United States Patent Application Publication US 2017/0009304 A1 - sequence listing, part 31

SEQ ID NO: 647430 - DNA, 100 bp, Homo sapiens
cggcactggctccgccgcccaagctgttccatttcctccaagtcaccggcttacagcaaaagaagtgtttgataatgatggaaaacctcgtgtggatatc

SEQ ID NO: 647431 - DNA, 80 bp, Homo sapiens
ctacctggtaatagaggacttgaagcagaaagcaagtgaatacgagtcagaagtgtttcaggctgcatgtaccaagtagt

SEQ ID NO: 647432 - DNA, 100 bp, Homo sapiens
cacagtattttgacatcagttatattccatctactgtctttttcttcaatgggcagcatatgaaagtggattatgggtcttgttcagcgttgcgtaatca

SEQ ID NO: 647433 - DNA, 100 bp, Homo sapiens
gcgcgggccgaccgggcgcaccgaccatggcctccaaatgccccaagtgcgacaagaccgtgtacttcgccagtggtggtgattactggcgaatcttgaa

SEQ ID NO: 647434 - DNA, 90 bp, Homo sapiens
ctccaagacctcatcaacaattaaggtaatgctggaggatggaagaagcaaagggtttggcttcgtctgcttctcatctcctgaagaagc

SEQ ID NO: 647435 - DNA, 82 bp, Homo sapiens
gaggttttaaacagtataacagggatatttgcttgaagccaggatctctgaacttataccccactcatctcctgaagtcccc

SEQ ID NO: 647436 - DNA, 75 bp, Homo sapiens
ggatatgagtcatggaactctggggctatgttgctgccaggtcagcccaagactaccccgtcggtcattctgttc

SEQ ID NO: 647437 - DNA, 100 bp, Homo sapiens
cgaaggaaaacaaagacaagatgacgatcattctaatgagaagaattataatatgacatgcacactctttacaaaggtctgagggtcatttatgcctgcc

SEQ ID NO: 647438 - DNA, 50 bp, Homo sapiens
cggtgacacgcttccctggattggggcgtgatggtgggcatgggtcagaa

SEQ ID NO: 647439 - DNA, 100 bp, Homo sapiens
accccggcgtggaatccgcaacagcggatacgatgcaatttctcagcaagacctggtacacatggctattcagattgcctgtggaatgagctacctggcc

SEQ ID NO: 647440 - DNA, 83 bp, Homo sapiens
cgcggcgagaagccccagctgcactacgcggatccaaggagctggttctgctggttggaccaaacctcgtgagccagccaccc

SEQ ID NO: 647441 - DNA, 82 bp, Homo sapiens
tggaggagctgtgcagccgcgaggaggcgcgggaggtgttcgagaacgaccccgagacgggttggggtgctggaggactgct

SEQ ID NO: 647442 - DNA, 82 bp, Homo sapiens
tgcccgctcacctgcgctgtgatgcctgcagagctgtggcttaccaggagggagccatggatttgctgcgggagctgaaggc

SEQ ID NO: 647443 - DNA, 51 bp, Homo sapiens
agtggctctgttttcccacaacagtcccacagaacaacgagaagcttcagg

SEQ ID NO: 647444 - DNA, 100 bp, Homo sapiens
tgggcatccagggctcgtacttctgctcgcaggagaaacattttctgaaagaagagaaaagtaaactcagtcaggaattgagtactgttgccacagaaaa

SEQ ID NO: 647445 - DNA, 97 bp, Homo sapiens
atccctgagtctcccagagggtcattcatgggcagcgatgaaggcaaagaggccatgctgcgacagaaggactatgagaccgccaccctctcggaga

SEQ ID NO: 647446 - DNA, 73 bp, Homo sapiens
tccagcctaggttccacccttttctgggaaccatttttttggatgcggagactcgaagagcgatgggagaaca

SEQ ID NO: 647447 - DNA, 74 bp, Homo sapiens
ctgtagccataaatgtctggctaatggcatttacaggagaacatctaaatatattgctgtttgggttagcacaa

SEQ ID NO: 647448 - DNA, 75 bp, Homo sapiens
gcggtcgcggggcccgcgcccggagctggcgccaggattgccaaggatccaagatttgaacgattaccatgtaca

SEQ ID NO: 647449 - DNA, 96 bp, Homo sapiens
aggggcctgcagaccccagtgtggacggagtacgagtccatcctacgcagggccggctgtgtggacaaggactgccatccaccatggtgaagctgg

SEQ ID NO: 647450 - DNA, 83 bp, Homo sapiens
gggagatgatcctggcggattttcagggtgggattaaaaactcagcctgaatcaaaatgccctgagctgcttgccaattactg

SEQ ID NO: 647451 - DNA, 82 bp, Homo sapiens
aaaggggaggttacgcagcaaaccatccagaagaacactctgctccagccaaggtggtgagggcagctgttcctaaacagcg

SEQ ID NO: 647452 - DNA, 100 bp, Homo sapiens
gcccaacagaatttatatagagatgtgatgttggagaactacagaaacctcgtctccctggggaccatggctaaacctcctggatcattagccagaagca

SEQ ID NO: 647453 - DNA, 100 bp, Homo sapiens
ttccatccatgttgctgcaaatgaatatggaaagtctcaattccacacgatctcatgagagaactggacctgatgattttgaatggatgtctgatgaaag

SEQ ID NO: 647454 - DNA, 75 bp, Homo sapiens
cagcgccccagccacacgccggcgggcagaagccgcccgctctccgggtgcatgtgagggaaccctggcttgttc

SEQ ID NO: 647455 - DNA, 100 bp, Homo sapiens
ctggaaacctggaaggagaaggcttcatccttgggggagttttcgtggtgggatcaggaaagcagaaatgattctggggaccattctgaccacatgcatt

SEQ ID NO: 647456 - DNA, 83 bp, Homo sapiens
gaccaagagggtgttcgactgctagagccgagcgaagctttggcaatgaggagcagcagctggcgtgggccaagcgggagagc

SEQ ID NO: 647457 - DNA, 100 bp, Homo sapiens
tccacactccgctgctcgacagtatactgcatgataaacacaggaactcaaatggatttagaggttaaaggagttgctgccacttctaggagccaaattc

SEQ ID NO: 647458 - DNA, 101 bp, Homo sapiens
cgggggaatgtggcgctggatccggcagcagctggtacaaattctgagctgtctaacccctctgaaacggaatctgagcgtaaagacgagctgagtgattg

SEQ ID NO: 647459 - DNA, 96 bp, Homo sapiens
gcacatccccacatcaatgcactgccaatgttgggatgaatgggttccggagagcagagtactcaaatacgtggacaccaatttgcagaaacagcg

SEQ ID NO: 647460 - DNA, 99 bp, Homo sapiens
gtcggcgccgcggccgctgcggacggacgctcgcctgccggctgagttcaacttcctcaattgctttgcctcactcttctatattgcctttgtcttgaa

SEQ ID NO: 647461 - DNA, 75 bp, Homo sapiens
attcgagtgaccgagaccgcggccgggaccgagggttaacacagaaatctgcctcctgggccatgccgcttctaa

SEQ ID NO: 647462 - DNA, 100 bp, Homo sapiens
cttgatcctcctcctaattgcagtaaacctatgatggacttgttgatattcctttgtgcacagtatcacttaaatccatcaagttacacaatcgatctgt

SEQ ID NO: 647463 - DNA, 100 bp, Homo sapiens
ggctggtgctgccagatggacaaggagaccaaagagaacaacctctctgaagaaggtgctggagaatctggtaaaagcaccattgtgaagcagatgagga

SEQ ID NO: 647464 - DNA, 129 bp, Homo sapiens
acatggggcacccggtgtaccgcggcgagaagccccagctgcactacgcggtgacagagctgaatgaacctctctccaatgaagatcgaaatctcctctctgtggcctacaagaatgtggttggtgcca

SEQ ID NO: 647465 - DNA, 83 bp, Homo sapiens
cggcaggagcgaccgtgaggacaggcttttgctctgcgacggctgcgatgcgggacaatgcagatcttcgtgaagactctgac

SEQ ID NO: 647466 - DNA, 75 bp, Homo sapiens
gcctagcacgtggaattcgcgaagctgccaaagccttagacaaggtgataaaagaaaatgtggctgaagttaccc

SEQ ID NO: 647467 - DNA, 135 bp, Homo sapiens
gactggcggccgtctgctccatcaccggctacacccacggaatgcacaccttggctttcatggctgcagagctcgttcgaccagtcaccatggtgcctagtgttccaggaatcccaggtccttcctctccccaac

SEQ ID NO: 647468 - DNA, 99 bp, Homo sapiens
ccgagcacccgcctccgggcatcttcaactatcttagcaaagcaatgtctcaagatggtgcttctcagttccaagaagtcattcggcaagagctagaat

SEQ ID NO: 647469 - DNA, 82 bp, Homo sapiens
gatgtccaggaaggaggaggaataatatttatggagcatatattatggaacacagttacgagaagtttctgagaagctgaac

SEQ ID NO: 647470 - DNA, 50 bp, Homo sapiens
catgaagcttatgaagaatatcatccagagctgctgttggcggattgtac

SEQ ID NO: 647471 - DNA, 82 bp, Homo sapiens
cagacctagtgggcgttgcctttagacccagtttggtgccctggttgtcagatgttggaaagcagtaggacggaacatactc

SEQ ID NO: 647472 - DNA, 75 bp, Homo sapiens
gtttgcttcacgacagaaaagctttatggaaactgcaatggatgttggtacaagaaaattccccaggacacagag

SEQ ID NO: 647473 - DNA, 100 bp, Homo sapiens
aagtgggctgtgctgctaccctgcctcattcttctgccttcacgcctcttaagctatcatcgagcatgtgcgggacggcagtgtggtcagggccctgctc

SEQ ID NO: 647474 - DNA, 82 bp, Homo sapiens
ctggagcctcagttggaagcagccgatccagcctgcggagcctgtggggcagatgttcccacaagcctgcatttccagagca

SEQ ID NO: 647475 - DNA, 100 bp, Homo sapiens
caaactgatggacgatgatgccaatggtgatgtggatgtggaagaaagtgatgagctgggatctagcaattgggaggcagcagacttgggtaatgaagag

SEQ ID NO: 647476 - DNA, 100 bp, Homo sapiens
cggagtgagaagcaagaaggccctggacacagcaatatctctgggctttcacagatgtctttggtggacttgggaaagaggttgctagaagcagcaagaa

SEQ ID NO: 647477 - DNA, 100 bp, Homo sapiens
tgaaacaccactgaagcattgccaagggaaattcctcgctgccggactgcgcccacccttgaggacctcacattctctttgggcagagcggaagccagac

SEQ ID NO: 647478 - DNA, 100 bp, Homo sapiens
gcaagcttttttttttctttttcttttttcttaccagcctccccccaatgaggtgaccttgaggaaccctgggagctcaggaaggaaggagcgcccagaa

SEQ ID NO: 647479 - DNA, 100 bp, Homo sapiens
gcgttgtcttggttaacaacattctacagaatgctcaggattacatcccagtagaccaagaagagttaagagattatgtcaaagctaggctgaaggtctt

SEQ ID NO: 647480 - DNA, 100 bp, Homo sapiens
ccatgctgaagcggaggcggccgctgctcgagataacacagcaggcgtgtacgcccggcgtggagggttcagtcggcagaagcaggacttgtaccttctg

SEQ ID NO: 647481 - DNA, 101 bp, Homo sapiens
agggaagcatggctattgtggatgtaaaagccatgttcaagttttcggctttgtgagaaaccttaccatcaaacacgatggccagcaacgttaccaacaag

SEQ ID NO: 647482 - DNA, 83 bp, Homo sapiens
gggccggccagaagcgggcggcgcgggggagatgttcatagccctgatgaagcaagttactctgctctcctaataaatgcaag

SEQ ID NO: 647483 - DNA, 108 bp, Homo sapiens
atcacctcctccaagaccgtgctggtctttctcaacctcatcttctgggaaaagaatacttgagatccatttgtaaggaaagaaaaggaagcaacaacataatgccca

SEQ ID NO: 647484 - DNA, 75 bp, Homo sapiens
gacagcgaagaaaatgagcccctagaaaccccagctccggaggaatatcgttcagaaaaatctcttgaagaattg

SEQ ID NO: 647485 - DNA, 100 bp, Homo sapiens
gcccgagacacaccaggccggcaggctgagaaaagcgagaccgcgtgcgaggaccgaggagatcatcgggggccatgaggccaagccccactcccgcccc

SEQ ID NO: 647486 - DNA, 82 bp, Homo sapiens
agcacgtggacgctgactcggaagtgcaggtggagccatcgaagcccccacccacaggctgacagaggcaccgttcaccaga

SEQ ID NO: 647487 - DNA, 101 bp, Homo sapiens
cagcaaagttaacctgacacagaaaatccttgtgcaaataaatgcttagctgaccggttccctgatgtgttacctgcttctgctactgatccaaactgcag

SEQ ID NO: 647488 - DNA, 82 bp, Homo sapiens
acgggtctggagtgcgtgggggaccggctgttggcgggaggctactcacagtcgaactacaactccccggggtccggccaga

SEQ ID NO: 647489 - DNA, 90 bp, Homo sapiens
caaagactgtggaacttttaagtggagtggtggatcagaccaaagatgggaagaatccccagcacaagatagaatatagacataatacgc

SEQ ID NO: 647490 - DNA, 88 bp, Homo sapiens
gggtgcatgtcagctgtgccctatggattcctgaggcatttattgaaatggcaaccacagaggatgctcaggccgcagtggattatta

SEQ ID NO: 647491 - DNA, 83 bp, Homo sapiens
tccggttccttggtgtcatccagccttagcaaaccagaggatgagaacaagttgagcagtgccaacggccatgaagaacgtag

SEQ ID NO: 647492 - DNA, 97 bp, Homo sapiens
caggatgacagcagtgcacaccagacaaaccagcccagatttgagcagaacacagatatgtagaactcttcttgaattctacagcaggagcaagcgg

SEQ ID NO: 647493 - DNA, 90 bp, Homo sapiens
tgcatacgtagcagatataacccaagagcatgaaagaagtatggcttatggactgggtctcactgtcaccttggctggagtacagaggcg

SEQ ID NO: 647494 - DNA, 76 bp, Homo sapiens
ttggttgtggagctggaaatagtgtgtttccaattttgaacactttggatagagacggggtttcacgatgttggcc

SEQ ID NO: 647495 - DNA, 90 bp, Homo sapiens
cagcatgagatccaaaggcagggcaaggaaactggccacaaatcctgtttgaccaaactcagagatcaattaaggcacagcttcagaact

SEQ ID NO: 647496 - DNA, 81 bp, Homo sapiens
cgaggaagctacacttttcaccaaggaactggtgctgcagcgagaggacaatcatctatctctccttggtgtatgtgcttg

SEQ ID NO: 647497 - DNA, 83 bp, Homo sapiens
ggactccttcggcagtccacccaccgccgccgcctcccaggagtgtggccatctggggccgtgtggtatttgccactcaggag

SEQ ID NO: 647498 - DNA, 73 bp, Homo sapiens
cttatttctgcttactcacttgtagatccagagaaagccaaagcgctattcaagatctctggcagtggaggaa

SEQ ID NO: 647499 - DNA, 96 bp, Homo sapiens
ccctagccggctgcggtgtgagaatggagtgggcaggaaagcagcgggactttcagaaactggcaagatgtttacctggggccgagcagactatgg

SEQ ID NO: 647500 - DNA, 97 bp, Homo sapiens
atctccccgacaaacaccacgagaattccgcagcccacacggtaccattgttggatactggtgacatcatcattgacggaggaaattctgaatatag

SEQ ID NO: 647501 - DNA, 75 bp, Homo sapiens
gtttgagtccgcatcgccacagctgaaggctgcgagggactaagagcagaagaatgtaactggtcactacatttc

SEQ ID NO: 647502 - DNA, 98 bp, Homo sapiens
cgctgagcgatcccaccgaagcagcgtgtcctccgtgggagcccgaggtaaccccccgcggcctagcctggagcccgaggagcccaagaggcctgtcc

SEQ ID NO: 647503 - DNA, 98 bp, Homo sapiens
ggctaaaactcaggctatacttttggagatggcgtggtgaccaagatgaagatgcagaggaccattgtcatccgccgagactatctgcactacatccg

SEQ ID NO: 647504 - DNA, 75 bp, Homo sapiens
gccagactgattgtcatgctcagggaccctgtggagaggatgccacagtgataccacacctcatggcactgctta

SEQ ID NO: 647505 - DNA, 122 bp, Homo sapiens
ctcattcttaacctgactcaggacgggatcaaactaatgtttgatgctttcaatcagagacttaagcaggaggatgcattagcacaacaggcctttgaagaggctcggagaaggacacgcga

SEQ ID NO: 647506 - DNA, 88 bp, Homo sapiens
aactttgggtcctgaatcttctgggagctgaggaaccagatatcttgaaaagctgccagaaagctacagatgaccctccccgacctac

SEQ ID NO: 647507 - DNA, 50 bp, Homo sapiens
gaggactcgtcaggctccgatggagacctttggcgacttggcctttggcg

SEQ ID NO: 647508 - DNA, 101 bp, Homo sapiens
tttccacttcccaagaaccttctggccaaggtgattcagattgcaacgtcatcctccacagctaagcctgacatttaccccggtaactgctgggcatttaa

SEQ ID NO: 647509 - DNA, 50 bp, Homo sapiens
gcagaagtggatcatagacctggccatggagatctattgggaaactgatt

SEQ ID NO: 647510 - DNA, 100 bp, Homo sapiens
ccgtgctgttcctgagtgtcaactatctgggggggacattcccaggagtacttgattcttcagaaaacctccaaagtagatgtggactcaagtggaaaga

SEQ ID NO: 647511 - DNA, 111 bp, Homo sapiens
atctgataaagccactatcatggcctttgatgccctggtgaccttctgtgaagaactgggacctgcctagagctggaacgttacctccagagcgagccctgctatgtttca

SEQ ID NO: 647512 - DNA, 75 bp, Homo sapiens
ggactggactcttcctaagcaagtccggtatgtagccctgaatcgtgtgcacttacttgggcgagtgggtcagga

SEQ ID NO: 647513 - DNA, 75 bp, Homo sapiens
accacactaacgagattcaagattatttgcaacagctcacgggagcaagaacgtactgccaaatctgtcgaaagg

SEQ ID NO: 647514 - DNA, 100 bp, Homo sapiens
ttcccaatgattttaattggtaataaagcagatctggatcatcaaagacaggtttattttcttgaaaaggctccaggcttcggcttggaaaatcccaccg

SEQ ID NO: 647515 - DNA, 83 bp, Homo sapiens
cttcgtagacattgtctcccaagacaacttcctcaccagcaccttacagctgtcggcagtactcagtggaagggtgatattat

SEQ ID NO: 647516 - DNA, 75 bp, Homo sapiens
ggccgagcgccgcgccttcgcccagaagatcagcagcggatattcaactcctttgtttacactgagaaaatctca

SEQ ID NO: 647517 - DNA, 97 bp, Homo sapiens
atactcagcagctggaccggcaaattaaagcaattatgaaagaagtcattccttttttgaagattgatcgtgtcctgtgctgaagatgtttccggaa

SEQ ID NO: 647518 - DNA, 120 bp, Homo sapiens
ctcgagctttgaccttcatcacgaggccacccagtcccacttcaaacattcgtctcggaaaccccgcctcttacagtcacgaggactttacactcctaagcctcaagtgatctccttatt

SEQ ID NO: 647519 - DNA, 100 bp, Homo sapiens
agaatctgtatctcaaaatgtggaagggacccaggctgattcaggaagctgaatatggtgggcatgatcagatagatttgtatgacgatgtcatatctcc

SEQ ID NO: 647520 - DNA, 100 bp, Homo sapiens
agaaagtatctctagtctttatgggaaacctcagcttgatgatgtatctcagcaggttccagagagattcctggaagttgctcagatcacattacgggag

SEQ ID NO: 647521 - DNA, 97 bp, Homo sapiens
gcaagtcgagaggaaactgttgtgcctcttcatattggcgatcctgttgtcctacaaggagaagatgaaggagctgtcggtgctgtcgctcatctgc

SEQ ID NO: 647522 - DNA, 123 bp, Homo sapiens
ccaggagaacagagagcaaagcagagccaatgcaagacctctggccctggaagccgaaggatatgtcttctccgactactatgaagaagcctgaaaagccattgttcagctctgcatctccac

SEQ ID NO: 647523 - DNA, 75 bp, Homo sapiens
ctggattatactgtactgcccatgaaaaaggatgttgaccggacaggggcccagggccggaaccaggaggagcgc

SEQ ID NO: 647524 - DNA, 75 bp, Homo sapiens
gaaaatacagtgaacctttggaggaacacggcaacttccttattacagggtggtgattccactgaagcaactgcc

SEQ ID NO: 647525 - DNA, 74 bp, Homo sapiens
cagcattcctgaaatacatccaggaaagacatggagattctcttaaaaagggaaatgatgtcactctgaaactc

SEQ ID NO: 647526 - DNA, 83 bp, Homo sapiens
gggaaggtcctggggctgccaccctcgttcccccgattggggccgcagggatttgtcttggctgttactatgacacgggaagc

SEQ ID NO: 647527 - DNA, 82 bp, Homo sapiens
gatggtgaccgcgtggcaggggctctcggacatgctgccaacgacgcgagtaacagtgtatcatgtatgccactgattccag

SEQ ID NO: 647528 - DNA, 93 bp, Homo sapiens
ggggaagtgggacaagatggtttacatctcgaacggtacaatgactcttcttgcttttcacctaagttgaataagcaccctgtgcactttaat

SEQ ID NO: 647529 - DNA, 101 bp, Homo sapiens
ctgcgaggagccggcgcggtcgcagtctccacggcgcaggcccacggtagcgcagccgctctgagcctggcacctgtgtttgctctgtttgtaccatttta

SEQ ID NO: 647530 - DNA, 100 bp, Homo sapiens
gaggtccctgagaaggaggggtatgagccacacatccccgaccacttgcggcctgagtatgttacagaatgtctgaaggggacagtgtgggagaatccgt

SEQ ID NO: 647531 - DNA, 100 bp, Homo sapiens
aaaaagagtcacctaccatgggacctggcaaagtacttcagaacttttattccttccagaagcagtcacccacaaaagctgtatataatgccagacattg

SEQ ID NO: 647532 - DNA, 83 bp, Homo sapiens
ctggagctgagcaaagtgcgtgaggagtttaaggagctgaaagcgcgacaatgcagatcttcgtgaagactctgactggtaag

SEQ ID NO: 647533 - DNA, 100 bp, Homo sapiens
cgccgccagagcaggacgaaccgccaatcgcaaggcacctctgagaacttcagttttcggctttgtgagaaaccttaccatcaaacacgatggccagcaa

SEQ ID NO: 647534 - DNA, 100 bp, Homo sapiens
tcttcctgagcaagaaattaaaacactggaagaagatgaagaggaactttttaaaatcatttaaatcaaacggtattgagatggattgggttatgaaaca

SEQ ID NO: 647535 - DNA, 51 bp, Homo sapiens
tggacactctggatcgagtagtaaactgccagaggcatgcagcattggtga

SEQ ID NO: 647536 - DNA, 102 bp, Homo sapiens
cagtgacctcctggacttcagcatgtaggagctgtggcgcggggccttccaggagtctgagctatgagtggcccctgtggagagaagcctgtcctggaagcc

SEQ ID NO: 647537 - DNA, 100 bp, Homo sapiens
ctggagagggggcgctgagctgttgggggtggcccggtggaaatcctgccctttctgtacctgggcagtgcgtatcacgcttcccgcaaggacatgctgg

SEQ ID NO: 647538 - DNA, 98 bp, Homo sapiens
acgaggaatcagctttgaagtgggagcccagttggaagcccgggaccgtttaaaaaactgaaactggcgatggaatatgagaggagccctctggaaag

SEQ ID NO: 647539 - DNA, 96 bp, Homo sapiens
ttgctcctctctccttggcctctcctgggatcggcccaaggccagttctccgcagagtttcagattgccaaaagacaaaacgggtaccacaaggat

SEQ ID NO: 647540 - DNA, 95 bp, Homo sapiens
cagaaaaattcatgctctgaccatcacatgggcacttcctcctcaacagcaacattacaggttggatggcaagcatgtggtgtttggcaaagtga

SEQ ID NO: 647541 - DNA, 51 bp, Homo sapiens
ggctgttcaacacttgagatctttaaaagtgatgttggggttggcctctgt

SEQ ID NO: 647542 - DNA, 50 bp, Homo sapiens
caggcctcattggacagcattcgagcttcgagagctgtgcccaggagtga

SEQ ID NO: 647543 - DNA, 75 bp, Homo sapiens
aatggcatttacagaaagagtcaacagcagtggcaacaggtgacacttaactccgccatctgcgttttgagcact

SEQ ID NO: 647544 - DNA, 100 bp, Homo sapiens
gcaggagcaagagatacctattgtaaaagtatggaacagtcgttactaagaagtccagaagtagtgcaatttttacagaaacagcaacagctattaaatc

SEQ ID NO: 647545 - DNA, 151 bp, Homo sapiens
ctgacggccacccaccatggccgcagaccagcgcccgaaggccgacacgctggccctgaggcaacggctcatcagaggaaagtctagacagtgacttgtatgctgaactccgctgcatgtgtataaagacaacctctggaattcatcccaa

SEQ ID NO: 647546 - DNA, 98 bp, Homo sapiens
cagtacctgcagaaggtctctggagacatcttcagcagggcccagtgttcaccatcataccaggggccagaggcgatggcttgcctccatgagacccg

SEQ ID NO: 647547 - DNA, 138 bp, Homo sapiens
tgtgcaggatggagaaccatggagggatgtccccaacaaccctgagcgatttgacacatggccctgcatcctgggtcaaaatgcagatcttcgtgaaaacccttaccggcaagaccatcacccttgaggtggagccca

SEQ ID NO: 647548 - DNA, 80 bp, Homo sapiens
tcagccatgtgactgtagtccacatggagctctcagcataccgtgcaacagcagcaacaactccaggcccagcatttatc

SEQ ID NO: 647549 - DNA, 75 bp, Homo sapiens
ggaagagcgagccagcgcccggagcaagcggagctcccccaagagccggaaagctgcatgaaagcggttacgatg

SEQ ID NO: 647550 - DNA, 113 bp, Homo sapiens
ccccggcccacagtgggggtgtgcaaacccgagagaactggctggttgtcttcttgcctgccctgtgtcgtaaaatgggggtcccttactgcattatcaagggaaaggcaaga

SEQ ID NO: 647551 - DNA, 100 bp, Homo sapiens
gctacgtcagatcccattcaactcagacgcttacctgtaattctgatggcgaatgggtgtataacaccttctgtatctgattgccagccctagagttccc

SEQ ID NO: 647552 - DNA, 83 bp, Homo sapiens
cacctcctcgccagcagccgtccggagccagccaacgagcggagtcagaaataccatcagaggaggggtactgtgactttaat

SEQ ID NO: 647553 - DNA, 100 bp, Homo sapiens
ctgcatcccgcgtccagcacctacgtcccgctgccgtcgccgccgccaccatgcccaagagaaaggttctgcggggagtgtctccagccctgcctgcagg

SEQ ID NO: 647554 - DNA, 124 bp, Homo sapiens
cagcccacgtcgccaggcacaagacacgtcggatgttgcagcagagccagcagctagcgcagatcctgaggaggatgaaggggctggccctggaggccgagagtgagctggagagacaagacga

SEQ ID NO: 647555 - DNA, 75 bp, Homo sapiens
ctggctgctgctggccgaagcgaagggcgacgccaagccggagggtctcctctgagcctccggcctccataagac

SEQ ID NO: 647556 - DNA, 100 bp, Homo sapiens
agatcggcagcggctccttcggagacatctatctcggtgatggcccgctccctctccccacccccggagctggaagaaagggatgtggccgcatactcgg

SEQ ID NO: 647557 - DNA, 90 bp, Homo sapiens
tggggagatgaacccaacctagtgggtgtaatacatcatgaactgcagggttaaggattcagccttcaagcccaccccccaaccacccca

SEQ ID NO: 647558 - DNA, 98 bp, Homo sapiens
tagctgaagatttgtatgatggacaagtcctgcagaagcttttcgtattgacttgaagctgaaagaaaagccttagttggccatgctggaagaagagg

SEQ ID NO: 647559 - DNA, 100 bp, Homo sapiens
tgcttccaactgcgggacaggaagtggccgtagcggcttgttggataaggtttaagaattgtttaagctgcatcaatggagcacatacagggagcttgga

SEQ ID NO: 647560 - DNA, 75 bp, Homo sapiens
tgagagatggaacccgaagaagaaaggattcgttacagccagagattggtgtgggcaagagcagtttactgttgc

SEQ ID NO: 647561 - DNA, 83 bp, Homo sapiens
ctcggcttccagctcaatcctgccggttgcgccttcttcctggacatgaccaactgtgttgatctacagcagcaaattatgac

SEQ ID NO: 647562 - DNA, 94 bp, Homo sapiens
tggaggccatcaggggccttgataacacagagtttcaaggcctccggtgtggctgtctctgatggtgtcatcaaggtgttcaacgacatgaagg

SEQ ID NO: 647563 - DNA, 100 bp, Homo sapiens
aaaatctcaaagacaagaggagacactgagggaacaaacacttctggatgcatccccacagcgtcctgtgtttactcatgaaaatattcaaggtgggggg

SEQ ID NO: 647564 - DNA, 74 bp, Homo sapiens
gtaaacaagtatcagcaagtggtgggcttggtgcttgcatttcctgcgttgcagtgtcaggatttttcagggat

SEQ ID NO: 647565 - DNA, 74 bp, Homo sapiens
ggaggcgagctagccgggagttacaccgccaccgccagaactgaaaagctccatcattggcaagaagaagccag

SEQ ID NO: 647566 - DNA, 100 bp, Homo sapiens
gaaactgagcatctgggcgattccatctctgaagcaacaaggggaatggggtcaaaatgagcaggtgctggagaatctggtaaaagcaccattgtgaagc

SEQ ID NO: 647567 - DNA, 75 bp, Homo sapiens
atcagcaatccttggctcactgaggaggtttggtggggcaagtccgtgggcatcatgttgaccgagctggagaaa

SEQ ID NO: 647568 - DNA, 100 bp, Homo sapiens
tttcaacttcacctcggcaacaattacttacctggcccaggaggatgggcccgttgtggaggagactgcaagcatcgggatgcccaggccccaaggaggc

SEQ ID NO: 647569 - DNA, 96 bp, Homo sapiens
ttcatgagtggaatccatgtttctggacgcggatttttggcctcatactctgttatagataaacaaggctccatctactctttgaagcttctgccc

SEQ ID NO: 647570 - DNA, 75 bp, Homo sapiens
ctgcccggcgtggagggcgcggggggcgcggagcagccagactgccttccgggtcactgccatggaggagccgca

SEQ ID NO: 647571 - DNA, 75 bp, Homo sapiens
ggaaagacccaggagaagccgcccaaagaactgggaacactgactatgccaaatggagactacattgaaggttat

SEQ ID NO: 647572 - DNA, 100 bp, Homo sapiens
taattactaagtaccgcaaaggagcatgtgaaaattgtggggccatgacacacaaaaagaaagactgctttgagctattgacctgaaaagtggttctgga

SEQ ID NO: 647573 - DNA, 90 bp, Homo sapiens
ctcgacacagtccctccctcggtttgcctactgaagagcttatcagagctctacttgggaaagtcaaagtggagatggcagaacccatct

SEQ ID NO: 647574 - DNA, 75 bp, Homo sapiens
tatggaaactcatcaggacggaagcacaggggccactcagagtcgcccgagaacagccaacagagcagtcagcag

SEQ ID NO: 647575 - DNA, 97 bp, Homo sapiens
ctggaattgattcgtttacagatggagcaaatgcaggtaaatgagctggatggtatcccgttgatcctggacaactgcaacatcagtgacagtaacc

SEQ ID NO: 647576 - DNA, 74 bp, Homo sapiens
agggaccacggtcaccgtctcctcaggacccttgaacatctgtgaagaaatgactattctgcatggaggcttct

SEQ ID NO: 647577 - DNA, 100 bp, Homo sapiens
aatccgaaaacaggcactggaccacttcaatgcagatgggtctgagaccttctcttccaccttctaaacaagctaacaagaatctgattttgaaggctat

SEQ ID NO: 647578 - DNA, 82 bp, Homo sapiens
ccgcgcgcgcccggcgcttcggctccgctccctgtgcgatatctccggagcatttggataatgtgacagttggaatgcagtg

SEQ ID NO: 647579 - DNA, 50 bp, Homo sapiens
acaagatccaatcccttgtccttaaaaggcatccgtgtcattctggacct

SEQ ID NO: 647580 - DNA, 100 bp, Homo sapiens
ccgcgcgcgcctcagaagctcccggacgcccagcctttctgagaaaagtctacagcattctttctctgcaggttctcttaactacagtgacttcaacagt

SEQ ID NO: 647581 - DNA, 50 bp, Homo sapiens
ggcgaggccctcatgtaccacacggttactcactataaacaatatccacc

SEQ ID NO: 647582 - DNA, 100 bp, Homo sapiens
cggctctcatgttcctccatgataaaggaatcatctatagaaacagcatctcttggaggtaaacccttatgagacaggaaacagcaaaggctagctttag

SEQ ID NO: 647583 - DNA, 96 bp, Homo sapiens
gcctgtgaccatagagctggaatcgccagctcccggcactgctacctctgacccaaagcaggtttgacatctacaggaaggtgcccaaggacctta

SEQ ID NO: 647584 - DNA, 100 bp, Homo sapiens
gtgcgctcagcactgggattttctgtgttttccaagcagtgaagcacttgccgtgttgaactgaatgcactactggagaatgttctgggtccaagatgct

SEQ ID NO: 647585 - DNA, 51 bp, Homo sapiens
aagccatggatggccgggaacctacacgatgaggcgagtggtacgacagag

SEQ ID NO: 647586 - DNA, 74 bp, Homo sapiens
ggggcgctgtgtccccaagctccccgtcctcggggatcgtgggactttaccagatcggtttgtaataacacctc

SEQ ID NO: 647587 - DNA, 82 bp, Homo sapiens
gtggccctgcagtttgagccaggacccctggcccacgcactggaggcagacatggagctggagtttctggagacagcgtgtg

SEQ ID NO: 647588 - DNA, 87 bp, Homo sapiens
gtcttctatgtttccacatcggtcagaaaaagattatctggagtccatctttcaccatcttctcctgagattgtactggaccgtgac

SEQ ID NO: 647589 - DNA, 100 bp, Homo sapiens
aaggagccgggcccagcgagctcccgggaggtgtgtggacatcagccctgacggggaaggcgagccaggtctgtggggtgtggcgggcagtgcctcggtt

SEQ ID NO: 647590 - DNA, 78 bp, Homo sapiens
tttgatgctgtggttggatatttagaggacattatcatgggaactagaggctgctatccagccagatactagcctggt

SEQ ID NO: 647591 - DNA, 152 bp, Homo sapiens
ttgttggggagaagaggattggaggtgtcagtgttaaaggaacctctacaacgaaggtgaagccacggaagataagggcgccaatgcttcggcattagagaaagagattggtccagaacagtttccggtcaatgagcactattttggattag

SEQ ID NO: 647592 - DNA, 74 bp, Homo sapiens
caagagccaggaccccctagaagtctagaaatgcaacacagtcactcctggcggcaaaccaaacaaaaccagag

SEQ ID NO: 647593 - DNA, 98 bp, Homo sapiens
aattgagtgatttcctgcaggctatggaacacactgaagttcttcagcttctcagccccccaggtcagccatgtcatctgagcctcccccaccaccac

SEQ ID NO: 647594 - DNA, 80 bp, Homo sapiens
cttcctccttcatcagtgaagaaacgaggtggtcttcaagctgacagagaagctgacggaacagaaggagtggatgaaga

SEQ ID NO: 647595 - DNA, 75 bp, Homo sapiens
tttcagttcttaggctcagcgtcagttacctgagagccaagagcttctttgatgaagacaatagatgtgcatctt

SEQ ID NO: 647596 - DNA, 107 bp, Homo sapiens
cctggcgcgatgcgtcaagtacactgaaattcatcctgagatgagaatgttgtaccatctttgggtaggcagacttccctgacgacatcagtgatacccaaagctga

SEQ ID NO: 647597 - DNA, 138 bp, Homo sapiens
tgctgctctgacgtgctgaagaaatttgtgtggagcgaggaaaggtgtgctgtgcctgaggccagggtcctgaggacaccgtgagccagccaggcctggccgctgggcctgaccggccccccagcccctacaccccgc

SEQ ID NO: 647598 - DNA, 90 bp, Homo sapiens
tggccacctacagaaacaaaatgtcaacaaattgatggtctctgctggatgaaccgaatcctaacagtccagccaatagccaggcagcac

SEQ ID NO: 647599 - DNA, 97 bp, Homo sapiens
cctatacacagaattacactgaagaagtagagtatttcaaccataaagacatcttaattgggcacgaaagaggccataggaaaaggatacagagtag

SEQ ID NO: 647600 - DNA, 96 bp, Homo sapiens
gtggtggaatatgccaaggaaaaactggagagcttcatcaaaaatagtgatagctttgataaacacatcatctcagagttggagcacctgacgttt

SEQ ID NO: 647601 - DNA, 82 bp, Homo sapiens
tggactgcttgctcagctcagtatcaacacttatgtttgaggtggtatcaacatcctacagaagaagaattaagaattcttg

SEQ ID NO: 647602 - DNA, 78 bp, Homo sapiens
ggcgctgggctggaggcggcggagcgcgagagcttcgagcggactcagcattagtgaccagaaggatcccaaggatcg

SEQ ID NO: 647603 - DNA, 110 bp, Homo sapiens
gagcttttcgtaaagggaagtcatttctactggacttcatgcttagatacatgtataacaagttgtggacatcggatacccaaggagacgaagctgaagcaggagaagga

SEQ ID NO: 647604 - DNA, 100 bp, Homo sapiens
cattatgagccaattccattcagttcttctatgaatgaatctgctcccactggtattactgatcatattgtccaaggctttggaatcaggatgatgctgg

SEQ ID NO: 647605 - DNA, 75 bp, Homo sapiens
gtttctgaaatgattctccagaatttctcctcataaaaaagctctgcagctctcctccctcctgtaatgcttcct

SEQ ID NO: 647606 - DNA, 146 bp, Homo sapiens
tccgcgcagagcggcggctcctccgggggacccgcggtccccaccgtgcagcggggcatcatcaagatggtatctcagatgaagacatcatcaacattactcttcctactggagtccccattcttctggaattggatgaaaacctg

SEQ ID NO: 647607 - DNA, 74 bp, Homo sapiens
tcagatcaaccaccaaagtgggaaacattgaaatcaaggtgtcagctgtgatgcatgtttaaaaggaaattttc

SEQ ID NO: 647608 - DNA, 74 bp, Homo sapiens
ggaaggatgagaatagctactgaagtgtaatcctgagagattcacatggtgttgcacaagtacgttttgtgaca

SEQ ID NO: 647609 - DNA, 128 bp, Homo sapiens
ccccgagtgcggcccggaggcggcggagggcaccccgggcgggcggcggctgctgtacatgtcccagagcaagcacacggaggcccgggagctcatgtactcgggagccctgctcttcttcagccatg

SEQ ID NO: 647610 - DNA, 98 bp, Homo sapiens
gagcacagagaaagagaatgatgaagagaaaggcccggagactggttttgccacattgatccgagaatggcctggagatctgtataataattcagtca

SEQ ID NO: 647611 - DNA, 100 bp, Homo sapiens
gacagacagctcattcgactgggaagatggctttatgctttattggcttgtcttgaaaagcctttgttacctgaggctcattcactgattcggcagcttg

SEQ ID NO: 647612 - DNA, 100 bp, Homo sapiens
cgcttcgaaagcatcatccacgagttcgacccgtggtgttttattccaaacgtctatgctgctttgttcactgcagctcttgttcctttgacgtgcctcg

SEQ ID NO: 647613 - DNA, 100 bp, Homo sapiens
cgattctgagtgaattggcaccaagccttcccagttatcataaccttgaatggcgactagatgtacaggtaccaaccaagaagctgaagaaatatgagaa

SEQ ID NO: 647614 - DNA, 90 bp, Homo sapiens
aacaaggtggaagattcttccaaggaaccagtgcgaaggcctccccatggccacccatggaccagtcggcattcacttcctcccttctgc

SEQ ID NO: 647615 - DNA, 74 bp, Homo sapiens
ccggcttccgtcccggacagagcccgtggtcgcgcagagctttttagatgaggaatttcctcactatgattccc

SEQ ID NO: 647616 - DNA, 88 bp, Homo sapiens
tacggcccgggcagcctgcgcgagctgcgggcgcgcgagttcagccgcctggcagatggtgagaacaagaccaagattggaaagccag

SEQ ID NO: 647617 - DNA, 100 bp, Homo sapiens
gcaggctcgcctccttgatgaactggcaggcaagctacaaagcctagacctttcagccgctgccgaaatggtcagaatggcggcagtggagcatcgtcat

SEQ ID NO: 647618 - DNA, 75 bp, Homo sapiens
caggagacggagccacggagcaggtgatgctgtggagtcttcaaaaagcccgaccactctggattacaaatttac

SEQ ID NO: 647619 - DNA, 75 bp, Homo sapiens
gtggatccttatcccatgggcaaacctcctttgcctagaggctatcacacgcttcttccagaccagctggtcttg

SEQ ID NO: 647620 - DNA, 100 bp, Homo sapiens
ctttgctgccatcctttcttctctaaaattgactggaacaacattcgtaactggttcttttcctatgactccatcaattccagctaatcctcccatggct

SEQ ID NO: 647621 - DNA, 75 bp, Homo sapiens
ccccagctctgcagccacatactatccgtttgttcaggaaccaccagtgacagaagttgatctctctaatgtatt

SEQ ID NO: 647622 - DNA, 82 bp, Homo sapiens
cgccatcaccgagcgcttgatgtgcgcggagagcaatcgccgggacagctgcaaggtcgcaatggaagaagagatcgccgcg

SEQ ID NO: 647623 - DNA, 73 bp, Homo sapiens
aacagttaggagttgatggcagtttcaataacaggtcattgccgagaaaagagattcgtcagcgaactgcagc

SEQ ID NO: 647624 - DNA, 96 bp, Homo sapiens
tggaaccgtgtgagaatccctaaggcggggaaccgcagcgcagtgacagtgcagaaccccggcgcggcccttgcaatcagccatgactgcctttgc

SEQ ID NO: 647625 - DNA, 121 bp, Homo sapiens
cgacgtcgtgatccagaagtccagagctgaggactgcctgtttgcagataacgaaggaggcccaacttcattcaataaggagcctgacggatttatcccagacggtagaacaaaaggaaga

SEQ ID NO: 647626 - DNA, 74 bp, Homo sapiens
cgacaacagcctggcgtccgccacgggggaactggattggagaagccccctacaagaatggccggccctgctct

SEQ ID NO: 647627 - DNA, 98 bp, Homo sapiens
cctccatgaagtgcatcatggggcaggatggcaccagccttggctacatatcgaaatcgaattgtgagccaaaatctcagcacaagggacagaaaagc

SEQ ID NO: 647628 - DNA, 98 bp, Homo sapiens
aatcatgttgaagctaaacccatatgcaaagaccatgcgccggaacaccattcttcgccaggccaggaattcccctgcagagagctgtgacctgctgg

SEQ ID NO: 647629 - DNA, 94 bp, Homo sapiens
ctctggacaagctggaatgcatccaagagaatccctcaacatgctgcagcccctgtcaaagggaacaggaagcagtccacggagggtgacgccc

SEQ ID NO: 647630 - DNA, 75 bp, Homo sapiens
agctctcgatggaaccaaggatgacagcactaattctacagtatcctggtgtgaaccagctatcctccagtatag

SEQ ID NO: 647631 - DNA, 75 bp, Homo sapiens
ctcatacagagattgaaatgttccttagaaaggagcagcagccagaagatcagctgccatgttacttgactcaca

SEQ ID NO: 647632 - DNA, 98 bp, Homo sapiens
ggcaagatccagatcgggatttacgtggagatcaagcgcagcgatgaacccattaaaagagccagtaaatcctgtggaaaatggccttcagtgatctt

SEQ ID NO: 647633 - DNA, 75 bp, Homo sapiens
tgggatttgatgctaccttgtcaggacctccaggatatagtggctaccctgggccccaggtcagctacccacccc

SEQ ID NO: 647634 - DNA, 80 bp, Homo sapiens
gcattctgttagacagtgaatgtggaaaggagattgacagtcacaattttgtaataaggacagtctcatcgaactcaagg

SEQ ID NO: 647635 - DNA, 98 bp, Homo sapiens
ggagcggccggggcctggggctgcctgccgggcggccgggcgcggcgagcccagctgcagccgaagccatatggtgtcaccagtgcacgggcttcgga

SEQ ID NO: 647636 - DNA, 74 bp, Homo sapiens
gtcctggagcacctgcagctggcgcctctgcagtggggtgtttcccattaaacactaccaggacaaaatcaggc

SEQ ID NO: 647637 - DNA, 74 bp, Homo sapiens
aggggtatgagccacacatccccgaccacttgcggcctgagtatgtgtccacaggatgaaatgtccgagtcagg

SEQ ID NO: 647638 - DNA, 74 bp, Homo sapiens
gcagatttgtggtgcgttctgagccgtctgtcctgcgccaagctggaccagctattccttctgttgtggcgtat

SEQ ID NO: 647639 - DNA, 90 bp, Homo sapiens
ccgggacacctggaagccgagaaatggggtgggacctggctgcacggatgagacgctgctgtcggccatcgccagcgccctgcacactag

SEQ ID NO: 647640 - DNA, 101 bp, Homo sapiens
tgtcagtgttaaaggaacctctacaacgaaggtgaagccacggaagataaggacagagcgggatgccaccagcttgtccaaagggaagttccaggagctcc

SEQ ID NO: 647641 - DNA, 74 bp, Homo sapiens
gaagccgaaaacaccctgcaatctttcagacagatactgaagtactctttcccagtgggactaagaaccagcag

SEQ ID NO: 647642 - DNA, 83 bp, Homo sapiens
gaggaactgtgatattgtgactgcctgcttgcaggctgtgtcacagaagagaagtacaggtttgcagattccgccagcagcac

SEQ ID NO: 647643 - DNA, 98 bp, Homo sapiens
ctgctggctttggcgtatacacagggcaagctggcagctgtctgactggacctgatgccactgggcctggtaggaagacagaatatctgttttggacc

SEQ ID NO: 647644 - DNA, 98 bp, Homo sapiens
tgcgagcggcgcgcactataaaatggcgcgtgctgcaacccgcgcccgcttcggagagagaaatgctggggtagctttggatatgttaaatcctcatg

SEQ ID NO: 647645 - DNA, 75 bp, Homo sapiens
gcagtctgcggctggaatcaggatagacaccaaggcaggacccccagagtgatgaacggcagcagccactcacca

SEQ ID NO: 647646 - DNA, 75 bp, Homo sapiens
cggcgctccgtgcgcggagccgtctgcctgcatctgctgctgaccctcgtggtgaccaagaatatggcccaggtg

SEQ ID NO: 647647 - DNA, 75 bp, Homo sapiens
gaagagaccactagaatctggaattgagaaatgagccgtcagactgctacagcattacctaccggtacctcgaag

SEQ ID NO: 647648 - DNA, 50 bp, Homo sapiens
gtgactgcggcctgcatcccggagtacgagacccaatctagtgcagaagc

SEQ ID NO: 647649 - DNA, 90 bp, Homo sapiens
caggattcttgaggatcttgacagcttgggaggaacaagcacatcatgattgacttggggactggcaacaacaacaagattaactgggcc

SEQ ID NO: 647650 - DNA, 90 bp, Homo sapiens
tcaagatcgaggggcttcaggacagtgaacatttaaatatgaatgtgaacagctttcaaaggaaatttgtgaatgaagtcagaaggtgtg

SEQ ID NO: 647651 - DNA, 75 bp, Homo sapiens
atctagtgcttctcgaaaaaaaccttcaggcggcccatggtattattttggcgacttcaatttgccacgggacaa

SEQ ID NO: 647652 - DNA, 89 bp, Homo sapiens
cagaaagtgaacttggcattttagatctaattcaatggccacagatgtctttaattccaaaaacctggccgttcaggcacaaaagaaga

SEQ ID NO: 647653 - DNA, 100 bp, Homo sapiens
caaacaaagaggccgcggaggagaagccggaggaggacaacgactaccaccgcagcgacgagcaggttttttattggcacctcagtctcaacattttctt

SEQ ID NO: 647654 - DNA, 100 bp, Homo sapiens
gcaagagagaagctgaccaggccggccgcgtcccctgctgtgggcgagaagctgaaaaagcctccatccctggaccagcttcgagctgaacgtctgcgga

SEQ ID NO: 647655 - DNA, 73 bp, Homo sapiens
aatcctgctatccaggctgccattgacctcacagcgggggctgcagaccattcctcaagaattttgtatccaa

SEQ ID NO: 647656 - DNA, 83 bp, Homo sapiens
aaggactcctgaaccagctcgtcctggagcacctgcagctggcgcctctgcagtgggcagccattgtttgatgtcctgtgact

SEQ ID NO: 647657 - DNA, 100 bp, Homo sapiens
gctccgagcagtgctacagagacgtgtctgatctaaaggtgacagagctgaatgaacctctctccaatgaagatcgaaatctcctctctgtggcctacaa

SEQ ID NO: 647658 - DNA, 75 bp, Homo sapiens
gataaatccaaatactgcatatcagaaacaacaggccacggaatgaattgtcccgggtctccaaaaagaacattt

SEQ ID NO: 647659 - DNA, 75 bp, Homo sapiens
aggagcctctccgcccggcagccaccccatctgggaagaatagccaggccagaagaaggaaggcctgtggtgagt

SEQ ID NO: 647660 - DNA, 74 bp, Homo sapiens
gcagatttccccagggttgagagagacttggttccctgtcccagaaagtttgatgaaggccggaacaactttga

SEQ ID NO: 647661 - DNA, 105 bp, Homo sapiens
ttgggcctcgcgccggctatggccgtgccctggggctgagccctcaggagccttcacgtaaatgggtccagtcatgcctcccagtaagaagccagaaagctcagg

SEQ ID NO: 647662 - DNA, 100 bp, Homo sapiens
ttgactcggactgcagcgaggacggcgaggcgctcaacggcgagccagagctggacctcaccagcaagaggaatgttacggcatccggagtcatccctca

SEQ ID NO: 647663 - DNA, 75 bp, Homo sapiens
cagaggacagcggcagcgacgagaacctggatcaggagaccctcctgttcttaactgtgggcgatgagaaaggtg

SEQ ID NO: 647664 - DNA, 98 bp, Homo sapiens
gaccccgctgcccgcacaaaatgtcggcccggacgccattgccgacggtgaacgagcgggacacggaaaatgaggattctctatgggaggatgcatgg

SEQ ID NO: 647665 - DNA, 90 bp, Homo sapiens
aggtatatttttgtggaatgaaaaggaagtattagaaatgagctgaagaccattcacagacattgctgtcgaactgctccagaaggcagc

SEQ ID NO: 647666 - DNA, 100 bp, Homo sapiens
tgagatatagtgactgtaagctgtgatctcagtatacaaagaaatgagccgtcagactgctacagcattacctaccggtacctcgaagtgtccaccatcc

SEQ ID NO: 647667 - DNA, 75 bp, Homo sapiens
aagaaaccaacattcccaacagccaccaccaccaccagatgatgggggctccggaggtggcgcccaggctctgag

SEQ ID NO: 647668 - DNA, 98 bp, Homo sapiens
taagacttcttgctcatttctgagtattgtctttatatcctgacactatgaatgctacttggatgcctcttaagccaaaatgaagtttaatccctttg

SEQ ID NO: 647669 - DNA, 74 bp, Homo sapiens
cgcatggagcctgcagcctttgtttaacttctgtgcaaccatattgcttctgggaaaaaatgtcaatatgttgg

SEQ ID NO: 647670 - DNA, 75 bp, Homo sapiens
gtacatcatccaaaagaggagtccatgatggaggcagaggtaaacttggagagaatttatagagcggcagcacgc

SEQ ID NO: 647671 - DNA, 100 bp, Homo sapiens
gcctggaccctgcccagcagaatttgtatagagatgtgatgttggagaactacagaaacctggtctccctagagatgctgcaatttgtcagtaatcaagt

SEQ ID NO: 647672 - DNA, 74 bp, Homo sapiens
aacagatccgggaattaagagagcttacaaaacactacacagcaaaataatgatctgctagactgctaacccga

SEQ ID NO: 647673 - DNA, 82 bp, Homo sapiens
cgaggaggggaccatgacacagtgacttaagagattaaaattaatttggttgctgttggttctgaacaaataatgagttctt

SEQ ID NO: 647674 - DNA, 75 bp, Homo sapiens
aaggattccaagtaactcttatttgcccctcatatggaaaatttgaaatgcagaggggaaacagtagcaaaggag

SEQ ID NO: 647675 - DNA, 75 bp, Homo sapiens
gattatgtccattgttctcttggagcagctggtcatcatggtgtcaactctgcccgctcagttcctccttcctac

SEQ ID NO: 647676 - DNA, 82 bp, Homo sapiens
agtgacccctgctctgaagctcaccaaaaccatccaggcatttcagaagatggacacaaagaagaaggaggaacagttgaag

SEQ ID NO: 647677 - DNA, 118 bp, Homo sapiens
ggatttaagaggggtgcagatcccggaatgcctgaaccaactgttttgaggtggctgaagccatactattttatagaattaatggaaagcagaaaagacatcacaaaccaagaagaaa

SEQ ID NO: 647678 - DNA, 95 bp, Homo sapiens
actctttcctcgtggaatttgaagattctacagataaatcaggacatggatttgattgacatactttggaggcaagatatagatcttggagtaag

SEQ ID NO: 647679 - DNA, 50 bp, Homo sapiens
cggcgttctggagccgggactcattgtttgtgctccccaaacctaaagtg

SEQ ID NO: 647680 - DNA, 89 bp, Homo sapiens
ccatctcatcgctaatgctgacgtgcagtccattgctgtagctgacgtgctgagcgccgtcctcaaggatctctaccacctgctgaagc

SEQ ID NO: 647681 - DNA, 83 bp, Homo sapiens
acagcaaggacgacttccaccgtgcagtggctggacctgcacctgcatcaggagatccccacatcgctgctcatcctgtcccg

SEQ ID NO: 647682 - DNA, 75 bp, Homo sapiens
ccctctccaaaggatggcaggggacagctttcactcacacggtttgccagtcagtccttagaagaacaacacagg

SEQ ID NO: 647683 - DNA, 75 bp, Homo sapiens
ccatgaggaggatttctggccttcgagatgacgtagctttgccaaagacttagaagctaagcagaaaatgagctt

SEQ ID NO: 647684 - DNA, 51 bp, Homo sapiens
ggagtggaaacgcttgtagggtttcaccagagatggggtcttgctgtgttg

SEQ ID NO: 647685 - DNA, 99 bp, Homo sapiens
ctgagcccgcccttgatcttcgctgtggcatggcggacgaggggaagtcgtacagcgatgcctgaggaaacccagacccaagaccaaccgatggaggag

SEQ ID NO: 647686 - DNA, 98 bp, Homo sapiens
cggccgccggagatgcctgacgcatctgtctgaggagcggtcagtgacgcgatggagcgggcaaggccctgggcagtgacggggttcgggtgaccatg

SEQ ID NO: 647687 - DNA, 74 bp, Homo sapiens
tcatccacaccaagaatcagccacagacggaacaagcatgcaggtttgagcacaaaatgaacataattagggaa

SEQ ID NO: 647688 - DNA, 109 bp, Homo sapiens
ctctgacctgaatcctgaattttccttgatggtcaaaagattaagtgccggtggtggtgtgcacattgagccccggtatagacagttcccccagctgaccagatcccag

SEQ ID NO: 647689 - DNA, 100 bp, Homo sapiens
gcggcgtgatcaccgaccagaactcggacggctactgctgcagccagctggaaggacattcaggtacccgggtaggctcctccctgcgacagaccttcag

SEQ ID NO: 647690 - DNA, 100 bp, Homo sapiens
cctgtacaacgtgctggagagaccccgcggctgggcgttcatctaccacgctttcgtgagattgcatcaacagtttgaaagctataaggaacaagtgaga

SEQ ID NO: 647691 - DNA, 98 bp, Homo sapiens
gaactctcaggggtccgcacggctgtcaccacggatgataccatcggggaccttaagaagctgattgcagcccaaactggtacccgttggaacaagat

SEQ ID NO: 647692 - DNA, 75 bp, Homo sapiens
ccgcatcaccggagcgtcccagctgcgaggaggaaccagcagcacaaacactgttggggcaacagtgaacagcca

SEQ ID NO: 647693 - DNA, 74 bp, Homo sapiens
tgcaaacttcaacctggctctctaccccaagttaaactcatcactgctatatatgcagattatgcccggagttt

SEQ ID NO: 647694 - DNA, 100 bp, Homo sapiens
taacacaacaagtttagggagtccatggccagaaaacttttggggttatacagtggttgctggaagaaaaattgtgtgcgctgcagtgtgctgtatttga

SEQ ID NO: 647695 - DNA, 75 bp, Homo sapiens
gtggttcacccgctgccgggcaccgaggaccagctcaatgacagattctctcgggcctagccgtccttggaaccc

SEQ ID NO: 647696 - DNA, 97 bp, Homo sapiens
ggggtgtttctggccacgtgcttcaacgctctgctgcccgctgtgagggaaaaggtgttttcacagtcctgtgtttggtatggagagtgtggaattg

SEQ ID NO: 647697 - DNA, 51 bp, Homo sapiens
tgctgctgctgctgctgcgcctgggccagatatggaatgtgcagatgtccc

SEQ ID NO: 647698 - DNA, 74 bp, Homo sapiens
ctctcttctgccatctgataatagtacctggagtagaacagaaaaattattatgtctgtgttcccttgggactc

SEQ ID NO: 647699 - DNA, 100 bp, Homo sapiens
cgcacctacttggagctggtgctttgcgtgctggtcagcatccggaacaacaggtgctttactccatgaactgtctaatgacggtgctcataagcagttt

SEQ ID NO: 647700 - DNA, 98 bp, Homo sapiens
tttgaggagaaggccagcagtccttcagggaagatgggaggcgaggagaagccggtgtggaatatcaaacaaatgattaagttgacacaggaacatat

SEQ ID NO: 647701 - DNA, 101 bp, Homo sapiens
gccaacaacggctcttctcaagtcagctttgtgaaagaagctatcatgaaggtgttgaacttggctctcatgtttgcagacggttggcaggcaggcctggg

SEQ ID NO: 647702 - DNA, 100 bp, Homo sapiens
aaccgcagtatcatgctggccaagaagatcatcattaaggacggaggcacgggtcagtatagaccttctgatttgctgtgccctgagacatatgtttggg

SEQ ID NO: 647703 - DNA, 80 bp, Homo sapiens
cgcagctcctggcctattacttcacggagctgaaggatgaccaggtcaaaaaggatgctgacagacagcaccaagaagta

SEQ ID NO: 647704 - DNA, 50 bp, Homo sapiens
ctccagccgaaggagaaggggggttaattatagaaaatgccaagtaggaa

SEQ ID NO: 647705 - DNA, 78 bp, Homo sapiens
atttggccagtttggagatgacccaaagatcacagattctgctggccatattctctactccaaagaggatgcaaccaa

SEQ ID NO: 647706 - DNA, 100 bp, Homo sapiens
gggaccctacagtcttcgcccccatcctcaacttcctgcgcaccaaagagttggatcccaggctgactgtgctgtcctgattgttgctgctggtgttggt

SEQ ID NO: 647707 - DNA, 100 bp, Homo sapiens
ttctcagactgattcttgacctctcaatgaaagtgttgaaacaggatgggaaatattttacacagctgctgccatcttaagtaaagtaaatctgtctgtg

SEQ ID NO: 647708 - DNA, 100 bp, Homo sapiens
ccgaattgccaaagttttggaaaaggattacagtttaaagacaatttctgtgatcaagttgtcatttggaagattaaacccatttcacgaggacttggag

SEQ ID NO: 647709 - DNA, 100 bp, Homo sapiens
acaaaactcgctgattttaaaagatctggaacatcgaaaggaccaagtaacacagctttcacaagagcattgatatgaaccatggacaagtatattctgc

SEQ ID NO: 647710 - DNA, 75 bp, Homo sapiens
cctgcctcagcctcccaagcagctgggtctacaggaaccctctggatattgatgcctcgggtgtggttggactgt

SEQ ID NO: 647711 - DNA, 50 bp, Homo sapiens
agcggggcgctccaggaggcactcacagttccagtctcatcagattttcc

SEQ ID NO: 647712 - DNA, 100 bp, Homo sapiens
cgccgcattactacaggagaaagaacatttccatcaaaccctgagagctttattaccagacatgatctttcaggacttttccagatttctcagaataaag

SEQ ID NO: 647713 - DNA, 83 bp, Homo sapiens
attattggattttgttacgattatcttcatattttgaaacagattgaaaaggctgtggtgtctcagcgcctgacagaatctcc

SEQ ID NO: 647714 - DNA, 50 bp, Homo sapiens
gcgcaacgccaacctcaggcgagatgctagtgagacctgcaacgacttcc

SEQ ID NO: 647715 - DNA, 80 bp, Homo sapiens
gattatatcgcatcctatggctcaaagaaagatgattatgtattagaaaactactcggatgctccaatgacaccaaaaca

SEQ ID NO: 647716 - DNA, 51 bp, Homo sapiens
aggatgatttcggaacctggagaaaatgtggacccccaaaagtacaagggc

SEQ ID NO: 647717 - DNA, 100 bp, Homo sapiens
catctatttctcttccatggaagagttcatctggtagattggactaccacttttccttgccttggatggtatactgtaaattcagcatatggagatacca

SEQ ID NO: 647718 - DNA, 98 bp, Homo sapiens
cagcgagccgtgagatgcgtggtccaccatcggtgacctcaccgcctcggttcgccctcagccgccccggtgaatctggattgggaaagtcgacatta

SEQ ID NO: 647719 - DNA, 88 bp, Homo sapiens
agaagtgaagaaattattggtacctgcagtgtattttgattacatgagaagctggatccaaatgctacagcaattacctcaagcatcg

SEQ ID NO: 647720 - DNA, 75 bp, Homo sapiens
gcgcccagcaacaagacagagctggcctggagtccgcggctggccgcgtgagtagaatttatagagcggcagcac

SEQ ID NO: 647721 - DNA, 75 bp, Homo sapiens
aattcgatttgcaaatcattcagtgaatcccaactgttatgccaaagatggcttgaaacccctccttcctgtgtc

SEQ ID NO: 647722 - DNA, 98 bp, Homo sapiens
ttacggtccacctcaagcacagattggagatcatgaatcagacagataaaaatcaacaagaaatcccatcataccttaatgatgaaccaccagaaggt

SEQ ID NO: 647723 - DNA, 98 bp, Homo sapiens
ctcgacaccatggtggacacttttcttcagaagctggtcgccgccggcagaaaccagcaaatatcctagtaatgggagaaggtcctgagagggggaga

SEQ ID NO: 647724 - DNA, 100 bp, Homo sapiens
attgatttcagggaaaaaagagtggatgtaaatgaagaccctggagaagatgtggccctcctctctgttagttttgaggacactgaagccacccaggtgt

SEQ ID NO: 647725 - DNA, 80 bp, Homo sapiens
gtgtggtttgtgatgagccacatgtgtttcaaaatggccctatgcttaggtcaagtccatcatctccagaaccagctagt

SEQ ID NO: 647726 - DNA, 100 bp, Homo sapiens
cggatggtcttgaaacacaaatggtttttgagctggagataagatgggtagactgctacttcccttttacacatccttcctttgagatggagatcaactt

SEQ ID NO: 647727 - DNA, 98 bp, Homo sapiens
tttgctcagctctttgccattcctcccctgaaaagcaaaggcctcatctccatggcacaggtgatgaaacaggaagactgaagcccaggcctggccgg

SEQ ID NO: 647728 - DNA, 50 bp, Homo sapiens
gcgagccagagcctgcagtcccacacggatcaaaatacttgctggatggt

SEQ ID NO: 647729 - DNA, 82 bp, Homo sapiens
tcagttggaagcagccgatccagcctgcggagcctgtggggcagctctgatccagtatatacggcctgtgttcgtgtcccgg

SEQ ID NO: 647730 - DNA, 98 bp, Homo sapiens
ctggagcttattaaactggacatttctagaacatttcctaatctctgcattttccagcaattccctgtattgaacactgatatacaaggaatgaatag

SEQ ID NO: 647731 - DNA, 75 bp, Homo sapiens
tcagcctactatctgtctggagaagaggttgaagcttgtagattatataccaagttctctgcccgcccaagcagc

SEQ ID NO: 647732 - DNA, 100 bp, Homo sapiens
tagcagctccccaagccttctaaatgacagtgccaagccatattcagcccatgctgtcattcttctctacagaagagcttctcctcatcaactggggatg

SEQ ID NO: 647733 - DNA, 50 bp, Homo sapiens
gccctcaacagcgccattttagtcaacaagtggaagaagctgtactcgac

SEQ ID NO: 647734 - DNA, 74 bp, Homo sapiens
ctgtatgagctctcagcaagcaactttgagctgcacgttgcacaaggacccatggatgaaggaccagatcttga

SEQ ID NO: 647735 - DNA, 96 bp, Homo sapiens
gggaacagtcgaaaaagtgggatcatcggtaaagcacctaaaaccaggtgatttgatgaaggctgctgcaggagagttcgcagatgatccctgctc

SEQ ID NO: 647736 - DNA, 98 bp, Homo sapiens
gcgcaatgggcacccgcgacgacgagtacgactacctctttaaaggtcctcttcctgactatactcctccagaaattttctcttttgaaagtactact

SEQ ID NO: 647737 - DNA, 87 bp, Homo sapiens
gacggaaacaatcgccagagatgccggggctagccttccccaccagattgcaagactggaggaagataaagaagaactacgtaacca

SEQ ID NO: 647738 - DNA, 75 bp, Homo sapiens
ggttaagaaaggaaatcaaaccgaaaatgtgtatatagatattaataaggcagcggaaagaagaaatatgaatac

SEQ ID NO: 647739 - DNA, 82 bp, Homo sapiens
cgagcagcccggggatccagcacgcagcatgatgccttcttctgtagagtgggcgctttgcagaatacgtgttgaatgaaat

SEQ ID NO: 647740 - DNA, 83 bp, Homo sapiens
ccatcaaactgcgcaggagtaaggcaggaaaccgacgagaggacctcagctccaaggtcttccgggctgcagggctccctcag

SEQ ID NO: 647741 - DNA, 83 bp, Homo sapiens
gatgggggcctcgggcgccccgcagccccccaacatcctgctcctgctcatggacgacgattttttatcaagcagaaatgcat

SEQ ID NO: 647742 - DNA, 75 bp, Homo sapiens
ctgtgataacctgtctcaaaaccctcctcatcatctactccttcgtcttctggctaccaagatgaatgaactaat

SEQ ID NO: 647743 - DNA, 82 bp, Homo sapiens
caacaagacgctgcccgtcgccttcaaggcaacatgagtgagaatgaggaagaggaaatttctcagcaagaaggcagtgggg

SEQ ID NO: 647744 - DNA, 117 bp, Homo sapiens
gataccaacggcaaaaatctcaagaaagaggtgggcaagatcctgtgcactgactgcgaaatgactgctgtccatgcaggcaacataaacttcaagtgggatcctaaaagtctagag

SEQ ID NO: 647745 - DNA, 82 bp, Homo sapiens
gatgggaaccagcccttcccggtgttagaacccaagaggctggtgtgagtggcgggagccatctgtgggcgccatggcaaag

SEQ ID NO: 647746 - DNA, 100 bp, Homo sapiens
caaaacctcaggaaggaaaccctagacccagagtcttccgcctccctgaggaccaagctgtcattaacagagccaacacagatctatagatttcttcgaa

SEQ ID NO: 647747 - DNA, 51 bp, Homo sapiens
tgctgcctatgcactccatttacagttgatcatggccttgccaggttggtg

SEQ ID NO: 647748 - DNA, 99 bp, Homo sapiens
ccagcactgagttctgcccggcggctagccttgatgtaccgaatgcaggttgcaaatattgacaagtttgaagagaagcttcgagcagctgaagatgag

SEQ ID NO: 647749 - DNA, 82 bp, Homo sapiens
ctgaggctgcgaggaggaggaggaggaggaggtgtggacactgccagcggctgcagccgacttggaatgacctgggagacaa

SEQ ID NO: 647750 - DNA, 100 bp, Homo sapiens
ttgcagaagaagatcaatgacttttgccgttctcagtgccctccaattaaggggagctcatattgatgtacgtaacaagaaggggaacactccattgtgg

SEQ ID NO: 647751 - DNA, 100 bp, Homo sapiens
caaccttctgtgagcctagggacccatttctcctcctttgacagggacatcagtggagccttctcagacccacagggaactgggaacagccaggtgcccc

SEQ ID NO: 647752 - DNA, 88 bp, Homo sapiens
acagaaacgtgcatggatgaagcacagattgctgctgtatgcagagagctctggattaatcgaattacagctgctagccaggaacatg

SEQ ID NO: 647753 - DNA, 100 bp, Homo sapiens
aggctattccatggaatatttgtcccggcactggctcttcagtcccttcaaatcagacactcctctaatttacaaagcagtgcccagctggtttgtgcga

SEQ ID NO: 647754 - DNA, 100 bp, Homo sapiens
gcggggcgcccgcggagcccacccggcagttcgcagcggcgggcttcaacggaccacaccaaaatgccatctcaaatggaacacgccatggaaaccatga

SEQ ID NO: 647755 - DNA, 75 bp, Homo sapiens
atacaggcccaaaagagttcagaagcagaaggagaaacgtgtgtggagtttaaagccatgttgattgcagtgggc

SEQ ID NO: 647756 - DNA, 82 bp, Homo sapiens
tgcggggaagagctgggtcgactcaagatgcagtggcagaacgtggagcacgttggtgaccagagcccctacgtcacctctg

SEQ ID NO: 647757 - DNA, 74 bp, Homo sapiens
ggccccgggacctgggctgggaacccgcggtggagcgggacacgaacgtggaagcagtcaattatagatttctt

SEQ ID NO: 647758 - DNA, 74 bp, Homo sapiens
ataaaggatttcatgattcagggtggagattttgttaatgtgcaaacggaggttcttcagaagaggcagcagga

SEQ ID NO: 647759 - DNA, 76 bp, Homo sapiens
tgggactgcaagtatacataccgtgcctgacgaaatatcacaatatttggaattgaatgatctggcacgggaccct

SEQ ID NO: 647760 - DNA, 101 bp, Homo sapiens
gcagaatacagagatatggaatcaggtggtcaagcgggtgctgacccagaccagcagcgggggcttctgtgggaacgacggcttcatgcacatgaccctgg

SEQ ID NO: 647761 - DNA, 82 bp, Homo sapiens
tctctcctgatacagcaggcgctcaccatgttccctggaggtgcccgtggttgacacgagctgtgtccccagctgttcccgt

SEQ ID NO: 647762 - DNA, 75 bp, Homo sapiens
aagggaccacggtcaccgtctcctcagactccccacctggtgaacctgaacgaagaccctctgatgtctgagtgt

SEQ ID NO: 647763 - DNA, 98 bp, Homo sapiens
gttaagcctctgggggtggatcctgaaaggtggtccagccgcctggccctgcgtgggaccctccacctggcagcagaatgctgtccagtttcaacgag

SEQ ID NO: 647764 - DNA, 80 bp, Homo sapiens
gagggagcgatgcggtgcagcgcgcccttcctttgaagaaaggaaacagttgggcttgccccaccagagacgaggaggaa

SEQ ID NO: 647765 - DNA, 100 bp, Homo sapiens
tgttgaagattttatggaattggagaaaagtggtgctctcctagaaagtgggacttatgaaggtgctggtgaatctggtaaaagtacaattgtgaagcag

SEQ ID NO: 647766 - DNA, 75 bp, Homo sapiens
attttagggtcctttatatagaagggagaattcatgatgagatttcagtgtcaagcatggatgcttctagacaac

SEQ ID NO: 647767 - DNA, 111 bp, Homo sapiens
cggcgcgcccgcggagcggcgcctgggccgcgccgacctggtcatgagcttcgttaacatggtaagactttgaccccgacgcaggcttcagtgattgccgcggatcagaag

SEQ ID NO: 647768 - DNA, 100 bp, Homo sapiens
ccaaacaacatctcctgctattccttgggctgcctttcctgcaggtgcctaatggataagaacttcgttaggattgggaaatggtttgtccgaccctacg

SEQ ID NO: 647769 - DNA, 83 bp, Homo sapiens
gactctttctgttcaggccagaccctctgggagcttctcagccattttccacagatcagtttgacaagtatgcgcccaagctg

SEQ ID NO: 647770 - DNA, 101 bp, Homo sapiens
ggcggcgaatcacttataaatggcgccgaagcaggacccgaagcctaaattccaggaggtcactcagcctctgaagaagcttcgggttcagactcaggcag

SEQ ID NO: 647771 - DNA, 83 bp, Homo sapiens
gccaatggggagcagaaggactcggacacagtgtctccagaacgctatagctatggcacctccagctcttcaaagaggacaga

SEQ ID NO: 647772 - DNA, 100 bp, Homo sapiens
agcaaacagccctcagtttctggagctgttccgaggcaacaggacctgtaccgaatcctgaaggcctacaccatctaccggcctgacgagggttactgcc

SEQ ID NO: 647773 - DNA, 83 bp, Homo sapiens
gctcaaatacacacacctgttgccattatagagctggaattaggcaaatatggacaggattgatctgaagttaaacaaaaaac

SEQ ID NO: 647774 - DNA, 100 bp, Homo sapiens
ttggagaattacagcaacctggtttcaatgggcaaactaggcgtggcaactgctggctgcgtgaatgaagttacagagatggagtgcggtcgctctgaaa

SEQ ID NO: 647775 - DNA, 88 bp, Homo sapiens
ttatattcatctcaaaaacaaaattctgaactcaggacttggcaaactttgaagattatccaatgagaattttatatgaccttcattc

SEQ ID NO: 647776 - DNA, 98 bp, Homo sapiens
gcacatcatgtccagctaaacctcgtgcccagtttcaggaccaatgccacttgttcttcaggagactgagctaaacattatgcgtcatgagaaatgtt

SEQ ID NO: 647777 - DNA, 90 bp, Homo sapiens
gtttgtttctccaaggtttgaaaagcagctggcctgcaaggatgtgatggagctgcttgaagaagatctcacatgccctatttgttgtag

SEQ ID NO: 647778 - DNA, 100 bp, Homo sapiens
gaggcgcgggaggtgttcgagaacgaccccgagacggagctcgtgggcgacgtgttgagagacacgctcagcgaggaagaggaggacgactttcggctgg

SEQ ID NO: 647779 - DNA, 75 bp, Homo sapiens
ggacaatggggacccgggacgacgagtacgactacctattcaaagggtcctcactgagcagcgagtcgtcccccg

SEQ ID NO: 647780 - DNA, 88 bp, Homo sapiens
gtttgatagtgaaaaaggagtggactttgttctgaattactccaaagcgtcctcttcctgatggatgggaacaagccatgactcagga

SEQ ID NO: 647781 - DNA, 50 bp, Homo sapiens
ggaatatatcctgactgattgtgtgtggatacataagtaaatgctacagt

SEQ ID NO: 647782 - DNA, 98 bp, Homo sapiens
caaagcactaacagttggaggattcattgaggaagaaaaagaagacttgcttcagcatttctcagtgcctgtcctgagacccatggacctgatggtgg

SEQ ID NO: 647783 - DNA, 85 bp, Homo sapiens
ttcaaggacagtatgccattccacagccagatggttccgagtctgaggaagacataaccttgtgcctgcctgcccacctctctct

SEQ ID NO: 647784 - DNA, 98 bp, Homo sapiens
tcattgcatgggttaatgacatagtatctttaaactacacaaaagtggaacagctttgttcagctcgaattacatctttacaagaggaggtgaagcat

SEQ ID NO: 647785 - DNA, 74 bp, Homo sapiens
agaaagcaggcgaacccgcggcgcaataacgaagctgcacacatacatgtaagagaagcaaaaatgtcagatga

SEQ ID NO: 647786 - DNA, 100 bp, Homo sapiens
ggatcgctctcgcccaccgcccgaaccggaagcccgtcagcctgagctacagatgcccatgccgattcttcgaaagccatgttgccagagccaacgtcaa

SEQ ID NO: 647787 - DNA, 98 bp, Homo sapiens
ccctgtacactgtgccctttaacctcattactgagtaccaccgcgaggaagaaaaggaggatggtgattgctcacaccaaagccttggacccctccca

SEQ ID NO: 647788 - DNA, 83 bp, Homo sapiens
ggagctcagtgacctcctggacttcagcatggccggtctaattgaagccaacggagaactcaaggtcttcatagaccagaacc

SEQ ID NO: 647789 - DNA, 83 bp, Homo sapiens
gtccccggcgcgaagaggctggactcggattcgttgcctgagctccaaagacaacaggccctccctctgccctcccgtctgtg

SEQ ID NO: 647790 - DNA, 82 bp, Homo sapiens
cccagaccctggagcctcagttggaagcagccgatccagcctgcggagcctgtggggcagctgtgatgcagatccatccgcc

SEQ ID NO: 647791 - DNA, 90 bp, Homo sapiens
gttcccggctccgtggggccgtcttcccggcgagtccgcgacggtcgccgcccacggcgagatgccatggacaatattaccaggcagaac

SEQ ID NO: 647792 - DNA, 75 bp, Homo sapiens
cctgagctcctgacagcccagcttcagaagtccatataatgcttgatggcctgttacctcctgacacctatttta

SEQ ID NO: 647793 - DNA, 75 bp, Homo sapiens
aaggacaaacccaccttcatcaaagggtacatagattctgcggacttggagcccatcacctcgcaagaagagccc

SEQ ID NO: 647794 - DNA, 50 bp, Homo sapiens
gccggcgcggcttctgcctggagaggaacgactgaagctggtgactgttt

SEQ ID NO: 647795 - DNA, 98 bp, Homo sapiens
aagacgatctgcacttcgcattttggcattgacatttaattttagggtcctttatatagaagggagagtagtttggaagccgaggcaccatcactgat

SEQ ID NO: 647796 - DNA, 75 bp, Homo sapiens
cctcccgagtagctgagattacaggatgaccggaaagaagggatgaccgcgtttgtggaaaagagaaaggccaac

SEQ ID NO: 647797 - DNA, 100 bp, Homo sapiens
caaggaaattactcatgatgtcaaaggtgggatgtgtgtgggctgaaattccgagctgcggttgtgcatgagaatacacccttcgtggtaccccatctcc

SEQ ID NO: 647798 - DNA, 83 bp, Homo sapiens
gaatattacagcggcgaccagtcagcagcccctgtcaaagggaacaggaagcagtccacggagggtgacgccctagacccacc

SEQ ID NO: 647799 - DNA, 100 bp, Homo sapiens
aaaaggtcccggaccccccggatctgacggggcgggacctggcgccaccttgcagggatcgcttacacctgagacgaactacagaacagcacgtaccaga

SEQ ID NO: 647800 - DNA, 100 bp, Homo sapiens
aaaatcagacagtgaagatataacaagatcagcaaatctaactgaccagagtctcactgtcgcccaggctgcagtgcagtggtgccatcacgcgtcactg

SEQ ID NO: 647801 - DNA, 122 bp, Homo sapiens
cccaaccaagtgaatgtggctgtcacgcgggcccaggaggggctctgcctgatcgactctgatgagaaagtcctgcccgtttcggagctgctggacatcgcctggcaggtggctgagggcat

SEQ ID NO: 647802 - DNA, 74 bp, Homo sapiens
agaatatgctgccaaaattatcaacaccaaaaagctttctgctaggggatctccaaagatgggtaaatggtgct

SEQ ID NO: 647803 - DNA, 88 bp, Homo sapiens
cctggagtctgccccattctgagagcagcagcctggctcctggtggctccagcagcaggctgatcagctgaccgaagaacagattgct

SEQ ID NO: 647804 - DNA, 101 bp, Homo sapiens
atggtgcatggaaggaaagccaatgcgcaggatgctcacaactgtattcctgagctggacagtgagacagccatgttttctgtctacgatggacatggagg

SEQ ID NO: 647805 - DNA, 76 bp, Homo sapiens
aagccccctgcaggaactctacaacccaatccaggtttttgattggtcaaggagcacatgtaggggctgtcaacag

SEQ ID NO: 647806 - DNA, 100 bp, Homo sapiens
ctgtctacctctgtccttggggtgccagccccacacagtgcacccccattgaatttgacagcaaaggcacagatgaggagagcatcctgactctgttgac

SEQ ID NO: 647807 - DNA, 100 bp, Homo sapiens
ttaagtctggaatgaatgtggctcgtctgaacttctctcatggaactcatgaggatgggagcaaagtgtttacggcatcgtgtgataaaactgccaaaat

SEQ ID NO: 647808 - DNA, 74 bp, Homo sapiens
ggggctccgcgagcggaattccggcggctgccgtgactccagtgcaaggtttccaggcctgaggtgcccgccct

SEQ ID NO: 647809 - DNA, 90 bp, Homo sapiens
ccggggctcctgcgcactcacttggcggccgcgcccgctggcgtcctcttgttctcttccaggccacggcagagacaacgtgtgtacccc

SEQ ID NO: 647810 - DNA, 98 bp, Homo sapiens
ggcggggcccaggtgagaaaggcccacctgtgtcctggttgagggtctccagggttctttggggcccgagggagagtcccgtattctcagagtaaaag

SEQ ID NO: 647811 - DNA, 100 bp, Homo sapiens
atgctcatgtggtgttgaggaaagcagacattgacctcaccaagagggcgggagaactcactgaggatgagatggcgggtgaaaaagttgagaagccaga

SEQ ID NO: 647812 - DNA, 100 bp, Homo sapiens
gaaataccagtccccagtgagggtgtacaaatacccctttgaattaattatggctgaggcaagtgaggcctatctggttggcctttttgaagacaccaac

SEQ ID NO: 647813 - DNA, 50 bp, Homo sapiens
gttgattactcaaggattaattagtaaagcctgtcacagccagggtctgg

SEQ ID NO: 647814 - DNA, 100 bp, Homo sapiens
tgttaagttatgctgtggaggaagaacatgcatatttgggtccaactgtgaagccagatgataagttgtctggcgccgggagtgagaccctaaaacaaag

SEQ ID NO: 647815 - DNA, 98 bp, Homo sapiens
ggtgctggaacgaacatcccggtgctaggggtgcaggaggaggacggcagcaaccgcagcagcagccttcaggtacatgtcccagagcaagcacacgg

SEQ ID NO: 647816 - DNA, 82 bp, Homo sapiens
gtgctgcttatggcggcgctggagagggggcgctgagctgttggggcatgaacgctgctgtccgggctgtgacgcgcatggg

SEQ ID NO: 647817 - DNA, 100 bp, Homo sapiens
ttgtaccttgtgacagaatatgccaaaaatggagaaatttttggaaactttgagggaaattttgagtcactggaccttgcggaatttgctaagaagcagc

SEQ ID NO: 647818 - DNA, 87 bp, Homo sapiens
cactgaaatcacaatggaaagtcttgacttgactgactctttttgatcagaacaatgctgcaaaaaaagaagagtcagaaactgcca

SEQ ID NO: 647819 - DNA, 50 bp, Homo sapiens
gtcttctttgcctgcactaatgcttccaatcagaagactatacaacctcc

SEQ ID NO: 647820 - DNA, 83 bp, Homo sapiens
agttcgaagagttggatactcagcgtcgctggcagccgctgtacttgaggactcaggagagtgcagcttgctctgtgagtggg

SEQ ID NO: 647821 - DNA, 100 bp, Homo sapiens
attggcgtggccgtcaaggagctggacctctacctggcctacttcgtgcgtgagcgagacttgtgcaccatggacaattttgctgagggagatttcactg

SEQ ID NO: 647822 - DNA, 90 bp, Homo sapiens
tcaagaaagacttgatggtctggtagaaacaccaacaggatacattgaaagcctcaagctcgaatgtgacaagttggccagtgagaagtc

SEQ ID NO: 647823 - DNA, 100 bp, Homo sapiens
cgagagcggcctgattgggaagaaactcttagcgcaatgatcatgattctggaaggaggtggtgtaatgaatctcaaccccggcaacaacctccttcacc

SEQ ID NO: 647824 - DNA, 76 bp, Homo sapiens
agaaagtttcatctgtggatggagtattgattgatgtacagctatatattttgtcctttctttcacctcatgatct

SEQ ID NO: 647825 - DNA, 102 bp, Homo sapiens
ggaggcagtggaggaagtgggggttatggtgggaggagccgatactgagcttcttcctatttgccatggttttgcgtttggctccctaatatctgctgtcga

SEQ ID NO: 647826 - DNA, 100 bp, Homo sapiens
ctgcctcagccctaccagcactggtcatgtctaaagcaatggctgccatccggaagaaactggtgattgttggtgatggagcctgtggaaagacatgctt

SEQ ID NO: 647827 - DNA, 82 bp, Homo sapiens
agagtcacacacggtcctaagagctgggcaccaggaagcgaaggctgcatgatgccttcttctgtagagtgggcgctttgca

SEQ ID NO: 647828 - DNA, 99 bp, Homo sapiens
tttactggagcgaggaaaagagccctggatgattttgagggaagaaacacagttcacagagaaagatgctggtttcgagttttggagatccttgttttt

SEQ ID NO: 647829 - DNA, 97 bp, Homo sapiens
tttccaaggactcatcccaaagcctgggatcatggcccaagttgcaatgtccaccctccccgttgaagatgaggagtcctcggagagcaggatggtg

SEQ ID NO: 647830 - DNA, 100 bp, Homo sapiens
gatttggtggtcagcttgcctgaggagagatactttctagttgggagcaataatgcagaaacgaaatatcgtgtcttgaagattgatagaacagaaccaa

SEQ ID NO: 647831 - DNA, 50 bp, Homo sapiens
aggacacggtctacaccgacttcgacgatataacacgtgggaaccggagg

SEQ ID NO: 647832 - DNA, 100 bp, Homo sapiens
cgaccacttgcggcctgagtatgggtgaggtggctttgaccccgggttgcccggccagcacgaccgaggaggtggctggacagctggaggatgaacggag

SEQ ID NO: 647833 - DNA, 100 bp, Homo sapiens
cattcagccccactactgtcaacactggccgagactatgaaatccctggagaatttttggtgacatgcactgagccaaggtgatggactgtatatttgag

SEQ ID NO: 647834 - DNA, 100 bp, Homo sapiens
agaaaagttgtttcctccaacattgatgttcctccagcaaggacaggtttcattaatcttgacaagccctctaacccctcttcccatgaggtggtagcct

SEQ ID NO: 647835 - DNA, 48 bp, Homo sapiens
gataagacagtcccacagtccagacgtgaacgatcaagagagagggac

SEQ ID NO: 647836 - DNA, 96 bp, Homo sapiens
ggggcttgagagctgggttctattttccctcctcaaactgactttgcagccacggagaggttgacaggactgaggtgattcgcacctgcataaacc

SEQ ID NO: 647837 - DNA, 75 bp, Homo sapiens
ggagagtgagcttcggaagctcaagttttcctacagaattatctcagacctcgagtcttggaatgatgagctttc

SEQ ID NO: 647838 - DNA, 100 bp, Homo sapiens
ggggctttccagctctcacagaaccttcagcatccccagctgccggtcttggcatcttcgaagtaaggagaggttgcagatgaatacatgttttccctag

SEQ ID NO: 647839 - DNA, 75 bp, Homo sapiens
gaccggcggcgcgcggcggccgaggccagcgtccgtctccaagagagtatgaagagagtgcgtctgtagggcagg

SEQ ID NO: 647840 - DNA, 98 bp, Homo sapiens
agacatatggaccacatgttcctgagcttgagatgctaggaagacttgggttggcatcactctcttcactgtgtctcataggaaatctctttggaaac

SEQ ID NO: 647841 - DNA, 98 bp, Homo sapiens
cctagcgccgccaaggccgacggccctcagcctctgccatggacttcgaggacggtaagaatgattgatgttggctgatattggagtgctcattcaca

SEQ ID NO: 647842 - DNA, 74 bp, Homo sapiens
ccggaggagtcagctgtgtgtccagaacgtgccatggagacgcttaacgaccgaagccaggacagcacagccgt

SEQ ID NO: 647843 - DNA, 87 bp, Homo sapiens
agcctcctgagtagctggtattacagcctacaacacagcagtcccctcaggatgagcaggaaaagctcttggatgaagccatacagg

SEQ ID NO: 647844 - DNA, 75 bp, Homo sapiens
gagcgtgctgcggacggcgctgcggtacatccagaaatggtggagtcaatgaagaaagtagcagggatggatgtg

SEQ ID NO: 647845 - DNA, 88 bp, Homo sapiens
ggccttttgtccctttgcctcatcccaggttgccttggaaaatgccaacgccgtgtctgaaggtgaccctggcagcaaccccaacaaa

SEQ ID NO: 647846 - DNA, 74 bp, Homo sapiens
aacagacagtttttgtttcaaaagaaacatgttggaagatcaaaggcacaggactcagcgaatgctctctacac

SEQ ID NO: 647847 - DNA, 90 bp, Homo sapiens
gcagggcatgaggacagcaatggttgtatcaactatgaagagtgacagcattcttgtgaatgtttacatcctgctgctgataggttcaag

SEQ ID NO: 647848 - DNA, 83 bp, Homo sapiens
cagctccgccggcagccgcgggagcacggcgacgccagcggcggtgttatagttttgccgctggactcttccctcccttcccc

SEQ ID NO: 647849 - DNA, 75 bp, Homo sapiens
attttattcctcttcctatccaatccctgccttttgagtccaggtgggctgtgggacagatgatgtctaccatgt

SEQ ID NO: 647850 - DNA, 100 bp, Homo sapiens
gggtttatattttcaaaatctatgaatgaaagcatgaaaaatcaaaaggagttcatgcttatgaatgctcgacttcagacagggtttcgccgtgttggcc

SEQ ID NO: 647851 - DNA, 87 bp, Homo sapiens
ctgtgcaatcctcacattcaagctgataggctgcgctaccggaatgtcatccagcgagtgattaggccatcatctgtgcgatctctg

SEQ ID NO: 647852 - DNA, 100 bp, Homo sapiens
ctgactacatttgaagggaaggagtggatcctcttctttataggatttggtgctatggagaaatttttggtagaatataagagtgcagtggagaagaaac

SEQ ID NO: 647853 - DNA, 90 bp, Homo sapiens
cagcatcccacattaagtcaacggaatttagtggttatgttcaacaagtaaaatatgcaatgacaagaataaaagctgccatgccaagaa

SEQ ID NO: 647854 - DNA, 75 bp, Homo sapiens
cgttggaataccggctctcagcggctgcttccctgattgtgactgaggagctgcacctgatcacctttgagaccg

SEQ ID NO: 647855 - DNA, 75 bp, Homo sapiens
gaacgttcagctgctgcaggaccacggggaaattgccaagaggcagcaaggagcgcttccactggcagagccaca

SEQ ID NO: 647856 - DNA, 100 bp, Homo sapiens
ctcaagggctccaatttgtactctcagctggaacggcaggcctgggttttgagagtattttagaagggctttatggaccacggctacgaagagacctcag

SEQ ID NO: 647857 - DNA, 100 bp, Homo sapiens
ctagcccagggtctcttcatcgatagggggtgatctgtctgcccctcactgttttctccaaatagcgatggcaagccggcaggtggatattgcaactcag

SEQ ID NO: 647858 - DNA, 100 bp, Homo sapiens
tccacctgtgccttcacggaatgtatcctccgaagctatggcctgaagacgggattctttagcgatgccagagagaatatccagagattctttggccatg

SEQ ID NO: 647859 - DNA, 75 bp, Homo sapiens
tccagaggatcgctgcaaatctccaacctctggtgatgatcctgcaggaagtgcaggagagacccccgggtggct

SEQ ID NO: 647860 - DNA, 76 bp, Homo sapiens
gaggtctcatctttgaactactgccggagcttctgccaggtggtccattatggctgacatgcaaaatctggtagaa

SEQ ID NO: 647861 - DNA, 78 bp, Homo sapiens
ttggccacatatatgcgaatctataagaaaggtgatattgtagacatcaagggagagaaggtacccaaagggaaaaag

SEQ ID NO: 647862 - DNA, 75 bp, Homo sapiens
tttgttgtggtacagtttaaagatatggactccagttatgcaaaaagagtgagagggtccaagcctggtaagaat

SEQ ID NO: 647863 - DNA, 100 bp, Homo sapiens
agccggccgtacgcggtgctgcgagggcagaacctgggctacctccgggatgtgacaggcaactacacggcttcttttgtggtggctggggccttccttc

SEQ ID NO: 647864 - DNA, 100 bp, Homo sapiens
aaatctcgagatgatagtcaactaaatggagattctagtgctttgcttgaacaggcctttgagagcagccagaagtacaaagaggggaagtacatcattg

SEQ ID NO: 647865 - DNA, 90 bp, Homo sapiens
gcttttcggttccgggtcttggccccgtccttacctcacaggtgttacaggacatgggcttgccgacgggtgctgaaggcagggactcga

SEQ ID NO: 647866 - DNA, 75 bp, Homo sapiens
ccgccaccgagcgtgctgagcaaccgcagcctccgcggccgagagtgcagcgacactctcgagtggaccctgagg

SEQ ID NO: 647867 - DNA, 121 bp, Homo sapiens
atgttcttggtgaagtcggccagcctgagcaagcggaggacctacgccggcctgggtgaaaggtgtagcagtcactcggcctacacccacagcatcgaccttgtgaacccagcgacctgac

SEQ ID NO: 647868 - DNA, 75 bp, Homo sapiens
tccacagctaagacaccgggacctcctggaagccaaaaatgtgagcctttgaatacatctttatcaatgaccagt

SEQ ID NO: 647869 - DNA, 82 bp, Homo sapiens
ctggtgggccgcgtcgaagacatggaccagggctacggaggtgtcccgacccaggctaagcttgagcatggctgagcaggag

SEQ ID NO: 647870 - DNA, 75 bp, Homo sapiens
ggttaattcaacagttcaccaccattaccgggacccccatcaaccgaatccccatcatggccaaacagatcctgg

SEQ ID NO: 647871 - DNA, 75 bp, Homo sapiens
aagtccttggctgctgagtggtgacagtagcccagcccgccggccaggcctcgaaaaagcccaagacagcagaag

SEQ ID NO: 647872 - DNA, 75 bp, Homo sapiens
ggagaaggcgctgcgcaagcacgctgaggagacttcccaagtaagaagcggaagaggagccgctggaaccaagac

SEQ ID NO: 647873 - DNA, 90 bp, Homo sapiens
ggttcaaggttgggcattgggtggaggagcagaatttactacagcatgtgatttcaggttttgcacactagggaccaagaagccctcggg

SEQ ID NO: 647874 - DNA, 101 bp, Homo sapiens
acgccattttaagaatcctgcataaatagcttagctaccgatgactctgcctgttttaggtcatcattgtcatctacctgtccgtggtgggtgccctgttg

SEQ ID NO: 647875 - DNA, 100 bp, Homo sapiens
gacttgttcacatgtggcaaatgtaaaaagaagaattgcacttacacacagctcctgggcaacgtgctggtctgtgtgctggcccatcactttggcaaag

SEQ ID NO: 647876 - DNA, 74 bp, Homo sapiens
aacagccacagcagcctcccaaggagtctgcaagttggcataaacttggaggaggcagtggagagagcatcctg

SEQ ID NO: 647877 - DNA, 123 bp, Homo sapiens
gcttcacttccctcggtctgggcttctctgaggcggcgagagatggtcaggtctggagctcgaccgggccagctaccgtcagagggctcagaagctttcggaaattcacaaggatcaacctgg

SEQ ID NO: 647878 - DNA, 102 bp, Homo sapiens
ccaccaagcgctttcccgagaccgtcctggcgcgatgcgtcaagtacactgaaattcatcctgagatgaggtgctggagaatctggtaaaagcaccattgtg

SEQ ID NO: 647879 - DNA, 74 bp, Homo sapiens
ccgacatcgtgtgccgctgccagggacacttgacattcagggacgtggccatagaattctctcaggaggagtgg

SEQ ID NO: 647880 - DNA, 100 bp, Homo sapiens
cccatacagcgctttgacaagtgcctggaagagttctatgcactctgtgaccagctggagctgtgcctgggacggcccaggtggcaggatgtcctggtct

SEQ ID NO: 647881 - DNA, 100 bp, Homo sapiens
agaaaaacaggatggatatgactctctgcagcgggatcaagctgtgtgcattagtacaaatgattcgccatgaagtcagcgtaaataatgtaacacataa

SEQ ID NO: 647882 - DNA, 100 bp, Homo sapiens
gtcaggacatattcgatgccatcgtgatggcggatgagagggttccccactgaaggacttggtccagctgtctggcagggaggagagacagaagctctgg

SEQ ID NO: 647883 - DNA, 100 bp, Homo sapiens
cagcatccctgcagccttctggtataccatcgtcaccatgacaacactagggtttttagaagtgaagtatagtaaatttggttcgttaaattgtgaaggc

SEQ ID NO: 647884 - DNA, 49 bp, Homo sapiens
aaattttatatttcagatttgtggaagggcagcccaatggatccaatgg

SEQ ID NO: 647885 - DNA, 100 bp, Homo sapiens
catcggctcccagagaaaaatcggcagatgttacagctgctcatgaaccacttggcaaaggaatatggagccattgatgatgtagatattgatctgcata

SEQ ID NO: 647886 - DNA, 83 bp, Homo sapiens
tgcctccggggacaagaaactagagcaaataaccgttttgaaattgatttgacgaaacgttcgagtcaaacgcagaataaagc

SEQ ID NO: 647887 - DNA, 83 bp, Homo sapiens
tcgtgactacatggctgtgctcatcaaggatgatgatcctgtgtatcgatgaggccacagcaagtgtggaccagaagacagac

SEQ ID NO: 647888 - DNA, 82 bp, Homo sapiens
cccccccggaattctgagcaccaaaaggctgggtccgatacgccgagcgggtgctgggtcgccccatcactgcccacctctg

SEQ ID NO: 647889 - DNA, 100 bp, Homo sapiens
tgcagattttatgaccacgaatgtaccaaatgtctacccagcagctccgcaaggagggatggctgccttaaacatgacggtttgctgtgtttcaaagaag

SEQ ID NO: 647890 - DNA, 96 bp, Homo sapiens
ggcggcaggaagctggagcacgatcccaggcacctgtgagaatatgaacttctcttggaggaatgaatgcaaccagtgtaaggcccctaaaccaga

SEQ ID NO: 647891 - DNA, 90 bp, Homo sapiens
catttggctttgcctttctggacacagaagtatttgtgacaggaatgtatacaaagactatcgcttccttgagctggcatgtgattccca

SEQ ID NO: 647892 - DNA, 99 bp, Homo sapiens
cctgcggccgccggaaaataattttgtctgatgaaggcaagatgtatgtggcacaggaccgccactacccaggagaccgatggctttcaggtgaagcgg

SEQ ID NO: 647893 - DNA, 74 bp, Homo sapiens
aaaaatcatcaacctttctaatgaaggatcctaagcacttcaagtcagagaagacaggacggggacagttgagg

SEQ ID NO: 647894 - DNA, 100 bp, Homo sapiens
ccgaggagcaggttggctttttggagcaaaggtcacaaatgaggccaagatcaaggctcgagatcttcgcgggaagaagaaggaggagctgctgaaacag

SEQ ID NO: 647895 - DNA, 100 bp, Homo sapiens
ggaaataataccatccatgtgcaccgagaaattcacaagggagatcggatgtggcactttgcggtgtctgtgtttctggtagagctctatggaaacagcc

SEQ ID NO: 647896 - DNA, 100 bp, Homo sapiens
agctcatcagcgtggaggacctgtggaaggcatggaagtcatcagaaggtcactgcagccagaggggtccagaagagagaggaggcactgcctccactac

SEQ ID NO: 647897 - DNA, 83 bp, Homo sapiens
gtgagctgcggcgagcggagcttcgcggggatcctgctggactgcacgaaaaagctggacggcagtctggaaacgaccaatga

SEQ ID NO: 647898 - DNA, 101 bp, Homo sapiens
ttttatgctccagtacatgcagatgacttgagagaaggtgcacagtatttgatgcagctttggggccatttggatcacacgatgttttttcaagattttag

SEQ ID NO: 647899 - DNA, 100 bp, Homo sapiens
gctcaccttgggccaggcctggcagggctgtgagtggcaaggactttggaggtactggttttggattaggaattgttttctcacttaccttctttaaaag

SEQ ID NO: 647900 - DNA, 75 bp, Homo sapiens
tcactgcctggaccattgtccctgctgtttctcaggcccttctgcgatgttttacctggctgcggctgtgtcaga

SEQ ID NO: 647901 - DNA, 98 bp, Homo sapiens
tctggagcaaggaaaagatccctggaatatgaagagacacagtatggtagccacacccccagcttgagagtttttccagcagtaccagctccagccag

SEQ ID NO: 647902 - DNA, 148 bp, Homo sapiens
agaagtatgaaggtcgcttacagcattctacacaaattaggcacaaagcaggaacccatggtccggcctggagataggcacctcttcaagtgagatggcagaccacctcaggatggaaatgtatttcttcatccccctctctacttcc

SEQ ID NO: 647903 - DNA, 82 bp, Homo sapiens
caggacagtcgcgaggttcgagtgttgcagagcctgcggggcaagatctatgtccagctcgccgctgtccaagaaacgtcgc

SEQ ID NO: 647904 - DNA, 133 bp, Homo sapiens
catccaggttcccatggttgccggctcccctctcaggacaacccagatgtgcaacaaagtgcgatgaggctgcctaccacaaggactttagcttactttttaaagattgaagaaaaaaaagaagacagaaaaa

SEQ ID NO: 647905 - DNA, 90 bp, Homo sapiens
catgaccacgtcgttccgcgacggcctggctttctgcgccatcctgcaccgccaccggcccgacctcatacggtggagcatggcttcccg

SEQ ID NO: 647906 - DNA, 97 bp, Homo sapiens
gatacacctgaaaatcttcgcctgaagcagcaaagtgaattgcagagtcaggtgtaccttgaaagacttttaacatacgcagagatagatatctgtc

SEQ ID NO: 647907 - DNA, 83 bp, Homo sapiens
cagagactgctgagcccgtccgtccgccgccaccacccactccggacacaggcataatcaccagcaacacccgggacaataat

SEQ ID NO: 647908 - DNA, 96 bp, Homo sapiens
ttcacggaagagtaccagctcttcgaggaattgggcaagaggcccagaagattaacaatggctcaagccaggcggatggcactctcaaaccagtgg

SEQ ID NO: 647909 - DNA, 75 bp, Homo sapiens
gcgtgtgtgcggcaacacctccccgacctctacgctgctgccgggggacatggcttgcagtgtggcaggcataac

SEQ ID NO: 647910 - DNA, 60 bp, Homo sapiens
cgactttatgaccaagagctgaacaagtgggaatgtaagacggacttagatattgcatac

SEQ ID NO: 647911 - DNA, 75 bp, Homo sapiens
ttacttccaagtcatcaccagaaaggcgtgcaatggaattgagttttgccctggtaaatgggaataatatccgag

SEQ ID NO: 647912 - DNA, 88 bp, Homo sapiens
catcaaccacctcaaagacactggttccccacaccagtgagaagcatcagcaccgtgaacttgtctgagaatagcagtgttgtcatcc

SEQ ID NO: 647913 - DNA, 98 bp, Homo sapiens
tcaccaggaatagggacctttttctgaatttcctgccctcaggggttacctgtatggcgggctggagttcggcgccgagtgctactgcggccacaaga

SEQ ID NO: 647914 - DNA, 74 bp, Homo sapiens
gaatgaggaaataccagatgactggtgtagaggaagtaacacagttcaaggagcagggacaagttacaggaatg

SEQ ID NO: 647915 - DNA, 82 bp, Homo sapiens
agaagcccaactaaagccccacatttgcagctcattgaaggaaaggttatcaatactctggctgaccatcatcatcgtggga

SEQ ID NO: 647916 - DNA, 75 bp, Homo sapiens
gtgaggcccaacagcggaatcatcgatgcaggggcctcaattaatgtatctggcctgaggagcgatgcgacaggc

SEQ ID NO: 647917 - DNA, 100 bp, Homo sapiens
tttacatcatacttggacatatcaagcattggtgcacgatgtactgctcatctttgggtgaaaaattgtcgggatcttctgcagtccagctacaacaaac

SEQ ID NO: 647918 - DNA, 75 bp, Homo sapiens
gcagctccaggaagcgagatgtcgaagccgccacccaaaccagtcaaaccaggttttgcgtgtgaagctgtgtgg

SEQ ID NO: 647919 - DNA, 88 bp, Homo sapiens
gacaatggacctgcctgggcatagacttccttaaggtagcaaaccatgtgatttcttctgactctatttcctcttctgccagtagttt

SEQ ID NO: 647920 - DNA, 75 bp, Homo sapiens
ctctgcagcctcatcctacagccccctaggccaaatagttgcatcacatgtatctaatccgagagtctcatgctt

SEQ ID NO: 647921 - DNA, 98 bp, Homo sapiens
ccgggcagtgcggcaaccaaatcggcgccaagccaggcccagacatgtccgtccttgtaagttaaaagcttccatgggagccttccttcctaatcaag

SEQ ID NO: 647922 - DNA, 80 bp, Homo sapiens
cagccaacctatgttgccctgagttacataaatagagtcttggaaattcacagagagaatatgaaaagcaggttgtcctg

SEQ ID NO: 647923 - DNA, 75 bp, Homo sapiens
ccggcgcggcgatgatgaacaggttccgaaagtggctctacaaacccaaggctcctctgctgaacagcccctggg

SEQ ID NO: 647924 - DNA, 100 bp, Homo sapiens
ctgaaaatcgtcgtgctgggggacggcgcctccgggaaggccctggagagtgaatttgtttcctgccagcttcaccaatggattgatctcatttttggct

SEQ ID NO: 647925 - DNA, 75 bp, Homo sapiens
ggatgccctgcagtacctgcagaaggtctctggagacatcttcagcagctccagttctccctggatccagaaccc

SEQ ID NO: 647926 - DNA, 100 bp, Homo sapiens
gccgccaccatgcccaagagaaaggctatgcccactggaagggccaagtgctgaattcagatgagctccaggagttgtacgaaggcctgaggctgaacaa

SEQ ID NO: 647927 - DNA, 100 bp, Homo sapiens
gggggtcggccgccgcagccatggaggccaactggaccgcgttcctgttccaggtaaaatgatgcggtgtgtccgctgccccgttgcctatcacagcggg

SEQ ID NO: 647928 - DNA, 88 bp, Homo sapiens
aggctccagtgtataaacgggtaatgcctgatggaaaaatccagaaattgattatcacagaagagactaccgagcgtggaagaagcag

SEQ ID NO: 647929 - DNA, 99 bp, Homo sapiens
tggcaccactggtcgccggtactcatcagcctggccgccctgttttccaaagatgactgtgatgatcctcttgtgtctgccttgcctcaggcatccttc

SEQ ID NO: 647930 - DNA, 101 bp, Homo sapiens
gtcaatgccagtgtacttcagttggtgcacaaaatactgtcatttgctcaaagcgttactggtaaaaagctactagaaaggggggaactgaaacgtcgata

SEQ ID NO: 647931 - DNA, 100 bp, Homo sapiens
agctgaaaggaatttccacactgtcccctacatggtcggaattaacaagcaggagtttggctggttgattccaatgttgatgagctatctactctccgaa

SEQ ID NO: 647932 - DNA, 100 bp, Homo sapiens
tccttaaaggggtcatactgctggttgggttgactgtaattcctgacagcacggctggctgtgtttttggtgttatctgtaagctcctggatcatacttg

SEQ ID NO: 647933 - DNA, 99 bp, Homo sapiens
cagagacactgccaagcagccttagccctagtgtagagacaagttggatggcttgaggactggtactaaaaggaaacgtgactgggaggccattgccag

SEQ ID NO: 647934 - DNA, 75 bp, Homo sapiens
gctttattgcttcctactgttaccaaagagcaatcaaggagaccgcgaaggcgtacattcccgggtgttgcttcc

SEQ ID NO: 647935 - DNA, 75 bp, Homo sapiens
ttttataccactgaaccgtgcacttcaaaatggttaagatggcatccttctttaaaagagaaatccacgttagct

SEQ ID NO: 647936 - DNA, 96 bp, Homo sapiens
gcaagagagtttatctgtgggtgagtgcatactccttccacgttactgcagacggtcagatgcagcctgtcccttttccccccgacgccctcatcg

SEQ ID NO: 647937 - DNA, 75 bp, Homo sapiens
gagaattatgggagcgcatttccccagggatcagctcagctactatttaataaaacaaaatctgtagaattcacg

SEQ ID NO: 647938 - DNA, 82 bp, Homo sapiens
ctcgaggccaggatgtggggcgttatcaggtgtcccgatttcttcatacctactcagctgctactcaggaccttcaagctaa

SEQ ID NO: 647939 - DNA, 75 bp, Homo sapiens
tagaggggacagaatccaggtgcgaaaagtaccacctctcaagccaggctatgatgaccttaatcctgattggag

SEQ ID NO: 647940 - DNA, 100 bp, Homo sapiens
gtaagcctttggtcataatcgctgaagatgttgatggagaagctctaagtacactcgtcttgaatagatgtgttcagagcaacattgttttgttgacaca

SEQ ID NO: 647941 - DNA, 83 bp, Homo sapiens
ccgggagctgggcggccatttaccaggacacattcagctaacgtattttagcaggtggagtgaggttgaagattcctgtgaca

SEQ ID NO: 647942 - DNA, 125 bp, Homo sapiens
gcggccccttcgtgtgcgcttgggcgaggccgggcggcgcttctgtcctcctactcggacccgcagaaatgggacgtcggtcatcagatactgaagaagaaagcagaagcaagagaaaaaagaaa

SEQ ID NO: 647943 - DNA, 83 bp, Homo sapiens
gtttctcacgacgggccgagcctgccactatgttccaggtcatccagccagagcgtgcgctgtacatccaggccaacaactgc

SEQ ID NO: 647944 - DNA, 100 bp, Homo sapiens
tgacaacttgacttctctggggactctgaacttccctggtcgaacagttttttctaatggctattcaagttgcagaatgaagaagagtctggagaacctg

SEQ ID NO: 647945 - DNA, 100 bp, Homo sapiens
gaggtggctgatagatggtacagtgaaatcaagaactataacttccagcagcctggcttcacctcggggactgatgccaattctcggaagcaagaagcag

SEQ ID NO: 647946 - DNA, 98 bp, Homo sapiens
tggcagagctgggcaggagaggcctgttgctgccgtctcgactcgtggatggaagcaggagctggccaacagctcggatgcgaccctcccagaccggc

SEQ ID NO: 647947 - DNA, 100 bp, Homo sapiens
tccgctcccacttccagcacgtcttcatcattgtccgagtccacaacccctgcactgataacgtctgttacagtaatccatgacaaattgcctctccaag

SEQ ID NO: 647948 - DNA, 100 bp, Homo sapiens
atgatcgaccgcaacttacgggaggacggggaaaaagcggccaaagaagtgaagctgctgctactcggccagtactgatgcaggcactgcaggagccctg

SEQ ID NO: 647949 - DNA, 100 bp, Homo sapiens
aagcgaagttctaaccctcctgctcgatctcagagctcagacacagagcagcagtcccctacaagctatatgttctcctttcagccaagacctttcacca

SEQ ID NO: 647950 - DNA, 75 bp, Homo sapiens
ggggaggcagcgcgggatcccagcctcaggcgtgcgcggacggtgtgcgggaaggaatcgtgtctcctagtgacc

SEQ ID NO: 647951 - DNA, 100 bp, Homo sapiens
acaggcttactgaatatcctcttataattaatgcaataaaacgcttccatctttatccagaggtgaccattgtgaggtagatattttgttctaattttcc

SEQ ID NO: 647952 - DNA, 83 bp, Homo sapiens
cttccccggccggtccctcgcctcccggccgagctgacggaagaggagcaggacttggatggtgagaaggggccatcatcgga

SEQ ID NO: 647953 - DNA, 71 bp, Homo sapiens
cagcagcgcctatgagtttgtcacctggctcgatggcattaagtatggcgactacccgaagctccctgacc

SEQ ID NO: 647954 - DNA, 98 bp, Homo sapiens
gtataattttcctcacacacagttacttgccaagacgattgaagcctcgaatggctacagagagaggaaatttggtgtttcttacggggtctgctcaa

SEQ ID NO: 647955 - DNA, 75 bp, Homo sapiens
caaagatctcgtacaagatccttctttgatttccagatgtgacttgcactcagaagatcagtggtcaacttcaga

SEQ ID NO: 647956 - DNA, 98 bp, Homo sapiens
gtgtatagtgagagcacctcactggcagaaaaactgcttttccatggtgaaaatattgaagcactggacaaggattaaactgcaaatatctcatgaag

SEQ ID NO: 647957 - DNA, 75 bp, Homo sapiens
cgatgtgtatcctgatggcttcaaaggactgatgggcggcgctggtctttggcctctttgccctcttcaggatat

SEQ ID NO: 647958 - DNA, 50 bp, Homo sapiens
aaggagcagctgctctcggagagttaatttggagtggcccctggagtcag

SEQ ID NO: 647959 - DNA, 100 bp, Homo sapiens
tagagtctgaagttgttaccaatggtgaaactacatgttcagaaagatatggtggtggttttaatgaaagagaaaatgttgaatatatagaaagagaaga

SEQ ID NO: 647960 - DNA, 51 bp, Homo sapiens
ggcgaacacgccgcggtcctcgtcgtggtgcagtggctcactcctgtaatc

SEQ ID NO: 647961 - DNA, 75 bp, Homo sapiens
ttaataatgacaatctcctcagggaaggggcagcacattggtgtaatacggtgcccagtatgccgccaagaatgc

SEQ ID NO: 647962 - DNA, 75 bp, Homo sapiens
caaatctactactgttcatggcaggcctcttatgtgaggagctgaagaggaattaaaatatacaggatgaaaaga

SEQ ID NO: 647963 - DNA, 74 bp, Homo sapiens
gcaggtgccatgatgagtgtggatgaaacactaatgtgttcttttcagcaattaccagctctggctgggtcgcc

SEQ ID NO: 647964 - DNA, 98 bp, Homo sapiens
cccgctctgctgtgggcgctgctggcgctctggctgtgctgcgcgacccccgcgcatggtgtgttccagagaacaagccttcagacatttgctatatt

SEQ ID NO: 647965 - DNA, 98 bp, Homo sapiens
tttctccatggattcgtccagactcaaaagtggagaagattcgcaggaactccgaggcgtctcttcaagaaaatgaggaggaggagattgggaaccta

SEQ ID NO: 647966 - DNA, 83 bp, Homo sapiens
cttggcgtccgtcggtctccgtccgtcggtccggggaccatggtgaatccgggcagcagctcgcagccgcccccggtgacggc

SEQ ID NO: 647967 - DNA, 97 bp, Homo sapiens
aaggcggcggacggctgcgtcgcccgaggcgaggaggagcgctggcggaatcattaaccaatggcaacaggaatccaaggataaagtgatttccctc

SEQ ID NO: 647968 - DNA, 109 bp, Homo sapiens
tttagaatctcaaacaagacaacttgagctgaaagcgaaaaactatgctgaccagactgtatgcaggagctattcttgaagtttgtggatgaaaattgggaaggttccc

SEQ ID NO: 647969 - DNA, 98 bp, Homo sapiens
aaagtttgagaacctctgcaagctcatgaaagaaatcttagataagaaggttgagaagcttccattgaagattgacatcattaaacatccaaatgaaa

SEQ ID NO: 647970 - DNA, 83 bp, Homo sapiens
cctctacttttcaagacaccaagtgagaggccaaccagctgagccattatctggatattgtggaagtaaacattgctcaccag

SEQ ID NO: 647971 - DNA, 75 bp, Homo sapiens
cgagtccctcggcgctctgagcccacaggcacccaggcatgtggaatatgctcatagtggcgatgtgcttggccc

SEQ ID NO: 647972 - DNA, 100 bp, Homo sapiens
atcatcatgtatagtcttgatgggaagaagtggcagacttatcgaggaaattccactggaaccttaatggcatcctctggtatcacgattccaaaacccc

SEQ ID NO: 647973 - DNA, 74 bp, Homo sapiens
atcctgctggagagcgacaagaagctcacccaggaacaagtatctgacaggtgccttgaatggcttctaaacaa

SEQ ID NO: 647974 - DNA, 117 bp, Homo sapiens
gacactttgttattggagaaacatgcagattatatcgcatcctatggctcaaagaaagatgattatgccttcccttcttcttggtggtgttcttgagtaagataatctggactggcc

SEQ ID NO: 647975 - DNA, 51 bp, Homo sapiens
gaggctgcggctaacagggcccagaactagatgaacggcgcaaaaggaggc

SEQ ID NO: 647976 - DNA, 50 bp, Homo sapiens
cacgagtcgggtcctgagaccaggggtatagaacaggctatgcttacagg

SEQ ID NO: 647977 - DNA, 75 bp, Homo sapiens
gcattatccaacggctgctggaagcggaccatgtgtcaacttatgccgcgtttgtacagacgcatagaccaacag

SEQ ID NO: 647978 - DNA, 76 bp, Homo sapiens
aggatggcttggccttgcacataaggagacgcaggtcagaatggaaatgggctgcagaccgggcagctattgtcag

SEQ ID NO: 647979 - DNA, 100 bp, Homo sapiens
cctcaggatcctttttaataatgctgtaaagaaacgtttgatgacagacagaaggattggctgccttttatcagagcctggagaaagttcttgtggaatt

SEQ ID NO: 647980 - DNA, 80 bp, Homo sapiens
gcagtccacccaccgccgccgcctcccaggtcatcgacatcctgagggggaaggccacccggcctgcttccacctcccag

SEQ ID NO: 647981 - DNA, 75 bp, Homo sapiens
ggctgttccaatcgctcctgtttgtcttctgctttggcccaggctttcatgagaaggacaagaagccatattgcc

SEQ ID NO: 647982 - DNA, 89 bp, Homo sapiens
ccacccagtcccacttcaaacattcgtctcggaaaccccgcctcttacagtcacgagaaaacatccagtacagacctttctgatatccc

SEQ ID NO: 647983 - DNA, 98 bp, Homo sapiens
aggaaatcatgtcaagcgaagccttgaaaaagctgccctgagacggtgtcccgccgaaaggcttatgcatctggatgtgacattgtaatactgggaag

SEQ ID NO: 647984 - DNA, 100 bp, Homo sapiens
gtagaggatgacttctctaatcagttacggtgacttaagagattaaaattaatttggttgctgttggttctgaacaaataatgagttcttttatttgagg

SEQ ID NO: 647985 - DNA, 74 bp, Homo sapiens
tgggccttcctcgacccaaaaggtatctcttccaaatgcacaatgaaggagttctcatcaacagcacaaggcaa

SEQ ID NO: 647986 - DNA, 111 bp, Homo sapiens
tggaaggccacgcctcctcccgcctgccccctcagccctgtggctgggggcagagctcaggtgtcagcttcctctggtgcaaccagcaagtcttccagtatgaatcccaca

SEQ ID NO: 647987 - DNA, 51 bp, Homo sapiens
ggacaagatcccgtccatgaatcagaaccttctgaggaaaggaggccatac

SEQ ID NO: 647988 - DNA, 83 bp, Homo sapiens
ttcctgattacctgccacccattgtgtcttctcaagaagtgcctccggagccagcgtggtggccatagacaacaagatcgaac

SEQ ID NO: 647989 - DNA, 73 bp, Homo sapiens
aatatactgctaaccccgctggttataatccttcaatatgtaccactgatgaaattatgaccaggtgggcccg

SEQ ID NO: 647990 - DNA, 82 bp, Homo sapiens
gtcacaagaaattgtatacaggacctggcttagctattcattgcatgcagggatttcagtcataatcggttgtctaactgga

SEQ ID NO: 647991 - DNA, 80 bp, Homo sapiens
ccatccaggccaccactgcggcgggctctggggagtgcatccgccccaacccttttccccctcgtctcctgtgagaattc

SEQ ID NO: 647992 - DNA, 82 bp, Homo sapiens
cccgcatcaccggagcgtcccagctgcgaggagatctgactgcagccatgagcagcaatgagtgcttcaagtgtggacgatc

SEQ ID NO: 647993 - DNA, 75 bp, Homo sapiens
cggccctgggaccaaagtggatatcaaacgggatgtggagacgctggtagcggggccaggaaggctccggacgga

SEQ ID NO: 647994 - DNA, 82 bp, Homo sapiens
ctgggcgcggattcgccgaggcaccgaggcactcagaggaggcaagtgaaccggagcaaacgacttccgatccagtctgcgc

SEQ ID NO: 647995 - DNA, 149 bp, Homo sapiens
ggaaacagagcccagattttctcgacagatctcaactagtggtgaactttcctttgatagtttagccagtactccaaagattcaggtttactcacgtcatccagcagagaatggaaagtcaaatttcctgaattgctatgtgtctgggt

SEQ ID NO: 647996 - DNA, 75 bp, Homo sapiens
cgactcggtcctgtttcgacagcgaacatgtcgcggcctgtcagttaattggccttggtcctcacagctccaaaa

SEQ ID NO: 647997 - DNA, 52 bp, Homo sapiens
aggagaagtcgagcaacagtgacagcacaatgacagatttcctcaaggacca

SEQ ID NO: 647998 - DNA, 100 bp, Homo sapiens
gggttctgctgcttcgaaagctggagcttgtacctccaggcccatacatccttccaaagctcccaactaccctacagagggaaaccaccgagtagaattc

SEQ ID NO: 647999 - DNA, 101 bp, Homo sapiens
gcgcttcgatcctgagaccaattccgacggttatatcaatcagtgaaaattctatattcctttggcatttttgtgacatattcaattcagttctatgttcc

SEQ ID NO: 648000 - DNA, 138 bp, Homo sapiens
tacagaggagcaggatttgcacccctcgctgggcttgctttggcaacagagtgcctgacccaggtcagaccagcatctcagacatgtcgaaaaagatgttttgatccctaaaataatgagagaaaaggccaaagagag

SEQ ID NO: 648001 - DNA, 75 bp, Homo sapiens
cttcgatgagctctcggattccttatgcagagtggccgacttggtattatacctgaagaaccttagccctcgggt

SEQ ID NO: 648002 - DNA, 100 bp, Homo sapiens
atgctaccctgcacagtgaagttcagtttccctgctcagcttctagcaacaattttgcaaggcagatccagcgccgcactggatgtgtgtgagaagtggg

SEQ ID NO: 648003 - DNA, 98 bp, Homo sapiens
tataccaaaaatgtagaagttctccatcttgggaaagtctggggccgcctgctgaaccttagctgctccacagtgcctacatttgtgctctcaatcac

SEQ ID NO: 648004 - DNA, 76 bp, Homo sapiens
gcccagcctctcgaatgggcacacctgtgtaggaaagatgaatgggagggctgattttcgagagccgaatgcagag

SEQ ID NO: 648005 - DNA, 75 bp, Homo sapiens
ggctgcgctggtggagccgctggggctggagcgggggcggcgactggcggcgcgatggacctgaccgggctcctg

SEQ ID NO: 648006 - DNA, 90 bp, Homo sapiens
tatcaaagtgacacctcttcaacaaatgcttgcctcatgtactggagctatactgacatcagtaatagtgtgacagtgacagtgaccagg

SEQ ID NO: 648007 - DNA, 110 bp, Homo sapiens
tttcatcatactgctatactgaaacctgaatcaggctgtcttgataacatcaagatgaagatgggtttcaagaactaaatgagaatggaaatgctaaggatgagaatatt

SEQ ID NO: 648008 - DNA, 85 bp, Homo sapiens
cagagactgctgagcccgtccgtccgccgccaccacccactccggacacaggtgctttgcaagatatcaccttgtcacagcagac

SEQ ID NO: 648009 - DNA, 96 bp, Homo sapiens
gatgagcagtttgttcctgatttccattcagaaaaccatgtccttgaacagtggcctcactcccagtgatccaggtgagttctgtgtggatgtggg

SEQ ID NO: 648010 - DNA, 100 bp, Homo sapiens
cgaggccccacaatgggcgctggattggatgtttggcaactgattccgactggatggtctttgagagctggatgcaccattggctcctgtttgaaatgag

SEQ ID NO: 648011 - DNA, 75 bp, Homo sapiens
tccaggcctacgaggaggtgcgcgagaagtacaaagatctcatcctggccttgggtgtcctggcccaaagccggc

SEQ ID NO: 648012 - DNA, 101 bp, Homo sapiens
atggcaggctccctgcctccctgcgtggtggactgtggcaccgggaactctaatgaatcattgattgaccagcactattttaccagttggaatgaatgatc

SEQ ID NO: 648013 - DNA, 100 bp, Homo sapiens
ctctctgagtcaaatccagtgttaattggccttggtcctcacagctccaaaaagaaacaggatctcgataagctctatgagctgaagtccaaagctcggc

SEQ ID NO: 648014 - DNA, 50 bp, Homo sapiens
cttggtcccagagtcatcatgaagttaaagccttccatctgaagtatgat

SEQ ID NO: 648015 - DNA, 74 bp, Homo sapiens
ggtgtgcaaacccgagagaactggatcactgtgtccactactatgatcttcgtaacactaaacagccaatcatg

SEQ ID NO: 648016 - DNA, 75 bp, Homo sapiens
aaaaaacatgtcggatgaagagaaacaggaaactaaatatattttgccaactttggaaaaagaattattcttggc

SEQ ID NO: 648017 - DNA, 83 bp, Homo sapiens
ccagcttgatcttctagactccatggcaccgggctgagcggtcgagcaaaagatgtgataataccagcaaagccacctgtcag

SEQ ID NO: 648018 - DNA, 100 bp, Homo sapiens
attctcgctgtgacagagacaacaccgagtatgagaaagacaaagcatggaggacacaagaatgggaggaaaggcggactctcaggaacttcattcttca

SEQ ID NO: 648019 - DNA, 90 bp, Homo sapiens
gtttgtcattaaacccatcgacaagaaggcacctatcagacactcctctaatttacaaagcagtgcccagctggtttgtgcgagtggaga

SEQ ID NO: 648020 - DNA, 97 bp, Homo sapiens
aggagatttttcgggacattaccaaaccactcattttagggagaagaagagtttgatatgcctcagcctccacatggccatgtcttacatcgtcaca

SEQ ID NO: 648021 - DNA, 100 bp, Homo sapiens
agatgctgactgggacagcgttctgtcatctcagcaaagaatgatcagaagatttcttggttatacatgctcgtgatgatttaacagctgttcaaggtac

SEQ ID NO: 648022 - DNA, 95 bp, Homo sapiens
aggagtcatcggacgccagaatctgatggcagatgatcagggctgtattgaagagcagggggttgaggattcagcaaatgaagattcagtggatg

SEQ ID NO: 648023 - DNA, 75 bp, Homo sapiens
caaagagatcatagccgagtatgaaagtcaagtcaaaggccgtcaccgatgggttgtatatactactgaaatgaa

SEQ ID NO: 648024 - DNA, 80 bp, Homo sapiens
attttttaactgaagatagtgcctttcagccctaccaggcagcacacttctgcttttgttccttcatcaggacgaattta

SEQ ID NO: 648025 - DNA, 82 bp, Homo sapiens
gtggccggcgcctcctcggagtccttggggacggagcagcgcgtcgtggggcgagcggcagctgagcgggctttggacacca

SEQ ID NO: 648026 - DNA, 90 bp, Homo sapiens
ccctgtgttcgcctgctcaacgccactcatcagattggctgccagtggatgtctcagatgcagcttgcacaccatggccctcatggctta

SEQ ID NO: 648027 - DNA, 101 bp, Homo sapiens
agatgtgcgtaccaatgaagtggtggccatcaagaaaatgtcttatagtggaaagcagtctactgaggatgtaatccctgttcattactacttaatacctc

SEQ ID NO: 648028 - DNA, 75 bp, Homo sapiens
ctacacatcttgaaagagaagctcttcctgtgaggcaaatcctcccccagtactggtcaacacagatagcttgga

SEQ ID NO: 648029 - DNA, 98 bp, Homo sapiens
catggagcaagtctgtcagcaccatctttctaacaacgtgaacgatcaagagagagggaccatagtagatcacgagaaaagagtcgacgtcataaatc

SEQ ID NO: 648030 - DNA, 98 bp, Homo sapiens
caagagtgcaaaaaaattatagttctaactggagctggggacagtcattttgtttactcattcagccctgttgcaggtcccaataaactcttcataag

SEQ ID NO: 648031 - DNA, 75 bp, Homo sapiens
gaggaccttccacgtggattctccagacgagaggccaagtcctgtatctgccatgtctgtggcgtccacctcaac

SEQ ID NO: 648032 - DNA, 100 bp, Homo sapiens
gaaaaccggcatctgcaaaattcggccgcccaaggcagaagctcctcctggggtagagacagatcttattgatgttggattcacagatgatgtgaagaaa

SEQ ID NO: 648033 - DNA, 75 bp, Homo sapiens
gggggcatgaagagccccccagaccagcccgtcaagcacctcttcaccacaggaattacatgaacgacagccttc

SEQ ID NO: 648034 - DNA, 85 bp, Homo sapiens
agttatggagtcctatgaagttgaaatagatgggaagacatatcaagggatcactgagattctgatgaacagaccttctgcccgc

SEQ ID NO: 648035 - DNA, 82 bp, Homo sapiens
gcgcggcagcggagggacggcagtctcgcgcggttgagaacttgttgcttagtaaccaagggaccattaagctgtgtgactt

SEQ ID NO: 648036 - DNA, 75 bp, Homo sapiens
tatgtgggcgccgtccctcaccgcggcatcaagcagccaacacaagccatcagccccatgctcagctcccagcag

SEQ ID NO: 648037 - DNA, 100 bp, Homo sapiens
cagagttggagccaattaaaccagtccctggtacgtgagcccctttcccggcgccggcagctgctccgggagaactttgtggagacagagggcgagtttg

SEQ ID NO: 648038 - DNA, 74 bp, Homo sapiens
ctacagaaccgtcccaaaatatggcaaagaaacctattctgaggtgccctcatcagccacgagaagctgctgct

SEQ ID NO: 648039 - DNA, 100 bp, Homo sapiens
tgcagagtgaagagaaaatagcaaacgatccagacggcagggagtgcatcaaaggtgtgaacacagccaaaatgaagtttaatccctttgtgacttccga

SEQ ID NO: 648040 - DNA, 100 bp, Homo sapiens
tttttcttcaatgggcagcatatgaaagtggattatggccctggtacctgacagtgtaaagaaggagctcctacaaagaataagaacattccttgctcag

SEQ ID NO: 648041 - DNA, 100 bp, Homo sapiens
gttggcccagcaaatgcaactagccaatgccatgatgcctggtgccccattacaacccgtgccagatgaattatactttgaggaaggtgatattatctac

SEQ ID NO: 648042 - DNA, 90 bp, Homo sapiens
tgataaagtcttggttgctgccaacaaggttaatggaaaaggttccttatggtgtgttgatccggaatataaacccaatcttatccaggc

SEQ ID NO: 648043 - DNA, 52 bp, Homo sapiens
atccttatcagcacagcacttattccagtgatcagcctttgagcctttccca

SEQ ID NO: 648044 - DNA, 75 bp, Homo sapiens
acactgaggccctggcccagagggacaaggtgataaaagaaaatgtggctgaagttacccgaagttcagcttgca

SEQ ID NO: 648045 - DNA, 75 bp, Homo sapiens
atggtgttggaaagcactatggtgtggcataatcaccagcaacacccgggacaataatacgggggccacctaccc

SEQ ID NO: 648046 - DNA, 90 bp, Homo sapiens
ttgaaattagagacgcagacagattaagcctgatcaagatgacaacctcccaaaagcaccgagacttcgtggcagagcccatgggggaga

SEQ ID NO: 648047 - DNA, 103 bp, Homo sapiens
ctgctgccccggcgcaccgactggaccgggaaggagcatcccaggacctaccagaatctgaagaaaaagtcagcactttttgaagtgtctgaggttataccag

SEQ ID NO: 648048 - DNA, 98 bp, Homo sapiens
gcctcccaagtcaagtttgaagacctcataaaagatttgagaaaactgaagaggcaactagaaggctgacaaacgggctcatcataatgcactggaac

SEQ ID NO: 648049 - DNA, 116 bp, Homo sapiens
caatatctgtcttcggtggactccttcggcagtccacccaccgccgccgcctcccagtgtcaacagcatctccaccctggagcctgtgagccggtgccagcgcctgagtgagctgt

SEQ ID NO: 648050 - DNA, 75 bp, Homo sapiens
cctgctattccttgggctgcctttcctgcagttgtcgccgtgatcctgaaggcgctgacctacgacgagaagcgg

SEQ ID NO: 648051 - DNA, 98 bp, Homo sapiens
aacaaggttctggacaagatgaagtctttctgccaggaaattcgaaatgagtcccatgactatcctcatagagtggccaagtttccagaaaacagaaa

SEQ ID NO: 648052 - DNA, 75 bp, Homo sapiens
aaaagactgatatctgtgaagatgagatgagtgatgtgtctgcaggaggagccactgtttttcctgaagttggag

SEQ ID NO: 648053 - DNA, 83 bp, Homo sapiens
aggaggccaaggacggcgttctggatctcaaagcggtgacagcacaaaacctgagaccgtagagcctatcccttctcatctgg

SEQ ID NO: 648054 - DNA, 100 bp, Homo sapiens
cttcctacacaggaccaaagggagatcacactactggggtaggccctgaagaggaaagtgaggatgactctcatctcgaaggcagggatcctgatatttg

SEQ ID NO: 648055 - DNA, 100 bp, Homo sapiens
ttattaatgagatcctggtcatgagggaaaacaagaacccaaacattgtgaattacttggacagtccctcagccccagtgaacgtcaccgtcaggcacct

SEQ ID NO: 648056 - DNA, 100 bp, Homo sapiens
ccggggcagggctcgggagagcggaagtcacctgcaccggtgcccgtgacgtacgagctgcccacactgtataggacggaggactattttcctgtggacg

SEQ ID NO: 648057 - DNA, 120 bp, Homo sapiens
gatgtcacaaaggaaaacgaggaaagtcccaggatgactactgtgtcaaggtgattctggagggcctctgtcgtgtcacattgatggtgtatggatccagacaggagtagtaagctgggg

SEQ ID NO: 648058 - DNA, 73 bp, Homo sapiens
gcagactacggacctgtctgggtctcagccgccaaagaccccgtccggcaaagaattggacaacttaaaatga

SEQ ID NO: 648059 - DNA, 82 bp, Homo sapiens
ctgcagcgggagctggacggcgagcgcgagcggcgcgagaaactgacctgatctccagcttcctgctcatcaccatgctctt

SEQ ID NO: 648060 - DNA, 157 bp, Homo sapiens
tgaacccgcctggggatgaggcctggtcttgtggaactgaacttagctcgacggggctgaccgctctggcccagggtggactttagccggttgagaaggatcaagcaggcatttggagcacaggtgtctagaaacttttaaggggccggttcaagaa

SEQ ID NO: 648061 - DNA, 75 bp, Homo sapiens
ctccagtgggctctggcgcctatggctctgtgtgacagagtctcactcccatcgcccagacttgagtgtagtgat

SEQ ID NO: 648062 - DNA, 75 bp, Homo sapiens
cccaggcccgccgcctccctgccaagctgcagtacggagacagcaaggacaaccctctcaagtactggctttata

SEQ ID NO: 648063 - DNA, 100 bp, Homo sapiens
ccgggggcgtctttcagagcattacgggctcagaaacacttatgggattttctaagcacggagggttcacttccttaacatcacctgaagggactctaag

SEQ ID NO: 648064 - DNA, 101 bp, Homo sapiens
gagtcttgtaattcctccgtggggcgaaagtacccatgggctggacttagatcagatcaattagatcttttatgacctagtgcggcaaattaacagaaaaa

SEQ ID NO: 648065 - DNA, 83 bp, Homo sapiens
gacaagaagaaatccattctcatgaagcagctgcagcagcagcagcacagcgacaagacgggggatatgagactttctactcg

SEQ ID NO: 648066 - DNA, 73 bp, Homo sapiens
cggagaggagcagcccccggagacagcggcacagaggtgcttctgccaggcgggcgctaatattgacacctgc

SEQ ID NO: 648067 - DNA, 100 bp, Homo sapiens
gttgtgtactatcaagtcaaacagccacgctggatggaaacagtcaagagaacgtttgtctgcctgatgagagccacttgggttaagaaactacctgtga

SEQ ID NO: 648068 - DNA, 74 bp, Homo sapiens
ctggagcctcagttggaagcagccgatccagcctgcggagcctgtggggcagttggtcctgagaaaagggtgcc

SEQ ID NO: 648069 - DNA, 75 bp, Homo sapiens
gccacgcctggaacaaggaccgcacccgtgctgtatttctctgaatccctcgtgcccacggcaaggaaggctttg

SEQ ID NO: 648070 - DNA, 75 bp, Homo sapiens
catgaatatgaactggctcagtttatcacttcctgaaagacctgaagaatcaaccttgtcctatgttaggcagct

SEQ ID NO: 648071 - DNA, 88 bp, Homo sapiens
tgtgttgcgggggccggacttcaagtgatgaatcaccaacaccagcagcagatggcccccagtaccctgagccagcagaaccacccca

SEQ ID NO: 648072 - DNA, 83 bp, Homo sapiens
actggaggctggcggacaggcgacagcgacctgcggcagaaatctctgcccctgttagaaaatcaaatcaaggagactcacca

SEQ ID NO: 648073 - DNA, 75 bp, Homo sapiens
cgcagactccgggctatccgggagctcaataggaaaatgtttcaacgtgcgcaagagttgcggtggcgggcagag

SEQ ID NO: 648074 - DNA, 75 bp, Homo sapiens
ccagatgcagcacctgcagtaccagcagtttttaatacagcattattcagtggaagagagggaagaccaaattga

SEQ ID NO: 648075 - DNA, 100 bp, Homo sapiens
ggtcctcatggattcctggtgccagcccggctttgacatcaaggacgttgccaggaagcgccgcggagccatcaacagcaagcagctcacctacctggag

SEQ ID NO: 648076 - DNA, 100 bp, Homo sapiens
caaaaatgcaaaagactgctaaagtgagagtgaccaggcttgttctggatccctatttattaaagcatgaatacaactttgtctgagagccccttcaagt

SEQ ID NO: 648077 - DNA, 90 bp, Homo sapiens
tttccaacacagatgtccaagctgccaaatgttccataagtttctgcttccatcagcaatgtaaggaagtgcccaattcctcctaccccc

SEQ ID NO: 648078 - DNA, 98 bp, Homo sapiens
gtccgattcccgagacctggacggctcctacgaccagctcacgggtttggtgcacctcgatttggaggaagtagggcagggcccttatctggaaagaa

SEQ ID NO: 648079 - DNA, 80 bp, Homo sapiens
tggctgactgagaagatgcatgccagagacttcacagtttctgctctggaatccatcaacagcatcaagtccagactaag

SEQ ID NO: 648080 - DNA, 90 bp, Homo sapiens
ccaagcattaggccaccaggaagacccccatctgcaagcaagcctagccttccagggagaaagagggtcatgatcagagttcgactcttg

SEQ ID NO: 648081 - DNA, 139 bp, Homo sapiens
tccaagatggtttgcgggggcttcgcgtgttccaagaactgcctgtgcgccctcaacctgctttacaccgaacgaatgatcacacactttgaaaggtccaaaatggagtaaggaatgggaagatttgcagttaaagatg

SEQ ID NO: 648082 - DNA, 76 bp, Homo sapiens
ggtttgagaagacctcttccatctaaatgacagccaccaaaatgaatggctgtgaagaatattgtgaagaaaaagt

SEQ ID NO: 648083 - DNA, 82 bp, Homo sapiens
gattccaacaacaattccgatggcaaagccgttgccaagagatgccctgtatccaagcccaatatgggacaccagcaccgag

SEQ ID NO: 648084 - DNA, 90 bp, Homo sapiens
aaatgaagccactgattagcaatttaaagatcctctccaagagcattacagcattgtgaagaactgattcagcagtacaaccgtgctgag

SEQ ID NO: 648085 - DNA, 100 bp, Homo sapiens
gggggggatggcgtctccccgactccacctgagggactggctcctgggaattctaccttgtcaaagattcctgctttacagggtagcacaaagtccccaa

SEQ ID NO: 648086 - DNA, 74 bp, Homo sapiens
tcagctccacattgagagcaaaatctacaagatgatgcagggaggaggggtgcactatgtatttgatacgacga

SEQ ID NO: 648087 - DNA, 76 bp, Homo sapiens
atctcgtgctcaccggtttctcccacatcgacctgcttctccaaacaggctggtgtacagggagcaacaccggagc

SEQ ID NO: 648088 - DNA, 100 bp, Homo sapiens
taatccccctcagggctatggacagcagaaccagtacaacagcagcagtggtggtggaggtggaggtggaggtggagaaaaggtgtgagcggtactgggc

SEQ ID NO: 648089 - DNA, 99 bp, Homo sapiens
cataagaatgtcctggcagcattcagccagtattttagatcccagatgcagtgactggttactacctgaaccgtgctggctttgaggcctcagacccac

SEQ ID NO: 648090 - DNA, 90 bp, Homo sapiens
gttttacaggtctgcaaaagatgattttacatccattattgggaaatgtcaaggtttatttccaaagttgaagaagtcttgaatgactgg

SEQ ID NO: 648091 - DNA, 98 bp, Homo sapiens
ccgcccgcttcctcctgcttcccatcgaagctctagaaatgaatgtttccatctcttcagagatgaaccaggtggcaaactgtggtcatatatcagta

SEQ ID NO: 648092 - DNA, 100 bp, Homo sapiens
ggcggccggccgacccttcctgtcgctgacggcgactgcgggaggccagaggatgtggatccctcagttggtcgattcaggaacatggtgcaaactgcag

SEQ ID NO: 648093 - DNA, 75 bp, Homo sapiens
gaaagagaaaaagcagaaagtagatgaagatgagattcagaagatgcagagaacaaggagactggcatggagagt

SEQ ID NO: 648094 - DNA, 73 bp, Homo sapiens
ggggcgggccggggtcaccacgcctgccccagggaaccgcacaggtgcagcagtaccgcgtcgccatgactgc

SEQ ID NO: 648095 - DNA, 87 bp, Homo sapiens
attatcagatcaaccaccaaagtgggaaacattgaaatcaagccctggcttgaaaaacagtccaattgatgaaagtgaggtgcaaac

SEQ ID NO: 648096 - DNA, 75 bp, Homo sapiens
gaacatccacagaatagacctgaagacaaaaatccagaagtacaagcagtctgccccagtggacaggaaagctaa

SEQ ID NO: 648097 - DNA, 73 bp, Homo sapiens
gacggaattgatgctgtcctcattgcaacgtggttgggtagctacagcaagctgggtagcaggcagatccaaa

SEQ ID NO: 648098 - DNA, 75 bp, Homo sapiens
cagcctgcggagcctgtggggcagcactggaagatcaattcttttatcatccatactttagaggcagcaaaatcg

SEQ ID NO: 648099 - DNA, 83 bp, Homo sapiens
gaggacaccgtgacttcccggacgctgggaaatggccagcatccttcagaaaaagcatccccgaggaggaagacgaatcgtta

SEQ ID NO: 648100 - DNA, 90 bp, Homo sapiens
agagccgttagtcatgccggtgtggtggcggcggcggagactgcgggcccgtagctgggctctgcgagccaccagaaaggcagattgtgg

SEQ ID NO: 648101 - DNA, 83 bp, Homo sapiens
ggaacctggacgccggaagccgggaaatggtacatgtgaagattttttggcagcttagcgtggaaaccattgatcaccctgct

SEQ ID NO: 648102 - DNA, 75 bp, Homo sapiens
tttcaccgcggccatcctgcaggcacagttgccgattacagatgcctgtgaggagccaccaacatttgaagctat

SEQ ID NO: 648103 - DNA, 88 bp, Homo sapiens
gggccaactttgatgaagaaaatgcgtttaagtttttgaaactgaagtaggcctacacagtaggaactcatgtcatttcttgtaagta

SEQ ID NO: 648104 - DNA, 119 bp, Homo sapiens
caggtttttgaagctactccaccagtgtaaaatctccagcttcctggtcacaaatgcacaatttcctgcggaaatcagcattttgcagctttctcctgtcttgaagaagtagaacggtg

SEQ ID NO: 648105 - DNA, 75 bp, Homo sapiens
tgggcgttcatgatcctggccagcctgctcatcgcctactgcaatctgggcggaccccggcaaatacgccctgat

SEQ ID NO: 648106 - DNA, 100 bp, Homo sapiens
cgttgaaggacaccagctgcggaatttgcggctttggcaggttttgcacactagggaccaagaagccctcggggacactgctgagaaaagactgccgaag

SEQ ID NO: 648107 - DNA, 75 bp, Homo sapiens
gaaaacttaaaatgaaggaattaaggatccagcgcagcttgttgaaatggatgcagtcagaactgaatgttgaag

SEQ ID NO: 648108 - DNA, 73 bp, Homo sapiens
gcagccccagctcaacgtgtgcaactgggcggtcatgatcccagatgcagtgactggttactacctgaaccgt

SEQ ID NO: 648109 - DNA, 100 bp, Homo sapiens
ccgcgccccgcgggacccggacggcgacgacgggggaatgtggcgctggatccggcagcagctggaatgaagccaagagtgatgaaagaagctgtatcta

SEQ ID NO: 648110 - DNA, 75 bp, Homo sapiens
gaggaagctgcctgcccggtgtctgcccctgaggaggaccgctcaggaagtggcagcgaagaagactgagccccg

SEQ ID NO: 648111 - DNA, 100 bp, Homo sapiens
gtgtccacgtgatcattggggggcacgattctccctctcctagaggcggtgccttagctggaccaattattgtggagccacatgtcacagcagtatgggg

SEQ ID NO: 648112 - DNA, 82 bp, Homo sapiens
ggcggccgggccctcgagacggggacgcactctcgagtggaccctgaggagctcttcaccaagctcgaccgcattggcaagg

SEQ ID NO: 648113 - DNA, 100 bp, Homo sapiens
aagatgaagtgcttaattcaaggtcacacaatgtcggggatggacctccagatttccttactggcaccatgactcctgtgaggatgcagcactccctggc

SEQ ID NO: 648114 - DNA, 100 bp, Homo sapiens
ctgcacctcaggagggaattcagcctcagtgatgtccatgagaacaccttccaccatgaccacctcagcaagttcccacttaaataaaggcatcaagcag

SEQ ID NO: 648115 - DNA, 49 bp, Homo sapiens
gcatgttctgcatggttaccaaaaagcttcactggcctgagcaagaact

SEQ ID NO: 648116 - DNA, 96 bp, Homo sapiens
ttccccaagcactctcaggaacctggcaacaggttgcacagagcattgaggatcaccatcaggaagtgattggtttctgcagagagaatggtttcc

SEQ ID NO: 648117 - DNA, 83 bp, Homo sapiens
cccactccggagtcgccgctgccgcggggacatggtcctctgcgttcagggatgagttttgatcatcctgagaaaaatgggcc

SEQ ID NO: 648118 - DNA, 100 bp, Homo sapiens
tggagcttttccggaaaaaggtgctgtgactatctaaggttcaaaccttgtactactcagctgatcacaagctgcttgatgggaacctactagatggaca

SEQ ID NO: 648119 - DNA, 75 bp, Homo sapiens
ctgatcaccgcactcgggccatgcaagatcccttctgtgacggctcccacttcttccaacgcactggcctatctc

SEQ ID NO: 648120 - DNA, 100 bp, Homo sapiens
agatggatgaaaggagacgtcagaacgtggcttatgagtacctttgtcatttggaagaagcgaagaggttaaatggaaaccacccttgggaactggatgc

SEQ ID NO: 648121 - DNA, 89 bp, Homo sapiens
gaaggcgcgagtgaggaaaggaggtactgtaggccatagtgtatgaaggccaagacaagaacccagaaatgtgccgagtcttgctcaca

SEQ ID NO: 648122 - DNA, 82 bp, Homo sapiens
gttaggtgacaataagcagacagaagagccaagcagctatggaggaaaatcaggaatggaagttggatacactttgtgactt

SEQ ID NO: 648123 - DNA, 100 bp, Homo sapiens
gtcaccaccttggtggagaacaagaaagctcagctggtggtgattgcacacgacgtggatcccatcgaggacttcctgggaaaatcagatccatttctgg

SEQ ID NO: 648124 - DNA, 75 bp, Homo sapiens
gccaggggaccaagctggagatcaaacttggattggatgctgctggcaagacaaccattctgtataaactgaagt

SEQ ID NO: 648125 - DNA, 96 bp, Homo sapiens
agagtcagctacagttatatttgcaggagatacaaatctaagggatcgagagttatggctgcagcttcgattgccaatattgtaaaaagttctctt

SEQ ID NO: 648126 - DNA, 82 bp, Homo sapiens
ggggctgaccgctctggcccagggtgaccctggagaagaaggaagaagaagtaacttcagaggaggatgaggagaaagaaga

SEQ ID NO: 648127 - DNA, 100 bp, Homo sapiens
cgcagaatagagaaagtcctagagtggctgtttatttcccaagagcagccaaaaatcaccaagtcctggactcattctgatgaaggaaagagcgtccctg

SEQ ID NO: 648128 - DNA, 75 bp, Homo sapiens
agatggaaactactatgcatgtaaacaaatgaagcagcgctttgaaagataagcatggattcctggttcattctt

SEQ ID NO: 648129 - DNA, 101 bp, Homo sapiens
aaatccatgcctgaaccaaggaacctgctttgatgacataagtggctacacttgccactgtgtgctgccatacacaggtgacgagctcatcttcttggacc

SEQ ID NO: 648130 - DNA, 100 bp, Homo sapiens
gataatgattatgacggaattaagaaattactgcagcagcagccaaaggattacctgatatggattcttcgatccttatacaccacaatggaggtatccc

SEQ ID NO: 648131 - DNA, 83 bp, Homo sapiens
cagtcactccagctccacgggcagacacctgcacagagggggatatgagactttctactcggaatatcctgagtgttgcgtgg

SEQ ID NO: 648132 - DNA, 76 bp, Homo sapiens
cctagctgttctcaaggcggattaattagcccaagaaacattatattcatgaactatactgaagagtctgcttctg

SEQ ID NO: 648133 - DNA, 100 bp, Homo sapiens
tcgttccaaaaatattactatccttgagctccccgatgaagtctctggacctctgactgacactgtgcctgcccaggtccctgtatgcactgccacagtg

SEQ ID NO: 648134 - DNA, 83 bp, Homo sapiens
gtctccgcgttcccagcccgggtccccgcgttcacagccccagcgcaggtgtttcccattaaacactaccaggacaaaatcag

SEQ ID NO: 648135 - DNA, 100 bp, Homo sapiens
ccagctgcagtccagctccagctaccagatcatggccgaacggcgtaatgcccgctgcttggtaaatggactctccctggaccactctaaacttgtggat

SEQ ID NO: 648136 - DNA, 83 bp, Homo sapiens
gcagctggtctaccctgctggaggcgcccaggacaggctgcaaatccctcactttaaggaggttatcatcatggctaccaact

SEQ ID NO: 648137 - DNA, 74 bp, Homo sapiens
cgccgtgagcgcccggagcggtccgcgagccaccgaggcccaggttcatgatcaagagggcccaaggacggaag

SEQ ID NO: 648138 - DNA, 100 bp, Homo sapiens
ctggggaagagtgtgactgtggtactccaaaggtacttaaaacagatgctgaggaacttgtctccagaagctattgggatacactgagacgtaacacaag

SEQ ID NO: 648139 - DNA, 100 bp, Homo sapiens
tgggattcgtgtctggctctggaattgctactgctgcctctgtcactcctggtgaccagcattcaaggttgcataccctgtcctgagggcgcggcacgga

SEQ ID NO: 648140 - DNA, 100 bp, Homo sapiens
cctgaagttccctcacattagccagtgtgaagacctccgaaggaccatagctccattttcagtccggcagcacacattactctgcgtacaaaacgattga

SEQ ID NO: 648141 - DNA, 90 bp, Homo sapiens
cggcgccaggccacccggccgtcagcagcatgcagggaacagtggagacaactggattccactcaaaaggagcaatactgggatctcatg

SEQ ID NO: 648142 - DNA, 96 bp, Homo sapiens
ggcgcctgcggacctaactagctccaggttaggccgagctttgcgggaaagcagcggtagtccaggggatcctgctcatctcagctgtgccagcac

SEQ ID NO: 648143 - DNA, 90 bp, Homo sapiens
ctggcagacccgtagctaagacgccaggatttcctggaagcagagaaatggtgcatggaggactgcaacagaggagtgggggactgaaga

SEQ ID NO: 648144 - DNA, 90 bp, Homo sapiens
gccatccagactgaggaagacccggaaacttaggggccacgtgagccacggccacggccgcatagcttttggaaaagaagaagagagtcc

SEQ ID NO: 648145 - DNA, 74 bp, Homo sapiens
gacgtaattcactcgtttcccaatcgcagccgcttctgtactatactggcaattgctggagaagattttgcaat

SEQ ID NO: 648146 - DNA, 100 bp, Homo sapiens
tcagggactgtgttcagacctacatccgtgagtggctaatcgtgaaccggaaggatgacctttcatcacttggaatatgatcagagaagcagaatttgcc

SEQ ID NO: 648147 - DNA, 82 bp, Homo sapiens
ctcatctgtcattcaaaggaaaaaagtagctgtcattggtggtggcttgcactgccagtgaaagatgtagaagataaacctg

SEQ ID NO: 648148 - DNA, 82 bp, Homo sapiens
gaaaagcgagcgatcgagcgagcgcgcgcgcgaaaactccgggcaggtgtggaaacaggaagagaactagaactggaagtaa

SEQ ID NO: 648149 - DNA, 82 bp, Homo sapiens
cagcagatggcggatgccctgcagtacctgcagaaggtctctggagacatcttcagcaggagacagatcagttggaggaaga

SEQ ID NO: 648150 - DNA, 75 bp, Homo sapiens
ctgggaaacccggggctaatgttgacaacaggctcgagactaagaaaaatggctttgtcagcccaacagataccc

SEQ ID NO: 648151 - DNA, 100 bp, Homo sapiens
agtatattggagaatcgcaaggatatgatatcatggaaccagcagcaaagaagtgctatctggaaagagagggtcctaaaaaggtggggacgctgtggcg

SEQ ID NO: 648152 - DNA, 98 bp, Homo sapiens
aggctcccctgagatgagcagcagcgcagaggaggtgcccctctcttactacaccaacttcaggtacgaactatggctcgagatttatacgatgacca

SEQ ID NO: 648153 - DNA, 90 bp, Homo sapiens
gttcagttggcaaaccagatatatgacttggtacaccagaggatcgcttcctggcagaatttgggagctgtttattgcagcactgttgtg

SEQ ID NO: 648154 - DNA, 75 bp, Homo sapiens
acccggtactgtgcactattctttcccaggaaccattggataaggataaaggagcccagtttcctccaattgcag

SEQ ID NO: 648155 - DNA, 100 bp, Homo sapiens
ctttggaatagcagtgttccagtgtgtgaacgtggaataacactcccatggatgaagcactgcactttggacaccatgatgtatttaaaattctccaaga

SEQ ID NO: 648156 - DNA, 75 bp, Homo sapiens
cgcaggtgcaggtgtctcttctcgccctggcggggaagttctgggaggtgatcagtgatgaacatggcatcgacc

SEQ ID NO: 648157 - DNA, 75 bp, Homo sapiens
gttgatgatttagttgattctctgaagacagcacccaagaaaacctcatttggctcgctgaaggatgaagaccgg

SEQ ID NO: 648158 - DNA, 82 bp, Homo sapiens
ccgtgccctcccgctcggccccgccagcagcactgtggaggccgtcctcggttaatttggagtggcccctggagtcagtttc

SEQ ID NO: 648159 - DNA, 82 bp, Homo sapiens
cgggaggaaggaacgaggcaaggagctaaagcagcgtgcgttcagccctgggaaagaagcttccggttctgaggtcctggag

SEQ ID NO: 648160 - DNA, 75 bp, Homo sapiens
cagtcctcgtcagcactgactttcagctatggaatcgccttcgttcagaaaaacctggtctatggcacaactaaa

SEQ ID NO: 648161 - DNA, 96 bp, Homo sapiens
gcggccgcgaggcgagcggcgatgatgcctgaaaacttcatgcctcctgttcccatcacatcaccaatcatgaacccgttgggtgacccccagtca

SEQ ID NO: 648162 - DNA, 154 bp, Homo sapiens
ccgggctgcgtggggctctgcgcgcagctccacctctgcaggttcatggtctacggcgcctgcaagttcctgagagccggattcacacgggaggcagctcaggactgcgaggtgctggggcagcgcatccccgcaggcgctgtgctagagatgg

SEQ ID NO: 648163 - DNA, 75 bp, Homo sapiens
tgcagccactcgagacatcacttctgttcgtgcagtagacattgttgcaatcatgatcggcaatctgaaaggcac

SEQ ID NO: 648164 - DNA, 97 bp, Homo sapiens
ttctgattagagaactgcaggaggtgaaaattgggttcaagactttgagagttttgacctgcctgaagagcaccagattgcgcacctccccttgagt

SEQ ID NO: 648165 - DNA, 75 bp, Homo sapiens
agcctcagttggaagcagccgatccagcctgcggagcctgtggggcaggtctctaaggacatctccatgcggctg

SEQ ID NO: 648166 - DNA, 100 bp, Homo sapiens
accccttctgctctaaaactagaacatccatgatagcagtcttctgtaaatcgaacttttcaagaattctctgaaggaaccaagtaggatattcttacat

SEQ ID NO: 648167 - DNA, 101 bp, Homo sapiens
ctgccgtgaatcattcctgcagatgaaaaagtgtgacttggcagctgttcactgagacttttttgacggagagggacaaacaatccaagtggagtggaatt

SEQ ID NO: 648168 - DNA, 98 bp, Homo sapiens
ccagcgtgagcgacgcagaagacagtgtctgtgcttgtggtcggtaacttttgctgctgttgttctgctgctgtctgccattccattcgccatctatc

SEQ ID NO: 648169 - DNA, 86 bp, Homo sapiens
gttggaataactggactcttttacactcaactaattggcatcatcacagaagacaactgttagttttgtggcttactgctgctcca

SEQ ID NO: 648170 - DNA, 98 bp, Homo sapiens
gcagagccgtgcatggggctgctccccaggacctgagcaggaacctggagttttcaggggaaggaggagtttgagaagacccagaaggagctgctgga

SEQ ID NO: 648171 - DNA, 100 bp, Homo sapiens
aaaaaagaagaaaacattaaggatttaccaagaatgaatcagcttcctgcagatttcacaaaactgcatcttactgacagtctccacccacaggtgaccc

SEQ ID NO: 648172 - DNA, 100 bp, Homo sapiens
attattgtcattgcaagcactattggcagctgcagagccagatgatccacaggatgctgtagtagcaaatcagagtgttgcggagataggaacatgggag

SEQ ID NO: 648173 - DNA, 100 bp, Homo sapiens
aagcaccagtcttcaccgcggaaagcatgttgtggctgttccaatcgctcctgtttgtcttctgctttggcccagtggactaaagaggatggacatagaa

SEQ ID NO: 648174 - DNA, 101 bp, Homo sapiens
actacatccaaggcatcaacctcgtccaggtggacgacatccttggagaaggcagcgacgacagcgacagcgagaagaggaggcctgaggagcaggaggag

SEQ ID NO: 648175 - DNA, 100 bp, Homo sapiens
cgagagaggcaccgggatcgtgaccgagaccgtgaccgagagcgtgaccgagagcgcgaatatcgtcatcgttagaaggattttgtgaaaatggaaaatt

SEQ ID NO: 648176 - DNA, 90 bp, Homo sapiens
attttgatgaacaatattgaacgctatcttaagaatgaagtgtctatgttgaaaaatgaggtggcccagctgaaacagttgttgttaaca

SEQ ID NO: 648177 - DNA, 83 bp, Homo sapiens
aagaaatctgccaaggatgcattgctgttgtggtgccagatgaagacagctgggtaccccaatctgaagtcagtaaatgaact

SEQ ID NO: 648178 - DNA, 83 bp, Homo sapiens
atcgtgccggcttcgcgcgcgaacccggctttcgcatttgggaccctgcaggggcagctgcaatgactctccgcacggtatta

SEQ ID NO: 648179 - DNA, 100 bp, Homo sapiens
gaaaggagagcccgtcattagcgtgaaaaccacaagcaggtccaaagagagagaatatttcactgctacatggagtactcccgactgcgtggtgaggccg

SEQ ID NO: 648180 - DNA, 82 bp, Homo sapiens
gagcctgagcgcggcggcggcccacgcgcagcgacagggagaggatattgactgggtacagacagagaagcacgtgtttgag

SEQ ID NO: 648181 - DNA, 50 bp, Homo sapiens
tgcaaagctgtacaagagatcatgcagccgatatttaaataaggcttttc

SEQ ID NO: 648182 - DNA, 82 bp, Homo sapiens
tagagagccagcaatgcctccatgaacaatctcacccaattactctgctcagacatagggcctgattacattccaacagagg

SEQ ID NO: 648183 - DNA, 100 bp, Homo sapiens
gctgccgctgctgccgccgccgcctcgggtcgtggagccaggagcgacgtcaccgccatggcaggcatcaaaggtgaatgttggatgtgtacccaaaaag

SEQ ID NO: 648184 - DNA, 96 bp, Homo sapiens
gtttgccaatgttggagccgtctgcaaagtgtccccggcaagaaggcccagggccccggccagtgcccagccccgctgggagacccggccagcacc

SEQ ID NO: 648185 - DNA, 97 bp, Homo sapiens
ccagtccccagtgagggtgtacaaatacccctttgaattaattatggctattggcatggtagcttggaaaatgacctttaaaagtcctgaatatcca

SEQ ID NO: 648186 - DNA, 100 bp, Homo sapiens
tgagttcatgcaggctgtgacagacaagatgacgctgtcagtatagaaagtggtacaaacactgaacgccctgatacacctacaaacacgccaaatgcac

SEQ ID NO: 648187 - DNA, 111 bp, Homo sapiens
ctcgcgtcgcgcccgggaggaaggaacgaggcaaggagctaaagcagcgtgcgttcagccctgggatgatgataattccgaagaaggcttccacactattcattcaggaag

SEQ ID NO: 648188 - DNA, 100 bp, Homo sapiens
ccctaaagtaggaggaaaaatgaccatgtccaagcatttgatgaatacagaaatatcagccaaaaggacattgtggacagcataaaaggagaattatctg

SEQ ID NO: 648189 - DNA, 82 bp, Homo sapiens
ccgctgccccggctgcctcctccctgaggtttgatttggccaactgtaacttaaatgatgagcatgtcaacaaaatgaactc

SEQ ID NO: 648190 - DNA, 98 bp, Homo sapiens
tggagaagtggtggcggcgggcggcgggcggcaaaggagcagccatgagggccgggcccagtcaccgaccgagatacaactcgtcaacgaatcaaatt

SEQ ID NO: 648191 - DNA, 100 bp, Homo sapiens
ctggatcaagaggatgcgctcctgggctcctaccctgtagatgacggctgccgcatccacagcctttgtggcatgtgcctgcccaggccaggctctcagc

SEQ ID NO: 648192 - DNA, 104 bp, Homo sapiens
ggcccttgttcccccaaatgtctgactctgactctcggactgagaaacgcaaggattttttatcaagcagaaatgcatcgaacaacgagaatcaagatcactga

SEQ ID NO: 648193 - DNA, 75 bp, Homo sapiens
gttgagatggcaatcattgaagataaggacctatttgacagaaagaatttactttcaggttttcttacctaaagg

SEQ ID NO: 648194 - DNA, 97 bp, Homo sapiens
agagctccagcctgagccggctcgaggatctgtctggctccattgatgacctccccacgggaacggaagcaactttgagctcagcagtcagtgcatc

SEQ ID NO: 648195 - DNA, 98 bp, Homo sapiens
ggctgaggcacaccagcaggagtgctgccagaaatttgaacaactttccgaatctgcaaaagaaggtgcaaacggaggttcttcagaagaggcagcag

SEQ ID NO: 648196 - DNA, 74 bp, Homo sapiens
tcggcccgccgagatggcgctcgaccccgcagagtgatggtgatgattttaattacatcattgcatttttcctt

SEQ ID NO: 648197 - DNA, 82 bp, Homo sapiens
ttcgccagcccgtgccgcgagcgcggcctgcaggagttctccaaggagaagtacatcctggactcatcgccagagaaactcc

SEQ ID NO: 648198 - DNA, 75 bp, Homo sapiens
cacgttctcacctcgcgggatggcagctgctgatttgtcccatgatgaagattatggaagagattcgggccctcc

SEQ ID NO: 648199 - DNA, 83 bp, Homo sapiens
ctgccggcagctccaaccatgggaggccgcgtctttctcgcacgagtacacgagacaggattgagaaaggagagattcaaatt

SEQ ID NO: 648200 - DNA, 100 bp, Homo sapiens
atcaaactgccctacttcaacaccatgaaaccgaagaagcaatatcgaaggcgtctacgagaagaattctctttatcccatgagctgcgttccaaggtgg

SEQ ID NO: 648201 - DNA, 117 bp, Homo sapiens
agggctcctccggcgccgccgagctgcgcccgctgccttcacaccccggacatccgcgccacacagtatcctgagctccagctggaccctaaattggatcctcttcctgctgagagt

SEQ ID NO: 648202 - DNA, 100 bp, Homo sapiens
tgtttgtccagcgactccggggcctgatgaatgacatcggcttctgcttcagtttacccaacctcagcaaacatcgtttgctttggagaggaacttaagg

SEQ ID NO: 648203 - DNA, 74 bp, Homo sapiens
caagacagccatcggggactacctgggggagagggaagacgacatgctagacatggcccccctcctccaggaga

SEQ ID NO: 648204 - DNA, 100 bp, Homo sapiens
gaaaccaggtctcagagtacatttccacaacattcctggtctgtagatgttgactggccacctgctctggatgactagctttcaaatttggagacaaaga

SEQ ID NO: 648205 - DNA, 100 bp, Homo sapiens
ttcggagtgcttatgccaagaggaacagcagtgtaaatgactcagtggaatcaactatgaaattataatcatagatgatggaagcccagatggaacaagg

SEQ ID NO: 648206 - DNA, 101 bp, Homo sapiens
ggaacatccggaggctgggaaatggtgagtgaagatggcagagaggacgtgaccagcactcacccttgtccacctgcccagtggcaccgccatgcagaagc

SEQ ID NO: 648207 - DNA, 100 bp, Homo sapiens
catttcaacagccagggagaaagcctggatgctcaaggaactttatattgctgttggaatatctggagccatccaacatttagctgggatgaaagacagc

SEQ ID NO: 648208 - DNA, 75 bp, Homo sapiens
ctcgacaacatgtcacccgcgctccaagacctgtcgcaacccggcacagtaaccttggtgcacgaccgaaagggc

SEQ ID NO: 648209 - DNA, 75 bp, Homo sapiens
ccaaagagcagcaccagaagctgtgggaagagaagagaaggtgttcttagatcagaagatgccattgtattaggt

SEQ ID NO: 648210 - DNA, 80 bp, Homo sapiens
ggccgcaagctgctgaccggcgtgtggaacactggtggtttgcagatcactgaggatgttttagaagaatgtatgtctct

SEQ ID NO: 648211 - DNA, 74 bp, Homo sapiens
gtgcgaaacagctatataaagacaaagaatttggctccatggtcttggaggtgttcaaagctgaaacaggagag

SEQ ID NO: 648212 - DNA, 98 bp, Homo sapiens
cccagtgcgacctcctatagtcaaacagcttatacttcctggaaattcagggggctcgagttggtagaatagatgcttttgttcagagcttggacaaa

SEQ ID NO: 648213 - DNA, 100 bp, Homo sapiens
gggagaaagactttgacttggacatgactgaagaggaggtgcagatggcactttccaaagtggatgcctccggggagtgttgtacatcagtacacagaag

SEQ ID NO: 648214 - DNA, 95 bp, Homo sapiens
ctgaagctgaccttcgattcatccttctcacctaacactggggacttgaagttggacggaggaagacaatcaactggtgcagtgagtttgaaaga

SEQ ID NO: 648215 - DNA, 100 bp, Homo sapiens
aggagcctgccccgccctggggacgaagagctgcagctcctcctgtgcggattgatatcagtaaatgccattatttagtggatttggacaccatgagaga

SEQ ID NO: 648216 - DNA, 75 bp, Homo sapiens
tgcaccataagaatgagttttgtgaaagggtggggagcagaataccggcaagagtacagcactgcatctgctctg

SEQ ID NO: 648217 - DNA, 51 bp, Homo sapiens
accctggaccagcagaaacctagagtgtccggttccagttgttggcaaagg

SEQ ID NO: 648218 - DNA, 90 bp, Homo sapiens
attgaaacttcaaccaggattgtcttttcttaacctgggaagtggaaccggatatttaagtacaatggttttgattcccaccatggccat

SEQ ID NO: 648219 - DNA, 75 bp, Homo sapiens
ggccaattctgacgccctcaaggtcgccaaggaggtggacccccagggtactggtgtggcatactcggacagaga

SEQ ID NO: 648220 - DNA, 75 bp, Homo sapiens
gaagggaggaaatagtggcaggtgacagtctgcatgtgcagttttcaggttctgagatgcagtaaaatcgctggt

SEQ ID NO: 648221 - DNA, 75 bp, Homo sapiens
atttcttgataaagtcttggttgctgccaacaaggttcatacgttttatgaagctgtggggtacatgattggtgc

SEQ ID NO: 648222 - DNA, 100 bp, Homo sapiens
tgtgtaaccaatagtactcttgccgctatcatacgccagctgagcagtctgaatatttacagaaagccttctgtgctctagtcgccttgaaaacatccac

SEQ ID NO: 648223 - DNA, 100 bp, Homo sapiens
tgcctggctccgtgtccgacccctggaagctgatgctgctggacgccactttccggggtgcacagcaagtgggaaaaagaaatagtggtttcagacagtg

SEQ ID NO: 648224 - DNA, 100 bp, Homo sapiens
tgcaccgaggtccgtgtggccaacgagctcaacgccaggcgccgctcctttacagggcgagctggagcggcagctgctgcaggccaaccccatcctggag

SEQ ID NO: 648225 - DNA, 82 bp, Homo sapiens
tcagagagggaagagattcagccagcacactcctcgcgagcaagtgcccctctcagctgaggaggaaccgagagcggcgctg

SEQ ID NO: 648226 - DNA, 100 bp, Homo sapiens
cgaacttataaagttctgccgggaagcaagaggcaaagagaatcggttgaatgcaagtgcggccccatcgacctcctgttcgtgctggacagctcagaga

SEQ ID NO: 648227 - DNA, 82 bp, Homo sapiens
atttcaaccataaagacatcttaattgggcacgaaagagatgcctataagaaaatcttagaaaccacaatgactccaactgg

SEQ ID NO: 648228 - DNA, 90 bp, Homo sapiens
ctgaaagctctccacctccagggacaggatatggagcaacaagcttttcctccgcaaccatgtctgacaaacccgatatggctgagatcg

SEQ ID NO: 648229 - DNA, 90 bp, Homo sapiens
taaaacagtgcagatcattgctttttttgcccacctagcttgtaacgaaggagctgctgctcaagaggtcatcaaaataatcaccaaaca

SEQ ID NO: 648230 - DNA, 100 bp, Homo sapiens
tgagaagttcaagctctacctgaccatcatcctgctcctgggtgccgtggcatgtcgatttgtccttcactacagaaatcttcccaaggctgcagacacc

SEQ ID NO: 648231 - DNA, 76 bp, Homo sapiens
cgaggtcagccccaaactaccggcgtctactagaaaaatctcagagggtagaagccatcattgcatctatgcaggc

SEQ ID NO: 648232 - DNA, 75 bp, Homo sapiens
ccaggttctctgcagatgcagtaccagcagagcatgcagtgaatgatgaacccacaacagccactgatcccgaag

SEQ ID NO: 648233 - DNA, 100 bp, Homo sapiens
ggcggcgccgctcatccccctctcccagcaggattgtggataatatgcctgtaacgtggtgttacgatgttgaagatggtcagaggttctgtaatcctgg

SEQ ID NO: 648234 - DNA, 76 bp, Homo sapiens
ggcagcacccccagccgcagcccccgctgtgggtaattccagaattgattggccataccattgtcactgtattact

SEQ ID NO: 648235 - DNA, 80 bp, Homo sapiens
aagagattccttgcagagacagctcaacacggcacttccacagccagaagatcagctgccatgttacttgactcacacca

SEQ ID NO: 648236 - DNA, 90 bp, Homo sapiens
cccatggtttccagtgcagcgcggagtgggcgatgccagcgtgccaggaaataactacgtgtttgccagattactacaagtggactcagt

SEQ ID NO: 648237 - DNA, 75 bp, Homo sapiens
gatcctgatgaagttcgagcactaatatttaagaaagaagatgttaactttcagcttaaagcttttcaagccagg

SEQ ID NO: 648238 - DNA, 100 bp, Homo sapiens
ctggagtcctgcccagtgccctaaaccccaaggcttaatgccagaccgggagttggaggtgtccgatctcgagttgggatccagcaaggccttctcagcc

SEQ ID NO: 648239 - DNA, 83 bp, Homo sapiens
gcagcgtggatgagcctcggggacactgtgccgaatgaaacaatgcagatcttcgtgaagactctgactggtaagaccatcac

SEQ ID NO: 648240 - DNA, 95 bp, Homo sapiens
ggtcagtccgccgctcaccccgcggccgcaccttcccgccttctcagcagcctcccgcgacgatgcccctcaacgttagcttcaccaacaggaac

SEQ ID NO: 648241 - DNA, 82 bp, Homo sapiens
tgggaatcgtagtcttcctaggagtttgaaaatgcctcgtgtaaaagcagctcaagctggaagacagagctctgcaaagaga

SEQ ID NO: 648242 - DNA, 82 bp, Homo sapiens
tttggtagcctttgcatacaagaatgtgaaatttgttctcaagcacaattcgtgaccagctgctccagacccccgctcctgg

SEQ ID NO: 648243 - DNA, 100 bp, Homo sapiens
gttatcagatgagttagaatccaaaccagagggaacagatgctgcttgtgttgctcagagtcacggaatctgtactgaagatgccatcacaagcttttct

SEQ ID NO: 648244 - DNA, 75 bp, Homo sapiens
aggacgcgaacctctgctcacgcgtgttcttctgcttctaagtgccagatgatggaggagcgtgccaacctgatg

SEQ ID NO: 648245 - DNA, 100 bp, Homo sapiens
gaagatgcctagcacagaccttctgatgttggtttgatgaacttgtgaaaaaattcaaagtcgaatatcatgctggtggctctacccagaattcaattaa

SEQ ID NO: 648246 - DNA, 50 bp, Homo sapiens
aaggccttcagcctggagataagcctgatgaaaacaaaggcgatatgcat

SEQ ID NO: 648247 - DNA, 74 bp, Homo sapiens
tacctgggagaatccaccgccatccgccaccatgggaaagcaggcaggatgggagagtcgccgatagaaccacc

SEQ ID NO: 648248 - DNA, 90 bp, Homo sapiens
gttagtgctcaagagcctcattatctaccacccgagatgccccaaggcaagatgatgatgaatgaagtcctggcagcttcctgtgtccca

SEQ ID NO: 648249 - DNA, 97 bp, Homo sapiens
cagctgaacggggtcatgcccatcgccatgagcatcaaggcaggcacggtggatgaggactcgtcaggctccgaatgcgctggctccctccctccga

SEQ ID NO: 648250 - DNA, 97 bp, Homo sapiens
aagcataaagacttgttgggtaaaagatacattgaactcttcaggagcacagcagctgaagttcagcaggtcatcatcagatttgaaatatttaaag

SEQ ID NO: 648251 - DNA, 75 bp, Homo sapiens
gcttcgtttttgctaacagggggaaaaaatggctgtgctgcaggcgctggggtccgtggtggcagtggaggagcg

SEQ ID NO: 648252 - DNA, 100 bp, Homo sapiens
gcgccctggcgggtccggaccaagggcaagtgtccagagaatggctgggatgaaagtacacttgaactctttttacatgaacttgcaatcatggacagca

SEQ ID NO: 648253 - DNA, 75 bp, Homo sapiens
tctgattgcccccctccaaacacgagcatcctaatgtcctatgatcacgtggaactcacattcaatgacatgaag

SEQ ID NO: 648254 - DNA, 88 bp, Homo sapiens
ggagcctggaggagctgctgctggacgccaaccagctccgcgagctgcccgaggatggttcctacctggctgagttcctgctggagaa

SEQ ID NO: 648255 - DNA, 80 bp, Homo sapiens
gcgcagtgcaggcagataccgtttgacaccaccaatatgcctcttcatgttcgacgcagtagtgacccagctctaattgg

SEQ ID NO: 648256 - DNA, 76 bp, Homo sapiens
gatccaggataacggaggctgggatctgtctggctccattgatgacctccccacgggaacggaagcaactttgagc

SEQ ID NO: 648257 - DNA, 75 bp, Homo sapiens
atctctataagggcactgttgatggtattttaaagatcaaaggaagaactatccgagtggatcatgtgtctaact

SEQ ID NO: 648258 - DNA, 82 bp, Homo sapiens
cagcccgccagcatgccccagtccaaaggtatggcctcacaagtcttggtctacccaccatatgtttatcaaactcagtcaa

SEQ ID NO: 648259 - DNA, 95 bp, Homo sapiens
tggtgaagcagaccatcgcgcaccagcagcagcagctcaccaacctgcagttttgctccagattactatgattggggacaacaaactaacagctt

SEQ ID NO: 648260 - DNA, 83 bp, Homo sapiens
cccaagtagaggagaggaagcggcagagggagcatcatcggctggttcgtgcgaagcttcaagtacttttacgggctccgctt

SEQ ID NO: 648261 - DNA, 50 bp, Homo sapiens
gctcagccgaggtcaccatccagggctgcagacaaggggcatgtttcttg

SEQ ID NO: 648262 - DNA, 90 bp, Homo sapiens
ccttctggactggaaatacctaggccgggtgcagggcctggtgagcacagtcagcgtcactcagcacttcctctcccctgagacctctgc

SEQ ID NO: 648263 - DNA, 98 bp, Homo sapiens
ctttactcagctgagtgtgccacacaggtagccctggacggcattcagtgttttggactggaaggatcaccagcacatatgcggccagtcagcagctg

SEQ ID NO: 648264 - DNA, 51 bp, Homo sapiens
aaaactcaatcgggcaacagaaggccagagatcctcagcaggagcctatgg

SEQ ID NO: 648265 - DNA, 90 bp, Homo sapiens
aaaaactacaatcataaagaaatccaacttaccttgtcagcctctaagaaatatgtctccaaagaacttgccaaagagattcgtgtcaaa

SEQ ID NO: 648266 - DNA, 98 bp, Homo sapiens
gaaactgaacttataatcgtcactggattactcgagttgccgcgtcgggctgggcgcgccgccgggtcccatggagctggaggggcagtggtggcgag

SEQ ID NO: 648267 - DNA, 75 bp, Homo sapiens
tctcaggctttcctacaactcatgcccagcagcagcaagcagatttgttcccgacaaggagttttctggttcaga

SEQ ID NO: 648268 - DNA, 100 bp, Homo sapiens
agtcctagctaaacttcgccaactccgctgcctttgccgccaccatgcccaaaacggtgaaaggtgtagcagtcactcggcctacacccacagcatcgac

SEQ ID NO: 648269 - DNA, 98 bp, Homo sapiens
cccgcgccgacgcggggcccatggccaggaccaccagccagctggaggatcccttttcccccagaaattactcaatgctgaaacctctcaaagtggta

SEQ ID NO: 648270 - DNA, 129 bp, Homo sapiens
gcaccttcgtcttcggctacctgctgccgctcctgctcatctgcttctgctatgccaaggtgctggctgccagctgctgcgccccccatgtagaaggtgcacctcctgggagcaggcacgtcttttggc

SEQ ID NO: 648271 - DNA, 100 bp, Homo sapiens
gacagacgccgcagccaggatggttgaggggaacgcccttttgcttgtgactggcagggctgcgacaagaagttcgcccgctccgacgagctggcccgcc

SEQ ID NO: 648272 - DNA, 82 bp, Homo sapiens
cggggatcctgaccgacagacagacggcgggcgctaacaccaccgacaaggagctagaggttctctccttgcacaacgtcac

SEQ ID NO: 648273 - DNA, 100 bp, Homo sapiens
caactctgtagaatgtttgcaaatgttaattaatgcagcttactgaaacaaatgcaggtatcaagtgcttggactccatgtgctgtttcccggaaggaga

SEQ ID NO: 648274 - DNA, 100 bp, Homo sapiens
cttgtccactgtccgccagacctgctgctgcttcaatgtccgcatcgcaaccaccgccctggccatctaccatgtgagttgcatgctgagaatttgaaaa

SEQ ID NO: 648275 - DNA, 100 bp, Homo sapiens
tccacaatctatgcaagatttgctgggtatgaataatgactttcctccaagagcacattgcctggtaagatggatcaaaatggtttcaatcccagaatac

SEQ ID NO: 648276 - DNA, 101 bp, Homo sapiens
atttgtccctggggcggcagcgcggacccgcccggagatgagatgagctgcttcagaaagagcaaaactattcagatgacgtcttggccaacatgattagt

SEQ ID NO: 648277 - DNA, 100 bp, Homo sapiens
cggagctgctggtttcattcgaggtttcgggccggacgggctctacgagtgcattctctgtgcctgctgtagcaccagctgccccagctactggtggaac

SEQ ID NO: 648278 - DNA, 90 bp, Homo sapiens
gctcatctgcctctgcgcgctgcagttggtgctgagtgtgacacctaatgatggctttgctaaagtccattatggcttcatcctgaaggc

SEQ ID NO: 648279 - DNA, 100 bp, Homo sapiens
ccggctgctcctcctccagtgccttctcgctgccgcgcgcccaagctcggcggacggcagtgccccaggttggtttgttggaccttgaactcaatcggct

SEQ ID NO: 648280 - DNA, 73 bp, Homo sapiens
cccaatgtagaagaggtgacacttcccaaaacagaccccaccaacaactgaacgctttggtcaggctgctaca

SEQ ID NO: 648281 - DNA, 140 bp, Homo sapiens
cttcatccgagacctggagcaggaagtcctctgcatcactgtgttcgagagggaccagttctcaccagatgatagactgggagctccatgaggtccgagacaacctgaagacgcccagctcagcagagactggctacggc

SEQ ID NO: 648282 - DNA, 76 bp, Homo sapiens
acctggtacatcgccgagttctagaaagcaattgagctgcgtctggcaaaaattgaccatactgcaattcacccac

SEQ ID NO: 648283 - DNA, 75 bp, Homo sapiens
ttcgcacttctccagttagttggagcccaggtggatgaaaatactaggaaaagtttatttaagttacgttctaca

SEQ ID NO: 648284 - DNA, 89 bp, Homo sapiens
gcgtggaccacatagacatttacgcggatgtcggcgaagagttcaaccagactctaaaatagagctcaagcttgagaagagagaaccac

SEQ ID NO: 648285 - DNA, 83 bp, Homo sapiens
atctggtgtataaatttatgaatttagccaaccatcatgcaatgtggaactctaggaagtatcagcaaacctggtatcatgaa

SEQ ID NO: 648286 - DNA, 75 bp, Homo sapiens
caaaaagtgattaagcagagaatggagaagaaggttgattccagctgcaagctttcttcctggtggcagatgaca

SEQ ID NO: 648287 - DNA, 74 bp, Homo sapiens
gctcttcgaagtggcctgggaggtggctaacaaggaaacctgctcctccaaagccagagcccaagcctaaaaag

SEQ ID NO: 648288 - DNA, 83 bp, Homo sapiens
attgaagcctgcacctgctgcattgctgttttcctggtggcaaagaaacacagcatgatgtttggaaatataattcttcgatc

SEQ ID NO: 648289 - DNA, 82 bp, Homo sapiens
gcgagggcaccatggaggtgaatgcagcattttgaaagcgaagcagaagccgtagaatcagcggcgagcctgttgaaagaac

SEQ ID NO: 648290 - DNA, 76 bp, Homo sapiens
gacgcaaaccaaggatctggggatcttcgcactatcccaaggttggaaagggcaaagaaattacaagaacagcgag

SEQ ID NO: 648291 - DNA, 100 bp, Homo sapiens
cgcggagcgcgcgtgtggtccttgcgccgctgacttctccactggttcctgggcaccgaaagggaaagcacaggttgcatgtagacactggaatggaggg

SEQ ID NO: 648292 - DNA, 95 bp, Homo sapiens
agaggggccactgctgggccctgaggctgcaccaagtggcgaaggagccggctccaagcgcccgggggctggagaaggccaggcagcagctgcag

SEQ ID NO: 648293 - DNA, 100 bp, Homo sapiens
gactcgtggggctgcagcaccgcgcgcagggaccatgtcggcggagaccgcgagcggccccacagaggaccaggtggaaatcctggagtacaacttcaac

SEQ ID NO: 648294 - DNA, 82 bp, Homo sapiens
caccctcacagtttgctctgctcttccaacaccagtggaagatgatcacatcccagctatatgttctcctttcagccaagac

SEQ ID NO: 648295 - DNA, 76 bp, Homo sapiens
accaagaagttcctgtagcaccttcacagtccaggcaagcgcaaatctgtccaaggctgcctggggagcattggag

SEQ ID NO: 648296 - DNA, 94 bp, Homo sapiens
tactggggccagggaaccctggtcaccgtctcctcagttccagggtctccctccactgctgtagtaacccgggtccggggcctcggtggtgctc

SEQ ID NO: 648297 - DNA, 95 bp, Homo sapiens
ttcctcaagatggagactttgactttaaatgaatactgcattgagggacggacttctggtcttcttcttcctaattgttccccttattgtctgtg

SEQ ID NO: 648298 - DNA, 95 bp, Homo sapiens
atactgaatgatctctacatctcagactactgtgtgtggattcagaaagtcaacttccctctgtgtgttgcagtcctgtggcattatgcatgccc

SEQ ID NO: 648299 - DNA, 74 bp, Homo sapiens
agaaatcgaaacagatacagagatgtaagcccataagctgaaacctatcaacactcttcaaaatgcaatggaat

SEQ ID NO: 648300 - DNA, 100 bp, Homo sapiens
ggaggacgtcgcccgcctcctgcaggtgcccagcagtgcgttcgctgacgtggagtggagccgccaccaaaatgcagattttcgtgaaaacccttacggg

SEQ ID NO: 648301 - DNA, 88 bp, Homo sapiens
gtgctcgtggtggaggctgctggcaatggcctacgtcgtcataccgggcttccttgccctgtccgggaaatcaacgaccgggagcaga

SEQ ID NO: 648302 - DNA, 75 bp, Homo sapiens
cggggcctccgcagcgacaacatggaggccgtgaagaccttcaatagcgagatacagttaagctaatgatctcga

SEQ ID NO: 648303 - DNA, 100 bp, Homo sapiens
agggcttagcagagagcctagcacctactgagcgctcagtaaagactgtgccctgtccacggtgcctcctgcatgtcctgctgccctgagctgtcccgag

SEQ ID NO: 648304 - DNA, 133 bp, Homo sapiens
tttcataaccccaggatcctccagaaaatttgcggcgcgctgagggaaaaccttgctggatccttcaaaccaaaaatgtggtggaagaaagaaaaccgtgtctttcagcagcatgccatcggaaaagaaaatt

SEQ ID NO: 648305 - DNA, 98 bp, Homo sapiens
ccgcctggctccccatactagtcgccggtttttgtggaaactctggataagtgtttcgaaaatgtgtgtgaattggatttgatcttccatatggataa

SEQ ID NO: 648306 - DNA, 100 bp, Homo sapiens
ccccacccactgtggtctgttgtaccccactgctggggtggtggttccaatgagacagggcacaccaaactccatctgaaacttcagtgctctcaagaag

SEQ ID NO: 648307 - DNA, 90 bp, Homo sapiens
gcggcggcggcgctcggcgatggtaggcgtccctggagcggccgccttccagcctgggagtgtccactcgccttccaccagcatggcaac

SEQ ID NO: 648308 - DNA, 100 bp, Homo sapiens
cgcttctcatcctggacatctgtgatccccccaggggtgcccgatgcccaccccagggaaggagacctgccagtgttccaggaccagatccagcagccca

SEQ ID NO: 648309 - DNA, 50 bp, Homo sapiens
tgacttcttgcatgcgagggaccattgcagtgtgacatgttggcgagcca

SEQ ID NO: 648310 - DNA, 100 bp, Homo sapiens
cgccggttcgcgtctctctgctgcggcgcggggaccgctgtgctctcgattggtgtctccgctgtgcctggctccgtatttccggttactgagactttgt

SEQ ID NO: 648311 - DNA, 100 bp, Homo sapiens
gacgcgatgaggaccttggcttgcctgctgctcctcggctgcggatacctcgcccatgttctggccgagggcaccgcgtccgtgctgcagcgccggtccc

SEQ ID NO: 648312 - DNA, 83 bp, Homo sapiens
ctgaacggcttgaggctccagtcaaaaaccattaagaaatcctaagtaatgcactgaagagaggagagatcattgcaaagcag

SEQ ID NO: 648313 - DNA, 100 bp, Homo sapiens
cggagatgccccgcggcagccgcgctcggggctctaaggtgcagctattgctggagtttaccgagcagcagggaaggaaatgataccatttgaagccctc

SEQ ID NO: 648314 - DNA, 98 bp, Homo sapiens
tgcagcccatccgcgacctcaccaagaactgggaggtggacgtggcggcccagctgggcgagtatctggaggagcttctcagatgaccaagatggtgc

SEQ ID NO: 648315 - DNA, 98 bp, Homo sapiens
caaactcctatgaagttgaaaccgggaagtttgctctaacatttccagagaagattgggctaatggatactacagacaacagagaaaacttgttgaag

SEQ ID NO: 648316 - DNA, 99 bp, Homo sapiens
gtggacagatctgagagatactgagggaagacactgatcaaggtggcagaagctgaaaagcaactgggagccgcggagagggattttatccacacggcc

SEQ ID NO: 648317 - DNA, 46 bp, Homo sapiens
caactattcgcagtccgagcgacagtaaggattgtatcctggagcc

SEQ ID NO: 648318 - DNA, 80 bp, Homo sapiens
ccaagttgtcgacgaccgacagggtggtgaaaggatttttagactctgaggagcagttggagctaatccacattatggaa

SEQ ID NO: 648319 - DNA, 98 bp, Homo sapiens
cttaacccagtttgaaacgtaactggttccctgaccaggtggaagcagggaaaggcctggagatgaggaagctggttctctcggggttcttggccagc

SEQ ID NO: 648320 - DNA, 75 bp, Homo sapiens
gtccaagtcaaacgcagaaggactgcctcactgagcaaccaagacaaacgtcactgctgcctccactcccaccca

SEQ ID NO: 648321 - DNA, 98 bp, Homo sapiens
ctgctgtgggcgctgctggcgctctggctgtgctgcgcgacccccgcgcatggctcccagccaacctctgataaaccctcccagcggccatcagagag

SEQ ID NO: 648322 - DNA, 101 bp, Homo sapiens
cctcttcaaccaggagccgagatttctgttgctctgaagcactgcaggagtttgtgaccaagaacttcaagagtcaagacagaaggaagccaagggagcag

SEQ ID NO: 648323 - DNA, 97 bp, Homo sapiens
tgcagcacgtggacgctgactcggaagtgcagctgagctgactgctgcccactttggaggaggcggtgggctccttcacaagaagactcaacaggaa

SEQ ID NO: 648324 - DNA, 100 bp, Homo sapiens
cctttggttaaaggagctgccgtcagagagcagagctgacatctgataaagacatgtaccttgacaacagctccattgaagaagcttcaggagtgtatcc

SEQ ID NO: 648325 - DNA, 83 bp, Homo sapiens
ctgatccatggacccgatgaacatagacacaggaaaatggcaaatgcacgacagcggcctcctgaacatcaccaaggtatcct

SEQ ID NO: 648326 - DNA, 101 bp, Homo sapiens
cgcagcagctggggaggagccaaagcctcggcgctcacctaagccgcagggagatacacccaactgggagtgaataaccctataccttccaatttgaaatc

SEQ ID NO: 648327 - DNA, 75 bp, Homo sapiens
cagaagccatgcccctcaggctggaacttgccctgtctcctcgcagatgagattcagaatggacagtttagaaga

SEQ ID NO: 648328 - DNA, 100 bp, Homo sapiens
atacctgatgatgtacctctgccagcaggttgggagatggcaaagacatcttctggtcagagatacttcttaaagggagagaatgtagaagatgccttcc

SEQ ID NO: 648329 - DNA, 50 bp, Homo sapiens
cgaggaggtgcgcgagaagtacaaagaaaattgtacaagctggagataag

SEQ ID NO: 648330 - DNA, 74 bp, Homo sapiens
ggaacgggcaatgaggcagacacaggccaaagaactgccaactctgaaagataatgatttcattaatgagggcc

SEQ ID NO: 648331 - DNA, 83 bp, Homo sapiens
caagtctcccaacaacagagacagaaccctgaaggaggcctgtacctggctgtgaccctgttggcaggcatcactggagttgt

SEQ ID NO: 648332 - DNA, 83 bp, Homo sapiens
cggagcctggcgcagcctccctctattaccaggtgccagaaccctgtggagcatcatgaactgggaagagtagctgagcccca

SEQ ID NO: 648333 - DNA, 97 bp, Homo sapiens
tgtggaaatgatcaggaacatccatactaatgaagaggaccaacgcattgaaggtggagaacgccggggccatcggcccgtcccggttcgggctcaa

SEQ ID NO: 648334 - DNA, 100 bp, Homo sapiens
agagatggaacccacctttccccagggtacactggctttctcaaaggactattgcaagtctttgcacacatagctggagccatctctcctactgctgctg

SEQ ID NO: 648335 - DNA, 51 bp, Homo sapiens
ggcgaggaactccagaatacaagtgaccaagcagagagactcggagatggg

SEQ ID NO: 648336 - DNA, 50 bp, Homo sapiens
ggaaacccacaggcacacccaagttgcacgttttcaaaaaatacctaatg

SEQ ID NO: 648337 - DNA, 98 bp, Homo sapiens
gaaagaagtttgattccagtcatgatagaaatgaaccatttgtctttagtcttggcaaaggatgttgagaaagaactggagatgcagatcagcatgag

SEQ ID NO: 648338 - DNA, 102 bp, Homo sapiens
cctagactgtgacaacgaccacgtctccaaaatgagtcgcatcttcaacccccatctatttggtgcttccagatgtgagttatcaggtggaatccagtgagg

SEQ ID NO: 648339 - DNA, 100 bp, Homo sapiens
caactgccagtctaaaaattgatataggtgcctcaatcaggaaccctgaagctgtcccacctacaggagggaacctacaccttccagctgaccgtgacgg

SEQ ID NO: 648340 - DNA, 100 bp, Homo sapiens
cgtgttccgtgtctctggattcaagtcccaggagtcctgaccagagagcagctatcatggtgaacttacttcagattgtgcgggaccactgggttcatgt

SEQ ID NO: 648341 - DNA, 82 bp, Homo sapiens
tggaaccggatatttaagtacaatggtgggcttaattttaggtcctcaaaggcttcccttccctactggttacaaaaggcag

SEQ ID NO: 648342 - DNA, 100 bp, Homo sapiens
tcttatagtcgagtaatcctgcctgtgtctgtagatgaggttggcaacattgtacaagtcacccagccagaaggaatgcacagtactgtttcaaatcaaa

SEQ ID NO: 648343 - DNA, 75 bp, Homo sapiens
cagcaggccgcggccgccaaggccatcgggctcctgggaccacattatcattctcttcactcgagagatgaggac

SEQ ID NO: 648344 - DNA, 75 bp, Homo sapiens
agaggaccactagttggaccccatcctcgtgctggaggaacaggtctaacttcaaacttgtggctgttaattcaa

SEQ ID NO: 648345 - DNA, 118 bp, Homo sapiens
gacacgtacacagcaggactgagtgaagaagaacagctcgagagagcattacaagccagcctctgggaccgagagtacatccaagccattatgatgatggaggaatctgttcaacatg

SEQ ID NO: 648346 - DNA, 100 bp, Homo sapiens
gaaaaccgaagaagaggcccggactcatacagagattgaaatgttccttagaaaggagcagcaggcttttattgagatggagacaagagaagatgcaatg

SEQ ID NO: 648347 - DNA, 100 bp, Homo sapiens
atcttcacagcacagttcctgggaaggtggagccaccagcctctccttgagttgcatgctgagaatttgaaaaatgaagatgatgtagacactggactat

SEQ ID NO: 648348 - DNA, 82 bp, Homo sapiens
gcctcccaggtagctgggattacaggtgtgtccctggaatcctccaacctctgcatgccagacctgccccatctcctggcct

SEQ ID NO: 648349 - DNA, 100 bp, Homo sapiens
gaagatcaataaaaactgctggaggatcaagaagggcttcgtgcccaacatgcagacttgccataactactttattgaagaccttggattgccagtgtgg

SEQ ID NO: 648350 - DNA, 82 bp, Homo sapiens
cgaagagctgccgtcgctgcagagaccccgctatggctacactggccaaaagaagaccctagacaagaaagatggaagacga

SEQ ID NO: 648351 - DNA, 96 bp, Homo sapiens
aaacaccatccaagcagccaggcagtatcgggagcaggaaagccagtgttgtggaccctagcacagaggtggtcacttctttcatcgaaactcctt

SEQ ID NO: 648352 - DNA, 100 bp, Homo sapiens
ctcttgctggccaatgcctacatctacgttgtccgctgggcagcattgcagagattgacctgggtgtgccgccgcccgtgatgaagaccttcaaggagtt

SEQ ID NO: 648353 - DNA, 98 bp, Homo sapiens
aagccagaccatgctggccggggtgcagtaccccagctccatcaacctcacgctgcacctgggcttttgatattatgagagtgacacatggcagagaa

SEQ ID NO: 648354 - DNA, 100 bp, Homo sapiens
caagtcttccgttctgaccaacgaaaagatggttttggggaaggatcaccccgatgttgccaagcagttaaataacttggccttactgtgccagaaccag

SEQ ID NO: 648355 - DNA, 100 bp, Homo sapiens
ccgggctgtccccactccacaccgtggcagtgaagagctgctgaagtacatgcttcatagtccttgcgtctctctggcggcgactggcggcgcgatggac

SEQ ID NO: 648356 - DNA, 100 bp, Homo sapiens
gtgagaacctgtctgcagtcatgttgtataaccccggattttctccaaaggaacatccggtgcttgccctgccaggagccccagcccagttccccgtcct

SEQ ID NO: 648357 - DNA, 100 bp, Homo sapiens
cttgactgtccagctctttgcattcttaaacctactgcctgtagaagcagacattttagcaattactctcgtggctttggtggccggtacggggtggaga

SEQ ID NO: 648358 - DNA, 50 bp, Homo sapiens
gctggcgttaactgtgcggaggcagataaaaatgaatgccatttcccatc

SEQ ID NO: 648359 - DNA, 100 bp, Homo sapiens
cctggaccaccgggcgctggtctgctcccagccggagtacgagagggcctccaaagtggaccagtttgtgacgcgcttcctgctgcgggagacggtgagc

SEQ ID NO: 648360 - DNA, 100 bp, Homo sapiens
cggcggtcgacatgttccaggtcccggatagcgagggcggccgcgccggctccagcacagcgactcggactccgaccccgagtactccacgctgccgcca

SEQ ID NO: 648361 - DNA, 82 bp, Homo sapiens
ccctgtaccacactgaggagcgcggccagccctgctcgcagaattaccgcctcttctttagacctcagcagccatgtcgaag

SEQ ID NO: 648362 - DNA, 80 bp, Homo sapiens
aatttctcctgctctgcagcttctgttcaggttctttggcatggacacaagttcagtgggaggattagaattgactgatc

SEQ ID NO: 648363 - DNA, 75 bp, Homo sapiens
ctcattcctgtaatagctgtgggcgccaatgcttcggcattagagaaagagattggtccagaacagtttccggtc

SEQ ID NO: 648364 - DNA, 83 bp, Homo sapiens
cggcgctttcggcgcgggcccgggccccgagcgcccgaacaggaagctcttcgtgggcggtcttgactggagcacgacccaag

SEQ ID NO: 648365 - DNA, 100 bp, Homo sapiens
gttgcctgggtaccaccagagggaaagctggggcgattgaaggattctcattaagcaaactagggaatttcaaccttcaagacattgaaaaagatgttgt

SEQ ID NO: 648366 - DNA, 100 bp, Homo sapiens
cggcagtctgaagaggatgagttcagagtcaagcaacttgaagataacattcagagatgctgcacaacaaacatgtcatggtccgtgtgggaggaggctg

SEQ ID NO: 648367 - DNA, 75 bp, Homo sapiens
catcaaagccaggctgctttattgcaggtgctgatatcaaacccctgtaaaagagcccaacagtgaaaatgtaga

SEQ ID NO: 648368 - DNA, 83 bp, Homo sapiens
cgccgcatggaggccggctgaggagcgccgctgcctcgcctcgacttcccaagtaagaagcggaagaggagccgctggaacca

SEQ ID NO: 648369 - DNA, 82 bp, Homo sapiens
acgattttgacactttcccgaggcctaggtttccacgggctcccttgctcagcagtatgcgcaccctaacgctaccctgcac

SEQ ID NO: 648370 - DNA, 51 bp, Homo sapiens
gccgttgcatcggtgcagggcaaggtgctggagaatctggtaaaagcacca

SEQ ID NO: 648371 - DNA, 83 bp, Homo sapiens
gcggcttcctggcctgggcgctccggtggcggcggagcagcgtccgtctccaagagagtatgaagagagtgcgtctgtagggc

SEQ ID NO: 648372 - DNA, 108 bp, Homo sapiens
caagaccaccaaaaagttccaccgcgcgcgcctcgacctgctgctggagacctggatctcgcgccacaaggagatggccctgctgctcctgggggccgccgccctggc

SEQ ID NO: 648373 - DNA, 100 bp, Homo sapiens
gaataaacatgcaatgaacccaaaagggattagtccaaagagtgatattactgacactggcctggcacagagcaacaatttgcaggtccccagttcttca

SEQ ID NO: 648374 - DNA, 143 bp, Homo sapiens
caagaactaacacatcctggagctgcccggagttccgctcctgcgggcttagcaggaaagggtgcctaaggtgctggagaatctggtaaaagcaccattgtgaagcagatgaggatcctgcatgttaatgggtttaatggaga

SEQ ID NO: 648375 - DNA, 90 bp, Homo sapiens
cgaaaacatggtggccaaagtggatgaggtgaagtccacaatcaagttccaaatgaagaagcataagcttaaatcgtctcagaaggacaa

SEQ ID NO: 648376 - DNA, 76 bp, Homo sapiens
gtctctgattgaactttttgaatctttcaagagttttgaaggactttgcctcccgggccaaactggcagttcaaaa

SEQ ID NO: 648377 - DNA, 76 bp, Homo sapiens
gttcaaggaggccttccagctgtttgaccgaacaggtgtatcctgagtttgaagaccagagagcttgtttgccatc

SEQ ID NO: 648378 - DNA, 73 bp, Homo sapiens
aaaccaacatcaagtcggcttccatgcatccctaccagcgtctgcgctcctcagaccaccggcaggtgaacag

SEQ ID NO: 648379 - DNA, 100 bp, Homo sapiens
ccccgtactggcaggcatggagccaacaaggagaacctggagctcaacggcagcatcctgagtggtgttttggggaacgagtttagtatattaaaatcac

SEQ ID NO: 648380 - DNA, 50 bp, Homo sapiens
cgcgggctgcggggccgaaccccgggtgtgtagctgggacggtgctggtc

SEQ ID NO: 648381 - DNA, 100 bp, Homo sapiens
aaaggtcaactcgatccaatacagacccctactccagtgggtgcagttcagcaagatcctgctctgtcatcaaacagagaagcacatcaacacagagata

SEQ ID NO: 648382 - DNA, 90 bp, Homo sapiens
accatgggggctgtgctgggtgtcttctccctcgccagctggcctcttagcaatgcataccacgagttagcacaagtgtattcaaccaac

SEQ ID NO: 648383 - DNA, 100 bp, Homo sapiens
cagcaaagcgcccagcctgccgcctcgctgtccctgcggcttctggggctgcggaagccctgacccgggagttctcggtgctcaagatccggcccctcac

SEQ ID NO: 648384 - DNA, 100 bp, Homo sapiens
tttgaggatgcagatgttgatcactgaaaatgatttatgcaagtttaagttcatggctcagttccacgaaaagatctaccagatgctgaagaacttactc

SEQ ID NO: 648385 - DNA, 90 bp, Homo sapiens
gttgctgcagttaccggaacctttgccaggactagtacaggaccacgggtgctggacgtcattgctcctccttatacctctgacttcgtg

SEQ ID NO: 648386 - DNA, 96 bp, Homo sapiens
atttaaaactattcatgacagtaccaaacagagactgaagatccaaaaggtaattctggcacttggagactatatgggagccacttgtcatgcctg

SEQ ID NO: 648387 - DNA, 50 bp, Homo sapiens
cttcaagcaggggctgatttaaacatctgctcaaattaatgaccatgggg

SEQ ID NO: 648388 - DNA, 75 bp, Homo sapiens
gcaggatctccattaagtgctactgtgtactcactggcctacgcctgcttgaagttagtgaattactccttcttc

SEQ ID NO: 648389 - DNA, 100 bp, Homo sapiens
cagcgtccaccatcttcctcttgctgccagtggtagcgctcgtctggcggagctggctccgggaagcagtttgttcgctatataaacatgttgataaacg

SEQ ID NO: 648390 - DNA, 98 bp, Homo sapiens
tcaaatataggcattctgatgggaacttgtgtgttaaagtaacagatgatttagttaaaaaggagtgatatttgggtccccactgacggaggaaggca

SEQ ID NO: 648391 - DNA, 100 bp, Homo sapiens
gacctcgcccacgcccagcagcagcagcaacagcattaaagggcagtatttaaagtcagttggcaagcagtggaataagatttttgtaaagaaaccttgt

SEQ ID NO: 648392 - DNA, 75 bp, Homo sapiens
ggctcctgctcaagatctcagagaaggaggaggtgaccacgcgcgaggggaacgcccttttgcttgtgactggca

SEQ ID NO: 648393 - DNA, 50 bp, Homo sapiens
ctacgccatccagctgtgcatagtaacagtgtatcatgtatgccactgat

SEQ ID NO: 648394 - DNA, 98 bp, Homo sapiens
tcggtgccggctcaggagccgggccacacacagcaccttgacttgcatgagcagggagttccagtgcgaggacggggaggcctgcattgtgctctcgg

SEQ ID NO: 648395 - DNA, 82 bp, Homo sapiens
gtgcagtcgccccgcgccccgcgcgacccttcgggccatcgaagacggcaatttggaggaaatggaagaggaagtacggctt

SEQ ID NO: 648396 - DNA, 96 bp, Homo sapiens
gcctgctatgctgaaaacccctggaaacttgctaaagagctgtggttgaaatcacaaagattagacacctttttagataggtgttcttcagcacca

SEQ ID NO: 648397 - DNA, 75 bp, Homo sapiens
gagccgcccgcccgccgagcagccatgagttctggagagtcttggcttctgggaggaagtcagagggattatctc

SEQ ID NO: 648398 - DNA, 96 bp, Homo sapiens
ttccagtggaggcattttggggcagaatacagagatatggaatcaggtgaagcggaggctggacctggaaactgaccatcagtacctggccgagag

SEQ ID NO: 648399 - DNA, 100 bp, Homo sapiens
gaaggcattgtggaaacaactggaggaatgccagctcctgagcaggcctcattggtggaggaggggcaaccacagacccgccaggaagctgcctccactg

SEQ ID NO: 648400 - DNA, 75 bp, Homo sapiens
tttgacaacatctttaaccggtccctgcactaggtcagacaatcccctttggggtacaggaaacaaagcaggagg

SEQ ID NO: 648401 - DNA, 51 bp, Homo sapiens
cactgccaaccggccagaggacgagtgtggcaacgcggtaaaaatattgct

SEQ ID NO: 648402 - DNA, 50 bp, Homo sapiens
agctccagagcgacgggaaacgaaagggcacacgtgtttcacgttgacag

SEQ ID NO: 648403 - DNA, 83 bp, Homo sapiens
cctcaatagcactggctaccggacaggccctggccaacgtcaacattgggagcctcatctgcaatgtaggggccggtggacct

SEQ ID NO: 648404 - DNA, 100 bp, Homo sapiens
ggaggagatgctcgccttggggaataatcactttattggatggcactggatctttaaaacgcagtggttcctttagcaaactccgggcttccattagacg

SEQ ID NO: 648405 - DNA, 75 bp, Homo sapiens
aagatgtttgcatattcttacaaagattctttacttactgaaccagaattctgcttggtcagaatcgtgatggca

SEQ ID NO: 648406 - DNA, 96 bp, Homo sapiens
cctccatcttgcagcccagaaggtcggattattgtccttatgaaatagttaaacagcctcgccatgtgccagaagaatataaaccaaaacaaggga

SEQ ID NO: 648407 - DNA, 111 bp, Homo sapiens
gaagcctgtacctgttttatacttgcttttgcttcagcgttctgtggttgtcaacaggagcgagcccagggcgtggtgctgaaagtgctcacaaacttcaagagcagtgag

SEQ ID NO: 648408 - DNA, 101 bp, Homo sapiens
cattctgttactagaggactggcttatcttcacacagaattaccacgaggagatcccaggtggaaagaagtttgattctgtggttgtcaatggctttgttt

SEQ ID NO: 648409 - DNA, 98 bp, Homo sapiens
tccagaggggccgattagggagaggtctcggcgcggaagatggccggcggcgtggacggccccatcgggatcccgttccccgaccacagcagcgacat

SEQ ID NO: 648410 - DNA, 75 bp, Homo sapiens
aagaacttaagaaacacaacaaaaaagatgattgttggatatgcataagagcaatgcagagtcctcagagaagag

SEQ ID NO: 648411 - DNA, 102 bp, Homo sapiens
gccgggccggccgcccagacgctgcccgcgggcccggccacggcggagccaaggacctgaaggagaagaaggagaaggtggaggagaaggcaagccggaaag

SEQ ID NO: 648412 - DNA, 100 bp, Homo sapiens
ccatgtgatgcacctgctccagattctgctcagcaatcctcagatgtggtggttaaatgattccaatcctgaaaccgacaaccgtcaagaaagtccttcc

SEQ ID NO: 648413 - DNA, 114 bp, Homo sapiens
tgtgtggcgatggtcttcctgctggggctcatgtttgagcttcttccagaccagctggtcttgcttctggagcatctcttggagcagaagactctgagcccccgaactctgcaa

SEQ ID NO: 648414 - DNA, 117 bp, Homo sapiens
atcacagaaacgtgaggatcaagaagccggactacaaggtcgcctacgtgcagctgggcgtgatggtgggcatgggtcagaaggattcctatgtgggcgacgaggcccagagcaaga

SEQ ID NO: 648415 - DNA, 100 bp, Homo sapiens
gactttccttacctgtttttccagctcacccactgccagcagagaatggagatgtatgcatttcgattcttcatccgcctgtagatgacccacagagtgg

SEQ ID NO: 648416 - DNA, 75 bp, Homo sapiens
caggctggaacttgccctgtctcctcgcagatgagctgatccaccttgagatcaagccggccatccggaaccaga

SEQ ID NO: 648417 - DNA, 100 bp, Homo sapiens
tgagtgggaagaccaagacagtgcctggataccttcgaataggggctctgtacacatatgaagatggctccgatgacctcaagcttgcagcatcaggagg

SEQ ID NO: 648418 - DNA, 82 bp, Homo sapiens
cggcggggaccgtccagcccagcgattctcagtcaggtgaatgaaaactttgccattgatttgatagcagagcagcccgtga

SEQ ID NO: 648419 - DNA, 75 bp, Homo sapiens
ctttatcacatgacagctcatggtgatgatgttgatttcccaatagggctcacttatctaaagaatatgaggagg

SEQ ID NO: 648420 - DNA, 90 bp, Homo sapiens
gccaagatccaggataaggaagcaatggccaatgtacatggtggactatgccggcctgaacgtgcagctcccgggacctcttaattacta

SEQ ID NO: 648421 - DNA, 75 bp, Homo sapiens
cgcagtttctcacgacgggccgagcctgccactatgtcaagccctccaacatcctagtcaactcccgtggggaga

SEQ ID NO: 648422 - DNA, 51 bp, Homo sapiens
gtttgtggagtcgcgagtgctggtgtccggctagagtgcaatggcgtgatc

SEQ ID NO: 648423 - DNA, 74 bp, Homo sapiens
gagcagaattcaccagagagcagcagccatgccaatgcgatggagtggagtcaacatatcaatggagcaagtca

SEQ ID NO: 648424 - DNA, 75 bp, Homo sapiens
gtttaatgaaaatagatgaaccaagcactccttaccataggatttctccagtgatgattctaagttagaatataa

SEQ ID NO: 648425 - DNA, 129 bp, Homo sapiens
accatggccgatggggttcctggtgtgcagaacattctcaaaattggcttcctgaatgacaaggaggccatgctctaccacaaccagaccgccgagctgcgggagctgctggagttcacccacatgtac

SEQ ID NO: 648426 - DNA, 100 bp, Homo sapiens
ggaggagtgcgcaggacggcccagccccagcagcggagctgcccaagccctccatctccagcaacaactccaaacccgtggaggacaaggatgctgtggc

SEQ ID NO: 648427 - DNA, 98 bp, Homo sapiens
tggaattcgcgaagctgccaaagccttagacaaggccatgctatgatagtggaagcttatccaaaataatagatccagaagaagtgacctgaagtttc

SEQ ID NO: 648428 - DNA, 90 bp, Homo sapiens
agggtggacctcaggagcctcctaaaaccacagctcgtattgttgctgttgagaagtcctggctgggaacggtggctaacacctgtaatc

SEQ ID NO: 648429 - DNA, 101 bp, Homo sapiens
aattcttctctgatatcttcctgtcatggttccccttctactacatgctgaagaaatggcaggatattattaaggaagtcaagtttctacaaagaataaaa

SEQ ID NO: 648430 - DNA, 75 bp, Homo sapiens
gccttccgctattcagcagagagctattattccctgtattaaagggaaggatcgaatcatatttgtaaccaaaga

SEQ ID NO: 648431 - DNA, 100 bp, Homo sapiens
gcgggcggcggcggcggcggcggcggccgggacccagcgggccaggagtacgagagggcctccaaagtggaccagtttgtgacgcgcttcctgctgcggg

SEQ ID NO: 648432 - DNA, 96 bp, Homo sapiens
agcgacaagccgctggcagccgcggatctcaccgccgctcagggatagctagcggccaggagaaatacagtggaaaatgcaaaacaacgaaattat

SEQ ID NO: 648433 - DNA, 50 bp, Homo sapiens
aaacttcaacagaatgtggcaaccagccaaaattgcctggaaaagagcag

SEQ ID NO: 648434 - DNA, 73 bp, Homo sapiens
aggcccctcaggagaggctcagggagactgaggtggcctcactccaggaaaaagtgacatcccagagccagga

SEQ ID NO: 648435 - DNA, 100 bp, Homo sapiens
ataccacagctgaactttcttctaagtgccacagtgaagtctctaattaacagaagatggcaaagcccagccacagcagctatgtccttcagcagctaaa

SEQ ID NO: 648436 - DNA, 110 bp, Homo sapiens
tgctgctcgccgcgctgcgcccttcggccgcctacttcgggtgtccctggccagtgtccttccacctgtccacaagcatggggaacatcttcgccaacctcttcaagggc

SEQ ID NO: 648437 - DNA, 100 bp, Homo sapiens
accttgcagccagtgacctcaaaggatttcagccacagactgcctctttaagctatgtcccatgaaccgctactctgcccaaaagcagttctggaaagcc

SEQ ID NO: 648438 - DNA, 83 bp, Homo sapiens
attcggtgctccgccagccccagcttggcgtcctgagaaatgacaatgcagatcttcgtgaagactctgactggtaagaccat

SEQ ID NO: 648439 - DNA, 90 bp, Homo sapiens
cgacagaccatctagccttttctgtctggctctgggagaggagtggacagcagctggttgagatacatccccatctggagacaggactgc

SEQ ID NO: 648440 - DNA, 100 bp, Homo sapiens
gcattgccatacctgatgcctctaagctgcaattcatcctagcagtgggaaagctcatggagcttcatggtgaaggcagtagttctggaaaagccactgg

SEQ ID NO: 648441 - DNA, 83 bp, Homo sapiens
caagcttctggaagctctttgcggtggcgttggtgctgtttgcggatgctgatgcaggctgatcagctgaccgaagaacagat

SEQ ID NO: 648442 - DNA, 100 bp, Homo sapiens
tgttgttaggcattacagtgaacagtggttttatgaagaaacagaaagcagtgatgatgttgaagtgctgactctcaagaaattcaaaggagacctggcc

SEQ ID NO: 648443 - DNA, 75 bp, Homo sapiens
agcaagctgctggatggcattcaggttatgaagacagtatggagtttccagaccatagtagacatttgctacagt

SEQ ID NO: 648444 - DNA, 100 bp, Homo sapiens
gtaagatactgtgcctttgctccagggcatttgtggagaatttaaactttgggataatgagctgcagtatgtggaccaacttctgaaagaggatgtgaga

SEQ ID NO: 648445 - DNA, 98 bp, Homo sapiens
atccacctgctgcagatggggcaggtgtggaggtggtatcacggaaaacttgacagaacgatagcagaagaacgcctcaggcaggcagggaagtctgg

SEQ ID NO: 648446 - DNA, 100 bp, Homo sapiens
ttacgagaaatgttagagaagaaagacagctttgtggaagagagatccgtgctcagctcacagagcagatgaaatgcctggaccagcagtgtgagcttcg

SEQ ID NO: 648447 - DNA, 108 bp, Homo sapiens
cctggctatcggggtgaacgcatcaatcagctcatccgtcagctgaactagacccagtcatcgaagaagccaactggatgactctggacaaagatgtgccccagtcag

SEQ ID NO: 648448 - DNA, 98 bp, Homo sapiens
ttctctgtgccaccagagagtttcgtgtgcgctgctgcattttttatcacctatgaatatgtgaagtggtttttgcatgctgattcatcttcatattt

SEQ ID NO: 648449 - DNA, 98 bp, Homo sapiens
gccctttggacatgagaatggatggtggcaggctgaccggttccctgatgtgttacctgcttctgctactgatccaaactgcagaacttctcattcat

SEQ ID NO: 648450 - DNA, 97 bp, Homo sapiens
tccaaaaggtcgtgaggaaactgagaggagaagatcaagaggtggagctggttgtagattatgcaatttgaatcaacccatagaagtgacagcgctg

SEQ ID NO: 648451 - DNA, 136 bp, Homo sapiens
ttggggcatctccgcggtccggcccggggccccgggatctcggctgtccttcctcccgcactattcctgatcagagaactccagttgcttcaacacacagtatcagtagtgcagccaccccagatcgaatccgctt

SEQ ID NO: 648452 - DNA, 100 bp, Homo sapiens
aattccacctctgcgtttttccctccaggtggtccattatggctgacatgcaaaatctggtagaaagattggagagggcagtgggccgcctggaggcagt

SEQ ID NO: 648453 - DNA, 75 bp, Homo sapiens
cgggagcgcaaggtcgccctcaaggccatgatcaaaacgaagctggagaagcttcgagagaaggagcgtaagaag

SEQ ID NO: 648454 - DNA, 101 bp, Homo sapiens
ctgagccccggcactgcctggctgcgagcacatgatggcgatacgggagctcaaagtgtgccttctcggggtaagtaaggaggtctctgtaccatggctcg

SEQ ID NO: 648455 - DNA, 75 bp, Homo sapiens
gtgtgctgaagataaccatctgtgaatactcccccagttgcaagaggcgcaggaccgtggaagacttcaacaaat

SEQ ID NO: 648456 - DNA, 100 bp, Homo sapiens
gggaggtgaatttccatgtcaacatagtccaggaaacccagcgtttgctggcagaaccagttcctggcatcaaagccgaaccagatgagagcaacgcccg

SEQ ID NO: 648457 - DNA, 75 bp, Homo sapiens
aatgactttgagccctaccttactggacagtcaaatcagtgagacggtttaagcggaagcatcttactgccattg

SEQ ID NO: 648458 - DNA, 51 bp, Homo sapiens
aaggcaaagaggatccagagaagggtccagaggtgtccttctaaagctggt

SEQ ID NO: 648459 - DNA, 100 bp, Homo sapiens
cgctacgagggcatcctctacaccatcgacaccgaaaactccaccgtagcccttgccaaaggtacctgcaccagtcaggggccctgaccatggaggccct

SEQ ID NO: 648460 - DNA, 82 bp, Homo sapiens
tcggcatcggatggttaaggtagacccagagaccaggtggaaccgtcccaaaatgtcccttgctcagaagaaggatcgggta

SEQ ID NO: 648461 - DNA, 75 bp, Homo sapiens
gaaatgttaggatcactttattctgccaaaactggacaagccaaggcatctgtagccaaagtaaacaaatctaca

SEQ ID NO: 648462 - DNA, 97 bp, Homo sapiens
gcagccacggggtgcagtgcgcacacaggtggacccaagtggagagattgtggaactggcgaaaggtgcatgtccctggaaggagcatctctaccac

SEQ ID NO: 648463 - DNA, 100 bp, Homo sapiens
acaagccttcacttgcaatactgctgatgcccccagtaaggatatctttgttaaattgacaacaatggccatgtatcctaaccctccactgagtgaagaa

SEQ ID NO: 648464 - DNA, 74 bp, Homo sapiens
gaatgtttatggaatcacaataatttcaggctgcatacaagaattaaattctgaataagtctgcaggtaggatg

SEQ ID NO: 648465 - DNA, 100 bp, Homo sapiens
cagccgcggagcagtagccgccgtgggagggagccatgaagcattacgaggccagtacgggatccctgaaccatggaattttccttttcggaggagctac

SEQ ID NO: 648466 - DNA, 50 bp, Homo sapiens
gatcaagcgggcacggctggccaagcttccccgggcgctgcctggacagg

SEQ ID NO: 648467 - DNA, 91 bp, Homo sapiens
accagtcccagcgctgtcgtgctcctctactcggttacaggaggttccagtggcatcgggaagtgcattgctatcgagtgctataaacaag

SEQ ID NO: 648468 - DNA, 50 bp, Homo sapiens
ctatccatctctcgaagacttgaagaaacctctgcgccatgagagccaag

SEQ ID NO: 648469 - DNA, 100 bp, Homo sapiens
agatacatctccaagtatgagctggacaaagccttctccgataggaacaccctcatcatctacctggacaaggccaataaaacaccactgcggccactgg

SEQ ID NO: 648470 - DNA, 87 bp, Homo sapiens
ttgacaagacgcggctgccgtacgtggccctcgatgtgctctgcgtgttgctggatgccttcaattaagttgcagagttctgatgga

SEQ ID NO: 648471 - DNA, 75 bp, Homo sapiens
gcgccacctcccccctgcctccctctccgctgtggaagaggagatcccagaactggagattgacgtggatgagct

SEQ ID NO: 648472 - DNA, 75 bp, Homo sapiens
cagatactttgaagtagaagaagctgatggcctcagtgaccccacacccccttcaggcccaagcctggatggtac

SEQ ID NO: 648473 - DNA, 96 bp, Homo sapiens
acccagccgtctcctgtgaaggccatatttgataaacaggaacttgagtacaagccagctgccatgttgtgagcacataccacatagctccatgga

SEQ ID NO: 648474 - DNA, 100 bp, Homo sapiens
ttgcacagtgcagcccacacagccatgggttgacccaggagagaagcctttggcctgcactgcacatgccccagaaagggccggtgcataaacttctccc

SEQ ID NO: 648475 - DNA, 75 bp, Homo sapiens
gccaacctggacggctcgttccgaactcagcctcctcccaagctccctgtgggtcctagccacaagctctccaac

SEQ ID NO: 648476 - DNA, 74 bp, Homo sapiens
tgaaatcctaagtggattgcagttgggagactttctcattaagataaggaagccattaaggtcactccactgcc

SEQ ID NO: 648477 - DNA, 110 bp, Homo sapiens
cagccccggggcggcggccgaggctacagagccggcggcaggggatggcaagatagcggcgcgggagcgtaccgtacaatccttggatttaccctccgaccatacagaat

SEQ ID NO: 648478 - DNA, 82 bp, Homo sapiens
cagagactgctgagcccgtccgtccgccgccaccacccactccggacacagcaacagtatcaaagtgctctattttgggcag

SEQ ID NO: 648479 - DNA, 100 bp, Homo sapiens
ccgcaccgagctggagggcgctgtcgggcttgctgccccccgacaccgctatcctagtggcaggcaacacactaccttttcagcagaatcaagtcgaagc

SEQ ID NO: 648480 - DNA, 51 bp, Homo sapiens
tacaacatggcagacattgacaagaaattgagagtcagattgacagaatct

SEQ ID NO: 648481 - DNA, 98 bp, Homo sapiens
ggctgtggccgcgtcggtgtccgcgtcgaggagccggggcagggcacgatggcggactgggctcggggctgaagaactgaaactggccacccagctga

SEQ ID NO: 648482 - DNA, 88 bp, Homo sapiens
ttcggcatcgggcgacagcaggtcacagtggacgaggtgttggcggaagtgccgcagaatggaattcggcattgttcctacacagctt

SEQ ID NO: 648483 - DNA, 50 bp, Homo sapiens
gcgaccgatatagctcgccaggtgtgcctccggagccagcgtggtggcca

SEQ ID NO: 648484 - DNA, 74 bp, Homo sapiens
ttgaaagatgtgtcatatcatgtgccctctatgaggagttttggattaagaacactcgtgaaactgctcaggcc

SEQ ID NO: 648485 - DNA, 101 bp, Homo sapiens
aaaaagaagtaaaagaagctattattacaagaataaaggcaggaatcaatccattcaatgcggtttgctgtgtttcaaagaagggtgctgaccacagtagt

SEQ ID NO: 648486 - DNA, 96 bp, Homo sapiens
aagatcctggtcccctgctttaaccatcgaaaatgagcttcgaagttccttcaacaaagcgttcagtataaaaaaggggcccaagtcagcttcctc

SEQ ID NO: 648487 - DNA, 100 bp, Homo sapiens
acctgcccccatctgtggcttccatcaaggtgtcggcggagctgctcagagctgccttgaaggacggccactcagactggcattgctcgggtaccacttg

SEQ ID NO: 648488 - DNA, 75 bp, Homo sapiens
gtggagtttttgacacttttgttcaagtacacatttcatcagtcatacagtttgtcaagaaagaaaatagtgcac

SEQ ID NO: 648489 - DNA, 101 bp, Homo sapiens
gccagggaacggggcatcgcggttccaacgatgccttcaattaagttgcagagttctgatggagagatatttgaagttgatgtggaaattgccaaacaatc

SEQ ID NO: 648490 - DNA, 100 bp, Homo sapiens
gttaaggattccaagtaactcttatttgagcaacctgcaagcaatcaaggccagtctaccctgcagcccttgccgccttcccataagcagcactctgcac

SEQ ID NO: 648491 - DNA, 50 bp, Homo sapiens
gagaacttcaaccaggcactcaagtctgaagatgatgagaaactgaaaaa

SEQ ID NO: 648492 - DNA, 83 bp, Homo sapiens
attgacgccatgtcgggttattcgagtgaccgagaccgcggccgggaccgaggccgcttacaaacacgcagatggcaagaaga

SEQ ID NO: 648493 - DNA, 75 bp, Homo sapiens
gacgcggtgggccgcccctccgatcagaatgaaggatttcattgccgggaagaatgccggattcttggccactct

SEQ ID NO: 648494 - DNA, 89 bp, Homo sapiens
ccccaagtcgacgccgcaacccggggaaagcaggtgagaagccctaccactgcaactgggacggctgcggctggaagtttgcgcgctca

SEQ ID NO: 648495 - DNA, 84 bp, Homo sapiens
cgggaggataaagaccaccacgatgtggacgagtgctcactagcagaaaaaacctgtgtgaggaaaaacgaaaactgctacaat

SEQ ID NO: 648496 - DNA, 85 bp, Homo sapiens
gccatgtcgggttattcgagtgaccgagaccgcggccgggaccgagggtcagccatgtcatctgagcctcccccaccaccacagc

SEQ ID NO: 648497 - DNA, 80 bp, Homo sapiens
gctccctgcgccccggagcaggccaagttcggggccaggacgtcgggaggacctgtttcctgggagttactgatcatctt

SEQ ID NO: 648498 - DNA, 50 bp, Homo sapiens
gcggtcccttcctgtaccttgtcctcagggaactctaatgatccaggaca

SEQ ID NO: 648499 - DNA, 98 bp, Homo sapiens
gaagggaaggcgcgagtgaggaaaggaggtactgtaggaatgtatcctgtcaggtataatgtcagtgaatggcaagaaagttcttcatatggatcgaa

SEQ ID NO: 648500 - DNA, 116 bp, Homo sapiens
ggaagtcagcggtcaacgttgcttcaattcagaattatttggtctatgcttggggctgtggagcttgtctaggttgtggttcttcagaagctactgctttgagacccaagcttatt

SEQ ID NO: 648501 - DNA, 50 bp, Homo sapiens
cgcgcggaggcggaggcttgggcctactcaatttgaagacattgaggatg

SEQ ID NO: 648502 - DNA, 100 bp, Homo sapiens
tcctagataacccaactcctgagatggaagcagcgagacgttccctgtgctttagactggagcaaggctgccaaacgagggattctttcatctggtcggg

SEQ ID NO: 648503 - DNA, 82 bp, Homo sapiens
atatcgacgtcgtgatccagaagtccagagctgagaaggactgcctgtttgcagatatgtaactggttcatcaatgcccggc

SEQ ID NO: 648504 - DNA, 100 bp, Homo sapiens
gtttgggatcatccagaagcatctgaagaccatggatcacaaccggaaccgcaggtgatgtcttggcattgcccattttcaagcaggaagattccagcct

SEQ ID NO: 648505 - DNA, 74 bp, Homo sapiens
cctacactgaggccacgaaagctcagagaaagcagcagatggcagagattgtgaatcggcacggtcctgaggca

SEQ ID NO: 648506 - DNA, 100 bp, Homo sapiens
tcctacgtacaatgtcacgctcccaccagcagcgcctatgagtttgtcacctggctcgatggcattaacggaagtgaccgtggtggcttcaataaatttg

SEQ ID NO: 648507 - DNA, 97 bp, Homo sapiens
ggtggtcgccagctttctccgaaagtttcaggtttagctgtgcctcccagtgactataatgacaaggaagctgtaaatgtatttgagttaagctttt

SEQ ID NO: 648508 - DNA, 100 bp, Homo sapiens
atgggccggctcccattgctccggcgcgttctcaagggcttgcagctgatcagccatgcagaagctggggacagaagtatttgaagaggtctataattac

SEQ ID NO: 648509 - DNA, 75 bp, Homo sapiens
ttggtctaaagtctttccaaaaggtcaaggttcacaagagccctaatttgtttagaactgtaatatgcacagtta

SEQ ID NO: 648510 - DNA, 75 bp, Homo sapiens
cgctgatgaaataattcagtgtgacaattgtggcattacagtccatgaagcctactttggggataaaggattatt

SEQ ID NO: 648511 - DNA, 75 bp, Homo sapiens
tgctgctgggattcgcgctgctgggcacccacggagcctccggggctggtgaacccgtgagcaactgtggtacct

SEQ ID NO: 648512 - DNA, 119 bp, Homo sapiens
caagaggctcggcgtctccgcctggctcaaccacctgaatgagctgggccaggtggaggaggagtacaagctgcggaagtttgtgatggacgcctctgaccccacccagctctctgcat

SEQ ID NO: 648513 - DNA, 104 bp, Homo sapiens
agcgtgagcagccggaggatcgcggagtcccaatgaaacgggcagccatggccctccacagcccgcagaggaattacggaggttgagctggtccggaatcccta

SEQ ID NO: 648514 - DNA, 50 bp, Homo sapiens
aagcagagaccatggagcttcttggacattgagagggaaaaggcctcatc

SEQ ID NO: 648515 - DNA, 97 bp, Homo sapiens
ctggtagagacactgcggaggtttcgagatggcaatagcagcgactcagacgcagatgccgggaccaccgtgctcaatttgcagcccagagccaggc

SEQ ID NO: 648516 - DNA, 80 bp, Homo sapiens
caaggggaacagaaccaaccaggctttacaggtatggatcctggcgggagccagtcaacccctattatgtcaatgccggc

SEQ ID NO: 648517 - DNA, 82 bp, Homo sapiens
caggacttgctttttctgctctgagccggacgccggaatggagtttgaggaagagacatggaaggtctttaatgtaacttta

SEQ ID NO: 648518 - DNA, 100 bp, Homo sapiens
gtcagagcgagaagcccggaggttgcgctgagcttggctgctcgctggccgactgctactgagcagaaccagagtctgccactggggctcaggaccaagg

SEQ ID NO: 648519 - DNA, 75 bp, Homo sapiens
attgaagcttcagaaattgttagaaagggattttgaattatgggatgatgtaggattaaacattccaaaacctcc

SEQ ID NO: 648520 - DNA, 50 bp, Homo sapiens
cgagaaatggccgcgtcggcaggttttaaaatcaaagatgggaaaatcgg

SEQ ID NO: 648521 - DNA, 90 bp, Homo sapiens
atttgctgcatcgagcagttggtttagtatcagccaaacttgcagctgttcagaccgcgctccgccgagacaaatttacatgtattggag

SEQ ID NO: 648522 - DNA, 97 bp, Homo sapiens
agagagggaatggtgcaggcaggcgctgagaaggacgcgcagtccatctctctcaggtgatggaactgtactggaacaatgggagaagctggtagct

SEQ ID NO: 648523 - DNA, 100 bp, Homo sapiens
ataagctgcactgcatggttgctgctggatgtgttgtgttcctggcttccctctggatgctgacagaaacaagggaaatggccagtgatgaactgaggga

SEQ ID NO: 648524 - DNA, 100 bp, Homo sapiens
aagaactaagaatattattagcacaagagcaccatactttgaggttcattatgctgacatatcttttcatgttggcctggctgggagtcacggctttcac

SEQ ID NO: 648525 - DNA, 118 bp, Homo sapiens
cgatgtggagcgcttctttaagggctacgggaagatcctggaggtggatctgaagaacggatgaccactgagcagtttacaggagatcatactcagcactttttggatggaggtgaga

SEQ ID NO: 648526 - DNA, 105 bp, Homo sapiens
ccaagcatatggaaatgtctctaaaagtaactgggcacctccgggctgtgaaaagttagggaagtgtctgacacctccagaatccattcccaagaagtgcctctg

SEQ ID NO: 648527 - DNA, 75 bp, Homo sapiens
gatcctgttagatatcgaaggtaccacaaccccgattgctttcgtgaaggtagctacagcaagctgggtagcagg

SEQ ID NO: 648528 - DNA, 75 bp, Homo sapiens
aagaaaaatcatagcaagtttactcttgcccactccaaacagcccggtaacacgcttataatggcaacccctgaa

SEQ ID NO: 648529 - DNA, 83 bp, Homo sapiens
tgcttttggtttccctggcaggggttgaactgtggagtgtgtgggtcaaaatgcagatcttcgtgaaaacccttaccggcaag

SEQ ID NO: 648530 - DNA, 100 bp, Homo sapiens
gacttggagctgccgccgccgggactcccgtcccagcagtatggactttctgtcagattttgagatgatgttgcagcgaaaaaagagcatgagtggcaag

SEQ ID NO: 648531 - DNA, 101 bp, Homo sapiens
ctgcctcgccgcgtctcgccacggtactaggttttgacaagcttgcatcatgcgtgagtataagctagtcgttcttggctcaggaggcgttggaaagtctg

SEQ ID NO: 648532 - DNA, 75 bp, Homo sapiens
gaaccgtcagtttgagccagatgggagctcactcagtgggtttgatgtggtggatgctggctcgggaagttctgc

SEQ ID NO: 648533 - DNA, 73 bp, Homo sapiens
gacaccccttcaagaagctttgaatcaactgatgagacaattgcagaggttgatctttgccggaaaacagctg

SEQ ID NO: 648534 - DNA, 100 bp, Homo sapiens
ggggcatctcaaaaaactcccagtagcactggatgataaggatgccttctatgtggcagacctgggagacattctaaagaaacatctgaggtggttaaaa

SEQ ID NO: 648535 - DNA, 82 bp, Homo sapiens
gtcttcaatgtcatttatcagagcgcggcggtcttcaagctctcagtgtggactggatgaacaaggtgatggcacgtttcgt

SEQ ID NO: 648536 - DNA, 82 bp, Homo sapiens
cctgaacgtcaccgaggagaagtaccaggaggcgttggccaagggtcaaaatgcagatcttcgtgaaaacccttaccggcaa

SEQ ID NO: 648537 - DNA, 97 bp, Homo sapiens
cggcggcagcggcagcgcggcggggccgggtgtccctggccagtgtccttccacctgtccacaagcatggggaacatcttcgccaacctcttcaagg

SEQ ID NO: 648538 - DNA, 95 bp, Homo sapiens
tttctggcggcggtagatttgaagcgcttcaaaggaccggacccagagaagaggaaaactctaccggtgcaggtcaaaatgcagatcttcgtgaa

SEQ ID NO: 648539 - DNA, 100 bp, Homo sapiens
tcagaagaaagcagctggctcagaaaacaggagtttgttcatctggcaaagagactggttagtgatcctgcattagaaaaggaaatcgtagtgaacggaa

SEQ ID NO: 648540 - DNA, 75 bp, Homo sapiens
caccactccagctgaaagaggaaggtcttctttatactgcagtgatattggccttcccttcttcttggtggtgtt

SEQ ID NO: 648541 - DNA, 74 bp, Homo sapiens
cttcggatgaggagaccctggaagacaatctaagtgatctagaacaacttcgaaaaatcagacgacgaagtccc

SEQ ID NO: 648542 - DNA, 49 bp, Homo sapiens
ccaggattgaaactggagtacggcaagggatttcaaggatttggatttg

SEQ ID NO: 648543 - DNA, 75 bp, Homo sapiens
gcctccccagccacgtgaaactcaggatgaagttaaaggaagtagatcgtacagccatgcaggcatggagccctg

SEQ ID NO: 648544 - DNA, 100 bp, Homo sapiens
cacagagccgctgaaaacgactgaagagagcaagggatttcctgggacatctggctctggaggttcttgaattagtgttggaaaactttgtttatccgtg

SEQ ID NO: 648545 - DNA, 74 bp, Homo sapiens
tgggccccaaacggctgtgtgctggcagtgtgggacacctgcttggaggctgttttggagtcagcggaagatca

SEQ ID NO: 648546 - DNA, 100 bp, Homo sapiens
atttcttccggcgcattgataaggaccaggatgggaagataacacgtcaggagtttatcgatggcattttagcatccagccaaagcctcactgtttcaat

SEQ ID NO: 648547 - DNA, 60 bp, Homo sapiens
gggcgagtgaagcagtgtcacgcattttagaagaatggggcccagtcatatatgcacagt

SEQ ID NO: 648548 - DNA, 82 bp, Homo sapiens
ctttgctcaaggatcccagttttctctggatgacgtgaggctgggaggcggcagaatgcagccagaggagggcacaggctgg

SEQ ID NO: 648549 - DNA, 71 bp, Homo sapiens
aggcgaggacggtctctgccagtataaatgcagtgacgaaagcggcagcccagaatctcgtgttaatgcga

SEQ ID NO: 648550 - DNA, 76 bp, Homo sapiens
ctcaggctggaacttgccctgtctcctcgcagatgagtatctgatgaaaaggataccacagaacccaagataccag

SEQ ID NO: 648551 - DNA, 50 bp, Homo sapiens
ctctgctcgcggccgcgcctttgagtaatgtatcctgcatatgcaaaatg

SEQ ID NO: 648552 - DNA, 100 bp, Homo sapiens
cttagtgaagttcctcaattgaagcaagagatttctgaatgaccccagcttggttgctttcttgagatctcacagccacacgcaagagcaaacaggagag

SEQ ID NO: 648553 - DNA, 75 bp, Homo sapiens
aaagtgttgagtaaacagaccaagttggagcctggagacacaggccccatccttcccaatggggacacttcaggg

SEQ ID NO: 648554 - DNA, 100 bp, Homo sapiens
aactccagaaaaacactgccaacatcaggaatatttgtgttttggctcatgttgaccatgatactagagtaaaaggatggtttcttctggacaattatat

SEQ ID NO: 648555 - DNA, 75 bp, Homo sapiens
ttggtttggaaaaatttcattagagcggacaaggcaaaatctcagcaagttcggacctctagtacaataaggcga

SEQ ID NO: 648556 - DNA, 101 bp, Homo sapiens
aagaaattgtttatgccaaatcaactgccttacaggtgcttgtgaatgacttcttcttggtggcttgtcttgaggatttcattgaaaatgcccgtctcttc

SEQ ID NO: 648557 - DNA, 73 bp, Homo sapiens
agaatgcatacttggaatgaatccttctagagacgtccacgaattaaacaaccaccatgtcgagcaaaaaggc

SEQ ID NO: 648558 - DNA, 76 bp, Homo sapiens
gccgcctgaagtgcgggcgcagctggcggagctggagctggagctctcggagggacaacttgcctttgatgatttt

SEQ ID NO: 648559 - DNA, 76 bp, Homo sapiens
ctgcagctgggccgcggccgaggaggcagcgcgacctccgcacggtactccaaagattcaggtttactcacgtcat

SEQ ID NO: 648560 - DNA, 100 bp, Homo sapiens
acagcctagatgaagtcaatttcatacagaaccttgtgttttacattgaagctgcatataaaactgctgtctctaattaacagaagatggcaaagcccag

SEQ ID NO: 648561 - DNA, 100 bp, Homo sapiens
gtgaccgagaccgtgaccgagagcgtgaccgagagcgcgaatatcgtcatcgttagaagccctacctgaacccatccttccatccctccaaaaaatttac

SEQ ID NO: 648562 - DNA, 96 bp, Homo sapiens
gcctgtcccgggcagcgcagccccggccgcagatccggggatttctttcacggtttgataatgtccttcccgtcagcctggcatttgacaaatgta

SEQ ID NO: 648563 - DNA, 50 bp, Homo sapiens
gaccggggacttcttgattgagatccgggtggatggacccaggggcaacg

SEQ ID NO: 648564 - DNA, 90 bp, Homo sapiens
cccaaaggcagcaaaaacaagagtccctctaaagcagctcaaaagacctgtgaccgcatcaagcagtcagcagctggcaccaagcgtcgg

SEQ ID NO: 648565 - DNA, 104 bp, Homo sapiens
cttcgagtgacccgggtgccgaggagcgggaagagttgctgggttgagcagctgaacagaggccatgccggggcactccgaggcctgagacgaccacgcctgtg

SEQ ID NO: 648566 - DNA, 100 bp, Homo sapiens
caacgcccccgggacatgcatcgtcccctggactctctcaatgcttagatgagtacgaagatgatgaagcagggcagaaagagcggaaacgagaagatgc

SEQ ID NO: 648567 - DNA, 100 bp, Homo sapiens
agaaaggttaaaacaagaaattgataatgccagagaactacaagaacagagggattctttgactcagaaactacaggaattgaatgatctggcacgggac

SEQ ID NO: 648568 - DNA, 98 bp, Homo sapiens
ccaccgcagttcagctccacccctgtgttaggctaccccagccctccgggaggcttctctacaggtttgtttctgcgtcacatgatcttggcctacag

SEQ ID NO: 648569 - DNA, 51 bp, Homo sapiens
taaggaaaatataatggatgatgatgagagtcttgctcttgttgcccaggc

SEQ ID NO: 648570 - DNA, 75 bp, Homo sapiens
gctagaggaggcgttgcaggacagcccccagttgtctatcaacgtctatgactacaactgccatgtggacttgat

SEQ ID NO: 648571 - DNA, 100 bp, Homo sapiens
acgtggtccaggtttctgcacaggaatatcgagagcgtcatgaacccgagctatagagaaaggagatgagctggattactgggccagttacaggtcttgt

SEQ ID NO: 648572 - DNA, 97 bp, Homo sapiens
cagaaagtgactccagtggtggaacccggagccaaccatttttagttacgcaaatacgccatgcgagacctagtccacaggcttccaggagggaaca

SEQ ID NO: 648573 - DNA, 100 bp, Homo sapiens
gatgttgatcactgaaaatgatttatgcaagtttaagaactctcagaaattgagcccaatgtattccttcgaccttttctggaagtgattcgctctgaag

SEQ ID NO: 648574 - DNA, 87 bp, Homo sapiens
agcatttaaccagcatggctacttcatattttggaaagcagtttttaagacaagcttttgtggccacaggaaccaatctgtctctcc

SEQ ID NO: 648575 - DNA, 100 bp, Homo sapiens
cagggatggccaggaaattgctgtggtttacttccgggatggctacatgcctcgtcagtacagtctacaggctcagcacgcagggggtgtcataaccgaa

SEQ ID NO: 648576 - DNA, 99 bp, Homo sapiens
aggtcttcacaggtcatatggggaagctggtacccctgaaggagaccatcaaaggattccagcagattttggcaggattgagagctactcatgtaagat

SEQ ID NO: 648577 - DNA, 100 bp, Homo sapiens
ggagaagaggattggaggtgtcagtgttaaaggaacctctacaacgaaggtgaagccacggaagataaggtaaccatgtgcgaccgaaaggccgtgatca

SEQ ID NO: 648578 - DNA, 100 bp, Homo sapiens
tgatccacaaagtcccctttgtgttcacataatgctgtcaggaactgtgaccaagaggatgaagtttttgctgctgcagcagaagtacctagaatacctg

SEQ ID NO: 648579 - DNA, 82 bp, Homo sapiens
tgatattccaacagtaaaacctctcaaaccgaggagttgatctctctaatgtattagatcttcatgcctttgatagtctctc

SEQ ID NO: 648580 - DNA, 75 bp, Homo sapiens
tttatttggcagatctgaagggaaagctccagatactagtggtgttggcatgaaaggcaggcttgtatcatgagg

SEQ ID NO: 648581 - DNA, 50 bp, Homo sapiens
ggacatcctggaagctgggaaatgatctccattacaagctcataatgaat

SEQ ID NO: 648582 - DNA, 74 bp, Homo sapiens
ccagcttccagttagtggatatagcacaccatccccagccacccccaaatacatcaagatgtttgtactggatg

SEQ ID NO: 648583 - DNA, 101 bp, Homo sapiens
ttactgtacagcctgcagaactatcatgaagaagtcatgctacccacgctggaatgagacgtttgaatttgagctgcaggagggggccgtggaggcgctgt

SEQ ID NO: 648584 - DNA, 75 bp, Homo sapiens
ggacggtcggactcccgcggcgggaggagcctgttcccctgagatgaaggatttgggggcagagcacttggcagg

SEQ ID NO: 648585 - DNA, 100 bp, Homo sapiens
ctggccctctcgctgttgctggtctctggctccctcctcccagggccaggcgccgctcagaacgaagtcaatgaaaggattctattttgcaaagctgtat

SEQ ID NO: 648586 - DNA, 100 bp, Homo sapiens
gctgctcggccccgctgcccgccaggtcgtgggctcccgctccgggcccggggccaccggctgtagagtgactcagacatctcctctacaagtacctaac

SEQ ID NO: 648587 - DNA, 100 bp, Homo sapiens
gttccaaggtggcaaggaggcaatgcggcggccacagattgacaagaaaggacgggctgtctcatggaccttctctgagtattcacaggcctccactggg

SEQ ID NO: 648588 - DNA, 82 bp, Homo sapiens
tacttggaatgaatccttctagagacgtccacggaatcccttggcaccatgtcctgtgtgcattataaattttcctctaaac

SEQ ID NO: 648589 - DNA, 111 bp, Homo sapiens
tgggacacacctccattggatttaaaagacagtcctcgtcagcactgactttcagctatggaatcgatttggaattctatgactggggaactagtacacacctatgatgag

SEQ ID NO: 648590 - DNA, 112 bp, Homo sapiens
gccgccatgaagaagcagttcaaccgcatgaagcagctggctaaccagaccgtgggcagtgctccagctgaggctgcaacaaaggaggacgagagaacaactagtggaccag

SEQ ID NO: 648591 - DNA, 100 bp, Homo sapiens
acaaaggaagacttgtaacctggagaagagaaatcaatgtggactgaacataaatcacctgatggaaggacttactactacaacactgaaaccaaacagt

SEQ ID NO: 648592 - DNA, 80 bp, Homo sapiens
gtctctacaccagagtcactactttaggcggattcgcgaagacctgcctagagctggaacgttacctccagagcgagccc

SEQ ID NO: 648593 - DNA, 90 bp, Homo sapiens
cgcgagcgtctgggcgggtggtaggttggtcaaagaaaaagtgatgtatgaaaaagaggcaaaacaacaagaagaaaagattgaaaaaat

SEQ ID NO: 648594 - DNA, 100 bp, Homo sapiens
ctaccctggagcccgggatttctcccagctggctttggacccctccgggaaccagctcatcgtgggagccaggcgccgggaactgtgtacgcagctgcgg

SEQ ID NO: 648595 - DNA, 100 bp, Homo sapiens
tgacagccgcccactgcttcccggagtaagtggggcagtgtccggaccagtggacgcagcagtggccttggcaccgatgtgggctcccggctagctggca

SEQ ID NO: 648596 - DNA, 80 bp, Homo sapiens
tgcagggtggctgacaacctggtcacagggtatccgctacacacaccccatctgatctcccagtgggaacaagaggagga

SEQ ID NO: 648597 - DNA, 83 bp, Homo sapiens
cggccgagaagctgtgcatctacaccgacaactccatccggcccgaggagctgctgtgtcaacagcatctccaccctggagcc

SEQ ID NO: 648598 - DNA, 100 bp, Homo sapiens
ctgtgagggaacaagaccagagtttcacgaagaacatgtgatcatccaggccgagttctatctgaatcctgaccaatcaggcgagtttatgtttgacttt

SEQ ID NO: 648599 - DNA, 74 bp, Homo sapiens
tcgctccggaaaggggacacctgacaaactgggaagattgagcctgtggtcctgccgctgctctggtttgcaga

SEQ ID NO: 648600 - DNA, 101 bp, Homo sapiens
ggaatttaagagaatacatggttgaaaaaatttacccacaaatacctgtgctggccattcaggcccgaaagcggaggccgaaaagagagaaacatccgaaa

SEQ ID NO: 648601 - DNA, 83 bp, Homo sapiens
tccagaagaccaagtacctgcagatcctgacctctctgatgagatggatcggacgcacatgcagaacatcaaggacatcacca

SEQ ID NO: 648602 - DNA, 82 bp, Homo sapiens
cagaaactgaaggcaactttgtctatcgcacagatcacctctgcagcctgcacagccgggcctttggactcctggatgctag

SEQ ID NO: 648603 - DNA, 100 bp, Homo sapiens
cccggcttccgacgtgcagcctggcagtgcagtgggaaaagaagatctcccggagcagtgccctgaaagtgctggaccatgccatgattggccccgaagg

SEQ ID NO: 648604 - DNA, 75 bp, Homo sapiens
cggcagagtccccgtacgcctacagtaacgggagtgcatccgccccaacccttttccccctcgtctcctgtgaga

SEQ ID NO: 648605 - DNA, 98 bp, Homo sapiens
cggattcgggaactgactgctgtagttcagaagaggtttggctttccagagggcagtgtagaggcatcaactgtgaaatctgtgttagaattgattcc

SEQ ID NO: 648606 - DNA, 90 bp, Homo sapiens
agaaatcacattggaccctcctcccaactgtaggtacttcgtcagtttgtaagacatgagtccgaaacaactaccagtttggttcttgaa

SEQ ID NO: 648607 - DNA, 50 bp, Homo sapiens
ccggcctgggagaagcagcagagaaaggctgaggtgaaggtccgcatgga

SEQ ID NO: 648608 - DNA, 88 bp, Homo sapiens
cgattcctcctccttggtcgccgcgtccttggctggcgtcacccccccaggcagcagcagcagttttcatctctggatgacaagcccc

SEQ ID NO: 648609 - DNA, 100 bp, Homo sapiens
agcctcccaggtagctgggattacagagtcctgcttcctgttcgccctcacgcgccagaagttgccacccttttgccagcaggggtacctgaggatgcag

SEQ ID NO: 648610 - DNA, 100 bp, Homo sapiens
tgcactggataactatgttattcgagttagagatgtttatgattacttccgagctgtcctgcagcgtgatgaaagaagtgaacgagcttttaagctaacc

SEQ ID NO: 648611 - DNA, 83 bp, Homo sapiens
ctctccagcaccagcttccagttagtggatatagcacaccatccccagccagccagcatccttcagaaaaagcatccccgagg

SEQ ID NO: 648612 - DNA, 82 bp, Homo sapiens
gccctttcaatagacagtgttgaggaccatcttgcctggagcaaggctgaggaaaaggcagatgctctgaataaggagctgc

SEQ ID NO: 648613 - DNA, 100 bp, Homo sapiens
gagtggcagaaaggctgatgcagcaggttagagcctggcaatgccgtttgggtgtgtgactctgggcgacaagaagaactataaccagccatcggaggtg

SEQ ID NO: 648614 - DNA, 76 bp, Homo sapiens
gttcgacgtgcggcccgaatgccagcgcctcttctaccggggcaagcaggtttgcaccttctgctccatctcctca

SEQ ID NO: 648615 - DNA, 82 bp, Homo sapiens
acacctttcacagcagtcttaaagtttgcagcagaagaagaggagtttgcaaaccaaagctgatcagcaagtcaaacagcag

SEQ ID NO: 648616 - DNA, 75 bp, Homo sapiens
gattcgagagacaagcagaagaattcctcaatgcagtcttttatagaaaaggtatgctatacctccggagcatgg

SEQ ID NO: 648617 - DNA, 100 bp, Homo sapiens
ctggaatacacccacctaccttgaaccagggtgtgggccgaagatatgctcatgtggtgttgaggaaagcagacattgacctcaccaagagggcgggaga

SEQ ID NO: 648618 - DNA, 82 bp, Homo sapiens
gcaaaacagcagtgaccgagatcgtcaacaggtgtgtgcagtggcctcagggatccggaaagtctaggactgaacttctcct

SEQ ID NO: 648619 - DNA, 98 bp, Homo sapiens
aagaaatggggaaagtcaagaaaatagatgcttctaaatctgttgatgaacgactgcatttgcctccagacttgtcagacacagtgagccgctcaagc

SEQ ID NO: 648620 - DNA, 97 bp, Homo sapiens
gaatttgtatagagatgtgatgttggagaactacagaaacctggtctccctaggtaagccgcgtagcagatacgctgccagcaacacgggcgaccat

SEQ ID NO: 648621 - DNA, 75 bp, Homo sapiens
tgccttattttttctcatggatgttcttcttcgagtatttgtagaaggacgaggagttgtttttggtctctggag

SEQ ID NO: 648622 - DNA, 80 bp, Homo sapiens
ccgccaccatgcccaagagaaaggccctgggctgcatcttgtacctgctgtgcttccggcagcacccttttgaggatgga

SEQ ID NO: 648623 - DNA, 90 bp, Homo sapiens
gttcagtgttcgtaaaggatttcaaacaggatgtcctgcacaggcagcatgctgaccacctgggggtgaatctctacattaagaacttgg

SEQ ID NO: 648624 - DNA, 109 bp, Homo sapiens
aggaattgatagaagatttgaagactttgcggcacaagcaggtgatacatcctggtcttcaagaagaaatgagccgtcagactgctacagcattacctaccggtacctc

SEQ ID NO: 648625 - DNA, 100 bp, Homo sapiens
gcacaaaccagggctcgccatgaagccaggtttcatgtccttagcaagctactgagtttcatggcacctattgaccatactacaatgaatgatgatgcca

SEQ ID NO: 648626 - DNA, 75 bp, Homo sapiens
cgcctttgccgatccgccgcccgtccacacccgccgccaggccctgccctgggagaagccctgccacacgtcgtg

SEQ ID NO: 648627 - DNA, 75 bp, Homo sapiens
ggtgcatgagcaagctgctggatggcattcagaaaatatttacaccagcagctccagttcataccaataaagaag

SEQ ID NO: 648628 - DNA, 80 bp, Homo sapiens
cgagcgctcaggatggaggaagactcgatccgcctgcctgcgcacctgcttctgtcaggccaagcagaaggcagccttgc

SEQ ID NO: 648629 - DNA, 76 bp, Homo sapiens
atagactacattagtgtgtttgatgtcaaatcaggctgccaatagctacctgcgagaccagtggttccattctctg

SEQ ID NO: 648630 - DNA, 82 bp, Homo sapiens
cgacaagccgctggcagccgcggatctcaccgccgctcagggtggtgatgatgtccagcaactctgtgaagcaggagaagag

SEQ ID NO: 648631 - DNA, 101 bp, Homo sapiens
tctgcagccacatactatccgtttgttcaggaaccaccagtgacagagtgagcgaagcaggtgttcacagaccccatgttggtggaattcatggtcgaagt

SEQ ID NO: 648632 - DNA, 100 bp, Homo sapiens
atgacaaggcctaccatcgtttcttcctgcctttgggccgtcaggcagttggttgggacccgctccaaccctcgtgccggtggtggtgtgcacattgagc

SEQ ID NO: 648633 - DNA, 90 bp, Homo sapiens
ggttccaagcagaaggaggtctgcatcaatccctaccactataagagagtagaaagccctggttcgggatgagtatcggcaggactacga

SEQ ID NO: 648634 - DNA, 83 bp, Homo sapiens
aaccacttctctacatcccatctcaatcagaattactagattttctctcaaactacgagtttttcccaggtcatgagtctcgg

SEQ ID NO: 648635 - DNA, 98 bp, Homo sapiens
ctgggggccgctgagccccgcggttcagaaagatgatggtggtgctaccccagtacaggatgaacgggattcagggtcagacggtgaggatgatgtaa

SEQ ID NO: 648636 - DNA, 106 bp, Homo sapiens
cttttctttttcacagagaagatcttgaagattcttcttaagcagaaaaatgagggtaaaatccagtacaaggaatatatcattgaaggatttgaaaacatgccag

SEQ ID NO: 648637 - DNA, 50 bp, Homo sapiens
gattaagattaacttcaagttggtgaactactgagttcttcattatgtct

SEQ ID NO: 648638 - DNA, 75 bp, Homo sapiens
acgagggcatatatgaagaaggcatttctattttagaaagcagttcgattctggatgaaattgaagaacataaca

SEQ ID NO: 648639 - DNA, 100 bp, Homo sapiens
ataatgatgagggacaacctctttgaaattgtaacaacgtctcgaactttctatgtgcagaatgtgacagtgatgataacatgggtgccaaaaatacttc

SEQ ID NO: 648640 - DNA, 90 bp, Homo sapiens
cgggctgcaacctgcagcacatcagcgaccgggagaacatagacggattcaagccaaaactcgagaatttagggaacgacaagctcgaga

SEQ ID NO: 648641 - DNA, 101 bp, Homo sapiens
agggcaacaattttctgtacaccaatggaaagtgcgtcatcctaaggaacatcgacgtgtctgtgggaggttatgtttatttgagacttctccatcgggat

SEQ ID NO: 648642 - DNA, 50 bp, Homo sapiens
ccagaccaggagaggatgtgctccaagcactacaaacaccactggtttcc

SEQ ID NO: 648643 - DNA, 100 bp, Homo sapiens
tgatcttgaaggtttacacttgtcaacttcctcttcagtcatcagtactgaatctggatatggatctgaatccagcttgcgtcgacatggctcaatggtg

SEQ ID NO: 648644 - DNA, 83 bp, Homo sapiens
aggaaactgagaggagaagatcaagaggtggagctggttgtagattatgtgacttaagagattaaaattaatttggttgctgt

SEQ ID NO: 648645 - DNA, 96 bp, Homo sapiens
aggggatattatgatcactgccatgaagacaaatgcttagctttttaaagatgacatcaggtatctgttgacaatggacaaactatggcggaaaag

SEQ ID NO: 648646 - DNA, 100 bp, Homo sapiens
gggcagccggaaggacaccaagatgcggatccgggcctttccggaagctctgatcatggcaagtatggatcatccacacctagtccggttgctgggtgtg

SEQ ID NO: 648647 - DNA, 74 bp, Homo sapiens
ctaaagaaagctttaaaagaaaaagaaaacagattattattgcaacaaaggatgttggcaaaggatgaactgat

SEQ ID NO: 648648 - DNA, 98 bp, Homo sapiens
gcctgtgtggtggactgtggcacggggaaatctactttcttcaatgtgttaaccaatagtcaggcttcagcagaaaacttcccgttctgcactattga

SEQ ID NO: 648649 - DNA, 51 bp, Homo sapiens
aaactacaggcggggacggcttctcgtgtaatgttcaagctcagaaatgcc

SEQ ID NO: 648650 - DNA, 100 bp, Homo sapiens
cggagccgcacaaaccagggctcgccatgaagccaggtctcccctgccaaatccaccctagcccactgaagcgctccatgtcactcatccctacaagccc

SEQ ID NO: 648651 - DNA, 75 bp, Homo sapiens
tgaataaaactgaccatagccagagaacagccctccatcttgcagcccagaagttctccagtgctgatgaagcgg

SEQ ID NO: 648652 - DNA, 100 bp, Homo sapiens
gagcatggcttggagcacttcctattccactggattgggaaagaccatggcagggcatccgtttccgaggctttagtatccctgaatgccagaaactgct

SEQ ID NO: 648653 - DNA, 98 bp, Homo sapiens
ctggacacagcaatatctctgggctttcacagggtccttctcccacacctgaggatgtctccatgaaggaagagaatctctgccaagctttttctgat

SEQ ID NO: 648654 - DNA, 82 bp, Homo sapiens
cgccggtatgagcgcccctcgccaccccgtgtcccaggcccggcctttctgacaagagacacgatgaggcgagtggtacgac

SEQ ID NO: 648655 - DNA, 82 bp, Homo sapiens
ggatccccagcaggagcaggagcgggagcgggagccaccttcctcgtcacgtttggaaactcagagaaacctgaaactatga

SEQ ID NO: 648656 - DNA, 100 bp, Homo sapiens
cccaacttcaccttcaacttgggcttctcgggcaagttctatcatactggccaagattgacagacacctaatattcatgacttgagaatattctgcagct

SEQ ID NO: 648657 - DNA, 74 bp, Homo sapiens
cttttgtgaaagtgtataactacaatcacctaatgcccacaagggtgtccgcaatgttgccagtgtctgtctgc

SEQ ID NO: 648658 - DNA, 96 bp, Homo sapiens
gaaacatccaagaaaaatgtccttaaagcaattgagcaggctgatctactgcaggaggcttattatgcccgtgatgctctggctaaaaacctctac

SEQ ID NO: 648659 - DNA, 89 bp, Homo sapiens
atttacagcagatgatatcaacaagatattctcccaggagtacatcaacctcctgctgtccatgtatttcttcgtgctgggaatcctgg

SEQ ID NO: 648660 - DNA, 50 bp, Homo sapiens
cacccggcagatatccgtgaaggctctagcatggcggacaccgacctgtt

SEQ ID NO: 648661 - DNA, 82 bp, Homo sapiens
ggtttgcgcctctgggcatgtagtctacacaggacctgagaatctgagaaactgcaggtgtcaaattggtttgctaatgcaa

SEQ ID NO: 648662 - DNA, 83 bp, Homo sapiens
cgccccgggccccccagcatgaagaccccggcggacacagccggcccgctggggctggaggcacgggcccatcaacgtgaacc

SEQ ID NO: 648663 - DNA, 96 bp, Homo sapiens
ggcaatgagcctgagattggggaggccctgaaggaggacgtgggaccaggcaaggctctattccgttcgctggttcgccacctcaggggaacgatg

SEQ ID NO: 648664 - DNA, 100 bp, Homo sapiens
aagggaattggccaatatgatatacaagacaaggtgaagcctcggaagcatcaacaacagcaacttgtgattggcggtgaccggatattcagttgcacat

SEQ ID NO: 648665 - DNA, 74 bp, Homo sapiens
ccatggtataagaactgtatagagaggctgcagcagatcttcctacagacgcaaacatgcagatctttgtgaag

SEQ ID NO: 648666 - DNA, 50 bp, Homo sapiens
ggagacatggaccgcggcgagcaagaacaaaatccagtctcatagcagag

SEQ ID NO: 648667 - DNA, 90 bp, Homo sapiens
cggccggccagccgaagatggtggcggctactcctcctgcgtatctggtgcaggccgtgagagcagcgggcaagtgcgatgcggtcttca

SEQ ID NO: 648668 - DNA, 75 bp, Homo sapiens
cattcttctggagcatggacaagcgaatttcagtcagtgggactcattctcacagttccggtttgctgaggagaa

SEQ ID NO: 648669 - DNA, 101 bp, Homo sapiens
cccagacggctcacctgtgcgggatggaacaaaaggttcatcatgcctagtggcgtataagaagaccccgccaccggtccctccacgcaccacttcaaagc

SEQ ID NO: 648670 - DNA, 82 bp, Homo sapiens
atgaaaacatcgtggccctgtacgacttccagggagtgcatccgccccaacccttttccccctcgtctcctgtgagaattcc

SEQ ID NO: 648671 - DNA, 100 bp, Homo sapiens
cggagcctcccctgcagcgactcggaagattcgaggcggcgggggacaagtcggcgccccagagcggacgaggctgaagccgacgtagcttctctgaaca

SEQ ID NO: 648672 - DNA, 96 bp, Homo sapiens
taactggtctggagggtggcatcatgcaaagaaacatccagctctgtcacccaagctgcagtgtggtggcatgattgtagctcactgtaactttga

SEQ ID NO: 648673 - DNA, 88 bp, Homo sapiens
gtgctggaccgaaacctggccgagaacatctcccgggtcctctatcccaatgacaatgcttcttctcatatcggtaattccactcagg

SEQ ID NO: 648674 - DNA, 145 bp, Homo sapiens
acagagggccagaaaaaatcagaccagaatgttttgagctacttcgggtacttggtaaagggggctatggaaaggactttgcctcccgggccaaactggcagttcaaaaactagtacagaaagttggattttttggaattttggc

SEQ ID NO: 648675 - DNA, 51 bp, Homo sapiens
ccaggttaccctaacagcaggaaggttgtctccagtgatccacaagctcag

SEQ ID NO: 648676 - DNA, 100 bp, Homo sapiens
ccaaaatgctattgccctgtcttcatcaacatttaatcaggaaatcctcattgacgattcaatttgttgaaggccaatttgtggactcctacgatccaac

SEQ ID NO: 648677 - DNA, 100 bp, Homo sapiens
gggcgacacgctgggcgtcggcaccttcggcaaagtgaagaggtcaacatatttcactggcacctattcacaagcttgaagaagctctgtatgaatacca

SEQ ID NO: 648678 - DNA, 90 bp, Homo sapiens
aatcctaccatgtcagccttcccagtagctggaactacagagaccatgaaacgtatggtgcaatagccctacttttggtgggaaaaatat

SEQ ID NO: 648679 - DNA, 96 bp, Homo sapiens
accagatttgactgcatttgctaaacaatttgacatacagctgttgactcacaatgatccaaaagctggattgccttttgcaattcttacttcaag

SEQ ID NO: 648680 - DNA, 75 bp, Homo sapiens
ctgatagccactacctcctctttggggccccaggaacctataattggaagggctcccaccccgtggccaggtacc

SEQ ID NO: 648681 - DNA, 50 bp, Homo sapiens
caggtttcggcacatggagattgatgcatgaattgctggaggaagcccgg

SEQ ID NO: 648682 - DNA, 100 bp, Homo sapiens
gggtggatggcataagacagtttaaacatctcccagatggatacttatccgctttttccccttggagtcctggcagattggcaagatagggacggtcatg

SEQ ID NO: 648683 - DNA, 100 bp, Homo sapiens
ctgggcgcggattcgccgaggcaccgaggcactcagaggaggtgggaggaggagctcgccaagcgcatgaaccttcagaccatggtggacacgctgcagg

SEQ ID NO: 648684 - DNA, 83 bp, Homo sapiens
cagattcgcagtggtcgcttcttctccttgacgttggaacttgccaggaatccagcaatgatgcaggagatgatgaggaacca

SEQ ID NO: 648685 - DNA, 100 bp, Homo sapiens
agctgtgcgacctcttctgcggccggcctgggcaggtgtcttcctcgagaggcaggcaggggatcccggacgtaacgatgactcggacatagacatccag

SEQ ID NO: 648686 - DNA, 101 bp, Homo sapiens
agacaaggatgaagacctccatgatgagccatctccacttaatgactgtctcacattggccggcaacttgttccagggagaagcctccagtggagtaggac

SEQ ID NO: 648687 - DNA, 98 bp, Homo sapiens
acaaatttttggatgatgatggatccatttctcctattgaggagtcaacgaaaagcacaatagtgaggctattatttcgcttctatgagcctcaaaag

SEQ ID NO: 648688 - DNA, 100 bp, Homo sapiens
cagtgcagcgcggagtgggcgatgccagcgtgccaggagcctcctcaacaagcccaagagtgagatgaccccagaggagctgcagaagcgagaggaggag

SEQ ID NO: 648689 - DNA, 82 bp, Homo sapiens
caaggatgtgaaagaggctgtcagaaagctggcttatcaggtagttgatgtcacttggcgatattcctgcaaacatgaagag

SEQ ID NO: 648690 - DNA, 49 bp, Homo sapiens
gttgttgcagcaagcgattcagggaggaatgatcaattggaatcgtctt

SEQ ID NO: 648691 - DNA, 90 bp, Homo sapiens
cgccttccccaggcagtggaaccttcgggctcctgtactactgagcgagtgtgcttgatccagggaacggttgaagcactgaatgcagtt

SEQ ID NO: 648692 - DNA, 75 bp, Homo sapiens
cgccggcagaggatccagtgttcaccatcctggccccggaagatcatgctttacgattatggaatatccagacgg

SEQ ID NO: 648693 - DNA, 50 bp, Homo sapiens
atcttcatgatgaaatttctgtaaatgggcagagcggcttgggtaaatcc

SEQ ID NO: 648694 - DNA, 83 bp, Homo sapiens
gagagtgggcgagaacgtccactgcgggccggcgaaagctgaataccctctaccatctgctttggtcagggtgccgctcgagg

SEQ ID NO: 648695 - DNA, 82 bp, Homo sapiens
ttacaagcatgagccaccgccgccaggtaaattcgaaccaccattatttcacccgaatgtgtacccttcggggacagtgtgc

SEQ ID NO: 648696 - DNA, 75 bp, Homo sapiens
tgtgctacaggaggtggtgcttacaagtttgaaaaagattttcgcacatattgcggaatgctgcagcactcctta

SEQ ID NO: 648697 - DNA, 101 bp, Homo sapiens
cgcgggcatcctggacgccagcaccgcggcgcagagggttattttggagctgttggagcactccttgagctgttgaagatcccgtgatcattacctgggga

SEQ ID NO: 648698 - DNA, 100 bp, Homo sapiens
agagagaaaattgagacggagctaagagatatctgcaatgatgtactgttccagagaggtggatcgcatggtctccacgcccatcggaggcctcagctac

SEQ ID NO: 648699 - DNA, 101 bp, Homo sapiens
cgagaccgtgaccgagagcgtgaccgagagcgcgaatatcgtcatcgttagaaggcaagataacccctgtgacagaaggctactgttgctgtaacaaaggg

SEQ ID NO: 648700 - DNA, 88 bp, Homo sapiens
gatcggcaactatggcatccccccagatgaaatggatgagttcggtctctgcaaggtttccaaggtgctattgggagctcatgcactc

SEQ ID NO: 648701 - DNA, 90 bp, Homo sapiens
aggccaaactggtaaatgacgaaggggcttcttccagagccaaggaggaagggttgtccgggtatcattgcccagtgcctaagatctttt

SEQ ID NO: 648702 - DNA, 100 bp, Homo sapiens
tcctcacggctcttcccggcgctctcctggctcccttctgccccagctccgtctcggcggcggcgggattaatacccctcgaagacaaggaggacttggg

SEQ ID NO: 648703 - DNA, 82 bp, Homo sapiens
cgcagtggtcgcttcttctccttgattaaaaggagcccaagccccatctcatcctagcacaccctcctccactgtcctggca

SEQ ID NO: 648704 - DNA, 82 bp, Homo sapiens
cctcggcctcggagcaacgagcgcagcgccgctcaccatggatgatgatatcgccgcgctcgtcgtcgacaacggctccggc

SEQ ID NO: 648705 - DNA, 100 bp, Homo sapiens
tcaggctgcaacaaggagaagagccatggaaacaggaggaagaattcccaagccaaagctttccaggttttagatggagcaggattagatattgatttcc

SEQ ID NO: 648706 - DNA, 100 bp, Homo sapiens
ggagaatactaaccctgcacagattgtgatggtgatgtggaatatactaaagcctagaacgcacctcctctggatcagctcagctactatttaataaaac

SEQ ID NO: 648707 - DNA, 100 bp, Homo sapiens
cagactctgcgaaaggccgagagaagctggtcctgctcacgagagaaaaaggaggaccttgcctcatagtattcgatcagattcagaagatatctgttta

SEQ ID NO: 648708 - DNA, 90 bp, Homo sapiens
ccagcgagatcctcggggccccagaggccgcggacaccgacctggaggcactgccgccctgcactgtagcagatgcctaaataaagtgtg

SEQ ID NO: 648709 - DNA, 83 bp, Homo sapiens
tcaaggagctggacctctacctggcctacttcgtgcgtgagcgaggtcagggaagtcaaagatgcatccctgagttcttccta

SEQ ID NO: 648710 - DNA, 90 bp, Homo sapiens
gtgattgtcagtttcctgaggcctccccagccacgctttctgtacagcctgcagaactcttgcagttccccacaatgatgaatggacccg

SEQ ID NO: 648711 - DNA, 83 bp, Homo sapiens
tgctgcaggccatcgacccccagagcaaccacttctcagaacttctggatgagttttcccagaacgtcttgggtcagctcctg

SEQ ID NO: 648712 - DNA, 74 bp, Homo sapiens
caggcagaccttgcagtcaaaagaacggagaccaacctgggctgaagaaagaagattaaatgctgaaacatttg

SEQ ID NO: 648713 - DNA, 83 bp, Homo sapiens
ctggaacatgcagagtctgcacaattggaaaatggatataccttatttgattatgatgttggactgaatgatataattcagct

SEQ ID NO: 648714 - DNA, 88 bp, Homo sapiens
catcacagatcggaacggaggcctgtgagtgacaaaaagagtagtccccagaaagaagttaagtatgaacccttttcttttgctgatg

SEQ ID NO: 648715 - DNA, 80 bp, Homo sapiens
cgatccagcctgcggagcctgtggggcaggatggccgagcctcgatttaacaacccctacttctggccccctcctcccac

SEQ ID NO: 648716 - DNA, 88 bp, Homo sapiens
tgccgttgtagacggaagttattaacctacttagatcgacttgcaacatatgagtatttgactacagtcattccttatgagaaaaaaa

SEQ ID NO: 648717 - DNA, 90 bp, Homo sapiens
aaagttcttatttacagaatcgccctggtacctgacagtgtaaagaaggagctcctacaaagaataagaacattccttgctcagcatgcc

SEQ ID NO: 648718 - DNA, 50 bp, Homo sapiens
gtcaagtggtctgaactgataaaaattggctttccttaaagtttcccatg

SEQ ID NO: 648719 - DNA, 100 bp, Homo sapiens
cacaaaagagtctccgcggtggaggtctgcgttgctcttgcttttcctcgctggggtgtacgtatgagcccagaggacctggtcggcccttgtaccaaag

SEQ ID NO: 648720 - DNA, 100 bp, Homo sapiens
caaagcttgcgaggtggcgttagaaatgcatcttctgcagacaccgggttaagagggtctctggagcctgcatccagtgttcctacggtcgctgcccggc

SEQ ID NO: 648721 - DNA, 100 bp, Homo sapiens
tcaactatgatatccataccctgcggcaggttcgaagggaagtaagaaacagatggaagtgcatcttagaagatttagaagaagaagaggacagtgctcc

SEQ ID NO: 648722 - DNA, 83 bp, Homo sapiens
atccccaacggggaggccaacgtgaagaagttgggcccgaaggcatcctgcagaacggggctgtggacgacagtgtagccaag

SEQ ID NO: 648723 - DNA, 100 bp, Homo sapiens
cgctgggatgtcgacgactgggacaatgagaacagctctgcgcggctttttgagcggtcccgcatcaaggctctggcagcatggcggacaccgacctgtt

SEQ ID NO: 648724 - DNA, 74 bp, Homo sapiens
gaggcgtctgggatggtgtgggaccggatgccttcaattaagttgcagagttctgatggagagatatttgaagt

SEQ ID NO: 648725 - DNA, 83 bp, Homo sapiens
atcaggacctcctgcaggtgaagaccggcctcagtctggaggtggcgacctaccggtgtgatgaatgcagactctgctaccat

SEQ ID NO: 648726 - DNA, 83 bp, Homo sapiens
caacatgatagagcagagtggaccaccccatgaacctcggtaaagggagaagatgaggaagagaacaatttggaagtacgtga

SEQ ID NO: 648727 - DNA, 90 bp, Homo sapiens
gaatgcttgcgccaggcctccctggagctcaaaaacagtcggaagctcgccaagatcctggaggtatttctgggaaaagccagcttctgt

SEQ ID NO: 648728 - DNA, 90 bp, Homo sapiens
gtttgacagagccgtgtgctgtgtgggcttctccaaatctgttgcccccaagtttcctggcagtgtgtgatactgaggaggtgagcttgt

SEQ ID NO: 648729 - DNA, 104 bp, Homo sapiens
gacacctgggtttgctccatgaaccctgatcctgaacaggaccgctcctactccaatgtggccagatgacctgcaaaaccacacattcctgcacacagtgtact

SEQ ID NO: 648730 - DNA, 78 bp, Homo sapiens
gggaacattatcacaaagctatcatcctgccaaactccaggctcagatgtcacagctgcaagagaaatagtgtggtta

SEQ ID NO: 648731 - DNA, 75 bp, Homo sapiens
gacgagaaacacgggagactcccggtaacccccaacttgccgaagcccctgaatgtgacagtgatccgcaggggg

SEQ ID NO: 648732 - DNA, 90 bp, Homo sapiens
gcgcgcccgggccgggcggcgcgctgcccacttgcccagcctgccacaagctcaaggagttatgaccactcagaaaattctgatttggtc

SEQ ID NO: 648733 - DNA, 90 bp, Homo sapiens
gccgtggccccgagggcggatccgaggtgcccctgagccagcctccagaggatgagctggataggctgacgaagaagctggttcacgaca

SEQ ID NO: 648734 - DNA, 98 bp, Homo sapiens
tccacctcattttagagtatcaagcaggatcttagaaatgaagttgaaaaattacgcaatgaagtgaatgaaagagagaaagcaatggaaaatcgtta

SEQ ID NO: 648735 - DNA, 75 bp, Homo sapiens
ggatgaggcccggcggtcgcgcctcaaccggctgtacggaatccaagtgctctggaactgaacccgcagtatctt

SEQ ID NO: 648736 - DNA, 73 bp, Homo sapiens
gaccagctgcgttcagcagccgccctgcttcccgctcaagatcctgttcatcttcatcgacagcgaccacacc

SEQ ID NO: 648737 - DNA, 83 bp, Homo sapiens
agcctcgagtttagccacaccaggctggagaatatggtgcagaggccctccacggtaccacatcgaggtgaaccgtgttcctg

SEQ ID NO: 648738 - DNA, 82 bp, Homo sapiens
agccggagctgggcgcggattcgccgaggcaccgaggcactcagaggagaatgacagggtccagaaactggcgagccacgag

SEQ ID NO: 648739 - DNA, 97 bp, Homo sapiens
gggagagcgcgttggtggcgacggccgagtcaggcaggtccacgagatccagtcttgcatgggacgcctggagacggcagacaagcagtctgtgcac

SEQ ID NO: 648740 - DNA, 100 bp, Homo sapiens
attaaatactggtttcacactccaccaagcatcccattacagatagaagaggacaaattgatggccaggagatcactgccaccgccgtgctggccccctg

SEQ ID NO: 648741 - DNA, 83 bp, Homo sapiens
aaggaataagcctggaagaaaaagatacaacgaactagcacaacgaggtccccctctacacaagaatctggatgcacgagaaa

SEQ ID NO: 648742 - DNA, 109 bp, Homo sapiens
tgtgagagtctcatttctatgcacagtgtttctcaggaggatggagctagttagctgtctgttgtctgtagcccagattggctttgtgctggggcattccttcaacacc

SEQ ID NO: 648743 - DNA, 82 bp, Homo sapiens
acacaatctaaaaagaattaggaaggtccttcagataacgaaggaggcccaacttcattcaataaggagcctgacggattta

SEQ ID NO: 648744 - DNA, 108 bp, Homo sapiens
ggtgtaccgcggcgagaagccccagctgcactacgcgacggtggatgtgatggcagaagacagagacaccattctggaccccaagatagacgcttcatgttaaggacg

SEQ ID NO: 648745 - DNA, 75 bp, Homo sapiens
ccccgaactccaggacagcatccaggcctcattggacagcattcgaggtcaaaatgcagatcttcgtgaaaaccc

SEQ ID NO: 648746 - DNA, 100 bp, Homo sapiens
tctcttctcgccctggcggggaagccatcccaggcctcaggacctgagttctccgacgcccacatgacatggctgaactttgtccggcggccggacgacg

SEQ ID NO: 648747 - DNA, 100 bp, Homo sapiens
gagtcttgttccttattgtggttcctgctgtggttttgatcatgttgttaccctcggacgtagcccggcttgtattggttggggaatggcggtcaatgtg

SEQ ID NO: 648748 - DNA, 82 bp, Homo sapiens
tactatccgtttgttcaggaaccaccagtgacagagcactcaaatctacaggattgcgaacgtctgatcccaggttgaaaga

SEQ ID NO: 648749 - DNA, 99 bp, Homo sapiens
tcatctgtgagaacagaagctttatctgtgatagaattgctgcttaaaaaacttgaagatgtgcccgtggagaagctggccgccatgccagccttgcgc

SEQ ID NO: 648750 - DNA, 100 bp, Homo sapiens
ctgtctgggttctgctgtcaatggtgttgtccaacacccatcatactgactccaagccccttgctctccagtatccacttctggagtactctcagtcctg

SEQ ID NO: 648751 - DNA, 88 bp, Homo sapiens
acaatagcaccaaggcagcgtgggactccatccagtcattttttctggcccccaaagacaaaccaagtggagacacagcagctgtatt

SEQ ID NO: 648752 - DNA, 100 bp, Homo sapiens
gacctcgtagccatcacggagctgatgcatgttgactgcattcagccagtgccaaaagaggagcccagtcccgctaccaaattccagtccatcggggttc

SEQ ID NO: 648753 - DNA, 75 bp, Homo sapiens
cagatccagaggcaacagggacatggccacctgggacgaaaagtttgatgaaggccggaacaactttgaagggga

SEQ ID NO: 648754 - DNA, 90 bp, Homo sapiens
aatgaccttgctgttacctacttctttcatcaggcttcaacggaccacaccaaaatgccatctcaaatggaacacgccatggaaaccatg

SEQ ID NO: 648755 - DNA, 100 bp, Homo sapiens
cgggactagtggaccagctggtgaaggcagacagcgagtggcgacgatggtgatattcatgaggatttttgcagcgtttgcagaaaaagtggccagttac

SEQ ID NO: 648756 - DNA, 75 bp, Homo sapiens
ggaaaaatccagagaccccctgaagattcgacagcatcaactgggcaagtggtgaggatgaccatgtagttgcca

SEQ ID NO: 648757 - DNA, 99 bp, Homo sapiens
gtataatatgcgtgtggaagactacgaaccttacccggatgatggcatgggttttctggatatgccgcagaaggatccgtgccagaagcaagcctgtga

SEQ ID NO: 648758 - DNA, 100 bp, Homo sapiens
ccggaaggatagcctcagcgtcaacgagttcaaagagctggttacccagcagttgccccatctgctcaagtcataccctaatgatcccagcaagataatg

SEQ ID NO: 648759 - DNA, 100 bp, Homo sapiens
cgggctgcggcgtgtgcgcgcccgccagctgctccggagatacgccttagattgtaagcaaaagaaatcaaggtcaagatctggaagcaagaagaaaatg

SEQ ID NO: 648760 - DNA, 74 bp, Homo sapiens
tgactttcatgaaggcgttagagctgaggatgtctacagttgctttcgcttcctacgtgatgtttttgcagatg

SEQ ID NO: 648761 - DNA, 100 bp, Homo sapiens
gcgccgccatcatggacaccagccgtgtgcagcctatcaagctggccaggcctcaggcccagagccagcacgagacatccgctgcgagttctgtggtgag

SEQ ID NO: 648762 - DNA, 101 bp, Homo sapiens
tgaggatcgaatcttcactcccgctgtctcagcagtctacagcacggaatgaatctgaagtctgctgcagtaaaacacagaaggctttaaaatgttttctt

SEQ ID NO: 648763 - DNA, 100 bp, Homo sapiens
gagcacaacaggagctacgaggagttgagagattggaacaattatcaggtcattaggatgctgtcctacggaaggagagctgcatgatctgattgcagag

SEQ ID NO: 648764 - DNA, 100 bp, Homo sapiens
cagtatcatgctggccaagaagatcatcattaaggacggaggcacgatccccttggaaaggacttccagaactgaccaatgagaatgcccagtactgtcc

SEQ ID NO: 648765 - DNA, 83 bp, Homo sapiens
acctgcgtccagcgagaggagcgcggcagggggccgggggcccagatggccaccatgtctgggagatggaagcgaaaactgac

SEQ ID NO: 648766 - DNA, 100 bp, Homo sapiens
ttttcggcgcctgttacattctctatctgcgcaccttggagtccaagcttgtgctctttgatgcggtgacctgccagcacctgccgcagccttcgtccgg

SEQ ID NO: 648767 - DNA, 90 bp, Homo sapiens
aggtgatcctggtatttcaagcattggtcttccaggtcttcctggtccaaaggtctcccacgtcttcaccaactttggcaagggcatccg

SEQ ID NO: 648768 - DNA, 90 bp, Homo sapiens
agtgcaagcagctgtccgagtcccaggtcaagagcctctgcgagaaggtgtagaatgagccaaggagactcaaacccagcagctattccg

SEQ ID NO: 648769 - DNA, 50 bp, Homo sapiens
ccgaggtggccgaggcgctgaccaaggcaatctgaaggcaaatcctgttt

SEQ ID NO: 648770 - DNA, 90 bp, Homo sapiens
aaaggctgtcgcaaggaggaagagtgaaagcagcagcagtagcaacatctccaccatgttggtgacacacgattacacggcagtgaagga

SEQ ID NO: 648771 - DNA, 98 bp, Homo sapiens
cccccacccaccgcgccggcgctcccttgtcacgcctcgggaagcgcgcacctgccaagcagtctcggaagggtgctgacctggaccgggagaagaag

SEQ ID NO: 648772 - DNA, 97 bp, Homo sapiens
atttaaaagctgaaaatttacttctggatgccaatctgaatatcaaaatagcagtatgccgagattttgctgtcctggaggaccacaccctggctca

SEQ ID NO: 648773 - DNA, 137 bp, Homo sapiens
aaactcctgaggagattcgcaagaccttcaatatcaaaaatgactttactgaagaggaggaagcccaggactcctccgtcttgctcatgactgggtcccctgggcagagccaggtcctggcagagagcagatatcca

SEQ ID NO: 648774 - DNA, 100 bp, Homo sapiens
caaaaatcttaaccttcaaccatctggggaaaaggcaaaaatcccatctaccgcaactctcagttcgagagtaaagcagcctgaaaaggtgatggcaaag

SEQ ID NO: 648775 - DNA, 95 bp, Homo sapiens
ctcagtacctctgcaatgttcgacacatctttacgattccaggacaagcttttgtccccaaaccagaggctaggcagctggaagagaaagaccga

SEQ ID NO: 648776 - DNA, 98 bp, Homo sapiens
gaatgtcatcaagcagcacattcaaggtgaaaggtgtagcagtcactcggcctacacccacagcatcgaccttgtgaacccagcgacctgactgcctt

SEQ ID NO: 648777 - DNA, 87 bp, Homo sapiens
ctggcagtgtgggacacctgcttggagcgtttctggtgaaccaggctgttaagtgcaccagaaaaataaatttagaacagtgtgaag

SEQ ID NO: 648778 - DNA, 100 bp, Homo sapiens
ctgcttttcggttccgggtcttggccccgtccttacctcacagatgcagacaacatatgttttacagagtcttcatttgaggattccagaaatttcaaat

SEQ ID NO: 648779 - DNA, 75 bp, Homo sapiens
gcggagtggagctcagccaggggcagccggctctggtgctcccagaagagtgacttttttgaacgaaccattctg

SEQ ID NO: 648780 - DNA, 83 bp, Homo sapiens
tctatatctacaagggggtccgcaagcgagtgatagacagccaagcagagaaactgaaggagcttgacaaggagatccggccc

SEQ ID NO: 648781 - DNA, 75 bp, Homo sapiens
cagtggtgtaatagatgtaatcacaaagacatggagggttgatccattttctaagaaagattggtatgatgtgaa

SEQ ID NO: 648782 - DNA, 100 bp, Homo sapiens
tggaggatgtgcggggtgcgccggcagaggatccagtgttcaccatcctggccccggaagggagtggagcttggtttcgggatctcggtgctgcagacgg

SEQ ID NO: 648783 - DNA, 100 bp, Homo sapiens
gaaacaccactgaagcattgccaaggactggaatgtcacgtggaataccagcaaccccgacttcaccaagtgctttcagaacacggtcctcgtgtgggtg

SEQ ID NO: 648784 - DNA, 100 bp, Homo sapiens
gaggaggaggaggaggaggaggatgttgctgactataagtcgaaaggaaagtttgatggtgcaaagggtcctgctaaagttgcccggaaaaaggtggaag

SEQ ID NO: 648785 - DNA, 100 bp, Homo sapiens
ttggagagctcatctggaattttgccgatttcatgactaaccagtggtcctgacttgtcctgggcaagccaagtccattgcttctgctcctgggaagtgc

SEQ ID NO: 648786 - DNA, 90 bp, Homo sapiens
ggagaaccccacctccatcaaactgctgcaagctttcttcctggtggcagatgacatcatggattcatcccttacccgccggggacagat

SEQ ID NO: 648787 - DNA, 75 bp, Homo sapiens
gaaccacatccgtttccccaaattcaacttctccaagtgcagtggaggcttgcctcttgcatcagctgagacgcc

SEQ ID NO: 648788 - DNA, 75 bp, Homo sapiens
gcctcccacagtgctgggattacaggagaaatgctctcatatggagacaggcaagaggtggaaatcagagggtgc

SEQ ID NO: 648789 - DNA, 104 bp, Homo sapiens
ccatcctgaacgtctctccctgtcctagctctgtaactgtttacatgtaaacaggaacatcgataagtagtgtaaaaacttgcacaatgaaatccgaagccaag

SEQ ID NO: 648790 - DNA, 50 bp, Homo sapiens
ggagatgaggagaatcccctcaaaatgccacagggcccagtgggctccgg

SEQ ID NO: 648791 - DNA, 82 bp, Homo sapiens
acacaagcaccccaataacctcaagggactggtgattgcagctggaagtgcccatgaccgagctggcgtcctccgggggcgg

SEQ ID NO: 648792 - DNA, 50 bp, Homo sapiens
gacgacatgttgcttttcgtggagattcatgatgttgctatcaaaagttg

SEQ ID NO: 648793 - DNA, 75 bp, Homo sapiens
tggacctgcaggcggtgctgccgcgcgagctctacccagtcgaggccgccttccaggagaatgtggggagacagg

SEQ ID NO: 648794 - DNA, 100 bp, Homo sapiens
gccttcatacaagcaaaatgaagactttgactagggtccaaccagggcctctgaaaaatggaaccaaattctctgaggactaaagtcccagctttcttat

SEQ ID NO: 648795 - DNA, 100 bp, Homo sapiens
tacctcggggttctctcctgcccccaagctggattccacctgctcctacgaagcccgactttgatggtcctcgagagaagatgcagaaactgggagaagg

SEQ ID NO: 648796 - DNA, 97 bp, Homo sapiens
tttggcagacatcgagaagcataatgacattgtggacagtgacagcgatgctgaggatcgaggaacgttgtctggtcagtcttatgaaatccgacta

SEQ ID NO: 648797 - DNA, 100 bp, Homo sapiens
ggcggcaccatgcaggtcaccctgaagaccctccagcagcagaccttcaagatagacattgaccccgaggagacgtttcaccagtgatcattaaagaatg

SEQ ID NO: 648798 - DNA, 75 bp, Homo sapiens
gaactgtaatacttctggaatccagacagaatggagctgaggacagggactggcggcaacagcggaatattccga

SEQ ID NO: 648799 - DNA, 100 bp, Homo sapiens
cgaccgagagtcctggtgactttgaacatgctggtgccgctagccaagctgtcctgcctggaattcagaaggagctggcggacatcactttagaccctcc

SEQ ID NO: 648800 - DNA, 100 bp, Homo sapiens
ggattctgctcagagggacctctacagagatgtgatgctggagaccttccggaacctggcctcagtagcttagcagtgtctgcaaaaacgaatcttttcc

SEQ ID NO: 648801 - DNA, 75 bp, Homo sapiens
aatgccaacctcagcaccatcaagcaggagccggtgaaacctgaagaaggcagagatatggcaaacaggattggc

SEQ ID NO: 648802 - DNA, 49 bp, Homo sapiens
ttttgcaccactggatgttgtttactggacctttaacttgaaggaagtc

SEQ ID NO: 648803 - DNA, 50 bp, Homo sapiens
gtccacgtcgggtcagatccgacagaagcttccttggaaatcattgacta

SEQ ID NO: 648804 - DNA, 82 bp, Homo sapiens
agcgggagcgggatccccagcaggagcaggagcgggagcgggctccccacaggtgcaggaagccgccgcccagccatggacg

SEQ ID NO: 648805 - DNA, 100 bp, Homo sapiens
ccagcggcagcagcagcggcgggaggagcctccgggaatggagatgagaaggcagagccatcgcctcagtcttggtcttcactttggaagcatgacaagg

SEQ ID NO: 648806 - DNA, 82 bp, Homo sapiens
cgcgagcccagcgcctcggaggccgcccccgcggcggccgcgctcttcgcctgggtgagaagccctaccactgcaactggga

SEQ ID NO: 648807 - DNA, 100 bp, Homo sapiens
tgggggagctgaaacagaacctgtccaggagctggcatgacgtgcaggtctctagcgcgttcctcatgagagtgctggactcctacggggatgactaccg

SEQ ID NO: 648808 - DNA, 82 bp, Homo sapiens
tgttcctgccacagcggcttcgagctctcctctgatggcaggacctgccaagaatctccggcctgtgaaactgtgaggggat

SEQ ID NO: 648809 - DNA, 87 bp, Homo sapiens
agaggcagcgccatggcggagcagacctactcgtgagtgaagatagtccaagtcctaagagacagcgcctctctcattcagtctttg

SEQ ID NO: 648810 - DNA, 88 bp, Homo sapiens
tggcaggcaaccccaaagccgcgcgagcagtgggaggagcaatgagaggcaatcctccgcggcgagtcctttgcacatgttggcaaca

SEQ ID NO: 648811 - DNA, 97 bp, Homo sapiens
cctccccagtagctgggactacagtgtatgggtttcgacagaccatgatgaaattgagaatgtggccaaacaatttggtgcacaagttcatcgaaga

SEQ ID NO: 648812 - DNA, 75 bp, Homo sapiens
actgtcagaaaagagtagcctgggctgtctggaaatctgagcatacagaaactgctgtaaaagaagaagttgtgg

SEQ ID NO: 648813 - DNA, 100 bp, Homo sapiens
gtcatccccatggctgatgcagcaggcatcatccgctatgcaattgggggtccagattttggctatgtaactcgagggccccaaacagggggtatcagtg

SEQ ID NO: 648814 - DNA, 50 bp, Homo sapiens
acacacagacccagctggaactcgatgaagaagatgactttatgtgtaag

SEQ ID NO: 648815 - DNA, 98 bp, Homo sapiens
tcctcctccccaggcccgccgcctccctgccaagatggactcaccctgtcacccaggttggactgcactggcctcaacctcctgagttcaagtgatcg

SEQ ID NO: 648816 - DNA, 74 bp, Homo sapiens
ctttgagccctaccttactggacagtcaaatcaggccaagaagcttgagagaagaaaaatttcagaaaaattgt

SEQ ID NO: 648817 - DNA, 100 bp, Homo sapiens
ttggactgaccttctccgaagtgccttaacaacaattcttgactgttgggatccaggcaatctgaaagcaaatcctgtttagatgcaggcgaaggttcct

SEQ ID NO: 648818 - DNA, 98 bp, Homo sapiens
gggcgggcgagcgaggggctaacttcagcggtggcaccgggatcggttgccttgagcctggagatcatgaatcagacagataaaaatcaacaagaaat

SEQ ID NO: 648819 - DNA, 83 bp, Homo sapiens
ggggccagggaaccctggtcaccgtctcctcagaaaccaaggtgtatgttggtaacctgggaactggcgctggcaaaggagag

SEQ ID NO: 648820 - DNA, 49 bp, Homo sapiens
ctgctcttcagtacaatcctatcctgtgaagccacctggcagctcttta

SEQ ID NO: 648821 - DNA, 100 bp, Homo sapiens
cgccgacgacccagcagccgccatggctctgctccgagaactcccccactggaaaggattctgaaagaaatgaagtcagccctcagaaatgaagttgact

SEQ ID NO: 648822 - DNA, 75 bp, Homo sapiens
ggtctccggtgtggagttctggaaactgtgaggtgatttgcagtgctcggccttgttctccccatgtgggccata

SEQ ID NO: 648823 - DNA, 100 bp, Homo sapiens
ctgaaagtgataaaataatatgggaaaaacatcaaattcttgaccaatctaggaggagctaactgaggtacagatgaaaaaattatcctgccaacgtcca

SEQ ID NO: 648824 - DNA, 100 bp, Homo sapiens
ctaacaggatattcctcatgacattgctgtctggtagcatctccgcccccacttactgatactcctgacactacagcaaatgctgaaggagatttaccaa

SEQ ID NO: 648825 - DNA, 98 bp, Homo sapiens
gggatcttcgaaatcaagactcccagccgggttattaccctgaagggtattaatggcattcttgctgatgaaatgggccttggtaaaacagtacagag

SEQ ID NO: 648826 - DNA, 88 bp, Homo sapiens
gcgcggcagaggcttgcccgatcctcggccatgtcactgctctgcgtgcgcgataccggggagaccacgacgctgcctcctgggcgcc

SEQ ID NO: 648827 - DNA, 75 bp, Homo sapiens
tgagccccggaggcagagcggctgccatggctgaccccgcactacatctacccaccagccatcgtgcagcccagc

SEQ ID NO: 648828 - DNA, 76 bp, Homo sapiens
agagagacaactctgactttggtgcatgctattatgatgctaatcagtctatgtatgtgtttggaggctgtaccca

SEQ ID NO: 648829 - DNA, 100 bp, Homo sapiens
accacgacggcgccatcaccgagcgcttgatgtgcgcggagagcaatcgccgggacagctgcaagctggcgtgcggccaggatgggcagctgaagggctt

SEQ ID NO: 648830 - DNA, 75 bp, Homo sapiens
ccaacagcaacagagagagtccaggtgaccctggcaaagatgagagtgcacatttcgtcctgcctgaaggtccag

SEQ ID NO: 648831 - DNA, 95 bp, Homo sapiens
cgagagccagagagatgtcggatttcgacagtaacccgtttgccgacccggatctcaacaatcccttcaaggaagacatttgctctcgtctgaaa

SEQ ID NO: 648832 - DNA, 75 bp, Homo sapiens
gtggctatcgacttgcttgcaagaaatctgagaatgaagatgacagcgagtgggaagatgtggatgatgagaagg

SEQ ID NO: 648833 - DNA, 96 bp, Homo sapiens
aaagcgaaattggtcattctcgctaacaactgcccagctttgagagttacactgttagaccttatgatagccaagataacgagtgatgagccactc

SEQ ID NO: 648834 - DNA, 102 bp, Homo sapiens
aaggcccacctgtgtcctggttgagggtctccagggttctttggggcccgagaagccctacaggtggcaactactagcccaactgccaatactactggtact

SEQ ID NO: 648835 - DNA, 75 bp, Homo sapiens
aagctcctacttccagaaaaagtgctcctgggactccaggataccagtttttggctttcacccccaaccagtgac

SEQ ID NO: 648836 - DNA, 80 bp, Homo sapiens
tttcttacaagaagtcacaagtgacttaagagattaaaattaatttggttgctgttggttctgaacaaataatgagttct

SEQ ID NO: 648837 - DNA, 97 bp, Homo sapiens
gactgagctggacaaagaaataagtaccttgagaagtggcttgaaagcagtagagacagccaaacgtaccaagaaagtcgggatcgtcggtaaatac

SEQ ID NO: 648838 - DNA, 75 bp, Homo sapiens
agaagtttcagttcagtatgaagaaaaatttcagaaccatcacaaactggagctgctaagacacatggttgcaca

SEQ ID NO: 648839 - DNA, 98 bp, Homo sapiens
gccaaatagcaagcagtagttgttacacatttgtctcctctgagcctccggcctccataagacccaaaacagatgacacctcttcccagtcccccgcg

SEQ ID NO: 648840 - DNA, 83 bp, Homo sapiens
ggcagagcgcctcaaaaccgaaggagcatcagatccatgctgctgctgactcggagccccacagcttggcacaggctctctca

SEQ ID NO: 648841 - DNA, 100 bp, Homo sapiens
cgggtggacccgggatggcaaatacaatggccaatgtacatggtggactatgccggcctgaacgtgcagctcccgggacctcttaattactagacctcag

SEQ ID NO: 648842 - DNA, 90 bp, Homo sapiens
gtcgctgaggcgagggtgtcatgtcagacaacgaggacaagcgcagtaacagtatctccaagtcccctggccccagctccccaaaggagc

SEQ ID NO: 648843 - DNA, 97 bp, Homo sapiens
gcttgatacaacaactgtactgggagagctaggatggaaaacatatccattaaatgggagattcctgaaattccagaaagcatttcattctgtaaag

SEQ ID NO: 648844 - DNA, 100 bp, Homo sapiens
agaatgatagccagtccctggagctggtgcacaggttccagactttaagtttgccatgtacccaccgtcgatgatcgcaactggaagtgtgggagcagcc

SEQ ID NO: 648845 - DNA, 99 bp, Homo sapiens
agaacgaataccctatttaggttttaaacagagtctctaattaacagaagatggcaaagcccagccacagcagctatgtccttcagcagctaaacaacc

SEQ ID NO: 648846 - DNA, 83 bp, Homo sapiens
ctggaagtccaactacttccttaagatcatcgcttgcagccctgagtgatcgagagactcggctgcaggaggtgcgctcagcc

SEQ ID NO: 648847 - DNA, 74 bp, Homo sapiens
aggaagtagcgtggagccggtgccgagccggggcgaagctggatcccctagttgacaggcgggtcgagtctgaa

SEQ ID NO: 648848 - DNA, 100 bp, Homo sapiens
ggcagacggactcggtattggagctgaaggcggcggcagagaacttgccggtgccagctgagaaagaatcttcaagagggagacatagggaaaaggaaga

SEQ ID NO: 648849 - DNA, 83 bp, Homo sapiens
ctacagatgatagtttacgagaacattttgagaaatggggcacactcacagattgtgtgacttaattcagtgcacaaatgaga

SEQ ID NO: 648850 - DNA, 83 bp, Homo sapiens
aaatgcaaacatgatcctggattggatccttagccgtggatacagaaatctctgcaggcaagttgctccagagcatattgcag

SEQ ID NO: 648851 - DNA, 50 bp, Homo sapiens
cgcccgtccacacccgccgccagcccttcctggatctggagagagcagct

SEQ ID NO: 648852 - DNA, 100 bp, Homo sapiens
acaaaggttaccatgaaggaaatcttactgaaggcagtgaagcgaagaaaaggatcccagaaagtttcagtctccaaaaaaagttggtgatgacattgcc

SEQ ID NO: 648853 - DNA, 76 bp, Homo sapiens
cgctgcaccttcaccgcgtacccgggacccgcccgcccgcgggagttgtcgagatgtccacagaaggaggatttgg

SEQ ID NO: 648854 - DNA, 97 bp, Homo sapiens
tgctgtttggaaaggtggcaaaggatagcagcagatactaatggaccatactaccaaggaccagtccacctgaaccacacactctaaagaaatattt

SEQ ID NO: 648855 - DNA, 90 bp, Homo sapiens
aagctggccatcttcacagatgacgtgtgatgaaccaaggagtggcccctatggtagggactccagcaccaggtggaagtccatatggac

SEQ ID NO: 648856 - DNA, 77 bp, Homo sapiens
gttcgagtggacaaaatggcgaagatcgccaagactcacgaagaaatcatgagtggaggatctcaagtccacatttt

SEQ ID NO: 648857 - DNA, 75 bp, Homo sapiens
tgcaacatagagctgacattaactgtcagatctccagcaccctgccggtggcactactgagagacgaggtgccag

SEQ ID NO: 648858 - DNA, 50 bp, Homo sapiens
ccggcttcccgtctcgtcaccctctgcaatttatctcaaagcttcaagtt

SEQ ID NO: 648859 - DNA, 80 bp, Homo sapiens
gaaccctggggactacgacgtccctcaaaccttgcttctaggagataaaaagtcgagtaatcctgcctgtgtctgtagat

SEQ ID NO: 648860 - DNA, 75 bp, Homo sapiens
ggagagatcataatttggggttcaagattccaggaactggcgctgaagaccctggggacagatggcctttttctc

SEQ ID NO: 648861 - DNA, 75 bp, Homo sapiens
ctgctgcaggccatcgacccccagagcaaccttgctgagcgagagcgagaagcggcccttcgtggaggaggcaga

SEQ ID NO: 648862 - DNA, 83 bp, Homo sapiens
cggagatcctgatgaagttcgagcactaatatttaagaaagaagatgttaactttcagcaacaagccctccaagggttgtaac

SEQ ID NO: 648863 - DNA, 98 bp, Homo sapiens
ctgggacttcccgtccgcggcgtggaggaggcaatgagtgcatataatagtcatgaagagggcagattagtttaccgatatggaggagaacctgttgg

SEQ ID NO: 648864 - DNA, 100 bp, Homo sapiens
actggaccaagatcgagcccagcgtcaacttcctcaagtcgcccaaagacctgcctagagctggaacgttacctccagagcgagccctgctatgtttcag

SEQ ID NO: 648865 - DNA, 90 bp, Homo sapiens
gattgcttctcttctctcctccaagatgggagcttgcctgattgtcaacccatcggcctggaccccagagcccacccagttgagcgtgtg

SEQ ID NO: 648866 - DNA, 50 bp, Homo sapiens
atgaccgtcaccaactggttcaagacatggatttgattgacatactttgg

SEQ ID NO: 648867 - DNA, 98 bp, Homo sapiens
agtgccggcgctgggccttttagcgccacagttaatgtaaccaccaagaaaacgcggaacagaaagaacagcttcaaaagatgaaagacttcgggtct

SEQ ID NO: 648868 - DNA, 98 bp, Homo sapiens
gcagggcaagagcgatatcgagctataacatcagcatgcttttgataaagagtacaagatggcatacgatcgtctcacacctagtcaagtcaagagta

SEQ ID NO: 648869 - DNA, 100 bp, Homo sapiens
tggtatgaaagtacttctcatggataaagagacgacctgttcgagtacaagtttgtgaacagccgtctgataaacagtacattcctgcacaacaaggagg

SEQ ID NO: 648870 - DNA, 100 bp, Homo sapiens
agaggccccgagccccgtggatccgctggagcggagccggccgtacgcggtgctgcgagggcagaacctggatggaattgtcagccacttgaagaagcag

SEQ ID NO: 648871 - DNA, 74 bp, Homo sapiens
ctgaccaccgtgaacggacagtcccccccaggtgaagctcgtgtgtggagtgccacggtacaatcagacgacag

SEQ ID NO: 648872 - DNA, 100 bp, Homo sapiens
tccttctgcagtccctcgtccagccacccccaggcacgtgtggttctcaaatataggcattctgatgggaacttgtgtgttaaagtaacagatgatttag

SEQ ID NO: 648873 - DNA, 100 bp, Homo sapiens
tggacttagtgaagagcagatttcagaagaggaagcacataactttacagatggcttcagcctgcctgcattgaaggactgactgcattgcacagatgat

SEQ ID NO: 648874 - DNA, 76 bp, Homo sapiens
gatcattgaggtgcggacgctcagcggcgagatggacgtgtggtacaacctggtgctcctgattcctgacaatgcc

SEQ ID NO: 648875 - DNA, 80 bp, Homo sapiens
ccattgtggcccagtacagacctgaaggtactccaaagattcaggtttactcacgtcatccagcagagaatggaaagtca

SEQ ID NO: 648876 - DNA, 100 bp, Homo sapiens
ctcaggctccttcctactgtccgagggccaccaggccgccgggggcctgctgcgcccgggccacggcgtatgcctccgaggacggggtcctgaccgaggc

SEQ ID NO: 648877 - DNA, 83 bp, Homo sapiens
ctccagatggcgtcttccgtgggcaacgtggccgacagcacaggtttggtgcacctcgatttggaggaagtagggcagggccc

SEQ ID NO: 648878 - DNA, 98 bp, Homo sapiens
aacagaatggggaaggggagcctgtcacattatttgaggtggtgaaactggggaaaagtgcaatgcaggatcaatatggaaattatgtaatccaacat

SEQ ID NO: 648879 - DNA, 74 bp, Homo sapiens
ctcagggcctgccgccccattatgatgatgtcgaggaaatttggtgagcggcctccacctaaacgacttactag

SEQ ID NO: 648880 - DNA, 100 bp, Homo sapiens
gatcttctgagtaacggaggacaattcaccatagttttctttaaggataagccagagacatgggaaaaccaatggaagtgtttcaaagttcttctcttta

SEQ ID NO: 648881 - DNA, 75 bp, Homo sapiens
gagcccctgatggagccagaaggggagagttatgaggacccaccccaggatgttaaagtctttagtgaagatggg

SEQ ID NO: 648882 - DNA, 75 bp, Homo sapiens
tctctttctggcctggaggctatccagcaattaaacaaccaccatgtcgagcaaaaaggcaaagaccaagaccac

SEQ ID NO: 648883 - DNA, 99 bp, Homo sapiens
cgggtttgggaggagtatgccaaccagcatggccctggacagagctacagagacttctgaagtggagagtctgcgacctcctcggttcttcaatgaaga

SEQ ID NO: 648884 - DNA, 75 bp, Homo sapiens
aacatggtggacagaaagtcagcctcttgtgaccatgaagattatgacccacaaactgtgaggctgggaagtaga

SEQ ID NO: 648885 - DNA, 100 bp, Homo sapiens
gttcgggctgggagcgtgctttccacgacggtgacacgcttccctggattgggttgtacgtggacactataaaggtcagcaaattggcaaagtagtccag

SEQ ID NO: 648886 - DNA, 100 bp, Homo sapiens
cctagtaagcacatatttggtagcctttgcatacaagaatgtgaaatttgttctcaagcacaagttgcagtattttacagagctagcccaaggcacaaga

SEQ ID NO: 648887 - DNA, 75 bp, Homo sapiens
tccctcagcacacagaggatgatgctgactttgatgaagaaccatatttatttagagtcagaatggagcgatttg

SEQ ID NO: 648888 - DNA, 98 bp, Homo sapiens
gtgcttcagccaagtgaaaggcactatcgagattggaaccacagaagcttttctgcaattagataaaaaaggaccacaaaaacatcactttgatcagc

SEQ ID NO: 648889 - DNA, 75 bp, Homo sapiens
gaacagaggacagtgagtcgctctcgtccctccaggagggaaaacccctgatcctaaaatgaatgctaggactta

SEQ ID NO: 648890 - DNA, 98 bp, Homo sapiens
tggcatctatgcttacggttttgagaagccttccgctattcagcagagagctattattccctgtattaaagaggccccacagtatcaaatatccgcct

SEQ ID NO: 648891 - DNA, 101 bp, Homo sapiens
ggataccttttcttacaacagacttaacttacagatgttttatcatggaagggaagtggttgctgtgtatgttactggtgcttggaactgctattgttgag

SEQ ID NO: 648892 - DNA, 100 bp, Homo sapiens
cagctgtgcctgcagtttgtggtgaaggtgctggatgtggacttggtttgtgaggccctgcaggttttgggatttgagattgacgcggtgaactctgtcc

SEQ ID NO: 648893 - DNA, 83 bp, Homo sapiens
tgtcctttgtgcagagtgcgggagatgccatccgtgccatctacgctggacacattcagctaacgtattttagcaggtggagt

SEQ ID NO: 648894 - DNA, 51 bp, Homo sapiens
aactgataatccttgaacatggctgcttggagaaggcttgcgacatgtgca

SEQ ID NO: 648895 - DNA, 80 bp, Homo sapiens
cagcagaattttttgcaggggaaaacatccagtgtggtggaaatgacaatgcctgtggaagacaagtcagaccccccaga

SEQ ID NO: 648896 - DNA, 88 bp, Homo sapiens
ctttgtctttgaggactttgtctctgatgagctgagaaacaaagccacccagccaatgaagagacgagttgtactgctgtcacaggaa

SEQ ID NO: 648897 - DNA, 100 bp, Homo sapiens
caagagttttccgagaggtgaccgtaaaaggaattgatgcttctgattaccagacagtccaggcggagtacgtccagcttgttactgaacttcgaatgac

SEQ ID NO: 648898 - DNA, 88 bp, Homo sapiens
atgaagcccagacctgcagggttcgtggataataaactcaagcagcgagtcatccagggcatcaagttatcagcagatgtcaaaccat

SEQ ID NO: 648899 - DNA, 100 bp, Homo sapiens
caggccacaagacatttcctgctcggaaccttgtttactaattgtgcatggctgcctcctaatcccatagtccagaggaggcatccctaggactgcgggc

SEQ ID NO: 648900 - DNA, 82 bp, Homo sapiens
cgggtccagacccacgcggcgccagttctccggcgggaaggaaaaccgcgcagagaggccgagacgcatccagagctttcgt

SEQ ID NO: 648901 - DNA, 83 bp, Homo sapiens
tctggctgtgcgcgctggcgctgagcctgcagccggccctgccgggacttaagtcacaacagattatctttcatcaaggcaag

SEQ ID NO: 648902 - DNA, 82 bp, Homo sapiens
aggcggcggagggcaccccgggcgggcggcggctgctggtttccaggcctgaggtgcccgccctggccccaggagaatgaac

SEQ ID NO: 648903 - DNA, 100 bp, Homo sapiens
cttctttgagattgatggacgtaagaacaagaatatgacagatacctagcatctagcaaaataatggcagctgcttaccttgaccccaacttgaatcaca

SEQ ID NO: 648904 - DNA, 101 bp, Homo sapiens
gaagaactaagaatattattagcacaagagcaccatactttgagggaccgcagctgaatgcacagctagaaggttggctttcacaagtacagtctacaaaa

SEQ ID NO: 648905 - DNA, 100 bp, Homo sapiens
ttgcagagaatgaaatcactttgtgtcaaaaagaaataactcagctgaagcatcagctcagagtcaagatctccactgaagttggcatcacaaatgttga

SEQ ID NO: 648906 - DNA, 87 bp, Homo sapiens
aagaagaggagcaagaaaagaaaaaactgacacagattcaagaatctcaggaactctttccagttaacagacagagtgtggatcatt

SEQ ID NO: 648907 - DNA, 75 bp, Homo sapiens
aatacgaaggtttctggctgggcttggtggagccagtgaacgtggtggacaatggagatggcacacacacagtaa

SEQ ID NO: 648908 - DNA, 100 bp, Homo sapiens
tcgccatggccgcggttcccgagttgctgcagcagcaggaggaggaccgcagcaaggtcttaaagaaagtgcagaagagatggtcaaaaacaaattggaa

SEQ ID NO: 648909 - DNA, 50 bp, Homo sapiens
cccgcgtgcgtgtgtgagtggcccccaaatacatcaagatgtttgtactg

SEQ ID NO: 648910 - DNA, 100 bp, Homo sapiens
ttattatgtacgatggaatccacggatgagacctcaggattttgcaggttaattcctcacacacgttcaccaggtacttggacaatatattttgaaggtg

SEQ ID NO: 648911 - DNA, 75 bp, Homo sapiens
gtggtacaagcacggctcactgcagccttgacctcctgggatcaaggaactatgaatagactgacccagctggaa

SEQ ID NO: 648912 - DNA, 100 bp, Homo sapiens
gaaaaactcagtgagacacaatttatcattgaataagtgttttaagaaagtggacaaagagaggagtcaggtgtgatgaatgcagactctgctaccattt

SEQ ID NO: 648913 - DNA, 51 bp, Homo sapiens
caacaggatcgtctcgtccaagcctcatgtttgactgttggagatttatcc

SEQ ID NO: 648914 - DNA, 101 bp, Homo sapiens
tgggaaggattggacccatcagggcatcgctaagctgtaccataaagtgagccagtgatgggcggcctggatggcgacatgttcaactactataagatgct

SEQ ID NO: 648915 - DNA, 98 bp, Homo sapiens
ttgaatccagatgttgaacggtccttgaagttctattccagggctcccaggcagcagaatctgcccacagagttcggacacatctttgccatcgtggc

SEQ ID NO: 648916 - DNA, 87 bp, Homo sapiens
aattttctagttttggggagacaattacaaacatgttttatcaatgcagctaagacactgtgcatcttagccaacatagcggatggg

SEQ ID NO: 648917 - DNA, 96 bp, Homo sapiens
cggcgcgcggactccgcatcccgcaccccgatggtagccgaggagctggtactccaaagattcaggtttactcacgtcatccagcagagaatggaa

SEQ ID NO: 648918 - DNA, 51 bp, Homo sapiens
tcccgggtagctgggactacaggtgggaatttgaagaatctgaagaagatc

SEQ ID NO: 648919 - DNA, 83 bp, Homo sapiens
cgacagtgccctgagggccttcgagagctaccgcgccagacagaatgaccgaagaagcatgccgaacacggagtcagaaacga

SEQ ID NO: 648920 - DNA, 100 bp, Homo sapiens
gaatcaagttgtccccaacagtgggccataggaaaaggatacagagtagagtttcatgaacctgaaacttggtggaaatttgatcctgaagaattagaaa

SEQ ID NO: 648921 - DNA, 125 bp, Homo sapiens
ggccctccctcatgacacagctatctctgggccactccactatgccccttaccacaggagctctgcacagagttcacatgagactctgaatatagtggaggagaagaagcgggcagaggttggga

SEQ ID NO: 648922 - DNA, 100 bp, Homo sapiens
gcaggttttcgacctccgcaagatcctcatcacctactatgtcaagtgcccctctcagctgaggaggaaccgagagcggcgctggggcacctgagcccag

SEQ ID NO: 648923 - DNA, 82 bp, Homo sapiens
catgtcagctgatccagataatgaggatgcaacaggtgtggacactgccagcggctgcagccgacttggaatgacctgggag

SEQ ID NO: 648924 - DNA, 73 bp, Homo sapiens
tttgggagaccgaggcgggcagactgcttgaggtgctggaaacatgcatgaagagctgcggcaagcggttcca

SEQ ID NO: 648925 - DNA, 75 bp, Homo sapiens
gattgcacccaccctgtagaagatggaatcatggatgctgccaattttgctaaagaacgtgccaatggaatggag

SEQ ID NO: 648926 - DNA, 100 bp, Homo sapiens
gagcggcacctacgtcctgatcgacatggttctcaacaagatggccaaaggaggaaaaggcttctcttttacatcgtactcaggaagaaagaagaaagag

SEQ ID NO: 648927 - DNA, 75 bp, Homo sapiens
gggaggatgacggagctgcagtcggcactgctactgcgaagacagctggcagcctcccgcgacgatgcccctcaa

SEQ ID NO: 648928 - DNA, 134 bp, Homo sapiens
gcagaatggggacaagctccaaaagagacctgagaagcggcagcagtcccttgggggcttctttaaaggcctggaaaagaccagtgccctcagtctgagcaacgttgctggagtattctacatccttgtcgggg

SEQ ID NO: 648929 - DNA, 100 bp, Homo sapiens
tggtacttctcctagttgcagtcaggcttcatacgctattgtcctgcccgtccaagcatctcattttgaaggcctaatcacaaccatagttgggtatata

SEQ ID NO: 648930 - DNA, 76 bp, Homo sapiens
agccttagactatttttcaaacagcccagcttcgggcatttatcccagagatgctcaagtactctacaggtcgggg

SEQ ID NO: 648931 - DNA, 90 bp, Homo sapiens
cttcctggtcaacatgtgcgtggctacggtcctcacggccggcgcttacctctgctacaggggggcatttccgtctggcgaggcgactga

SEQ ID NO: 648932 - DNA, 83 bp, Homo sapiens
tcagcgctggccgcgctgcgcaaggagatgatgtgtcttgctgaatcagggctctcttatccctgccatcgacttacagtggg

SEQ ID NO: 648933 - DNA, 75 bp, Homo sapiens
cctcccaaagtgctaggattacagaccaggatggagcagagcccagcgccaattccgtgtcagcccacaacctgc

SEQ ID NO: 648934 - DNA, 76 bp, Homo sapiens
gaaaattgttgtgaacctcacaggcaggctaaacaaggtgaatgaaaactttgccattgatttgatagcagagcag

SEQ ID NO: 648935 - DNA, 101 bp, Homo sapiens
aagcccttttcctaactatgctgactctggcgctggtcaagtcacaggacaccgaagaaaccatcacgtacacgacggggtctggctctgtcacccaggct

SEQ ID NO: 648936 - DNA, 83 bp, Homo sapiens
cctaaggtttcacctgctttgcatcaggtggggagcagcctattcctctctggaacgaacatgatggaacagcagatggagat

SEQ ID NO: 648937 - DNA, 76 bp, Homo sapiens
gcaaaagtgccgccctgacttgtgcagcaaagtggcccaaatccatggcattaaaagcagcatctgttatagcaaa

SEQ ID NO: 648938 - DNA, 75 bp, Homo sapiens
ctggcctggtttgatactgacctgtaaatcatcctttagcatcgatttcttccctgtgaaaacaagagcaaggcc

SEQ ID NO: 648939 - DNA, 100 bp, Homo sapiens
agcctcaaactcccaggctcaagcagtcctaccatgtcagccttcccagtagctgggaccacaggggtccccacggagtctggaccatggaggagcgagg

SEQ ID NO: 648940 - DNA, 83 bp, Homo sapiens
caaacacaccgtatttcatctgtagcattcaagacttcaaactgcactgccagtgaaagatgtagaagataaacctgaacaac

SEQ ID NO: 648941 - DNA, 74 bp, Homo sapiens
gccagctgcagccctggccgcgcactcgcctcagctgagcctgggtcaaggtcagcatctcctcgacgatcaag

SEQ ID NO: 648942 - DNA, 83 bp, Homo sapiens
tggcggaggcggaaggggaaagcctggagtcctggctcattctccaaggagaagtacatcctggactcatcgccagagaaact

SEQ ID NO: 648943 - DNA, 90 bp, Homo sapiens
ggagaagtggctgttctgaagagagatgggcgatatatatattacttgattttggatttagtaaaggggacacattaccaggtagcctgt

SEQ ID NO: 648944 - DNA, 75 bp, Homo sapiens
tctgcagaggcccctcgcctgattgaggagtcctccgtagacgaggctgaccaactgactgaagagcagattgca

SEQ ID NO: 648945 - DNA, 76 bp, Homo sapiens
agccaacgtggtgggacccaaaatctgcctggaagataatgtgtgtgcaactgaggaacatggctcaagaaactaa

SEQ ID NO: 648946 - DNA, 100 bp, Homo sapiens
tgtgcccactttgcctcgactgccctttctggctgctctccagcgcctgtgccctggcccagatatggatcagaaactttcgaagttggtagaagagctc

SEQ ID NO: 648947 - DNA, 98 bp, Homo sapiens
tgtgggtcaccgttgggctctacctccaggaaggtcacaaagtgcctcagttccatggcaagctttcagcttatgtggagaagtcgctgtgaagccac

SEQ ID NO: 648948 - DNA, 80 bp, Homo sapiens
aaagaagaacaaagaaggatctggagatggaggtcgagctgagctctggagcctcccagctcaattgcctgggatttata

SEQ ID NO: 648949 - DNA, 82 bp, Homo sapiens
aaagaatttgagcctctgctgaattggatgaaagataaagcccttaaggacaaggtttactcctggcttgggggcattagga

SEQ ID NO: 648950 - DNA, 82 bp, Homo sapiens
ccgacagacagacagacagctggcaagaggcagcctgggggccacagctgcttcagttttaaaatcaaagatgggaaaatcg

SEQ ID NO: 648951 - DNA, 75 bp, Homo sapiens
gcggcagaagccgagttcaacatcctcctggccaccgactcctacaaggtgttggagagcacaatggctgaacaa

SEQ ID NO: 648952 - DNA, 88 bp, Homo sapiens
gccgctgctcgagctgctgctggattgaactcagagaagccggggtttgtggtaaatatgccagctctagaacacatgaatcagattt

SEQ ID NO: 648953 - DNA, 100 bp, Homo sapiens
gccgcgtgtcctcggagcgcggtccctgtattggtctcctgctcctagaggtgtcgtgaaaactacccctaaaagccaaaatgggaaaggaaaagactca

SEQ ID NO: 648954 - DNA, 83 bp, Homo sapiens
gggaaccctggtcaccgtctcctcagctgctgtcggggccgtgtttggcctcaccacctgcatcagcgcccatgtccgcgaga

SEQ ID NO: 648955 - DNA, 100 bp, Homo sapiens
gtgcagtatcgtggcacacatacttgtacccgacagggccggttaagagaactgcgcatcaggacagaactgtaccgctctctttttggccagctccacc

SEQ ID NO: 648956 - DNA, 90 bp, Homo sapiens
gaagaaaggtgttccttcccatggatatttgtatgctgataactacgtgtctcgaggatgatctgctcagagctcttccatgccattctc

SEQ ID NO: 648957 - DNA, 100 bp, Homo sapiens
ccacagcagccgtggtgacggagaagcagcagatgctggagcagcaccttcaggatgtccggaagagagtgcagccgtgtaggagactcaccaatacctg

SEQ ID NO: 648958 - DNA, 90 bp, Homo sapiens
tgatttttatattttattcctcttcctatccaatccctgccttttgagtccaggtggtatggacctgtctgccaatcaggacgaggagac

SEQ ID NO: 648959 - DNA, 100 bp, Homo sapiens
gctagaagctatcaaagcccttgaagtcaggctgtgtttgatgtggacaagaagaaagggttgactctgattgagctctgggaaggcctgacagtggatg

SEQ ID NO: 648960 - DNA, 100 bp, Homo sapiens
gtcaagctgccttaggcttataacatcacatttaaaagcatctcagcagtgatagtagacaagaagatgcagaagaaaatgaagaaagctcataaaaaga

SEQ ID NO: 648961 - DNA, 89 bp, Homo sapiens
acatctggaggaaactgatgaaaattttcacaaggcccatttggaggccagcgctgagaagtggaacaggttgctgatgtccttagaag

SEQ ID NO: 648962 - DNA, 100 bp, Homo sapiens
ccgcgatgttcgccccccggctgctggatttccagaagacgaaatacgcgaggttatacattggctcttcaaagacgttcacctcatcagagaaatccct

SEQ ID NO: 648963 - DNA, 101 bp, Homo sapiens
aaaagcggaaccttcgcctcagaaaaagggtgcgggacccctcctcaccgtgcggtcacgggtcgagctgtgcagttttagcgggtacaagatctaccccg

SEQ ID NO: 648964 - DNA, 75 bp, Homo sapiens
cccgcgctgcggcctggcggcttccaggcgcactaccgcgatatggctcgtggacagcagaaaattcagtctcag

SEQ ID NO: 648965 - DNA, 100 bp, Homo sapiens
gaggaattccagttcctgcaggcgcagtatcacaggtggctgaatccacagaggagcctgctggttctaatcggggacagtatcctgaggattcctcaag

SEQ ID NO: 648966 - DNA, 74 bp, Homo sapiens
ggaaaacacacgttcctccgaaaccggtttgcaagtccttgtagagtctggatgtggatagtgaagctaagaaa

SEQ ID NO: 648967 - DNA, 90 bp, Homo sapiens
gttcaagcaattttcatgccgcagcctcctagctgggattacagggcgccagcctcccagtgatggacctgactgaactccccaagtgca

SEQ ID NO: 648968 - DNA, 100 bp, Homo sapiens
ggacagagtttgatcgactgaatgagatcaaaggtcacctggaaattgccttattggaaaaacatttcttacattttgcaagaacgaggctcaaggatgt

SEQ ID NO: 648969 - DNA, 100 bp, Homo sapiens
aacctgctgcgggatcccaaatcggaagtgaattcggattgtttgctgactctttttgatcagaacaatgctgcaaaaaaagaagagtcagaaactgcca

SEQ ID NO: 648970 - DNA, 100 bp, Homo sapiens
tctcatctcgctcggctgcgggaaatcgggctgaagcgactgagtccgcgatggaggtggagaaaccttgcagtggtggccaagatttacttctttatcc

SEQ ID NO: 648971 - DNA, 52 bp, Homo sapiens
cgacgacgaggaagaggaggtttctgagagcattggggagtcagcaatgtcc

SEQ ID NO: 648972 - DNA, 98 bp, Homo sapiens
caggagctcacctgtgacgatgagccagagacctacgtggcagctgtgaaaaaagccatttccgaagaacttccagcactatgttgaataagagtggt

SEQ ID NO: 648973 - DNA, 83 bp, Homo sapiens
aacattccgaaactgtcaagattggcaaggaatgggtaccacagaccatgtcatcgtcctggcgtccacgaaccgagctgaca

SEQ ID NO: 648974 - DNA, 100 bp, Homo sapiens
caaagccaaagctcccatccaagacatctggtaccacgaggatcggattagagcgcctctcttctgtggaaactctgaagccgaccagttgggcaaaatc

SEQ ID NO: 648975 - DNA, 100 bp, Homo sapiens
aacgctgcatgcgagtgctgtactaccgagatgcccgttcttacaaccggggccctgtggtaggaggctggtacaaggttttggatcggttcatccctgg

SEQ ID NO: 648976 - DNA, 75 bp, Homo sapiens
ccagatcaacgtcctccgggaccggagtcagaaccctccgcagagtaaagctcagagtcaagatctccactgaag

SEQ ID NO: 648977 - DNA, 100 bp, Homo sapiens
aaggcgcgagtgaggaaaggaggtactgtaggagtctactcttcatcttgtgttgagacttcgtggtggtgctaagaaaaggaagaagaagtcttacacc

SEQ ID NO: 648978 - DNA, 98 bp, Homo sapiens
gactcaatcatcactgttttaacagtgtgttgttggtggctgcaatgccagctttgcttctcagggagggctagctcgtcatgtacccacacacttca

SEQ ID NO: 648979 - DNA, 90 bp, Homo sapiens
ctctggtggaatgagcttatttttatccaaagcagctcatgatggagcagtccaagaagtcctccctcatggtggcccgcagtattctca

SEQ ID NO: 648980 - DNA, 75 bp, Homo sapiens
caaaaaatcttcttggttctgctacaagagcagtatagcatcaagttctagaggaattgggagccattgcaaatc

SEQ ID NO: 648981 - DNA, 82 bp, Homo sapiens
ctcgggacgctgcacctcccgcgccgcacggtggacgagtctctgctttctatccgtcaagatgataaagtcgtgtgcccga

SEQ ID NO: 648982 - DNA, 51 bp, Homo sapiens
cccagcaacttcctcgagatcgatattttgaagacattttggctacaatat

SEQ ID NO: 648983 - DNA, 98 bp, Homo sapiens
cccagcgccctggccctctcgctgttgctggtctctggctccctcctcccagggccaggcgccgctcagaacgatggatcctgagcttgaaaaaaaac

SEQ ID NO: 648984 - DNA, 100 bp, Homo sapiens
catggtgtccaggtctatctgcctggccaaggggagggctggcgctgtgacaactgccgcagacctgggggtgaacccagtcccgaaggcactactggcc

SEQ ID NO: 648985 - DNA, 101 bp, Homo sapiens
gggacagagcggtcggtgacagcctcaagggcttcagcaccgcgcccatggcagagccagaccatcccgggggcataactgctggcagcaccgacgaaccc

SEQ ID NO: 648986 - DNA, 98 bp, Homo sapiens
ccgcggccggcgtccggagcatggcggacccccagagctggtctcagcatcagaggagcccaggaggaggaccctcccgatccccagctaatgagact

SEQ ID NO: 648987 - DNA, 100 bp, Homo sapiens
cccaggagtcatcggacgccagaatctggaaggaagcagccaccctcgccatggcctccccgcccgcctgcccctcggaggaggacgagagcctgaaggg

SEQ ID NO: 648988 - DNA, 51 bp, Homo sapiens
cagcaaggaggagctggaagtggtaaagcgattgtaactgcctatgagaat

SEQ ID NO: 648989 - DNA, 75 bp, Homo sapiens
cgcagatgggaagaagcgttagagcgagcagcactcacatctcaagcatccataccccagtttaccaattccccc

SEQ ID NO: 648990 - DNA, 83 bp, Homo sapiens
ccacagtacggctggcagggtggacctcaggagcctcctaaaaccacaggctatggagttactagtagagaaagcaatcagca

SEQ ID NO: 648991 - DNA, 82 bp, Homo sapiens
gagcagtggagcccaaagacccctggagacatgagacaagaggagcagcagcggcaccgcccctcaccctggagggtcctgt

SEQ ID NO: 648992 - DNA, 82 bp, Homo sapiens
gggggacctgccggcacgcgactccccccgggcccaaaaaccagacgtcctgggtcctctccagcatggcagccctctactg

SEQ ID NO: 648993 - DNA, 98 bp, Homo sapiens
ggggaagggacccgcacgccgggctttgttgtggaaatcccggttacctgggtggcccagttgaaatccttcccttcctctaccttggaagtgcctac

SEQ ID NO: 648994 - DNA, 75 bp, Homo sapiens
gaaaaggcctaagaattttggcattggtcctagcagaagatgtgactcagactgcctctgggtggggctggctgg

SEQ ID NO: 648995 - DNA, 101 bp, Homo sapiens
gcgtccgccgattcctcctccttggtcgccgcgtccttggctggcgtgcccagggccccggccagtgcccagccccgctgggagacccggccagcaccacg

SEQ ID NO: 648996 - DNA, 87 bp, Homo sapiens
tcagtaaggtagagatgatgaccccccactacaggttctgcaccagtattgtggctcaagactccagaggccacatttaccatggtc

SEQ ID NO: 648997 - DNA, 50 bp, Homo sapiens
gctccgccccagacctgtcggcgaaagggatgtgattgacgtcatgaaaa

SEQ ID NO: 648998 - DNA, 80 bp, Homo sapiens
ccgaggtgggaggatcacctgaggcctccccaaagccagtcctgtgtcaccaatcaaaggaaaggaagccgtcagcagag

SEQ ID NO: 648999 - DNA, 125 bp, Homo sapiens
gcttcgcccggctttgcagcggggacttcggcggcggcgcctcaggcacctcggcccgggtactaggttttgacaagcttgcatcatgcgtgagtataagctagtcgttcttggctcaggaggcg

SEQ ID NO: 649000 - DNA, 75 bp, Homo sapiens
cttcctcggcgctgcctacggaggtggcagccatctccttctcggaaaagccatggagacttcagcatcctcctc

SEQ ID NO: 649001 - DNA, 75 bp, Homo sapiens
cagctgtgtactttgccctcagcatctcccttcatgtctgggtcatggaacaagcacatcatgattgacttgggg

SEQ ID NO: 649002 - DNA, 76 bp, Homo sapiens
cagtggaagcagcaccatcggggagacaagcaactgctacaggagctgagagaccctaccctcactttccgtctgc

SEQ ID NO: 649003 - DNA, 83 bp, Homo sapiens
ccggccccctgcctgcccgcgcctagaccccattcagtggccagcatcgaaatgttcagccttttagtgatgaagatgcatca

SEQ ID NO: 649004 - DNA, 100 bp, Homo sapiens
aaagagcaaagtcaggaaacaaaacagagagcacagcaaaagctgcttgaaaacattccaggtcagtcatatcatttggatcaaaaaatagaacaatcgg

SEQ ID NO: 649005 - DNA, 100 bp, Homo sapiens
tgtcaccaatccagaggagatcctcagaggggagacccctcgggtggaagaagtggggccatacacctacaggtatctagaagagcagaagacagagaat

SEQ ID NO: 649006 - DNA, 100 bp, Homo sapiens
agaaaatacaaatcacacgcataatggatgaaaggaaccgacagcaaatgcagccctgaggatttggctactgcatataacaacagggggcaaatcaagt

SEQ ID NO: 649007 - DNA, 75 bp, Homo sapiens
aggtgttcgagaacgaccccgagacgaaaactgattgggaggtagctattaaaagtattaataaaaagaacttgt

SEQ ID NO: 649008 - DNA, 82 bp, Homo sapiens
gacacgcggttcttctccagcgccctggcctccctcaccttggacacctcgcttgggctttatcctgtggataaacgcagag

SEQ ID NO: 649009 - DNA, 100 bp, Homo sapiens
ggcccggtttccctcggcgtgctactgtgcgctcgatccagcaccatggggaagcgggacaatcgggtgatattgaaatggattccaggcgtgtgcctcg

SEQ ID NO: 649010 - DNA, 150 bp, Homo sapiens
tatggtgtttgcgaaaacttgcggaagctggagatcacaggcgtgtcttgtcgggacgtctatgcgaagcaatttcgctaaggagtttgtgatcagtgatcggaaggagctggaggaagatttcatcaagagcgagctgaagaaggcggg

SEQ ID NO: 649011 - DNA, 137 bp, Homo sapiens
tccgcggcgctgggtcggtggcggaggctgaggagaaggaggagcgggccgtggaggcttcgccgcctagatactccatcttctaaaccaacactcctagccaatggtggtcatggagtagaagggagcgatactac

SEQ ID NO: 649012 - DNA, 100 bp, Homo sapiens
acattcatagagccccccacaatattggatacggaaatgaaggactaatggctgaaggataaatcaacatggcaactatgattccaccagtgaagctgaa

SEQ ID NO: 649013 - DNA, 100 bp, Homo sapiens
cacctgtgcgggatggaacaaaagatgatcacagtcgtgttaaactgcaaaatgctgagaatgattatattaatgccagtttagttgacatagaagaggc

SEQ ID NO: 649014 - DNA, 74 bp, Homo sapiens
tccattaatgcaactaccattacactaagatattctctaagccgctttcatcatgggagaaatagagcagaggc

SEQ ID NO: 649015 - DNA, 101 bp, Homo sapiens
cgaagatgaatggaaagaattggagcaaaaagaggttgattacagcggcctcagggttcaggcaatgcaaataagctcaaagttatgaagtttcaggatga

SEQ ID NO: 649016 - DNA, 98 bp, Homo sapiens
gtcaggctggcccaggaccgggaggagatgaagtctgcgggccaggcatcgacatccgcaacgactatcagcagctgaagcgcctggagaactgcacg

SEQ ID NO: 649017 - DNA, 80 bp, Homo sapiens
ggttttcaggccacaaatgctttcacagcctcaaggaataggttctcctagtgtctatcatgcagttatcgtcatctttt

SEQ ID NO: 649018 - DNA, 90 bp, Homo sapiens
agctgggagccatcacgcccagctagccatcttctaattttcattccttcaaagagcccccctccatgcgcctgaaggcccgacccagca

SEQ ID NO: 649019 - DNA, 100 bp, Homo sapiens
caagatgttcagaagttcatggatgctgtcaacaagaagagcagttcccaggatctgcataaagccctactgccaataaagggaaaataagagatgctca

SEQ ID NO: 649020 - DNA, 100 bp, Homo sapiens
acacaaactaaatgtacctgagacgatgactgaggttcttgatgtttctgatgaagagggtactttgcagcaactcagtttgaacccctggcagcaagat

SEQ ID NO: 649021 - DNA, 100 bp, Homo sapiens
gcagctggctggtgtacgtgcactactcgtcctactcggagcgctgtcgcggccatgtctgccaggtggtcattggtccacctggcccccagggtccgat

SEQ ID NO: 649022 - DNA, 83 bp, Homo sapiens
ctcccagcaaagcagtggccgcccgggcggcgggatccactgtccggcagaggaaagaaccggaggctgaagcaggccaaaga

SEQ ID NO: 649023 - DNA, 50 bp, Homo sapiens
ccgcatcccattttttatgtccacagctagtatgttcaacacaccaggaa

SEQ ID NO: 649024 - DNA, 82 bp, Homo sapiens
ctcggccgcgcggactgaaggagactgaaggaagccatcttcgacaagagcacagggaaggttgttttgaagacgttcagcc

SEQ ID NO: 649025 - DNA, 75 bp, Homo sapiens
cgaatctcttctccctccccttcttgcaaagaatggctcaagaagtactgacacatttaaaggagcatcctgatg

SEQ ID NO: 649026 - DNA, 76 bp, Homo sapiens
cagagttcaaggaggccttccagctgtttgaccgaacagagagaagtggagatcctgatgtttctcagtgccattg

SEQ ID NO: 649027 - DNA, 50 bp, Homo sapiens
acgtcaccctggacctgggccagggtatacctcagttaccatgtgccaaa

SEQ ID NO: 649028 - DNA, 82 bp, Homo sapiens
ggagccctggtgggcacggcgtgcaagatgatgccaggaaagaccaaagcagatgctgctgacccagcaccacttcccagcc

SEQ ID NO: 649029 - DNA, 75 bp, Homo sapiens
aatggtcgtcgtcggcatcctcctggcctacctggcaggtacatggtgcagtggccgggagcacgcatccttcgg

SEQ ID NO: 649030 - DNA, 75 bp, Homo sapiens
cgcaaagatattcaaactctaaaccatctgaattggctcaatgatgaggggcatacaaacttgcctgattccagg

SEQ ID NO: 649031 - DNA, 119 bp, Homo sapiens
ctcgtcggcagtgaagctcaagttgctactcgggacgctgcacctcccgcgccgcacggtggacgagtgtgagccactgccccatgttgtgttgatgccaatctgccatgctagcctgt

SEQ ID NO: 649032 - DNA, 50 bp, Homo sapiens
gccaactggaccgcgttcctgttccagctccagatcaagcatgcggtcac

SEQ ID NO: 649033 - DNA, 83 bp, Homo sapiens
ttcggtgtgccgtgggtccgcgctgcttccacccaacttcctgttagccccctcggaaaaccacactgagagttgcattaaaa

SEQ ID NO: 649034 - DNA, 74 bp, Homo sapiens
aggttccccacatctacttggaaatctttgggatgctcaatgtcagagcaccataacatggtgtgggaagtgaa

SEQ ID NO: 649035 - DNA, 98 bp, Homo sapiens
gggcgcagctccggtgcaagcgaggacacgacacatgcagtggcttctggactgcgcgatgactggacgctctcggaagaactggttgttaaagagca

SEQ ID NO: 649036 - DNA, 98 bp, Homo sapiens
ctgctcctgggtgccgtggcatgtcgatttgtccttcactacaggacagagcgggatgccaccagcttgtccaaagggaagttccaggagctcctggt

SEQ ID NO: 649037 - DNA, 100 bp, Homo sapiens
cccacttccaccagaccttcatgaatgccacgtgcgtggacgacttctaccatgggaccaagctcatctctcaggatgaggctgatcgacgcggaaaggt

SEQ ID NO: 649038 - DNA, 82 bp, Homo sapiens
cggccggtcgggcggggcggcggcgctgacagagtctcactgtcgcccaggctgcagtgcagtggtgccatcacgcgtcact

SEQ ID NO: 649039 - DNA, 75 bp, Homo sapiens
acccaggaacaagtatctgacaggacagctaacccccgcatcggtgacgtgatccagaagctggcccccttcctg

SEQ ID NO: 649040 - DNA, 98 bp, Homo sapiens
ctcaaaaccccccaacccggccctcggcaaaacggccacggactctgacgaaaggcctgcacagctgaccacagttgggaaacgttgctgtctttgga

SEQ ID NO: 649041 - DNA, 100 bp, Homo sapiens
ctgggaaggcgtgggcgacccggtgtgtggcgcgcccagagccccgcgtttcagccctagggaaggctactgcagcactggggtgtcagttgttggtccg

SEQ ID NO: 649042 - DNA, 100 bp, Homo sapiens
gtctccttaacaccgaacaccgcctatgaaaggaggttccctacatgtcctttgattccgatgttcgtgggcagtgacactgtgaatgaattcaagagcg

SEQ ID NO: 649043 - DNA, 73 bp, Homo sapiens
gcctcttcaagccaggctccaagtagcctgtataccagcacggccagacacaatgggaatatccttttggacg

SEQ ID NO: 649044 - DNA, 83 bp, Homo sapiens
cggaccaagcgggcccagaagcggcaaaatgatgcttcaacacccaggccaggtctctgcctcggaagtgagtgcttctgcca

SEQ ID NO: 649045 - DNA, 75 bp, Homo sapiens
agttgcaggaaaacaagttcagggctcccactgattctacattatgtgtttctctcctgaggcaaagcccaacac

SEQ ID NO: 649046 - DNA, 50 bp, Homo sapiens
aggagactggatgatagaattatggtcagtaggacagaaggtaacattga

SEQ ID NO: 649047 - DNA, 100 bp, Homo sapiens
gaaactgtgaagcaaattcgtcagatcaaagaacaagggtttcccaaactctcgattgcctcttgcaagcagatgacctgggagcaaatgttatggcaga

SEQ ID NO: 649048 - DNA, 75 bp, Homo sapiens
gctgctgcgggaaatacttcctgtttggcttcaacattgtcttctgggatctcactggcatcgaatctatggatc

SEQ ID NO: 649049 - DNA, 50 bp, Homo sapiens
cttagttcctttccagtggtaacatccatgatagcagtcttctgtaaatc

SEQ ID NO: 649050 - DNA, 100 bp, Homo sapiens
gtcaaggcttggttcaagccagatagcacctgaggacagaacatatcagctaatttgacaggacatgctgagaaggtgggaatagaaaattttgagctcc

SEQ ID NO: 649051 - DNA, 74 bp, Homo sapiens
cgggagccagcaggagcaccagctgcgcaggcaggtaagactttgaccccgacgcaggcttcagtgattgccgc

SEQ ID NO: 649052 - DNA, 100 bp, Homo sapiens
tggtgcaaagggcgccagccctccccgcctctgcgtctttgctcccggagcgcttgaaggagctgcggagtgatcagcagctggactgtgccttggacct

SEQ ID NO: 649053 - DNA, 75 bp, Homo sapiens
caagtattgattgagaagtatgaacccaacaacagcctcgccagaaaaggtcatcatggtcacaggagaccatcc

SEQ ID NO: 649054 - DNA, 90 bp, Homo sapiens
gccgcctcgctgtccctgcggcttctggggtggtgaagttcatggatgtctatcagcgcagctactgccatccaatcgagaccctggtgg

SEQ ID NO: 649055 - DNA, 90 bp, Homo sapiens
cttggctgtaaggacccctaaggtgcaccaattccagctggacatcactgtgaaaatgggacgggataaagtccgagaaatgtttatgaa

SEQ ID NO: 649056 - DNA, 82 bp, Homo sapiens
gagagggcctgggagcttgctgcagcttcaggtggtctttgggaagaagcttcctgcctttgccaccatccccatccaccag

SEQ ID NO: 649057 - DNA, 75 bp, Homo sapiens
atcattcacagcatatcttgaaagatgtcattcctccattggaacaactgtgccaaacccaagtctgaaatccac

SEQ ID NO: 649058 - DNA, 100 bp, Homo sapiens
acattgacaatgatggctttgaagccacagatgaagatatccttgctaaaggaaaacagtccatcaggagtcaggctttaggaaatcagaactcagaaaa

SEQ ID NO: 649059 - DNA, 74 bp, Homo sapiens
attaacagacaagacacttttcagaaagacagatgatgaagtaataggagttagtgtcagtgttcgggaccgag

SEQ ID NO: 649060 - DNA, 100 bp, Homo sapiens
catgaaccgaagttttcacaagtctcagaccttgcgattctacgattgcagcgcagtggaagtcaagagcaagctgggagtgtccactcgccttccacca

SEQ ID NO: 649061 - DNA, 90 bp, Homo sapiens
cgaaaaactgattgactgggctggcgttaactgtgcggaggcagacttcccagactcccggccagccatcgaggacctcaagtactgcct

SEQ ID NO: 649062 - DNA, 59 bp, Homo sapiens
gccttgcacctgaagaccccacctttcctgaaggcagagccaggtgtacaggatggaac

SEQ ID NO: 649063 - DNA, 82 bp, Homo sapiens
aacgaggcaaggagctaaagcagcgtgcgttcagccctgggcacgagtacacgagacaggattgagaaaggagagattcaaa

SEQ ID NO: 649064 - DNA, 101 bp, Homo sapiens
gctcacccaggcagagctggagagctgtatgaagaagtacgagccccctccggacagcagcatcgccacgctgcaggtgagaagcgcaccaaggaaccagg

SEQ ID NO: 649065 - DNA, 83 bp, Homo sapiens
tggcattggacttggcacagggatggtcaggaggtcctgagtcactttgagaagtttgaaattggcacaatggaagaagctgg

SEQ ID NO: 649066 - DNA, 82 bp, Homo sapiens
agcgagagcggcccggacgacaaggtgagaagccctaccactgcaactgggacggctgcggctggaagtttgcgcgctcaga

SEQ ID NO: 649067 - DNA, 100 bp, Homo sapiens
agcaagtactgcaagaccaaggcctggaccgagttccacaagaaggactgcggggacctggtggccatcggtgtaatggataggtaacagagaagacctc

SEQ ID NO: 649068 - DNA, 90 bp, Homo sapiens
ttggtcaccaaggaacagcaccggcaactcaaatctctgcaagagaaagtctccaagaaggagaactatttgtcaatgaagattgtaaag

SEQ ID NO: 649069 - DNA, 76 bp, Homo sapiens
taataaatcaactcagtgatcctgattatattaatcagtatgtcatatggatgtgtgtcatagctaccatagcttt

SEQ ID NO: 649070 - DNA, 80 bp, Homo sapiens
gaatatgccaaggaaaaactggagagcttcatcaaaaatagtgatagctttgataagaaaatgttggggcttttcaggaa

SEQ ID NO: 649071 - DNA, 75 bp, Homo sapiens
gtgagggcgaaggtcgtattgaatggtgttgtaggtgtgatccctcacatccacaaatctctgattggaaagaag

SEQ ID NO: 649072 - DNA, 51 bp, Homo sapiens
ctctaattcaccgcaggatttccgtgtatttgcatgcccgagtctttgagc

SEQ ID NO: 649073 - DNA, 74 bp, Homo sapiens
cctgtgaagcccaccgccctaacaggcagcctggcatcctcgctacaacctcattgttgtgggccgatacccag

SEQ ID NO: 649074 - DNA, 97 bp, Homo sapiens
aaagggtggacaagttccggcagttcatgcagaatttcaggttggccttggggaggcactattagaggctgaaactattgaagaacaagaatctcca

SEQ ID NO: 649075 - DNA, 90 bp, Homo sapiens
ctcgaagaacagctgtggaaagaagttgcaaaacactgggtcagccccagttgatgctgacagcaggacccagtgttgccgtccctcccc

SEQ ID NO: 649076 - DNA, 82 bp, Homo sapiens
cctttatcctggtcatcttctatttccaaaccttatgccagcctggaccatcttggaggcagtgtaggatcatggaagaact

SEQ ID NO: 649077 - DNA, 97 bp, Homo sapiens
gaagcggcgcgagcgccccgccatcgtcccgcggcacccgacctgacagcgttcagcgacccgcgccagttccccgcgctgccctccatctccgacc

SEQ ID NO: 649078 - DNA, 97 bp, Homo sapiens
tgatgcggaggaggatgactcggatgtctggtggggcggagcagacacagactatgcagatgggaggttgggggccgtcccgctcctaaggcaggaa

SEQ ID NO: 649079 - DNA, 100 bp, Homo sapiens
gccgcgtggctggaagacatggccactccagtcggtgttgagcacggcgagcagtctcaggcctttagtgatgatggtccataacttagtggcaattgaa

SEQ ID NO: 649080 - DNA, 95 bp, Homo sapiens
agcggagcagctgggcacggcgtccagggcagctagggcctgggccgcggttcggccgcgccggccggaaatctggcattttttaaagtttgcgc

SEQ ID NO: 649081 - DNA, 50 bp, Homo sapiens
ctcagcctcactctgtacaaaaaagccgaaagccgtgattccgatctacg

SEQ ID NO: 649082 - DNA, 75 bp, Homo sapiens
aaaaatcaggtcaggtgacactggaagataccagctcatgatggagcagtccaagaagtcctccctcatggtggc

SEQ ID NO: 649083 - DNA, 71 bp, Homo sapiens
gctgctgctcctcacagtgcttacaggcggcacaggcaccaagatgtccaaccgagtggtctgccgagaag

SEQ ID NO: 649084 - DNA, 144 bp, Homo sapiens
agaaaccttggacagcagattttggtttaatatctgattgggacaacattcagacccatttccagtcatgaaataactgaagtgaagtgatggactccgatttggagagtagtaagacgtgaaaggaatacacttgtgtttaag

SEQ ID NO: 649085 - DNA, 87 bp, Homo sapiens
gtcccatcctccggcttcatctaccagtgcttttaagatcagccatccacagatcaagaccttttattttgcagctgagaatgtgca

SEQ ID NO: 649086 - DNA, 90 bp, Homo sapiens
gccgggacacctatgaggaagtaaagcaggctgggaggtacagggtcgggtgtgctgacagccggctgttaagccctgcctgccccgcgc

SEQ ID NO: 649087 - DNA, 82 bp, Homo sapiens
atgtcgggttattcgagtgaccgagaccgcggccgggaccgaggtatgagcccagaggacctggtcggcccttgtaccaaag

SEQ ID NO: 649088 - DNA, 75 bp, Homo sapiens
accgcgaagtcatggggctctgtcgggaagaccagcatctcagacatgtcgaaaaagatgttttgatccctaaaa

SEQ ID NO: 649089 - DNA, 100 bp, Homo sapiens
cggagaggtggctccatggacacagacctgctgtgtgtgcttctgcgccccagcccaggatggcggcccaggtgactctggaggacgcgctgtccaacgt

SEQ ID NO: 649090 - DNA, 100 bp, Homo sapiens
aagcaaccaggaggcagtaaattcttcagctgctcggacagatgaagctccccaaggagctgcagatgccttattggaggaactggaacgctccaccctt

SEQ ID NO: 649091 - DNA, 95 bp, Homo sapiens
caaaatgtgctacgtcactcggagtatggccttggccgaccctgagaacaggttcattggcatggaaaaatgttcagtgggaggattagagttga

SEQ ID NO: 649092 - DNA, 120 bp, Homo sapiens
ccgcctgcgtcccagaagtgcctgcagttcagacccttctctcccctccactttctcccggtgtactaatggtcacttgatgtgcgctggctgttttatccacctactagcagatgcccg

SEQ ID NO: 649093 - DNA, 75 bp, Homo sapiens
agaagatggcatgcctggaggccggaataagagcattgggccagtccaggactatgatgatggatatggcactgc

SEQ ID NO: 649094 - DNA, 75 bp, Homo sapiens
gcgcagccgagccaccttgtatgcgctgagccacgcggtcaacaacttagcagtgtctgcaaaaacgaatctttt

SEQ ID NO: 649095 - DNA, 82 bp, Homo sapiens
tgaaccgcgcggccgaaccctccgggctggtgaattaccatatctccgtcaagtgcagtaaccagttcaagttggaagtgtg

SEQ ID NO: 649096 - DNA, 50 bp, Homo sapiens
atgcgggccccgcccgtcgcctcagaaggaggcttcgatgaagaaagtgg

SEQ ID NO: 649097 - DNA, 75 bp, Homo sapiens
tttaaatctcattgatacaccgagcctacctggacgtagacattactctgtcctcagaagctttccataattaca

SEQ ID NO: 649098 - DNA, 75 bp, Homo sapiens
aggttttggactcgctgaagcgtacctggagtagaacagaaaaattattatgtctgtgttcccttgggactcatt

SEQ ID NO: 649099 - DNA, 140 bp, Homo sapiens
ctgccataaattttgtttctcgtcagcataaagaattcatacgacttcgaagaaggcagaggcgccaacgcttggtcaccatcagaaaagctaagtttgctgtatagtgaggatcaggagatctgatcctgattgcagaa

SEQ ID NO: 649100 - DNA, 82 bp, Homo sapiens
cccaaacaggacgaaggcgtgctgaaggtggaccaggtgctctgaggctggcgtacagacacagcacgtgcgacggagtggt

SEQ ID NO: 649101 - DNA, 82 bp, Homo sapiens
ggcacgccttcacctacaaggtctatgctgacaagaggctggacgcacaagactcttccagctggagttggaggctgacgcc

SEQ ID NO: 649102 - DNA, 100 bp, Homo sapiens
ccaccatccacgccagccgcaccatgccgctcctaagcctgcacagccgcggcggcagcagcagtgagagaaaactttagaaactgttcctttggagagg

SEQ ID NO: 649103 - DNA, 51 bp, Homo sapiens
tgcgcaaatccctgcaaggggtggcagggcagtgggtaacaaagtttgact

SEQ ID NO: 649104 - DNA, 75 bp, Homo sapiens
cttgtgtccacccaagcccagggctgtgaacgtggctttcctcgggtgatctggaccctctggcatctctcaaat

SEQ ID NO: 649105 - DNA, 80 bp, Homo sapiens
gccttccacgccggtcagccccatcgagggggatatgagactttctactcggaatatcctgagtgttgcgtggatgtaaa

SEQ ID NO: 649106 - DNA, 76 bp, Homo sapiens
caggcgcctggtggtccttggcttcccttgcaaccaatttggacatcagctgagtcagtgctgattctctcaaata

SEQ ID NO: 649107 - DNA, 100 bp, Homo sapiens
tggatgggcacaaaatccagatgaaagaccatctttcttaagatggaggtttgcttctgaataacccttcggcattagctatgcatgagtgtaaatgtct

SEQ ID NO: 649108 - DNA, 85 bp, Homo sapiens
catcctttacgagcacggcctcttgcgctacgccctggatgagatggttctctacttaaaagacaatgactactgatgaaggtgc

SEQ ID NO: 649109 - DNA, 101 bp, Homo sapiens
gcagccttgggcctcgcgccggctatggccgtgccctggggctgagccctcagatttccacccagaagacagagaaggagccagtggtcatggaatgggct

SEQ ID NO: 649110 - DNA, 75 bp, Homo sapiens
cgccttccggcagaagctggtcagtcaaatgagtttcggacgtggctgagggaggaatgggggcgcacgctggag

SEQ ID NO: 649111 - DNA, 98 bp, Homo sapiens
ctctgccagctcattgaactcagataatcttgatgcagagtgtgccctggaggatgaaacgtatgcagatggagctgagaccgaggtggactgtaacc

SEQ ID NO: 649112 - DNA, 75 bp, Homo sapiens
ccgcaaccagagccgccgccacggtgtggacactgccagcggctgcagccgacttggaatgacctgggagacaaa

SEQ ID NO: 649113 - DNA, 101 bp, Homo sapiens
tcccgggtgggcctgctgatgggctgctccagatcacacctcgacacccaacccctgaaccccacacactctgccatgcacacaggaggagagctggacct

SEQ ID NO: 649114 - DNA, 90 bp, Homo sapiens
gccaaatacatcagcttgtaggagacagaggtggagccgccaccaaaatgcagattttcgtgaaaacccttacggggaagaccatcaccc

SEQ ID NO: 649115 - DNA, 100 bp, Homo sapiens
aggccggccggtgccagcacctttcggcttctgagacggcggcagcagcggcattcagtgagcctttgaatacatctttatcaatgaccagtgcagtaca

SEQ ID NO: 649116 - DNA, 100 bp, Homo sapiens
gctcactgcagcctccgcctcccagtccaaatccttgggtgacagtaagaaccgccacaaaaagcccaaggaccccaagccaaaggtgaagaagcttaaa

SEQ ID NO: 649117 - DNA, 78 bp, Homo sapiens
accagtggccacagcatctttgtctagccccagtgcaggttcagcttgttggtttagatgaggagagttcagagttta

SEQ ID NO: 649118 - DNA, 76 bp, Homo sapiens
gtcttcagttaatggcaagacttgcagagggttttaaaacatgaatcctacactcatccttgctgccttttgcctg

SEQ ID NO: 649119 - DNA, 88 bp, Homo sapiens
caaagatttctgaagacgtctttctagaaatgactggaaagtttcaagaggcataagatacaggttcatctctaacaagtatttagtg

SEQ ID NO: 649120 - DNA, 100 bp, Homo sapiens
tgatctcctgtggcggtgatggtgggattgtcgtctggaacatggacgtggagaggcaggagagcctgccttctggtacaagatgcctgtggaatgttcg

SEQ ID NO: 649121 - DNA, 80 bp, Homo sapiens
gccgctgccgctgccgcacctccgtagctgactcggattgaaagaaggtggcaagaggaagaagcagaagcagagagagg

SEQ ID NO: 649122 - DNA, 83 bp, Homo sapiens
ccgcaacgccgagcgcaccgacatctgcctgctcaaaggtgacacccagggcagctacactcagaagccacaaggaatgctag

SEQ ID NO: 649123 - DNA, 83 bp, Homo sapiens
cggtgacacgcttccctggattgggaggatacgaagcgttttcggcttcctgcccggagctgtgcagcaaacagtcgaccccc

SEQ ID NO: 649124 - DNA, 100 bp, Homo sapiens
cagccttccaagctctactgtgacttcagagacactgccaagcagccttagccctagtgtagagaaaactttagaaactgttcctttggagaggaaaaag

SEQ ID NO: 649125 - DNA, 73 bp, Homo sapiens
tgccaccgatccagaaccctgctcctcaccccacagcttcagcgcctgctcctggtcatcactaaccagattt

SEQ ID NO: 649126 - DNA, 95 bp, Homo sapiens
aagcggaaccttcgcctcagaaaaagggtgcgggacccctcctcaccgtgcggtcacggccaaacgtaccaagaaagtcgggatcgtcggtaaat

SEQ ID NO: 649127 - DNA, 83 bp, Homo sapiens
ggttattcgagtgaccgagaccgcggccgggaccgagggtgatgatgaacagtctacacagatggctgcaagttgggaagatg

SEQ ID NO: 649128 - DNA, 100 bp, Homo sapiens
aaaaatcaaaaggagttcatgcttatgaatgctcgacttcagcagcagccgctcttctaaaacattcaaaccaaagaagaatatccctgaaggatctcat

SEQ ID NO: 649129 - DNA, 50 bp, Homo sapiens
gtctccttaacaccgaacaccatcggcttcagctccccaggaatatgatt

SEQ ID NO: 649130 - DNA, 100 bp, Homo sapiens
aagcccttcaccaacaaagatgcctatacttgtgcaatcactcagcctctgaagaagcttcgggttcagactcaggcagtcagtcggaaagtgagcaggg

SEQ ID NO: 649131 - DNA, 75 bp, Homo sapiens
ccaccatctccatcacccaccaacaacaccacaataatccacagccaaggtcccttatttcgcgtgagtctttgg

SEQ ID NO: 649132 - DNA, 75 bp, Homo sapiens
aatggagtcgagtctagaattcacacagagccacctaggtcagaatggcggcagtggagcatcgtcattcttcag

SEQ ID NO: 649133 - DNA, 73 bp, Homo sapiens
tttggcttcaagattttgtgccaaccaggtggagccgccaccaaaatgcagattttcgtgaaaacccttacgg

SEQ ID NO: 649134 - DNA, 51 bp, Homo sapiens
ttactttatagcaaacgactggtgaacatgacgacagatttggaagggagc

SEQ ID NO: 649135 - DNA, 75 bp, Homo sapiens
caattgtaaaagactgcaaagaggtactcaggaccccagggaacaatctgcatgaggtggagacagcccaagggc

SEQ ID NO: 649136 - DNA, 96 bp, Homo sapiens
tgacgtggagcggtacatcgcctcggtgcagggctccaccccgtcgcctcgacaggggctttgaccacgacctttgaagagcttcattttgagatc

SEQ ID NO: 649137 - DNA, 90 bp, Homo sapiens
cgagtaggaactgcaggggaaatggaaagtcacttttacaaagagaaagtttggattaatgaagaaagcctatgaacttagtgtgctctg

SEQ ID NO: 649138 - DNA, 100 bp, Homo sapiens
aacaagaccaacatgaattacgacaagctcagccgggccttgcggtactactatgacaaggctcagcaacagcctcaccaaggactccatgaatatcaaa

SEQ ID NO: 649139 - DNA, 100 bp, Homo sapiens
ggaaagtctagtactcaataaaggacccgtgagcagctacaagccgaagtgcagagggcacaggcgcggatagaggacctggagaaggccctggcggagc

SEQ ID NO: 649140 - DNA, 83 bp, Homo sapiens
cccgggggcgggccggggtcaccacgcctgccccagggaaccgcacagatgaccattctagggtgattctgagccaactggat

SEQ ID NO: 649141 - DNA, 98 bp, Homo sapiens
atcaacaccaggactacagtaaggctgaaatcattgaagtgcttggagtgcagaactgaaagaggccacgtgcgagcgagggtttgcagcaatggaag

SEQ ID NO: 649142 - DNA, 90 bp, Homo sapiens
ccgcgcgccaagatccattcgttgccgccggaggggaagcttgggatcatgatgtcagtattgaatatggtggtgaggcgtgaccctggc

SEQ ID NO: 649143 - DNA, 90 bp, Homo sapiens
tgcgagaggaccaacggagcgctgaggcgggcgttttcttggatgaattgcttgctttggagtctgcaggagctgcctggtgaagtacct

SEQ ID NO: 649144 - DNA, 83 bp, Homo sapiens
agcaagcggagctcccccaagagccggaaaggtgacttaagagattaaaattaatttggttgctgttggttctgaacaaataa

SEQ ID NO: 649145 - DNA, 51 bp, Homo sapiens
ctattgaaagagagtatgcacaggtgacgagagcagacgtggatgtccagc

SEQ ID NO: 649146 - DNA, 80 bp, Homo sapiens
ctccgcaccccggggtcccaggaagggcggcccaggagccttcacgtaaatgggtccagtcatgcctcccagtaagaagc

SEQ ID NO: 649147 - DNA, 82 bp, Homo sapiens
aacaattgatttgctcttacgtatttgtgtgacttgactcttcaaacacaaaggtcactgcagccagaggggtccagaagag

SEQ ID NO: 649148 - DNA, 96 bp, Homo sapiens
tgggccatgcacagacacagctcatgtctcattaatcacaccaacaaaaagatcctgtggtacagcatcttggcgacagttgggacggagtttgac

SEQ ID NO: 649149 - DNA, 75 bp, Homo sapiens
atttatgaaccccacagaccaagcccgtttatgtagaagtttctaaaatgaaaatcaatgttactgaaattcctg

SEQ ID NO: 649150 - DNA, 90 bp, Homo sapiens
tgtgtacaatggagacttacatcacctataggatcaccaccaaagtaatggaactgctggtccatctgaataaacgtataaaaagccgcc

SEQ ID NO: 649151 - DNA, 100 bp, Homo sapiens
aaaaagattcctttcttggcaactggaggtcaaggcgaatatttaacttatatctgcctgtcaggtcaaaatgcagatcttcgtgaaaacccttaccggc

SEQ ID NO: 649152 - DNA, 100 bp, Homo sapiens
ggagatgggcagacggattcatttagagctgcggaacaggacgccctctgatggcagcccaatggatccaatggtgatgaagagacctcagttgtatggc

SEQ ID NO: 649153 - DNA, 75 bp, Homo sapiens
atctgaggtggctcacgttgaccaactctttgatgatgcatccaggaagtgaaagtacttagcattgatcaaaga

SEQ ID NO: 649154 - DNA, 74 bp, Homo sapiens
agaagaccacacactgggaaacatcattaaatcgaaatctgaaatagagtactatgctatgttggctaaaactg

SEQ ID NO: 649155 - DNA, 82 bp, Homo sapiens
ctggaagcagcagctcaccgaggacggggactcgtacaagaagtatgtcttcctggaccccctggctggtgctgtaacaaag

SEQ ID NO: 649156 - DNA, 101 bp, Homo sapiens
gcggagccgggggcctgggacccgtcgcgtcagagccagggtccccagccccaccccagccccaaaggaggctgttcgagagggacgtcctccggagccaa

SEQ ID NO: 649157 - DNA, 75 bp, Homo sapiens
tgactctttgacatggagagaatttcactatattcagggcaaactctttgattctacaatagctgatgagggaac

SEQ ID NO: 649158 - DNA, 83 bp, Homo sapiens
cagccaccatgacaatcagtctgcagtggctgagcttgatcgcctctataaggagctgcagggtgatattcatgaggattttt

SEQ ID NO: 649159 - DNA, 90 bp, Homo sapiens
ctcctcgccagcagccgtccggagccagccaacgagcgggatgagatttactgccagatctgcaagcagctctcggagaacttcaaaaca

SEQ ID NO: 649160 - DNA, 100 bp, Homo sapiens
cctcccctccatggccttcatggacatccgcctccgagtggatgcagcaccccgtcgccggcaaggagaccaaattttgaggaaggtggaccaacatcag

SEQ ID NO: 649161 - DNA, 99 bp, Homo sapiens
tgcggcgcggcggccccgggaccaaggaggtgtctgacttccagcaactgctggcctgtgccagggtgcaagctgagcactggagtggagttttcctgt

SEQ ID NO: 649162 - DNA, 117 bp, Homo sapiens
accaaacaccacatgttgtctcttagaagtgggagctgaacgagacagagtctcgctgtgttgcctacactggtctagaactcctggcctcaagcgatcctcctgcctcggcctgcc

SEQ ID NO: 649163 - DNA, 100 bp, Homo sapiens
gtccctctggaccaccactttccatcatgccccaattttctagaccttttgtccccgggcaagatcttcagtttagatcttggaggcatatcaactgtgg

SEQ ID NO: 649164 - DNA, 86 bp, Homo sapiens
gtatgtgcgcttcccagggatcttgagagtgaagatctcgaaggatttcataggcaacaatttgggatgaatcccaaagacattat

SEQ ID NO: 649165 - DNA, 60 bp, Homo sapiens
ggaatccggatcattctagagctttaatggatgacgtagtagatgaaagtgatgacaacg

SEQ ID NO: 649166 - DNA, 100 bp, Homo sapiens
ttgctattcatgaagctatggaacagcagaccatatccatcactaaagcaggagtgaaggtgctgggtaggccaggtttcagcatcgcagacaagaagcg

SEQ ID NO: 649167 - DNA, 75 bp, Homo sapiens
agtatggtaatgaagaacagagaaaacaggcttttgaagaattgcgaggctcagcagggagctgctggatgagaa

SEQ ID NO: 649168 - DNA, 51 bp, Homo sapiens
gtggtcctcttccctttgtcggcctcgaaggagctccagcaagcccagaca

SEQ ID NO: 649169 - DNA, 75 bp, Homo sapiens
tttgaccataaagctgacttggaagactttgactccaaggtgcaagggtggtagatctctgtagaaatgtaaaag

SEQ ID NO: 649170 - DNA, 85 bp, Homo sapiens
tcacctgtggagctctgggtacaggatgcatcatctgcagacatcagaaaagcatatcgtaagctttcactaactttacatccag

SEQ ID NO: 649171 - DNA, 100 bp, Homo sapiens
acaagatgttgtcctgtgctggggctgacagcacctgcccgcccagagaccagggcacccctgaagtccagcccacccctgcaaaggacacatggaaggg

SEQ ID NO: 649172 - DNA, 75 bp, Homo sapiens
cagaagaggaagaagcagaactgggcagagaagttgatgacgcctgagatgttttcagaaatcctctgtgacgat

SEQ ID NO: 649173 - DNA, 100 bp, Homo sapiens
aagtactgtttacagctcacgattcctgggggaactgtcttactgcagtttcaagccacagtcgaggaaggagctgtgggagttattgtcaatttgacag

SEQ ID NO: 649174 - DNA, 75 bp, Homo sapiens
aagaccgagtgaagaaaggtggatcctacatgtgccatagggttggtactaagaagtgcctttcctgacgtctct

SEQ ID NO: 649175 - DNA, 102 bp, Homo sapiens
atccctcagcctggtgagggtgatgttcgggaggaggccttgtccacagaggactacactgaaacattcaaatgtgtggcgaaaacataattttcattcctt

SEQ ID NO: 649176 - DNA, 83 bp, Homo sapiens
ctggtgcatgcgtcgtcggcctctgggcagcaggggatgaacgtagggcacttagcttcttccaccagaagggcctccaggat

SEQ ID NO: 649177 - DNA, 101 bp, Homo sapiens
agaagatgaaggaagactgtctgccgagttctcacgtgcccatcagtgacagcaagtccattcagaagctattgagggcacctacattgacaagaaatgcc

SEQ ID NO: 649178 - DNA, 100 bp, Homo sapiens
ggggcagtatcaacggagtctccggggatctgcacaatttagacctaatgattggaattgcttccgcgggtgttgctgtgtaccgaaaatacatttgcac

SEQ ID NO: 649179 - DNA, 74 bp, Homo sapiens
ctccttttcatgagtgttcctgtggtctctgcacctcctttctgttcctggtagagttacacagttgtgccgcc

SEQ ID NO: 649180 - DNA, 82 bp, Homo sapiens
ggattcgccgaggcaccgaggcactcagaggagctggtcagtgagaaggtcggaggggccgaggggaccaagctggatgatg

SEQ ID NO: 649181 - DNA, 75 bp, Homo sapiens
ttcgggaaatcatgggaacaccagaatatttaggaacatcgaaatcgtgtatttcatgatttccgaaatggctta

SEQ ID NO: 649182 - DNA, 74 bp, Homo sapiens
tcatgctggccaagaagatcatcattaaggacggaggcacggcacccaggcatgtggaatatgctcatagtggc

SEQ ID NO: 649183 - DNA, 83 bp, Homo sapiens
accttgggccaggcctggcagggctttcctgttcccgacatccggacgtgccacttctgcctcgtagaagacccttctgtagg

SEQ ID NO: 649184 - DNA, 75 bp, Homo sapiens
ctgccctagaggggattgcagaatctccaacaactttacagagcaaaatggagccatctaccttccaacaccaga

SEQ ID NO: 649185 - DNA, 75 bp, Homo sapiens
catgcttcaggctcctctctttactgctgaagctttacttcgagctcatggtggattggactctaaatattggag

SEQ ID NO: 649186 - DNA, 100 bp, Homo sapiens
gctcaaaatgaggaaattctgtatgttcttcgccattatattcagcttggtgatccagctatttttcctgccgtaattgtggaacatgttcctggtgctg

SEQ ID NO: 649187 - DNA, 98 bp, Homo sapiens
aggagatgagatgcaccatccggctgctggacgactcggagatctcctgccacatccaggctcatgcacaattagttcgagaagttgatgtggagaag

SEQ ID NO: 649188 - DNA, 100 bp, Homo sapiens
atccaatcctctgcttccaggacaagtcctgcgcttggggatcctctgtacgcccgttcactgccagaagatcagctgccatgttacttgactcacacca

SEQ ID NO: 649189 - DNA, 83 bp, Homo sapiens
gaccgagaccgtgaccgagagcgtgaccgagagcgcgaatatcgtcatcgttagaaggcatgtgagcagcagtgacagagtgg

SEQ ID NO: 649190 - DNA, 97 bp, Homo sapiens
gatgtagtttttggaacatcaggaagctgttttaggttatgtgaaagagatgtttcctcatctctaaggcttaccagaagctctgatttgaagagaa

SEQ ID NO: 649191 - DNA, 100 bp, Homo sapiens
agacaattttcaaaaatgggatttgtggacaacaaacgaattgcaatttggggctggcaaaccagtccagctacgggggcccagccagccagcagctgag

SEQ ID NO: 649192 - DNA, 102 bp, Homo sapiens
ctcatctacctcatcaaaaagagagagttttaccgtgacaagaagtacgaggaagtgagccattgagacccagagcagcagttctgaagagatagtgcccag

SEQ ID NO: 649193 - DNA, 50 bp, Homo sapiens
tggagttgccggagagacagcccagattatttgcatgggtgcaaaagaaa

SEQ ID NO: 649194 - DNA, 74 bp, Homo sapiens
gaagagattcagccagcacactcctcgcgagcaagatgtacgattatagtttggatatgtggagtttgggttgt

SEQ ID NO: 649195 - DNA, 100 bp, Homo sapiens
aggcggtgacccgctaccggaaggccatcgccaagacctggagtggaagatcatttatgttggctcggctgagagtgaggaatttgatcagatcctagac

SEQ ID NO: 649196 - DNA, 100 bp, Homo sapiens
aagaaatccatataggatctttgagtatttgcaactcagcctagaagaggtttaactatagatcaacacatcatcttgcatctcatgggttctatgaatt

SEQ ID NO: 649197 - DNA, 90 bp, Homo sapiens
tggatgaagctgttttccaagtgttcaaggcatatctcacagatttcctctgccagtttgctcagcagccctgctacataatgttttcag

SEQ ID NO: 649198 - DNA, 80 bp, Homo sapiens
ccttcagcgaggaagctacacttttcaccaaggaactggtgctgcagcgagaggcctcaggagtgcaagtagctgatgaa

SEQ ID NO: 649199 - DNA, 97 bp, Homo sapiens
tcacagtggactcccaaggggcaggtgggaaactacctccgtatgttccgaggttctctgtacaagagatacccctcactctggaggcgactagcca

SEQ ID NO: 649200 - DNA, 75 bp, Homo sapiens
attctcatatttcaccaataaagctactacccacagatggcatgatccgaaaacactctcatgtcaagatagggc

SEQ ID NO: 649201 - DNA, 82 bp, Homo sapiens
aagcatgccctgaaaaagtatcgtcgagaagcctatcatcggctgttaaattccaaaagtttcaagcctttgactggggaag

SEQ ID NO: 649202 - DNA, 74 bp, Homo sapiens
ttagggtcctttatatagaagggagagtaggttgttgaagattggaaattcatagcccaggttcttgatcggat

SEQ ID NO: 649203 - DNA, 83 bp, Homo sapiens
ccccaccctgggcagtatagagacgtcggacttcacgctggcagagaggctgatgacatcgtgaactggctgaagaagcgcac

SEQ ID NO: 649204 - DNA, 98 bp, Homo sapiens
tcaatctaaacatttgtgggaagttgtattcatcaataatgaaatgctgactaaggaacaagcttcaaggttactgactttttatgatgtttggtggc

SEQ ID NO: 649205 - DNA, 100 bp, Homo sapiens
tggcttagaggactctgaggatagcaaaagagaaaaggaacagttccgtaagctctttattggtggcttaagctttgaaaccacagaagaaagtttgagg

SEQ ID NO: 649206 - DNA, 100 bp, Homo sapiens
ggccggcgcctgccgggaagcgagccgcgacccgagctgaaaagatcccgcaccatcctccaggatccaatggccttggagagagggctgcagggcccac

SEQ ID NO: 649207 - DNA, 100 bp, Homo sapiens
agccgtccccagaacgcagatcagaggtagtcggacctttcccgctggcgcgcagcctcagctagactcaccatcaattaccaaggcccttgcatctccc

SEQ ID NO: 649208 - DNA, 83 bp, Homo sapiens
acagacagcgcgggactgagaaggaaagcttctttctgggcagccagagccgcaaagggtttccaggcctgaggtgcccgccc

SEQ ID NO: 649209 - DNA, 75 bp, Homo sapiens
atcctggtgatggcaaatgtcgtggacatgaaatttctgaataaattggcagaagaacgcagacagaagaaggaa

SEQ ID NO: 649210 - DNA, 83 bp, Homo sapiens
gtcgccgccacctcctctgatctacgaaagtcatgttacccaacaccggccccttcatgaataagttttttccagccagcttt

SEQ ID NO: 649211 - DNA, 100 bp, Homo sapiens
tcaggaacagggacagcacctcatcccctggatgggggaccacaagatcctcatcgacaggacctgaaggagaagaaggagaaggtggaggagaaggcaa

SEQ ID NO: 649212 - DNA, 51 bp, Homo sapiens
ggtcaccggtcgctctcaggaacagcagaaatggaagcaactgtcgagatt

SEQ ID NO: 649213 - DNA, 100 bp, Homo sapiens
ctcagcggctttcggactgtacagatcctggaaggacaaaagatcctggctaactgttcttctccctaccagatgagttatcaccaccttgttctgaaca

SEQ ID NO: 649214 - DNA, 97 bp, Homo sapiens
gccttcaggccactctcctgtgcctgccagaagagacagagcttgaggagagcttgaggagagcaggaaaggcacatctcccacttcattcacaacg

SEQ ID NO: 649215 - DNA, 100 bp, Homo sapiens
ctatattgcagttggacatgagaaccgtgcaaatttctgatctagaggcaatttgaatcaacccatagaagtgacagcgctgtattcatttgaaggacag

SEQ ID NO: 649216 - DNA, 75 bp, Homo sapiens
ctgacattcagcagatgaaccggccatcaaatgtagcacatccatatccagaagacccagcagtttataaaccac

SEQ ID NO: 649217 - DNA, 90 bp, Homo sapiens
cttcaagagacgtctgatgaacctcatgcgggatgtggagcgggagggcctggactgggacctcatgcaggagcagttcgtggacttgta

SEQ ID NO: 649218 - DNA, 50 bp, Homo sapiens
ggaccagaggaactcagccctgattgcgaagcagctgacacaggatgatg

SEQ ID NO: 649219 - DNA, 90 bp, Homo sapiens
gggacagaggcaccaaggacctccaagacagcctatcagcttatcactgtggtgatcgcagccgcgggaggtgggctcctgctcatccta

SEQ ID NO: 649220 - DNA, 50 bp, Homo sapiens
tgataacaccctgtaacagctgagatctaagcattgaagaacagtcagag

SEQ ID NO: 649221 - DNA, 100 bp, Homo sapiens
ccatgtggaattcccagtacgacaggcaggtatgttgaagaaagtacgcacatcttatcttctgaacattttgatggaattaaccacaaacttcatgcaa

SEQ ID NO: 649222 - DNA, 75 bp, Homo sapiens
cagagcacttcttctgctctcactgcggagaggtgtttggtgcagaaggctcagtagatgaaggcgtttctgagg

SEQ ID NO: 649223 - DNA, 100 bp, Homo sapiens
agccagtcagcacaaaggaggacgtgacaagttggatggcttgaggactggtactaaaaggaaacgtgactgggaggccattgccagcagaatggaggat

SEQ ID NO: 649224 - DNA, 74 bp, Homo sapiens
gctgaatctgccgcagctagaaatgctcaagaaccagctggaccagtgatgtccttgcattgcccatttttaag

SEQ ID NO: 649225 - DNA, 100 bp, Homo sapiens
catctgaggacggctcaggagcatgacaagcgagaccctgtggtggcttattactgttcacgcaaagaatctgctccacaagttttgcttccagaagaag

SEQ ID NO: 649226 - DNA, 100 bp, Homo sapiens
gcactctacactcgagttcattcttagggagttttcagctacagtcgtttttagaaggagcactgacagcgaggatgccttccgcgccttccaccctgac

SEQ ID NO: 649227 - DNA, 75 bp, Homo sapiens
ggcgtgcaacatggggcttgagaaaggcaaagaatggctcaagaagtactgacacatttaaaggagcatcctgat

SEQ ID NO: 649228 - DNA, 50 bp, Homo sapiens
cgcagcccgacgttccgctgctggggtctctgagcggcccctgatgttcc

SEQ ID NO: 649229 - DNA, 96 bp, Homo sapiens
cagctgcctgcaagacaaaggtagctggatccgtagagtgatcctgccatgaagcagtttctgctgtacttggatgagtccaatgccctggggaag

SEQ ID NO: 649230 - DNA, 83 bp, Homo sapiens
ctggtgaccaagatggcggcggagctggtggaggccaaattatgcaaagggtgacctggacatatcttacatcacatccagaa

SEQ ID NO: 649231 - DNA, 100 bp, Homo sapiens
ttacctacttggtgtctggcagtctcattcagaatggacattccatgaacgacaatctccttgagagctggagcgacctcgacgagctgaagggagccag

SEQ ID NO: 649232 - DNA, 83 bp, Homo sapiens
gatccagcctgcggagcctgtggggcagtaccttctccaggcaaattccgttcccctgcagcaccatctcctttggctcttcg

SEQ ID NO: 649233 - DNA, 100 bp, Homo sapiens
ccattggcaaagacctggactttgaaaaagccaaggtagatggcacaaaccttcagggttttactaatcagcaagcagtagaggtattgcgacatacagg

SEQ ID NO: 649234 - DNA, 101 bp, Homo sapiens
ccgaccgccgcccgactgccatcgcccggcccggccgcgcccgcggaaccagaccagcttcgttccagagcccagcatgaatggatacgcggaatttccgc

SEQ ID NO: 649235 - DNA, 82 bp, Homo sapiens
cgccgctgtccccaccactgcagccatgatctccttaacggacacgcagagttatcttatgatgaggcttttgctatggcta

SEQ ID NO: 649236 - DNA, 110 bp, Homo sapiens
cgacgtacagcgggccgggaaaagtggcactgaggctctggaacttctgcccagctctccttggtggtgctttctacacagcagagactagtgaaaatgcaaaattgcat

SEQ ID NO: 649237 - DNA, 100 bp, Homo sapiens
acagtcttcaagagcccacggacaccacctcaacgtactatactggcaattgctggagaagattttgcaattgttgcttctgatactcgattgagtgaag

SEQ ID NO: 649238 - DNA, 73 bp, Homo sapiens
ccagcccccagaaaggattgtgacatatcgttggacccagaattgagtgccggtggtggtgtgcacattgagc

SEQ ID NO: 649239 - DNA, 101 bp, Homo sapiens
caacaccagctttaaatagtggaggcggaaaaaaatatttacaccagcagctccagttcataccaataaagaagatcctgctacccaaactaatttgggat

SEQ ID NO: 649240 - DNA, 100 bp, Homo sapiens
ccagccctgcctcggcggaccaaaggccaaaacctattgatgtacaagtcattacacaccacatgcagcgatatgcagtttggtttggaggatcaatgct

SEQ ID NO: 649241 - DNA, 101 bp, Homo sapiens
gaaacaccaagatctgtggaagaaatcctcagaggagcccgagtatcgtgcccgggtgttgggaggtctcccagacgtggtcaccatccaggaggggaagg

SEQ ID NO: 649242 - DNA, 101 bp, Homo sapiens
cgtgtctgccaccatcttcgacttgagcgaagttttatgcaaggttaattatagaaaatgccaagtaggaaatttgccgatggtgaagtggtaagaggtcg

SEQ ID NO: 649243 - DNA, 48 bp, Homo sapiens
tcagctcaaacatttttatcagagaatgtgacagtgatgataacatgg

SEQ ID NO: 649244 - DNA, 98 bp, Homo sapiens
agtgattcccggaccctggaagagaagagggtggctaatgattaaggtatgccattctgaccaaagccacctggccttcttggcagggagaggagaag

SEQ ID NO: 649245 - DNA, 98 bp, Homo sapiens
tgcaggcccatacgatttgagccaccaatgctggatttccatgaacaaatttacaacgggaatgattttaccaacgaaagctatggcaacccaggaat

SEQ ID NO: 649246 - DNA, 88 bp, Homo sapiens
gccagataaacattccttggcctttgttgtacgcatcgaaaggagcgcccctggccactgaactgcgctgccagtgcttgcagaccct

SEQ ID NO: 649247 - DNA, 80 bp, Homo sapiens
tgggtagatgtcgttctgaaacgcagggtaagcttgatgattaccaggaacgaatgaacaaaggggaaaggcttaatcaa

SEQ ID NO: 649248 - DNA, 80 bp, Homo sapiens
gcaaggcgcttcccctttccagagagccagaaagaagtctctaattaacagaagatggcaaagcccagccacagcagcta

SEQ ID NO: 649249 - DNA, 100 bp, Homo sapiens
gttttgctaccgtgaccgtttagaatcctcagacgttgcaattgatatctaaaaagaagtcacttgctggagcagcacaaatcttattgaagggggcaga

SEQ ID NO: 649250 - DNA, 100 bp, Homo sapiens
cttccagctcgatctgctcttcgtctgcttcttcctcttcagtcaaggaaatggctagtgatgagctgaaagagatgcggaaaaacttgaccaaagaagc

SEQ ID NO: 649251 - DNA, 51 bp, Homo sapiens
attcgcagtggtcgcttcttctccttggatcctggtgcacctgagccgtgg

SEQ ID NO: 649252 - DNA, 100 bp, Homo sapiens
ctggagtaaccctcactggagaatccagaggacacaactcagatgggaagttcatcgcccgggcacagcggatagagtacgactgtgaactagttccccg

SEQ ID NO: 649253 - DNA, 100 bp, Homo sapiens
ctctccattgacaaaatccatctcattaatgacaatcagccatcctggattggacagtttgaagacatacctgatatcgggtcagagagccaaggagtct

SEQ ID NO: 649254 - DNA, 90 bp, Homo sapiens
tggagttcagcgggagcctcttcccgcacgcaatctgcctcggagacgttgataacgatacgttccatgccattgcagtgtcaactaggc

SEQ ID NO: 649255 - DNA, 100 bp, Homo sapiens
tcagaagtggtgtgcgggctcatcttcaggctgctgctgcccatctgcctggcagtaggttctgggaaatggcttttacgttcaccggtctcaagctgca

SEQ ID NO: 649256 - DNA, 104 bp, Homo sapiens
gcgggattggtatgacttcgtgtggaaccgcacgcgtggcatacggaagggctacttctacaagtccgaacagccagtccagcaaaatgaacagcattgtctac

SEQ ID NO: 649257 - DNA, 75 bp, Homo sapiens
gaaacacgagcacgcggtccggttacaggcgcagtttgacatcgcagtggccagcgagatcatggcggtgctggc

SEQ ID NO: 649258 - DNA, 101 bp, Homo sapiens
cttttgtctaccttcttctgatccagacagcttttgcgagaattgaagcaccctaatgtgattgcattgcagaaggtgttcctttctcacagtgacaggaa

SEQ ID NO: 649259 - DNA, 100 bp, Homo sapiens
ctcctagcggcctggcgccgaggcggcggtacgcaaggctggagccgcagcgggagcccccggatgattgaggaaagtgggaacaagcggaagaccatgg

SEQ ID NO: 649260 - DNA, 90 bp, Homo sapiens
gcgaggagaatcagtattgagcttttaagtgtcgtcttgcacaggtaagaattctctacgcctgtggttttagcgttttgttgaccagct

SEQ ID NO: 649261 - DNA, 100 bp, Homo sapiens
tgcccgcctacatgagaaaaaggagcattctacagcaatgcctttggtgcttcatgaagaatatttccagatatctcacagacattaagcctttgcctcc

SEQ ID NO: 649262 - DNA, 73 bp, Homo sapiens
atgaaattgaattgaagaaaattgcacgtaatcacccaaatgccaagcatgttatgttacccagagaactttc

SEQ ID NO: 649263 - DNA, 100 bp, Homo sapiens
ctgttcactagtctagcttcagatgaacagcttggatatataagcagagtgacagcaggaaaagatagctatttagccttggtggataaaaacattatgg

SEQ ID NO: 649264 - DNA, 82 bp, Homo sapiens
ctcccgaatagctgggattacaggtggctgccacactcaacaatttggctgtgctctatggcaaaaggggcaagtacaagga

SEQ ID NO: 649265 - DNA, 100 bp, Homo sapiens
gagctgccacacggcctgcactctgcgctttgagctactgggctgtgagctgaacgggttcagactaggcaatgtggtacatgctatacaggcaactgag

SEQ ID NO: 649266 - DNA, 98 bp, Homo sapiens
accattcagatgggatctttccggatcaatccagatggcagccagtcagtggtggagagtatgtattcccgtgtgccagagtgccaggtcaccacata

SEQ ID NO: 649267 - DNA, 88 bp, Homo sapiens
ctccagcgggcctggactgtgggctggtgtgtggaactgagcgtttcccaaagtgtattctgcggaactagcacctactgtgttctca

SEQ ID NO: 649268 - DNA, 101 bp, Homo sapiens
ctggatccagctcctatggtcgcctgggtccctctgagccccggggcatctatgccagtgagaggcccaagtccctaggaagaaatgttggctatttggcg

SEQ ID NO: 649269 - DNA, 50 bp, Homo sapiens
gcggcgttggaggccaccgtttccaggccaaagaactgccaactctgaaa

SEQ ID NO: 649270 - DNA, 100 bp, Homo sapiens
aaggaaggtagaaatgtggcaggcaaaatttggtttctctaatattactggaattgattactctccttctgcaattcagctttctggaagtattatagaa

SEQ ID NO: 649271 - DNA, 75 bp, Homo sapiens
tgtttgtggatcgctgtgatcgtcacttgttgcttctgcaggaagcctttttggtggcatggtcctcaagaagtt

SEQ ID NO: 649272 - DNA, 88 bp, Homo sapiens
tatctggacacgtgcaggctgagtgcctggaagagctgggatgtctggttgagtcctatggcatgaatgtttgccaaccaaccccagg

SEQ ID NO: 649273 - DNA, 101 bp, Homo sapiens
ggattccaagtaactcttatttgtgttcacaccctttccagaaattcttggctggtaaccgcgaaaccgactggagcaggagctgggagaactggagaaaa

SEQ ID NO: 649274 - DNA, 75 bp, Homo sapiens
tgagcggcgagtttccgatttaaagctgagctgcgaggaaaatggcggcgggagcacgtcagctaactgttcaga

SEQ ID NO: 649275 - DNA, 75 bp, Homo sapiens
aaaataagaaggaacccaaagaaccatctcccaaacaggatgattggagctggagtgagccttccaggaattttg

SEQ ID NO: 649276 - DNA, 90 bp, Homo sapiens
ccagccactgcgccgcggccaagcctcctgcctcgcaggaaatctactttcttcaatgtgttaaccaatagtcaggcttcagcagaaaac

SEQ ID NO: 649277 - DNA, 50 bp, Homo sapiens
gagccctgagctgccacggatactgagatgaccactcccgggtcctgctg

SEQ ID NO: 649278 - DNA, 100 bp, Homo sapiens
cttggagaggctgtgagccacaatgcatcgctggaagtagccacatgcagcagattggaataaatatgatgaccgattgatgaaagcagcagaaaggggg

SEQ ID NO: 649279 - DNA, 71 bp, Homo sapiens
aattcatcagagagcattttactactgagctgcaaaggtatgggccagcagtttcctgccagatattgccc

SEQ ID NO: 649280 - DNA, 82 bp, Homo sapiens
ttctgacctccgcgcgacgtacccgccgccgccgttggctggaggcggtgcgtctttctacgtgaataggattttgtggctg

SEQ ID NO: 649281 - DNA, 83 bp, Homo sapiens
cgctggcctgcgacccagccagccagcaacctggaccggctgaccccgcactacatctacccaccagccatcgtgcagcccag

SEQ ID NO: 649282 - DNA, 75 bp, Homo sapiens
gatgagaccgctactcacccggattagaaatgatatttgccaaatttgatgaagtgcaaagttcaggcggtatga

SEQ ID NO: 649283 - DNA, 82 bp, Homo sapiens
gaaactggatgcagcaaggaaataggatttaaccgctctctgcctcccagacgcaaaatcgaatgaagctaatggccgacaa

SEQ ID NO: 649284 - DNA, 98 bp, Homo sapiens
agcaactcgatggccttcctggcacacattcgcactcacacaggggagagaccattctaacacaggtaccgtccagacagtgcctctgagaaagggaa

SEQ ID NO: 649285 - DNA, 49 bp, Homo sapiens
ctgggttctttactgctggatcgcaggtttggaaagcagagtggagaac

SEQ ID NO: 649286 - DNA, 75 bp, Homo sapiens
ttgctaaacttaaaagcaagctggttctctgggatataaataaggtgggaagaagagcgctatcctgaaggcatc

SEQ ID NO: 649287 - DNA, 75 bp, Homo sapiens
atgtgcatactcacagagttagagagagggatggtggtctccaccagctcctggccgggttcgaggacaagtcag

SEQ ID NO: 649288 - DNA, 82 bp, Homo sapiens
cacttcgcattttggcattgacatttaattttagggtcctttatatagaagggagagtagatgtttttctacctacaccgga

SEQ ID NO: 649289 - DNA, 100 bp, Homo sapiens
gcactgacagcgggaggcagagggaggaacctggacgccggaagccgggaaatgaacactctgctccagccaaggtggtgagggcagctgttcctaaaca

SEQ ID NO: 649290 - DNA, 98 bp, Homo sapiens
gaacccaggccccgccgaggcggccaggtgtcccgacccaggctaagcttgagcatggctgagcaggagcccacagccgagcagctggcccagattgc

SEQ ID NO: 649291 - DNA, 100 bp, Homo sapiens
atcaacaggagcaatcccaaagctgcagccccctaaacccaggaggcgccctggcccgcgctcgccccccagggcctcatgtcggaaccacagcctgacc

SEQ ID NO: 649292 - DNA, 75 bp, Homo sapiens
atgactgtcaagttttagaagagattcaaccctatgaaaagataaaggccaggggcttgcctgataatatatctt

SEQ ID NO: 649293 - DNA, 82 bp, Homo sapiens
gaagaccgcgcgcagggcctgcagcgggagctggacggcgagcgcgagcggcgcgagaaaattctacttcaaagaaatcctg

SEQ ID NO: 649294 - DNA, 101 bp, Homo sapiens
tgttggatcaccaatgtctcagggacttgcttccaaagagagaactcgatgccaccgcaacggtattggcgaaccggcaggatgaaagtgagcagtccaga

SEQ ID NO: 649295 - DNA, 75 bp, Homo sapiens
gtcgccttccgctacttccgggagctctttgggatccggccagatgattacttgcctgatttagcagctaatgaa

SEQ ID NO: 649296 - DNA, 100 bp, Homo sapiens
gttgctgcttttccaggaatgaaagacattcaggatcaacttgaacgaatatttctgctccagcggcgccatgagcaaatgaaaaagaatttggaagcac

SEQ ID NO: 649297 - DNA, 98 bp, Homo sapiens
tgaatttctcttggacaaatctgcagaaaaggctcttgggaaggcagcatctcacattaaaagcattaagcatggagatatggaccaaaaggaacgag

SEQ ID NO: 649298 - DNA, 100 bp, Homo sapiens
tagaaatactgcctttgaaaggctatttcccttctaattggcccactaacagagaagaaatcatagcctataagccacctggatttagtctgatgtatca

SEQ ID NO: 649299 - DNA, 80 bp, Homo sapiens
tcgtcaggccgctgcagatgaccattccaggcttgggcactgtttaaaggaaagttccgagaaggcatcgacaagccgga

SEQ ID NO: 649300 - DNA, 82 bp, Homo sapiens
tgacaggctgcacttggatgggagcacctggtgcctcgggactgctccgatgcccggtgtgttccagagaacaagccttcag

SEQ ID NO: 649301 - DNA, 104 bp, Homo sapiens
ccgcaggacccacgagaagcggaaaccggcgcaaggacccggtccccccggcgccgtgagaagccctaccactgcaactgggacggctgcggctggaagtttgc

SEQ ID NO: 649302 - DNA, 100 bp, Homo sapiens
gcagcacgggatcccagcctcaggcctgcacggacggtgttggttgggaccaaagagaaccctgtacagtaagaaatatggtgtggacctcatcagatac

SEQ ID NO: 649303 - DNA, 83 bp, Homo sapiens
ttgctgatgacctcacatggtgtggtgaattcaacacttccaattactctcgtggctttggtggccggtacggggtggagaag

SEQ ID NO: 649304 - DNA, 98 bp, Homo sapiens
gaagatccgcagctccacgcagcaagacccgcgccgccgggacccccaggacgacgtgtacctggacatcaccgcaatttcctgctgcagagagcatt

SEQ ID NO: 649305 - DNA, 100 bp, Homo sapiens
tattacctggcatgtggattttgtcgctggacgtctagagatgtgggcatggcagacaaatctgtagaacctcagaggatccagaacggcagctggtcct

SEQ ID NO: 649306 - DNA, 82 bp, Homo sapiens
gtggatgaaacactaatgtgttcttttcagcatgtagagcgcatgaagtacaggacaataaagcttcctacacatatcacca

SEQ ID NO: 649307 - DNA, 101 bp, Homo sapiens
gggtccagaccaaacatttccacatcaagtgtttcacctgcaaaggttgcaaaagcttctcatttcagagagatgccaggatcctaagtgcctgccaaact

SEQ ID NO: 649308 - DNA, 74 bp, Homo sapiens
ctaaattaccagaatgcagggctcaaaagccaaaagtctctgagaacgactttgaagatctgttgtccaatcaa

SEQ ID NO: 649309 - DNA, 156 bp, Homo sapiens
tgagcttcattcagatgtggtggaatatgccaaggaaaaactggagagcttcatcaaaaatagtgatagctttgataagatctagtgaaaagccatttgatgtatgcggtcagagaagaagtggaggtcctcaaagagcaaatcaaagaactaata

SEQ ID NO: 649310 - DNA, 100 bp, Homo sapiens
gggccggcggattcgggaactgactgctgtagttcagaagaggtttgatggtgatgagctcaccacagatgaaaggatacggtccctggctcagcggtgg

SEQ ID NO: 649311 - DNA, 100 bp, Homo sapiens
tacaagcagactctgaagatgatcagacaaggcaaagcgaaattggtcattctcgctaacaactgcccagctttgagagctctcgatgttctgaagtatg

SEQ ID NO: 649312 - DNA, 98 bp, Homo sapiens
gccgacagaggcagacacagaaggccgacaccctgcacctgttgtggacatcggatacccaaggagacgaagctgaagcaggagaaggaggggaaaat

SEQ ID NO: 649313 - DNA, 96 bp, Homo sapiens
gagcaagatggcgcagacgcagggcacccggaggaaagtctgttactactacgacgagccacctgagctgaagattcccttgagaacaagtactgt

SEQ ID NO: 649314 - DNA, 75 bp, Homo sapiens
gacccagttcgtgctgcacctgctggtcggctttgtcttcgtgaaactccaagaggaggaggaggagagcaacac

SEQ ID NO: 649315 - DNA, 74 bp, Homo sapiens
cctacagaaacaaaatgtcaacaaattgatgggaatcttttgggtgagttgtgaggctggcacctacattcgga

SEQ ID NO: 649316 - DNA, 102 bp, Homo sapiens
agcaagacagagatcacggagctcaggcgcacgctccaaggcctggagattgagctgcagtcccagctgagcatgaaagcatccctggagaacagcctggag

SEQ ID NO: 649317 - DNA, 98 bp, Homo sapiens
tttgttaaggattccaagtaactcttatttgaatgtctacacaaggaagtacaggatttggcttttctagatgtcgtatccaaacttcgcagtcatga

SEQ ID NO: 649318 - DNA, 100 bp, Homo sapiens
tcaggaaggaggatggaggctggtgggagggacagatcaacggcaggagaggtttgttccctgacaactttgtaagagcaagcagagtgctggtagcatc

SEQ ID NO: 649319 - DNA, 83 bp, Homo sapiens
agggcctccgtctggatttccaaggaagaatttcctctgaagcaccgaaatgagccgtcagactgctacagcattacctaccg

SEQ ID NO: 649320 - DNA, 50 bp, Homo sapiens
caagcggaggacctacgccggcctggtccttgctgagaagcagattgagc

SEQ ID NO: 649321 - DNA, 100 bp, Homo sapiens
cctgaatgggggcggcgtgcccgccggggggctagtggccacgctgcagagcctcgttaccttatcccatatcacacaactggtcctcagccataacaag

SEQ ID NO: 649322 - DNA, 75 bp, Homo sapiens
cagatctctgcagttacaggaacatcgtctgcttcatgtgtcttctacaaatgcttctgggaactggaggaccca

SEQ ID NO: 649323 - DNA, 82 bp, Homo sapiens
caactttctgggcgttcatgatcctggccagcctgctcatcgcctactgcagagcaggccgggctctcgccatgggtcactg

SEQ ID NO: 649324 - DNA, 75 bp, Homo sapiens
ttgggtgtgctgacgagcagggtgctggagaagcgactggaggagtggttggggaggacattgcctggcagtgac

SEQ ID NO: 649325 - DNA, 76 bp, Homo sapiens
gaagaagtatatgcaggaaattttgtggaagtggatgggaagagagtcccaagggatgcagggcatcctctgtacc

SEQ ID NO: 649326 - DNA, 98 bp, Homo sapiens
cttcgcgcacctgctcaaccccgcgccgcccgcccgcggcggccaggaacccgaccgccctccgctctcagtgatgcagtttggcaaagggaagtcgt

SEQ ID NO: 649327 - DNA, 87 bp, Homo sapiens
agatctggagaaaccaacagctgtgttgaagaaataatccgggttctagtaaataccgcttgctgtgttttgatgttggtggctaag

SEQ ID NO: 649328 - DNA, 75 bp, Homo sapiens
gtggaggtgaagaagtttgtgaagatcggccgcccgggctacaaagaaaatgtggacacagacttgccaggcagc

SEQ ID NO: 649329 - DNA, 50 bp, Homo sapiens
tcgtagttctcaggcacggaatgtactactataattccttgacccagcag

SEQ ID NO: 649330 - DNA, 75 bp, Homo sapiens
cttgccctactaagattttggaagatgttgtgcaaccatgtccaagggacctgcagttggtattgatcttggcac

SEQ ID NO: 649331 - DNA, 100 bp, Homo sapiens
tccaacatcaaccaatgtgaaaacattgactggctttggtccaggtttagccatggaaactgcccttagaagtcctgatcgtgtgaaggcaaagaagaat

SEQ ID NO: 649332 - DNA, 100 bp, Homo sapiens
aacccgggctcctggttcagtgaattcaagcgtgggaaactggttgactatagtcaatggggccaatggagccaagtgtatggaaacccacaacagtatg

SEQ ID NO: 649333 - DNA, 75 bp, Homo sapiens
catccacaagaagggctttgggggcagtggactataagacctacttggactttgtccttgcattagaaaacagaa

SEQ ID NO: 649334 - DNA, 100 bp, Homo sapiens
gtcggcgccgcggccgctgcggacggacgctcgcctgccggctgaggtgattggcgaggacaacgtggcagtcccctcacacctttataaggtaatcctg

SEQ ID NO: 649335 - DNA, 49 bp, Homo sapiens
cacgcacctcgtcaccaaggccaaggcttgcattgatgacaatgttgat

SEQ ID NO: 649336 - DNA, 80 bp, Homo sapiens
tcacagctttgagtgagaaacaggtagaagactttttgaatctctccacacagctgtctggatttcatatttgtattgac

SEQ ID NO: 649337 - DNA, 88 bp, Homo sapiens
cgccgacccgccgagcaaaatggttaaacccatccagagtaatggctgcggccttacccaggaccctgggggagttgcagctgtatag

SEQ ID NO: 649338 - DNA, 100 bp, Homo sapiens
aggttctggacaagatgaagtctttctgccagcggtctctctgtgctgatccgcgtgcgcctggagctgcggcggcaccagcgtgccggccacaccatcc

SEQ ID NO: 649339 - DNA, 96 bp, Homo sapiens
ctcgaccaggggcgacggcgtactttgggcttcatcatggaggactacctgcagggttgtcgagctgctctgcagagtttcactcttattgcccag

SEQ ID NO: 649340 - DNA, 101 bp, Homo sapiens
ctcaccatcagggacgtgctggccgtgatcaaacactgcaaggaccccctccggctcaagtgtgtcaagcaagcggttaagaagattgtctaccaaatata

SEQ ID NO: 649341 - DNA, 98 bp, Homo sapiens
gtttgtggcaagacaagctcagaactgagaagctgtcaccacaggggggaccttccttggagcagaggtttgaatcctattacaactactgcaatctc

SEQ ID NO: 649342 - DNA, 100 bp, Homo sapiens
gagaggctcgtgtggttttggctcatggctctcaccttgctcacgaaaatgatgcatcctgttgccagcagtaatccagctttctgtgggcctggcaagc

SEQ ID NO: 649343 - DNA, 88 bp, Homo sapiens
gcgcacagaaattatagaagatttggccttctactctagtacagtagtatctctattgatccagtttgctgaccagaagcaagaattc

SEQ ID NO: 649344 - DNA, 74 bp, Homo sapiens
ccctcacatccgatgcaccctttttgtcagattatcaggatgaggaactgataaatttcaaacggaagagagtg

SEQ ID NO: 649345 - DNA, 98 bp, Homo sapiens
agagagggaccccgggcgcctgctgagctcagctggcagagtttgcaagtggcggagacccttcaggctggcagtgatggtgaaagcataggaaactg

SEQ ID NO: 649346 - DNA, 50 bp, Homo sapiens
ggagctggccaacgtgcaggagttgccatcaacctgatcgtgcagcacat

SEQ ID NO: 649347 - DNA, 100 bp, Homo sapiens
gtagaaagacttcgcaagcgtcagacacattgactattccattgtctagactttgtgttccaagatcagaggctatagaaagcgcaattggtggtaacgc

SEQ ID NO: 649348 - DNA, 90 bp, Homo sapiens
accagtggctctgttttcccacaacagttacctcatcaggctcacgaagatagctccccaactctccactgaagaactggtgtctcttgg

SEQ ID NO: 649349 - DNA, 73 bp, Homo sapiens
tcttggccagggcgatttctctctggattcgattttccagtctcttcaccctctgaaaacaagaggatgtgta

SEQ ID NO: 649350 - DNA, 90 bp, Homo sapiens
gccggcagtgctggggccgcgccacttccgcaaacaggtgcagataagctgtcattggaaggaatagtggtacaaagagctgaatgccga

SEQ ID NO: 649351 - DNA, 100 bp, Homo sapiens
ctcatatatttaacccccctccaaaaagtattctctactgccgctgatggtcaaacgcaagtggaaattaaagtgtgtcagggtgaaagagagatggctg

SEQ ID NO: 649352 - DNA, 100 bp, Homo sapiens
ttggaagcccagtgaagacccttgggaacaacatgctaaatggtatccaggattgtccccttggggcggaaagaagccaaggccaaggagctggtgcggc

SEQ ID NO: 649353 - DNA, 100 bp, Homo sapiens
cttcgggctgcgccagcaagcggggccggtggcgcccgtgtcggagaccccgcgccggaccctgaggcagcgagatcatctctagcaacaggtcacacat

SEQ ID NO: 649354 - DNA, 75 bp, Homo sapiens
cgtcatccgcctctgccagactgaggggccgttccttgtgaccacaaataacagcacgtcgaggcatctgaaagg

SEQ ID NO: 649355 - DNA, 98 bp, Homo sapiens
cttaatgaggctcagggatgcctgtaccatgatgtgatgctggagaccttgacacttatatcctccctggtctcacagaaagttctccgctcccagac

SEQ ID NO: 649356 - DNA, 98 bp, Homo sapiens
ggctgagccaggccccttctcagattgcaaacagtggttctgctggattgataaacccagctgctacagcctgatgccctggaacaagcaatgtcaga

SEQ ID NO: 649357 - DNA, 109 bp, Homo sapiens
gtgcggggccgtggcggccgcggcgatgactcggacccagtcttactactttgaccgcgatgatgtggctttgaagaactttgccaaatactttcttcaccaatctcat

SEQ ID NO: 649358 - DNA, 90 bp, Homo sapiens
ccaaagtctcgcttctgccgaggtgtccctggtacaactccaaaaggagacattggagaagaaccaagctgggtctataaggaattgcac

SEQ ID NO: 649359 - DNA, 75 bp, Homo sapiens
aaaggacaaacaagtgaaatacttcatacattacagtggttggaataaaaagttcaggagctccatgaggaggag

SEQ ID NO: 649360 - DNA, 100 bp, Homo sapiens
ccccggacttcacctgagctacctcagcttcgatgtttttgaagcaggcatttgaaggagaataccctaaattattacgtctttataatgacttatggaa

SEQ ID NO: 649361 - DNA, 75 bp, Homo sapiens
gagaggaatatactcatcatcagtctatttagaagagaccaagccaccctggtagaacaagtaaaaagagtaaaa

SEQ ID NO: 649362 - DNA, 97 bp, Homo sapiens
gtaccctggcattgccgacaggatgcagaaggagatcactgccctggcacccagcacaatgaagatcaagaaaccagactgtgatgactgggagagc

SEQ ID NO: 649363 - DNA, 90 bp, Homo sapiens
atatctatgcgtgtgcattagatcagacaggtctcctggagatgaaatgctgtcccaaccttactgggtggacccccaaaagtacaaggg

SEQ ID NO: 649364 - DNA, 89 bp, Homo sapiens
ccagcactttcgggggcacacgggggcggatgtccggtctgtgctacgacagcaaaatgttccaggtgcatcaggtgctctgcatcccc

SEQ ID NO: 649365 - DNA, 126 bp, Homo sapiens
ctaaaaccaatggcctatccaaggacatgagcagtttacacatctcacccaattcagggagttctgggaaatcgttcattcatttacagatgaacagaaaagactcttcttgcagtttacaacggg

SEQ ID NO: 649366 - DNA, 89 bp, Homo sapiens
gcaaatctttcaccaatgtaagtctgccttatgttcctccagccaattgcaaaggaactgttcgtcaggtggcacaggagcagttcttt

SEQ ID NO: 649367 - DNA, 75 bp, Homo sapiens
ctgaaaaccaagccgaggactgcggggtccggtgtccacgcagagtatgccattgcattggccttaagggaaaag

SEQ ID NO: 649368 - DNA, 99 bp, Homo sapiens
tccgatgcagatttatggctcctgaacagttgcactgtaaaaaacccagctgaagaccactttagaaactcaattaagcctccccatggccacccatgg

SEQ ID NO: 649369 - DNA, 50 bp, Homo sapiens
ctcagcagtgatggggagagccatagcgggctgaacccatcagaaccact

SEQ ID NO: 649370 - DNA, 83 bp, Homo sapiens
ctactacctggtgcagggcctgattgaggactgccagctggcgctgcagggggtccactggacggggcctgagctacaacttc

SEQ ID NO: 649371 - DNA, 100 bp, Homo sapiens
ccagacctactgcagccacgcgggcgagcggctgtgtggatgtcggcgaagccgcgggcgagatggagaaggatgaaactgtgagtgactgctccccaca

SEQ ID NO: 649372 - DNA, 89 bp, Homo sapiens
cgcgcacatcactcccgagtggaggaagcaatacatccagtatgagttgttcaggggatgaaggaagctcaggaaaggctgacgggtga

SEQ ID NO: 649373 - DNA, 75 bp, Homo sapiens
aaagggactgctgcagagactcttcagtcgccaaagacaagaggagcagcagcggcaccgcccctcaccctggag

SEQ ID NO: 649374 - DNA, 75 bp, Homo sapiens
ttcagggagctgatcgtcactccttccttaaggctctttattaccaagataatgctgtagatccagatgtatctg

SEQ ID NO: 649375 - DNA, 90 bp, Homo sapiens
aatccaaaccagtcacctccccacccccaccgccaagcagccacgagaaaggaaattcagttcatgaagataagaagtttcttgacaaat

SEQ ID NO: 649376 - DNA, 90 bp, Homo sapiens
gatgtctgtgggtaccctctatgaaaaacagaatggaaaagagtcttctgaactgagtccaggaacacctgccttgttcagtgaagccgc

SEQ ID NO: 649377 - DNA, 100 bp, Homo sapiens
cgccatgcacaagctgcacttcctgcacagatcaatgcaatgtcccggaatggcttccatttgccaggcctaccaacctaactgatgactttgagtttcc

SEQ ID NO: 649378 - DNA, 108 bp, Homo sapiens
gctacctgcagcgccgtgtggcacgacacaaaaatcaggcagaggaacgaggacgcctgaaggaagagctggaagaggctcgggacatagcccggcggcgctctttag

SEQ ID NO: 649379 - DNA, 87 bp, Homo sapiens
ccagctcgcccagctcgcccagcgtccgccgcgcctcggccaagacgctctgcacaaaagccaccatgcagacggtccgggccgccg

SEQ ID NO: 649380 - DNA, 98 bp, Homo sapiens
gcaagtcagatgacaaaaccacgcgactcgaggctgtgcgggaaatgtcggagacccatcactggcatgacaccatcatccgagcagtattgattttt

SEQ ID NO: 649381 - DNA, 78 bp, Homo sapiens
ccagcggttccatcctacacttgggttctgcggggagtgtctccagccctgcctgcaggtgccatccccgctgtgccc

SEQ ID NO: 649382 - DNA, 100 bp, Homo sapiens
cccgcccgcagcctggacgacatcgacctgtccgccctgcggatggactcaccctgtcacccaggttggactgcactggcctcaacctcctgagttcaag

SEQ ID NO: 649383 - DNA, 98 bp, Homo sapiens
gtcacatctgaaactcatctgtacctcacttagaaaggtcagaatggcggcagtggagcatcgtcattcttcaggattgccctactggccctacctca

SEQ ID NO: 649384 - DNA, 128 bp, Homo sapiens
gcaaaagaaaaaagaatgggtcaaccaagaacgtcaaacactccaacgattgagagcatttaaagatgaaacttggatttaactggccagaagcaggtattcaaagcagagaacaatccctgggtgac

SEQ ID NO: 649385 - DNA, 76 bp, Homo sapiens
tacggcatcttgtcttgttatgaccacagagctggaatagtcaaatgatttcagttcgtgaagccaaagccattcc

SEQ ID NO: 649386 - DNA, 82 bp, Homo sapiens
gtctacttcctcagcagcaccttcaagcagacaatgcagatcttcgtgaagactctgactggtaagaccatcaccctcgagg

SEQ ID NO: 649387 - DNA, 139 bp, Homo sapiens
gcacaagtatcagagtcgggagagctttctggatgatgtaaaccttattctggccaacagtgttaagtataatggatttgtactgtgttcgcagtgacctggggaacctgctcaaagccctgggtcgcttggaagaagc

SEQ ID NO: 649388 - DNA, 83 bp, Homo sapiens
cttcggcaccgagaaagacaattcccgatgggtcccggctcggacggtccgatgggcggcatgggtggcatggagccacacca

SEQ ID NO: 649389 - DNA, 100 bp, Homo sapiens
aatcattgacatagagtaactccacagcatgtgtcttcaagagcttccctaaaaggaattgaatgatctggcacgggaccctccagcacagtgttcagca

SEQ ID NO: 649390 - DNA, 75 bp, Homo sapiens
gcccccttctcagttttcctgccttagattgtaagcaaaagaaatcaaggtcaagatctggaagcaagaagaaaa

SEQ ID NO: 649391 - DNA, 75 bp, Homo sapiens
cctcgagcggctgctggacgaaggtgaaatgacaatggatgctctgttggctcgattgaaacttctgaatccaga

SEQ ID NO: 649392 - DNA, 75 bp, Homo sapiens
caccccacgagacctacttctgcatcaccacaggtgcacagatgtattcataaaggaagacattagatccagcca

SEQ ID NO: 649393 - DNA, 75 bp, Homo sapiens
aaggcctccgtggaggccagattgaaggtcaagtctggcaccatctttgacaacttcctcatcaccaacgatgag

SEQ ID NO: 649394 - DNA, 100 bp, Homo sapiens
agaagttcaagaccagcagagaccggaaggatcacatggaatgaatctgaagtctgctgcagtaaaacacagaaggctttaaaatgttttcttgcataaa

SEQ ID NO: 649395 - DNA, 100 bp, Homo sapiens
ccttggagagaggagaacgaacatcttctggacctttgtccagaaggaaaacgacagattcctttaaatgagcaattcctcagcaagtgccctaatgcag

SEQ ID NO: 649396 - DNA, 98 bp, Homo sapiens
tttctccaccaaggaaaaaacgagaagaccccaaaaccagcaccaaatcagatgaaagccaaggaagggaggaatgtgtacagttcttcacgctatga

SEQ ID NO: 649397 - DNA, 100 bp, Homo sapiens
tatactgaagcctatgcaacgggtaacaagatacccactgatcattaaaaatagtgctgatggcagagattggtgaggatttggataaatctgatgtgtc

SEQ ID NO: 649398 - DNA, 97 bp, Homo sapiens
gctctgtcagttgcgctgtgttcctctctagtcacaagagccttggggaagacagttggaagctcagacatgagatctgtcttacaacctattagaa

SEQ ID NO: 649399 - DNA, 49 bp, Homo sapiens
gttccatccctaaacttatacgtttctaagcatgaattgaggaacagaa

SEQ ID NO: 649400 - DNA, 100 bp, Homo sapiens
gggaaatataacattcttggcacaaatactattatggataagatgatgagctcaaatgatacttttcccacagcaatgcacattgctgctgcaatagaag

SEQ ID NO: 649401 - DNA, 105 bp, Homo sapiens
aaactttttaccagcaggtgaagcagctgtcagaggctcctgtggatttggcctcgaagctgcaggttctcactctgtcgcccaggcttagggtgcagtggtgcc

SEQ ID NO: 649402 - DNA, 75 bp, Homo sapiens
ttcgaagtgacctcagcagggcatccagtctgcgctcctcagaccaccggcaggtgaacagcctgatgcagaccg

SEQ ID NO: 649403 - DNA, 100 bp, Homo sapiens
gggatttcgcgcgtgtgtgtgtcaggaattgagttcttctcagactttatcacatgatggaggattcttcaatagactggaagatgatgttcataaaatt

SEQ ID NO: 649404 - DNA, 100 bp, Homo sapiens
gttcccggctcccaggtttattctcccatagcatgtgacaaagaaacagccttggtataatagcacgttagcatcaagacgaaaacgacttactgctcat

SEQ ID NO: 649405 - DNA, 75 bp, Homo sapiens
cgtcgattaaagagccatctgtggtgccaattgaaggtggctatggaccgccccctgcaggaagaggagcccccc

SEQ ID NO: 649406 - DNA, 74 bp, Homo sapiens
tgcgcctgtggaatcaaatgacagcgaggacactcccagcaagctcttcggtatgatctcgtgaaaccttgaga

SEQ ID NO: 649407 - DNA, 75 bp, Homo sapiens
attaaggcacatccttggactaagcttagatggaaaccatttgagattccaaaagcatctcagaagaaagtagac

SEQ ID NO: 649408 - DNA, 100 bp, Homo sapiens
ctccgggcgcagaggcctacatcccacagagatacccagacaacaggatcgtctcgtccaagggcacacgtgtttcacgttgacaggtttgcttgggacg

SEQ ID NO: 649409 - DNA, 94 bp, Homo sapiens
ccgtgatggaaaactgtttctttggggacaagcactttatatcatcgcaaaactcctgggaatctcctgcaagaggaccctctggctctccaag

SEQ ID NO: 649410 - DNA, 100 bp, Homo sapiens
cgatgctgctcatgaaatcatcgagaccatccggttcgtgctggccgtgggcagcgccgtctttgatgccatgttcaacgggggaatggccacaacatcc

SEQ ID NO: 649411 - DNA, 75 bp, Homo sapiens
cgcatttccattatgagaatgttgagttcggcagcatacagagtcaagggtccagagaaggaggagaagttgaga

SEQ ID NO: 649412 - DNA, 96 bp, Homo sapiens
tgagccagagggacacgctggtgcatctgtttgccggaggatttacgacaggatatgttgacactccaaatgttgcgcttgatggatttactctgg

SEQ ID NO: 649413 - DNA, 127 bp, Homo sapiens
cacagatgaacgaagttatggcagagttagctaaagaactccctcaagtttcatttgtgaaggcagcttcaaaagatggtccatgatattaaaaacaatgaaggtggaataatgaataaaatcaaaa

SEQ ID NO: 649414 - DNA, 74 bp, Homo sapiens
ctgcgcagaaggccggggccggccagaagcgggcggcgcgggggagatggtcatattgaacattccagatacct

SEQ ID NO: 649415 - DNA, 87 bp, Homo sapiens
ttctgggctctgtcagccatgtgactgtagtccacatggagctctcagcataccgtgcaacaggtgggaccagggagattggatctg

SEQ ID NO: 649416 - DNA, 96 bp, Homo sapiens
ctcgctgtccctgcggcttctggggctatctcattatcgagagcatttgaacattcaggaccctgacaaacgaaaagaatttcttaaaacctgtgt

SEQ ID NO: 649417 - DNA, 80 bp, Homo sapiens
cctcggcctccggcgcagcccggaaatgtccggcaagatcgagaaagcaggacatgtattcctctgagaaaccttggaca

SEQ ID NO: 649418 - DNA, 76 bp, Homo sapiens
agggacactgaaaagtcacaaactccttcacactgcagatgatgacagacaaccttctgtgccttcatcaagctgg

SEQ ID NO: 649419 - DNA, 100 bp, Homo sapiens
tccgccggggggctatgggcccatcgactacaaacggaacttgccgcgtcgaggactgtcgggagtggaagctggacacactatgtgacttgtatgaaac

SEQ ID NO: 649420 - DNA, 100 bp, Homo sapiens
ccgcgcagccccagctcaacgtgtgcaactgggcggtcatgagtctctggccagccgcagagtgtgaccgcctcctcggacaaggcttttgaagactggc

SEQ ID NO: 649421 - DNA, 101 bp, Homo sapiens
aaaaggacaagggagatgaggaggaggaaggagaagagaaacttgatgaagaaaacctgcttgatatcacacagtcaggagtcaactgagttggggctttg

SEQ ID NO: 649422 - DNA, 75 bp, Homo sapiens
aggcctgcctcatcagcctgggctacgacgtggagaacgaccggcagccgcggcccatggagcccgccggcccgg

SEQ ID NO: 649423 - DNA, 83 bp, Homo sapiens
ggatgacaagaactcttgaagaccaggaataacaggtttctctccgcaagcgcgcgatgcagcgggcggcggcgctggtccgg

SEQ ID NO: 649424 - DNA, 82 bp, Homo sapiens
cacacccggctccccggacgcctcggtgatgtgtccaatctagatcccaacttctcatttgaaggcaccaaactggatgtgg

SEQ ID NO: 649425 - DNA, 100 bp, Homo sapiens
gcggatctctacatttctgaagccagcgatctgtacatgagacccaggaattatttccaaagcaagattcatatgctgaaggggtaacagacagaacctc

SEQ ID NO: 649426 - DNA, 100 bp, Homo sapiens
aggtggagcaaaacacaccaagcctggtgccaatcattgacaatattatgctgcatccagtggaactaaagccgttccaggattatcaaaaactgagcag

SEQ ID NO: 649427 - DNA, 75 bp, Homo sapiens
cgctcagcccctgaggacttgcggctgctcttctacgatgaggtgtatgtgcccacagtgtttgagaactatgtg

SEQ ID NO: 649428 - DNA, 82 bp, Homo sapiens
gctaaagcagcgtgcgttcagccctgggcgctgataaagcagtttgtgtccgacgtggcctggggggagctggactacctgg

SEQ ID NO: 649429 - DNA, 74 bp, Homo sapiens
ttcagaagagccaaggaataaacatgcaatgaacccaaaagggtgctgtaccttctcagccagctgcagcaaag

SEQ ID NO: 649430 - DNA, 75 bp, Homo sapiens
acctccctgcgaccgtcgcggaccatgggcgacaaagggacccgtactatactggcaattgctggagaagatttt

SEQ ID NO: 649431 - DNA, 78 bp, Homo sapiens
cggcttccaggcgcactaccgcgatgaaggatttgggggcagagcacttggcaggtcatgaaggggtccaacttctcg

SEQ ID NO: 649432 - DNA, 117 bp, Homo sapiens
catgttcacgcacgggatccagagcgccgcgcacttcgtcatgttcttcgcgccctgatgtgaagttcatttccaatccgccctccatggtggcagcggggagcgtggtggccgcag

SEQ ID NO: 649433 - DNA, 74 bp, Homo sapiens
gaagcaccagttcaagtggccctcagggcatccccgttttcgcacaagctccgggtggataaggcagctgctgc

SEQ ID NO: 649434 - DNA, 75 bp, Homo sapiens
gcttctcctatgactacgtctttgactggaacatgctgaaattcggactatgcagccatcgtcttctttgctaac

SEQ ID NO: 649435 - DNA, 50 bp, Homo sapiens
ggcggacaacgagaagtcgtcagacatgcacatgatggtgtccaagccag

SEQ ID NO: 649436 - DNA, 108 bp, Homo sapiens
gtcgcccccatcgagagggtcaaactgctgctgcagatatatttttgccatcatggatcagtttggagatatattagaaggtgaagtggaccattctttctttgacag

SEQ ID NO: 649437 - DNA, 100 bp, Homo sapiens
ctggtgcgctgtgctaggtcagcaccacaactaccagaactggagggtgtacgacgtcttggtgctcaaagatatttggagttcttacaacatggcagac

SEQ ID NO: 649438 - DNA, 100 bp, Homo sapiens
gacagctgaggaagtctgcatccacattgcacataaagttgaatatgacagatacctagcatctagcaaaataatggcagctgcttaccttgaccccaac

SEQ ID NO: 649439 - DNA, 80 bp, Homo sapiens
gattacaagaatcctatagaccagtgtaataccctgaatcccgtctctaattaacagaagatggcaaagcccagccacag

SEQ ID NO: 649440 - DNA, 82 bp, Homo sapiens
ctggagcctcagttggaagcagccgatccagcctgcggagcctgtggggcagggagtggagcttggtttcgggatctcggtg

SEQ ID NO: 649441 - DNA, 100 bp, Homo sapiens
cttccccacctgcccggtgcccgaggaggcagccaagctcgtagcctgccactccgtgcgctggagtgcactgttgtgatcttggctcactgcgacctct

SEQ ID NO: 649442 - DNA, 100 bp, Homo sapiens
gcaacagctcggcgggctggaaggcctggcagctgcgattcagccacctcgtggggtatggtgctagatattactcttacctcatgtccagagcggtcgc

SEQ ID NO: 649443 - DNA, 75 bp, Homo sapiens
agtcacttttcacagaaggactgaagagtctgacagatgcttttactgactctgctatcagtgctaaagtgaatg

SEQ ID NO: 649444 - DNA, 75 bp, Homo sapiens
agagtctgtggaagaggtggttcgaggtaagccgcgtagcagatacgctgccagcaacacgggcgaccatgctga

SEQ ID NO: 649445 - DNA, 106 bp, Homo sapiens
ctgttctggtggtgaagctcacgcacatctcagccacagccagcatggccgtcccactgctggagttcctgtccaaaaaactgaacgtggaggcagccaactggac

SEQ ID NO: 649446 - DNA, 98 bp, Homo sapiens
agagataaaaataccagaaacatacccatttaatccccctaagtttgaaaatgagatcatcaccaagctggatcatgaagtcgaaggaggcagaggag

SEQ ID NO: 649447 - DNA, 88 bp, Homo sapiens
ctctcacccctgtgcgtgctgctctggagggaactcacaggcatccagtgtcacactgagtccccgccagggcctcccgaggatccca

SEQ ID NO: 649448 - DNA, 98 bp, Homo sapiens
tctggaccaggagacattcagcataaatagcctaacatggcagaccagagacagcgctcactgtctacctctggggagtcattgtaccacgtccttgg

SEQ ID NO: 649449 - DNA, 83 bp, Homo sapiens
gggagatccaagagattcagtatcactcgctcccttgatgatcttgagatgtgaagttcatttccaatccgccctccatggtg

SEQ ID NO: 649450 - DNA, 99 bp, Homo sapiens
cagagaccgtgcatcagctctccaagaccagccgggccctggtggccgacagccatcctgaaagaagtgagttgctgaatgagcttatggacagtgcaa

SEQ ID NO: 649451 - DNA, 82 bp, Homo sapiens
caaaggctccaggcctgggggcctttagaaggaagtttattcagatgcggaaaacgccatgcggtacataaatgggacgcgt

SEQ ID NO: 649452 - DNA, 100 bp, Homo sapiens
tgaaagaagatctgtccagcatcatcctcctatcagaggaggacctccagagacggtgccgagacctcaaggccaagggaattttatttgtggggagcgg

SEQ ID NO: 649453 - DNA, 82 bp, Homo sapiens
ggggggcgccccgatgagccccgagtgcgaggagccgccgccccccctcgcaggggaacgcccttttgcttgtgactggcag

SEQ ID NO: 649454 - DNA, 98 bp, Homo sapiens
catttctcctattgaggagtcaacaagttgggatatctaaagcagaagccttagaaactctgcaaattatcagaagagaatgtctcacaaataaacca

SEQ ID NO: 649455 - DNA, 154 bp, Homo sapiens
cgcgggaggaggaagtagagcccgggaccgccaggccaccaccggccgcctcagccatggacgcgtccctggagaagacttgaccttgaccagatagtcttcaagatgccaaactggggcggaggcgcaaaatgtggagcctgtgaaaagaccg

SEQ ID NO: 649456 - DNA, 87 bp, Homo sapiens
tcttcagttctctggagccccagattcaacccgtgtacgtgcctgtgcctaaacggcaacctttggcactgcatccatgagcatgcc

SEQ ID NO: 649457 - DNA, 85 bp, Homo sapiens
tcagaggaggtcgtgggggccgggagtttgcggattttgaatataggttttttcaagggggaacatggcaaaggtgttcagtttc

SEQ ID NO: 649458 - DNA, 100 bp, Homo sapiens
aataacacaccggagacttttggggggaaactaggtcgatggtcggcggcgcccggatgggcagctgagttcgatcctttggtacagaagacagaccgac

SEQ ID NO: 649459 - DNA, 100 bp, Homo sapiens
ggagcgaacccgagagcgtggagcgggctgggccagactctttttgatcagaacaatgctgcaaaaaaagaagagtcagaaactgccaacaaaaatgatt

SEQ ID NO: 649460 - DNA, 83 bp, Homo sapiens
tgctgtttcttgggactgcgaagctatacaggctgcatggaagaggagatggttcgtgttacgcagtggccgtttaactggag

SEQ ID NO: 649461 - DNA, 51 bp, Homo sapiens
atgctgcaggattcaataaactggatggaatttcgctcttgttgcccaggc

SEQ ID NO: 649462 - DNA, 75 bp, Homo sapiens
gaacgcttcgctggccatttaggagctctgctcaaagccagacgcatcaacaaagagagcattgtggatgtagaa

SEQ ID NO: 649463 - DNA, 75 bp, Homo sapiens
cccagagggattcgtctataaggatgacttgaaagtagggcatccttcacccatctgaagggaggaaatagtggc

SEQ ID NO: 649464 - DNA, 82 bp, Homo sapiens
tctgcctgacttggaccctggaaaacctggccctcttcaatttctgacaaaagaagaggactgtcagaaggacgtagaaggc

SEQ ID NO: 649465 - DNA, 83 bp, Homo sapiens
cgcggactccggagccgcacaaaccagggctcgccatgaagccaggtttggtgcacctcgatttggaggaagtagggcagggc

SEQ ID NO: 649466 - DNA, 95 bp, Homo sapiens
gtccactgtgtgtgtgactaatgtcaggccatccggctgtccttagagcaagccctgcctcctgagccaaaggaagaaaatgctgagcctgtgag

SEQ ID NO: 649467 - DNA, 100 bp, Homo sapiens
gccccacggccaagcccgccgcgggccggcgtgcgctggtcactgaggcccaggtcgccgccgcggcgcggtgaatatgagaagggcgtagaccatctga

SEQ ID NO: 649468 - DNA, 83 bp, Homo sapiens
cgaggcaaggagctaaagcagcgtgcgttcagccctggggctggctgcaggagctggcccgccgactggagactccctactac

SEQ ID NO: 649469 - DNA, 100 bp, Homo sapiens
ccatggctccctgcagtaccctttaacggatgactacgacaaccatactggaattgatttggttggcactataatagccaccattaaaggctctaatgag

SEQ ID NO: 649470 - DNA, 100 bp, Homo sapiens
ggtgatggcgttcacacaaactggtcagcgtttccctggagaggaagaggcaaggccggatcacctcaacagtcacgtcagacaagtgcactcaacagaa

SEQ ID NO: 649471 - DNA, 97 bp, Homo sapiens
gcggggccttccacaccccctccgtgggtgtgtggtgcctcaggaaccctgaagctgggctgagccatgatgctgctgccagaacccctgcagaggg

SEQ ID NO: 649472 - DNA, 101 bp, Homo sapiens
tctggagagcagctgcattgcaggcacagggcccgatgagccagagaagcttgcatgctacaagtgaaaactgatgagaaactgaatgtgtctgatgagaa

SEQ ID NO: 649473 - DNA, 73 bp, Homo sapiens
tgaaaaccaaactgatctctctgggttggcttcagctatgaagacggccaagtgggagatgcaaatattaata

SEQ ID NO: 649474 - DNA, 82 bp, Homo sapiens
gcggatgccctgcagtacctgcagaaggtctctggagacatcttcagcaggttctgcggggagtgtctccagccctgcctgc

SEQ ID NO: 649475 - DNA, 85 bp, Homo sapiens
ccaagcggagggtgcgcgagctctaccgcgcctggtatcgggaggtgccgaacactggttccttttgaggatggccacacagaca

SEQ ID NO: 649476 - DNA, 100 bp, Homo sapiens
tagatgatagcacagtcagtcaaccaaacctcaagtatacaattaaatgtgttctagaacagatcagacattttgtaatgatgcctgaaataaacactaa

SEQ ID NO: 649477 - DNA, 51 bp, Homo sapiens
cctagatagaacagaagagcttgcgaaaacccgcctagtgccaagcaaccc

SEQ ID NO: 649478 - DNA, 51 bp, Homo sapiens
gttaaggacattccaggcagaggcaaggtcgaatgagtgatttgagtgtaa

SEQ ID NO: 649479 - DNA, 100 bp, Homo sapiens
ctgctgaacaccatccagaagacacagagtgttgaaattccgtaaacttaacttcaatggggagggtgaacccgaagaactgatggtggacaactggcgc

SEQ ID NO: 649480 - DNA, 100 bp, Homo sapiens
cggtgatcatgtccattgaggagaagatggaggctgatgcccgttccatctatgttggcaatggcgtgatggtgggcatgggtcagaaggattcctatgt

SEQ ID NO: 649481 - DNA, 90 bp, Homo sapiens
gggaaccagtgggccccacgtgggtaaaaagctacctctgacttttgaggatgttgctatttatttctccgagcaagaatggcaggatct

SEQ ID NO: 649482 - DNA, 100 bp, Homo sapiens
gaactagtagatagagccaaacaatcttttcaagggatcccgggtgcaaggggcacaagtttgcacacagtggcctggcttgccagctgccccagccctg

SEQ ID NO: 649483 - DNA, 75 bp, Homo sapiens
atgggcagacggattcatttagagctgcggaacaggacgccctctgatcattttgaaagcgaagcagaagccgta

SEQ ID NO: 649484 - DNA, 73 bp, Homo sapiens
ttctgaattgtgctgccttggccaaaagagtacctttgtgttggatgaatttaagcgcaagtactccaatgag

SEQ ID NO: 649485 - DNA, 82 bp, Homo sapiens
gggctcgcactcttctggtctcccaggcccaacccacctgaagaattgcctgaggttctgtccattgaggaggaagtggaag

SEQ ID NO: 649486 - DNA, 75 bp, Homo sapiens
cggagccgccttggcctcggggtctccctacaccaacggcaaactcaaatgctgagaaccccaagctgatatcag

SEQ ID NO: 649487 - DNA, 100 bp, Homo sapiens
gagcctgcgtacgtggatttatcgctgccacggtctgcgtagctccagaggtttaaccataggatagagaaaccaggtgtcatggagaaactccagctgg

SEQ ID NO: 649488 - DNA, 100 bp, Homo sapiens
aggcgcagcccgagcccgaccccgacccccggcccctcccggcggggcccctccttaggtgaagatctttaagcaagaagttaaagagtgaacatggtgg

SEQ ID NO: 649489 - DNA, 75 bp, Homo sapiens
atagcgggaagaacaaaggaaggggagcccgggacccccgggggcgcaggtcaaaatgcagatcttcgtgaaaac

SEQ ID NO: 649490 - DNA, 75 bp, Homo sapiens
cagagattcatatgagagttatggtggatgggaagagagtcccaagggatgcagggcatcctctgtaccccttta

SEQ ID NO: 649491 - DNA, 90 bp, Homo sapiens
catcactggatctgctgccagcattagcctggctcaatatctaatcaatgtcagggtttggaatcacttgctaggagtcttgtctctctg

SEQ ID NO: 649492 - DNA, 98 bp, Homo sapiens
gcggaggacgacgcgctcaaccagatcgcgcgggagctctgtctcggaagacctaggctgtagacgtggggatttcagtaggaaacattatggatctg

SEQ ID NO: 649493 - DNA, 49 bp, Homo sapiens
caggcagcaaaaccatcttctctaaggagaatgaagtttctagattaga

SEQ ID NO: 649494 - DNA, 100 bp, Homo sapiens
ctcctcggaccaagcctcgggagctaagatgtaaaaaaagattggtctgaccatgctctctggtgggaaaagaagagaacttggcttctgaagacacatt

SEQ ID NO: 649495 - DNA, 98 bp, Homo sapiens
aagcttccgccaaacaaaagaggacagcacttccggtcacgccatcgttgctgccttcttcgtcaaggtgagagcacagtaaggactattgctatgga

SEQ ID NO: 649496 - DNA, 75 bp, Homo sapiens
aagccacaggatggaggagggggatcccagcaaagcggggatctgatgagcttctttcttctggcatcattaacg

SEQ ID NO: 649497 - DNA, 100 bp, Homo sapiens
tggggttggtgtgattagcttcgcagtctggaaagctttaggagttcacagtaatgcaggtctggtgactgtcactaccactcctctcaactgtggccct

SEQ ID NO: 649498 - DNA, 50 bp, Homo sapiens
ggatcgcccaatccacatgcttttccagagagttaattgttaaatccagt

SEQ ID NO: 649499 - DNA, 80 bp, Homo sapiens
gaagttggagatgctgcagtggaaggtggtcgagatatccagtctgacggagcacttgctgacggaatgtgacaaaaaag

SEQ ID NO: 649500 - DNA, 50 bp, Homo sapiens
tgctgcatcaagaaacccaagctgctgagtttggaaattttagcattcag

SEQ ID NO: 649501 - DNA, 100 bp, Homo sapiens
ttaaaagatgatgagaaataaggacaaaagccaagaggaggacagttcgctacacagcaatgcatcgagtgacaacactgcagctgaaggaggagttgct

SEQ ID NO: 649502 - DNA, 75 bp, Homo sapiens
gtcaaggaggcggcaaaaaaaaagtctgctactactacgacgatggagaacatcattgcaacagtaagagattcc

SEQ ID NO: 649503 - DNA, 100 bp, Homo sapiens
aagacatcctgagaggacttggcaggtaaaagagtggctctgtttgaactgtcaaatgaaaagagctctaggcggggatctggctccagttccgtcatca

SEQ ID NO: 649504 - DNA, 82 bp, Homo sapiens
gagctccccaggggagttctctgtgtctgtgaaacaatgcagatcttcgtgaagactctgactggtaagaccatcaccctcg

SEQ ID NO: 649505 - DNA, 50 bp, Homo sapiens
ctgagacaagaccgcccagcgtcgaacttcctgtagaaaagcccccaaaa

SEQ ID NO: 649506 - DNA, 75 bp, Homo sapiens
gattgtaaatgcaccaatcagcatgctgtgtctagctcaagatttaagttctcaaaggtggctgcaccaaatccc

SEQ ID NO: 649507 - DNA, 98 bp, Homo sapiens
ggcgctcgccgccttgggcaggacccacctcgccttcctcccggcgtggcagatgctccaggtaagaatgattgatgttggctgatattggagtgctc

SEQ ID NO: 649508 - DNA, 100 bp, Homo sapiens
attcatctggagaaccttttggccaggtcttactttgatcctcgtgaggttcgagaaatggctgctactaccttaagcggtctgctacagtgtaactttc

SEQ ID NO: 649509 - DNA, 100 bp, Homo sapiens
acctttgagcatacaccgagagagtgaggagccagacgacaagcacacactatggcgctgaaacggattaataagacttgggaagatccccatgaaaaag

SEQ ID NO: 649510 - DNA, 100 bp, Homo sapiens
ttgattgatataggaatggtgcttctcctgagacagggacccctcattcagagctcttggaagaagtcgaatgtactccgtcacctcgattagctctcac

SEQ ID NO: 649511 - DNA, 90 bp, Homo sapiens
agcgagccagcgcccggagcaagcggagctcccccaagagccggaaagagaatgtaactggtcactacatttccccctttcatgatattc

SEQ ID NO: 649512 - DNA, 90 bp, Homo sapiens
gcagaaaccccgttgacaaggcactgctttttcatgacgcgccatcatgaccgggtcctataacaacttcttcaggatgtttgatagaga

SEQ ID NO: 649513 - DNA, 75 bp, Homo sapiens
ggattcaaggatggaatttttcataactccatatggcttgctatcatggtgaacttacttcagattgtgcgggac

SEQ ID NO: 649514 - DNA, 87 bp, Homo sapiens
tccactgaaatcacaatggaaagtcttgacttgactgatgcagccgctctctgctccctgccccaatgaacatctgcactaggccca

SEQ ID NO: 649515 - DNA, 75 bp, Homo sapiens
cctggacaacagacctctgtttggggagacgtccgccaaggtttggtgcacctcgatttggaggaagtagggcag

SEQ ID NO: 649516 - DNA, 100 bp, Homo sapiens
ccggagctgggtctggagacgccgtggcagcctgaacggagtgtgcgacggattgggagaaagcatccctggagaacagcctggaggagaccaaaggccg

SEQ ID NO: 649517 - DNA, 75 bp, Homo sapiens
cgataacgcgcttttgctcctcctgaagtgtctttggtccaacgttgttccagtgtgctggaattgatgttcgtc

SEQ ID NO: 649518 - DNA, 74 bp, Homo sapiens
agctctgtcgctgacgggaggatctgaagccggccgcaggtggttctaactttgatggtttgagaccaaatggg

SEQ ID NO: 649519 - DNA, 82 bp, Homo sapiens
aagaaaaatgccaagcctttaagttttaaggtcggagtaggcaaagttatcagaggagctggagtgcaatggtgcaatctcg

SEQ ID NO: 649520 - DNA, 76 bp, Homo sapiens
aacgaaaataccgagtttgtaatgtgactagacggccagccagtcatcaaacattcacaatgacatcctttcaaga

SEQ ID NO: 649521 - DNA, 82 bp, Homo sapiens
gcctcagttcctaaactcaggggcatatcctcaaaaacctcttaggtcccctcttgctgttggctgcacatcaggaaggctg

SEQ ID NO: 649522 - DNA, 90 bp, Homo sapiens
gagcaatttgctggctcaatcctttatcctattgaaaccttgctgggctttgacaaacttcctctgtggggtaccatcctcatctcggtg

SEQ ID NO: 649523 - DNA, 100 bp, Homo sapiens
ctttctatgtgcagattgacttcagtcgtccatatgaccccagaagggatctcttcagggtggaatacgtcattgacatccacgacagcgatggcagttc

SEQ ID NO: 649524 - DNA, 82 bp, Homo sapiens
cagccaccctgcccccaagaaggaagtcatcatgggccggcctggaacaggattttttatcaagcagaaatgcatcgaacaa

SEQ ID NO: 649525 - DNA, 100 bp, Homo sapiens
ccgggacatgcatcgtcccctggactctctcaagctttctggctcatctgctggaggaatccttgctgcgggggtgttttcattttctcgtctaacatgg

SEQ ID NO: 649526 - DNA, 98 bp, Homo sapiens
ccagcccgcgggccagcaccatggaggacgtgaagctggagttcccttcccttccacagtgcaaggaagacgccgagactgatgggtttctgaaggac

SEQ ID NO: 649527 - DNA, 75 bp, Homo sapiens
cctggatgcagctcacctccgggcatttttggtcgaagagagctgaagtaatgagaagacatcatggaggcccag

SEQ ID NO: 649528 - DNA, 90 bp, Homo sapiens
gaaggacgaagaggaagccttggtaaagtgttgagagaggagaaccagtgcattgctcctgtggtttccagccgcgtgagtccagggaca

SEQ ID NO: 649529 - DNA, 75 bp, Homo sapiens
aacagtgatgtcacaagattgaccacattgatcacagttcaacaacgtcatcttccaccatccataatgaagctg

SEQ ID NO: 649530 - DNA, 75 bp, Homo sapiens
cagcagctacgggcagcagatttgggcttcctgtagacacccttttcctgcgcaacagagctgggcctccctttc

SEQ ID NO: 649531 - DNA, 85 bp, Homo sapiens
accgagagcgcgaatatcgtcatcgttagaagatgggaaactcttgtctagtgatgtgactcattacgtgatcccagactggaaa

SEQ ID NO: 649532 - DNA, 83 bp, Homo sapiens
ctgccggcggcgcggcgagagagcggctgacagaggggatgcgagtaatagttatgcacgagtgcgagctgtggtgatgaccc

SEQ ID NO: 649533 - DNA, 82 bp, Homo sapiens
ttgtagtcatgtacagaacatgatcaagggtgttacactggttgaagaagaggatgaacttgaatctggagaccaagaggat

SEQ ID NO: 649534 - DNA, 96 bp, Homo sapiens
cccggttacgcctgtcacataaagctccctgtgctgtcaggaatctacaggacttggctcgtatttacattcgacgcacacttagaaatttcataa

SEQ ID NO: 649535 - DNA, 90 bp, Homo sapiens
gccaaagccctccccaccccggaggactccccagccagtcaccatcaagccccctccacctgagtatgtgccaagtgctctctgctgccc

SEQ ID NO: 649536 - DNA, 102 bp, Homo sapiens
cggggaccgagcctgggaggccggccggtgccagcacctttcggcttctgagacggcggcagcagcggcattcaggccctgagcctgtgcaattatttcgag

SEQ ID NO: 649537 - DNA, 82 bp, Homo sapiens
ctgcactctttcaactggcagagaaactaatctggattcactccctctggttgatacccactcaaaaaggacacttctgatt

SEQ ID NO: 649538 - DNA, 100 bp, Homo sapiens
ggaagctttggctttacggaataccagtatttaggaagctgtcctggctcagatggctcggtcatcacggggctgaaggagataacttattaatctgtcg

SEQ ID NO: 649539 - DNA, 100 bp, Homo sapiens
atgtgtagcatcacatccagaaaccagggatcatagacggtatttctatgtaaacgaacagtcgggcgagtctcagtgggagtttccagatggtgaagag

SEQ ID NO: 649540 - DNA, 90 bp, Homo sapiens
cctctccttttccctctccctttccctaaggaagaaaggcgaaggttgaaaaatgcaataattatccagtcatttattcgaggctataga

SEQ ID NO: 649541 - DNA, 78 bp, Homo sapiens
ggcctttccagcccgtggtccttctccatattcgagagtgtgaacatggctacgcctcttcattcccgtccatgccga

SEQ ID NO: 649542 - DNA, 75 bp, Homo sapiens
aagttcttcgatgtatctaaacttggcaccaagtatggtacatcaggaacgtctctatcaagaatacaatttcag

SEQ ID NO: 649543 - DNA, 49 bp, Homo sapiens
aaagacatcacggtggaggacatgctcctcttggctatggtggtttccc

SEQ ID NO: 649544 - DNA, 73 bp, Homo sapiens
attgaggtcaacggtgcccctgcatgtgctcaagacggggtctccctatgtggcccagcctggtctcaaactc

SEQ ID NO: 649545 - DNA, 100 bp, Homo sapiens
ggatagccctacacagatatttgagcatgtgttcctggttggacgtgataagtatgagcctgcagctgtttcagaacaaggtgataaaaagggcaaaaag

SEQ ID NO: 649546 - DNA, 51 bp, Homo sapiens
tgaagatccaagatgttctacagatggcgggtgaaaaagttgagaagccag

SEQ ID NO: 649547 - DNA, 90 bp, Homo sapiens
gggaatatttatggaagacactgcctggcttggtggggggcccagcgatgccaaggaggtcatggagcacaggttcttcctcagcatcaa

SEQ ID NO: 649548 - DNA, 96 bp, Homo sapiens
cctgagcctgctgtcgctggggacgtgcctgggcctggcctgatgtgccggtgacttcagcgccagtcaccgcgttctaccgcggctgcatgacac

SEQ ID NO: 649549 - DNA, 96 bp, Homo sapiens
tgaaaagaagtcagctgttgcagataaacatgaattgctcagccttgccagcagggtcaacatatttcactggcacctattcacaagcttgaagaa

SEQ ID NO: 649550 - DNA, 82 bp, Homo sapiens
ctgcccctggacgaccaggtcatcctgctgcgggcagtaatttctatgcagcccccgacccagagccgagctccacttctgc

SEQ ID NO: 649551 - DNA, 97 bp, Homo sapiens
cagagtaaagcaaagagaaaggaagcaggcccgttggaagtggttgtagcaaccatctaaacctgaaattgtaagcaaagcactgtttctcgaaaca

SEQ ID NO: 649552 - DNA, 100 bp, Homo sapiens
agcaatcctaccatgtcagccttcccagtagctggaactacaggagagaaatatgaacttcacgcgggaacagagtcgacacccagcgtggtggttcatg

SEQ ID NO: 649553 - DNA, 51 bp, Homo sapiens
agtcatacgggaagagagagtaagaggtaccccaagaagctagtgcagact

SEQ ID NO: 649554 - DNA, 74 bp, Homo sapiens
gatatttggagttcttacaacatggcagacattgacaagagtacaagcgcaagctagccagagtttccctggtg

SEQ ID NO: 649555 - DNA, 98 bp, Homo sapiens
gaaaacagcctcaagaaaccagtaacagattgtgttatttcaggtgaccgatctgaggactttggtgtgaatgaagacttggctgattcagatgccag

SEQ ID NO: 649556 - DNA, 90 bp, Homo sapiens
ccgctttccaggaagcagcaggatgcgccgctccactgtcggtagcaacaaggtgaagtggatcctaaagagaggatagcacgccaacga

SEQ ID NO: 649557 - DNA, 95 bp, Homo sapiens
ttccaacgccaccaattccaacctggagatcatgaatcagacagataaaaatcaacaagaaatcccatcataccttaatgatgaaccaccagaag

SEQ ID NO: 649558 - DNA, 98 bp, Homo sapiens
aagcagttctacaaggcgagccagttctttattggtgaaaacatgaatccagatggcatggttgctctattggactaccgtgaggatggtgtgacccc

SEQ ID NO: 649559 - DNA, 101 bp, Homo sapiens
ctcaaggctcggaagaatgtggagagttttctagaagcctgtcgaaaaatgggggtgcctgaggtgtcccgacccaggctaagcttgagcatggctgagca

SEQ ID NO: 649560 - DNA, 100 bp, Homo sapiens
gtgcccggccatgggctgtatcggctctcggagcccggcgggtcaggataatgagtgtgtatatggcaactaccctgaaatacctttggaagaaatgcca

SEQ ID NO: 649561 - DNA, 75 bp, Homo sapiens
tcttcctgaggttttcctaagccatcccctggcggaaccgcccccaggcgaagctgctctcaggggagaacccag

SEQ ID NO: 649562 - DNA, 100 bp, Homo sapiens
gaactcaaatatgtccgcattgtcttgcatccagacacagagcattctaaagaaaaccatgagctgttttccaagagcttcatctccatggaagtgcctg

SEQ ID NO: 649563 - DNA, 75 bp, Homo sapiens
gtaaactctctgtttccaaacaaagccggcttgagcaggccttaaaacaatcatctggggacctggagaatgatg

SEQ ID NO: 649564 - DNA, 100 bp, Homo sapiens
ggaaacctcagagctataaagtggagtgacatggaagacagacacggaggctgccacgggagaataccaggttttgctggaactgtacactgaaaaacgg

SEQ ID NO: 649565 - DNA, 90 bp, Homo sapiens
gtagaggatgccgaggagaaaacagcaggcacccaagcgggcggcaggggatgaccgctttggaagacgtgttgtcacgttcagctgctg

SEQ ID NO: 649566 - DNA, 100 bp, Homo sapiens
gtatacagtgcttgtaaaaggtttgaagaactgggagtcaaatttgtgaagaaacctgatgatggatgtcacatgtacttcagtttgaggataaaagcag

SEQ ID NO: 649567 - DNA, 90 bp, Homo sapiens
agagaccttagaaaggatcaggactggcgggctgctttgactctcccgcgaagacctttccttcactgttctactgtgattcccgttgtg

SEQ ID NO: 649568 - DNA, 82 bp, Homo sapiens
accatgccaatgcagctgtgaacgatcagagataaatttccgctgtaagccgtccttccgtgaatcaggctccaggaatgtc

SEQ ID NO: 649569 - DNA, 88 bp, Homo sapiens
tcttcgctcacctggatgacaacgagaggagcttccccgggcgctgcctggacaggcctgcctgcgtgctgggacatgtctggcctcc

SEQ ID NO: 649570 - DNA, 90 bp, Homo sapiens
tacatctacaagaggggacaagtacctttatgaaccagtgtatcccaatcctcacacaggtattcaggaataccaggatggcgtgcccaa

SEQ ID NO: 649571 - DNA, 100 bp, Homo sapiens
tgcctggcagtttgcacacctgtaaactgaagctgcaggaggaccggcgacagcaaggttggtgacatcgtgaaagtcacaaggatgaatataaatggcc

SEQ ID NO: 649572 - DNA, 100 bp, Homo sapiens
ggctgctcaactccaagcagctgggaatgatcgaggcaagacctgtaggaggatattcttcatgaaggtgcaaattgagcatgacccagaattagaaaaa

SEQ ID NO: 649573 - DNA, 50 bp, Homo sapiens
gaaaatcgcagactttctcaactcgttcgaagctggataagaaatcatct

SEQ ID NO: 649574 - DNA, 75 bp, Homo sapiens
gttcggcggcgggcgagtgactgcggccacgcctgaaaggcgactctccttacgtttcaggagacggcagcgagg

SEQ ID NO: 649575 - DNA, 100 bp, Homo sapiens
gacccggctttacgtggatcagacactgcgagagcgggaggctggcaccggtatgggcactaggaaaagacttcttccatcaagcttaattgttttgtta

SEQ ID NO: 649576 - DNA, 75 bp, Homo sapiens
gtcctggcgccccgcccccactgctgtttctcaataagcaaaaagagctatcagcttcccagtttgcacaattca

SEQ ID NO: 649577 - DNA, 75 bp, Homo sapiens
ttcattgctttcaaagttcctttgcaaaaggttcactattatgaagatggcaatgttcagttggttagtcataaa

SEQ ID NO: 649578 - DNA, 88 bp, Homo sapiens
aagcagccttagccctagtgtagagcttcttccagaccagctggtcttgcttctggagcatctcttggagcagaagactctgagcccc

SEQ ID NO: 649579 - DNA, 90 bp, Homo sapiens
ctgcatcccttcctgcagaggcagcagctggattatggcatctacgtcatccaccaggaaaggcagactacaagttactgagcacctccc

SEQ ID NO: 649580 - DNA, 83 bp, Homo sapiens
gttccaccaggccgggaagcccatcggatgctgtgggccctgagggaaaggatcacagaggcgctgagccgggatggctacgt

SEQ ID NO: 649581 - DNA, 83 bp, Homo sapiens
cccagaccctggagcctcagttggaagcagccgatccagcctgcggagcctgtggggcagaacagatctcggcccctttccaa

SEQ ID NO: 649582 - DNA, 100 bp, Homo sapiens
agagtgcgcagaaggattccgggagcacagttccgccgattggagtgcttagtgcagttggtgagagcgggagccacactcaacgtctccaccacacggt

SEQ ID NO: 649583 - DNA, 83 bp, Homo sapiens
tgcagagaccccgctatggctctcaccatggatgatgatatcgccgcgctcgtcgtcgacaacggctccggcatgtgcaaggc

SEQ ID NO: 649584 - DNA, 151 bp, Homo sapiens
atccaagatctcctcatgagctttggtatccttaaacctgacttaaggattgtctttgtacataacaagcacttttccagccattaactccaggctctcgagaatttgaagatgttgtaaatattctccattcttcttaccttgaaccaac

SEQ ID NO: 649585 - DNA, 100 bp, Homo sapiens
gcccttcctccccaactggcagcccgtgcagtggcaatctgaaagcaaatcctgtttagatgcaggcgaaggttcctggtgacccaggctctcaccttac

SEQ ID NO: 649586 - DNA, 101 bp, Homo sapiens
ttcaggagaactggtcgccatcaagaaagtattgcaggacaagagatttaagatttgctatgggatcatttatggaatgggagctaaatctttgggagagc

SEQ ID NO: 649587 - DNA, 50 bp, Homo sapiens
caccgtcttcgggaaggagctcaaagtggagccatttggaagaagagctc

SEQ ID NO: 649588 - DNA, 86 bp, Homo sapiens
cgtggaccacatagacatttacgcggatgtcggcgaagagttcaaccaggagtctccccaggacagtgctatcacccgggatatta

SEQ ID NO: 649589 - DNA, 100 bp, Homo sapiens
tagagtctgaagttgttaccaatggtgaaactacatgttcagaaagccctgtctctgcccctggtggtcatcgtccatggcaaccaagacaacaatgcca

SEQ ID NO: 649590 - DNA, 100 bp, Homo sapiens
cctgctccacaagcggcgccgcgccctcggcctgcacggattttgaagccagcttcataaggctattggacaaaataacgaatggttctcgaattgaaat

SEQ ID NO: 649591 - DNA, 100 bp, Homo sapiens
aaccactcattcacttctagacgacaaaatgcaaaaaaggaggccaaagacttttctgctttacaagaacttgaagaattgaaacaaattgttcccaaag

SEQ ID NO: 649592 - DNA, 75 bp, Homo sapiens
gtgccctcctgagtgactgcgtcaggcatctcaatcatggaaaatttgagaatggtgttgcagaaggaatggtgg

SEQ ID NO: 649593 - DNA, 82 bp, Homo sapiens
tccggaggcgccagctcaaccgtatctttcagatgaaggcattgaagcttgcacaagctctccagacaaagtcaatgtaaat

SEQ ID NO: 649594 - DNA, 75 bp, Homo sapiens
gaccttccggagcttctcagaagacagagggttttcttttgagattctggctgtgactcagtcactgacactgag

SEQ ID NO: 649595 - DNA, 74 bp, Homo sapiens
accgcagcactggggaaacgatccgctcccaaaacggcactcttggaaagaacaggctacacacttgatgtgac

SEQ ID NO: 649596 - DNA, 74 bp, Homo sapiens
cgattccatatggcatgtccaacattcagggtgtctatagcccgattgggaggtggggaagacagggctccagc

SEQ ID NO: 649597 - DNA, 101 bp, Homo sapiens
cccgacgcccgcaggtcctcgcggtgcgcaccgtttgcgacttggtcaccgacgatgagggcgcacctgctgtcctggagcttccgatctctgttcgggga

SEQ ID NO: 649598 - DNA, 100 bp, Homo sapiens
gtgagtgtggtctacgagctgtttctcatctttatactcttccagacaatgcagatcttcgtgaagactctgactggtaagaccatcaccctcgaggttg

SEQ ID NO: 649599 - DNA, 101 bp, Homo sapiens
gctgcctgacaacaccgatcacagaccaacaagttctaagctggtctatgtccatcaccttcttggagaaggagcctttgcccaggtgtacgaagctaccc

SEQ ID NO: 649600 - DNA, 74 bp, Homo sapiens
tttcggttctacctgggagaatccaccgccatccgccaccatgtaatagttatgcacgagtgcgagctgtggtg

SEQ ID NO: 649601 - DNA, 82 bp, Homo sapiens
aaaacttcaagccaaacatcaagcagaatgtgatttgcttgaagatatgagagcagcccgacggccatggaggctgaagaga

SEQ ID NO: 649602 - DNA, 118 bp, Homo sapiens
gcggcgtcctcggcgctgaaggggttaattcaacagttcaccaccattaccgagaccttttaatcaaagtgaagtttggggaaagcattgaggacttgcacacctgccgtctcttaat

SEQ ID NO: 649603 - DNA, 83 bp, Homo sapiens
cgccgggtctcggcccgcaccaggagcggaacaaaaaattgtacaagctggagataaggaccttgatgggcagctagactttg

SEQ ID NO: 649604 - DNA, 73 bp, Homo sapiens
atataatattaaatatcagcccaaagttaaatctaggctttatgagtgcggttctcatcctcaagtacacccg

SEQ ID NO: 649605 - DNA, 101 bp, Homo sapiens
gggcaggcatcgcaagcgaccccgaggcccgcagccgtgccgggtgctcttcagcatgtccttcatcccggtggccgaggattccgacttccccatccaca

SEQ ID NO: 649606 - DNA, 82 bp, Homo sapiens
ccagttccaaagtgtcttaaagtgggcctttggagtgacgctgtgggaactcatgactctgggccagactccctacgtggac

SEQ ID NO: 649607 - DNA, 101 bp, Homo sapiens
gtttgttggtggaggaggtggcaggcctcggcggatgtgctgatggagctccttgagcagtgcgcagatggactctggaaagccgagcgctacgagctcat

SEQ ID NO: 649608 - DNA, 98 bp, Homo sapiens
gcggggcccgagggcaaggagcagttttcggctttgtgagaaaccttaccatcaaacacgatggccagcaacgttaccaacaagacagatcctcgctc

SEQ ID NO: 649609 - DNA, 75 bp, Homo sapiens
ccagactcgtgggggaaaggctggtgattgatgagatttatcgtgtgttgagatatgtcaattctaccagagccc

SEQ ID NO: 649610 - DNA, 98 bp, Homo sapiens
tttcttccagcttctgctgtccttctttgtggagagcaagatgcctgaaaacttcatgcctcctgttcccatcacatcaccaatcatgaacccgttgg

SEQ ID NO: 649611 - DNA, 75 bp, Homo sapiens
tcgagagccgaatgcagaggttccaagaccaattccccgacagtcattttgtttactcattcagccctgttgcag

SEQ ID NO: 649612 - DNA, 134 bp, Homo sapiens
cgccctggagttgctggtgatccgcaattacggccccgaggtgtgggaagacatcaacaattcacagaagctgtgagtccttcagtgctacccccttcagctttgccactggacctgcttaataatgctataac

SEQ ID NO: 649613 - DNA, 75 bp, Homo sapiens
gctggcccccatgtgggaaggtcctgcggaaggccaccttcatggtgttccaagccttggctcaataccaaaagg

SEQ ID NO: 649614 - DNA, 50 bp, Homo sapiens
cggaatcagatttgaaaatgaaagtgaattgaatgatctggcacgggacc

SEQ ID NO: 649615 - DNA, 100 bp, Homo sapiens
ttggcaaggcaagtagcggcggcgcttcaaggtctccgtgaggccgggtgacgctccagaatgggagacaagccaatttgggagcagattggatccagct

SEQ ID NO: 649616 - DNA, 85 bp, Homo sapiens
gattaccacttcctctagtgctcccttcacccagccattgtcttccaatgaggtttattcactggatctctgaatacccaggccc

SEQ ID NO: 649617 - DNA, 101 bp, Homo sapiens
gaaaaaccgacgaatctttacctacactgactctgatagatacaccaatttggaggagacaacagtgcaggaggaaagcacagtagactcccagccagtgc

SEQ ID NO: 649618 - DNA, 98 bp, Homo sapiens
tcgaaccccgggacacgcaggaacggctccagcatcaagatccgtctgacaggcaacagcattattgagaaaagcccttacagaagagtgtggccgta

SEQ ID NO: 649619 - DNA, 96 bp, Homo sapiens
cggctgtggaccgggcggcacgcacgcggtgcagggtaacatggcggatgcggaaggcggcttacagggagaacacagttggcctccaccgtttct

SEQ ID NO: 649620 - DNA, 75 bp, Homo sapiens
gatgtactgtgcttggctggaaaaccccaaaagtgtacataaggaagaactcccaaattagagtagaagatatgc

SEQ ID NO: 649621 - DNA, 74 bp, Homo sapiens
acacactgggaaacatcattaaatcgacccatgagcttcctggctggcctgggccttgctgtgggactggccct

SEQ ID NO: 649622 - DNA, 100 bp, Homo sapiens
gaccgtgtcaccatccaggaactcacagctaaagatgtgattaaagagattgaagactttgacagcttggaggctctgcgtctggaaggcaacacagtgg

SEQ ID NO: 649623 - DNA, 100 bp, Homo sapiens
ctccccttggattcagacgccgattcgcccagagcttggggcttccttggtcgcacccaccacctgcctgcccactggtcagccttcagggaccctgagc

SEQ ID NO: 649624 - DNA, 100 bp, Homo sapiens
ctgcagttaaatccagatgtcagctgacttctgccatgacttctgccacagattcactgtgtaacctgggcatttacagccgaacaataccagcaacatc

SEQ ID NO: 649625 - DNA, 100 bp, Homo sapiens
cctctgcttgcttgtccggcgcaccaggctcaggctgcacgaagaaaaggttattaaagatagacgtcatcatctcaagacctacccaaactgttttgtc

SEQ ID NO: 649626 - DNA, 90 bp, Homo sapiens
taagagaggatcgcccaatccacatgcttttccaggtattcacttacaagcagagcacaattacccaccagaaggtgactgctatgcacc

SEQ ID NO: 649627 - DNA, 100 bp, Homo sapiens
gccgccactgtgacttgcagtcatcatccattaccacaaaattaggcctaaacggcagcggcaaaacaactttcccatgtttccctctcctaaagcctgg

SEQ ID NO: 649628 - DNA, 74 bp, Homo sapiens
ctcctgagtggctgggactacagtgtaaagaaagaatgaggcctgttaaagcagctttgaaacaacttgatagg

SEQ ID NO: 649629 - DNA, 100 bp, Homo sapiens
cacatggagctctcagcataccgtgcaacaggggggacacagcgattgccacgcgccattggaatgtccctggccaaggagctcatattctctgcgcgag

SEQ ID NO: 649630 - DNA, 100 bp, Homo sapiens
atccagggcggcttccgctgcctggccttcgagtgccctgagaactaccgccgctccgcagccacagccccccaagatgaacccagtggtggagccactg

SEQ ID NO: 649631 - DNA, 50 bp, Homo sapiens
ccgcgatctatgggggtgtagaggggtgctatgggcataaacaacagagg

SEQ ID NO: 649632 - DNA, 90 bp, Homo sapiens
cggggccagcgcatggggctgctgagaccgctccggacgtgcgaagcgttcgcggtgcggggggcatgtgctctgtgtacctgaaggaca

SEQ ID NO: 649633 - DNA, 95 bp, Homo sapiens
atgaagctaccggccagggttttctttactctggggtcccggctgccctgtggcctcgctcctcggaggcatgttggcagataaattgaacatga

SEQ ID NO: 649634 - DNA, 100 bp, Homo sapiens
ctgtagaacccagcagctcagaatccattaaaaggagagctgggaggaggaaacccttttccaaagagaaatgaagaagaaaactgtatgtaccctaaat

SEQ ID NO: 649635 - DNA, 94 bp, Homo sapiens
tcagctgcccactcgtgatttccagcggcctccgcgcgcgcacggaccaagaatcgccttcagccctgtctggtgcatccttggcagaaagtga

SEQ ID NO: 649636 - DNA, 50 bp, Homo sapiens
tcctccaggaggagggactacacggacagagcccgcggagctgagcagcg

SEQ ID NO: 649637 - DNA, 98 bp, Homo sapiens
cgagactcttaaaacttcgctatctcatactaggatcggctgttgggggtggctacacagccaaaaagtgtgaagcagtatgcagatgttgaaggatt

SEQ ID NO: 649638 - DNA, 75 bp, Homo sapiens
ctttgccactatcacgcctctcatgttcacagcaggggaaatgctgtctgtagctgagcacttcctggagcagca

SEQ ID NO: 649639 - DNA, 75 bp, Homo sapiens
aaggattccaagtaactcttatttgggatacctcagacaatggcagcttttggattgaaatatttgctgaatgac

SEQ ID NO: 649640 - DNA, 96 bp, Homo sapiens
gaagcgccgcgatgttcgccccccggctgctggatttccagaagacgaaatacgcgaggatggatagaatgacagaagatgctcttcgcttgaatc

SEQ ID NO: 649641 - DNA, 100 bp, Homo sapiens
gcggtctcccgcaccacctgctgcaaggctcgggaaggaaggcgaagatagcaccggggcatccccgggagtccgcaagtggtttgctaagaaggccatt

SEQ ID NO: 649642 - DNA, 50 bp, Homo sapiens
tattctgatttaatggaatctgttacgtatacactaccactggaactgat

SEQ ID NO: 649643 - DNA, 83 bp, Homo sapiens
tgaaccgcttcagggtgtccaagttccggcacaccgaggctcggccgccccgccgcgagggaacggcaggagcagctgatggg

SEQ ID NO: 649644 - DNA, 83 bp, Homo sapiens
gtacagacagaactactaacttcgccaagaactaaggacacattgagaggtaccaatcttgggaaaaagaagcaacacatttg

SEQ ID NO: 649645 - DNA, 100 bp, Homo sapiens
ctgttcgccacctgggaggtggacggctccagccccagctgcgtgcccaggtgaaaggtgtagcagtcactcggcctacacccacagcatcgaccttgtg

SEQ ID NO: 649646 - DNA, 100 bp, Homo sapiens
gacttgctgaaccgcttcctgggggactatgtggagaacctgaacaagtcccagctgaagctgggcatctggggcggaactttatattgctgttggaata

SEQ ID NO: 649647 - DNA, 82 bp, Homo sapiens
caccactttgaggtcactttccagcagtccagcacggccaagtcagccacctggacgggcgtctctggccgagcctcttttt

SEQ ID NO: 649648 - DNA, 100 bp, Homo sapiens
ttaaggtctggtcggatggggcaggatggctgcgttgacacgtcttatttaatccacatcataggagtcattacgggccaatagtcgactgctggaacaa

SEQ ID NO: 649649 - DNA, 100 bp, Homo sapiens
cgtggttgtggggaccataactgatgatgtgcgggttcaggaggtacccaaactgaaggttctcccacccacggtgtacctgagggtaaccgaaaatatt

SEQ ID NO: 649650 - DNA, 100 bp, Homo sapiens
tctctcatcctcccggattgctctgaggccaggagcgattgtaactgcctatgagaatagctctcagcatgatcccagttcaaataacgctatgcttggg

SEQ ID NO: 649651 - DNA, 98 bp, Homo sapiens
cctcaataacgtcttccaggacagcaatgccttcacccgggatacgctgcaagagattttccagagatttggagcaagaggtggtggtggccttcccc

SEQ ID NO: 649652 - DNA, 98 bp, Homo sapiens
gatgaggccgtgagggccccactggactgggcgctgccgctttctgagttctttcgggaggaccattgcctcaagggcatgaatttgaactgtacgaa

SEQ ID NO: 649653 - DNA, 83 bp, Homo sapiens
gccgcccgcttccccatcatcgccagctgcacactcttggggctctacctctttttcaaaacgaagttatacggaagcgtctc

SEQ ID NO: 649654 - DNA, 90 bp, Homo sapiens
ggggccaggaagcaattctggaagcgcagcaacagcaagctcccgggcaggggcctcatccacatgctcacccacttggccgaggctctg

SEQ ID NO: 649655 - DNA, 100 bp, Homo sapiens
ccgaggagtagtcgctggagtccgcgcctccctggtatcaacaacctgcaggctgagttaaacaagatttttgccctgcggaagcaactggagcaggatg

SEQ ID NO: 649656 - DNA, 100 bp, Homo sapiens
caaggcctaccagaaaccagcacaatccagcattcagatggatgataaaatcctcaagacaaccacacgggatgatgctgtgtatctggacaatgagaaa

SEQ ID NO: 649657 - DNA, 98 bp, Homo sapiens
agctcccagaaccttcagtgaaagtaaaagaaccttcagtacaagaggctacttctactagaccattaaaaatctcaagtgacgactttgggaaactc

SEQ ID NO: 649658 - DNA, 73 bp, Homo sapiens
gaactctatcccaggaatacagctttgcattaggagagttctgatctccctgttgctctgcttttggctcagc

SEQ ID NO: 649659 - DNA, 75 bp, Homo sapiens
cttttgatgatcatgatacagttgataaaattgttgagtcaatacagatttgtatgtgaagctattttgaaagtt

SEQ ID NO: 649660 - DNA, 100 bp, Homo sapiens
aacgtgttcgctgcccagaagaagggaaggcgcgagtgaggaaaggaggtactgtaggagttaaacatagatgtagctgatgtggagagcttgctggtgc

SEQ ID NO: 649661 - DNA, 100 bp, Homo sapiens
tgtggtccgcaccatccttgtctacagccgtccaccttgccagccccagttctccttgacggagcccatgaaggtgttggctgaggtgacttcgtgggac

SEQ ID NO: 649662 - DNA, 99 bp, Homo sapiens
aacagtttgcggcaatccaaaaagagcagctgaagcaacaatctggaaatcaaagagcaggaggttgtggacaaagtcatggaaacactggacaatgat

SEQ ID NO: 649663 - DNA, 100 bp, Homo sapiens
gggcagtatcaacggagtctccgggagttatggtgaatggttgcatggatttgaaaaaaaggcaaaagaatgtatggctggaacttcagggtcagaggag

SEQ ID NO: 649664 - DNA, 97 bp, Homo sapiens
ctcctccccagttctactcaagccttattgaagagataggaactcttggttgggataaggttttgacccaccacatcagagtgacacaagaaccatc

SEQ ID NO: 649665 - DNA, 74 bp, Homo sapiens
caaacagtggttctgctggattgataaacccagctgctacagatgttttactgtgcctggctaactatagtcga

SEQ ID NO: 649666 - DNA, 100 bp, Homo sapiens
atttgcagccagtactctatatgaacaatccgtctggatcacggatgtaggaagtggggcttggaagaattctgtggaagagtggacaacagaagactgg

SEQ ID NO: 649667 - DNA, 50 bp, Homo sapiens
agcgctgcggcccagggggtaaagagaggctgaccccgcactacatctac

SEQ ID NO: 649668 - DNA, 98 bp, Homo sapiens
accatcctcatcaaccccgcggaccgggcctattcctggtaccagaaggcctttgagccctacttagagattttggaagtatactccacaaaagccaa

SEQ ID NO: 649669 - DNA, 104 bp, Homo sapiens
agggagcagcgagcacgcgtttcccgcaacccgataccatcggacaggatttctccgcctcagcccaacggggaggtacatgtcccagagcaagcacacggagg

SEQ ID NO: 649670 - DNA, 71 bp, Homo sapiens
tgaggataacatccctccagaagatggctggtgcagtggtgtcatcttggctcagtgcagcctcgacttcc

SEQ ID NO: 649671 - DNA, 75 bp, Homo sapiens
cagtgacgggtctggagtgcgtgggggaccggctgttggcgggccaagactaaggggctgcagagcggggtggac

SEQ ID NO: 649672 - DNA, 100 bp, Homo sapiens
cattccagcactggactcatggaggctgagcatttattcagagccaatcttcggacgtggtgattgtctcctctaagtacaaacagcgctatgagtgtcg

SEQ ID NO: 649673 - DNA, 50 bp, Homo sapiens
ccgggggcgtctttcagagcattacgatccatctgtttgacattgatgtt

SEQ ID NO: 649674 - DNA, 90 bp, Homo sapiens
ccgtggtaatgaacaggactgttttattcttggggactggagatggccagttacttaagggccgttgctccagggagaactgcaaatatc

SEQ ID NO: 649675 - DNA, 100 bp, Homo sapiens
cagaaacgtcaggccgtagccgaagcctcggaaggagcggcccacggcaaaggaaagctaaaaccatgggggcaatctaaagaaaataattatctaaatc

SEQ ID NO: 649676 - DNA, 82 bp, Homo sapiens
aagcaggcgaacccgcggcgcaataacgctgtcgcctggttgggcccggaaatgggacgtcgcgctttctcagggagcgtag

SEQ ID NO: 649677 - DNA, 76 bp, Homo sapiens
gttttgcaggaaatgtgaatctcaggagagagcagccagagtgacggaatgttgctcttgttgccgaggctggagt

SEQ ID NO: 649678 - DNA, 98 bp, Homo sapiens
tatttgggaaaatatgtcaataacctgaacactgaccagctctcagttgcacttctcaaagaccaaaatccacacccttatcacagcccagtgccaat

SEQ ID NO: 649679 - DNA, 50 bp, Homo sapiens
gggggatattgccttgttgaaaacttatcaatggccaatgtacatggtgg

SEQ ID NO: 649680 - DNA, 75 bp, Homo sapiens
acccggaggaggttcgaagctgagtatgtgacaggtttgtggaatcttgcttcccttttttccaacctttgttta

SEQ ID NO: 649681 - DNA, 82 bp, Homo sapiens
ctgtctctagcatcacctctcagcacgattttcccgagagttcacagttgatattcactgatggactccaaagaatcattaa

SEQ ID NO: 649682 - DNA, 100 bp, Homo sapiens
gaagttctaaccctcctgctcgatctcagagctcagacacagagcagcagtcccctacaagggaaaaagacctcgatgaagttctgcagacccactcagt

SEQ ID NO: 649683 - DNA, 100 bp, Homo sapiens
ctggtctgcgatcctgaatgggggcggcgtgcccgccggggggctagtggccacgctgcagagcctcggaaaaatgccagctgtgggacaaggagtgcag

SEQ ID NO: 649684 - DNA, 75 bp, Homo sapiens
ggctgtgattttcagaggggaatgctaagagctcctttagcggcagagttttccgagtgaccttcttgatgctgg

SEQ ID NO: 649685 - DNA, 88 bp, Homo sapiens
acgagaagaaaattggcaagagtggagacaaagagatgagcagctagtatgttcaacacaccaggaatgcagagcttgttgcaacaaa

SEQ ID NO: 649686 - DNA, 100 bp, Homo sapiens
agtggctgaaggaagaatatggagagagccctttgcaggatgcagaagaagccaaaaacattctgggagcaagtaatactgcagacacattgtttcaaga

SEQ ID NO: 649687 - DNA, 90 bp, Homo sapiens
attttgatacctgtggaagagcattttcagaccttaaatggaaagagatgtgaaagctggaaacattcttcttggagaagatggctcagt

SEQ ID NO: 649688 - DNA, 75 bp, Homo sapiens
cctggatcagtttctttgtcatgtagccaagactggagaaacaatatcttgcttctgaaatatctacctgggatg

SEQ ID NO: 649689 - DNA, 82 bp, Homo sapiens
cgggacaccgcggaagccgggaaatggggaacgcccttttgcttgtgactggcagggctgcgacaagaagttcgcccgctcc

SEQ ID NO: 649690 - DNA, 75 bp, Homo sapiens
gggcttcatagcattcgcctactccgtgaaggttatcaatactctggctgaccatcatcatcgtgggactgactt

SEQ ID NO: 649691 - DNA, 101 bp, Homo sapiens
gcagtgacaacagacggcagcatcatctatgtctctgacagtatcacgcctctccttgggcatttaccgaaagttcaggagccctggaaaggagaaggaat

SEQ ID NO: 649692 - DNA, 74 bp, Homo sapiens
gggactctacctggggatatacatgcatgcaccaaaacgaggacagctggactctgactcagaccgcattggag

SEQ ID NO: 649693 - DNA, 83 bp, Homo sapiens
ctcaagatctggactactgttgaaaaaatttccagtgagatttgaatataacctgccgctttgcaggtgtattccacgtggag

SEQ ID NO: 649694 - DNA, 75 bp, Homo sapiens
gcggagactgcgggcccgtagctgggctctgcgaggagaagatgtatggtcttatgcaaagggacttcctcacat

SEQ ID NO: 649695 - DNA, 51 bp, Homo sapiens
cctttttgcaccatccgtactaccaggccaaatacctcaccaagaaaaccc

SEQ ID NO: 649696 - DNA, 98 bp, Homo sapiens
cctttacccaagaatgtggtattcgtgcttgacagcagtgcttctatggtgggaaccaaactccggcagattcgacggaggcgccttgcacgacttgc

SEQ ID NO: 649697 - DNA, 125 bp, Homo sapiens
tgagcagttaaccagagccatccttcgggagaggatatgtagcgaggaggaacgcgctaaggcaaagcacctgaccgaagggaggagcactttcacttcctttatagaatggaatgtggtggcac

SEQ ID NO: 649698 - DNA, 100 bp, Homo sapiens
agcatcagcccctcccacagccaggtgcccaggtctttcatcagagccccatttcaagtgctcagtagcccctttggccagtgcgccccaccacatggga

SEQ ID NO: 649699 - DNA, 82 bp, Homo sapiens
cacgctcatcaccctgaactcggaaggctgaaggtgatgtggccgccctcaaccgacgcatccagctcgttgaggaggagtt

SEQ ID NO: 649700 - DNA, 83 bp, Homo sapiens
gacttccaaccagagcagcaccctctacgtcacagacaacagtgcaggaggaaagcacagtagactcccagccagtgccaaac

SEQ ID NO: 649701 - DNA, 120 bp, Homo sapiens
aaacagtgctgaagcctttaaatgcagcatctgcgatgtgaggaaaggcacctccaccaggtactaggttttgacaagcttgcatcatgcgtgagtataagctagtcgttcttggctcag

SEQ ID NO: 649702 - DNA, 89 bp, Homo sapiens
tttgctaagacactccagcactggccacacattattcgaataggagaccttaaacctacaggaaaatcctgccttgcttcgttgggcct

SEQ ID NO: 649703 - DNA, 87 bp, Homo sapiens
ctcagttggaagcagccgatccagcctgcggagcctgtggggcagtgatgtcttggcattgcccattttcaagcaggaagattccag

SEQ ID NO: 649704 - DNA, 98 bp, Homo sapiens
ggcaccttcacctgggtctgcacgccctttctgtctctagtgatccctgaaaagttccagcatattttgcgagtactcaacaccaacatcgatgggcg

SEQ ID NO: 649705 - DNA, 83 bp, Homo sapiens
ccgctctccagcccgcttgaacgtggctagaaagtttgaaatggtggggagaggggatgctgatctcggcagttgtagcttct

SEQ ID NO: 649706 - DNA, 83 bp, Homo sapiens
ctcagcgctactgcaccgacaccggggtcctcttccgccaggggccagcagcctcccccgatgggtcgtcagcaacgagggtg

SEQ ID NO: 649707 - DNA, 83 bp, Homo sapiens
gtgtggtgtagtgatggacaggagcctcgtccaggccaaacgtaccaagaaagtcgggatcgtcggtaaatacgggacccgct

SEQ ID NO: 649708 - DNA, 75 bp, Homo sapiens
cggctgttaccctgcacagccgtcaccctcaactttcccttcagattcccaggactccggctctctctgcttctg

SEQ ID NO: 649709 - DNA, 100 bp, Homo sapiens
gtcaccctgactcggagacggacgaggatgaggaggagggggacgagcagcagcggctcctcaacacccctcgaagggagagctggtgacggcctccaag

SEQ ID NO: 649710 - DNA, 100 bp, Homo sapiens
agggctgtggctaccatgttctctcgcgcgggtgtcgctgggctgtcggcctggaccttgcagccgcaatggtatgaacgctgccgtccgtgccgtggtg

SEQ ID NO: 649711 - DNA, 90 bp, Homo sapiens
tcccaatttccagatgccttgttcaacaggccatttatgccagtgttcttcctggagagttgatgagggggtacatgacccagtttccca

SEQ ID NO: 649712 - DNA, 98 bp, Homo sapiens
agaaacaaaacttctattgagtcatggattgaagagaagaacatgccaattacttcggcgtggatgagaagctggggccagtggctgtgagcattaag

SEQ ID NO: 649713 - DNA, 100 bp, Homo sapiens
gtgaagagtgcagagacagtagccatccagccagagtgcctggaagagctgggatgtctggttgagtcctatggcatgaatgtttgccaaccaaccccag

SEQ ID NO: 649714 - DNA, 100 bp, Homo sapiens
tgatacccaaacttccccagagccaggcacaaggatgaacattctgccgaagagaacaagacgtgtgaagactcagcctccagggtcgtatagacctccc

SEQ ID NO: 649715 - DNA, 75 bp, Homo sapiens
gctgcgctctgctcggtgtcgtggcctcgcagatgtgatgccatctgcagttttgtgatctgcaatgattcttcc

SEQ ID NO: 649716 - DNA, 100 bp, Homo sapiens
gcttgacctacaaggaatctgagggtgccctcaatgagcacatgaccagcttagcttctgtcctaaaggctctgtgtgctccgggatggagcaggtgtgc

SEQ ID NO: 649717 - DNA, 100 bp, Homo sapiens
actcgtggggctgcagcaccggttttcccatcatatgattcccggtcctcctggtccccacacaactggcatccctcatccagctattgtaacacctcag

SEQ ID NO: 649718 - DNA, 100 bp, Homo sapiens
tggagtcgctttcatggtcttgctgattccactcaacggagctgtggccgtgaagatgcgcgccttccaggttctgtttggattctgcaaagcagactcg

SEQ ID NO: 649719 - DNA, 80 bp, Homo sapiens
tcagctgcctccagtcctccaccccctgcttctcgcctggatgatgaagaattcagaaggagctggcggacatcacttta

SEQ ID NO: 649720 - DNA, 90 bp, Homo sapiens
agcatgaaaaatcaaaaggagttcatgcttatgaatgctcgacttcagacagccattgatatcctgacaacagtagtacgaaatacaaag

SEQ ID NO: 649721 - DNA, 74 bp, Homo sapiens
atatgatgtgcagtgtccaaagagagtgaaagaaaggatgtcttaagagaagctgaaattttacacaaagctag

SEQ ID NO: 649722 - DNA, 80 bp, Homo sapiens
caaaggcaagaaggcaacgacgttccatctgtggaaggacctaccaaccaggtgtttgaaaaactccaactcttctatcc

SEQ ID NO: 649723 - DNA, 83 bp, Homo sapiens
cgcgaccgagcatcctggcggcgccgggccactgggaggttttataggatcacattgacaaaagtaccatggagttttatgag

SEQ ID NO: 649724 - DNA, 101 bp, Homo sapiens
agacgggttcagttcgtcatggggctgtttggaaagacccaggagaagccgcccaaagaactggtgctgttccagaattcaaagaagagaaactgcagctg

SEQ ID NO: 649725 - DNA, 76 bp, Homo sapiens
cgggatctgggagtgacactgatgacttcaaacctgcttctattgacacttcttctgaaggataccttgaggttgg

SEQ ID NO: 649726 - DNA, 51 bp, Homo sapiens
ggcaatgaacagaggcatgaagatgagctgctgggcatgctgtgtgcttgc

SEQ ID NO: 649727 - DNA, 100 bp, Homo sapiens
cgcgctcaagttcgagaacgcggccgccgggagtaaaagtccctcgcaatttccgactgttggaagaactcgaagaaggccagaaaggagtaggagatgg

SEQ ID NO: 649728 - DNA, 100 bp, Homo sapiens
cttggccgagcggatcctaataaggggaaaatggcacgggcgagagcgggaagagcacgttcatcaagcagatgcgcatcatccacggcgccggctactc

SEQ ID NO: 649729 - DNA, 75 bp, Homo sapiens
gcaccccagagggttctattgcccacacaaaaagtttcatgccgcctccagttcccccacctgttgtgccacccc

SEQ ID NO: 649730 - DNA, 74 bp, Homo sapiens
aagtcaattctggacagctgggtatggggcaagcaaccaggttgaagatgacagcgatgcagagacctatggag

SEQ ID NO: 649731 - DNA, 75 bp, Homo sapiens
cgaatatcgtcatcgttagaaggactggaatgtcacgtggaataccagcaaccccgacttcaccaagtgctttca

SEQ ID NO: 649732 - DNA, 82 bp, Homo sapiens
gaagggcatggacaagaagaaggcagccggtgttggggatgtcctttgcactgaccctgaactgccagattgacaaaaccag

SEQ ID NO: 649733 - DNA, 75 bp, Homo sapiens
gagccattatttatgtcatcaagaagaatgacgatggaaacaagattttggtgaagcagtcgcccatgcttgtag

SEQ ID NO: 649734 - DNA, 80 bp, Homo sapiens
atgaagcacttgtgaaaagttcatgcttacacccctggtccaaaagaaacggttttgatgatgatggttcagaatttcat

SEQ ID NO: 649735 - DNA, 101 bp, Homo sapiens
gagaccatatagctgccctcagctgcactgtggcaaggcttttgcttccaaatacaagctgtataggttgcatctggtggtgtcgcaagtaacttctatat

SEQ ID NO: 649736 - DNA, 50 bp, Homo sapiens
agcggggttcgggcgatgctgcaggggctggctgtgtgaactgctccgct

SEQ ID NO: 649737 - DNA, 100 bp, Homo sapiens
cccaactgtacctcagacacaagacacgttcccgcagcatgtgctcagtcagcctcaacaagtcagaaaggaaatctgagaatgaagatgacagcgagtg

SEQ ID NO: 649738 - DNA, 100 bp, Homo sapiens
aattcttcagctgctcggacagatgaagctccccaaggagctgcagaactctaagaaggagctgatgtggaggagcagctgagacagttcaagatgacga

SEQ ID NO: 649739 - DNA, 83 bp, Homo sapiens
ccgctggattctgaggaccagcagatggccagtcacgagaacccaggtgtggccgacgacgatgccctcgctgaggagcgcat

SEQ ID NO: 649740 - DNA, 82 bp, Homo sapiens
atccagcctgcggagcctgtggggcaggactgaaatgcaactgcagaagcaacatgtgaccttttagagatgcttgtgggac

SEQ ID NO: 649741 - DNA, 83 bp, Homo sapiens
cggcttcggagcgggagtgttcgttgtgccagcgactaaaaagaggaaatctggcattttttaaagtttgcgccccacaaaga

SEQ ID NO: 649742 - DNA, 100 bp, Homo sapiens
ggctccgagcccggcgggaccatgttcaccagcaccggctccagtgggctctgattatcattggcaatggcgttcattccttacgagtggctttactgca

SEQ ID NO: 649743 - DNA, 96 bp, Homo sapiens
ccaccgtaccccaggcagcccctgctcagggcaaagtgcacctggagctgcggctgagcgaggtcatcacagacactggggtcgtctgccacaagc

SEQ ID NO: 649744 - DNA, 100 bp, Homo sapiens
ccaggtggcagctgcctccccaagacagggtgtgggccgaagatatgctcatgtggtgttgaggaaagcagacattgacctcaccaagagggcgggagaa

SEQ ID NO: 649745 - DNA, 100 bp, Homo sapiens
gttagaacagataactggcaaaggtgcttcggggacattccaggtgccttatgcccgctcagaggcccacctcacagagctgctggaggagatatgtgac

SEQ ID NO: 649746 - DNA, 90 bp, Homo sapiens
agacctacctgatggggacgccaggtgtgcaggggcgtggcgcgtagagttgagtccacgctccatgagaatgctgaacaccatccaaag

SEQ ID NO: 649747 - DNA, 90 bp, Homo sapiens
tgaagatccaagatgttctacaggtcgaatgagtgatttgagtgtaattggtcatccaatagattcagaatctaaagaagatgaaccttg

SEQ ID NO: 649748 - DNA, 82 bp, Homo sapiens
cagcggccgagcgggcggcttcctggcctgggcgctccggtggcggcggagatgaagggcgccctaatggagatcatccagc

SEQ ID NO: 649749 - DNA, 89 bp, Homo sapiens
cagattcgcagtggtcgcttcttctccttgaaagtgactgagaccgaagatgatagtgatagtgacagcgatgatgatgaagatgatgt

SEQ ID NO: 649750 - DNA, 100 bp, Homo sapiens
gccgcggcatgggcggcgctggccgaggctattgagggcacctacattgacaagaaatgccccttcactggtaatgtgtccattcgagggcggatcctct

SEQ ID NO: 649751 - DNA, 100 bp, Homo sapiens
ggggacaggctccgaggcaggcccgacccgcctccccggcgccgccgtggctcgacggagaccagctaggcccccctggccacagagaggagccttacct

SEQ ID NO: 649752 - DNA, 98 bp, Homo sapiens
cgccgctgcgcccgacgctccctgtctgggaccttctccctgcctggacccctactattgcaacaagatcatagcaatggatcatttaacttgaaagc

SEQ ID NO: 649753 - DNA, 75 bp, Homo sapiens
ccaaaggcccatgaggggatgcagttatgggctctgtcgccgtggtaaagatgacggcgccttgaggtaagctac

SEQ ID NO: 649754 - DNA, 50 bp, Homo sapiens
ctggatctgcgatctgtttgtgaaaacatccagtacagacctttctgata

SEQ ID NO: 649755 - DNA, 97 bp, Homo sapiens
ggcggtggcaagcgctgtcccccagcagaggtgtccctggatacaggcacggagtgtgaatgtgaagacacaagctctttctggatacagagaccaa

SEQ ID NO: 649756 - DNA, 87 bp, Homo sapiens
tgaccggtggggccaggagaaggggaatgaagtagaggtgggacgtccaaggatgatgggcactgacctgtcgcgaaatcgcctttc

SEQ ID NO: 649757 - DNA, 96 bp, Homo sapiens
cctggtagagaaataccgcattcttatcacaaagagaaccatggagtctggcagtaccgccgccagtgaggaggcacgcagccttcgagaatgtga

SEQ ID NO: 649758 - DNA, 75 bp, Homo sapiens
gggacacctggttccagctgcagcacgtggacgctgactcggaagtgcaggtccccatcctcatcccgtgccaca

SEQ ID NO: 649759 - DNA, 98 bp, Homo sapiens
ccctggcggcccgggccggctgcatgccgcctcctatctgcccgccgctcgcgccgggcccgtggccgggtggagaccacgtagctttgcaaggccag

SEQ ID NO: 649760 - DNA, 75 bp, Homo sapiens
gtgtatgacgccgagggacctcacatcaacttctaccagctggtggattttcaagacacgaatgctcggagtctg

SEQ ID NO: 649761 - DNA, 100 bp, Homo sapiens
agctttctttccaagatacctagcgtcttctctggtcagcttatttcggatcaagtggcagaaatcgtatctaaatacgaccccaatgtttacagcatca

SEQ ID NO: 649762 - DNA, 75 bp, Homo sapiens
gaatcacgctcggaaacaatgggggacaagggcctgtccgacacgccctacgacagcagcgccagctacgagaag

SEQ ID NO: 649763 - DNA, 76 bp, Homo sapiens
tacacctgcgagtgcttcgaggacttcactggtactccaaagattcaggtttactcacgtcatccagcagagaatg

SEQ ID NO: 649764 - DNA, 82 bp, Homo sapiens
cttgctcggccgatgaagtgcagaggtttttttctgctgaatgcaatatccatacatctccttctccgggaattcaagtaag

SEQ ID NO: 649765 - DNA, 100 bp, Homo sapiens
cgggacggacggtgatggtggtcgccgcggcggcgtgtgcgcccctcagaaacctgtcaagtaaccggctcaccacactctcgtggcagctcttccagac

SEQ ID NO: 649766 - DNA, 98 bp, Homo sapiens
ctgaatacatgatttaaacaagagatttccacagaaggtcttgggcgtctttggtactggcttttttaggggtctgcctggggattacccttgctgtg

SEQ ID NO: 649767 - DNA, 75 bp, Homo sapiens
ccattgcacccaaaattgcaagacctttcatagaggcacattcaggaccccgcgagccagcggctgacgtggaac

SEQ ID NO: 649768 - DNA, 100 bp, Homo sapiens
aaggctctgtgcaatcctcacattcaagctgataggctgcgctaccggaatgtcatccagcgagtgattaggattaacctccatttcagctaatcatggg

SEQ ID NO: 649769 - DNA, 98 bp, Homo sapiens
ggctgcagacggctgcgaggcgctgggcacagaagcagctgacacaggatgatgatactgatgcggttgagattgctatcgacaacacggcttttatg

SEQ ID NO: 649770 - DNA, 100 bp, Homo sapiens
cgcgcttcagcgtcccggcgccgtcgcgccactcctccgaacacctagctgttgggcagaagagggtgcagaaaagaggtcacatcagcgttctgcgtca

SEQ ID NO: 649771 - DNA, 75 bp, Homo sapiens
tctacagtggttcagaccgacatgctgtacaggttcctaaaagtaaagctttagaggccaccaaattggcaattg

SEQ ID NO: 649772 - DNA, 98 bp, Homo sapiens
gcccacctccacaagggcttcctggccctctaccaaaccgtgggaatgtgccataccgaatccgtgtgcggctgtccagaaaacgtaatgaggatgaa

SEQ ID NO: 649773 - DNA, 114 bp, Homo sapiens
cgggggcgcagggaaggagggcgtccgagtcaacaaccgcttcgagctggaggatacttcatcgagacttaaagtcaaagaatgtatttctgaaaaataatctccttaaaattg

SEQ ID NO: 649774 - DNA, 89 bp, Homo sapiens
tttacattctcgacccgtggttcgcggcctcctcctcagtcgggatcaaccgatggagacaatgcagatcttcgtgaagactctgactg

SEQ ID NO: 649775 - DNA, 75 bp, Homo sapiens
gaaccattgaagcttgagagaaaagcccccaaaagcagctattcagattggcccggatcctcgttcgcctgccgg

SEQ ID NO: 649776 - DNA, 89 bp, Homo sapiens
ctgccctccgctcagctcgagcttccctcgtggccgacggaacaatgaaggagaatggtgttgaacgcgtgtgtcctgagagcctgctg

SEQ ID NO: 649777 - DNA, 100 bp, Homo sapiens
ggacgatgtgcggcggatgaacaagcggcagcttactgcagagtgggtctgggcatctgctacgacatgcggtttgcagagcttgcacaaatctacgcac

SEQ ID NO: 649778 - DNA, 74 bp, Homo sapiens
tgacccttatttatccagaagattgatcatcatatgggttctgacgaagaatttgatgaactatgttttgaatt

SEQ ID NO: 649779 - DNA, 75 bp, Homo sapiens
cttaactgccgaaggaaaatgtcactgtcccattggccatattttaggtaatgggaaacccaggaactttcaaaa

SEQ ID NO: 649780 - DNA, 98 bp, Homo sapiens
cgcgttcccagcccgggtccccgcgttcacagccccagcgcagactattcagactatgaagacagttccctcgaatttttggaaaggtgctcttctcc

SEQ ID NO: 649781 - DNA, 82 bp, Homo sapiens
ctttcacgaaggcaccgacgtcatcatgctgaccaccaatcagatccgtaagctcctgtccaaatatgacccccagaaggag

SEQ ID NO: 649782 - DNA, 82 bp, Homo sapiens
gccaaggaaaaactggagagcttcatcaaaaatagtgatagctttgataagtaatattaacggctgctatttgaactattac

SEQ ID NO: 649783 - DNA, 100 bp, Homo sapiens
taactgcctccattacactgctgagtcacacacaacgcttgttatgttttcatcacttctctccagaaggttggtacccggaggtacatggctccagagg

SEQ ID NO: 649784 - DNA, 90 bp, Homo sapiens
agtttctttgagcagtttgtggaagcgatcatgaagaatgcaaattgcacatcagattttgaggaatactttgccaaaagaaaactggag

SEQ ID NO: 649785 - DNA, 75 bp, Homo sapiens
tctggtggacaacagtgtgtttcatggtccaggtcaagacctcgtctccgttctcatagtcgtagcagtgaaagg

SEQ ID NO: 649786 - DNA, 73 bp, Homo sapiens
ggccgcggcatcatcactgacagctttggcaggccaccaggctcatgctgggacccaacccagtgcacaagga

SEQ ID NO: 649787 - DNA, 97 bp, Homo sapiens
agacacgggtgaatgctgctaaaaacaagactggggctgctcccatcattgatgtggtgcgatcgagcagcccgacggccatggaggctgaagagac

SEQ ID NO: 649788 - DNA, 96 bp, Homo sapiens
ttcccctttttggagagccctacaagaatgacatcttcgagtggtccagggaccaccgagcccaccacaagtactcagagacggatgctgaccccc

SEQ ID NO: 649789 - DNA, 98 bp, Homo sapiens
ctgatggtgaggacggcaatgagatggtgttctgtgacaaatgcaacatctgtgtgcaccaggaacacctgattgagaatgaagtgtcaatactgcgc

SEQ ID NO: 649790 - DNA, 100 bp, Homo sapiens
ccgtccagcagatggcggatgccctgcagtacctgcagaaggtctctggagacatcttcagcagggcgccctgcgtccggcagaggaggcgagcatcccg

SEQ ID NO: 649791 - DNA, 75 bp, Homo sapiens
catttcaacttctgccgacaacttttctcctgatttgagggccaaagatgaagaggaagcctttctggattggag

SEQ ID NO: 649792 - DNA, 50 bp, Homo sapiens
tcagttcctgcttgctggcccccctctgaggaaggcaaagtttgttgaga

SEQ ID NO: 649793 - DNA, 82 bp, Homo sapiens
ggtctcacctgaggtgaaccttcgaccttggacttctcagcctccagaatgaggtggcgagaggcgtgctgaccagtctgcc

SEQ ID NO: 649794 - DNA, 101 bp, Homo sapiens
cgcggtggcaggagctgacagagtgatgggaaacgcgtgagccaggccgagaggccatgtttttggtatactgtgcactggagaaagaacctgtgccaatg

SEQ ID NO: 649795 - DNA, 83 bp, Homo sapiens
gacggaaccgccacagcactcaactcaccatggatgatgatatcgccgcgctcgtcgtcgacaacggctccggcatgtgcaag

SEQ ID NO: 649796 - DNA, 134 bp, Homo sapiens
ttcagtccccgccgagccgccaccgcaggtcgaggacggtcggactcccgcggcgggaggagcctgttcccctgagacaatgcagatcttcgtgaagactctgactggtaagaccatcaccctcgaggttgagc

SEQ ID NO: 649797 - DNA, 51 bp, Homo sapiens
atgctacttggatgcctcttaaggttctcagctgctgcgggagttgaaaaa

SEQ ID NO: 649798 - DNA, 90 bp, Homo sapiens
gttagaatctgggactttcttcgttgccatgaggaaagaattctccgagggaaagaatcatgtgatgtacagctttatataaagagacaa

SEQ ID NO: 649799 - DNA, 75 bp, Homo sapiens
tggtgaggcaacagcaggcctttcctcacgccagaacaatggtggaacaatccaaagttttaatcaaagaaggtg

SEQ ID NO: 649800 - DNA, 100 bp, Homo sapiens
ttggatgaagtggctccggagatgtcttaaagaaagtgcagaagagatggtcaaaaacaaattggaaggaaaggataaactgaccccttgggaacaattt

SEQ ID NO: 649801 - DNA, 126 bp, Homo sapiens
ggccaacttcggcaagatccagatcgggatttacgtggagatcaagcgcagcgatgactcagcccacctgcacccaggtgaaataaacagctttattgctcacacgaagcctgtttggtggtctct

SEQ ID NO: 649802 - DNA, 100 bp, Homo sapiens
gcatcctccgcctcctaggttcaagcgattcttccacctcagcctcccaagtagctgggatcacagtttgcagagtggtgtctagattacggagcacacg

SEQ ID NO: 649803 - DNA, 80 bp, Homo sapiens
ctctggaagccaaggcagctgccttcgagaagcaggtcctgcagctgcagagagaagaagaaggaggttcctgctgtgcc

SEQ ID NO: 649804 - DNA, 90 bp, Homo sapiens
atcggaaatatggagcattaccggatcagggaatagccaaggcagcaccagtttggatcttgcagccattgttcgtctacctgctgttta

SEQ ID NO: 649805 - DNA, 89 bp, Homo sapiens
cttccaagcgcgggggcaactgttggcccagctccgaaacctggacaacgcggtcctcatcgctactgtgtgaagacattcacaggaca

SEQ ID NO: 649806 - DNA, 100 bp, Homo sapiens
gactacgtgggcaccttgcgcttcttgcagtcgacatgcaagaaagcacttcagccaagcagaagggagccagctggacgaggtgcgccaggccatgggc

SEQ ID NO: 649807 - DNA, 74 bp, Homo sapiens
aggagctgcgccacatccactccaggtctccaccagctgagcagcccgcgctacaagttcaacttcattgctga

SEQ ID NO: 649808 - DNA, 100 bp, Homo sapiens
attacagataatcccaggagctaaacatggaaatattcaagtgggatgtgtagactgttcaatgcaacaaggcaagaactacagtctttggaacagcaat

SEQ ID NO: 649809 - DNA, 82 bp, Homo sapiens
attcggtggaacgaggacgcggactgcgaaggcaggtggctattatcatggaaaactaatttttcccagagaatttcctttc

SEQ ID NO: 649810 - DNA, 75 bp, Homo sapiens
tgggatgtgaaaactctgttactgaagcatcagacaacagtcagcgctttcgagaaacctgttttgcatttgcct

SEQ ID NO: 649811 - DNA, 140 bp, Homo sapiens
cacccatgcctatgatattcttctcctggttaatcaagaattctctatttctgctccgtcatccatgccactaatcatcggactcaggtacatctgtgagtgagaacaggtgtcaccttgaaggtgggagtgatcaaaag

SEQ ID NO: 649812 - DNA, 75 bp, Homo sapiens
gaatcacccaacatgctggtgtacagaaagttttacatgtggcacccataaaagatgaggctgagaacacggaaa

SEQ ID NO: 649813 - DNA, 100 bp, Homo sapiens
cagctcaaatggcaagacgaactcaaccagcacaacaggttggatcgtcaaacgcaggctactaccttggtccatcaaatttttggagggtatctcagat

SEQ ID NO: 649814 - DNA, 82 bp, Homo sapiens
agtcgacagtcctcttcttctgacacagatttgagtttgacacccaaaactgaaatttctgaataaattggcagaagaacgc

SEQ ID NO: 649815 - DNA, 83 bp, Homo sapiens
tgactacgacatccacttctaccccaccttccggggccccagtggttgtgtagagagtctggaggtgacctgcagacgggcag

SEQ ID NO: 649816 - DNA, 117 bp, Homo sapiens
gcgctgcttgctaaagagccgagcacgcgggtctgtcatcatgtcgcgttacgggcggtacggaggagcgatgtgcattttgtaagcactttggagccactatcaaatgctgtgaag

SEQ ID NO: 649817 - DNA, 100 bp, Homo sapiens
ggagaagcgcagcgacggcgtcgggagagcgcgcctagccggctcgcgaagtcatcagctacgagtgctgtcctggatatgaaaaggtccctggggagaa

SEQ ID NO: 649818 - DNA, 97 bp, Homo sapiens
cagaaagagtcaacagcagtggcaacaggctaatccaaaaatgtgattttcccattatgaagttttcactctacttcttggcttatgaggataaaaa

SEQ ID NO: 649819 - DNA, 100 bp, Homo sapiens
gatgcccggcctgcccggggcaccagggaaggatgggtacgacggactgccggggcccaagggggagccaggtccccaggatcggctgagagccctggtg

SEQ ID NO: 649820 - DNA, 90 bp, Homo sapiens
cggagaggcgccccccgcagcaggctggagtgcagtggcgagatctcgactcactgcaggctccgactccccagttcaagcgattctcct

SEQ ID NO: 649821 - DNA, 78 bp, Homo sapiens
ggaagagaatgtgcgggacacacagcaggtgaccaccctccagctacccccggtatcgagtgaacttcagacctagat

SEQ ID NO: 649822 - DNA, 100 bp, Homo sapiens
agacacttggccattaagaactttggacagcagcccattttcgtttttctcctgagtactagggcaggtgaaaggtgtagcagtcactcggcctacaccc

SEQ ID NO: 649823 - DNA, 75 bp, Homo sapiens
gtgctccgccagccccagcttggcgtcctgagaaatggtgggaaagcagtgccactctccgcttcacagatgccc

SEQ ID NO: 649824 - DNA, 87 bp, Homo sapiens
ggcccagcaggcacccgagttcagcgccacgcaaggtgctggagaatctggtaaaagcaccattgtgaagcagatgaggatcctgca

SEQ ID NO: 649825 - DNA, 51 bp, Homo sapiens
cagacggctgcccttcaagtaccaaaaggaggtgtggcatcaggattcaag

SEQ ID NO: 649826 - DNA, 101 bp, Homo sapiens
tcgatgagtcggagaagtcccatgaacctggcctatgttaaagcagcagactgcatttcagaaccagttaacagggagcctccttccagagaagctcagct

SEQ ID NO: 649827 - DNA, 82 bp, Homo sapiens
cggtggatacgtcgccatcttggatccgcgggacaagaaaattcatgcgaacactctgctccagccaaggtggtgagggcag

SEQ ID NO: 649828 - DNA, 104 bp, Homo sapiens
atggtgcagaagaaaccagccgaacttcagggtttccaccgttcgttcaaggtctcggcgcggaagatggccggcggcgtggacggccccatcgggatcccgtt

SEQ ID NO: 649829 - DNA, 95 bp, Homo sapiens
agttgagggagaaaggcgggcccgggaacagttgattgatattacaggcaagaaccaggatgaatgtgtgattgctttgcatgactgcaatggag

SEQ ID NO: 649830 - DNA, 95 bp, Homo sapiens
ctacgcgtccctttgggtttagcacgatgagctcaatcggcactggggcttgtttctggtgcaggtgacatcaaactcaccaaagatggcaatgt

SEQ ID NO: 649831 - DNA, 75 bp, Homo sapiens
gccactgacgccgggaccgggaccgccgccgccgccgccaccatggtgaacttcacggtagaccagatccgcgcc

SEQ ID NO: 649832 - DNA, 100 bp, Homo sapiens
tgaatatagccagttccattgagggttctccaaaaaatgtggaatcctttgcatctatgctgagacattctcctcttacacagatgggacctgcaaagga

SEQ ID NO: 649833 - DNA, 100 bp, Homo sapiens
aggggcggcggcgaatgctgggagagtccgacgagcgctgcactaacgcaggatccggctgccgaaggtcctcgccaggacttccaatagtagtcagaca

SEQ ID NO: 649834 - DNA, 50 bp, Homo sapiens
gacgggcactgctgctgcccctgggggtctcggaggaccccatcctagcc

SEQ ID NO: 649835 - DNA, 100 bp, Homo sapiens
cagctacggtccgcggctggggttccctcctccgtttctgtatccccacgagtgaccaatgccctggtgggtatgagcccctcatcctcgctctcagccc

SEQ ID NO: 649836 - DNA, 138 bp, Homo sapiens
ccactttctccagctgcactgccacccagcctgcctggtgctggtgctcaacacgcagccggccgaggagattatgaagcaattgtgaagctttcggatggctttaatggagcagatctgagaaatgtttgtactgaa

SEQ ID NO: 649837 - DNA, 100 bp, Homo sapiens
ttacaactgtgtaactgtcttcatctttacagaggaatagtctacaaaggaagacttgtaacctggagaagaggtagttaaaccagagagcaatgacaaa

SEQ ID NO: 649838 - DNA, 82 bp, Homo sapiens
gtgagattggaagtggcggcggcggcaggcggcagaggggagtgcagggctcgcggcctggcaagaatgtacagctgacaga

SEQ ID NO: 649839 - DNA, 100 bp, Homo sapiens
ggaggagcagtgcttggctccctgcagtttggctacaacactggagtcatcaatgccccccagaaggccatccggctgtccttagagcaagccctgcctc

SEQ ID NO: 649840 - DNA, 83 bp, Homo sapiens
gaagatctgggacatcagccagccaggcagcaagagccccatctcccagctggactgcctggcagttccagggccacacggac

SEQ ID NO: 649841 - DNA, 101 bp, Homo sapiens
ttactgaagctcagaagcagtattgggtctgcaactcatccgatgcaagtatttcatacacctactgtgagacgaccaccggataattctttttatgtgcg

SEQ ID NO: 649842 - DNA, 83 bp, Homo sapiens
gtagtggaagatgtaaagcaatatttcgagcagtttggcaagggactggtgattgcagctggaagtgcccatgaccgagctgg

SEQ ID NO: 649843 - DNA, 96 bp, Homo sapiens
ccacaggaagaagtgccattcaggctggatcagtgcatgtaagaattcgacgagatgccaatgaacaaatggttcttgctcatgtgaccaacaggc

SEQ ID NO: 649844 - DNA, 104 bp, Homo sapiens
gcctcagttggaagcagccgatccagcctgcggagcctgtggggcagaacatctgctcaaattaatgaccatgggggatatgaagaccccagactttgatgacc

SEQ ID NO: 649845 - DNA, 100 bp, Homo sapiens
tgagggaaacctgctcccaggagttgaagtttacccaaggtccagcctagcccctaggcaccatgtcggacagtgatctaggtgaggacgaaggcctcct

SEQ ID NO: 649846 - DNA, 82 bp, Homo sapiens
attcctgacgacattgaatgccaccactagtaccttccagtttgaaatatgggaaaatttgactcagcccgcctgcacccag

SEQ ID NO: 649847 - DNA, 75 bp, Homo sapiens
tgactaaagcttgaaatgctacatttccaagtatgctgggagcggtgaagatggaagggcacgagccgtccgact

SEQ ID NO: 649848 - DNA, 100 bp, Homo sapiens
aaggagtatcaagaccttcagcatctggacaatgaggagagtgaccaccatcagctcagaaaaggatgtgaacctgaagatgccccggaacaaccagctg

SEQ ID NO: 649849 - DNA, 82 bp, Homo sapiens
ggcttctcctgcacttgcaatgatgcgaatatgttgttgacctcctgtactggagagacattaagaagactggagtggtgtt

SEQ ID NO: 649850 - DNA, 76 bp, Homo sapiens
gctcaatgcctcagaaattcattggaatcctgttcactggggagctctgggagttcttgagctttgctgaaaggta

SEQ ID NO: 649851 - DNA, 98 bp, Homo sapiens
acaagcaagcatgcagcttactgcttgaaagtggatcaatcttcctgtcctacaactgacaaaggatcccctaaagacccctggaaggctggaccatg

SEQ ID NO: 649852 - DNA, 75 bp, Homo sapiens
ctgtcatataactcctgagaatagtggttcttaactctgctgtgtggttccgggtgctggtgctgtggaagtggc

SEQ ID NO: 649853 - DNA, 83 bp, Homo sapiens
ggaagccaagacttaaagtttcctagatcccagcttgacatggatttgattgacatactttggaggcaagatatagatcttgg

SEQ ID NO: 649854 - DNA, 75 bp, Homo sapiens
agagactggaccagaccatgggcctgagcatcaggtgtggacactgccagcggctgcagccgacttggaatgacc

SEQ ID NO: 649855 - DNA, 100 bp, Homo sapiens
acttgtatcaacctgctggtcatctttgcccccaacatcctgggcatctttggggtcatcgcgtacacagactttactaaaagagtacaaagaaagggat

SEQ ID NO: 649856 - DNA, 75 bp, Homo sapiens
cagaccagagttcctgccccaggtcttctctaagagatggacagagacgtatgtgcgttggtctcctaagggcac

SEQ ID NO: 649857 - DNA, 96 bp, Homo sapiens
agctccccactggctttggctggggacacccgaccacgtttcctgtggcagcctaagagggagtgtcatttcttcaatgggacggagcgggtgcgg

SEQ ID NO: 649858 - DNA, 50 bp, Homo sapiens
gtcacccaccttgtcttccatcactcagctgataccccaatgtccttctt

SEQ ID NO: 649859 - DNA, 82 bp, Homo sapiens
gctgaagcaggacaacatagcggtgaaggcgaacgcggtctgcaagctgacgtatctcctgtccaaatatgacccccagaag

SEQ ID NO: 649860 - DNA, 97 bp, Homo sapiens
tgtatgtgtttggagacttcaaagatgtattgaaacatgccctgaactgtcacagaatgaaaccagcgctcttcagcgtcctgtgtgagatcaaaga

SEQ ID NO: 649861 - DNA, 51 bp, Homo sapiens
ctccagatgacggtggaatctacaacatggccaacgccctggccagcgcca

SEQ ID NO: 649862 - DNA, 100 bp, Homo sapiens
cgccgctgcccatggagggagtggacatcagccccaaacaggacgaaggcgtgctgaagaggctgtggccaggccagctgggctcggggagcgccagcct

SEQ ID NO: 649863 - DNA, 90 bp, Homo sapiens
ccatcatagtcaactgcgtggaagagaaggagccgtggaggtccaggtccctgaggacccggtggtggccctagtgggcaccgatgccac

SEQ ID NO: 649864 - DNA, 99 bp, Homo sapiens
tcaagaaggagaccagattctgaagcagggaggagagagcgatggcttttttcacccagaaggccagccccagcggcttccccagcctccggaagtggg

SEQ ID NO: 649865 - DNA, 101 bp, Homo sapiens
ttactacaggacaaagaaggtctttcaaaccagctccgtgtacagacagagctgctagcagaagaaagtcttcccacaaccccattttatttcatattggg

SEQ ID NO: 649866 - DNA, 100 bp, Homo sapiens
gctaaggacaatggcagtagagatgagctgcgctactatgactcaggtgaggacacaagctgtaaaggccacattgatctggctgaagtagaaatggtca

SEQ ID NO: 649867 - DNA, 110 bp, Homo sapiens
agtgaagaaagtgatcataggagaaaaccatttcaggattaaagcaaggagagccaatcatgactggcaaaacacagaccagcaacgtcaccaataagaatgaccccaag

SEQ ID NO: 649868 - DNA, 106 bp, Homo sapiens
tggaactggttaatagaccctgagacacaaaagtgagacggtttaagcggaagcatcttactgccattgactgccagcatttggctcggagtcacttggctgtgac

SEQ ID NO: 649869 - DNA, 83 bp, Homo sapiens
ggacattcctgtcaccctctacagcgacgctgatgaatgggagcaaattgtggctactaatttgccccctgaagatcaagatg

SEQ ID NO: 649870 - DNA, 97 bp, Homo sapiens
ctgaaacacagtcgaaaagaatactgtgaattatgcaagcacagatttgcttttacaccaagcatggattccgtgaaggaacaacacctaaacccaa

SEQ ID NO: 649871 - DNA, 83 bp, Homo sapiens
cgtcagtccctgctctgtgcgcgcctccatctgggccatggatggaccaggatgaaagagcagctgagctcagcagggagcag

SEQ ID NO: 649872 - DNA, 96 bp, Homo sapiens
ggacagaaatgaccaacagataactgaggacaatggacctgcctgggcatagacttccttaagaatcgcctaccatttggtgcaagcaaaaagcaa

SEQ ID NO: 649873 - DNA, 96 bp, Homo sapiens
ggaagaatgccggtcacagcccaggagctccagggtttgagccacaatgtgatcttcaccttggattctttgttaaaaggagacctaaagggagtc

SEQ ID NO: 649874 - DNA, 100 bp, Homo sapiens
cgttattgtcctcgtcgtgctctggtcctactatgcctacgtctttgaactctgcctggatataaaccacagtacttcaggatcccattatgaaaattcc

SEQ ID NO: 649875 - DNA, 51 bp, Homo sapiens
cattggcaacgagttaaatatcacccacggcgaggattaaatccaccacac

SEQ ID NO: 649876 - DNA, 75 bp, Homo sapiens
cagtcgcgaagcagcaaccatgagcccccaaagacacacgtgactcaccaccccatctctgaccatgaggccacc

SEQ ID NO: 649877 - DNA, 50 bp, Homo sapiens
gcggcgtcggcagctgctgctccgagggagaagaaatgggtgaccgttgg

SEQ ID NO: 649878 - DNA, 98 bp, Homo sapiens
caggccccctggcagtggccgctgtgctatatcacaagatgaacaatgagaagcaggcagaagattgcatcacacgctttttaattaaatgaagccaa

SEQ ID NO: 649879 - DNA, 82 bp, Homo sapiens
tgaagttcgagcactaatatttaagaaagaagatgttaactttcagagcagtcaagagaccagcccctgcaaaaagcagtga

SEQ ID NO: 649880 - DNA, 100 bp, Homo sapiens
agcccacactcgtgcccgaagccccttaccccgccccgggctgtggtctgtgggctgtgggacgagctgcggcgcggagaaatgctctcatatggagaca

SEQ ID NO: 649881 - DNA, 90 bp, Homo sapiens
gtgcgatgcttcagtacctctgtggtcagaccatttgccaagcttgtgaggggtttcctgaggctcaagctctaggactggaggtgttcc

SEQ ID NO: 649882 - DNA, 97 bp, Homo sapiens
tgaaaccaaacattattggagaacagaaacccttgccctgagacatccagaagaaaatttttagtgggattaccacaaatgtttttgtgtgtaaaac

SEQ ID NO: 649883 - DNA, 75 bp, Homo sapiens
ctggatctgtgcttgtgaaaggctccatggtcttgcctccttgcagccactcattggatttggaagatgatactc

SEQ ID NO: 649884 - DNA, 88 bp, Homo sapiens
tggctgtcgaccgttgccttctgcaggacttcctcgttctgcccatcttcctaacaaggctatggctgataacagcagtgatgagtgt

SEQ ID NO: 649885 - DNA, 87 bp, Homo sapiens
gacacctttcgaccacaacatagtcaatttgcttaccacctgtagcaccgcagccacactcgatttgaaatcaaaggaggagaagga

SEQ ID NO: 649886 - DNA, 90 bp, Homo sapiens
ccccctgtacagcctgatcactccccagacgtggtcagcaacgcacagctatcttgacccacccttggtttctgacgtagaagagcttac

SEQ ID NO: 649887 - DNA, 100 bp, Homo sapiens
aaacatgacttccaagctggccgtggctctcttggcagccttcctgatttctgcagctctgtgtgaagtggcagaaatctgaagctatcatggaacaatt

SEQ ID NO: 649888 - DNA, 82 bp, Homo sapiens
ggagaacatgcaacagtacgttttgctggtgttgtccctcccgtggcaggtgaaaggtgtagcagtcactcggcctacaccc

SEQ ID NO: 649889 - DNA, 50 bp, Homo sapiens
tttcagctacaacatcatcttctggccaatcctgaggcaaaagaaacatt

SEQ ID NO: 649890 - DNA, 100 bp, Homo sapiens
aagggaggcctcgggagaaggggtgctcgtaagccaacaccagcgtgccgcggcctgcacaccctgctgacatcccaggtttgaagatgccgcatttgga

SEQ ID NO: 649891 - DNA, 100 bp, Homo sapiens
aaatgggggcctctccagggagtgctctgttcacggctccatcgctgttaatatcgggaggcaattcagaagtgggatgaagcactacagttaactccaa

SEQ ID NO: 649892 - DNA, 82 bp, Homo sapiens
gtagaaaccaaatatggtttgcttcaggtccagaggtgtccttctaaagctggtagaggtttcacgagtcatcagggaccca

SEQ ID NO: 649893 - DNA, 83 bp, Homo sapiens
attttcttcctgcccctcgttgatgagagcattcgaagtgacctcagcagggcatccagggctgccagaggaacccgaccaga

SEQ ID NO: 649894 - DNA, 96 bp, Homo sapiens
aacgcgcctgctcccctcgtcgcagtttccagcccgacgagcttgttttgtcccggactcggtagaaccctggaagaagaggaagaggaaggcaaa

SEQ ID NO: 649895 - DNA, 90 bp, Homo sapiens
ttggaatgtatctggctcagaactatgatgtctgctcaccaggtggccagataccgcccacgtgcccccatcattgctgtgacccggaat

SEQ ID NO: 649896 - DNA, 98 bp, Homo sapiens
caccgggacctcctggaagccaaaaatgatccaaaatacggagctggcatatacttcaccaagaacctcaaaaacctggcagagaaggccaagaaaat

SEQ ID NO: 649897 - DNA, 100 bp, Homo sapiens
caggaagagcactcaggagaccaggaaaatggccacagggctcctgagagccaaaaaagagggttttggccaaattgggcgagggcacaaaataaccact

SEQ ID NO: 649898 - DNA, 125 bp, Homo sapiens
tagcaaagcatggaatgaaggttgtccttatcagcagatcaaaggataaacttgaccaggtttccagtgaaataagaagagaatggagactacacatatgtggaaagagtgaagatacccttgga

SEQ ID NO: 649899 - DNA, 98 bp, Homo sapiens
agtcccttgtgggaaacaatccctcgcctccggaggcggcgaggagcggcggctcactaccctgggaaatcttacaccttcaagcactgtgtttttct

SEQ ID NO: 649900 - DNA, 100 bp, Homo sapiens
cgagaatgctaggcttctggcccagaaaagaggagctttgcagggctctgcatggcaggttagctcagatcagtgtgcgtgtgaccaccatggatgcaga

SEQ ID NO: 649901 - DNA, 98 bp, Homo sapiens
ccacagagtcggggtcttcacgggccttcgtgtacctgagcaacctgctgtaccccgttcccctggtacaccgtgtggcaatcgtcagcgagaagggc

SEQ ID NO: 649902 - DNA, 90 bp, Homo sapiens
tggatgaacattaacctgcgagaagtcatctgcacgtccaggtaagactttgaccccgacgcaggcttcagtgattgccgcggatcagaa

SEQ ID NO: 649903 - DNA, 100 bp, Homo sapiens
cagactgcctgaagttacatttagagactgaaatcactgcaccttaaaaacaaaagattgagctgcactgtattcctagtgaccgtctccttatcaaggg

SEQ ID NO: 649904 - DNA, 99 bp, Homo sapiens
gcagaagtcattttaaactatggacgactccgaggaacattgagaggagcaggatgcaaccgacaggctgtggccggacagctgctgcccagcacatgg

SEQ ID NO: 649905 - DNA, 83 bp, Homo sapiens
gccccagatgcccaccgggatggagaaggaggaggaatcgcatgaagaggaaccacctcagaatatgaaaccacaatcaggaa

SEQ ID NO: 649906 - DNA, 50 bp, Homo sapiens
tccttcctgtccagatgagccaagtatttgactggaatggttgacaaaag

SEQ ID NO: 649907 - DNA, 83 bp, Homo sapiens
caatcttgaatcatgaagctactaaccagagccggctctttctcgaggcagagctggcagattcgagtggtctctaccatgag

SEQ ID NO: 649908 - DNA, 75 bp, Homo sapiens
gaaacaaaatgtcaacaaattgatgggtggcgacatgtctaagaatgtgagccagtcacagatggcaaaattgaa

SEQ ID NO: 649909 - DNA, 100 bp, Homo sapiens
gaccctaaacacctcaacgatgacgtggtcaagatcattgagactgaaaatatgatggaccgaattgtgactggcttgtctgagtctagtgtcaaggtgc

SEQ ID NO: 649910 - DNA, 50 bp, Homo sapiens
ctgtgtgacaccaagataagtaacatgtctttggtggacttgggaaagag

SEQ ID NO: 649911 - DNA, 98 bp, Homo sapiens
gaaaacaaagatgatgataatgttttcagcagcaatttgccctcagagataacaacgaacttgatgcaagtgataggtttgccaaggtcagacctctc

SEQ ID NO: 649912 - DNA, 75 bp, Homo sapiens
ctcccattgattctacattatgacctctgactatgtgaagatacggtgggaagatgactgaccgcaagacaggaa

SEQ ID NO: 649913 - DNA, 74 bp, Homo sapiens
atcgaagtggtggctacaaaaaggccagagctgtgtttaaaagggtgtccgcaatgttgccagtgtctgtctgc

SEQ ID NO: 649914 - DNA, 75 bp, Homo sapiens
cgtcactgaggttgcagttggcgtgaaggtgaccgggttattgatgtgggatctgaatggcgaactttcagcaat

SEQ ID NO: 649915 - DNA, 100 bp, Homo sapiens
ctcctccctttcctcctcctctttctcctcctccttatccgaaccccagtcagaccgatctgctctgctctcggaattgtcttagaagaaagaaggcaag

SEQ ID NO: 649916 - DNA, 100 bp, Homo sapiens
cctggacagctgcaagcattccagctaccctgattcagagggggctcctgactctgtcaggacggcagcctcgctgctggggctcccagaggacgtgctg

SEQ ID NO: 649917 - DNA, 75 bp, Homo sapiens
ggcaaagtagggaatatgaagacggcccgctgtcgcttgtcatgcccaagattagtgacaagagctggggttagg

SEQ ID NO: 649918 - DNA, 100 bp, Homo sapiens
aggaaagaaaagaatacattcctgattacctgccacccattgtgtcttctcaagaaggcattggaatggatacttgtgtcattcctttgaggcacggtgg

SEQ ID NO: 649919 - DNA, 95 bp, Homo sapiens
gaaggcctggaatctgatcctccacttcagagaacaggggtttactcctggcttgggggcattaggaagcactggaggctcttcgggaactaatg

SEQ ID NO: 649920 - DNA, 96 bp, Homo sapiens
tggtgtccagcgtggttgtctatcccgtctacctggccatcctctttctcttctggatgtcccggagcaaggcccgggttcgagagctcgaagaac

SEQ ID NO: 649921 - DNA, 100 bp, Homo sapiens
agacatctggcgtggactactctgatgtttgaggtggtatcaacatcctacagaagaagaattaagaattcttgcagggaaacaacaaaaagggaaaacc

SEQ ID NO: 649922 - DNA, 96 bp, Homo sapiens
attattctgcaagacaaagggaagaaataaaattttcccatactgaggacaggagagagtggcaagagtacgtttatcaagcagatgagaatcatc

SEQ ID NO: 649923 - DNA, 83 bp, Homo sapiens
cccgggtctgtcaggcacatccccccagaaacagtgatgagccccaagagcctcaagaacccaacaaggtgcccctagaagac

SEQ ID NO: 649924 - DNA, 100 bp, Homo sapiens
ttcctagctgaacagcgcgaggcggcggcagcgagccgggtcccaccatggccgcgaattaagactttgaccccgacgcaggcttcagtgattgccgcgg

SEQ ID NO: 649925 - DNA, 99 bp, Homo sapiens
cgcttttcacgtcacctggagagatgcacagacagtgacaataccctcccctcccttgggctggacccctctctacagctaggagccaatggcagaaga

SEQ ID NO: 649926 - DNA, 130 bp, Homo sapiens
ccctagcggcagcggctctagaagtagatcctccagtagtgattcaatcagcagcagcagtagtaccagcagtgacagtgctaagctcctacatcctgttctggaaggacaatcctgagcacacgatgag

SEQ ID NO: 649927 - DNA, 98 bp, Homo sapiens
ttgaaaaggcccacacgctgatcctgcagcctccctccgagaaaggagctgctggagcatggagtgtgtgaggaggtggagagagttcggcgctcaga

SEQ ID NO: 649928 - DNA, 101 bp, Homo sapiens
cacgcagagtttctcccggaaactgcccttcccagatgagacccacgagcgctatgccagcaaggtgcctttctgcaagttccacctgggtgaccgaccca

SEQ ID NO: 649929 - DNA, 100 bp, Homo sapiens
gggcttcgctgctcagccagctcctgcgaccgccctgcgcttcgtgcaccggggcggtccgttgccaaagccagatgccttcaattaagttgcagagttc

SEQ ID NO: 649930 - DNA, 100 bp, Homo sapiens
gtttgatgttgttgaaggagaaaagagttctaaatgtcgcacagtgcttgcttcgccccagaagattgaaggttttaagcgtcttgattgccagagtgct

SEQ ID NO: 649931 - DNA, 101 bp, Homo sapiens
gtgctgaggagtcatggaagagtttttaaaccagacagccgctcaggaagcaatcttgcatgcgtctggaaatggcacaaccaaggactactgcatgcttt

SEQ ID NO: 649932 - DNA, 75 bp, Homo sapiens
ctgaaattcaggccaaggctccaagtagtctgagtgatggcctggagctgctgaagactgctattgggaaagctg

SEQ ID NO: 649933 - DNA, 75 bp, Homo sapiens
ctcaccgcctcggttcgccctcagccgccccgttggggaatggcggtcaatgtgtattctacctcgataacccaa

SEQ ID NO: 649934 - DNA, 138 bp, Homo sapiens
agcaggattgcaaattcctgccattctggggattcttggaggaattcttgctttgctaaaaatgggcaagttcatgaaacctgggaaggtggtgcttgtcctggctggacgctactccggacgcaaagctgtcatcgt

SEQ ID NO: 649935 - DNA, 96 bp, Homo sapiens
ggagtggagcttggtttcgggatctcggtgctgcagacggcgagacctcctgcacagttacagaatgtctgaaggggacagtgtgggagaatccgt

SEQ ID NO: 649936 - DNA, 98 bp, Homo sapiens
atgaggaacaaaaaggatgcacctgtggaccatctggggactgagcactgctatgactccagtgcccccccaaagtagggacggggtttcgccacgtt

SEQ ID NO: 649937 - DNA, 87 bp, Homo sapiens
tagttaagctctctgaaaagaaggtggcagacccggtttgctgatcgccccagggatcaggagattcgggaactggagcctctcctc

SEQ ID NO: 649938 - DNA, 90 bp, Homo sapiens
caagcacgcctcttcaaagacgaggtgcccctgggcgctgggattgctctagcctgtaagtataatggaaaagatgaggtctgcctgact

SEQ ID NO: 649939 - DNA, 75 bp, Homo sapiens
cggaagcggagagcaacagcgcgccgggactggtttggctgaaagacaaagaagcaacacattgtaaactttgtg

SEQ ID NO: 649940 - DNA, 75 bp, Homo sapiens
actcacgctccactgcaacatcacggtgctggagaatctggtaaaagcaccattgtgaagcagatgaggatcctg

SEQ ID NO: 649941 - DNA, 98 bp, Homo sapiens
ctgtcagtcgcgagcgaacgaccaagagggtgttcgactgctagagccgagcgaagcgcttgggcactgtttaaaggaaagttccgagaaggcatcga

SEQ ID NO: 649942 - DNA, 100 bp, Homo sapiens
cataggcatcacgttgacgtccatttaccagtcttccctggcaagattcttctgaattgtgctgccttggccaaaagagacttaattcagtgcacaaatg

SEQ ID NO: 649943 - DNA, 50 bp, Homo sapiens
gacctcagatgtgaagtccattaaagcccccaaatacatcaagatgtttg

SEQ ID NO: 649944 - DNA, 75 bp, Homo sapiens
cagacggcgagacctcctgcacaggagccttcacgtaaatgggtccagtcatgcctcccagtaagaagccagaaa

SEQ ID NO: 649945 - DNA, 50 bp, Homo sapiens
tcaacatctctcagagacgaaaggttactcactataaacaatatccaccc

SEQ ID NO: 649946 - DNA, 50 bp, Homo sapiens
ttgaagaatcccttttggagccagcatttgatgaatacagaaatatcagc

SEQ ID NO: 649947 - DNA, 100 bp, Homo sapiens
cggccacactcaccactccatggccacacagaaagcataacccctactgtagaactaaatgcactgtgcatgaaacttggaaaaaaaccaatgtataagc

SEQ ID NO: 649948 - DNA, 74 bp, Homo sapiens
ttgatatcacagaggaaactctgcattctcgcttcctggagagcacgaacttccaggagccggtgcagccgctg

SEQ ID NO: 649949 - DNA, 74 bp, Homo sapiens
accaccgccctggccatctaccatgtggcatctgctgtcaccgtgcgcttctacggccttgtgcactgggagga

SEQ ID NO: 649950 - DNA, 75 bp, Homo sapiens
ctttgatccagaacttgcagcaacaatagctcgtcgtcaaggtgcacatgaatgataacagcacaaagtcactga

SEQ ID NO: 649951 - DNA, 90 bp, Homo sapiens
tcactatggaaacaagagattggatcttgctgggccgctgcttgcattcttatttagaggcaaagctctgcaggaatattctcagagctt

SEQ ID NO: 649952 - DNA, 100 bp, Homo sapiens
ttcctgatggaatccaatcctctgcttccaggacaagtcctgcgcttggggatcctctgtacgcccgttcactggactacgagaaagccctgttcttccc

SEQ ID NO: 649953 - DNA, 83 bp, Homo sapiens
cgctgggctgctcttcctgaggttttcctaagccatcccctggcggaaccgcccccagttacatctgtgaaaacgaggccatc

SEQ ID NO: 649954 - DNA, 101 bp, Homo sapiens
acaccaatggaaagtgcgtcatcctaaggaacatcgactctgtagatggacggcagatccgagtagaccaggcaggcaagtcgtcagacaaccgatcccgt

SEQ ID NO: 649955 - DNA, 100 bp, Homo sapiens
ttacctatgtacctgttaccactttcaaaagtgttacacataatattgcattacttcgagaggtgataatcaactcacgctttgtaaaaggagacatcag

SEQ ID NO: 649956 - DNA, 98 bp, Homo sapiens
tggccaaagcctgcccagacggctcacctgtgcgggatggaacaaaagcattgcagggggtcaaatactgtcagtgataaagatgcaactgattaaag

SEQ ID NO: 649957 - DNA, 82 bp, Homo sapiens
gcgaggatggctcctttacccagccattcgatgaggactatctaaaccatctcgagcctcccgtgaagcacatgtccttcca

SEQ ID NO: 649958 - DNA, 100 bp, Homo sapiens
gtcagtattccatctatcaccaaatcccgccctgagccaggccgctccatgagtgctagcagtggcttgtcagcaaatgcctttgaagatgagaaacccc

SEQ ID NO: 649959 - DNA, 82 bp, Homo sapiens
aacggcgagagtgggcgagaacgtccactgcgggccggcgaaagctggccggcgaccaccaggggcctgaggatgaagccaa

SEQ ID NO: 649960 - DNA, 75 bp, Homo sapiens
cgccaccctgcgctgccgccgctctgaggagttaaagaagaagaagaggacagtgctccagtgaaagtggaagaa

SEQ ID NO: 649961 - DNA, 98 bp, Homo sapiens
gtccaccagctacaagaaaagttagcaatgatggaaagtggggtgagagactatagcaagcagttgaaacattgtagtcggtatatacatgacttatt

SEQ ID NO: 649962 - DNA, 100 bp, Homo sapiens
aaggatatctgaacttctccatcacagatgacatgcctttagaagaagccacactctctgaattaaaaactgtcctcaagagcttcctaagtcaaggcca

SEQ ID NO: 649963 - DNA, 101 bp, Homo sapiens
cataggcatcacgttgacgtccatttaccagtcttccctggcaagattcttctgaattgtgctgccttggccaaaagaggcctccaggcccaaggtcagca

SEQ ID NO: 649964 - DNA, 75 bp, Homo sapiens
cccctgctacgtggagaaaacctcggataagcatcttcatgatacagttaagaggaatcttgacagcgccacttc

SEQ ID NO: 649965 - DNA, 82 bp, Homo sapiens
gaagtgctgcctggtgcagaggatcctggaggcctgggaagccaacgaccacacgcagatcccatgacagattctgttgtca

SEQ ID NO: 649966 - DNA, 75 bp, Homo sapiens
gacaccgggacctcctggaagccaaaaatggaatagcgggttttgcagcaattgttgcatatggattatataaac

SEQ ID NO: 649967 - DNA, 100 bp, Homo sapiens
aagaaagtggtcatggaaactctgtctgtcctgtaacttcaaattatcacaggcaaatcctgatcctaactgttgtcttggagtatttgggctgagcttg

SEQ ID NO: 649968 - DNA, 50 bp, Homo sapiens
cggtacaggtgccctgcggacacgttgcactggtgattgctgcggtgttt

SEQ ID NO: 649969 - DNA, 100 bp, Homo sapiens
gcgtgtgcatggggctgctggaggagagcattccagagcagtacatctgctatatctgccgggacccaccagagtaccaggtggatgcccagccccttcg

SEQ ID NO: 649970 - DNA, 100 bp, Homo sapiens
aggccaaatgccccagttcctctggcagactgccagattcacttacagccccagctaattccaccaaacatggaggagtacatgaacagccttctctcag

SEQ ID NO: 649971 - DNA, 100 bp, Homo sapiens
ggcggcgggtacggcggccccgcgcagcccccggccgcagcgcaggcagcccagcaggtgcatctgcagacgcagcaggaggtgaagctgcgcatgacgg

SEQ ID NO: 649972 - DNA, 100 bp, Homo sapiens
tttgtggctggctggatctctggtgaaatgacaatggatgctctgttggctcgattgaaacttctgaatccagatgaccttagagaagaaatcgtcaaag

SEQ ID NO: 649973 - DNA, 82 bp, Homo sapiens
aaagattcagattacgaggattatggatgaacgtaacagacagaatttgccattttcagtggaaaacaagtggtcgttacta

SEQ ID NO: 649974 - DNA, 100 bp, Homo sapiens
ctggtgtctaaaccgcctcggagttgtggaaagtaaaaatgtagccctaccaaaaggaactattgtactggcttctccaggctggacaacgcactccatt

SEQ ID NO: 649975 - DNA, 80 bp, Homo sapiens
ctgcaacctacggggtgtacttgggaacgaggggtgaagcggcccaggtgagggtgtcttcaaaaacaaacatatttaaa

SEQ ID NO: 649976 - DNA, 71 bp, Homo sapiens
atgtgggccgggagctgtacttctatatctacaagggggtccgcaagtgtcggagatgtatgcagtgtgac

SEQ ID NO: 649977 - DNA, 101 bp, Homo sapiens
agaaaggagtgatgaatcagcccatggcttacgctgcacttccatcccacggtcaggttgaagcactggacaatgccacatactttgtggatggtgtgggt

SEQ ID NO: 649978 - DNA, 96 bp, Homo sapiens
caggcctgcatgaaacgttgttcttttttgtgggcttatgctgcacaattggcaggtgccaagtcctgccctgccaacttcttggcagctgccgac

SEQ ID NO: 649979 - DNA, 50 bp, Homo sapiens
gatccaggataacggaggctggtgtgtgcaggaacggagaataaactgag

SEQ ID NO: 649980 - DNA, 100 bp, Homo sapiens
gacgacttgtctttcaagaaaggagagaagatgaaagtcctggaggatatgtccgtggttcagaccctgtattaaagcttttggacgacaatgggaacat

SEQ ID NO: 649981 - DNA, 100 bp, Homo sapiens
tggccaacgccacgcacatctacggcgcctcggccggggcgctcacggccacggcgctggtcaccggggtctgcctggtgtttgtgaccctcacctgcgc

SEQ ID NO: 649982 - DNA, 82 bp, Homo sapiens
agttccgcaccctgatgaaagcctacgggatccgctttgacgtgatggtgaacggcaagatgagcagcaccagcagtaagag

SEQ ID NO: 649983 - DNA, 82 bp, Homo sapiens
ctcgagaaagtcctctcgggagaagcagcgcctgttcccggggcagatccaggttcaggtgtcgtgaaaactacccctaaaa

SEQ ID NO: 649984 - DNA, 100 bp, Homo sapiens
aggcgatcaaggccaagtatccgccagtcaataggaagtacgagtaaatatggctacacacacctttctgcaggagagctgcttcgtgatgaaaggaaga

SEQ ID NO: 649985 - DNA, 98 bp, Homo sapiens
actaaggaggaaacggctcagagaggggaagtgtttggccaaggtcacccagcgatctattatcctcccagtccacaacgctgaaccgtggctggacg

SEQ ID NO: 649986 - DNA, 99 bp, Homo sapiens
aggttctgggggcggctcctcataccaaggcaaacaaggagacctacaaattgccgcaccggctcatcgagaaaaagagacgtgaccggattaacgagt

SEQ ID NO: 649987 - DNA, 83 bp, Homo sapiens
aaaaatagtgatagctttgataagtttgatgagaagagggcagtgcagcagctgagagcatgtggtgtcctggaaaccatccg

SEQ ID NO: 649988 - DNA, 90 bp, Homo sapiens
ttttgccagagaaaggacgagcagcaagtcagggagcttaaggagtctgcactatggaaacaacctgtcaatccagctcaaggcacacat

SEQ ID NO: 649989 - DNA, 75 bp, Homo sapiens
aatctgcccacccctcctgtaacccagcctgtttcacttcttgataaccctaaggaatatcttggatgtcttcac

SEQ ID NO: 649990 - DNA, 75 bp, Homo sapiens
gctcagttcaaagacctgttcttaaaaaaaggagtggaagctggacacactatgtgacttgtatgaaaccctgac

SEQ ID NO: 649991 - DNA, 75 bp, Homo sapiens
gcctcctgcgccggccttgcctcgggaacaagatcactcaaggtgaaggataatctactaataccagcactttga

SEQ ID NO: 649992 - DNA, 75 bp, Homo sapiens
gaggtggacgccatcgtcaacgccgctacgagttccagggagctctgtcctggtgaccgtgcccgggttatgacg

SEQ ID NO: 649993 - DNA, 76 bp, Homo sapiens
gtccaagttcaaccaagccattctcttagaacaagctctggtgattgaggaacagctgcgccgggctgcttacttg

SEQ ID NO: 649994 - DNA, 112 bp, Homo sapiens
ccatctccatcacccaccaacaacaccacaataatccacagccaagtgtaaacaggaacatcgataagtagtgtaaaaacttgcacaatgaaatccgaagccaaggatggag

SEQ ID NO: 649995 - DNA, 102 bp, Homo sapiens
gcggacgcaggagcgatggcagcgaccgatatagctcgccaggtgacaatgcagatcttcgtgaagactctgactggtaagaccatcaccctcgaggttgag

SEQ ID NO: 649996 - DNA, 100 bp, Homo sapiens
cgccgccgcgaaggacagcctttccgcgcgggactccggggcgccacgggggccatgtaagcagaccggtaccgggagtaccagtggatcggactcaacg

SEQ ID NO: 649997 - DNA, 83 bp, Homo sapiens
gccagaggatggattacccagtgctttatcctgtggataaacgcagagtgaacgagtttggggagtcctacgaggagaaggcc

SEQ ID NO: 649998 - DNA, 83 bp, Homo sapiens
cttcgaggaggtcatgaaggacctgagcctgacgcgggccgcgcgggaccaagaatcgccttcagccctgtctggtgcatcct

SEQ ID NO: 649999 - DNA, 75 bp, Homo sapiens
cggcgcgaagaggctggactcggattcgttgcctgagaatgtgaaaacctttgcatcttctgatagtctagccaa

SEQ ID NO: 650000 - DNA, 50 bp, Homo sapiens
cttcgacttggagtctttgtccaggacgacgatgttccacaggagcccgt

SEQ ID NO: 650001 - DNA, 98 bp, Homo sapiens
atgtggcagccggccacggagcgcctgcaggtatggcatttcaaatatagatacaaccattgaaggaacgtcagatgacctgactgttgtagatgcag

SEQ ID NO: 650002 - DNA, 74 bp, Homo sapiens
cttccacttgcacgaaagctttcctaggccaaaaagagaaggagaacttatggattgtgatggaaaatcagaat

SEQ ID NO: 650003 - DNA, 100 bp, Homo sapiens
gagtattttagaagggctttatggaccacggctacgaagagacctcagtttatttgaagagctggactggccattatggaggaggagctgcagcattccc

SEQ ID NO: 650004 - DNA, 83 bp, Homo sapiens
cctccacacctaccactacccgtgtgccagcgatgcagcagttggaattgatcacaccttttcagttgtacttcaatcctgaa

SEQ ID NO: 650005 - DNA, 100 bp, Homo sapiens
ctttcaggaaggagccattatttatgtcatcaagaagaatgacgatgttccagaagaaggcttcttattgggatgtgtgtttgcaattgcggattatcca

SEQ ID NO: 650006 - DNA, 75 bp, Homo sapiens
cttggactgagtcctgcaggacacagaatgggaggcattccagctaaaagccataggggagaaaaactactttta

SEQ ID NO: 650007 - DNA, 50 bp, Homo sapiens
cgccgcgcaggagcctcccggagctggtgctggagaatctggtaaaagca

SEQ ID NO: 650008 - DNA, 116 bp, Homo sapiens
attctctgggaaagggcagcagcagccaggtgtggcagtgacagggagattttgaagccagcttcataaggctattggacaaaataacgaatggttctcgaattgaaataaaccaa

SEQ ID NO: 650009 - DNA, 89 bp, Homo sapiens
cgacggggcggccgggggctcagagatccaagtgcgcgccctggcgggtccggaccaagcgagtaaccagctcataaatcacatcgaac

SEQ ID NO: 650010 - DNA, 75 bp, Homo sapiens
ctgccagacccttaccagaagcagagactgaatggtgaacctctggataattttgaatcactggataatcaggaa

SEQ ID NO: 650011 - DNA, 75 bp, Homo sapiens
caacactcagtggctaatgaagggttattatattatgcaggacatggttatgaaaattttgggaacagcttcatg

SEQ ID NO: 650012 - DNA, 97 bp, Homo sapiens
cccctgtggaccagctcctgcaggacgggctccagctgcgctcctgcacattccagggagaagccggagacccagggccccctggactacctgccta

SEQ ID NO: 650013 - DNA, 100 bp, Homo sapiens
tgcctgagatcctgaatcctgtttcctacccactattcagccattgggtcacaagcgatgaaaagagcaccttgaaggtgctggagaatctggtaaaagc

SEQ ID NO: 650014 - DNA, 75 bp, Homo sapiens
ggctatggtgggcaaactaagccgattttccggaaaaagtaaagatgacggcgccttgaggtaagctacaggcaa

SEQ ID NO: 650015 - DNA, 75 bp, Homo sapiens
caaggaggagcttgccaagaagtgtggcatcaccgtgtctcagatttcttcctgaccactatgcccactgactcc

SEQ ID NO: 650016 - DNA, 75 bp, Homo sapiens
acagctggatgtttgcgacatcccagagagcttccagaaaaatattcagaagttggggaattataccttgaaatt

SEQ ID NO: 650017 - DNA, 83 bp, Homo sapiens
aacatgcctcaccctcatctatatcctttggcagctcacagatgttccatttaagcagacctcttccatagctgtagctggag

SEQ ID NO: 650018 - DNA, 82 bp, Homo sapiens
cggcgcgggcactgctttccactcggctcctgtcgtccgttctctcaggctcccgttcagattatgatgcatcattatcaca

SEQ ID NO: 650019 - DNA, 75 bp, Homo sapiens
aagattacctcatccagagaagaggctgataaaataccagtaatgcgtggacagtggtttattgacggcacttgg

SEQ ID NO: 650020 - DNA, 100 bp, Homo sapiens
agctggccgtggctctcttggcagccttcctgatttctgcagctctgtgtgaagtgttctaagaacggaagcatctgggctggatggaatttagcatcaa

SEQ ID NO: 650021 - DNA, 89 bp, Homo sapiens
gcgtcgccgcagccccccaatgcggccgcgagaagcagcgggggggcaggcgatcgaaggtttctttacctccagaaagaagaatattg

SEQ ID NO: 650022 - DNA, 101 bp, Homo sapiens
aggtctgcgttgctcttgcttttcctcgctggggtgtacgaactacattaccatggacgagctgcgccgcgagctgccacccgaccaggctgagtactgca

SEQ ID NO: 650023 - DNA, 82 bp, Homo sapiens
ctcggtgcagggctccaccccgtcgcctcgacaggaactgtggctgcaccatctgtcttcatcttcccgccatctgatgagc

SEQ ID NO: 650024 - DNA, 71 bp, Homo sapiens
tcaccatcctggccccggaagagcactgcagtttcctcctgaaggctggctccggctctccctcaataatg

SEQ ID NO: 650025 - DNA, 100 bp, Homo sapiens
gggatgaagcatttcgagaactttctaagatggatccagagggaagcaaattgttggatgattcatcagtgagttctgcctcagtcagctcccaagtgag

SEQ ID NO: 650026 - DNA, 83 bp, Homo sapiens
cttcgcgggaccgtggcgcatggaggagatgttaaagtaacccatcttgcaggacgacattgaagattggtcttctgttgatc

SEQ ID NO: 650027 - DNA, 100 bp, Homo sapiens
cctaaacacagagggttctttccattgtgtctgccagcagggtttctcaatctctgcagatggccgtacgtgtgaagggtctggaacagaatctgacagt

SEQ ID NO: 650028 - DNA, 75 bp, Homo sapiens
cggcctttctgctcctcgcggcccagccatcccaggcctcaggacctgagttctccgacgcccacatgacatggc

SEQ ID NO: 650029 - DNA, 80 bp, Homo sapiens
actggcttgatatgagcaatgttgagcagcaaatggaacgtgtttttccatggttcagtgtcaaaaagtccaggttttgg

SEQ ID NO: 650030 - DNA, 76 bp, Homo sapiens
ccagtaatggtggatgaagttgttcattgtttgtcaccacaaaaaggacaggcacttcctggacctcactactaca

SEQ ID NO: 650031 - DNA, 100 bp, Homo sapiens
gtgcatcaattcttcgacaggaaaaaaatttgctggatattgatgcgccagtcactgacgtatttcattagctagtccacgtcagctttttaaggcttct

SEQ ID NO: 650032 - DNA, 75 bp, Homo sapiens
gggacctgggactgctcacagccaggtccaagggtagccaaggatggctgcagcttcatatgatcagttgttaaa

SEQ ID NO: 650033 - DNA, 100 bp, Homo sapiens
tcaacccccaggacccgctcaaagatcttgtctcgctggcctgcgacccagccagccagcaacctggaccggcaggcgagtggaaccacaggtgcttccc

SEQ ID NO: 650034 - DNA, 83 bp, Homo sapiens
tgctcttctgggcacaccccacccacctgtggccagggctgctcacagtatttggggccagagcctacgtgaatatatgtgtg

SEQ ID NO: 650035 - DNA, 96 bp, Homo sapiens
cgctacctgcacgacatcatcacggagattccaacaatgtctcacccatcttggctgccacccaaaagcactggtgagcccctcggccatgtgcct

SEQ ID NO: 650036 - DNA, 100 bp, Homo sapiens
cggcagtacggcaaatatggcggaggccatccggctgtccttagagcaagccctgcctcctgagccaaaggaagaaaatgctgagcctgtgagcaaactg

SEQ ID NO: 650037 - DNA, 75 bp, Homo sapiens
gtgaccgagagcgtgaccgagagcgcgaatatcgtcatcgttagaaggcatcagcttctggtgatgtgagctgtg

SEQ ID NO: 650038 - DNA, 49 bp, Homo sapiens
agatggcagccagtcagtggtggagattgttttacaaggacatgctaca

SEQ ID NO: 650039 - DNA, 85 bp, Homo sapiens
ttccggggtgcacagcaagtgtttaaggaagaaatctctaaacgttttaaatcacatactgaccaacttgtgttgatatttgctg

SEQ ID NO: 650040 - DNA, 97 bp, Homo sapiens
ggtcggcggagtagcaagtggccatggggagcctcagcggtctgcgcctggcagcaggtccagcaagactatgaatctctgttccaaatgctttgct

SEQ ID NO: 650041 - DNA, 100 bp, Homo sapiens
tggtcttggaatgcagattccaaagtaagatcagcgttgaagaatcttgaccttttcaaacagaaaagacagctttgatttctggctgcaaaaaagatat

SEQ ID NO: 650042 - DNA, 75 bp, Homo sapiens
tggggttggtgtgattagcttcgcagtctggaaagctttaggagttcacagtctcctgttggatcaccaggatgc

SEQ ID NO: 650043 - DNA, 75 bp, Homo sapiens
catggtacttacatttttgtgggctggataataaacaagggatctcaagggcatttccctttgcccacctcacct

SEQ ID NO: 650044 - DNA, 95 bp, Homo sapiens
cgaaccttggagagaggagaacgaacatcttctggacctttgtccagttgctgctgacacgccgaccgcctgctgcttcagctacacctcccggc

SEQ ID NO: 650045 - DNA, 96 bp, Homo sapiens
gcaacccattcttaaccagttcacgcctgctaacattagtcgacagatcagtggtcgtgaagtgtttgaatttcgtcctgaactggtcaatgatga

SEQ ID NO: 650046 - DNA, 90 bp, Homo sapiens
aatctctcaggctgcatcaggatgaatgatgacccaagtatggaaagcaacattttgcagatgttgtacttagtgaagaatttctcaatc

SEQ ID NO: 650047 - DNA, 77 bp, Homo sapiens
caggtggccgggcacatgtacgggaaggacaaagtggtttgctaatccagactttacacaacctatctcagaagttg

SEQ ID NO: 650048 - DNA, 100 bp, Homo sapiens
cagctgtggaaagaagttgcaaaacactggctcagcaaaacccagcagctcagattcctgccaggcagcgggagattgaaatgaaccgacagcaacgctt

SEQ ID NO: 650049 - DNA, 100 bp, Homo sapiens
ctgccattcgtgtctcaaggacaagcgcttcagcctcgttctctgtgagctgatctgtggatcgcggcgtgtcggggtgaagaaggtgaatacagtgaag

SEQ ID NO: 650050 - DNA, 74 bp, Homo sapiens
ggaaacaatggcatttacagaaagagtcaacagcagtggcaacagtaatctatgccagcaattatgacaatgtt

SEQ ID NO: 650051 - DNA, 75 bp, Homo sapiens
gctgggacttcaagacggccgagagccactgccagccattgtttgatgtcctgtgactgagaaaccaggctttaa

SEQ ID NO: 650052 - DNA, 90 bp, Homo sapiens
ggatgagcctgcagagcgcgcagtacctccgaccctgcacttgatggaccagctggcaccacccagatcaataaactggcttatttgaat

SEQ ID NO: 650053 - DNA, 100 bp, Homo sapiens
tggaaatctgctctgagcctgtggcagcctcccctgcaccggcaggctcctcctggtcaccagcctggtggttgtgctgctgtgggaggcaggtgcagtc

SEQ ID NO: 650054 - DNA, 50 bp, Homo sapiens
ggaagatggcggctgggttcaaacaacaatatgcacaggttttggcccaa

SEQ ID NO: 650055 - DNA, 98 bp, Homo sapiens
gctgaacggcggagcgggagcggccggaggagccatggactgcagcctcgtgcggacgctcgtgcacagatacgaaagtgccaaagtaatccagccca

SEQ ID NO: 650056 - DNA, 83 bp, Homo sapiens
ccgggattatgccaagaaaccaggtgcactacatcctccaggaggtggtgatgggtgggatggtgttggaaacaaacatgaat

SEQ ID NO: 650057 - DNA, 75 bp, Homo sapiens
gataatttccccagagcgtcttgatccttttgcagatgcatttgaagacatgctggagaacccactgaacagcac

SEQ ID NO: 650058 - DNA, 50 bp, Homo sapiens
cgagcagcgtcatgtacccctaatgttggctcaattaagaaacatcaggg

SEQ ID NO: 650059 - DNA, 100 bp, Homo sapiens
tagcaagaaccggggcaagaggaaagctgatgccacttcttcccaagacagtgaattagaatgaagtaagaactctgctagagaggaaatggctgcttca

SEQ ID NO: 650060 - DNA, 100 bp, Homo sapiens
cgctgcggcggcgactgagccaggctgggccgcgtccctgagtcccagagtcggcgcggcgcggtactccaaagattcaggtttactcacgtcatccagc

SEQ ID NO: 650061 - DNA, 87 bp, Homo sapiens
gcttctttgactcagatgaggatgactccaccagcagactgctggagttaataccaccgacaaagagatggaggtgcttcacttaag

SEQ ID NO: 650062 - DNA, 76 bp, Homo sapiens
agttttatccttttctgtacaacatcacttcttctgtttgcagtgagcaacttatgactctcatctctgctgcacg

SEQ ID NO: 650063 - DNA, 80 bp, Homo sapiens
cctgcagatgccaaccttcccgccagactacggcttccccgaacgcaaggagcgcggagcgcctggaccatgctgctgag

SEQ ID NO: 650064 - DNA, 75 bp, Homo sapiens
caacagcacgtgaagatcaccccagtgattggccaaggaggcatccgcacttccactaatagccaagtagacaag

SEQ ID NO: 650065 - DNA, 90 bp, Homo sapiens
cctggatctattaaagggagcattccgatcatctgaggaacagcagcaaaacaagctatcgatcagggaagatctccagttataatagat

SEQ ID NO: 650066 - DNA, 83 bp, Homo sapiens
atgacaatgactttgagccctaccttactggacagtcaaatcagaaatgcctccacggctgtgtacgcctgttgcaaccccat

SEQ ID NO: 650067 - DNA, 98 bp, Homo sapiens
tgaccaactcagtgccaaaaccagagctgggcctccagaagagaggatgctgtctggtgctgggctacatggccaaggacaagtttcggagaatgaat

SEQ ID NO: 650068 - DNA, 75 bp, Homo sapiens
gatttacgtggagatcaagcgcagcgatggatcttggagtgaaaatatactggaatattttctgagaaatagcca

SEQ ID NO: 650069 - DNA, 100 bp, Homo sapiens
agttgatggaattacactgtgatacgactgactgaagatgagaatgtgcctactgctcctgatcctccaagtcaacatttacgtgggcatgggacaggct

SEQ ID NO: 650070 - DNA, 82 bp, Homo sapiens
cagctcagccagacttcccctatggtcagtatgctgaggcggcacctggagctgaaagagaagggcaggcacgtggtgctgg

SEQ ID NO: 650071 - DNA, 97 bp, Homo sapiens
cttcgcttggaatccgaatcagagcttggaccagagccttccctgagaatgctgaagatgagatcgtggggctcaccagcgtcccccatggcttctg

SEQ ID NO: 650072 - DNA, 75 bp, Homo sapiens
tggggccgaatataacatagaggtacaccaggggttggaaaaaccacactaggcaaagaacttgcgtcaaaatca

SEQ ID NO: 650073 - DNA, 100 bp, Homo sapiens
ccgcgaggaccgcacggaggaggagcaggagcgcggagccgcgagccccgagccccgagcccggcgcctggctgagtagcgaggccttcttgggcagctt

SEQ ID NO: 650074 - DNA, 100 bp, Homo sapiens
gtgcagagcgccgtctggagccgagatggagccctggtgggcacggcgtgcaaggtttggttttcctaaacaaatcctttcacagggaccgacggcactt

SEQ ID NO: 650075 - DNA, 100 bp, Homo sapiens
cgagaagccattctggccttggatatccaggatccaggggtccccaggctaaagaacatggaatgcccttcaatcagctgggcaccctggcaggcagcaa

SEQ ID NO: 650076 - DNA, 100 bp, Homo sapiens
ggactatgctatgaatttatacaaggagaagcactggatccaaagcatgtctgcaacccagccattttcaggtttcagaaccttctgtggtccagaaaga

SEQ ID NO: 650077 - DNA, 98 bp, Homo sapiens
gtcacagtgggacccgcactggcagcgggaggcagagggaggaccctggaacatcccggaagccgggaaatgtattcccggcaggagcaggaggagga

SEQ ID NO: 650078 - DNA, 90 bp, Homo sapiens
cagacttaactaagcagatttcccgagactacggtgtgctgttagaaggttctggtcttgcactaagaatgttgtaccatctttgggtag

SEQ ID NO: 650079 - DNA, 88 bp, Homo sapiens
tgcctcaggcttctctcctagtgtacagtgcccaaatgatgggtttggtcaattctttgtgatgatgtcaccacaagaagtactgcag

SEQ ID NO: 650080 - DNA, 90 bp, Homo sapiens
ctctttctaaagaagccaacagagacccaggagctggtgcagcaggtcctcagtttggccactcaggaccccagaagtggccgatcagcc

SEQ ID NO: 650081 - DNA, 116 bp, Homo sapiens
agggagagccgagcagccccggctctgggctacggactatgggcgaatagctctgaccacccggcgaaggtactccaaagattcaggtttactcacgtcatccagcagagaatgga

SEQ ID NO: 650082 - DNA, 101 bp, Homo sapiens
ccaggatgccggggtccggtgcaacctaccttacactggggcagagaccaggctcctgaactgcatcatggacatggtggagaagacgcggcgctcgctca

SEQ ID NO: 650083 - DNA, 100 bp, Homo sapiens
gaggaaacgtcggaaactttagagaagttaagagaagaattagctatcaaatccggccaggatcatccagcagctcgtcaacggcatcatcacgcccgcc

SEQ ID NO: 650084 - DNA, 100 bp, Homo sapiens
cttaacagatatcaccgaagccattaaactagactcaggagtcgtcaagaggctctgcaccctggatggaaagcaggaactgcaagcacatgttgaccag

SEQ ID NO: 650085 - DNA, 82 bp, Homo sapiens
ccatgatgagtgtggatgaaacactaatgtgttcttttcagccttacggacatccaaaaattgcttggaactgacttcatgg

SEQ ID NO: 650086 - DNA, 100 bp, Homo sapiens
agcaagaaggccctggacacagcaatatctctgggctttcacagctcctattcagacatatgtgcttggtgctaataaccaggaaacagtaaaatatttc

SEQ ID NO: 650087 - DNA, 100 bp, Homo sapiens
ccacgatcgcagactccaaccagaacatgcagtccctgcttcctgccgtgactctgacatcattagaagcatgccagaacagactggtgaaaagtaaacc

SEQ ID NO: 650088 - DNA, 100 bp, Homo sapiens
ttggccatggtcttactgggagccactcacggattaatatttctccctgtcttactcagttacatagctcctgcccctcctaaagctgaagccaaagcga

SEQ ID NO: 650089 - DNA, 100 bp, Homo sapiens
ctcgacctctggttctacttcacactgcagaactgggttctggactttgggcgtcccattgccatgagcaaggtccgtggtcctgtcagtggaagcccgg

SEQ ID NO: 650090 - DNA, 100 bp, Homo sapiens
gctaccgcccacagggtggaggcacccagctccccttccacatcctctgtcaccacatgaggttcaacctgaaagagctatcagttgagggatttgcagt

SEQ ID NO: 650091 - DNA, 50 bp, Homo sapiens
ggaaattgtcccgaatccctgcagtttaagctatgaagaaggacatccct

SEQ ID NO: 650092 - DNA, 100 bp, Homo sapiens
catgagagaagaaatacaggatgcctctcagctgccacctgcctttgacctttttgaagcctttgcaaaaaattaaatatgggtgatgttgagaaaggca

SEQ ID NO: 650093 - DNA, 87 bp, Homo sapiens
gggatttcgttttgcctccggttggggctgctgtttctcttcgccgacgaccagcatctcagacatgtcgaaaaagatgttttgatc

SEQ ID NO: 650094 - DNA, 100 bp, Homo sapiens
caagatgtagctaatgaccgtggttcccactgagctgagcgggctttggacaccatgaactttgatgtgattaagggaaagccaatccgcatcatgtggt

SEQ ID NO: 650095 - DNA, 101 bp, Homo sapiens
ggaattccggtcagggtcaagtcgtgttctgatcactactgacttgttggttcaggaacaagtgcatcccactctctcagctaatgaagagtctctctatt

SEQ ID NO: 650096 - DNA, 95 bp, Homo sapiens
gtgcaacagtgaagtatcttcaaaaattcatccctgaaattactatcagtgatatacttagctccagtgatccacaagctcagaaatacatcgcg

SEQ ID NO: 650097 - DNA, 75 bp, Homo sapiens
ctctcacaggagagggcgttcaggcagtggctctgccaatgatcctgtgagtattcaggaatcactgttgcccct

SEQ ID NO: 650098 - DNA, 100 bp, Homo sapiens
ccttccctatgtccaaaaacgtttttcctgataactggaaagttcctcaagatggagactttgactttgtatggcccatctcctgtacgcttggagcgac

SEQ ID NO: 650099 - DNA, 98 bp, Homo sapiens
tgtggtggaagcagcagtccaggaatgcagtcagtctgttgatgaaactatcacccagaggcctccattcaggctgttttttcagatgcccaaatgca

SEQ ID NO: 650100 - DNA, 100 bp, Homo sapiens
cgtgagcagccggaggatcgcggagtcccaatgaaacgggcagccatggccctccacagcccgcagatcttgtagaaaatttcagctgtagcccttggac

SEQ ID NO: 650101 - DNA, 100 bp, Homo sapiens
tagctaggaggtgtgtaccaccacacacaacctaatctgggagcctgcaagtgacaacagcctttgcggtccttagacagcttggcctggaggagaacac

SEQ ID NO: 650102 - DNA, 98 bp, Homo sapiens
gatcctttctacaatgaatccttcagcttcaaagttccccaagaagaactggaaaatgccagcctagtgtttacagatatggagttaccagtaaggag

SEQ ID NO: 650103 - DNA, 100 bp, Homo sapiens
gtccgtggggttggcgggccatcccaacagaagaccacgtggccttaaaccaactgctgcaactctgtgtgcaggatgattctgtgggcccaagtcaccc

SEQ ID NO: 650104 - DNA, 100 bp, Homo sapiens
tttgttcaagataaagtgattttttgcctttgttgattaactggacaaattcaggtgtggacactgccagcggctgcagccgacttggaatgacctggga

SEQ ID NO: 650105 - DNA, 75 bp, Homo sapiens
tgccggtgctgctgcgccctgcggagctccgaacacgtgcgctcaccaggagactaaagtccatcaaaaacatcc

SEQ ID NO: 650106 - DNA, 82 bp, Homo sapiens
gcacatcgtggtggtcggatttcaccacaagaagggctgccagcaaacggggattcagcgtccgatcctttggaacagggac

SEQ ID NO: 650107 - DNA, 49 bp, Homo sapiens
acggagtcgccgcggagcgcaggtcagcctgccagtatactggggggca

SEQ ID NO: 650108 - DNA, 75 bp, Homo sapiens
atatctttgcagtagctgaagaagcttacaagcaaatggccaggcagattttgacaacaaaccagtaaatggccc

SEQ ID NO: 650109 - DNA, 131 bp, Homo sapiens
gacagggatgtctacctggtaatagaggacttgaagcagaaagcaagtgaatacgagtcagaagattactctcgtggctttggtggccggtacggggtggagaaggataaatgggacaaagcagctctggg

SEQ ID NO: 650110 - DNA, 96 bp, Homo sapiens
acgtgttggaccttccggagcttctcagaagacagagggttttcttttgaggtctgccatcatggatgttctcgcagaagcaaatggcacctttgc

SEQ ID NO: 650111 - DNA, 83 bp, Homo sapiens
cggcgagacgcgcgtgtgtgagcgcgccggaccaagcgggcccagaagcggattatgatgcatcattatcacagaagaaattc

SEQ ID NO: 650112 - DNA, 87 bp, Homo sapiens
tgcatcggttcctggcagaggatgcactcaacacgaaaccaccatcatgggttcgggtcccatagaccccaaagaacttctcaaggg

SEQ ID NO: 650113 - DNA, 98 bp, Homo sapiens
ctgcctccgagcgcacgcatcctgagatcctgagcctttggttaagaccgagctctattaagctgatgtgagccactgccccatgttgtgttgatgcc

SEQ ID NO: 650114 - DNA, 75 bp, Homo sapiens
cgaagcttggaagttgcagaagaacgtactcaggaaaagtggggatttccaatgtgccactatttaaaggaagag

SEQ ID NO: 650115 - DNA, 98 bp, Homo sapiens
cggcgccgggcactgagcaccgccaccatggggaagggggttggaatttctcaagagaacaagaaggaagtggaaaagaaactgactgtgaagcctat

SEQ ID NO: 650116 - DNA, 100 bp, Homo sapiens
gctacgacccttgggatctgccctccgctcagctcgagcttccctcgtggccgacggaacaatgaagatacactgcctctaggactgggacagatagcca

SEQ ID NO: 650117 - DNA, 100 bp, Homo sapiens
ccatatcacacaatctggtgaaaatggaaaagaagagacacagtatgaaagaacagagccatctccaaatgaggaggcaaaacagattcagaatctgcag

SEQ ID NO: 650118 - DNA, 90 bp, Homo sapiens
gtcatctcggagactagaggctggataccaaatagcagtggaaaccggatctaagcctttcccacgttatggttataaaccctccccacc

SEQ ID NO: 650119 - DNA, 100 bp, Homo sapiens
atgactgtgacttccaaaccaaccacaccttgaagcagcaaaaacctcgctctatcctgtccaagtatgacgaagagcttgaaggggagcggccacattc

SEQ ID NO: 650120 - DNA, 82 bp, Homo sapiens
tggagcctcagttggaagcagccgatccagcctgcggagcctgtggggcagatgctaatcctgaggtgacgatgacaatgct

SEQ ID NO: 650121 - DNA, 75 bp, Homo sapiens
tttgactctcgcgggaatcccactgttgaggttgatctcttcacctcaaaaggtcctgcacccagacctcacgac

SEQ ID NO: 650122 - DNA, 90 bp, Homo sapiens
atgtaaccaaatattatggatcctatctgaaggttctaggtgataaacatgggaatgctttatggcttaatgaaagagagtgctcaattc

SEQ ID NO: 650123 - DNA, 82 bp, Homo sapiens
cgcagacctggtggaggtgttaaatgaaaagggcagctgtgtacaggatgaatcggaaccacagaggcctctgtgtcattgt

SEQ ID NO: 650124 - DNA, 106 bp, Homo sapiens
caagaccctcggcctcctcccccgccgccttcctgcagagacacctatggctgccgatgaaggctcagcagagaaacaggcaggagaggcccacatggctgcggac

SEQ ID NO: 650125 - DNA, 96 bp, Homo sapiens
ccctggaaagccaatgagagagtcctcctccgcctcctcctctctgcatgcgcgtcagagcccgtgccaagaacaagcagcagtcctgaactcgag

SEQ ID NO: 650126 - DNA, 90 bp, Homo sapiens
gccgccaagaagcacggcaccaaaaacaagcgcgacgctgcatccaggtagtacacaaactgctctgctaccagaagaagtgtcgggtac

SEQ ID NO: 650127 - DNA, 50 bp, Homo sapiens
agagagccaaagagcaagtcaggaatacggttggacagaatgaactgaag

SEQ ID NO: 650128 - DNA, 114 bp, Homo sapiens
ctgagaccatctaccagtctgcaagcgtcttcaaaggagccccacatgagcgaactctagttggcctagtaagagacctgagagggatcgctttcgctttcaatgccaagacca

SEQ ID NO: 650129 - DNA, 75 bp, Homo sapiens
gattacctttccaagccaatgcccaagacattataaacaagcctaaagaaactgttccaactcttgctccaaaaa

SEQ ID NO: 650130 - DNA, 75 bp, Homo sapiens
gaggggctccggctggtctgtggtgaggaagacaactgttagttttgtggcttactgctgctccacccagtgtct

SEQ ID NO: 650131 - DNA, 100 bp, Homo sapiens
catgaagaaggggctggatccgtgggtcagagaacacaggaccagtttgccatcccaaggccgaagcaaaagctggcaggctgacagaggcggcctcagg

SEQ ID NO: 650132 - DNA, 51 bp, Homo sapiens
tcggcttccaccgcttcttagtgaataatccagaatggctactctgatcta

SEQ ID NO: 650133 - DNA, 75 bp, Homo sapiens
gtgctgtggaagagcacccagtaggaattcctcctgatcagcagagactgatctttgctggcaagcagctggaag

SEQ ID NO: 650134 - DNA, 100 bp, Homo sapiens
ctagggaggacctcacttccccggggtgtaataatgttaactgaggctacccacctttctgttctgagacccctcaagagacatataagaaggtgatgaa

SEQ ID NO: 650135 - DNA, 82 bp, Homo sapiens
ccctgcctcccctgcgtcccgccaccggccgcttctgtcctcggccgggctctcgccatgggtcactgtcgcctctgccacg

SEQ ID NO: 650136 - DNA, 75 bp, Homo sapiens
ttcagttgcacatccccacatcaatgcactgccaatgagctccactggttcaacagcctctcctccagtttcgac

SEQ ID NO: 650137 - DNA, 134 bp, Homo sapiens
ggagacccatctggactaccaaggagaagctatagactacttctactccaccaggaaggtgaccaagaatatggcccaggtgaccaaagccctggacaaggccctgagcaccatggacctgcagaaggtctcct

SEQ ID NO: 650138 - DNA, 107 bp, Homo sapiens
agccatggcgtccgagcggctccctaacaggcccgcctgtctgctcgtggccagcggcgccgccgaagccatcgacgagtacaagccccaggatgctaccaccaacc

SEQ ID NO: 650139 - DNA, 98 bp, Homo sapiens
ccaagatcttggcaaagcttctccctcagtatttagaccaggaaaagcaggtgatattctcagtggagaccaggacaaggaacagaaagacccttact

SEQ ID NO: 650140 - DNA, 98 bp, Homo sapiens
cgccaccacccactccggacacagcacttgcacctcctgcgccgccgccccccatccaaggatatgccttcaagcctccacctagacccgactttggg

SEQ ID NO: 650141 - DNA, 98 bp, Homo sapiens
tggattatgttataatgtggaacctggatgaatgtagagagaaagtacttcaagctgaactgtcccaagcaataaacagtggtacattgttatcaaaa

SEQ ID NO: 650142 - DNA, 82 bp, Homo sapiens
cccaggtgaactcgtggcgagagaaggaaaatgcgcgtcccgggcgcggactaagaaaaatggctttgtcagcccaacagat

SEQ ID NO: 650143 - DNA, 75 bp, Homo sapiens
acattcctgattacctgccacccattgtgtcttctcaagaagcctcaagcagcctgccaccctgccatattccgg

SEQ ID NO: 650144 - DNA, 99 bp, Homo sapiens
acaacgggccctggggagaaggaaaagggctttgttcgcgggggtcacagctctcatggctgcagctagcgtgaccccccctggctccctggagttgct

SEQ ID NO: 650145 - DNA, 50 bp, Homo sapiens
cacgcactttctgtactgcgtacgatagaagctttggagaaaatgaatga

SEQ ID NO: 650146 - DNA, 100 bp, Homo sapiens
cgcgcgctgcccacgattcgcttctgaggtaaaatgtcggttccaggaccttaccaggcggccactgggccttcctcagcaccatccgcacctccatcct

SEQ ID NO: 650147 - DNA, 51 bp, Homo sapiens
ccgcaacgtaaaatccttggaaaaggacaagcaaagtggatcagcaaaggc

SEQ ID NO: 650148 - DNA, 51 bp, Homo sapiens
gacatgagatgattgccaaacccccaggtattgttgtctctaagccagacc

SEQ ID NO: 650149 - DNA, 98 bp, Homo sapiens
gggaataggagctggggagcccttctgcgccacaggttaatgttgaagaaggaaaatgcggaagtcgtcatttgacaagttttataaatgagtatttg

SEQ ID NO: 650150 - DNA, 98 bp, Homo sapiens
gtggtggtggtgtcttcctgtctcaacgatacctattttctagtgctgagatcctgagacaatgatgagtataggatcaaaccagtggaagaggtcaa

SEQ ID NO: 650151 - DNA, 75 bp, Homo sapiens
atcgagcagaaagaatgtctttcagaagaagctcattcacacagaagacccatttaatgatgaacatcaggagag

SEQ ID NO: 650152 - DNA, 100 bp, Homo sapiens
atttcctctcctcccctctggatttctcagagctgcagcaaaaaattattcctgatcaggaccaactgatggcaatagcactagagtgcatctatacctg

SEQ ID NO: 650153 - DNA, 134 bp, Homo sapiens
ctcttccaaacagtgccggaatcgctacgagaatgtcatcattccacgagaggaggggaaggagcacttgattagactccagaaacagaaactgcagctgctcccaccacccccaccaccacaggccctgcccg

SEQ ID NO: 650154 - DNA, 97 bp, Homo sapiens
gagaacgccgcgctgcgcatctccaacagcgacctgagcggctcagctgtcgcaggccctggaggagctgggaggccagaaacaaagagcagacatg

SEQ ID NO: 650155 - DNA, 101 bp, Homo sapiens
tcaggaccgggcctcaaaatggccacacgcgtacccccgtagcggaaaaaccttttcctccgcaaccatgtctgacaaacccgatatggctgagatcgaga

SEQ ID NO: 650156 - DNA, 99 bp, Homo sapiens
atttgttaaggattccaagtaactcttatttggagctgaatgagcgctggcggtccctacagcagctggccgaggaacggagccagctcttgggcagcg

SEQ ID NO: 650157 - DNA, 75 bp, Homo sapiens
ctggccgtcggctgcggcgccatcggcaaaggaccagagaccttgtatgcagggcagaagctcaatgacaacgag

SEQ ID NO: 650158 - DNA, 58 bp, Homo sapiens
gcaaagggcgtggcattgaccagaaaaagcttgtggtgaaggggggcaaaaaaaagaa

SEQ ID NO: 650159 - DNA, 75 bp, Homo sapiens
taagtgccttaagagaggatcgcccaatccacatgcttttccagtaccaaaagaattggtggagctccatttgaa

SEQ ID NO: 650160 - DNA, 75 bp, Homo sapiens
ggctattccctatattcagcaattaaatcataccctaatgatcccagcaagataatgtcctgtcttctaagatgt

SEQ ID NO: 650161 - DNA, 98 bp, Homo sapiens
cagatttgaaaattcacccttgtagagtcattcctgcctttgagcggactcccttttaagagatggggtcttgccaggtcttggccaggctggtcttg

SEQ ID NO: 650162 - DNA, 100 bp, Homo sapiens
gttcatggagagcaaggagaaggatcgccaggtgctggaggacttcccaacggagttgatccccctcatattgtgtacagcatgtctacatcctgagcct

SEQ ID NO: 650163 - DNA, 83 bp, Homo sapiens
ccaacagagacccaggagctggtgcagcaggtcctcagtttggccactcaggcctccccaaagccagtcctgtgtcaccaatc

SEQ ID NO: 650164 - DNA, 90 bp, Homo sapiens
tccagtggactactgttatagagagaacatttcatgtagatactccagaggaaagtcttgtgaaaatgccattgtgtgctggaaacctgg

SEQ ID NO: 650165 - DNA, 146 bp, Homo sapiens
catggattaaaaatatggaaagagctaccactagcaaggaagacccggcctccagcacaggagggattaaaggtaggtttctctggcaccgattcggggcctgcccggacttcgccgcacgctgcagaacctcgcccagcgcccac

SEQ ID NO: 650166 - DNA, 100 bp, Homo sapiens
gctgagtggttgtgtggtcgcgtctcggaaaccggtagcgcttgcagcatgggcctattccactagaagcaagatggctgaactcaatactcatgtgaat

SEQ ID NO: 650167 - DNA, 75 bp, Homo sapiens
agataggatgtgggaacttcggagagctcagattagggaagtttaattagcattgacagcacctgtacagagatg

SEQ ID NO: 650168 - DNA, 97 bp, Homo sapiens
gaagttgtcttctcctgataatgtaaattgccgcgatacccaaggcagacattcaacacctttacatttagcagtatttgctggccgttggttaatg

SEQ ID NO: 650169 - DNA, 83 bp, Homo sapiens
agcactatacccacaacactgtccgagggtgctcttatttctacagatatggatatgtgtgtgccacaaaaattatgaaactg

SEQ ID NO: 650170 - DNA, 101 bp, Homo sapiens
atcacatccaccatgaaagctaagctgctgaagcattagtgccagcagtagttcccaagggctgtctcagccatccacccagacgactcagtatctgagag

SEQ ID NO: 650171 - DNA, 83 bp, Homo sapiens
gtgacagagacaacaccgagtatgagaagttaacacagaaatctgcctcctgggccatgccgcttctaaggcctgtttcttct

SEQ ID NO: 650172 - DNA, 110 bp, Homo sapiens
gccgctgcccgggccatccctcgaggaagtttcatcagcagacctgcttggactgtaagaaaaatttttgcatgacctgttcgagccaagtagggaatgggccccgcctc

SEQ ID NO: 650173 - DNA, 95 bp, Homo sapiens
gtggaggaagaacatgcatatttgggtccaactgtgaagccagatgataaggagcaggggagagaagacagaagaggttggagaggtcagggagg

SEQ ID NO: 650174 - DNA, 100 bp, Homo sapiens
gaagatggtgccgggggtcgctggctctgctgctgccgccggcgaaggaggaggcgttgccgggaaatggctagtgatgagctgaaagagatgcggaaaa

SEQ ID NO: 650175 - DNA, 101 bp, Homo sapiens
ggaagtgcagctgcctcagttcttagcgcaggaactgttgacattcagggatgtgaccatagaattctctctggaggagtgggagtttctgaaccctgctc

SEQ ID NO: 650176 - DNA, 82 bp, Homo sapiens
aggtggtcaaggctaaagccggagcagactcgctctgttgcccaggctggatcatagctcactgaagcctcaagtgatcctc

SEQ ID NO: 650177 - DNA, 100 bp, Homo sapiens
atccaatagggatattgtagaaactgtctttaacctggtcggggtatgataggtcggggaagagggggctttggaggccgaggccgaggccgtggacgag

SEQ ID NO: 650178 - DNA, 100 bp, Homo sapiens
cttactaacccgtttggcaagggagcattcattcagcttctgcggcagtttggaaaggaagaggagttgtacgcatgtcagagaggttgcaggctgtttt

SEQ ID NO: 650179 - DNA, 83 bp, Homo sapiens
tgaaggagttccaccaggccgggaagcccatcgggagcatcagatccatgctgctgctgactcggagccccacagcttggcac

SEQ ID NO: 650180 - DNA, 50 bp, Homo sapiens
ttcgtctatgtggcgcccggcataggggacccgaagctgccagtactgta

SEQ ID NO: 650181 - DNA, 50 bp, Homo sapiens
ggaaaagcgaggcaaggcaggcgggctttcttgatcatggatggtgaaga

SEQ ID NO: 650182 - DNA, 101 bp, Homo sapiens
gatatactactaactttgaaatggaataagaaaatgggtcacttggcctaagaccatttgtgggagaaatgatatggatggatcagatggtgatgatagtg

SEQ ID NO: 650183 - DNA, 83 bp, Homo sapiens
ctgaagttgccaggcttcccaacattcttgtctgtgtcctcctccgcctcctcctctctgcatgcgcgtcagagcccgtgcca

SEQ ID NO: 650184 - DNA, 98 bp, Homo sapiens
caagatgcagaagtcagcaagagtgacataggagaagtgattcttgtgggtggcatgactaggatgcccaagcatgacactactgtgagtggcctaca

SEQ ID NO: 650185 - DNA, 83 bp, Homo sapiens
acgcgccacccgccgacgcctcagccgcttggggcccgcacggaccctctacttcactgcatcttcctcccgtgaggctggcc

SEQ ID NO: 650186 - DNA, 75 bp, Homo sapiens
taaaatcctcacttactatggagcccagaaagagaggaagctcaagcggcagtttacaagtccttccactttctc

SEQ ID NO: 650187 - DNA, 96 bp, Homo sapiens
ggaattaatttttccatctaattatgacctccttcgccacttacagtatgcaacacattttcctatacctctgtttctacagcagtataatcacta

SEQ ID NO: 650188 - DNA, 51 bp, Homo sapiens
gaccacgatcgtgcgcttgtgggaaggtgaacatgtcaaaccttttaagcc

SEQ ID NO: 650189 - DNA, 75 bp, Homo sapiens
tgctgccagggtccctgaagagggaagacacgcggaaacagaacaggccgcccgcctgaagaaactacaagagca

SEQ ID NO: 650190 - DNA, 100 bp, Homo sapiens
cggccccggccccgccaacgctgccgccggagatggacagagacgtatgtgcgttggtctcctaagggcacctacctggctacctttcatcaaagaggca

SEQ ID NO: 650191 - DNA, 75 bp, Homo sapiens
tccagcttgccaccaaagacctgcgactttgctcaggtgtaatggataggtaacagagaagacctcgtcccttcc

SEQ ID NO: 650192 - DNA, 82 bp, Homo sapiens
gcggctggcggagcagaacggattgcaggccattgagacccagagcagcagttctgaagagatagtgcccagccctccctcg

SEQ ID NO: 650193 - DNA, 50 bp, Homo sapiens
gaagagctgcagctcctcctgtgcggtactctttccattccttaccccag

SEQ ID NO: 650194 - DNA, 100 bp, Homo sapiens
gaagctgcggctgcacacggtcaactccaggcacgaggccagcctgaagttgtacaagtttttgaaatcatgaatcctgtttatagtcctggatcttctg

SEQ ID NO: 650195 - DNA, 82 bp, Homo sapiens
tagaatcaaggatttcagcaacaatgcctctgttcaaactcccagatgtttagcactgtgttcagtggtcgatacattattt

SEQ ID NO: 650196 - DNA, 97 bp, Homo sapiens
aggaatgcgtcctgagcagcagccccgcggtgctggtcaccaggagactaaagtccatcaaaaacatccagaaaattaccaagtctatgaaaatggt

SEQ ID NO: 650197 - DNA, 82 bp, Homo sapiens
gacgctgtaaggccaaaacgaggatttgtgttgtgagacaatgcagatcttcgtgaagactctgactggtaagaccatcacc

SEQ ID NO: 650198 - DNA, 99 bp, Homo sapiens
tccacagccactgccgccgtcgccgcggagctggtttctgccgacaactcttccaccaaagccacctaagccaatgacttcagcagttccaaatggaat

SEQ ID NO: 650199 - DNA, 100 bp, Homo sapiens
cctcagcctgggtttagtagattatatcttcgtagccatgttactttacatccgagatgcttggacaagcagatcttttgaaatatgctaagaatgagac

SEQ ID NO: 650200 - DNA, 100 bp, Homo sapiens
agcctggcagggcacagtttctagagggcccgtccccagcccgggccgtccatcctcgcattgctgttgaatggaacaagcacatcatgattgacttggg

SEQ ID NO: 650201 - DNA, 88 bp, Homo sapiens
tgggatccagtacgagttgaatcattgttcaaataaggaaagaccacagcaagattctttcattcgtctcctcctagcctgggggacc

SEQ ID NO: 650202 - DNA, 100 bp, Homo sapiens
caggggccggagggcccacaacccgcagagacttctactggctgcgctcctttctggccggagctcgtttgatcccttccaactgataccttgtaatttt

SEQ ID NO: 650203 - DNA, 100 bp, Homo sapiens
tgggttcaggaccagttggatgatgagacgttatttccatcaaaaattgtttctagcatggacaatccagataatgaaatagtgttgtacttaatgttac

SEQ ID NO: 650204 - DNA, 110 bp, Homo sapiens
attcttctggccgagggaaagcaagaatatctgttcctgcaactgcactgattctagaaacactctctattcgaactctcatgaggcccaactccgacactgtatgtcca

SEQ ID NO: 650205 - DNA, 90 bp, Homo sapiens
cacgagaattccgcagcccacacggtttgggaaaagttcttaagttctgaaacgccgcggatcaatgtctttatggcagtgcctacaata

SEQ ID NO: 650206 - DNA, 90 bp, Homo sapiens
cgggagagcgcgcctagccggctcgcgagacctcagcagccatgtcgaagccccatagtgaagccgggactgccttcattcagacccagc

SEQ ID NO: 650207 - DNA, 100 bp, Homo sapiens
tgtatgttcacttacgcctctcaaggagggaccaatgagttggctggggaacagaccagggaattggtggatttggagaagagccgggaattaaatcaca

SEQ ID NO: 650208 - DNA, 87 bp, Homo sapiens
atctggagaaaaactggatgttggtagaaaaagcaagagtttgttatatagcagtggcatttttctgaagttgttcattaagacttc

SEQ ID NO: 650209 - DNA, 100 bp, Homo sapiens
ggctacgatgagcacaccggccgtgccccaggacctgcagctgcccccgagtcagagggcgcagtccgcattcaaagagcggttctggtgaggttggaag

SEQ ID NO: 650210 - DNA, 100 bp, Homo sapiens
agaccgaaaagaagatgatacaaatgaatttgttagtgctgtgtgctggagggcactaccagatgggctgctggagccagttctgcttctcggcaaggag

SEQ ID NO: 650211 - DNA, 100 bp, Homo sapiens
acctcactgcagaggtgctggagctggcaggaagttattccaacttttgacatggctgtcaatgaaatcttctttgaccgttaccctgactcaatcttag

SEQ ID NO: 650212 - DNA, 96 bp, Homo sapiens
gccgcagctgcgggtccgggattcccagccatggcagattcctccgggcagcaggaggctgacccgcggctgattgagtccctctcccagatgctg

SEQ ID NO: 650213 - DNA, 82 bp, Homo sapiens
ccgaaggaaaaggaggaattcgccgtgcccgagaatagctccgtccagcagctgtgatcgagatggtacaagaggctggtag

SEQ ID NO: 650214 - DNA, 100 bp, Homo sapiens
tacgagctggttaggaggcacagggcgtcggacctgcacgagctgtctggattttttatcaagcagaaatgcatcgaacaacgagaatcaagatcactga

SEQ ID NO: 650215 - DNA, 97 bp, Homo sapiens
ctgcgcccgtgggaccggtgaagttctggcgacccggtgggaagaagagcgctatcctgaaggcatcaagtggaaattcctagaacataaaggtcca

SEQ ID NO: 650216 - DNA, 82 bp, Homo sapiens
cggccgagcgggcggcttcctggcctgggcgctccggtggcggcggaggtggctattatcatggaaaactaatttttcccag

SEQ ID NO: 650217 - DNA, 82 bp, Homo sapiens
caggcttactgtggatctggattctaaggcaacacttccttgaagaaacaagcttacagaataccaagctgctattttacac

SEQ ID NO: 650218 - DNA, 75 bp, Homo sapiens
ctaaaatccagatgtcatattcactttatcttcaagccaggatgaagggagactgggcaagactcttacgcccca

SEQ ID NO: 650219 - DNA, 100 bp, Homo sapiens
cagggcctgattgaggactgccagctggcgctgcagatacacattccagttttcctgatggtgaacaaataggccctgaagatctcagcttcaatacaga

SEQ ID NO: 650220 - DNA, 98 bp, Homo sapiens
acgccacctccgctgctgctgctgctcttcccgctgctgctcttctccaggctctgtgggagaattaccaagatcttcatcacacaccttcatggaga

SEQ ID NO: 650221 - DNA, 76 bp, Homo sapiens
gttcgcgccaaggagaccaggaagcgagcactcagcagaggcggggtttcaccatgttgcccagactggtcttgaa

SEQ ID NO: 650222 - DNA, 80 bp, Homo sapiens
aggggcacaaggactgatgaacagttccctccttcatcaggacccagtggcttttaaggatgtggctgtgaacttcaccc

SEQ ID NO: 650223 - DNA, 100 bp, Homo sapiens
attctcagtgatcagtcagtcaactttggttttagtaaaaagctgacttcatgagaccgaggatctcgttcgttgatcgatgctacatattcagcatgtt

SEQ ID NO: 650224 - DNA, 80 bp, Homo sapiens
ctttctggcctggaggctatccagcgtattgatgtcaagctgaaccatcgtaggaagttgaaagccttagaaagaggact

SEQ ID NO: 650225 - DNA, 96 bp, Homo sapiens
ggaggagcagttgtctgatgaagagaagtccttaaaaaacgatgagcagtctgccaaaactgatgttcagaaacttctggaattaggacagaaaca

SEQ ID NO: 650226 - DNA, 90 bp, Homo sapiens
ccagaagttctcaaaggtgcctaccaaggtcaaaggctatgacaacctctttgctatggagcagacgcctccgcctagacctgaagccta

SEQ ID NO: 650227 - DNA, 83 bp, Homo sapiens
ctcagccgagagcagagcactccccccaagtctcctcagtgaaaaccgagtccaaaactacttacctggaagaccttccacca

SEQ ID NO: 650228 - DNA, 96 bp, Homo sapiens
gcgatccgggcgctcgagacttaccagagccacaaggtgttgggctggatcttgatagcagttgttatcatcattcttctgatttttacatctgtc

SEQ ID NO: 650229 - DNA, 100 bp, Homo sapiens
ttacgtctgcggaagtgcagctgcctcagttcttagcgcagtctcagaccagtatccttcaggggttctcttactctgatttgcggaaatttggcatcgt

SEQ ID NO: 650230 - DNA, 96 bp, Homo sapiens
cgtcaacgccgtatccagcgactacgcggccgcggagacctacctgcggcgtcggcagctgctgctccgagctaatttgggcataggaatccctct

SEQ ID NO: 650231 - DNA, 80 bp, Homo sapiens
cagagttgctcatggaggtgcacggaaatgggaagaggcccagtccagagagctgaagacctaactgcagcatgtctgta

SEQ ID NO: 650232 - DNA, 100 bp, Homo sapiens
gggttttggaggctggcaagattgggatatttgagagtccaactggcactatataaagatgaagcgcagctgtataaagaagagcacctgaggaatcggc

SEQ ID NO: 650233 - DNA, 100 bp, Homo sapiens
gcgcgtctggtggcggcggcgtgatgttctcggcaggagcggagagtttgctccaccaggccagggtatttctcaagctgccagatacgtttaccaacga

SEQ ID NO: 650234 - DNA, 100 bp, Homo sapiens
cagatcgagcagctgcgtcgctgcgagctcatcaaggagagcgaagtcaaggccctgtgcgctaaggccaggactggaccagtttgcaatgccaccagcc

SEQ ID NO: 650235 - DNA, 100 bp, Homo sapiens
cagaatgttgccaagctgctgataaagctgcctgcctgttgccaaagtatgccgaccctgtgacagacctgctggaccggtgtggggtgttccgggcccg

SEQ ID NO: 650236 - DNA, 50 bp, Homo sapiens
gtgagaagacgtctgtgtcgtgcgtttgctggcctagacctgaactcttc

SEQ ID NO: 650237 - DNA, 90 bp, Homo sapiens
tgcagctccgggacacctggggccgccgaggcaaaggtggagccgccaccaaaatgcagattttcgtgaaaacccttacggggaagacca

SEQ ID NO: 650238 - DNA, 100 bp, Homo sapiens
ctttcagaaagtggctgacatggccaccaacacacgtgagctctgaggaacatgaatacagtgatgaagctcctcaggaagatgagggctttatgggcat

SEQ ID NO: 650239 - DNA, 100 bp, Homo sapiens
gacaaacgtacctgtggtccctggatccagtgctactgctacaaataagagctaccatagaggaggcatactccaggtcaatgacaaaactagcaaaatc

SEQ ID NO: 650240 - DNA, 90 bp, Homo sapiens
ccccgcgcctctcttcgcctcgcctcgggacccgcggtccccgctcttgctgggacaggagagagtggcaagagtacgtttatcaagcag

SEQ ID NO: 650241 - DNA, 51 bp, Homo sapiens
gaattcagcaactgaacagcaacatgtatggtctgctggctgtgtgttggc

SEQ ID NO: 650242 - DNA, 74 bp, Homo sapiens
gatgagtcatgtggcagtggaaaatgcgctcgggctggaccagcagcctcttcgagcactactgctactcccgg

SEQ ID NO: 650243 - DNA, 75 bp, Homo sapiens
cctcaacacgtccctaacttgtgaccacctcctccaccctgaagggtgccatccagctgggcatcggctacaccg

SEQ ID NO: 650244 - DNA, 50 bp, Homo sapiens
ggagcgggaagagttgctgggcaactgaagcagcagcgggacaagctgag

SEQ ID NO: 650245 - DNA, 48 bp, Homo sapiens
gaaagactagatgccgatccaaaaggtcaaaatgcagatcttcgtgaa

SEQ ID NO: 650246 - DNA, 100 bp, Homo sapiens
ccgaaaaggagaacttcttaagaagagtggtatcgatatcctgaagcttgtagcagcccaagtgggaagccagtggaaagatatctatcagtttctttgc

SEQ ID NO: 650247 - DNA, 50 bp, Homo sapiens
atagcccagtggatggccattccagaactcctttaatgtgaaagtttttg

SEQ ID NO: 650248 - DNA, 100 bp, Homo sapiens
gggagagaaatcacttggaaggactttgtcaataactatctttcaaaaggagtagctttgatgacagtagggaaagaaccatttcctaccatttacgtag

SEQ ID NO: 650249 - DNA, 82 bp, Homo sapiens
caacagcaaaagttggcagaggagagacggcggcaggccagattacctgtccctaatactgagcagaagctggtgaatgaaa

SEQ ID NO: 650250 - DNA, 73 bp, Homo sapiens
gcaagtccactcggaagaagttggcagacaagttcatccacgcaggctccatctccattctgggttctgatga

SEQ ID NO: 650251 - DNA, 76 bp, Homo sapiens
ggcgattcggtgaagcgattcctgcaggcgttggttcccctctttgacctgaataatcatgggccagactgggaag

SEQ ID NO: 650252 - DNA, 98 bp, Homo sapiens
gccggccagtgcggcaaccagatcggggccaaggaaagaccacagcaagattctttcattcgtctcctcctagcctgggggaccaggctcgaactgac

SEQ ID NO: 650253 - DNA, 76 bp, Homo sapiens
cctcttcgagtttaaccagcgcgacgagggcgccgccgcggccgccccaggtggacgacatccttggagaaggcag

SEQ ID NO: 650254 - DNA, 100 bp, Homo sapiens
gaggaaattctgaaacaggaaggaggcgttgtcatcaataagcccattgctcaccatctcttaaatcgagtccttcagccaaaccaaggacagaatgcac

SEQ ID NO: 650255 - DNA, 75 bp, Homo sapiens
gtggttgctgttgcttggcctggtgggcccagtcctcggtgcggcgcggccaggagtggctgtaaggtgaagaag

SEQ ID NO: 650256 - DNA, 75 bp, Homo sapiens
cgactgtttacgggagatgctgctcttcccttacgatgactttcaggtgacagagctgaatgaacctctctccaa

SEQ ID NO: 650257 - DNA, 74 bp, Homo sapiens
agacaaggcgcccaccccacagagcaagttttctgaaacgtttgtcgccgtgatcctgaaggcgctgacctacg

SEQ ID NO: 650258 - DNA, 100 bp, Homo sapiens
cggttccccggcccacagtgggggtgtgcaaacccgagagaactggatcttactgtgccgagatcgctcacaatgtttcctccaagaaccgcaaagccat

SEQ ID NO: 650259 - DNA, 100 bp, Homo sapiens
taatgaaaattacaaggtcgttgaacaagagaccatgaaacgtatggtgcaatagccctacttttggtgggaaaaatatacagccattctggtgaagcag

SEQ ID NO: 650260 - DNA, 96 bp, Homo sapiens
cagaaggtctctggagacatcttcagcagactcgcagggcaatgacattaaagtcactgctgagagcactggtgaacatgcctcctcactaccgct

SEQ ID NO: 650261 - DNA, 50 bp, Homo sapiens
ctgagattgagctttttgtaaaggctccttcctcagagaagcttcctgtt

SEQ ID NO: 650262 - DNA, 100 bp, Homo sapiens
ctgcgcgacgaggagcccttgctcaagctagacttcgggctccttgaggatattcagttttgtatgtttgaatatcctctcaccatgttcagcataaagt

SEQ ID NO: 650263 - DNA, 83 bp, Homo sapiens
ccccgagcatcactgtgccctccccacaaagggggatatgagactttctactcggaatatcctgagtgttgcgtggatgtaaa

SEQ ID NO: 650264 - DNA, 95 bp, Homo sapiens
ccagacctgcagggttcgtggataataaactcaagcagcgagtcatccagattctgaaaaagagttccacgtcctcccttatcgagtctttgttc

SEQ ID NO: 650265 - DNA, 98 bp, Homo sapiens
aaacaccaacacaatcaataatggcactcagcagcaagcacagagtatgaccaccactattaacccagcgcagctctgtttgaggcctgctgcagtga

SEQ ID NO: 650266 - DNA, 100 bp, Homo sapiens
gtattgggagatccacagctaagacgccaggacccactggaagcctagaaatggtgctggagaatctggtaaaagcaccattgtgaagcagatgaggatc

SEQ ID NO: 650267 - DNA, 100 bp, Homo sapiens
agtcctaccatgtcagccttcccagtagctgggaccacagagtgaagagaagagccgtcagctggccgagtggttggacgacgccaagcagaagctgcag

SEQ ID NO: 650268 - DNA, 100 bp, Homo sapiens
tagatcatcctgatcccattattaaaagagaggctcaacgagaacctttgacaagagcacgaagtgaagaaatggggaggatcgtaccaggactgccttc

SEQ ID NO: 650269 - DNA, 75 bp, Homo sapiens
ggcggatttcgaagagttgaggaacatctgctcaaattaatgaccatgggggatatgaagaccccagactttgat

SEQ ID NO: 650270 - DNA, 100 bp, Homo sapiens
tctacattgacctgcttcaaaagaacaggaccccgtacgtcactaccactgtctctgctcacagtgccaagctacaaaccactgagtaagcaaaaatcag

SEQ ID NO: 650271 - DNA, 75 bp, Homo sapiens
cgagcgccatgagcaacaaatgcgacgtggtcgtggtggggggcggcatctcagttggattggatgctgctggca

SEQ ID NO: 650272 - DNA, 100 bp, Homo sapiens
cccaagagcagcggaaaatgatccagtcacaggttggacgtgataagtatgagcctgcagctgtttcagaacaaggtgataaaaagggcaaaaagggcaa

SEQ ID NO: 650273 - DNA, 76 bp, Homo sapiens
gttccctccccatggcaagatactacatgaattagcagttcacaaagcacattcgcatataagggcttgttttgaa

SEQ ID NO: 650274 - DNA, 118 bp, Homo sapiens
cgccgcccgccgggcgctctcgcttcagtcagtcgggccgcgccgcgcctcagctctgcccctgccgccttgtcatgactccgaggaatccatggaggtgttcaaacagcactgccaa

SEQ ID NO: 650275 - DNA, 100 bp, Homo sapiens
gaatgactacaatgagtcaccggatgatggagaggtcaatgagacaagagatgggaatgaggtgggaggtggaagaagggagaagaaaggtgagtttgag

SEQ ID NO: 650276 - DNA, 75 bp, Homo sapiens
cccatgcaaaatcttggttgctacagatgcaattggcatgggacttaatttatgccactgccgccaggagccctg

SEQ ID NO: 650277 - DNA, 117 bp, Homo sapiens
attttatggatgtcttcacgtggtctttaccgtttgttggagaaaaagacatatctgaagagatggattaagaatgctttggattaaggattgtggagcacatttcaatcattttag

SEQ ID NO: 650278 - DNA, 75 bp, Homo sapiens
ctgacaacaccgatcacagaccaacaagtgagacaggcattggcaaatccacgttaatggacactttgttcaaca

SEQ ID NO: 650279 - DNA, 101 bp, Homo sapiens
gtcatggcggcagcagccgctctgagggcgcctgctcaggtggaagatggatgcctgaagtgtagactgctgctagctgaataccatctgggagcataaag

SEQ ID NO: 650280 - DNA, 80 bp, Homo sapiens
tcaatgcagtctttagtcgcatttctaccagaaagctctgggtgtgcggcagtaccatgtggcctcagtcctgtgccaac

SEQ ID NO: 650281 - DNA, 82 bp, Homo sapiens
aaaaaaggaggccaaagactttggatgagtatttccgcatgaagctgcagtggaaatctgtgagccctgagcaggagcggag

SEQ ID NO: 650282 - DNA, 123 bp, Homo sapiens
cctcggtgctgtggtgcagagctagttcctctccagctcagccgcgtagccaggcgggcaccacggcaggggctgagctaccctcatggaagggagaggaccgtaccggatctacgaccctgg

SEQ ID NO: 650283 - DNA, 100 bp, Homo sapiens
attgtgatcacaggagatggagatattgatcatgaccaggacctgaaggagaagaaggagaaggtggaggagaaggcaagccggaaagagcgaaagaaag

SEQ ID NO: 650284 - DNA, 90 bp, Homo sapiens
gtactacgtggggcacgtctgcaagtccacagagaagcagtctgtgaagcagcgatacagggctgtgcctgcgcccagaagcagctacac

SEQ ID NO: 650285 - DNA, 100 bp, Homo sapiens
atggacagtctggcaaaagcctctgctctgcctccggggacaagaaactagagcaaataaccgttttgaaatttttatagaccagcaacagttctacctg

SEQ ID NO: 650286 - DNA, 123 bp, Homo sapiens
tcttcgcggagcggcgccgcgtagcttccatccgccagctgccatgagcgagcgcctccgtcccagccttatgatctcctcattgcgtccccctctgcccactggacttggacttcagatctg

SEQ ID NO: 650287 - DNA, 90 bp, Homo sapiens
gagcacaggcttgtccggggagcagtatgccggaagctggttttcaggccacaaatgctttcacaggattactacagcatcccatttccc

SEQ ID NO: 650288 - DNA, 100 bp, Homo sapiens
aactcagatcaaaacctgttactgaaggaactggtgatattattaaggaataagtttgtggagtttgacatgaagccagtctgtaagaagtgctatgaga

SEQ ID NO: 650289 - DNA, 75 bp, Homo sapiens
aagtcctgacagattcagcaacactgcatgactacggggccccccaggaggcgactctcggggccaacaaggtga

SEQ ID NO: 650290 - DNA, 96 bp, Homo sapiens
agacaggcggcgccatcttcgaacttagacttccggaaggactttggcgaggaactggtcatgctgctggagtggtggtcctgcacggagtgtaca

SEQ ID NO: 650291 - DNA, 100 bp, Homo sapiens
acaatcggctctttccaatttggctacaacactggggtcatcaatgctcctgagaagggccatcactgtgcatgtccccatgccctcagcaggagtcgtg

SEQ ID NO: 650292 - DNA, 75 bp, Homo sapiens
tttcggtctgattctgctgtcttgctaaggtatgttgagtctaaaaaggacagagtcacagtagtcttcagcaca

SEQ ID NO: 650293 - DNA, 83 bp, Homo sapiens
cagaaagcaggcgaacccgcggcgcaataacggtcgcgtggggcaggcagtggcgctgcgggccaaggccttcggcttcaacg

SEQ ID NO: 650294 - DNA, 100 bp, Homo sapiens
tgcagaggccaggatgtgggcccagccctgtgccaggaggctggctggaataaaggtcagacatggctgtgatgccacatgctggggtccgggacctggt

SEQ ID NO: 650295 - DNA, 100 bp, Homo sapiens
atggactcatatgcaagattgctgacttcggattggcccgattgatagaagacaatgagtacacagcaagacaaggcatttattaatacagcaaaagaaa

SEQ ID NO: 650296 - DNA, 83 bp, Homo sapiens
ccgcgtttcagccctagggaaggtccctgtgcgttttattgcgacctgccggtgggaactttgtctccgagtcggagcagcat

SEQ ID NO: 650297 - DNA, 100 bp, Homo sapiens
aaaagatgctgctgctaaaggtatccaggaaattgctgactctgtaaaggcctgttacatgaacagaatatggcaaaaatgagactacttacttttatgg

SEQ ID NO: 650298 - DNA, 95 bp, Homo sapiens
actccagcgtgtctccagccgtggagaactacgatgacccgcacaaaacccctgcctccccagttgtccacatcaggggcctgattgacggtgtg

SEQ ID NO: 650299 - DNA, 75 bp, Homo sapiens
aatatgctatgccaagctcagccccgaagtgcttcagatgtagaggtgcttacatgttgcagaagctaattgaag

SEQ ID NO: 650300 - DNA, 100 bp, Homo sapiens
gtatgcagcctccaattattccactcttccctgttgtcaagaaagatatgacatttctacatgaagcttgcagtttgacccagcacctcgtagaggcgag

SEQ ID NO: 650301 - DNA, 74 bp, Homo sapiens
caatggtcacagccaccaacagtatggaagagactctgatgcaaataggaaaatgtttcaacgtgcgcaagagt

SEQ ID NO: 650302 - DNA, 75 bp, Homo sapiens
gcaagatggcgtctgctagtagggtcgttcaggggtatagaacaggctatgcttacaggcatcctctcattcgag

SEQ ID NO: 650303 - DNA, 96 bp, Homo sapiens
ggccgacccgggccggaccgaccccaggcggcgtgcccttccgagaggccccggcgtactccaaccgccggcggcggccccccaacacgctggccg

SEQ ID NO: 650304 - DNA, 116 bp, Homo sapiens
ggtcgcttccggagggactgcaaaagctctcagggatgctggtctggcagtcagatgtgttcagagcaacattgttttgttgacacaagcatttagaagaaagtttgtgattcctg

SEQ ID NO: 650305 - DNA, 51 bp, Homo sapiens
caagccgcggagcctccagacggtttggcaatgaggagcagcagctggcgt

SEQ ID NO: 650306 - DNA, 75 bp, Homo sapiens
tcttctcaaatgccttctcatccccacatacatttcttatactgaagcagtggagatcttaaagcaagcatccca

SEQ ID NO: 650307 - DNA, 110 bp, Homo sapiens
attggcatcatgaaaggcggctcgaagggatactggttcgtccttactgcggaaagcttgtcctggtataaagatgatgaggcttcccagctggcgtgtatgttgtaaag

SEQ ID NO: 650308 - DNA, 50 bp, Homo sapiens
ggaacatcttcttgtctgctgggttttggccaaattgggcgagggcacaa

SEQ ID NO: 650309 - DNA, 129 bp, Homo sapiens
atctgatgtggtgcttttgaaccactggaaagtgaggaattttgaagtacaccgtggtgacattgtatcattggtttgcattaaaatcctcccctactgaaagaaacggaggccaggataactgtagag

SEQ ID NO: 650310 - DNA, 100 bp, Homo sapiens
ctgtggcagcattttttccagaacacaaaagtgatgtcttggcattgcccattttcaagcaggaagattccagccttccattggatggtgaaacagagca

SEQ ID NO: 650311 - DNA, 82 bp, Homo sapiens
tagtcggacctttcccgctggcgcgcagcctcagctagacaatgcagatcttcgtgaagactctgactggtaagaccatcac

SEQ ID NO: 650312 - DNA, 100 bp, Homo sapiens
atcgcttgaacctgggaggcggaggttgtggtgagccaaggtctcctactccctccctccagtactgcgagaactgtgacacccacttccaagattccaa

SEQ ID NO: 650313 - DNA, 100 bp, Homo sapiens
ggcctgggctgtgacgcgcgcgccggagcggggtccgatggttctcgaaggcccgcggcgccccgtgctgcagaatttaacacgtgaactggagaatggg

SEQ ID NO: 650314 - DNA, 100 bp, Homo sapiens
gcagcattttttccagaacacaaaagttactactgaatgcccacagaaaggaagaaacttctctctccctttagacaaagtcgaattcttatcgcagctc

SEQ ID NO: 650315 - DNA, 83 bp, Homo sapiens
tccctgtcaaaataagtatccatttcaggtacaatgactcttcttgcttttcacctaagttgaataagcaccctgtgcacttt

SEQ ID NO: 650316 - DNA, 98 bp, Homo sapiens
ctccggccgcctggctccccatactagtcgccgttggaagatgctggctcaagtagtttagataatctactaagtagatacatctcaggcagtcacct

SEQ ID NO: 650317 - DNA, 96 bp, Homo sapiens
cacgaggatcgtgggagctaagaaggtgtccggtggagagctgtttgaccggatagtggagaaggggttttatacagagaaggatgccagcactct

SEQ ID NO: 650318 - DNA, 48 bp, Homo sapiens
ggactgcgccgcgtcttcctcaagggttacacatcattttggaatgac

SEQ ID NO: 650319 - DNA, 91 bp, Homo sapiens
cgggcagcgtgggtgagcggcgcagcggcggcagcggagagcgagagaggggagcagccctgccaggagcccggaagtgggtccgcacgag

SEQ ID NO: 650320 - DNA, 100 bp, Homo sapiens
gcgctttgagctactgggctgtgagctgaacgcaaaccagtccagctacgggggcccagccagccagcagctgagtgggggttacggaggcggctacggt

SEQ ID NO: 650321 - DNA, 75 bp, Homo sapiens
ggcagagccaagtgcgtcctggaggcttcccccgttgcgaagtggtgaccatcatcaaggggaaggtggaggagg

SEQ ID NO: 650322 - DNA, 100 bp, Homo sapiens
ctgaagggtacatcctctcccaaggtttctgttgcagcagacggtgcccagaaagagggtaaaaataagtcagaagatgcaaagtctgttcattttgaat

SEQ ID NO: 650323 - DNA, 75 bp, Homo sapiens
gggagatcccaggcggtgacagagtggagccatggctagagcaccgcggagacctgggcaatgtccgtgctgatg

SEQ ID NO: 650324 - DNA, 75 bp, Homo sapiens
ggcagctgcaaagttttcttcaaaagagcagtggaagcatgtggagaaactctacaagaatccaatggcaacctt

SEQ ID NO: 650325 - DNA, 83 bp, Homo sapiens
gggttattcgagtgaccgagaccgcggccgggaccgaggtgagacggtttaagcggaagcatcttactgccattgactgccag

SEQ ID NO: 650326 - DNA, 101 bp, Homo sapiens
gtggaaacagcagatgtaccctcagtacgccacctactattacccccagtatctgcaagccaaggaccctgctttctcggctgtgattcacgacaaactcc

SEQ ID NO: 650327 - DNA, 96 bp, Homo sapiens
aatggtccatccagcacccggggggccagcgggtcatcgggcactacgctggagaagatgcaacggtttattacccagaactctttgtctgggtca

SEQ ID NO: 650328 - DNA, 101 bp, Homo sapiens
ggcatattggattacgtagtagaaaccaccaaaccaatttctcctgcaaaccagggtatcagagctggaggaaagcaggaatgttcagaggcaaatgaaga

SEQ ID NO: 650329 - DNA, 82 bp, Homo sapiens
cggcgagacgcgcgtgtgtgagcgcgccggaccaagcgggcccagaagcgggtggagccatcgaagcccccacccacaggct

SEQ ID NO: 650330 - DNA, 51 bp, Homo sapiens
cgatgcctcaatggccaactgcagggtgatctggaccctctggcatctctc

SEQ ID NO: 650331 - DNA, 100 bp, Homo sapiens
cgtgaccgagagcgcgaatatcgtcatcgttagaagtctcatctgtcaaccaggctagagtacagtggcacaatcacagctcactgcagcctgaaactcc

SEQ ID NO: 650332 - DNA, 83 bp, Homo sapiens
caaccctgaagtgcttgatatcacagaggaaactctgcattctcgcttcctggagcacggcagcaatttgataggtatgtctg

SEQ ID NO: 650333 - DNA, 101 bp, Homo sapiens
tggaagttttagcctagctgttctcaaggcggattaattagcccaagaaacattatattcatatgatagcatgtctccaaatcagtggcgttactcgtctc

SEQ ID NO: 650334 - DNA, 80 bp, Homo sapiens
tgttcggggctgtccaaaggacgctagctgttgcacctgttcctccctgcgcgtaaggtttcccctcaaaaaacctataa

SEQ ID NO: 650335 - DNA, 83 bp, Homo sapiens
gcactgctttccactcggctcctgtcgtccgttctctcaggctcccgttcaggcttcagtttcacattcttggtacctcctgg

SEQ ID NO: 650336 - DNA, 98 bp, Homo sapiens
gccgcacctgcgcaacctcgccgtggccatgtgcagccgctacgttgtgaccgagattcccgacgagagagactgaggggaagagaggaaggaggggc

SEQ ID NO: 650337 - DNA, 100 bp, Homo sapiens
ttctagtgttgctttggatcttgtggaaagtcagacatatagcactttctacattgtgggtttaatattatcaatgcagataccttttgtgggattccag

SEQ ID NO: 650338 - DNA, 123 bp, Homo sapiens
aagtaactgaaattaatgaagctcttgcagaaaatccaggacttgtaaacaaatcttgttatgaagatggagcccagtttcctccaattgcagcacaagaccttccttttgttctaaaggctg

SEQ ID NO: 650339 - DNA, 77 bp, Homo sapiens
tcgcagtggtcgcttcttctccttgatttttgatgaaattgagtcatgaaactgtaaccattgaattgaagaacgga

SEQ ID NO: 650340 - DNA, 100 bp, Homo sapiens
atttggggagctgtggagggtgcaggaggaaggcatggactcggagattggctgcctcatccgcttctatgcaggatgatgaacgacagttgtcaaaatc

SEQ ID NO: 650341 - DNA, 99 bp, Homo sapiens
ctcaggaagctcagcaagactggagtccctgatggaattatgcagtttattaaggatattgaggcaacaatgaactcggccctgaatgagctacgggaa

SEQ ID NO: 650342 - DNA, 100 bp, Homo sapiens
gacggccgccaagatggagaagaaggtgtctaagcgctcgcggaaggaggagtgtccacaggatgaaatgtccgagtcaggccagtcctcggcggccgcc

SEQ ID NO: 650343 - DNA, 83 bp, Homo sapiens
tagctgtgctcgcgctactctctctttctggcctggaggctatccagcctcagagtcaagatctccactgaagttggcatcac

SEQ ID NO: 650344 - DNA, 58 bp, Homo sapiens
gatgctgtcctcctggtgttcgccaacaagcaggctgccccctcggtcactctgttcc

SEQ ID NO: 650345 - DNA, 75 bp, Homo sapiens
gcaatcttcaggaaagtaagaggtgaagcctggtgttcggtacagagaattgggaaacattatccagaagcatgc

SEQ ID NO: 650346 - DNA, 98 bp, Homo sapiens
atcccatggtggactacctggtgcctctagtgaaaagaacaagaagtcttaccctcaggtcaaaaaaatatttacaccagcagctccagttcatacca

SEQ ID NO: 650347 - DNA, 82 bp, Homo sapiens
ctactcctccctcaactccctcatcggattttttatcaagcagaaatgcatcgaacaacgagaatcaagatcactgagctaa

SEQ ID NO: 650348 - DNA, 75 bp, Homo sapiens
gcttggaatggtggagtgttctggatggagtttcactcttgtctcccaggctggagtacaatggcatgatctcag

SEQ ID NO: 650349 - DNA, 75 bp, Homo sapiens
tggcctgtcgttggaagagtacaagctgatcctgtccacagatccagacatttaatgtggatgcaccatgccaga

SEQ ID NO: 650350 - DNA, 75 bp, Homo sapiens
cacagggcgacggcggcaggagctcgggaaccgggactgcgagcgggtattagaaaactactcggatgctccaat

SEQ ID NO: 650351 - DNA, 75 bp, Homo sapiens
agccagtttcaaattcatcatttaggacaccctcagcacagggatctcgttctcctcattttttgggggtgtgtg

SEQ ID NO: 650352 - DNA, 76 bp, Homo sapiens
accacctgccgccggttgccggaggccatcgaggaagtgaagaagtcagccctgacaaaggtcagctagccccttg

SEQ ID NO: 650353 - DNA, 101 bp, Homo sapiens
ttgcttggttctacttcctttatcccgattggccgtcggacttatgccagtgcggcggagccgatgccagtatggacagaatagcttatgatgcttatccc

SEQ ID NO: 650354 - DNA, 75 bp, Homo sapiens
attgctggtatttcgaaggactctatccaacctattatatacaacgactgaaagacctttcattcagaagctgtt

SEQ ID NO: 650355 - DNA, 100 bp, Homo sapiens
cgacgcctttggcggtaaattcggcaatggtacagcagttccatgaaagtcatttgcgtgtggttgactgatagattagacctccaactccatatttacc

SEQ ID NO: 650356 - DNA, 50 bp, Homo sapiens
ttcgacgaacactacgagtaccggccagattacctgtccctaatactgag

SEQ ID NO: 650357 - DNA, 83 bp, Homo sapiens
gtttgtgcaggacaccgacatggaacagggactcactgggggtcactgctgaaactcaagagaaagaagacgttatcacacat

SEQ ID NO: 650358 - DNA, 87 bp, Homo sapiens
aaatctggtgtatgttgtcaactatccaaaagacaattgtggcaattaataaagacccagaagctccaattttccaagtggcagatt

SEQ ID NO: 650359 - DNA, 75 bp, Homo sapiens
accagccttagactatttttcaaacacccaaggagctggatccctctgctgtgctccccttagactgtctgcttg

SEQ ID NO: 650360 - DNA, 100 bp, Homo sapiens
gggatctggcctttgagaaggggatcaaaactccagaaatgtgtgaagcttacactctctgctctggtagatgggaagagcattaatgctggaggccaca

SEQ ID NO: 650361 - DNA, 75 bp, Homo sapiens
tgaatggtgtgcatcacattaaggaagagcattaagaagttggttttgaagaaccttaataatagcaatctcttt

SEQ ID NO: 650362 - DNA, 83 bp, Homo sapiens
cttgtatgcctcaatttgctggatttaagcactgctgcactttatgagctggggggtcccgttggtcatcactgtggcagccg

SEQ ID NO: 650363 - DNA, 98 bp, Homo sapiens
aaaaagatgatcctgttgctaatatggaacctgtacaaggagaaaacaagagagactgttggactgtggcatttgctcattatcaaattatagtgatt

SEQ ID NO: 650364 - DNA, 90 bp, Homo sapiens
gccttttccgttgccggtgccggcctagcgtcctggaattacttcaatcaagtgctgttggcagcagcggtctgcacaaaagcaggaaag

SEQ ID NO: 650365 - DNA, 75 bp, Homo sapiens
gaggaagattcttacctctttgatctcgacaataaggtgatgtgtccaatctagatcccaacttctcatttgaag

SEQ ID NO: 650366 - DNA, 76 bp, Homo sapiens
ggtcgagatcgccatgcctacccgtgccctcaccaccaatggcatcaaccctgacaccagtactgagatcggacgt

SEQ ID NO: 650367 - DNA, 75 bp, Homo sapiens
tttgccactgtggtggaggccaagctgataaaacacaagaaggggattgtcaatccctgtgaagacccgatcagc

SEQ ID NO: 650368 - DNA, 98 bp, Homo sapiens
aggctagaggtttcttggaatttgtggaggattttattcaggttcctaggaatctcgttgcacttcagaatccagaggtggtggcccttcgaggtgga

SEQ ID NO: 650369 - DNA, 90 bp, Homo sapiens
gtgtgtctgatctgctgggatcctagagctggaacagcttaaagaaagtggttattgtacaggtcatgaaccagattccctggagttcag

SEQ ID NO: 650370 - DNA, 75 bp, Homo sapiens
attcttaaattgatttcaagtttgaacaagcctgcttgaatttcttgaaactgtgcaaaataaaatattacaatt

SEQ ID NO: 650371 - DNA, 100 bp, Homo sapiens
ggaaacaaggactttgcacagcaccttccagcccaacatttcccagcaagcacctcaaatttgccatgctggctggtggaagagtttgtggtagcagaag

SEQ ID NO: 650372 - DNA, 83 bp, Homo sapiens
cccggctggtgtgacctgtgcggacgagaggtgctgcggcaggcgctgcgctgcactatcagattctgaggaagatgaaccca

SEQ ID NO: 650373 - DNA, 95 bp, Homo sapiens
agagtataagcggatgtacggcaagtcgctgtaccacgacatctcggacgtcttcctcatctgcttctccctcgtcagcccagcctcttatgaga

SEQ ID NO: 650374 - DNA, 100 bp, Homo sapiens
ggacctgagccgcgaggacacgggctgcaacctgcagcacatcagcgaccgggagaacatagacggtgtggccgacgacgatgccctcgctgaggagcgc

SEQ ID NO: 650375 - DNA, 90 bp, Homo sapiens
gcaaggatatgatatcatggaaccagcagcaaagaagtgctatctggaaagagagacttcacagagaatgcagttgtcttgacttcaggt

SEQ ID NO: 650376 - DNA, 75 bp, Homo sapiens
cagagccggtgcggcggccgcgacttccccgacgcggggcgctgagaagcaatataagagttcggaccgcccagc

SEQ ID NO: 650377 - DNA, 100 bp, Homo sapiens
aagccccgcaataggcttaaacaatctggacaaggcatatgtggaacggagtgacagttcatttagattctttgtattcttcttcgtctatatttgtcag

SEQ ID NO: 650378 - DNA, 100 bp, Homo sapiens
ccgaaaccggtcatcgtggacaagcaccgccccgtggaaccggaacgcaggagtggaagctggacacactatgtgacttgtatgaaaccctgaccatcac

SEQ ID NO: 650379 - DNA, 75 bp, Homo sapiens
cggcgctcgctgggctacgcctacatcaacttccagcagcccgcggacgaaactggcgatggaatatgagaggag

SEQ ID NO: 650380 - DNA, 83 bp, Homo sapiens
atcccaatttccagatgccttgttcaacagagatgtaaaacagatgctcttgaagcttgtagaactccggtcaagtaactggg

SEQ ID NO: 650381 - DNA, 82 bp, Homo sapiens
tgaggcctcctcagccatgtggaactgtgactttgacactgaggctggagctgtgtcctcctcagagcccactgtggccaga

SEQ ID NO: 650382 - DNA, 50 bp, Homo sapiens
caggggccactcagagtcgcccgagaaagtcttaccagcaaggggtcctg

SEQ ID NO: 650383 - DNA, 75 bp, Homo sapiens
acgcggctgaccctgatggaggaagtgctcctgctgggcctcaaggaccgcgagtgatgtcttggcattgcccat

SEQ ID NO: 650384 - DNA, 75 bp, Homo sapiens
tgaccccagaggattgggatttctgacagatttgaccagttttgggccatcaatcggaaactcatggaatatcct

SEQ ID NO: 650385 - DNA, 82 bp, Homo sapiens
ccggcgccgtccgtgcccgcgggacctgacagccgggtcagagttacagaatgtctgaaggggacagtgtgggagaatccgt

SEQ ID NO: 650386 - DNA, 83 bp, Homo sapiens
gaagcatttactgagaaatttcttaaaattaattgcaaatatattaccagtggcaagtttttcagaagaagtgaagtcaagat

SEQ ID NO: 650387 - DNA, 100 bp, Homo sapiens
ggttaaccacctgggacggtaaactaccgaagtctgcttctgcttccaaaggagaaccgcagtgaaaggtgcagtagacattgttgcaatcatgatcggc

SEQ ID NO: 650388 - DNA, 50 bp, Homo sapiens
ggagatatggcgcaactgcggcgcggtctccagccacctgcccttcccga

SEQ ID NO: 650389 - DNA, 98 bp, Homo sapiens
atccgatacagcaccaaacaggaggcggccaaggcccaaactgcactgcacatgacttgattattcttagaaatgcacttgacctgcttttgccaaag

SEQ ID NO: 650390 - DNA, 75 bp, Homo sapiens
tccctggatgccctgaagatcagcatccgccagctcaagtggaaggaggttcgccaagcagcttttcagtctctg

SEQ ID NO: 650391 - DNA, 100 bp, Homo sapiens
aaacgatacgccatctgttctgccctggctgcctcagccctaccagcactggtcatgtctaaaggtgcaagaaagcctttgaggtgaaggtgtatgaaag

SEQ ID NO: 650392 - DNA, 88 bp, Homo sapiens
tccggatcgggggcaagcggaaggtgatgcccaagatggaccagcagatataatttctacagtagaatttaatcattctggagaatta

SEQ ID NO: 650393 - DNA, 99 bp, Homo sapiens
tgtgtcaaacatccatatcataagtggaattttggagatattcaaaggagccttcacgtaaatgggtccagtcatgcctcccagtaagaagccagaaag

SEQ ID NO: 650394 - DNA, 75 bp, Homo sapiens
gggctggcatatgctgaatatgtcatctacagaggagaacaggagatcatcacctccatcctgctgagcgggcgg

SEQ ID NO: 650395 - DNA, 82 bp, Homo sapiens
tgcggacagtgaaccggacagtcatcaccatgggccgggatcacattctgattggcctgttcacaatgagcttgcattccag

SEQ ID NO: 650396 - DNA, 98 bp, Homo sapiens
ggcctcccaaagtgctggagttacagatgtgagcctctgtgctcagtccatccttggctgttcaagtgtagagacatggcccatgaacatggacatga

SEQ ID NO: 650397 - DNA, 122 bp, Homo sapiens
ccgatcatggcggatggcccccggtgcaagaggcgcaaacaagccaatcccaggaggaaaaacgattcaaccctatgaaaagataaaggccaggggcttgcctgataatatatcttccgtgt

SEQ ID NO: 650398 - DNA, 100 bp, Homo sapiens
gggcaacgcgctggccggagcagtgaaccagcacggggggtgtttgagaagtcccccctgcgggtgaagaacttcgggatctggctgcgctatgactccc

SEQ ID NO: 650399 - DNA, 100 bp, Homo sapiens
gaggtgcacgaactgcaggcgcggtggttccccagcagaaccactctgcatcgggaggaatcaatgctgctctggggaacatggaggaggacaactggag

SEQ ID NO: 650400 - DNA, 75 bp, Homo sapiens
cgtggatgcctctccctcgcctctgtcaggaagaggatcacctagcccgggtagaagaggcaatcacccgtatgc

SEQ ID NO: 650401 - DNA, 100 bp, Homo sapiens
cactcatttgcaacttatatcgccagtccagcagctaaggatattttgtgcagcgcacgatgggatcgtgattaagatcgaggtacagaccaacgacgag

SEQ ID NO: 650402 - DNA, 51 bp, Homo sapiens
cggaggctgggagccgcggcggcctggggtctaccctgaactgcagatcac

SEQ ID NO: 650403 - DNA, 89 bp, Homo sapiens
taatgcagtaaaacgcttccatatttatccagaggtgtcttcaaaaacaaacatatttaaaagattttacttctcatctccaggaagaa

SEQ ID NO: 650404 - DNA, 100 bp, Homo sapiens
caccacatgatttcatgtttgtgaagaggaatgatccagatggacctcattcagacagaatctattaccttgatgaacagactagccactttgcattgac

SEQ ID NO: 650405 - DNA, 80 bp, Homo sapiens
caacaacaccacaataatccacagccaagatgaaggatttgggggcagagcacttggcaggtcatgaaggggtccaactt

SEQ ID NO: 650406 - DNA, 74 bp, Homo sapiens
ctggtggcctcagtcatcgagagatggccgccctgctcccccaatgaaaggccagcttcgaagaaaagctgaaa

SEQ ID NO: 650407 - DNA, 76 bp, Homo sapiens
cgggaggtgaagttgctgctgttgggatgctgacagacagcaccaagaagtaattgcaatttatcggacacacctt

SEQ ID NO: 650408 - DNA, 98 bp, Homo sapiens
agctcacccactgccagcagagctccgggaagcagtttgttcgctatataaacatgttgataaacgacacgacgtttttgctcgatgaaagtctggag

SEQ ID NO: 650409 - DNA, 82 bp, Homo sapiens
tgattttgaagttattggaagataaaaatggagaggtacagaatttagctgtcaaatgaatctttgaaattgcctggggtct

SEQ ID NO: 650410 - DNA, 100 bp, Homo sapiens
gcgaattggagaaaaagttcagtgggaagcatgtcgtctttatcgctcagctggatgctgacaaatatgagaatgatccagaattagaaaagatccgaag

SEQ ID NO: 650411 - DNA, 75 bp, Homo sapiens
tgattttttgcctttgttgattaactggacaaattcagatccagaagcagcaaggtctagcaattccaaaatcac

SEQ ID NO: 650412 - DNA, 51 bp, Homo sapiens
gtggattgttgggaattggagcaggctggagtgcggtggcgtgatcttggc

SEQ ID NO: 650413 - DNA, 100 bp, Homo sapiens
gttaacttgggagaaagtttcatctgtggatggagtattggctcctatccagcagtttgcagacaaactcagtggctattttgttccttttattgttttt

SEQ ID NO: 650414 - DNA, 50 bp, Homo sapiens
atcactgcagaatcaatcttctacaaggcagtttcagcgtcgaaagtggc

SEQ ID NO: 650415 - DNA, 90 bp, Homo sapiens
cctgtacgggtgcctggcctcgcttctgtcccaaacgcgtatcacaatgtgactgcagagcagctctttttgaaggacattatagaaaaa

SEQ ID NO: 650416 - DNA, 100 bp, Homo sapiens
ttcgtctccagaaccctggacagctcctccaggccgccatggcatcagatgaaggcaaactttttgttggagggctgagttttgacaccaatgagcagtc

SEQ ID NO: 650417 - DNA, 50 bp, Homo sapiens
cacctacttggaactgctcagctagacacctagtgcctctcggaagtccc

SEQ ID NO: 650418 - DNA, 120 bp, Homo sapiens
ggttactaaacatgcagcagaaaatccagggaaatataacattcttggcacaaatactattatggataagatgatggttggccttgccatcaaaccaggaacctcagttgagtatttggc

SEQ ID NO: 650419 - DNA, 140 bp, Homo sapiens
gggagacgaggggctgagagacggcggcggccgaaagcggagagatgctgggcgtggcggccgggatgacccacaggaccctctttgcaagttcagtgcttaacctgaccgaactggctgcccttcggcctgaccttggg

SEQ ID NO: 650420 - DNA, 87 bp, Homo sapiens
tggcggcggcgccatggcagggcttgcaggcaaagatgccttttgatgccaacaaactgtattgcagtgaagtgctggccatattgc

SEQ ID NO: 650421 - DNA, 94 bp, Homo sapiens
aacccagatcgctactaccccgcagttcccggacatgatcctctccgcctctcgagttgctgatcatctgggctgtgatccacaaacccggttc

SEQ ID NO: 650422 - DNA, 98 bp, Homo sapiens
ccccaaccagacccaggactgtgtgcagagttcccggacagattgaagtgctaagaggctttctaggtagtgacctgggagactttatggactatgac

SEQ ID NO: 650423 - DNA, 104 bp, Homo sapiens
cgcggagccgcggcggagccggaggaagctgatggtcatcttttccaaggtggtgaaggaggagatctttgatgacaatgccaagcttccctgcttcaacggcc

SEQ ID NO: 650424 - DNA, 100 bp, Homo sapiens
gcggcgctgcggccacccggcaggaagcaatgcagaatcaggtgaatgttaatccagagagagccaaccctgtgactgaccctgtgagtatggctgctcc

SEQ ID NO: 650425 - DNA, 100 bp, Homo sapiens
gtggagagtgacatgcagttggatggcggtgactgcgtgcgggctacattgagagacctcagctgattcgagcaaaagtgccaattgtgaagttcaggga

SEQ ID NO: 650426 - DNA, 74 bp, Homo sapiens
cgctccatgcccatccgcaaggacgacgaggtccagataaagcatatgatggctttcattgaacaagaagccaa

SEQ ID NO: 650427 - DNA, 108 bp, Homo sapiens
gctgaggcggaggctgacgaggaggcggatcccccggcgtcaggagcgggacggtatgcgggccatcctggggtcctacgacagcgagctgaccccggccgagtactc

SEQ ID NO: 650428 - DNA, 75 bp, Homo sapiens
gcagaactgagcccaggccacagtaccctattcacgctctgtgcttgtgccaagaagtgggagagcgtgaaactc

SEQ ID NO: 650429 - DNA, 100 bp, Homo sapiens
ttaaaagacagtcctcgtcagcactgactttcagctatggaatcgtagaacttcatggaggaacacggagtgacccaaaccgaacatatggctaccatag

SEQ ID NO: 650430 - DNA, 100 bp, Homo sapiens
tttacagtctgttccacatgatcattgtaataagtactatactggcaattgctggagaagattttgcaattgttgcttctgatactcgattgagtgaagg

SEQ ID NO: 650431 - DNA, 75 bp, Homo sapiens
tatcaggaaggaagtgaatagagcttctaaactgcttcccatcgacggtcagtgcgcacgttgtaatcagctgag

SEQ ID NO: 650432 - DNA, 75 bp, Homo sapiens
acagtgttcagcaggtcctgttggagatgatagacagagcgggatgccaccagcttgtccaaagggaagttccag

SEQ ID NO: 650433 - DNA, 75 bp, Homo sapiens
gggaagatcgcaccgcggacgcccgctgagcttggcgcacgggccgaccaggttcgtgctggccgtgggcagcgc

SEQ ID NO: 650434 - DNA, 100 bp, Homo sapiens
gaagattttctgaatatctgcattgaacctgacaccatcagcaaaggagactttataactataggaaaccaatagagccatggcgactccctctgctgcc

SEQ ID NO: 650435 - DNA, 100 bp, Homo sapiens
aaagtaccttcataagttcttcaatatcccatttttgcagcttcaggccgccatggcatcagatgaaggcaaactttttgttggagggctgagttttgac

SEQ ID NO: 650436 - DNA, 90 bp, Homo sapiens
gaacaatcttgaatcatgaagctactaaccagagccggctctttctcggtcctagctggactgctgcaccttggcaatatccagtttgct

SEQ ID NO: 650437 - DNA, 100 bp, Homo sapiens
agaaattgctgctatcatccatcctaatctgcagcagagagagatcatcattgcctgaatttagctttgtgactgcaagagcaagaccagttcctgtctg

SEQ ID NO: 650438 - DNA, 71 bp, Homo sapiens
ttggggtctccgtgggcattgtgatccgtcccaggcagtgttccagtctcatcagattttccatgtcctgg

SEQ ID NO: 650439 - DNA, 100 bp, Homo sapiens
aatgaagacaagtggaagcgactgtctcgacagatagctgacatcatcctcccaatgttagccaaacagcagggcggcgactggcggcgcgatggacctg

SEQ ID NO: 650440 - DNA, 100 bp, Homo sapiens
cgcggccctcaggagcaaggcgggaggtggggaagacagggctccagctaccacaggacgggctctgggtatagccgttccagtcagggacagccgtgga

SEQ ID NO: 650441 - DNA, 74 bp, Homo sapiens
ttaccttcactctgggaaaaggcactgaagttggtattatgactctgtccccctttgatcaaatgaagactgcc

SEQ ID NO: 650442 - DNA, 73 bp, Homo sapiens
cgaacatcttctggacctttgtccagattacgtgtgaaaatgaacttgtgcaaacccaaccccatgctgataa

SEQ ID NO: 650443 - DNA, 75 bp, Homo sapiens
cagtgaaagccctcacaggactcaggttaagagagaagagagtcagcaacagcaagttttactcatagaagctgg

SEQ ID NO: 650444 - DNA, 51 bp, Homo sapiens
ctgcctttttataagacccccagtccagaacacatattacataatggagcc

SEQ ID NO: 650445 - DNA, 75 bp, Homo sapiens
gccgaggaggttgggatcttcttcactgcctctggcatggatgaggtagaaacgttgaagcacaatgatcctttt

SEQ ID NO: 650446 - DNA, 87 bp, Homo sapiens
aaggccgtggaaacaaagggaggaactgtttgtagccctcgtccagacgccccaaacaaacactaatttgacaggacatgctgagaa

SEQ ID NO: 650447 - DNA, 49 bp, Homo sapiens
ggagacgccgccgctgcctcccgcggccgttgctccagggagaactgca

SEQ ID NO: 650448 - DNA, 96 bp, Homo sapiens
ggggccgtggggcttccgcctcgtgggcggcaaggacttcgagcagcctctcgccatttcccgggaggcccagaagattaacaatggctcaagcca

SEQ ID NO: 650449 - DNA, 74 bp, Homo sapiens
aaacatatatcccagatttctgtggcagaagatgatgatgaaagtgtggacatcttcaataaggagctactgct

SEQ ID NO: 650450 - DNA, 100 bp, Homo sapiens
gttgaggagcagatgcacatcctccacatttctgtgatggtttgagtacaagctcagcttcaaaggcccaaggctggcattgcctggggctggaataccc

SEQ ID NO: 650451 - DNA, 100 bp, Homo sapiens
acattctgggtgacacgctgggggtcggcaccttcggcaaagtgaagggtactagcaaaggccagacgtcttactcaacaacttccctgccaccacctcc

SEQ ID NO: 650452 - DNA, 87 bp, Homo sapiens
ggcctgcggctctctacgtccctgcggagcagccgtgtaaacaggaacatcgataagtagtgtaaaaacttgcacaatgaaatccga

SEQ ID NO: 650453 - DNA, 98 bp, Homo sapiens
tgtgcaggaccctaacgacaggcgcctccggcccatttacgcttgctcacttccgacagagaaaaacaaaaggtgacagttcgcattcggagaaaaag

SEQ ID NO: 650454 - DNA, 103 bp, Homo sapiens
tgccctggaggctctgagccccggcggcgcccgggcccacgcggaacgacggggcgagacaatgcagatcttcgtgaagactctgactggtaagaccatcacc

SEQ ID NO: 650455 - DNA, 75 bp, Homo sapiens
cgcggactctccccgcgatgatgccggacacaatgtttgcacgaggactgaagaggaaatgtgttggccacgagg

SEQ ID NO: 650456 - DNA, 88 bp, Homo sapiens
gcggcgtggaagctgtgagcgcccccatcccggaggtctccgccggctcccggatccagaagcagcaaggtctagcaattccaaaatc

SEQ ID NO: 650457 - DNA, 90 bp, Homo sapiens
ccgccaggaaggactcaccgaggcgcaggggctggaggtggtgctggggtgcaccgtccaggtgaggttagagctggggcatcgcgccca

SEQ ID NO: 650458 - DNA, 82 bp, Homo sapiens
tgggcatcctcctgagactccggggtcagacgcccactccaggtcaccctgctgattgccttcatctgtgtgcggagctccc

SEQ ID NO: 650459 - DNA, 96 bp, Homo sapiens
ctatgctgaagtggctggactcccgccccagggcaagtgtccagagaatggctgggatgaaagtacacttgaactctttttacatgaacttgcaat

SEQ ID NO: 650460 - DNA, 75 bp, Homo sapiens
tttccgatttaaagctgagctgcgaggaaaatggcggcgggagcctcccgcgacgatgcccctcaacgttagctt

SEQ ID NO: 650461 - DNA, 99 bp, Homo sapiens
gatccctgcgcgggctcgagagctcgccccgaacgggggtcttcctcctccgccgttgacaggtgattgcccacagtgagtatcaaaagtccaaaagaa

SEQ ID NO: 650462 - DNA, 101 bp, Homo sapiens
aaaaaacagcagatggctcgagaatacagagagaaaattgagacggagctaagagatatctgcaatgatgtactgggcttgataacctctgaaaatgagaa

SEQ ID NO: 650463 - DNA, 97 bp, Homo sapiens
cacgtgcagacatctacaaccttcgatctcctgacgagtccccttcccctgagcccatctacaatagcgaggggaagcggcttaacacccgagagtt

SEQ ID NO: 650464 - DNA, 74 bp, Homo sapiens
ggaggatgatttcatgtgcgatgatgaggaggactacgacctggtgatgcaggttctgaatgctgatgccattg

SEQ ID NO: 650465 - DNA, 96 bp, Homo sapiens
cgaagaaccttttccctaatacgtacctcattgtgggagaaacgatactggagtatttgtgtcagacattgtcaaaggaggaattgcagatgccga

SEQ ID NO: 650466 - DNA, 75 bp, Homo sapiens
gcatcaagtacatcgggatgaggaatgagcaagcggttgatgaaaaaaccgtaggagaacctggttggctttatg

SEQ ID NO: 650467 - DNA, 82 bp, Homo sapiens
accgcagccttgggcctcgcgccggctatggccgtgccctggggctgagccctcagctcccgaaaagcccgtgaaacaagag

SEQ ID NO: 650468 - DNA, 100 bp, Homo sapiens
agactctggaatagttcctcatttggttcctctgctcagccaccaggaagttaaagttcaggtgatgctgggaggttcctggttacagacactggaggct

SEQ ID NO: 650469 - DNA, 90 bp, Homo sapiens
tgctgctattctccgagcttcgcaatggatctcgaggacctggaagaagcagaggagccagacatggaggaagacgatgatcagaaagct

SEQ ID NO: 650470 - DNA, 90 bp, Homo sapiens
ggacaaagggaaaaatgctgaagtgctgtactcgatcgagtcagggtggaagatgtctatggatgtgacattcctggggacgggtgcagc

SEQ ID NO: 650471 - DNA, 98 bp, Homo sapiens
gaacttgtgccacagaactacaaaagaatcttcaagagggagacatagggaaaaggaagacataaaaatcactaaggaaagaactccagaaagtgaag

SEQ ID NO: 650472 - DNA, 100 bp, Homo sapiens
cacaagtcccgaccaagtctccaggtatggctgatggcaagcattgtacttttccacatctgcctggcaaaacctttgtctataatgcttctgaagatag

SEQ ID NO: 650473 - DNA, 100 bp, Homo sapiens
gaagggaaaggcactggaagtggctgagtacctgaccccggtcctcaaggaactgtggaaggtgcatcagtgaagaaatggaccaatgtgtataatcatg

SEQ ID NO: 650474 - DNA, 75 bp, Homo sapiens
ctgggctgcggcgcacgccttgcccgcccaggtactccaaagattcaggtttactcacgtcatccagcagagaat

SEQ ID NO: 650475 - DNA, 98 bp, Homo sapiens
aagacataagaaacgttattctggaggttaatgaagacatgctgagtgaggctttaattcaggaaggatctgagtctctccctgcggagacagccctg

SEQ ID NO: 650476 - DNA, 75 bp, Homo sapiens
gccgccccccactccgcctccgggagagaatccattccaatatatggccatgtggctctttggagcaatgttcca

SEQ ID NO: 650477 - DNA, 83 bp, Homo sapiens
aaatggggatctgtgactcatcagagtgtgggggttgtgaaagatcaggatcctcatgaccagccaaagagaagaagaattag

SEQ ID NO: 650478 - DNA, 75 bp, Homo sapiens
tgtgggagacacgccaaagctcccaagccagagactgctgctactttgaaacgtacgatagaggccctgatggac

SEQ ID NO: 650479 - DNA, 75 bp, Homo sapiens
aagaaggacgtgctgacccgcctgaagcacctgcgggcgctgctggatgatcacagtcgtgttaaactgcaaaat

SEQ ID NO: 650480 - DNA, 75 bp, Homo sapiens
ctcagctggtggtgattgcacacgacgtggatcccatcgaggctcatgtttcagtcgtttggcagctagaggaga

SEQ ID NO: 650481 - DNA, 90 bp, Homo sapiens
caagtcctgcgcttggggatcctctgtacgcccgttcactgctgccattaggccgacagtgtgtggagcattatcgcttgcttcatcgat

SEQ ID NO: 650482 - DNA, 75 bp, Homo sapiens
gacagacttatgctggaactgggttttagcaagagtgagcctcgcagctggtccctgctagagcagctgggcctg

SEQ ID NO: 650483 - DNA, 100 bp, Homo sapiens
agattaaaaagtatggagctgctatggtggtcatggcttttgatgaagaaggacaggtcatgaaacgagtgcgtaccgagcagattcagatggcagtgtc

SEQ ID NO: 650484 - DNA, 74 bp, Homo sapiens
aaccacactgcttcgatcctggacaggatgcaggcagattctcctaaagagcccgaacagctgaggaagctctt

SEQ ID NO: 650485 - DNA, 100 bp, Homo sapiens
gagaagggattgcccagtcagcaaaggttcagccctccaagttatttcaagtaccattggaagaggaaggacaacgtggtggacctatccttgcaccaga

SEQ ID NO: 650486 - DNA, 90 bp, Homo sapiens
tgtagaggatgacttctctaatcagttacgcagcagcagttgcaagctcagcatctttctcatggccacggacccccagttccccttacg

SEQ ID NO: 650487 - DNA, 98 bp, Homo sapiens
aaaaggtgtacttgcaagaaacctcaggacttgagtaacagcaacatgagaaagcaattgagctgcgtctggcaaaaattgaccatactgcaattcac

SEQ ID NO: 650488 - DNA, 75 bp, Homo sapiens
ggaacatcttgccaatttcaaatcgggaattgtgagcatatcagcatcaagtaccactggtgtggcaatgcacac

SEQ ID NO: 650489 - DNA, 101 bp, Homo sapiens
ccaagatctgtgctgaccacaggaattggatctactagtgcaggatctagtgaaaagccatttgatgtatgcggtcagagaagaagtggaggtcctcaaag

SEQ ID NO: 650490 - DNA, 98 bp, Homo sapiens
cgccgccaagagtgagcgagcggacccgcgatggaacctgcacttgttgccaagtcttccatcttactagatgtgaaaccttgggatgatgagacaga

SEQ ID NO: 650491 - DNA, 100 bp, Homo sapiens
gtctgctcggagatcatttgggagatccaagagattcagtatcactcgctcccttgatgatcttgagggtgaaaatgggatggaggattgtgtcatggcc

SEQ ID NO: 650492 - DNA, 90 bp, Homo sapiens
cggacagacagagtgcactgccgggtgctgcctgaccatgcctggagactggaccgcagactttgagaatcactacaagaaaaactcctt

SEQ ID NO: 650493 - DNA, 100 bp, Homo sapiens
tgttcagtcaggtggggccggtgaagcagtgcttcgtggtgactgaaaaagggagaagaagtgggtgactgtgggtgacacgtccctgaggatatttaag

SEQ ID NO: 650494 - DNA, 100 bp, Homo sapiens
ccggacatgaagcgctacctgtgggagcgctaccgggaggcgaagagaagcacagaagggaagaaccccacagacgaatacctggagggcatgatgagcg

SEQ ID NO: 650495 - DNA, 100 bp, Homo sapiens
aagcgcctcaagatggccgaggaagaccggaaggccatggtgaatcacaagcctttgagaacagcctgagccttcagccctcacagatgcccagcctcat

SEQ ID NO: 650496 - DNA, 50 bp, Homo sapiens
ccggagccaaggtccgctcgggtggacgacatccttggagaaggcagcga

SEQ ID NO: 650497 - DNA, 82 bp, Homo sapiens
ggagcagttccatcagctcagccaggtcttcaaatggagctgctcctggtgaacaagctcaagtggaacctggccgcaatga

SEQ ID NO: 650498 - DNA, 76 bp, Homo sapiens
gaacagtctttggcagccttatcattggttatgccagacgagatgatgcctattggccagaaggaaagcgtgtggc

SEQ ID NO: 650499 - DNA, 75 bp, Homo sapiens
ggaacccgaagaagaaaggattcgttacagccagagattgctggtaggtgagtgctgtcctcggctcactttcct

SEQ ID NO: 650500 - DNA, 100 bp, Homo sapiens
ctgcctcactgagcaaccaagatgccggtggtggtgtgcacattgagccccggtatagacagttcccccagctgaccagatcccaggtgttccagagcga

SEQ ID NO: 650501 - DNA, 148 bp, Homo sapiens
ccggccgccacttgcgcctctccagcctccgcaggcccaaccgccgccagcaccatggccagcaccatttccggacttgggaccctggaggactgacgctgctggcctgggcgtccccttccgctgagccatggcgactcccgacgtg

SEQ ID NO: 650502 - DNA, 75 bp, Homo sapiens
tggatgtggaagaaagtgatgaggttcttcacacacccccattcggcgtagtacccagagagctcaagatgtgtg

SEQ ID NO: 650503 - DNA, 73 bp, Homo sapiens
agaagctgcggccgcacctggccaagaattcctccacgtactgggaaggcaaagcagatatggagactctcca

SEQ ID NO: 650504 - DNA, 90 bp, Homo sapiens
acagagggtgagacagaagtgaagaaagatgaggccggagaaaactattccaatatcccttttactattcagcgactatgtgaattgtta

SEQ ID NO: 650505 - DNA, 116 bp, Homo sapiens
gcggatccccaagcccgccacgccgcccagcccggccccgcccgcgccggaagagccacgccggtgctggagaatctggtaaaagcaccattgtgaagcagatgaggatcctgcat

SEQ ID NO: 650506 - DNA, 98 bp, Homo sapiens
tgcctaccaattctgctcaggaatgtcagaatctggagaattggcagagggggtcgatttgggaggaaaggtgtggctataaactttgttactgaaga

SEQ ID NO: 650507 - DNA, 74 bp, Homo sapiens
gagtaaagctgctggacaacaccatggaaatatttgacattgagatgtggaattagaagaagctattagaagaa

SEQ ID NO: 650508 - DNA, 119 bp, Homo sapiens
tccggacagccgcgcgctgagggtctcggggcgggcgccgcgggacctctccgggccatggctacgagttccagggagctctgtcctggtgaccgtgcccgggttatgacgactaatcc

SEQ ID NO: 650509 - DNA, 90 bp, Homo sapiens
ctctgagtcaccaacctgaggctgccccggccgcctgcgcacccggcagcaccatgacaggtgattttacaacgagatgctgctctccat

SEQ ID NO: 650510 - DNA, 75 bp, Homo sapiens
cactggctgccttggtgacatacaaaggaagggaggtagtatcttccccagcagatgttgctgaaaaagctgaca

SEQ ID NO: 650511 - DNA, 101 bp, Homo sapiens
ccccaagaagaccattcagatgggatctttccggatcaatccagatggcagccagtcagtggtggagctgcagcagaaggccgtggctagtgagatcttca

SEQ ID NO: 650512 - DNA, 83 bp, Homo sapiens
ctgaatgttgtgaccactaatttggtgaaatgacaatggatgctctgttggctcgattgaaacttctgaatccagatgacctt

SEQ ID NO: 650513 - DNA, 75 bp, Homo sapiens
caagctgaagaaaacctgtttaaactcattgtcaatttaccaaacgagaaccagaagatacgaaaagtgcagatt

SEQ ID NO: 650514 - DNA, 98 bp, Homo sapiens
tgttccccaaacaagtgctcctacattctggtgcaggccactgtcgtggggctcttggctgctgtggctgcgctgctgttgggcgtggtgtctcgaga

SEQ ID NO: 650515 - DNA, 100 bp, Homo sapiens
aaataccatgtccttcatatcaacactaccaaaaataatccagtgatgtcattgcaagatcagttcacagaagaaaagcttggccaggctgagaagacag

SEQ ID NO: 650516 - DNA, 98 bp, Homo sapiens
gaggttcctagagttgttcagaatcctccaaaaccagtcatgaccactagacccacagctgttaaagcaacagtttatgtgaagaaccagctcagtgg

SEQ ID NO: 650517 - DNA, 87 bp, Homo sapiens
ggggatcccggcaagtaacatgactaaaaagaagcgggagaatctgggcgtcgctctagaggtagcacaggcggagtgcagcggagg

SEQ ID NO: 650518 - DNA, 74 bp, Homo sapiens
aggaacttcagtctataataaagagatgtgaataagacgagttggaagaagacctgatcaacaacttcagggtg

SEQ ID NO: 650519 - DNA, 100 bp, Homo sapiens
tcattgctcatatagaagacccagaggacactaaccaagagccaatggccaaaggccctgccaagaattcagaaccagaggaggtcatcccatcccggct

SEQ ID NO: 650520 - DNA, 90 bp, Homo sapiens
ggacggcctgcgtggggggccgccaccggccgccgccgccgccgcccaggcgcagattgaagatggatacgtgacaatcccagggaccgc

SEQ ID NO: 650521 - DNA, 101 bp, Homo sapiens
tggtcaagttggcagaggcaactagaactaacattggaattcagggaccgcagatgttcatggactgcagcccacaggccctgcccatcgcatcagaggac

SEQ ID NO: 650522 - DNA, 75 bp, Homo sapiens
gccagagcctcagcaggagcctgttctcatcaccatggcaacaggatctcaaagatttcatgagacaagctgggg

SEQ ID NO: 650523 - DNA, 147 bp, Homo sapiens
gcactatgctaccctctactttgtattttgtgtggattcctcagagagtgaacttggaatcttggacctcatccagaacaaattgcctccctgagtcggaccagctgcccgtggatcctacgctgcagtcacaccagactcctcatg

SEQ ID NO: 650524 - DNA, 100 bp, Homo sapiens
aacagaagattttggtgggagtctcacctatgatcacatggactggttaaataagaggctggtgttggtgtctgtccagtcccttatattagtagctgag

SEQ ID NO: 650525 - DNA, 101 bp, Homo sapiens
aagaggaggatgcggctcgtggtggatggcatggggcgctttggcaggttctgacagggagacaacagcaaatacaagagaagattgagcagaaccgacgg

SEQ ID NO: 650526 - DNA, 90 bp, Homo sapiens
atcccgattcccctggcgcggactctggcaccaacaaaactatctctttgaggcaccatggctgaggaaacagctccagcagttcttgag

SEQ ID NO: 650527 - DNA, 98 bp, Homo sapiens
tgacagagatagaaacaacacaaggacccatcagcagacgaatggatgatcaaaacgtgggatggcaccacagatgtgacgcggacaatgcattttgg

SEQ ID NO: 650528 - DNA, 100 bp, Homo sapiens
ctcccccatctacctgtcgtttgtcatgcttttggctgccctgagctggcagtacctgaccactctctcccagcccacacatcttgctgacttcactcaa

SEQ ID NO: 650529 - DNA, 82 bp, Homo sapiens
ggagcggagacctggacgccctggacaagcagcacaggcttgaagtagaaaatgccatgatgagaaaaactattaaaaaaca

SEQ ID NO: 650530 - DNA, 100 bp, Homo sapiens
cccagatatacgagctggtggcacagactgtgtcggagcggaaaaagtgattaggaagaagcttgttcgtaaaacgctggacatgatcaagaagattgct

SEQ ID NO: 650531 - DNA, 49 bp, Homo sapiens
ctagttcccgacttgtttctcagaaccatatttatttagagtcagaatg

SEQ ID NO: 650532 - DNA, 100 bp, Homo sapiens
cagaaacagagcatcatccgcctgcagagcctgtgtcgggggcacctgcagcgcaagaggtggacccaagtggagagattgtggaactggcgaaaggtgc

SEQ ID NO: 650533 - DNA, 51 bp, Homo sapiens
agatggggccgaatataacatagaggactttgtgttttatgccccacgtct

SEQ ID NO: 650534 - DNA, 100 bp, Homo sapiens
tttacctcgctgaccctatgaagctgcaagctttcttcctggtggcagatgacatcatggattcatcccttacccgccggggacagatctgctggtatca

SEQ ID NO: 650535 - DNA, 100 bp, Homo sapiens
gatgcagagagagcgatcaacacgctgaacggcttgaggctccagtcaaaaaccattaagagtgtgtggcaggccccaacatcgccgccatcgtcggggg

SEQ ID NO: 650536 - DNA, 75 bp, Homo sapiens
tttgttcctggggctgagtgccctcgcatgatgccttcttctgtagagtgggcgctttgcagaatacgtgttgaa

SEQ ID NO: 650537 - DNA, 75 bp, Homo sapiens
agggacctggtggaccgactgaaggtttgcatcactggttgctgtttatgttgttggggggttcctataccagcg

SEQ ID NO: 650538 - DNA, 141 bp, Homo sapiens
gaatcacgccctggagttgctggtgatccgcaattacggccccgaggtgtgggaagacatcaaagcattggggagtcagcaatgtccgttgtgttaaatcagctgctgcccatgattaagcctgtaacccagagaaccaac

SEQ ID NO: 650539 - DNA, 50 bp, Homo sapiens
ccgggcggggcgagggcagctccgagtctcgctgtgtcacccaggctgga

SEQ ID NO: 650540 - DNA, 136 bp, Homo sapiens
atgctgccatttccactgcagaccacaggataaaaggaccgcttcaccgtggcccaggatacccttttaagtaggagctcatgaggcaacccacacaggcaggctggagaggagtggcaagaagctcaccttcgga

SEQ ID NO: 650541 - DNA, 89 bp, Homo sapiens
acaagtgtaatgaaattatcaactggcttgataagaatcagccaaatttgtatcctactgtggggcttcaaacaccaggagaagtggtc

SEQ ID NO: 650542 - DNA, 100 bp, Homo sapiens
ctaactcagcagcaacttaatggaaactaggtagtgggcagcagtcagtgacaggtgtaacctctgtggatgacagcaacagttactggaggatacgggg

SEQ ID NO: 650543 - DNA, 78 bp, Homo sapiens
gagtggttgtgtggtcgcgtctcggaaaccggtagcgcttgcagcatggctggcgcccatgcggctctacacgctctc

SEQ ID NO: 650544 - DNA, 75 bp, Homo sapiens
gtgaaaaaaggtggaaagacttgaagaacagagttgttgaacatgtgattgacatctctatgatccttgcagaag

SEQ ID NO: 650545 - DNA, 100 bp, Homo sapiens
cgcctgtgtggggcccaccctccgatagttttgaggcagctgtgccatcaaatagccacattgtttcggaacctggaaagaatgtcacactcacttgtca

SEQ ID NO: 650546 - DNA, 100 bp, Homo sapiens
aatccccccctgaatcagaaaataaggagcagctcgaggccaggagggaaaatagttctgcttgcaggatgggcattgttcttattccttgcatataaag

SEQ ID NO: 650547 - DNA, 76 bp, Homo sapiens
ctggatcagaagacattcagcattatggctgagagctagcaaggaaaactcaggaccatgatggctcagtttccca

SEQ ID NO: 650548 - DNA, 74 bp, Homo sapiens
atacatgagacagcagccaaacccccagatggtcctggtgctgcccaggaacccacgtggctcacagatgtccc

SEQ ID NO: 650549 - DNA, 75 bp, Homo sapiens
tttcacaaaggccttcacaacaggagaggagacgccgtgagcgggacgaccagatgtaccgagagcggctgcgca

SEQ ID NO: 650550 - DNA, 90 bp, Homo sapiens
ggacgcaggggacgaggacgaggagtcggaggagccgcgggcggcgcggcccagctcgttccagcaggtcaatggccagcaaggaggggg

SEQ ID NO: 650551 - DNA, 90 bp, Homo sapiens
cggcgagcccggtccccgccggcaccatggccagcggagcctgcaccaccgtggagacaacctggagaccctggtcctcctgaacccatc

SEQ ID NO: 650552 - DNA, 50 bp, Homo sapiens
tgggaccacatcagtaattattcttgctgagatgccgcggcagtttccca

SEQ ID NO: 650553 - DNA, 90 bp, Homo sapiens
gctacgcgccgtggacacagacggggtggagcccatggaatcggtcctggaggacaggtcctcagccagcagagccacgttccttatgag

SEQ ID NO: 650554 - DNA, 99 bp, Homo sapiens
ctccggtccggcccgccgccgcacccaggacggaggctgcatgcccgaggaccaggccggcgcagccatgatgtgtcttgctgaatcagggctctctta

SEQ ID NO: 650555 - DNA, 75 bp, Homo sapiens
gagacggagccggacccgccgcctcccgggtctctctgaagaggctatcatggagctgaacctgccgactggtat

SEQ ID NO: 650556 - DNA, 54 bp, Homo sapiens
gacacagaaacgtgtgtacagttgatgatgcgtctgaagaaacatcgctggtat

SEQ ID NO: 650557 - DNA, 97 bp, Homo sapiens
gtgctccgtcgcccttgcctccagacctcacattccaatcagcaaattagttgtttcagaatcctatgatacttatatcagtagaagtttccaagta

SEQ ID NO: 650558 - DNA, 82 bp, Homo sapiens
acagttttggagaaggagatgcgtagtcttggtgttgacatggacgataaagacgatggccacaggagaatggtatgctgct

SEQ ID NO: 650559 - DNA, 90 bp, Homo sapiens
cccttggagcggcttttgtctacttggctgacctcctgatgcctcacttggaagccattaatttgctagaaccaatgacaaacgaccccg

SEQ ID NO: 650560 - DNA, 95 bp, Homo sapiens
atgaagtgcagaggtttttttctgttgtcgagatgtccacagaaggaggatttggtggtactagcagcagtgatgcccagcaaagcctacagtcg

SEQ ID NO: 650561 - DNA, 50 bp, Homo sapiens
tcagctctctgttttggaaaatggaaatgaagaagcagtacgacgtctca

SEQ ID NO: 650562 - DNA, 96 bp, Homo sapiens
gaactacaggaacctgctttctctcgatgaggataacatccctccagaagatggagattcaataagtgtaattggcagaaacaacagcaacaactt

SEQ ID NO: 650563 - DNA, 75 bp, Homo sapiens
tagatattaataccttacaagaggctatgtatgtcaaaaaggatgttcctttgtggcaaaaacatggacggaact

SEQ ID NO: 650564 - DNA, 76 bp, Homo sapiens
aaggatatgctgtattcagctcaggaccaggcaccttctgtggaaggttcagcagctccacagaacagagcagtgc

SEQ ID NO: 650565 - DNA, 82 bp, Homo sapiens
cgcgtcccctccagtccgctccgggcagacttcctagcatgggctgttgtgctggagagaacgagagctacgaagagactac

SEQ ID NO: 650566 - DNA, 75 bp, Homo sapiens
cacgaggcggcgggctggagacatggaccgcggcgagcaagcacatacccccggcctcatgagtacctgtcccca

SEQ ID NO: 650567 - DNA, 90 bp, Homo sapiens
tgttacttgaaaaggaagccaacgtagacactgttgacatcctaggatgcacagctttacacagagggaccctggtgggcagcagtggga

SEQ ID NO: 650568 - DNA, 131 bp, Homo sapiens
tacctgcggcccggctctcctccgcgcccccactcgcgctgcgatgacgcgctcactgttcaagggaaacttttgggttccggagtctcaccactgcatttttcagagacgccatgggcttcttattaatg

SEQ ID NO: 650569 - DNA, 100 bp, Homo sapiens
ttccaggcacgttaccggcagctggatgtggtggatacccaccctggtctcacgttcctgaaagatgctccagaattccactcccgctacatcaccacgg

SEQ ID NO: 650570 - DNA, 99 bp, Homo sapiens
aaaattccacaccctcttgtgccttttgatggacctgaagtggcacgaagaagtgactgcatacagagatgaagttgaggaagtgggagctagagctca

SEQ ID NO: 650571 - DNA, 100 bp, Homo sapiens
ctcctgctctgcagcttctgttcagggccgttgctccagggagaactgcaaatatcttcatccacccccacatttaaaaacgcagttggagataaatgga

SEQ ID NO: 650572 - DNA, 100 bp, Homo sapiens
tgatgagcaagctgttttatatttaatccaggtttctgcttggagaggaagaaggtagaggagccagcgaagattcatgatgttgctatcaaaagttgag

SEQ ID NO: 650573 - DNA, 83 bp, Homo sapiens
cattcacttctagacgacaaaatgcaaaaaaggaggccaaagacttttcatcaagagttcatataactagagctgtcctggag

SEQ ID NO: 650574 - DNA, 100 bp, Homo sapiens
cactagcaatcccagctaaccatggagttatgggccagcaggagaaacactcagtggctctaactaactacacctttgaaaatgtgagctttcatgttct

SEQ ID NO: 650575 - DNA, 130 bp, Homo sapiens
gcttaggaatccgggcttttgctgatatgcatgcatgtaccgaccttctgaacaaggccaacacctatgcagtttgtggggacattcatggacaattctttgatttgatgaagctctttgaagtcggggg

SEQ ID NO: 650576 - DNA, 83 bp, Homo sapiens
ctgggccgtgtttggactcctgcctcgcgtttagtgggctacagatggcatggcatctaaaaccttacaatgcttgattttca

SEQ ID NO: 650577 - DNA, 90 bp, Homo sapiens
gattccagagagcggcggaaaggataagcctcgacttagaagctaccgagttaccctaagaaaggtgatgacacaatgactggtgatggg

SEQ ID NO: 650578 - DNA, 74 bp, Homo sapiens
aggtctcagagctttacgatgtcacttgggaaggaagaagccatggatttaataaatagagaaacaatgtctga

SEQ ID NO: 650579 - DNA, 82 bp, Homo sapiens
aaaaacactctacctaatcatggaatatgcaagtggaggatgcacaggaacaaacgagggaatatgcctcctatggaacatg

SEQ ID NO: 650580 - DNA, 82 bp, Homo sapiens
ggtctttctcaacctcatcttctggcgggctgacgcacgaggcacacaggaaggaggtggagcaggtgtatctgcgctgtgc

SEQ ID NO: 650581 - DNA, 145 bp, Homo sapiens
gtagaagtggaagaagtagttataaaagcaaacacaggattcaccacagtacttcacatcgtcgttcacatgggaccctgactaaagcttgaaatgctacatttccaaggtgaagatgtgtgggcacatgttatggcagattgaa

SEQ ID NO: 650582 - DNA, 100 bp, Homo sapiens
tgcgcgggcccgaggccggaggaacccggactccggcgtagcggttaaacccatccagagtaatggctgcggccttacccaggaccctgggggagttgca

SEQ ID NO: 650583 - DNA, 100 bp, Homo sapiens
gccacagtccgcagggatgaacctcgagttgctggctcttgttcagcttctggaatttctgagcagccctcgtcagtacaagatggaccccgtagtcttg

SEQ ID NO: 650584 - DNA, 83 bp, Homo sapiens
tggagcttaaaaagctgcacgcaagtgttaaacttctggtacaatgactcttcttgcttttcacctaagttgaataagcaccc

SEQ ID NO: 650585 - DNA, 100 bp, Homo sapiens
caaacatgttttatcaatgcagctaaggaattactcaaggtgatgaggacaattgatgacagaatagtacatgaattaaacactacggttccaacagctt

SEQ ID NO: 650586 - DNA, 76 bp, Homo sapiens
atactactttttccagaattcatacaaagagtagattccagacattctaaatgcaagtaatctgaaaacatttagg

SEQ ID NO: 650587 - DNA, 73 bp, Homo sapiens
tgtgcaggacaccgacatggaacagggactcactggggatccaagaaaacattcttggccaaaatctagggga

SEQ ID NO: 650588 - DNA, 75 bp, Homo sapiens
aagcggagagagtcagcctctggttcagactgcagtaaccactagaaaccagtgcctgaaagaaactccaattaa

SEQ ID NO: 650589 - DNA, 98 bp, Homo sapiens
tgggcactggcaggggccgcgctctgctgcttcctcgtcctagtgatccacgcgcagttcctcaaagaaggtgaaaggtgtagcagtcactcggccta

SEQ ID NO: 650590 - DNA, 100 bp, Homo sapiens
ctcgaggacaggcagatggctttggattagacattcttccaaaactgaaagatgtcaagagcagtaacttcagaggacgaggaaacaatcgtggctacaa

SEQ ID NO: 650591 - DNA, 101 bp, Homo sapiens
gcggcggggcgggggggggcgccccgatgagccccgagtgcgaggagccgccgccccccctcgcaggagacagggtctggctatgttgcccaggttggagt

SEQ ID NO: 650592 - DNA, 76 bp, Homo sapiens
tgggaaccagtctttcaaaattggctttgaagcgtatgttgaatttcaatgtgcctcatattaaaaacagcacagg

SEQ ID NO: 650593 - DNA, 75 bp, Homo sapiens
tctgactctcggactgagaaacgcaagaaattttactgcaggataaaactccaggataaaactgtcaagtgccgg

SEQ ID NO: 650594 - DNA, 75 bp, Homo sapiens
tcgatcctgagaccaattccgacgcgccccatcatctccatctgctggggtcaccgggattcgaggctgttgatg

SEQ ID NO: 650595 - DNA, 95 bp, Homo sapiens
ggccaacatcgcggtgcagcgaatcaagcgggagttcaaggaggtgctgaagagcgaggagagcatctgctgcacccaagcctgagccggttcct

SEQ ID NO: 650596 - DNA, 83 bp, Homo sapiens
cgaccaccgtcagcactcagcgcgggccggtttacccaaggtccagcctagcccctaggcaccatgtcggacagtgatctagg

SEQ ID NO: 650597 - DNA, 95 bp, Homo sapiens
agggaggaactgtttgtagccctcgtccagacgccccaaacaaacagtttcagtgttgactggtgggctcttggagtgctcatgtttgagatgat

SEQ ID NO: 650598 - DNA, 98 bp, Homo sapiens
cgccgagctgcacgtcctcgaacgcgaggccaacagccccggttttataggatcacattgacaaaagtaccatggagttttatgagtcagcatatttt

SEQ ID NO: 650599 - DNA, 75 bp, Homo sapiens
cgcagtggtcgcttcttctccttgaccatagcccagtggcgtaaagctggctaccaggacatgcccgagtatgaa

SEQ ID NO: 650600 - DNA, 74 bp, Homo sapiens
aagtactcaagatgaatttgaggttttcctttggaatatggataaatacaccatgatacggaaactagaaggac

SEQ ID NO: 650601 - DNA, 100 bp, Homo sapiens
tttgtggattgttatctgtggggaaaactgcaattttggagcagctcctttatggaaatcatactattgagccccagtttgagggacagcgggatatcca

SEQ ID NO: 650602 - DNA, 82 bp, Homo sapiens
caccatgccgctcctaagcctgcacagccgcggcggcagcagcagtgagagagtgcgctagatgttggaccgagtatggaat

SEQ ID NO: 650603 - DNA, 100 bp, Homo sapiens
ctgggctccggggacactttgcgttcgggctgggagcgtgctttccacgacggtgacacgcttccctggattggtgacaaagcataaatcatggacacca

SEQ ID NO: 650604 - DNA, 90 bp, Homo sapiens
gtttatctcaaggcctgagtagccggtaacaaacgagggttcccgggattggaccgacgcagccatgggtctcgctctgtcgcccaggct

SEQ ID NO: 650605 - DNA, 75 bp, Homo sapiens
ctgaaattgagaagctttgtgagaagggcagaagggaggtggggaagacagggctccagctaccacaggacgggc

SEQ ID NO: 650606 - DNA, 96 bp, Homo sapiens
aaagaagtttgtccttctgctattgatcctgaaggttccagcaacagatagaaatgctttaagttcactctggggaaagctggcctctgaaatctt

SEQ ID NO: 650607 - DNA, 100 bp, Homo sapiens
tcatcctggtcactagcggactcttcttcgccttcgagtattctttaggtgatgctagaaggcctcttcatgaaacagcagttttggtagaagatgtggt

SEQ ID NO: 650608 - DNA, 100 bp, Homo sapiens
gtctccgcgtcccgctcgctgggagagaggccgagtatgaagtgaccccggatgacaagcggaaggcatgtgggcggcagctaacgcagaattttctgag

SEQ ID NO: 650609 - DNA, 100 bp, Homo sapiens
agatgaagaacctgagtcaggacgtaaatggaaccctgacagtgggagtagctcaccgttacccaagtatgcttcatctcccaaaccaaacaacagctac

SEQ ID NO: 650610 - DNA, 110 bp, Homo sapiens
tacatctgttggaggagccaactagcatggaagtgcagtctgctccatctggacacaagcatctgacggtagaagagttatttggaacctctttgccaaaggaacaacca

SEQ ID NO: 650611 - DNA, 121 bp, Homo sapiens
gtcgggtctccgtcgggcatggcaatgtgggtgtcaacagaggctggttctgtgagaagggcagctgcaatgactctccgcacggtattattgtcattgcaagcactattggcagctgcag

SEQ ID NO: 650612 - DNA, 75 bp, Homo sapiens
tgatgaaccctacactgactttgatgccgtgctggtatagaggactctaagaagtggggcatgctgtttctggtg

SEQ ID NO: 650613 - DNA, 100 bp, Homo sapiens
tatacaaaacatccttctaaaccaggaaggctttgtgatacctgatgaagggggcccacaggaggagcaagaagagtattaacagcctggaccagcagag

SEQ ID NO: 650614 - DNA, 100 bp, Homo sapiens
gccaactcacgtctggggagtggggctgctgtccaatcccagaggctgactgtgctgtcctgattgttgctgctggtgttggtgaatttgaagctggtat

SEQ ID NO: 650615 - DNA, 100 bp, Homo sapiens
cctctgcgggcaccttccgggtgctgaaggagccccttgccttcctgcgagccctggaattggttgtaggtcataaagaaggtctggatgttatggagag

SEQ ID NO: 650616 - DNA, 74 bp, Homo sapiens
caggggtctccacagagaccatcaggatgtcgtattttggggagcatttttggagacggggtttcgccatgttg

SEQ ID NO: 650617 - DNA, 50 bp, Homo sapiens
ccctggaggagacctggcagcaggtttttagaacttcagccataaaaatg

SEQ ID NO: 650618 - DNA, 75 bp, Homo sapiens
cagataatgtgcctgctttggtccagggcttccatgctgctccccaaggggccaagttccccatcaagtggacag

SEQ ID NO: 650619 - DNA, 75 bp, Homo sapiens
aaggactcaggtgaggactggagttgaaaacgaggcccactgcgactttgtgaagctgcgggagatgctgattcg

SEQ ID NO: 650620 - DNA, 100 bp, Homo sapiens
cgcgcacttccaggtgcacagcgcgggagccgtcacggtgctcaagaaatgagccgtcagactgctacagcattacctaccggtacctcgaagtgtccac

SEQ ID NO: 650621 - DNA, 100 bp, Homo sapiens
cggaatcccgcgcgctgcccacgattcgcttctgaggtggggtggcagttgaaaaatttggtgaatgcactacgagaggacccgagtggtgttatcttaa

SEQ ID NO: 650622 - DNA, 82 bp, Homo sapiens
cagcggcaggaccagcgggcgggggcccacgaacaggtgatttggcttctgcacagttaggaggagcaccaaaccgatggga

SEQ ID NO: 650623 - DNA, 74 bp, Homo sapiens
ttgccgggagccgggcgcggctctgtgtggactcggagaaacgcgggacctcagcagccatgtcgaagccccat

SEQ ID NO: 650624 - DNA, 99 bp, Homo sapiens
ggggccatggccagcgacggggccaggaagcaattctggaagcgcagcaacagcaagctcccgggcaggtaagtaaggaggtctctgtaccatggctcg

SEQ ID NO: 650625 - DNA, 100 bp, Homo sapiens
ccaaggagctcttacagatggacctgtacgcgctgctaggcattgaggagaaggcagcggacaaagagtcttgattcccttttggccagcagtttttagg

SEQ ID NO: 650626 - DNA, 98 bp, Homo sapiens
aagagaacaacctctctgaagaaggcctagccgcccgtgactctcacactgtctcctgcatgacgggtggcgcctcccgcagcttcccttctctctcc

SEQ ID NO: 650627 - DNA, 90 bp, Homo sapiens
cttttgattgtgtattatggataccaaggaagagaagaaggaacggaaacaaagttattttgctcgataccatgtttgtgtggaagtgcc

SEQ ID NO: 650628 - DNA, 100 bp, Homo sapiens
gcaaggagccacaaagaagaaaacatttcttttaatttttaaacttggtttgaaagacagttgatattcataaagagaaagttgcaagaagagaaattgg

SEQ ID NO: 650629 - DNA, 83 bp, Homo sapiens
agagctagcaaggaaaactcaggaccatgatggctcagtttcccacagctatgaatgataatgaaggttctggaagcaaaagg

SEQ ID NO: 650630 - DNA, 100 bp, Homo sapiens
tccatgctggcgatgaagtgattcaagttaatcatcagactgtgctctacattaatcatactcctccaccactgtccaagagtaaggagagagaaatgga

SEQ ID NO: 650631 - DNA, 90 bp, Homo sapiens
gtgagacagatcaagatcaagaccggcgtggtgaagcgtactatactggcaattgctggagaagattttgcaattgttgcttctgatact

SEQ ID NO: 650632 - DNA, 74 bp, Homo sapiens
ctttacatcaaccatttatttcaagtccatgaacatcctgacctccgtgctgctgctgtacaccaaggaggagg

SEQ ID NO: 650633 - DNA, 74 bp, Homo sapiens
aaccaacctcttcctggaggagattcagcagtgttgtactgctacttctataaacggacagccgtaagactagg

SEQ ID NO: 650634 - DNA, 98 bp, Homo sapiens
caaatagtaacccaaagatcgtgcagctcttggcaggagtagctgatcaaaccaaggatggacgaggacctattaaacttggaatggctaaaatcacg

SEQ ID NO: 650635 - DNA, 100 bp, Homo sapiens
ggagtctccgcgtcccgctcgctgggagagaggtacctctccttttccctctccctttccctaagaaatggtggagtcaatgaagaaagtagcagggatg

SEQ ID NO: 650636 - DNA, 99 bp, Homo sapiens
acaactgcgttttcgccccagccgacaattttttgcagataacctgggtgattttctcatttttctccgccgctttgccgatgacattttggagacatc

SEQ ID NO: 650637 - DNA, 50 bp, Homo sapiens
gcctcccgaatagctgggactacagcggggctcattccaccggatgccac

SEQ ID NO: 650638 - DNA, 90 bp, Homo sapiens
ttcagctcctgcagctctgaagtggttctgccacataaagaagatccctaatagtcatttctcaacaattatatagtcaactgatgtaac

SEQ ID NO: 650639 - DNA, 50 bp, Homo sapiens
cgggatcggttgccttgagcctggttgcacgttttcaaaaaatacctaat

SEQ ID NO: 650640 - DNA, 82 bp, Homo sapiens
acttctctacatcccatctcaatcagaattactagattttctctcaaactacgagcctgctgatcttaagaagagaatagaa

SEQ ID NO: 650641 - DNA, 80 bp, Homo sapiens
cggcaggatgcaggaggagctggcgtgggagaccgacggccgtgtccctggccagtgtccttccacctgtccacaagcat

SEQ ID NO: 650642 - DNA, 83 bp, Homo sapiens
catgtctgagactcctgctcagtgtagcattaagttgtggaagctgatcgaggaagcctaagcaggctctgtgaagtgggaat

SEQ ID NO: 650643 - DNA, 89 bp, Homo sapiens
tcaaccttgaaggcatcgtgtggcaggaaacagaagatggtactccaaagattcaggtttactcacgtcatccagcagagaatggaaag

SEQ ID NO: 650644 - DNA, 100 bp, Homo sapiens
gcccgggaactgctgacgcttgatgagaaggacccacggcgtctgttcgaagggacgtccagatcggtgacatcgtcacagtgggcgagtgccggcctct

SEQ ID NO: 650645 - DNA, 82 bp, Homo sapiens
aacgcccctccagccttcgagtcgttcttgctcttcgagggcgagaagaaaaaacataccgtttcatttactgctccgacac

SEQ ID NO: 650646 - DNA, 100 bp, Homo sapiens
tttcctagatgatagcacagtcagtcaaccaaacctcaagtatacaattaaatgatttcttataggaaagacgtgcaggacacccacacgtacagtgcag

SEQ ID NO: 650647 - DNA, 97 bp, Homo sapiens
ccgccgccgccgccgccgccgccgcgcacgccatgggagccgtgactgacggaacaagactgccaatggagactgccgcagagacccccgggagcgg

SEQ ID NO: 650648 - DNA, 75 bp, Homo sapiens
ccctaatggaagaccatggcatagagaaggagagagctattctcaagctggaataactgagactgaatggacaag

SEQ ID NO: 650649 - DNA, 80 bp, Homo sapiens
gcccactgctgccgcccagtgtttgctggacccaaaggagacaacatttatgaatggaggtcaactatattgggaccccc

SEQ ID NO: 650650 - DNA, 90 bp, Homo sapiens
gtggtgtggattttcatgcaccttacaaacttccatacaaggaggacaaagacactgattctaccaaagagcctctggatgaccttttcc

SEQ ID NO: 650651 - DNA, 82 bp, Homo sapiens
atgtcagttctgtaacccaaaaccaaagtttttagaacttcagccataaaaatgggcagaattttccttgatcatatcggtg

SEQ ID NO: 650652 - DNA, 99 bp, Homo sapiens
agccccccaatgcggccgcgagaagcagcgggggggcaggcgatcgaagggaaatcctcattgacgattcaatttgttgaaggccaatttgtggactcc

SEQ ID NO: 650653 - DNA, 75 bp, Homo sapiens
ccgggggggcccaagcgtcagcggcccgcgcctgtcgggctgaactgagcaagtgcagccgcggagccctgtaca

SEQ ID NO: 650654 - DNA, 100 bp, Homo sapiens
cccagaaccacctcctttgcggagagctgcaagccggtgcagcagccttcagcttttggcagcatgaaagttagcaggtgtgtccgcagccggccaggtg

SEQ ID NO: 650655 - DNA, 75 bp, Homo sapiens
tggccaagtttggcgctattctggcccagggcatactggatgcaggccacagatggggaagtcacagccgtggag

SEQ ID NO: 650656 - DNA, 75 bp, Homo sapiens
cagcgtagctgaatccagtaccaaaaacgtcaacaacagttttacgggagagctggaccaggaacgactgaccag

SEQ ID NO: 650657 - DNA, 96 bp, Homo sapiens
ccggatgttcggtgcagctgccagatccgctgatctagtgcttctcgaaaaaaaccttcaggcggcccatggaatgcaggctcaacagtaccagca

SEQ ID NO: 650658 - DNA, 80 bp, Homo sapiens
ctggcccccttgagcctgtcccaagccctggtgccaggtgtccatccccgtgctgagaacgctgcgatgactggggacta

SEQ ID NO: 650659 - DNA, 100 bp, Homo sapiens
ccctgtgaaagaaggagaagcccaatatgctgtggtccactgtacaggatacatcaaggcctggccaccagcaggtaatatgcacgtgtcactagctgag

SEQ ID NO: 650660 - DNA, 100 bp, Homo sapiens
aaattaaacatgtttccagtctgctggccaagtccagtgtgaaaaaagccagtattaaaatactgaaaaattttgatgaagcgataattgtggatgcggc

SEQ ID NO: 650661 - DNA, 100 bp, Homo sapiens
atatacaaagacaaaaggagattctgatgaagaagttattcaagatgagtgatcagcagctggactgtgccttggacctaatgaggcgcctgcctcccca

SEQ ID NO: 650662 - DNA, 50 bp, Homo sapiens
caacatctttcctcaccccaagaaatccataaccatcagccttgttcaaa

SEQ ID NO: 650663 - DNA, 100 bp, Homo sapiens
tcaaagcccacagagcagtgcttgctgctttttctaactatttcaagatgatatttattcaccaaacaagatgtatcctccactcctcgctggccaccat

SEQ ID NO: 650664 - DNA, 82 bp, Homo sapiens
gcgctcctggctcggcccgacagcctcgcttggccgccagttcttctgcagccgaaggcgggttattttggagctgttggag

SEQ ID NO: 650665 - DNA, 82 bp, Homo sapiens
gatacaggagcttatagaaactaatcaacagcttagggcaagaatatcacggcatgggcatgagtagcttgaaactgctgaa

SEQ ID NO: 650666 - DNA, 82 bp, Homo sapiens
tggaaattgcgctggaccgtcgccttgctcctcgccgcggcggggactgcaggcaggtgacagcagggacatgtctcgggag

SEQ ID NO: 650667 - DNA, 82 bp, Homo sapiens
tggggctggaaattgcgctggaccgtcgccttgctcctcgccgcggcggggactgcaggtccgcgggagagctgtggggctt

SEQ ID NO: 650668 - DNA, 100 bp, Homo sapiens
ccgtgtggaggtcgggccaaagacctacatccggcaggacaatgagaggagaatacttatctctggcgcacatcactatatttggctgcctctgccagtg

SEQ ID NO: 650669 - DNA, 98 bp, Homo sapiens
tttaagacggtctacaaaggtctggacactgaaaccaccgtggaagtcgcctggtgtgaactgcagattcctgacattcagacaactgacttgtaact

SEQ ID NO: 650670 - DNA, 75 bp, Homo sapiens
attttgtcaaagcctttcaaagtccccattccaaattatcaagactttaccagaatgcaggacatcccggaggag

SEQ ID NO: 650671 - DNA, 98 bp, Homo sapiens
ctgacatacatttttgggaaggtagaagcatttggcacagaagtgctgccaggagaaactaagttgctgaacgggtcctggctataagtcaccatggc

SEQ ID NO: 650672 - DNA, 83 bp, Homo sapiens
ggtctgagcagtgggccaccatcgagcagctgtgcagtcaaaatgcagatcttcgtgaaaacccttaccggcaagaccatcac

SEQ ID NO: 650673 - DNA, 89 bp, Homo sapiens
cacaatcccacgtcctgctgcttgtgcaaggtggtgtctgtgcagctggtgtccccgattctggctgtcctatgtccaggaagaagccc

SEQ ID NO: 650674 - DNA, 96 bp, Homo sapiens
cgatctaagatggcgactgtcgaaccgtttgtacaatgacgacagaaacctgcttcgaattagagagaaggaaagacgcaaccaggaagcccacca

SEQ ID NO: 650675 - DNA, 74 bp, Homo sapiens
tgagatgagacagaagattcgacagctcacccaggaactatcagaactttatattgctgttggaatatctggag

SEQ ID NO: 650676 - DNA, 98 bp, Homo sapiens
gccagtacacacacaagatctaccacctgcagagtgagaaagatcagtctaaagaaaaggagaagaaagtgaaaaaaacaattccttcctgggctacc

SEQ ID NO: 650677 - DNA, 75 bp, Homo sapiens
ctagagcaaataaccgttttgaaattggtgtctcagaatcaagttggacagcactttacctttgtactgacagac

SEQ ID NO: 650678 - DNA, 75 bp, Homo sapiens
cgggcggagagaactcagcgaggattctgagtggacatttgggagcaataaaaataagaagaaaggaaaagccag

SEQ ID NO: 650679 - DNA, 100 bp, Homo sapiens
ctcctctccgtctccctggaccgctgtgtaggcacctgagttaacggacgctaagcggggtaggggaagcaggtgtcttctgcggaggtgcgcatcgggc

SEQ ID NO: 650680 - DNA, 100 bp, Homo sapiens
ccggagcggagctcggggcgcgctgctgctggcactgctgctctgctgggacccgaggctgagccaagcagttatggctgattgtcctcacacaattggt

SEQ ID NO: 650681 - DNA, 73 bp, Homo sapiens
ggtcgacgacttcagtgatcgagcggagattctggagctggctggcaatgcagcgagagacaacaagaaggga

SEQ ID NO: 650682 - DNA, 100 bp, Homo sapiens
agctgaaccaggcccttttggatcttcatgccctgggttctgcccgcacggacccccatgtgtcccgcatgagatgtctgcagaatgagacttacagtgc

SEQ ID NO: 650683 - DNA, 80 bp, Homo sapiens
cggaaaactcccaacttcctggagccttcacgtaaatgggtccagtcatgcctcccagtaagaagccagaaagctcagga

SEQ ID NO: 650684 - DNA, 128 bp, Homo sapiens
cccgtgccacaactccaaaaactgaaaagataagcactgccttgatgatccgtatggggaactaatggagatttacagacagtcatctgggtggaggacacccttttgggatcagcactgaaagtgac

SEQ ID NO: 650685 - DNA, 98 bp, Homo sapiens
tcgagtccctccggaactcacactccagggcatcacatttgatgaattcaggtcatttttccagtttttaaacaacctagaagactttgcaatagccc

SEQ ID NO: 650686 - DNA, 99 bp, Homo sapiens
ccgaggtttatgacaccccagagaacatcgtgcacggcagtggaagccagaaacagccatggagtgattttgctgttctgaatgggggaaagattaata

SEQ ID NO: 650687 - DNA, 100 bp, Homo sapiens
gcgagcaaggccgccagatgtgcagagtattgggaaagggtcgttgtggtgcatagacccagagtatagacaaaatctaattcaggctttgaaaaagaca

SEQ ID NO: 650688 - DNA, 75 bp, Homo sapiens
ggaaaacatggaacaatttattattcaagacagatgtacagaagattttaagaaatgcaaggaaactacctgaaa

SEQ ID NO: 650689 - DNA, 83 bp, Homo sapiens
aacagatgttaagacattcttggaagccttaccgactgaaatcgccaagagattgaatacgatttgtgcacaagtcatcccat

SEQ ID NO: 650690 - DNA, 100 bp, Homo sapiens
ctatggtatggatgtaaccaagaaaaacaaacgagatggaactgaagtcactgagagaagtgtgtagaccacactccaaaactgaaactgtggatggcag

SEQ ID NO: 650691 - DNA, 129 bp, Homo sapiens
tggactttgcacacctccaggagaagaacccagaaaattgatcagttctaaaaaaccatgccccacgatgcatcatctgcagacatcagaaaagcatatcgtaagctttcactaactttacatccagac

SEQ ID NO: 650692 - DNA, 100 bp, Homo sapiens
tgccttgctgatctgagctcagacctgccaatttaccagagataattgataacaccctgtaacagctgacggcgtcttcgacatcttcggaacattgctg

SEQ ID NO: 650693 - DNA, 75 bp, Homo sapiens
cgatgaatctctgaacatcatcataaatacattcacggcatggtgtaactcccacctccggaaggcggggacaca

SEQ ID NO: 650694 - DNA, 75 bp, Homo sapiens
gcgctttgatttacagcagctgcaggtggacccccaaaagtacaagggcatatttaacggattctcagttacact

SEQ ID NO: 650695 - DNA, 83 bp, Homo sapiens
tccagctccgaagaggaagaggaattcggtgtggttggaaatcgctctcgctttgccaaattccagcacaagaaccctgaaga

SEQ ID NO: 650696 - DNA, 75 bp, Homo sapiens
ctcctctgatggcaggacctgccaagtttgtttcgacgccggaccgcgtaagagacgatgatgttgggcacggaa

SEQ ID NO: 650697 - DNA, 74 bp, Homo sapiens
gtaaaacaaaaatattatggtctttgtgcacatttacatcaaggttaaagatcgaggtccggaagccactagga

SEQ ID NO: 650698 - DNA, 50 bp, Homo sapiens
gcaacatccagcggatcagccaagccaagagcccgagcccagcacattgt

SEQ ID NO: 650699 - DNA, 75 bp, Homo sapiens
ggatacaacatagaacctattatgctctatcagctttctaaaaccaatttttccaacaacaacgatttccgtgct

SEQ ID NO: 650700 - DNA, 99 bp, Homo sapiens
ccgttgcctgctcccggagggagacgcgctgccgaggagaacccagcggatgctgttggacagcagggacaatgaccacttttgggaacagcagttgga

SEQ ID NO: 650701 - DNA, 75 bp, Homo sapiens
agacactccccagggcagaaatagcgaccatggcgaggtcaaaatgcagatcttcgtgaaaacccttaccggcaa

SEQ ID NO: 650702 - DNA, 100 bp, Homo sapiens
ctctcatctcgctcggctgcgggaaatcgggctgaagcgactgagtccgcgatggaggagcatcagatccatgctgctgctgactcggagccccacagct

SEQ ID NO: 650703 - DNA, 75 bp, Homo sapiens
gccgaatcttccttcaggatatcaaggtcaatgagctgaaggagaaaggcaacaaggccctgagcgtgggtaaca

SEQ ID NO: 650704 - DNA, 83 bp, Homo sapiens
gagcagcgcgtcgtggggcgagcggcaggctcacagaacatttcctgcctgttgctcacactctgttgtccacagcatacccg

SEQ ID NO: 650705 - DNA, 82 bp, Homo sapiens
gtccaatctgagcgtgctgcggacggcgctgcggtacatccagggcgtgatggtgggcatgggtcagaaggattcctatgtg

SEQ ID NO: 650706 - DNA, 90 bp, Homo sapiens
gcgaggccgggcacagccttcctgtgtggttttaccgcccagagagcgtcatggacctgggaaaatctctaacttccaaggtcccaccaa

SEQ ID NO: 650707 - DNA, 75 bp, Homo sapiens
ttccgccgggactgcctggccgacgtggacaccaagtattctgacaagtccctgtacacccagctgtgcttttac

SEQ ID NO: 650708 - DNA, 83 bp, Homo sapiens
catccccttgctggacagtggctgtggcctgacctctcgggacacacccagccctgtggacccagacaccgtggaggtgttga

SEQ ID NO: 650709 - DNA, 83 bp, Homo sapiens
cagcccaccggggcacagccagagcagcacccaggtattagaaaactactcggatgctccaatgacaccaaaacagattctgc

SEQ ID NO: 650710 - DNA, 98 bp, Homo sapiens
attggggtgcacaacatagggcagggctaccggctctctgaccagttccacgacatcctcattcgaaagtttgacaggcagggacgggggcagattgc

SEQ ID NO: 650711 - DNA, 100 bp, Homo sapiens
gaggagtctctgtccgggggcctggctaaggaaaccctattacctccaggatggatagaatgacagaagatgctcttcgcttgaatctgttgaagcggag

SEQ ID NO: 650712 - DNA, 82 bp, Homo sapiens
agaacatcttctccttctacctgagcagatgcagagtttgcggggtggtacagaagcgatagcacgattggatcagttagaa

SEQ ID NO: 650713 - DNA, 74 bp, Homo sapiens
tcatcgttatctacttcgtggtagtgatggccgtcggactgtgggcaatacaaggacctgtggaatatgagtga

SEQ ID NO: 650714 - DNA, 82 bp, Homo sapiens
taagcgcagaaagcaggcgaacccgcggcgcaataacgaggagcaggagcggcttcgcttggagcaggagcgagagcaggaa

SEQ ID NO: 650715 - DNA, 100 bp, Homo sapiens
cagaaaagacagtgttctgctttcatggagttcacagaagagtcgaggagatggtgttatctgaaaaggttagtcagctgatggaatggactaacaaaag

SEQ ID NO: 650716 - DNA, 75 bp, Homo sapiens
cgggagagtgtttgatatgttaaacagaagatacctttgcttcctggagattcacgaacaagaataggattcatg

SEQ ID NO: 650717 - DNA, 98 bp, Homo sapiens
gtggttcacccgctgccgggcaccgaggaccagctcaatgacagggttctccaaaaaatgtggaatcctttgcatctatgctgagacattctcctctt

SEQ ID NO: 650718 - DNA, 73 bp, Homo sapiens
agtcaagtaaaggagagcctgacccactggaagataaacagacattaaaactaccactactatggaagtacca

SEQ ID NO: 650719 - DNA, 100 bp, Homo sapiens
tggaactcagacatctgcaaatcatgtcatatttgatcagaaattggatgaaccttcgggatgctgagacagggaagatactctggcaaggaacagaaga

SEQ ID NO: 650720 - DNA, 100 bp, Homo sapiens
ggactatggagtacagtttacatcttcacggaagtttttcacaatttctccaataattctattttcatgataaacctcaaacgcagaaaggacaggcggg

SEQ ID NO: 650721 - DNA, 74 bp, Homo sapiens
gagatcacatgcaggactctttcttaatgcagcctgaggtgaccaagaatatggcccaggtgaccaaagccctg

SEQ ID NO: 650722 - DNA, 98 bp, Homo sapiens
tctccaaaaagaccatcggtggaaaggtcaccaaggaagaaggattggccttggcccgagaattcagctgtcccttttttgagacatctgctgcatac

SEQ ID NO: 650723 - DNA, 90 bp, Homo sapiens
agcctggggactctgcctcgtgccgctgagcctggcgcagatcgagctccacgcaggagatcggtgaggagctgatcaacggagtcatct

SEQ ID NO: 650724 - DNA, 82 bp, Homo sapiens
ccgcccgccgcccggatgggaccaccagagtgctgcctttccacgaagagtcctcagccttctccctccagccggaagagcc

SEQ ID NO: 650725 - DNA, 100 bp, Homo sapiens
cttggaccctggaaaacctggccctcttcaatttctgacaaaagcttgccagcaaagcacggacagagaaggaggagaagctgagccaggcctatgcaat

SEQ ID NO: 650726 - DNA, 100 bp, Homo sapiens
aagaattccatggtaatggtgtgcttgcaaagtataatcctgaagggagggacattggctggcgcccggacagcacccacctgctggtcttctccaccga

SEQ ID NO: 650727 - DNA, 76 bp, Homo sapiens
caggagtgaagctgcagaccttcgcgatttctcgaatgctggcagccaaaaccgttttggctatccgttatgatgc

SEQ ID NO: 650728 - DNA, 76 bp, Homo sapiens
ggggcacaagatgccacagaaaattctgcttccagtttagcaccagggctgcgaataaaggagaccaaggaagttt

SEQ ID NO: 650729 - DNA, 100 bp, Homo sapiens
ccagctgatgatttgtccctgtctgaagagaatggggagaaggaacccccgacaacactactctgggttcagtatttcctggcacagcactttgataaac

SEQ ID NO: 650730 - DNA, 100 bp, Homo sapiens
gaattttcatagagctggactattggaagtgtttgccagctctgagcctgtgccaggattccagggggataccctgcagctagcattcattgacctcaga

SEQ ID NO: 650731 - DNA, 83 bp, Homo sapiens
cctggacaggccatggcccttccatggaggattcctctgctgtcctcatggaaagcctaaagttcgcccattgagccgagaga

SEQ ID NO: 650732 - DNA, 138 bp, Homo sapiens
tcttcccagaaacttcaacatctggaacatgtgatggaaaattatactcagtggctgcaaaaaatcccttctgcttactatgacattacccagagccacggcggacagtggtgagagtgcagcagactcactggcact

SEQ ID NO: 650733 - DNA, 83 bp, Homo sapiens
ggagggctgcagcgcccaccctgcgccagagaccagataaaatgtgtatatctcatgattgatatggagaaactagtcatggg

SEQ ID NO: 650734 - DNA, 83 bp, Homo sapiens
ccgcgggcgccatggagggggtgctgtacaagtggaccaactatctgagcgttacagaatgtctgaaggggacagtgtgggag

SEQ ID NO: 650735 - DNA, 90 bp, Homo sapiens
ctcgtcttgaattgtagctcccataatccccacatgttgtggagggaccctgtggaagaaggacagaataacgggctcccagattcacaa

SEQ ID NO: 650736 - DNA, 98 bp, Homo sapiens
tatgtattccctggggatggcgcatcacacaccaaagggaaacagaagtacctgtgcgccagcagaaatgattgcactattgataaattccgaaggaa

SEQ ID NO: 650737 - DNA, 75 bp, Homo sapiens
ccaccaatgggaacatgcacagattacgatgaggacctggtgcaggaagcttcatctgaagatgtcctgggcgtt

SEQ ID NO: 650738 - DNA, 100 bp, Homo sapiens
tgggcccagaagggggaccaggagagcaagaaggccgacaccaaggcccagacaggtcctcagaatggttggaatgaccctccagctttgaacagagtac

SEQ ID NO: 650739 - DNA, 75 bp, Homo sapiens
accgcggcttaaatgatgtattttgtgatcgcagcgatgaaaggtacttaagagattatggcatcagaaacccac

SEQ ID NO: 650740 - DNA, 75 bp, Homo sapiens
gtttttgtttcaaaagaaacatgttggaagatcaaaggcacagttgctctcaccagaagatttagtgaatgcgtg

SEQ ID NO: 650741 - DNA, 83 bp, Homo sapiens
ctccacacctaccactacccgtgtgccagcgatgcaggcaccatgactcctgtgaggatgcagcactccctggcaggtcagac

SEQ ID NO: 650742 - DNA, 83 bp, Homo sapiens
cgcaaggtcgccctcaaggccatgatcaaaacgtgctgaaggtcgccatcctggctgagaagtacgcggtggactacacctgg

SEQ ID NO: 650743 - DNA, 95 bp, Homo sapiens
atcgctacttcaaagggtactttttagaaccaaaggctactccagagcaaataagcatggacctcaagaatgaattgatgtaccagttggaacag

SEQ ID NO: 650744 - DNA, 96 bp, Homo sapiens
cacacatgatcttcctgtccctggaggatgagaaggcgcgcattgaagcattgggtggctttgtgtctcacatggactgctggagagtcaacggga

SEQ ID NO: 650745 - DNA, 75 bp, Homo sapiens
gagctcatcagactgaccgtgtcttacatcagttcagagagcagccattgtttgatgtcctgtgactgagaaacc

SEQ ID NO: 650746 - DNA, 82 bp, Homo sapiens
gctcgctcaagatggcggcgcagccaccccgcgggatacgcctcagcgcgattgtcaagtggtcagactgttgtttgccatt

SEQ ID NO: 650747 - DNA, 100 bp, Homo sapiens
cgatggcctactggggataacattcatgcagaacatcagattttgaagatgtaactgagtttctggaagaggtcattgaagccttgatattggatgagga

SEQ ID NO: 650748 - DNA, 100 bp, Homo sapiens
atctattccggccacccattgatttgatgcataaaggcagctttgaaacaccaacagaagctgttcttccctctcctcccactgtccctgtgatccctgt

SEQ ID NO: 650749 - DNA, 100 bp, Homo sapiens
gtgacccgcgtgtgccctaagcacacctggagcaacaacctggcggtgctcgagtgcctgcaggatgtgagggagcattgtcttcagtgttaagaaatgt

SEQ ID NO: 650750 - DNA, 75 bp, Homo sapiens
cgcgccgctgctggttgctgtccctggatgctttggagtctgcaatgaagaatggcctgtggggtcacgctctgc

SEQ ID NO: 650751 - DNA, 100 bp, Homo sapiens
cgccgccagggtctgcagggcctgggccgccgctgctacctgcagcgccgtgtggcacgacacaaaaatcaggtcccgcagcccccggaagccaatagac

SEQ ID NO: 650752 - DNA, 132 bp, Homo sapiens
gggccgcagaccgtctggaaatgcgaatcctaaagcgtttcctcgcttgcattcagctcctctgtgtttgccgcctgggagcatattaatgaaaagtgccataaactgaaaaaccaaacatgagggtagcag

SEQ ID NO: 650753 - DNA, 80 bp, Homo sapiens
gatgccatcgtgatggcggatgagaggtgctgatgtatggacagccgtatcgtgttaccttagagcttgagctgccagag

SEQ ID NO: 650754 - DNA, 50 bp, Homo sapiens
atttcaagaacaaaggccgcgacttggagcattctcccagatggtgatca

SEQ ID NO: 650755 - DNA, 90 bp, Homo sapiens
gttttgtttgactccagtgttaagagaagaaatgaggacatatcagtatcgccacataaagaagatccctaatagtcatttctcaacaat

SEQ ID NO: 650756 - DNA, 87 bp, Homo sapiens
tgatttcagatatcgaaaagaaaaggcagcgtatgattgaagtccaggatgaactgcttcgagatcctgagtcatgtgttccagtgg

SEQ ID NO: 650757 - DNA, 101 bp, Homo sapiens
agaaaacacatctttacacactaaattgttgccagcaaaggaggttttgaaatggtcaccaaagagaagaaatggtctaaagtgggtagtcgcttgggata

SEQ ID NO: 650758 - DNA, 82 bp, Homo sapiens
caacgcctggctcggagcagcagcctctgagatctctgttgaggagctggcgcggaatctggtcatcaaggtcaacagggat

SEQ ID NO: 650759 - DNA, 100 bp, Homo sapiens
cggagacgggagtattatgaaaagatctctattgcgtctgcagacatggatttcaaccagctggaggcattcttgactgctcaaaccaaaaagcaaggtg

SEQ ID NO: 650760 - DNA, 101 bp, Homo sapiens
cggaggaggaggggagaggcctggaggacaccaacatgatacagaattcgttgttgggaaggactggggaaacagctgtaacatttgccaccctcagaagc

SEQ ID NO: 650761 - DNA, 90 bp, Homo sapiens
ttgagctccaggagttcgtctcttacgtctgcggaagtgcagctgcctcagttcttagcgcaggtacctggagtacaagagggtccctaa

SEQ ID NO: 650762 - DNA, 82 bp, Homo sapiens
cccccccttccccacgcaaccccagatccatttacactttacaggatcatagacggtatttctatgtaaacgaacagtcggg

SEQ ID NO: 650763 - DNA, 83 bp, Homo sapiens
ctctgcaggcttgccgaagaagggaggtatctacgagaccccagcaggcaccatcctttaccatgctcatttagacatcgagg

SEQ ID NO: 650764 - DNA, 90 bp, Homo sapiens
actaccggggtgagaactcgtggttctccactcaggttgacactgtggccaccaaggtgaagctgggagtgtccactcgccttccaccag

SEQ ID NO: 650765 - DNA, 101 bp, Homo sapiens
ggaaaatagtggccgagtatgagaagaccatcgctcagatgataggctggtggttcgtgagcacttctgaggagcagggctgggtccctgccacctacctg

SEQ ID NO: 650766 - DNA, 100 bp, Homo sapiens
ccatacccagcaagagaaggaagcaggatgcagccccgcttgaggccgccagcgtgccttctgcagactgtgagcaggctggagtgcaaaggcgtgatct

SEQ ID NO: 650767 - DNA, 129 bp, Homo sapiens
gtccaaagaggactggtgatctacgtgtgctttttcaagggagctgataaagaacttcttcccaaaatgggtctctaattaacagaagatggcaaagcccagccacagcagctatgtccttcagcagct

SEQ ID NO: 650768 - DNA, 75 bp, Homo sapiens
gggggtaccagtgtactatagcatgatcccacctgctcagcagaacggtacgagtggggtttatttccaagggac

SEQ ID NO: 650769 - DNA, 100 bp, Homo sapiens
cccgcaggtcttcacccaggccctggagtgcatgcgcaggactagtggtggtgaatcattacctagcatttcagttttttgcagaagaatattatccctt

SEQ ID NO: 650770 - DNA, 83 bp, Homo sapiens
agagacaggcgttcgaggagatcatcctgcagtgtggaagttaaacgagctgagcctcgggacagcaagagccaagcgccggg

SEQ ID NO: 650771 - DNA, 51 bp, Homo sapiens
tggaagtaatggaaggacccctcaacctggaccatcgagtctctgtataag

SEQ ID NO: 650772 - DNA, 82 bp, Homo sapiens
cccggcctacctcttcctctggcccgaagccttcctttatcgctttcaggtcaaaatgcagatcttcgtgaaaacccttacc

SEQ ID NO: 650773 - DNA, 90 bp, Homo sapiens
atgtgaaggagcggaaggttaatgttcttcagaagaaggtcaccatggctgttattggctcccttgctgtccccagctgttccccaggtc

SEQ ID NO: 650774 - DNA, 74 bp, Homo sapiens
ttactgaaggcagtgaagcgaagaaaaggatcccagaaagtttcaggcggctgagccagaggccaactgcagag

SEQ ID NO: 650775 - DNA, 94 bp, Homo sapiens
agaggacccgcgtgggcaccctgcaggtggtcagacatgtcatcaactcagctgaacatccagtcatggataaaaatgagctggttcagaaggc

SEQ ID NO: 650776 - DNA, 90 bp, Homo sapiens
ccgaggccttcaagtgcatgatgtgcgatgtgcggaagggcacctccacccgttcttcgtgccatgaaggaggacagtgaaaaagttccg

SEQ ID NO: 650777 - DNA, 98 bp, Homo sapiens
ggtctacaagtcgctgctagaaatattttagcctctccaaagcccagaatgcagccccgacccaagtttgtaagcttcaaacatacccatatagataa

SEQ ID NO: 650778 - DNA, 76 bp, Homo sapiens
atcgtgctgggcaccggcctgacgaaccttctgaggaaaggaggccatacagaaattgaacctcagcacttctgtc

SEQ ID NO: 650779 - DNA, 88 bp, Homo sapiens
accgctaggccgtccccgaccttgcctgaacaagttttctgagtttaaccagtaatgccattcagttgccaatctcaagcaaagcaaa

SEQ ID NO: 650780 - DNA, 98 bp, Homo sapiens
cgtgttgcagcacatcctcatccgagcctttgatttgagtgggtgattcgcatctaggtggcggcagtcgagaaggctcgtttaaagaaacaataaca

SEQ ID NO: 650781 - DNA, 82 bp, Homo sapiens
atgaggccagcaagcggaggtgctgggagcgagttggctggcaccatgactcctgtgaggatgcagcactccctggcaggtc

SEQ ID NO: 650782 - DNA, 100 bp, Homo sapiens
agtggactcaacttcaaagacgttctcaaggagaaggcagacctggtacttcctcctgtgctggttccaagacacagcgaatataatcctcagcacagcc

SEQ ID NO: 650783 - DNA, 146 bp, Homo sapiens
tggtgatctggactgactgtgatagagaaggcgaaaacatcgggtttgagattatccacgtgtgtaaggctgaggcatttcatccttcatgaagccattcaggattttgaattgcatatgagtgcttggctcttccttctgttcta

SEQ ID NO: 650784 - DNA, 90 bp, Homo sapiens
attgtaccccaggcaccagctgctcagccactacagattcagtcaggagttctcacgcagaatcattgaaaaatggctctgctacaggtg

SEQ ID NO: 650785 - DNA, 100 bp, Homo sapiens
cattgaaaaatttgagaaggaggctgctgaggtgattacatggatccaacacctgatccccaagattgaagatggaaatgattttggggtagcaatccag

SEQ ID NO: 650786 - DNA, 75 bp, Homo sapiens
ctcttcttgaactggtgctgtctgggcttcatagcattcgcctactccgtgaagcacacggaccctgactactcg

SEQ ID NO: 650787 - DNA, 75 bp, Homo sapiens
gggagataaagctgtgtactgccgttgttggaggtccaaaaaggataattgggatgaagatgaggaggagagtga

SEQ ID NO: 650788 - DNA, 100 bp, Homo sapiens
tgggagggagccatgaagcattacgagtgacatgggctcgagggttggctaccccgctcaggtttacaaaactgccagtgcagagactcctcggccctcc

SEQ ID NO: 650789 - DNA, 82 bp, Homo sapiens
aatacgtggcctacatagagtcgcagggagcccaccgggcgggcctggccaaggttctgcggggagtgtctccagccctgcc

SEQ ID NO: 650790 - DNA, 80 bp, Homo sapiens
gcccgacgcaaaccaaggatctggggatcttcgcactatcccaaggtatataatgtttacatggcagggaggcagctgtg

SEQ ID NO: 650791 - DNA, 101 bp, Homo sapiens
ggcttctgtgggccggaaccttaaaggtcacggcctccccacatcctttggctgaagcccacagtcctcatccatgaagcctcacccaccatgttttatgg

SEQ ID NO: 650792 - DNA, 83 bp, Homo sapiens
gaaagacaaagacccagtgaacaaatccgggggcaaggccaaaaagaaggtgacccagggcctggtcatcgggcagctgagca

SEQ ID NO: 650793 - DNA, 100 bp, Homo sapiens
agggtgaagtggcaggaggaggaggaggggctccggctggtctgtggtgaggtactccaaagattcaggtttactcacgtcatccagcagagaatggaaa

SEQ ID NO: 650794 - DNA, 75 bp, Homo sapiens
gtgcgcaaacttgacactcaccctgaccgagtcgacttcaatgttcctatgaagaacaaccagataacaaacaac

SEQ ID NO: 650795 - DNA, 75 bp, Homo sapiens
ggcccaacgatggcgagggcgccttccatggagacgcagaatgcaatgcagcaattcacaagaagtgtattgata

SEQ ID NO: 650796 - DNA, 98 bp, Homo sapiens
gatctctcagggtcgtcgggtgaaggttctagtaaataccgcttgctgtgttttgatgttggtggctaagctcatccagtgtattgtgtttggccctc

SEQ ID NO: 650797 - DNA, 95 bp, Homo sapiens
catacgtgctggtacacacctctgctgggtgcctgattattacaaaataattaaaaatccaatggatttgtcaaccatcaagaaaagactacaag

SEQ ID NO: 650798 - DNA, 50 bp, Homo sapiens
gaaagagtcaacagcagtggcaacaggaagaagccatggatttaataaat

SEQ ID NO: 650799 - DNA, 75 bp, Homo sapiens
tgcagtacgccacggggccgctgctcaagttccagatttgttcttggccaggctgactgagagatttgtgctggg

SEQ ID NO: 650800 - DNA, 98 bp, Homo sapiens
aaaaattctcagtctcttgcgtttattacgactttcaaggttaattagatacatacatcaatgggaagaggtttcctccagcctggtggtgccctgtc

SEQ ID NO: 650801 - DNA, 101 bp, Homo sapiens
gagcctcttgggaccagaacatcctcttgcatcacttaagagggtacaccacccggactacaacaatgagttgacccagtttctgccccgaaccatcacac

SEQ ID NO: 650802 - DNA, 76 bp, Homo sapiens
tgaaatgtcatgcctctgaaaatgaaggccaatggtggcagagtctacatagaactatgcttcgtggtgttctggg

SEQ ID NO: 650803 - DNA, 76 bp, Homo sapiens
aaaattgtttcgtagcagagaacagctctttgcatccggagagtggacaagaaaattcagaatggacagtttagaa

SEQ ID NO: 650804 - DNA, 100 bp, Homo sapiens
gcagtacctggatctcatcaaaaaggacaccagcaagctgttcaatgaggagattgcccgtgaggcagaggctgccatctaccacttgcaattatttgag

SEQ ID NO: 650805 - DNA, 75 bp, Homo sapiens
gaagagctatggtgaaacaccactgaagcattgccaaggcaaactaggcgtggcaactgctggctgcgtgaatga

SEQ ID NO: 650806 - DNA, 51 bp, Homo sapiens
ctcccgagtggctggaactacagatattcagactgacaatgatttgacaaa

SEQ ID NO: 650807 - DNA, 74 bp, Homo sapiens
gggttggcctgaacctgctttatgctcaggagttcattcaaaagtgcctgcagtctgagcctgctcgcagacca

SEQ ID NO: 650808 - DNA, 88 bp, Homo sapiens
cgacaagccgctggcagccgcggatctcaccgccgctcagggagcgcagctcagctgggctggaactgccctcctggaactcccccag

SEQ ID NO: 650809 - DNA, 50 bp, Homo sapiens
cctggcgggctccctgcggctcagtccacaaaaggtggctccgattcctc

SEQ ID NO: 650810 - DNA, 90 bp, Homo sapiens
ctgtgaggagttcgccgagttccagcatgcagccagtaaagatcccagagaagttcgagaagctagagatcataaggaaccaaaagagga

SEQ ID NO: 650811 - DNA, 75 bp, Homo sapiens
caaaagcctcctacaagagtcctaccaaaagcaatgtctacttcgatctgaagtctagaggagacaagtatggca

SEQ ID NO: 650812 - DNA, 75 bp, Homo sapiens
ttgggccagagttccaggggctctgggagtggctgccaggaatgtatcctgtcaggtataatgtcagtgaatggc

SEQ ID NO: 650813 - DNA, 100 bp, Homo sapiens
agaaagctagtgaatgggaaaatggtagcgtgtcaagctgagctcccagactctgatacaggctggggatgatgagaagaaccagaggacgatcactgtc

SEQ ID NO: 650814 - DNA, 93 bp, Homo sapiens
ccgaaaagcgtttccgcagacagaagtggggagaagcggagctggagaatgctggaggagaccttaaggatggccaccaccactatgaaggag

SEQ ID NO: 650815 - DNA, 99 bp, Homo sapiens
ctcgccgccgcggggcccgccgccgctcaccgcagccccctcctggcgacccgcaatgtactaatggtcacttgatgtgcgctggctgttttatccacc

SEQ ID NO: 650816 - DNA, 83 bp, Homo sapiens
gcacagttcggccatgtcagaaggtgcattttacctttttgcctccggagccagcgtggtggccatagacaacaagatcgaac

SEQ ID NO: 650817 - DNA, 58 bp, Homo sapiens
aagaaaggtgatattgtagacatcaagggatcggcttcggggaccggactagcacctt

SEQ ID NO: 650818 - DNA, 76 bp, Homo sapiens
ctcggaagagcgctcccaggagaaacaaggagaagaaatgggtgaccgttggtgacacatccctacgaatctacaa

SEQ ID NO: 650819 - DNA, 101 bp, Homo sapiens
gtttctgatggggattctagaagcagttcggttatacctgggtgctggagaatctggtaaaagcaccattgtgaagcagatgaggatcctgcatgttaatg

SEQ ID NO: 650820 - DNA, 100 bp, Homo sapiens
tatgatgatccactttcacttaatgactatgtctcagtttgaaactgaattctacatcagtggacttgcacctctctgtgatcagcttgttgtactttcg

SEQ ID NO: 650821 - DNA, 82 bp, Homo sapiens
atcctgcccggcaagacgcccgtgtacggttttgggatttgagattgacgcggtgaactctgtccagttttcaaaccacaca

SEQ ID NO: 650822 - DNA, 100 bp, Homo sapiens
cctgccccggcttcaggatttacacagacgtggggcgatgcttgtgaccctgcagctcctcaaacgatggcaagccggcaggtggatattgcaactcagg

SEQ ID NO: 650823 - DNA, 90 bp, Homo sapiens
gtggcgggggtcgcggaggtggcagggggcctggctccgggcagtgcggatgccaattctcggaagcaagaagcagagtggaaagaaaag

SEQ ID NO: 650824 - DNA, 100 bp, Homo sapiens
tggcctacttcgtgcgtgagcgaggacacattcagctaacgtattttagcaggtggagtgaggttgaagattcctgtgacagcgatgccatagagagaat

SEQ ID NO: 650825 - DNA, 100 bp, Homo sapiens
caaggagctaaagcagcgtgcgttcagccctggggctaggcagctggaagagaaagaccgagtgctaaagaagcaggatgcattctacaaagaacagctg

SEQ ID NO: 650826 - DNA, 75 bp, Homo sapiens
atgctgaaaagagaaggtcaaacagctgaagatatgaggccccaggattcctggcgaggtcctcctccccttttc

SEQ ID NO: 650827 - DNA, 83 bp, Homo sapiens
aatacgccaagaagtcagttaagatgactttgaagaagccaaggaaattttgacaaagatgagatacttttcaaatatagaag

SEQ ID NO: 650828 - DNA, 100 bp, Homo sapiens
agagaaacgagttgtggctgaggaccccggcggcagacgcaggttcgggaccatgagctgaccacaattagtcctctggagaatgccatagaaaccatgt

SEQ ID NO: 650829 - DNA, 100 bp, Homo sapiens
gatgccaactctgcccttatggaattggacaaaggtgtatttacaggagacagcaatggaaacctggtcagttgagcaggtctgcagttggttggtggag

SEQ ID NO: 650830 - DNA, 107 bp, Homo sapiens
cagaccctggagcctcagttggaagcagccgatccagcctgcggagcctgtggggcagaatgagtctgcaggtcttaaacgacaaaaatgtcagcaatgaaaaaaat

SEQ ID NO: 650831 - DNA, 83 bp, Homo sapiens
tcggctcccagagaaaaatcggcagatgttacagctgctcatgaaccacttggcaaaaacctgcacttgttgccaagtcttcc

SEQ ID NO: 650832 - DNA, 74 bp, Homo sapiens
gaaaggagctcggggactcccccaaagacaaggcaaacctgtatgtgggactggtggtcatgtgtggcttcgtc

SEQ ID NO: 650833 - DNA, 100 bp, Homo sapiens
ttggctgataaaattgccctgaaactggttggtgaagaaggatttgtaggctttaatccagtgtgaccagttgaggaaggagctggagaggcaggcggag

SEQ ID NO: 650834 - DNA, 100 bp, Homo sapiens
aagaggaagcggaaaccagtggccacagcatctttgtctagccccagtgcagacctggaatggccaaatatcaaggtgaagttcaaagtttgaaactgga

SEQ ID NO: 650835 - DNA, 100 bp, Homo sapiens
atgtattaaaacaattctcaaactctataaggttcaaaccttgtactactcagctgatcacaagctgcttgatgggaacctactagatggacaggctgag

SEQ ID NO: 650836 - DNA, 100 bp, Homo sapiens
caagactccacctcctggtgaagaaagcaaacaacatatgtagagtgtgtcggtcagaaggaacacctgagaaaccgctttatcatccttgtgtatgtac

SEQ ID NO: 650837 - DNA, 100 bp, Homo sapiens
ttgtttgaagttcctgggcctaactccaaaagggccaatacgcatattcgagactttctacagttgcttttgaaatcagaaagtcagtgcagggttgtag

SEQ ID NO: 650838 - DNA, 80 bp, Homo sapiens
cgcgctgcgcccgccctcgcctcacctggcgcagacgaacaggaggcattgaactcaatcatgaacgatctggtggccct

SEQ ID NO: 650839 - DNA, 83 bp, Homo sapiens
acagggacattcacaacatgaataatggaagcactgtggtgtcgtgaaaactacccctaaaagccaaaatgggaaaggaaaag

SEQ ID NO: 650840 - DNA, 76 bp, Homo sapiens
ctcttcttcgccagcaccgtgctctccaccacagttgctgatcatctgggctgtgatccacaaacccggttctttg

SEQ ID NO: 650841 - DNA, 100 bp, Homo sapiens
agaaatcctggtgtcaaggaaggatataagttttacccacctaaagtggagttgtttttcaaggatgacgtggaacgctgcaagcagaaggacctactgg

SEQ ID NO: 650842 - DNA, 96 bp, Homo sapiens
cgcttctttcggttctacctgggagaatccaccgccatccgccaccatgggtgtccgcaatgttgccagtgtctgtctgcagattggctacccaac

SEQ ID NO: 650843 - DNA, 88 bp, Homo sapiens
gttacaatcaaggtctatgaaggtgagcggagaattagagtacatacactttgtttgccagtggtaagttcactagcagatgtatatg

SEQ ID NO: 650844 - DNA, 90 bp, Homo sapiens
ctccaaaggagcatctctgtatgacttgctcggcatggaagtagagttgagggtattcgtggacaccgtagggatgccagagacatacca

SEQ ID NO: 650845 - DNA, 98 bp, Homo sapiens
ccgaggtggagctgcggggccctggcatgaaagtttctctcctgtcacaatggcatgatctcggctcactgcgacctctgcttcctgggttcaaggat

SEQ ID NO: 650846 - DNA, 90 bp, Homo sapiens
gagaaatcctcagtgaacttgggaagtgtgttgctggaaaaggtcaggttggtgacattggtccatcacatgggtggagttattcgaaaa

SEQ ID NO: 650847 - DNA, 50 bp, Homo sapiens
aaatatttcaattatactgtgaaggttggaatgttgcatcagcaggtaga

SEQ ID NO: 650848 - DNA, 97 bp, Homo sapiens
ggaagcaagcggtcttcttcttcacgcaagacccactgatctcagcatgaagagacaattggcgactagctcaggatcctccagcagctcaaactcc

SEQ ID NO: 650849 - DNA, 83 bp, Homo sapiens
ttagtggaggaggtgcagctcaacttctaccagttcctcggggtgcagcagatttggtcgtattgggcgcctggtcaccaggg

SEQ ID NO: 650850 - DNA, 76 bp, Homo sapiens
ggagcaaaatggcggatcatgtgcagatctgactgcagccatgagcagcaatgagtgcttcaagtgtggacgatct

SEQ ID NO: 650851 - DNA, 100 bp, Homo sapiens
gttaccattgtgaaagaaggttgggttcagaagagggattgaaaatcttcaagagcagcttagagacaaggaaaagcagatgagcagcttgaaagaacgg

SEQ ID NO: 650852 - DNA, 75 bp, Homo sapiens
gtctcctcggatcgcctggagaggcactcggacctgacctagaggatcaagacataatgggagcatttttagaca

SEQ ID NO: 650853 - DNA, 100 bp, Homo sapiens
tgaggtagagtgttcttttgcctccgagtaggaccgagagtgttgggaagaggagcgcgtccccggggaaatgagataagctgtcattggaaggaatagt

SEQ ID NO: 650854 - DNA, 51 bp, Homo sapiens
taaatgcactctttcgaaagaaaggaattacatgaacgacagccttcgcac

SEQ ID NO: 650855 - DNA, 98 bp, Homo sapiens
ggaggagcagttgtctgatgaagagaagctgagtcagtgctgattctctcaaatagagcttgaaggataaatcttcatttttgtttcaacaaaacttc

SEQ ID NO: 650856 - DNA, 82 bp, Homo sapiens
cacctacgtcccgctgccgtcgccgccgccaccatgcccaagagaaaggtgtttgagaagtcccccctgcgggtgaagaact

SEQ ID NO: 650857 - DNA, 85 bp, Homo sapiens
ctggaggagattctggggcagtatcaacggagtctccggggaatatatatgtcccagatgtgaatcaggctttattgaagaagtg

SEQ ID NO: 650858 - DNA, 112 bp, Homo sapiens
cttttgcattacagcctccctgctttgcccgcctgctgctggaagcttagcaggagtcaggaatggagagaagggtaatggttttacctcttattgtggaaacctgttgaga

SEQ ID NO: 650859 - DNA, 74 bp, Homo sapiens
tcactaaaagaatagatagtcttcctttaactgaaaatgcccatcatcctggatccggccgaccccaccctcaa

SEQ ID NO: 650860 - DNA, 94 bp, Homo sapiens
aaggaacgaggcaaggagctaaagcagcgtgcgttcagccctggggtaactaggatttctacctcaaccgcgagacctatgcaaggacggtgtg

SEQ ID NO: 650861 - DNA, 98 bp, Homo sapiens
acatcatcccccagctctgggagtttccagtctgatggaggagacagagcctgcttcggccctgggcagtgacggggttcgggtgaccatggagagtg

SEQ ID NO: 650862 - DNA, 73 bp, Homo sapiens
tataccaaccgggcagcagcacagtactatctgggagcaagagcagctctacctgaggtcaggtgtggtgtcc

SEQ ID NO: 650863 - DNA, 90 bp, Homo sapiens
ccgccttgggctcccgcggccactcggggacgccagtgaaccgcgtgcccatcatggcgaagcaggtgctcgacctgtacgctctgtttc

SEQ ID NO: 650864 - DNA, 50 bp, Homo sapiens
acccacggagcctccggggctgagggtggttcccacttcatcaacacctc

SEQ ID NO: 650865 - DNA, 88 bp, Homo sapiens
ccgcccagcgagagcagaaccaatccagtcaggatgtcactgactctaaatcagacatatctgaagagatggattaagaatgctttgg

SEQ ID NO: 650866 - DNA, 80 bp, Homo sapiens
agctgggcgcggattcgccgaggcaccgaggcactcagaggagtttggtgccctggttgtcagatgttggaaagcagtag

SEQ ID NO: 650867 - DNA, 100 bp, Homo sapiens
ccagatggtccccgagttcgctgccagccccaagaaggagaccctcatccagctgatgcccttcttcgtgtgccagaaccctgtggagcatcatgaactg

SEQ ID NO: 650868 - DNA, 100 bp, Homo sapiens
gctctatggcctgcaggaagcgctggaaatagccagagagatgaaaattcttgctgctgtattgagaacagattgagaaaacaagggcagaagcagggag

SEQ ID NO: 650869 - DNA, 75 bp, Homo sapiens
cccctctgctcgcggccgcgcctttgaggtttggacatatttgactcttttccccccaggttgaattgaccaaag

SEQ ID NO: 650870 - DNA, 82 bp, Homo sapiens
gttcgggtgcgctgctcaaggacacggtctacaccgacttcgacgttcttggccaggctgactgagagatttgtgctgggag

SEQ ID NO: 650871 - DNA, 74 bp, Homo sapiens
gatgttggcaatctgatccagcctggggacattatccggctcaccaaagggatctaagagaagagggagatgaa

SEQ ID NO: 650872 - DNA, 90 bp, Homo sapiens
tgtgagcagggtctgcacgaaataaagctcctgggcaaggggacgtctgcagctgagaagcaaaatgtggattcagcaaacaaattctgg

SEQ ID NO: 650873 - DNA, 100 bp, Homo sapiens
cgatttaaagctgagctgcgaggaaaatggcggcgggaggactcacaccacccggcaagaactgctcactacggctccctgccccagaagtcacacggcc

SEQ ID NO: 650874 - DNA, 99 bp, Homo sapiens
gagcttcggagatccctgcggtcccgcgggacggcgcggcagcagctgacctcgcaggtgcatgtccgttccgaggaatgggatttaatgacctttgat

SEQ ID NO: 650875 - DNA, 98 bp, Homo sapiens
acagtatgcaacacattttcctatacctctgattcgggaactggagcctctcctctgtcacagtgacaatccatctcagctcatctggacatcatctc

SEQ ID NO: 650876 - DNA, 82 bp, Homo sapiens
atggctttggtccccagcgcagtgaagtggtgagcctttttgtcactggaaggtgtgcagattactgagagtggtaaattcc

SEQ ID NO: 650877 - DNA, 100 bp, Homo sapiens
cgtacgatgtttgtgaacagcctccacctctcaatatactcactccttataggcatgcccaagagaatcgtaaatgcaaaaattgcttgccttgacttca

SEQ ID NO: 650878 - DNA, 78 bp, Homo sapiens
aaacactgggacctgccacccccaggagaactcgagagagggtcctcgagggtgtctcctggcattaggcccctctgt

SEQ ID NO: 650879 - DNA, 96 bp, Homo sapiens
ctgactcggactgggacaatgacagcagctcggcccgcctctttgagaggtctcgcattaaggctctggcagctgcaactgcaactcttccatgcc

SEQ ID NO: 650880 - DNA, 95 bp, Homo sapiens
ggggacatggatggagctcacggagcaggtttttagaggaacgtaaagagatcaccgagaaattcagtgcggaacaagatgccttcctgcaggag

SEQ ID NO: 650881 - DNA, 103 bp, Homo sapiens
tctaacacattcagactacaagtccagacccaggagagcaaggcccagaaagaggtgctggagaatctggtaaaagcaccattgtgaagcagatgaggatcct

SEQ ID NO: 650882 - DNA, 75 bp, Homo sapiens
ggaattatggagaatcctattgtaaaatcacttgctaaggcaccccctgtaatggcctatcctgctactacacca

SEQ ID NO: 650883 - DNA, 82 bp, Homo sapiens
ccgccgccggccctcggtgcgcccggccgcctgcacccccaggacgtggcccagtggaacatcgggagcctccggaccatcc

SEQ ID NO: 650884 - DNA, 108 bp, Homo sapiens
caccaccccctcccaaaaaggagaccaagccagagccaatggaagaagatcttccagagaataagaagcagttacgttatgatgatgaagtgaagcgggtggtggcag

SEQ ID NO: 650885 - DNA, 100 bp, Homo sapiens
tctctcaagagaagctgcaagagcaacatctttcctcaccccaaggatgaatctggttatagatggacaagagacgatcattctgcaagcaggcaacctg

SEQ ID NO: 650886 - DNA, 51 bp, Homo sapiens
gtgtgtctgaaggaggatgataaaggtgactgaacttgaatgtgttagtag

SEQ ID NO: 650887 - DNA, 87 bp, Homo sapiens
tcttcaggaaccttcatcctttagaggcaagaaaattggatgtatattttgaatatgaagaaaaaataatgagcaaaactactctgg

SEQ ID NO: 650888 - DNA, 100 bp, Homo sapiens
aaatttctcaacaccacagtcagctaaggtccgacactggttcagaatttgccatcgtcagtgcagactgtgtgtgagtcctggaacaacatcaatacca

SEQ ID NO: 650889 - DNA, 90 bp, Homo sapiens
gccgggcggaggagagctcaagctaaggctgccaaacgagggattctttcatctggtcggggcagaggaattcattcaagaggtcgaggt

SEQ ID NO: 650890 - DNA, 82 bp, Homo sapiens
cagagtccggaagacagacaataatcgcattgctaggattgggaagttcagccatgaatatacaaatgcttttggaaaaact

SEQ ID NO: 650891 - DNA, 75 bp, Homo sapiens
gttcaaggaggccttccagctgtttgaccgaacagcttggacgaaccttgacaggatgggtgcagcgaactttcc

SEQ ID NO: 650892 - DNA, 90 bp, Homo sapiens
ttgtcaccgttatgtgggaagcgaatccagtctgcggatcaatggagagctaatcactgcctacccacaagtggtggtagtcagagtacc

SEQ ID NO: 650893 - DNA, 74 bp, Homo sapiens
ctggaccagactgtgcgcgtttgggatatttctgtttcagagactcctccactctctgggaatgacacggactc

SEQ ID NO: 650894 - DNA, 100 bp, Homo sapiens
ctgggtcgtcttctcggcgacaactgccctgctcttcatcccagggttcaggataagtttgaggtgctgaattacacaagcattcctatctttctcccgg

SEQ ID NO: 650895 - DNA, 100 bp, Homo sapiens
ccgaagcctcgggacggccctggaagccgctttaccgatttgttacaactcaagcaagggccagcagaaattctcttttgacagatataattgctgctta

SEQ ID NO: 650896 - DNA, 82 bp, Homo sapiens
aacccgaccaccggagaattcctggggcgcaccgccaagagctggggccatttcataattctgaatcatgtctgataacgga

SEQ ID NO: 650897 - DNA, 90 bp, Homo sapiens
ttggttttgatatggattatacccttgctgggtttcatcaccttaaatggttttgaaccaatgaaggtgtattcccttaaaaagacggac

SEQ ID NO: 650898 - DNA, 100 bp, Homo sapiens
ctctcattttccccccttgctcgggatggtgccacaggaggctgtgcgggccccgctccgcttcgaatgggttgatggaaatcacaatcttctgacaaag

SEQ ID NO: 650899 - DNA, 100 bp, Homo sapiens
gctgctggacgccaaccagctccgcgagctgcccgaggttttcaaatggaacattttgatgcatcacttagtacctatttcaaggcattgctaggccctc

SEQ ID NO: 650900 - DNA, 100 bp, Homo sapiens
tcatttgggcacagccctaaaggccaacccttttggaggtgcttctcatgcaaaaggaatcgtgctggaaaaagtgaacatgagagaatttcaagaatcc

SEQ ID NO: 650901 - DNA, 50 bp, Homo sapiens
aggcttttgggaagaatttgaggagcactagacatctactatgactgaca

SEQ ID NO: 650902 - DNA, 100 bp, Homo sapiens
cgggggccaggggcccctcgcctcccctctgaggaccgaagatgagcttcctcttgagctgacatggacccaaatcctcgggccgccctggagcgccagc

SEQ ID NO: 650903 - DNA, 88 bp, Homo sapiens
caattttgccaacttcagtgctgtcttctggatttggcgacatcttactgtgaaaacagactgaaaaaactttgtcagcacattatca

SEQ ID NO: 650904 - DNA, 100 bp, Homo sapiens
cccgctgcctggctccgtgtccgacccctggaagctgatgctgctggacgccactttccggggtgcacagcaagtgactggtcgaattgacaaatcttac

SEQ ID NO: 650905 - DNA, 100 bp, Homo sapiens
gcatcgcccagctgtacatgatacaggaatttcagggaagagccaggtcctgtttgctgtggtgttcactgcccgatatctggacctcttcaccaactac

SEQ ID NO: 650906 - DNA, 75 bp, Homo sapiens
tcagaactgtgttcgcaattcttacgatgtcttctctttgctacgagttctaaagttcctgttgcttcagacaat

SEQ ID NO: 650907 - DNA, 75 bp, Homo sapiens
gagtgccaggcgccggccggctgcgaagacgcggtgggccgcccctccggtcctgcaaccctggttccagtctgg

SEQ ID NO: 650908 - DNA, 75 bp, Homo sapiens
acgcctgcgcccagaagctggctggtaagcgggcccctcagtgctaccccagttccgtcaactctgccaggactg

SEQ ID NO: 650909 - DNA, 82 bp, Homo sapiens
gcaatccattccatgggttttattcacaggtaatcctcccacttcttaaaagtgatctttatgaagtgattcagtccacctt

SEQ ID NO: 650910 - DNA, 83 bp, Homo sapiens
gcgagatatctggccgcctctgccgcagctggaggggaacgcccttttgcttgtgactggcagggctgcgacaagaagttcgc

SEQ ID NO: 650911 - DNA, 83 bp, Homo sapiens
ccatcgcgacggccaaaaggagcggcgcggtcttcgtggtgttcgtggcagctgacggcccagagggtgggtgccaattccac

SEQ ID NO: 650912 - DNA, 100 bp, Homo sapiens
tccatcactcggattggcaggacctggggccaaaagccaaggtagatcgacacttgagaaagctggatcaggaactggctaagtttaaaatggagctgga

SEQ ID NO: 650913 - DNA, 100 bp, Homo sapiens
gtggcactggacggggaatcaagagacccggtttctaatccctgctctgtcactaacaagctgcgtgatcttcgtgagaaagatcagtctaaagaaaagg

SEQ ID NO: 650914 - DNA, 89 bp, Homo sapiens
atgcttcatcagagtggaaagtttttgatcccagtaggtacttcccggacatcagtaaccaagctcagtcttcatacaaagcccagaat

SEQ ID NO: 650915 - DNA, 46 bp, Homo sapiens
tgcctcactgagcaaccaagaaacactgatatttgcatttaatggg

SEQ ID NO: 650916 - DNA, 97 bp, Homo sapiens
aactccgcgacccgagcgcaagttctttaggtgctgggaatgtagccgatcgtgttttggctcagctcttaacagaaatggatgggattgaacagct

SEQ ID NO: 650917 - DNA, 82 bp, Homo sapiens
cagggaataggagctggggagcccttctgcgccacagcctctacactctgtcaagttgaacctgtgggaagatggtttgaag

SEQ ID NO: 650918 - DNA, 50 bp, Homo sapiens
gcgttggaggccaccgtttccaggtcacgagaagagaatgccttctagat

SEQ ID NO: 650919 - DNA, 75 bp, Homo sapiens
cccctcaagagccagggactcggtttcccccgcaggccgccctccccactgttaccaacatgaagctgctcgcag

SEQ ID NO: 650920 - DNA, 110 bp, Homo sapiens
gaggaggaggtggaggaggtggaggaggtggaggaggcgccggaccggggggttttcggctttgtgagaaaccttaccatcaaacacgatggccagcaacgttaccaaca

SEQ ID NO: 650921 - DNA, 100 bp, Homo sapiens
cctggcttgccggcttcagctcgcgcctcttcgccgtcatccgcttcgaaagcatcatccacgagttcgacccgtggctccaaccaggaatggagacgcc

SEQ ID NO: 650922 - DNA, 100 bp, Homo sapiens
cgtgaggtcaacctgcgcccccagatgtcccagctcatgatggagcagtccaagaagtcctccctcatggtggcccgcagtattctcaacaacaagctca

SEQ ID NO: 650923 - DNA, 88 bp, Homo sapiens
agttcttccagtcctcctaggcatcttattgatcctccagtcgagtgtatttgaatgaagcagggttcaactttgtgagaaaatgcat

SEQ ID NO: 650924 - DNA, 90 bp, Homo sapiens
gttgcaagtatcatcctgggctccaaggagaggaccccaccaacaactgaacgctttggtcaggctgctacaatggaaggaattggggca

SEQ ID NO: 650925 - DNA, 90 bp, Homo sapiens
agagaaagataggcggccatggtccaaccttgaaggcacacgactgtctatcccagatggctgcactggcctaggacagacggttcttcc

SEQ ID NO: 650926 - DNA, 51 bp, Homo sapiens
gcttgtcccagaagcaatttaaggagcaggccagtgaagaagcaaaggaag

SEQ ID NO: 650927 - DNA, 75 bp, Homo sapiens
catgtgaacacgaacactctaattgcctcctgatagcacacagaaagttatcaagtgggaatcctgtatatgaaa

SEQ ID NO: 650928 - DNA, 75 bp, Homo sapiens
gccacagcagcctcccaaggagtctgcaagttggatgtaagcctgaacaacagatgatgtatgctggaagtaaga

SEQ ID NO: 650929 - DNA, 116 bp, Homo sapiens
tccatctctgccctttgaaacaaaagggtatttcttttctctcttcagcccccaacccagtggagatgcctgtgaggagccaccaacatttgaagctatggagctcattggtaaac

SEQ ID NO: 650930 - DNA, 97 bp, Homo sapiens
cacagccctcatgttcagctccatcgtctgcagcgtcccgcacacctggcagcaaaagagggggagtcggtgaagtacttcctggacaacttggacc

SEQ ID NO: 650931 - DNA, 100 bp, Homo sapiens
cctgaacctgttgccagatggtgcaatgttcaaagtactcaagatgaatttgagttttttgctccactcaagcctgttagaatcaccatggaatacagct

SEQ ID NO: 650932 - DNA, 90 bp, Homo sapiens
tgtcattacatgtgaaggctgcaaggagatctattgggaaactgattataaccactcgggcaccatcgatgcccacgagatgaggacagc

SEQ ID NO: 650933 - DNA, 100 bp, Homo sapiens
ggagagaaggaaagtcaatcgtaggaagaacacagtacagactgctgagaaggaagaatttgaacatcaacagaaagagctggagaaagtttgcaacccc

SEQ ID NO: 650934 - DNA, 100 bp, Homo sapiens
agtgaaagccagaatggcatccagagagaggctctttgaactttggatgctttattgtacaaaggctactgcagcactggggtgtcagttgttggtccga

SEQ ID NO: 650935 - DNA, 75 bp, Homo sapiens
tttcatacagaagtacctgcttcagagacatgagaagattcatactgggccgttgctccagggagaactgcaaat

SEQ ID NO: 650936 - DNA, 96 bp, Homo sapiens
ccagtacggggatgagtccactctggccttccagcaggtggaacggcacatgtgtgatggggacattgttatcttcaaccggcagccaactctgca

SEQ ID NO: 650937 - DNA, 100 bp, Homo sapiens
gaccaaggaggagcctgttccagaactgctggaagctgaggtgaccttggagaaggtgctgggaattacagtgtctggaggcagaggacttgcctgtgac

SEQ ID NO: 650938 - DNA, 82 bp, Homo sapiens
acaggcggcgccatcttcgaacttagacttccggaaggactttggcgagggcggtgcgtctttctacgtgaataggattttg

SEQ ID NO: 650939 - DNA, 98 bp, Homo sapiens
accgaacccagcattttcggcaaccgctgctggcagttttgccaggtgtttgttaccttgtcctcctgcaaggagaatccttttaaccggaagccatc

SEQ ID NO: 650940 - DNA, 75 bp, Homo sapiens
caacctggatatcagcccccagcggcccaggcccaggaacggcaggagcagctgatgggatatcggaagagaggg

SEQ ID NO: 650941 - DNA, 82 bp, Homo sapiens
ttcggcagtccacccaccgccgccgcctcccaggaaccctcagtgctgcgtctagattctgcaggggaggtttgctgggacc

SEQ ID NO: 650942 - DNA, 75 bp, Homo sapiens
gagaaaaccatgatagaagtagaagctccaatcacagatcctgataacttaagtgactctctcttttccggtgat

SEQ ID NO: 650943 - DNA, 87 bp, Homo sapiens
gcctcctttgcccctcccacccttattacctggagatgatgacatggatagaaatgactgctgtccatgcaggcaacataaacttca

SEQ ID NO: 650944 - DNA, 110 bp, Homo sapiens
cttgagaataagactgttgttgtcaccacaattttggttgaagctccattcataccaaagtttagaggctctggagataccagcaactttgatgactatgaagaagaaga

SEQ ID NO: 650945 - DNA, 75 bp, Homo sapiens
ggaagaggagattgagactttaaatgaaatgtctcacaagctaggtgatccagataacgaaggaggcccaacttc

SEQ ID NO: 650946 - DNA, 80 bp, Homo sapiens
ttcaataccatccttaccaccagaagctatccacaacttcgcagagcccaaacaaattcgaatatcttctaaaacaggaa

SEQ ID NO: 650947 - DNA, 80 bp, Homo sapiens
aggagagctccgtggagagaagttttcggctttgtgagaaaccttaccatcaaacacgatggccagcaacgttaccaaca

SEQ ID NO: 650948 - DNA, 83 bp, Homo sapiens
tgaggatgatggtagattgccaggctactgcagcactggggtgtcagttgttggtccgacccagaacgcttcagttctgctct

SEQ ID NO: 650949 - DNA, 80 bp, Homo sapiens
ctgcaactaactccattcttaattggttggatggcaagcatgtggtgtttggcaaagtgaaagaaggcatgaatattgtg

SEQ ID NO: 650950 - DNA, 100 bp, Homo sapiens
gtgagccggacgaagtggacaagttcaaggccaagttcctgacagcctggaacaacgtcaagtacggagcaggccgggctctcgccatgggtcactgtcg

SEQ ID NO: 650951 - DNA, 112 bp, Homo sapiens
tgaagctttgcagccttgcagtccttgtacccattgttctcttctgtgagcagcatgtcttcgcgtttcagaggaagtcgaggctcaagaggttctcaaattgatagtcaca

SEQ ID NO: 650952 - DNA, 75 bp, Homo sapiens
tggagctggcagagaaaaaggccaccgattatgacgccgtgcccatccagtccagcgtggtgttatgttcctgcc

SEQ ID NO: 650953 - DNA, 80 bp, Homo sapiens
atctcagtgacctttatcaagagggaggtggggaagacagggctccagctaccacaggacgggctctgggtatagccgtt

SEQ ID NO: 650954 - DNA, 76 bp, Homo sapiens
agcctatggagttgtacttaaatgcagacacaaggtggggtggcagttgaaaaatttggtgaatgcactacgagag

SEQ ID NO: 650955 - DNA, 82 bp, Homo sapiens
atggtctactgcaaaattgatcagacccagagaaaagtagttgtcaggtgtgagtgttatgactatttatttgatattgccg

SEQ ID NO: 650956 - DNA, 50 bp, Homo sapiens
gaaaatgattgggaagaggttgaagtgcacgagcatagctgtgtctcgga

SEQ ID NO: 650957 - DNA, 96 bp, Homo sapiens
ctctgaaaaaattcaaaactagtccttattttccaaccacagaacttacaatgtctcagaaaaatggtgggaatgttcttcagatgatgtatgaga

SEQ ID NO: 650958 - DNA, 101 bp, Homo sapiens
gaatcatgaagtatcagctgttactgaagtctcacaccattttgctggtacagcctaccaagaggccagaaggcagaacttatgctgactacgaatctgtg

SEQ ID NO: 650959 - DNA, 90 bp, Homo sapiens
tcgcatgcctggggttacacctaaacaggaaagatgaatgggagggctgattttcgagagccgaatgcagaggttccaagaccaattccc

SEQ ID NO: 650960 - DNA, 51 bp, Homo sapiens
gaagatctatgctcctctgtacttgggtcctaacctgattataaaacaacc

SEQ ID NO: 650961 - DNA, 90 bp, Homo sapiens
cgggcgccccgccggtcacctccgcgcggacaccagactccgccgtggtcatggaggagggaagtccgggcgaggttcctgtgctggtgg

SEQ ID NO: 650962 - DNA, 97 bp, Homo sapiens
agaccggaagctgagtttttatccaccagcatctcagacatgtcgaaaaagatgttttgatccctaaaataatgagagaaaaggccaaagagaggtg

SEQ ID NO: 650963 - DNA, 85 bp, Homo sapiens
gaaagagtccacgtgtactatttcttttctacgaagacctgaaagaggataaagaagccaagtctgggaagttggaaaaggagaa

SEQ ID NO: 650964 - DNA, 75 bp, Homo sapiens
aggaaaggtgtgctgtgcctgaggccagggtgataaaagaaaatgtggctgaagttacccgaagttcagcttgca

SEQ ID NO: 650965 - DNA, 100 bp, Homo sapiens
agttctcgcccactatcctcagaatatagaatggaacccttttgatcaagatgcggtgaacatgatggtggcagatgaaaaagcagatttttttcccctg

SEQ ID NO: 650966 - DNA, 82 bp, Homo sapiens
gtgaaaaccacaagcaggtccaaagagagacatgttccaccttccctcttcacggaacctaatgaaatatcccagtatttac

SEQ ID NO: 650967 - DNA, 75 bp, Homo sapiens
ttgaccttctgaaacacattcaattcaaggtgggtgacatcaccatcctggtgaacaatgccgccgtggtccatg

SEQ ID NO: 650968 - DNA, 50 bp, Homo sapiens
gtacatatgatttcagctgcaatggcagcataacatggcttgaagtaaaa

SEQ ID NO: 650969 - DNA, 100 bp, Homo sapiens
ccctcatggggaaaatctccccggtgactttcagcaccaagcaatatcatttatgctggctgaaatggcaatgaaagttgaactagctagaatgagttac

SEQ ID NO: 650970 - DNA, 75 bp, Homo sapiens
cacattgagagcaaaatctacaagatgatgcagggaggaggctgccccgggagacgctggccttcagggaggagc

SEQ ID NO: 650971 - DNA, 74 bp, Homo sapiens
tttcttgacattaccttttcaccagactatccgtttaaaccccctaaggtgacgcagaagttctccctggtgat

SEQ ID NO: 650972 - DNA, 100 bp, Homo sapiens
tcagcgtgtgtcttcagctggatcgaggagcactgtaagcctcaggaagaaatgcagagtaacgtggaagtggtccacacctaccgccagcacattgtga

SEQ ID NO: 650973 - DNA, 100 bp, Homo sapiens
cacgtttcttctagccattcaggatgtagtatcactagtgattctgggagcagcagtctttctgatatctaccagcttcagaatggcagaagatgatcca

SEQ ID NO: 650974 - DNA, 87 bp, Homo sapiens
ccgcgagtatttctactacgtggaccaccagggccaggttaatttggagtggcccctggagtcagtttcctacaccatccgaggccc

SEQ ID NO: 650975 - DNA, 84 bp, Homo sapiens
agaaactgcaccggaaatgtgcctaccagatgctctaaacgtccctgccatctggtccagatggagtcctcaggcaacccagag

SEQ ID NO: 650976 - DNA, 100 bp, Homo sapiens
tttagctgacaaagctcgagcacttttaactactggaagtttgcgtggcaaaatggcaatacctgtgctttggaagtttctggagaagtatccttcagct

SEQ ID NO: 650977 - DNA, 73 bp, Homo sapiens
tgaacagatttcctgcccggggccctcatggacggttggatcagggccgaagatgtgagctgtgatgaatggg

SEQ ID NO: 650978 - DNA, 75 bp, Homo sapiens
gtcctgaccaccgtgaacggacagtcccccccagataacgaaggaggcccaacttcattcaataaggagcctgac

SEQ ID NO: 650979 - DNA, 82 bp, Homo sapiens
ccgccacctggaccgctccatttgacgagccaaactcaggctgtaccttgagcagctcaagcaactggtgcccctgggcccc

SEQ ID NO: 650980 - DNA, 50 bp, Homo sapiens
acagtgctggtctgcctgacatatgagcaccatgccaggactgcccaccc

SEQ ID NO: 650981 - DNA, 75 bp, Homo sapiens
cttttcctcgctggggtgtacggaacctacaagcagcaattggcgcctattatgactttgagagcccaaacatca

SEQ ID NO: 650982 - DNA, 99 bp, Homo sapiens
gacagccggcggcggagcggccggtccacggaggagagtttcataaatggacgctgacatggactacgaaagacccaacgttgaaactatcaaatgtgt

SEQ ID NO: 650983 - DNA, 75 bp, Homo sapiens
agtggaagtgctgaaaaatgctcatctctcacacagacttttgatggacaggagcctgtgggccaaagctgacca

SEQ ID NO: 650984 - DNA, 83 bp, Homo sapiens
cccgcgtccagcacctacgtcccgctgccgtcgccgccgccaccatgcccaagagaaagatgaggacggggacttggttgcct

SEQ ID NO: 650985 - DNA, 74 bp, Homo sapiens
gccagtcgcctccaggccaagagggatccttcacccgtgtctggccgagacgcatccagagctttcgtgaccgg

SEQ ID NO: 650986 - DNA, 100 bp, Homo sapiens
gaatgggcgcgctatggagtgttctataagttccaacctattgacctcatcaggctgatcccaaagaactaatcaagatggtcaccaggcatgtgactcg

SEQ ID NO: 650987 - DNA, 87 bp, Homo sapiens
gagcagtgggggttgctgacccagaggagagttctccaaacatgatcgtttactgcaaagaacatcatttacagcgagcaatttcag

SEQ ID NO: 650988 - DNA, 100 bp, Homo sapiens
gaagggcgacgccaagccggaggaccatgctcgacagctgaccaaggccatgatgcgaaaggccacggccagccgcctggtcacgcagcgcgatgcggac

SEQ ID NO: 650989 - DNA, 75 bp, Homo sapiens
cgggactgcggcggcgccggcctccggggagaaacgtgtatcccctactccgtgttgctgaaagacctggagatg

SEQ ID NO: 650990 - DNA, 82 bp, Homo sapiens
gctgaatgaagaagagggaaggacggttagtcaggtaaaaaagctccagttttatttaataaagaaatgattgagtcaatga

SEQ ID NO: 650991 - DNA, 100 bp, Homo sapiens
ctgacctggtcctcatgctgccgaggctgttgctgttgatctgtggggttgtagaaggtgatttagctgccatagaagcatacaagtcatcaggaggaga

SEQ ID NO: 650992 - DNA, 82 bp, Homo sapiens
aaatttacatacgagaatggcttgtgaaatcatgcctctgcaaaggagttaaagttcctcgtaattttcgcttgttggaaga

SEQ ID NO: 650993 - DNA, 100 bp, Homo sapiens
gcatttgcacctgtggcttatctacgctttttagaattgcacttggaggacaagtcactcagcctctgaagaagcttcgggttcagactcaggcagtcag

SEQ ID NO: 650994 - DNA, 82 bp, Homo sapiens
ggcagagttgttatttttcagcgtgaacaagaggatgaccggaaagaagggatgaccgcgtttgtggaaaagagaaaggcca

SEQ ID NO: 650995 - DNA, 75 bp, Homo sapiens
agttggcacccctttgaagagaagattgtcagcagttcggttacagtgtacagcatgtatgtttctataatggct

SEQ ID NO: 650996 - DNA, 60 bp, Homo sapiens
ccttttccgcgagaactggcagggagtgaccgtctccttatcaagggaggcagaatcgtc

SEQ ID NO: 650997 - DNA, 87 bp, Homo sapiens
aagtttttatcaacaaaggcaaaggattcggatttattaagcttggattgtgctgcattctgacttggattctgccatcgaacacag

SEQ ID NO: 650998 - DNA, 100 bp, Homo sapiens
aaagcattacaaatatgaagaggcattatttatgaccttttctatggaaaggtatatgccctcattttgcttaagacctctggccagagcagggcatgga

SEQ ID NO: 650999 - DNA, 76 bp, Homo sapiens
gattgacatctgtgacagactaaacaggacgtctttaatgaaggtgaggggaagtggcttcgaaacattgactatt

SEQ ID NO: 651000 - DNA, 90 bp, Homo sapiens
gatggacctccagatttccttactgtgtgaagcctcagtttaggtcatctggtggttcagaacactcaacagagggctctgtatccttgg

SEQ ID NO: 651001 - DNA, 75 bp, Homo sapiens
ccctgatggacttggacatggagctgtccttgtgtccatgaaactgggaggcgaccgtgttagctgccagttcct

SEQ ID NO: 651002 - DNA, 97 bp, Homo sapiens
cccctcgcctcctctcctaggtgccggccgggagggcggccgcagcaggagcttgaagaaatccgcaaatgtgggatgaaaaacttccgtaacatcc

SEQ ID NO: 651003 - DNA, 100 bp, Homo sapiens
ggattccagaagatttaactacgtggtccgggagatacaactcgtcaacgaatcaaattcagtgatgacagagtatgcaagagtcaccttctcaactgtt

SEQ ID NO: 651004 - DNA, 89 bp, Homo sapiens
agggatccctaacatcagaagagtttgctaagcttgtgggaatgtctgtcctcctagccaaagaaagtttagacactctgcaatatcac

SEQ ID NO: 651005 - DNA, 75 bp, Homo sapiens
cggaggctgaggagaaggaggagcgggccgtggaggcttcgccgcctaggaatagccaggccagaagaaggaagg

SEQ ID NO: 651006 - DNA, 100 bp, Homo sapiens
agaccatgttgcaggcccacagctgcctacagaaccgtcccaaaatatggcaaagaaacctattctgagaacatttccccagaggagctcaaaatggagt

SEQ ID NO: 651007 - DNA, 50 bp, Homo sapiens
tggtcaccgagaagtccccgaccgactgcgtcaagggttccacactgttg

SEQ ID NO: 651008 - DNA, 100 bp, Homo sapiens
catcaaccgccagatcaacctggagctctacgcctcctacgtttacctgtccatggtactatttcttgatcatccaaaaaagaagattcgggacacacag

SEQ ID NO: 651009 - DNA, 100 bp, Homo sapiens
agaagaccattcagatgggatctttccggatcaatccagatggcagccagtcagtggtggagctgcctgtgtcagggaatctgcttgatgtgtacagtag

SEQ ID NO: 651010 - DNA, 75 bp, Homo sapiens
gcttgagcatagtcttttcctcagagttaatagagtggatacaaccttgctgaagatgaagaatatacaatattg

SEQ ID NO: 651011 - DNA, 97 bp, Homo sapiens
tctacagactgctttcaaaaaattaagagtggatgcatcagggtcctcagaatggttggaatgaccctccagctttgaacagagtacccaaaaagaa

SEQ ID NO: 651012 - DNA, 100 bp, Homo sapiens
cagagccccgcgtttcagccctagggaaggactttgagcttcaccatcttcttgatcctgtttttggcttttatcgagaccccatcctcactcaccagca

SEQ ID NO: 651013 - DNA, 90 bp, Homo sapiens
tgagatgcaggaccttggggacaagctgcgcatgatcgtcatgggacacagaaggtatggagagtcggcttgactacactgtgtggagca

SEQ ID NO: 651014 - DNA, 74 bp, Homo sapiens
aaagctggtcatcagtttggagttacatggcgtgagggccccaaggctgttgcagctcctcgacctgatcggtt

SEQ ID NO: 651015 - DNA, 100 bp, Homo sapiens
caaggcgaatatttaacttatatctgcctgtcagaacacagatatgtagaactcttcttgaattctacagcaggagcaagcggtggtgcttatggtagcc

SEQ ID NO: 651016 - DNA, 82 bp, Homo sapiens
cagcgccgacggcagccggcacctgacggcgtgaccgacccgagccgcaattctgtggtgttcttggtcacacatttatgga

SEQ ID NO: 651017 - DNA, 83 bp, Homo sapiens
catgcttctgacggccaatgaaacccccaagatgggcatctattacattccactggccttggtcgcacgggcactctgatagc

SEQ ID NO: 651018 - DNA, 50 bp, Homo sapiens
cttgagaactgaatcaaacacttcaggtccagtccaggtgcagcagcaag

SEQ ID NO: 651019 - DNA, 71 bp, Homo sapiens
tccccgagccgtgtttccttccatcgtcgggcgccccagacaccaggttgggacaaacattcctatggtta

SEQ ID NO: 651020 - DNA, 85 bp, Homo sapiens
gtggatgtgaagatttcctctaaaagggggcaagcgcgatgaagagctggttctgcccatcaactcctccctgagcgtcactctg

SEQ ID NO: 651021 - DNA, 100 bp, Homo sapiens
ggaggaaattgtgatctgcgatcgagcctcggtcaaggaggtggagatgttacagccaaaaatatctggttggcagaaagtgttctggatatcctgacag

SEQ ID NO: 651022 - DNA, 83 bp, Homo sapiens
gcacgggctgtctgattctccttcgctgtggcgggaagatggccggatttgaaggagaacaaggggtctgtggaaatcatgag

SEQ ID NO: 651023 - DNA, 92 bp, Homo sapiens
cagggcccgcgggccaggagagcgctcggcgggcccggcctgcatgcctacgaaaaggaggacagtgatgaagtccacctggaggagttgag

SEQ ID NO: 651024 - DNA, 100 bp, Homo sapiens
ttcagcagcaacagcagcagcaagttagtggattaaaatctcccaagaggaatgacaaacaaccagctcttcaggctctgtatgtggatgtgatccgtgt

SEQ ID NO: 651025 - DNA, 100 bp, Homo sapiens
ctggggaacctgctcaaagccctgggtcgcttggaagaagccaagacttaagccagattgggttttgagaagagataacatggaagaaatcacaaatccc

SEQ ID NO: 651026 - DNA, 83 bp, Homo sapiens
ctgaccattcgggagagcattctcatcagcaacggctcaagacttcccaagtaagaagcggaagaggagccgctggaaccaag

SEQ ID NO: 651027 - DNA, 101 bp, Homo sapiens
gccagctgcttaacaacctccgggcgcactccatcaacctgaaggagatcaacctgaggccgcagatgtcccagcacttgctctgaaatttggggactgag

SEQ ID NO: 651028 - DNA, 100 bp, Homo sapiens
ggcattggaacttcctgttctgatagcgtggaaggtcgtttatacgcaatgcagactggaatgaagatcgatagtaaaactcctgaatgtcgcaaatttt

SEQ ID NO: 651029 - DNA, 75 bp, Homo sapiens
acagcatatttgagtcatttccttcgtacccacagtgcttcatgagaggtttggtgcacctcgatttggaggaag

SEQ ID NO: 651030 - DNA, 100 bp, Homo sapiens
agacagccctatgctgtcagtgaattagcagggtgcttcaaggatgaccgcatcgtcttctggacttggatgttctccacctacttcatggagaaatggg

SEQ ID NO: 651031 - DNA, 100 bp, Homo sapiens
gctgctgcacattaggttgcagtatgtggccagttatttgcctcagtaaaagagctcatccaaaatacttgagttgtattgcaatcagctgttttttcct

SEQ ID NO: 651032 - DNA, 96 bp, Homo sapiens
gtggccctcgatgtgctctgcgtgttgctggggtcagcagttcccagcgctcctcacggatccctctctctcgggccagggtggagcaggctcgcc

SEQ ID NO: 651033 - DNA, 82 bp, Homo sapiens
agcccgccagcatgccccagtccaaaggcttgggcactgtttaaaggaaagttccgagaaggcatcgacaagccggaccctc

SEQ ID NO: 651034 - DNA, 91 bp, Homo sapiens
ataaaaacaaggtggaagattcttccaaggaaccagtgcgaaggtgatgatgaacagtctacacagatggctgcaagttgggaagatgata

SEQ ID NO: 651035 - DNA, 100 bp, Homo sapiens
aactagagcaaataaccgttttgaaattggccccgtggttatgaatgtgcttcagtttcataatgcctcctgctatggcagacatccttgacatctgggc

SEQ ID NO: 651036 - DNA, 92 bp, Homo sapiens
ccaggcccgcgaccgtccgccagtcgtcccgaggccaccagcttgggctccccacggagggcagcaagtgggacttggggaacccggctgtc

SEQ ID NO: 651037 - DNA, 74 bp, Homo sapiens
tattatctcccctgcccagagatcttagtttgcagaagcaggaggtgaagaacttgcaccagcgtctggaaggg

SEQ ID NO: 651038 - DNA, 83 bp, Homo sapiens
gtcctcagcgactcttctgacctccgcgcgacgtacccgccgccgccgttggctggaggaaagtatgcctcagactcctccct

SEQ ID NO: 651039 - DNA, 98 bp, Homo sapiens
acagcttgtggctccttgagggaggagattcagcccggcgatattgtcattattgatcagttcattgacaggtgatggcatcagctgagaagggaagg

SEQ ID NO: 651040 - DNA, 100 bp, Homo sapiens
aggcgacgaaccttggagagaggagaacgaacatcttctggacctttgtccagaattccatagtactcagcacacagatggccacattgggacagaagcc

SEQ ID NO: 651041 - DNA, 100 bp, Homo sapiens
gtgactttcacttccagccagctgtgaagaagcacacggaccctgactactcggctgcctatgtcgtcatagaaactgatgcagaagatggaatcaaggg

SEQ ID NO: 651042 - DNA, 96 bp, Homo sapiens
cgcccgtctgcttcgggcctctggaatttagcgctcgcccagctagccgcagagtccctgcaggaagcatcacccaggctggcagatcatggtagc

SEQ ID NO: 651043 - DNA, 83 bp, Homo sapiens
caggtctaccgggccacgcaccgcctgctgctgctggccgctgccatggcccagacactgcagatggagatcccgaacttcgg

SEQ ID NO: 651044 - DNA, 75 bp, Homo sapiens
ctgggcggcgaggaaggcgtctcccggtttatctggaagaatgtgaactggctaaacagctttatccaaaggaaa

SEQ ID NO: 651045 - DNA, 74 bp, Homo sapiens
gccgccgctgccaacgtcgagcggcgacggctggtgagccagccatgagagggtatcttgtggccatattcctg

SEQ ID NO: 651046 - DNA, 50 bp, Homo sapiens
agggaagttcctttttgaagtagttccagcaacttgagttggtggaacca

SEQ ID NO: 651047 - DNA, 83 bp, Homo sapiens
gccgtagctccatcgcattttatgtttctggcgagaagggaacggagttttcatcagctttgatgtggaaaatggcccttccc

SEQ ID NO: 651048 - DNA, 100 bp, Homo sapiens
aagtggtggtaaaatgggtgacagcactttagaagagattacctaaaacctcgggcagaagaggagaggaggatagcagcagaagagaagaagaagcagg

SEQ ID NO: 651049 - DNA, 50 bp, Homo sapiens
gaaaaacctgtatgtggaaccacctgcatagaatgtcaagctaaccaggc

SEQ ID NO: 651050 - DNA, 90 bp, Homo sapiens
gtggtcgtctggtcctactacgcgtacgtggtggagctctgcgtgtgagtgtttctcaggagctatcagaaactatcctcaccatggtag

SEQ ID NO: 651051 - DNA, 100 bp, Homo sapiens
ccagaattttccaggaagcttcaactgtgtttgcaaaactggatacacaggtccttccatagtgacgccccccaaggacatctggaatgtcactggtgcc

SEQ ID NO: 651052 - DNA, 83 bp, Homo sapiens
ggagaacacagttggagaaaatcggcagctgagacggccttggccgtgcctccggagccagcgtggtggccatagacaacaag

SEQ ID NO: 651053 - DNA, 98 bp, Homo sapiens
tcgggggtcggcggaagatggcggccggcgaaaggagctggtgcctgtgcaagttgttgaggaattggcagcaatgaaacagattctcgttaagatgc

SEQ ID NO: 651054 - DNA, 100 bp, Homo sapiens
gaagatttctggccagtggagagaggaattcctcaagacaccattccaggatctgtgccagttcagaagcaggcgagcctcttccctgatgaaaaagaag

SEQ ID NO: 651055 - DNA, 83 bp, Homo sapiens
cccctcctcacccgaacatcagggccctccagactcaggcgccccaacactgtggaaagtgaagaaggcattgaagatgacta

SEQ ID NO: 651056 - DNA, 98 bp, Homo sapiens
gtccagcccaggaaaatggagaggtggggtggaagacaacccgtgagtattacaccttcatgtgggttactttgcccattgacctaaacaacaaatca

SEQ ID NO: 651057 - DNA, 75 bp, Homo sapiens
aaaaccagtctaccatggttactgctgacatgggaattgaatgatctggcacgggaccctccagcacagtgttca

SEQ ID NO: 651058 - DNA, 100 bp, Homo sapiens
tgttgatcaggagtgaattcacagtctaccatgaattggaaggaatgggcattaatacacagaatcctcgaatttcaggtccaaaccccgtggttccgat

SEQ ID NO: 651059 - DNA, 100 bp, Homo sapiens
cccgcacacctgagccgcccggagaggagcctcggccccgtacccaggaaataatgcaaaaggtgtcccaaggctcctgaccagtgaacaaagatttgag

SEQ ID NO: 651060 - DNA, 111 bp, Homo sapiens
tgttggcgccatcatcatgccccacaacatctacctgcactcggccctggtcaaggaggtcacaagccccaaagtggacgtgttcaatgctaacagcaacctcagttctgg

SEQ ID NO: 651061 - DNA, 95 bp, Homo sapiens
caagcaggccctgttggaattgaagaagataatggaaaaccagtagattcccagacatcgcgaagtgaatctgaaattgtgccaaaagttgctaa

SEQ ID NO: 651062 - DNA, 98 bp, Homo sapiens
actaccaaacagcacttcctggcaatgatagatacatcagtgtgggaagccaagcagatacaagctcctggctggtgccccccgggagctcgctgtgc

SEQ ID NO: 651063 - DNA, 100 bp, Homo sapiens
cgtcaagatggaggggcctttgtccgtgttcggtgaccgcagcactggggaaacgatccgctcccaaaacggcttccagttgtgcagctctggaaatgcc

SEQ ID NO: 651064 - DNA, 74 bp, Homo sapiens
acgaatctgcccacccctcctgtaacccagcctgtttcacttcttgggacactccggacgcaggcccggccagg

SEQ ID NO: 651065 - DNA, 83 bp, Homo sapiens
ctcagacggggatgtctttggcccagagctggacaccctcctggactcgctgagcaagccatgggccacagccaggaccggct

SEQ ID NO: 651066 - DNA, 83 bp, Homo sapiens
cgggtccttcggagatatctacctggaagctggaggatcaggagcagcgggcccgacagctcaaggagaggctgcgcagcaag

SEQ ID NO: 651067 - DNA, 101 bp, Homo sapiens
caagggggaccgcatcctggaggtgtggccccccacctcctacagccagccagcctgcctctgtgaatatccctggaagtcttccctctagtacaccttat

SEQ ID NO: 651068 - DNA, 75 bp, Homo sapiens
tgaagatgtgtgggaacgtgaaacatctgatacaagcatttaaatcaaacggtattgagatggattgggttatga

SEQ ID NO: 651069 - DNA, 96 bp, Homo sapiens
gccactttgcattgactggaaacaatggcatttacagaaagagtcaacagcagtggcaacagctgttccaggagctctgagtcctttggccattcc

SEQ ID NO: 651070 - DNA, 101 bp, Homo sapiens
cctccgtctgccacacgctgatggtgcagcaccgcatgatggtacccaaagtcagggaaatgaataagcgtctaacagaagaacaagccagaaaaacattt

SEQ ID NO: 651071 - DNA, 74 bp, Homo sapiens
gccaaagaggaagcagcttgggcttccagctcagcagggaaccctgcagccctggtacctgacagtgtaaagaa

SEQ ID NO: 651072 - DNA, 74 bp, Homo sapiens
acaaatcaaattagtggttttggcagacctgttatcctaaactaggtgagtcagcttttggtacatgtgatgat

SEQ ID NO: 651073 - DNA, 96 bp, Homo sapiens
ggcggggaaggccgcacggttgtgcactgcttggaagctgcccgggagtgtcgcaggaagaagaaagaatatgtcaaatgtcttgaaaatcgtgtg

SEQ ID NO: 651074 - DNA, 75 bp, Homo sapiens
tgagagaaaacagaaatcttgaaacagtgtctcctgaaaggaagactgaaactgttgaggagcccatggaggaag

SEQ ID NO: 651075 - DNA, 101 bp, Homo sapiens
aaacttcacaacatgatagttgatctggataatgtggtcaaaaagtaggagagaagtttgctgaggaatgccttcaagcacaaagtgatgaatgactgcct

SEQ ID NO: 651076 - DNA, 100 bp, Homo sapiens
ctgacggctgtctctggactggacagcagtggcgtccgcttttctctaaggaacccgcctcatcagcagctgtgggctcaggcccccctcccgaggcgga

SEQ ID NO: 651077 - DNA, 75 bp, Homo sapiens
agggctcagaatagcaccattgctggtatgttcgcaattcgtgctgatcatgattttgtagtacaggaagacttc

SEQ ID NO: 651078 - DNA, 75 bp, Homo sapiens
gacagtattgaggaggaggctgcacaccatagtcaccagcaagtgccccagctgttcagtggtgtttgggggtgt

SEQ ID NO: 651079 - DNA, 100 bp, Homo sapiens
gcggacttctacaaggaatttttaagtaaaaattttcagaagcacatgtattataacagctccgggaagcagtttgttcgctatataaacatgttgataa

SEQ ID NO: 651080 - DNA, 83 bp, Homo sapiens
cgcgcctgctgccgggttgcgctccgtgcacctcttgcggcatcagaattttgaagaacaaatgcaaggcatgaagacccagc

SEQ ID NO: 651081 - DNA, 100 bp, Homo sapiens
agcctcctggcctgcagcttctgtgtgctcctgagaggttctgacagggagacaacagcaaatacaagagaagattgagcagaaccgacgggcacaagag

SEQ ID NO: 651082 - DNA, 100 bp, Homo sapiens
gggagtctccgcgtcccgctcgctgggagagaggtacctctccttttccctctccctttccctaagggttgaagctttgagagaagcagcaactgctgtt

SEQ ID NO: 651083 - DNA, 78 bp, Homo sapiens
caaagatgtgagagagaaaagtgagtttattctgaagagcatccaggttcgatacaagaggctgttttcctagcgtgg

SEQ ID NO: 651084 - DNA, 100 bp, Homo sapiens
cgccgaggccttcaagtgcatgatgtgcgatgtgcggaagggcacctccacccggtggggtgaccgctctctgttgggacccagtccagcgggtgttgtt

SEQ ID NO: 651085 - DNA, 75 bp, Homo sapiens
ggctgctgcaggagccattttaggtaaaccccaaggatttggaccccaaatatgcctacatccaggtgacctatg

SEQ ID NO: 651086 - DNA, 83 bp, Homo sapiens
ctcacaagataatagccagctccccagaaatgaacctgcccacggtgtccgcgctcaggaaatgcactcggtgatggaaagag

SEQ ID NO: 651087 - DNA, 101 bp, Homo sapiens
ccaccaaaagtccattatgaaactggcggctatgagaggttttcctccgagtacccagaattctgttctaaaaccaaggccctggcagccatcccaccccc

SEQ ID NO: 651088 - DNA, 100 bp, Homo sapiens
ccaaggcgtgaggcgccgcccgggtgtccccgcggcgcaggaggcggtggagcgcagagcgggcgagcgcgtggctgcttcaacccccaactccactgct

SEQ ID NO: 651089 - DNA, 87 bp, Homo sapiens
gccccatcgatgtgcggcgtccgctgtataaggtataccaagcttggctacgcaggcaacactgagccccagttcattattccttca

SEQ ID NO: 651090 - DNA, 100 bp, Homo sapiens
gggattcaggtgtggtgccggtgggaactgaggaagcgcccaaggaattccagagacgctgtaacactctgatttcattgattgagaaagaaaatatgga

SEQ ID NO: 651091 - DNA, 106 bp, Homo sapiens
gtataaacttctgaatgaaagagggcctgctcattcaaagctttcagtgtcatcagtgtggtttcttacctcatcctggctcttctctctgtcaccatcagcttca

SEQ ID NO: 651092 - DNA, 90 bp, Homo sapiens
gacgttatcggaaaggtctgccttacaagggacaccatagcctctcaccctaaggatactaatggaccatactaccaaggaccagtccac

SEQ ID NO: 651093 - DNA, 74 bp, Homo sapiens
gagcacggaggggataggcacggacgcaacacttttggaacttagacgctaccattgagacccagagcagcagt

SEQ ID NO: 651094 - DNA, 83 bp, Homo sapiens
cacaaagggacctgatgaagcgaagatcaagtgtttggtgtataaaacagaccaagctcaagatgtaaagaagattgagaaat

SEQ ID NO: 651095 - DNA, 101 bp, Homo sapiens
ctcgtggtccagctggccctcctggcaaggctggtgaagatgaaaaagaagatgtccctgtggaaatgtccaatggtgaaccaggttgccactactttgag

SEQ ID NO: 651096 - DNA, 90 bp, Homo sapiens
acaagcttacgtctctgctcttcagtacaatcctgtattgatgaagatgaccctactgctgatgataccagtgctgctgtaactgaagaa

SEQ ID NO: 651097 - DNA, 100 bp, Homo sapiens
ggatgtctgatctccgaataactgaggcgtttctgtacatggattatctggtggcgacatgtctaagaatgtgagccagtcacagatggcaaaattgaac

SEQ ID NO: 651098 - DNA, 71 bp, Homo sapiens
ataaagtgattttttgcctttgttgattaactggacaaattcagcaccagcaggcagctggctccggtttt

SEQ ID NO: 651099 - DNA, 100 bp, Homo sapiens
ggaatgatctcattaaaagtaattcccaaccagcaaagccgtcttcctgcactacaggttcaaaccttgtactactcagctgatcacaagctgcttgatg

SEQ ID NO: 651100 - DNA, 90 bp, Homo sapiens
gccgtcggcagcaagaacagagagagaggtggacagatctgagagatactgagaccacccatacctggagcccagacactttgtggatga

SEQ ID NO: 651101 - DNA, 75 bp, Homo sapiens
gatttctaccatttgatgatgataatgtaatggctttatacaagaagattatggcaggagtagggctgattggag

SEQ ID NO: 651102 - DNA, 88 bp, Homo sapiens
tcgtggaggagtacatccccacacaggagatccaggtcaccagcatccactggagctacaagagtgatgatccgggagaagaaccccg

SEQ ID NO: 651103 - DNA, 122 bp, Homo sapiens
gaccgccgcagtgtgtgcattttccttcccaacgatgaatctctgaacatcatcataaatttttcggctttgtgagaaaccttaccatcaaacacgatggccagcaacgttaccaacaagac

SEQ ID NO: 651104 - DNA, 74 bp, Homo sapiens
gaagttaagggagacaaagttgaaaacaaagtgctggtactccaaagattcaggtttactcacgtcatccagca

SEQ ID NO: 651105 - DNA, 83 bp, Homo sapiens
gatttttaccagtttacttttaattttgcaaagaatccaggacaaaaaggattaggtttctttacctccagaaagaagaatat

SEQ ID NO: 651106 - DNA, 75 bp, Homo sapiens
ggcccaaccacaagacgactcaataggaggaagggtgtcaaattgagaaccaggtagatccccaccacctacagt

SEQ ID NO: 651107 - DNA, 100 bp, Homo sapiens
accaaggtgtctgccagcacagtccccactgacgggagcagcagaaatgagactgggcatttagctatggagacattattatcccttacttctaaacgag

SEQ ID NO: 651108 - DNA, 100 bp, Homo sapiens
tgcgtgtccatcgctgctgtcctgcccaaggtccaggtgtgcctaccgcatgttgccgctgctgtttctgctgggacgtctgactccagttccttctccc

SEQ ID NO: 651109 - DNA, 75 bp, Homo sapiens
caaaaagacccagctggagcaggaagctgggaaaccacaaaggaatggcatggaagaggagatggttcgtgttac

SEQ ID NO: 651110 - DNA, 100 bp, Homo sapiens
cgtcactgaggttgcagttggcgtgaaggtcacattgaagtagtgaaattgcttgtgtcgcatggagctgaagtgacatgcaaggataaaaagtcttata

SEQ ID NO: 651111 - DNA, 98 bp, Homo sapiens
ctgcttttaattcaactcagagacttcacagagaatgcagttgtcttgacttcaggtctgtctgttctgttggcaagtaaatgcagtactgttctgat

SEQ ID NO: 651112 - DNA, 83 bp, Homo sapiens
ggcgacggctccgcgacgttgaggccgcgttgggcggttcagactcagggtgacagccgctgtactgtgttaaggaaacaaga

SEQ ID NO: 651113 - DNA, 83 bp, Homo sapiens
gaggaggaggccgaggtggatgagtttcccaccgatgggtctcgtccctgcagagctcccctgacttctctgcattccccaag

SEQ ID NO: 651114 - DNA, 83 bp, Homo sapiens
atgcccatctgggtggtcctcctgtcccggatcattatgaaggagaagcagagcaccaaggctgttcggctcttgaatcccag

SEQ ID NO: 651115 - DNA, 100 bp, Homo sapiens
cgggggtggcattcaagctcgccgcaggatctgtgagaatgggcctgactgtgcaggctgcaatgtgatgctgcagttggagaagaaacttgaacgtgaa

SEQ ID NO: 651116 - DNA, 83 bp, Homo sapiens
tggagatgggcagacggattcatttagagctgcggaacaggacgccctctgatcagccattgtttgatgtcctgtgactgaga

SEQ ID NO: 651117 - DNA, 101 bp, Homo sapiens
tattgggaaaattcaacttcattcagggcttatttcaaaacctttgtccctcagttccaggaggcagcatttgccaatggaaagctctaggaaacaccagt

SEQ ID NO: 651118 - DNA, 126 bp, Homo sapiens
gatgagcaacctggacctaaccaagattctgtccaagaaatacaaggagcttccggagaagaagaagggctttgagagactcatctgtaatcagaagaaggagaatgagaccagggtggtgctgtg

SEQ ID NO: 651119 - DNA, 100 bp, Homo sapiens
gggaggataattgggatgatgacaatgtagaggatgacttctctaatcagttacgactatatcatcatgtacatagaaaaatccaaaggattctgcaaaa

SEQ ID NO: 651120 - DNA, 90 bp, Homo sapiens
gacgagcgctgcactaacgcaggatccggctgccgaaggtcctcgccagacggtctggaaaatcccgaagcagaagcccgtattcatcta

SEQ ID NO: 651121 - DNA, 98 bp, Homo sapiens
tgcgaccacttcgactagtgtcaggagtgcccaagttctaaatgtcgcacagtgcttgcttcgccccagaagattgaaggttttaagcgtcttgattg

SEQ ID NO: 651122 - DNA, 74 bp, Homo sapiens
agcagtctaaacctgtgaccacccctgaagaaattgcacagccaaaacctattgatgtacaagtcattacacac

SEQ ID NO: 651123 - DNA, 99 bp, Homo sapiens
ctggaggaaagctgaccaggcggcttgtgaacagtcagatcgaaagctgctttgcgtcgcagttggagcagcacccccaccgcaggtggcattgaaggg

SEQ ID NO: 651124 - DNA, 75 bp, Homo sapiens
ccatgatttcgatgatgatgatcctgagatctccagcaccctgccggtggcactactgagagacgaggtgccagg

SEQ ID NO: 651125 - DNA, 75 bp, Homo sapiens
tgaaagaactagtgaatatgatactaatgaagatgggtttttcaggctttcttctagtcaagatgagtgataaac

SEQ ID NO: 651126 - DNA, 98 bp, Homo sapiens
tgcatcgagacttgaaaccacagaacctcctcattaatgagaaaggagaattaaagctagcagattttgtgtcttctgggactctcctactcattgct

SEQ ID NO: 651127 - DNA, 90 bp, Homo sapiens
gtatcctaccaggccgcacattgcagaaaggcttcccaactgatgcaactcttgatgacataaaagaatggttagaagataaaggtcaag

SEQ ID NO: 651128 - DNA, 50 bp, Homo sapiens
cctggatccaggataacggaggctggctgtgtcagcgtgttatgatgccg

SEQ ID NO: 651129 - DNA, 82 bp, Homo sapiens
ttctacatcggcagctaccagcagtgcataaacgaggcgcagcgggtgaagctttctgtatgagcccaatagccaagggtac

SEQ ID NO: 651130 - DNA, 95 bp, Homo sapiens
gcctgagcgccctcctgctgcgctacttcctggagcacctgcgtgtcagcggccacccccttaaccctcgggactactgtggctggacacctctg

SEQ ID NO: 651131 - DNA, 83 bp, Homo sapiens
gcagctcatcccgcagcagctgctgctgcctcaagggctacgtcaaccacagcctgtccgtcttccacaccaaggacttccag

SEQ ID NO: 651132 - DNA, 73 bp, Homo sapiens
agattcgcagtggtcgcttcttctccttggctgcaggccaacttcaccatccgggaagatgccaaccccagct

SEQ ID NO: 651133 - DNA, 50 bp, Homo sapiens
tcggcctcccaaagtgctgagattacaggcatgagccaccgcgcctggcc

SEQ ID NO: 651134 - DNA, 49 bp, Homo sapiens
gtcgttatgccagctaagaaatgggttcaacagaaatatttggtggtta

SEQ ID NO: 651135 - DNA, 83 bp, Homo sapiens
gttggcaggagcatgggcttcggaggcctatagcccgcagcaaattgtggctactaatttgccccctgaagatcaagatggct

SEQ ID NO: 651136 - DNA, 76 bp, Homo sapiens
caggagttcattgaactcatccggcagaataagagactggacgctgtgagccctccagaatacccatcatatagcc

SEQ ID NO: 651137 - DNA, 82 bp, Homo sapiens
atttaattttagggtcctttatatagaagggagagtagaggtctcttcattattgatgacaaaggaatcctaagacaaatta

SEQ ID NO: 651138 - DNA, 74 bp, Homo sapiens
cctctcctccaggaacagcttcagggcaattgaaggaacagactaaaaatcgtgtcctggaaggaaactacagg

SEQ ID NO: 651139 - DNA, 100 bp, Homo sapiens
caggcttccagaaaaaaacaggagatcagtgagctagcagcagagaagccttcctggaaaaggatctaagcattgaagaacagtcagagtgtgctcagga

SEQ ID NO: 651140 - DNA, 73 bp, Homo sapiens
ggcgggagaactcactgaggatgaggtggaaagacagaggagacttgaaagaataaaacagaaacagtctcaa

SEQ ID NO: 651141 - DNA, 80 bp, Homo sapiens
ctaaaatcctttacaaactattcaggtcaaaatgcagatcttcgtgaaaacccttaccggcaagaccatcacccttgagg

SEQ ID NO: 651142 - DNA, 90 bp, Homo sapiens
tgcgtggggagacagcgccgggagaggccggcagccccgggacacccccgcaagcgagcagtatctccagatgaaatggccactgcttga

SEQ ID NO: 651143 - DNA, 100 bp, Homo sapiens
tcggcgccatcagctgcctggccttccacccgcactgggctgcgctgaagaaataccagactgagcaaaggagcaaaggcgacgccctggacaagtgtca

SEQ ID NO: 651144 - DNA, 100 bp, Homo sapiens
ctgtgctgggcctggcattatggactgaacctttcagctcttggggcattggtgagtctcagtaatgcacgtctcagttccatcaaaactcggtaagtct

SEQ ID NO: 651145 - DNA, 98 bp, Homo sapiens
cagatctccctttgagcattgaatgttttatgaatgatgttgatgtatctggaactatgaataggtgatttgatgaaggctgctgcaggagagttcgc

SEQ ID NO: 651146 - DNA, 82 bp, Homo sapiens
ctcgactccaaatggttgaaaacagatatacaggtgacccatcactacatggagatgtttggtcgtggctggaattcttcct

SEQ ID NO: 651147 - DNA, 75 bp, Homo sapiens
tcttcggtggactccttcggcagtccacccaccgccgccgcctcccaggtgtgagatcaaccatgagttccgttg

SEQ ID NO: 651148 - DNA, 104 bp, Homo sapiens
acataaatggaagcaggggatgtggtccaaggaagaaattgatattttgatgaacaatattgaacgctatcttaaggatcgaatcatcaatttagttgttggca

SEQ ID NO: 651149 - DNA, 90 bp, Homo sapiens
ttgcttggccatcaaaactgaagatcggagccaaatccaagaaagcacaagtgaagctgatgtggaggctgtcatggataagttgtttga

SEQ ID NO: 651150 - DNA, 75 bp, Homo sapiens
agcagatgatcctggcctgcctattcggagctgagccctgcaactaccggggatgttcgtctaaccccagaagac

SEQ ID NO: 651151 - DNA, 95 bp, Homo sapiens
ctggagttaaggaacagatccccggaggagtattctaccttgtaaatactgttatttgtatatactgtaaatgatgacatcggtgggcactaacc

SEQ ID NO: 651152 - DNA, 100 bp, Homo sapiens
aggaaaagggagcgatgttgatctcaggaagcacaaagggaccttcctagctctgactgaaccacggagatcctggaaaggctgaacaagatgtgcgggg

SEQ ID NO: 651153 - DNA, 86 bp, Homo sapiens
gaaagggaccgaaatggagagcaaaggtgtcatggagaaactccagctgggcccagagattctgcagcgggaaaatccaaggctta

SEQ ID NO: 651154 - DNA, 101 bp, Homo sapiens
cggggacaagaaactagagcaaataaccgttttgaaattgaatatgtgtgtcttctgatcaaaatcatttccgaggagaaattgaggaaaccatcactgaa

SEQ ID NO: 651155 - DNA, 101 bp, Homo sapiens
gggccccagaggccgcggacaccgacctggaggtactaggttttgacaagcttgcatcatgcgtgagtataagctagtcgttcttggctcaggaggcgttg

SEQ ID NO: 651156 - DNA, 100 bp, Homo sapiens
agcttttgataaaaccagacctgtaattgctctggaagcagccaaagcactggatgacaagaactgctgggaaaagctgggagaagtggccctgctgcag

SEQ ID NO: 651157 - DNA, 100 bp, Homo sapiens
tgcccaatcttgcatcagtgggaacaagactacctcctcctttaccccagaacctcctttacacagtatcagaacgtggtatggtcaggaaaaagactac

SEQ ID NO: 651158 - DNA, 96 bp, Homo sapiens
agaccgaattcagaaggatatcgacgtcgtgatccagaagtccagagctgaggactgcctgtttgcaggaccgccgggagagcctgcccacctccc

SEQ ID NO: 651159 - DNA, 100 bp, Homo sapiens
aattctgaggaaagggaattctccccgagtttcatcaactttgtcaacttgtggccatcttcccatttacccggacgcctctgacaatgtgtgcctggcc

SEQ ID NO: 651160 - DNA, 127 bp, Homo sapiens
caactgcacttgcctcagacactcgcaaagctccctggagaagcaagaactgaagaaagtgaactggaacctccagactggtgaattttcagctcgtttccttttgaagctgcccgtagatttcagc

SEQ ID NO: 651161 - DNA, 100 bp, Homo sapiens
ccagcctcgtcgccacccgtgaggactacaggtattagtcactgtaccactggctttactacagaaaggtgccattcagtttaatccaccgttgtcagag

SEQ ID NO: 651162 - DNA, 75 bp, Homo sapiens
cggcgcccggcgagggcgcgcggctggtgtccgccccgcccgaaaggttccaaggagcaggggcctcgacaaagg

SEQ ID NO: 651163 - DNA, 98 bp, Homo sapiens
tctgctgcggcgcggggaccgctgtgctctcgggtgacgagaacaagtcagtgcgcgaccgtttcaacgcccgccagttcatctcctggctccaggac

SEQ ID NO: 651164 - DNA, 99 bp, Homo sapiens
catatgccaacccacctaactacggaaaacctgatcccaaaattattgaaaacactcgaagggtcaatgtgacggtggactacattagaccagccagcc

SEQ ID NO: 651165 - DNA, 97 bp, Homo sapiens
tagttgcaggaaaacaagttcagggctcccactgattctacattatggtaacttctgaagaactgaatattataattcagaatgtaatgacctgggt

SEQ ID NO: 651166 - DNA, 49 bp, Homo sapiens
tgtttgtcaccacaaaaaggacaggttcagattcagaacaagaaagtgg

SEQ ID NO: 651167 - DNA, 100 bp, Homo sapiens
cgagaagcagccacgatgtgcgatcatggaagggaagtggttgctgtgtatgttactggtgcttggaactgctattgttgaggctcatgatggacatgat

SEQ ID NO: 651168 - DNA, 95 bp, Homo sapiens
ccttggcccagacacccacctgacttagtggctcctctgcaggaaaggcttgggaaacccgctacatgcttttgctctggctctccgtgacctgc

SEQ ID NO: 651169 - DNA, 74 bp, Homo sapiens
actttcatgaaggcgttagagctggtgaccaagaatatggcccaggtgaccaaagccctggacaaggccctgag

SEQ ID NO: 651170 - DNA, 75 bp, Homo sapiens
cggcgacctgaggggagagggaacgcagctgaaagcgtgaactgtgcagatcgggagcggtgccgagaaaaattt

SEQ ID NO: 651171 - DNA, 100 bp, Homo sapiens
gaaccttacacagcacggatattcgccgccggatttgactcttccaaaaacatatttcttggagcatttgggcaccctgggctgccaggatcctctttag

SEQ ID NO: 651172 - DNA, 75 bp, Homo sapiens
caaacgtggagatcaactcctctctgttaatggagtggaaactaaatatattttgccaactttggaaaaagaatt

SEQ ID NO: 651173 - DNA, 50 bp, Homo sapiens
cttggggcccgcacggaccctctacttcacaatggctgccatccggaaga

SEQ ID NO: 651174 - DNA, 74 bp, Homo sapiens
gcttcctgctgcgggaatcggacgccccaggagtctactcttcatcttgtgttgagacttcgtggtggtgctaa

SEQ ID NO: 651175 - DNA, 75 bp, Homo sapiens
atccgtcagaaaccagtaaaccatctatggagagtggagatggcaacacagagaatgtgatcaatgggcaggact

SEQ ID NO: 651176 - DNA, 100 bp, Homo sapiens
gaagaatcaatgctttggcccctggtgacatgtacatggtgtaatgacaggctttctccatatttacgtgcttgtaactctggcatgacctttgctccag

SEQ ID NO: 651177 - DNA, 75 bp, Homo sapiens
cgcgggcccggcggcggcggcagcggggtccgggtccggagcgccacacttttgtctggtcctctgagccccagt

SEQ ID NO: 651178 - DNA, 75 bp, Homo sapiens
ctgggaccactcgttgctgacagtcagaaagtggtcttcaagctgacagagaagctgacggaacagaaggagtgg

SEQ ID NO: 651179 - DNA, 75 bp, Homo sapiens
aaggtcatctcggagactagaggctggataccaaatagcagtggaaaccgatagcaagttttgtgaacaagtcag

SEQ ID NO: 651180 - DNA, 75 bp, Homo sapiens
ggacaaagaatacatgaaaggagtgatgagaacaaaggtggatgactgccaggcagaagagctgtccatcaagct

SEQ ID NO: 651181 - DNA, 75 bp, Homo sapiens
ctggactgtcctctacagaaggaagcacaaaaagggacagtcggggtggcaaaatatgcctgacggatcatttca

SEQ ID NO: 651182 - DNA, 50 bp, Homo sapiens
ttcagaaaagtcttcctttgtatctccagtactttccaggagcagatgag

SEQ ID NO: 651183 - DNA, 100 bp, Homo sapiens
ctcaaggaaacctttccaacacagatgtccaagctgccaagacgctgccaaggtctgcagagaattcaccgagcgtgagcaaggagaagtccgcttctct

SEQ ID NO: 651184 - DNA, 100 bp, Homo sapiens
ggatggggaggaggttcttcagtgtatgcctgggttaccatccattgacccatcaggcagctccccatcttcctcttctgctcctctggcaagtttttcc

SEQ ID NO: 651185 - DNA, 51 bp, Homo sapiens
gttgcggccagtcgccactgctagtccgcttagtggaaagaggatcccctc

SEQ ID NO: 651186 - DNA, 51 bp, Homo sapiens
caggcagaccttgcagtcaaacttccttcaaaatgtctactgttcacgaaa

SEQ ID NO: 651187 - DNA, 100 bp, Homo sapiens
gtcatgtacagctgaaggtagttgctggaaaccatgacattggcttccattatgagtgcgaaattgaggcaactcttgagaggctaaagaaactagagcg

SEQ ID NO: 651188 - DNA, 82 bp, Homo sapiens
agaagatcatcattaaggacggaggcacggctggacggcagtctggaaacgaccaatgagatcttggactctgcctctcacg

SEQ ID NO: 651189 - DNA, 100 bp, Homo sapiens
gtcgccgccgtcagagccgccctatcagggatgactctgttccagaagacaacatctggagaggcatcctctctgttattttcttctttcttatcatcag

SEQ ID NO: 651190 - DNA, 76 bp, Homo sapiens
tacttctcagctttaccatccctggaggagacctggcagcagggcgacataccttctgttgaataccttttacaaa

SEQ ID NO: 651191 - DNA, 75 bp, Homo sapiens
agtaagaagacttttcagatcaccaaacaagtttaattggttggggtcagataagaagaggagtgacaatcaagc

SEQ ID NO: 651192 - DNA, 90 bp, Homo sapiens
gcactttttggatcggcatctagtctttccgcttcttgaatttctctctgtaaaggaggtactctttgagcacatcaaattcttccattg

SEQ ID NO: 651193 - DNA, 82 bp, Homo sapiens
cagcagcttcgacaaagggaccatgcggaggatggcgctgtccatgatcgagtgagaagccctaccactgcaactgggacgg

SEQ ID NO: 651194 - DNA, 50 bp, Homo sapiens
gagaccgcggccgggaccgaggatgctgagccagggaggcggcccttcca

SEQ ID NO: 651195 - DNA, 100 bp, Homo sapiens
cagtcagctacgggaattcagtactctgtaacacccagctaccaggctgttactgaggcggagacacgggtgatgattggctttctggggagagaggaag

SEQ ID NO: 651196 - DNA, 100 bp, Homo sapiens
gcggagcaaaggcacccggcaacctgaacccccaggtgcgtcccgcgaccctgcaaggagctgctggggggggccctcagcctcttggccttgaacgggc

SEQ ID NO: 651197 - DNA, 94 bp, Homo sapiens
tcgggtccccgcaccacctcctgctgccttcccgtcgccgctcccgaagcttttccagacaatgcagatcttcgtgaagactctgactggtaag

SEQ ID NO: 651198 - DNA, 75 bp, Homo sapiens
gagcagaacagagctaaaccggttcacctggtgcccagacggctagcccatctgctggcaaggctaagattagaa

SEQ ID NO: 651199 - DNA, 96 bp, Homo sapiens
attcagcactcagaatgctccaggcagtgtaatctcattccatcttcattcatgactccagacagaatagcctaacatggcagaccagagacagcg

SEQ ID NO: 651200 - DNA, 74 bp, Homo sapiens
agatggcgcctgttgtgacaggatcgatctctttgggctgcctgacctccttgggtgcttgctattaattaaca

SEQ ID NO: 651201 - DNA, 116 bp, Homo sapiens
ttcggttcgggtgcgctgctcaaggacacggtctacaccgacttcgacggtctcctctgagcctccggcctccataagacccaaaacagatgacacctcttcccagtcccccgcgc

SEQ ID NO: 651202 - DNA, 74 bp, Homo sapiens
gtgtcctgaacctggaagttgtgctttttaagtgatgtcttggcattgcccattttcaagcaggaagattccag

SEQ ID NO: 651203 - DNA, 100 bp, Homo sapiens
tttcagataaactaaatgagatcaatgaaaagattgctccaagttttgcagtggaatcgtataacattcaggcttatccaacaacagtggtattcaacca

SEQ ID NO: 651204 - DNA, 73 bp, Homo sapiens
accccgcagcacagccgcgacttcaaggttctctacttttagagtcgaaaataaatcctaacactgcatacca

SEQ ID NO: 651205 - DNA, 100 bp, Homo sapiens
ccgccgaggactccagcacaccgaggggatctggtctgagggggcggacggcactgatatcaacgctgtggcccgctctcatgatgggaagttgctggct

SEQ ID NO: 651206 - DNA, 99 bp, Homo sapiens
ggcgctactactcatgacccttggacagcaggatgtttccaaagtcctgctaggccctctctctccctacacgtttcagaagcaggcaacaggaacaag

SEQ ID NO: 651207 - DNA, 75 bp, Homo sapiens
gttggagagtttttgcaatttgttcaacttgatggaggtatggaaacattggaacttcaaaaggacatcaaagaa

SEQ ID NO: 651208 - DNA, 101 bp, Homo sapiens
cggggtttcggcggccgggagggagttgtcggcgccgcggccgctgcggacggacgctcgcctgccggctgaggtactccaaagattcaggtttactcacg

SEQ ID NO: 651209 - DNA, 75 bp, Homo sapiens
gtcacccgctacgggaagcaggcctcgccacagttttttgctccactcaagcctgttagaatcaccatggaatac

SEQ ID NO: 651210 - DNA, 100 bp, Homo sapiens
cgcggtctggacaagcgaggaagtttctttaaggtgcgatacatgtcctcgacggatgccaaagtggaacagatgtttcagatactgttggacccagaag

SEQ ID NO: 651211 - DNA, 75 bp, Homo sapiens
cctagaaaagctgcctctgcaaatcgactgtctggctgcctggggatgcaaacttaaaactgattagagaactca

SEQ ID NO: 651212 - DNA, 75 bp, Homo sapiens
cttctgatgacacctttattttaaaagctgatgttccaagagactttagaagacagctttccatcgacactaggc

SEQ ID NO: 651213 - DNA, 83 bp, Homo sapiens
gcaagaactggattcgtggcgccacaagctcattcactgtgtaggtctgggatctgccgatatgggggatatgaagacccctg

SEQ ID NO: 651214 - DNA, 75 bp, Homo sapiens
tacttcaggacaacctcttgggcaggactctaaaatagagctcaagcttgagaagagagaaccactaaagggcag

SEQ ID NO: 651215 - DNA, 83 bp, Homo sapiens
caacattgtgggagacctactgcggaaagtcgggccatcactggtgcaagctatatttaacggagatcctgatgaagttcgag

SEQ ID NO: 651216 - DNA, 100 bp, Homo sapiens
tcgaagagtcgtgagggggtgacgggttaagattcggagagagaggtgctagtggctggacttgacctggaaagctctggcgacggcgcttgacgtgggc

SEQ ID NO: 651217 - DNA, 95 bp, Homo sapiens
ctgccaccagtaccaggagcaccaggaatgcctccagcccccaaatacatcaagatgtttgtactggatgaagctgacgaaatgttaagccgtgg

SEQ ID NO: 651218 - DNA, 76 bp, Homo sapiens
tgtacagacttctcgtgggcagcctcccctcggaactcgggcatcatggcctcagccctggaggagccgatggtgg

SEQ ID NO: 651219 - DNA, 100 bp, Homo sapiens
cggtccttacagccgctcgtcagactccagcagccaagatggtgaagcagatcgagagcaaggtctttggccatggcaaggccaatggagagccgacctg

SEQ ID NO: 651220 - DNA, 100 bp, Homo sapiens
agaggtttcagggagcagcaagacaatcactgcagagataccaggagggccaaacatgtgggctattacctctgaagaacgtactaagcatgacaggcag

SEQ ID NO: 651221 - DNA, 100 bp, Homo sapiens
ggcagaacagcagaaaacacctttaataaaacccatacattccactttctcgtgctcttcaggatccaaatgtggctgcgttcatggtagaaccaattca

SEQ ID NO: 651222 - DNA, 96 bp, Homo sapiens
gtcattcagttcctccagaagagcatccagcggcacctggacgacctgtcgaaactatatcattctctgctggaactgggtgagaagcgtaaaggc

SEQ ID NO: 651223 - DNA, 104 bp, Homo sapiens
tccagcaaggtcggcagagcaaggggcttacgcagaaggacctggccacgctgtggcggggccttcgtgggcccgcgatgccaggaccccaacccgtgcctcag

SEQ ID NO: 651224 - DNA, 88 bp, Homo sapiens
aaatacgccacatttattctaccggggaagacagtgggacagtcattttgtttactcattcagccctgttgcaggtcccaataaactc

SEQ ID NO: 651225 - DNA, 90 bp, Homo sapiens
cagataatgatttttccagaaggaacttgtacaaacaggacctgcctaattaccttcaaacctggactttaatttttggaagtgaataaa

SEQ ID NO: 651226 - DNA, 75 bp, Homo sapiens
ggtgcctgtgcaagttgttgagaggagaagaagatgattctttggccatcaaaccaccccagcaaatgtctcgga

SEQ ID NO: 651227 - DNA, 60 bp, Homo sapiens
aacttttgcccttatcagtaacacctgagggaccattgacatttatggatgtggccatag

SEQ ID NO: 651228 - DNA, 92 bp, Homo sapiens
ttccggcgcctccactccgtcccccgcgggtctgctctgtgtgccatggacgggattttttatcaagcagaaatgcatcgaacaacgagaat

SEQ ID NO: 651229 - DNA, 100 bp, Homo sapiens
tctgaaaaggaaaaggagagtattgccagagcaagagctggatctcgtctttctgtgggagatgagggagcaggccacttcgtgaagatggtgcacaacg

SEQ ID NO: 651230 - DNA, 51 bp, Homo sapiens
tcaaaggctgtcgcaaggaggaagggcttaatgtttggctatgccactgat

SEQ ID NO: 651231 - DNA, 100 bp, Homo sapiens
cagaacgtcaacaccaagtgcatcaccatccccagcaaatgatgtgcttgcttttggaacattggtcagtacttccaatacctacgacgggtctggtgtt

SEQ ID NO: 651232 - DNA, 100 bp, Homo sapiens
ctttgagaaaaatgtacgggcaggaagatgaataggtgtctgtttgattaagggccaaaagagaaacattggctactttgacaaccttaaagcggactcc

SEQ ID NO: 651233 - DNA, 75 bp, Homo sapiens
aaaatcatattatagatggagtaaagttccatgccattgcagtgtcaactaggcctcagttacttttcagtttgc

SEQ ID NO: 651234 - DNA, 75 bp, Homo sapiens
ttcgtctcttacgtctgcggaagtgcagctgcctcagttcttagcgcagatctgcaaagcccctgagcccaaaac

SEQ ID NO: 651235 - DNA, 76 bp, Homo sapiens
ctgcgtctgccgtggacagcgaagctgctgcggttcctgagccggaggttttaaaatcaaagatgggaaaatcgga

SEQ ID NO: 651236 - DNA, 100 bp, Homo sapiens
acaacacagacaccaaataaaatagccatctcacctttgaaatcgccaaataaggacactttcttcatgagcaacaaaccccaaagatacaaagacaagc

SEQ ID NO: 651237 - DNA, 83 bp, Homo sapiens
aagatgacttccctcttaggaaaacaggctgcgggaacaccatcgggccaccattaaggtcattcgacgcatgcagtactttg

SEQ ID NO: 651238 - DNA, 100 bp, Homo sapiens
agcaatcccacagagtattgatgaggaaactgaagtttggagcgatcacatcattttcccaaggaaattttacctggattgttcttaggcccatattcat

SEQ ID NO: 651239 - DNA, 97 bp, Homo sapiens
gcgacgtctacactgagtcggaggcgaagacactacaacaacaggagtgcaaacttctctacagccgaaaagagggtcaaaggcaagaaaacaaaaa

SEQ ID NO: 651240 - DNA, 98 bp, Homo sapiens
aaacacagcagttgcaccctgttttgcaaaaaccatcagtgtttgggaatgattctgatgatgatgatgaggcttggtggcatgcatgtttagtccca

SEQ ID NO: 651241 - DNA, 75 bp, Homo sapiens
ccgggcgggggcaccgagggctaccacgttctgcgggatatgttcaaggaatgagtgatttactttcccctcttt

SEQ ID NO: 651242 - DNA, 74 bp, Homo sapiens
atcatacaatatttcagaggtcatgtcaaaagagttctcaaaagtctatggccctgtgttcactgtgtattttg

SEQ ID NO: 651243 - DNA, 100 bp, Homo sapiens
ctcagttggaagcagccgatccagcctgcggagcctgtggggcagagtggtgtggcgtacattgcggctccctccggttctgctgctgacaaagttgtga

SEQ ID NO: 651244 - DNA, 96 bp, Homo sapiens
cacggtggataacgacaagaaaaacaatcgcttcaatgatgggaaggtggatcccgccgggaggtactttgctgaaagaaatttcagagcttccaa

SEQ ID NO: 651245 - DNA, 102 bp, Homo sapiens
ccaggaaaggaaaaacccacaaacatgttcacaacgggcatggtcatggcaaaaccccaaaagatgccgcgtcagttcgagccacgcatccaataccagcag

SEQ ID NO: 651246 - DNA, 100 bp, Homo sapiens
aggggaagaagatcaaagaaggaaagaagaaggggaagaaaagaaggggaagaagatcaaaacccaccatgccccaggaggcagttcccatgttatacgc

SEQ ID NO: 651247 - DNA, 113 bp, Homo sapiens
gcaagagaccgactggcggagcaccgccttccggcagaagctggtcagtcaaatgtatgacccacggcacaaccgctggttccagatccagtccctgcagcaggagcacgccg

SEQ ID NO: 651248 - DNA, 89 bp, Homo sapiens
aggagctaaagcagcgtgcgttcagccctgggaatagcctaacatggcagaccagagacagcgctcactgtctacctctggggagtcat

SEQ ID NO: 651249 - DNA, 51 bp, Homo sapiens
acatcccctttggcatcactgaggccatgacgctgatggagtacctcatca

SEQ ID NO: 651250 - DNA, 99 bp, Homo sapiens
cctgcccagcagaatttgtatagagatgtgatgttggagaactacagaaacctggtctccctaggtgacatcactcaaaaaggatatgaaaagaaaagg

SEQ ID NO: 651251 - DNA, 75 bp, Homo sapiens
tacccggaccctggaggtgcagagcgactactccagacaatgcagatcttcgtgaagactctgactggtaagacc

SEQ ID NO: 651252 - DNA, 82 bp, Homo sapiens
gcgagtttccgatttaaagctgagctgcgaggaaaatggcggcgggaggagcatcagatccatgctgctgctgactcggagc

SEQ ID NO: 651253 - DNA, 90 bp, Homo sapiens
ctggaggaagcacaccctgtcctatgtggacgttggcactgggaagggctgtaatccccttgcacaaaccggccggagtaaattgcagaa

SEQ ID NO: 651254 - DNA, 90 bp, Homo sapiens
gcggcgacggtggtggtgactgagcggagcccggtgacaggatgtaccaaatatgccccaacagcggcaagaccagcatcatcagagtgc

SEQ ID NO: 651255 - DNA, 83 bp, Homo sapiens
gatccagcatctctccaccatcgactacgtggaggacggtgctggagaatctggtaaaagcaccattgtgaagcagatgagga

SEQ ID NO: 651256 - DNA, 98 bp, Homo sapiens
aatctatcaaaaaggaagcatgttggacgatatctaatattacagctggaaatagggcacagatccagcaatctgcacatcgtgctgccacacgaggc

SEQ ID NO: 651257 - DNA, 50 bp, Homo sapiens
gtcaagttggttgctgatttccaaaggtgaggaagatcttctcagtcctc

SEQ ID NO: 651258 - DNA, 75 bp, Homo sapiens
ctaccggactacgagtatctggtgcttcatgcccaccagtttctgcagaatgaatatgccctcagtctggtttcc

SEQ ID NO: 651259 - DNA, 100 bp, Homo sapiens
ttggggcccttattgggtccagcatctgtggccaagaaaaattttttggtttccaggagactgacaaggcgtggcatgggggatgtctggcgctggcaga

SEQ ID NO: 651260 - DNA, 100 bp, Homo sapiens
acgcggggccatgtgcaggaccctaacgacaggcgcctccggcccatttacgatacgtaggtaacctttccagagatgtgacagaagtccttatacttca

SEQ ID NO: 651261 - DNA, 95 bp, Homo sapiens
aaatttccagactcattgatcatgatccttgtctcttctgtaaagatgccgaattcaagtacggcagctgctattgcttatggcctggataagag

SEQ ID NO: 651262 - DNA, 100 bp, Homo sapiens
cggaagcggagagcaacagcgcgccgagactctccaacatgtgccttctgaccatacaaatgaaacttccaacagtactgtgaaaccaccaacttcagtt

SEQ ID NO: 651263 - DNA, 100 bp, Homo sapiens
gccaagctccggaagattctggaggccagcaacagcatccagtttgtcatcaagagggtgaggacgcttgagcggaagttagaagcaaaaatgatcaagg

SEQ ID NO: 651264 - DNA, 100 bp, Homo sapiens
tagcaacgcagggaccgcggcggtaactgtggctagggaaacctggagcggtcagagcaggatggaagaccagtttgcagccctgcacgaaaatcccgac

SEQ ID NO: 651265 - DNA, 83 bp, Homo sapiens
atcatcttcacctactacaccgcctgggtgattctcttggcccgggtggaacgcatggagcagttccagaaggagaaggagga

SEQ ID NO: 651266 - DNA, 51 bp, Homo sapiens
gcctcctgcataactgggactacagcaattaccagctctggctgggtcgcc

SEQ ID NO: 651267 - DNA, 101 bp, Homo sapiens
ttcccggagccggagaccctcccttgaaaccggcactgggacttctcgatctctggaggcacctgttgcaagtgacagatcctaaatgcccaggagatgtt

SEQ ID NO: 651268 - DNA, 80 bp, Homo sapiens
cggccctgggagctggaggaaccgcgaattcaattcgtcataatctgtccctacacagcaagttcattcgtgtgcagaat

SEQ ID NO: 651269 - DNA, 75 bp, Homo sapiens
gtcgggttattcgagtgaccgagaccgcggccgggaccgagggcagcaatgaatgtggatcacgaggttaacctc

SEQ ID NO: 651270 - DNA, 148 bp, Homo sapiens
gcgctcactgcactccatactgaggaggaaaattataatgtggttgcaccaggctgtctttcacaatccagttttcagatgcttcaagtgttgtgaacagagacttgtttggattatgcatttctcagctagactaaataaatgctag

SEQ ID NO: 651271 - DNA, 75 bp, Homo sapiens
ttggagattccacccaaacttgctggtcactgggaggacaactacacctttgcccaacctgggattcaaatgaaa

SEQ ID NO: 651272 - DNA, 83 bp, Homo sapiens
gacggcgtggaccacatagacatttacgcggatgtcggcgaagagttcaaccagctgtcaaagctcgaaaaacagcagcagag

SEQ ID NO: 651273 - DNA, 82 bp, Homo sapiens
ttcgcagtggtcgcttcttctccttggctttgatgcggcctggaagaattgatagaatcatctatgtgcctttaccggatgc

SEQ ID NO: 651274 - DNA, 82 bp, Homo sapiens
aaagcctacgggatccgctttgacgtgatggtgaacggcaagccggtggctgctggcagcggaatcccccagatcaagtgct

SEQ ID NO: 651275 - DNA, 100 bp, Homo sapiens
aaaaatggagttgtggaactgatgtttaaaatcattggaccatttagtaagaagaattccagtcttataaatctattgaagacaatgaagtatatttgcc

SEQ ID NO: 651276 - DNA, 75 bp, Homo sapiens
ggaacactgccggggcccaaccacaagacgactcaataggaggaagccaagaaggatcaagaaggtggagaagaa

SEQ ID NO: 651277 - DNA, 74 bp, Homo sapiens
cgaaggggaaggcgcctgaagaggacgaagttcattcggctcctaaagaagtagcagtgtccaaggaacaagaa

SEQ ID NO: 651278 - DNA, 75 bp, Homo sapiens
ctacttggagattcatggcgtcgtttgcagcaagtcagctcagttggttgaatctggcgatgtggaacccatgga

SEQ ID NO: 651279 - DNA, 76 bp, Homo sapiens
gaagaagggaaggcgcgagtgaggaaaggaggtactgtagtattctaccttgtaaatactgttatttgtatatact

SEQ ID NO: 651280 - DNA, 101 bp, Homo sapiens
gggacggagccggatcaggagccgccgccgccatatcaggtgtgcgatgactgtgtggtgttgcgtagtaacatcggaacagtgtatgagcgctggtggta

SEQ ID NO: 651281 - DNA, 74 bp, Homo sapiens
cttcaagtaccaggtcctggcgatcagcaccaagaacccactgcaggtcaccatccttaatggctcagacattc

SEQ ID NO: 651282 - DNA, 75 bp, Homo sapiens
aaccagctctccatgcagtgtgtcaaggatgatgagacaaggaagaggtgcagcggaagcggaggaaggccttgc

SEQ ID NO: 651283 - DNA, 75 bp, Homo sapiens
gccaacttccccgtgcgtgtgccctttgaggccttcctggccagtacaatgcttgcacactgcacggtggaaaag

SEQ ID NO: 651284 - DNA, 73 bp, Homo sapiens
gaccaccatggcagatggcaacagaggatgtcaacaattttttggaggcaattgttctcttaactgaattaat

SEQ ID NO: 651285 - DNA, 98 bp, Homo sapiens
cgggcggggagctcggcggcggcgggcgcgggaagatggcggcagcggcggcggcggctgcagaacagctgtaaaggtgcctcccactacggcctgac

SEQ ID NO: 651286 - DNA, 75 bp, Homo sapiens
tgaggtgtacggacctatcaaaagaaattatatccagatcgagagacagaagattctgaaagggttcaatgaaat

SEQ ID NO: 651287 - DNA, 95 bp, Homo sapiens
agtccctggtcttcagaatgaacagaaacgattccaactggaagaactgagaaagtttggggcccagtttaagggtgcccggcacccatttgccc

SEQ ID NO: 651288 - DNA, 83 bp, Homo sapiens
ggcgcggattcgccgaggcaccgaggcactcagaggaggactggagactgatgcatgagggggctacggaggcgcaggagcgg

SEQ ID NO: 651289 - DNA, 101 bp, Homo sapiens
tagtcttctggttgaagctgcgcctttagatgacacgaccctacccacccctgtttccagcggatgcccgggcctggaggccgaatacatcaagcaatggt

SEQ ID NO: 651290 - DNA, 83 bp, Homo sapiens
ttcggtgtagaagtggcagcacggcaggtgatgatgaacagtctacacagatggctgcaagttgggaagatgataaagttaca

SEQ ID NO: 651291 - DNA, 99 bp, Homo sapiens
tcctgatggtgggccccaacttccgcgtcggcaagaagatcggctgcggcaacttcggggagctccgcctaggtccagaggtgtccttctaaagctggt

SEQ ID NO: 651292 - DNA, 51 bp, Homo sapiens
aaggtctctggagacatcttcagcagggatgtttgtgggggtggcgtcagc

SEQ ID NO: 651293 - DNA, 80 bp, Homo sapiens
aatggcgccctacagcctactggtgactcggctgcagagatgaggatgacatcaatgatgtgacttctatggcaggggtc

SEQ ID NO: 651294 - DNA, 100 bp, Homo sapiens
gcccttcagcttcagacaagcccagccaggagaccctgaccaggaagcgggtctctgccagttccccaaggcttcgtgggacacatatgcaacatgccta

SEQ ID NO: 651295 - DNA, 80 bp, Homo sapiens
accttgatggagaggccaggcgggagaactaccgcagcagttcatggcctcccacgggaacgacgccgcgagagccaggt

SEQ ID NO: 651296 - DNA, 98 bp, Homo sapiens
atttgctcaaatctcatcttaaccttggacacagagtctgggatctaataattcagtcattttggatggactaaaaagaagacagaattttctgcaaa

SEQ ID NO: 651297 - DNA, 98 bp, Homo sapiens
gcaatgggactgatggtgccattttcttttagtatatttccacagattggacagttttttgctccactcaagcctgttagaatcaccatggaatacag

SEQ ID NO: 651298 - DNA, 100 bp, Homo sapiens
aataaaaagaccctgtacaccctggtgaccaagagggattcaaagatctcaaagacggaattagattggttccttcaagatttggaaagagaaattaaaa

SEQ ID NO: 651299 - DNA, 101 bp, Homo sapiens
ccgtatctcagcaggaggacaggtgccggagcagctcgtgcagctaagcagccaactgcagaaacgtcaggtcaaaatgcagatcttcgtgaaaaccctta

SEQ ID NO: 651300 - DNA, 97 bp, Homo sapiens
aagagtgtgttgtgaacgaagtcagaatttcctgtgttccctttgccgctcctggagttcactggatgtgggctctcttgatgagaagatgaagagc

SEQ ID NO: 651301 - DNA, 100 bp, Homo sapiens
agaccttttgcctgaagattttgtggtttatacttacaacaaggaagggactttaatcactgaccatcccaatatacagcctgattttccctacaaagat

SEQ ID NO: 651302 - DNA, 75 bp, Homo sapiens
gatttaaacaagagatttccacagaagtttcttgcagaacataaattattaggaaacattaaaaatgtggccaag

SEQ ID NO: 651303 - DNA, 82 bp, Homo sapiens
caggcctgaccagggcctgcacaggttaaccgtcagacttccggggcattcaggaagtcctgacggccacgctggatctgga

SEQ ID NO: 651304 - DNA, 74 bp, Homo sapiens
ctccttcggcagtccacccaccgccgccgcctcccagaaagaaatgaccgcccggatgtgccactgagagcccc

SEQ ID NO: 651305 - DNA, 98 bp, Homo sapiens
ggctttcctacaactcatgcccagcagcagcaagcagcaaagccaaagagctgaaggaccggcaccgggacttcccagacgtgatctcaggagcgtat

SEQ ID NO: 651306 - DNA, 75 bp, Homo sapiens
gacacccgtttgacacggtcaaggaacaggcctttgagagcagccagaagtacaaagaggggaagtacatcattg

SEQ ID NO: 651307 - DNA, 90 bp, Homo sapiens
atcgaaaacccggacctcgcttacctgcatgctggattttttatcaagcagaaatgcatcgaacaacgagaatcaagatcactgagctaa

SEQ ID NO: 651308 - DNA, 100 bp, Homo sapiens
actccaatctgaactcctcagttttgtgatggatcacgtttttattgaccaagacgaggagaaccagagcatggatgatcctgtacatgcagctccaacc

SEQ ID NO: 651309 - DNA, 101 bp, Homo sapiens
gatttgccttaaactccctaaaatctccgcagctctggttcctgttgcggccgtttcccagcgaggtggtcattcagagcctacacatctgttctgtattt

SEQ ID NO: 651310 - DNA, 101 bp, Homo sapiens
gaaactcctgcgtaagaagatcgagaagcggaacctcaaattgcggcagcggaacctaaagtttcagggaatgagtgcagagcacaggtggaccggtttcc

SEQ ID NO: 651311 - DNA, 100 bp, Homo sapiens
agaatatcgaagatgaagcaaaagaacaaattcagtcccttctccatgaaatggtacacgcagaacatggttactataacaacagtaccaaggtggctgt

SEQ ID NO: 651312 - DNA, 100 bp, Homo sapiens
caatcttgcatcagtgggaacaagactacctcctcctttaccccagaacctcctttacacagtatcagaacgtccggcgccagctgccagtcgaggaacc

SEQ ID NO: 651313 - DNA, 75 bp, Homo sapiens
ggtcttccagagcgtgaagatcaagatcgcctgacatttaccccggtaactgctgggcatttaaaggctcccagg

SEQ ID NO: 651314 - DNA, 97 bp, Homo sapiens
atccggcgcggggcacaggatccggagctggagcccccagactctgatgccagtatggactggagatgatgggagccagttggatagccccatggaa

SEQ ID NO: 651315 - DNA, 100 bp, Homo sapiens
atgaaatgattgaatctggtgttatcaacttaaaagatgccacctctaaggatgcggcttccttcaaggcagagctgagctacagaggccctgtgagtgg

SEQ ID NO: 651316 - DNA, 99 bp, Homo sapiens
cccctcactgaccgctgctatttgacaatgacacaagccttggaggccaggctggggggttccccatttgacttcattagaggggtggtagactcggag

SEQ ID NO: 651317 - DNA, 100 bp, Homo sapiens
tgccatgatgatgtagttaagattgtgaatctagcttgcaaatataatctttgtatcataccaattggtgcaggagctgtctctagagggaagaattttg

SEQ ID NO: 651318 - DNA, 75 bp, Homo sapiens
aaaccagacctccacttccaaggatatagagcagtaagtacaaggtggactgtgcatgcctcaaagaaaacccag

SEQ ID NO: 651319 - DNA, 106 bp, Homo sapiens
acttcaaggataagggcgacagcaacagctctgccggctggaaggttatgaagacagtatggagtttccagaccatagtagacatttgctacagtgtctgagcgag

SEQ ID NO: 651320 - DNA, 100 bp, Homo sapiens
gacttgagtctggacaacagccctctgctgcaatccatccaccagctggatttcgtgcaagtgaaaggtatggcaggaggaaaatatcgttcgtttttaa

SEQ ID NO: 651321 - DNA, 49 bp, Homo sapiens
gcctagtgggccttccttcccagtaagactttgaccccgacgcaggctt

SEQ ID NO: 651322 - DNA, 98 bp, Homo sapiens
ctggcccggcgggaagggagaagacactgcgtcaagcaggtgccccgaataacgataaaggctcactgatggctcagttgggagcagttgtggctgtg

SEQ ID NO: 651323 - DNA, 96 bp, Homo sapiens
tcacttattgcctatgctgtattccataatatacagaaatctccagaggtgcaatgtagcaggacaactcatggagcccccccgggcccatcgagt

SEQ ID NO: 651324 - DNA, 82 bp, Homo sapiens
ccaccgagccgggcccacctccccaccaaggaagatccggcgcaggagaccaacgcctgccatgctgttccggctctcagag

SEQ ID NO: 651325 - DNA, 74 bp, Homo sapiens
ggagatcccggcctcacttcgtcccactgtggttagggttacggctagatgaggctcaagaagcagaatgccag

SEQ ID NO: 651326 - DNA, 90 bp, Homo sapiens
gttggacatgctaaacagagaatacaagaggattatcttagaattttaagatacttcagtcgattaagtgatgttctaaagagaaaacga

SEQ ID NO: 651327 - DNA, 75 bp, Homo sapiens
atcgcccggcaccagatcgtggaggtggcaggcatagaatgtcaagctaaccaggcgtccgctacttcagaagag

SEQ ID NO: 651328 - DNA, 90 bp, Homo sapiens
aaaaaatcaaggaggttaccgaggaggtggcaaacaaacaatcaacaaaggtccctcaaaccccactgcacaccagccgggtcctgaagg

SEQ ID NO: 651329 - DNA, 82 bp, Homo sapiens
cattcacaaagggaaaactacagccaccacacacaaggtgtttggagaagagggattgaccctgaatcttgaagacgttcag

SEQ ID NO: 651330 - DNA, 100 bp, Homo sapiens
ttactggaagaaaatgaaaatcttcaggcaaatgagatcatgtggaataacttaacagcagaaagtttgcaagtaattttaatagaaaatggtcagcttg

SEQ ID NO: 651331 - DNA, 82 bp, Homo sapiens
gtcggcggctcagttgtccatgaccctgaaggtccaggagtacccgaccctcaaggtgctggagaatctggtaaaagcacca

SEQ ID NO: 651332 - DNA, 101 bp, Homo sapiens
ggcgtaggcgcgcggggcccgccatggctgcgtcggagctctacacaaagatcatcagaaaagcccttactgaggaaaaacgtgtctcaacaaaaacatca

SEQ ID NO: 651333 - DNA, 98 bp, Homo sapiens
cccgacctctcctcactctcgctcgccgtttccaggagcacaggcggtaaccagcgtgagctcgcccgccagaagaatatgaaaaagcagagcgactc

SEQ ID NO: 651334 - DNA, 51 bp, Homo sapiens
accagtttccggacagcttcgtgctggtccacagatcctggtccctacaaa

SEQ ID NO: 651335 - DNA, 83 bp, Homo sapiens
ctggaagggaaggaaaaacctgtatgtggaaccacctggacaacaccttccatccacatatgggacgccatgaccaaacacac

SEQ ID NO: 651336 - DNA, 73 bp, Homo sapiens
gtattcaagcctttgaatcatttgtaagaagatttataagattggccagggctaccttatcaaggacggcaag

SEQ ID NO: 651337 - DNA, 95 bp, Homo sapiens
tgtgagacgtgcctttgaccttctgccatgattgtgaggcctccccagccacgtgaaactctccagtgatccacaagctcagaaatacatcgcgg

SEQ ID NO: 651338 - DNA, 82 bp, Homo sapiens
actggctaggcaaataagctttaagggagtgcatccgccccaacccttttccccctcgtctcctgtgagaattccccgtcgg

SEQ ID NO: 651339 - DNA, 100 bp, Homo sapiens
gtggatttgagccgccgcattttttaaccctagatctcgttacatggacacagaacagtatgaagaagcagtacgagactatgaaaaagtataccagaca

SEQ ID NO: 651340 - DNA, 88 bp, Homo sapiens
tggaagacatggccactccagtcggtgttgagcacggcgagcagtctcaggcctttagtgatgatggaaaatatatgcagatgatgaa

SEQ ID NO: 651341 - DNA, 51 bp, Homo sapiens
aagcgcagcaacagcaagctcccgggcagggaggaggtacaggagaactgt

SEQ ID NO: 651342 - DNA, 75 bp, Homo sapiens
atttggagttcttacaacatggcagacattgacaactgcctactgaatcactcttctatcgtgctgttcttcagg

SEQ ID NO: 651343 - DNA, 96 bp, Homo sapiens
aggtccgagtgacagccagtgagaagaatgagtataaaggatgggttttaactacagacccagtctctgccaaggagctggtaagtcgcctacagg

SEQ ID NO: 651344 - DNA, 100 bp, Homo sapiens
cagaagcatgtgtcttccccagctctgcagccacatactatccgtttgttcaggaaccaccagtgacagaatctttgaacaggtactaagtgaactggag

SEQ ID NO: 651345 - DNA, 146 bp, Homo sapiens
cagcttcccaaaagatagggattacagaagagaggtgatgcaagcaacagccactagtgggtttgccagtggaagtgaaattcgatgctactgtgatgctgcccactgtgtagccactggttatatgtgtaaatctgagctcagcg

SEQ ID NO: 651346 - DNA, 75 bp, Homo sapiens
ccgctcgcggcctggcccttggcctcctcctgctgctactgtgtccagcgcagcaatctgcagagcgctgtgtaa

SEQ ID NO: 651347 - DNA, 50 bp, Homo sapiens
tccagactcaggcgccccaacaacatcgtggacatcaagcctgctaacat

SEQ ID NO: 651348 - DNA, 51 bp, Homo sapiens
gagcgacccgtggccttgtgtttcaggatggccaggccatgttatgggatc

SEQ ID NO: 651349 - DNA, 100 bp, Homo sapiens
acggtcgaggacaggaagtgagtcatcacaaactgggacctccaccacatctagcagaatgtcaactgttagccacgcagatgccgattgctttgtgtgt

SEQ ID NO: 651350 - DNA, 86 bp, Homo sapiens
cccgggagatcccaggcggtgacagagtggagccatggctagagcttccccgggcgctgcctggacaggcctgcctgcgtgctggg

SEQ ID NO: 651351 - DNA, 101 bp, Homo sapiens
ccgacctcgacgtcttgcctgtgtcccacttgttcgcggcctatagctagtatgttcaacacaccaggaatgcagagcttgttgcaacaaataactgaaaa

SEQ ID NO: 651352 - DNA, 51 bp, Homo sapiens
ggatcatgtctgcgagccaggattcccggaggccccgtgtgggccgcggcc

SEQ ID NO: 651353 - DNA, 75 bp, Homo sapiens
agaacagttaatcctcaatttaagcctgatctaacccctagaaacagggcaagaatatcacggcatgggcatgag

SEQ ID NO: 651354 - DNA, 82 bp, Homo sapiens
atgaaatatggaaacgactcctcggccgagctgagtgaggtgattactggtggtcactatgatgtagattgtcgattagaag

SEQ ID NO: 651355 - DNA, 50 bp, Homo sapiens
cgcgcatgccagggaagactacaaggaggaagagtttgccagcccgggat

SEQ ID NO: 651356 - DNA, 75 bp, Homo sapiens
ctgacagaactaaagtctcctgcaaatcaacagtacaaattctgaagtttgtaaacttgctgatggtggtggtaa

SEQ ID NO: 651357 - DNA, 75 bp, Homo sapiens
taaggctgagtgcggagccaagacctttccaaagtgaaactgatgagatttgatgatccactgttggggcctcga

SEQ ID NO: 651358 - DNA, 96 bp, Homo sapiens
gacagccacacgtctgtcaccatggaagggaaattcacctcttctatagaagagtttgttttgaactatacgatttgaaacaaaattctttttttg

SEQ ID NO: 651359 - DNA, 83 bp, Homo sapiens
tgggtgggcaacttacccgagaacgtgcgggaagagaagatcatcgagcatttcaaacggacacaactcagatgggaagttca

SEQ ID NO: 651360 - DNA, 101 bp, Homo sapiens
ctcctggttttggcgacccctgtagacatagtaattcttggactcagctatgctaatttgcaaacagactatggaaatgatgttagacaaaaagcaaattc

SEQ ID NO: 651361 - DNA, 75 bp, Homo sapiens
gccagagaggcggaagaggaggcctgatggggtgaatctggattgggaaagtcgacattaatcaactcattattc

SEQ ID NO: 651362 - DNA, 82 bp, Homo sapiens
ctacatcttcggcctgggccttaccatcttcatcatgcacatcttcaagcatgctcagcaattctgtggtgttcttggtcac

SEQ ID NO: 651363 - DNA, 100 bp, Homo sapiens
cgcgaatatcgtcatcgttagaaggccccagtgaaatatcatggagacagatcaaaggagagtttagtgagttttgcaatgcagcatgttagaagtacag

SEQ ID NO: 651364 - DNA, 100 bp, Homo sapiens
aaagattgctgtccactgcacagttcgaggggccaaggcagaagaaatcttggagaagggtctaaagaaaccaaagcccaaaccccggccatccatcaca

SEQ ID NO: 651365 - DNA, 83 bp, Homo sapiens
cgccgcattttttaaccctagatctcgagaaaatgatgtggctggtattgatgtcaacatgggctgtccaaaacaatattcca

SEQ ID NO: 651366 - DNA, 97 bp, Homo sapiens
ggaaatttaaaacataagcaataccagatattggcagtagagggtgctctttctctagaggagaaacttctggaaacaacgtggaggtagatgagtc

SEQ ID NO: 651367 - DNA, 137 bp, Homo sapiens
atgattcattgtccagtgtacccagtagttcttcttcaaggaaaaattctcaggggagtaacagaagcctggattgtggatcccagtcaaattctggaagggatcaacctgtctaaaaggaaagagctacagtggcc

SEQ ID NO: 651368 - DNA, 100 bp, Homo sapiens
tttctgagcatccctgcaatgaagagaacccagggaagttcctttttgaagtagttccagataagagtgcccaggagtggaatctggaaatagagtctac

SEQ ID NO: 651369 - DNA, 100 bp, Homo sapiens
gacagtgccaagccatattcagcccatggaactgatgaggagtttcaacagagacaggcggattttttgtgccattctctccactcacagccgtaccaca

SEQ ID NO: 651370 - DNA, 100 bp, Homo sapiens
gtgtatctcaggagctcttctctgctggcttggtggatggtcacgatgtagttatagaccccctggttgtggaatacgaggcattgctggtacaactacc

SEQ ID NO: 651371 - DNA, 98 bp, Homo sapiens
tcttgtattggaatcctttatactttggcgcaggacagcacttctcctgatgtgcagagatctgaaactggacaatgtcctgttggaccacgagggtc

SEQ ID NO: 651372 - DNA, 82 bp, Homo sapiens
caacgacgcggacatggtcatgagctttgtgaacctggccgaggtgctcggtggagtcatggcagtgccctttgtggaagac

SEQ ID NO: 651373 - DNA, 98 bp, Homo sapiens
gccagaccccgccggttgcctctgctcagcgtcctgctgctgccgctgctgggcgaacccacaatacattatatgcaccagaaatgctagccaaaatg

SEQ ID NO: 651374 - DNA, 95 bp, Homo sapiens
ctcgtctgtagtgcacgccgcgggcccagctgcgaccccggccccgcccccgggaccccggccatggacgttcaatctcatccctcccagcagct

SEQ ID NO: 651375 - DNA, 100 bp, Homo sapiens
ctgaaaagtgcatcatgaattccggagttgccatgaaatatggaaacgactcctcggccgagctgagtgagtgtgctcactgatccgcctccagggccac

SEQ ID NO: 651376 - DNA, 75 bp, Homo sapiens
ggcagactggtgacttcacttttgagtgcaactgccttccagttattcattttggacctggagaaagttcttcag

SEQ ID NO: 651377 - DNA, 101 bp, Homo sapiens
ggtgccagcccggctttgacatcaaggacgttgccaggtctgtccagggttttggtggctggcgaagctgagggcgtgtcagcaggcctttcgatccctgg

SEQ ID NO: 651378 - DNA, 51 bp, Homo sapiens
ccgcaggcgctgtcacccagtgctccattcgttcctggttaactcggaaac

SEQ ID NO: 651379 - DNA, 75 bp, Homo sapiens
ccagacaccaggaaaccctcagattggaggctggtgtcccggagcagtgcaagatagtgtttttagaagaagcat

SEQ ID NO: 651380 - DNA, 100 bp, Homo sapiens
attcgatgtgtgaagaaaaaagaagtaaaagaagctattattacaagaataaaggcaggaatcaatccattcaatggaggaagaacgtgcaaaacgtgag

SEQ ID NO: 651381 - DNA, 101 bp, Homo sapiens
acaagggaaagagccctggatggttgtgagggatgagaaaagaagatggactctagttttaacttctagtcatggcgaatgatcgcaggagagcacagact

SEQ ID NO: 651382 - DNA, 151 bp, Homo sapiens
gagggacgggcggccccccgacagtccagctcctttcggctcttgcaggaagccctggaggctgaggagagagagtcttgctatggagatacacttcaattcctacttcagtggaagagtcgggaaagaaagagaaaggaaagagcatctc

SEQ ID NO: 651383 - DNA, 75 bp, Homo sapiens
gttggaagcagccgatccagcctgcggagcctgtggggcaggattgcacctctgcctccacctcccctactacca

SEQ ID NO: 651384 - DNA, 75 bp, Homo sapiens
ttctaggaggaggaagtgatccattgtgtaagtctaaggttgtgggtgacagagagaacggcagtgacaacctcc

SEQ ID NO: 651385 - DNA, 51 bp, Homo sapiens
gaaaaaacagcaaaggagctagaagaggagctccgcaaagctgtcatggac

SEQ ID NO: 651386 - DNA, 100 bp, Homo sapiens
tacctgcaaggcggtgaaccccctaggggaggcatctgtggactgtcgggtggatgtgaaaggagtcacccacttgcaatctgttccctgcatccaaaag

SEQ ID NO: 651387 - DNA, 98 bp, Homo sapiens
ggcaagtcggcgctcaccatccagttcatccaggtgccaatgggtcatgtttggttagaaggtgacaatctacagaattctacagattccaggtgcta

SEQ ID NO: 651388 - DNA, 100 bp, Homo sapiens
atccacacaacgaccctgacctggtcatggcgtccagctccggcctggcgtgaggaccccccaatccgcgtgaggttgtgaccgagattcccgacgagag

SEQ ID NO: 651389 - DNA, 100 bp, Homo sapiens
ccgaagaggacgagccactgaaggagtcccgcaggaaggaggccttcttgacctgggtttcagtgatgagacatggggtatgatgtaacccgtttccagg

SEQ ID NO: 651390 - DNA, 50 bp, Homo sapiens
aatggaagcagctggcttcactgctcagattcttcaaagtgacgcctccc

SEQ ID NO: 651391 - DNA, 98 bp, Homo sapiens
gcagatgcgggccctgctggaccagctcatgggcacggctcgggacggtcttgggcgtctttggtactggcttttttaggggtctgcctggggattac

SEQ ID NO: 651392 - DNA, 83 bp, Homo sapiens
aagaccgcgcgcagggcctgcagcgggagctggacggcgagcgcgagcggcgcgagaaaatcgcaccccctccctccctggcg

SEQ ID NO: 651393 - DNA, 82 bp, Homo sapiens
agacatcaagaagatcttcgagttcaaagagaccctcggaacgacataagcagctctatgaccaatagcacagctgccagta

SEQ ID NO: 651394 - DNA, 95 bp, Homo sapiens
ctgcgctgtagaatcttgaggggtctccatccagatcagctgaatcagagtttgcattgttaacaaggtatccgttacagcactgatgtgagtgt

SEQ ID NO: 651395 - DNA, 97 bp, Homo sapiens
gtaccgcagcccccgggcacgacctctcggacacggtgcaggcagtcccaagaggaattacaagagtactgcagacatcatgaaatcacctatgtgg

SEQ ID NO: 651396 - DNA, 83 bp, Homo sapiens
cgagcgcgagcggcgcgagaaactccgtgggcgaggtacagtgggaggccgagtttttcgcactgcaggacagcaacaacaag

SEQ ID NO: 651397 - DNA, 82 bp, Homo sapiens
cccgcagtgggcccatcttccgcacgacctcagcaaggcagccctgggaggagcggggacactgaggacctctctccaaatt

SEQ ID NO: 651398 - DNA, 76 bp, Homo sapiens
atgctgatggtgatggagattttgatgtggatgatgccaaagttttattagatattaataaggcagcggaaagaag

SEQ ID NO: 651399 - DNA, 74 bp, Homo sapiens
aaggattccaagtaactcttatttggtaatccctcagtttgtccagatgaagtatggcctgactggcccttgga

SEQ ID NO: 651400 - DNA, 98 bp, Homo sapiens
gccaagttccccaacggctccccgtcgtcctggtgctgcagcgggcgtgttggagagtttcctgggcactgctgtctctggagccatcttttgccttt

SEQ ID NO: 651401 - DNA, 86 bp, Homo sapiens
gcgccgcgggacctctccgggccatgggagcatcagatccatgctgctgctgactcggagccccacagcttggcacaggctctctc

SEQ ID NO: 651402 - DNA, 101 bp, Homo sapiens
tccatcgcataagagcaaagaacactgttgttgccacaggtgccggtggtggtgtgcacattgagccccggtatagacagttcccccagctgaccagatcc

SEQ ID NO: 651403 - DNA, 75 bp, Homo sapiens
gaaaaatggagaaaacaagacaagcccattcattcatttgagcatagcaagtgttgacagctcttctaccacaag

SEQ ID NO: 651404 - DNA, 75 bp, Homo sapiens
aaagcacagaagacgtgacgtggtgttcttcaacggtgccaacgtccggcaggtggacgtgcccacgctgaccgg

SEQ ID NO: 651405 - DNA, 100 bp, Homo sapiens
gcggagatctctctcatctcgctcggctgcgggaaatcgggctgaagcgactgagtccgcgatggaggctattgagggcacctacattgacaagaaatgc

SEQ ID NO: 651406 - DNA, 100 bp, Homo sapiens
gtgaacttcgaccacttccagatccttcgggccattgggaagggcagctttggcaagatctggtggctggacccagagctgacctatggctgcgccaagc

SEQ ID NO: 651407 - DNA, 98 bp, Homo sapiens
acgggtcgctccatttcgaattctgcttcaagttcccggctcccaggtttattctcccatagcatgtggataccagaaggccctattgatcaggggcc

SEQ ID NO: 651408 - DNA, 75 bp, Homo sapiens
ttgcaaatcagcctttgattggaagcgagacagcagaggccacagtctgcacggtgacactggagaagatgtcgg

SEQ ID NO: 651409 - DNA, 100 bp, Homo sapiens
ctcacccttagcctttacgacccccattccagcgacctcggcggccacttgaccaaccaggacaatgcctccaagctgctcctggctctgatggagagcc

SEQ ID NO: 651410 - DNA, 80 bp, Homo sapiens
tacagcttcagaagaccgaagcgttcgtatctggaagaacccagcgggtgccgcttctccacccgaggcttccacctcca

SEQ ID NO: 651411 - DNA, 101 bp, Homo sapiens
cgaaagagaaacccggagggcgccgggccacacccactcgcccgggtctatggccacggtcggagagtggtcctgtgtgcgctgcaccttcctgaacccgg

SEQ ID NO: 651412 - DNA, 75 bp, Homo sapiens
ctacagacctcacagtgccaaatggagctggaagcagtccagtggatacactctgtgcagttttagagagagaca

SEQ ID NO: 651413 - DNA, 74 bp, Homo sapiens
ggcggaggatcgacctcaacctggatatcagcccccagcggcccaggcccaattactctcgtggctttggtggc

SEQ ID NO: 651414 - DNA, 80 bp, Homo sapiens
cgccgcctgcggcctggcgctgggtggatccataaagaacccagccaacccgcagagggaggggaggggctgagctgtga

SEQ ID NO: 651415 - DNA, 87 bp, Homo sapiens
tagtgtgtggaggcttccaccaggagattgagaggatccagaatccagatctctggaatagctaccaggcaaagaaaaaaactatgg

SEQ ID NO: 651416 - DNA, 100 bp, Homo sapiens
ctgaccctgggcctctgctccccagtgtctgaccgcgaccgcaacctcatggtgtacatgtacctgcccgaagagcttgtggttgcagagtcagtggtcg

SEQ ID NO: 651417 - DNA, 102 bp, Homo sapiens
gaagaagatgtcttgggggatgagagtcagacaaccccaaatcgagatgctgtctttgcaggtgccatgcctacaatggcaagcatcaagctgtctacactt

SEQ ID NO: 651418 - DNA, 51 bp, Homo sapiens
atttcagtcactggtttgcagagtccaggtgagtggtgtcattgagcaaac

SEQ ID NO: 651419 - DNA, 88 bp, Homo sapiens
tgtcatcaccgccatgcccaagaataaagcatgttttagaggttcgtcctctaaatcagcaggtatcagtacttcattcctttttaag

SEQ ID NO: 651420 - DNA, 100 bp, Homo sapiens
gccgctctgtctacaacccgagattgaaaaggaagatcaggccaaccccaaagaagaagtgaccaaggaggagtttaaactgaatgaacaacctcggctc

SEQ ID NO: 651421 - DNA, 97 bp, Homo sapiens
gcagcgcacgctgcagtccagagggccctcctggacccgggagcggaccctggtggcggtgaagcccgatggcgtgcaacggcggctcgttggggac

SEQ ID NO: 651422 - DNA, 76 bp, Homo sapiens
tggagagcttcatcaaaaatagtgatagctttgataagttgaaatcacaaagattagacacctttttagataggtg

SEQ ID NO: 651423 - DNA, 75 bp, Homo sapiens
gtattcgatagaccactgcctgtgtctcgtcttgtatctctaattggaagcagttggcatgtatatggactcttg

SEQ ID NO: 651424 - DNA, 75 bp, Homo sapiens
cattctcaactctgcctggacaggctgcagctggaggctattcataaggacagagcgggatgccaccagcttgtc

SEQ ID NO: 651425 - DNA, 75 bp, Homo sapiens
ctgtcagaacgtggttccagaaattttaaggaaggccactggggactacatgggtgtgtctctgcgtgacaagaa

SEQ ID NO: 651426 - DNA, 90 bp, Homo sapiens
gagcggccaaagcagtacagctgggatcagcgcgagaagcatgtcagctgaactgttccgaccatggccactgtgactcgttcaccaaac

SEQ ID NO: 651427 - DNA, 82 bp, Homo sapiens
ttatgcttataagagtggaacagaacccagtgacttgattgtaaaaatttacagagcggaatcatatgctggtctccaagag

SEQ ID NO: 651428 - DNA, 100 bp, Homo sapiens
ctggagagagaaggaagattatcatccctccattcctggcctatggcgagaaaggctatgttgaaaacaccacacactgtgagtttgcctacctgcggga

SEQ ID NO: 651429 - DNA, 73 bp, Homo sapiens
tggacgacctcacctgcaaggcggaggctggcccgtgttctaagaacggaagcatctgggctggatggaattt

SEQ ID NO: 651430 - DNA, 100 bp, Homo sapiens
gattgcctaaatcagccaaacacagggtgcaggccctagcaggtgcaggtggagtagacaatctccatgtactggactttcagaagtataaagctttcac

SEQ ID NO: 651431 - DNA, 50 bp, Homo sapiens
ctcgcaagtcaccgcctggacgcagagacggggtttcgccatgttggcca

SEQ ID NO: 651432 - DNA, 97 bp, Homo sapiens
atgtcaagagtgaaaaggtttacactcgccatggggtccccatctcagtcactggcattgcccaggagttcatgatcaagtgttgcccacaccaaat

SEQ ID NO: 651433 - DNA, 75 bp, Homo sapiens
cgatgcagccagtagcttggatccttgtgggcatgatccataatcggtttcaagcctccagaggtgaagtcccca

SEQ ID NO: 651434 - DNA, 100 bp, Homo sapiens
caggtgcaaccccctgcgtggtcctctgtggcagccttctctcattcagagctgctgctggtggtctacccttggacccagaggttctttgagtcctttg

SEQ ID NO: 651435 - DNA, 98 bp, Homo sapiens
tgggccccatctgccagctggccttcccgcttgtgctgcattgcacctgtcctcgcggccaaggtgctcagaggcgtcgaggtgactgtgggccacga

SEQ ID NO: 651436 - DNA, 75 bp, Homo sapiens
tgcgctggccgggggcgcgggcggcggcgccggcaggaagccctgaaggatggctgccatattgggagacaccat

SEQ ID NO: 651437 - DNA, 100 bp, Homo sapiens
gttccttcagccaaagaaacaagccgtggaataggtgtatcaagtaatggtgcaaagcctgaagtgtcatggagaaactccagctgggcccagagattct

SEQ ID NO: 651438 - DNA, 83 bp, Homo sapiens
caacgacaactactgtgaaaaactgctgccctggctggacaagtccatcgagttcatcgttgcagagtgggcaggatcttaag

SEQ ID NO: 651439 - DNA, 100 bp, Homo sapiens
ggcgtcatcattccgtatccaccgtccaatcgctatgaaacactgctgaagcagagacacgtccaggacatccccttgaatttttacggaatcagcctca

SEQ ID NO: 651440 - DNA, 100 bp, Homo sapiens
ataattctcaaggattctacgtgtcatcttttcttgagtcccttctgcaaccagagtctttaaggttggattggctgcttttggcagtgtcccttgatgc

SEQ ID NO: 651441 - DNA, 75 bp, Homo sapiens
aaggaaaaatcgagcagaaagaatgtctttcagatgtgggttctgtggaaggacttgcctatcacagagcctggg

SEQ ID NO: 651442 - DNA, 72 bp, Homo sapiens
catgccgacttcattcataagcacgtgaaaggctcacgaggctgggaggcggcagaatgcagccagaggagg

SEQ ID NO: 651443 - DNA, 101 bp, Homo sapiens
tcagaggggccggtctctctaaatatgccccagattctgaaaagaaatcatctctcctgtcagaggaacaacaagaaacaagcactttagtagaaaccatc

SEQ ID NO: 651444 - DNA, 90 bp, Homo sapiens
catcaggtaggggctttgcagagaccatcgacgggctgacttgagatgcagtgtcagccttacttgcaagaacatcagctgagttgttag

SEQ ID NO: 651445 - DNA, 100 bp, Homo sapiens
tgtgtggccttagctatttacatcccattccctgaagatgattctaattcaacaaatcataacttggtttgtgggggagagaaaccttatttgtctccag

SEQ ID NO: 651446 - DNA, 83 bp, Homo sapiens
cacaaattcactgtggatctcccaaagaaacacggaatggaagttggatacactttgtgacttgtacgagacactgaccatta

SEQ ID NO: 651447 - DNA, 75 bp, Homo sapiens
ccacagcctctaattaaccacgcacccaggtttcctatcctgggagcaggagagtgtgcctatttgaatgacaaa

SEQ ID NO: 651448 - DNA, 90 bp, Homo sapiens
acctgctctgtaccaactgccggaaagtgctgcggaagactattgcccagaagaaaagatgtttggttttcacaagccaaagatgtaccg

SEQ ID NO: 651449 - DNA, 75 bp, Homo sapiens
cacacccacacgtgttcaatacacctcccacctgtcctcaggcatatcaaagggcgtctctggccgagcctcttt

SEQ ID NO: 651450 - DNA, 75 bp, Homo sapiens
ccgagggctaccacgttctgcggagtcctgtgtatggaaactcacatgagtcagctcagtctagaagggtagtaa

SEQ ID NO: 651451 - DNA, 75 bp, Homo sapiens
gcagggagcagaggggacagaggcaccaaggacctccaagacaggaaagaaggtggaaagtttggttttgcagag

SEQ ID NO: 651452 - DNA, 74 bp, Homo sapiens
agccatatcaagaaaaactccagcccagcctcagagggtgaagtgatgaacctcctgatgttcctgtcgacgtg

SEQ ID NO: 651453 - DNA, 100 bp, Homo sapiens
gagatgcgcaagaaggagaagagcatgccctggaacgtggacacgctcagcaaagacggcttcagcaagagctcgcggcattccaagctggagaaggcgg

SEQ ID NO: 651454 - DNA, 110 bp, Homo sapiens
agaagaagggtgtttggggtgtgttttacaaagtggtctgcaagaagaatctggacagtaccactgtggccgtgcatggtgaggagatttactgcaagtcctgctacggc

SEQ ID NO: 651455 - DNA, 90 bp, Homo sapiens
ctcagaccagtctctgcaagagatctctatgaagcaccagaattatcagtgaagaatatattaaatggctcacgggctactgtaaagcat

SEQ ID NO: 651456 - DNA, 100 bp, Homo sapiens
gaacagctgtggaaagaagttgcaaaacactgggtaatctgtaagtcagatgctccaacaggggatgttcttcttgatgaagctctgaagcatgttaagg

SEQ ID NO: 651457 - DNA, 82 bp, Homo sapiens
caggacaacatagcggtgaaggcgaacgcggtctgcaagctgacgtatgtgatgtgtccaatctagatcccaacttctcatt

SEQ ID NO: 651458 - DNA, 97 bp, Homo sapiens
cccagactctctgctgatccgaagaatcacaggaaggtggatagatacttctcaagacatcacacagcgtgagtcaatcaaggagggaagccacaag

SEQ ID NO: 651459 - DNA, 100 bp, Homo sapiens
attgacattacacagtgttaacaatgcatccacagagggaacctgatttgagatcaattcttggagaacacaaagaagtgtgatggtatgttccaggtgt

SEQ ID NO: 651460 - DNA, 75 bp, Homo sapiens
accactgtaatcacagggactaccagaatatttcaagaaatgggattgtcgatcagtcacaacaagcataccaag

SEQ ID NO: 651461 - DNA, 83 bp, Homo sapiens
ggaggagggggatcccagcaaaggtttacccaaggtccagcctagcccctaggcaccatgtcggacagtgatctaggtgagga

SEQ ID NO: 651462 - DNA, 75 bp, Homo sapiens
gagctgtaatcaattgtgctgacaacacagatcgtcagtatttaaacagatcacatcatgcgtgagtacaagcta

SEQ ID NO: 651463 - DNA, 100 bp, Homo sapiens
cagctaccagattaaaaggaatagtcccattagcaaaggaagatgaagatcctgccaaaggtgatcagagtcgatcagttgaccttggggaagataatgt

SEQ ID NO: 651464 - DNA, 82 bp, Homo sapiens
tgaacgtggacaaagctgttgtctcagggagcacagaagttgcccacattcccaaatcagatgctttgtactttgatgactg

SEQ ID NO: 651465 - DNA, 95 bp, Homo sapiens
cggggagctgaacgtggacagcctcatcacccggctgctggaggaactctaagaaggagctgatgtggaggagcagctgagacagttcaagatga

SEQ ID NO: 651466 - DNA, 83 bp, Homo sapiens
cttggactgagtcctgcaggacacagatggcaactcttggggaagctcgcctaagggaaatggaagccttgcagtctctcaga

SEQ ID NO: 651467 - DNA, 90 bp, Homo sapiens
ctgttgttaaggaattaatgggggaggaaacagagcaaatgcagcgttacaatcaaagacttattgaggaattgaaaaacagacagactc

SEQ ID NO: 651468 - DNA, 101 bp, Homo sapiens
cgaataactgaggcgtttctgtacatggattatctggatggagctatgacattgaagagaggaaggttccaaaacccaagtccaagtcttatggtgcaaac

SEQ ID NO: 651469 - DNA, 75 bp, Homo sapiens
cggagggggaccagcagctgctgaagcgggtgctcgtccggcaccgcatcagcctgctcaaccctttaaatttac

SEQ ID NO: 651470 - DNA, 83 bp, Homo sapiens
ttggacacgggaacatcattacaagacagacagtctccagggaggacggccgctacctgtctgaggaacccgagccctacctg

SEQ ID NO: 651471 - DNA, 101 bp, Homo sapiens
tgtcctttcttctaacttgtcttctccagcggaagtgaccgtggtggcttcaataaatttggtggtaagaatgattgatgttggctgatattggagtgctc

SEQ ID NO: 651472 - DNA, 83 bp, Homo sapiens
cgcggggaaccaaggagacgctcctggcactgcagcaattctgtggtgttcttggtcacacatttatggagtttctgaagggc

SEQ ID NO: 651473 - DNA, 75 bp, Homo sapiens
tttcagagcgcagccatcggtgcgctgcaggatcaagccagccccgtaccccatgggaagcagccatgcttccgc

SEQ ID NO: 651474 - DNA, 127 bp, Homo sapiens
gcgggcactgctttccactcggctcctgtcgtccgttctctcaggctcccgttcaggtgctggagaatctggtaaaagcaccattgtgaagcagatgaggatcctgcatgttaatgggtttaatgga

SEQ ID NO: 651475 - DNA, 75 bp, Homo sapiens
caggaacctgctttctctcgatgaggataacatccctccagaagatggcaaacgggtgaaccacctctagagaat

SEQ ID NO: 651476 - DNA, 75 bp, Homo sapiens
gcggaggctgaggagaaggaggagcgggccgtggaggcttcgccgcctaggaacaagactgccaatggagactgc

SEQ ID NO: 651477 - DNA, 96 bp, Homo sapiens
cgagcggcgcggagctggacgccgcgatcgtggggcccgcgaggcgggcagccggggcgtccagtactatactggcaattgctggagaagattttg

SEQ ID NO: 651478 - DNA, 75 bp, Homo sapiens
gaaaatcaaaacgctgattaaaagaagcacggataatgtttccaaagatgtaccccagaccagatggggttattg

SEQ ID NO: 651479 - DNA, 97 bp, Homo sapiens
gggctgctgcagctccgcctcctccgccgcgcaggtcacagccaagactgcctttctatttattttacctcagtataacattagcgtgcctacagca

SEQ ID NO: 651480 - DNA, 100 bp, Homo sapiens
gagtgtggcttcaccagtcaaacagcacggccacaggccccagccacagtggggctggccttccgggcagtaatagctcttcaagtctgcaataaaaaat

SEQ ID NO: 651481 - DNA, 75 bp, Homo sapiens
acggggacgacgcgtgcttcgtggcccggcaccgttccgcggacgtgctcgaatggtggtttggcctggagtgat

SEQ ID NO: 651482 - DNA, 100 bp, Homo sapiens
acgttctcaggcctccacgctgaggttaccatgccagcaatgattccttttgagtttctgacagaagatagtggttttcatccaaataagtcaactactc

SEQ ID NO: 651483 - DNA, 75 bp, Homo sapiens
tgcctcttcaccatgttcggaatgctgctgttcgctggtgggaagcgagaaggcactgcagagcaaccactttga

SEQ ID NO: 651484 - DNA, 82 bp, Homo sapiens
ccaagagctatcaggggaagatatgcatcagttccatcgagccattactacagttacagctcttttgaggaagcttaagcag

SEQ ID NO: 651485 - DNA, 120 bp, Homo sapiens
cgcaactctacttctgccgctattgtagcgaactgcggtcgctggaatgtgtgtctcacgagttgttgacctcctgtactggagagacattaagaagactggagtggtgtttggtgccag

SEQ ID NO: 651486 - DNA, 78 bp, Homo sapiens
agacacgcacttatcattcagtggttgacggactggacaaagcttctatagcaaactcagatggccccacagcaggtt

SEQ ID NO: 651487 - DNA, 94 bp, Homo sapiens
tggagttccacttctccccacagacctagataaagaaatgggggctcagagcagtcaagaacatgccccaagttattcgtcagtgaggcggaaa

SEQ ID NO: 651488 - DNA, 90 bp, Homo sapiens
ctttcttcggtagctaccgaaacgctctgaaaatcgagccgcggggatctgatgagcttctttcttctggcatcattaacggacctttta

SEQ ID NO: 651489 - DNA, 100 bp, Homo sapiens
aaatatcacagttgccacacaggccagcagaaacccaatcacatccaaagagtggtactggaaccaggtgcggcggggagagaagtttgttccttgggga

SEQ ID NO: 651490 - DNA, 90 bp, Homo sapiens
caggaagcggaggaaggtgaagtaggaccgaattcctgtgccgaagaggcctgcagtgggagagcagggtatcgagaaccttccctgcga

SEQ ID NO: 651491 - DNA, 100 bp, Homo sapiens
ggcgcctacatcctaactcgatttgctgggttaaagggaatgtccagggaaacctcttcaaagtgattactaaggatgacacacactattacattcaggc

SEQ ID NO: 651492 - DNA, 50 bp, Homo sapiens
tggctgatcaaagaagagcagcccatgattggaccagtatcatcttcaag

SEQ ID NO: 651493 - DNA, 75 bp, Homo sapiens
ctccattaatgcaactaccattacactaaggaaagaccacagcaagattctttcattcgtctcctcctagcctgg

SEQ ID NO: 651494 - DNA, 83 bp, Homo sapiens
ctcaggtgcaacaaattattttagtcagtcctatggggaattggctcgggaaaaggtaatgcgagaagttaaagccttagcca

SEQ ID NO: 651495 - DNA, 109 bp, Homo sapiens
ggactccagttatattccgtgctcttgtcggcacgcatttcacttctagctctggattaatcgaattacagctgctagccaggaacatggactgaagtatccagcgctc

SEQ ID NO: 651496 - DNA, 48 bp, Homo sapiens
ctttggaagtacagcagaggccttaggatgtacagttacccagcacgt

SEQ ID NO: 651497 - DNA, 50 bp, Homo sapiens
ctgcaagcaggcaacctgaatacagtgtgtcccagatgcctgtggccgag

SEQ ID NO: 651498 - DNA, 129 bp, Homo sapiens
cgctccccgcctagtccacggagctcaatggcggcagtcgcgctgagggactcggctcagttactccacaggatccgctgaacataggatgttgccacaaaatctacctcgtgtatttttctctttcac

SEQ ID NO: 651499 - DNA, 75 bp, Homo sapiens
tggagcgcgaggacagtgggaccttcagaatgattacggacctgaagccaaagaacaagatgcgctagtggacag

SEQ ID NO: 651500 - DNA, 76 bp, Homo sapiens
tgtcactccccggcggcagcacgaaagtaccatgcgtcacctcctcctgtcgcctggccctcgccatgcagacccc

SEQ ID NO: 651501 - DNA, 84 bp, Homo sapiens
ctcgcctttgccgatccgccgcccgtccacacccgccgccaggaccaagaatcgccttcagccctgtctggtgcatccttggca

SEQ ID NO: 651502 - DNA, 111 bp, Homo sapiens
cacaggtgctactccactgtcacaccttgctcctggagaaggaaggacgcaatgagcccctgaagaaagagcggcttaagtggaagagcgactaccccatgactgacgggc

SEQ ID NO: 651503 - DNA, 100 bp, Homo sapiens
acagaaactttagaatggaggctcggttcttctgacattcttaattacagcctgagattcctgaacgcctctgcgaacaaactggaaagccttcctccag

SEQ ID NO: 651504 - DNA, 82 bp, Homo sapiens
gtcagcgagggcatggccctgcagctgggctgcctggagctcagagagttaattgttaaatccagtatggccacaggaggag

SEQ ID NO: 651505 - DNA, 83 bp, Homo sapiens
ctttcgccagcccgtgccgcgagcgcggcctgcaggaggagccagggagtaacgaagagatcaaagagttcgccgcgggctac

SEQ ID NO: 651506 - DNA, 83 bp, Homo sapiens
cggcacggctgaggcccgcaagcgcaaggttcattggcatggaaaaatgttcagtgggaggattagagttgactgaacagact

SEQ ID NO: 651507 - DNA, 83 bp, Homo sapiens
ggacaggctgaggctgagtctcagtgttgccctgttcagtctgagagtactgtggacaaactcattaagaagacaaacctggc

SEQ ID NO: 651508 - DNA, 87 bp, Homo sapiens
cgcgcggagcgccccttcgcgtcccctgcaccatgagctggggcaccgagctctgggtcatcatcagatttgaaatatttaaagtgg

SEQ ID NO: 651509 - DNA, 109 bp, Homo sapiens
ccccaggcggcggcggtcctggtgcggaccctccggccgcagccatgtgggacccgcgggcagctaggagccagcaccgctctttgaccttgccatgcttgccttagat

SEQ ID NO: 651510 - DNA, 83 bp, Homo sapiens
attacagagaaactttcagctcatgagggacctagaccaaagaacagaggtgttagatgatgaagatagcaacaacatcacag

SEQ ID NO: 651511 - DNA, 75 bp, Homo sapiens
tgtcatataactcctgagaatagtggttcttaactctgaatcagagatcattgatttcttcctgggggcctctct

SEQ ID NO: 651512 - DNA, 98 bp, Homo sapiens
gggcgtgagcggaaatgaggaggagatggtggaggaggctgaagcttcatccaattctgtgacaacatatgaaacctgccagacctacgaacgcccca

SEQ ID NO: 651513 - DNA, 75 bp, Homo sapiens
tcggttctacctgggagaatccaccgccatccgccaccatgcagttggaattgatcacaccttttcagttgtact

SEQ ID NO: 651514 - DNA, 100 bp, Homo sapiens
tggcacctgcaggaaacaagctcctacttccagaaaaagtgctcctgggactccaggataccagggattggggaatttttctgtaaacacttctaagggc

SEQ ID NO: 651515 - DNA, 75 bp, Homo sapiens
ttttacatctggtggagtttgtcattcggatcccaagatgacaagtaacatggggagcatcatgacagagcctca

SEQ ID NO: 651516 - DNA, 90 bp, Homo sapiens
tatcaccaccccagatgacctggaggggaaaaatgaggactcagtggaactgctggtgttggcaccagatactgctacaccatctcatcg

SEQ ID NO: 651517 - DNA, 100 bp, Homo sapiens
tttacagctgaagaatgggaaaaaattgatggtgatataaagaacatccatgatagcagtcttctgtaaatcgaacttttcaagaattctctgaaggaac

SEQ ID NO: 651518 - DNA, 50 bp, Homo sapiens
ctcgatggcgagccaacagtcactgtgggagaaggagaagcacgaagacg

SEQ ID NO: 651519 - DNA, 75 bp, Homo sapiens
gcaattaggaactgttctgccggaatttgaaaagtgcctgttggtgaactcttgaaagattggcgacgtcttaat

SEQ ID NO: 651520 - DNA, 97 bp, Homo sapiens
gaacctgctttactatacacgtggcttccagcacacaggcatctacagtgtcatgatccagaagattatgtttgagaccttcaacaccccggccatg

SEQ ID NO: 651521 - DNA, 82 bp, Homo sapiens
gaccacaaccaccaccttcaagggagtcgaccccaacagcaggaatagctcccggtttggtgcacctcgatttggaggaagt

SEQ ID NO: 651522 - DNA, 75 bp, Homo sapiens
tttagaaggaggttcaggctacgctccaacagacagaagcagagctcaggaaggtggatgaggccatcgccctat

SEQ ID NO: 651523 - DNA, 82 bp, Homo sapiens
ctaaagcagcgtgcgttcagccctgggatcgctgccgttttgcccttgggagtaggatgtggtgaaaggatggggcttctcc

SEQ ID NO: 651524 - DNA, 83 bp, Homo sapiens
aaggaagaatatggagagagccctttgcaggatgcagaagaagccaaaaacattctggggagtgcatccgccccaaccctttt

SEQ ID NO: 651525 - DNA, 100 bp, Homo sapiens
gctgtctggcatgggcctctccaccgtgcctgacctgctgctgccactgcccgtggaccgggagcccgtggaccgggagccggtggtgtgccaccccgac

SEQ ID NO: 651526 - DNA, 83 bp, Homo sapiens
ctgtgttctggaagggctcattgtacagtcaaggcggcagcacatgcagatgacaatccaggctctccaggatgaattgcgga

SEQ ID NO: 651527 - DNA, 110 bp, Homo sapiens
aaatagtgcagaagatagaggaagtactttctggggtcttagatacagaactacgatataagccagacctcagttggatgaacccattccactgtatgaggcaaaagttt

SEQ ID NO: 651528 - DNA, 90 bp, Homo sapiens
gagagaagacctcatctggatgccaggcccaggaattcccataccaaccacagagaatcaaaaagaccctctggctgtggacaaaataat

SEQ ID NO: 651529 - DNA, 100 bp, Homo sapiens
tcgcagtggtcgcttcttctccttggggccacatcagccagcagcctcctccaaggcctcagcttcagcttgcaggatatcagcagcaagacctctggcc

SEQ ID NO: 651530 - DNA, 100 bp, Homo sapiens
cttcggcacatggttcaggattgcactgctgtaaaaactcagttactcaaactgaaacgtctcctgcatcaggccacaagggcagccattactcagcact

SEQ ID NO: 651531 - DNA, 88 bp, Homo sapiens
gtcaccactggacctccaaggaagccacgtgcagacatctacaaccttcgatctcctgacgagaacttaaaaggagtctagaaaatcc

SEQ ID NO: 651532 - DNA, 74 bp, Homo sapiens
cctttcaactctacttcaacccgcaccttgtgttccggaagttccagtttcactgttacatgccttgaagtgat

SEQ ID NO: 651533 - DNA, 100 bp, Homo sapiens
tctcattttctttccctgcaccaactagcagtactggagaaaatgaaactgggattgacccatcaagatgcttggctcaataagaaaaccacgttaggag

SEQ ID NO: 651534 - DNA, 83 bp, Homo sapiens
cggggaccttgccttgcccggggaagatgagaatgtgcctactgctcctgatcctccaagtcaacatttacgtgggcatggga

SEQ ID NO: 651535 - DNA, 90 bp, Homo sapiens
cccaagaaatcaaaataaaggaaacacatttcatatactgcagttgcatcagccagcgaatacgcccacagggggctggacaagttggag

SEQ ID NO: 651536 - DNA, 100 bp, Homo sapiens
caaccctggagacaactgctactccgtgggcagcgtcggggatgtccccttcacgtattctgaagtctcaggaaactggaccatttaaatgtgcatggcc

SEQ ID NO: 651537 - DNA, 83 bp, Homo sapiens
aggacatggagtatgaaagacgagctcttcagtatccccatcagccagtttccgaggtgctgagaagcacagaaactccgcag

SEQ ID NO: 651538 - DNA, 82 bp, Homo sapiens
gacggccgtgcccgaggggctcagcgccttcacccaagcgcttcaccattactttaagtactgcaaaatctcagcattggct

SEQ ID NO: 651539 - DNA, 83 bp, Homo sapiens
gccgagggtttgatgaaggtggaggcagcgcggctctcaggtggaagttaaacgagctgagcctcgggacagcaagagccaag

SEQ ID NO: 651540 - DNA, 75 bp, Homo sapiens
ggaaaaggtcatcggatttttgcagaaacacaatgttgcattaaaatcctcccctactgaaagaaacggaggcca

SEQ ID NO: 651541 - DNA, 100 bp, Homo sapiens
gattccagctcccaagagagtgtgtctcatccaggagccaaaaggaggcaacgcacgggccacaggcatgttcctgcagtatacagtgccggggacggag

SEQ ID NO: 651542 - DNA, 75 bp, Homo sapiens
gagctgcccccgcaggcccacggtctcggcgtagacggacagctggcctgaagctcagagccggggcgtgcgcca

SEQ ID NO: 651543 - DNA, 74 bp, Homo sapiens
ctgtgctcaacattgcttatcggttaccagcacaactttgacacctatgatgatagcttaatcacagacctcaa

SEQ ID NO: 651544 - DNA, 49 bp, Homo sapiens
ctgggagcaaatatccagaacagacacgaatgcagagtttgagtccaga

SEQ ID NO: 651545 - DNA, 75 bp, Homo sapiens
agaccagtccatttggggaaatccttcggatggtgaactcattagaacttcctgcctgacacagctcacttcaag

SEQ ID NO: 651546 - DNA, 100 bp, Homo sapiens
catagacatgttttccatgtgtgagcatcacttggttccatttgttggaaagaaaggaaaggagtttggatattttcccagagatgcagtccagattgaa

SEQ ID NO: 651547 - DNA, 100 bp, Homo sapiens
agccgaaccaatgctggacctggaggtagtgcccgaacgctctctggggaacgagcaatgggaattcacgctgggagccaggcctgggggtggacttcat

SEQ ID NO: 651548 - DNA, 75 bp, Homo sapiens
tgccagtccgcagagcccggcgacgaagaggaatttgaagcctacattaatgcttctggagaacatggaattgtg

SEQ ID NO: 651549 - DNA, 50 bp, Homo sapiens
attccatgtagagacccctggaggaaaacagttcctcctgaggatttcag

SEQ ID NO: 651550 - DNA, 98 bp, Homo sapiens
cgggcgcctgccttctgtgatcactgcggggagatgctcttcggcctagtgcgccagggcctcaagtgcgatgcggcagtctttcccccctgtgtgca

SEQ ID NO: 651551 - DNA, 100 bp, Homo sapiens
aagctacttccattccagaaagatggcatcatttttgccctcaaaagaaatggcagatgaagcgttctgtcagccaccctggttcttgcagttcagagag

SEQ ID NO: 651552 - DNA, 88 bp, Homo sapiens
gctctagaaggctgaagtggagatgtagaaaaagccatggtgaagtaacacagaaggatgattcgctaaatattgtaatggatcaagg

SEQ ID NO: 651553 - DNA, 75 bp, Homo sapiens
cggaagatcgtcgccacctggatgctggagagtttgctctccaaagctcggggaattgattccagctctgttaaa

SEQ ID NO: 651554 - DNA, 50 bp, Homo sapiens
cttcatatgcaccagaaggagatgaaggtttcccttgggggctttgaaat

SEQ ID NO: 651555 - DNA, 74 bp, Homo sapiens
gataatgtccaatactgtggctactgtaaataccattttagtaagctggcacctgaatggacagaagaggacct

SEQ ID NO: 651556 - DNA, 75 bp, Homo sapiens
ggacagtgcggctactcttgatcctctccggctgcttggtctacggcacagtgttcaagaaggaagtgtatcttc

SEQ ID NO: 651557 - DNA, 50 bp, Homo sapiens
ggctgcttcccgttctgccatgatgaaacctctgcgccatgagagccaag

SEQ ID NO: 651558 - DNA, 75 bp, Homo sapiens
ggaccggcggcgctggaggagcgaggcagctgtactaggactgggaacggggaggagattggacaggctggactc

SEQ ID NO: 651559 - DNA, 75 bp, Homo sapiens
aaggagatcatagcagagtacgatactcaggtcaaagctcagagtcaagatctccactgaagttggcatcacaaa

SEQ ID NO: 651560 - DNA, 51 bp, Homo sapiens
gcagaagatattaagaagtctttcagattagtgggatggtttggccatgaa

SEQ ID NO: 651561 - DNA, 90 bp, Homo sapiens
ccaaatactaaaatccagatgtcatattcagtaattaataatgcttgtgctactcaagccatagtgagtgtgttactgaactgtacccac

SEQ ID NO: 651562 - DNA, 100 bp, Homo sapiens
cggctgtgaagtggggaggctggcaacagttttcttcagcgcccaggatgcagccggctaagggtcctggcggcagagaccacgtcccagcaggagcggc

SEQ ID NO: 651563 - DNA, 74 bp, Homo sapiens
gacaacatctcttctgaactcaagaccaggtaccagcagatcctgcaccggaacctggtatacctggccacgat

SEQ ID NO: 651564 - DNA, 89 bp, Homo sapiens
tgatcgagtgtgacatgtgccaggactggtttcatggcagaccgaagccaggacagcacagccgtagcactctcagactctagctcaac

SEQ ID NO: 651565 - DNA, 74 bp, Homo sapiens
gcgagtgaggaaaggaggtactgtaggttctgggaagttctggattgtttaataaccatggactccaagtacag

SEQ ID NO: 651566 - DNA, 101 bp, Homo sapiens
ctagtctttccgcttcttgaatttctctctgtaaaggagattgaaaaggaagatcaggccaaccccaaagaagaagtgaccaaggaggagtttaaactgaa

SEQ ID NO: 651567 - DNA, 82 bp, Homo sapiens
tacaggcctccaggaatggctaaaaatgtttcagatttaaagacttgtattgcaagtactactcagactattgaacagatgt

SEQ ID NO: 651568 - DNA, 90 bp, Homo sapiens
attctctttgtggccagatgggtttgtatggacaggcttgtccatctgtaacttcattaagtcacccacaaaagctgtatataatgccag

SEQ ID NO: 651569 - DNA, 83 bp, Homo sapiens
gaggacagttcgctacacagcaatgcatcgagcacttgacccctgacaagatctaccacgtcacagtgatgccctgctatgac

SEQ ID NO: 651570 - DNA, 100 bp, Homo sapiens
atgctgaagttcttcttgtcagtgaaattgattggctcaaaaggattaggggaatatccgatgtagcctggtcgtcagattctaaccttcttgtttctgc

SEQ ID NO: 651571 - DNA, 50 bp, Homo sapiens
caccaaaaagctttctgctaggggtcacggtctagatcacattctcgatc

SEQ ID NO: 651572 - DNA, 80 bp, Homo sapiens
agagcctcgcctttgccgatccgccgcccgtccacacccgccgccagacgagccaaactcaggctgtaccttgagcagct

SEQ ID NO: 651573 - DNA, 124 bp, Homo sapiens
gtgtgctgctccaggcatggcctgctgtggacccggagttcctgcagcagcctgaggttgtccagatggcagttctggagcctgtgtgaaatgcagcaaaggggtgtttggggctggccaggcc

SEQ ID NO: 651574 - DNA, 95 bp, Homo sapiens
taaattgatcaggatttttggcctaccctccaaagaaaagaaagacagctcttgattcctctcttaatttctgtagtaagacttcatcttcagca

SEQ ID NO: 651575 - DNA, 90 bp, Homo sapiens
tggcggatggccccaggtgtaagcgcagaaagcaggcgaacccgcggcgcaataacggcagaggtggaggagacactgaagcgactgcag

SEQ ID NO: 651576 - DNA, 98 bp, Homo sapiens
aaaatctaaccttgcatatgatattgtgcagttgcctacaggattaacaggtataaagttggatcctccagatagccactgccttttcctcaagggag

SEQ ID NO: 651577 - DNA, 100 bp, Homo sapiens
cccagaccctggagcctcagttggaagcagccgatccagcctgcggagcctgtggggcagccattgagacccagagcagcagttctgaagagatagtgcc

SEQ ID NO: 651578 - DNA, 75 bp, Homo sapiens
atacctggagtgggattgctagatcacatgcaggtgtcttctgcggaggtgcgcatcgggcccatgagactgacg

SEQ ID NO: 651579 - DNA, 75 bp, Homo sapiens
cagaatcaggtggccagccctcagcccccacatcctggcgagaccgagtctcctgccattccgagcaggcctggt

SEQ ID NO: 651580 - DNA, 90 bp, Homo sapiens
ctcagagggacttatacaaggatgtgatggtccagaattatgagaacctggtctctgtaggtctatgctccatcagcaagcactgccgac

SEQ ID NO: 651581 - DNA, 87 bp, Homo sapiens
tgatgacacatcagcatttgtttcccttagccagcccgagcaagtaaagattggtgctgggctgtgctgtggagctccctgatgtca

SEQ ID NO: 651582 - DNA, 101 bp, Homo sapiens
taggattcgaagaccagttcattcttagtgtcttctgaaataaaattaggtagtggaggacatgctagaggacgaggaagaagaagatgacaaagatgaca

SEQ ID NO: 651583 - DNA, 92 bp, Homo sapiens
aaaaggacgccgcggtcttcccaggcgtcgcggagagcagggcgtgatggtgggcatgggtcagaaggattcctatgtgggcgacgaggccc

SEQ ID NO: 651584 - DNA, 74 bp, Homo sapiens
tgttaagaagcacctcatgcaagcgagggacctgggactgctcacagccagattgtctccagctttaagaccac

SEQ ID NO: 651585 - DNA, 75 bp, Homo sapiens
ctccatcaggaccccagatgtctgacagccctgtgtgacaccaagataagtaacatgacgaagatgatcctgcag

SEQ ID NO: 651586 - DNA, 89 bp, Homo sapiens
tcgggacccgcggtccccgctcttgctgacaccaaatggattgcttctgactccgagtccactgctctccagcatacatttctggagca

SEQ ID NO: 651587 - DNA, 74 bp, Homo sapiens
gcgtgctctgcactgggcagcatacatggatggtgaggtctacagctttgggactcttccctggagaagtggac

SEQ ID NO: 651588 - DNA, 75 bp, Homo sapiens
tccggcttccgtcccggacagagcccgtggtcgcgcagctagagaccgttggatggcagcttaaccttcagatgg

SEQ ID NO: 651589 - DNA, 75 bp, Homo sapiens
aggagctgcagaacagaacactttctcatgtccagggtcagattacaagaatcttgtggaagaagaatgaagttg

SEQ ID NO: 651590 - DNA, 90 bp, Homo sapiens
tcaacaacctgctgctccatgtagaacctaagcggaagcaaggacttcaagactcaagttcaaaatgccaggcattggaagaaaacaatc

SEQ ID NO: 651591 - DNA, 98 bp, Homo sapiens
tggtacacagtggagcaaccaaaggagaaatctcggccacacaggacgtcatgatggaggagagagaactcgatgccaccgcaacggtattggcgaac

SEQ ID NO: 651592 - DNA, 88 bp, Homo sapiens
gtagaaggccagagtcacacacggtcctaagagctgggcaccaggaagcgaaggctgtttgtttcgacgccggaccgcgtaagagacg

SEQ ID NO: 651593 - DNA, 100 bp, Homo sapiens
cgaagagtgagattccaagaaatagacgatagcttggatcaaggtgaaatgacaatggatgctctgttggctcgattgaaacttctgaatccagatgacc

SEQ ID NO: 651594 - DNA, 94 bp, Homo sapiens
gtggggactgcacgtagcccggcgctcggcatggctctcctggtgctcggtgctggagaatctggtaaaagcaccattgtgaagcagatgagga

SEQ ID NO: 651595 - DNA, 90 bp, Homo sapiens
cagtgttcccagcgaggacgagtggatcctcctccgcctgccttcgtctgtcctctgcggcagcagcttccaggcagaacagcccatcac

SEQ ID NO: 651596 - DNA, 75 bp, Homo sapiens
gcgggaccagctccagcgccaccttaactccgccctcccccagggtgagaaggactggcagaaatacgagactgc

SEQ ID NO: 651597 - DNA, 75 bp, Homo sapiens
gggacagaagcgaaattagtgcggaaagttgccggggaaaaatttcagaagaaagtggtagcttcctttccaaga

SEQ ID NO: 651598 - DNA, 100 bp, Homo sapiens
attttactgctgaagattatgaaaaggtaagccgtaactttgagctggttggacgggttaacttggatcagctggaacagatgaaggagaaaatggagag

SEQ ID NO: 651599 - DNA, 100 bp, Homo sapiens
agtaaaaggacaatttttctcctccataggattacaaggttatggatgatgaatcagatgaaaaagaagcaaactcaccttaaaataatctggattttct

SEQ ID NO: 651600 - DNA, 76 bp, Homo sapiens
ggcctggcgcccgtcaacttctgcgacgaagaaaaaaagagcgacgagtgcaagcctgtggacatctctacagcaa

SEQ ID NO: 651601 - DNA, 98 bp, Homo sapiens
agttgtgcaaccttgaacaaatggtccagtcaacctgcaaccaaaacgagactttttagcacgcttgatcctgagctcatgttaaacccagaaaactt

SEQ ID NO: 651602 - DNA, 112 bp, Homo sapiens
ctgctgtcagcatcccactccggaaatgtcactcccaccgccccaccgtacttgcaagaaagcagccccagaggtgctggagaatctggtaaaagcaccattgtgaagcaga

SEQ ID NO: 651603 - DNA, 75 bp, Homo sapiens
ttgtaatcagctgaggccatgtcaggagacggagccacggagcaggataaaagaatcagagtgtctcaacccttg

SEQ ID NO: 651604 - DNA, 97 bp, Homo sapiens
gtttcatgttgggtttagaaacgcatgaccgaaaatcagaagacaaacttgccaaagctacaagagacagagtgttgcggagataggaacatgggag

SEQ ID NO: 651605 - DNA, 101 bp, Homo sapiens
gacataccacctccaggatcaggatgcagagcaacgcacctcttgctttttcctccaaagtatgttatgttaagtttcgtgatccatcaagtgttggcgtg

SEQ ID NO: 651606 - DNA, 100 bp, Homo sapiens
tgctactgcgaagacagctggcagggttcaggataagtttgaggtgctgaattacacaagcattcctatctttctcccggaagtcaccattggagctcat

SEQ ID NO: 651607 - DNA, 100 bp, Homo sapiens
gagcttcggagaagcagtggtgggttccatgtgatggtggagtaggaggcaggtctccgcggttgactatagtcaatggggccaatggagccaagtgtat

SEQ ID NO: 651608 - DNA, 90 bp, Homo sapiens
cggccgggtcctggctggccaaacgaggctcgcggaagcagcagccgccgcctgaccgcaggaagaaggtagataatgactataatgccc

SEQ ID NO: 651609 - DNA, 96 bp, Homo sapiens
cacccctccgcgctggcggtgtggacgcggaactcagcggagaaacgcgattgaggtgagagaacgccgagccgtcgccgcagcctccgccgccga

SEQ ID NO: 651610 - DNA, 80 bp, Homo sapiens
cccccagaagagcggcggctggaccacttctctgtcgacggctatgacagttctgtggcattggcctggccctctgcaag

SEQ ID NO: 651611 - DNA, 98 bp, Homo sapiens
ttgttccactccagcttgcttcgtttacagcgcggggtgtcctgtcctcgccatgaggccgcagcaggcgccggtgtccggaaaggtgttcattcagc

SEQ ID NO: 651612 - DNA, 100 bp, Homo sapiens
tcggcgggcccctgctgaaagaccggcatgccctattctgtgggcttccgcgaaacggatgtttccagtcctaaagattagtgtcacagggttggacccc

SEQ ID NO: 651613 - DNA, 100 bp, Homo sapiens
gacagcccctgcccatttactgcgaaaacctgcaacccagagcctgaaggacttcctgcccaaggagtatgtgaagcagaagggagagcgtaagatcttc

SEQ ID NO: 651614 - DNA, 75 bp, Homo sapiens
gttttctgccggctgtaaagtcatcacctcctgggatcagatgtgcattgagctgatcttgcatctttaatggat

SEQ ID NO: 651615 - DNA, 75 bp, Homo sapiens
atgaacttgtttaccctttctgccttggttggagacgaaaccagacagagggtcaagtttacagatgaccgtgtc

SEQ ID NO: 651616 - DNA, 100 bp, Homo sapiens
aggatgaagaggttggagatgggaccacatcagtaattattcttgatattaacctggctgcagagccaaaagtgaaccgaggaaaagcaggtgtgaaacg

SEQ ID NO: 651617 - DNA, 96 bp, Homo sapiens
gcctccaaatgccccaagtgcgacaagaccgtgtacttcgacggccaatgggaacgtggaggccaaagtggtgtgcttctaccggaggcgggacat

SEQ ID NO: 651618 - DNA, 73 bp, Homo sapiens
ccagatggtcagtttaaagatatcagcctgtctgactacaaagggaagttaagatatgccaacaacagcaatt

SEQ ID NO: 651619 - DNA, 87 bp, Homo sapiens
aaggattccaagtaactcttatttggtaaatgagctggatggtatcccgttgatcctggacaactgcaacatcagtgacagtaaccc

SEQ ID NO: 651620 - DNA, 75 bp, Homo sapiens
agagaatgtaagacaggaaaataattaaatattcttaccgagcagatataatttctacagtagaatttaatcatt

SEQ ID NO: 651621 - DNA, 101 bp, Homo sapiens
ctggtcttcactgactttcagctagaagaaggatatgatttcttagagatcagtggcacggaagctccatccatatgggccaaaagagaaacattggctac

SEQ ID NO: 651622 - DNA, 83 bp, Homo sapiens
caggcatgttgtataaatgtacagggttttcagagaaagatgctgatgaggtgaaaggaatttttgtagataccaacttatac

SEQ ID NO: 651623 - DNA, 82 bp, Homo sapiens
attggatatggagcctttggtgttgtctgaactctcttgatagagcccaagcagccaagaataaaggcaataaatattttaa

SEQ ID NO: 651624 - DNA, 74 bp, Homo sapiens
ggggaagggcttcaatgggaggaagccagggtgtgaagtgacgggggaggatggagatgaagatgaggaagctg

SEQ ID NO: 651625 - DNA, 100 bp, Homo sapiens
caaatagcagaagaataccatgaggtcaaaaaggaaatcaccctgcttgagcaaaggaactatcagttgagggatttgcagttgataaaatggctggaga

SEQ ID NO: 651626 - DNA, 75 bp, Homo sapiens
cccgctccccttttcccctcagtcgcctcgcgcctgcaggctctacagagtgaaggtttaaatccaaggtcatgg

SEQ ID NO: 651627 - DNA, 51 bp, Homo sapiens
ctcccgagtggctgggattacaggctgcctttaatattggttgggaacaaa

SEQ ID NO: 651628 - DNA, 74 bp, Homo sapiens
aagctgaatgaaattgtcgggaatgaagacaccgtgagcaggctagagctgtgctccattgaagtgacttgtga

SEQ ID NO: 651629 - DNA, 83 bp, Homo sapiens
acgaagagctgccgtcgctgcagagaccccgctatggctgctgaccccgcactacatctacccaccagccatcgtgcagccca

SEQ ID NO: 651630 - DNA, 88 bp, Homo sapiens
tttcttttgtgcaagatgagcctcaagtgcttctgcattacagtatttcatggaaacttggagagagaaaagtgatgaagtgatggga

SEQ ID NO: 651631 - DNA, 83 bp, Homo sapiens
tcctggccctggccctgatcatcctgctgggcttcgtccagatcgggaaggaacatccagtcatggataaaaatgagctggtt

SEQ ID NO: 651632 - DNA, 50 bp, Homo sapiens
cgccctggccatctaccatgtgggaatgaaagctactggttgattttaaa

SEQ ID NO: 651633 - DNA, 75 bp, Homo sapiens
gaggaggaggtggactctgccgacaccggagagaggatttttagactctgaggagcagttggagctaatccacat

SEQ ID NO: 651634 - DNA, 51 bp, Homo sapiens
caagcggcttttcttctggatgcaggccatcaccatcgaggctgagccaag

SEQ ID NO: 651635 - DNA, 83 bp, Homo sapiens
gagacacgcctgggcccaggtgtggcgtctctgtccccatctggttttagcactgagctagcctctccttgctagaagcttac

SEQ ID NO: 651636 - DNA, 101 bp, Homo sapiens
tctgccacccagtggtttactggcataattactcatcatgatctcttcacccgcaccatgatcgttatgaatgatcaggtccagagggggcaaacctcttt

SEQ ID NO: 651637 - DNA, 90 bp, Homo sapiens
ctttgaatttgctaaagaactcatcaggcacaatctgagaatggatcttggagaatgtctgaaagtccatgacctggctttaagagcgga

SEQ ID NO: 651638 - DNA, 95 bp, Homo sapiens
ccagagcattgaagatcagtacaaaaattcttcaagaaatctaaggtgaccaagtcagccatcggggtgctctaactgggggttattatgacaca

SEQ ID NO: 651639 - DNA, 50 bp, Homo sapiens
ggagaacttcaaccaggcactcaagattcccaaatgctggaaaatcctct

SEQ ID NO: 651640 - DNA, 100 bp, Homo sapiens
gacttggtctgccttggaggcagtcgtgcccaggagcaggtgtgttaccgagtggaatgggccaaattccaggaacgtgagaggaagaaggaagaagagg

SEQ ID NO: 651641 - DNA, 88 bp, Homo sapiens
gctgccgagaatccattttggatggttcctgtttcccagcgactaaatcttcctgtcatgggtgccactcgcagcaatctgcagcccc

SEQ ID NO: 651642 - DNA, 97 bp, Homo sapiens
aaaaaaacagtttcctgctatggccctgaagattcctgccaagagaatatttggtgataattttgatccagatcgtaaaaaggaccttgtaaaacta

SEQ ID NO: 651643 - DNA, 96 bp, Homo sapiens
tggaatgtcatggacttcatcgtggtcctcagtggacacttcttggtctccacctgctatggcctctacctccctgtcagaagctccacctttctt

SEQ ID NO: 651644 - DNA, 100 bp, Homo sapiens
atggccagtacctccaggccctgaacgcggactggcacgcagactgcttcaggtgtgcgagctggacatcatcttcaactttgagaaggcctacttcatc

SEQ ID NO: 651645 - DNA, 109 bp, Homo sapiens
ggggcagctgaactgagcgtatgtgccacgccgcccaggagacccctctgctgcaccacttcatgctgtgcctttgccaacacccccaagtacagccaggtcctaggcc

SEQ ID NO: 651646 - DNA, 100 bp, Homo sapiens
cgccccccaccgtgtcgccggccttggtccctgcggcgcggacgtccggcgcgggagagaaaggaagattcttacctctgaagacaatgttaggaccaag

SEQ ID NO: 651647 - DNA, 100 bp, Homo sapiens
aaaggagaaggaagaagcagatcttcttttggagcagcagagactgtttgggagcctctggtggagcaagtaattgggattcctacagtgaccatttcac

SEQ ID NO: 651648 - DNA, 100 bp, Homo sapiens
cacaacgctgtattcattactaagaagcctgttcattttaacgttacctggagatattagatgaacaagagaactgggcaacccatgatccacatctacc

SEQ ID NO: 651649 - DNA, 75 bp, Homo sapiens
ccgacagccaggcccgcgagaaccctgggcgctgcctatggcacagccaagagcggtaccggcattgcggccatg

SEQ ID NO: 651650 - DNA, 100 bp, Homo sapiens
agagagttcgcctgagccagatcccaggtgaatggaagagaatccgaagaagaaaatctcaataaatctgaaataagtcaagtgtttgagattgcactta

SEQ ID NO: 651651 - DNA, 51 bp, Homo sapiens
gggcagccgccgctcctccggggcgggcgctaatattgacacctgctcaga

SEQ ID NO: 651652 - DNA, 90 bp, Homo sapiens
gtttgaagtgatcacaaacaaccgaacctttgccttccgggcagagagtgatgtgggcatttgagccagatgtgtttcagaaacaggcca

SEQ ID NO: 651653 - DNA, 50 bp, Homo sapiens
gctccgtgtttctggaaagtgacagcaggcttgcttccggcgtcatggct

SEQ ID NO: 651654 - DNA, 83 bp, Homo sapiens
gggaatctgaatggtgaaaccatcaaatctggaacatctctaatttttaaaggggtatcaacctggacaaagcaatatcaagc

SEQ ID NO: 651655 - DNA, 90 bp, Homo sapiens
cagagtgttgccaaggccaaatatgaatttttatttggcagatctgaagggaaagctccagatactaatttgaacatggaattcaatcct

SEQ ID NO: 651656 - DNA, 98 bp, Homo sapiens
ggagcaaggatccttttccacggtgtgttctatgccgggggctttgccattgtgtattacctcattcaaagcgaagtggtgaacacccatggccccgt

SEQ ID NO: 651657 - DNA, 90 bp, Homo sapiens
tttggctttgcctttctggacacagaagtatttgtgacaggcttctccagtgacagtgatctggtatctcttactgttgatgtggattct

SEQ ID NO: 651658 - DNA, 83 bp, Homo sapiens
gtgcaccatgcgagaaggggagattgcccagttcctctgtgacatcaagtgcctccggagccagcgtggtggccatagacaac

SEQ ID NO: 651659 - DNA, 100 bp, Homo sapiens
caaaagaaccattgaaaaatttgagaaggaggctgctgagggcaacgtgtttatgtattatggactgtctaatttctatcaaaaccatcgtcgttacgtg

SEQ ID NO: 651660 - DNA, 74 bp, Homo sapiens
gaagggctgggtaatgttgcatctgtggagctaaagagagcaaagggagaaagctctaggctaaaggccagaag

SEQ ID NO: 651661 - DNA, 100 bp, Homo sapiens
agtcatcagagcatgtatggaggaaatgcaccaggttgcaaggagtatgagcctgatgtgggcagaatccagatgagctggccagtgctgtgaaggagct

SEQ ID NO: 651662 - DNA, 96 bp, Homo sapiens
cccactgaaaactggtgagacaataaatgacgctgtgctctgtgccgtggggatcgtcattgccatcctcgcggcttgcacagaaatctggaggca

SEQ ID NO: 651663 - DNA, 96 bp, Homo sapiens
ggatgcctccattgcacacagattccacatcatgagagaaaaacacccagagaaattcaacagtagagccttcagagggaaacattcccatccatt

SEQ ID NO: 651664 - DNA, 76 bp, Homo sapiens
ggtctccacagagaccatcaggatgtcgtattttggggagcatttttggtagagacggggtttcgccatgttggcc

SEQ ID NO: 651665 - DNA, 85 bp, Homo sapiens
gcgattgcgagaatgaggaggacaacagctacaaccgggggtaccacatcgaggtgaaccgtgttcctgctggcaactgggttct

SEQ ID NO: 651666 - DNA, 95 bp, Homo sapiens
tgcggaagtccccgaggcagcctccgcggaggagcagaaggacctcagcagccatgtcgaagccccatagtgaagccgggactgccttcattcag

SEQ ID NO: 651667 - DNA, 82 bp, Homo sapiens
gacccctctgctcgcggccgcgcctttgagggcgccctgcgtccggcagaggaggcgagcatcccgctcaggtgatgaggaa

SEQ ID NO: 651668 - DNA, 90 bp, Homo sapiens
ccactgacctggggacagcagatgttggaggatctcctgatgcagtccagcaaagaactttcacatgtggacctccctgaagattttcta

SEQ ID NO: 651669 - DNA, 75 bp, Homo sapiens
tccctgcaactaactccattcttaattgattttgttggcccccatttgaccaaaaaagtgacactgaattccgaa

SEQ ID NO: 651670 - DNA, 90 bp, Homo sapiens
tgctttttcaagggagctgataaagaacttcttcccaaaatggtccctggatggctttgtatttgcactaaatcaggaaggaaaattttt

SEQ ID NO: 651671 - DNA, 100 bp, Homo sapiens
agaatctggaggggacactgaggagacgttccctaagaacaccttccaccatgaccacctcagcaagttcccacttaaataaaggcatcaagcaggtgta

SEQ ID NO: 651672 - DNA, 100 bp, Homo sapiens
aacaacaccacaataatccacagccaaggtgatgatgaacagtctacacagatggctgcaagttgggaagatgataaagttacagaagcatcttcaaaca

SEQ ID NO: 651673 - DNA, 100 bp, Homo sapiens
gcaactaccgcgagctgcgctggttcaccccgtggtcgaggagtcgcagcaagatggaacttattgatgataacaccgtagtcagggcacgaggtttacc

SEQ ID NO: 651674 - DNA, 83 bp, Homo sapiens
ggtgagaaacattaagacctactaccaggaatctctgaaggaagaagatgaatcagatgatgataatatgtaacatttactcc

SEQ ID NO: 651675 - DNA, 75 bp, Homo sapiens
ctaagatgctgccgactctgggcggcgaggaaggcgtctcccggccaccaaaaccctcaacaggggcatctctga

SEQ ID NO: 651676 - DNA, 49 bp, Homo sapiens
ctcccaaagtgctgggattgcagatggaatctcactctgtgagtctcac

SEQ ID NO: 651677 - DNA, 75 bp, Homo sapiens
caggcgaacccgcggcgcaataacgatacacaatcatcatcttactagttctctgtgttgctcgctaaccagtcc

SEQ ID NO: 651678 - DNA, 98 bp, Homo sapiens
cggcctcagcctgggtttagtagattatatcttcgtagccatgttactttacatccgagatgcttcacttgcagaagcaagagggtgcagtgaatccc

SEQ ID NO: 651679 - DNA, 82 bp, Homo sapiens
gggtcgggcgcggagagaagccgcaaccagagccgccgccacggttgttgatcattatgaaaatcctagaaacgtggggtcc

SEQ ID NO: 651680 - DNA, 75 bp, Homo sapiens
ctacggagtcagattcctgaaaaaggcttctggctgtgatgggtcggagattcctgatgaagtgaagctgattgg

SEQ ID NO: 651681 - DNA, 89 bp, Homo sapiens
cttctaataatgcgagctgcttccgaaggctgaccgagtgcttcctgagccccagctggaagtgatggagagagtattggaaactgtcc

SEQ ID NO: 651682 - DNA, 100 bp, Homo sapiens
ccaagatccgtcagacacacagccttgcgcacctcctcaccaaatacgctgagcagctgctccaggaatatcccgtgctcccacacacagctgtgtgcct

SEQ ID NO: 651683 - DNA, 98 bp, Homo sapiens
aaggaaacagttccctgtcttgggaaaaggagaactcctgactgattagcattcacaccagttccatacgttttgaagagctgtgcagaatttataga

SEQ ID NO: 651684 - DNA, 98 bp, Homo sapiens
tgagggccccaacttcgacagaggccaatcacatccgcaagctccgggcctcagtggcagaccctgggcagctgaagatcctgacaggggactggttc

SEQ ID NO: 651685 - DNA, 100 bp, Homo sapiens
ccagtggtaattaccatcaatactatggaatgcattttgaaacttaaggatgggatacagtaccaaaagaattggtggagctccatttgaagctgatgag

SEQ ID NO: 651686 - DNA, 51 bp, Homo sapiens
attcaataacagttgcatttgaaaacaatgatgtcttggttcgtgtcccca

SEQ ID NO: 651687 - DNA, 74 bp, Homo sapiens
atgacaagcttacattattttgtgaggtggtatgcagatcttcgtgaagaccctgaccggcaagaccatcaccc

SEQ ID NO: 651688 - DNA, 75 bp, Homo sapiens
agtaaagctttggacaactaaggtgtcagctgtgatgcatgtttaaaaggaaattttcgaggtcgcagatataag

SEQ ID NO: 651689 - DNA, 121 bp, Homo sapiens
ggtgttcttctagagctacgaaaatatttgccaaaatattatggcatctggtcacctcccactgcaccaaacgtaattcctgaatttgtaacacaagtgaatgttgccttggaagccttaa

SEQ ID NO: 651690 - DNA, 82 bp, Homo sapiens
cgtacagctcccaggagaaggcttgccgagtgacaacgcgcctgcaaaagggaacaagagcccttcgcctccagatggctcc

SEQ ID NO: 651691 - DNA, 100 bp, Homo sapiens
acagagcaacttgatgaaggtacacccaatagagaggcctccctattccttgagacacaacaatattgaaattagaccaactgataaccctacaatagcc

SEQ ID NO: 651692 - DNA, 100 bp, Homo sapiens
gttgtgccagcgactaaaaagagctggagatggagctgaagatgctgaagtctcagtccagctctgccgaacagagcttcctgttctccagggaggaggc

SEQ ID NO: 651693 - DNA, 75 bp, Homo sapiens
caccatgtcagacgcagccgtagacaccagctccgaaatcaccaccaaggtacatgtcccagagcaagcacacgg

SEQ ID NO: 651694 - DNA, 75 bp, Homo sapiens
ttcatcaaaaatagtgatagctttgataatgaataaccctataccttccaatttgaaatcagaagcaaaaaaggc

SEQ ID NO: 651695 - DNA, 75 bp, Homo sapiens
aaatgtgaaggtgatgaggttgaagatctctatgagcttttgaaacttgttaagcatccgtacccttccgaagag

SEQ ID NO: 651696 - DNA, 101 bp, Homo sapiens
caccctgcagaagaaggctgaagctgcacatcggattctggaaggcctggggccccaggtggagctgagtgaagacatttccacctggacacctgaccatg

SEQ ID NO: 651697 - DNA, 75 bp, Homo sapiens
ggcgggggtcggcccggggctcggagaatgggcaggtatggcctcacaagtcttggtctacccaccatatgttta

SEQ ID NO: 651698 - DNA, 100 bp, Homo sapiens
gctgtctgtggtcactactgtgtggggagttggcaacgcgacacagagccaggttcgagaaatggctgctactaccttaagcggtctgctacagtgtaac

SEQ ID NO: 651699 - DNA, 100 bp, Homo sapiens
caactattcaacatggaggcggaggtcgataagctggaactgatggtgatctttgacgagactctacagaagtgcctggactcctacctgcgctatgtcc

SEQ ID NO: 651700 - DNA, 75 bp, Homo sapiens
caagggcatcagttcaggctgcgcggaggagagaaggaagtgctgatgtggaggcaggatggggaagcagaatag

SEQ ID NO: 651701 - DNA, 75 bp, Homo sapiens
gaacttgccctgtctcctcgcagatgagtgtttaactgctgaagagatcttttcccttcatggcttttcaaatgc

SEQ ID NO: 651702 - DNA, 75 bp, Homo sapiens
gttaacttctgtttacatggaactcagacatctgcaaatcatggtgcgagaagatgtactaaattcattgaataa

SEQ ID NO: 651703 - DNA, 100 bp, Homo sapiens
cacagagcctatttacccagaagtagtccatatggccctccctatcctgaagacattagctgagagtctggcaccttttaaaggtctgatcatcaattgt

SEQ ID NO: 651704 - DNA, 75 bp, Homo sapiens
cccaggtgtaagcgcagaaagcaggcgaacccgcggcgcaataacgtaatctatgccagcaattatgacaatgtt

SEQ ID NO: 651705 - DNA, 137 bp, Homo sapiens
gccgcgaaggacagcctttccgcgcgggactccggggcgccacgggggccatgtaagcagcaaaatgatgcttcaacacccaggccaggtctctgcctcggaagtgagtgcttctgccatcgtcccctgcctgtccc

SEQ ID NO: 651706 - DNA, 90 bp, Homo sapiens
gtgttcccttgtgggcattcttcatcttcaaagagcgagggcggcactgctcacaggacggctacccatccgcaatggcttctacaccac

SEQ ID NO: 651707 - DNA, 98 bp, Homo sapiens
ggaatatttaggatttgcatcaccagaggttccagcaacagatagaaatgctttaagttcactctggggaaagctggcctctgaaatcttaatgcaga

SEQ ID NO: 651708 - DNA, 100 bp, Homo sapiens
ggacgaggaggctggaggtactgagaggatggaaatcagcgcggagttaccccagacccctcagcgtctggcatctgagtcagaaataccatcagaggag

SEQ ID NO: 651709 - DNA, 82 bp, Homo sapiens
accgctgccctcagctccgagtccagggcgagggacctcaggatggaaaccagcagcctgcaccgcccgagaaggtcggctg

SEQ ID NO: 651710 - DNA, 74 bp, Homo sapiens
tcttccaaggaaccagtgcgaaggcccagtttcctctcaacaatctttgaagaaccttcgagaaaggagaaaca

SEQ ID NO: 651711 - DNA, 114 bp, Homo sapiens
gatctgagctcagacctgccaatttaccagagataattgataacaccctgtaacagctgagtgctggagaatctggtaaaagcaccattgtgaagcagatgaggatcctgcatg

SEQ ID NO: 651712 - DNA, 100 bp, Homo sapiens
taatccttttgcagacatctcaacgctggctctccagagtcctccctgctgctgtgtggacgacacgtgggcacaggcagaagtgggccctgtgaccagc

SEQ ID NO: 651713 - DNA, 101 bp, Homo sapiens
gaaaagcacgcctgggggcctcagtggatcttaaatgtatttcggcattgggttgaacatcatttttatgactttgaaagagacttggaattgcttgaaag

SEQ ID NO: 651714 - DNA, 71 bp, Homo sapiens
aaggtgcccccgaagtgaaagagatggcctggtggaaagcctggcattcctctgaatattgatttgctgaa

SEQ ID NO: 651715 - DNA, 96 bp, Homo sapiens
gcgcagcccgcccgcccggcgaccagcaaggatctaaacgctcttcccacagcaatgcttatttttatggcttcttcaagaacaagcgaatagttt

SEQ ID NO: 651716 - DNA, 96 bp, Homo sapiens
ctgggtccgctgagcggggcgacccgagcaagtaactggcagaagttttggtgataaagattttcggacaggtttagaaaatggaatcctcctctg

SEQ ID NO: 651717 - DNA, 111 bp, Homo sapiens
ccaacaccttcaggaaaactcgtgtccatcaaaatccagatgctggatgacacccaggaggcatttgaagttccagtagcagaaggtcaagaaatttgtgtgattgaagcc

SEQ ID NO: 651718 - DNA, 82 bp, Homo sapiens
gggagaggagctgtggataacgggaggtgaatttccatgtcaacatagtcctgctggagaagcgactggaggagtggttggg

SEQ ID NO: 651719 - DNA, 115 bp, Homo sapiens
tccagatgaaagagaagtttctggtcactccccaggattatgcgcggttgctgctaaaaccttgcctttttataaggactacttcaatgttccttatcctctacctaaaattgat

SEQ ID NO: 651720 - DNA, 80 bp, Homo sapiens
acaaccttgtcatctggccttcagttgctccgcagagtcttccactgtgggaaggatctcatagatcagaacatactgga

SEQ ID NO: 651721 - DNA, 101 bp, Homo sapiens
ttgaagctattcctttggccttacaagtacgaggatgtcgtccaggaaagattgtgcagatgactgaagcagaagttcgaggcttatgtatcaagtctcgg

SEQ ID NO: 651722 - DNA, 74 bp, Homo sapiens
aaaatgccctcaaacgcgccaacgttgcagagtgggcaggatcttaagacccgataggtgcagaacccatctgg

SEQ ID NO: 651723 - DNA, 74 bp, Homo sapiens
gacacggtgaccagctgaatcgtgtggtctcggtgggtggagccgctgactgccgagggcagagcctcgcttcg

SEQ ID NO: 651724 - DNA, 89 bp, Homo sapiens
gcttgaaatgctacatttccaaggtggagccgccaccaaaatgcagattttcgtgaaaacccttacggggaagaccatcaccctcgagg

SEQ ID NO: 651725 - DNA, 75 bp, Homo sapiens
tccttgcccttgtcctcccctttcatccctatgtggaaaacggacccaatgttgtcttccagttgtgaaagcacc

SEQ ID NO: 651726 - DNA, 101 bp, Homo sapiens
aacctgataatgagctccaatgggatcccagagtgctacgctgaagaagaaccagagcagaattgggaagctgtggatggcagtcagacggaaacagagaa

SEQ ID NO: 651727 - DNA, 100 bp, Homo sapiens
caagaagtggccggagagttctgcatgttgattctgtcaagctgagctcccagactctgatacaggctggggatgatgagaagaaccagaggacgatcac

SEQ ID NO: 651728 - DNA, 98 bp, Homo sapiens
gtcggtttccggatgaaacgaggagccagtacctggagtagaacagaaaaattattatgtctgtgttcccttgggactcattggaaattgtacagtga

SEQ ID NO: 651729 - DNA, 98 bp, Homo sapiens
tcaggatctcgtagtccatcaagggtttccaaacactctgaatcccattctcgatcaagatcaaaatccagacaactgatcaatactgggttccatgt

SEQ ID NO: 651730 - DNA, 100 bp, Homo sapiens
ggaagggtggaatgtgttccatccgtctcagcgaaccccttttgaagttgaggccaagaaaggatcttgtagagcaagtctggaaaagtttgaaattcca

SEQ ID NO: 651731 - DNA, 100 bp, Homo sapiens
tgaagacctagtagaagaggtggccttcccttcttcttggtggtgttcttgagtaagataatctggactggcccccgtctttgcttccctgcctgctgct

SEQ ID NO: 651732 - DNA, 101 bp, Homo sapiens
aaccggcaaatgctgcaggaactggtgaacgcaggatgcgaccagaatcatcggactcaggtacatctgtgagtgagaacaggtgtcaccttgaaggtggg

SEQ ID NO: 651733 - DNA, 50 bp, Homo sapiens
tcaccggagcgtcccagctgcgaggagcaataccaagaaggagggtgacc

SEQ ID NO: 651734 - DNA, 100 bp, Homo sapiens
cctggtgatgcagttcaaagtaccttgaagtgtatgcttgggattctcaatggatgctggattctaaaatttgaatagacgggttcgtgctatgttgtcc

SEQ ID NO: 651735 - DNA, 100 bp, Homo sapiens
gtggtgttccagtggcaaacagctgtataaactcttgtaaacaggaagcgttgttgacgaccatggacatcatccacgatggatttggattcatgctggc

SEQ ID NO: 651736 - DNA, 101 bp, Homo sapiens
ctggtgcccatcgggaaatgcatgtgcaaggcaggatatgaagagaaaaatggcacctgtcaagttgcctttccccatcttcctggttctgctccttcgtg

SEQ ID NO: 651737 - DNA, 90 bp, Homo sapiens
aaaatccagatgtcatattcaaaactagaaaaactgcttttggaattatctctacagtgaagaaacctcggccatcagaaggagatgaag

SEQ ID NO: 651738 - DNA, 90 bp, Homo sapiens
agacccggctttaccttatatcagatgagctttgatccaaaccttctccacaacaatggacataatgggtaccctaatggtacttcagca

SEQ ID NO: 651739 - DNA, 74 bp, Homo sapiens
ttaatcctcaatttaagcctgatctaacccctagaaacagtctatgcagcagaaccaggatcctgaagtatttg

SEQ ID NO: 651740 - DNA, 100 bp, Homo sapiens
cagacgccggtgggcacgcccaaagatggccaatgacagcacagagaccagtgaagcaggggaagaggaggaggaccacgagggagacagcgagaacaag

SEQ ID NO: 651741 - DNA, 100 bp, Homo sapiens
gccaagcatgtagaaagccggaaatggcagagcagctcatgaccttggcctatgataatggcatcaacctcttcgatacagcagaagtctacgcagccgg

SEQ ID NO: 651742 - DNA, 100 bp, Homo sapiens
cgagcccgagccatggcgtccgagcggctccctaacaggcccgcctgtctgctcgtggccagcggcgccgccgaaggcagaggtgtccaggacctgcctg

SEQ ID NO: 651743 - DNA, 100 bp, Homo sapiens
tcgctgctcctgcttctcgggctgctggtgctgtgcgcgaggctcctcactgcagcgaagggttgaaatcacaaagattagacacctttttagataggtg

SEQ ID NO: 651744 - DNA, 102 bp, Homo sapiens
cactactcttggaatcaaagataaatccaaatactgcatatcagaaacaacagtttttgatgatgaagaagaaagcaaattgacctatacagagattcatca

SEQ ID NO: 651745 - DNA, 101 bp, Homo sapiens
ctgaaaacttccgtgttctagtgaaacagaagaaggccagctttgaggaagtgaaagcagcccagagcctccccacggtcaacctgcagcctctggaatgg

SEQ ID NO: 651746 - DNA, 101 bp, Homo sapiens
gctagtggaagttactgccgcgccaccgagtccggaccggagactttggggcctaactagggaccagttactctccacaagaaaattcacacaaccacagt

SEQ ID NO: 651747 - DNA, 87 bp, Homo sapiens
gtatttcctgccctacatggattttgaacttgaattcccagcctcgcttgcatctagacacaggttatcaatactctggctgaccat

SEQ ID NO: 651748 - DNA, 98 bp, Homo sapiens
ctggaactgccaccattgctgaacggagaggtagccatgatgccccacttggtgaatggagatgcagctcagcagatcctgtttgaccaaactcagag

SEQ ID NO: 651749 - DNA, 100 bp, Homo sapiens
acagcgcgcacttcacccgcagttgttttcggctttgtgagaaaccttaccatcaaacacgatggccagcaacgttaccaacaagacagatcctcgctcc

SEQ ID NO: 651750 - DNA, 90 bp, Homo sapiens
tcacctaatgttgccaaaaaatttcatgttggacatttgcgttctaccatcatagtggaggcaatgttcactgcaatgtgcgaatgccag

SEQ ID NO: 651751 - DNA, 75 bp, Homo sapiens
tggaagcaggtttaaaattttacataagaagttacctttttcaggtgaaatccttaaccctgtttgtcacccatt

SEQ ID NO: 651752 - DNA, 100 bp, Homo sapiens
ggagaaacaacaactgctacatctgttggaggagccaactagcatggaagtgcagtgatcctgagcagctgaagaaggaactgaatgaactggtcagtgc

SEQ ID NO: 651753 - DNA, 83 bp, Homo sapiens
caagaacagttggccaatactggtgcccaagcctggattaaaaaggaactgtggctgcaccatctgtcttcatcttcccgcca

SEQ ID NO: 651754 - DNA, 98 bp, Homo sapiens
ccagatggaagaaccattgttagtgaacgtggacaaagctgttgtctcagggagcacagaacacttgctctgaaatttggggactgagtacaccaaat

SEQ ID NO: 651755 - DNA, 100 bp, Homo sapiens
aagacgaagacagccacagaatcaaccaggaccattgcaggactaatgttccgacgttttcacagtcaaatctagaacagcagaagcagctttatctcag

SEQ ID NO: 651756 - DNA, 101 bp, Homo sapiens
gagaaatctccattcaaatgggttcattaaagaagcggaagcagaatgaggctgccaaggaggcagagactcctcaggccaagaagataaagcttcagacc

SEQ ID NO: 651757 - DNA, 48 bp, Homo sapiens
cgcgctcggcggccgccattgcaggctggagtgcagtggcacggtctc

SEQ ID NO: 651758 - DNA, 98 bp, Homo sapiens
gagctggtggatgctcttcagttcgtgtgtggagacaggggcttttatttcagtatttaccttgctgtggattgctgactggatggtccatcacttct

SEQ ID NO: 651759 - DNA, 98 bp, Homo sapiens
tccacctcattttagagtatcaagcagatgcctctttgacaaggccacttcatcatcaagcttctgcctgcccgcattctcatggaaacccccctcct

SEQ ID NO: 651760 - DNA, 50 bp, Homo sapiens
ccaggcacgcgaggcccctcagatggctctgagagattcctctgcgaatc

SEQ ID NO: 651761 - DNA, 80 bp, Homo sapiens
caaggccagcacggcccctggggcggagggtcagcccaaggccaaccccactgtcactctgttcccgccctcctctgagg

SEQ ID NO: 651762 - DNA, 90 bp, Homo sapiens
tacaacaactagtgcaaccagtaagttgatccatccagatgaggatatatccctggcagcctggcatcctcgctacaacctcattgttgt

SEQ ID NO: 651763 - DNA, 74 bp, Homo sapiens
cctcccaggacacaggagtcaaggctgtattcgtgcctggccaatggcagtgcggatgagtttcagcgagggga

SEQ ID NO: 651764 - DNA, 100 bp, Homo sapiens
atgccttcgaagtggctgagaaatacctcgacatccccaagatgctggatgcagagggtttgtccagaggggttgcgtttatccggtttgacaaacggtc

SEQ ID NO: 651765 - DNA, 90 bp, Homo sapiens
cagccacaacaagacctcccggcccaagatgtccctggtgatgcctgccatggcccccaatggaaatgtgactggaaacagtaactccac

SEQ ID NO: 651766 - DNA, 75 bp, Homo sapiens
cagtgttctttggatgctcatgaaatttgtctgcaagatatccagattgcagagggaatggcatacatcgagcgg

SEQ ID NO: 651767 - DNA, 88 bp, Homo sapiens
aggctcccgggacctgcgtgctgccgagagaggaagcgaagggcaccatctttggcagaagattttcgcaagctctggaaaactccac

SEQ ID NO: 651768 - DNA, 90 bp, Homo sapiens
gcaaatttattggctgaagctggcactagtcaagatggaggtgatgctgggccgttgctccagggagaactgcaaatatcttcatccacc

SEQ ID NO: 651769 - DNA, 88 bp, Homo sapiens
tataacattcttggcacaaatactattatggataagatgatgatcaaagatccagctaacaggcgctacgaggtgcccttggagaccc

SEQ ID NO: 651770 - DNA, 96 bp, Homo sapiens
aaacatcaccaccggagaagaaaagataaagaatcagataaagaagatggacgggaatctccttcttatgctgttaagaagaaatcctgaacggcg

SEQ ID NO: 651771 - DNA, 100 bp, Homo sapiens
gacaatggctttggtccccagcgcagtgaagtggtgagcctttttgtcactgataattgtatggaagagatacagtgattttaagaaactacacaaagaa

SEQ ID NO: 651772 - DNA, 100 bp, Homo sapiens
tcaaggctgcctataatcaagtaaaaacaatagctcaaggaaacctttccaacacagatgtccaagctgccaaggtcaaaaattgcatgttcaaacaaaa

SEQ ID NO: 651773 - DNA, 89 bp, Homo sapiens
ttttcgttcagtgggacttgcttcacgacccctcctcctgtagagagtggtgctgccctctcgggatgtacctgcaggtggagacccgc

SEQ ID NO: 651774 - DNA, 82 bp, Homo sapiens
tcctccaggcatgccccgctacgagctggctttaatcctgaaagccatgcagcggcatttgcaagtgaggaagcagcacaac

SEQ ID NO: 651775 - DNA, 75 bp, Homo sapiens
ttctcttctccatcgtccatgacaagtcagcctgggcagaggagcagaataagttggtgcatggcggaccctgcg

SEQ ID NO: 651776 - DNA, 98 bp, Homo sapiens
ctatgtcttccatccagacaatgctgttggtgttcgaggaagagacattgttgttcttggtgtggagaagaagtcagtggccaaactgcaggatgaaa

SEQ ID NO: 651777 - DNA, 71 bp, Homo sapiens
gttttcttatgcttataagagtggaacagccggccaagagccactgcacaatgaggagctggcaggagcag

SEQ ID NO: 651778 - DNA, 75 bp, Homo sapiens
tatgtttcaccgaagcgctctcggcagcaccagccattcagatgccgaatataccaactctcctttggtacctac

SEQ ID NO: 651779 - DNA, 98 bp, Homo sapiens
cgggaccggagtcagaaccctccgcagagtaaaggttgtctgcattcaaaagagcattctattaaagctaccttaatttggcgcttatttttcttaat

SEQ ID NO: 651780 - DNA, 76 bp, Homo sapiens
gggacttggccgagcggatcctaataaggggaaaatgacactgtcacatgaacccaaagtccttcaagagggtctc

SEQ ID NO: 651781 - DNA, 73 bp, Homo sapiens
caggatggcggcggtgaagaaggaagggggtgctctgagcatcagacaacagtcagcgctttcgagaaacctg

SEQ ID NO: 651782 - DNA, 75 bp, Homo sapiens
ggagcaaccctgtaaaaccagccttagactatttttcaaacagtcacggtctagatcacattctcgatccagagg

SEQ ID NO: 651783 - DNA, 100 bp, Homo sapiens
gcaaaagcctttcatgattataatgaagtccctgaggtgaagaaagaggagactttgctggatctggactttgatcctttcaagcccgaggtgacacctg

SEQ ID NO: 651784 - DNA, 101 bp, Homo sapiens
catgtgctagagacagccaacaaaatattcatggttcttgagagaaagcttcttgctatctacctccaccatgatgaaagtgtgttaaccaacgtgttctg

SEQ ID NO: 651785 - DNA, 101 bp, Homo sapiens
cgtggccttagctgtgctcgcgctactctctctttctggcctggaggctatccagcggcagctgcaatgactctccgcacggtattattgtcattgcaagc

SEQ ID NO: 651786 - DNA, 104 bp, Homo sapiens
ctcaatggagaattctggtcactcagtgacacacacaactcgggcctccccagcgacagccatcgaagacggcaatttggaggaaatggaagaggaagtacggc

SEQ ID NO: 651787 - DNA, 101 bp, Homo sapiens
acctgcggcccggctctcctccgcgcccccactcgcgctgcgatgacgcgctcactgttcaagggaaacttttgggtgatggcttggacaacagtgtagct

SEQ ID NO: 651788 - DNA, 83 bp, Homo sapiens
ggaagaatatggagagagccctttgcaggatgcagaagaagccaaaaacattctggtgtctttggtgcaacactaacaaggct

SEQ ID NO: 651789 - DNA, 98 bp, Homo sapiens
ctggagcaactgagacaggaggccgagcagctccggaaccagatccgggatgccctaaatgagaccagggaatcagagacaaagctgaaggagctccc

SEQ ID NO: 651790 - DNA, 94 bp, Homo sapiens
ttacgtatttgtgtgacttgactcttcaaacacaaagtttggtgccctggttgtcagatgttggaaagcagtaggacggaacatactcttcgtg

SEQ ID NO: 651791 - DNA, 99 bp, Homo sapiens
gactggaagctttactagaagctgcagggagactcatgcatctgtatgccgtgtgcgtggactgcctggaaggggttcacaagatcatctgcatcaagt

SEQ ID NO: 651792 - DNA, 51 bp, Homo sapiens
tgggagcctattgtccagcccctcaggctatcttagcggcacagagacgag

SEQ ID NO: 651793 - DNA, 80 bp, Homo sapiens
gtgatgttggagaactacagaaacctggtctccctaggttcgatacaagaggctgttttcctagcgtggcttgctgcctt

SEQ ID NO: 651794 - DNA, 75 bp, Homo sapiens
aaacctgggtgaactttcacggacaacctcagaggacaacgaagtgttcgccttcaggaggagaactccgttaca

SEQ ID NO: 651795 - DNA, 99 bp, Homo sapiens
ctgtatttacaaccctttgtttggatcagatcttcagtatacaaatcgggtagaggaccgaaaacactttggagctgtagaagctaaaccagaattgtc

SEQ ID NO: 651796 - DNA, 82 bp, Homo sapiens
gagattttgatgtggatgatgccaaagttttattaggtgtgtgtgtgcaggccacagcagcatgcccttggtgtagtcagtg

SEQ ID NO: 651797 - DNA, 74 bp, Homo sapiens
cctggatcccaagaaagctggaacatatttctcaaatcaggcagctcctccgagcagctccatggccggtctga

SEQ ID NO: 651798 - DNA, 100 bp, Homo sapiens
atctgcacttcgcattttggcattgacatttaattttagggtcctttatatagaagggagagtagcctgggaatctcaacttaaacccgaagagttgcct

SEQ ID NO: 651799 - DNA, 95 bp, Homo sapiens
aggcacaggctgctcgcggaccaccctgctccgaaaactaagagcgcatcagcgaggaggtggggctgctgcagctccttggggaccccccgccc

SEQ ID NO: 651800 - DNA, 100 bp, Homo sapiens
aagaatgaaccgcttgcttcttatttagaatatggctcaagcctggaagatgacgtggtgggggacacttcagggtactaccagcggatgttggtggttc

SEQ ID NO: 651801 - DNA, 100 bp, Homo sapiens
tactaccactgtttttgttggcaacatttccgagaaagcttcagacatgcttataagacaactcttagctaatcagttgctcaactaccgttctgccatt

SEQ ID NO: 651802 - DNA, 100 bp, Homo sapiens
aatgcacgggtcgctccatttcgaattctgcttcaagttcccggctcccaggtttattctcccatagcatgtgtcatctcaactcgaactccacctccac

SEQ ID NO: 651803 - DNA, 101 bp, Homo sapiens
gtctgcactacccactgagagcatgcagttatatgaggtgatccgagcagttggcagactaaaaagagagcggtctatgagtgaaaatgctgttcgccaaa

SEQ ID NO: 651804 - DNA, 89 bp, Homo sapiens
tgatatttcgtgctttagatcctgctttcaaaatagaagatccttatagcccaaggatacagagtacaggtttgcagattccgccagca

SEQ ID NO: 651805 - DNA, 75 bp, Homo sapiens
cgaggacagcctgcaggatgcctgggactacgtgcaggctcagaatcaagaagtggtggactttgaaaagttgga

SEQ ID NO: 651806 - DNA, 82 bp, Homo sapiens
atggacatgagccccctgaggccccagaactatcttttcggtgaccatggaggaagaagatgagtctcgagggaagacagag

SEQ ID NO: 651807 - DNA, 97 bp, Homo sapiens
tcaccaaataagctatatactttggttacctatgtacctgttaccactttcaaaattgatgaggaatctggattaaaggattcagaaccagagcgaa

SEQ ID NO: 651808 - DNA, 90 bp, Homo sapiens
atccaggcattcttcatgagcatagacagtctgtgtaagaagtactccagggaaacctcccagggcagctggtggaatttttgaagaaaa

SEQ ID NO: 651809 - DNA, 100 bp, Homo sapiens
gtagaccaggaggatttcctgatcatccacatcgaggttttgaaacatgccggtggtggtgtgcacattgagccccggtatagacagttcccccagctga

SEQ ID NO: 651810 - DNA, 96 bp, Homo sapiens
tcatgtcaagcgaagccttgaaaaagctgccctgagacggtgtcccgccgaaagacaatgcagatcttcgtgaagactctgactggtaagaccatc

SEQ ID NO: 651811 - DNA, 80 bp, Homo sapiens
cgcagaaaccccgttgacaaggcactgctttttcatgacgaatcctaatgtacctggctagctggtggtgagtaggggct

SEQ ID NO: 651812 - DNA, 98 bp, Homo sapiens
gaacatcttgccaatttcaaatcgggagaataaaggcagccccgttgatgactgaaaatgacaaagcatccacctaacagacgaggaatcagctttga

SEQ ID NO: 651813 - DNA, 90 bp, Homo sapiens
tgaagcaacccaattagcatctgaacaattgcaagcagatggatgcaaccttgaaagaactgacaagcttagtaaaagaagtctacccag

SEQ ID NO: 651814 - DNA, 75 bp, Homo sapiens
ctccaggacacccctgaagccgagaaatgggtttccaggcctgaggtgcccgccctggccccaggagaatgaacc

SEQ ID NO: 651815 - DNA, 80 bp, Homo sapiens
aaatcgaaaggagagcccgtcattagcgtgaaaaccacaagcaggtccaaagagagagcttctcacggcattcagcagca

SEQ ID NO: 651816 - DNA, 100 bp, Homo sapiens
caggacccacttgcagcatggagtcgcccgcctcgagccagcccgccagcatgccccagtccaaagctggtactcctggttaatcaacagcttcgtcaac

SEQ ID NO: 651817 - DNA, 75 bp, Homo sapiens
tgagaacatcaccgtggtgaagggcatccggcgtgccaagttggaggccgccattgccgaggctgaggagcgtgg

SEQ ID NO: 651818 - DNA, 74 bp, Homo sapiens
ttgctgcaggctctggggagtcgccatgcaccctggaggagaagaggttctgctggaacaagctggtgtagatg

SEQ ID NO: 651819 - DNA, 100 bp, Homo sapiens
ggaaggccctggtcgaccagagggagctgtacctgggcctgctctaccccacggaggactacaaggccctgggtgccaggccctgtggatgcacaaggtc

SEQ ID NO: 651820 - DNA, 100 bp, Homo sapiens
gtggaggaagagattgcagtgggggctgccagtgctaccctgagaaaggtggacgtcggagctggagtttgttcagatcatcatcatcgtggtggtgatg

SEQ ID NO: 651821 - DNA, 80 bp, Homo sapiens
ggcggttaagtatgcggcgccaggagctgtttgatgaacttgtgaaaaaattcaaagtcgaatatcatgctggtggctct

SEQ ID NO: 651822 - DNA, 113 bp, Homo sapiens
gttcgcggtgacggtggcgccgcccggggcgaggcagggccagcagcaggcgggaggacatggatttgattgacatactttggaggcaagatatagatcttggagtaagtcga

SEQ ID NO: 651823 - DNA, 75 bp, Homo sapiens
ctgagtggttgtgtggtcgcgtctcggaaaccggtagcgcttgcagcatgcctcgaagcggaggatccctgtgtc

SEQ ID NO: 651824 - DNA, 100 bp, Homo sapiens
ctcttcttcgggatcactggattgctgacggcagccctctcaggtcagaaccatccagtcctggacatgggaccacatcggcgactgcagtggacgtggc

SEQ ID NO: 651825 - DNA, 100 bp, Homo sapiens
gcatcaaacctcttcaattccatatttttgctgaagatcagctacatcatagctttaaaggcagagggtctaaattatggataataatggaatacctggg

SEQ ID NO: 651826 - DNA, 59 bp, Homo sapiens
catcctgctctggaaaccactggctcttgtcaggatggtgaagctgttcatcggaaacc

SEQ ID NO: 651827 - DNA, 75 bp, Homo sapiens
atgcagaatgcagaaatcatcagaaaaatgactgaagaatttgatgagcggcagtacatacctgtgaaaatgaag

SEQ ID NO: 651828 - DNA, 100 bp, Homo sapiens
gggaagatggcgaaggtctcagagctttacgatgtcacttgggaagatggcatggcagtgatcaaggttggagatcaagaaacacagcacacagatgagt

SEQ ID NO: 651829 - DNA, 82 bp, Homo sapiens
cttgaggctcgcgagcctccttcgccgcgccccacttgctcgtgcactttacacacatgagccaagacaatgcaaactccag

SEQ ID NO: 651830 - DNA, 100 bp, Homo sapiens
gtctaaccccggaggccggaggaacgggcccgtcaagctgcgcctgacagtcaggtcaattcagtgaagatatgatacccacagtgggcttcaacatgag

SEQ ID NO: 651831 - DNA, 98 bp, Homo sapiens
gaactggtgcaagcggggccgcaagcagtgcaagacccatccccactttgtgattccctaccgctgcttaggacaatgaaaagcgaaccccattgcac

SEQ ID NO: 651832 - DNA, 82 bp, Homo sapiens
tccttacagccgctcgtcagactccagcagccaagatggtgaagcagatcgagagcaaggtcctttctgaaatggtatctat

SEQ ID NO: 651833 - DNA, 82 bp, Homo sapiens
ccaccctctatcctaaagaaaacctcagcctatggtttcccagctcatagggaagtgatgctctccatgctgatgcattctt

SEQ ID NO: 651834 - DNA, 100 bp, Homo sapiens
cttcatgcctgtcctgggatttggcacctatgcgcctgcagagaagttcaccatgtctattctcaagatccatgccagggagatctttgactctcgcggg

SEQ ID NO: 651835 - DNA, 90 bp, Homo sapiens
tctctcataaagtatggggaattcctctatgacaatctcatcattttctccccttcggtagaagccaacttctctttgcctgaaaaatgc

SEQ ID NO: 651836 - DNA, 50 bp, Homo sapiens
agaagtaaagattttgctgaaaaaagcctggctacagataagggaccaaa

SEQ ID NO: 651837 - DNA, 82 bp, Homo sapiens
ggacctgtctgttcatctctggagctgcatctctgcgtctcccgcaagcacttcgctctggaacggggctgcaggctgcgtg

SEQ ID NO: 651838 - DNA, 100 bp, Homo sapiens
cgggtcgcttccccgcagcatggaggacgatgcaccagtgatctacgggctggagttccagttctcttgcaactagcaagtgaagccttgccaaatgaca

SEQ ID NO: 651839 - DNA, 75 bp, Homo sapiens
gttcacggctgacacatttggcatagatacctcttcccgatgggtcccggctcggacggtccgatgggcggcatg

SEQ ID NO: 651840 - DNA, 75 bp, Homo sapiens
ggtcaactccaggcacgaggccagcctgaagttgtacaagctcagagagtggcaacagtgtgaaaagactgaaac

SEQ ID NO: 651841 - DNA, 51 bp, Homo sapiens
cgattgtcgctcggcggcgggagtcggtctcattcaggaacgtcgcctgat

SEQ ID NO: 651842 - DNA, 100 bp, Homo sapiens
gcaagaggattccctcgccactgctatctacccaacaacgagaaaggccggaaggtgactgcccaggatgtgcggaaggaaagccccctgctctttaagt

SEQ ID NO: 651843 - DNA, 95 bp, Homo sapiens
aagaacatgggaatgattgttataaatgaaggctctcttgatgaccttatttaatgaactgaggattgttgttgaacacataataatgaaacctg

SEQ ID NO: 651844 - DNA, 82 bp, Homo sapiens
ccctatgaaatgtttcagtctggagccaaccatgtgtgtttacaggcattggagtttttacatgctaatcaagtgatccaca

SEQ ID NO: 651845 - DNA, 75 bp, Homo sapiens
gcagatgctgtcgtgcttcctgtatagctgcagaactgaattaatgaccaagttaataactgagacacctgacca

SEQ ID NO: 651846 - DNA, 89 bp, Homo sapiens
ggccccagccctagcgctggccgcgaccccggcgggggggccctcagcctcttggccttgaacgggctgttcatcttgattcacaaaca

SEQ ID NO: 651847 - DNA, 100 bp, Homo sapiens
atgctgaccagtttcctgacgcacttttccagccattaactccaggctctcgagaatttgaagatgttgtaaatattctccattcttcttaccttgaacc

SEQ ID NO: 651848 - DNA, 75 bp, Homo sapiens
atcatttgaagacgttccttgaggaggtttgaaaaaatttttcgaaagaaagcagtggaacttggggtaaaattg

SEQ ID NO: 651849 - DNA, 75 bp, Homo sapiens
tggaatttgattaactcattcaaggttacccagttggtttctggcatttgaagtcaaagagtattcagcgttgga

SEQ ID NO: 651850 - DNA, 75 bp, Homo sapiens
ggatttgccagtggagtagaacagattattcttggagctggaccagtacttgagtctccctctgatgccgagcgg

SEQ ID NO: 651851 - DNA, 75 bp, Homo sapiens
taaagccacagtcttcaagagcccacggacaccacctcaacggatagagtaatgataaaccgcttagacaacatc

SEQ ID NO: 651852 - DNA, 82 bp, Homo sapiens
accttcactctctccagcaacatcatcatggacacctccaccttcctgctcagcggacaaacataaattgcagagattcctg

SEQ ID NO: 651853 - DNA, 101 bp, Homo sapiens
aaaccatgttaaggaggattttacagaggtctctctgccttctggggaaaagataacttttcttgatactccaggacatgctgctttctcagcaatgagag

SEQ ID NO: 651854 - DNA, 99 bp, Homo sapiens
agcacactcaggttctttgaaggattttgcctggctggaatcattctcaccttgtatgctttacgccccttcacagatgtagtcactacaaatcttaaa

SEQ ID NO: 651855 - DNA, 50 bp, Homo sapiens
gatcaacctccttcagcagcagatccagagaagagcaagttagtaccttg

SEQ ID NO: 651856 - DNA, 96 bp, Homo sapiens
ttccagtgctggtgttggatgtcaatgatgatttttctgaggaagtaaccaaacaagaagacctcatgagagagatgaggctgccagccttgagag

SEQ ID NO: 651857 - DNA, 83 bp, Homo sapiens
ctcagatgtggaagatgatgggtcaaaaatcattgcaaaagtactttgactcaggagactacaacatggccaaagccaagatg

SEQ ID NO: 651858 - DNA, 76 bp, Homo sapiens
taccatggccggagttgatccatttacagtcttatctgcagatatgtacagaccacatcctaagattgacttctgc

SEQ ID NO: 651859 - DNA, 142 bp, Homo sapiens
ccgctcaccgcagacgtggtggctgcagtcagtcttcccgagtgagggatttcgccgcccgctttcaggcccgtagcttactcacatagcatattggtatatcaaaatgaaatgcaaggaaccaaaaataacataattgaag

SEQ ID NO: 651860 - DNA, 74 bp, Homo sapiens
ttaatgagcatgttgacagcatcgatgctagacagacagtctcagcatcagaggagcccaggaggaggaccctc

SEQ ID NO: 651861 - DNA, 75 bp, Homo sapiens
aacagattcagtggcctgcattggtgaattatgtaacctcattacgctggatgtagctcacaatcaacttgaaca

SEQ ID NO: 651862 - DNA, 97 bp, Homo sapiens
atctccagccctaaaaccaatggcctatccaaggacatgagcagtttacacatctcacccaattcaggtggagatgaagaagagaatgatgagccac

SEQ ID NO: 651863 - DNA, 90 bp, Homo sapiens
ccgggaaggagcgccctggcggagaagactcgaacggctcccacagccgggcgttgggggaaaggtggtgctggggctgcccttcctgct

SEQ ID NO: 651864 - DNA, 100 bp, Homo sapiens
cgcagaccagacttcgctcgtactcgtgcgcctcgcttcgattccctcccaggctgtccctcgccgccttgctacagcccccaagactgaaaaacctccc

SEQ ID NO: 651865 - DNA, 95 bp, Homo sapiens
caacgtgttggaccttccggagcttctcagaagacagagggttttcttttgagatcaatgtaaccactgtgcgggaatatctgccagaaggagac

SEQ ID NO: 651866 - DNA, 101 bp, Homo sapiens
atcaaacaggaaaatctgttatcatcaacaagaccagcagcaccagaattcagattgttcgatatggtgagattccagctgaattaagggcggcggccact

SEQ ID NO: 651867 - DNA, 78 bp, Homo sapiens
tgggatgtgtatgaccttcacctcattaacactgtgagccgtgagctttgaggcggtgggatgtgtcagcagaatgtc

SEQ ID NO: 651868 - DNA, 78 bp, Homo sapiens
aaattttaaaaaattttccaaaagagagatggaatccagatcttacataagatggaagtctctcacactagatactga

SEQ ID NO: 651869 - DNA, 75 bp, Homo sapiens
accaccagtattgccagcgtcgctgcacttctccaccgacccagtggccgcctccatcatgaagatctacacgtt

SEQ ID NO: 651870 - DNA, 90 bp, Homo sapiens
gcctattctaaggaaaagtcttcaaagaaagggaaggggaaaaagaagcagtatctatgcccatcgtaagaatgattgatgttggctgat

SEQ ID NO: 651871 - DNA, 100 bp, Homo sapiens
agtgcatgggagattcctgcatcttttgcgctctcaagcaatgccaagtgagtacacctatgtgaaactgagaagtgattgctcgaggccttccctgcaa

SEQ ID NO: 651872 - DNA, 50 bp, Homo sapiens
gcccagacactgactggcagagtcctgctttgaaagctgtatttgatgag

SEQ ID NO: 651873 - DNA, 80 bp, Homo sapiens
agcagaagcgacttcagcgtgtggaccatcctgaagaagtgtgttggcctgttgctgtggttggctgataaatatttgtc

SEQ ID NO: 651874 - DNA, 100 bp, Homo sapiens
caagagtatcaagaatgggtaataaaacttcaccaagacctaaaaaaccccaacaacagctcccttaggaagttgccttaaagaatagacaagagctgta

SEQ ID NO: 651875 - DNA, 75 bp, Homo sapiens
cttcttcacacggcccttttataaggctcttctcagaatacctgtcatttactccatcctttatagtgatgctac

SEQ ID NO: 651876 - DNA, 100 bp, Homo sapiens
gtgttaaaggaacctctacaacgaaggtgaagccacggaagataagtgcctgatcaactttctagcgggagaacgatcatggaggtggtgccagctgagg

SEQ ID NO: 651877 - DNA, 90 bp, Homo sapiens
ctcattggcttctttgagactgaaatggcagtgggctcgggatgagtttgaaggcctcttcaagcagccagcagaaaatgtcaaccagta

SEQ ID NO: 651878 - DNA, 75 bp, Homo sapiens
aggaagactctgttatcatgaatcgttcagctgtagaccgcggcttcttcagtactatactggcaattgctggag

SEQ ID NO: 651879 - DNA, 75 bp, Homo sapiens
tagacagtggagatggtgtcactcatgtcattcctgtggggccacctacagatgctcctgcagtggacacagcag

SEQ ID NO: 651880 - DNA, 74 bp, Homo sapiens
cacctgtgcctcttcaccatgttcggaatgctgctgttcgctggtgggaagggcggaccccggaggcctgagcg

SEQ ID NO: 651881 - DNA, 100 bp, Homo sapiens
ctgctgctgaggagaggagcgtcaacagcagcaccatggcatgttacaccagacagctatattccatgccttgcagacctgtgcaaagcactatgggaag

SEQ ID NO: 651882 - DNA, 74 bp, Homo sapiens
gaacaaaaggtgacccaggacctcctggtgctgaaggacctccagggctaccacccagccttcaagtgagccaa

SEQ ID NO: 651883 - DNA, 101 bp, Homo sapiens
cccgaacagtctctcctcctcacagaagcctgactcggggtctaaatgtgagaccaagaagttacctccaaatcaatgcaacaaatctgggcaaagcatct

SEQ ID NO: 651884 - DNA, 51 bp, Homo sapiens
gggacacagacccccagcccgcccagctggagtgcaatggcgggatctcgg

SEQ ID NO: 651885 - DNA, 75 bp, Homo sapiens
acaaaaatattatggtctttgtgcacatttacatcaaggttttgattcccaccatggccatcacccagtttcggt

SEQ ID NO: 651886 - DNA, 83 bp, Homo sapiens
caggcaacctggagacattccctagagatcctgagaaagctgttgttggaagtatgcgagacttaagagctcaagtgactagt

SEQ ID NO: 651887 - DNA, 50 bp, Homo sapiens
cccttgatccgggagtctttccactggatacgtttgaaatggtttctgaa

SEQ ID NO: 651888 - DNA, 75 bp, Homo sapiens
gctgctgtcctgcgaccccaagcagggaacaagctgccaataatgtctgcaaaaagtgaattcttccaacaacta

SEQ ID NO: 651889 - DNA, 103 bp, Homo sapiens
aatgtttgacgacactgatggtttgaaaaagcttgtggtgaaggggggcaaaaaaaagaagcaagttctgaagttcactcttgattgcacccaccctgtagaa

SEQ ID NO: 651890 - DNA, 82 bp, Homo sapiens
agactatgtttaaacagatccacaaactgaacagaggaatgggacaacaaccagatccagcctttggtcgagtgtctagtcc

SEQ ID NO: 651891 - DNA, 74 bp, Homo sapiens
gattccaagtaactcttatttgacagcccacctgaggatattgaccataaggactcatatctcattacaagaag

SEQ ID NO: 651892 - DNA, 98 bp, Homo sapiens
gaagtgttccacgtttcagaggcagccgctcctgacatcactggccataaacggagtgagaacaagaatgaagggcaggatgccactatgtattgcaa

SEQ ID NO: 651893 - DNA, 89 bp, Homo sapiens
aacggcttaagctctcggaggagtggcagagtacgatctgaaggaggggcttctggttagcccagggagaagcaaagttgttgaaagat

SEQ ID NO: 651894 - DNA, 100 bp, Homo sapiens
gagcgtcacggcgtacgccctcatggggaaaatctccccggtgactttcagggttgtgtctgtaaagacaaaggccagtgcttctgtgacggggccaaag

SEQ ID NO: 651895 - DNA, 75 bp, Homo sapiens
cttctcagaagacagagggttttcttttgagaaaaatatgtcgtaactgcaagtgtggccaagaagagcatgatg

SEQ ID NO: 651896 - DNA, 50 bp, Homo sapiens
ccgggcgccacgccgcgaacggtacatgtcccagagcaagcacacggagg

SEQ ID NO: 651897 - DNA, 88 bp, Homo sapiens
ggagtgagtggcgctgcgggtggggccgtcggcggcgctggtttttagaacttcagccataaaaatgggcagaattttccttgatcat

SEQ ID NO: 651898 - DNA, 75 bp, Homo sapiens
cagagtcaccagtttccatatgtaatgcaaggcggggatctgatgagcttctttcttctggcatcattaacggac

SEQ ID NO: 651899 - DNA, 99 bp, Homo sapiens
ataaccatgaacttcgaaacgtgataagaagcacctggatgagacatttgctacagcatcccacattaagtcaacgaattaaacaaccaccatgtcgag

SEQ ID NO: 651900 - DNA, 80 bp, Homo sapiens
acgctcatgatcgacttcctcacccgcgcctgcgacctcgactgattcttgctattccaaatcctcttccacgttgacag

SEQ ID NO: 651901 - DNA, 100 bp, Homo sapiens
atctaaagaagataaacttggcaaatgacatgcaggttcttcaaggcagaataattgcagaaaatcttcaaagtaagggttacactgacgtggtgaggat

SEQ ID NO: 651902 - DNA, 97 bp, Homo sapiens
gataattcaaaaacactatcccagggagtgcaagcttagagcgtctggccaagaatcagaggaagtggatatgtgtcacaaagatgtctacacggaa

SEQ ID NO: 651903 - DNA, 75 bp, Homo sapiens
ggcggcgagagatggtcaggtctggagctcgaccgggccaggtattgaagcccctgggtgataatttgatggagg

SEQ ID NO: 651904 - DNA, 75 bp, Homo sapiens
agccgtggaataggtgtatcaagtaatggtgcaaagcctgaagagaagtacagcatcggggagcccacagtgcca

SEQ ID NO: 651905 - DNA, 75 bp, Homo sapiens
ccagcggccgagcgggcggcttcctggcctgggcgctccggtggcggcggaggcaggacaagctgaaggtgcaca

SEQ ID NO: 651906 - DNA, 100 bp, Homo sapiens
cctgcttcgcgccgtgctggctgtccccctggagcgaggggcgcccaacaaggaggagacccctgcgactgagagtcccacagccacaaccaaagtcccg

SEQ ID NO: 651907 - DNA, 88 bp, Homo sapiens
ggaagtcactggagatgttggagctcggcctgagtgaggcacaggttatgatggagggtggtcgcagcaaagggtttggttttgtatg

SEQ ID NO: 651908 - DNA, 75 bp, Homo sapiens
cggggcccaccattaccagcagggagagggaggcagatagtcagaacattatgcctttttctgactccagcagag

SEQ ID NO: 651909 - DNA, 83 bp, Homo sapiens
tcgggaggtagagcggaggctgcgagggatcattgaccaaatccaaggtcaaaatgcagatcttcgtgaaaacccttaccggc

SEQ ID NO: 651910 - DNA, 101 bp, Homo sapiens
cacagcaggactgagtgaagaagaacagctcgagagagcattacaagccagcctctgggaccgaggaagagaggatggtgatgcaccggttacaaaagatg

SEQ ID NO: 651911 - DNA, 78 bp, Homo sapiens
ggcgttgatatcggtggtaacgacggcctcagcaggcggggaagatgaaagggggcataaggaaatggtggcaggcac

SEQ ID NO: 651912 - DNA, 83 bp, Homo sapiens
cgacgatcgggcctacagcagcttcggcggcggcagagggtgtccggaggctgcactgcagcgtagccgcttgggcgggcggc

SEQ ID NO: 651913 - DNA, 82 bp, Homo sapiens
ggcagaataagagactggacgctgtgaggtcttgagtcaccacgtccgaatataattcttgggttagtaatctgccaaaaaa

SEQ ID NO: 651914 - DNA, 83 bp, Homo sapiens
agccccaagaaggagaccctcatccagctgatgcccttcttcgtgttggacttggctcagtctctgggactcactcagctgca

SEQ ID NO: 651915 - DNA, 100 bp, Homo sapiens
tctggtcactccccaggattatgcgcgaaaggagaatcacttgaacccaggaggaggaggttgtggtgagccgagattgcgccattgccctccagcctgg

SEQ ID NO: 651916 - DNA, 83 bp, Homo sapiens
agaaactacagtcatcacaatggtctggatgccttatgccagcctggaccatcttggaggcagtgtaggatcatggaagaact

SEQ ID NO: 651917 - DNA, 103 bp, Homo sapiens
aggacacgaagtttgtcggcccttgccttggcagagctgagtaataaaagactagtggccttagtgcccatgcccagtgaccctccattcaatacccgaagag

SEQ ID NO: 651918 - DNA, 101 bp, Homo sapiens
taatctgggccaaaaggaatgaccctagccagactcagggatcaaagagcaaacagattcagtggcctgcattggaaggagctcattgccaagttagatca

SEQ ID NO: 651919 - DNA, 96 bp, Homo sapiens
aaggaagactgtctgccgagttctcacgtgcccatcagtgacagcaagtccattcagaagatgcgctaatgcagctcgccaaagctgtggcaagtg

SEQ ID NO: 651920 - DNA, 100 bp, Homo sapiens
ggagccggagcctcgcgccccccgctccactccgattctctccgcgccagagccagcgcgccagagttttgcggcctccaggtggtggatccaatttttc

SEQ ID NO: 651921 - DNA, 136 bp, Homo sapiens
gatgatatgtgtttcaactatgcaaagaaaaatgtggaacagaataacttatctgatctcataaaagatttccacaagacggcaccctatgtcgtcactggcagcgtagatcaaacagtaaaagtgtgggagtgcc

SEQ ID NO: 651922 - DNA, 83 bp, Homo sapiens
cggccggccgacccttcctgtcgctgacggcgactgcgggaggccaggaagccagcagacctgcagaacttggctcccgggac

SEQ ID NO: 651923 - DNA, 100 bp, Homo sapiens
ggaagatctttaaatctgacagtgaagtggctggttacatccggcaagcgggtgacttccatcaggtgcatgaatacctcagaagtaaactctgttcact

SEQ ID NO: 651924 - DNA, 100 bp, Homo sapiens
agaagttggtggaatgtgggttgaaaaggtacgtgctctactccctggacctgtacaatgacagcgcccactacgcgctcaccaggttcaacaagcagtt

SEQ ID NO: 651925 - DNA, 100 bp, Homo sapiens
gtgattagcttcgcagtctggaaagctttaggagttcacagtctaacaacctgagagaagattacaaatttcaccacactttcagcacagaaatagcaaa

SEQ ID NO: 651926 - DNA, 98 bp, Homo sapiens
gaatttccaaggggattcaaacttcaacagaatgtggcaaccaggtttgtaaagtcgatcttgcagtacacggagaacctggtggcttacaccagtta

SEQ ID NO: 651927 - DNA, 98 bp, Homo sapiens
ccagggcctgctctccaacttccctgacatcatccatctacaaaaaggctcagttagctctagaggccattcttttgctgatcctgccagtaatcttg

SEQ ID NO: 651928 - DNA, 83 bp, Homo sapiens
tcaaggaacatcccctgttggcatcatgtgagagtgaagacagtatttgccagctcattgatctggagcccatacaagcagcc

SEQ ID NO: 651929 - DNA, 95 bp, Homo sapiens
aagatgcagatcctcatttccatcatttcctgctaagccaaacagagaaggtctcccgcctgccatgcagaaagtcatgtataagggactcgtcc

SEQ ID NO: 651930 - DNA, 100 bp, Homo sapiens
caggtgaactggaggagcgatttgccatcgtgctggagctgactgctgggcaggaacgtctctcaggagaaagagtggaagagaaaattgtgaactaagg

SEQ ID NO: 651931 - DNA, 76 bp, Homo sapiens
cggcaccacctcccggtccgccctccagcctgcctagggtagttaaaagacgagtgaatgctctcaaaaacctgca

SEQ ID NO: 651932 - DNA, 50 bp, Homo sapiens
cagcgagccatgatgatccaaacacctagattaaaagctgctttgaccca

SEQ ID NO: 651933 - DNA, 101 bp, Homo sapiens
cggccaacgccaagtaggggattgcgttccctccagtcgcagatttgggaatggatgatgaaggagatgatgacccagttcctctaccaaatgtgaatgca

SEQ ID NO: 651934 - DNA, 97 bp, Homo sapiens
gttcattgtttgtcaccacaaaaaggacagtatacaattggaccgtggatgaggtggtacagtggctgatcacatatgtggagctgcctcagtatga

SEQ ID NO: 651935 - DNA, 100 bp, Homo sapiens
tcataagccaggtcttagaggctcccggagtgtatgtctttggagaacttctggagctggccaacgtgcaggaggatttctctgcctcttccaaactttt

SEQ ID NO: 651936 - DNA, 100 bp, Homo sapiens
tttgccattggggtgcagcagctgcaccccaccttgatccagcggacttacggatgtggaagcgtttgccaaagccatgcagaacaacgccaagcccgag

SEQ ID NO: 651937 - DNA, 101 bp, Homo sapiens
tgactactggggccagggaaccctggtcaccgtctcctcagacaggccgacggtcgcaaggtcctacggtcaagcatccgggagtttctatgcagcgaagc

SEQ ID NO: 651938 - DNA, 100 bp, Homo sapiens
caggcaagcttccagattgaagccttcggctccaaattcattcttgacctcatactgaacaacactcaaaaggctatgagaatggtacaaacagattgag

SEQ ID NO: 651939 - DNA, 100 bp, Homo sapiens
cccagccagtctctactcagcctggagcaagaactaagttcagaaaatcttagaacttgctttaagatcatcaatggttatatctttttatcatcaacag

SEQ ID NO: 651940 - DNA, 83 bp, Homo sapiens
ctaggccgggagagggagaacacagttggagaaaatcggcagctgagacggccttggccggtttggtgcacctcgatttggag

SEQ ID NO: 651941 - DNA, 101 bp, Homo sapiens
ccgctatgaagagctggctcggatgctgatggggctggacctgctggtgttcgcccacgaccatgcgtcgagggcgaggcccccagcagtgagactggcac

SEQ ID NO: 651942 - DNA, 80 bp, Homo sapiens
cccctgatgacattctggggcacgccaccatttccaagaattaaacaaccaccatgtcgagcaaaaaggcaaagaccaag

SEQ ID NO: 651943 - DNA, 75 bp, Homo sapiens
ttctcccagtttggcactgtgacacggttcaggctgtccagaagtaaaaggatacccagaaataatcgcttaatg

SEQ ID NO: 651944 - DNA, 50 bp, Homo sapiens
gacagagccaggatttgaaaccagagtacagttgtgaatttggctccgcg

SEQ ID NO: 651945 - DNA, 74 bp, Homo sapiens
tatccttgagctccccgatgaaacgactgcaagaacattgccaacatcatgaagacactcgcctatcgaggctt

SEQ ID NO: 651946 - DNA, 75 bp, Homo sapiens
tggaggaatccgagaagagcagagcggagggagccccagacacgattattcacaccgatagcaacaccgtcttgg

SEQ ID NO: 651947 - DNA, 82 bp, Homo sapiens
cagaaaacaaggtgtctgcaggaccaacctctcctctggatgctctagcttaaagcttttcaagccaggccaagaagctgtg

SEQ ID NO: 651948 - DNA, 100 bp, Homo sapiens
ctgagatggctgatgaagtaatttgcagtgaaattttaagcgactgtgactctgctgcaagttccccagatcttgagctatggcctgctgtgcagttagc

SEQ ID NO: 651949 - DNA, 100 bp, Homo sapiens
ccaaatgtgaaggtgatgaggttgaagatctctatgagcttttgaaacttgttaagggaaatctgagtcagactacccaggagcagaagcagttgtctga

SEQ ID NO: 651950 - DNA, 50 bp, Homo sapiens
atgtcaggaacatttctgattagctttacctgctgttcctgagccttacg

SEQ ID NO: 651951 - DNA, 97 bp, Homo sapiens
cagggaggaagaagaagaggaggaggacgatgacgaggaggaaaaggcccctgtgacctctctggacttattggacaaaatgttgacattcaaccca

SEQ ID NO: 651952 - DNA, 80 bp, Homo sapiens
tggcctggaggctatccagcccatctatcacacctgtgaggcctccaacttccagtgccgaaacgggcactgcatccccc

SEQ ID NO: 651953 - DNA, 97 bp, Homo sapiens
ccgggacaccctggaagccaggaaatggaatgtatcctgtcaggtataatgtcagtgaatggcaagaaagttcttcatatggatcgaaacccttact

SEQ ID NO: 651954 - DNA, 100 bp, Homo sapiens
tgccagaatttcctgcgctgttccacctcattcaacttcagcttcggaaccaaaaagaagcttcccagagccggggccaggagccccaagcgccctctag

SEQ ID NO: 651955 - DNA, 87 bp, Homo sapiens
ctgcgctctcggccgccgccgcctctgcgtgggccggccgggagggcctcgggggactgactgtcatcttatcccatgcgtgtgaac

SEQ ID NO: 651956 - DNA, 75 bp, Homo sapiens
ctatcactcaagagactcttcatttagattggattctgaatatcaggaagcaagatttccagatgtagcaaatgg

SEQ ID NO: 651957 - DNA, 82 bp, Homo sapiens
atcgagagcctaactttgcaaccattggtctgcaggacatcactttagatgatggttgttcttcgtgggctcccgggagggc

SEQ ID NO: 651958 - DNA, 100 bp, Homo sapiens
aaaggatgtgatttccatatttcaagtcattcaaagacagatgggaagatcagttttcctgccatccaggctgctccctccttcagcaactcattcccac

SEQ ID NO: 651959 - DNA, 83 bp, Homo sapiens
ctgctgtgggcgctgctggcgctctggctgtgctgcgcgacccccgcgcatggtacggacattgctgcaggagaagaggttgc

SEQ ID NO: 651960 - DNA, 80 bp, Homo sapiens
ccggccgctagcgtcagcgccagccagcgtctgcttctgcgctttgcctgggagaggccctggtggcctcgttcctggcg

SEQ ID NO: 651961 - DNA, 100 bp, Homo sapiens
ttggaagccgaggtccttctggacccccagggcctgatggaaacaaggtcttggacaagctcctcctttacctgcgcatcgtgcattccttggattatta

SEQ ID NO: 651962 - DNA, 100 bp, Homo sapiens
agcggccgaggaggaagaagcagctgcggcggccacaccctggatgaggtcagaatggcggcagcggagcatcgtcattcttcaggattgccctgctggc

SEQ ID NO: 651963 - DNA, 100 bp, Homo sapiens
cagcttgttaattcctggctgcaggtaacatctgccggcacctgctgccccgggtccagtgccccgccttgattgtgcacggtgagaaggatcctctggt

SEQ ID NO: 651964 - DNA, 75 bp, Homo sapiens
aaatgatgatggaaatgaagtataataccaagaaagccccacttgctatcatggtgaacttacttcagattgtgc

SEQ ID NO: 651965 - DNA, 50 bp, Homo sapiens
acgtgtacagcactgactactacaggcaacaactccaggcccagcattta

SEQ ID NO: 651966 - DNA, 82 bp, Homo sapiens
ggattctcgacctgctaacagaactggaccttttcgggggatatgagactttctactcggaatatcctgagtgttgcgtgga

SEQ ID NO: 651967 - DNA, 101 bp, Homo sapiens
ggagcgagccaagctggccagcgccgaccacttctacctcctcctgctggccattccctggtgtggtgctggaggctgtggcatggctagcaggaggcaca

SEQ ID NO: 651968 - DNA, 73 bp, Homo sapiens
gtgtgcagactacatggcatctaccataggggtacagatttatgaattagaggaacataaaattgaaacatgg

SEQ ID NO: 651969 - DNA, 75 bp, Homo sapiens
agcccgccagcgacgtgcgcctcgggagtcggcctgtgagcgtgaccgaattacaagttttagaaaatctactgt

SEQ ID NO: 651970 - DNA, 75 bp, Homo sapiens
gagccacgcaggatctcacagctgcagtctaatagtaacacagagcactgccagtgaaagatgtagaagataaac

SEQ ID NO: 651971 - DNA, 75 bp, Homo sapiens
agctgcagaaaccacagtggtagaggagtggagtcaacatatcaatggagcaagtcacagtcgtcgatgccagct

SEQ ID NO: 651972 - DNA, 134 bp, Homo sapiens
cggtctacaaaggtctggacactgaaaccaccgtggaagtcgcctggtgtgaactgcaggtcaaaatgcagatcttcgtgaaaacccttaccggcaagaccatcacccttgaggtggagcccagtgacaccatc

SEQ ID NO: 651973 - DNA, 100 bp, Homo sapiens
cagcagcagcagcagaaagcgggcgagcagcagttgagcgagcccgaggacatggagatggaagaggcgtcgggagaaggctggaaggggcaggatcctt

SEQ ID NO: 651974 - DNA, 75 bp, Homo sapiens
gcgctgctcccgggggcgacggatggcgttcaggaagtggcttatattcactcaaaccagaatgtaattggatcg

SEQ ID NO: 651975 - DNA, 103 bp, Homo sapiens
gtcggagcccgaggcgggagccatgccggagaagcgcgcgggcgcgcaggccgcggggagcacctggctacaaggctttggcccaccaagtgtgtaccatgct

SEQ ID NO: 651976 - DNA, 88 bp, Homo sapiens
gacatttctcttctaagagaagtagtaaaaccagctgcagtgttatcaaagtggtggacttgctttgtgaagagacagttcatgaaca

SEQ ID NO: 651977 - DNA, 100 bp, Homo sapiens
ggcagcttccgtcgaagaggagggggctgcggtggccaccgcggcggagcccgaggtgagcgagtgctgtgctttcatgggcctcttctttatgaagcaa

SEQ ID NO: 651978 - DNA, 101 bp, Homo sapiens
gcaagaccttgctcttttgaagaggccatgaaagggagagccataatgcaagccattcctagtggaaaagttgagaaggaagaacagcttattccagacca

SEQ ID NO: 651979 - DNA, 100 bp, Homo sapiens
gccccgaatgaggaccagggagggaaatatgtcatgtatcccatagctgtgagtggcgatcacgagaacaataaggtgatggcatcagctgagaagggaa

SEQ ID NO: 651980 - DNA, 87 bp, Homo sapiens
agaatggcagtgctcaaactcaccgaccaggtattgttgcagcatctggcagtgagactgaggatgaggacagcatggacattccct

SEQ ID NO: 651981 - DNA, 90 bp, Homo sapiens
tgcagcggggacgcgaggacccgggctgggctttcctcacccggtgctacagttgaaactccagcagcgccggacccgggaagaactggt

SEQ ID NO: 651982 - DNA, 75 bp, Homo sapiens
ggaggagcgcagcccggcctcgtcctgacacagctctccctgaggagcagccacattccagctcccagtgcgccc

SEQ ID NO: 651983 - DNA, 73 bp, Homo sapiens
gaaaatctccccggtgactttcagctgtacctcccacaaggattaccccttccatgaagagttttgaagctgt

SEQ ID NO: 651984 - DNA, 75 bp, Homo sapiens
caagaaggcagtggctggacagcagcaggacttaatgactgacctgaagtctgagatctctggagacctggcaag

SEQ ID NO: 651985 - DNA, 80 bp, Homo sapiens
ggacacccgggagtcaggaaatggctcatcagattcaagagatgtttccccaggttccataccatctggtactgcaggac

SEQ ID NO: 651986 - DNA, 99 bp, Homo sapiens
agaggagcagctaagcaggaagatgatgaagtactgggccaactttgcgagaaatggggtgtccgcaatgttgccagtgtctgtctgcagattggctac

SEQ ID NO: 651987 - DNA, 75 bp, Homo sapiens
gtttcaaggagtttgggaaaaaccgcgaagtcatggggctctgtcgggaagctggtcacctgacttttgaatgcc

SEQ ID NO: 651988 - DNA, 98 bp, Homo sapiens
acgctgctggaggaaacacctcaggacacggcctacaacaccaagaggctcctctgaggagaggcaggtcatggatcatgccttcctccttctcagtt

SEQ ID NO: 651989 - DNA, 75 bp, Homo sapiens
gctggccgagcaggctgagcgatacgacggaaacatttactagggacaacttttgagtgtcagaccctgtggaca

SEQ ID NO: 651990 - DNA, 82 bp, Homo sapiens
ttttggaccaaaggcctgtgtgctgcagaacccccagaccatcatttcctccgtgtcacaaagcagtacctgccccacgtgg

SEQ ID NO: 651991 - DNA, 74 bp, Homo sapiens
ggacagcgggctggagcctgacgagctggcggacttttatcggacgttttcgccgcatcatggactcctcacag

SEQ ID NO: 651992 - DNA, 100 bp, Homo sapiens
aatggagtcacatcagcattttctgttgactgtaaaggtgctggtaagatttcttctgggggatatgagactttctactcggaatatcctgagtgttgcg

SEQ ID NO: 651993 - DNA, 74 bp, Homo sapiens
cgcgggatacgcctcagcgcggtctagcacataccgctccaagggctttgacgtcacagtgaagtacacacaag

SEQ ID NO: 651994 - DNA, 83 bp, Homo sapiens
gccaggcgctccggcgcttctccactggccggaagaggactgtcagaaggacgtagaaggcacggttttactgtgaggagcaa

SEQ ID NO: 651995 - DNA, 100 bp, Homo sapiens
accttgttttgtggggactggagagacaagtaaactctcagagtaactgtcccctctgactaccatttctaaggtggtgctttgtaaatttcactccgtg

SEQ ID NO: 651996 - DNA, 100 bp, Homo sapiens
atggcaattgacctcacctcaagcacacccaatggacagcatgcctcaccaagtcacatgacaagcatgataacaatccatattcctcatttggagcaac

SEQ ID NO: 651997 - DNA, 100 bp, Homo sapiens
tgaaatttttgtagactttgccccattcctatctcgtacacttcttggcagtcatggacaagagctattgatagaagaagactgtgcagtctttgtaact

SEQ ID NO: 651998 - DNA, 98 bp, Homo sapiens
tgggctggaagaggggtgacgatcggacccacccccagcagggccagtgcgaacaaagtgattgaaaactcagcctcaaaacaaaaaattcactagtt

SEQ ID NO: 651999 - DNA, 100 bp, Homo sapiens
ctgcggtcgttccctcggctgtggaccgggcggcacgcacgcggtgcagggtaacatggcggatgcggaagggtgacctggccaagaagaagatctaccc

SEQ ID NO: 652000 - DNA, 100 bp, Homo sapiens
atggatccatttctcctattgaggagtcaacaagaggactgtcagaaggacgtagaaggcacggttttactgtgaggagcaaagattctttacctacgca

SEQ ID NO: 652001 - DNA, 75 bp, Homo sapiens
caaaccaggagattgcgagggagcgatgcggtgcagcgcgatgccttcaattaagttgcagagttctgatggaga

SEQ ID NO: 652002 - DNA, 75 bp, Homo sapiens
cagatgtctgacagccctgtgtgacaccaagataagtaaccttcccattgaccggggtggaggtgaaggaaaggc

SEQ ID NO: 652003 - DNA, 82 bp, Homo sapiens
ttaatcagttctgcgtttgaaaggaaacccgcagtacttctggaatagaaattctaaacattagcctgccgaacaactggat

SEQ ID NO: 652004 - DNA, 99 bp, Homo sapiens
ccctggggactacgacgtccctcaaaccttgcttctaggagataaaaagggtgttaatctttatgtgaaaaatcttgatgatggtattgatgatgaacg

SEQ ID NO: 652005 - DNA, 100 bp, Homo sapiens
ttattttgggctacgttactgtgacagaagccatcagacgttatggtactgctgtgactccgatggtagcagattcatcattggatttccaaacctctca

SEQ ID NO: 652006 - DNA, 82 bp, Homo sapiens
tggccgcctctgccgcagctggagatgagcagcaccagcagtaagagggctccgaccacggcaacccagaggctgaagcagg

SEQ ID NO: 652007 - DNA, 100 bp, Homo sapiens
atttaaggaaacttgcagagaatgaaatcactttgtgtcaaaaagaaataactcagctgaagcatcaggataaaagaatcagagtgtctcaacccttgac

SEQ ID NO: 652008 - DNA, 100 bp, Homo sapiens
tcgacgtgttgcagcacatcctcatccgagcctttgatttgagtggttatgtgtctcggtaccacgtgaaagactcctcacgccacgtcatcctaggcac

SEQ ID NO: 652009 - DNA, 101 bp, Homo sapiens
gagctctcattttccccccttgctcgggatggtgccacaggaggctgtgcgggccccgctccgcttcgaatggagtcaagggtccagagaaggaggagaag

SEQ ID NO: 652010 - DNA, 100 bp, Homo sapiens
tggccctgggaagagaagcctagatatctggttctctccataaatgaagaagggctaaggcgatgcgaagagaatacaaaagtctttggtcggcctatca

SEQ ID NO: 652011 - DNA, 98 bp, Homo sapiens
ggtcgttgtggtgcgctgtcttcccgcttgcgtcagggacctgcccgactcagtggtgacctcacagtgactcaagctaccacttactgttgattgtg

SEQ ID NO: 652012 - DNA, 75 bp, Homo sapiens
gtgatgatagatacaatcagtttcacataagaaataggaaggttgttgattactcacagtttcaggaatctgatg

SEQ ID NO: 652013 - DNA, 80 bp, Homo sapiens
gatccagcctgcggagcctgtggggcagatgatgatgtgcctgcagatatggttgcagaagaatcaggtcctggtgcaca

SEQ ID NO: 652014 - DNA, 100 bp, Homo sapiens
actggggttcgctggaactttcctaggtttttcttcccccagtccctcagctgctgctgctgctcaggaggtcagatctgccactgatggtaataccagc

SEQ ID NO: 652015 - DNA, 100 bp, Homo sapiens
attcctgggagcgctcgcctcgctgggcagcctcaacatcccctacaagatcgaggccgtgcagaggtccctctctgtcctgctcgatgacctgcaggac

SEQ ID NO: 652016 - DNA, 101 bp, Homo sapiens
ggaagaagaaggagatgaggaaaatgatccagactatgacccaaaggaatcaaccctgcctaccggactgaggatgccaatgaggacaccattggggtcct

SEQ ID NO: 652017 - DNA, 98 bp, Homo sapiens
gtggaggagctcctgagcgagatggcggcggcggtgcaggagagcgcgcgaagtccttatgtcgtcagaagatcgagaagctcaggaggatgaattgc

SEQ ID NO: 652018 - DNA, 100 bp, Homo sapiens
gccgcccgctggccgggagcggagcccctgtggcacaagtggaagtgctgtccgctgcactacgtgcttccagcctggatgcacatgaagagaccatcag

SEQ ID NO: 652019 - DNA, 83 bp, Homo sapiens
cagctgccggagcccgagtggatcggggacggagagaacacgagcccatcagaaccccaaggagtggaccaagaaggtcatca

SEQ ID NO: 652020 - DNA, 82 bp, Homo sapiens
attggaccctgtgtgtcactcaattctaaaggaccctgtgtgtctgaaaattgatgtcttggcattgcccattttcaagcag

SEQ ID NO: 652021 - DNA, 100 bp, Homo sapiens
ttatgctgcagcatattgtactggcctgctgctggcccgcagggtttgttgataagccggggcccttcgtgggaccctgcggtcactggatcaggccctc

SEQ ID NO: 652022 - DNA, 74 bp, Homo sapiens
ggaatcgcccgaccgcacacgttgccaccctgagaaagttcaggagccctggaaaggagaaggaataagacggc

SEQ ID NO: 652023 - DNA, 83 bp, Homo sapiens
aaagcaagctgaagacatcaagaagatcttcgagttcaaagagaccctcggaacgtttttagaacttcagccataaaaatggg

SEQ ID NO: 652024 - DNA, 99 bp, Homo sapiens
aattatgcaagcacagatttgcttttacaccaagtttctaagcatgaattgaggaacagaagaagcagagcagatgatcggagcagcatttgtttctcc

SEQ ID NO: 652025 - DNA, 100 bp, Homo sapiens
cttttgcgtacctcctcaccatacacctgaaggaaggccggaacctggttgtccgagatcgctgtgaggctgacccgcggctgattgagtccctctccca

SEQ ID NO: 652026 - DNA, 50 bp, Homo sapiens
gtggaggacatggctcggaggaattcaccagaccagagcacttgggcagc

SEQ ID NO: 652027 - DNA, 83 bp, Homo sapiens
agcagcaactcctgatttaggggcaatcgatgtaatctgtaagtcagatgctccaacaggggatgttcttcttgatgaagctc

SEQ ID NO: 652028 - DNA, 75 bp, Homo sapiens
agcgtcaacagcagcaccatggttgttgtggaattataagctgaacctaactacagatcccaaatttgaatctgt

SEQ ID NO: 652029 - DNA, 100 bp, Homo sapiens
cacgaatgtcccaagtcccaggacccggccaacagagcacttatggcaaggcatctcgagggggtggcaatcaccaaaacaattaccagccatactaaag

SEQ ID NO: 652030 - DNA, 83 bp, Homo sapiens
aaaagaagaaaaaaactaaaaagatatttgatattgatgaagctgaagaaggtgtaaagtttaaaaggatgcttaatcgggag

SEQ ID NO: 652031 - DNA, 113 bp, Homo sapiens
gaggcgggagagtgagagaaaggctggaagacgaggacatggtccggcgaggagagatcatcgacaatgacaccgaggaggagttctacctccggcgcctggatgcggggctc

SEQ ID NO: 652032 - DNA, 97 bp, Homo sapiens
gggccgtgaggtgagagagtccgggagcccgagcttgaggtaactgtgacatttgatgatgtggccttatatttttcggaacaagagtgggagatcc

SEQ ID NO: 652033 - DNA, 74 bp, Homo sapiens
gccacgcaggcggggccctggatgccggtggccgtgggtccctacggacagtcccagccaagctgcttcgaccg

SEQ ID NO: 652034 - DNA, 76 bp, Homo sapiens
tgacaacgtgaagatcatctgcctgggagacagcgcagtgggcaaatccaagtctttcatggtgctgattcagaca

SEQ ID NO: 652035 - DNA, 75 bp, Homo sapiens
gagatatatttgagagaattgttcatttacaggaggactcagagagagtaatgataattaccggaccaaacatgg

SEQ ID NO: 652036 - DNA, 98 bp, Homo sapiens
atgtcgagggaatgcagaaagagttaaggaaggcagaatccagcaactatcacaagaatactccttagccacttcaattgggataaagagaagctaat

SEQ ID NO: 652037 - DNA, 100 bp, Homo sapiens
cgaccaccaggacctccagcaagaactgatagtgcatcagccgacccaggtaatttaaaatattcttcatccagagatagaggtggttcttcctcttacg

SEQ ID NO: 652038 - DNA, 100 bp, Homo sapiens
taaaattgctacctgcatttcatactccctctggaataccttgggcattgctgaatatgaaaaggccaggagacaagcttctcaagtctttacagccgag

SEQ ID NO: 652039 - DNA, 75 bp, Homo sapiens
gagaagatttgcagtggtggcctgataaggctgctgatactttggctgtgaggcaaaaaaggagaatttatgata

SEQ ID NO: 652040 - DNA, 131 bp, Homo sapiens
caatctactgatccttttgccacttcaagcactgaccctttcagtgcagccaacaatagcagtattacatcgttcctcattgttccggccatcgtgggcagtgccctcctccatcggctgtctgatgactg

SEQ ID NO: 652041 - DNA, 100 bp, Homo sapiens
ccgcgattttctgcaggccccacgagtgggaggtgctgagccgctcagaaaaaaccgggaagatcctgacggagttcctccagttctatgaagaccagta

SEQ ID NO: 652042 - DNA, 100 bp, Homo sapiens
gaagaagcaggaggctaagaaagtggtgaatcccctgtttgagaaaaggcctaagaattttggcattgtatctggagtccatctttcaccatcttctcct

SEQ ID NO: 652043 - DNA, 83 bp, Homo sapiens
gtccttggagttgtcttcagaagcaagcagcatgggggcgtgcaactgcagatagaagacctgactcgtaaactgcgcacagg

SEQ ID NO: 652044 - DNA, 82 bp, Homo sapiens
cggtgagattggaagtggcggcggcggcaggcggcagaggggagatgaagggcgccctaatggagatcatccagctcgccag

SEQ ID NO: 652045 - DNA, 110 bp, Homo sapiens
gagcagttaaccagagccatccttcgggagaggatatgtagcgaggaggaacgcgctaaggcaaagcacctgaaactggcgatggaatatgagaggagccctctggaaag

SEQ ID NO: 652046 - DNA, 98 bp, Homo sapiens
cgccgtgagcgcccggagcggtccgcgagccaccgaggcccagggaactctaatgatccaggacaaagaagttaccctggagtatgtatcaagcctgg

SEQ ID NO: 652047 - DNA, 100 bp, Homo sapiens
ggagtttctggtggtccctgtgggaggcctctcatttttagttaatcacgatttctctcctcttgaggttggcgttgcaaacgctatggtcaccgaacgg

SEQ ID NO: 652048 - DNA, 100 bp, Homo sapiens
ttaccttcaacagactcaagaactggttatacttgaaaccataatgctacaaactctaggcaagtttgaaaaccactgctttaaagaaaatggatactcc

SEQ ID NO: 652049 - DNA, 50 bp, Homo sapiens
gagacagcagccaaacccccagcttatatcaaaggtgggtggatccttag

SEQ ID NO: 652050 - DNA, 100 bp, Homo sapiens
tatttggctgaggagttttcaatcccaatccagacatttaatgtggatgcaccatgccagaccgtggaagatttaacgaatggggttgtgatggcccagg

SEQ ID NO: 652051 - DNA, 100 bp, Homo sapiens
cttcctcgtggccgcctccttcttcctcatcgtggcagctctggaaccccagctcaaagggattgtgacaaggttattcagccagcagggatacttcctg

SEQ ID NO: 652052 - DNA, 90 bp, Homo sapiens
ctcgctactacagagcacccgaggtcatccttggcatgggctacaaggaaaacgatcctaatgtggctcttacttttctggaaaagactc

SEQ ID NO: 652053 - DNA, 87 bp, Homo sapiens
tctactaaagttgtcatccgtggagcaggaaaccagatcatgtttcaggcatatggagacaaacagggaccactgcatggaatgtta

SEQ ID NO: 652054 - DNA, 100 bp, Homo sapiens
acaaggccacaactctgcagtggaccacagcattcctgaaatacatccaggaaagacatggagattctcttaaaaaggaagaagatggactgcggatgag

SEQ ID NO: 652055 - DNA, 102 bp, Homo sapiens
gttttgcttgatgaccccaaccagcgtttttgagaagaccaaatgcttcatctgtgggataggcaatgattacttcgacacagtgccacatggctttgaaac

SEQ ID NO: 652056 - DNA, 100 bp, Homo sapiens
gagttcgaggtggtgggactcaccgctctggccagggtgcttttggaaacctgtggaataatggcaacagaaagactggctaactacaccggaggcatct

SEQ ID NO: 652057 - DNA, 80 bp, Homo sapiens
cacctcttgatgaagaggctttcaaagtacagaatttttccctagattggtgtaaacagccagacgtgggccttcccaaa

SEQ ID NO: 652058 - DNA, 90 bp, Homo sapiens
ctactattacccccagtatctgcaagccaagtttacaagtccttccactttctctctgaggcagaaagagcaagggtttttctctccatt

SEQ ID NO: 652059 - DNA, 101 bp, Homo sapiens
ttgcatttggtaatttagcagaacttgatgctgagatgaatcgtcacctgtgtgtttggctttttagacatccatctcttaatggttacctccagtgtcac

SEQ ID NO: 652060 - DNA, 75 bp, Homo sapiens
gctgccagtggtagcgctcgtctggcggagctggctgcagaagaaagatcagcaactggagcctaaaaaaagtac

SEQ ID NO: 652061 - DNA, 75 bp, Homo sapiens
gaacatgtggaaggtgcgcgagctggtggacaaagcaagaagcgcacgctgaaggggtccattgagctctcccga

SEQ ID NO: 652062 - DNA, 90 bp, Homo sapiens
ccagaacagcgtgggatcttcacaatcagtgaccacccagcagaacagcgtgggatgttcacaaaggcccagtttgagatgccttatgtg

SEQ ID NO: 652063 - DNA, 100 bp, Homo sapiens
ctgtaagaagaaaacactttgtgggccaggttccagcaacagatagaaatgctttaagttcactctggggaaagctggcctctgaaatcttaatgcagaa

SEQ ID NO: 652064 - DNA, 98 bp, Homo sapiens
cctggaaccttcttttgtttgtcagcagccaaggtgtttccaggaagttcagagagaacagggactggtgattgcagctggaagtgcccatgaccgag

SEQ ID NO: 652065 - DNA, 96 bp, Homo sapiens
tagtctttccgcttcttgaatttctctctgtaaaggaggaagtgggaaaactcttgcctttgccatcccaatgattcatgcggtgttgcagtggca

SEQ ID NO: 652066 - DNA, 100 bp, Homo sapiens
tggaacatgtgatggaaaattatactcagtggctgcaaaaagttttaaatgcacagagagcaggatacaaggcagccatagttcacaatgttgattctga

SEQ ID NO: 652067 - DNA, 100 bp, Homo sapiens
cccatcctgaaggacgtggccactgtggccttctgcgacgcgcagtccacgcaggagatccatgagaaggccaggccaggatcagatgggaagtggaagc

SEQ ID NO: 652068 - DNA, 76 bp, Homo sapiens
tttcaaggagtttgggaaaaaccgcgaagtcatggggctctgtcgggaagaagacttgcactatctgccagatgct

SEQ ID NO: 652069 - DNA, 90 bp, Homo sapiens
tctcagggcaacccagatctccatatgaaggattaaggcctcaggatcttcgtagactaaaagatatgcttattgtggaaactgcagaca

SEQ ID NO: 652070 - DNA, 100 bp, Homo sapiens
ggccggcacagcagacgtaccctccctcgctgcctgcctgcagcctgccctgcatgcaggatggccctgaggaaaggttttgggatttgagattgacgcg

SEQ ID NO: 652071 - DNA, 78 bp, Homo sapiens
cgggctcatctgctggcagtatacaagcgaaggacgggagccgaagctcaacacccagtttggccttctctgaggtca

SEQ ID NO: 652072 - DNA, 102 bp, Homo sapiens
catgccctccacccatgccatgtccggcaccgccatccccatttctatggtcctcctcacctatggccgctggcagagacggggtttcgccatgttggccag

SEQ ID NO: 652073 - DNA, 82 bp, Homo sapiens
aggcagccaagctcgtagcctgccactccgtgctgcaaagagccgtctcactcttctctctgaacgacccggccctgagccc

SEQ ID NO: 652074 - DNA, 74 bp, Homo sapiens
taggaagaacgtgcaaggatgcgaattgtgaatcgcttctccaaacattaccaccaccctgtgaatctgcctgc

SEQ ID NO: 652075 - DNA, 100 bp, Homo sapiens
gcgtcctcatgtatggcccacctggctgtgggaagaccatgttggcaaaggcggtggcacatcacacaacagagccccatcagccacacctgatgctgga

SEQ ID NO: 652076 - DNA, 100 bp, Homo sapiens
gcccaaggcgggcggggcggagccaggagccccacggagcgctgcggagcgaacctcacctttccagggcgcaagctcagatcgtctgatagaagagaca

SEQ ID NO: 652077 - DNA, 75 bp, Homo sapiens
acagactcttgtttctgaacagcatcagaggctccttgaaatgctagatacagagaaggaactgttaaaagaaaa

SEQ ID NO: 652078 - DNA, 73 bp, Homo sapiens
tcgcctcgactccaaatggttgaaaacagatatacagtatgacaacattttgatggaagaggctgctcagatt

SEQ ID NO: 652079 - DNA, 100 bp, Homo sapiens
accccgcagcacagccgcgacttcaaggtatgacaatcggtgcaggaacatgagccaggagcaggtggcccagaagctggccaaggaccccaagcctgcg

SEQ ID NO: 652080 - DNA, 98 bp, Homo sapiens
gacaagagcgcaggcagtggccacaagagcgaggagaagcgagaaaagatgaaacggaccctctgagatctgtatctgtggacctgaatgttgatccc

SEQ ID NO: 652081 - DNA, 82 bp, Homo sapiens
gcatgccaagaagatgagaccgggggaggcgacgctaagttgctgatcgtggcgcaaacggggattcagcgtccgatccttt

SEQ ID NO: 652082 - DNA, 75 bp, Homo sapiens
ctggggagattggacaagtatgctgcaagtgagaacatatttaacagtgagaaagatcagtctaaagaaaaggag

SEQ ID NO: 652083 - DNA, 83 bp, Homo sapiens
tccatgcgcagtcatgagtcgcttcaagtttatcgcaaattgtggctactaatttgccccctgaagatcaagatggctctggg

SEQ ID NO: 652084 - DNA, 81 bp, Homo sapiens
ggccattgtcgactgtggctttgagcatccgtcagaaggaatttgctgacacaatatcttccgcctggtgctgggcatatc

SEQ ID NO: 652085 - DNA, 101 bp, Homo sapiens
tgagaacctggagcaggaatgcggggaagctgcattgcagtgtcgagatggctatgaaccctgtgtaaatgaaggaatgtgtgttacctaccacaatggca

SEQ ID NO: 652086 - DNA, 100 bp, Homo sapiens
gttcattgacaccacctccaagtttggccatggccgcttccagaccatggaggagaagaaagcattcatggtaacctgtgtatggtgactggaggtgcta

SEQ ID NO: 652087 - DNA, 75 bp, Homo sapiens
cccttgacaggcggctttgcatcggaaatcagctctacagttcagacgcaaaatgatttcatggttatctgcaat

SEQ ID NO: 652088 - DNA, 100 bp, Homo sapiens
gcctcgacctcttctgcctcttcatgggtcaggatcgcagtgaagccactttgataaagaggtttaaaggtgaaggggtccggtacaaagccaaattgat

SEQ ID NO: 652089 - DNA, 100 bp, Homo sapiens
aaggaggccagtatggcttagtggctgcgtgtgcagctggagggcagcccctctgaggaaggcaaagtttgttgagagcccacgaattccagaatccgag

SEQ ID NO: 652090 - DNA, 74 bp, Homo sapiens
cctcgtccagcctaggttccacccttttctgggaacgtgagtatcaaccaagttaccttatcccatatcacaca

SEQ ID NO: 652091 - DNA, 98 bp, Homo sapiens
gtcagaaggcaaagaacagaagatcctccttggaacatggcgctgctctgggggctcctggtgctcagctggtcctgcctgcaaggcccctgctccgt

SEQ ID NO: 652092 - DNA, 50 bp, Homo sapiens
ctcctgggtagctgggactacagggcagtgggcaaaacgaaccagtcggg

SEQ ID NO: 652093 - DNA, 49 bp, Homo sapiens
atttacctgctcctaccctgatctaggactatctgctgccaaactcttg

SEQ ID NO: 652094 - DNA, 98 bp, Homo sapiens
gtccactggaagacctggctggccatcaagtgctcgcccagcctgcacgtcgacgacagaaatgcactcggtgatggaaagagagccactattctgaa

SEQ ID NO: 652095 - DNA, 100 bp, Homo sapiens
acagcatggatgggctggagacaacagaaacagaaacgattgtggaaacaggttgtctgcattcaaaagagcattctattaaagctaccttaatttggcg

SEQ ID NO: 652096 - DNA, 100 bp, Homo sapiens
agaatatatggctggacagctagctgcttatggctataaaattacaggcccgccatgttcatagaggataaagcagtagacaccctggcttacctcagtg

SEQ ID NO: 652097 - DNA, 98 bp, Homo sapiens
tctgcctccggggacaagaaactagagcaaataaccgttttgaaattacaatgcagatcttcgtgaagactctgactggtaagaccatcaccctcgag

SEQ ID NO: 652098 - DNA, 73 bp, Homo sapiens
aaagatatcagcaccttggaacctttggagttttttgagaaccctgcttttcgtcccgatgggctgaaactct

SEQ ID NO: 652099 - DNA, 88 bp, Homo sapiens
ggctggagacatggaccgcggcgagcaagagtgcctggaagagctgggatgtctggttgagtcctatggcatgaatgtttgccaacca

SEQ ID NO: 652100 - DNA, 82 bp, Homo sapiens
atctctacatgcgctctttgaaagcgccccggaatgacctgtcgcctgccagctctggcctgtagtggtggagacacgccca

SEQ ID NO: 652101 - DNA, 90 bp, Homo sapiens
gcgccccccactctgaactcaagtcaccgtggagctccgccgccccgaaactttcaccgcgagcgggattactacagcatcccatttccc

SEQ ID NO: 652102 - DNA, 75 bp, Homo sapiens
actgagacccggaatcagttccttgatgagctcatggagcccccagagtgtgaaaggccggaatgacacctttta

SEQ ID NO: 652103 - DNA, 131 bp, Homo sapiens
ttaaaacaaactcaagatacgaaatgagacttttgaagtgcctttgatttctgggtcaaaatgcagatcttcgtgaaaacccttaccggcaagaccatcacccttgaggtggagcccagtgacaccatcga

SEQ ID NO: 652104 - DNA, 50 bp, Homo sapiens
cttacggcagtgggggctgacagatatttggagttcttacaacatggcag

SEQ ID NO: 652105 - DNA, 82 bp, Homo sapiens
ctcagggctgcggccgcccgaagaggagagagcgcgggcctctaggaagggtgagaactctgtctcagtcgacgggaagtgc

SEQ ID NO: 652106 - DNA, 96 bp, Homo sapiens
ccctctactttgtattttgtgtggattcctcagagagtgaacttggaatcttggacctcatccagaaaactttagaaactgttcctttggagagga

SEQ ID NO: 652107 - DNA, 96 bp, Homo sapiens
taactttactacaacaagaagtggattacgagggcagggacagagcagaatgggctgatatagatccggtgccgcagaatgatggccccaatcccg

SEQ ID NO: 652108 - DNA, 100 bp, Homo sapiens
gacacgtggtacggaaccggcgccgcgcttgctgctggtaacagggccttgcctagtgggccttccttcccagatccagacatttaatgtggatgcacca

SEQ ID NO: 652109 - DNA, 80 bp, Homo sapiens
attaaagttactgctgttaaaaagatttatcgaggtgtgagagtcggagggttgaaagagtctgcagtgcattctcagta

SEQ ID NO: 652110 - DNA, 117 bp, Homo sapiens
gggggactatgtggtggacttggacacgtcccagctctctctgggcatctggaaaggtagcattcttttcaagtggatgaccatggaatcagagaagatctcagagaagcaggagga

SEQ ID NO: 652111 - DNA, 100 bp, Homo sapiens
ggcaaggtgctgctggacgacacggtgccgctgacagcagccatcgaggcgagccagagcctgcagtcccacacggttgtgtgatagctgagctttttac

SEQ ID NO: 652112 - DNA, 51 bp, Homo sapiens
gccgggagttcaagaagaacactccagaggccatcatctgtgcgatctctg

SEQ ID NO: 652113 - DNA, 101 bp, Homo sapiens
gtatagtttgggttcgccagttggaattgaagtaattttatgcgtcaggagtgtttggattccagatttgtattcgatagaccactgcctgtgtctcgtct

SEQ ID NO: 652114 - DNA, 98 bp, Homo sapiens
cggaggaaacgggagtgaacggagagcgtagtgaccatcatgtcttgcagaaacagtccattgtgaccttcagcctgtgggccccgagaggggcgagg

SEQ ID NO: 652115 - DNA, 115 bp, Homo sapiens
atgatggtgccactattctaaaaaacattggtgttgacaatccagcagctaaagttttagttggccacgtgctgtacgccgacatcaagatggagaatgggaagtccaaggggtg

SEQ ID NO: 652116 - DNA, 74 bp, Homo sapiens
gagattttaagtgtggcatacaagaaaggctacccacctttctgttctgagacccctcaagagacatataagaa

SEQ ID NO: 652117 - DNA, 87 bp, Homo sapiens
cgtgttcagcctccctgactccaaggaaggaaaagctgatgcgatgctctcagtgccgcgtcgccaaatactgtagtgctaagtgtc

SEQ ID NO: 652118 - DNA, 83 bp, Homo sapiens
gtttgctgccatgctcctggcgtggacacacaagcaccccaataacctcaagctgcatcttcctcccgtgaggctggccgagc

SEQ ID NO: 652119 - DNA, 97 bp, Homo sapiens
gccagagagttctgtgtttcatcaccgccgaaagaagttaatattatgtgggccggacaccaaacacatcatagttctgaagactataacttatcca

SEQ ID NO: 652120 - DNA, 98 bp, Homo sapiens
gcggctgcgcttccgacggggcggccgggggctcagagatccaagtgcgcgccctggcgggtccggaccaagtatctccagatgaaatggccactgct

SEQ ID NO: 652121 - DNA, 83 bp, Homo sapiens
cggcgagacgcgcgtgtgtgagcgcgccggaccaagcgggcccagaagcggggtttccaggcctgaggtgcccgccctggccc

SEQ ID NO: 652122 - DNA, 100 bp, Homo sapiens
gcctttgttgattaactggacaaattcagatgctgcagttggagaagaaacttgaacgtgaacttgaggatgatgcacgagttattgcttgccggttccc

SEQ ID NO: 652123 - DNA, 114 bp, Homo sapiens
gacgaggaagttttctactgtaaagtcaccaacgagatcttccgccactacgaggggatatgagactttctactcggaatatcctgagtgttgcgtggatgtaaaacccatttc

SEQ ID NO: 652124 - DNA, 100 bp, Homo sapiens
acgagattggggccatgccaaggactatgtggagcctcttagcaaatatccggctgtgatcaatgatatttcattctggttgccctctgagaattacgca

SEQ ID NO: 652125 - DNA, 82 bp, Homo sapiens
caatatctgtcttcggtggactccttcggcagtccacccaccgccgccgcctcccaggccttggacaagattcgctatgaga

SEQ ID NO: 652126 - DNA, 98 bp, Homo sapiens
cccgccgcccccgccgccggggacatgtctaaccccggaggccggaggaacgggcccgtcaagctgcgcctgacagggtttccaggcctgaggtgccc

SEQ ID NO: 652127 - DNA, 100 bp, Homo sapiens
tcatcatcacggcggtctactccgtagtgttcgtcgtgggcttggtgggcaactcgctggtcatgttcgtgatcatccgacacgatgaggcgagtggtac

SEQ ID NO: 652128 - DNA, 100 bp, Homo sapiens
cttcctgatctctctcgctgtgagacatgtctgagactcctgctcagtgtagcattaaggatcagtgaagtggagcccaaatactatgcagatggggagg

SEQ ID NO: 652129 - DNA, 100 bp, Homo sapiens
gttcatgaagctgaggaggggagtaaattgaaaatattggggccatttagtaacttctttgcaagctgtgagccgtgagctttgaggcggtgggatgtgt

SEQ ID NO: 652130 - DNA, 87 bp, Homo sapiens
agacctacgtggcagctgtgaaaaaagccatttccgaagattctgaaggaagatttccattaggtaatttgtttaatcagtgcaagc

SEQ ID NO: 652131 - DNA, 90 bp, Homo sapiens
gtccctggagcggccgccttccagcaaaaagcagagagatcttgctaagatgagaaaatgtctcagaccagaagaactgacaaaccagat

SEQ ID NO: 652132 - DNA, 100 bp, Homo sapiens
ttttttcttcttggtcaaggattatggcagctggcttgatattgggacaaggaaattgacaatggcccttcagctatgctaggtctataatgggaagtgt

SEQ ID NO: 652133 - DNA, 75 bp, Homo sapiens
aagcaagcgagaagtcgcgggcccagcccacagcaggggggatatgagactttctactcggaatatcctgagtgt

SEQ ID NO: 652134 - DNA, 50 bp, Homo sapiens
caattagagagaaactaagtagtggacaagtccctgtgaagcaggaagag

SEQ ID NO: 652135 - DNA, 55 bp, Homo sapiens
attgcccagagcagatgaaactggatgggatgtttgtgggggtggcgtcagccca

SEQ ID NO: 652136 - DNA, 88 bp, Homo sapiens
aaacccaataccaccttggaaagtgccgggatgccattattacttgcaatcctgaggaattcatagttgaggcgctgcagcttcccaa

SEQ ID NO: 652137 - DNA, 90 bp, Homo sapiens
agaaaacccctaaaaaaaggtgagagaacaccagtgttacttcactcccctttgtggacaccaaggggaagaagaatacggtaagcttcc

SEQ ID NO: 652138 - DNA, 98 bp, Homo sapiens
ttttggcgtctgagcattgttatgcgttattttcaagctttgctaacgcgttgggaattcaagcatcctcagcctttcctacgtactcgtgaatttct

SEQ ID NO: 652139 - DNA, 80 bp, Homo sapiens
ctgacggataatttccaagccagtgccctctggtggtcagaagatgctgtgctgtctcgttaggatgaatggattaaaat

SEQ ID NO: 652140 - DNA, 97 bp, Homo sapiens
cccaggctgtcatataactcctgagaatagtggttcttaactctatgcccagcctacagagtctgagaaggaaatttataatcaggtgaatgtagta

SEQ ID NO: 652141 - DNA, 87 bp, Homo sapiens
tgaaatacgtctccattctttttccttagtactctcgttcattcacttacgaccttagctggatctccaaaatacaagtgaatcacc

SEQ ID NO: 652142 - DNA, 48 bp, Homo sapiens
tggactttgctgtctctgaacagtagatttcgggcagacaacttgaac

SEQ ID NO: 652143 - DNA, 74 bp, Homo sapiens
agggctctatcaaggggctggtgtactccagcaacttccaggctgctctttggcgtaaattgcaatcgattagg

SEQ ID NO: 652144 - DNA, 83 bp, Homo sapiens
accgggaggaaagaagacaagagagaacgcaaacagtttgaagctgaggattttgtttaagaatgttacatttgatatcatag

SEQ ID NO: 652145 - DNA, 100 bp, Homo sapiens
aggaagccgactgctgcctggtctgcaaagaagtcctttcaagtctctaggactggactcttcctaagcaagtccggagctcgaggccatgagcagatat

SEQ ID NO: 652146 - DNA, 75 bp, Homo sapiens
ctgatggggctggacctgctggtgttcgcccacgaccatggaaaaaagaaggggcatggctggagcagaatggga

SEQ ID NO: 652147 - DNA, 109 bp, Homo sapiens
gctgatttcctgagaatcaagttaaaacctctagacaaagtaaccaaatctccagccaacaccatgccacaaggagagtgatctcttcccctgttttcacaatggagga

SEQ ID NO: 652148 - DNA, 75 bp, Homo sapiens
ctttgaggtggacctgctagaaagaaagaccacagcaagattctttcattcgtctcctcctagcctgggggacca

SEQ ID NO: 652149 - DNA, 51 bp, Homo sapiens
cttcaatccgctctactggaatgtgtctcacagaaagttctccgctcccag

SEQ ID NO: 652150 - DNA, 75 bp, Homo sapiens
cctcactcccaactctcctgcagaaatgtctctcatcacttttgtgaacaagcacctgaacaagctgaatttgga

SEQ ID NO: 652151 - DNA, 50 bp, Homo sapiens
tcaaagaatagataacaagtgcagtaaataggaaggttgttgattactca

SEQ ID NO: 652152 - DNA, 75 bp, Homo sapiens
acatgaaactgaaagagcgagtgctgatacctgtcaagcagtatcccaagttgtcgagatgtccacagaaggagg

SEQ ID NO: 652153 - DNA, 82 bp, Homo sapiens
cgacgaccgccccgcgtcatgcggctcctcggctggtggactccctggaggaaaagcggaagcggcagcggtctgaacgcct

SEQ ID NO: 652154 - DNA, 75 bp, Homo sapiens
gaaaaatcccaacatcgttaactttttggacagtcttcaggcagtgacagtggtgggagcagcagcagcagcagc

SEQ ID NO: 652155 - DNA, 100 bp, Homo sapiens
caatgaaggcaactaccgcgagctgcgctggttcaccccgtggtcgaggagtcgggggtccactggacggggcctgagctacaacttcacccacctggac

SEQ ID NO: 652156 - DNA, 77 bp, Homo sapiens
tcctaccatgtcagccttcccagtagctgggaccacagtttaatggatcgagaagtggcgttgcttgctgaaatgga

SEQ ID NO: 652157 - DNA, 100 bp, Homo sapiens
ctgtatgacttcacagcccgaaatgccaacgagctatcggtgctcaaggatgaggtcctagagagtttattgacattcagtacaaagtctccagaagaaa

SEQ ID NO: 652158 - DNA, 100 bp, Homo sapiens
gtgttggaccttccggagcttctcagaagacagagggttttcttttgagggttctatggcctggatgagtctgacctcgacaaggtcttccacttgccca

SEQ ID NO: 652159 - DNA, 96 bp, Homo sapiens
tcggatgccggcggtctctgctgaagagagaagatggcgcttgacggaccagagcagaacagtgcccaaacctcgtgttaaaaagcagccgaagac

SEQ ID NO: 652160 - DNA, 73 bp, Homo sapiens
taatccccccacagaccctggaagaaagcccctctcacacagaaccgagctgaagctgccatggaattcttac

SEQ ID NO: 652161 - DNA, 100 bp, Homo sapiens
ctccgctgtacctggatcctgctcctctgggttgaaacccgggcgccgccaagatgccggtcgatccagtgtttacaagggaagtgaaagccaaagtgaa

SEQ ID NO: 652162 - DNA, 100 bp, Homo sapiens
tccggagtccgccccgtgaggagaatggacagagcgggatgccaccagcttgtccaaagggaagttccaggagctcctggtgggcatcgttgtggagaat

SEQ ID NO: 652163 - DNA, 101 bp, Homo sapiens
gtcaaaatccgaaagattcgggccagagacgacaacccgggcctccgagactatgaaagtgatgacgactcttatgaagtgttggatttaactgagtatgc

SEQ ID NO: 652164 - DNA, 126 bp, Homo sapiens
agttggcgacgtccctgggcgcgtcagaacaggcgctgcggctgatcatctccatcttcctggcaaaacagttatcaacttattaacacagaagacttccatgatcagaccaaatgtggggtcgga

SEQ ID NO: 652165 - DNA, 83 bp, Homo sapiens
atcgctaccatccaggagtatcagagaagcagcgtcccctctcacagtatgtcctcccgacgggacacagactcggataccca

SEQ ID NO: 652166 - DNA, 76 bp, Homo sapiens
gtgaacgaatcccgaatcaaagcggcgcattgaggcaggaaggatcagaatgttctctctccagtcaactgctgga

SEQ ID NO: 652167 - DNA, 50 bp, Homo sapiens
gtggaacggctgcttttggaagccgctgtacaaccagccctccgacaccc

SEQ ID NO: 652168 - DNA, 85 bp, Homo sapiens
ggatcctaatacttggccatctccacacaatgaacagcagagaatttcaaaggaccttgctaatatctgtaagacggcagctaca

SEQ ID NO: 652169 - DNA, 97 bp, Homo sapiens
tctgctcctaaccaaccccgacaaaaggatctcttgaatcgtgtagaagattttcaacagcatagtcagaaactactctctgaggaaacgcctagtg

SEQ ID NO: 652170 - DNA, 107 bp, Homo sapiens
gttgcagcgtggacgccggatgagttgcttttaggcttgctggcccgcggggctgtccaggcacgcgaggcccctcagatctattaatgagatgaagcggttggaag

SEQ ID NO: 652171 - DNA, 98 bp, Homo sapiens
gaattacaggtcagaagatactgaagattactacacattactgggatgtgatgaactatcttcgattaatggaaagtggagtggtcagagtgctggag

SEQ ID NO: 652172 - DNA, 90 bp, Homo sapiens
gtgcccttcccggagcgtgccctcgccgctgctaccatactgggaactgcccaatggagaggcccacattccacaaggaactgatgtctt

SEQ ID NO: 652173 - DNA, 101 bp, Homo sapiens
tctcccgcccctgtctcccgctccgcagccccgggcacggcggaggcagcggagccctgggccatcggatcagttcttaagagcagccccggtaactggag

SEQ ID NO: 652174 - DNA, 82 bp, Homo sapiens
ctgctggggacagctgctggtgtggttcggagccgcgggtgtcttataagactttgacacttcctgttttgtctgaaaaaaa

SEQ ID NO: 652175 - DNA, 78 bp, Homo sapiens
ctcccgaagtgctgggattacagcaaaaaagggagacgctgtccccgctgtgcctcatccccatggtgacatctcccc

SEQ ID NO: 652176 - DNA, 97 bp, Homo sapiens
gttgaataattcatcaaattacacaactgaaagaacacccaggttaatgcctgataaagaaagcatgtattacccacgggtacaacattaccgagag

SEQ ID NO: 652177 - DNA, 75 bp, Homo sapiens
ccggcgtccccggcgcgaagaggctggactcggattcgttgcctgagagaacgcattcgactgcagaaaaagttc

SEQ ID NO: 652178 - DNA, 73 bp, Homo sapiens
atgatatccttctcaaccttgtgggatgtgaaaactctgttactgaagggtaattttgggagtgtggagatgt

SEQ ID NO: 652179 - DNA, 75 bp, Homo sapiens
ccgaaaagtggatggaggaggcgatgcacatggttgggagccacgtgtaccagtgtgtgttgatcttggcttgat

SEQ ID NO: 652180 - DNA, 100 bp, Homo sapiens
cggaggtgtaggtaggaaccggaatacctcggaagccgggaaatggaatggaaactgaaagtggaaatcaggaaaaggtaatggaagaagaaagcactga

SEQ ID NO: 652181 - DNA, 50 bp, Homo sapiens
ccgcaacagccccttcgtcccaacaaaacaccgaattgctcataaaccgc

SEQ ID NO: 652182 - DNA, 100 bp, Homo sapiens
gacttccggaaggactttggcgaggcagcagccgctcttctaaaacattcaaaccaaagaagaatatccctgaaggatctcatcagtatgaactcttaaa

SEQ ID NO: 652183 - DNA, 75 bp, Homo sapiens
ggcccttggcctcctcctgctgctactgtgtccagcgcagacattcacggcatggtgtaactcccacctccggaa

SEQ ID NO: 652184 - DNA, 75 bp, Homo sapiens
aacatttccccagaggagctcaaaatggagttgccggagagacagcccagcttttcctccgcaaccatgtctgac

SEQ ID NO: 652185 - DNA, 90 bp, Homo sapiens
gcttgccctggtcttgctcggccgatgaagtgcagaggtttttttctgggctgggttacgacccctacaaccctgagctgcccaagcccc

SEQ ID NO: 652186 - DNA, 100 bp, Homo sapiens
ctggagaagatattggccgacaaggaagtgaagaaggcgcatcactcccagctgcgcaaagcttgcgaggtggcgttagccacagcatgttccgaagaga

SEQ ID NO: 652187 - DNA, 90 bp, Homo sapiens
aggcgccgggaccctcaggctcagatcagtggccgaggccccagagtgaacgtcgtcacttgtaccaaacacacctaccgctgcctcaat

SEQ ID NO: 652188 - DNA, 100 bp, Homo sapiens
gatccgggagagtgagagctccccaggggagttctctgtgtctgtgaagtcagccatgtcatctgagcctcccccaccaccacagccccccacccatcaa

SEQ ID NO: 652189 - DNA, 100 bp, Homo sapiens
ctgagggccccggcccctggatgcacagccccggcgctgactgtgccctgtccacggtgcctcctgcatgtcctgctgccctgagctgtcccgagctagg

SEQ ID NO: 652190 - DNA, 83 bp, Homo sapiens
atcgaaaggagcaagagcaagatcaccgtgacatccgaggtgcctttctccaaaagcttacagtgcttgaatgaaacactcac

SEQ ID NO: 652191 - DNA, 75 bp, Homo sapiens
gcgggggccgcgggacccgccagagcgcaggcggagtgggctggcgcacgtggttaatttggagtggcccctgga

SEQ ID NO: 652192 - DNA, 74 bp, Homo sapiens
aatacttcagaagtggggaaatgaagctaaaccagccccagaaatatttgaaaatgaagtcatggccctgctga

SEQ ID NO: 652193 - DNA, 90 bp, Homo sapiens
gcccgatcaagcctgacttctagccaagcacacggaccctgactactcggctgcctatgtcgtcatagaaactgatgcagaagatggaat

SEQ ID NO: 652194 - DNA, 100 bp, Homo sapiens
taggaggaaaattcatcatctggccataggaaaaggatacagagtagagtttcatgaacctgaaacttggtggaaatttgatcctgaagaattagaaaag

SEQ ID NO: 652195 - DNA, 50 bp, Homo sapiens
tcaaaatgtgaagcaatttgggacgttccagatgttgaagtgaaaggaga

SEQ ID NO: 652196 - DNA, 100 bp, Homo sapiens
cttcaacaccaccttcatctccaccatcggaccatctgaatctgataatttttctcataacctgagaggagtaatcccacgaagttttgaatatttgttt

SEQ ID NO: 652197 - DNA, 100 bp, Homo sapiens
ggctcaatcaagaaaggagaaagagagctcaaaatcggagacagagtattgccatcactggtgcaagctatatttaacggagatcctgatgaagttcgag

SEQ ID NO: 652198 - DNA, 91 bp, Homo sapiens
agaggaactaaggcggaggaactgagacgtttcgaattccaggtacaccaggggttggaaaaaccacactaggcaaagaacttgcgtcaaa

SEQ ID NO: 652199 - DNA, 100 bp, Homo sapiens
tgctcacctcttggagcctttccgacagtattatctccaagccgagcactccctgccagcgctcatccagatcagcaaccccaaggtccaggtggaggcc

SEQ ID NO: 652200 - DNA, 75 bp, Homo sapiens
cggggccttccacaccccctccgtgggtgtgtgaaacctgtttccctccaatcttgtggttgcagctttccgtac

SEQ ID NO: 652201 - DNA, 82 bp, Homo sapiens
agagtcgctggagcgggcggagctgtgcgagagcctcctcacttgggctgaaggggatgctaagggagataaagcaaaggtg

SEQ ID NO: 652202 - DNA, 100 bp, Homo sapiens
atacttgcttttgcttcagcgttctgtggttgtcaacaggctttcatgagaaggacaagaagccatattgccgaaaggatttcttagccatgttctcacc

SEQ ID NO: 652203 - DNA, 75 bp, Homo sapiens
ctggcggcgctgcggatccagggggtcggctgccaggtacagtggaagatagatgataagcctgtaaaaattgac

SEQ ID NO: 652204 - DNA, 100 bp, Homo sapiens
ggacaacggagaccagacctactgcagccacgcgggcgagcggctgtgtggatgtcggcgaagccgcgggcgagctcggcttattccaggggtgtgtttc

SEQ ID NO: 652205 - DNA, 50 bp, Homo sapiens
caagaacttcttctgaggacagacaggactaatggctgaaggataaatca

SEQ ID NO: 652206 - DNA, 100 bp, Homo sapiens
acaatttctcctgctctgcagcttctgttcaggtgacttaagagattaaaattaatttggttgctgttggttctgaacaaataatgagttcttttatttg

SEQ ID NO: 652207 - DNA, 100 bp, Homo sapiens
atccccatgaactaaataatctcctgtctaaatgtaatgttcaagctcagaaatgccttatgtggatcgtcagaatcgcatttgtggttttctagacatt

SEQ ID NO: 652208 - DNA, 75 bp, Homo sapiens
agaaaaagagggttgtccccaaaaagcctcccccatcaccccaacctacagcaaaccagtccagctacgggggcc

SEQ ID NO: 652209 - DNA, 115 bp, Homo sapiens
atacctcctgcaatccgttctcctcaaaattcacattcacattccactccttcctcatctaggaaatactatgtgaagtatgccggaaaacatttaaacgcaaagattaccttaa

SEQ ID NO: 652210 - DNA, 82 bp, Homo sapiens
cggggctgaggcggccgcggggcccgagcgcagaaagaaatgaccgcccggatgtgccactgagagccccgcgggtctcccg

SEQ ID NO: 652211 - DNA, 105 bp, Homo sapiens
ctggttaaccaaactgaattatttgtgccatctctcaatgttgacggacagcctatttttgccaatatcacactgccagagtctcgctgtgtcacccaggctgga

SEQ ID NO: 652212 - DNA, 74 bp, Homo sapiens
atgatgccccctatgggagggccaccaatgggacaagatctcatagatcagaacatactggagcctgtaacccg

SEQ ID NO: 652213 - DNA, 99 bp, Homo sapiens
cacttgttttccagtgtgatcttacccttaaagctgattaacacagattcctcagatccagaagactgaaatttcctttcgtcctaatgatcccaagag

SEQ ID NO: 652214 - DNA, 100 bp, Homo sapiens
gtttcttgcaaaacgcttctccggctgcaccctgaccgatgggaccctggacagttttggcatgtgactgacttacacttagaccctacttaccacatca

SEQ ID NO: 652215 - DNA, 90 bp, Homo sapiens
gctgggtgcagatgcagtgtggctctggatagcaccttatggacaggaattgaatgatctggcacgggaccctccagcacagtgttcagc

SEQ ID NO: 652216 - DNA, 71 bp, Homo sapiens
caaacaaaaacagccaagcttttctgccaaaaagggcttcatggacattgacttaaacaaattcaaggaga

SEQ ID NO: 652217 - DNA, 74 bp, Homo sapiens
tttccctcagcacacagaggatgatgctgactttgatgaaggtgacttcaggtggaacattcattggcattgga

SEQ ID NO: 652218 - DNA, 100 bp, Homo sapiens
ctccccgcgagggcggaggcgccgaaatcaaagcgagagcgcctcggcctctccagctgtccgcgaaagtagcacgtctggaaattgagaacaaagtcct

SEQ ID NO: 652219 - DNA, 98 bp, Homo sapiens
ccggcaaatgctgcaggaactggtgaacgcaggatgcgaccaggtaacaaggagggagcgcattcttccaccttctgggtgctgctgagtatctttct

SEQ ID NO: 652220 - DNA, 90 bp, Homo sapiens
cccgtccgagccccggccccaagtaacgccgccgccccggagccgccgaagagagaagggcacagttacctaagtatcaacgtaatcttc

SEQ ID NO: 652221 - DNA, 75 bp, Homo sapiens
ctgtcccgcattgtgactctccgggctaaggtctcggcgcggaagatggccggcggcgtggacggccccatcggg

SEQ ID NO: 652222 - DNA, 76 bp, Homo sapiens
caacaccaccatccaggatgtcaaccgctacctcctcaagagtggagttattgccttgtctgtcaagatccgcagt

SEQ ID NO: 652223 - DNA, 82 bp, Homo sapiens
tcgcgccggctatggccgtgccctggggctgagccctcagaccccccacccaacctgccttactttgtacgacgctctcgga

SEQ ID NO: 652224 - DNA, 50 bp, Homo sapiens
tattactggcagcatgtatatcttttcctcagcctcaccatgtgtgtcag

SEQ ID NO: 652225 - DNA, 96 bp, Homo sapiens
gacagtattactccagaagtccttcctgggtggaaaggaatgagtgctgctgatgacccagattcctccatggtcctcctgtgtctcctgttggtg

SEQ ID NO: 652226 - DNA, 83 bp, Homo sapiens
ccatctacagcaacgtgatcaaagacaatgcagatcttcgtgaagactctgactggtaagaccatcaccctcgaggttgagcc

SEQ ID NO: 652227 - DNA, 75 bp, Homo sapiens
ctccctggcggtgcagagaccagcatccttggagaagccgctcctctggaagagctaacaatgggaacctcctgc

SEQ ID NO: 652228 - DNA, 83 bp, Homo sapiens
cccagcactggccggcggttctcggagcacaaactctgcgcggacgacgaatgcagcaacgcaaacatgcagatctttgtgaa

SEQ ID NO: 652229 - DNA, 100 bp, Homo sapiens
cctgcctcccctgcgtcccgccaccggccgcttctgtcctcggctattgagggcacctacattgacaagaaatgccccttcactggtaatgtgtccattc

SEQ ID NO: 652230 - DNA, 51 bp, Homo sapiens
aaaaactctaaacgggattacactgggaacgatggcactgaatttggaggt

SEQ ID NO: 652231 - DNA, 75 bp, Homo sapiens
ccctcacggagctgggcgacgagctgaccctgggagacatcgacgatcaccgaagtggccttggagtacaacaac

SEQ ID NO: 652232 - DNA, 82 bp, Homo sapiens
gtgcctcagcctggccagaggagaaggtgagaattatgaagatgatgacctagtaaattctgatgaggttatgaagaaacca

SEQ ID NO: 652233 - DNA, 83 bp, Homo sapiens
cgatggcaacggcaagcatccaagtcctccgggcctcatatgaacaggagaaagaagcgcttacccactctttccgggaggcc

SEQ ID NO: 652234 - DNA, 100 bp, Homo sapiens
tggatcttcacacagctgcttccattggccagtatgaagtggtgaaggagtgtgtgcagcgagtgatcatcaccatgctggtcgccaccgccgtctgctg

SEQ ID NO: 652235 - DNA, 90 bp, Homo sapiens
attgggggcctgtggaaattttcatggtggacttgctttgtgaagagacagttcatgaacaagagtctttcaggacctggacagtgaagg

SEQ ID NO: 652236 - DNA, 82 bp, Homo sapiens
ggggccccccagcctccgccaacccagggtcggcactcttcaccctcccgagccctgcccgtctcggccccatgcccccacc

SEQ ID NO: 652237 - DNA, 134 bp, Homo sapiens
attctgtatcagtgccatttttccagccagcgtgtgcttacttcatgtctctgggtcacattttgaacatgggcctggaattgatatattcacacctggtaaacctggagaatatgacttggaaggtggtatat

SEQ ID NO: 652238 - DNA, 104 bp, Homo sapiens
ggcatctgccctcactgtggtgattgcatcaaatattggccttcccatcagtacaacacattgtaaaggtctcggctcactgtagcctcaacctcccaggctca

SEQ ID NO: 652239 - DNA, 83 bp, Homo sapiens
cgcgctactctctctttctggcctggaggctatccagcgcctggtactgtggcgctccgtgaaattagacgttatcagaagtc

SEQ ID NO: 652240 - DNA, 50 bp, Homo sapiens
aagaaagaccatcaagtttaccatgatggaatggggagaagatattaaag

SEQ ID NO: 652241 - DNA, 75 bp, Homo sapiens
aaaaaaagaatcgctgtttcatgtgcaggaagaaagtgggacttactggtccagtccaggtgcagcagcaaggag

SEQ ID NO: 652242 - DNA, 75 bp, Homo sapiens
atcggatctggctataatacccctgctgacatttggagcacggcatgcatgagacggggtttcgccatgttggcc

SEQ ID NO: 652243 - DNA, 75 bp, Homo sapiens
ctacttctaccatggcctttcctggccccagctctcctccccctttctctctaaggatggcccagaaggagaact

SEQ ID NO: 652244 - DNA, 101 bp, Homo sapiens
tgatgaatgcaataattctccattgagaagagagaagaacattctcgaatacctagaatggggtgctgaccttaaggaaagagccaaaatgagttccagtg

SEQ ID NO: 652245 - DNA, 90 bp, Homo sapiens
cttttggaccaaaggcctgtgtgctgcagaacccccagaccatcatgtccctggtgctgaaccgcctgcgtccagttgccagcgggggtg

SEQ ID NO: 652246 - DNA, 49 bp, Homo sapiens
gcatcatccgctatgcaattgggcatggggtcctgtcccagcaattcgt

SEQ ID NO: 652247 - DNA, 75 bp, Homo sapiens
caaggtccaccgagcccgcaaaaccatgtccaaaccaggaaatggacagactgatgggaagaagagttactataa

SEQ ID NO: 652248 - DNA, 75 bp, Homo sapiens
tggagagaggagaacgaacatcttctggacctttgtccaggtacaccaggggttggaaaaaccacactaggcaaa

SEQ ID NO: 652249 - DNA, 100 bp, Homo sapiens
tgctgcagacgacactgttcctgctgagtctgctcttcctggtccaagacttcccagactcccggccagccatcgaggacctcaagtactgcctggagag

SEQ ID NO: 652250 - DNA, 90 bp, Homo sapiens
tgagtacctgaaccggcacctgcacacctggatccaggataacggaggctggatagaaaatgctgctgaagaacctagagtcttatgtat

SEQ ID NO: 652251 - DNA, 80 bp, Homo sapiens
atttgcttttgtaacttttgatgatcatgatacagttgataaaattgttggtatccaaaccttgaaacctttgctctaga

SEQ ID NO: 652252 - DNA, 100 bp, Homo sapiens
agaaccagtcagtaaagcaaaacagagtcggagtgaaaagaaggcacggaaggcccgggaccgtggcgcttcgagagattcgtcgttatcagaagtcgac

SEQ ID NO: 652253 - DNA, 101 bp, Homo sapiens
caaaggacaaactaagagaaacttggcgaaaggcaaaggcaagttaggaaatcaacattgaatcccaatgcaaaggagttcaacccacgttccttctctca

SEQ ID NO: 652254 - DNA, 74 bp, Homo sapiens
catcactgcaataattgaggagcagcccaaaaactatcaagtttggaagcctgtctagcagtccagaggagatg

SEQ ID NO: 652255 - DNA, 82 bp, Homo sapiens
tctccggcgggaaggaaaaccgcgcagagagctcattgctatggacagtgctatcaccctgtggcagttccttcttcagctc

SEQ ID NO: 652256 - DNA, 100 bp, Homo sapiens
ctacagcatcccacattaagtcaacggtcctggcattgatgtgcctgctccagacatgagcacaggtgagcgggagatgtcctggatcgctgatacctat

SEQ ID NO: 652257 - DNA, 75 bp, Homo sapiens
tcatgggatcccagccacgccgggcataggagtcttggccatttcatcacccagttaataagaaatttgttccag

SEQ ID NO: 652258 - DNA, 83 bp, Homo sapiens
ccttgggcctcgcgccggctatggccgtgccctggggctgagccctcagatcagacctattgtgaccgcctggtgcaggacac

SEQ ID NO: 652259 - DNA, 75 bp, Homo sapiens
ggcagggatgggtctccaacccggaaatatttctccaacctcgcctcagttttatgaccctgtggagccagtgga

SEQ ID NO: 652260 - DNA, 100 bp, Homo sapiens
gtggactgctctaggctggcacaggcccctctggagagctgttgcatgagcttacagttgaacatgagtcttcttatgattagtgagaatgtaaaattgg

SEQ ID NO: 652261 - DNA, 83 bp, Homo sapiens
ggtggttcccgcagagtggataaagaactgggagaaatcagggagaggcgaattgttttgagcaaaattttggactgtgaagc

SEQ ID NO: 652262 - DNA, 75 bp, Homo sapiens
ttttgtaacttttgatgatcatgatacagttgataaaattgttgtcatggctccgatcttcatcttgaagaagag

SEQ ID NO: 652263 - DNA, 74 bp, Homo sapiens
ttgcagtctggagggcgccaacagcagctaccagggctgcttttcctggaagaggagttgtacgcatgtcagag

SEQ ID NO: 652264 - DNA, 74 bp, Homo sapiens
ctacggtgtcccaaatcaatgcggagttcgtgacccagtggaattcggtgcgatctgtaagtcgttgtcgaagc

SEQ ID NO: 652265 - DNA, 101 bp, Homo sapiens
ctgcccctgcccagccccctgaacccgaggccctgcctactatctatgttgttacccccacctatgccagtagagatggggtttcgccatgttggccaggc

SEQ ID NO: 652266 - DNA, 97 bp, Homo sapiens
agcgtcggcgctgcggggccgcgggggtcggacaggctgcgggaggagctgcaggactgaggtacagaggccaggggcccagggcaggacccagcct

SEQ ID NO: 652267 - DNA, 100 bp, Homo sapiens
gaaaaagaagaatactcaaggactccaggtgccagctggaagtggagccctgccgataggccctcttttgctgaaacacaccaagcttttgaaaccatgt

SEQ ID NO: 652268 - DNA, 75 bp, Homo sapiens
gtttgggaatgattctgatgatgatgatgagatgatgattattccccaccttctaagagacaaagaccaacgagc

SEQ ID NO: 652269 - DNA, 89 bp, Homo sapiens
agcaaggtcagcgagggcatggccctgcagctgggctgcctggagctcaggtgttgacagctcttctaccacaagcagtgcttctccaa

SEQ ID NO: 652270 - DNA, 98 bp, Homo sapiens
atcggagaataatttctttctcgctgatcgcctaacttctactgacgaagcttggaagttgcagaaggagacactttgagactccgaacaattctgga

SEQ ID NO: 652271 - DNA, 75 bp, Homo sapiens
agctcctggcatcagctctattcaaatctggttcagattttacagctctgggcgatatgagtctcatccagtctg

SEQ ID NO: 652272 - DNA, 75 bp, Homo sapiens
ttacctctttgatctcgacaataaggtgagaagccctaccactgcaactgggacggctgcggctggaagtttgcg

SEQ ID NO: 652273 - DNA, 90 bp, Homo sapiens
tccacccgctctggggcttcgtgcagtaaaggcatgacttcctggcaccacagggaaaatcgggtgcaagcccagaaactatttccccac

SEQ ID NO: 652274 - DNA, 95 bp, Homo sapiens
cggcggagacgatgcctgagatcagagtcacgcccttggttctacgcctgggtaactcagcagatgcccttgagtcagccaaaagagctgttcac

SEQ ID NO: 652275 - DNA, 73 bp, Homo sapiens
gagggggtgcctttctggtgctccccctaagcaaggtggccaaggtggaatacgtcaggaagaagccaaaatt

SEQ ID NO: 652276 - DNA, 82 bp, Homo sapiens
gaagtttctggagagacagtggtatttcaagggggagctcttggcaaaacaccagatgggatgttggcaaaggatgaactga

SEQ ID NO: 652277 - DNA, 74 bp, Homo sapiens
cgccgtctacccgtggccgctgccggtctacggacacctgtgaaccgcatccccatcatggccaaacaggtcct

SEQ ID NO: 652278 - DNA, 75 bp, Homo sapiens
cagatgctatagtctggtatcaaaagaagcttttaatctagacaacgagcaaccagattatgatatggattcaga

SEQ ID NO: 652279 - DNA, 101 bp, Homo sapiens
tacgggggtggtgccgcgctcctggccccgcgcgggcggacggcggaggcgcctcccaggatattaaaggactcagcaaaaagagaaagatgtattctgaa

SEQ ID NO: 652280 - DNA, 82 bp, Homo sapiens
acgccggctgcgacagttacagcagctacagcagctgcgagacagtggcgagaagattttggaattacagatgcaaagtata

SEQ ID NO: 652281 - DNA, 98 bp, Homo sapiens
cttggccatgtgagatacaaggctacacagagacagatcaaagcagctcatattgatgatgttaagaagttcaaaccgggttacctggaagctactct

SEQ ID NO: 652282 - DNA, 50 bp, Homo sapiens
cggaggctgatcgcgcccagaagaaattacagaagacatccccgtgaaga

SEQ ID NO: 652283 - DNA, 100 bp, Homo sapiens
cgccgtcccgtccgacagccaggcccgggagaaatgttgaaacatttgtagcagatatactgaaaggagaaaatttatccaagaaagcaaaggaaaagag

SEQ ID NO: 652284 - DNA, 82 bp, Homo sapiens
ctcggagccggcacggctcggcgttgatattcactgatggactccaaagaatcattaactcctggtagagaagaaaacccca

SEQ ID NO: 652285 - DNA, 100 bp, Homo sapiens
ctcctaagagacccaggggaagacccaaaggcagcaaaaacaagagtccctctaaagcagctcaaaagatttctcgaatgctggcagccaaaaccgtttt

SEQ ID NO: 652286 - DNA, 100 bp, Homo sapiens
agtgaggccagcatcatgggacagtttgaccatccgaacatcattcacttggaaggcgtggtcactaaatcctcagcaccccaatcagatgaaggctctg

SEQ ID NO: 652287 - DNA, 75 bp, Homo sapiens
gctactgccctctgcgctcctgcatctgcctccccatgttatcaatactctggctgaccatcatcatcgtgggac

SEQ ID NO: 652288 - DNA, 96 bp, Homo sapiens
cgcctgaaggcaccttggccaggtccccgtccattgatagcattcagaaagatcccagtgtaaacaggaacatcgataagtagtgtaaaaacttgc

SEQ ID NO: 652289 - DNA, 100 bp, Homo sapiens
cagcagttcgtgaagtctgtgaggaggacactttccttcctcacgtggaatgtgggacgatcactctgattggggcaaccactgaaaacccttccttcca

SEQ ID NO: 652290 - DNA, 119 bp, Homo sapiens
gtcagaggatgggagacggggcagtgaaacaaggcttcttgtatcttcagcagcagcagacgtttggaaagaaatgggcaagttcatgaaacctgggaaggtggtgcttgtcctggctg

SEQ ID NO: 652291 - DNA, 98 bp, Homo sapiens
acggcttccggcgggagctgtgcagctccttatcatgatttattcaggagattgagcatgctctgggtcttggcccagccaaacagtgtcctcttcga

SEQ ID NO: 652292 - DNA, 80 bp, Homo sapiens
gatggaacatggccaaggggtccttctactcctaaatggcccactgcgtgaccttggttcagctgtccatttcctgtgac

SEQ ID NO: 652293 - DNA, 138 bp, Homo sapiens
aaagtcggccaagaaagacaaagacccagtgaacaaatccgggggcaaggccaaaaagaaggatgatcggctgaatgtaacagaggaactaacgtccaacgacaagacgaggattctcaacgtccagtccaggctcac

SEQ ID NO: 652294 - DNA, 89 bp, Homo sapiens
tttggaaaatgaaggcctgaaaaagaaacaagtaaaactggatgagcagctcatggaggcagcagaagaggatgaaacacaaaaccagc

SEQ ID NO: 652295 - DNA, 94 bp, Homo sapiens
gtgggatcgatgtttcaatattggaagcgctttgatttacagcagctgcagcccgagcgggaagaagttccgcagcaagccgcagctggcgcgc

SEQ ID NO: 652296 - DNA, 100 bp, Homo sapiens
acgagacaagaagggcttcatcatcaagcagatgaaggaggatggcgcctgtctcttccgggctgtaggtggaacctaacttcttgtggaacaagtgttg

SEQ ID NO: 652297 - DNA, 82 bp, Homo sapiens
ccgaggacaccgactaccagcagcaaattgtggctactaatttgccccctgaagatcaagatggctctggggatgactctga

SEQ ID NO: 652298 - DNA, 97 bp, Homo sapiens
ggccgggagaagcatgggaaggaggccgagccgggatctcaggtcctcgggggcggcggccacgccaaggacgggaaaacctcttttttgtgatgga

SEQ ID NO: 652299 - DNA, 82 bp, Homo sapiens
ccttagagggcctccccaggccgcctccgcccgtgaagtactatactggcaattgctggagaagattttgcaattgttgctt

SEQ ID NO: 652300 - DNA, 90 bp, Homo sapiens
cgtatccagcgactacgcggccgcggagacctacctgcggcgtcggcagctgctgctccgagtgtcctctacaagcctggtgatgcccac

SEQ ID NO: 652301 - DNA, 78 bp, Homo sapiens
gtgaccgtcgctagaactcagttgtgcgttgcggccagtcgccactgctaattcctagaggacctgtgcaacaacctc

SEQ ID NO: 652302 - DNA, 90 bp, Homo sapiens
tttccttgcccggggccgcgggaaggccgaccgactgccgcgacatgccttgaattggaacgctacctacagacggagccccggaggatc

SEQ ID NO: 652303 - DNA, 83 bp, Homo sapiens
caagaatgatcaggatacttgggactacacaaaccccaatctcagtggacaagccatggccatgcagaaaatctttgcccggg

SEQ ID NO: 652304 - DNA, 83 bp, Homo sapiens
gggggccgctctgggatcccggccaccagcaattgtccgaggactactgagcccagccaggctgtatgccattgctgccaaag

SEQ ID NO: 652305 - DNA, 50 bp, Homo sapiens
ccaatgccaatccctcccagctcttcgtgcaccagagtggaatcacatag

SEQ ID NO: 652306 - DNA, 100 bp, Homo sapiens
tgcagaagcacgccgacccgctccagcaatttgcagatgcatgtgggcaggcccttgacgtgaatgagcgcctcatcaaagaggaccagctggagtacca

SEQ ID NO: 652307 - DNA, 82 bp, Homo sapiens
ccgaggaaaaggaatcgtatcgtatgtccgctatccagaacctccactctttcgttgatattcactgatggactccaaagaa

SEQ ID NO: 652308 - DNA, 100 bp, Homo sapiens
ctcggagcgcgaagccagtgacgtcctgtgcaccatcaccaagaccatggactacctccattcccaggggcttctttatgaaaaaggcatcagcctcagg

SEQ ID NO: 652309 - DNA, 75 bp, Homo sapiens
gtaccaggcgaagctggccgagcaggctgagcgatacgacgctgtcaccactgactaaagaagagaaaactgcgg

SEQ ID NO: 652310 - DNA, 100 bp, Homo sapiens
ggtgctcctggagagaccccagatactcctgggcatggaagtggatgggctgagactcctcgaacagatcgaggtggagattctattggtgaaacaccga

SEQ ID NO: 652311 - DNA, 124 bp, Homo sapiens
tgcagatttcgggacagctctctagaaactcgctctaaagacggaaccgccacagcactcaaacaatgcagatcttcgtgaagactctgactggtaagaccatcaccctcgaggttgagcccag

SEQ ID NO: 652312 - DNA, 100 bp, Homo sapiens
cgggattcgggatgacttcgggcgggtcatcatcagatttgaaatatttaaagtggatacaaaactatttcagcaatgcagacaattaagtgtgttgttg

SEQ ID NO: 652313 - DNA, 100 bp, Homo sapiens
atatgatacagatgtattcaaatggatcttcaaaggtcacacttcacctgaatcccatctcctcagtccacatccaccacaagtctgttgtgttcctgct

SEQ ID NO: 652314 - DNA, 100 bp, Homo sapiens
ggcgccctccccgccaaggcccgtgcgagaaacctctgtagaggagcaggatgcaaccgacaggctgtggccggacagctgctgcccagcacatggagcc

SEQ ID NO: 652315 - DNA, 95 bp, Homo sapiens
ggcagaactggccattagtactttctggcctaacttttatcaggtattgttgcagcatctggcagtgagactgaggatgaggacagcatggacat

SEQ ID NO: 652316 - DNA, 97 bp, Homo sapiens
ctccaggagcagttgctggtgctgctgaagtccctagggaaccaccaattcttcccagtgtgcctgacgaggaggccaagacaaccaccacaaacac

SEQ ID NO: 652317 - DNA, 95 bp, Homo sapiens
gcgcccgcggcggccgggccgggctgggctgcggagcgcgggcctcggcggcgcagtggaaggactaaaagtggtggagattgagaaatgcaaga

SEQ ID NO: 652318 - DNA, 101 bp, Homo sapiens
tgcccacagacggtggtgcctcaaaacacctacccaggtcgacctggccgtctctgtttcccagatctccatcgaagagaaggtgaaggaattgagccccg

SEQ ID NO: 652319 - DNA, 100 bp, Homo sapiens
gagaccgcccctctattgaccagatcctgcgccatgacttctttaccaaggtttggtgcacctcgatttggaggaagtagggcagggcccttatctggaa

SEQ ID NO: 652320 - DNA, 51 bp, Homo sapiens
gggactatgtccagcaacatggcacagaaaactgaatctgtagataacgag

SEQ ID NO: 652321 - DNA, 99 bp, Homo sapiens
gtgacagcagcctggctctacatgtgctgtccctggacaccaacatcacaaaccaggtgaataagctgaaccgagacctgcttcgcctggtggatgtcg

SEQ ID NO: 652322 - DNA, 88 bp, Homo sapiens
gtgaagcaaggacagacacttttcattcccacaggctcagcaacagcctcaccaaggactccatgaatatcaaagcccatatccacat

SEQ ID NO: 652323 - DNA, 100 bp, Homo sapiens
cgatgaagcagctgcagccgcagccgcctccgaagatgggggatttctacgacccggagcacccgacccctgagagctgcttcatctgacccaagctggc

SEQ ID NO: 652324 - DNA, 82 bp, Homo sapiens
cggactgctggagatggtggagtccgtcaattgttaaaggaaatgggctggcaggaagacagtgaaaatgatgaaacatgtg

SEQ ID NO: 652325 - DNA, 90 bp, Homo sapiens
aaggtgtggaacttaaagaagaatggcaagatgaagattttccgatgagttgggatacagctacgtggaactgaatgcaagtgacacccg

SEQ ID NO: 652326 - DNA, 75 bp, Homo sapiens
aatacttcatatttggcttcaatgtcatattttggccaagaaggatcaagaaggtggagaagaaaagaaatctgt

SEQ ID NO: 652327 - DNA, 50 bp, Homo sapiens
ggaaaccccatctttgctgaaaagatacactgaagagatggtgccttggc

SEQ ID NO: 652328 - DNA, 73 bp, Homo sapiens
ctgcaaacaactcgagctggagcctcggccaggaccggcgcgagaggcgttctgatacaacaccccttttaaa

SEQ ID NO: 652329 - DNA, 75 bp, Homo sapiens
agcctcccaagtagctggaattacagataaacttctgcactggaggggcctctcctcccctcgttctgcacatgg

SEQ ID NO: 652330 - DNA, 75 bp, Homo sapiens
ccctgagcagaggactgtaccttgtaaggtgtggtcactgtcaaagattaacaccagaatggaagaaagcagcaa

SEQ ID NO: 652331 - DNA, 74 bp, Homo sapiens
agaaaatccctcaagacagaccaacctcagaggttctcctgaaggcagggcctggtcactgaccaagtctcact

SEQ ID NO: 652332 - DNA, 101 bp, Homo sapiens
ttctccactttcgccagcccgtgccgcgagcgcggcctgcaggaggggacggcaaaacagaacagaaaggcggagataaaaagaggggtgttaaaagacca

SEQ ID NO: 652333 - DNA, 116 bp, Homo sapiens
acctgactctctgaggctcattttgcagttgttgaaattgtccccgcagttttcaatcatgcagcaagatgaagagcgacgtcggcagctgagagagagagctcgtcagctaatag

SEQ ID NO: 652334 - DNA, 75 bp, Homo sapiens
tcggaacccattgaggcagagcctgaggagcactgcagtttcctcctgaaggctggctccggctctccctcaata

SEQ ID NO: 652335 - DNA, 74 bp, Homo sapiens
gcccaggctcgcctcgactccaaatggttgaaaacagatatacagcactgctcagcacgcaggcatgtgaggaa

SEQ ID NO: 652336 - DNA, 88 bp, Homo sapiens
cgcccagagtcatggcggcagcagccgctctgagggcgcctgctcagtctataggatcgggtgaaccaccaaccggcaattgaaagct

SEQ ID NO: 652337 - DNA, 49 bp, Homo sapiens
gtggccgctgccgcctccgccccaggtggttccttaaaaacagttattg

SEQ ID NO: 652338 - DNA, 85 bp, Homo sapiens
acggcatgggccggggcctcttgacccggaggccaggcacgcgcagaggaggcttttctctgggcatggattccgtgaaggaaca

SEQ ID NO: 652339 - DNA, 90 bp, Homo sapiens
cagagaaacacggaaactaggaagaggaaattaactatctgtacttataagatttcagatgcagaactccaggaagttgtaaaagtaggc

SEQ ID NO: 652340 - DNA, 95 bp, Homo sapiens
gtttgtaaatgtgagtggaagccatgaggccaaaggcagttgtattgcctaaatgcgatggccaggtattactgacacaagtgtggaagcgttta

SEQ ID NO: 652341 - DNA, 100 bp, Homo sapiens
gacagcgtgcggtctgggccttttgggcagcttttccggcctgacaacttcatctttggacagagcgggatgccaccagcttgtccaaagggaagttcca

SEQ ID NO: 652342 - DNA, 100 bp, Homo sapiens
ggcgattcgtgttcgtgagggccttttctgaggactactgagcccagccaggctgtatgccattgctgccaaagaaaaagatattcaagaggagtccact

SEQ ID NO: 652343 - DNA, 74 bp, Homo sapiens
acaaccagcagttcctgtcctgccatgaccccatcaacatccagttcacctcgagcgacatcatattccaggat

SEQ ID NO: 652344 - DNA, 100 bp, Homo sapiens
ggcccggagcagccgccgccgcagcgcgaacatggacgccgtcaacgccttcaaccaggaggatgtgtgagactggtgaagggctgtttatctttcagac

SEQ ID NO: 652345 - DNA, 111 bp, Homo sapiens
cgggaggaaggaacgaggcaaggagctaaagcagcgtgcgttcagccctggggtgcccgtggttgacacgagctgtgtccccagctgttcccgtctacaatggcatcatct

SEQ ID NO: 652346 - DNA, 96 bp, Homo sapiens
aatgtgtaagcaggatccgagcgttctgcacaccgaggaaatgcgcttcctgagggagtgggtggagaggctctgacgcccgctctgcggcttcgg

SEQ ID NO: 652347 - DNA, 101 bp, Homo sapiens
tggattgtgagctatttcagaactgttctcaggactcattattttaacatttgggagaaacacagccagaaggcatcaacttctaactcatctcgccagga

SEQ ID NO: 652348 - DNA, 49 bp, Homo sapiens
gttcttacaacatggcagacattgacaacgctcctttaccctcatcgtg

SEQ ID NO: 652349 - DNA, 100 bp, Homo sapiens
cgggcgcgagcgaggcgccctagacatcttctccctcccttgcctcaggcctactctgtgaagagaacattgatgactgtgcccggggtccccattgcct

SEQ ID NO: 652350 - DNA, 98 bp, Homo sapiens
tatcttcagggaaaagacttcgaaaaagtgcctgaagtgacacaacacatgttttcttctggtatctggctaaagtttggacatatttgactcttttc

SEQ ID NO: 652351 - DNA, 75 bp, Homo sapiens
catcctacgtaaccagaccaagctgtgggttcttggccaggctgactgagagatttgtgctgggagtggatatgt

SEQ ID NO: 652352 - DNA, 98 bp, Homo sapiens
ctcatcctgtccatcgtgtgcctgatgatcacgcagctggctggcttcagtggaccaactgttaccaatgctgtggtcacagtgccagcttactttaa

SEQ ID NO: 652353 - DNA, 83 bp, Homo sapiens
agatgaataagtgggttcgttgtatttgtgacatctgtgggtttaatccaacagaagaaggaaaattgcctaagaattatgac

SEQ ID NO: 652354 - DNA, 100 bp, Homo sapiens
gttacataaactgtttccaagtagagcagcagagacagtggtggatccagaaatgacaccgtacttagacatagctaaccagacaggcagatcaatcaga

SEQ ID NO: 652355 - DNA, 75 bp, Homo sapiens
tggtggcggcggcggagactgcgggcccgtagctgggctctgcgaggatgcttaaatggcagaggccaagcccag

SEQ ID NO: 652356 - DNA, 88 bp, Homo sapiens
gcagatgggacctacaccctaattatccggctgcggcacaacgtgattaagacaggtggatcttcttgttccaaccaaagtgactggc

SEQ ID NO: 652357 - DNA, 83 bp, Homo sapiens
ccgttagctaattaaaacatttttcagggacgtagccatccagagtgtggggtgatcagccccagatttgacgtgcaactcaa

SEQ ID NO: 652358 - DNA, 100 bp, Homo sapiens
aactcgaagaacagctgtggaaagaagttgcaaaacactggctattgacctgaaaagtggttctggaaaagtgtaccaaggccctgcaaaaggtgctgct

SEQ ID NO: 652359 - DNA, 75 bp, Homo sapiens
cgaaggagcggaagaatggcagtgctcaaactcaccgaccagcttatatcaaaggtgggtggatccttaggaaag

SEQ ID NO: 652360 - DNA, 96 bp, Homo sapiens
atggactgaaccagatgattgtcatagaacagacccaggaaagcattcagcattttgagcgacaggcagggctgagagatgctggctacacacccc

SEQ ID NO: 652361 - DNA, 74 bp, Homo sapiens
gactctgttggatcagaaggtcaaggtggtgtgtaagaagtaccggggattcaccatccccgaggccttccggg

SEQ ID NO: 652362 - DNA, 73 bp, Homo sapiens
ggaatattggacctcaatacctataacgtcgattttccgcagatttccagtggccccactgatcccttatcca

SEQ ID NO: 652363 - DNA, 100 bp, Homo sapiens
agcggtttccgcgggggcggaacaaacaggcagagccaagtgcgtcctggaggcttcccccgttgcgaaggcccgccaagctgccccctgtgtgctattc

SEQ ID NO: 652364 - DNA, 96 bp, Homo sapiens
cggtgccagcacctttcggcttctgagacggcggcagcagcggcattcaggaaaatgtttataggaggccttagctgggacactacaaagaaagat

SEQ ID NO: 652365 - DNA, 98 bp, Homo sapiens
ctcaacgagaactcggagggcaccggagcccccaggctccgctcttgccagagggacaggagccatggctcagaaaatggactgtggtgcgggcctcc

SEQ ID NO: 652366 - DNA, 87 bp, Homo sapiens
aggctggcgcagcgccgaggccgcggccctgggggcccgcaatccacgccacggaatccccgagacaaatttacatgtattggagac

SEQ ID NO: 652367 - DNA, 100 bp, Homo sapiens
gagattcagaacagagatgaacaggctttcccagccctttccgtctcctctgagcctccggcctccataagacccaaaacagatgacacctcttcccagt

SEQ ID NO: 652368 - DNA, 100 bp, Homo sapiens
aggattccaagtaactcttatttggctcatgagaggctagaagattccaaactagaagctgtcagtgacaataacttggaattagtcaatgaaattcttg

SEQ ID NO: 652369 - DNA, 101 bp, Homo sapiens
agcaagctgatgaaggcctactgcgagaggcagccgccgccgcgccgccgtcgctctccaacgccagcgccgcctctcgctcgccgagctccagccgaagg

SEQ ID NO: 652370 - DNA, 76 bp, Homo sapiens
acacgcataatggatgaaaggaaccgacagccttccttgaatccagaagctggcaaacagcatcagccatgcagac

SEQ ID NO: 652371 - DNA, 75 bp, Homo sapiens
catgtggttgtgctgctgcttcggggactcagccagaaagctactgagttcctgtgccttaagaacattagaacc

SEQ ID NO: 652372 - DNA, 75 bp, Homo sapiens
acattttctattttttttcctaggttctctgctgtttaaaaagtatccctgtgggaatggctacgtcagtgctcg

SEQ ID NO: 652373 - DNA, 83 bp, Homo sapiens
tggagccggagctgggcgcggattcgccgaggcaccgaggcactcagaggaggttacaggaggttccagtggcatcgggaagt

SEQ ID NO: 652374 - DNA, 75 bp, Homo sapiens
gccgtcgcgccactcctccgactctttcaccatgcctggatcacttcctttgaatgcagaagcttgctggccaaa

SEQ ID NO: 652375 - DNA, 100 bp, Homo sapiens
actggatgttggtagaaaaagcaagagtttgttatatagcagagcatctttccttgaagaagtacattattgacattgtggttgaaagtacagctccagc

SEQ ID NO: 652376 - DNA, 100 bp, Homo sapiens
tttagctggactaacagatttgggtgtacaactatgagcctttgacacagctcaagaatgtcagagcaaattactatggaaaatacattgctctaagagg

SEQ ID NO: 652377 - DNA, 51 bp, Homo sapiens
catagaccagaaccttagtcccgggaaagatgtccggtctgtgctacgaca

SEQ ID NO: 652378 - DNA, 100 bp, Homo sapiens
gtcccaggaggtggtgaatatggccgtgatcgtgcccaaagaggagggcgtcatcagcgtctccgaggacagaattgagcccctgagtcctgagttggtg

SEQ ID NO: 652379 - DNA, 82 bp, Homo sapiens
ccagaacaaagccgcgggcctctcagctgcctgtggaggaaccgattgtgtccacagatgaggtcatcttcccactcaccgt

SEQ ID NO: 652380 - DNA, 90 bp, Homo sapiens
ttttacaagaaaccaaacaagcctttgaaagatgtcatagggttttataggatcacattgacaaaagtaccatggagttttatgagtcag

SEQ ID NO: 652381 - DNA, 75 bp, Homo sapiens
acctggagagccaccgtgacggccagcgcagcagcatcatggacgtgcgtgattacagtggcgagatcttgaaca

SEQ ID NO: 652382 - DNA, 83 bp, Homo sapiens
aggctccgggcgcggggaagtcatgctcgcttcacggaggcaatagctagccgcctcccgcgacgatgcccctcaacgttagc

SEQ ID NO: 652383 - DNA, 83 bp, Homo sapiens
ctgcggctccgtggcctgtaccctgtgtggcctcgtggagaaggcaacagcccccaggggagcaaccagggagtcaaaatcac

SEQ ID NO: 652384 - DNA, 71 bp, Homo sapiens
acgagctgtttctcatctttatactcttccaggatgttttagaagaatgtatgtctcttcccaagctatct

SEQ ID NO: 652385 - DNA, 83 bp, Homo sapiens
ttcctctttcggccgcgctggtgaacagggatagctgggagtatggccaccctgctccacgatgcggtaatgaatccagcaga

SEQ ID NO: 652386 - DNA, 101 bp, Homo sapiens
tgaaaggcatggtcacaaagaactcaagaaaatcttcgaagacttttcaagaacacctgttcccagcgctgaagcattccgatggttcttttaaagcagta

SEQ ID NO: 652387 - DNA, 75 bp, Homo sapiens
ccgccgtgcaggcggccgtcagcaacctcgtccggatggagaaggatgaaactgtgagtgactgctccccacaca

SEQ ID NO: 652388 - DNA, 87 bp, Homo sapiens
taaacttccttttactattagcccatcaagaaatgaagaacgagattcagacacaggttcgccaagcagcttttcagtctctgggac

SEQ ID NO: 652389 - DNA, 100 bp, Homo sapiens
gtaaactcaaaaactgacactcgattcagctattggaaagtttttttaatgtggttggaacaactgagggtaaaccagacttgaatacaacattgccaat

SEQ ID NO: 652390 - DNA, 83 bp, Homo sapiens
gcggggaaccaaggagacgctcctggcactgcaggttgtgaccgagattcccgacgagagagactgaggggaagagaggaagg

SEQ ID NO: 652391 - DNA, 83 bp, Homo sapiens
gtgaccaagaacgtgagcaagcccaggcacagccgacgccgcgggatgaaggatttgggggcagagcacttggcaggtcatga

SEQ ID NO: 652392 - DNA, 75 bp, Homo sapiens
cttgttctggatccctatttattaaagtactgtatctggacggatggactgaatgcgctactcgggaaggacatg

SEQ ID NO: 652393 - DNA, 100 bp, Homo sapiens
cttcgcggggcctgactgccgcatcaccaccaagcgtcctgaggaagtgtgcgggcccacacagttccgatgcgtctctaccaacatgtgcatcccagcc

SEQ ID NO: 652394 - DNA, 119 bp, Homo sapiens
cggtattgtaagaacaagccgtacccaaagtctcgcttctgccgaggtgtccctggttcagaaaagagaccctcgtgactggactgcacagttcatggaggctgcagatgaggccttgg

SEQ ID NO: 652395 - DNA, 80 bp, Homo sapiens
gtcccggggagcccctaggcccgggtcccggatccccgcgcacccggccaggataccatacttgcagagctccttcagat

SEQ ID NO: 652396 - DNA, 75 bp, Homo sapiens
gattttttaaaaattaaacttcaacacaatgaggttaaagctgaagctcaacaaagatatagtgatctctgtggg

SEQ ID NO: 652397 - DNA, 75 bp, Homo sapiens
tgactcttctcaaatgccttctcatccccacatatgtatcgcattaagttcaaggagagctttgctgagatgaac

SEQ ID NO: 652398 - DNA, 78 bp, Homo sapiens
gaccaaagcaactcagaacttcaaagtggtcactcctggaagcaaggcggctctagctaatttatgtattggagatgt

SEQ ID NO: 652399 - DNA, 75 bp, Homo sapiens
gttaacacttcctagataacgggacctgatcccaaccttgaagaaagtcctaaaagaaaaaatattacatatgag

SEQ ID NO: 652400 - DNA, 74 bp, Homo sapiens
ctgacgcacaggagagagctgaaggcagccagataagctggtggtggtatggacccgtcggaaccgacgcatct

SEQ ID NO: 652401 - DNA, 82 bp, Homo sapiens
ctcatgttctccttcgtcaacgaccggctagcttgtcactttctgcaaaggtttccctcagggagcctcctgctgccaggca

SEQ ID NO: 652402 - DNA, 90 bp, Homo sapiens
gagtgtaagcagctgaacgagaaccaagtgcggacgctgtgcgagaagaattaaacaaccaccatgtcgagcaaaaaggcaaagaccaag

SEQ ID NO: 652403 - DNA, 100 bp, Homo sapiens
catcttgcctcaagtttctttcaccgcagtgggctaccataaacacatcaccttgatttttaatcccacggaccgtataatagacgctggccccaaagga

SEQ ID NO: 652404 - DNA, 51 bp, Homo sapiens
atacttttactactgtgacaacattaacggctggagtgcaatggcgggatc

SEQ ID NO: 652405 - DNA, 75 bp, Homo sapiens
caacctgccttgcgccatgcaccagattggggatgtcaagcctgaactctttgcttccggaatccgggattgttg

SEQ ID NO: 652406 - DNA, 100 bp, Homo sapiens
agtcgccggtcgccggtcgcggcggagcctgggcgctgaggttactgaagctaaaggagatgtttaactccaagtttggatctattcccaagttttatgt

SEQ ID NO: 652407 - DNA, 90 bp, Homo sapiens
gtcatttggaagaagcgaagagaatggaatgactcctctaatgcatgcagcatataaaggaaaactcgatatgtgcaaattactactgcg

SEQ ID NO: 652408 - DNA, 75 bp, Homo sapiens
ggcaggtgacagtctgcatgtgcagttttcaggcctccccatggccacccatggaccagtcggcattcacttcct

SEQ ID NO: 652409 - DNA, 50 bp, Homo sapiens
gcctcccaagtagctgagattacagctccctacaccatcatcaccttccc

SEQ ID NO: 652410 - DNA, 100 bp, Homo sapiens
accctcagggctttaccagcaactaccccagtgccggggagggttctgctgcttcgaaagctgcctaggcgaggacttctaccgcgaggccatcgagcac

SEQ ID NO: 652411 - DNA, 51 bp, Homo sapiens
ctggagaagggatggaaatacttcaacaagatgaataatacggcagctagt

SEQ ID NO: 652412 - DNA, 75 bp, Homo sapiens
cgcagccaagtggcgctggcaaaactgttgtagggtgtacaactatgagcctttgacacagctcaagaatgtcag

SEQ ID NO: 652413 - DNA, 83 bp, Homo sapiens
gggctacccgctctttgccgtgacaacaccgttcccccagccgggctgttacaggcccaaaaactgcgactggcatacacaag

SEQ ID NO: 652414 - DNA, 74 bp, Homo sapiens
ggaaaataccacaggatggagactacgagtttgaggaacagcacagcatgctgggctctggatttaaagctgag

SEQ ID NO: 652415 - DNA, 51 bp, Homo sapiens
gctctcagctctcggcgcacggcccagagagaagaagaaggaggttcctgc

SEQ ID NO: 652416 - DNA, 101 bp, Homo sapiens
ggacgagcggaaaaacggagcctacggtatatgaatgacctaaaggtacaaataaagacggagagagaacagtgccaactgggagcagggcaagaatgcca

SEQ ID NO: 652417 - DNA, 75 bp, Homo sapiens
cagttgttcagtcagattggaccctgtaaaagctgtaaaatgataacagaggctagcttgtcactttctgcaaag

SEQ ID NO: 652418 - DNA, 98 bp, Homo sapiens
attgaagcacatcgaccggcgacagcagccaggagtcatgagcgacagcggcgagcagaactacggcgagcggggaaagaatcatgtgatgtacagct

SEQ ID NO: 652419 - DNA, 90 bp, Homo sapiens
tccgttgccggtgccggcctagcgtcctggaattacttcaatcaaagtgtgaacatggctacgcctcttcattcccgtccatgccgagcc

SEQ ID NO: 652420 - DNA, 83 bp, Homo sapiens
aaaaatattatggtctttgtgcacatttacatcaaggaatgcctgaactagatgaatacaccatggagagggtcctagaggaa

SEQ ID NO: 652421 - DNA, 74 bp, Homo sapiens
ttaaagagccatctgtggtgccaattgaaggtgctgggcgtcctcttctttgccatagcctgcttcttatacaa

SEQ ID NO: 652422 - DNA, 83 bp, Homo sapiens
ctacccacctagaagaggtgatgatagctttggagacaagtcttttattcaaaacttcagcgttctctatagtcccttgaaaa

SEQ ID NO: 652423 - DNA, 75 bp, Homo sapiens
aaggattccaagtaactcttatttgattcaagaaatccatggtgaaaggtttggattcctatgaagaaaaggagg

SEQ ID NO: 652424 - DNA, 96 bp, Homo sapiens
agagaagctcaaggtgctctacaagctacaccttcccccagatggcctctccagaggagaagtgtcaacaagtcttggaacccccttatgatgaaa

SEQ ID NO: 652425 - DNA, 83 bp, Homo sapiens
agcaacttggcgaggttcagactcttggagccagaagctacatgacccctaaacgatgatatcatcaagttgaatcgaaagga

SEQ ID NO: 652426 - DNA, 100 bp, Homo sapiens
tggaaagtgaggaattttgaagtacaccgtggtgacattgtatcattggtgttaatggtgcaatgtaagaaacctttaaaagtttctgatgaattagtgc

SEQ ID NO: 652427 - DNA, 82 bp, Homo sapiens
attggaaccagttccgatacagcacaatgcgggagaggacctgctggccccaccgcacgacaccagcacggatctcacggag

SEQ ID NO: 652428 - DNA, 100 bp, Homo sapiens
tcagcagcaacagcagcagcaagttagtggattaaaatctcccaagaggaatgacaaacaaccagctcttcagctagttgctacattgcctgatgatgtt

SEQ ID NO: 652429 - DNA, 74 bp, Homo sapiens
tcatccgcatgtataaggccgaggctaccggctctctgaccagttccacgacatcctcattcgaaagtttgaca

SEQ ID NO: 652430 - DNA, 75 bp, Homo sapiens
ggaatgtggtggatgggccatacgctggagtcatgacagcttatgaagtaaaagattatgagcctccatttggtt

SEQ ID NO: 652431 - DNA, 98 bp, Homo sapiens
agagcgcctgtattggggggccgcccaatgcttgcttggatcagctgcagaactgaagaagctcattcacacagaagacccatttaatgatgaacatc

SEQ ID NO: 652432 - DNA, 75 bp, Homo sapiens
gccagccaggcggagagggagatgcaagtaagactttgaccccgacgcaggcttcagtgattgccgcggatcaga

SEQ ID NO: 652433 - DNA, 75 bp, Homo sapiens
cacagagggcgagccagggtggagaagagccagcccagtaagtattccagaacacgatgaggcagacgagataag

SEQ ID NO: 652434 - DNA, 75 bp, Homo sapiens
cctggcgggacgaggacgactacacctgtgatgtcttggcattgcccattttcaagcaggaagattccagccttc

SEQ ID NO: 652435 - DNA, 75 bp, Homo sapiens
gatcacatctttcgacttgaaaaagttgtacatcctggagacctgaagaattctgttgaagtcgcactgaacaag

SEQ ID NO: 652436 - DNA, 50 bp, Homo sapiens
ccccaagctccccgtcctcgggttcggagcgaccttggccgttggcctga

SEQ ID NO: 652437 - DNA, 75 bp, Homo sapiens
gtcggcggctgatttagaaggaggttcaggctacggtgagccgaaggctaagtcctatcagccatggaaacacca

SEQ ID NO: 652438 - DNA, 50 bp, Homo sapiens
ctccatgttgaacatgcctggccctcagaagatgaatttgctgtcatgtt

SEQ ID NO: 652439 - DNA, 99 bp, Homo sapiens
agggtcgataaagacaggagtggagtgatatcagacaccgagcttcagcaagctctctccaacggtgcttaatttacccatttctgatgcgaggaggaa

SEQ ID NO: 652440 - DNA, 88 bp, Homo sapiens
gcctcagagaagcctgacctggccggctatgaggcccaggcatcatcggctggttcgtgcgaagcttcaagtacttttacgggctccg

SEQ ID NO: 652441 - DNA, 114 bp, Homo sapiens
tgatacgtataagggcaagtccttagagatccagaaacccgctgactatcaagaaatccaagtggtaatgggcgaagtttattcagcatccggcaatggacttatcgtagttgg

SEQ ID NO: 652442 - DNA, 82 bp, Homo sapiens
gcgggaaggcggcggccagcgggcagccgcggcccgagatgcagtgcccggccgagcattcatggggagatttccttttgga

SEQ ID NO: 652443 - DNA, 50 bp, Homo sapiens
cactgtacaagctttcaaagtcaatgtgtcagctgtgatgcatgtttaaa

SEQ ID NO: 652444 - DNA, 101 bp, Homo sapiens
tcacggacgagaactggagagaactgctggaaggagactggatgatagaattgttgcagtgttattgatggatactcagggaacctttgatagtcagtcaa

SEQ ID NO: 652445 - DNA, 90 bp, Homo sapiens
gccagctgttcctgcggtgacactgtataaacacgatgaccctgccttggcttacaagacagtcacatcagaccaagccaaacacacaga

SEQ ID NO: 652446 - DNA, 90 bp, Homo sapiens
atgccgtgaaagtgacgccttcgctcaacgaggacctgcaggtggaagtgatgaagggctctgtgtatgaatgacaaggataccttcagc

SEQ ID NO: 652447 - DNA, 98 bp, Homo sapiens
gaagtcggagcaaagaacttaccaccaagcaggacgcgtgaccaaaaccaaagacggccatgaagtgagatcgtgcaaagtagcagataaaacgggca

SEQ ID NO: 652448 - DNA, 100 bp, Homo sapiens
ctgttgtctggaccctgaccaacgtcatccataacctgtgttcgaccacctaagaaaagttggaaaaagatcttcaacctttcgggaggagagaaaacac

SEQ ID NO: 652449 - DNA, 75 bp, Homo sapiens
ctttccattctgccctcccggcttcccagtaagattgtccccttggggcggaaagaagccaaggccaaggagctg

SEQ ID NO: 652450 - DNA, 100 bp, Homo sapiens
tcgtacttacttggagagacatatgtctgaatttatggagtgttgactatagtcaatggggccaatggagccaagtgtatggaaacccacaacagtatgg

SEQ ID NO: 652451 - DNA, 100 bp, Homo sapiens
ctacatcaacttccagcagcccgcggacgacactgaccactactttctgcgctatgctgtgctgccgcgggaggtggtctgcaccgaaaacctcaccccc

SEQ ID NO: 652452 - DNA, 100 bp, Homo sapiens
accatggacagcagacgatcccgaacggactgagtaattccctcctggtcccagacagtctaagaggcacagataaacgcagaaatggacctgaattttc

SEQ ID NO: 652453 - DNA, 100 bp, Homo sapiens
aagcagatcgagaaaaatcacgggctgtccaggaactgtcggaacagaaccaaaggctattggatcagctcagcaggattggtgaaagacaacaagtgtt

SEQ ID NO: 652454 - DNA, 98 bp, Homo sapiens
gctgcccagcgccctggccctctcgctgttgctggtctctggctccctcctcccagggccaggcgccgctcagaacgcaacgaaggttttgggaacag

SEQ ID NO: 652455 - DNA, 75 bp, Homo sapiens
gaaatcctcttcttatcattagtgtctctaggaagagagaatattgatattgttgacatttggtcagttgggtgc

SEQ ID NO: 652456 - DNA, 101 bp, Homo sapiens
ctaaatagcaaagaccaggaagtgctgcttcaaacgggcagggctctaggaaacatatgttacgatagccatattgatgatgttaagaagttcaaaccggg

SEQ ID NO: 652457 - DNA, 82 bp, Homo sapiens
aggaacttgcagaaatcacattggaccctcctcccaactgtaggttactgaagctaaaggagatgtttaactccaagtttgg

SEQ ID NO: 652458 - DNA, 96 bp, Homo sapiens
gctgcagcatgtgctgttgctggagcaggcccggcagcagagcaccctcattgctggatgaatagccttggaagatagagatcgtgtctccctcca

SEQ ID NO: 652459 - DNA, 100 bp, Homo sapiens
gaacgatgaagatggtggtagcgatgtcagtgtggaagaagagatggctgcagagtctactgaaagtccagagatgactgacctggacatcaagtttcag

SEQ ID NO: 652460 - DNA, 74 bp, Homo sapiens
ggatcagaactgtgttcgcaattcttacgatgtcttctctttgctacggtgcttttgaagatgatgatatcacg

SEQ ID NO: 652461 - DNA, 74 bp, Homo sapiens
caggaaaacgtggatgattactacgacaccggcgaggaacttggcagtctgagggaaaaggccataccaatgct

SEQ ID NO: 652462 - DNA, 74 bp, Homo sapiens
aagagcagagcggagggagccccagacacggttaatttggagtggcccctggagtcagtttcctacaccatccg

SEQ ID NO: 652463 - DNA, 100 bp, Homo sapiens
ccgggccaacacctggcctgcccgagcaagagcctggagctgcgcaagttgtaagaagaagcttgggaagctgccacctcagtatgccctggagctcctg

SEQ ID NO: 652464 - DNA, 83 bp, Homo sapiens
cacaacaggagctacgaggagttggtgaaaggtgtagcagtcactcggcctacacccacagcatcgaccttgtgaacccagcg

SEQ ID NO: 652465 - DNA, 75 bp, Homo sapiens
caccgcagtctcgactttcctgggctcagggatagctgggagtatggccaccctgctccacgatgcggtaatgaa

SEQ ID NO: 652466 - DNA, 90 bp, Homo sapiens
gtgccctccacttgcagccagggactgggcatccacccggccaggttcccaggaagttaattggccttggtcctcacagctccaaaaaga

SEQ ID NO: 652467 - DNA, 82 bp, Homo sapiens
attttcagcgagggtactgtatttatggagaccgctgcagtatttagtgtctctgatccgggacaagctaggatggatgtgg

SEQ ID NO: 652468 - DNA, 49 bp, Homo sapiens
atggatcaacgccgccaagtggtgcttgtgaatgacttcttcttggtgg

SEQ ID NO: 652469 - DNA, 74 bp, Homo sapiens
gcgctcattgggaatttagttaagtctcttcaagaaaatgaggaggaggagattgggaacctagagcttgcctg

SEQ ID NO: 652470 - DNA, 100 bp, Homo sapiens
gaaaatcaccaaaagataggttatgccgaaggaatggtgaggttctggagaattgatgaggattatccagtgcaagttgcacctttgagcaatggtcttt

SEQ ID NO: 652471 - DNA, 100 bp, Homo sapiens
gtgggctgcaaaggttcaaaagctggtattgaacaagaaggatattggttgccaggagatgagattatctcagagaagctgtctcagctgcaggcacggc

SEQ ID NO: 652472 - DNA, 80 bp, Homo sapiens
cgaaatcctgataacttggaagaactactattgaatgacgtgctatgggaagagggcaaggcagccttggagcagctgct

SEQ ID NO: 652473 - DNA, 100 bp, Homo sapiens
ggggtgactcttctcaaatgccttctcatccccacatactaagatatcaacatggactagggactccagacttgcggcaaacccttcccaacctgaaaaa

SEQ ID NO: 652474 - DNA, 83 bp, Homo sapiens
aaaacaatagctcaaggaaacctttccaacacagatgtccaagctgccaaacccaagtcttggattgaggaacaggcaatggg

SEQ ID NO: 652475 - DNA, 75 bp, Homo sapiens
agccaccctgcccccaagaaggaagtcatcatgggccggcctggaacagcaaacggggattcagcgtccgatcct

SEQ ID NO: 652476 - DNA, 80 bp, Homo sapiens
acgaccaagagggtgttcgactgctagagccgagcgaagcggcgtgatggtgggcatgggtcagaaggattcctatgtgg

SEQ ID NO: 652477 - DNA, 75 bp, Homo sapiens
ctcctccttcttcctcaactatctcgctgacacgcaggagggtgtgaagacagagaatgaccacatcaacctgaa

SEQ ID NO: 652478 - DNA, 100 bp, Homo sapiens
cctgtgggagcctcaatgttaccctggaacaccccctcttcgttggaggaatgtgccaaaactgcaagttatggactctgtgggattcattatattgacg

SEQ ID NO: 652479 - DNA, 99 bp, Homo sapiens
gttcctcttgacaccacggaataccctggaagagcttcagcttcaccttctttagatgtccttattactttattgtcacttggatcaaatggctataag

SEQ ID NO: 652480 - DNA, 80 bp, Homo sapiens
ctctgcctcctgtggacaaaaaaaggcagttgtgaaaaacttcaggacaaaaatgtttcatttaaggacttgtgctgcta

SEQ ID NO: 652481 - DNA, 83 bp, Homo sapiens
gcatatgcacagggtatcagccgaaccaagtactgggaggatgatgatgacgacatgggagaggatgaagatgaggacgatgg

SEQ ID NO: 652482 - DNA, 82 bp, Homo sapiens
tgggcatcgccttgctggcctacgtcgcctagttgcatgctgagaatttgaaaaatgaagatgatgtagacactggactatt

SEQ ID NO: 652483 - DNA, 50 bp, Homo sapiens
ctggtcgagccggaggaagccaccagggagtctgaagatacagtattgct

SEQ ID NO: 652484 - DNA, 74 bp, Homo sapiens
catgcccttcacaatagcagcggagaaggtgtacaacacccgccatcaggctgcttttgtcagagacgttttat

SEQ ID NO: 652485 - DNA, 88 bp, Homo sapiens
gggctgaaattgcatcttgtagttatgaggccaggaagtttgtggtatatgaagtattgcgagaagatgagttttccccactaaagaa

SEQ ID NO: 652486 - DNA, 90 bp, Homo sapiens
aggtgacactcagtccaattaaaactgatctgataagacctcagatcagacagaggatgaaaagatccagacccgggaagggaagtccgc

SEQ ID NO: 652487 - DNA, 80 bp, Homo sapiens
aggacgaggagtcggaggagccgcgggcggcgcggcccagctcgttccagggctgaagaagatgcagagcagcctgaagc

SEQ ID NO: 652488 - DNA, 75 bp, Homo sapiens
ttctgagctctgtgctgaacaagagccaggaaatgtcatttcaattcttatttcttcggagtttttaaaaatgga

SEQ ID NO: 652489 - DNA, 100 bp, Homo sapiens
caaatacttattcatcaacagcagtttcagcagttgttaaattctcaacagctcacaccagtaatggaactgctggtccatctgaataaacgtataaaaa

SEQ ID NO: 652490 - DNA, 98 bp, Homo sapiens
atcttagcaggcatttatctttctttgagtctaaagaatcccttgaagaaagtattggcaagtgctggaactttgcctgtcacctttcgttgcctgga

SEQ ID NO: 652491 - DNA, 75 bp, Homo sapiens
ctctacgaaatctttcgctccctacacaccctggttggacaggttgaatttttaggagaagaaggaactggcttg

SEQ ID NO: 652492 - DNA, 98 bp, Homo sapiens
ggaaaccccgcctcttacagtcacgaggcctgcacagctgaccacagttgggaaacgttgctgtctttggattcaggatctttgcatggatctccaga

SEQ ID NO: 652493 - DNA, 90 bp, Homo sapiens
gcggccaccgccctcctgacgcacggccaagaggaaggccaagtcgagggccaagacgaagacagtcagccatgtcatctgagcctcccc

SEQ ID NO: 652494 - DNA, 100 bp, Homo sapiens
gctccatgctgtggctccatactggaataatggagcagagacttcttggcagctaaagctgttgatggatacgtgaagccacagatcaagcaagtggtcc

SEQ ID NO: 652495 - DNA, 90 bp, Homo sapiens
cgccctggagatggagttcaaacgcggccgcttccgactcagcctcttcagcgacctgcccgaggacgactgggtttggattcagaagag

SEQ ID NO: 652496 - DNA, 75 bp, Homo sapiens
tttgtggccttagctacaggagagctctttcgacgtgtagcagcagctttgccgggaatggaaagcacacaggac

SEQ ID NO: 652497 - DNA, 82 bp, Homo sapiens
cgcggagcgccccttcgcgtcccctgcaccatgagctggggcaccgagctctgggctgctgagaactagccctagacctctg

SEQ ID NO: 652498 - DNA, 82 bp, Homo sapiens
aaaaagaagatgagggtctggcgggactccttcttggtggagagaggaaactaatctggattcactccctctggttgatacc

SEQ ID NO: 652499 - DNA, 100 bp, Homo sapiens
ggagtagaagaaataaaaggtcatcccttttttgaaggtgtcgactgggagcacataagcactgctcagcacgcaggcatgtgaggaagctgggcttaaa

SEQ ID NO: 652500 - DNA, 75 bp, Homo sapiens
tagtcggacctttcccgctggcgcgcagcctcagctaggggtccagattttatggaaatgagctcaagaaagaaa

SEQ ID NO: 652501 - DNA, 98 bp, Homo sapiens
aaaggaatcaaaagaatatttagaatgcaggatggagagccctgggcgctgcctatggcacagccaagagcggtaccggcattgcggccatgtctgtc

SEQ ID NO: 652502 - DNA, 100 bp, Homo sapiens
aagctttccagtcacacatcaaggcgcttgatcacaatggaaaaggcgaagaaagcgtgatgaggaccggcatgacatcaacaagatgaagggttatact

SEQ ID NO: 652503 - DNA, 90 bp, Homo sapiens
tctgcaggaagcctttttggtggcatggtcctcaagaagttcctaaaagtgccggtggtggtgtgcacattgagccccggtatagacagt

SEQ ID NO: 652504 - DNA, 82 bp, Homo sapiens
gcggcgaaggtgaagagttgtcccagctcggcccgcgggggagccccgggagccgcacgcaattctgtggtgttcttggtca

SEQ ID NO: 652505 - DNA, 87 bp, Homo sapiens
aagatgatgaggaggaggaagaagaggaggaggaagctgagaccgtggagagggacaacatggaggaggacaatgtagaggagagcg

SEQ ID NO: 652506 - DNA, 82 bp, Homo sapiens
ggaaagctattttgcgaactatcttctccagcggagatggccaatggagtggagcttggtttcgggatctcggtgctgcaga

SEQ ID NO: 652507 - DNA, 82 bp, Homo sapiens
caccaggccggcaggctgagaaaagcgagaccgcgtgcgaggaccggacctgaaggagaagaaggagaaggtggaggagaag

SEQ ID NO: 652508 - DNA, 98 bp, Homo sapiens
acaaggagaagaaccatggagactggaggaagaattcccaagccagagctttccaggtgacttgatggagggtgagctctattctgctctcaaggaag

SEQ ID NO: 652509 - DNA, 100 bp, Homo sapiens
cgccttactcactctctcgggattattgccgattgccagggtgctgaccgtgggagccgaccgaggtttggttacaaaagtacggctaccttccaccgac

SEQ ID NO: 652510 - DNA, 100 bp, Homo sapiens
gttcattccttcctgaacgggacaaacgctttgccacattcagccgccaatgatcccatttttgtggaatttgatgaatcttcacccaaacaacctacaa

SEQ ID NO: 652511 - DNA, 74 bp, Homo sapiens
ccttcacctcaggttcttagctacgcctccaaggaaaggcgtaggaggaggagcaggagttcttccagatcgcc

SEQ ID NO: 652512 - DNA, 76 bp, Homo sapiens
gctaaatggctccctgattcatgatgctgaaattttcttctaaggagaaatatcccttatttacttttgtaaatgg

SEQ ID NO: 652513 - DNA, 90 bp, Homo sapiens
ggcatactttgtgcatgcagcagatatccttggaacagaagatcttattgtggaagtgacttccaatgatgctgtgagattttatccctg

SEQ ID NO: 652514 - DNA, 90 bp, Homo sapiens
ctcaacaccctgagcagcctccacccaatgggaggatgagctcatggcggaattagaagaactagaacaggaggaactagacaagaattt

SEQ ID NO: 652515 - DNA, 50 bp, Homo sapiens
cggaagaccaagatcatcgagatggcttttctgatgtggatcacacctat

SEQ ID NO: 652516 - DNA, 95 bp, Homo sapiens
gtcagaatagagggtatgcatttatcaccttctgtggaaaggaagctgcacaggaagccgtgaaactggctatggagttactagtagagaaagca

SEQ ID NO: 652517 - DNA, 82 bp, Homo sapiens
tgtctcctgcacgtgcaactgcaaacgctctttgttccagagcatggagatcagtgagaagccctaccactgcaactgggac

SEQ ID NO: 652518 - DNA, 82 bp, Homo sapiens
gtacttcaagaggaggaatcacgctcggaaacaatggatgcctgaggaaacccagacccaagaccaaccgatggaggaggag

SEQ ID NO: 652519 - DNA, 108 bp, Homo sapiens
ggagattctttctttgatgatcccattcctaagccagagaaaacttacggtttcgaaaaacctgatgtgttatcccaggagttggggatggaaggggagaaatcatcc

SEQ ID NO: 652520 - DNA, 82 bp, Homo sapiens
gcagagcaaggggcttacgcagaaggacctggccacgctacgagttccagggagctctgtcctggtgaccgtgcccgggtta

SEQ ID NO: 652521 - DNA, 96 bp, Homo sapiens
tccggaggacaaaggaaagtgtgctaataagaaatgagccgtcagactgctacagcattacctaccggtacctcgaagtgtccaccatcccagagg

SEQ ID NO: 652522 - DNA, 90 bp, Homo sapiens
taggtgattatttgcaggtaatggaaaaggtggagaatcaatttatggtggatattttaaaggttacagaaattatctcagagattcggg

SEQ ID NO: 652523 - DNA, 75 bp, Homo sapiens
tgagctcttcattagggcaccaaagcgaaggttcacaatatgtgcctaaatcttttcagaggacaactttgactt

SEQ ID NO: 652524 - DNA, 100 bp, Homo sapiens
actcatgactcccagagaggatggcatctagaagagaattttctctacatgtgcacccatttaaaggactcggcttcaagggaagcagcttccaccgcat

SEQ ID NO: 652525 - DNA, 98 bp, Homo sapiens
cacaagttccaaggttacgtttcagtgacatttgctctgaactggatgatacgaatgatgtcagatttggaatctaacatcgtggctgtggagagggt

SEQ ID NO: 652526 - DNA, 51 bp, Homo sapiens
ctctacttagctcagcaattcttaccttgaatgggtaccacagaccatgtc

SEQ ID NO: 652527 - DNA, 74 bp, Homo sapiens
ggactttgggcgtcccattgccatgtgagaaagatcagtctaaagaaaaggagaagaaagtgaaaaaaacaatt

SEQ ID NO: 652528 - DNA, 100 bp, Homo sapiens
aggatgacagagctgaggcagagggtggcccatgagccggttgcgccacccgaggacaagctttccccacaaataaaccagagaaagatgcaagacatgt

SEQ ID NO: 652529 - DNA, 100 bp, Homo sapiens
ggagatgtccgagcccaaggcaattgatcccaagttgtcgacgaccgacagggtggtgaaaggtgacagaccatgccaccactgccctgctccactatca

SEQ ID NO: 652530 - DNA, 90 bp, Homo sapiens
tcctgagcctcccaaaccttacaggccccaaggaaacctcgacaaatggtcctgtaagccaagaagccttctcggtgacaggcccagccg

SEQ ID NO: 652531 - DNA, 100 bp, Homo sapiens
acagcaggaggcacatgccaaggtagacaacaccaagtttacgatggactgcgtagcgcctacgatccacgtgtacgagcaccatgagaacagatggcgg

SEQ ID NO: 652532 - DNA, 129 bp, Homo sapiens
cttttctaaaccaatttgtggtgcacactgtacagttcctcaaccgcttttctacagtttgtgaggagcctgctataactgcggtagaggtggccacattgccaaggactgcaaggagcccaagagaga

SEQ ID NO: 652533 - DNA, 75 bp, Homo sapiens
agataatgaaggaagaaaacacaggagccggagcagaagcaaagaggtcccgttcaagaagttcttccagttcgc

SEQ ID NO: 652534 - DNA, 82 bp, Homo sapiens
gattgtatgaagcacttcaagggctcggtggagaagctgtgtagtgtggagcaggtgagaagccctaccactgcaactggga

SEQ ID NO: 652535 - DNA, 98 bp, Homo sapiens
tcagtcagagagccttgggccagagttccagggtctctgggagtggctgccagctgacattaaagagcatcttgctgcaaagagaaaaaggattgaaa

SEQ ID NO: 652536 - DNA, 100 bp, Homo sapiens
ggcagcggcggccccgcgaggatcggctccagacacgatgaggcgagtggtacgacagagcaagtttcggcatgtatttgggcaagcggtgaaaaatgac

SEQ ID NO: 652537 - DNA, 75 bp, Homo sapiens
tgtttcaacacaaatgaaatcatgtgatgacgaagatgattacagtttaaggtttggacatatttgactcttttc

SEQ ID NO: 652538 - DNA, 96 bp, Homo sapiens
gaactgcatgaggctgagcaggagctgctctctgacatgggagaccccaaggttggtaggaggagaggattggagctgttttctccttgatgccaa

SEQ ID NO: 652539 - DNA, 50 bp, Homo sapiens
ccaagcacagcctcaagcaaacacaggctctatctaatgttcctcctctc

SEQ ID NO: 652540 - DNA, 98 bp, Homo sapiens
gacttcctcaaggactacagtatgcacttaatgtcccttgacaaccatgagtggaaaaaactaattatggttcagcactggcctgagacagtatgcga

SEQ ID NO: 652541 - DNA, 98 bp, Homo sapiens
ggatctttccggatcaatccagatggcagccagtcagtggtggagctcattcttggaatcccagaacaggccttaagtcttctccacatggccatcga

SEQ ID NO: 652542 - DNA, 74 bp, Homo sapiens
attttaggaaaagttagcattgctgccctggccaacgtcaacattgggagcctcatctgcaatgtaggggccgg

SEQ ID NO: 652543 - DNA, 100 bp, Homo sapiens
aatgaagatttaaccgagttacttaatggcatggatgaagatactggctcttctcagatgaagttccaggattattcattgaaaaaggctgggtacatga

SEQ ID NO: 652544 - DNA, 80 bp, Homo sapiens
ggtcgtggtgcatgcagaggacggcaccacctccaaatactttggctttctctgctcagagctccaagccacccgcctcc

SEQ ID NO: 652545 - DNA, 100 bp, Homo sapiens
acgggaggggcaagccagccatcctgggaccccaggcgtgcaggttctctttgaggtccttattggaaatgaaggagttaagaagaagtaagaagcaaac

SEQ ID NO: 652546 - DNA, 90 bp, Homo sapiens
tggtgaaacaccactgaagcattgccaagactagacgcttgaagcaaagctgccatcccagaagacgacatgctctcagcaacccccctg

SEQ ID NO: 652547 - DNA, 133 bp, Homo sapiens
tacagctgcagctaccggaccgatggggaaggcgccctctctgagcccagcgctactgtgaccattgaggagctcggtacaggtttgcagattccgccagcagcacagcaagctctacagatgagtggctctt

SEQ ID NO: 652548 - DNA, 82 bp, Homo sapiens
gcctgcagcgggagctggacggcgagcgcgagcggcgcgagaaaggaacccgagcgtcatgttagggtgaagcagaggacct

SEQ ID NO: 652549 - DNA, 90 bp, Homo sapiens
cctgctgcagctctatgatgcctccaacagcgagtggcagctggggaagaccaaggcactggtgaggtggattgatgatgaatcttctgg

SEQ ID NO: 652550 - DNA, 100 bp, Homo sapiens
caccacagtccttctgcagtccctcgtccagccacccccagccagatccaggctcctggaagaaccatgtccggcagctactggtcatgccaggcacaca

SEQ ID NO: 652551 - DNA, 87 bp, Homo sapiens
caggagctctgtcacaaagctgttcatggaagaggatgttggacttcttacttgggaaaacctgaggtgcttggaggtccagacaca

SEQ ID NO: 652552 - DNA, 102 bp, Homo sapiens
aaaacggcgagagtgggcgagaacgtccactgcgggccggcgaaagctggtgaaaggtgtagcagtcactcggcctacacccacagcatcgaccttgtgaac

SEQ ID NO: 652553 - DNA, 100 bp, Homo sapiens
gggacagtgggcagtgctcccggaacacaagctgtgaaacactagaatgtcatacccaggctatcccccaacaggctacccacctttccctggatatcct

SEQ ID NO: 652554 - DNA, 50 bp, Homo sapiens
tttgccaacagtccttgggttgttcagtgcatcagagacctttgccccag

SEQ ID NO: 652555 - DNA, 74 bp, Homo sapiens
tgtaaagcaatatttcgagcagtttggcaagacaagttggatggcttgaggactggtactaaaaggaaacgtga

SEQ ID NO: 652556 - DNA, 98 bp, Homo sapiens
gtcattcatctgttcaaggaggaagtaatgaccaaattaagtcattttcgagaatcagagagacgcaacatccacaagcttcttgatgaagtcttttt

SEQ ID NO: 652557 - DNA, 100 bp, Homo sapiens
tgtccgccgagatgtccggctgcagcagcaagtcccatcggaggacctccctgccctgtataccgagggaacagctagagacatgacctaacaccctgat

SEQ ID NO: 652558 - DNA, 87 bp, Homo sapiens
cagcttacgcaaacagaaccttgacctccttgaacagttgcagatcactgagacccagaggctgggcctggctatggccctagaacc

SEQ ID NO: 652559 - DNA, 100 bp, Homo sapiens
ctgggttccaaggagactggagacaaggcgcaaaggtaacctggatgaggacatcattgcagaagagaacatcgtttcccgaagtgagttcccagagagc

SEQ ID NO: 652560 - DNA, 100 bp, Homo sapiens
gctcaccctcctctgcagcctggtgcccatctgtgtgctgcgccggccaggagctaaccatgaaggctcagggaaagggtgccacactgggaatgcaagc

SEQ ID NO: 652561 - DNA, 83 bp, Homo sapiens
caaaattcagaagctcccgatgtccagaattaggatgcctaaatcaaaggaacttgtttcttcaagctcttctggcagtgatt

SEQ ID NO: 652562 - DNA, 100 bp, Homo sapiens
aacatctgggagaatatttaatggaaaatcgcttggttaaaacctgacacttttaacagctaatcacatatggctctgatagaactgaggcactgaagag

SEQ ID NO: 652563 - DNA, 51 bp, Homo sapiens
ctcccagcgaccccaagcaataccggttttatgaatgaagctatggctaca

SEQ ID NO: 652564 - DNA, 100 bp, Homo sapiens
gtacgcctatctcttcaagtacatcataatcggcgacacagatgaagttggagcccttgtttttgacattggatcctatactgtgagagctggttatgct

SEQ ID NO: 652565 - DNA, 100 bp, Homo sapiens
agaaagaagataaaattggaaaagtgttgcccgttatgcatgagagtcaccatgctcaaagtgaatatattaagcagcagggaatacagcagacagcccc

SEQ ID NO: 652566 - DNA, 75 bp, Homo sapiens
acaagccacacggaaggcccaggaagcagttcaggtacttttgaagcattctgcagatgttaatgctcgagacaa

SEQ ID NO: 652567 - DNA, 100 bp, Homo sapiens
gatgctgctggcaagacaaccattctgtataaactgaagttaggggagatagtcaccaccattcctaccattggacagtcattttgtttactcattcagc

SEQ ID NO: 652568 - DNA, 130 bp, Homo sapiens
ccgtctcaaccacagggcatggggaaagcatcctgaaggtgaacctggctagactcaccctgttccacatagaacaagcttctgcagagatctgcccgagctttcagcgtgtcatcgaaaccctcctcat

SEQ ID NO: 652569 - DNA, 83 bp, Homo sapiens
aaaggaacggctgaaggccctacgggagaaaaccgggcgcaagatgcctgaggaaacccagacccaagaccaaccgatggagg

SEQ ID NO: 652570 - DNA, 100 bp, Homo sapiens
ggaggaaagccacgagcactgagcgcctcctgagagccagccctgacgtgaactcattttatctgccacgacccagaagagcccccctctgaggacctgg

SEQ ID NO: 652571 - DNA, 75 bp, Homo sapiens
tcccagaggcctatctttttctgaagctacagcctccaatttgagctcacaatgtctctctgcaccaagctccat

SEQ ID NO: 652572 - DNA, 90 bp, Homo sapiens
ccagtgagaagaatgagtataaaggatgggttttaactacagacccagtctctgccaaatgtctactgttgtggagctgaacgtcggggg

SEQ ID NO: 652573 - DNA, 75 bp, Homo sapiens
tgggattttctctatgaacttatgaaaaccttcagttacagctacctcctgccccatctccttccatctaaacct

SEQ ID NO: 652574 - DNA, 100 bp, Homo sapiens
tactgttgaaaaaatttccagtgaggtgtctgctttttcaacgtgggagaaggagttgcacaagatagtttttgatccccggtacttacttctcaatcct

SEQ ID NO: 652575 - DNA, 51 bp, Homo sapiens
ctatgaatgctacttggatgcctcttaaggctgaccaactgactgaagagc

SEQ ID NO: 652576 - DNA, 50 bp, Homo sapiens
ctaaaacgtaatggtattaagaattctgggttgtgtctgtaaagacaaag

SEQ ID NO: 652577 - DNA, 80 bp, Homo sapiens
tgctgctgggcaactccatcctcgtggacctgctggacatcatcatgatggaggacctgcctggcctagccccaggccca

SEQ ID NO: 652578 - DNA, 90 bp, Homo sapiens
agctctcaaagcatgcttcagtggattgacccaaaccgaatggcagcatcggcacactgctcaatactgtgatagatgccaacattttcc

SEQ ID NO: 652579 - DNA, 100 bp, Homo sapiens
agcccacatgcccgctcacctgcgctgtgatgcctgcagagctgtggcttaccagcagaagatggctgtgccacccacgtatgccgatcttggcaaatct

SEQ ID NO: 652580 - DNA, 100 bp, Homo sapiens
aggaccggagcggcctgtccgaggtggataatattaatgcagctgtgatggatttgaaaaaaaagaagatccgcagtctaagtgaagaggtcaaaatagg

SEQ ID NO: 652581 - DNA, 83 bp, Homo sapiens
tggccagcgagagccagggctccaaagaactcggatggtactggggaagtatgactgttaatgaagccaaagagaaattaaaa

SEQ ID NO: 652582 - DNA, 98 bp, Homo sapiens
ggacggccagtgggagagcgaggcctgagcctctgcgtctagattttaccaaatgttgcaagaactctggagttcttatggtagtaaaatgccggaaa

SEQ ID NO: 652583 - DNA, 136 bp, Homo sapiens
ggtcttccacccttggccacctccccaggtgatgcctgaagctcaagggactgtgtccaccctcagctcagcgacatgtcctcacctacatggaggatgcagtgtgccagctgctagaaaacagggaagatattag

SEQ ID NO: 652584 - DNA, 100 bp, Homo sapiens
gcgcgccttaatgataaggagggatatgttccacgtaacttgctgggaagagatgcaggtcagctcctccagtaccacaacttctgagagtcaagatccg

SEQ ID NO: 652585 - DNA, 75 bp, Homo sapiens
actcaggccatgcactgttacttaaaggaacctaaggagtacaagcgcaagctagccagagtttccctggtgcgc

SEQ ID NO: 652586 - DNA, 51 bp, Homo sapiens
gccggtcaggctcgccgccgagctgatgtagccgcctgtcccgggagcctg

SEQ ID NO: 652587 - DNA, 101 bp, Homo sapiens
ttgtaacttttgatgatcatgatacagttgataaaattgttggttcaaaccttgtactactcagctgatcacaagctgcttgatgggaacctactagatgg

SEQ ID NO: 652588 - DNA, 100 bp, Homo sapiens
ttcaatcagtaagatatatgcaggaactggagctcttgaagggaaagcgaagctgttaggcaattttcttcagtggtatggcattttctcaaataaaact

SEQ ID NO: 652589 - DNA, 100 bp, Homo sapiens
cccatctgtaacgaggtgttgagacgaggtactccaaagattcaggtttactcacgtcatccagcagagaatggaaagtcaaatttcctgaattgctatg

SEQ ID NO: 652590 - DNA, 96 bp, Homo sapiens
agaaaactgggtcagttttgcagatactccaccaaccagtactcttttaaccatgcatcctgcttctgtccagacagcaatggatcaacttcatat

SEQ ID NO: 652591 - DNA, 100 bp, Homo sapiens
caaggatgaggttttgaagattatgccagtgcagaagcagacccgtgccggccagcgcaccaggttcaaggtaagaccctaagtgtcaaggtgatgagag

SEQ ID NO: 652592 - DNA, 83 bp, Homo sapiens
ggcggcggccacgccaaggacggcacatgattaagtaccggtacatcccgttcacacatgggaagagaaggtacagaggcaag

SEQ ID NO: 652593 - DNA, 82 bp, Homo sapiens
tgacgggtctggagtgcgtgggggaccggctgttggcggtttgctggcctagacctgaactcttcagataatcagagtggag

SEQ ID NO: 652594 - DNA, 83 bp, Homo sapiens
ccatttaggagctctgctcaaagccagacgagtgcctggtgaagaatgtgatgggatcactagcatgtctgcggagagcggcc

SEQ ID NO: 652595 - DNA, 83 bp, Homo sapiens
gaagacttgaacttaatacagcaagaaagaccatcaagtttaccagatgactcactggttgtgtggaaggaagtcgatttgac

SEQ ID NO: 652596 - DNA, 74 bp, Homo sapiens
cctggcgttccaccagcaaccatgagtggttccatgatgggaagtgacatgagattaaaagctgctttgaccca

SEQ ID NO: 652597 - DNA, 75 bp, Homo sapiens
ggaccaacatgggcattttgtttatgagcaagatggaattggggaggaggtgctcaagatgtccacggaggagat

SEQ ID NO: 652598 - DNA, 90 bp, Homo sapiens
gcggaggaaacgggagtgaacggagagcgtagtgaccatcatatatgagggaaggcaccattggagatatggctatcctgggtataacag

SEQ ID NO: 652599 - DNA, 98 bp, Homo sapiens
tcgcagcagctggggaggagccaaagcctcggcgctcacctaagccgcagggagatacacccaactgggaggctgcccttttcttgggcctgggggtg

SEQ ID NO: 652600 - DNA, 100 bp, Homo sapiens
acaaaccccaatctcagtggacaaggttaccatagagatgaatgaaccagttcaactaacttttgcactgaggtacctgaacttctttacaaaagccact

SEQ ID NO: 652601 - DNA, 78 bp, Homo sapiens
cacaactcttgtcctaccacctcatgattcatcagaaagtggcatgctgtcccgcctgggtgatttgctcttttacac

SEQ ID NO: 652602 - DNA, 75 bp, Homo sapiens
ctcgaagagaaggtggtgatcaaaggggttctgatgactgtcttgtgaaaatatgggcaacagatgatgggaggt

SEQ ID NO: 652603 - DNA, 100 bp, Homo sapiens
ggttctggcctgggtgaaggagaaggtggtgtgtgatgagaacggctctaagggttatgcctttgtccacttcgagacccaagaggctgccgacaaggcc

SEQ ID NO: 652604 - DNA, 100 bp, Homo sapiens
gaccttgaggaaaatcagcgaatttcagagttctatagaaaatttgaatctcacgggctgtgcgtgcctcaccaccgtccctgctgagaacgcaaccgtg

SEQ ID NO: 652605 - DNA, 58 bp, Homo sapiens
gtggagacacggccagatctgccctccagtgctttggctctagcagacaggaagaaat

SEQ ID NO: 652606 - DNA, 80 bp, Homo sapiens
caccgacacgaattggccttattaatgatatggggatggtgactttcgaggacacggctgtgtctctaacctgggaggag

SEQ ID NO: 652607 - DNA, 88 bp, Homo sapiens
cttcccgccagactacggcttccccgaacgcaaggagcgcgattaataaagaactcttcagaattcctggtgtttcatcatatatacg

SEQ ID NO: 652608 - DNA, 100 bp, Homo sapiens
actttagccactgctactacagatgaagattatggaagagattcgggccctcccactaagaaaattcgatcatctccccgagaagctaaaaataagaggc

SEQ ID NO: 652609 - DNA, 83 bp, Homo sapiens
cgaggccctcatgtaccacacgggttggggtgctggaggactgcttcaccttcctgggcatcttcctggccatcatcctcttc

SEQ ID NO: 652610 - DNA, 75 bp, Homo sapiens
agtacgaagcgggcgtttgcgaaggtaccagatccccaggggctgcagggctcaccagcagagattcctctgtcc

SEQ ID NO: 652611 - DNA, 83 bp, Homo sapiens
ctaaagcagcgtgcgttcagccctgggggctgaaggcctttcggcagcagctgaggaagaccacgcggaccaaagggtttctg

SEQ ID NO: 652612 - DNA, 100 bp, Homo sapiens
gtgttgatctgtttaggaagtggtatcatgagagatatagcccacttagaaatcacaattgtctactatgaagcagggattattctatgctgtgtcctgg

SEQ ID NO: 652613 - DNA, 82 bp, Homo sapiens
gaaggaacgaggcaaggagctaaagcagcgtgcgttcagccctgggaaggaagaggcccagcagaagggactcgctgagcca

SEQ ID NO: 652614 - DNA, 60 bp, Homo sapiens
ttgctcccatccctgcagcatgaacaaggctccagacccagttcctggacctgccctgga

SEQ ID NO: 652615 - DNA, 74 bp, Homo sapiens
tgaaagctcatgaactcaaggagcacaacggacacatcacagggccaaaacactcattgactcagatctctcaa

SEQ ID NO: 652616 - DNA, 51 bp, Homo sapiens
cctgctcaggaacatgcgccagttaaaggtggagcagttctggaggtttta

SEQ ID NO: 652617 - DNA, 96 bp, Homo sapiens
aacagactggacttctcaactgccattctggattccagaagatttaactacgtggtccggccagacgttcacatcggatgcggcgacaccaccacc

SEQ ID NO: 652618 - DNA, 90 bp, Homo sapiens
caaactgaatcctctaaaggccccatacaatgaagtagacattggtggaaacatttatgtcctgggtcatgaaacttaatccacagcaag

SEQ ID NO: 652619 - DNA, 100 bp, Homo sapiens
cagcaagctcgagttaaagttggatgtgctggaacagggcgaactttctgaccaagtatacaactacccagagggcctaggagaagtgctgtatagagag

SEQ ID NO: 652620 - DNA, 83 bp, Homo sapiens
aaaatacccgcaacagccccttcgtcccaaatgccatggacaatattaccaggcagaaccaattctacgatacccaagtcatc

SEQ ID NO: 652621 - DNA, 98 bp, Homo sapiens
cgaggctggagggggagaacacccagaagcatcaagtgtacctgatttgtgaacctatcttgcttcagttggtttcctcctaaatattaggcagatgg

SEQ ID NO: 652622 - DNA, 90 bp, Homo sapiens
ggaagatgcctagcacagaccttctgatgttggtgctggagaatctggtaaaagcaccattgtgaagcagatgaggatcctgcatgttaa

SEQ ID NO: 652623 - DNA, 74 bp, Homo sapiens
gcctgttgtctaccaagtgcagtttaaatagctcttgtcaggatggtgaagctgttcatcggaaacctgccccg

SEQ ID NO: 652624 - DNA, 75 bp, Homo sapiens
ggacagctaccgcagcatgagcgaaagctacacgctggaggctgaccccgcactacatctacccaccagccatcg

SEQ ID NO: 652625 - DNA, 75 bp, Homo sapiens
tggtcttgctcggccgatgaagtgcagaggtttttttctggacacagccagtgtgaagtcctctagtagtcttga

SEQ ID NO: 652626 - DNA, 96 bp, Homo sapiens
atcttctcacttattggtattgatgtcttcagctggtatcatgaattaccaagggtccaagtgtgcctgccatcaactaactatccaggctacagc

SEQ ID NO: 652627 - DNA, 100 bp, Homo sapiens
aggagccgggacacgcctagcgcgggctccaggtaagtaaggaggtctctgtaccatggctcgtacaaagcagactgcccgcaaatcgaccggtggtaaa

SEQ ID NO: 652628 - DNA, 100 bp, Homo sapiens
gaacttgggcctgattgcattctgtgtattcattctactacatcctgttttgctccaagggtgcctgataggcacctgaatggacagaagaggacctcag

SEQ ID NO: 652629 - DNA, 125 bp, Homo sapiens
taacactttaaccaccagcctcacatcaacttccagtgagagtgacacaggtcaggaagcagaatattccttatatggttgtgggagacaagtagccaacagtatcataactggcaacaaaattg

SEQ ID NO: 652630 - DNA, 102 bp, Homo sapiens
tttacacattgtgctattcactctgctttacaagattgtcttcttacataatgatagatacattgaatttcattcgcaatcaggtttttactacaaaaccag

SEQ ID NO: 652631 - DNA, 82 bp, Homo sapiens
cggaaagactgttccaaaaacagtggataattttgtggccttagctacaggagagggttctccaaaaaatgtggaatccttt

SEQ ID NO: 652632 - DNA, 75 bp, Homo sapiens
agactatcagccactaatgaagttgggaactcagaccgtaccttgcaacaaggtttgtgaaatggctgctgacat

SEQ ID NO: 652633 - DNA, 75 bp, Homo sapiens
tgctcgaggaactgactatagcatcttggaggctcctcgacctccaaaacaacccaatgttcaggatttccagtt

SEQ ID NO: 652634 - DNA, 90 bp, Homo sapiens
gtccgccagagctgcggccgccaagccttgttagatgacttggataaagaactaaacaactacattatgcgatgtagagaatggtatggc

SEQ ID NO: 652635 - DNA, 74 bp, Homo sapiens
ctatgaatatgggtcgaccattccaaaaaaatcggggacaagatgccaactggcaagcagctagctgacattgg

SEQ ID NO: 652636 - DNA, 75 bp, Homo sapiens
gcctcagttggaagcagccgatccagcctgcggagcctgtggggcaggccgaatacatcaagcaatggtaacatc

SEQ ID NO: 652637 - DNA, 96 bp, Homo sapiens
gaggcactgaaagaccagcagaggcataaggttcgggaagaggttgttaccgtgggcaactctggtaaccaaggagcagtgaacagcagctactac

SEQ ID NO: 652638 - DNA, 90 bp, Homo sapiens
caaccagaaggaggctgtggcctatgcagtcaactcctggaccactagtgagatctataaggacaggcagaaattctcagaacaggtttt

SEQ ID NO: 652639 - DNA, 75 bp, Homo sapiens
cagagcacttcttctgctctcactgcggagaggtgtttggtgcagaagatgtgatggaagacctctataactaca

SEQ ID NO: 652640 - DNA, 100 bp, Homo sapiens
cagagtcagctgcatgaagctggagggcaggccagttttgttgcatctggaaataggacagatatttccttggatgatccaaatttctggcaaaagtggg

SEQ ID NO: 652641 - DNA, 75 bp, Homo sapiens
caatgagacagggcacaccaaactccatctgggtgagaactctgtctcagtcgacgggaagtgcagtgactccac

SEQ ID NO: 652642 - DNA, 100 bp, Homo sapiens
gcagcatggagtcgcccgcctcgagccagcccgccagcatgccccagtccaaaggggaacgcccttttgcttgtgactggcagggctgcgacaagaagtt

SEQ ID NO: 652643 - DNA, 117 bp, Homo sapiens
gcggccatggcgtacgcctatctcttcaagtacatcataatcggcgacacaggtactaggttttgacaagcttgcatcatgcgtgagtataagctagtcgttcttggctcaggaggc

SEQ ID NO: 652644 - DNA, 82 bp, Homo sapiens
ggtgaccggcgcgcgggagcgctacggccccaacgtaagactttgaccccgacgcaggcttcagtgattgccgcggatcaga

SEQ ID NO: 652645 - DNA, 87 bp, Homo sapiens
tcctggagggaaatcaatagctctgctgcagtgtgcttgtccagaaaggtgactcttttgatggtgggacttgataatgctggtaaa

SEQ ID NO: 652646 - DNA, 87 bp, Homo sapiens
tttaaagatgcagaggatgctttgcagaaacttcataaatatatgcagacaaaattgcttacccagtacatattaaatctcggcaag

SEQ ID NO: 652647 - DNA, 75 bp, Homo sapiens
agaacagctcgagagagcattacaagccagcctctgggaccgaggataatttcttgagaggagataactcccgta

SEQ ID NO: 652648 - DNA, 116 bp, Homo sapiens
ggaccggcggcgctggaggagcgaggcagctgtactaggactgggaacggttcgatcctttggtacagaagacagaccgacagatcgtccaataccacctcgagatgaagtctttg

SEQ ID NO: 652649 - DNA, 98 bp, Homo sapiens
ttcgaggcactcaagtcctggctcagcaagactctcgagcccatggtatatttcagaaatcgctgggtaaagactgtccacccagttgtgcatcagta

SEQ ID NO: 652650 - DNA, 90 bp, Homo sapiens
gcttgtggaagccacccgggagtttgaggaggttgtgctgtcggaaaaggtaacagaagatggaactcgaaatcccaatgaaaaacctac

SEQ ID NO: 652651 - DNA, 90 bp, Homo sapiens
aataagctggtcacagagagacaaatcctgggtgatcccacttacatgaggatggccaggccatgttatgggatctcaacgaaggcaaac

SEQ ID NO: 652652 - DNA, 75 bp, Homo sapiens
cggcgcttctgtcctcctactcggacccgcagagtgatcagcagctggactgtgccttggacctaatgaggcgcc

SEQ ID NO: 652653 - DNA, 113 bp, Homo sapiens
cctcaagcgatgtttgatattgaatatttcagaaaagatccaagaccattcttcaagtttgcaaaggaactgcaagcacatgttgaccagataactgaaatggcagcagtaat

SEQ ID NO: 652654 - DNA, 75 bp, Homo sapiens
gtggctgggaaccgcaaagccagggaaatcctcattgacgattcaatttgttgaaggccaatttgtggactccta

SEQ ID NO: 652655 - DNA, 90 bp, Homo sapiens
agcacttaggaacattcaagctggcaattataccgtgtaccaacagtaccgttattgccaccacaagtaaaccagtccctcacttctgtg

SEQ ID NO: 652656 - DNA, 75 bp, Homo sapiens
gtgggaacccaggccccgccgaggcggccagacatggctccttactatgaagccttgtgcaaatccctcgactgg

SEQ ID NO: 652657 - DNA, 98 bp, Homo sapiens
tggaacttcaaaaagttctgaaaacatgttgctgaactttgacctggaccggggcgtgtttccagtagtcatccaggctgtggtggacgaaggagatg

SEQ ID NO: 652658 - DNA, 96 bp, Homo sapiens
gattgttctgcgcaggttggaggcttgcttccggcgtcatggctcaaagggccttcccgaatccttatgctgattataacaaatccctggccgaag

SEQ ID NO: 652659 - DNA, 100 bp, Homo sapiens
gcttctctacgcagaacccgggagtaggagactcagaatcgaatctcttctccctccccttcttgagtgaacctctgtatgtgcctgtgaaattccatga

SEQ ID NO: 652660 - DNA, 75 bp, Homo sapiens
agcggcggagctcaggaccactggagctatacagcttttctgcaaaagcggagctggagtttgttcagatcatca

SEQ ID NO: 652661 - DNA, 98 bp, Homo sapiens
cagtgggctgatcccaatggattgcatccacattccagagagcatcatcaagatggcactggatctttaaaacgcagtggttcctttagcaaactccg

SEQ ID NO: 652662 - DNA, 100 bp, Homo sapiens
ccgggacctgggctgggaacccgcggtggagcgggacacgaacgtggtgaccctggcaaagatgagagtgcacatttcgtcctgcctgaaggtccaggag

SEQ ID NO: 652663 - DNA, 75 bp, Homo sapiens
ccagaaggtggcgatgttggtccaagggaactgggtggtgaagagatgccagaagtgggtggagaactgtaggag

SEQ ID NO: 652664 - DNA, 100 bp, Homo sapiens
tgggaatccacgtagacagatctgagctagatcactccaaacccttgctgtcattcagcatggtgttagtctgtatattcaagataaagaaggcttgtca

SEQ ID NO: 652665 - DNA, 97 bp, Homo sapiens
accccgccagctccagagccacgtacggctctcaaaattagagagatgtgtaattgtccaccactgtctaatccagaccctcgattactattcaaac

SEQ ID NO: 652666 - DNA, 75 bp, Homo sapiens
tggcctccatcttcggcaccgagaaagacaagttgctgaagcacatgtgcctaatttcatttttgatgagttcag

SEQ ID NO: 652667 - DNA, 76 bp, Homo sapiens
gaacatcctttgactggttagccagaataatccagaatggctactctgatctatgttgataaggaaaatggagaac

SEQ ID NO: 652668 - DNA, 100 bp, Homo sapiens
gaagaaatggcggacttctacaaggaatttttaagtaaaaattttcagaagcacatgtattataacaggcggggagacaaccccttccccaagaatgctg

SEQ ID NO: 652669 - DNA, 88 bp, Homo sapiens
cggctcgtggtggatggcatggggcgctttggcagcactgctcagcacgcaggcatgtgaggaagctgggcttaaaggagactccagc

SEQ ID NO: 652670 - DNA, 100 bp, Homo sapiens
ctgaccttggagactcctctgaatcagctgcctcccaggcctgagcgagctgtgttccggctgaggaaatggatcatctttcgattggtgagcattgtgg

SEQ ID NO: 652671 - DNA, 73 bp, Homo sapiens
ggagggagcccaggagtatgtatcgctgttcaagcatcaggcgtggctgctgaaccgggaacaggagctgagg

SEQ ID NO: 652672 - DNA, 73 bp, Homo sapiens
agcctcccaagtagctggtattacaggaaacttccattttagaagaatacagtatcaattggactcagaagct

SEQ ID NO: 652673 - DNA, 101 bp, Homo sapiens
ccccccaaagtcctggagctgtgggaggaataagtttttttcatctgtaatttggaagccaagtcagtaacaaaatgaaaccagtaaagcatctgttgacc

SEQ ID NO: 652674 - DNA, 100 bp, Homo sapiens
gagggcaacgagcacaacaggagctacgaggagttgattgctggactcgctgaagagagactacgcaggaaagccccagccacccatcaaatcagagaga

SEQ ID NO: 652675 - DNA, 75 bp, Homo sapiens
cggcgcccagtggcgtccacctgctcgtccgcagaggtacctgcgtcgagctctgcacaggtgactgggactgca

SEQ ID NO: 652676 - DNA, 98 bp, Homo sapiens
ccggttgctgtttcttctcaggctcagggaccggccgcggccccgtaggggtggttgtgtcaaaccgattggtgacatctccatgctgtattgtcaca

SEQ ID NO: 652677 - DNA, 115 bp, Homo sapiens
gcaccatgacgtccatccatttcgtggttcacccgctgccgggcaccgaggaccagctcaatgacagagccctatgagtttgtctctctggaatggctgcaaaagtggttggatg

SEQ ID NO: 652678 - DNA, 83 bp, Homo sapiens
ctagaagccgccgcggcagcagctgtttttggaaggaagaaagatggaaagcggtgcagttctgctggaatccaaatcctccc

SEQ ID NO: 652679 - DNA, 82 bp, Homo sapiens
ggacccaccgctgccctcagctccgagtccagggcgaggaacaagatcactcaaggtgaaggataatctactaataccagca

SEQ ID NO: 652680 - DNA, 76 bp, Homo sapiens
ccggttccccggcccacagtgggggtgtgcaaacccgagagaactggataaacaggggtcacatgacgacagaagc

SEQ ID NO: 652681 - DNA, 98 bp, Homo sapiens
gataagaaattaactacccttgcagatctattccggccacccattgatttgatgcataaaggcagctttgaaacaactggattatggacagaacttgg

SEQ ID NO: 652682 - DNA, 100 bp, Homo sapiens
gaattggtaactaactgcttcaaaaacagatatactttgcaggcaaatcctgatcctaactgttgtcttggagtatttgggctgagcttgtacaccacag

SEQ ID NO: 652683 - DNA, 100 bp, Homo sapiens
cggaaagtgctcctgcggctgtatggagcgattttgcagatggcatacccagagtatcttatcacttaccagatcatgaagccagaagccccttcccaga

SEQ ID NO: 652684 - DNA, 83 bp, Homo sapiens
cagtcctcgtcagcactgactttcagctatggaatcggtttactcctggcttgggggcattaggaagcactggaggctcttcg

SEQ ID NO: 652685 - DNA, 83 bp, Homo sapiens
gctgctttgggaggatttctcaggctatgccatggcagctgcagaggcccagggagagagccatgtccattggagcccgttcc

SEQ ID NO: 652686 - DNA, 82 bp, Homo sapiens
ccgccacccaaaccagtcaaaccaggcattcccatcaagagcaccatggacaaccccaccaccacccagtatgccagcctca

SEQ ID NO: 652687 - DNA, 75 bp, Homo sapiens
cgagcgccgcggacgcgtcatcgagtgtgacgtggtgaaaggtcacagaacagaaagtgctggtggacatctctt

SEQ ID NO: 652688 - DNA, 75 bp, Homo sapiens
ggaaaaagaagaccagcgacaaatttagagaaacctcggcagaaacgttcctggatccgaacactgccccctgac

SEQ ID NO: 652689 - DNA, 100 bp, Homo sapiens
caaggacttgccacatatagtaaatcaccagatgatgctgtgttccaacaaatagcactttcttattccaagtgggggcccctgaagccactgatggaag

SEQ ID NO: 652690 - DNA, 97 bp, Homo sapiens
ttgtggatggacttgctacctcttgggtgaactctagcaattacaagtggccaatccgccatggtatagttgaagattgggacttaatggaaaggtt

SEQ ID NO: 652691 - DNA, 100 bp, Homo sapiens
gtttctcttcagtcactgtgtcaaatttgttcaaggttttgcacactagggaccaagaagccctcggggacactgctgagaaaagactgccgaagggaag

SEQ ID NO: 652692 - DNA, 83 bp, Homo sapiens
ctttttctcccgaaggaagattatttcaagtggaatatgccattgaggctatcaaggggctgcttgctctcggtgactacatg

SEQ ID NO: 652693 - DNA, 50 bp, Homo sapiens
gcccccaaaagcagctattcaggactttatggacagcagcctgctaacca

SEQ ID NO: 652694 - DNA, 100 bp, Homo sapiens
catggactcggagattggctgcctcatccgcttctatgcaggttaatcactgttctgaagatggtgtttgtaacaccagttatgcttcatacttctgagg

SEQ ID NO: 652695 - DNA, 97 bp, Homo sapiens
cggtactgttgaaagcgacaagtggaggcgccgctctagcggccgggactctgaactatggcggttctgacagggagacaacagcaaatacaagaga

SEQ ID NO: 652696 - DNA, 82 bp, Homo sapiens
tcgaagagagttatgagttgattgaaaaggcttgcaccctcacgacatgctctctctctctccctctcctcttttctctctt

SEQ ID NO: 652697 - DNA, 100 bp, Homo sapiens
cttacttgaagcatgtctttcagagcccggcaccacccatcttgagtatctgattgtggatttcttaaagaagaagcatgattttgtagaccttattata

SEQ ID NO: 652698 - DNA, 116 bp, Homo sapiens
tgatctataaatgcggtggcatcgacaaaagaaccattgaaaaatttgagaaggaggctgctgagatggagaagatgaagaacttaattccatttgatcagatgaccattgaggac

SEQ ID NO: 652699 - DNA, 82 bp, Homo sapiens
ggcctccatggtgtcagagcaaggagaagctgttgcaccttgcagagtgaagtcaagcccatcctagagaagctgacccagg

SEQ ID NO: 652700 - DNA, 100 bp, Homo sapiens
ttcacataagaagttcttcgatgtatctaaacttggcaccaagtatggatcccctaacaacagtgagagagcaatgcgagcagttggagaaatgtgtaaa

SEQ ID NO: 652701 - DNA, 100 bp, Homo sapiens
cgagcctctgtgggagccggggccgcggcggcgcgggtgctccgggccgaggccgcgaactgtcagaccttcagcagcctcagctgcctgagcgcaggga

SEQ ID NO: 652702 - DNA, 90 bp, Homo sapiens
gggcgggaagatggcggctgggttcaagccgctttgtagttcagaatgtttctgcacagaaagatggagaaaaatctagagtaaaagtca

SEQ ID NO: 652703 - DNA, 100 bp, Homo sapiens
ctaaaatgatcattgaaaacttcgaggcactcaagtcctggctcagcaagactctcgagcccattaccttccactggaagaatctcaaacagcgctactt

SEQ ID NO: 652704 - DNA, 105 bp, Homo sapiens
gagcatataatctaaccaacttttccagcatgtttactgattcctgtgactgctctgagggctgcatagacatctgtattcttcaggacttgtggaatgtgagga

SEQ ID NO: 652705 - DNA, 82 bp, Homo sapiens
agaaagtcctctcgggagaagcagcgcctgttcccggggcagatccaggttcagcggaggaagttcctgcagatgaagcgca

SEQ ID NO: 652706 - DNA, 50 bp, Homo sapiens
ccccagcgcagcctgcatgttccaggtggacctgggctcctcgaaggagg

SEQ ID NO: 652707 - DNA, 98 bp, Homo sapiens
gcccgaactcatggccgagaaggactcgctcgacccgtccttcactcacgccatgcagctgctgacggcagatagactgtcttcaagctcactgatat

SEQ ID NO: 652708 - DNA, 51 bp, Homo sapiens
ctgggttcgcctgcccagcaaatgcgaagctgggagtgtccactcgccttc

SEQ ID NO: 652709 - DNA, 100 bp, Homo sapiens
cggggcctggccgcgcgctgctgtgttctggaagggctcattgtacagtcaaggcggcagagcatccaggatgtgaggagtgatgacgaggattatgaag

SEQ ID NO: 652710 - DNA, 100 bp, Homo sapiens
cttgtggatattatggctaataacacaacaagtttagggagtccatggccagaaaacttttgggcctcccaaagtgaaatgcctgaccaagatctggcac

SEQ ID NO: 652711 - DNA, 78 bp, Homo sapiens
gcagtccacccaccgccgccgcctcccagagacctgtcggccatggagcctaatgatagtaccagtaccgctgtggag

SEQ ID NO: 652712 - DNA, 100 bp, Homo sapiens
ggggctgctggacctcagctacccccgcacccacgcggccctgctgaaagtggcgcaaatgacctgtcgcgaaatcgcctttcagaaattcctatagaag

SEQ ID NO: 652713 - DNA, 74 bp, Homo sapiens
actaccagaacggagatgtgtttggcggaatcaagtactggaaatgtttgatcatgcttatggtaactatatgg

SEQ ID NO: 652714 - DNA, 90 bp, Homo sapiens
aaatggcggacttcgacacctacgacgatcgggcctacagcagcttcggcggcggcagagggaaaatgtttcaacgtgcgcaagagttgc

SEQ ID NO: 652715 - DNA, 75 bp, Homo sapiens
cggacatcactttagaccctccacctaattgcaggttacgttatatataggattcgtgttcgccgtggtggccga

SEQ ID NO: 652716 - DNA, 90 bp, Homo sapiens
aaaatgccctgcgtgtgagaagcagatctttaagcaagcgacaatgaaggcattgcggaaaaaatctgttttgctaactggctatctgga

SEQ ID NO: 652717 - DNA, 100 bp, Homo sapiens
ctgcatctcctaaagacatgcttattctggtggatgtttacagaagaatggtctgagaaaaaatggtattttgaaaaatggcttgatctgtgacttcaag

SEQ ID NO: 652718 - DNA, 100 bp, Homo sapiens
cctgagggagcggtacttctcagggctaatatatgtatgatgagtgggtgaaggctgacaggataatctggcctttggacaaaggtggaccaaagaaaaa

SEQ ID NO: 652719 - DNA, 75 bp, Homo sapiens
cggctatggagtccccatgttggaagatgagaatgtgcctactgctcctgatcctccaagtcaacatttacgtgg

SEQ ID NO: 652720 - DNA, 82 bp, Homo sapiens
ctgactctcggactgagaaacgcaaggccagaagcggactcctagaagaggggagcagcaaggatggaatgacagccgtggg

SEQ ID NO: 652721 - DNA, 90 bp, Homo sapiens
gcttcagtcagtcgggccgcgccgcgcctcagctctggttctctacttaaaagacaatgactactgatgaaggtgccaagaacaatgaag

SEQ ID NO: 652722 - DNA, 82 bp, Homo sapiens
cttccggggacagccagccctcgctggaccagaccatggccgcggccttcgcccgcgggaggactcagactccagcacttcc

SEQ ID NO: 652723 - DNA, 126 bp, Homo sapiens
ggaccgacagaggaggatgctgagattattcagcatgaccagctctccacccactcagaggacgcagacgagattggccatctgcaagcttcccttctccgtggagagcaggaagacagtcatggg

SEQ ID NO: 652724 - DNA, 75 bp, Homo sapiens
acactagaagatatttgctgcagcctttagctgcgcaccaagctgtcatcacaggagatccagcagtttgcagca

SEQ ID NO: 652725 - DNA, 82 bp, Homo sapiens
ctaatcaaggagaagactgctatttttttttctattccacatgtaccaaaagatgctgcaatttgtcagtaatcaagtggga

SEQ ID NO: 652726 - DNA, 100 bp, Homo sapiens
gtcaatcgagatctcactgaggctgttcctcgacttccaggagaaacactaatcactgagagatggaaccatgtaaccaccacgaccaagaggccagtaa

SEQ ID NO: 652727 - DNA, 76 bp, Homo sapiens
gtcgttttggaagcgcccttcctagttggcattgaaggttcactcaaaggcaggggcaacaccctccactaaagag

SEQ ID NO: 652728 - DNA, 80 bp, Homo sapiens
gaagatgtagaaggggatgaggacgacgatgaagtcagtgaggaggatgaagcggatcccaaacggcagaagacagaaaa

SEQ ID NO: 652729 - DNA, 100 bp, Homo sapiens
aggcggagcagggccttggaccccgcggcgcccctcggcctcggagcaacgagcgcagcgccgggagttgaccacatttggccatttcccagaagggccc

SEQ ID NO: 652730 - DNA, 74 bp, Homo sapiens
ctcaactctctacgctttgcctccaagctcacagcgctccttcaccactattacccaattgagatcgacccaca

SEQ ID NO: 652731 - DNA, 51 bp, Homo sapiens
actggatctgctgacagaactataaagttttctggatatgccgcagaagga

SEQ ID NO: 652732 - DNA, 100 bp, Homo sapiens
gcgccatgtcgttctgcagcttcttcgggggcgaggttttccagaatcactttgaacctgggtttggatccagctcgagtcaacgtccctgtcattggtg

SEQ ID NO: 652733 - DNA, 100 bp, Homo sapiens
tgctgccaaaaaacctcagtcgggaggagctggttgatgcgctgcgggcagccgtggtggaccggaaaggagaaggatttgatcccaaagctgtttcaag

SEQ ID NO: 652734 - DNA, 50 bp, Homo sapiens
gccgagcgaggcagctctgagccgcgcgtgcccatgacgcttccggagac

SEQ ID NO: 652735 - DNA, 90 bp, Homo sapiens
cagagtcggcacctgaaggacatggaggcctcattgctacgatttcagagtaccctggtaatagctgagcatgcaaatgattccctagca

SEQ ID NO: 652736 - DNA, 99 bp, Homo sapiens
ccaaattagtgtggaacaatctatcagcctcctcctcaactttatgattgctgcatatgacagacctctgactatgtgaagatacggtgggaagatgac

SEQ ID NO: 652737 - DNA, 133 bp, Homo sapiens
gccgggtggccgccctgttccccgcgctgcggcctggcggcttccaggcgcactaccgcggtactccaaagattcaggtttactcacgtcatccagcagagaatggaaagtcaaatttcctgaattgctatgt

SEQ ID NO: 652738 - DNA, 82 bp, Homo sapiens
gcctggctagccggcgacttgagtgacgaaggctgtggccaggccagctgggctcggggagcgccagcctgagaggagcgcg

SEQ ID NO: 652739 - DNA, 83 bp, Homo sapiens
gtctggtcctactacgcgtacgtggtggagctctgcgtgtgttattcagcttctcaaggctggaaaagcgaaggaagtttcct

SEQ ID NO: 652740 - DNA, 83 bp, Homo sapiens
gcagcaccaacccatgggttcagttcttttgttccacggagaacaggtcgcaatggaagaagagatcgccgcgctggtcattg

SEQ ID NO: 652741 - DNA, 99 bp, Homo sapiens
ctcagaagccatgcccctcaggctggaacttgccctgtctcctcgcagatgagaggatggttagaacgagagagcaggtatggtctgcaagcaggacac

SEQ ID NO: 652742 - DNA, 75 bp, Homo sapiens
atggcggagcagacctactcgtgaaaccaggcgatgcggaagaagctaatcttgtacttcaagaggaggaatcac

SEQ ID NO: 652743 - DNA, 100 bp, Homo sapiens
tggagatcgacccgtacttgaagccctacgccgtggacttccagcgcagagctgacttttttgaagatgaggcgattgaacagattttgaagtataatcc

SEQ ID NO: 652744 - DNA, 100 bp, Homo sapiens
gacaatccagaaatgccttctaattcaggcaatttgcaaaagggcaagtgtccagagaatggctgggatgaaagtacacttgaactctttttacatgaac

SEQ ID NO: 652745 - DNA, 98 bp, Homo sapiens
ggagctgggaatcgggagccgggcgcggggagctgcgcgaagccggggcggagcacgcgagctatggtcaaaatgcagatcttcgtgaaaacccttac

SEQ ID NO: 652746 - DNA, 99 bp, Homo sapiens
tggcggtgctgccgtgagggaagtttatgaggagccctggtacctgacagtgtaaagaaggagctcctacaaagaataagaacattccttgctcagcat

SEQ ID NO: 652747 - DNA, 98 bp, Homo sapiens
taatgactgggaagaccacttggcagtcaaggtacgaactatggctcgagatttatacgatgaccattttaaagctgttgaaagcatgcctcgtggag

SEQ ID NO: 652748 - DNA, 80 bp, Homo sapiens
agagcgtctggccaagaatcagaggaagtgggagccttttgtggcagatgaatatattgaacgtcttgtatggagaaccc

SEQ ID NO: 652749 - DNA, 49 bp, Homo sapiens
gggttttctgcacttctacactcaggcatttgcaagtaaaatcactggc

SEQ ID NO: 652750 - DNA, 88 bp, Homo sapiens
gcccagccgggaactccccatcgcgttttgccagcgataatacgcctcaggttatggacatcattatgtactgccttgaaggatcttt

SEQ ID NO: 652751 - DNA, 101 bp, Homo sapiens
ccattggcaaaactgtggagtatctgcactcacaggggttgctagacctgatgcacaccctgcacacgcgggcagcctctatctacagctcatgggcggag

SEQ ID NO: 652752 - DNA, 74 bp, Homo sapiens
ttttgtggagtggtttgaatatcgtaagcgcacgtttaaacatctcaaggcctttggacaagcacacacaaacc

SEQ ID NO: 652753 - DNA, 100 bp, Homo sapiens
tgagcccccatcattgggagaaatccccactcctccaagaaccaacccccaaattggctgggacagggatgttactggctggttttacgattaggaatgt

SEQ ID NO: 652754 - DNA, 100 bp, Homo sapiens
cagcggccgcgcggcgctggactggagcagaaccccaggactgcgcccccgggagcgggcgcccagagaaatgttgctgaagtgctgctgaaagggccag

SEQ ID NO: 652755 - DNA, 51 bp, Homo sapiens
gaggaagcagaaagtgaaggaggagctcccagctcctccagcagccgacag

SEQ ID NO: 652756 - DNA, 74 bp, Homo sapiens
cacctttcggcttctgagacggcggcagcagcggcattcagtttgaagaaaacaggtctgaaacaaggtcttac

SEQ ID NO: 652757 - DNA, 83 bp, Homo sapiens
gcgcaggcgcaagcgcagagagcggaggcggtggtggtggcggccgctggccagtcaataccaagaaggagggtgacctgata

SEQ ID NO: 652758 - DNA, 75 bp, Homo sapiens
cagagccaagctcatttctggcacataagaggtacttaaacttcacccttgtttagcccctattaaggttgcttt

SEQ ID NO: 652759 - DNA, 82 bp, Homo sapiens
ctgggagcagaggaagccttgaggacctactcacagataggaattgaagattagaagcccaggacccaggaaggagacacag

SEQ ID NO: 652760 - DNA, 100 bp, Homo sapiens
cgcgtcgtcgacccgcagccgcggggcggactaagaagggagccgcctgctgcgaggccgccgggctcccgagtggagagatctacagaccaagtaatca

SEQ ID NO: 652761 - DNA, 73 bp, Homo sapiens
tttcatcctatacagtggctgtctggtcctgctccagaagcaataactgataaaattttccaaatcagcaaga

SEQ ID NO: 652762 - DNA, 80 bp, Homo sapiens
tttgaagatgcagtgaatatactgaagccttcaactataattgcccttagagatttgtttgattccatggataaaacttc

SEQ ID NO: 652763 - DNA, 100 bp, Homo sapiens
agcaaacgtatgggcatcatcgtgcgggcagacagccaagtggacctggtccggcagcatttctatgaagtatccctggaatatgtcttcaaggtgcagg

SEQ ID NO: 652764 - DNA, 82 bp, Homo sapiens
cagagaatgacgatgacgtctaccgcagcctggaggagctggccgaggaaagcaggcaggatgggagagtcgccgatagaac

SEQ ID NO: 652765 - DNA, 100 bp, Homo sapiens
agagtgtgcacactggctatcattgatccagggccagtgtcgttattatccttgtggagtaatagaatcaatactgccaattccagaaaacatcaggaat

SEQ ID NO: 652766 - DNA, 101 bp, Homo sapiens
gcttgttggatgaattaatgaaccttgacccacaccaagtgccggtggtggtgtgcacattgagccccggtatagacagttcccccagctgaccagatccc

SEQ ID NO: 652767 - DNA, 98 bp, Homo sapiens
ggacaccgcggaagtcgggaaatggttatgatgtgattgctcaagcccaatctgggactgggaaaacggccacatttgccatatcgattctgcagcag

SEQ ID NO: 652768 - DNA, 100 bp, Homo sapiens
catggagttgatattacaaccagtgacactgcagaaaaggaagaccagtgtctcatgcctgaagcctggaatgtggaccagggagtaattaccaaactca

SEQ ID NO: 652769 - DNA, 75 bp, Homo sapiens
cagagcagaggccaactccagccagacccttggaaatgccaccatggagaaatgaacaaagaaagggtgagtgag

SEQ ID NO: 652770 - DNA, 75 bp, Homo sapiens
attttctagtgctgagatcctgagacaatgacgcaagatggctgtcctctctaaggaatatggttttgtgcttct

SEQ ID NO: 652771 - DNA, 80 bp, Homo sapiens
catcccattgtactgcaaaaaccaagactaaggtgtcagtatgttcttcaagctgctctgctcctgggcccaagctattc

SEQ ID NO: 652772 - DNA, 83 bp, Homo sapiens
cctagggcccggccgacccgcggcccgggcgtgatggtgggcatgggtcagaaggattcctatgtgggcgacgaggcccagag

SEQ ID NO: 652773 - DNA, 50 bp, Homo sapiens
gaagaggcgagtccggtctcaaaatggagctcttcagtgggtcatctgtg

SEQ ID NO: 652774 - DNA, 50 bp, Homo sapiens
tggcagccctcactgcaggaggaagccaccactgccagccgcttctacag

SEQ ID NO: 652775 - DNA, 100 bp, Homo sapiens
gaaaagacagcaaatcttgtcattagcaactggaatcagcaaattaagttctgcaggctgggaagcccaaggtcgaggggctgcctttggtgacttatgg

SEQ ID NO: 652776 - DNA, 101 bp, Homo sapiens
cggccgccatcgcgacggccaaaaggagcggcgcggtcttcgtggtgttcgtggcagagtaatcaagtcagaggattatatgacttttatctgcctagaga

SEQ ID NO: 652777 - DNA, 98 bp, Homo sapiens
ttgcagaaatcacattggaccctcctcccaactgtaggagtctactgctaagatttcagcatgtcctgtggctgagttaatcagagttatgacaggaa

SEQ ID NO: 652778 - DNA, 95 bp, Homo sapiens
ttgttaccgacaagaactctggagaagtcatgacagtaggcctgctcaatgtgaagagacaaggatgaagaccttgatgatgatccacttcccct

SEQ ID NO: 652779 - DNA, 88 bp, Homo sapiens
actctttccgccctaatggaggtctccagtttcgcagtccagagcgtgagtccattcacatcctgagtgttgatgagaagaacaagtt

SEQ ID NO: 652780 - DNA, 100 bp, Homo sapiens
attgatcttttcaagaaagcaggatggactatcattactcctccaacaccaatcatcccagacggtttttgtggaaactctggataagtgtttcgaaaat

SEQ ID NO: 652781 - DNA, 83 bp, Homo sapiens
ctgcgatacctgcctgcaggagttcctcagtttggtgccctggttgtcagatgttggaaagcagtaggacggaacatactctt

SEQ ID NO: 652782 - DNA, 82 bp, Homo sapiens
cccagcgcagtgaagtggtgagcctttttgtcactgacatccctttaaaagtagttggaatgttcccaagtagaggtgagaa

SEQ ID NO: 652783 - DNA, 100 bp, Homo sapiens
ccagttccgtctgtgtgttcgagtggacaaaatggcgaagatcgccaagactcacgaagttgctctatatgcaatcagtgctgtctactttgctggagtg

SEQ ID NO: 652784 - DNA, 75 bp, Homo sapiens
ggggcacgccaccatttccaagcgcctgggccatgttcctggaccggccccagcagtggctccagctcgtcctcc

SEQ ID NO: 652785 - DNA, 75 bp, Homo sapiens
atttgcagagtacatgtggatggagaatgaagaggatttcaacagacagattcatgttacatgtaaagctgtcct

SEQ ID NO: 652786 - DNA, 98 bp, Homo sapiens
gatcatgttgttaccctcggacgtagcccggcttgtattgggttctcgcaaccttgggattaatcttgctcactgcctactttgtgattcaacctttc

SEQ ID NO: 652787 - DNA, 75 bp, Homo sapiens
tcagtcattttactgtcaagacatttcttcggcattctgcaacagagttttgccgaattgacaagcccctgtgtc

SEQ ID NO: 652788 - DNA, 75 bp, Homo sapiens
ggaggacctgtggaaggcatggaagtcatcagaaggagtgacagttcatttagattctttgtattcttcttcgtc

SEQ ID NO: 652789 - DNA, 75 bp, Homo sapiens
gaggcaccgaggcactcagaggaggcctccctccctgacatggagagtaacctgtctggcctggtgcctgctgcc

SEQ ID NO: 652790 - DNA, 75 bp, Homo sapiens
ttccatgaatactgagaatgccaaagtaaccagatctaacatgagtcaggtcaattcagtgaagatatgataccc

SEQ ID NO: 652791 - DNA, 100 bp, Homo sapiens
ccccagtctggggatcccgccgacgctactcgctgcagcatatgccagaagactggagaggcaggagacgattgagcagctcttaagcaacatgttcgag

SEQ ID NO: 652792 - DNA, 82 bp, Homo sapiens
tctggaattttattaaacatggtccagctgtcctcagttaatcccccgtctttgtcaccaccaggaactacaggaattgaac

SEQ ID NO: 652793 - DNA, 75 bp, Homo sapiens
gagatgaaggacccataggccaccaggggccgattggccaagaagcctcaggcccagagccagcacgagacatcc

SEQ ID NO: 652794 - DNA, 98 bp, Homo sapiens
cgctccagaaatggggttgtgatataaagacagggatatgagtgaagaaaacacagagccaccctggaaaggacccttgaacatctgtgaagaaatga

SEQ ID NO: 652795 - DNA, 130 bp, Homo sapiens
gcgctgcgtagaagtatcaatcagccggttgcttttgtgagaagaattccttggactgcggcgtcgaattcaggaggaatcagatatgtggaaaataagagaactggaaaaacagatggaagatgcttac

SEQ ID NO: 652796 - DNA, 100 bp, Homo sapiens
gtaactgcgatcctttcctcttgccatctgcttatcaggacagaagatctggaccacggccaagctcacaaatcgggctgaccggttccctgatgtgtta

SEQ ID NO: 652797 - DNA, 80 bp, Homo sapiens
ggccatctttgaactcctggactatattgtgaacgagaaaatattttcagaacctggaagcttatccatggccaccgtcg

SEQ ID NO: 652798 - DNA, 100 bp, Homo sapiens
cgcgggggcagtggccatggaggccgtgctgaacgagctggtgtctgtggaggacctgctggtggaagagaaacctgatgtcacatacagtgatgttggt

SEQ ID NO: 652799 - DNA, 100 bp, Homo sapiens
ggtggacacactgaaacagaagaagcttgaggaaatgactcggactgaacaagagggttatgaagacagtatggagtttccagaccatagtagacatttg

SEQ ID NO: 652800 - DNA, 50 bp, Homo sapiens
cccgaactgactcagtcatcattgcagcttcatcgctgtggagaacattg

SEQ ID NO: 652801 - DNA, 74 bp, Homo sapiens
gcccgagcagtggaagtcccacagaagctacagctgccaggtcacacgacctacaagtagggagcagggaaaga

SEQ ID NO: 652802 - DNA, 100 bp, Homo sapiens
tgtcgctgagagcctcacgagtcgaggtcctgcaggtggagctccggcagccgccctgggttttggccaaattgggcgagggcacaaaataaccacttac

SEQ ID NO: 652803 - DNA, 51 bp, Homo sapiens
gctgtttgtaaagcagctattatagggccctgtggtaggaggctggtacaa

SEQ ID NO: 652804 - DNA, 80 bp, Homo sapiens
acagacacttctgatagtgaagatggatggagcaccttcagaatcagagaagctttactcattttatgatctggagtcaa

SEQ ID NO: 652805 - DNA, 100 bp, Homo sapiens
gaggaggtcctggagatggagcgcaaggaggagcaggccgaggccatatccgagcggtttgtgaatcttatctcagagaggaagacaaagtttgccaagg

SEQ ID NO: 652806 - DNA, 75 bp, Homo sapiens
cccaccaatggaagcagctggcttcactgctcaggggaggagccccagccccgcgacgaggaggaagcggagctg

SEQ ID NO: 652807 - DNA, 97 bp, Homo sapiens
ggacagagaagccttttccgttgccggtgccggcctagcgtcctggaattacttcaatcaagacagtactgcttttaaagagacagtgttagggatc

SEQ ID NO: 652808 - DNA, 100 bp, Homo sapiens
gcgcggggcacgatgttgaacatgtggaaggtgcgcgagctggtggacaaagcaaacattgctgaggctcttgtcagcaaaggtctagccacagtgatca

SEQ ID NO: 652809 - DNA, 82 bp, Homo sapiens
cgcctttcccgagccctggaggtggggagaaaaggcaaaatcctcaatgatgatactgctctcaaagaatataaaattgatg

SEQ ID NO: 652810 - DNA, 88 bp, Homo sapiens
accccacagtgcagcgctccgtgtttgcatcggtggacaaggtgccagggtggcaatgaccatgagatcttcacagaccccagaacca

SEQ ID NO: 652811 - DNA, 100 bp, Homo sapiens
gaggaaaacaacttcgagggcagagatggggctggtaagtagcaaaaagccggacaaggaaaagccgatcaaagagaaggacaagggccaatggagcccc

SEQ ID NO: 652812 - DNA, 75 bp, Homo sapiens
ctgaagattgcttctcttctctcctccaaggtttcattgaaaacagatcctgcaaaagttccaggtgcccacact

SEQ ID NO: 652813 - DNA, 82 bp, Homo sapiens
gtacgagagcaagctctataagattcttcaaggtggggttggcatcccccacatacgtgtgcaggatgacagaattcgagtc

SEQ ID NO: 652814 - DNA, 100 bp, Homo sapiens
tactactatcctcattatctccaaaccaaggacaagtaaatttttgtgaaacattgcagatgttagatggatttgggagaattttccaaactaagtggac

SEQ ID NO: 652815 - DNA, 50 bp, Homo sapiens
cttcaggacaacctcttgggcagggacaatcatatcctgattcagccctt

SEQ ID NO: 652816 - DNA, 75 bp, Homo sapiens
ttcattgatgccacaaccataatagaatgtctacattcctgccaaaaggtgtgttttgctgacttcaagcatccc

SEQ ID NO: 652817 - DNA, 75 bp, Homo sapiens
tttggatgacaacgtctgcatggcctttgcagcaggtttggatgcatctgctcagactacttctcatgaactcac

SEQ ID NO: 652818 - DNA, 75 bp, Homo sapiens
tcttaatcagcctttggacaactattttcgtcatctttggaacaaagatgtattgctgtccttgaatattagccc

SEQ ID NO: 652819 - DNA, 75 bp, Homo sapiens
tagggaggcgaggttcccgcaccggataggaatgtttacccttgcggaagttgcatcacttaatgacattcagcc

SEQ ID NO: 652820 - DNA, 75 bp, Homo sapiens
gcattattataatgttccattgtgtgtcacagaagagaccttcacaaagatccccgtcgaggtcaagatcaagat

SEQ ID NO: 652821 - DNA, 75 bp, Homo sapiens
ctcgctggctcaggagtgaagctacagaccttcgcggtcctcagaatggttggaatgaccctccagctttgaaca

SEQ ID NO: 652822 - DNA, 96 bp, Homo sapiens
ctggagtggagattccagaacctgttttcttctgtaccatagaacccccatcactgtctaagcagccagtctctgctggatgaaccgaatcctaac

SEQ ID NO: 652823 - DNA, 83 bp, Homo sapiens
gtcccgggagaacctgcggcggccggagcgcaatgaatgtggatcacgaggttaacctcttagtggaggaaattcatcgtttg

SEQ ID NO: 652824 - DNA, 99 bp, Homo sapiens
tgaggactgccagctggcgctgcaggcagcatgaaaccgtgattcctggcgagctccccctggtgcaggagctcacgtccactctgcgagaatgggctg

SEQ ID NO: 652825 - DNA, 88 bp, Homo sapiens
aaagagcaactgaagattcatacgcagctggcagatattatcatagttgctgcagaaagctgacttcatgagaccgaggatctcgttc

SEQ ID NO: 652826 - DNA, 90 bp, Homo sapiens
agcggacaacatggcggccttcatgctgggctcgctgctgcggacgttcaagcagcaggggaaatgctgtctgtagctgagcacttcctg

SEQ ID NO: 652827 - DNA, 83 bp, Homo sapiens
gccgcggatctcaccgccgctcagggtggccagcatcgaaatgttcagccttttagtgatgaagatgcatcaattgaaacaat

SEQ ID NO: 652828 - DNA, 82 bp, Homo sapiens
cgccagcggccgagcgggcggcttcctggcctgggcgctccggtggcggcggagacacattcctgaaggcgctaaaagacga

SEQ ID NO: 652829 - DNA, 100 bp, Homo sapiens
cccggtctcggtgtagctgccgtggttgccaggagagctgcgccggcgagaagcggccgagccagcagcagcttattcagctgattctgaatcatcttac

SEQ ID NO: 652830 - DNA, 74 bp, Homo sapiens
gatagtctgtgatccatttcaagttgatttgctatctggtgtgagtgccggtggtggtgtgcacattgagcccc

SEQ ID NO: 652831 - DNA, 100 bp, Homo sapiens
ctggagcaaagattagcagaggtgctaaagggaagaaggaggaaaagcaggaagctggaaaggaaggtgatctgtgaaaatggttcgctattcacttgac

SEQ ID NO: 652832 - DNA, 87 bp, Homo sapiens
atggggattcaaggatggaatttttcataactccatatggcttgccctggacccatccaaggacccctgcctgaaggtaaaatgcag

SEQ ID NO: 652833 - DNA, 100 bp, Homo sapiens
accaggtgtcctacttctcatttaagctactcaagaaagagtgcccaattccaaatgtacagattctggatgaaattgaagaacataacatcaaaatcta

SEQ ID NO: 652834 - DNA, 101 bp, Homo sapiens
catgcgggagtcgcaatgtgtgcttggatcaaataagctttccgatttgttggcacccatctcagagcagatcaaagaagtgataacctttcgggagaaga

SEQ ID NO: 652835 - DNA, 83 bp, Homo sapiens
ctctcctagcgcggtgcccgcgccgtgactccgcaggctttatcctgtggataaacgcagagtgaacgagtttggggagtcct

SEQ ID NO: 652836 - DNA, 90 bp, Homo sapiens
gcagctgaagctcatcatgaccttccagaattacgggcaagcgctgttcaaacccatgaaatgaagatctccttcaacgacaaaagcctg

SEQ ID NO: 652837 - DNA, 100 bp, Homo sapiens
cacggttcattggattttgcattcagaaaggagcagactgtggagcaaaggttatcaatactctggctgaccatcatcatcgtgggactgactttggtgg

SEQ ID NO: 652838 - DNA, 98 bp, Homo sapiens
gtgaggtgagcaggcccggggagggtggttaccgctgaggagctgcagtctctgtcaagaatctaggtcaacctattaagatacgtttccaggaatct

SEQ ID NO: 652839 - DNA, 96 bp, Homo sapiens
ggatcctttatcctggtcatcttctatttccaaagttgggagccacgtgtaccagtgtgtgttgatcttggcttgattcagtctgccttgtaacag

SEQ ID NO: 652840 - DNA, 75 bp, Homo sapiens
ctcaaaaacaaaattctgaactcaggacttggcaaggtcttttaacatccgaggaccacattctttgtgctttcc

SEQ ID NO: 652841 - DNA, 75 bp, Homo sapiens
ggcctcccgtttctggctccgggctgagcttcctggagaagaggaagtgcccctctcagctgaggaggaaccgag

SEQ ID NO: 652842 - DNA, 100 bp, Homo sapiens
agaattttccaaatgaatttgcaaaacttactgtagatgtatgtccatccctgtgacgatgagggctattcggaggaaagctgaaaccattcaagccgac

SEQ ID NO: 652843 - DNA, 50 bp, Homo sapiens
gctgtggtgcagtccccgcaggtcacaggactcagtggcctttgaggatg

SEQ ID NO: 652844 - DNA, 74 bp, Homo sapiens
agaaggaggagcgggccgtggaggcttcgccgcctaggaaaacaggaaatcattttcacaactttataagttgg

SEQ ID NO: 652845 - DNA, 83 bp, Homo sapiens
caaaatcaaccgggaccccagcttttcagaactgcagggaaacagccatcatgagggtacccagtgtgttgaacaaattcaag

SEQ ID NO: 652846 - DNA, 74 bp, Homo sapiens
gatggaggaagactcgatccgcctgcctgcgcacctgcgactctccttcagcaactccagaagcttcagacttt

SEQ ID NO: 652847 - DNA, 75 bp, Homo sapiens
aagaacgagctgaagcaggccctctcaggtctcagtgctgtgccccccccagagcctagaggatgtttcatggga

SEQ ID NO: 652848 - DNA, 76 bp, Homo sapiens
gcctcagtttgtgcaggacaccgacatggaacagggactcactgggggtggtcactaactgccaagagagaatcca

SEQ ID NO: 652849 - DNA, 101 bp, Homo sapiens
gttaacttctgtttacatggaactcagacatctgcaaatcatggaacttgcatcagcactgaagtcagccttatctggccacctggagacggtgattttgg

SEQ ID NO: 652850 - DNA, 74 bp, Homo sapiens
accagggtgaatcctgtgacactagagacaggccataaaattttgagtagaaaaatccagaaatttgaaaatca

SEQ ID NO: 652851 - DNA, 101 bp, Homo sapiens
ccgcctcaggggccatggcgaagcacgagcagatcctggtcctcgatccgcccacagacctcaaattcaaagggaagacatgtaaggaatttgcataagac

SEQ ID NO: 652852 - DNA, 100 bp, Homo sapiens
ttcctggtcctgaaatatagaggcctgattaaatactggtttcacactccaccaagcatcccattacagatagaagagaccgagactcgctctgtcaccc

SEQ ID NO: 652853 - DNA, 100 bp, Homo sapiens
cgtgctgatgctactgaggagccagcgtctagggcagcagccgcttcctagaagaccaggtttctggtcctcataccgtgtggttgagtgaaatcaaaac

SEQ ID NO: 652854 - DNA, 50 bp, Homo sapiens
acaggaaagctcgagccaggctgtgaggatgatgtggacctggaagccct

SEQ ID NO: 652855 - DNA, 100 bp, Homo sapiens
gtggaagtgactggccacgcccacgtgctcttggctgcctttgaaaaggttgctccttgagggcaggacagttcttatggctttatccgttgcgtaagca

SEQ ID NO: 652856 - DNA, 100 bp, Homo sapiens
catggagccccgggcggcggacggctgcttcctgggcgacgtgggtcatcatcagatttgaaatatttaaagtggatacaaaactatttcagcaatgcag

SEQ ID NO: 652857 - DNA, 82 bp, Homo sapiens
ggaaaggcaggcgaagtcttcattcataaggataaaggatttggctttatccgcttggacccgctacatcagcacggagctg

SEQ ID NO: 652858 - DNA, 82 bp, Homo sapiens
aaagaaaactcctccttgtacctaggtggtgctctagaaaagttcgagatttatggtggcagggaatccctccaagtgtgag

SEQ ID NO: 652859 - DNA, 101 bp, Homo sapiens
gaaaactgttagatattaagcagaagtgtaccactgccaaacaagaactagcaaataacctacatgtcagactgaagagtttcataatagaagagcagagt

SEQ ID NO: 652860 - DNA, 100 bp, Homo sapiens
gattcgcaagaccttcaatatcaaaaatgactttactgaagaggaggaagcccagttctcacagctggtgaacggggatgtggctttgctgggcgggggc

SEQ ID NO: 652861 - DNA, 73 bp, Homo sapiens
cgctatccagaacctccactctttcggcatctttgggaaagccgcttcaccctttgctggtggttgcccccaa

SEQ ID NO: 652862 - DNA, 58 bp, Homo sapiens
gcttccctcgtggccgacggaacaatgaagagggaaaattgcaacccttgcctacaac

SEQ ID NO: 652863 - DNA, 82 bp, Homo sapiens
ctggattcctccatgactcaaggcacagactctccaggcaccgttcctgccttgggcgctcatgggcttctcgctgctgctg

SEQ ID NO: 652864 - DNA, 75 bp, Homo sapiens
ttgtccaaaagtgaaattttacgaactcagttaatcagctgtgttcagcgaatacttatgaacagaaggctccag

SEQ ID NO: 652865 - DNA, 50 bp, Homo sapiens
ttttggaaagcagtttttaagacaacaactagaagccatttgtgtcaagg

SEQ ID NO: 652866 - DNA, 91 bp, Homo sapiens
ccactgttcggttaaaggagcctcctgtggatatctgtctaagtaagagccttgcttcctgttttacatcacaaatctaaaaaaggacccc

SEQ ID NO: 652867 - DNA, 83 bp, Homo sapiens
gcagataatcattgggcaaaaacttgtgagggcgaaggtcgtattgaatggtgttgtaggcctatatgaacccaatagcaatg

SEQ ID NO: 652868 - DNA, 100 bp, Homo sapiens
tatgccaacccacctaactacggaaaacctgatcccaaaattattgaaaacactcgaaggattgagaggatccagaatccagatctctggaatagctacc

SEQ ID NO: 652869 - DNA, 119 bp, Homo sapiens
ccgtcagtccctgctctgtgcgcgcctccatctgggccatggatgggtttagacgtctgtgccacttgccatgaacatgccacatgccagcaaagagaagggaagaagatctgtatttg

SEQ ID NO: 652870 - DNA, 100 bp, Homo sapiens
agcgagccgcctgccccggtgcgcagacagagctattccagcaccagcagagcatcaagatggtgctcatgtggaccagtggtgacgccttcaagacggc

SEQ ID NO: 652871 - DNA, 90 bp, Homo sapiens
tcctgcgctgagcacgagtcacccgttctacgacgtggccagacatggcattctgcaggtggcagggcagagcggcttgggtaaatccac

SEQ ID NO: 652872 - DNA, 100 bp, Homo sapiens
gtggccagggtcagaaagtgcagaaggttatggtgcagcccatcccttcagactgtcacacaactgtaaggccagctaagccacctgtggtggacaggtc

SEQ ID NO: 652873 - DNA, 74 bp, Homo sapiens
tggggccaagggacaatggtcaccgtctcttcaggttccttcaatggtgccttagctgctgttcctgtccagga

SEQ ID NO: 652874 - DNA, 90 bp, Homo sapiens
gctgcagtcccaaaattaggggttccaatacatatgaagaggcagctgcctatattcaatgccagtttgaagatctgaacagaagaaaag

SEQ ID NO: 652875 - DNA, 100 bp, Homo sapiens
caacttgtccacgacaccggctacttctcagctttaccatccctggaggagacctggcagcaggtgaaaggtgtagcagtcactcggcctacacccacag

SEQ ID NO: 652876 - DNA, 75 bp, Homo sapiens
gctgaggcgggcgttttcttggatgaattgcttgctttggagtggattctgctgcgaaccggagaccatggccaa

SEQ ID NO: 652877 - DNA, 87 bp, Homo sapiens
actaaaagcattgtttctagaacatgagttgatattcactgatggactccaaagaatcattaactcctggtagagaagaaaacccca

SEQ ID NO: 652878 - DNA, 100 bp, Homo sapiens
ggacggcaccacctccaaatactttgtggccctcatggagcacagcaactgctcgtcggagcccggcttctgggcacaccctcctggggcccaggcgggc

SEQ ID NO: 652879 - DNA, 100 bp, Homo sapiens
agaagttctgatcaaacaccagcagctgtcagacctgcacaaggccctcttcaatgccatcatcccagatcaccatgcagaagccttctctcctcctcgc

SEQ ID NO: 652880 - DNA, 110 bp, Homo sapiens
acgcagtcagctgcgtgattcccgtgattgcgttacaagctttgtctccttcgacttggagtctttgtccaggacggtgtcgtgaaaactacccctaaaagccaaaatgg

SEQ ID NO: 652881 - DNA, 90 bp, Homo sapiens
gtctttgcagcgtagcccgagtcggtcagcgccggagaatccagcaactatcacaagaatactccttagccacttcaattgggataaaga

SEQ ID NO: 652882 - DNA, 83 bp, Homo sapiens
aagcatgctcagaccttcattgctctgtgtgccaccgatatcccgttgttacagcaccgtttgtagaagagggtgtcctgtcg

SEQ ID NO: 652883 - DNA, 120 bp, Homo sapiens
cagaagccttcctggctgatgcaaagtggattttgcacaactgcatcatttataatggggatctcatggaaccaagggattgacttgtggtggcatgagctcatgcaagaggcaggggat

SEQ ID NO: 652884 - DNA, 90 bp, Homo sapiens
ctgaaggggaagagcaagatgcagtcagtggagtgtgcagcaaacaacttcctccttgtaacctgagtaaagaggacctgttacagaacc

SEQ ID NO: 652885 - DNA, 100 bp, Homo sapiens
cctccatcactggcgtcaccatgggggctgtgctgggtgtcttctccctcgccagctgggtgaagaacgaggtggagaagctcccccgacagcagcggaa

SEQ ID NO: 652886 - DNA, 75 bp, Homo sapiens
cgcagtggtcgcttcttctccttgcttgacagagccaattcgctattaaaccagactcaacagccttacaggtat

SEQ ID NO: 652887 - DNA, 75 bp, Homo sapiens
tgggtatatacttttagcaataacactgataatttgtcatatagtgtttgatgagtgtcataaagccaaaaactt

SEQ ID NO: 652888 - DNA, 74 bp, Homo sapiens
ctacaggggaaaatattctgagaccagcatctcagacatgtcgaaaaagatgttttgatccctaaaataatgag

SEQ ID NO: 652889 - DNA, 50 bp, Homo sapiens
ccacaagcaggtccaaagagagaatgagacaaaaggacccagtgaaagga

SEQ ID NO: 652890 - DNA, 90 bp, Homo sapiens
aagatggcgaccgagacggtggagctccataagctaaaggtgttccatgtacccctggaggagagaaaatacaaggatatgaaccagttt

SEQ ID NO: 652891 - DNA, 87 bp, Homo sapiens
gaagagaagaagaagcaggatgaactgaaacggattgccagagaattggcagaaggtttaagtttttgaaactgaagtaggcctaca

SEQ ID NO: 652892 - DNA, 75 bp, Homo sapiens
cctactatccatttcaactacagatactttgaagtagaagaagctgatggtgttcacgactttggaaatcacaaa

SEQ ID NO: 652893 - DNA, 75 bp, Homo sapiens
agcaaggaagaaattgttcagttcttctcagtcagggactatgcggcgcaaacatctccttcgccaaaagcaggc

SEQ ID NO: 652894 - DNA, 82 bp, Homo sapiens
agcatggcatttcagtcactggtttgcagagtccaggcatccgtgtcattctggaccttactcccaactaccggggtgagaa

SEQ ID NO: 652895 - DNA, 76 bp, Homo sapiens
cgcccggccaagctatcttctcgctagcagattcccttggagtgttcttgttgtggatgaagctcacaggttgaaa

SEQ ID NO: 652896 - DNA, 75 bp, Homo sapiens
ctgcaccatgagcgtcccggccttcatcgacatcagtgaagaagatcaggttactatatcaacaactgataggag

SEQ ID NO: 652897 - DNA, 82 bp, Homo sapiens
tcttcggtggactccttcggcagtccacccaccgccgccgcctcccagacggccgaagccctgcagcccacgctacagccgg

SEQ ID NO: 652898 - DNA, 80 bp, Homo sapiens
accatttcagaggttcaccgccatcattggacccaatggctctggacttctgcacggacctggccgtctccagtgccaac

SEQ ID NO: 652899 - DNA, 75 bp, Homo sapiens
gctgaattagggagtgatatttaccttgatgggacatggatgaaattggaaatcatcattctcagcaaactatcg

SEQ ID NO: 652900 - DNA, 76 bp, Homo sapiens
cggatttgcttgttccagtaaagttcccgtgtggccggtggttagggaagggcatggatgatggaagcctggagcg

SEQ ID NO: 652901 - DNA, 100 bp, Homo sapiens
gtgggatcgatgtttcaatattggaagcgctttgatttacagcagctgcaggacccacatgttgactgttacacaatgtcatctatcaagagtaaactag

SEQ ID NO: 652902 - DNA, 100 bp, Homo sapiens
gcgagctgagtggttgtgtggtcgcgtctcggaaaccggtagcgcttgcagcatgggttcaggataagtttgaggtgctgaattacacaagcattcctat

SEQ ID NO: 652903 - DNA, 97 bp, Homo sapiens
cgagcatcctggcggcgccgggccactgggaggttaaaaagatcaagtggcatgagcagccttttggggaaaattggtgccaagaagcagaaaatga

SEQ ID NO: 652904 - DNA, 83 bp, Homo sapiens
gaaaagcaaatgggagatggacacatctgaggcaaagctaggggtctccttatgccagggaccaggttaccctaacagcagga

SEQ ID NO: 652905 - DNA, 74 bp, Homo sapiens
atctttaagatcactttggagacagatgaagatatggctacggaaacaggccgagaagaacgtggagaagaaaa

SEQ ID NO: 652906 - DNA, 83 bp, Homo sapiens
gcaattgtgatgagatattctgctgagtggaaggtacagcatcctgctgcaaaaatgattgtaatggcttctcatatgcaaga

SEQ ID NO: 652907 - DNA, 75 bp, Homo sapiens
ggcacgggggcctctcgtccgatgctcaggagagcttggaagggtactgctactataagctccaggttgacttct

SEQ ID NO: 652908 - DNA, 97 bp, Homo sapiens
ggccaggataacaccaccaactatggcggaagatggacagcatatgttcctgcaccctgtgaatgtgcgctgcctcgtgcgggagtacggcagcctg

SEQ ID NO: 652909 - DNA, 100 bp, Homo sapiens
actttttagaggcttgggtccaaatttggttggagttgcaccatcaagaccagaacttctgactcacagtaccactgaagttactcagccaagaacgaat

SEQ ID NO: 652910 - DNA, 100 bp, Homo sapiens
ggcctgggcatcccgcagctcctggaggccgtgctgaagctgctgcccctggacacctatgtggagagtccgaggtccagcaccccatcctcgcccactg

SEQ ID NO: 652911 - DNA, 75 bp, Homo sapiens
ctttcacatgtggacctccctgaagattttctaaggagcaaaggtgatgttgcgacaggtccagaacagagccat

SEQ ID NO: 652912 - DNA, 100 bp, Homo sapiens
gctaagaaggtggagaccggagaagctgtgaggttagagagtctacaaggagattgaacaggtggttggcccacatcgccctccagcgcttgatgaccga

SEQ ID NO: 652913 - DNA, 96 bp, Homo sapiens
cagggcagacgttagcgtgagtgatcactctcaatcccgggtgtgttccagagaacaagccttcagacatttgctatattgacgctgagctgtcag

SEQ ID NO: 652914 - DNA, 96 bp, Homo sapiens
ttgggctaccctgctgctctgccattgactccctgggaggatctttgacttcagcttctcctcggtccaacgagcgctcctccaagcggagccttg

SEQ ID NO: 652915 - DNA, 100 bp, Homo sapiens
tcaccgacaagcccttgagccagggtaactcaggaaggaaaggaatcctgaagtgggtaaaactgattgacaactttgaaggggaatatgactacgtgac

SEQ ID NO: 652916 - DNA, 98 bp, Homo sapiens
ataaaagatacaataggaaacgattctttgccttgccttatgtggaccattttctcagagttggcgtggacctggatgaaaatctgaaggaggacccc

SEQ ID NO: 652917 - DNA, 97 bp, Homo sapiens
ttctcgtcggattgcccatgcacttgttgcagaaacagccaagctcgccatggccaaacagctgcaggcccgaaggctagacgggatcgactacaac

SEQ ID NO: 652918 - DNA, 98 bp, Homo sapiens
cttacatggaaagcatgagactatatgctagagacgcagtaaaacgcaggactcttcccgcttggattcgcgaaggtcttgaaaaaatggaacgtgaa

SEQ ID NO: 652919 - DNA, 51 bp, Homo sapiens
cgcggccgccgcccccgcctcagagcactgcagtttcctcctgaaggctgg

SEQ ID NO: 652920 - DNA, 100 bp, Homo sapiens
ctccagcgccggcctcctcagtgcgaagaagctgcagccgcacctggccaaggttcgatatctcaatgcctatactggaatagtgctacttcgatgcaga

SEQ ID NO: 652921 - DNA, 89 bp, Homo sapiens
cctcggcggccccggcgccggcaaggggacccagtgcgcccgcatcgtcgagacccaacatgagtgaagtttcctgcaagaaacgggac

SEQ ID NO: 652922 - DNA, 80 bp, Homo sapiens
ttctgcgtggggacggccgcctagagtggttcagccacaaggaggtctccatccaatcccaccccaaggaggaaaactgg

SEQ ID NO: 652923 - DNA, 101 bp, Homo sapiens
ctttccgccctaatggaggtctccagtttcgccgccttgctccgaaccttcagctttttgggctttgagattgtgagaccggggcatccccttgtccccaa

SEQ ID NO: 652924 - DNA, 100 bp, Homo sapiens
tggtaaagaacgatcgtccagtggagggaagaaacccttttttcttggagccagcaataattatcacaattactgatgggagcaagttgactaccaccag

SEQ ID NO: 652925 - DNA, 75 bp, Homo sapiens
ccaaaattggaagtgacctcaaaaaacacgaagtcaagcatttaattgacggtctcactctctcacccagactgg

SEQ ID NO: 652926 - DNA, 100 bp, Homo sapiens
acttcatcaaacaggagtgtctcaacaacattggcgatgcctcctcgctcatccgagccaccattgatttgcctgaagacctggataatctccatttttg

SEQ ID NO: 652927 - DNA, 82 bp, Homo sapiens
catctttggcaggaaggcgaggcttccgcccggcacaggggctggtcagtgagaaggtcggaggggccgaggggaccaagct

SEQ ID NO: 652928 - DNA, 76 bp, Homo sapiens
cagaagctaatggacatatccattttgataatgtcagtgtggtatctctacaggaaaccacccctactcctaatcc

SEQ ID NO: 652929 - DNA, 101 bp, Homo sapiens
ccaccgccggggccgctgccgttgaggaggagacggaggagaccgacgttgttagggccgcgatgggcctcttggaacattggtgtgttcatctgcattcg

SEQ ID NO: 652930 - DNA, 51 bp, Homo sapiens
acagtttctctatactctgacagatttggtgcttccagatgtgagttatca

SEQ ID NO: 652931 - DNA, 75 bp, Homo sapiens
gccagcgctgctctccgccgcagcttcagcacctcggcccagtctcacagaaagttctccgctcccagacatggg

SEQ ID NO: 652932 - DNA, 75 bp, Homo sapiens
cccgcctgcagatgaccagtaccaaagagcagttgggatgaatgggttccggagagcagagtactcaaatacgtg

SEQ ID NO: 652933 - DNA, 75 bp, Homo sapiens
cttgccctcatcctggttctggaatcctcagttcaaggtcatcatcagatttgaaatatttaaagtggatacaaa

SEQ ID NO: 652934 - DNA, 51 bp, Homo sapiens
ctccttttccctctccctttccctaagatggaaatcctgtatgaatgtgga

SEQ ID NO: 652935 - DNA, 75 bp, Homo sapiens
actggctgcgctcctttctggccggagaatttcttgaggttggcaaaaagcagcctgctctggatgttctttatg

SEQ ID NO: 652936 - DNA, 83 bp, Homo sapiens
ctggattctctccttacttcctctgaaactcccccttcaagactgactggtcttgtaatagcctgcagctggtgttttgagaa

SEQ ID NO: 652937 - DNA, 100 bp, Homo sapiens
ctacgagctgtttctcatctttatactcttccaggatgatgatgctgaagctatccttgctgcagacttcgaaattggtcactttttacgtgagcgtata

SEQ ID NO: 652938 - DNA, 100 bp, Homo sapiens
cagcagaaactgcggcttcagagaatccagatggagagagaaaggattcgaatgcgccaagaggagctcatgaggcagtggtcatatgcattagaaaaac

SEQ ID NO: 652939 - DNA, 74 bp, Homo sapiens
tcatctcagcctccaaaagtgctggcattacaggtctgctgtgcacgtgctgcagaactccatagacagcctca

SEQ ID NO: 652940 - DNA, 75 bp, Homo sapiens
gccgcccggccaagctatcttctcgctagcaggtctcggcgcggaagatggccggcggcgtggacggccccatcg

SEQ ID NO: 652941 - DNA, 74 bp, Homo sapiens
cggaaagctgcccagccaccagcaaccccccaggatggaatccgacgtggtaggcccagagcagatactgtccg

SEQ ID NO: 652942 - DNA, 98 bp, Homo sapiens
ctcagtttgtgcaggacaccgacatggaacagggactcactggggctctagaggacaaaatcccagtccttggcacaaactcaggaaatggaagccgg

SEQ ID NO: 652943 - DNA, 51 bp, Homo sapiens
agcagatccttgcatttgtccaaggctgtgctactcatggacgccgaaaag

SEQ ID NO: 652944 - DNA, 98 bp, Homo sapiens
gtcggactcccgcggcgggaggagcctgttcccctgaggtcatggaaaatggaagatttgcaaaatacaaatattttacccatgtcatgatcaataag

SEQ ID NO: 652945 - DNA, 75 bp, Homo sapiens
gagggtgtcctgttacttccaagtcatcaccagaaagccaattgcatgatttctggcgtttggattactgggaag

SEQ ID NO: 652946 - DNA, 73 bp, Homo sapiens
cgtcaccttcgacctgctcttcatctccctgctctggatcatcgaactgaatagagaaaattcatgaaccctt

SEQ ID NO: 652947 - DNA, 50 bp, Homo sapiens
ggattcagaccgcaaatatgaagaggtggagcccagtgacaccatcgaaa

SEQ ID NO: 652948 - DNA, 100 bp, Homo sapiens
ttggtttggctttggctacacagcactggttgtttctggtgggatcgttggctatgtaaaaacaggattaacacagattcctcagatccagaagactgaa

SEQ ID NO: 652949 - DNA, 50 bp, Homo sapiens
gttccatctatgttggcaattttttggtgttgagccagacttgaccaggg

SEQ ID NO: 652950 - DNA, 100 bp, Homo sapiens
tgttgtatctggaattggtgggttcttggtctcactgacttcaagaatgaagccgcagaccctcgtgatgtggacgagtgtgcaacagattcccaccagt

SEQ ID NO: 652951 - DNA, 75 bp, Homo sapiens
acctcctcggcgtgagcgacagcggcaaaggaagacatgtaaggaatttgcataagacagttatgcaaaatggag

SEQ ID NO: 652952 - DNA, 73 bp, Homo sapiens
gggaggacgccgggacacctggaagccgagaaatgacacgatgaggcgagtggtacgacagagcaagtttcgg

SEQ ID NO: 652953 - DNA, 100 bp, Homo sapiens
cgcatccccgcggacgccacagcgctgccacggcatatgcctccaaggacggggtcctcactgaggccatgatggacgcctgtgtgcaagatgctgtcca

SEQ ID NO: 652954 - DNA, 75 bp, Homo sapiens
acgtgaagtcattggctgaagctgatgaacaggaagttgtggctgaggttcagctgaagtttttgagtcccagag

SEQ ID NO: 652955 - DNA, 100 bp, Homo sapiens
accactcaaatatccaggtgtctgagcctgactggctcatggagaaagcctacctaagaatgaagccgggacccggcagaatggctcctgtgaagaaggg

SEQ ID NO: 652956 - DNA, 100 bp, Homo sapiens
cggccgctaccgctcaggtgctgcaggcacagcccgagaaaccgcagcactacactcgtttccacttgttccatgtgacacagaccagcctcaagacaag

SEQ ID NO: 652957 - DNA, 75 bp, Homo sapiens
ctactgtgtggggagttggcaacgcgacacagagccaggctttatcctgtggataaacgcagagtgaacgagttt

SEQ ID NO: 652958 - DNA, 82 bp, Homo sapiens
tgcaaaacttaatttcatccacaaatcaaatctggatggaacaaatcggaagaagttgcctatgaagaaagggcctgtgaag

SEQ ID NO: 652959 - DNA, 100 bp, Homo sapiens
ctcaggttacttcttcctcaacaccagcaccgcagatgttgtcaaggtggcctaccaggaggccaggggtgtcgccatgaaactggcgatggaatatgag

SEQ ID NO: 652960 - DNA, 75 bp, Homo sapiens
acattgactacgaggaatggcggcggctgccgcaggacctgcagcatcccagagggcatttgatgtagaactact

SEQ ID NO: 652961 - DNA, 95 bp, Homo sapiens
agcgagctcaaggcggcgcggcggccactgggcgcagcacccaggcaccatgactcctgtgaggatgcagcactccctggcaggtcagacctatg

SEQ ID NO: 652962 - DNA, 100 bp, Homo sapiens
ccaacattatgcgaagaactttacgtggacatcccatttaattctcagaagccgatcacaaggttgggaaggagaaaatgctcaaggtgaagattgtgaa

SEQ ID NO: 652963 - DNA, 82 bp, Homo sapiens
cacaggcacgactagaagcattgctagaagcagcaggagctcctccattcctgagaccacctggaatgccaggactccgagg

SEQ ID NO: 652964 - DNA, 75 bp, Homo sapiens
ccgattcctcctccttggtcgccgcgtccttggctggcgtaacatggagaaggcgactctgccgtcggtgacgct

SEQ ID NO: 652965 - DNA, 100 bp, Homo sapiens
ctttaagaaacatcagcagctgaaaatccatcagtgccagcataccaatgaacctctattcaaatgcagaaggaattacttgacacagaactggatttat

SEQ ID NO: 652966 - DNA, 50 bp, Homo sapiens
gcgctgccatggagcccagcagcaagagcagcccgacggccatggaggct

SEQ ID NO: 652967 - DNA, 73 bp, Homo sapiens
tgggttggacctttacctgtggaggcaacactggccaagaagaggaaaggatgtcacatgtacttcagtttga

SEQ ID NO: 652968 - DNA, 74 bp, Homo sapiens
aagcccgacggcaccctcgtctccttcaccgccgacttcaagaagaacagctttgctgagccatcaaggtctaa

SEQ ID NO: 652969 - DNA, 82 bp, Homo sapiens
gatgagcctgcagagcgcgcagtacctccggtgatgtgtccaatctagatcccaacttctcatttgaaggcaccaaactgga

SEQ ID NO: 652970 - DNA, 80 bp, Homo sapiens
tgcagattttactttatgtgagaaaatctacaatttcttcgagacactcatataaagggaactcaaagttggcattcccg

SEQ ID NO: 652971 - DNA, 75 bp, Homo sapiens
ttaaaacatttcagggcaagccaattatgtccacagacaaacgaatttaaaggagcaaccgaggaggcacctgcg

SEQ ID NO: 652972 - DNA, 90 bp, Homo sapiens
ccagcaataattatcacaattactgatgggagcaagttgactaccaccagtggagtccaggatgagggctggttgatatgtgaagagcca

SEQ ID NO: 652973 - DNA, 120 bp, Homo sapiens
gttttcttatttagccggagtgagaagcaagaaggccctggacacagcaatatctctgggctttcacagccccattgacaaaccttcagattctctcagtatagggaacggtgataattc

SEQ ID NO: 652974 - DNA, 102 bp, Homo sapiens
ccgaccgccctcttctgtcttgcttagaccatgctcagcctccaagcagccttgtcatcgacaaagaatctgaagtttacaagatgcttcaggagaaacagg

SEQ ID NO: 652975 - DNA, 100 bp, Homo sapiens
cctgaacggagtgtgcgacggattgggagtgtgctcatgggagcttagaagatcccaaaagtataacccatcataaattaatccacgctgcctcagagag

SEQ ID NO: 652976 - DNA, 100 bp, Homo sapiens
agattcgcagtggtcgcttcttctccttgccgtcatggaaatgatgagtcagaagattcagcagctcacagccctgggggcagctcaggctactgctaag

SEQ ID NO: 652977 - DNA, 83 bp, Homo sapiens
caacgccccggtggagaagctgagacaatgcagatcttcgtgaagactctgactggtaagaccatcaccctcgaggttgagcc

SEQ ID NO: 652978 - DNA, 74 bp, Homo sapiens
ctgtccttcgagcggctgttgcaggacccgctgggcctggcttacttcactattatgtttgagaccttcaacac

SEQ ID NO: 652979 - DNA, 50 bp, Homo sapiens
ccgtggctcacaagatgaaagagcacgatttgaactcagaggatcaaaaa

SEQ ID NO: 652980 - DNA, 132 bp, Homo sapiens
cggagtctgggggttcgcgcccgccgacccgcgccctgctccctctcagcacctgggcggacgatatgagggaaggcaccattggagatatggctatcctgggtataacagaaagttttcaagtgaagcgac

SEQ ID NO: 652981 - DNA, 88 bp, Homo sapiens
aaaatgtcttgtattagagtcacaattgatcctgcctttcttcctgacgtggagtgtggtgaactcagtgcattgggccaatggttcg

SEQ ID NO: 652982 - DNA, 50 bp, Homo sapiens
gagtcttcggagcgaccccggcagtgttctcaggcgctgtggtctcacct

SEQ ID NO: 652983 - DNA, 51 bp, Homo sapiens
cggggcatccagcaactttatggtaaatcagtggcacagtatactgcctcc

SEQ ID NO: 652984 - DNA, 75 bp, Homo sapiens
gggcgccgcccgcgcccgggaccgacccctctgctcgcggccgcgcctttgagggcttccagggcagcgattgag

SEQ ID NO: 652985 - DNA, 101 bp, Homo sapiens
gagagaggcaccgggatcgtgaccgagaccgtgaccgagagcgtgaccgagagcgcgaatatcgtcatcgttagaagatatctcttccaaacacatgatga

SEQ ID NO: 652986 - DNA, 74 bp, Homo sapiens
ctgaagtcggtgtttggagaaaaggactcagagtccctgcaggaagcatcacccaggctggcagatcatggtag

SEQ ID NO: 652987 - DNA, 75 bp, Homo sapiens
cccggagcaagcggagctcccccaagagccggaaagctggagagatttaccagcatgagaattaagaaggagaag

SEQ ID NO: 652988 - DNA, 100 bp, Homo sapiens
cccgactgcaactgctggattgctgcaaggctgagggacgagaacgaggctgtattcatcaccaaagaaaaaacttacaccaatgcagaaatcggttagt

SEQ ID NO: 652989 - DNA, 93 bp, Homo sapiens
actggggccagggaaccctggtcaccgtctcctcaggtgtggacactgccagcggctgcagccgacttggaatgacctgggagacaaatacaa

SEQ ID NO: 652990 - DNA, 82 bp, Homo sapiens
agccaggcggggacaggacggcggggcgagccagcttcctgcctgacacagctcacttcaagaagtgcacaatgtcagaacg

SEQ ID NO: 652991 - DNA, 73 bp, Homo sapiens
tcccagagtcctgggattacaggaagacagagatgtcaatgaccccatgcccaaccgaggcggcaatggacta

SEQ ID NO: 652992 - DNA, 73 bp, Homo sapiens
tcactcaccgcgtggacacgatcggaatcctatccatcttcttcaccgatatggtttgtggattctgaagacc

SEQ ID NO: 652993 - DNA, 83 bp, Homo sapiens
ccgcgctatgccccgccccctccccagccccagacacggaccccgcaggccgcttacaaacacgcagatggcaagaagattga

SEQ ID NO: 652994 - DNA, 100 bp, Homo sapiens
gattaagtttaagacttcgcgagaacagaatttcttttggcacctcctctccgcgcgttcttgggggcccagtcatatatgcacagttagaccactccgg

SEQ ID NO: 652995 - DNA, 74 bp, Homo sapiens
tgatgctgtggaacttgcaaatcgaaggttattaacacggggatcaaagtctggtgtagaaataacagcggtga

SEQ ID NO: 652996 - DNA, 51 bp, Homo sapiens
ttcctgtacagcctgcagaactatctacggaatccagaggcagcattgtct

SEQ ID NO: 652997 - DNA, 73 bp, Homo sapiens
ccaagcattggtatctacggcctggacttctatgtggtacgcagagatgcctaaggcggagaagaacgctgtc

SEQ ID NO: 652998 - DNA, 75 bp, Homo sapiens
gcgccgccgccggacgtcggcaacggagaaggctctgaagagcggccattcctcagattcgaagctgaacacatc

SEQ ID NO: 652999 - DNA, 148 bp, Homo sapiens
gccgctatggatgatcgagaggatctggtgtaccaggcgaagctggccgagcaggctgagcgatacgacgagagacaagagagacacctccaacttcgacaaagagttcaccagacagcctgtggaactgacccccactgataaactc

SEQ ID NO: 653000 - DNA, 75 bp, Homo sapiens
gacaacttcgcccgggacttcatgtatatcctttcgggctctgatgacttcaacctgtacatgtggagaattcct

SEQ ID NO: 653001 - DNA, 132 bp, Homo sapiens
ttcaacattaaattagttcaggctcccttggatgcagatggagacaatgtcttacaggcaacagcattattgagaaaagcccttacagaagagtgtggccgtaggtcagctattcacagtagtgaatcatct

SEQ ID NO: 653002 - DNA, 123 bp, Homo sapiens
gtcatcgaaggctaccgggcccagcacagccagcaccgcacgccctgcaagggaggtgtcatggagaaactccagctgggcccagagattctgcagcgggaaaatccaaggcttatttatgcc

SEQ ID NO: 653003 - DNA, 82 bp, Homo sapiens
gtttctacaaataaaagatgggtggattattttctcgatggaggcatccggtgaaagacagagatcacatttcaactagatt

SEQ ID NO: 653004 - DNA, 89 bp, Homo sapiens
ccccgactatgttcttgtcgcctccgaccgggtggccgccagcaatattgtccagatgaaggacgattgttcagagattttcaatgatg

SEQ ID NO: 653005 - DNA, 100 bp, Homo sapiens
agaagtaccacaacagggacacctggttccagctgcagcacgtggacgctgactcggaagtgcaggcacaaatatttaaacatggaaaacgtgaagactg

SEQ ID NO: 653006 - DNA, 97 bp, Homo sapiens
aggcggagatccgctacgagggcatcctctacaccatcgacaccgaaaactccaccgtagcccttgccaaagaacacatacaccaatgcggataaat

SEQ ID NO: 653007 - DNA, 102 bp, Homo sapiens
gaatgtaatacggaggcctctgaggaaggagtacggaggccgagaaggagccggcatttgatgagcgaaccgggaaaggcatcatggcagaacaggatgtgg

SEQ ID NO: 653008 - DNA, 74 bp, Homo sapiens
cgtgtgtcggtcgcctagtctggagaactagtcctcgactcacggtatggcgtgagtcccgagaacattatcct

SEQ ID NO: 653009 - DNA, 75 bp, Homo sapiens
atgtgaggcgacaagcaacaacaatcatagctggtcggattgtttgtgctgaacgaactgtcctcttgcttcaga

SEQ ID NO: 653010 - DNA, 75 bp, Homo sapiens
ccggaagactctgcagaaggagctgtgagtgagatcattggccgagacctgagtggcttccctgcacctcctgga

SEQ ID NO: 653011 - DNA, 50 bp, Homo sapiens
accgccctggccatctaccatgtggcctccaggcccaaggtcagcatccc

SEQ ID NO: 653012 - DNA, 75 bp, Homo sapiens
cctcttcgatgtgcgagactttggaaaggtggagtttcccgaagcccggatttatgaggagaccctgaacatttt

SEQ ID NO: 653013 - DNA, 82 bp, Homo sapiens
ctcatcggcactctgaacgcggccaaggtgccggccgacaccgattcctggtcgggtggcttccagtggtcttcagtctgtc

SEQ ID NO: 653014 - DNA, 96 bp, Homo sapiens
ggagaagccggaggaggacaacgactaccaccgcagcgacgagcaggtgtcatggagaaactccagctgggcccagagattctgcagcgggaaaat

SEQ ID NO: 653015 - DNA, 90 bp, Homo sapiens
gttggacagtgatgtgaagaggttcagctgtcctaatcctcactgccgaaaggccttctggcggccgcccctggtttctcctggggggtg

SEQ ID NO: 653016 - DNA, 50 bp, Homo sapiens
ctggaggagctgtaccgcggcatgggtacagaagtgcaggtggatgacat

SEQ ID NO: 653017 - DNA, 75 bp, Homo sapiens
cccgagagcctcactgcactcgtgtactcagctgaggaaggtgagtgaagatggcagagaggacgtgaccagcac

SEQ ID NO: 653018 - DNA, 74 bp, Homo sapiens
cggcgggcccggcggccgcagcgaggagaagatctcggactcggaggtctcggcgcggaagatggccggcggcg

SEQ ID NO: 653019 - DNA, 100 bp, Homo sapiens
cttcgtattcaaagtgggaaaccgcttccagacggcgcgtttctatcgggacgtcctggggatgaagcaggttcaggagaagtggcacctggtggaggac

SEQ ID NO: 653020 - DNA, 50 bp, Homo sapiens
gtaaccctcactggagaatccagagatattctcccaggagtacatcaacc

SEQ ID NO: 653021 - DNA, 100 bp, Homo sapiens
cgagccttggcggcggacgtgcagtgacaaagcataaatcatggacaccagagaataaggtggacctcaggaatccggaaaagactgagaagcttacatt

SEQ ID NO: 653022 - DNA, 50 bp, Homo sapiens
ccgggctcccagctgcccacctcatagggcgtgatggtgggcatgggtca

SEQ ID NO: 653023 - DNA, 100 bp, Homo sapiens
cacctgtccccactgtccccgggttttcccttgggccagctccctacagaggcacatgctcacacacactgacctgatggccaaaagaaaggaagaaaat

SEQ ID NO: 653024 - DNA, 100 bp, Homo sapiens
caaaaacagcaagcgcagagccaaacagccaggcagcaccagaaagtttgatgcaggcattggaagacttagattatctggcagcactggataatgatgg

SEQ ID NO: 653025 - DNA, 100 bp, Homo sapiens
ggaagatggcgctggccggatggaaatcctaatgacagtctccaaattcgcctccatctgtaccatgagtcattcaggagagcaggaaagaaaaggccat

SEQ ID NO: 653026 - DNA, 58 bp, Homo sapiens
aaaaatgtgagagagaagttgtcagcaggagagggcaagtgtccagagaatggctggg

SEQ ID NO: 653027 - DNA, 50 bp, Homo sapiens
ctcaggacttgagtaacagcaacatggtccagacatcatctggtctccct

SEQ ID NO: 653028 - DNA, 83 bp, Homo sapiens
tacgagacgaggttcctgtgcaactcttcacagaacctgagccagcagaagagtacactgagcaaagtgaagttgaatcaaca

SEQ ID NO: 653029 - DNA, 101 bp, Homo sapiens
gttgaaacaacatttagttcagaatccagtcagactctggcaacttttaggtggcctggctgctgtgatctacacggatgccctgcagacgctgatcatgc

SEQ ID NO: 653030 - DNA, 90 bp, Homo sapiens
aggattccaagtaactcttatttggtacctgcacatgttgttctttgtcagtgctgtcaagtgtgtgccagggtgatccatggtcacttt

SEQ ID NO: 653031 - DNA, 90 bp, Homo sapiens
tcagacagcatatttgagtcatttccttcgtacccacagtgcttcatgagaggaatttgctcgccctgatacatcgaatgatagagtttg

SEQ ID NO: 653032 - DNA, 80 bp, Homo sapiens
gaagcagccgatccagcctgcggagcctgtggggcagagcactggcctcaggggaagctagtatggaggatctgcaccca

SEQ ID NO: 653033 - DNA, 80 bp, Homo sapiens
actggcccggcaccgagttctctctgtgttctaagaacggaagcatctgggctggatggaatttagcatcaagcagagtc

SEQ ID NO: 653034 - DNA, 82 bp, Homo sapiens
gcaatttaaagatcctctccaagtttgatggtatccatgtggtgagtggatctcttgatacatcaatccgtgtttgggatgt

SEQ ID NO: 653035 - DNA, 82 bp, Homo sapiens
tttgaagtctgtgtcaaacatccatatcataagtggaattttggagatattcaaagaagtgagttgctgaatgagcttatgg

SEQ ID NO: 653036 - DNA, 100 bp, Homo sapiens
tgagcggcgcgggctccagactcgccgtggtcaagttcaccatgagaggttccaatttgagccgctgtgaaaaaggcctccaccagcctctcaccagaag

SEQ ID NO: 653037 - DNA, 74 bp, Homo sapiens
atgcattggtcgtcttattccagtgtctgatataaatgacaaaggaatggtctggaacacggacctggtggaga

SEQ ID NO: 653038 - DNA, 73 bp, Homo sapiens
tgccctgtaaccgccatgcagaagaaatctggctatcatagtgctggagaatctggtaaaagcaccattgtga

SEQ ID NO: 653039 - DNA, 75 bp, Homo sapiens
aaatcaacctgctcaccggggagtctgatacacagggtggcccagttgaaatccttcccttcctctaccttggaa

SEQ ID NO: 653040 - DNA, 96 bp, Homo sapiens
agcctaacaagatggaagcaggtttaaaattttacataagaagttacctttttcagatgatattggtgcccatatgaatgtaggaagaacttataa

SEQ ID NO: 653041 - DNA, 50 bp, Homo sapiens
cgcacacagcaggatttaagagggtgatctggaccctctggcatctctca

SEQ ID NO: 653042 - DNA, 120 bp, Homo sapiens
acaacattgccgcagcattactccctttgaccagtgctttctatagggttgcaattgtagctcaagacttggcagcattccatactgcctcatcagaaatggggcaccagcagcatagcc

SEQ ID NO: 653043 - DNA, 50 bp, Homo sapiens
gctctcgaggctgctaagagactaatccagagacaacaagttcagcaaga

SEQ ID NO: 653044 - DNA, 75 bp, Homo sapiens
cgcccctcctggaagaaggaagaggggtttgtgaccatgactctggaaagcctagaggaaatacaggatgtcagc

SEQ ID NO: 653045 - DNA, 83 bp, Homo sapiens
cagacagctcaggctgcccagatggtggctcccggagtccagggggatatgagactttctactcggaatatcctgagtgttgc

SEQ ID NO: 653046 - DNA, 130 bp, Homo sapiens
gtggagcggaagaacagcctgaagaagggctccctcgtgaagaacctgaaggacacactagtatgagcccagaggacctggtcggcccttgtaccaaagaagaatctcatctagctcagttcaaccttgt

SEQ ID NO: 653047 - DNA, 49 bp, Homo sapiens
cttggagacggacttgcttccggaacgactgaagctggtgactgttttg

SEQ ID NO: 653048 - DNA, 100 bp, Homo sapiens
cggagcggccggtactgttgaaagcgacaagtggaggcgccgctctagcggccgggactctgaactatggcgatcctgataacttaagtgactctctctt

SEQ ID NO: 653049 - DNA, 96 bp, Homo sapiens
ttcctggaccgtgagagcatcaagctcgtgtccatcgatctgaaaaccatgagtgaacgcctcaagaataggtactacgtgtctaagaaattattc

SEQ ID NO: 653050 - DNA, 100 bp, Homo sapiens
gacgtgctggtgtctgagtggatggggacctgcctgctggttcgagaacttgtcttggacaattgcaaatcaaatgatggaaaaattgagggcttaacag

SEQ ID NO: 653051 - DNA, 100 bp, Homo sapiens
cctggaagcagtaacatgcaaaaataagcgggttttgaaaacaaaaaaaagaaggagtggaagagggggccaggatccaggcctccatccccacagaagt

SEQ ID NO: 653052 - DNA, 84 bp, Homo sapiens
gtccgttcgagctctgactgcagacctaccaaaacaggtcgtaatctgaaggagtggctgagggagcaattttgtgatcatccg

SEQ ID NO: 653053 - DNA, 101 bp, Homo sapiens
atcaaatggcacttcattggccacctacagaaacaaaatgtcaacaaattgatggggtttgtaccagttgctggagccccgaatgattgttcgttgcagga

SEQ ID NO: 653054 - DNA, 75 bp, Homo sapiens
ggttcacagaccgagttagcaattgtcaccgcagactttgttaaggactcagaattcatgattgaagaaatgcag

SEQ ID NO: 653055 - DNA, 75 bp, Homo sapiens
acgcagtggtggccctggagcagtatgccagcaaggtctcacagatttcaagcctggctactggattggtgtccg

SEQ ID NO: 653056 - DNA, 75 bp, Homo sapiens
aatcgcatcatcggtgccaaggaccacgcatccatccagatgaacgtggccgagctggagaatgctggaggagac

SEQ ID NO: 653057 - DNA, 86 bp, Homo sapiens
gaggggattttgtcagcttgtcgtcaagagaaagatgctggtttcgagttttggagatccttgttttttatggaacacagttctgt

SEQ ID NO: 653058 - DNA, 100 bp, Homo sapiens
ctgtccaaaggcctggcccggcggctcagccccatcatgctgggtgtgggagtatttccctcacaggatcctgctcagcccagaatgcctccttggattt

SEQ ID NO: 653059 - DNA, 50 bp, Homo sapiens
gttcaaactcaacaatattatccccatgctgcaataggatctgtggcttt

SEQ ID NO: 653060 - DNA, 101 bp, Homo sapiens
tgtacagataatactggtgattctgatgatagtgcttcaggaattgaagacgtatcggacgatttaaatgtcaagccctccaacatcctagtcaactcccg

SEQ ID NO: 653061 - DNA, 82 bp, Homo sapiens
tgcagagaatggagcccaaacagatgttctgggtgcgagcccggggctatattgacaatgcagatcttcgtgaagactctga

SEQ ID NO: 653062 - DNA, 100 bp, Homo sapiens
atggcgctgcaagtggagctggtacccaccggggagatcatccgcgtggttcatccccacaggccctgcaagcttgaattacatgaacgacagccttcgc

SEQ ID NO: 653063 - DNA, 100 bp, Homo sapiens
aacagggcagacgttagcgtgagtgatcactctcaatcccggggagttgaccacatttggccatttcccagaagggccccaccccaagggtgagtggcca

SEQ ID NO: 653064 - DNA, 50 bp, Homo sapiens
gcagtgctcaaactcaccgaccaggttgtctgcattcaaaagagcattct

SEQ ID NO: 653065 - DNA, 75 bp, Homo sapiens
ctcagagtcggtcggggaaggccacccagcggtcttgcgagtggctggttccctgcagaagagcacagaagtgat

SEQ ID NO: 653066 - DNA, 83 bp, Homo sapiens
ataaattgcaagcattctatccaaatggtttgaaaaataacaggtcagcctcttcccagatttcttgacatccttggaaacca

SEQ ID NO: 653067 - DNA, 98 bp, Homo sapiens
cgatgtgtgagaagaccaccatcaacaatgagtacaactaccgctgctggaccacaaaccgctgccagaaaaatgcctttgaagatgagaaaccccca

SEQ ID NO: 653068 - DNA, 75 bp, Homo sapiens
accaggaggccaggggtgtcgccatggcttctccagggaaagtgaccgaggcagtgaaagaggccattgacgcag

SEQ ID NO: 653069 - DNA, 99 bp, Homo sapiens
tgaactttctgctgtcttgggtgcattggagccttgccttgctgctctacctccaccatgccaagggtgataaaagaaaatgtggctgaagttacccga

SEQ ID NO: 653070 - DNA, 75 bp, Homo sapiens
aagtcaggggccacctgtggacgctcagacacctattaccagaggtggaaaaggagggagctgctctcaggctgc

SEQ ID NO: 653071 - DNA, 83 bp, Homo sapiens
gtggtgattccctgcggtgtgcaagtccgactggaacagagatgccctgtatccaagcccaatatgggacaccagcaccgagt

SEQ ID NO: 653072 - DNA, 100 bp, Homo sapiens
actagaagaaaagtcacgccaatgtggtatgaagctgcagagtttgttgcagatgaagaacttcctgattacattatggtgatggtggccaacaagaaaa

SEQ ID NO: 653073 - DNA, 90 bp, Homo sapiens
gactcaagtctggacctgggacccactgcagggcagagcggcttgggtaaatccaccttaatcaacaccctcttcaaatccaaaatcagc

SEQ ID NO: 653074 - DNA, 100 bp, Homo sapiens
gatttatcaaatcgagtcactgtcaagatggtctgacaccactgcactgtggagcaaggagtggccacgagcaggtggtagaaatgttgcttgatcgagc

SEQ ID NO: 653075 - DNA, 100 bp, Homo sapiens
aacattcctgccttcttcttatgcaagacggctgtgctcaccgccacggatgataccatcggggaccttaagaagctgattgcagcccaaactggtaccc

SEQ ID NO: 653076 - DNA, 87 bp, Homo sapiens
tccgggagagtgagagctccccaggggagttctctgtgtctgtgaaggactggtgattgcagctggaagtgcccatgaccgagctgg

SEQ ID NO: 653077 - DNA, 141 bp, Homo sapiens
tcaacatcgactggatgatatgaaccaaagatggaatgacttaaaagcaaaatctgctagcatcaggatgtgatcttcgtggtggaaagctaaattttaaaaccaccccaatggatgcagacagtgatgttgcattggaca

SEQ ID NO: 653078 - DNA, 100 bp, Homo sapiens
acctgaaactagtttccttcagcaaactatgtacaagttacagtcatagcagtacccgagatggaagacgcgacagctcggcttattccaggggtgtgtt

SEQ ID NO: 653079 - DNA, 75 bp, Homo sapiens
ccggtgcagaggacggtttgtctgcccagtaatcctgttcaagggcaaggtgagcgagtgctgtgctttcatggg

SEQ ID NO: 653080 - DNA, 85 bp, Homo sapiens
gcaccgcggcttaaatgatgtattttgtgatcgcagcgatgaaagagtccggcagcgtcttctcttgagggagcaatttggagaa

SEQ ID NO: 653081 - DNA, 75 bp, Homo sapiens
gaaggagctaagagacatgggaatcactctgcatctatatgttgatgatgtgatcagccgcattgacaggatgtt

SEQ ID NO: 653082 - DNA, 74 bp, Homo sapiens
aaaaggaaatgcatctttatgtcagaaacacaaagcagcccaaccaaaggtgctctggtgctactgattgctca

SEQ ID NO: 653083 - DNA, 51 bp, Homo sapiens
ggagaacaagcccatcgtcaccttgtctttggtgcaacactaacaaggctt

SEQ ID NO: 653084 - DNA, 98 bp, Homo sapiens
gccaaagatatagatctcctcgcaaaaaatgccaaaacttataatgagcctggctctcaagtattcaaggcaggaagttatgttcgtgatgatgcagt

SEQ ID NO: 653085 - DNA, 77 bp, Homo sapiens
tcggggtggcagttcccgttaaccttagccacaaagtcaaaggtgacctcaaagcagaagctctgaattcacctctc

SEQ ID NO: 653086 - DNA, 85 bp, Homo sapiens
acagcggaatttatatagggatgtgatgttagagaactacagaaacttggtcttccttggtattgttgtctctaagccagacctg

SEQ ID NO: 653087 - DNA, 50 bp, Homo sapiens
tggcaatggaacaggcttgagaaacagatggagtgaaggtacctgagcgc

SEQ ID NO: 653088 - DNA, 100 bp, Homo sapiens
gtgaagctggaacagccagaattggacccgaaaccatgcctcactgtcctaggcaagctaaaccaggtggacaggtgaaatgtcagtatatctctgctgt

SEQ ID NO: 653089 - DNA, 82 bp, Homo sapiens
gaatattggggggctcggctgcagacttggccaaatggacgggactattaaggccatgtagggcaggaccgggtggactttg

SEQ ID NO: 653090 - DNA, 78 bp, Homo sapiens
acgcctgccccagggaaccgcacaggttgggcccgaaggcatcctgcagaacggggctgtggacgacagtgtagccaa

SEQ ID NO: 653091 - DNA, 98 bp, Homo sapiens
cttctcatatccatttcttgttcttcagatgttgcttgtgactcatattctcagctgggagaaccaccacagacgacgagctagaagagatgctggag

SEQ ID NO: 653092 - DNA, 98 bp, Homo sapiens
aagatgcagttttttgatgctgaggagctcctggtcgatgaagaggatgatgtttttggtgaagttcacagaagaaaagcttggccaggctgagaaga

SEQ ID NO: 653093 - DNA, 90 bp, Homo sapiens
ctctttttgccaccaatcccttcgatcaggatgttggatgttccctttctacagctgctggaggactggactgctactactactcctggc

SEQ ID NO: 653094 - DNA, 74 bp, Homo sapiens
acggaccccgggagcccagacgtgctttgcaagatatcaccttgtcacagcagaccccctccacttggaaggac

SEQ ID NO: 653095 - DNA, 90 bp, Homo sapiens
gcagctttgccaccggcttatggagcatggcatcatccagcatggtgctggagaatctggtaaaagcaccattgtgaagcagatgaggat

SEQ ID NO: 653096 - DNA, 83 bp, Homo sapiens
gccaccgctgcagcgcgggccccgcagaggaaggaagccggcgggcggggttctgcggggagtgtctccagccctgcctgcag

SEQ ID NO: 653097 - DNA, 100 bp, Homo sapiens
agaaagatggcatatcagatatgcaagtctgtgaattagttcacccagggcatgatcttacctacaatgaatggagagtcagtagacccagtggggcagc

SEQ ID NO: 653098 - DNA, 75 bp, Homo sapiens
cagccaagatcttggcaaagcttctccctcagtatttagaccagaatgaaccaacattttatacatctgatggtg

SEQ ID NO: 653099 - DNA, 89 bp, Homo sapiens
ccagacagatcgctgtcaaaaccctagctgaactagatgcagagcacgcccagaaggtcctggaaatggagcacacccagcaaatgaag

SEQ ID NO: 653100 - DNA, 82 bp, Homo sapiens
aaaactgtcaggagcatacaagaggctccagggttacacatcattttggaatgactgtatatcatctggattacgtggctgt

SEQ ID NO: 653101 - DNA, 83 bp, Homo sapiens
ttcaggttcagtgacatcagaaaatgtgtccagagattacaagaatgctgtcagaagggtatctcagtggacttgagtactgg

SEQ ID NO: 653102 - DNA, 74 bp, Homo sapiens
aagcagtctaaacctgtgaccacccctgaagaaattgcacagagctccttaataagcatttatagtcagttttt

SEQ ID NO: 653103 - DNA, 100 bp, Homo sapiens
gaagcaccgagactctagaagaaatgccctccgggtcacaggataagggtaagacgtgaccttttgaggtgactataactgaagattgctttacagaagc

SEQ ID NO: 653104 - DNA, 83 bp, Homo sapiens
gaagaaatttgtgtggagcgaggaaaggtgtgctgtgcctgaggccagggtggagccagccatcctgagacgtccgtacagcc

SEQ ID NO: 653105 - DNA, 75 bp, Homo sapiens
cgcggtgcgcaccgtttgcgacttggtaagaatgattgatgttggctgatattggagtgctcattcacatgaagt

SEQ ID NO: 653106 - DNA, 83 bp, Homo sapiens
gagtacaacgaggtcaacgtcaccctggacctgggccaggagccttcacgtaaatgggtccagtcatgcctcccagtaagaag

SEQ ID NO: 653107 - DNA, 100 bp, Homo sapiens
cgatgccaatgatgaggcgcccaggttcatccaggagccttatgttgccctggttcccgagcctaaatgcgatggccaggtattactgacacaagtgtgg

SEQ ID NO: 653108 - DNA, 100 bp, Homo sapiens
caaggataagggcgacagcaacagctctgccggctggaagattgattataccggaacagagccttccagtccctgtaataaatgtttatctccggatgtg

SEQ ID NO: 653109 - DNA, 100 bp, Homo sapiens
cgagcgaggaggatggcggagtcggggctcctgacgcatgcttttcacttccactgcatctctcgctggctcaaaacacgacaggtgtgtccattggaca

SEQ ID NO: 653110 - DNA, 101 bp, Homo sapiens
agacaaagccaaagccaaaaagttttcagcagtcagtggtggacttgctttgtgaagagacagttcatgaacaagagtctttcaggacctggacagtgaag

SEQ ID NO: 653111 - DNA, 100 bp, Homo sapiens
tgtcctgaaaagtgcgaccgttctcccaaggaatttccacggcctcaactccatatagcatagattcagattctttgggaatggagtgtattatttcggg

SEQ ID NO: 653112 - DNA, 99 bp, Homo sapiens
cagagacattacatcaggaagatactgcagagatattctactccatctcattcattgtacagccaaatttgtatcctactgtggggcttcaaacaccag

SEQ ID NO: 653113 - DNA, 75 bp, Homo sapiens
actgaaacctggaaagcttacaacagtgactttgaggaatcagtgaagctgtggtctaccaatctagacaactca

SEQ ID NO: 653114 - DNA, 120 bp, Homo sapiens
tgaagggcagggagctggacctggaggcgccgccgcgacagcagcagccatggaggacgagatgcccaagactctacaatggcgatgaccactcagaaggaggcctggtggagaaccacg

SEQ ID NO: 653115 - DNA, 80 bp, Homo sapiens
ttctcttcttctgaaaaagagatcttgcactgccagtgaaagatgtagaagataaacctgaacaacaaaccagaacaaga

SEQ ID NO: 653116 - DNA, 101 bp, Homo sapiens
tttttggcaccatatactactttttccagaattcatacaaagagtgtaaagtaatctcacaagctgccaaagaacacatcccaagcagtaatcacagacga

SEQ ID NO: 653117 - DNA, 74 bp, Homo sapiens
taaagcttgaaatgctacatttccaagtgcagcgtaagtatgcacagatgaagatggaactaagccgagtaaga

SEQ ID NO: 653118 - DNA, 100 bp, Homo sapiens
acactccagccacgaagtcaaggctctgggggccatgtggaaactacataagagggtatattacctctctctggaattttacatgggccgaacattacag

SEQ ID NO: 653119 - DNA, 88 bp, Homo sapiens
caaaccattgccaagcaggaagaggacctggaaaccatgaccatcctcagggctcaggttcgagaacttgtcttggacaattgcaaat

SEQ ID NO: 653120 - DNA, 51 bp, Homo sapiens
tgggaaacgcagaggcagaaaccagacatgacaatggatgaagtccgagaa

SEQ ID NO: 653121 - DNA, 83 bp, Homo sapiens
gtgcttaattcaaggtcacacaatgtcggggatggacctccagatttccttactggctggcgccttcctctgttgggccagcg

SEQ ID NO: 653122 - DNA, 50 bp, Homo sapiens
tccaggtgtctgtgttcagagtctcaagtcctcccgagagctggatgaca

SEQ ID NO: 653123 - DNA, 133 bp, Homo sapiens
aagatgccggccgtgtccaagggggacgggatgcggggcctggcggtcttcatctcggatatccgcaactgttcacaaccagtatccaactgagtttgaattcaatctctattacttaaagttcttggctttc

SEQ ID NO: 653124 - DNA, 98 bp, Homo sapiens
cggcgccgctgcctgccgaggtgcgggagagcctggctgagctggagctggagctgtcggaaggaaggttgtgcaggaccagcgttccctgtgcaggc

SEQ ID NO: 653125 - DNA, 82 bp, Homo sapiens
ttcggggaaatggctgcgagaccctagaggcctgcggaccgtggcaaggaggtgtacagccctgactttcatagcctcggag

SEQ ID NO: 653126 - DNA, 75 bp, Homo sapiens
aattcctaggccactggctggacaaattacgaagaatgaagaacgcttacgacaggcagttgaattactaggaaa

SEQ ID NO: 653127 - DNA, 99 bp, Homo sapiens
ctccagcctctgcctcccagaaactcagggctgtgggacagatgatgtctaccatgttctacccactggtcacctttgtcctcctcctcatctgcattg

SEQ ID NO: 653128 - DNA, 100 bp, Homo sapiens
tcaagtcctggctcagcaagactctcgagcccatgttcttgggtgtctctggggagtccctgggccagaccttcctccagactccagcccacctcttcgg

SEQ ID NO: 653129 - DNA, 100 bp, Homo sapiens
aggcggctataataatagcaaacatcgatggcctactggggataacattcatgcagaacatcaggtggctgcgctggagcggcagatctttgacttcctg

SEQ ID NO: 653130 - DNA, 100 bp, Homo sapiens
cttttcttcaatgataagagctgtcagttttctgtggatgaagcagatataatttctacagtagaatttaatcattctggagaattactagcaacaggag

SEQ ID NO: 653131 - DNA, 74 bp, Homo sapiens
attcacctgcctcctatgtcttccatccagacaatgctgtggtctgtttttctggggggccaccaacacctccc

SEQ ID NO: 653132 - DNA, 87 bp, Homo sapiens
cggaccgcttctcccgcttcaacgaagaccgagactttcagggagtgcatccgccccaacccttttccccctcgtctcctgtgagaa

SEQ ID NO: 653133 - DNA, 100 bp, Homo sapiens
atccttgaatgttgaagatgtccttaccagctttgacaatacaggaaatgtttgctaactatatgtcagaaagcatcagcttttctcgatggacccattc

SEQ ID NO: 653134 - DNA, 101 bp, Homo sapiens
cggctaccatgtccgcccaggcgcagatgcgggccctgctggaccagctcatgggcacggctcgggacggaaggatctgagtctctccctgcggagacagc

SEQ ID NO: 653135 - DNA, 74 bp, Homo sapiens
gaaaacacaagaaaactgcacataactccgaagggaagaaggagaaagggccaacccctgaagaagcaatacag

SEQ ID NO: 653136 - DNA, 90 bp, Homo sapiens
cacgctggactggtgcgaggagaactactccgtgacctggtacatcgccgagttctatcttgtggaagccctgaagccagagtatgtggc

SEQ ID NO: 653137 - DNA, 75 bp, Homo sapiens
tgcggaagtcaagcccctctggcccaaaggctggatgcaggccaggttcaggtgctgataatactgaatctgaaa

SEQ ID NO: 653138 - DNA, 83 bp, Homo sapiens
agggcatcaccgtgaagcagaagagcccacagaagaagaagcatcttcaaaggaggattctgcaccttctaagccagttgtgg

SEQ ID NO: 653139 - DNA, 100 bp, Homo sapiens
agaagatgtggtacacactcagttaattaatctgaactccatccggcacaacctgtcactgcatagtcgattcatgcgggtccagaatgagggaactggc

SEQ ID NO: 653140 - DNA, 83 bp, Homo sapiens
atcgtgcacatccaggctggtcagtgtggcaaccagatcggtgccaagccttatgccagcctggaccatcttggaggcagtgt

SEQ ID NO: 653141 - DNA, 128 bp, Homo sapiens
tttggcgataaaccttgttgttttacagaccttaaggtgtttgttgacctcttacctgctacacagtgtacaaaaatgtatgtccctgggaagctgcatgatgtggaacacgtgctcatcgatgtggg

SEQ ID NO: 653142 - DNA, 100 bp, Homo sapiens
cagggagatatgaagcctccaagctatgattctgcatagattccagcctcaaaatcctctctcaggagcccagcaatttgtggcaaaggatccccaagat

SEQ ID NO: 653143 - DNA, 75 bp, Homo sapiens
tgagaatacaagatctaacaggactagatgtttccacagcagaggaattacagaagccaagtacaagaagctgga

SEQ ID NO: 653144 - DNA, 75 bp, Homo sapiens
tacctgtgagatgtttcatcccaacaagaatggatcttggagaatgtctgaaagtccatgacctggctttaagag

SEQ ID NO: 653145 - DNA, 51 bp, Homo sapiens
ataggataggactccctcctaagacaatgcagatcttcgtgaagactctga

SEQ ID NO: 653146 - DNA, 101 bp, Homo sapiens
ccagtggcaatgacccagacccggacgacccccattgctgagccagcggagctgcttgtgacgggtcagtcttacgagaatatggtaactgagatcatgtc

SEQ ID NO: 653147 - DNA, 83 bp, Homo sapiens
ctctgagtgggaagcggagccgggggcctgggacccgtcgcgtcagagccagcggagctggagtttgttcagatcatcatcat

SEQ ID NO: 653148 - DNA, 90 bp, Homo sapiens
cttcgaggcatgatggtcgactacaagaagagggcggagcggagacgggagtattatgaaaagatcgagatgcgctctgtgctgcggaag

SEQ ID NO: 653149 - DNA, 98 bp, Homo sapiens
ccatctacatctcccacaggaagtgtcacacagcagtcaagtatgtcccaaacgtctgtacccactgatggtaatgctggcctgctggctgaacccca

SEQ ID NO: 653150 - DNA, 75 bp, Homo sapiens
gcctgcttggttcgggtctcttcgtgttctcgctcactgtgaggttactattgaatgtaaaacaaggtactggac

SEQ ID NO: 653151 - DNA, 99 bp, Homo sapiens
cagaacctgctgcagcagaagagaaaaatggctacaaacttcctagcacatgagaagatctggttcgacaagttcaaatatgacgacgcagaaaggaga

SEQ ID NO: 653152 - DNA, 73 bp, Homo sapiens
attgacatttaattttagggtcctttatatagaagggagagtaggcgctgaacaacctgcagtccaccttctc

SEQ ID NO: 653153 - DNA, 100 bp, Homo sapiens
gctgattttaaaagatctggaacatcgaaaggaccaagtaacacagctttcacaagagatgtacagtgggagaaatcacagatgccctgaaaaaggtatt

SEQ ID NO: 653154 - DNA, 83 bp, Homo sapiens
ccatgttggtgctgtttgaaacgtctgtgggttacgccatctttaaggatggatagaatgacagaagatgctcttcgcttgaa

SEQ ID NO: 653155 - DNA, 99 bp, Homo sapiens
tgtttaataagttactgggtaacattgaggaaacctagccctgtctattcatttggaaaatatcagagagcgttatggaaccctaacaggcgagctgca

SEQ ID NO: 653156 - DNA, 100 bp, Homo sapiens
actaggacaaccaatatttccaggggatagtggtgtggatcagttggtagaaataatcaagacctgtcgcgaaatcgcctttcagaaattcctatagaag

SEQ ID NO: 653157 - DNA, 95 bp, Homo sapiens
tgccacgccgcccaggagacccctctgctgcaccacttcatgtgaaggataaggaggacacccaggtggactctgaggcccgaccgatgaaagat

SEQ ID NO: 653158 - DNA, 100 bp, Homo sapiens
accacagtgctcttcatagttcaaattcacattcttctaatccaagcaataacccaagcaaaacttcagatgcagattgccttgacaagttccgaactcc

SEQ ID NO: 653159 - DNA, 75 bp, Homo sapiens
gagaacttgccggtgccagctgagaaggtgggtgcggctgctatttggacgagagttccccctgcaggaccttct

SEQ ID NO: 653160 - DNA, 75 bp, Homo sapiens
gggacattagttcaagtagcaactatatcagggaagaaggagaaagggccaacccctgaagaagcaatacagaaa

SEQ ID NO: 653161 - DNA, 90 bp, Homo sapiens
aagggaggaaatagtggcaggtgacagtctgcatgtgcagttttcagaaattccatgagtgaaaccgtcagactggtcagtggaatgcag

SEQ ID NO: 653162 - DNA, 100 bp, Homo sapiens
atttccttttacaacacctaaagctacagtagtacctttgccaacgttacctcccgtttcccacttaaccaaaccaatgcctgaaatgtgcagatgcccc

SEQ ID NO: 653163 - DNA, 75 bp, Homo sapiens
atggatattcattgcatggtctccagatcattctcattgggtcaacaacctggaggttgatagcagatataattc

SEQ ID NO: 653164 - DNA, 50 bp, Homo sapiens
atgcgacctcaggaaggagatgagatatgggacacagcaggacaggaacg

SEQ ID NO: 653165 - DNA, 100 bp, Homo sapiens
tatggcaaagaaacctattctgagggaccagcgcatcagccaggacgtggagcgattctgccggcagctcagcagcatggccagcaagctcatcatctcc

SEQ ID NO: 653166 - DNA, 80 bp, Homo sapiens
cacacatcactaaaaattatccctactacaggactgcggacaagggctggcagcctcccgcgacgatgcccctcaacgtt

SEQ ID NO: 653167 - DNA, 100 bp, Homo sapiens
tgaaccttgtgatagatgaatgtgtggagatggcgactagtggacaacagaacaatattggaatggtggataaatgctgtatccaatgctcaggtgagag

SEQ ID NO: 653168 - DNA, 56 bp, Homo sapiens
cttcagataacttctgtgaagctgatggaagtatatattcaagcccaggactgtat

SEQ ID NO: 653169 - DNA, 71 bp, Homo sapiens
cctactctatactctcagtggcttaggtgctggagaatctggtaaaagcaccattgtgaagcagatgagga

SEQ ID NO: 653170 - DNA, 89 bp, Homo sapiens
ttgtttttatggtggaactccctatggaggtcaatatggctctgagagattcctctgcgaatctgtttttagctatcaagtggcatcca

SEQ ID NO: 653171 - DNA, 100 bp, Homo sapiens
ttcaggatttacacagacgtggggcgatgcttgtgaccctgcagctcctcaaagtgacctcaaagcagaagctctgaattcacctctcatctgacgactg

SEQ ID NO: 653172 - DNA, 100 bp, Homo sapiens
tggttggaacaatcctgtattcttgataacaacgaacttgatgcaagtgataggtttgccaaggtcagacctctcatcatccggatgaactgcaatttcc

SEQ ID NO: 653173 - DNA, 73 bp, Homo sapiens
cgggaactgctgacgcttgatgagaaggacccacggcgtctgttcgaagaaatatcttcccttccaacctggt

SEQ ID NO: 653174 - DNA, 82 bp, Homo sapiens
aaacaccagggcagagccagaaaagcaagagtttctgtttagatgaccagtctcctggttttaaaatcaaagatgggaaaat

SEQ ID NO: 653175 - DNA, 100 bp, Homo sapiens
cttcggaatgcactacaacaggaaaatcatattatagatggagtaaagaatcctcactatggatgggctcattgaggacattaagcatcggcggtattat

SEQ ID NO: 653176 - DNA, 100 bp, Homo sapiens
gaaacagtggcatggttcgtgccaaattccgaagcaatcttcctgctaaggccattggacacagaatccgagtggagccggtgaaacctgaagaaggcag

SEQ ID NO: 653177 - DNA, 99 bp, Homo sapiens
aaagaatacactgatgtgtaccccgaaatcattgaacgagcaggctattccttggagaaggctgattccaacaaaaccagaattgatgaggccaaccaa

SEQ ID NO: 653178 - DNA, 75 bp, Homo sapiens
acacgttaaaggaatcaaagagcctctgggataggtgattttacaacgagatgctgctctccatagggatgctca

SEQ ID NO: 653179 - DNA, 83 bp, Homo sapiens
gggacgacgagtacgactacctattcaaaggtgaccctggcagcaaccccaacaaacgccagaggcagccccctctcctggga

SEQ ID NO: 653180 - DNA, 75 bp, Homo sapiens
cacagatggaaccagaaaagatacgaggctctaggagagctcactaccctgggaaatcttacaccttcaagcact

SEQ ID NO: 653181 - DNA, 90 bp, Homo sapiens
gctcgctgcagcttcaacggagacttcgtgtgcggacagtgtgtgtgcagcgagggctgggttccaaaaggtcccaggtgtcctctccgt

SEQ ID NO: 653182 - DNA, 100 bp, Homo sapiens
tcccgtgaggtcctttggcactgtcatctgtgtccctcgatcttatgcaagatctactgcagtcatgtctatggttggatacataattggccttggagac

SEQ ID NO: 653183 - DNA, 96 bp, Homo sapiens
cccaagacagtggaaaattttgttgctctagcaacaggagagatgttctcagtgcagctgagtcttggtgagcagacatgggaatccgaaggcagc

SEQ ID NO: 653184 - DNA, 82 bp, Homo sapiens
ctggttccaagacactgtcactgagagaaggagcggcagcgcctggagaatctgcggcggaaggaggaggccgagcagctgc

SEQ ID NO: 653185 - DNA, 100 bp, Homo sapiens
gggaagcgctccgggcctggaatccctacgcgtccctttgggtttagcacgatgagctcaatcggcactgggggtttggaaatcccttgtctccaggttg

SEQ ID NO: 653186 - DNA, 75 bp, Homo sapiens
ccatgcctttgagaacctagaaatcatacgcggcaggaccaagcaacacaaaccagtccagctacgggggcccag

SEQ ID NO: 653187 - DNA, 100 bp, Homo sapiens
ttgttctcgagttttctctgccatgttgctattgcaggacggaacttttggaaaagaatttgataaacattttgggaaaggaggttctaaactactgaga

SEQ ID NO: 653188 - DNA, 75 bp, Homo sapiens
tttgatttgacagtcggtataactgatcctgagaagataggctgtgccttcctcacctactgtgccagggattcc

SEQ ID NO: 653189 - DNA, 50 bp, Homo sapiens
tgtttcaggcatgttgagatttggaaatcattgaagactctccggaattc

SEQ ID NO: 653190 - DNA, 74 bp, Homo sapiens
ggaagtggaaccggatatttaagtacaatggtgggcttaattttagtcctgatcacccgagaggatgacttcaa

SEQ ID NO: 653191 - DNA, 90 bp, Homo sapiens
catagcagtggctgatgaagggtggcacattttacagaataagtcagatgactttctgtttggaaaatggtaccacatggcaaaacccag

SEQ ID NO: 653192 - DNA, 50 bp, Homo sapiens
gcaagtccatgtacctcacggttaaaatggatcaatcttcctgtcctaca

SEQ ID NO: 653193 - DNA, 100 bp, Homo sapiens
agacctgcagcttcagggtaaactgctgctctccaggccgaagaacagttgagaattgttgaagaacaaagaaagattcatgaggaaaggatgaaactag

SEQ ID NO: 653194 - DNA, 75 bp, Homo sapiens
cccgaagaagaaaggattcgttacagccagagattgaccacggtgtgaacacatgaacagaagacgaaaatttct

SEQ ID NO: 653195 - DNA, 100 bp, Homo sapiens
acatgctgaccgctcaagagattctacatcagtttggtttcactcagaccgagagacaagagagacacctccaacttcgacaaagagttcaccagacagc

SEQ ID NO: 653196 - DNA, 80 bp, Homo sapiens
tttccgttgtcggcctcccactgcagatagggccagatttgagtgtgtgaatttttgagtgaaacctggaacccaaatga

SEQ ID NO: 653197 - DNA, 100 bp, Homo sapiens
gtggatgacaaggaggcctgagtagaccgcagggtccccagccccaccccagccccaaaggaggctgttcgagagggacgtcctccggagccaaccccag

SEQ ID NO: 653198 - DNA, 82 bp, Homo sapiens
ccaaagaagtgaagctgctgctactcgatattgatgatgttaagaagttcaaaccgggttacctggaagctactcttaattg

SEQ ID NO: 653199 - DNA, 98 bp, Homo sapiens
tccagtgaccctgagcgcaccctggaccccaactcagccttcctgcataccctggaccagcagaaacctagagtgagatccgtgctcagctcacagag

SEQ ID NO: 653200 - DNA, 75 bp, Homo sapiens
ttggcgtgcaacatggggcttgagaaagggaaggaagcagccaccctcgccatggcctccccgcccgcctgcccc

SEQ ID NO: 653201 - DNA, 100 bp, Homo sapiens
ccgagaagtacttaaaaaaacattggaattctgcttatctaggcagtatttggcagtcgtattcagagataaacccctggagctatgggatgttaggact

SEQ ID NO: 653202 - DNA, 75 bp, Homo sapiens
cctttttaagaacataggacttcagatgagttttgatcatcctgagaaaaatgggccttggcctgcagacccaat

SEQ ID NO: 653203 - DNA, 100 bp, Homo sapiens
gaatgggcccgtgggcatatttagtcattcatttttgatcaggagaaagaagacagccatcatttgaaagttaccttatcccatatcacacaactggtcc

SEQ ID NO: 653204 - DNA, 98 bp, Homo sapiens
gagcgtccgaggcctgtgtgaacgtactatactggcaattgctggagaagattttgcaattgttgcttctgatactcgattgagtgaagggttttcaa

SEQ ID NO: 653205 - DNA, 101 bp, Homo sapiens
gagcgctcgaggtcgtatgaacgcacaggccgtcgctatgagcgggaccaccctgggcacagcaggcatcggaggcaatactgaacactgcgcagcttgca

SEQ ID NO: 653206 - DNA, 100 bp, Homo sapiens
cggctgcatcagaggctgcagctgtgtgttttccagcaggacgttcagcaggctgaccggttccctgatgtgttacctgcttctgctactgatccaaact

SEQ ID NO: 653207 - DNA, 75 bp, Homo sapiens
actagtcacagtgttgctgcaacatagagctgacattaactgtcagtcactgcttcaaccacctgtgagaaatta

SEQ ID NO: 653208 - DNA, 74 bp, Homo sapiens
aaagcaacaaccaggagctccgcacgcagcatggaggaatctatgtaaagcgcagtgccaaatttaacgagaaa

SEQ ID NO: 653209 - DNA, 100 bp, Homo sapiens
gtggtggcctatgcctactgcaccatccccacctaccccagcggccagatcggcttcatgctgtgcagcaagaacccggaaacaaaccatcaggcctccc

SEQ ID NO: 653210 - DNA, 90 bp, Homo sapiens
ggcggccagagcgccggcaagagctcggtgctggagaacttcgtgggccgggcgccctgcgtccggcagaggaggcgagcatcccgctca

SEQ ID NO: 653211 - DNA, 90 bp, Homo sapiens
caccatcacagactcttcatctggggtgtttgactccatttcaagtaggaaggaagtccatgaagacccagggcaggccaccttgagcac

SEQ ID NO: 653212 - DNA, 82 bp, Homo sapiens
cggcgctggccgagagccgcggctccgtgtttctggaaagtgacagcaggtgacttaagagattaaaattaatttggttgct

SEQ ID NO: 653213 - DNA, 50 bp, Homo sapiens
gcaaccgcagcagcagccttcagaaataaactatcaatcttgcccagact

SEQ ID NO: 653214 - DNA, 137 bp, Homo sapiens
gcctcaggcagtgccagacccagaagagggctcttcagcacctagaagctggaaagggatgaacaggacaacgtggatctgggagagctgatgttttccctgtgctatcttccaacggctggcaggctgaccattac

SEQ ID NO: 653215 - DNA, 75 bp, Homo sapiens
atgaagacttgaggcgaatggccgaatctctccgcttcccagtgatcctgtccatcgaggagcactgcagcgtgg

SEQ ID NO: 653216 - DNA, 75 bp, Homo sapiens
tatgcccagacaagtccccagggaatgccacagcatcctccagcacctcagagatctattcgatcttttgctaat

SEQ ID NO: 653217 - DNA, 75 bp, Homo sapiens
gtctgaggtcatcggggatgtggacgaaggggccgacctcctaggtcatcatcagatttgaaatatttaaagtgg

SEQ ID NO: 653218 - DNA, 80 bp, Homo sapiens
ctggaagaggaagatgcctagcacagaccttctgatgttggatgaccagtgtcccagtgaaggaacgagtgaaggtgtct

SEQ ID NO: 653219 - DNA, 75 bp, Homo sapiens
gcggcgcagaaaggtggaggccgggaggacgaagattgacgagatgcctgaggctgccgtgaaatcaacagccaa

SEQ ID NO: 653220 - DNA, 80 bp, Homo sapiens
tgctagcagaaaatcaaaacgctgattaaaagaagcacgaatgaaatatgactgaggactctcagagaaactttcgttca

SEQ ID NO: 653221 - DNA, 100 bp, Homo sapiens
agctgcgggagagccgggtaccggccgtggaagcggccaccgactactgtcagcagctgtgccaggcctccccatggccacccatggaccagtcggcatt

SEQ ID NO: 653222 - DNA, 100 bp, Homo sapiens
agttgtgggccgccgtcggcagcaagaacagagagagaggtggacagatctgagagatactgaggttctgcttggattctgctagacagacccgacaaag

SEQ ID NO: 653223 - DNA, 75 bp, Homo sapiens
gatttatgcaaacttgggccaaaggacagttagaagacagtagcactggccatgggcctctgtgtcgccatgatc

SEQ ID NO: 653224 - DNA, 75 bp, Homo sapiens
ctgagatggaattctccagctgaagaagggtcaagcgatctagggcagccctgcagaggtacctgttctactgta

SEQ ID NO: 653225 - DNA, 100 bp, Homo sapiens
ttggactgggagggcaacgagcacaacaggagctacgaggagttggacgggctctacgagtgcattctctgtgcctgctgtagcaccagctgccccagct

SEQ ID NO: 653226 - DNA, 77 bp, Homo sapiens
gttgaactcgcagctggaccttttggaaataatgaaaagttgcctaaaatagacttttttgactattctaaattgac

SEQ ID NO: 653227 - DNA, 85 bp, Homo sapiens
tgaaggaccagagagggagccctgcctacatcagtcccgacgtgctcagcggtccccagcctgggtaaagatggccccatggccc

SEQ ID NO: 653228 - DNA, 95 bp, Homo sapiens
gaagagagctccagtttatgcagatttgatggcaatacattaaaaactactcatgtgaggcgtagaggctccggtgttttttgtgccaattgcct

SEQ ID NO: 653229 - DNA, 96 bp, Homo sapiens
tcctccttcgccgccgcgcacaaccgcacgtgcagggaagagaaggaacggtggatccgtgccaagtacgagcagaagctcttcctggccccgctg

SEQ ID NO: 653230 - DNA, 74 bp, Homo sapiens
agtcagctggccagaggatccacttagcacctctcaatgcaacggcttcaggaatctagaaaactgtatctgaa

SEQ ID NO: 653231 - DNA, 100 bp, Homo sapiens
gcacgagcaactctggctgatgcgagaaaagactgtatcttcaccattgacccatcaaccgcccgagacctcgatgatgccctctcctgcaagccactcg

SEQ ID NO: 653232 - DNA, 82 bp, Homo sapiens
ccgagagcaggccttcaccagcccgcccctttcggccgctgctgcccacttcccgctcgggccccctcggaaaaccacactg

SEQ ID NO: 653233 - DNA, 82 bp, Homo sapiens
gttcaactcccaagaaccccataacatcctgccactggcatccagtcagatcagtggaatcccccaaagaaggtaaagggag

SEQ ID NO: 653234 - DNA, 74 bp, Homo sapiens
atgtgtcctatgaataccgcttcctggagttcacgactctgagtgctgatcctgagagtcagaccttgaaagaa

SEQ ID NO: 653235 - DNA, 51 bp, Homo sapiens
aaggattccaagtaactcttatttggctaatgtcatctgtatagtgtatgc

SEQ ID NO: 653236 - DNA, 100 bp, Homo sapiens
ctggctagctataatttgacagttcgcgagctaaagcttttcttcagtaaacttcaaggagataaaggacgatgggttggacaccgaggaacagtaagag

SEQ ID NO: 653237 - DNA, 89 bp, Homo sapiens
ctttctctggacaaaagcagcacttcagattctgttgatgaaggatgagctttctgatgttagccaaggcggatctaaagctaccactc

SEQ ID NO: 653238 - DNA, 83 bp, Homo sapiens
cggagctgcagtcggcactgctactgcgaagacagctggcaggggccaaaccagtgctcctgccacctctctggctgccccct

SEQ ID NO: 653239 - DNA, 98 bp, Homo sapiens
gttatcagtgatggctcttctctggaagatcttgtggtgctcatgtgactatcacggatcgaaaagtagcattagaatttcttaaatcaaacgttcaa

SEQ ID NO: 653240 - DNA, 75 bp, Homo sapiens
tctggtgtaccaggcgaagctggccgagcaggctgagcgatacgacggtgaggcaggcgactaatcagattgtga

SEQ ID NO: 653241 - DNA, 75 bp, Homo sapiens
caaccatcgcagttggaagcccatggggcaggttgggacaaacattcctatggttaccatggtgatgatgggcat

SEQ ID NO: 653242 - DNA, 74 bp, Homo sapiens
aacctcagcaggccctgtatagtgtgcaacaacaggcttttgaacacttgcagcaattagaattaataaagccc

SEQ ID NO: 653243 - DNA, 90 bp, Homo sapiens
gccatcctcggcgcgactcgcttctttcggttctacctgggagaatccaccgccatccgccaccatgaaaagcaaactcaagttcctgcc

SEQ ID NO: 653244 - DNA, 96 bp, Homo sapiens
actttccggggtgcacagcaagtgggtctaggtgctggagtgcgcacggaggccgatgtagaggaggaggccctgaggaggaagctggaggagctg

SEQ ID NO: 653245 - DNA, 100 bp, Homo sapiens
agaaccgtggacagcaacatttcccacaggacacgaagtttgtcggcccttgccttggcagagctgaggagaaagtggatgaggaggggctgaagaagct

SEQ ID NO: 653246 - DNA, 75 bp, Homo sapiens
ctggggactacgacgtccctcaaaccttgcttctaggagataaaaaggttacaggaggttccagtggcatcggga

SEQ ID NO: 653247 - DNA, 82 bp, Homo sapiens
cggagctgggtctggagacgccgtggcagcctgaacggagtgtgcgacggattgggagttcctgtgccttaagaacattaga

SEQ ID NO: 653248 - DNA, 98 bp, Homo sapiens
gaagatcggcttgaaattaccaactgctttcctttccctcagcacacagaggatgatgctgactttgatgaaggatcagaatttgtctgtgaaagtaa

SEQ ID NO: 653249 - DNA, 88 bp, Homo sapiens
tgaccagaagcctgcatttctgcattctgcttaattccctttccttagggtgtcaaattgagaaccaggtagatccccaccacctaca

SEQ ID NO: 653250 - DNA, 100 bp, Homo sapiens
cagggcctgcagcgggagctggacggcgagcgcgagcggcgcgagaaatgcaagagaagcctgagccagtgccgctggagagccgctcctgcgtcctcat

SEQ ID NO: 653251 - DNA, 100 bp, Homo sapiens
gcgagttgtcatcatcaagaatatgtttcatcctatggattttgagaacactcctatgccaccttcaccagctgtacaagtgcagggccagcctaacagt

SEQ ID NO: 653252 - DNA, 98 bp, Homo sapiens
gcagtggaaaatgcgctcgggctggaccagcaggatctgggcatccaggcacggccatgacccctccgaggctcttctgggtgtggctgctggttgca

SEQ ID NO: 653253 - DNA, 75 bp, Homo sapiens
ccgatgggaatgagacctcctgtaatgtcgcaaggattaagcatgaaaatattgttgccctggaagacatttatg

SEQ ID NO: 653254 - DNA, 97 bp, Homo sapiens
ccagggcttcctggtttacctggcactcctggacaggatggattgccagggcttcctggcccgaaaggagagcctcacgtcattgtggccattgtcc

SEQ ID NO: 653255 - DNA, 98 bp, Homo sapiens
ccatggccatgggcagaggcgaagggctggtgggcgatgggcccgtggacatgcgcacctcacacagctgctacggaagaggcacataggaaatgaca

SEQ ID NO: 653256 - DNA, 82 bp, Homo sapiens
ttaataaaataaccgtccccgccagtcagaagttgaggggaagcatttctccttgcattggtttgctggtatggatggccct

SEQ ID NO: 653257 - DNA, 76 bp, Homo sapiens
acttaagagaatctcaagctgctaagggcactgtaaattggtctgttgatgacattgtcaaaggcataaatagcag

SEQ ID NO: 653258 - DNA, 97 bp, Homo sapiens
ggacccaaagtgccatgtctttaatgattatagtgtcacctatggccattgtccggaaatcacagtatacacaagctgctgttactttcctagtgct

SEQ ID NO: 653259 - DNA, 100 bp, Homo sapiens
tgattctctccgccctgcacttttgccagctgaaggtccagtcaaccacagaagcccctgtgaagcgagcatctctgctgggtgatatgcatttccgaag

SEQ ID NO: 653260 - DNA, 100 bp, Homo sapiens
ccacagtgggagcagcaatttcttctcaccctcagatcaacaagatcgccttcaccggctccacagaggttggctggtatgtcacacttcatgtctctga

SEQ ID NO: 653261 - DNA, 98 bp, Homo sapiens
ccgccgccggcccatgaggatattgccgtgaaagagcaccccaagatctggctacctcgggccctgaggcagacctacatccggaaggttggggacac

SEQ ID NO: 653262 - DNA, 144 bp, Homo sapiens
ccgggatcgtgaccgagaccgtgaccgagagcgtgaccgagagcgcgaatatcgtcatcgttagaagttacccggctgtatgtgaattcttacagcacaataacttgttatctatactccgagcccacgaagcccaagatgcag

SEQ ID NO: 653263 - DNA, 102 bp, Homo sapiens
aaggaaatgaacaggagtcaatggcaaggctaaagaaattaatgacaataatggatagtatgaatgatcaagctcccattgctatcacatgttttaccagag

SEQ ID NO: 653264 - DNA, 90 bp, Homo sapiens
cggtcaggaagtattaaggaagagctacagtgaacctgttgacgtgaagacatctcaacctcctcagctgatcaattcgaagccgtcggt

SEQ ID NO: 653265 - DNA, 75 bp, Homo sapiens
ttctccactttcgccagcccgtgccgcgagcgcggcctgcaggaggtgaccctggcagcaaccccaacaaacgcc

SEQ ID NO: 653266 - DNA, 74 bp, Homo sapiens
ttgggagggatatcccatacaggcctggacatggaggcatcccccaatcacctgcagaccaaggcctatgtgcg

SEQ ID NO: 653267 - DNA, 83 bp, Homo sapiens
taacaagcagcagtgaggacaccaaaggagtggagtcaacatatcaatggagcaagtcacagtcgtcgatgccagcttcttct

SEQ ID NO: 653268 - DNA, 49 bp, Homo sapiens
agggactgctaagaagataccaccaggcatatcacacctgaaaaatttt

SEQ ID NO: 653269 - DNA, 100 bp, Homo sapiens
agcctcagcaggagcctgttctcatcaccatggcaacaggtatatggaaccctgggaggaatgctgactcgacagccttttgccattggtggctccggca

SEQ ID NO: 653270 - DNA, 74 bp, Homo sapiens
ggaagacggggcggaagaccaagatcatcgagatgagtgacagaaggaagtcaaggcaccattatgactcggat

SEQ ID NO: 653271 - DNA, 97 bp, Homo sapiens
aatcaagcctagtgcttcgttttgtgaaaggccaatttcatgaatttcaagagagtaccattggggtatggatgagaaaaccctgtatctagctttg

SEQ ID NO: 653272 - DNA, 50 bp, Homo sapiens
agccatggcacaagaatataatacaaactggactctcaggacaaaacgac

SEQ ID NO: 653273 - DNA, 75 bp, Homo sapiens
ctcgcgagcctccttcgccgcgccccacttgctcgtgcactttacacacatgagtttcaacctgaaggatatggc

SEQ ID NO: 653274 - DNA, 100 bp, Homo sapiens
cgaccccaacttcttctgagcggcagtggcgccagaagcagtctggctttcaggtttcagaaaagggatccctaacatcagaagagtttgctaagcttgt

SEQ ID NO: 653275 - DNA, 100 bp, Homo sapiens
ataaagagaaaaatctggagcagtataatggaaaggattttgcacaagccagcagctatgcagatatagctgtgaactctgatagatataatccagcagc

SEQ ID NO: 653276 - DNA, 90 bp, Homo sapiens
gcaccgtgtctgttgctgatgcctcaaaaagtgtgcaaggatgccttgttttgcaagagcttgatgaacttgctcttcagcctgcatgtt

SEQ ID NO: 653277 - DNA, 90 bp, Homo sapiens
ggcaaatagtacttcaagagcacagtcttatgtaaggcttcagggatgacttcttagggggcaggggaggtagtcgcccaggcgaccggc

SEQ ID NO: 653278 - DNA, 100 bp, Homo sapiens
caccatgaagacctcattggcaagcccggtggtgtctccctgtccaactgggtttgctcccagtttccgggctaccgaggatttcagtatgtgctggaat

SEQ ID NO: 653279 - DNA, 100 bp, Homo sapiens
cgggtagcagctatgcgggaggcggggacagcgcttccggaccagagatcctgaaggagctagacgagtgctacgagcgcttcagtcgcgagacagacgg

SEQ ID NO: 653280 - DNA, 100 bp, Homo sapiens
gcagtccagaaagcggcttatcgaacagagccgggagttcaagaagaacactccagaggagctgctgctcttcctccagaacctgcccacagcccactgg

SEQ ID NO: 653281 - DNA, 102 bp, Homo sapiens
ggcttgtccagccggaagccctgagggcagctgttcccactggctctgctgaccttgtgccttgggcttgtcaatgaggcagatcagattcaggttcgacgg

SEQ ID NO: 653282 - DNA, 90 bp, Homo sapiens
gggagcaaattttactttctgacaatgcagcttctcttgcagtgcaggttattgaagagagggaaaaactaaagaatgaccgggaagccc

SEQ ID NO: 653283 - DNA, 83 bp, Homo sapiens
cttcctggctccggaggccagcggccgggatagccccggcggagcccgcagcttccctgccgctcattgctatggacagtgct

SEQ ID NO: 653284 - DNA, 83 bp, Homo sapiens
gctcgcgctactctctctttctggcctggaggctatccagcaccctgtattcagtggatcagctggcaccacccaaatagata

SEQ ID NO: 653285 - DNA, 88 bp, Homo sapiens
actggaggatgcctatgtattccctggggatggcgcatcacacaccaaagttaaacacagtgggaatatcacttttgatgagattgtc

SEQ ID NO: 653286 - DNA, 100 bp, Homo sapiens
ctgctgcagactggagcctgagagcagggttctgagcaaggttcaaccagtcaagaacaggccttatctgctcagcaagctgctgttattaaccttactg

SEQ ID NO: 653287 - DNA, 100 bp, Homo sapiens
gcctgagcaagcggaggacctacgccggcctggaaagaaatgaccgcccggatgtgccactgagagccccgcgggtctcccggtgcccgaaccgccgctg

SEQ ID NO: 653288 - DNA, 80 bp, Homo sapiens
ggtggcagcggcaggagagtccggccgcgacaggacggcatctgcatctgggaccgacctcctgggctggctgatcaaag

SEQ ID NO: 653289 - DNA, 73 bp, Homo sapiens
cggctttgaccgagaggctgctggagctcgtgtttggacgcgtgctggaggtggtgagagccaactatgacac

SEQ ID NO: 653290 - DNA, 101 bp, Homo sapiens
ttccccaacacccacctagccagcgagtcaccgagccaccggccctcgggtcatcagtgagttctgcctcagtcagctcccaagtgaggacgcagtcacct

SEQ ID NO: 653291 - DNA, 100 bp, Homo sapiens
gaaattggaaaaacatatgactgcagagaagggccccatgattggtcaaggaagtttgctccaaccttttatatactatagatttcttacccttcgatat

SEQ ID NO: 653292 - DNA, 100 bp, Homo sapiens
tgaagaccaatattcaacaggcacagagagtgaggaagaagatgaaatggaagttgaagaccaggatagtaaagaagccaaaaaaccaaacatcataaat

SEQ ID NO: 653293 - DNA, 96 bp, Homo sapiens
cggcttcagccacacacggggacgcctcctccccacccttcctcgcagctcttcctggccctgctgctcctgggggccgccgccctggcctgcctc

SEQ ID NO: 653294 - DNA, 74 bp, Homo sapiens
taaagtctgagagagggaagtcgcctctgtgctcgcagaggagatgctgaagaagaaacctcgggccaccactg

SEQ ID NO: 653295 - DNA, 75 bp, Homo sapiens
ggcctcataccttgtccacacagagttcctgtacaaggttcctgacctgtgctagaaagtttgggtcagagtgaa

SEQ ID NO: 653296 - DNA, 100 bp, Homo sapiens
ttgctatgggatttcctgcagaaagacttgaaggcgtatacaggaacaatattgatgatgtagtaagacaaatgctgtgcttcatgaagttaaaagagag

SEQ ID NO: 653297 - DNA, 51 bp, Homo sapiens
ctgaaggccattgtaaatgtcataggtacaggtttgcagattccgccagca

SEQ ID NO: 653298 - DNA, 75 bp, Homo sapiens
cgctgctggaggaaacacctcaggacacggcctacaacaccaagaggtacatgtcccagagcaagcacacggagg

SEQ ID NO: 653299 - DNA, 100 bp, Homo sapiens
aacaaaatgtcaacaaattgatgggttaccgaggagacgagcctcgtcctgcagaccctcggatacacgtgcacctgtcgaggaataatcaacgtgaaag

SEQ ID NO: 653300 - DNA, 89 bp, Homo sapiens
ctggacccctactattgcaacaagggatatgtggtgcctgtcataagctccagagagctgccttccacaagaccagcagaagagtgggc

SEQ ID NO: 653301 - DNA, 74 bp, Homo sapiens
tttctttcttaaaggactgatttttagaactccacatttgagggttacacatcattttggaatgactgtatatc

SEQ ID NO: 653302 - DNA, 50 bp, Homo sapiens
gccggaatgcagtaccctcagcagcaggagatcatgaatcagacagataa

SEQ ID NO: 653303 - DNA, 100 bp, Homo sapiens
gttggctcgcgcttcgttgtcagatctgaggcgaggctaggctttacaggaagtatggtgctggcatctgcttggcttctagagagtcttacaatcgtgg

SEQ ID NO: 653304 - DNA, 83 bp, Homo sapiens
tgcaatggtctcaatctctggaaaaacttcttgccaaccaaaaattcggttccctcaaaattataaaggcaggaaagctcaag

SEQ ID NO: 653305 - DNA, 82 bp, Homo sapiens
ggccgctctgcgggactctgaggaaaagctcgcaccagaaaccaaggtgtatgttggtaacctgggaactggcgctggcaaa

SEQ ID NO: 653306 - DNA, 82 bp, Homo sapiens
gagttcacgatcctgtaactgccaaacccaagttggttggagatgtggattttgaagggagtgcatccgccccaaccctttt

SEQ ID NO: 653307 - DNA, 141 bp, Homo sapiens
cagaaagggaacaaaccctgcaggttctaagaagactcttcccggttgatcgtggattatttgagttccatgccattgcagtgtcaactaggcctcagttacttttcagtttgcccaaattgagcccatctcaacatttgg

SEQ ID NO: 653308 - DNA, 100 bp, Homo sapiens
aattttcacaaccttcaagaaattcgggcactgccaggacttaccgtacaacactccttggcttctggaattttatctctgctcacagtctacattacaa

SEQ ID NO: 653309 - DNA, 74 bp, Homo sapiens
ggagcgcggttcggggccgcagaggtcaaaatgcagatcttcgtgaaaacccttaccggcaagaccatcaccct

SEQ ID NO: 653310 - DNA, 96 bp, Homo sapiens
agcctcccgagtagctgggtttacagaaatcctggatccaccaccgctgctgttcaccctctcccacccatcctgacccagacccagatgaaacag

SEQ ID NO: 653311 - DNA, 83 bp, Homo sapiens
aacggctgaaggccctacgggagaaaaccgggcgcaagttctttatagctccaagctctacagattcttcaaatatattgaga

SEQ ID NO: 653312 - DNA, 100 bp, Homo sapiens
agggctctcctgtctgccaccatcctgggttgacaattctacacaaggaggcaacaagattgacctggctgaaaggagagaggtttcccagcagcgagct

SEQ ID NO: 653313 - DNA, 100 bp, Homo sapiens
caagaagcaaaaaagggactgctaagaagataccaccagtattggatgaacgaatatacctcatccattggaattggagtttttcattcaggaattgaag

SEQ ID NO: 653314 - DNA, 97 bp, Homo sapiens
ttaaaatctgggcccagtccaggagcatgtatgaaaaccgacgtaacatctgccggcacctgctgccccgggtccagtgccccgccttgattgtgca

SEQ ID NO: 653315 - DNA, 74 bp, Homo sapiens
tgaagaatttctcagggttagaaaagaggttttgcagaatcatcacaggccaggacgactggaatgggaccagg

SEQ ID NO: 653316 - DNA, 42 bp, Homo sapiens
ggagcgatgcggtgcagcgcgatgccatggacaatattacca

SEQ ID NO: 653317 - DNA, 76 bp, Homo sapiens
ccacagccctgtacagcagcccacctgaggtgcagacacgcagtgctgatgagcccatgactacctttgtcttatg

SEQ ID NO: 653318 - DNA, 50 bp, Homo sapiens
ataacttgaggacaggcaggacaaggcatgcggctaccaagggcatcctt

SEQ ID NO: 653319 - DNA, 82 bp, Homo sapiens
gacagcgcgaggtccgcgcagcccagcgcagccatcatccgcagtgtcatgcagaagtacctggaggaccggggcgaggtga

SEQ ID NO: 653320 - DNA, 82 bp, Homo sapiens
cggtaccccagctccatctcttcatcaccccaaaaggacctgactcaggcaaagcactgccagtgaaagatgtagaagataa

SEQ ID NO: 653321 - DNA, 87 bp, Homo sapiens
gaggccgaactcgggttctgacaagatggccgggctgccccgcaggatcatcaagaacatccagtcatggataaaaatgagctggtt

SEQ ID NO: 653322 - DNA, 100 bp, Homo sapiens
tgctgaaataaagtgtttagttattgatgaagctcataaagctctcggaaactatgcttattgccaggttgttctgtacactctactaagccaagagaga

SEQ ID NO: 653323 - DNA, 100 bp, Homo sapiens
aggacaaagagcccctcatcgagctcttcgtcaagggattaaagcctgtggtttccacagaagcaccacctatcatatttgccacaccaactaaactgac

SEQ ID NO: 653324 - DNA, 102 bp, Homo sapiens
cttagtaaactaatgaaagcctattgtgaacgacaggcaaatctgagtagcctccaagaggcacacaagcagaggatgggctgtgttgccctgactgccagc

SEQ ID NO: 653325 - DNA, 76 bp, Homo sapiens
gaggagccattttgagcaatggggaacgctcacggactgtgtggctccgattattcaaggatgttcctgatagccg

SEQ ID NO: 653326 - DNA, 100 bp, Homo sapiens
ctccggggacccttccgtatctgcctaggcattttgctgtctcctcctaatacgatgtgagtatgcagtgctcacaggatatacttcgaatgctcctctc

SEQ ID NO: 653327 - DNA, 100 bp, Homo sapiens
cctcaagccagaagtccgcctggtgaagctgccgttctttaatatgctggatgagctgctgaagcccaccgaattagccgaacgaccctgtcaccaacat

SEQ ID NO: 653328 - DNA, 75 bp, Homo sapiens
gactggagaaatgttcatggtatcaattttgtcagtcctgttcgaaaccaaggtcgtggttcaattccagaattc

SEQ ID NO: 653329 - DNA, 96 bp, Homo sapiens
ctcccacaagctctgccttccctccctggtcctcttcagaccccctcttagttcttcgcggctaacgacaaatttacatgtattggagaccagacc

SEQ ID NO: 653330 - DNA, 100 bp, Homo sapiens
agaaccctgttccttacgctgcctgacatcggcgaggagggggcctcggacggcgactccggggatggcgaagcatagtcgtgcaagcactgcagtgttc

SEQ ID NO: 653331 - DNA, 88 bp, Homo sapiens
agtggtacaaggaccagaagaaactgcaccggaaatgtgcctaccagcacttctaccctagccgggcccagcccccgagcagtgcagc

SEQ ID NO: 653332 - DNA, 100 bp, Homo sapiens
caactgcagctggtacatccagggcgaccgtggtgacatgattaccatcagatgcttcccagaagaaaggaaagaaggaggtgaggagaggacgagcaag

SEQ ID NO: 653333 - DNA, 90 bp, Homo sapiens
gaagaattctgaatttgaaggtggaaaatcaacagtgaattgtagaggagaggagacgccgtgagcgggacgaccagatgtaccgagagc

SEQ ID NO: 653334 - DNA, 98 bp, Homo sapiens
cgctcctacctgcctgagaagctccagatcgtgaagccgctggaagctccattacttaccacagcccaggcgaaaccaggagagacccaggaggaaga

SEQ ID NO: 653335 - DNA, 100 bp, Homo sapiens
ggaatctttgctgcagctcttcaggtccatcaatgacatgatgagcagcatgtcagaccagaccgtccgggtgaaggtcctggttccacaaggataaaac

SEQ ID NO: 653336 - DNA, 75 bp, Homo sapiens
cagactcccagggaacctacagctttctccttcacagcattgcaggagagatgtggtcttgctatgttgcccaag

SEQ ID NO: 653337 - DNA, 100 bp, Homo sapiens
tcaacaatgattgctcaagacttctttgtggctttgctaaaggacagaattggcagagggggtcgatttgggaggaaaggtgtggctataaactttgtta

SEQ ID NO: 653338 - DNA, 74 bp, Homo sapiens
ggccaagaggcaaaggggaggttacgcagcaaaccatccagaagccccctcggaaaaccacactgagagttgca

SEQ ID NO: 653339 - DNA, 83 bp, Homo sapiens
cgatatggaagaggagggcaagaagggcaagaaggcgcattggagtgactgtctggcatcaccaagatgacactccacgccac

SEQ ID NO: 653340 - DNA, 100 bp, Homo sapiens
cctccatgcctcctacagcgtcagcctggcagtctctgtgaagatgaatgtgctgctcttcgcccctgggttactgtttcttctcctcacacagtttggc

SEQ ID NO: 653341 - DNA, 74 bp, Homo sapiens
ctgagttgggagaagagctccagagatcacaccgaggagaagactcagtgggaacatccaaaaactggaaaaag

SEQ ID NO: 653342 - DNA, 100 bp, Homo sapiens
ctctgtctccgagctcgcctgcatctactcggccctcattctgcacgacgatgaggtgacagtcacgattgctcgctgtaagcagctcatctgtgacccc

SEQ ID NO: 653343 - DNA, 82 bp, Homo sapiens
tcaaccctggagacaactgctactccgtgggcagcgtcggggatgtccccttcacggacctacaagaacagtgaggagcttc

SEQ ID NO: 653344 - DNA, 82 bp, Homo sapiens
tcaaaagtagagaaaatgaaaggagagcaagaatctcatagggcagcatctcatcacggcagttgctgaccatctatttaag

SEQ ID NO: 653345 - DNA, 75 bp, Homo sapiens
gaagacgagaagaagaggagcgttggagaatggaaatgagctaccagagattcactgactgctataagtgcttct

SEQ ID NO: 653346 - DNA, 75 bp, Homo sapiens
gggtggactacggggagcgcgccgagctggatgactcggacggttttcaaatggaacattttgatgcatcactta

SEQ ID NO: 653347 - DNA, 83 bp, Homo sapiens
ctcctccagcaacccatacctgatccggagaatcgaggagctcaacaaggctcagctgtcgcaggccctggaggagctgggag

SEQ ID NO: 653348 - DNA, 75 bp, Homo sapiens
tttattcctgaagatgacccattatttccacctattgaatcgaaattgcccagaagcatcctgatatctatgcag

SEQ ID NO: 653349 - DNA, 96 bp, Homo sapiens
caaggatctggggatcttcgcactatcccaaggtgaactggcacaaaggttaatctcaagatgccgctagtgaaaagaaacatcgatcctaggcac

SEQ ID NO: 653350 - DNA, 51 bp, Homo sapiens
cctggatccagaacaagatggaggagatcgggaggatctccattgagatgc

SEQ ID NO: 653351 - DNA, 74 bp, Homo sapiens
taagcagaccaattaaggagctcctgctggaatcaaaataagaggtaatagcctgcagctggtgttttgagaag

SEQ ID NO: 653352 - DNA, 74 bp, Homo sapiens
agcaacctagtcagtctgcatttggctctggaacaactcctaattctaactaatctggtagcttctggtgctaa

SEQ ID NO: 653353 - DNA, 90 bp, Homo sapiens
gcagaggcttgggccgccgagctggacccggaccggttttgggtcctctccacccggatcctggccatgaaggcctcgctctgcaagctg

SEQ ID NO: 653354 - DNA, 90 bp, Homo sapiens
aagctgtctgtgaatgcccctgaattttacccttcaggttattcttccagttacacagtgcgagcccctatggttaatccaacattaggt

SEQ ID NO: 653355 - DNA, 97 bp, Homo sapiens
atttctttggcatcactgcagctagtaatttgccttctggattaattttgatttggctgctgggctgctaccttgaaatccaagccctaaaaatgcc

SEQ ID NO: 653356 - DNA, 100 bp, Homo sapiens
ttgttctgtatcagaagacaatatcatgcaagtgtggcaaatgttccaaagaactactggttcagattttagctcttcccaagttgtgaaaatagtgaag

SEQ ID NO: 653357 - DNA, 90 bp, Homo sapiens
gagccactgcgtgaggctagcactcatccgcttccgggtcaagagatatactgccattggagaactggggaaagctactgatacactaga

SEQ ID NO: 653358 - DNA, 101 bp, Homo sapiens
tccagttccacttcaccaaggacctggagacactgaagagcctgtgccggatcatggacaatggcttcgttcactggttgaggacccagttcccatctttg

SEQ ID NO: 653359 - DNA, 100 bp, Homo sapiens
gcggagacatggccaacatcgcggtgcagcgaatcaagcgggagttcaaggaggtgctgaagagcgaggaggttggagttgctgtgggtgagctgctgtg

SEQ ID NO: 653360 - DNA, 75 bp, Homo sapiens
agccaagagtgtttctaccaccaacattgctggccccaggatgactactcggtcctgtttgaagacacctcctat

SEQ ID NO: 653361 - DNA, 75 bp, Homo sapiens
gcaagagaagaattcagaagaaacaaaagtgccaccgaagagggagaagcatgacactggccaacactgcgtcca

SEQ ID NO: 653362 - DNA, 100 bp, Homo sapiens
ttcagcctcaaaaccgtcctgctgcttgctgaccaaatggttctgggccggagaaggggcgacgttcgggcaccccccgaatggacaatctttccttctg

SEQ ID NO: 653363 - DNA, 75 bp, Homo sapiens
tggctgcggcagcaggggactagcgtgagaggttatcaatactctggctgaccatcatcatcgtgggactgactt

SEQ ID NO: 653364 - DNA, 100 bp, Homo sapiens
cacaggcgggcactctctgcgggtcccgcggctcccgcggcttccggcccactcagcgcctccagaggcctcagacaggccgacggtcgcaaggtcctac

SEQ ID NO: 653365 - DNA, 96 bp, Homo sapiens
ggaaaaacgaactccgtccactaacaaaagatggctacgagggtaacatgttcgatatatggcagtgtatgggagaaattacatcgagcctttgcc

SEQ ID NO: 653366 - DNA, 75 bp, Homo sapiens
tcctcgctcatccgagccaccattgactggcacagcctccaggttggcgggctcatctgcgctggggttctgtgc

SEQ ID NO: 653367 - DNA, 75 bp, Homo sapiens
acaagaatggaatcaacagttctgggcaaaccagaatttgacttttagtaagggtagagtggagtgctgggaccc

SEQ ID NO: 653368 - DNA, 100 bp, Homo sapiens
agtggatcctctggccagctgactgcacttcttttttgagaaaggaaggaatatatcctgactgattaaccgcatgcacgagtctctcatgctcttcgac

SEQ ID NO: 653369 - DNA, 96 bp, Homo sapiens
agtggggcagttgtggccgtaggactgaacacggggaggtgggaacattctccatggccagtgaggaagtcttgaagaatagagccataaagaaag

SEQ ID NO: 653370 - DNA, 51 bp, Homo sapiens
ccaaactgtccaaggctttggcaatgtggaattagaagaagctattagaag

SEQ ID NO: 653371 - DNA, 90 bp, Homo sapiens
cggagtcgaggattccagggtcgaacactcggatggtggatgtggggggccagcggtcggagcggaggaagtggatccactgctttgaga

SEQ ID NO: 653372 - DNA, 95 bp, Homo sapiens
ctttgaggatctggaggacggagaggacctgttcaccagcactgtctccaccctagaggtgatttgatgaaggctgctgcaggagagttcgcaga

SEQ ID NO: 653373 - DNA, 50 bp, Homo sapiens
tggcttcccctctcttcaactagtggactgtgcattgtcacttattcgac

SEQ ID NO: 653374 - DNA, 50 bp, Homo sapiens
cagaaccacagtttatcatcccttcctgccctctactggtctatccgcag

SEQ ID NO: 653375 - DNA, 50 bp, Homo sapiens
aggagagcgtggggagctatgtgcaggtgctggagaatctggtaaaagca

SEQ ID NO: 653376 - DNA, 74 bp, Homo sapiens
gactcgctctacccggccccagggtacgctgccggtgtgcacaggtggcctgccatgggtatccatggtgacaa

SEQ ID NO: 653377 - DNA, 90 bp, Homo sapiens
cattcttcatgagcatagacagtctgtgtaagaagtactccagggaaacctcccaggtcctgaacgaggctgtgggggccctgatgtacc

SEQ ID NO: 653378 - DNA, 109 bp, Homo sapiens
gcggcacagagagggcctgggagcttgctgcagcttcagggacagggaggaggagcagcacaggatgctgagcagggcctctggagtgacagggcggagggagactcca

SEQ ID NO: 653379 - DNA, 100 bp, Homo sapiens
gacatctacgtgggctccattgagacagaccggggggtgcgagagcagaggcatttcatccttcatgaagccattcaggattttgaattgcatatgagtg

SEQ ID NO: 653380 - DNA, 134 bp, Homo sapiens
gagttgaggcgcgggtttggtggcgcgtttcagcgaagtcgcacgtgaaggatagcagtggcctgagaaaggtgctggagaatctggtaaaagcaccattgtgaagcagatgaggatcctgcatgttaatgggt

SEQ ID NO: 653381 - DNA, 100 bp, Homo sapiens
cagcaggcactggagctggtggtgcaggaggtctccagcgtgctcaggtcggcggaggagaagaaattgcaggtgctgcagtgtctgaaatttccgggcc

SEQ ID NO: 653382 - DNA, 100 bp, Homo sapiens
cagagtatagggaggacgtgggcccattcattgcaggctttgatcactcagactcgagccaaacaggcagctaccatgagtgaagtggagtggagaggga

SEQ ID NO: 653383 - DNA, 82 bp, Homo sapiens
agctttcacgaaggcaccgacgtcatcatgctgaccaccaatcagatccgtaagggggatatgagactttctactcggaata

SEQ ID NO: 653384 - DNA, 90 bp, Homo sapiens
ggcggccccgcgcagcccccggccgcagcgcaggcagcccagcaggcagatcgggagcggtgccgagaaaaatttccttactagatgaca

SEQ ID NO: 653385 - DNA, 82 bp, Homo sapiens
tggacgacattcgaaggatggaagaagagacgaagagacagctggatgaagaggagacatcacagctttcccagatcgggag

SEQ ID NO: 653386 - DNA, 74 bp, Homo sapiens
gcggatttttggcctcatactctgttatagataaacaaggagccaaaaacctgtatatcatctccgtgaagggg

SEQ ID NO: 653387 - DNA, 100 bp, Homo sapiens
tcggaggccaagcctgcagcggtggctgctgaaaatgaagagggcttctatgaggaggtggccaacccactgctgacgggtgtggagatggagtaccccg

SEQ ID NO: 653388 - DNA, 75 bp, Homo sapiens
atttgctggaaaaaatgacatccagcgacaaggactttaggcactttccacacatgaggagaagaagagcttctg

SEQ ID NO: 653389 - DNA, 95 bp, Homo sapiens
ctatggcgaacaggaactggatgccaactctgcccttatggaattggacaaagctttaatgaagcaccagttgagattcccagtccttctgaaac

SEQ ID NO: 653390 - DNA, 98 bp, Homo sapiens
aagatcggccccctgggtctgggaaggatggagacgctgaaggataagaccctgcaggagctggaggagttgcagaatgactcggaggcgattgacca

SEQ ID NO: 653391 - DNA, 75 bp, Homo sapiens
cgtggccagcactggctccttgatgatagcagactccttgaaagcagggtccttgtttagtgcatctttgcccac

SEQ ID NO: 653392 - DNA, 75 bp, Homo sapiens
ctctatttgccaaaggaaacttgccttatcaccttcttgcttgcaggtgcagattcactttataggaacagcttc

SEQ ID NO: 653393 - DNA, 50 bp, Homo sapiens
gcatgcctcaccaagtcacatgacaagcatcattgaagtcaacaagagag

SEQ ID NO: 653394 - DNA, 100 bp, Homo sapiens
tggagttcttacaacatggcagacattgacaacctactcatgaaggttacttctcttgtttggatatctggacgctgtttttggactatctgacaagtaa

SEQ ID NO: 653395 - DNA, 82 bp, Homo sapiens
aggcggcggtgtgggcgcgtcaggccgcgacgagggcgctgagatataacacgtgggaaccggaggagaacatcctggaccc

SEQ ID NO: 653396 - DNA, 100 bp, Homo sapiens
ctcagatcgtgtgcccagaccttccctgccaaacaggagaccagcgggtggtgaaactctacctaaagtccaaggagacagggaagaagtttgcgtctgt

SEQ ID NO: 653397 - DNA, 101 bp, Homo sapiens
cttgaagacttgaattagattacagcgatggggacacagaagaccaagaaacatcatggtgtataattgtacaacaggcagcactaatcctttccactggg

SEQ ID NO: 653398 - DNA, 49 bp, Homo sapiens
tgggaaccagtctttcaaaattggactaaagaggatggacatagaactt

SEQ ID NO: 653399 - DNA, 100 bp, Homo sapiens
ctggaatgtgaagagacatgagacagtagtcaaatactcaggaattacatgaacgacagccttcgcaccgacgtcttcgtgcggttccagccagagagca

SEQ ID NO: 653400 - DNA, 100 bp, Homo sapiens
cataatccccagtgcagccagggtttgtgtgtcatcgtactggagtagagggccgactcttcccatgaaggctcaaactgctttttctgcaaaccctgcc

SEQ ID NO: 653401 - DNA, 98 bp, Homo sapiens
tcaaggccaagatggacgccgagcaggatcccatgatccccccaggggtgcccgatgcccaccccagggaaggagacctgccagtgttccaggaccag

SEQ ID NO: 653402 - DNA, 101 bp, Homo sapiens
tgtccaaatgttggagcatttgattgaaaaatccttcttagccattttaaaggtgtctgacttccagcaactgctggcctgtgccagggtgcaagctgagc

SEQ ID NO: 653403 - DNA, 73 bp, Homo sapiens
gatggcagccagtcagtggtggaggggtgggaaccgccaaacctctcccttctttttgacttcacccttggat

SEQ ID NO: 653404 - DNA, 122 bp, Homo sapiens
attgccgaacgcgatgcccgagggcgctgtgagcggggtggccttagctcgccgaggctggagctcttgtccctggcaaagcgaaagcgcagtgactctgaggagaaggagccgcctgtgag

SEQ ID NO: 653405 - DNA, 82 bp, Homo sapiens
gccgaactccaagggacgacgctcgcggaagcagaggtttgggacctgcctagagctggaacgttacctccagagcgagccc

SEQ ID NO: 653406 - DNA, 50 bp, Homo sapiens
ggcgttcgctgcgcgtgcacattccgattgtaaaccatggctgtgtggat

SEQ ID NO: 653407 - DNA, 100 bp, Homo sapiens
taatcaatttatgatgctgatgcaagcattagtgctgttcacactggactccctggacatgctgccagcagtgaagctgtaaaactaccatagaagctat

SEQ ID NO: 653408 - DNA, 82 bp, Homo sapiens
gggaaccctggtcaccgtctcctcagtctgccatgcacggactgatcatgggcggcctggaagtgatctcaatcacagacaa

SEQ ID NO: 653409 - DNA, 84 bp, Homo sapiens
gccagcccgtgccgcgagcgcggcctgcaggaggtggagccatcgaagcccccacccacaggctgacagaggcaccgttcacca

SEQ ID NO: 653410 - DNA, 100 bp, Homo sapiens
aattatctctggtgctgcagctctatgattctgggcctcccccatctactgtcattaaccaaaatgaaacatttgccaacataatttttaaacctactgt

SEQ ID NO: 653411 - DNA, 104 bp, Homo sapiens
tccaggccggctctccatgatgtccttcatcctcaacgccctcacctgactggtccctcttccggatgttctcccgaaccctcacggagccctgccccctggct

SEQ ID NO: 653412 - DNA, 100 bp, Homo sapiens
aagcttccaggtgtcccagaaacccaggaaatcgagactcatgactcccagagaggatggcatctagaagggccaattcctgtccccccagcagcatggc

SEQ ID NO: 653413 - DNA, 90 bp, Homo sapiens
taaccatcggtcctggatctccaccaccagcaatatttctccctcgagtggctgggaaacttggcaagagaccagaggacccaaatgcag

SEQ ID NO: 653414 - DNA, 51 bp, Homo sapiens
ctcagcggcagcggcaagagcatgaacgcggctacttctacaagtccgaac

SEQ ID NO: 653415 - DNA, 82 bp, Homo sapiens
ctcgcagagaaacaagcttatcgtggtcgtgcatgcctgcagggctgcctgaccatggtccccagtgagaaggaagtggaac

SEQ ID NO: 653416 - DNA, 50 bp, Homo sapiens
cctcctgagtagctggagctacagatcaacaaactccatttatgtaaacc

SEQ ID NO: 653417 - DNA, 100 bp, Homo sapiens
cagaactggatgaaaagcatcaaggaggaggcaaaaccttcaactgaggacttgggggataagaaggaaggtgaatatattaaactcaaagtcattggac

SEQ ID NO: 653418 - DNA, 78 bp, Homo sapiens
agaggtcaatctttatgtacagcaccccagcagtcagtgactactctagaattgctttgggtcctaaacggggtccat

SEQ ID NO: 653419 - DNA, 51 bp, Homo sapiens
gcgtgtttatctgacacggacgtaggcaagggctgctgtgctgctctcaaa

SEQ ID NO: 653420 - DNA, 131 bp, Homo sapiens
ttcgttccccgccaaccgcaaccattgacgccatgtcgggttattcgagtgaccgagaccgcggccgggaccgagggccccttcccagctgcctgcctgccctagccagctcccaggtgaagagactctcg

SEQ ID NO: 653421 - DNA, 82 bp, Homo sapiens
gccggaggtccagagatcctgagagcccgagcgcccagcgccgcgccgggagagccaaatctcctcagccacctgttgaaga

SEQ ID NO: 653422 - DNA, 98 bp, Homo sapiens
ccgcctgccctcagccgcccgctggccgggagcggagcccctgtggtaagactttgaccccgacgcaggcttcagtgattgccgcggatcagaagcct

SEQ ID NO: 653423 - DNA, 98 bp, Homo sapiens
tgcagaagacttatttgtaaacatacgagggtttcctcaagcatctgcttcctacatattactacaatttgcacagtatgggaatatcttaaaacatg

SEQ ID NO: 653424 - DNA, 100 bp, Homo sapiens
gaagaagctgaggatgaagaagatggatttggaaacatctcaccacgcacagaaggcggcaaaatattctgtatcatctatgccttactgggaattcccc

SEQ ID NO: 653425 - DNA, 100 bp, Homo sapiens
cggacgggaaggcgggagacgagaagcctgaaaagtcgcagcgagctggagccgccggagtgcttaagaaaagatgcagagtctcgtagaagagaacttc

SEQ ID NO: 653426 - DNA, 100 bp, Homo sapiens
caccttgaccagaatgaccctcgtttcattggaaactggaggattttgaaggaagtgcatatggattacaaaactttaagaaacaaaagatattaaacaa

SEQ ID NO: 653427 - DNA, 98 bp, Homo sapiens
gaagaacttggactgattattgatttaacatatactcaacgctattataaaccagaggttctgcagcatatcttgaatcctgctttcttgtacagctt

SEQ ID NO: 653428 - DNA, 58 bp, Homo sapiens
agccgcagtgggtcccggacaaggaggtctctaattaacagaagatggcaaagcccag

SEQ ID NO: 653429 - DNA, 125 bp, Homo sapiens
actggctgagcgagaagaaaatcaagaagctgaatttccaggccttcgccgagctgtgcagaaatggatgaaaagaggctgctggatccagggttgaaggttcataaaggcctctgggattatac

SEQ ID NO: 653430 - DNA, 51 bp, Homo sapiens
ggtggacagatctgagagatactgagaggctcacaggacacctgcatgccc

SEQ ID NO: 653431 - DNA, 83 bp, Homo sapiens
cgtgaacggacagtcccccccagagcccgcagcttcatctcccagctcaaacaacacagcggccacaacagcagctattgtcc

SEQ ID NO: 653432 - DNA, 50 bp, Homo sapiens
cagtattgagccaggagttgaggtggacccccaaaagtacaagggcatat

SEQ ID NO: 653433 - DNA, 100 bp, Homo sapiens
ccgccgccgccttgctgctgctcaaagctgctgccgccccttgggctaaaaggagatgagtatgatgtatgtgccatttgtttggatgagtatgaagatg

SEQ ID NO: 653434 - DNA, 82 bp, Homo sapiens
tcatgtctgcgagccaggattcccggtatcctgtggtctgaggccatcttcctcgaggcaaggccccagaggaggaccaaga

SEQ ID NO: 653435 - DNA, 83 bp, Homo sapiens
cttgggccagaaggttctctggtggaggcgctcttcctggtgtcccgcccagtaggatgagacctgcacgcagtggctcacag

SEQ ID NO: 653436 - DNA, 87 bp, Homo sapiens
cttccaacaccagtggaagatgatcacatcccagttggcaaacatgaattgactgggcataaagtagctgtgaagatactcaatcga

SEQ ID NO: 653437 - DNA, 98 bp, Homo sapiens
taaggatctctttggcaagtttgatagggatgaggaagaaatgaccaaacgagatgacaaaagagatatcaacagatactgcaaggagaggccctcta

SEQ ID NO: 653438 - DNA, 129 bp, Homo sapiens
tagaagacaaaagcagctcttgccagttttgaataatttctgcatgaatagaccagtaagaggtatggtgtggagcctcctggtttgataaagctggaaaaagagattgaacaagaagaaacactttct

SEQ ID NO: 653439 - DNA, 51 bp, Homo sapiens
atgggagggccaccaatgggacaactcaactgagaagtcatttccttggag

SEQ ID NO: 653440 - DNA, 75 bp, Homo sapiens
gcggaacagccacagcagcctcccaaggagtctgcaagttggttcctctggaggatgagtctgtggatgtggctg

SEQ ID NO: 653441 - DNA, 83 bp, Homo sapiens
agaagcgaccaaagcgcctgaggaccggcaacatggtgcggtcggggaataaggtcagaagaggccaagtgatggaaatagtg

SEQ ID NO: 653442 - DNA, 80 bp, Homo sapiens
tgggttgaaacccgggcgccgccaagatgccgatcagtcgcatcgaatacattcattcaaagaacttcatccaccgggat

SEQ ID NO: 653443 - DNA, 98 bp, Homo sapiens
gatgggaaggtggatcccgccgggaggtactttgctgaaattggcgtgttagccaaggctttcattgaccaagggaaactcatcccagatgatgtcat

SEQ ID NO: 653444 - DNA, 95 bp, Homo sapiens
cacgagcagtgtcaagtgccagccctcccgcgtccaccaccgcagcgtcaaggctcagctgtcgcaggccctggaggagctgggaggccagaaac

SEQ ID NO: 653445 - DNA, 80 bp, Homo sapiens
agcacctatcacttgttccctccaagacaactgaatgggagtgcatccgccccaacccttttccccctcgtctcctgtga

SEQ ID NO: 653446 - DNA, 100 bp, Homo sapiens
gaaacccttccagctcgatctgctcttcgtctgcttcttcctcttcagtcaagatgatcatagcagggttaagctagcacagcttgctgaaaaggatggc

SEQ ID NO: 653447 - DNA, 75 bp, Homo sapiens
aaaaaaatgaccttcggtatattgaaatgcagggccgttgctccagggagaactgcaaatatcttcatccacccc

SEQ ID NO: 653448 - DNA, 49 bp, Homo sapiens
ctgaacattactcttccagaagagggtgaaaaggaacagcctgtatttg

SEQ ID NO: 653449 - DNA, 82 bp, Homo sapiens
ccagccgcaccatgccgctcctaagcctgcacagccgcggcggcagcagcagtgagagagagtcacaccccaaagcctcttt

SEQ ID NO: 653450 - DNA, 75 bp, Homo sapiens
gcagaacgtcaacaccaagtgcatcaccatccccagggatacccacccaccatcccagggtctacaacatccaca

SEQ ID NO: 653451 - DNA, 84 bp, Homo sapiens
agtgggtgtaatacatcatgaactgcagggatttttagactctgaggagcagttggagctaatccacattatggaaatggaaac

SEQ ID NO: 653452 - DNA, 74 bp, Homo sapiens
cgactgtgtaaacaactagagaagattggacagcaggtcgacacttcttggacacttaatgattgttggcaaga

SEQ ID NO: 653453 - DNA, 100 bp, Homo sapiens
tgcaatgtttagccaacccaaattaccttaattgaactgcaagcacatgttgaccagataactgaaatggcagcagtaatgaggaaagccattgaaattg

SEQ ID NO: 653454 - DNA, 82 bp, Homo sapiens
ggagcggcccgcgcctgggctgccggcacttcgcggcagggcgccctgcgtccggcagaggaggcgagcatcccgctcaggt

SEQ ID NO: 653455 - DNA, 100 bp, Homo sapiens
accccgtggatgttctgcgcacccgctttgcagctcagggtgagcccaagttgattccaggcgtgaattccaagaagaaccaaatgtattttgactgggg

SEQ ID NO: 653456 - DNA, 82 bp, Homo sapiens
ttcccgtccatgctggccctctctgtttaattagacacttcagaattttgatcacctaatgttgatttcagatgtaaaagtc

SEQ ID NO: 653457 - DNA, 74 bp, Homo sapiens
gagctgccggtggccggggccctgcgccaacctcgtaaggactcagacgtctactaagtaaacaggaaactggg

SEQ ID NO: 653458 - DNA, 100 bp, Homo sapiens
cgggaagcgtcgcacagcgactgcatcaccatggagccgagggcagttcattccttggaagaagctgtaccatcgatacctgatgaatgaagagcaagct

SEQ ID NO: 653459 - DNA, 80 bp, Homo sapiens
acagtgactgaaggaatgaattgaatcttgagacgggtcctcaccagaaaatattttcagaacctggaagcttatccatg

SEQ ID NO: 653460 - DNA, 73 bp, Homo sapiens
cgtgaggtcaacctgcgcccccagatgtcccagggcaaccatcaaagcggatcttccagccatcaaggagggg

SEQ ID NO: 653461 - DNA, 82 bp, Homo sapiens
tttattcttttcagaatagaaaacactctgaaaagatggctaaattagtctgtgctgagacctataaccctgatgaggaaga

SEQ ID NO: 653462 - DNA, 50 bp, Homo sapiens
ggcaacagagagatcactgcaggctattcacgaaaagcagcagctctaga

SEQ ID NO: 653463 - DNA, 82 bp, Homo sapiens
gccccctcacatctatgccatcacagacaccgcctacaggagtatgatgcaaggtgccaacatcgcctctggtgaggaagtc

SEQ ID NO: 653464 - DNA, 83 bp, Homo sapiens
ccaagagggtgttcgactgctagagccgagcgaagcggagtaccctgacttctaccggaagctctacggcctcttggacccct

SEQ ID NO: 653465 - DNA, 90 bp, Homo sapiens
aagatgctgagccggaatccggacaattatgtccgcgaaaccaagttggacttacagagaggtgctggagaatctggtaaaagcaccatt

SEQ ID NO: 653466 - DNA, 123 bp, Homo sapiens
ttcctctgctcgcggttagcccgtcagtccctgctctgtgcgcgcctccatctgggccatggatgggaggaggaagccaagaatctggtgagcgaagccatcgcagctggcatcttcaacgac

SEQ ID NO: 653467 - DNA, 97 bp, Homo sapiens
tggccaacgcagacaccatgaaggtgctgggagtgcagcggcctctcctacaggtttctgagtcccttcaacatgatcctgggaggaatcgtggtgg

SEQ ID NO: 653468 - DNA, 107 bp, Homo sapiens
ctgtgctcgcgctactctctctttctggcctggaggctatccagcgggaggtcatcaaggcttgggacattgccatagccaccatgaaggtgggggaggtgtgccac

SEQ ID NO: 653469 - DNA, 51 bp, Homo sapiens
aggggctccggctggtctgtggtgagttcaacatctgtgccaacagcagcc

SEQ ID NO: 653470 - DNA, 97 bp, Homo sapiens
cagaagaagcgcgtcaccatgatcctgcagagtcccgccccgcagggtggagcccgtctgctcagggttgcaggcccagattctccactgctaccga

SEQ ID NO: 653471 - DNA, 75 bp, Homo sapiens
aaccagaaagagattgggtacttaatggactgatcctttgaaatactccagccatgactaaaagagaagcagagg

SEQ ID NO: 653472 - DNA, 97 bp, Homo sapiens
aaggagctgaactactttgcaaaggccttggagagcccagagcgacccttcctggccatcctgggcggggtgggttaggagtacagaagatgctgtg

SEQ ID NO: 653473 - DNA, 50 bp, Homo sapiens
gaagaagtactctcatggagacaagcgtttgcctcagcatggagggcggg

SEQ ID NO: 653474 - DNA, 71 bp, Homo sapiens
tggtcgcaccaccactccacagcagaccaagtatatgaatgacctaaaggtacaaataaagacggagagag

SEQ ID NO: 653475 - DNA, 97 bp, Homo sapiens
agtgaaaagtgcagctgcaaccaatctctcagccctgtattatatggttgggggccgtcccgctcctaaggcaggaagatggtggccgcaaagaaga

SEQ ID NO: 653476 - DNA, 50 bp, Homo sapiens
gttttggaatgtacccatctcagatgaatttggacccaattaaatccttt

SEQ ID NO: 653477 - DNA, 75 bp, Homo sapiens
catcttctccctcccttgcctcaggccctccctatcctgaagacattagctgagagtctggcaccttttaaaggt

SEQ ID NO: 653478 - DNA, 100 bp, Homo sapiens
cggaggctcctcggtccttcagcacccctcggcccgacgcacccacgcccctcaccccccgagagccgggacttcatctgcagcatcctcaccattaaaa

SEQ ID NO: 653479 - DNA, 100 bp, Homo sapiens
tctccccgaaggcctgccagcacccctggagaagcgcgttaaggagctggctcagttttacagctcccagcacagtaggaaagagaaatttgagtcctag

SEQ ID NO: 653480 - DNA, 82 bp, Homo sapiens
ttatacctagaagtctactaatggacagttagtcacccacctacatgttgagatgaccaatttgcagatcaaggaagagaaa

SEQ ID NO: 653481 - DNA, 74 bp, Homo sapiens
ctaagccaagggattcaggtgtggtgccggtgggaactgaggaagcgcccaagattagaagcccaggacccagg

SEQ ID NO: 653482 - DNA, 83 bp, Homo sapiens
aggagtcaaagttcatgtggatcgtctacagtaaaacaggcttggtgtcatctacctgggacagacagttttacttcacgcag

SEQ ID NO: 653483 - DNA, 83 bp, Homo sapiens
gagcgacaagccgctggcagccgcggatctcaccgccgctcaggttgagtcccagtttctgccgctttatctttcccgcctcc

SEQ ID NO: 653484 - DNA, 87 bp, Homo sapiens
gcggtctctgctgaagagagaagatggcgcttgacggaccagagcagagagatcaatgtcttattgtgatgagtctcgactgtcaaa

SEQ ID NO: 653485 - DNA, 50 bp, Homo sapiens
ttcctatgaccctggaattactgcaggttggtgatgacaaaactgtgaag

SEQ ID NO: 653486 - DNA, 98 bp, Homo sapiens
ggataagatcgttccatcactgcttttcaatctacagcatgtagaggaggcagagagattgttgatccatttcagatacttgtggcagcaaacaaagc

SEQ ID NO: 653487 - DNA, 75 bp, Homo sapiens
atgttaacagcattggtcctgtgtcatcaataaacatggagagagtaactaggattctagcttctctggattttg

SEQ ID NO: 653488 - DNA, 95 bp, Homo sapiens
agtgttgctgcaacatagagctgacattaactgtcaggacatgaaagatcagatgtcaacttcatctgtgcaggcattagctgaaagaaaaaata

SEQ ID NO: 653489 - DNA, 100 bp, Homo sapiens
tttacagtttacatccctgataactatccagatggtgactgtccagtcatgccacctcagaacctggaaagggcagatgaaatttgcattgctggctccc

SEQ ID NO: 653490 - DNA, 100 bp, Homo sapiens
gtttctttggggacaagcactttatatcatcgcaaaactcctggatttattcctgacgacattgaatgccaccactagtaccttccagtttgaaatatgg

SEQ ID NO: 653491 - DNA, 75 bp, Homo sapiens
gcatcaactttgatgtcaatggctacattgttggagccaacattgagacttctacttgtttgcggccccctacta

SEQ ID NO: 653492 - DNA, 100 bp, Homo sapiens
gcagtcatggctagagcagatttggaacgcagggcctgtttgccagaggtccatcttgagtggcctcttcccacccagtggtggctctgccttcatcctg

SEQ ID NO: 653493 - DNA, 100 bp, Homo sapiens
gactgactcatgatccaaagtacaggaaatgggcctgggaagccgtagagtactggagaaaatgaaactgggattgacccatcaagatgcttggctcaat

SEQ ID NO: 653494 - DNA, 98 bp, Homo sapiens
gataaaatcaagttgctgaaagctgcctttctgcaatactgcaggtcccaggtgtgacaccttcagcaggtctcagggaagatggcagccctagggga

SEQ ID NO: 653495 - DNA, 98 bp, Homo sapiens
gtgacagccgcgcgcctcggccaggtactccaaagattcaggtttactcacgtcatccagcagagaatggaaagtcaaatttcctgaattgctatgtg

SEQ ID NO: 653496 - DNA, 83 bp, Homo sapiens
gtgcgcggacatggcctcaaacggtctgagttcactgacaccatcctgtccgtgcacccctctgatgtgctggacatgcccgt

SEQ ID NO: 653497 - DNA, 49 bp, Homo sapiens
tgccagggtggtggactatttaacaaaaaacaatatgatgcgtttgtga

SEQ ID NO: 653498 - DNA, 101 bp, Homo sapiens
gcccggattatagtctctcgccacagcggcctcggcctccccttggattcagacgccgattcgcccaggtaatctgtaagtcagatgctccaacaggggat

SEQ ID NO: 653499 - DNA, 88 bp, Homo sapiens
gagttgagccgcggcgtgtgcgccgagcgctactcgcaggaggtcttcggaaacaagcctccaggtctgcttccccgcaaaggactat

SEQ ID NO: 653500 - DNA, 100 bp, Homo sapiens
gcgatggaataatgcccagcggcccgccaggtcccggtaccccctgtaccggctgggtggcccacaacttcgggtgttccgaaccaacttcttcattcag

SEQ ID NO: 653501 - DNA, 90 bp, Homo sapiens
tgctcgcaaggcgggggaggcggcggcccagccacgatggataccagaataccattgttgctggaagtcttattacaaaatcaaacctgc

SEQ ID NO: 653502 - DNA, 96 bp, Homo sapiens
tagcacagctcactgcagcaactttgacaaaactggaagaatttcgcagtaagacagcaacaggaaaatgcccagataatcagagaagtggaagtg

SEQ ID NO: 653503 - DNA, 101 bp, Homo sapiens
gaaaacgacagagaagcttctgaaaacatttttgaaaagacaagccatcaaaactgccttcagaagcaaaagattgatgaagatccctgcctcattcctga

SEQ ID NO: 653504 - DNA, 98 bp, Homo sapiens
tactcctgaaagaggtttttcccttcggaaagatggccctttggacatgagaatggatggtggcagtaacagtgtatcatgtatgccactgattccag

SEQ ID NO: 653505 - DNA, 100 bp, Homo sapiens
aggcctcgagtgcgatatggcaaagccaaagctcccatccaagacatctggtaccacgaggatcggattagagcgactgcctccaagtggaagttggcag

SEQ ID NO: 653506 - DNA, 74 bp, Homo sapiens
ctgactgaatctgatgagcatttttcgacaaagcttatgtatgaaggacaatacatggcttgatatacaacgcc

SEQ ID NO: 653507 - DNA, 100 bp, Homo sapiens
gccgagtggtctaaggcgccagactcaaggtgtggcacattggttgacctttgccagggcccccaccttcggcatactggacagattggaggactgaagc

SEQ ID NO: 653508 - DNA, 75 bp, Homo sapiens
gcggattcgccgaggcaccgaggcactcagaggaggggccaaaccagtgctcctgccacctctctggctgccccc

SEQ ID NO: 653509 - DNA, 75 bp, Homo sapiens
cgctgcagctctccgtgagcaacctgcagcaactggaacagatccagaaggagctaagtgttttggaagaggata

SEQ ID NO: 653510 - DNA, 100 bp, Homo sapiens
gcatgtggctcctggtcagtgtaattctaatctcacggatatcctctgttgggggagaaggtatttcagaccgaacaaaagaatcttttcaggctggaaa

SEQ ID NO: 653511 - DNA, 90 bp, Homo sapiens
aggctgcaacggagaaggggctttctctcctgcgctatggtggaaacctgtccctccaaagtgccatgagtgtacgattcaacagcaacg

SEQ ID NO: 653512 - DNA, 98 bp, Homo sapiens
gtttgaatctgttgacaagattctgaaagctgaacagagaattctggcactgcactgggtaggaaaaaggacatggatttgattgacatactttggag

SEQ ID NO: 653513 - DNA, 76 bp, Homo sapiens
tggtgcatccttggcagaaagtgaggaggaaaacacccccattatgtgggacctaggaaaaggcctgaagattccc

SEQ ID NO: 653514 - DNA, 102 bp, Homo sapiens
cagacacgtacattctcttcaatccttggtgtgaagctccccagttaaagatctcagatgaccggctgactgtggttggagagaagggctactctatggtga

SEQ ID NO: 653515 - DNA, 74 bp, Homo sapiens
atccgccaggagccctcttccttcagaaatggatgaaaagaggctgctggatccagggttgaaggttcataaag

SEQ ID NO: 653516 - DNA, 100 bp, Homo sapiens
agcggcagcgcccccggcaggcgcggtggcggtggcgcgcagccagttacagctcttttgaggaagcttaagcagcaatccagggaaagtgttgaagaaa

SEQ ID NO: 653517 - DNA, 74 bp, Homo sapiens
gtggccctttcgggggaccttcgagacaaggctgtcagcccctagccaatccgggggacccaggacatgcccca

SEQ ID NO: 653518 - DNA, 50 bp, Homo sapiens
ggaaaatgtgatgcatgtctcagtggttcacaaaaaggattctggctttt

SEQ ID NO: 653519 - DNA, 100 bp, Homo sapiens
gcctccccaaccccaccatcccaccaaagggggctgctgaccgagagagctcactcagccaggtgtgtagctgggacggtgctggtctgagctggacctt

SEQ ID NO: 653520 - DNA, 82 bp, Homo sapiens
cttggtcccagagtcatcatgaaggtgtgagttcttgatacgaatgaaaggccaagagtttgttgatgagattcaaggtaga

SEQ ID NO: 653521 - DNA, 100 bp, Homo sapiens
ggcggcgctgccgcctgaagtgcgggcgcagctggcggagctggagctggagctctcggagggttagtggatgacagatgtgtggtgcacccagaggccg

SEQ ID NO: 653522 - DNA, 50 bp, Homo sapiens
caggatgccttggccagtaatataaggatgacattcggctgctgccgtca

SEQ ID NO: 653523 - DNA, 100 bp, Homo sapiens
gtaaaagaacaccaagaatcgatggacatcaacaaccctcgggactttattgattgcttcctgatcaaaatggagaagaatacaaatggagagatttgca

SEQ ID NO: 653524 - DNA, 90 bp, Homo sapiens
atgcacacttcgagttttatcaatcaaaggggctgcgatttatccagttgaaaaatccttggagtcatttacgttggaaaggaagataca

SEQ ID NO: 653525 - DNA, 75 bp, Homo sapiens
agtggagcatcactgacggctatgtccccattctcggcaacaagctgaccatgccactgcctcggtacggctccg

SEQ ID NO: 653526 - DNA, 96 bp, Homo sapiens
cccgctcgaccagatcttgatgggaacctatgctcgaaggtgaaccaaggactgggttttgctctggaagcctgtcctgattgcttctgtaatctg

SEQ ID NO: 653527 - DNA, 100 bp, Homo sapiens
gaagagtttgaaagcgtgctccacaaatatttacagtcggaggagtactcggtgaaatcctgtcctgaagactgtaaggcccagcagcaaagaaacctgg

SEQ ID NO: 653528 - DNA, 88 bp, Homo sapiens
ttgcgagctgcagctgcgatctctgtggtaggcccagtgtgtgttttaatagaaaagttgtcactttccaaaatgccctttagaggtg

SEQ ID NO: 653529 - DNA, 80 bp, Homo sapiens
caaactgcaataagccgccttccaaggtttttcgttggaatatacgttgcacatttatggcgattctgagtgtgagggca

SEQ ID NO: 653530 - DNA, 100 bp, Homo sapiens
ctaaagcttgacggcttggacgaagatggggagaaggaagcgagactcatacgcaacctcaatgggcccgaaagatccccatcatcattcgccgttacct

SEQ ID NO: 653531 - DNA, 75 bp, Homo sapiens
tccttaatccggttcccactgatgacaattgaggaatttgcagcaggttttaaaatcaaagatgggaaaatcgga

SEQ ID NO: 653532 - DNA, 75 bp, Homo sapiens
caccatgccgctcctaagcctgcacagccgcggcggcagcagcagtgagagtgctgagcttgcaagacctctgct

SEQ ID NO: 653533 - DNA, 138 bp, Homo sapiens
cgcagtgttggcctgcatgcctgactgccacacacctccagaatcaggtgtctgaaaatactatactggcaattgctggagaagattttgcaattgttgcttctgatactcgattgagtgaagggttttcaattcata

SEQ ID NO: 653534 - DNA, 100 bp, Homo sapiens
gtgttaaaatctgtcgtgataccgaggaaggccccgagatcccaggcactgagtgactgcatactccgattacaaggagagctttaatacgattggaaac

SEQ ID NO: 653535 - DNA, 96 bp, Homo sapiens
tggcgtccctggtctaggcggagaaccgcctgggcgatgagtgagaacctcgacaacgagggccagttacaacagaagacactcctatggatgcta

SEQ ID NO: 653536 - DNA, 100 bp, Homo sapiens
accactcaagagtcataggattagatgatccaagtcaccaagaaattactgtctcaagtgatacgggtatgttagagcccaccaaggaaccactgaaacc

SEQ ID NO: 653537 - DNA, 50 bp, Homo sapiens
cccaaagtgccatgtctttaatcttgagaattacattgtggaaaacatga

SEQ ID NO: 653538 - DNA, 78 bp, Homo sapiens
gccgcaccctacggcatcgaaaggagcatcagatccatgctgctgctgactcggagccccacagcttggcacaggctc

SEQ ID NO: 653539 - DNA, 100 bp, Homo sapiens
ctcagcctcctaagtagctgggactacagtatggtttgaagtggtgaacatggatttttctcggcttcacatgtacagtcctccccagtgtgtgccggag

SEQ ID NO: 653540 - DNA, 114 bp, Homo sapiens
gttttgtccagggcagcatctctggtgcatgctgatgacgaaaaacatttccttgatagctgccgtgccagtactctattggctgagctcgatgatgatgaggacttacctgag

SEQ ID NO: 653541 - DNA, 100 bp, Homo sapiens
ggatgaccaccaccctcgtgtctgccaccatcttcgacttgagcgaagttttatgcaagagccatgtccattggagcccgttcccaatcagctcgtactt

SEQ ID NO: 653542 - DNA, 74 bp, Homo sapiens
cgcaaccaccgccctggccatctaccatgtggtgcatctgcagacgcagcaggaggtgaagctgcgcatgacgg

SEQ ID NO: 653543 - DNA, 88 bp, Homo sapiens
gaaagcatttaaccagcatggctacttcatattttggaaagcagtttttaagacaagctgtggaaaatctctgttctcacaaagtctc

SEQ ID NO: 653544 - DNA, 96 bp, Homo sapiens
catcgtggaggggaagaaccttcccgccaaggacatggtctcctatggacagaagtgcgggcaaggagctttgttcctccccgatgtcaccctccc

SEQ ID NO: 653545 - DNA, 50 bp, Homo sapiens
cgtggaggcagaggtggcatggggaatcagagatcattgatttcttcctg

SEQ ID NO: 653546 - DNA, 100 bp, Homo sapiens
cttggcccagctggcagcccagcgggaggatctggagacagccatggagttctacttagaggttgtagacactcctgggatcctggaccaccctctggag

SEQ ID NO: 653547 - DNA, 90 bp, Homo sapiens
ttcatacaccatgcaaaacagaaccttccaaatttccttttccaactaaggtcaccaagaagttctactcaatgggctgctacgagatct

SEQ ID NO: 653548 - DNA, 50 bp, Homo sapiens
atggcggccttgaccagccagtggaacctagaaagattgtacaatgaatg

SEQ ID NO: 653549 - DNA, 75 bp, Homo sapiens
agagttcgaggtggtgggactcaccgctctggccagggtgcttttggaaacccagaagctgcacctggccgagaa

SEQ ID NO: 653550 - DNA, 71 bp, Homo sapiens
aggaggaggaggaggggctccggctggtctgtggtgaggtctgggaggggctgaacgtggtgaagacaggc

SEQ ID NO: 653551 - DNA, 82 bp, Homo sapiens
gacatggacgaagccttcaaatccatcaagctcatcaaaaggttagagcagccagcgggtacagaatggattttggaagagg

SEQ ID NO: 653552 - DNA, 87 bp, Homo sapiens
gagacagaagaagctggaggccggcaaagccaaggaattgtcttagaagaaagaaggcaagccaccattttacccacgtaaatatat

SEQ ID NO: 653553 - DNA, 100 bp, Homo sapiens
catgatagagcagagtggaccaccccatgaacctcgatgatccgcccaccttggccacccaaagtgctgggattacaggtgtgaaccactgcgcccggcc

SEQ ID NO: 653554 - DNA, 82 bp, Homo sapiens
gtaaccgctacccaggaggcggagcggacaaggctccggcctgcgaggagtgtggacgaatgtggaacctcgctctgtggct

SEQ ID NO: 653555 - DNA, 76 bp, Homo sapiens
ctttcccagatgtttataatgagggcacacagggctgatcccttatccaacatggttctaaccttcagtactaaag

SEQ ID NO: 653556 - DNA, 75 bp, Homo sapiens
cttctgatttctgccattgggcctatgtgcttcccaagctgtatgtgaagctacattactgtgtgagttgtgcaa

SEQ ID NO: 653557 - DNA, 100 bp, Homo sapiens
ggatttcctggcgccaatggagagaagggcggcaggagccagcgggttgtgctgcagctgaagggccacgtcagcgagctggaagcagatctggccgagc

SEQ ID NO: 653558 - DNA, 100 bp, Homo sapiens
ctgggctccatcctgagctccatggagaagccacccagcctcggtgaccaggagactcggcgcaaggcccgagagatttacaaacgaggaccacctggca

SEQ ID NO: 653559 - DNA, 82 bp, Homo sapiens
atcaaagtcatctccatgggcaacgccgaagtggggaaagtctggccgtgggcctgggcttcggggcactggcagaggtcgc

SEQ ID NO: 653560 - DNA, 88 bp, Homo sapiens
gtgctttgcccaaggagatggtctcattaaggtggataggcatgtagacctgctagaagttgcccaggaaactgatgggttttcagga

SEQ ID NO: 653561 - DNA, 100 bp, Homo sapiens
agtcttgaagaatagagccataaagaaagcaaagcgcagaaatgttggatttgaaaaatttaaaagcctgttgattcaagaactttctaaagtatttccg

SEQ ID NO: 653562 - DNA, 100 bp, Homo sapiens
cacgccgagggcaggacgaacttcaccaggttccagccgtcctcacctcaggaggacatagctttgtgcctttcaaagccctttctcatctatcatcagg

SEQ ID NO: 653563 - DNA, 51 bp, Homo sapiens
tgcgcaacgccaacctcaggcgagatggaactctaatgaatcattgattga

SEQ ID NO: 653564 - DNA, 75 bp, Homo sapiens
gccagccagagagggagtcatttcattggcgtttgagtcagcaaagacctgaattggtagttaagaagttacgat

SEQ ID NO: 653565 - DNA, 83 bp, Homo sapiens
tgagcatttcctcctgacggctgtacttgagcagtcacctggcacagatgtgtcttgctgaatcagggctctcttatccctgc

SEQ ID NO: 653566 - DNA, 74 bp, Homo sapiens
gaggggaacggaggccagagctgcgattaccagttgaccagtgcagagctctcctccttaccagcctttagttc

SEQ ID NO: 653567 - DNA, 97 bp, Homo sapiens
attgcccaggaagctacagttttaaaggatgagcttacggcttcacttgaggaagttcgcaaagaaagtggtggacataatgcgagttaacgtggac

SEQ ID NO: 653568 - DNA, 100 bp, Homo sapiens
caagtccttcgtgatcttgttcgtcaccccgctcctgctgctgccactcgtcattctgatgcccgccaagggactttgaacatgtcggggatcgccctca

SEQ ID NO: 653569 - DNA, 100 bp, Homo sapiens
gccatccgttccttcccacatgataatgtagaggacctcatcagagggtcagaaattggctttggaaaaatggaaacctacatcaaattggaaaagcttg

SEQ ID NO: 653570 - DNA, 97 bp, Homo sapiens
gttttacaaacgcatggaaccagaggaagaaaatggcagagaatacaaatttgatgtttcgtcagagttactagagaacattcctgatgtagatgaa

SEQ ID NO: 653571 - DNA, 89 bp, Homo sapiens
cgcagcttctatatccatggactcagtattatcaagcaaaagatacagatattgtggatgaagccatctattacttcaaggccaatgtc

SEQ ID NO: 653572 - DNA, 75 bp, Homo sapiens
accgcctcaccgttctgcccccagaactagacagagtctcgttctgtcacccagcctggtgtgcagtggttcaag

SEQ ID NO: 653573 - DNA, 89 bp, Homo sapiens
gcaccatcggcaagggcaacttcgcggtggtcaagcgggccacgcacctcgtcaccaaggccaagttgtggacatcggatacccaagga

SEQ ID NO: 653574 - DNA, 51 bp, Homo sapiens
gcaccgttccgcggacgtgctcgaatttcgctaaggagtttgtgatcagtg

SEQ ID NO: 653575 - DNA, 96 bp, Homo sapiens
gtcttttccgcccgcttcgatcgcctcgcgccggctgctctttccggaccatggtgaatccgggcagcagctcgcagccgcccccggtgacggccg

SEQ ID NO: 653576 - DNA, 90 bp, Homo sapiens
actgaacccacagaagattctggctttgtccagggatctgaaaccactttgcagtcgacatactcggataccagcgctcagcccacctgt

SEQ ID NO: 653577 - DNA, 83 bp, Homo sapiens
ccgatgagtccgaggccacttgcagttgattcttcaccacactgaaaccattaggaaaaatccttgtggttaacagcagaggc

SEQ ID NO: 653578 - DNA, 82 bp, Homo sapiens
ggagctggacggcgagcgcgagcggcgcgagaaaaatccacattcatctcaatggaaggatcctgccttaagtcaacttatt

SEQ ID NO: 653579 - DNA, 50 bp, Homo sapiens
ttcggcacatggagattgatgagagcgacttgcagttgtggaggtacagt

SEQ ID NO: 653580 - DNA, 138 bp, Homo sapiens
caaggactggctggagccactgttggactgaataatattaatgcactagcaggtaccatcaacatggccataaaatgcagtaaaaacaaatccagttcccaagaagctgtacaaatgctttcttctgttcgactcaat

SEQ ID NO: 653581 - DNA, 100 bp, Homo sapiens
acagatgattccccaaagtacaattaccatttggactccagtggtagctatgtggaaagaggccagaagatcagtgagcagattgtcattggcacccctg

SEQ ID NO: 653582 - DNA, 100 bp, Homo sapiens
tgatgatgctgcctacacacaagaaaagagtctgccgcctgcagcaacagggcctggagctgatgggcagcctgcgccaccctggatcaccgtcactcgg

SEQ ID NO: 653583 - DNA, 88 bp, Homo sapiens
gcaagagcgagccgcctgccccggtgcgcagacagagctattccagcaccagcagaggatcagagctgatgcccaaagctctatcgac

SEQ ID NO: 653584 - DNA, 50 bp, Homo sapiens
ggaagacttgggtccttgggtcgcaggctggagcgcaatggcgtgatctc

SEQ ID NO: 653585 - DNA, 101 bp, Homo sapiens
caccgtcagcactcagcgcgggccgcctcgaagcggaggatccctgtgtcccagccgggcatggccgacccccaccagcttttcgatgacacaagttcagc

SEQ ID NO: 653586 - DNA, 100 bp, Homo sapiens
tcctttatatagaagggagagtagtcccgcatggtccagaatgagatcccctacttcatctggaccactcggcgggatgtgctcgactgtcgcttcctct

SEQ ID NO: 653587 - DNA, 100 bp, Homo sapiens
aaggacctcaaggacattgttggtgacttcagaggcttctataggcagctcacaagtgatgggcagctcagatgggtggtgaaaacaggaatgagaacga

SEQ ID NO: 653588 - DNA, 100 bp, Homo sapiens
ggttaggatcactattcctgaaattgccacctctgagttagactctggccatctatgaccggtttggccggttgatgtatggacaggaagatgtacccaa

SEQ ID NO: 653589 - DNA, 75 bp, Homo sapiens
ccacagtccttctgcagtccctcgtccagccacccccaggacaatctctatgggaagcagaaggcaaggaccccg

SEQ ID NO: 653590 - DNA, 90 bp, Homo sapiens
ctcggagtgggagacgtggagtgcagacggatgtttccagtcctaaagattagtgtcacagggttggaccccaatgccatgtactccctc

SEQ ID NO: 653591 - DNA, 51 bp, Homo sapiens
aaagctgagaatcctcagtgtttgctagaaactgttcaggttccattatca

SEQ ID NO: 653592 - DNA, 120 bp, Homo sapiens
gtgagatgttcttgtcagaaaccgacaaatactccaagtttgatgaaaatggcggcgactggcggcgcgatggacctgaccgggctcctgctggacgaagaaggcaccttctccctcgcc

SEQ ID NO: 653593 - DNA, 88 bp, Homo sapiens
tttaggcctgtaagtgagacatgcacagacagatctggcatctccactggacactggtcagatcttagcaaagcaatgtctcaagatg

SEQ ID NO: 653594 - DNA, 100 bp, Homo sapiens
gatcttttcatatttctcccagtttggcactgtgacacggttcaggctgtccagaagtaaaagggttttgcggctagttggctattcaagaaacctcgcc

SEQ ID NO: 653595 - DNA, 88 bp, Homo sapiens
ctggaagaaatgccatgaacatgcaagaaacatatactgcttacctcattgaaacaagattgatctggatactattgatgtaagcaac

SEQ ID NO: 653596 - DNA, 100 bp, Homo sapiens
ctggacttgggagttgggcccagagctgcaggaagacatccggctccgggttcgagcagagtactgcgagcatgggccagccttggagcagggcgtggca

SEQ ID NO: 653597 - DNA, 74 bp, Homo sapiens
ttccctccgagccccttcctgagaagatcccaggtgtcccgacccaggctaagcttgagcatggctgagcagga

SEQ ID NO: 653598 - DNA, 82 bp, Homo sapiens
aaaggcaaaaatcccatctaccgcaactctcagttcgagagtaaagaaacctgtttccctccaatcttgtggttgcagcttt

SEQ ID NO: 653599 - DNA, 100 bp, Homo sapiens
tcgttccccgccaaccgcaaccattgacgccatgtcgggttattcgagtgaccgagaccgcggccgggaccgaggggagcaccccatcggagacaagagc

SEQ ID NO: 653600 - DNA, 100 bp, Homo sapiens
tggcgctgtcgtgtacccttaacaggtatctgctcctcatggcgcaggagcatctggagttccgcctgccgatatcgcaaacggcaccagttcagggggg

SEQ ID NO: 653601 - DNA, 100 bp, Homo sapiens
aaactgctgaagcagctcccgcgaggaccacccgtgtgagccactgccccatgttgtgttgatgccaatctgccatgctagcctgtctaccagggccagg

SEQ ID NO: 653602 - DNA, 50 bp, Homo sapiens
aaaataaagacccaataacgattgttgatagtacaggggctcaggtccag

SEQ ID NO: 653603 - DNA, 100 bp, Homo sapiens
gaccacagtcaagacgatcatagtcactgtgtattctggaggtcgaatggtcacatatgaacatctccgagaggttgtgtttggcaaaagtgaagatgag

SEQ ID NO: 653604 - DNA, 83 bp, Homo sapiens
aaatgatgaagacatccggaagaagtctctagtgatccctgaaaagttccagcatattttgcgagtactcaacaccaacatcg

SEQ ID NO: 653605 - DNA, 98 bp, Homo sapiens
ccggcgcccccggacccgcaccagtaagactttgaccccgacgcaggcttcagtgattgccgcggatcagaagcctgagcactttggctcgagacaat

SEQ ID NO: 653606 - DNA, 100 bp, Homo sapiens
gtggggtcacttaatatagagcaattgaaaactacaaagcagcagttaacagatcaaggaaatgctaatatgttagaacggctaaaaatttatgaggaag

SEQ ID NO: 653607 - DNA, 80 bp, Homo sapiens
cggcccgggcgagcgggtgcgtctgccgcagagtcggcacctgaaggacatggaggtaacacgtacacagacctctcggc

SEQ ID NO: 653608 - DNA, 100 bp, Homo sapiens
tggccgccgcggagacccagtcgctacgggagcagccagacaccactccttctgggtgggcgacgtggtccgggtcatcggcgaccttgacacagtgaag

SEQ ID NO: 653609 - DNA, 90 bp, Homo sapiens
caaagacctcctcctccacaggggagacagaggggcaagctctgtgtgattgattggaagacatcagagaaaccaaagccttttattcaa

SEQ ID NO: 653610 - DNA, 48 bp, Homo sapiens
aaacctggatctgcgatctgtttgtgaataatgcaggatcaaagtgaa

SEQ ID NO: 653611 - DNA, 100 bp, Homo sapiens
cagaaatcagctcaaacatttttatcagagcctctacggcagacacatgcaggccaacccagaaccaccgaagaagaataatgacaaatcgaaaaagatc

SEQ ID NO: 653612 - DNA, 50 bp, Homo sapiens
ttcggccggaaccgccatcttccaggttttgcgtgtgaagctgtgtggaa

SEQ ID NO: 653613 - DNA, 83 bp, Homo sapiens
atcctacacagtttgaagagagacatttgaaatttctacagcaacttggcaagctgtgagtaccagagtgcccactggttcca

SEQ ID NO: 653614 - DNA, 82 bp, Homo sapiens
agcatggacatgagggtccccgctcagctcctggggctcctgctgctctggctcccaggccctggagggacaggaaagccag

SEQ ID NO: 653615 - DNA, 80 bp, Homo sapiens
ctcagagagggaagagattcagccagcacactcctcgcgagcaagacaaagaaacagccttggtataatagcacgttagc

SEQ ID NO: 653616 - DNA, 100 bp, Homo sapiens
gggagccccggcgggccgcgcctggtgatcggctccttaccagctcacctctcaccgcgcatgtttggagctagtgagacctgcaacgacttccacccga

SEQ ID NO: 653617 - DNA, 87 bp, Homo sapiens
ggaaactccagagactgggctgccaaaggaccgtatttactgcctgggttactaggtgtctttcagaagctgattgcatccaaagca

SEQ ID NO: 653618 - DNA, 75 bp, Homo sapiens
gatccatgccttagaagaaacaattcttcgacatactctccagcttcaagctttcaaggatatgctgtattcagc

SEQ ID NO: 653619 - DNA, 100 bp, Homo sapiens
tccaggagctgctgcgcacgaccggcgcctcggacaccttcgagggttgggccagaaatgtacacacaggagagctggctgcagtaaaaatcattaaatt

SEQ ID NO: 653620 - DNA, 82 bp, Homo sapiens
gcccagacctgcagggttcgtggataataaactcaagcagcgagtcatccagttggttgaatctggcgatgtggaacccatg

SEQ ID NO: 653621 - DNA, 48 bp, Homo sapiens
cggggagccggccttggacacggatgttttagaagaatgtatgtctct

SEQ ID NO: 653622 - DNA, 88 bp, Homo sapiens
tcttccactgatatctcaaaaggtgatctggacaaaggaacaggtatctcagggcctcattttcttctgtcactggagccatcattta

SEQ ID NO: 653623 - DNA, 90 bp, Homo sapiens
tccttctattcaggccactcttcgttttccatgtactgcatgctgtttgtggcaggctccgctgatcctctaaatagtgctttccatttg

SEQ ID NO: 653624 - DNA, 82 bp, Homo sapiens
cctgagacaagccacaagctggaactgtggctgcaccatctgtcttcatcttcccgccatctgatgagcagttgaaatctgg

SEQ ID NO: 653625 - DNA, 75 bp, Homo sapiens
ggaagagcgagccagcgcccggagcaagcggagctcccccaagagccggaaagggggagctgatcaccttctatt

SEQ ID NO: 653626 - DNA, 75 bp, Homo sapiens
gacgacgagaatatcaattatctgactctaccaaatagtagacttgggccttctgcgctttgtcacggctgtcgg

SEQ ID NO: 653627 - DNA, 100 bp, Homo sapiens
tggtgatcggctccttaccagctcacctctcgccgcacatgtttggaggttggcagcctcgatggttccttctctgtgggggaatattgtcctattatga

SEQ ID NO: 653628 - DNA, 50 bp, Homo sapiens
ccagctacatccagctccctgaggcagggtgaggccgagttcaaccgcat

SEQ ID NO: 653629 - DNA, 88 bp, Homo sapiens
gggcgactacgaccagtgaggcggccgccgcagcccaggcgcgggggcgacgacaggttggtcaaagaaaaagtgatgtatgaaaaag

SEQ ID NO: 653630 - DNA, 100 bp, Homo sapiens
gcggccccacctacgttaacatgacggtcggctccttcgtgtgtacctcctgctccggcagccttgaatggtagtgtctagaaagggtatgtcccttcaa

SEQ ID NO: 653631 - DNA, 76 bp, Homo sapiens
aatggtgctggggaaaggcagctttggcaaggagcggaaagaatgtcggagcgggccgcggatgacgtcagggggg

SEQ ID NO: 653632 - DNA, 100 bp, Homo sapiens
gagcctttttggcctggcttgtttgcaaagacagcacccaagaaaacctcatttggctcgctgaaggatgaagaccggattttcaccaacctgtacggcc

SEQ ID NO: 653633 - DNA, 101 bp, Homo sapiens
agcggggggagtggggaggaggggggtcggccgccgcagccatggaggccaactggaccgcgttcctgttccaggaccttttaccaatttgaggctgcgtg

SEQ ID NO: 653634 - DNA, 99 bp, Homo sapiens
aaagggattaaaggctagtctcaggctggggatggctcctgtctatttcttctctctcagagactgcaggcctgatcacttgaacggacatatcaagca

SEQ ID NO: 653635 - DNA, 74 bp, Homo sapiens
gaggctggagggggagaacacccaggaccgtataatagacgctggccccaaaggaaactactctcgatttatga

SEQ ID NO: 653636 - DNA, 100 bp, Homo sapiens
gagcagcggccgggagcccttagggaggcaggcaccatggctgaggaaacagctccagcagttcttgagcggcaccagggggccctgtactccctctttc

SEQ ID NO: 653637 - DNA, 90 bp, Homo sapiens
agccctggaggtggggagaaaagttgcagttgccaatacctatgcctgtaaggggctagacaggattgaggagagactgcctattctgaa

SEQ ID NO: 653638 - DNA, 96 bp, Homo sapiens
tgtgttccaacaaatagcactttcttattccaagtttcattcattggctcccatgtactatcgaggctcagctgcagctgttatcgtgtatgatat

SEQ ID NO: 653639 - DNA, 100 bp, Homo sapiens
cgccacgctgtgcttctcgcttcagaacattttctccaaaaaggtgacaacatccgggaattcttgctgagcctcagatactttcgaatcttcatcgccc

SEQ ID NO: 653640 - DNA, 76 bp, Homo sapiens
ttgcggcgctacactagagcagagtacgagtctgaggcggagggagtaatgatataactgtgcgatcagcagttct

SEQ ID NO: 653641 - DNA, 75 bp, Homo sapiens
cctgtctcaacgatacctattttctagtgctgagatcctgagacaatgaaggacagaataacgggctcccagatt

SEQ ID NO: 653642 - DNA, 90 bp, Homo sapiens
aagacactgctgataaggatgccatgaatcatcttaatggacagaaaatgtatggaaaaattattcgtgttactctgtctaaacatcaga

SEQ ID NO: 653643 - DNA, 83 bp, Homo sapiens
cttcctctgtatagagcaactgttgaactcagctgcctgtagacaatgcagatcttcgtgaagactctgactggtaagaccat

SEQ ID NO: 653644 - DNA, 97 bp, Homo sapiens
agaagccttcattgctgatcttgacaaaactttagcaagtgaaagatttagagaactaatggataagttcctgagggttaacttcagtaaaggctgc

SEQ ID NO: 653645 - DNA, 96 bp, Homo sapiens
cggctggcgtccctcttcagttctctggagccccagattcaacccgtgtacgtgcctgtgcctaaacgggcagttgcaggagatgcctctgagtca

SEQ ID NO: 653646 - DNA, 100 bp, Homo sapiens
gggaaagtggatcccacctacggtctggagagcagctgcattgcaggcacagggcccgatgagccagagaagcttgagtcaatggttgcaggaaagtttg

SEQ ID NO: 653647 - DNA, 74 bp, Homo sapiens
tcagagtaggaaataattttcacaaccttcaagaaattcggagtgaattactggaactgaaacggcagcagcaa

SEQ ID NO: 653648 - DNA, 75 bp, Homo sapiens
agtttgtgtaaaacaaaaatattatggtctttgtgcacatttacatcaagttatattccctgctcagagaggata

SEQ ID NO: 653649 - DNA, 100 bp, Homo sapiens
ggtggacagaaagtcagcctcttgtgacaaggcgcctctgtcgaagagccttctgctggtccccagtgccctctccctcctgctcgccctcctcctgcct

SEQ ID NO: 653650 - DNA, 98 bp, Homo sapiens
tttggattgtgagctatttcagaactgttctcaggactcattattttaacatttgggagaaacacagccagaaggcttctagtgaggacgttgccagc

SEQ ID NO: 653651 - DNA, 100 bp, Homo sapiens
cctgctctggccggattccagactcgtgggggaaaggctggtatgataagtattatcagcaacataatagttctgggcatcttcattaagtacaaggaac

SEQ ID NO: 653652 - DNA, 83 bp, Homo sapiens
cggacaggatttctccgcctcagcccaacggggagagcggttctggtgaggttggaaggatgcagccacccggttgtcatgaa

SEQ ID NO: 653653 - DNA, 76 bp, Homo sapiens
ccatcttcattcatgactccagacaggttggtcaaagaaaaagtgatgtatgaaaaagaggcaaaacaacaagaag

SEQ ID NO: 653654 - DNA, 75 bp, Homo sapiens
aaacttcaggcgaaagtgctgaaggagcaagagacagtcctgcaggctcagacaaatttacatgtattggagacc

SEQ ID NO: 653655 - DNA, 83 bp, Homo sapiens
gccgaagggagcgagttctggagcgccctgctggagaaggcatacgccaagttccaagaatatttgtcaatggtacttttatt

SEQ ID NO: 653656 - DNA, 51 bp, Homo sapiens
agggagatcaatgaggagatgaaggagtacgagacccaatctagtgcagaa

SEQ ID NO: 653657 - DNA, 100 bp, Homo sapiens
gttgtgttggatcattttgaaaaacagtattccaaagaactcggagatgcctggaatacagtaagacccaacatgagtgaagtttcctgcaagaaacggg

SEQ ID NO: 653658 - DNA, 50 bp, Homo sapiens
ccaggggccattggaccctacaggtttgggccccatggtatccctgtgac

SEQ ID NO: 653659 - DNA, 111 bp, Homo sapiens
gccccagcggcggaggccctccctgctgtctgagttccagcccgggaatgaacgacaatgcagatcttcgtgaagactctgactggtaagaccatcaccctcgaggttgag

SEQ ID NO: 653660 - DNA, 82 bp, Homo sapiens
ccagagtgtatgcactttactacaaagatggacttctctgtacaggcacctggaacacctatcattgcacggcaggtgaccc

SEQ ID NO: 653661 - DNA, 90 bp, Homo sapiens
atcgtctgatttccattctgggtgatgccagatttttcgaaagaaagcagtggaacttggggtaaaattgctacctgcatttcatactcc

SEQ ID NO: 653662 - DNA, 82 bp, Homo sapiens
cacaaggagaacaggagacccccaaaagggaaaaagcttgtggtgaaggggggcaaaaaaaagaagcaagttctgaagttca

SEQ ID NO: 653663 - DNA, 83 bp, Homo sapiens
ctattggcaaactgcggatgggcaggtccaccttccttcgggggtgagcggcctgaggccatgaagtacttgtcatacctgct

SEQ ID NO: 653664 - DNA, 100 bp, Homo sapiens
ctcacagtttaggtctcaaggcaagcctattgagttaacacctctgccgctgctaaaagacactcttgcactcctgtaatgagcctggcactgtgatgaa

SEQ ID NO: 653665 - DNA, 97 bp, Homo sapiens
actttgttggaccctcgtcaatctctttcgaagccattcagtcctcaatctccttttccttggctacccaatttacatagtacatgacgaagttaag

SEQ ID NO: 653666 - DNA, 82 bp, Homo sapiens
tttggccctgcactaccaccctcaccccttcctcaacagaacggaaagatgctgaaggatgggagaccgttcagagaggaag

SEQ ID NO: 653667 - DNA, 100 bp, Homo sapiens
gacgctcgtcctcatcctggtcactagcggactcttcttcgccttcgagttcttcacacacccccattcggcgtagtacccagagagctcaagatgtgtg

SEQ ID NO: 653668 - DNA, 90 bp, Homo sapiens
gacctgtcagcggagagtgaggtgctggacgtggagtgtgaggtgcaggaccgcctggcacacaagcttacgaggaaatatttcagtaaa

SEQ ID NO: 653669 - DNA, 99 bp, Homo sapiens
cctggcctgcccggacgagttcgatgacttcgtcacctatgaggaaaaccaattctgtgtcctcggaggaccacagcccagttgggccccaggcgaaac

SEQ ID NO: 653670 - DNA, 82 bp, Homo sapiens
ctccactgttcctggaggaatccgagaagagcagagcggagggagccccagacacgaggctgaggggatctggcggtggagc

SEQ ID NO: 653671 - DNA, 100 bp, Homo sapiens
ggattttgggactcgcctttgccctggcaaacactggaatcctactttttctccctttctaaggcacaaaatgatgtgatggaaatgaagatgcagtcag

SEQ ID NO: 653672 - DNA, 90 bp, Homo sapiens
caacaccacaataatccacagccaagggttaccatccattgacccatcaggcagctccccatcttcctcttctgctcctctggcaagttt

SEQ ID NO: 653673 - DNA, 96 bp, Homo sapiens
gcccagcgagatcctcggggccccagaggccgcggacaccgacctggagagtggagactgctgcacggactctggaaccatgaacatatttgatcg

SEQ ID NO: 653674 - DNA, 100 bp, Homo sapiens
ctgggagctgttagagggcagggatcctagctgacacatctatgtcctcgccttggttggagggacctaccagggccagtgggtcggtggcatgcgccag

SEQ ID NO: 653675 - DNA, 74 bp, Homo sapiens
gcctccttcccagccgcgcggcttcctccagacctctcggcgcgggaacgccgcgatggctgcgcagggagagc

SEQ ID NO: 653676 - DNA, 75 bp, Homo sapiens
ttatcagtgatggctcttctctggaagatcttgtggtaaaaagaacgtattctcatggtacttacagagctggcc

SEQ ID NO: 653677 - DNA, 100 bp, Homo sapiens
gaccttaacgtggagctctccaagtgtgcaaatttaaggcccacaagcgctgtgctgtgcgtgcaaccaataactgcaagtggaccacactggcctcgat

SEQ ID NO: 653678 - DNA, 78 bp, Homo sapiens
gcggattagccttcgcggggcaaaatgggcatcttctctgcattcagtttcatccaagtcattccgggatttcttact

SEQ ID NO: 653679 - DNA, 100 bp, Homo sapiens
tggagaagtggatcaacctgaaggggttgtgtccactgtggtccccgactctgcccacaagctgttcatcgggggcttacccaactacctgaacgatgac

SEQ ID NO: 653680 - DNA, 73 bp, Homo sapiens
atgaacccagaggtcgtggaggtggccgtggaggcagaggtggcatggggtactctttgagcacatcaaattc

SEQ ID NO: 653681 - DNA, 100 bp, Homo sapiens
gcctctgaagagccaatccattcaggatgggaaaccacgcaggcaaacgagaattaaatgccgagaaggccagtacgattttaggtgatgggcaagtcag

SEQ ID NO: 653682 - DNA, 90 bp, Homo sapiens
ggcctgagtagccggtaacaaacgagggttcccgggattggaccgacgcagccatgtgtgcgtgaaggaaaattggagcatacacttgcc

SEQ ID NO: 653683 - DNA, 100 bp, Homo sapiens
ttctggcagaaacagaggactaattttggcagttctaaatttgaatttgagggcaagtgtccagagaatggctgggatgaaagtacacttgaactctttt

SEQ ID NO: 653684 - DNA, 74 bp, Homo sapiens
gttacaagcagcaagtgcgcggttggggccactgcgaggccgttttagctgccactgcagagccccgccatgga

SEQ ID NO: 653685 - DNA, 75 bp, Homo sapiens
aacgcgcagccagccttgggaagcccaggcccggctggacattttgaagattcattctcggaagatgaacctgac

SEQ ID NO: 653686 - DNA, 101 bp, Homo sapiens
ggctgtagtggggctggtggtgcttccaactgcgggacaggaagtggccgtagcggcttgttggataaggtgccaatgggtcatgtttggttagaaggtga

SEQ ID NO: 653687 - DNA, 50 bp, Homo sapiens
ataaggttctgggaacacataaagaagcactaccacaggaagagcaagaa

SEQ ID NO: 653688 - DNA, 113 bp, Homo sapiens
cctggcgctttcctgggttgcttctggcggccatggtgttgctgctgtactccttctccgacaatgcagatcttcgtgaagactctgactggtaagaccatcaccctcgaggt

SEQ ID NO: 653689 - DNA, 76 bp, Homo sapiens
tggaaagaagttgcaaaacactggctttggagtttaacccttctgccaatccagaggcaagcacaatattccagag

SEQ ID NO: 653690 - DNA, 80 bp, Homo sapiens
aattataaaatgtcagcttttaaggaaatgacagactttttcattgaatgatgaggacacagcagccatattatgccaag

SEQ ID NO: 653691 - DNA, 90 bp, Homo sapiens
aataagcactacaatctggagaccacagtcccacaggttctcttagaagcacaagatatggcagtgagagaccataacgtggaattcagg

SEQ ID NO: 653692 - DNA, 85 bp, Homo sapiens
tgctgtagatgatccacatgatgacaaggtgtgggaattaacagctaacaatgtaatcatggtttctgctattggcaatgacgga

SEQ ID NO: 653693 - DNA, 100 bp, Homo sapiens
catgagatggtagccaacccctcaggtattgttctctccaagccagaactgatcacctgtctggagcaaggaaaaaaacctctgaccgtgaagagacatg

SEQ ID NO: 653694 - DNA, 50 bp, Homo sapiens
aacaaattgcagagcaaagctgaccgcctgtactttgtgatggagtacgt

SEQ ID NO: 653695 - DNA, 75 bp, Homo sapiens
ggaggcgggacatctccagcaccctcatcgccctggccgacaagcacgcaagcatagatcaagatcccgatcccg

SEQ ID NO: 653696 - DNA, 90 bp, Homo sapiens
gggcttgccctggtcttgctcggccgatgaagtgcagaggtttttttctgggatgactccgctgaggtggacgtgtacaacccgacgagg

SEQ ID NO: 653697 - DNA, 50 bp, Homo sapiens
cctcccgagtagctgtgattacagggagatggtactggagtcgccagtat

SEQ ID NO: 653698 - DNA, 83 bp, Homo sapiens
cggcgaacgcggagagcacgccatgaaggcctcgggcacgttgttgacctcctgtactggagagacattaagaagactggagt

SEQ ID NO: 653699 - DNA, 82 bp, Homo sapiens
gctcctggccctggccctgatcatcctgctgggcttcgtccagatcgggaagggttgtggcagcactgcctgaaggtatgag

SEQ ID NO: 653700 - DNA, 100 bp, Homo sapiens
gagtgcaaagtgctcatgctggaccagcagtatgacaccttccacaatggcagctgggtccacctcaccatcaacggatgccttccgtgccttccatcaa

SEQ ID NO: 653701 - DNA, 97 bp, Homo sapiens
gtgggactcagcagccttggtgctcaggtgccagatgcaaagggaagtcttctgaccaactggccctccgtccctcctaccataaaggaggaggaaa

SEQ ID NO: 653702 - DNA, 98 bp, Homo sapiens
gcggagcagaggaaccacacgctgatcatggatctcatctggccaccgcgttctggaagaggcgagagggagagcgtgcgcgagaggagagagacggc

SEQ ID NO: 653703 - DNA, 51 bp, Homo sapiens
cccgcggcatccctctggacgcaggaacagacaacgcaagctggggacgaa

SEQ ID NO: 653704 - DNA, 74 bp, Homo sapiens
tgttcgactggctcctgattacgatgctttggatgttgccaacaaacaaatggcggatgacgccggtgcagcgg

SEQ ID NO: 653705 - DNA, 98 bp, Homo sapiens
gctctgctccacactgccaaccggccagaggacgagtgtggtttcctccagcctggtggtgccctgtccttgcaaaagcagatggaacatgctaacca

SEQ ID NO: 653706 - DNA, 100 bp, Homo sapiens
aagagaagcagctgttgctattggaggagaggacgattatttatcatttctactaaagcaggatctctaggaattaatctggtagctgctaatcgagtaa

SEQ ID NO: 653707 - DNA, 83 bp, Homo sapiens
cagcaccggcaagaccaccttcatcagctcttcagtaggttacctgcaacatccaggatcagaacaagtacaatttcctcgaa

SEQ ID NO: 653708 - DNA, 74 bp, Homo sapiens
cccaagggagatgtgggtgcctctggagagcaaggcatccctggaccaccggtgatgtagtcaaggtgatcgtc

SEQ ID NO: 653709 - DNA, 100 bp, Homo sapiens
gcgggctccgcgcccggccggacccgggcccgagctgcgtgcccagatgcgcgacctggcacggggcatgttcgtctttggctacgacaactacatggct

SEQ ID NO: 653710 - DNA, 75 bp, Homo sapiens
ctggcctgctgctggcccgcagggattcgctaaatattgtaatggatcaaggagatacacctacactagaggaag

SEQ ID NO: 653711 - DNA, 101 bp, Homo sapiens
cccatcctgccgtccttctccactttcgccagcccgtgccgcgagcgcggcctgcaggaggaagctcttcgtgggcggtcttgactggagcacgacccaag

SEQ ID NO: 653712 - DNA, 100 bp, Homo sapiens
cttctgcatgaacatctccagccaggatgacttcagccgtgtgagattagtctccatgaatgaagaggaaggtgcagactacatcaatgccaactatatt

SEQ ID NO: 653713 - DNA, 75 bp, Homo sapiens
atttgtacctgcaggcctcctacacctacctctctctgggatttgtcttggctgttactatgacacgggaagcaa

SEQ ID NO: 653714 - DNA, 100 bp, Homo sapiens
gctgcggtccagaacccggccctcaccgccctcaccacccctatccagacggctgcccttcaagtaccacaacacagtcactcctggcggcaaaccaaac

SEQ ID NO: 653715 - DNA, 51 bp, Homo sapiens
ggaagatggcggctgggttcaactatcatggtgaacttacttcagattgtg

SEQ ID NO: 653716 - DNA, 90 bp, Homo sapiens
accacctcctgctctgggaccggaggagacatcggcctctgcaggcttgccgaagaagggaggctggtgtttggaatgctttatcctgca

SEQ ID NO: 653717 - DNA, 90 bp, Homo sapiens
agatcatcacgtttgccgagtcagttcctacaacagcagccagtacccctgatgccgttgacaagtatctcgagacacctggggatgaga

SEQ ID NO: 653718 - DNA, 100 bp, Homo sapiens
ccatgtcaccctcaaaagagtccagattcaacaggctgccaataaaggagcaagatggctaggggctttcaaggatatgctgtattcagctcaggaccag

SEQ ID NO: 653719 - DNA, 74 bp, Homo sapiens
ctaccgggacctcatcagccgccaagcacacccaggagaactgtgagacctggggtgtaaatggtgagacgggt

SEQ ID NO: 653720 - DNA, 111 bp, Homo sapiens
agaaaaggccaagatgatgaagtgagaacgttgatggcaaatggcgccccattcaccacagactgggggtacacatctttctggaatgactgcatatcatcaggcctgcga

SEQ ID NO: 653721 - DNA, 75 bp, Homo sapiens
cgccgtgcccgagaatagctccgtccagcagtctcccatcaaaggacgtgcacagccttatgatcccaattttta

SEQ ID NO: 653722 - DNA, 101 bp, Homo sapiens
gttttgagaacagagtgctgttttagagctggcagcagcatctcagcccaagagaaggtggcacaagaatggctcaactctccaaatagagagaatttcta

SEQ ID NO: 653723 - DNA, 50 bp, Homo sapiens
ttaacaccatcttcatatccaagggaacattgaacattttggaagaggag

SEQ ID NO: 653724 - DNA, 119 bp, Homo sapiens
ctgccattgctatacagatgcaattgaagaatattttactcatgttccaagagtggtgtgcttgtgatactcagaaccgtgctgcatactatcctcctagccaaattgctcaactaaga

SEQ ID NO: 653725 - DNA, 75 bp, Homo sapiens
tctgtagaattcgacagtatgcaaatgatggctcagacattcattctgctgtgctctccacaattagaaaactag

SEQ ID NO: 653726 - DNA, 76 bp, Homo sapiens
aaaagcacacaaagacctcctcctccacaggggagacagagattacgtgtgaaaatgaacttgtgcaaacccaacc

SEQ ID NO: 653727 - DNA, 100 bp, Homo sapiens
ttcttcgacattgccgtcgacggcgagcccttgggccgcgtctcctttgagctgccactgcagagccccgccatggaagacacgccgttggtgatatcga

SEQ ID NO: 653728 - DNA, 83 bp, Homo sapiens
taaagttccagagcctggagtgcccactgaaaccataaaggtggagccgccaccaaaatgcagattttcgtgaaaacccttac

SEQ ID NO: 653729 - DNA, 90 bp, Homo sapiens
gggcggccggccgacccttcctgtcgctgacggcgactgcgggaggccagaaggacagaataacgggctcccagattcacaagccccacc

SEQ ID NO: 653730 - DNA, 87 bp, Homo sapiens
agaacaactaaaacagtatgaaataaacgccactcctaaaggctggtcctgccactgggacagcctacgaggacaagcagaaactca

SEQ ID NO: 653731 - DNA, 83 bp, Homo sapiens
aacatcggtctgggcttcaagacacccaaggaggctgccccctcggtcactctgttcccgccctcctctgaggagcttcaagc

SEQ ID NO: 653732 - DNA, 100 bp, Homo sapiens
ggtggtgctggagcagggtctcctgattcttttcctgctagagttcccggacacagtgcgtaaggtacctccttggaagcagagaccaggccgtttccag

SEQ ID NO: 653733 - DNA, 73 bp, Homo sapiens
tgagtggttgtgtggtcgcgtctcggaaaccggtagcgcttgcagcatggagatggcagcagaaaaggccaaa

SEQ ID NO: 653734 - DNA, 98 bp, Homo sapiens
tttgcagtatatgttgtcgggtacattgatatatgtaaattacggaagatcatttatatacacatggtggaacaatccaaagttttaatcaaagaagg

SEQ ID NO: 653735 - DNA, 100 bp, Homo sapiens
cgcctgggctcagcttcacccaaggtaccacggacgctgctcacactggatgagcaagtggagaactacgatgacccgcacaaaacccctgcctccccag

SEQ ID NO: 653736 - DNA, 100 bp, Homo sapiens
aggagttcgtctcttacgtctgcggaagtgcagctgcctcagttcttagcgcaggaatcatgggtaaagaaggaagacaggctgcaagaaacagtgacta

SEQ ID NO: 653737 - DNA, 88 bp, Homo sapiens
ggaagctgtgagcgcccccatcccggaggtctccgccggctcccggatcttatgccttcattcatccggcatggtccaacaattccaa

SEQ ID NO: 653738 - DNA, 100 bp, Homo sapiens
tgaactccggtcctgcacgccctgtctgaaggccaacattgagcgtctggaggagctggtggttaagcgtctgggatatgacacccgggttactgtcttg

SEQ ID NO: 653739 - DNA, 50 bp, Homo sapiens
cggcgaggccctcatgtaccacacggtgatgcaggttctgaatgctgatg

SEQ ID NO: 653740 - DNA, 96 bp, Homo sapiens
caacccacctcacagcacttcattatgcagctaagttttcaagccggtgtgaagcccctgatgctaaccagcagttacagcaggccatggaggagc

SEQ ID NO: 653741 - DNA, 78 bp, Homo sapiens
ttagaaggaggttcaggctacggtgagccgaaggagatcgggaggatctccattgagatgcatgggaccctggaggac

SEQ ID NO: 653742 - DNA, 85 bp, Homo sapiens
ctgtgcggcacatcgcagacctgtcaccaggagacaaggttcctctcctggctgaaatttatggtatagaaggaaacattttcag

SEQ ID NO: 653743 - DNA, 82 bp, Homo sapiens
cagaacctagcctatcagctggggctggatgagtttagaacctggcccattagatgaaacccagatcgctactatattaaga

SEQ ID NO: 653744 - DNA, 97 bp, Homo sapiens
gtcgtggtgagcgcagccactcaggctggtcctgggggtggggctgtaggggaaagtgctaaagccgctgagtgcctggctctctggctatgaaaat

SEQ ID NO: 653745 - DNA, 100 bp, Homo sapiens
tactacttaataatgacaatctcctcagggaaggggcagcacagtgaagagaaggactataccatatggctggcacactccacagaccctgaagattatg

SEQ ID NO: 653746 - DNA, 96 bp, Homo sapiens
atcgggagcgtttttgtgaaaatgcttgcattgatgacaatgttgatatggtgaagtttctggtagaaaatggagcaaatattaatcaacctgata

SEQ ID NO: 653747 - DNA, 51 bp, Homo sapiens
atggacaatattgacaccttcatcgaggatgatgagtttacacacctgtac

SEQ ID NO: 653748 - DNA, 101 bp, Homo sapiens
tataagtacaagtaaagaacaggaagcaaagtaccaggccagccacccaaaccttagaaagctggatgatacaggtatcgtgatttccgatacccacctgg

SEQ ID NO: 653749 - DNA, 98 bp, Homo sapiens
ctgcccctgcatgtgcacgaggaagaaggaatcctggtggcagctgctctcccatgggtgatggtgatccagaggccatggaagagtctccaaggaaa

SEQ ID NO: 653750 - DNA, 90 bp, Homo sapiens
cgaacccctggacgggagagtctgccggcggagaatataagaattcagtactgtacacaggaaattactgtcttccgtgaagacttagta

SEQ ID NO: 653751 - DNA, 100 bp, Homo sapiens
ggacccagaccctggagcctcagttggaagcagccgatccagcctgcggagcctgtggggcagggagtctccggtggactgcagcgttagcaaatgcagc

SEQ ID NO: 653752 - DNA, 100 bp, Homo sapiens
cgtacgtctactacccttgttagaaggaagctttggatcttcggtgggtgatctttagacagtgactgagtatggatcatttgaacgaggcaactcaggg

SEQ ID NO: 653753 - DNA, 75 bp, Homo sapiens
gggataacctgcatcgagctggagactaaggtgtcagtatgttcttcaagctgctctgctcctgggcccaagcta

SEQ ID NO: 653754 - DNA, 100 bp, Homo sapiens
ggcgccgccaaacagcccagctcgcgcttcagcgtcccggcgccgtcgcgccactcctccgagatgttggcaaaggatgaactgatgaccatacttgaga

SEQ ID NO: 653755 - DNA, 75 bp, Homo sapiens
tgtaacatcagtcacagcatgagttttgagagcaaaatgacaacacccagaaattcagtaaatgggactttcccg

SEQ ID NO: 653756 - DNA, 98 bp, Homo sapiens
cacggggacggattggttgttttttcctgtatgaagcggttggcaccactgaagtgaccgaatgagtgggaaatatgagtgagcatgtgagaacaaga

SEQ ID NO: 653757 - DNA, 91 bp, Homo sapiens
ggcgctgctggcgctctggctgtgctgcgcgacccccgcgcatggtgtcgtgaaaactacccctaaaagccaaaatgggaaaggaaaagac

SEQ ID NO: 653758 - DNA, 73 bp, Homo sapiens
aacctggagctctacgcctcctacgtttacctgtccatgccagatcacatttgattgacagtccaccaactta

SEQ ID NO: 653759 - DNA, 75 bp, Homo sapiens
cagctcttggcaggagtagctgatcaaaccaaggatgggtctgtctctcctgccagagtgtatacaccagttgga

SEQ ID NO: 653760 - DNA, 49 bp, Homo sapiens
atccgatagctctctgcttattaatggttatatcttaagtgtggtgctg

SEQ ID NO: 653761 - DNA, 101 bp, Homo sapiens
tgagtgaacccatcctgccgtccttctccactttcgccagcccgtgccgcgagcgcggcctgcaggagggcagttgggtgagaagcagcttccatcttcaa

SEQ ID NO: 653762 - DNA, 100 bp, Homo sapiens
tcacattagccagtgtgaagacctccgaaggaccatagcggaaggagagttttacatggaagtggcttacagaaacttggcgctgaggtgcagggaagcc

SEQ ID NO: 653763 - DNA, 100 bp, Homo sapiens
accatcgaaaggagcaagagcaagatcaccgtgacatccgaggtgcctttctccaaaagttcctgggcttcccgatggactcgagtttttactatgtgag

SEQ ID NO: 653764 - DNA, 82 bp, Homo sapiens
atattgtttttaatgcagcgtgggaggggaggatatgacacgcgatatcgcagattggacgactgattattggacagaatgg

SEQ ID NO: 653765 - DNA, 75 bp, Homo sapiens
cgccgggaaggattaggtagcaactacctaggtggtcgtagccccactgaggtacaggtttgcagattccgccag

SEQ ID NO: 653766 - DNA, 83 bp, Homo sapiens
ccggaccccggcgcgctgaatgcaggttttaaaatcaaagatgggaaaatcggagaaaattgcccttccccatggccagcttg

SEQ ID NO: 653767 - DNA, 50 bp, Homo sapiens
gtaattggagccaagaaatgagtatagatgagaactggactgatgaccaa

SEQ ID NO: 653768 - DNA, 100 bp, Homo sapiens
tgaaataacccttgatcctcctcctaattgcagagattctgtgaggagctggaaggcaagcttggttcatgcagacatgaggcactaatgttttcaactg

SEQ ID NO: 653769 - DNA, 50 bp, Homo sapiens
caatgcagcgcgtctatggagcccagcccttgaaggtagtggacccagat

SEQ ID NO: 653770 - DNA, 96 bp, Homo sapiens
gctgccgatgccagagccaggtgaactggaggagcgatttgccatcgtgctggatgaatttttagatgtgatctactggttccgacagatcattgc

SEQ ID NO: 653771 - DNA, 75 bp, Homo sapiens
cagcatcccgaattgatgagttatttcaaaagagaagcagtgttctcactcagctccagtgatccacaagctcag

SEQ ID NO: 653772 - DNA, 75 bp, Homo sapiens
ggaagactcgatccgcctgcctgcgcacctgctggacagtttgcggttgtgaagaaatgccgtgagaaaagcacc

SEQ ID NO: 653773 - DNA, 75 bp, Homo sapiens
ggagtacaaaaacggcccttggatgatggagaccagcatctcagacatgtcgaaaaagatgttttgatccctaaa

SEQ ID NO: 653774 - DNA, 80 bp, Homo sapiens
gtggagatcagtgcctggttccaggaggccataggcttcattgcgtgagtgcatctccatccacgttggccaggctggtg

SEQ ID NO: 653775 - DNA, 95 bp, Homo sapiens
gccgccagcgcgtttggctgtgacctgacggagtatctggaaagctcgggacaggatggagcggaaagaatgtcggagcgggccgcggatgacgt

SEQ ID NO: 653776 - DNA, 100 bp, Homo sapiens
cgggcgggccgtcgcgggagagactgacgacaacagtggagacttggacccaggagtcttgctgacagctcaaactatcacatctgagaccccaagcagc

SEQ ID NO: 653777 - DNA, 90 bp, Homo sapiens
ctatgcaaatgccaaaggaattggttatccagcagaatggaagtgaggaaaggcaaccagctgacacaggagccagagtgagaccagcag

SEQ ID NO: 653778 - DNA, 101 bp, Homo sapiens
ctcattatctaccacccgagatgccccaaggagctatcgaaaaaccttgaactgagtactaacagtttccaacgacagttgcttgctgaaaggaaaagggc

SEQ ID NO: 653779 - DNA, 76 bp, Homo sapiens
ccctcagcacacagaggatgatgctgactttgatgaaggtgtagagttcggtgctcgaatgataactattgatggg

SEQ ID NO: 653780 - DNA, 100 bp, Homo sapiens
cattgggaagaaaaggctagagaagtcaccctccttcgcctcggagtgggatgagataaacaggggtcacatgacgacagaagccaagagggctgcaaag

SEQ ID NO: 653781 - DNA, 88 bp, Homo sapiens
tgggacccagccatgcagactccacctttacaacagcctcaccaggaacaaggaatcctgggagcagtaatttacagaaaataaccaa

SEQ ID NO: 653782 - DNA, 100 bp, Homo sapiens
aaaggtgcgaaaaaaggtgaaaggtattcttgtggatattgggcttgacagctgcaaggagttactgaagaggaggccgagcgtggcagcctcggcgcgg

SEQ ID NO: 653783 - DNA, 100 bp, Homo sapiens
gttattttcagaccttggaagattcagatagctacaaaaggcaggctgcacctgagggcccacccaatgctaatgaagactacagagaagcttcttcttg

SEQ ID NO: 653784 - DNA, 89 bp, Homo sapiens
cagaaatcgtatacatagacggatctcaatggaggttgatgttctcaatcaagttgattggaatgcctggctctactctcctggactgc

SEQ ID NO: 653785 - DNA, 100 bp, Homo sapiens
cccaggtggagaatgaggagaaactgaaggagctagagcacctatgtgcttcccaagctgtatgtgaagctacattactgtgtgagttgtgcaattcaca

SEQ ID NO: 653786 - DNA, 73 bp, Homo sapiens
tgctgttttccagccctccccaaatgcattcttcaggaaagcggcgttatgacaggaagcagagtggctatgg

SEQ ID NO: 653787 - DNA, 88 bp, Homo sapiens
ccaggaccagaccgtggtgtttgtggccacgaagcaccacgccgagtacctcactgaggaccctgatgctcccataagacagaaaatg

SEQ ID NO: 653788 - DNA, 100 bp, Homo sapiens
cttcagtcggtaacagcccgaattatcgaacctcgtcaccagagaaagcccaacatattttatagtggcccagcttctcctgcaagaccaagataccgat

SEQ ID NO: 653789 - DNA, 99 bp, Homo sapiens
tggggtgcccggtgcggctgcttcaagcgggtatttctgtgggacttggatgaaaccatcatcatcttccactcacttcttactggatcctatgcccag

SEQ ID NO: 653790 - DNA, 75 bp, Homo sapiens
aaaacttcacgtagcggtgaagtatctcagcagaaatggaataatggatatctcaagggacaatttcagcttcag

SEQ ID NO: 653791 - DNA, 100 bp, Homo sapiens
ggcccgcgagtctgcgaagccagccctttcagtaggagccttcgctgccaaggaagaagatggactgcggatgaggaagacagtgcagagcaacagcccc

SEQ ID NO: 653792 - DNA, 75 bp, Homo sapiens
gtggcgcttgagttggtcgggggcagcggcagaattcagaaggagctggcggacatcactttagaccctccacct

SEQ ID NO: 653793 - DNA, 100 bp, Homo sapiens
cacagttcctctttctgaagatcaggaattgaaagatgttggccatcgtgatcagatggctgcagctagaggaatcctgcagaagaacgttccgatcctc

SEQ ID NO: 653794 - DNA, 100 bp, Homo sapiens
tttttctcagaactgcctgaccccctggtcccgtataacatgcagatcgacttggtggaagcacacatactatactggcaattgctggagaagattttgc

SEQ ID NO: 653795 - DNA, 75 bp, Homo sapiens
cgtcgagagattcactatggaatcggatgaaattgattctgcagtaaagatgttggtgtcattaaaaatgagcta

SEQ ID NO: 653796 - DNA, 83 bp, Homo sapiens
gttgcgggccccgggacctgggctgggaacccgcggtggagcgggacacgaacgtgatggcggctgcagaggctgtgcatcac

SEQ ID NO: 653797 - DNA, 75 bp, Homo sapiens
atccgcgtgaccaccatcgcccgaaagaagatcccagtgtctgagtgaactaacagtcctgctttcagccaccat

SEQ ID NO: 653798 - DNA, 100 bp, Homo sapiens
agagagttgtgcatgctaaaggagcaggggcgacgtcgtaaaccaggacgacctgtaccaggccttggccagtggtaagattgcagctgctggactggat

SEQ ID NO: 653799 - DNA, 75 bp, Homo sapiens
gcaaaactttgggcttgcaacttttgttaccaaaggaatcaggtggttcagaatctggggagccttatattccag

SEQ ID NO: 653800 - DNA, 98 bp, Homo sapiens
agatgacccaactccctcgaggtctggctctgggagaggagtggacagcagctggttgagatacatccccatctggagacaggactgccactgacaga

SEQ ID NO: 653801 - DNA, 83 bp, Homo sapiens
atgccctcctaggccggagcggctcaatgcctacgatgtgaagttcatttccaatccgccctccatggtggcagcggggagcg

SEQ ID NO: 653802 - DNA, 82 bp, Homo sapiens
agcctgcggagcctgtggggcaggcctccaggcccaaggtcagcatcccactgtcagccatcattgaggtccgcaccaccat

SEQ ID NO: 653803 - DNA, 100 bp, Homo sapiens
aaactggaagaatcccagcccactcatctcattcccgtggggacccatcgtgaagatggcgtggccctgagaggcagccattctcttctgccaaaccagg

SEQ ID NO: 653804 - DNA, 99 bp, Homo sapiens
ggacacactggcagtaatacggactcttgtagataatcggcagaaccaattgaaagaccaacagcaacagcaagtggtatcgttatgtcctgatgacac

SEQ ID NO: 653805 - DNA, 101 bp, Homo sapiens
caaaggagtatctccagcctttcaaggacaaactagaggagttcttccaaaaagggactggtttggctgaaagacaaagaagcaacacattgtaaactttg

SEQ ID NO: 653806 - DNA, 100 bp, Homo sapiens
gacgccgggacacctggaagccgagaaatgaaagaaattttggcgctaattccaaaccagaatgctcttctaaaggacttggatattcttcataattcat

SEQ ID NO: 653807 - DNA, 75 bp, Homo sapiens
ggaaaatctccccggtgactttcaggctcatcagattcaagagatgtttccccaggttccataccatctggtact

SEQ ID NO: 653808 - DNA, 100 bp, Homo sapiens
ggaaaaggagttcgagcagatcgacaagtccgggagctgggcggccatttaccaggtcctcagaatggttggaatgaccctccagctttgaacagagtac

SEQ ID NO: 653809 - DNA, 75 bp, Homo sapiens
ttttgtttatataactcaagttgtttggctaaattcttcaggctatggagttactagtagagaaagcaatcagca

SEQ ID NO: 653810 - DNA, 50 bp, Homo sapiens
ggaagcccttccgcggaccgaaagtcaccggactttgctgaggagttgag

SEQ ID NO: 653811 - DNA, 74 bp, Homo sapiens
cagaagcagacccgtgccggccagcgcaccaggttcaaggcccctgagcctctgagctccttgaagtccatggc

SEQ ID NO: 653812 - DNA, 96 bp, Homo sapiens
gcagaacgtgctgcagcagagcgcggcgcagaaggcctggcagctgcgattcagccacctcgtggggtatggtgctagatattactcttacctcat

SEQ ID NO: 653813 - DNA, 90 bp, Homo sapiens
gtgttaccaagctgtttcctaccaggtcacacactgttgcagcacaggctgagactcgggctgagtttgcggagaggtcagtaactaaat

SEQ ID NO: 653814 - DNA, 100 bp, Homo sapiens
tggtggcctatgcctactgcaccatccccacctaccccagcggccagatcggcttcatgctgtgcagcaagaacccggcctgtttaaagaagaaaacccg

SEQ ID NO: 653815 - DNA, 76 bp, Homo sapiens
ctttgcaccctgcttggagacggacttgcttccggcttttacactctgatcgagatcctattccagatgttcctgc

SEQ ID NO: 653816 - DNA, 74 bp, Homo sapiens
gtcgctgacggcgactgcgggaggccagggtgaatttggaagtgaaaagaaaactgctttgcatgaaaaagagg

SEQ ID NO: 653817 - DNA, 74 bp, Homo sapiens
gtggcctatcccaggacaggtggcactctttcagtccacctggaaggccgctgtggtggaaggatgtttgactg

SEQ ID NO: 653818 - DNA, 90 bp, Homo sapiens
tgacataaagatcggcccagagtgccatgctctttcgacgtgtagcagcagctttgccgggaatggaaagcacacaggacagaagcagag

SEQ ID NO: 653819 - DNA, 75 bp, Homo sapiens
ggaagcagccgatccagcctgcggagcctgtggggcaggtaaccacatggtggatattggggatattatatttac

SEQ ID NO: 653820 - DNA, 76 bp, Homo sapiens
tagaatatacaaagacaaaaggagattctgatgaagaagttattcaagatggtccctcccacaacacggaattatg

SEQ ID NO: 653821 - DNA, 85 bp, Homo sapiens
aaagataaggaagcttgcgtccacaagatattacgtcaacagcagcacgttatctacgcagcagaataccctttcatcatcaaca

SEQ ID NO: 653822 - DNA, 125 bp, Homo sapiens
acagtgagaaggcgacaggaaccagctcgggggccaactctgaggagtccactgcagcagctttgacagatccaaatgcttctgctgcccagcaggctgttctccagcagcacatcaatagtcta

SEQ ID NO: 653823 - DNA, 100 bp, Homo sapiens
tggaaacaaagacagaatttgcttacgaatatgtattgctggattttactctacaaggaatgtatcctgtcaggtataatgtcagtgaatggcaagaaag

SEQ ID NO: 653824 - DNA, 75 bp, Homo sapiens
ttcaagtcctgttctacctactgccaattggaaagatactaatggaccatactaccaaggaccagtccacctgaa

SEQ ID NO: 653825 - DNA, 100 bp, Homo sapiens
tgagcgccatggctcactccccggtgcagtcgggcctgcccggcatgcagcacccttacccttctgaagaacagaaaaagcagttggcacaagacacggg

SEQ ID NO: 653826 - DNA, 82 bp, Homo sapiens
tatctgtcttcggtggactccttcggcagtccacccaccgccgccgcctcccagcggagctggagtttgttcagatcatcat

SEQ ID NO: 653827 - DNA, 100 bp, Homo sapiens
tgagagcaaaatctacaagatgatgcagggaggagccactgaggcggctcccagctgcgttggcgacatggccgacacccccagagatgccgggctcaag

SEQ ID NO: 653828 - DNA, 75 bp, Homo sapiens
gtgagtcattcaaacagcatgacataactgtacctggagtagaacagaaaaattattatgtctgtgttcccttgg

SEQ ID NO: 653829 - DNA, 76 bp, Homo sapiens
atagattagtaactggcatagacaactatgggcagagaagcctgtgtctcccaaatcaggaacactgaagagccct

SEQ ID NO: 653830 - DNA, 98 bp, Homo sapiens
gggagaatgctcttcaggatagtatcttggccagggaactcaaacagcagatgcagatgagcaccatgccaggactgcccacccggccctgcttttat

SEQ ID NO: 653831 - DNA, 96 bp, Homo sapiens
ggggcagcggagtcccgtgcgccctgtggtgacagctcaggagatcttcctctgatggcgctgcctccatgccatgccctctgccagttctatgtg

SEQ ID NO: 653832 - DNA, 100 bp, Homo sapiens
tgatcagacaaggcaaagcgaaattggtcattctcgctaacaactgcccagctttgaggaagtggtcagcaggcagaaaggaaatgagctacaaggaaat

SEQ ID NO: 653833 - DNA, 100 bp, Homo sapiens
cccgagcagacggagtacacggagcagcggccccggccccgccaacgctgccgccgggcggatgttcccattcctgtcatttactgtggccgggctggag

SEQ ID NO: 653834 - DNA, 83 bp, Homo sapiens
gtccctggcattttaggtgtcggttgggtaggccttccagcaggaaatttcactgaaccacaataagattgagcagataattg

SEQ ID NO: 653835 - DNA, 100 bp, Homo sapiens
aaggaaaaattgtccatcttgtcgtcttcggaaatgttatgaagcagggatgactctgggaggtcctgcaaccctggttccagtctggcaagcattgtag

SEQ ID NO: 653836 - DNA, 75 bp, Homo sapiens
ggagagaccgcggggctgggcgctgctttaccacgcgttggtgagtatgctgctgctgttccgctttgcgtcctc

SEQ ID NO: 653837 - DNA, 75 bp, Homo sapiens
acagccatctcacatttccaagtacattctcaggtggagacctggtctaaaattcccaggactccacagctttgc

SEQ ID NO: 653838 - DNA, 82 bp, Homo sapiens
gaaggtcagtgtgcttgcttggagatcaggacgcaaagggggagacattggacaggacagctctgatgataatcacagcggg

SEQ ID NO: 653839 - DNA, 50 bp, Homo sapiens
gtggagctccggcagccgccctgacaatgcagatcttcgtgaagactctg

SEQ ID NO: 653840 - DNA, 75 bp, Homo sapiens
cggaagctggtggaacagctacgcatagaagccgggattgagcgcatcaagtagccacgatggaggtgatgaacc

SEQ ID NO: 653841 - DNA, 87 bp, Homo sapiens
aagatgtatgaggagttcaagcagctggctctggaggacgccaaagaaggctacagatgcagaggccaggatgtgggcccagccctg

SEQ ID NO: 653842 - DNA, 75 bp, Homo sapiens
gaactggaggaaaaggtcgcctctttgctgcaccaggtgtcctggagacagcaaggatggaacattactgtggac

SEQ ID NO: 653843 - DNA, 75 bp, Homo sapiens
ttctgtagaccagctccaacaggattccatggtagctgggatgttagggctcagcgccacccaagactgtcaaac

SEQ ID NO: 653844 - DNA, 110 bp, Homo sapiens
ggactttctaaaagcaaagtcagaggaattcagatttggaatcaaggctgcagagaaacgactggagcagcagaagccgacagtgattgcaacttccactacttccccaa

SEQ ID NO: 653845 - DNA, 74 bp, Homo sapiens
acgtggaattcgcgaagctgccaaagccttagacaagtggagttggcatgaacttaacagcagcagatactgtg

SEQ ID NO: 653846 - DNA, 82 bp, Homo sapiens
actctcggactgagaaacgcaagttggaatcgaagcctcttaaaatggcagatgacttggacttcgagacaggagatgcagg

SEQ ID NO: 653847 - DNA, 75 bp, Homo sapiens
tgaacctccgaaagctcagcacacactcccgcaggatcccgccattgttcagcacaagctccgggtggataaggc

SEQ ID NO: 653848 - DNA, 90 bp, Homo sapiens
ctgtcctttcagcttctttctcacacgcagatgaacactggacttcagaaataataccaaacattatgagctgttaaactacagtgagca

SEQ ID NO: 653849 - DNA, 50 bp, Homo sapiens
cgaatcgttaaacatcttaggtcaggatgacgcggcatggcaagaactgc

SEQ ID NO: 653850 - DNA, 100 bp, Homo sapiens
tgctggtgaatctttggcacttctctttgaattggccagaggaatagagagtaatgtcgtactctcaggaggctccaccatgttcagggatttcggacgc

SEQ ID NO: 653851 - DNA, 100 bp, Homo sapiens
atatttgtagtggacagaaacacagtagaaattacagagcttccagttagaacttggacacagttgaatccttggcctgaatatatttacacacgtcttg

SEQ ID NO: 653852 - DNA, 90 bp, Homo sapiens
gtttggggctaccttgagccaggagggcctccaggatccggatcacctgtttgaaaccatctcccaagccatgctgaatgctgtggaccg

SEQ ID NO: 653853 - DNA, 74 bp, Homo sapiens
gaaccagcaatattaccctgatgatacactgaagagatggtgccttggcacccttgcctggaactcgttagcaa

SEQ ID NO: 653854 - DNA, 128 bp, Homo sapiens
catcatccacagcagcagctggatattgagccggatagacctattggatatggagcctttggtgttgtctggtgtgggccatgtttgaggattgccccagcattcagttctatgagtaataaatatcc

SEQ ID NO: 653855 - DNA, 74 bp, Homo sapiens
ccaggaggaccagctggatcgacccccgggacagctgcagaaccttggcctgaaaatgctacattatatcagca

SEQ ID NO: 653856 - DNA, 83 bp, Homo sapiens
cggcggccttgagcgctgagcaagcaaagggaagtgggaaaactcttgcctttgccatcccaatgattcatgcggtgttgcag

SEQ ID NO: 653857 - DNA, 90 bp, Homo sapiens
atcctaccaggccgcacattgcaggatttggtgctatggagaaatttttggtagaatataagagtgcagtggagaagaaactggcagagt

SEQ ID NO: 653858 - DNA, 100 bp, Homo sapiens
agatgattcatatccttctgtactacaaagcatccacaaacatccaagacactgagggtaacactcctctctacaccaaaattgcattgagccaaacttg

SEQ ID NO: 653859 - DNA, 50 bp, Homo sapiens
cagatgcttcgggacctcataaaggaaagtgtggacgaatgtggaacctc

SEQ ID NO: 653860 - DNA, 97 bp, Homo sapiens
gttcagtcggagccagtaaagcaaacactcgtgaaactgctcaggccatcaagggtatgcatatacgaaaagccacgaagtatctgaaagatgtcac

SEQ ID NO: 653861 - DNA, 83 bp, Homo sapiens
gtttgtttctctttctacaagtggaggaaagtatcagatgaccgtggaaaaagtacagggtattagcagattggaacaacttt

SEQ ID NO: 653862 - DNA, 100 bp, Homo sapiens
ggcacctggcgcccagcgcgcccgtggccgctgccgcctccgccccagattctgaagactactttgaggtcaacattccaacagacctacgagcaaaaca

SEQ ID NO: 653863 - DNA, 82 bp, Homo sapiens
tttcttcttgaaattaggcagactcttcaaaacgcactcattcagtttgctactagcctactttggggataaaggattattt

SEQ ID NO: 653864 - DNA, 83 bp, Homo sapiens
ccctgttccccgcgctgcggcctggcggcttccaggcgcactaccgcgcgctcctggttgcagccagaatgcatgacttcagg

SEQ ID NO: 653865 - DNA, 88 bp, Homo sapiens
tgagactgggtctggtaaaacaacacaggtattgatgaagatgaccctactgctgatgataccagtgctgctgtaactgaagaaatgc

SEQ ID NO: 653866 - DNA, 83 bp, Homo sapiens
gtactggatcgaaatgtccatgagaaaaagcttggagataaagttgctttttactgccgcggcgagtcctttgcacatgttgg

SEQ ID NO: 653867 - DNA, 96 bp, Homo sapiens
attaaggtctggtcggatggggcaggatggctgcgttgacacgtcttatttaatccacatcataggcttatgcaagcaaagatctggaggagcagt

SEQ ID NO: 653868 - DNA, 88 bp, Homo sapiens
cccttcccgagtgcagagcgggcagagaagtgatcagggccaaagcggtcagtgagaaggaagtggactctggaaacgacatttatgg

SEQ ID NO: 653869 - DNA, 101 bp, Homo sapiens
cggaagaccaagatcatcgagatgatccagacatttaatgtggatgcaccatgccagaccgtggaagatttaacgaatggggttgtgatggcccaggttct

SEQ ID NO: 653870 - DNA, 73 bp, Homo sapiens
agaagttcttccttgaagaaatacagcttggtgaagagttactagctcaagccaggcccagacatgtccgtcc

SEQ ID NO: 653871 - DNA, 80 bp, Homo sapiens
ggagcaggagcgggagcgggatccccagcaggagcaggagcgggagcgggcttgggcactgtttaaaggaaagttccgag

SEQ ID NO: 653872 - DNA, 83 bp, Homo sapiens
accacctcatcgagatggacaagcgggagggcaaatacgacatgggcatcctgggtgagaagccctaccactgcaactgggac

SEQ ID NO: 653873 - DNA, 75 bp, Homo sapiens
gaggacaagaccatcgagctcatggactgttatgaacactatccaacaattaatgatgattttaaattcagcaag

SEQ ID NO: 653874 - DNA, 75 bp, Homo sapiens
catgcggaagatcgtcgccacctggatgctggaggtactccaaagattcaggtttactcacgtcatccagcagag

SEQ ID NO: 653875 - DNA, 73 bp, Homo sapiens
acaaccttcgatctcctgacgaccaggtctaaactgcagtaatccatttactcagctggagaggagacatcaa

SEQ ID NO: 653876 - DNA, 100 bp, Homo sapiens
catttcactacagacgaaatccactaggactttgcctcccgggccaaactggcagttcaaaaactagtacagaaagttggattttttggaattttggcct

SEQ ID NO: 653877 - DNA, 74 bp, Homo sapiens
agtcggggccctacaagcagtctacgagcttgagagaattctgaacaggagttgtctctgtgggaagtttgtcc

SEQ ID NO: 653878 - DNA, 75 bp, Homo sapiens
gggagtggaggggagccaggcggccgcctcagaaaacgttgtgtgacgtgatcctcatggtccaggaaagaaaga

SEQ ID NO: 653879 - DNA, 75 bp, Homo sapiens
ataatggatgaaaggaaccgacagttttacatgtggcacccataaaagatgaggctgagaacacggaaagcttct

SEQ ID NO: 653880 - DNA, 95 bp, Homo sapiens
ttactgagctcccttctggaaatgacacctctgggcttgagaataagactgttgttgtcaccacaattttgattgttcagattccattctgtggg

SEQ ID NO: 653881 - DNA, 97 bp, Homo sapiens
cctgaacagcattctatcatggaaggaggagatgaagggcaagggccaaaatgatggctggtccctgcagacggcttcccatttttatgaccggatg

SEQ ID NO: 653882 - DNA, 74 bp, Homo sapiens
gatgcctttgttcaccgccaaccccttcgagcaagacgtggatattctatattgagcgcattataccaataatc

SEQ ID NO: 653883 - DNA, 101 bp, Homo sapiens
cgcccaaggagaatgcgctcttcaagcggatcttgaaagtgactgagaccgaagatgatagtgatagtgacagcgatgatgatgaagatgatgttcatgtc

SEQ ID NO: 653884 - DNA, 121 bp, Homo sapiens
agaccccaccacccaccttctcctttcgagaaaggatgactcacaagagtcttgtctacctctggttcctgtgcaggtctctctgaagaggctatcatggagctgaacctgccgactggta

SEQ ID NO: 653885 - DNA, 49 bp, Homo sapiens
cagtccgagagctagatggaagccagaagatacctgaaattcctgcaga

SEQ ID NO: 653886 - DNA, 100 bp, Homo sapiens
tgatcctctgtccctcaagctgttaacagatgtcataggaaagataatctatctttgccggaatgcaaaggatgtggctgtttccttttattatttcttt

SEQ ID NO: 653887 - DNA, 50 bp, Homo sapiens
aggagctgggctgcatcaactcgtaagactttgaccccgacgcaggcttc

SEQ ID NO: 653888 - DNA, 76 bp, Homo sapiens
ctccagccgggcccgcgaagtgttcataattggacccttgaagacactcttcagtggttgatagagtttgttgaac

SEQ ID NO: 653889 - DNA, 100 bp, Homo sapiens
aacggcgacctcaagaagcagctccacgaaaggcagccgcggatcgccgcgctcagcgacaaacaaatccagacatttaatgtggatgcaccatgccaga

SEQ ID NO: 653890 - DNA, 83 bp, Homo sapiens
gcggccccggccgcctccgcgagggcaccatggaggtgaatgcagatatggatcagaaactttcgaagttggtagaagagctc

SEQ ID NO: 653891 - DNA, 101 bp, Homo sapiens
gggtcacacgttacatgctactctacggcgaccgagtggacagctggacaccgttctaccagcgagggcacaactcggtggggtggaagacaacccgtgag

SEQ ID NO: 653892 - DNA, 99 bp, Homo sapiens
ggtgaatttccatgtcaacatagtcctggtgctggagaatctggtaaaagcaccattgtgaagcagatgaggatcctgcatgttaatgggtttaatgga

SEQ ID NO: 653893 - DNA, 78 bp, Homo sapiens
tcagacagaacagttaatcctcaatttaagcctgatctaacccctagaaacagtgctctatggagagaggtataatga

SEQ ID NO: 653894 - DNA, 96 bp, Homo sapiens
gcctcagcctcctgagcagctgggattacagcaggcttatggctatgggccatacggtggtgcgtacccgccaggaactcaagttgtctacgctgc

SEQ ID NO: 653895 - DNA, 80 bp, Homo sapiens
gcagaggtgccgacatggggcttaagatgtcctgcctgaaaggttgaaatcacaaagattagacacctttttagataggt

SEQ ID NO: 653896 - DNA, 73 bp, Homo sapiens
ggttctccgggagagggggagtgcgcggcggccgcagctgccacaaaccaggccggatcacctcaacagtcac

SEQ ID NO: 653897 - DNA, 74 bp, Homo sapiens
tttcctttccctcagcacacagaggatgatgctgactttgatgaagcctatggaaattcctagagacagataaa

SEQ ID NO: 653898 - DNA, 95 bp, Homo sapiens
cactttcatagcaagtgtgatcggcacccgagggcttgcggctgaaggtttgtttgtaaaaacaatggtgtgttgtttgaaaaccagctgcttca

SEQ ID NO: 653899 - DNA, 100 bp, Homo sapiens
ccggcttctacggcaacgccctgctgcccggcaactgcacccgacccacgcagccacccagcctcagcactcatctgcgcagccatggaggccctgggac

SEQ ID NO: 653900 - DNA, 75 bp, Homo sapiens
tgaaggaagaaaacacaggagccggagcagaagcaaagaggtatctgcatgtaaaatcttcagctggtggatggt

SEQ ID NO: 653901 - DNA, 74 bp, Homo sapiens
gtgtcgcctccggggggcgtagcaagctccgacagttagttaatatgtgcatcaacccagatccagagaagcga

SEQ ID NO: 653902 - DNA, 75 bp, Homo sapiens
ctgtggtttatctagctgaagatgccaaaggatccagttggggatctcctgttcatctatgacctctttggtctc

SEQ ID NO: 653903 - DNA, 100 bp, Homo sapiens
aatgaagccatccaatggatgcaggaaaactgacatacaatctttgccagcaacacttcctccttgcagattacaagcatagctaatgccaccaccagac

SEQ ID NO: 653904 - DNA, 75 bp, Homo sapiens
tgaagacccaccggctggacaaggtgtttgtggccacagatgccgtcagaaaggtgcaagcatctcttggcagtt

SEQ ID NO: 653905 - DNA, 83 bp, Homo sapiens
ctggtgtgcagccgcccaggagggcgaatgacaacagagctgctcaaggcgggaactctgagctaagcagtggaggtttctct

SEQ ID NO: 653906 - DNA, 73 bp, Homo sapiens
aaaaaaacccttcactgtgaagagacatgagatgattgccaaatccccagaggagaaggcagagcccccccag

SEQ ID NO: 653907 - DNA, 82 bp, Homo sapiens
ctttgtttttcctgggaactgcagatgatgccatggagagcagcaagcctggtccagtgcaggttgttttggttcagaaaga

SEQ ID NO: 653908 - DNA, 90 bp, Homo sapiens
gatgttcctgtggaccccagtccagcccgagttctttcaggtctgccacaccaagaaggactatgaagagtacgggcccagcatctgccg

SEQ ID NO: 653909 - DNA, 96 bp, Homo sapiens
ctaccttgtatgcctcaatttgctggatttaagcactgctgcactttatgaggtgaaaggtgtagcagtcactcggcctacacccacagcatcgac

SEQ ID NO: 653910 - DNA, 82 bp, Homo sapiens
ttaagcacacgagctggaggactgggtatcaatctcactgctgcagacacagttagtggttacttggatgattgtacctgtg

SEQ ID NO: 653911 - DNA, 100 bp, Homo sapiens
cggtgacagagtggagccatggctagagcccggccgcaccacctgggtctccgccatgaacgggcctgccctgcagccctcctcgccctcttccgcgccc

SEQ ID NO: 653912 - DNA, 98 bp, Homo sapiens
tgaacggcgtcgtcgggccgccgcagcccgccgaaggcgcgggctctgatggttgtatatatgaaaccttgataccaatacgtccagctgacccagaa

SEQ ID NO: 653913 - DNA, 90 bp, Homo sapiens
aggactgatgcagatgcccctcctccaccagaggactgggaggagcatgtcaacagcattcctctgaatattgatttgctgaatagccca

SEQ ID NO: 653914 - DNA, 75 bp, Homo sapiens
ggcggccatggtccaaccttgaagggtgaggatccacgacctccgcagtggtaacatcgccctgtcgctctccgc

SEQ ID NO: 653915 - DNA, 97 bp, Homo sapiens
gcagcgtgtgtggggtcgagcttcctgataacgaggctgtggagcagcacaggttccaatcgttgcacttactgctactgcaagttcttcaatccgg

SEQ ID NO: 653916 - DNA, 89 bp, Homo sapiens
tgtattccatggacatgttccacacgcgcttcaagcaggagggtgtcctgaacagcaaggtatcacctcttctgggctcaagatggaca

SEQ ID NO: 653917 - DNA, 100 bp, Homo sapiens
aaaatgtaaaggccaagatccaggataaggaaggtttaggaatgtatgaaacacccctgttcctagctcatgaagaagagtcaggtggccgaagtgttcc

SEQ ID NO: 653918 - DNA, 100 bp, Homo sapiens
cagaaggcttatgaggatggctgcaagactgtcgacctaaagcctgactggggcaagatgcttgctctgtcaaggcacagcctattgtctcctttgctca

SEQ ID NO: 653919 - DNA, 50 bp, Homo sapiens
agcgagtacacctgcaccatccagtactatactggcaattgctggagaag

SEQ ID NO: 653920 - DNA, 83 bp, Homo sapiens
tttacaccgacaactccatcaagcctcaggagctgctgacctgcctagagctggaacgttacctccagagcgagccctgctat

SEQ ID NO: 653921 - DNA, 98 bp, Homo sapiens
atcacttctgaagaggaacggtcccctgccaagcgaggtcgcaagtctgccacagtaaaacctgagttgaagttggtgaagacattcatgatttaaac

SEQ ID NO: 653922 - DNA, 90 bp, Homo sapiens
agcattccttgcttcttttatcttggtctttgaccttcttattgtgatgcaggccatgatcatagctttcacgtcggacatgatcccccg

SEQ ID NO: 653923 - DNA, 108 bp, Homo sapiens
attcagatcttcatgtgtctcttctaagctgaataaagctgttttggaactgtcaggtacctcaaagcgtcatgtccatcctgttgcatggggatgctgcatttgctg

SEQ ID NO: 653924 - DNA, 88 bp, Homo sapiens
ccagaccgcaggctggagaccaagtatccggtggtgtccgatggcaagaggttcctgggctctggagacctcctgccccccgaggtct

SEQ ID NO: 653925 - DNA, 75 bp, Homo sapiens
tatgcttcctactgtttgagagcatgcgagagcacctcaagttccaaatggagattgatgttcttgaggaccctg

SEQ ID NO: 653926 - DNA, 95 bp, Homo sapiens
gctttcagcaatcgtgagaccgtctagtataagacagagcacgaaaggcatttttactgctggaacaagactgccaatggagactgccgcagaga

SEQ ID NO: 653927 - DNA, 97 bp, Homo sapiens
gcgaaggccgccgaacctgcctggctagccggcgacttgagtgacgagtccagacatcatctggtctccctgaacctgaaatcacaccatggatgat

SEQ ID NO: 653928 - DNA, 100 bp, Homo sapiens
caaacctggagccagaaacattaccgtcatattccacccattactaagatccgggtggatggacccaggggcaacgccctccagtatgagacggtgcagg

SEQ ID NO: 653929 - DNA, 82 bp, Homo sapiens
tctcgtgaacatagctttaatagggatcagtttgacaacttagaaaaacacacacagtggggaattgatattcttgagaaat

SEQ ID NO: 653930 - DNA, 75 bp, Homo sapiens
tccaagatggaagaggaagcggggcagaccagtgagaaagatcagtctaaagaaaaggagaagaaagtgaaaaaa

SEQ ID NO: 653931 - DNA, 100 bp, Homo sapiens
ccatccccagaccatcaattattgacacgcccaagcctctacggcagacacatgcaggccaacccagaaccaccgaagaagaataatgacaaatcgaaaa

SEQ ID NO: 653932 - DNA, 98 bp, Homo sapiens
tgacaacgaacagctcttcaccatgaaatggatagatgaggaaggggaatcccggaggcaagacacttgaggagaggcgctccagcctggacgctgag

SEQ ID NO: 653933 - DNA, 90 bp, Homo sapiens
ggatgccctgcagtacctgcagaaggtctctggagacatcttcagcagaggaaccgctgctgctggccgaactcaagcccgggcgccccc

SEQ ID NO: 653934 - DNA, 100 bp, Homo sapiens
ctaccgcagaagagaccctagaacatccttggttcaaagttaatttggagtggcccctggagtcagtttcctacaccatccgaggccccacccagcacga

SEQ ID NO: 653935 - DNA, 101 bp, Homo sapiens
cggatccccaagcccgccacgccgcccagcccggccccgcccgcgccggaagagccacgccggccacccagaggagaaggccaccccgcctggaggcacag

SEQ ID NO: 653936 - DNA, 96 bp, Homo sapiens
cagccggccaccccggggcttggcatgtttgtggaggtgaaggacccagaggacaaggttgatgccggcccaggatggatcagacctgtgaactac

SEQ ID NO: 653937 - DNA, 80 bp, Homo sapiens
gccctgggccgggccccaccggacgcgtttagtgggctacagatggcatggcatctaaaaccttacaatgcttgattttc

SEQ ID NO: 653938 - DNA, 75 bp, Homo sapiens
tgccctcagctccgagtccagggcgagacctattcaacgaattgcttgaaaactgaacaggcttttcccctgcaa

SEQ ID NO: 653939 - DNA, 100 bp, Homo sapiens
gaagttcacgagagagtgagccaaagaaccccgggttgctccttgagggcaggacagttcttatggctttatccgttgcgtaagcacagagaggtctgcg

SEQ ID NO: 653940 - DNA, 100 bp, Homo sapiens
tgctggcacggggctggtgggcatagtggctgccctgctggtatgaagtgtaacagaacagactttaccacctgaaactgctgcttcaagttcagatcag

SEQ ID NO: 653941 - DNA, 98 bp, Homo sapiens
gcgagctgcggctcggacgccagcggacacgcgggcgagctacaagagactgtgaaaaggaagttggaaggagctcgatcaccacttaatggagacca

SEQ ID NO: 653942 - DNA, 75 bp, Homo sapiens
tggaggttcgcggctctaacggggctttctacaagactgtgccctgtccacggtgcctcctgcatgtcctgctgc

SEQ ID NO: 653943 - DNA, 50 bp, Homo sapiens
tttggctggctatgcagacatctttctggaatcccgttctgcttccagaa

SEQ ID NO: 653944 - DNA, 75 bp, Homo sapiens
tgcggatacgacccatgaaccggcgagaataactgaagtgaagtgatggactccgatttggagagtagtaagacg

SEQ ID NO: 653945 - DNA, 100 bp, Homo sapiens
aagttgttcattgtttgtcaccacaaaaaggacaggctctatcaaagaaagcaagagatggaaaattgttgcctgaagaataccaaggaggatcttttag

SEQ ID NO: 653946 - DNA, 136 bp, Homo sapiens
gaaactgttaccagaaaaacaggtcccgatcccgaccccaaaagagtattcttggatcttgcacaggaaggaattaaagctatctcccctggttcgaggtattttataagctgcttaacatcctggcagattacac

SEQ ID NO: 653947 - DNA, 82 bp, Homo sapiens
cggagcgcggtccctgtattggtctcctgctcctagagctgagcgggctttggacaccatgaactttgatgtgattaaggga

SEQ ID NO: 653948 - DNA, 100 bp, Homo sapiens
tgcgggtcccgattgctgcagccgcttgtcagtgtgatgaagattggcacccagccaggcccagacatgtccgtccttgtaagttaaaagcttccatggg

SEQ ID NO: 653949 - DNA, 75 bp, Homo sapiens
gaggaagtagccaaagagcaactaactgatgctgacaccaaagcaactcttctgacctctgggactactgcaaca

SEQ ID NO: 653950 - DNA, 100 bp, Homo sapiens
tgcacagatgaacgaagttatggcagagttagctaaagaactccctcaagtttcatttgtgaagatggtttcacccaaatatcactggtgtggaggcaga

SEQ ID NO: 653951 - DNA, 60 bp, Homo sapiens
cggagatggtgcagaagatggaggaggactttgcctcccgggccaaactggcagttcaaa

SEQ ID NO: 653952 - DNA, 117 bp, Homo sapiens
cagcaattcctgagccaagaggaacttgacccccagagtgtggaaagaaagaccatctccccaggtgtcccgcatgagatgtctgcagaatgagacttacagtgcgctgagccctgg

SEQ ID NO: 653953 - DNA, 48 bp, Homo sapiens
tcatgccggatggttcctgctcaagcccgccagctcatcctgcagtat

SEQ ID NO: 653954 - DNA, 100 bp, Homo sapiens
aacaggccgaactgctgtatgggctctcctttactacttctccctggtttcattcatgttctgaggagggtgtgagaaggaaccatggatcccacagcct

SEQ ID NO: 653955 - DNA, 75 bp, Homo sapiens
tctttacctgcttcccaatcccactgatgaggatcagcccatgtcagaaagcttcttcactacctcctattgtag

SEQ ID NO: 653956 - DNA, 75 bp, Homo sapiens
gcttcgtttttcgccgtcatgggcgcctcggccgccatggtcttcagcgactcggtgaaatacctggagtgctca

SEQ ID NO: 653957 - DNA, 76 bp, Homo sapiens
tgagaccaagaaccaaccaattccggacacacttggactcgacagactctaagcaaattgtggctactaatttgcc

SEQ ID NO: 653958 - DNA, 95 bp, Homo sapiens
gtccttccagcaatgataagcatgtaatgagtcgtctttctagcacatcatcattagcagatttgaagcctagcaacattgttgtgaaatcagac

SEQ ID NO: 653959 - DNA, 90 bp, Homo sapiens
gaccctgatggaggaagtgctcctgctgggcctcaaggaccgcgaggttgacgatgtgtcacactgtgtaagggaatcgcatggagatgg

SEQ ID NO: 653960 - DNA, 101 bp, Homo sapiens
cattatttatgtcatcaagaagaatgacgatgggaactctaatgatccaggacaaagaagttaccctggagtatgtatcaagcctggatttttggtactgc

SEQ ID NO: 653961 - DNA, 50 bp, Homo sapiens
agcctcccaagtagctgagattacaggctggagtgcaatggtgcgatctc

SEQ ID NO: 653962 - DNA, 75 bp, Homo sapiens
ctgcagtcacagggaaccctcaggaagaccttccgggcagagaccagagggaagtctccagtcggaagaaggctg

SEQ ID NO: 653963 - DNA, 82 bp, Homo sapiens
cccgcccgtgccctcccgctcggccccgccagcagcactgtggaggccgtcctcgctacctgaccgacgttgaccgcatcgc

SEQ ID NO: 653964 - DNA, 80 bp, Homo sapiens
cgctgctgctgtgtgcggtgctgctgagcttggcctcggcgtcctcggaataccaagctgctattttacacttgaagagg

SEQ ID NO: 653965 - DNA, 82 bp, Homo sapiens
ctgcggccgtcgcccaggagtcatcggacgccagaatctgtaagactttgaccccgacgcaggcttcagtgattgccgcgga

SEQ ID NO: 653966 - DNA, 82 bp, Homo sapiens
atccgtctggatcacggatgtaggaagtgcccaagaagatgaaaggattgttcttgttgacaacaaatgtaagtgtgcccgg

SEQ ID NO: 653967 - DNA, 96 bp, Homo sapiens
ggatccacaggtcttggataagaacatgtttgacaagctgaaccgtgatgcctttcatataatttcttattttttgtttcaagttctggaccagtc

SEQ ID NO: 653968 - DNA, 100 bp, Homo sapiens
tttgcccatgccaaccaaaaggcgatccacatttgttcagtctcctgcagatgcctgcacacctcctgcacacacatgccctcttggttctgtttctttg

SEQ ID NO: 653969 - DNA, 75 bp, Homo sapiens
agccgcaccacctaacgctggccgacaacagcctggcgtccgccacgccaagctacatcagtgatgtgggacccc

SEQ ID NO: 653970 - DNA, 73 bp, Homo sapiens
aaaatgaaaaacatcagcaatcaccttcaaattcaacacccaacagcttccttaatagcaaaggtagcaacag

SEQ ID NO: 653971 - DNA, 97 bp, Homo sapiens
gttggatctacactttctcaagcactgtgatcttcaaatactcagattgatggacaacttttcttaattaagcaccttttgatacttcgtgaacaaa

SEQ ID NO: 653972 - DNA, 90 bp, Homo sapiens
caagagagtgtgtctcatccaggagccaaaaggaaaggctaaccggtggtttggggttgctccccctaaatctggaaaaatgaacatgaa

SEQ ID NO: 653973 - DNA, 102 bp, Homo sapiens
gaatacatcaagattctgaatctggtgatgaacttagcagcagctccactgaacagataaggagttgaacaatgaccatagttgacaaagcttctgaatctt

SEQ ID NO: 653974 - DNA, 100 bp, Homo sapiens
ctctgtgtagcagtagatttaggttccttttctccggcaggctcctaagcctaggagagcccgaactggaggagagtagatctggagaaaccaacagctg

SEQ ID NO: 653975 - DNA, 75 bp, Homo sapiens
gcctctccaccgtgcctgacctgctgctgccactggaaagaccacagcaagattctttcattcgtctcctcctag

SEQ ID NO: 653976 - DNA, 58 bp, Homo sapiens
atccatttctcatttctgatgagttacgaagaagatgaacatgatgccatcatttaag

SEQ ID NO: 653977 - DNA, 75 bp, Homo sapiens
gcaacttcggggagctccgcctagaggacctgaaaaacgtgttcccacccgaggtcgctgtgtttgagccatcag

SEQ ID NO: 653978 - DNA, 75 bp, Homo sapiens
ttcaaaaacaattcaaggggagctgggctggatctcttatccatcacatgggttgcctgctaataaagatgcctt

SEQ ID NO: 653979 - DNA, 100 bp, Homo sapiens
gacacataacaagcagcagtgaggacaccaaaggaaaccacagtgcaaatttaattgccggggaagataacgggccttggtgccctccaagcgtcagctg

SEQ ID NO: 653980 - DNA, 100 bp, Homo sapiens
gtaaagctgctggacaacaccatggaaatatttgacattgagctggaagatgagctggtgtcactgcaaaagaaactcaagggcaccgaagatgaactgg

SEQ ID NO: 653981 - DNA, 100 bp, Homo sapiens
cacgcgcacggagcataagctgagccgcacttcacagagaatgcagttgtcttgacttcaggtctgtctgttctgttggcaagtaaatgcagtactgttc

SEQ ID NO: 653982 - DNA, 75 bp, Homo sapiens
agaagagcagagcggagggagccccagacacggggtttcacagaccagctgcgtaagatttctaaggatgcaggg

SEQ ID NO: 653983 - DNA, 83 bp, Homo sapiens
ctcatcgcctgcctgctgctgcgcgtcttcagctgggattctgtccctgaccgtcttcacagtccaggtgatcttgactactg

SEQ ID NO: 653984 - DNA, 82 bp, Homo sapiens
gttcctgccgtctgctcttctgcctcttgatctccgccaccgtcttcaggccagatgacagtcatgtccctttccagggacc

SEQ ID NO: 653985 - DNA, 75 bp, Homo sapiens
ggccctgggaccaaagtggatatcaaacaaatgagccgtcagactgctacagcattacctaccggtacctcgaag

SEQ ID NO: 653986 - DNA, 82 bp, Homo sapiens
gttattcagtctcgtctcctcggtcagtggactcttattcttcaactcagcatgttccttactatactggcaattgctggag

SEQ ID NO: 653987 - DNA, 75 bp, Homo sapiens
attggcttctttgagactgaaatggcagggcaattgaaggaacagactaaaaatcgtgtcctggaaggaaactac

SEQ ID NO: 653988 - DNA, 75 bp, Homo sapiens
gggcggcagcgggcgtgaggggcttaagtccactccccgccctaagttctctgtgtgtgtcctgggggaccagca

SEQ ID NO: 653989 - DNA, 86 bp, Homo sapiens
gcccgtgcgcggcccgggcagccgcgctttcccagtcatcatcagatttgaaatatttaaagtggatacaaaactatttcagcaat

SEQ ID NO: 653990 - DNA, 90 bp, Homo sapiens
caatgtgatcttcaccttggattctttgttaaaaggagacctaaagggagtcaaaggacattccaaaatatgcccggtgctatccgccca

SEQ ID NO: 653991 - DNA, 83 bp, Homo sapiens
atccaataagaacttctccaaaaagattcagcaggagcagctgatgagccagatccgggagacgcagcagctctgccaccaga

SEQ ID NO: 653992 - DNA, 80 bp, Homo sapiens
gccaaaaatgtgcatactcacagagttagagagagggatggtgagcataaatgcccagtggatgagcgggagcaactgga

SEQ ID NO: 653993 - DNA, 101 bp, Homo sapiens
tgagggattgctactgcacggtgaacctggaccaggaggaggttttcaggaccaaaattgtggaaaagtcactctgatcaatgaactgagccatgttcaaa

SEQ ID NO: 653994 - DNA, 88 bp, Homo sapiens
atttgcgccatcatcctcatcatcatcatagcttcttctcagcctgttgataaccatgttagcccatcttccttcttgggccagacac

SEQ ID NO: 653995 - DNA, 100 bp, Homo sapiens
ttaagatgatgtttgagaaaggtgaaccaactcaaactaagcaggtagcatctaaaggaactggtttaaatcctaatgccaaagtatggcaagaaattgc

SEQ ID NO: 653996 - DNA, 74 bp, Homo sapiens
ttcatacctcaaactgcatgatgtcctgaaagctacacacgctaactacaaggacttgaaaatactggaaatct

SEQ ID NO: 653997 - DNA, 98 bp, Homo sapiens
ctggagtctgcgaaggccgggacccggttccccggcccacagtgggggtgtgcaaacccgagagaactggggtatcgaggcaccaagccagattcgct

SEQ ID NO: 653998 - DNA, 100 bp, Homo sapiens
aacacagcccttactcttttggagaaggtttactttgcaagagcaatcaagacaacaagttggacatggaaattttggaacaacttaaatacatcgggtg

SEQ ID NO: 653999 - DNA, 100 bp, Homo sapiens
ggctggtaaaattgcagtgctgaagacactggacccggaattgttacgatttcctaaacttcatgatgccatagttgaagtggtgacttgtcttcttcgt

SEQ ID NO: 654000 - DNA, 75 bp, Homo sapiens
ccgacggcaaaggtgtcgtggtggtcattaagcggagatccggtttactcctggcttgggggcattaggaagcac

SEQ ID NO: 654001 - DNA, 100 bp, Homo sapiens
gcgggaacgattgggctgagcagaggacgacatgttgcttttcgtggagttctttggggtgactttcaagatggactctactctaacagcaagtgaaatc

SEQ ID NO: 654002 - DNA, 82 bp, Homo sapiens
gcccctcggccttccgacgtgggcggtgggccccagccccacagaccagcccagcattcagtggtacaggagctgcagcagg

SEQ ID NO: 654003 - DNA, 100 bp, Homo sapiens
tcccgtggcaaaagagaaggaagtgctagcggtggaatgtgttccagaagatctagaactgaagaagaagatttttgctcagttagattccatcattgat

SEQ ID NO: 654004 - DNA, 100 bp, Homo sapiens
tgataaagaacttcttcccaaaatgggagagaagcaatactgcagagaaactgtatgactctaaccattctggaaaagtcttcaatgaacacccatttct

SEQ ID NO: 654005 - DNA, 90 bp, Homo sapiens
cgggtgggctttcgcccgcggctcctgagggatcggtctcagccgcgcggctggtcagtgagaaggtcggaggggccgaggggaccaagc

SEQ ID NO: 654006 - DNA, 97 bp, Homo sapiens
tcatacagagattgaaatgttccttagaaaggagcagcaggctcaggaagaggccaaagaagcagaaatgagcagaaaggagttggggcttgatgaa

SEQ ID NO: 654007 - DNA, 92 bp, Homo sapiens
tatcatgctggccaagaagatcatcattaaggacggaggcacggtgagaagcctcacaagtgccaggtgtgcggcaaggcattcagccagag

SEQ ID NO: 654008 - DNA, 100 bp, Homo sapiens
gactagccagccggctacaattggagtcagagtcccaaagacatgggtattatacctgaagaaccttagccctcgggtgactgaaagagatcttgtgtca

SEQ ID NO: 654009 - DNA, 74 bp, Homo sapiens
tcctgtacagcctgcagaactgtctcctctgagcctccggcctccataagacccaaaacagatgacacctcttc

SEQ ID NO: 654010 - DNA, 87 bp, Homo sapiens
gtacagtgaactgcctgaagagttctcttgcaactagcaagtgaagccttgccaaatgacatgaccttggctcttgcttaccttctt

SEQ ID NO: 654011 - DNA, 100 bp, Homo sapiens
cagcatcgacatggtttccgaagtcaacatgggatcgcttacacctgagacgaactacagaacagcacgtaccagaggtggaagtccaagtcaaacgcag

SEQ ID NO: 654012 - DNA, 96 bp, Homo sapiens
gctacttccagggctacgcgcgctccgcgcagctcagaagtttgcctgcaatggtactgtaattgagcatccggaatatggagaagtaattcagct

SEQ ID NO: 654013 - DNA, 76 bp, Homo sapiens
cccagaaacccctactcatgatccggaccctgagactcccctaaaggccagaaagatgctgagggttggaaaagca

SEQ ID NO: 654014 - DNA, 100 bp, Homo sapiens
caggatgaacaaccaagtgattcattccaaggacaggcagcccagtctggtgtttggaatgacgacagtatgagttacactgttagaccttatgatagcc

SEQ ID NO: 654015 - DNA, 90 bp, Homo sapiens
gtcctcggagcgcggtccctgtattggtctcctgctcctagagctacgagttccagggagctctgtcctggtgaccgtgcccgggttatg

SEQ ID NO: 654016 - DNA, 97 bp, Homo sapiens
agtcctactccagcggcggcggcggccagcagatcttcccagacccgtcagattttgaccgctgctgcaaactgaaggaccgtctgccctccatagt

SEQ ID NO: 654017 - DNA, 88 bp, Homo sapiens
cagaacatctgggagaatatttaatggaaaatcgcttggttaaaacctgacacttttaacagattcaaccctatgaaaagataaaggc

SEQ ID NO: 654018 - DNA, 100 bp, Homo sapiens
cggaaagataaggaagcttgcgtccacaagatattacgtcaacagcagcatccacctccagatcgacaggcagtacctggaagaccaggcccctttccct

SEQ ID NO: 654019 - DNA, 100 bp, Homo sapiens
caatgtgagaacccagagaagaatgaggcctttctgatgacaatttgtcgggcacgagcggtatggaagtggacgaccgcgtgtcggcgctggagcagcg

SEQ ID NO: 654020 - DNA, 74 bp, Homo sapiens
gtacttcatcatccagtaccaggagagcctgaggatccaagcaggttcaggagaagtggcacctggtggaggac

SEQ ID NO: 654021 - DNA, 75 bp, Homo sapiens
aaaatcataccatatcagatgcctcgcagagcaccaggcccaccgtgaaagccatcccaggcctcaggacctgag

SEQ ID NO: 654022 - DNA, 98 bp, Homo sapiens
agcagttcagggagctcacatttctcatattgctcaacagtttcaccagtgatcattaaagaatgggcagcttacaaaggaaagtctcctcaaacccc

SEQ ID NO: 654023 - DNA, 75 bp, Homo sapiens
tgtgcaagtacctgccagagaacgacctgaaggtgtgatcccctgggcccgtttgttgtcgggggagaagactta

SEQ ID NO: 654024 - DNA, 75 bp, Homo sapiens
caatactcatgtgaatgtcaaggaaaagactgtcttctgaagattgatgtctatttccttgagctctttaatttt

SEQ ID NO: 654025 - DNA, 75 bp, Homo sapiens
tccagattgatacctggctacagcttgtctgggttctatactgtgatctcatttgcctcgactacgatggaaaca

SEQ ID NO: 654026 - DNA, 83 bp, Homo sapiens
ccccgagccgctggtgctacaggatttttagactctgaggagcagttggagctaatccacattatggaaatggaaaccaccga

SEQ ID NO: 654027 - DNA, 100 bp, Homo sapiens
cagctggccaaagaattgcagttagaagaagaagctgccgtttttcctgaagttgctcagattgttcgatatggtgagattccagctgaattaagggcgg

SEQ ID NO: 654028 - DNA, 75 bp, Homo sapiens
gtatatcttctaagattccgctcctcaccaccatcaggaacttcatgcccacttgaatggatccattagttctca

SEQ ID NO: 654029 - DNA, 90 bp, Homo sapiens
gtcctcacctcgctactcgcttgcctacccgccggcccgcgggtctacttcctcaaagccctgggcgctgcctatggcacagccaagagc

SEQ ID NO: 654030 - DNA, 80 bp, Homo sapiens
ggctttctgcgccatcctgcaccgccaccggcccgacctcatgtctgccatcatggatgttctcgcagaagcaaatggca

SEQ ID NO: 654031 - DNA, 83 bp, Homo sapiens
gaaggttcagttggcaaaccagatatatgacttgcaattttccagattattcaaagtatcaggatgggcatgtgaagtgactg

SEQ ID NO: 654032 - DNA, 122 bp, Homo sapiens
ctttgccattggggtgcagcagctgcaccccaccttgatccagcggacttacgggtcaaaatgcagatcttcgtgaaaacccttaccggcaagaccatcacccttgaggtggagcccagtga

SEQ ID NO: 654033 - DNA, 74 bp, Homo sapiens
agcatctagaaaagaaaatggacctgttgtaggattgattgatgtccatgtgcacctgcgggaaccaggtggga

SEQ ID NO: 654034 - DNA, 75 bp, Homo sapiens
gcttcgaaagcatcatccacgagttcgacccgtgctgtgaaagttgtgtagatttactgtttgtgagaggagctg

SEQ ID NO: 654035 - DNA, 102 bp, Homo sapiens
tttgccatcgacatatttcctgtcaccaacaaagatttcagctctctgatgtaaaggatggagtaaatcaagcagcacctgcatttggatttggcagcagtc

SEQ ID NO: 654036 - DNA, 82 bp, Homo sapiens
cgagcatcgctcttcggcaacccgaagccacaggatggaggagggggatcccagcaaagggcgaccattgacgaggtggaga

SEQ ID NO: 654037 - DNA, 51 bp, Homo sapiens
gatgatgcggaaattaaccccaaggtagcagcaattgcagagacagatgaa

SEQ ID NO: 654038 - DNA, 75 bp, Homo sapiens
accgaatatactgggcctgagagttacgtggcagaaatgatcaagcacgcactcctggctttaaagtttatactt

SEQ ID NO: 654039 - DNA, 90 bp, Homo sapiens
gaagagtcctgaccacaatggggaggacaacttcgcccgggacttcatgtatcaaatcatgggtggataagatgcaagaagaccttgtca

SEQ ID NO: 654040 - DNA, 100 bp, Homo sapiens
tcctcctgtttctatagaaactgggttggaagtcagagctgcacaaagggaaaggcaaatccagtttgctgatgacatgcaggagttcaccaaattcccc

SEQ ID NO: 654041 - DNA, 75 bp, Homo sapiens
gcgggggggaagtgactgggcggtgccggcgccggagacgatgccgtttaggtcaagaagcaggtctcgatcccg

SEQ ID NO: 654042 - DNA, 82 bp, Homo sapiens
gatgagagtcggagccgaataccaagctcggatccctgaatttgatccaggtcttgccccagaagctgcgggcacatccacg

SEQ ID NO: 654043 - DNA, 80 bp, Homo sapiens
tgaagatgcttgtttcttcctcttccctaacgccctttccaccagtgcggactgcagcaattctgtggtgttcttggtca

SEQ ID NO: 654044 - DNA, 74 bp, Homo sapiens
ctgctgggcctgcccttcaccctctacatgtgacttgctgtctcctgactcagtcctgagttgcttgtatcctg

SEQ ID NO: 654045 - DNA, 82 bp, Homo sapiens
ctcagagatgcctgtaccgtgatgtgacgctggagaacctggcacttatgtcctccctggcatggcgaggacaacatccttg

SEQ ID NO: 654046 - DNA, 50 bp, Homo sapiens
tggcagatatcgaggtggatggaaagcagactgtcccaggtgccctccgg

SEQ ID NO: 654047 - DNA, 75 bp, Homo sapiens
agcgatgggccgaaagagctcataaagtggtggagataaaatccttctccaaacaggctggtgtacagggagcaa

SEQ ID NO: 654048 - DNA, 98 bp, Homo sapiens
tggactttgggcgtcccattgccatgtttggaaattttagcattcaggtgccaggaatgcagatgggacagccagtgccagaaacaggcccagctata

SEQ ID NO: 654049 - DNA, 110 bp, Homo sapiens
caaacagcccgcccgaccccgtcccgaccctggccgccccgagcggagcctggagcattttgaaagcgaagcagaagccgtagaatcagcggcgagcctgttgaaagaac

SEQ ID NO: 654050 - DNA, 90 bp, Homo sapiens
ctgaaatttgatgacctagatggaacacatgctctgatgagcagataaaatccccccatctctgtactccacctactgccaggcctgctc

SEQ ID NO: 654051 - DNA, 100 bp, Homo sapiens
acagacacaactgaggccccctttcaaggggatcagaggtccctggagtttctgcttcctccagagccagatcgggtgctaccaaggttttgcttttgca

SEQ ID NO: 654052 - DNA, 100 bp, Homo sapiens
tgacctgggtggtccccctcctcttcctcttcctgctgtccaggcagggcgatctttgtggagttcacctctgtgtttgactgccagaaagccatgcagg

SEQ ID NO: 654053 - DNA, 100 bp, Homo sapiens
ggcgatccagcatggaccccgaggacgaaggggtagcgggagtgatgtctgtggggccgccggcggcccggcttcagattttcagctgaactctcatctc

SEQ ID NO: 654054 - DNA, 75 bp, Homo sapiens
gccatgcttcctatctaccctgccattgatattgatgcacaggtggcgacatgtctaagaatgtgagccagtcac

SEQ ID NO: 654055 - DNA, 97 bp, Homo sapiens
ccaggaagctttggatcagacttttgtgttgcagttcggacaatgcagatcttcgtgaagactctgactggtaagaccatcaccctcgaggttgagc

SEQ ID NO: 654056 - DNA, 50 bp, Homo sapiens
tagcctcctaagtagctgggaccacagcttgtgagaagaatgagttgatg

SEQ ID NO: 654057 - DNA, 97 bp, Homo sapiens
aggaaaaccccgaaaacgcaagaagcgtatcgggcccgggacacccagacagatgagattgtcgcactgaagaaggtgcggatggacaaggagaagg

SEQ ID NO: 654058 - DNA, 98 bp, Homo sapiens
tttgagtcagctaaccaatcaaccaccttgtctggacagcagtcagcatagaatggatcttggagaatgtctgaaagtccatgacctggctttaagag

SEQ ID NO: 654059 - DNA, 100 bp, Homo sapiens
cagtgttaaaggaacctctacaacgaaggtgaagccacggaagataagccgtcattgtgtggcactggacggggaatcaagagacccggtttctaatccc

SEQ ID NO: 654060 - DNA, 75 bp, Homo sapiens
gttatcagttgattgggagccactcgggggtgaagctttgcaggtggacaaagatggagtctcgttctgttgcca

SEQ ID NO: 654061 - DNA, 75 bp, Homo sapiens
cgcaggcgcagacccacccgccatgaagccccccgcagggacacctgtgaaccgcatccccatcatggccaaaca

SEQ ID NO: 654062 - DNA, 73 bp, Homo sapiens
gctgaagtggtttttcctaatggaaaatcacatacctttccaaaatgcactcggtgatggaaagagagccact

SEQ ID NO: 654063 - DNA, 100 bp, Homo sapiens
ctggagaagatggtggccaggaagaacacggacaggaagatgtcacccaagcgcatagctaaaagaaggtcccccccagcagatgccatccccaaaagca

SEQ ID NO: 654064 - DNA, 100 bp, Homo sapiens
gaatttaaaggaggtagaccaggaggatttcctgatcatccacatcgaggttttgaaacagaatttttgagagatatcttcaatctcctgtttttgttgc

SEQ ID NO: 654065 - DNA, 50 bp, Homo sapiens
gaaaactggtcaaggaagctatttggacacctcccacactgagtccccaa

SEQ ID NO: 654066 - DNA, 75 bp, Homo sapiens
gaggagaaccaactggtcccgaaagagccacagctccggagcaagccccagccccggcccggccataccagggcg

SEQ ID NO: 654067 - DNA, 87 bp, Homo sapiens
gtccattcgagggcggatcctctctgtctcatataatggcagcaaaggctgtagcaaatacaatgagaacatcacttggaccaaatg

SEQ ID NO: 654068 - DNA, 75 bp, Homo sapiens
tttaggtctcaaggcaagcctattgagttaacacctctgccgctgctaaaagggtaatcactttgatcagtatga

SEQ ID NO: 654069 - DNA, 100 bp, Homo sapiens
ctttatcctggtcatcttctatttccaaataccttctccaggcaaattccgttcccctgcagcaccatctcctttggctcttcggcaaccagtgaaagca

SEQ ID NO: 654070 - DNA, 98 bp, Homo sapiens
ctgatcatcaagccagacaacttctggcagaaacagaggactaattttggcagttctaaatttgaatttgagctggccatgactcatccaagtcatca

SEQ ID NO: 654071 - DNA, 75 bp, Homo sapiens
ctgccaccatcatcagtgagaacttgaacaatgaggtcatgatgaagaatacgccagacaccttttgaaagctaa

SEQ ID NO: 654072 - DNA, 75 bp, Homo sapiens
tgagtagcttggttggtggtaccctaaaattagggcatgattaagatttggattcaagatgtgaaataatcagcg

SEQ ID NO: 654073 - DNA, 90 bp, Homo sapiens
tctacatatatattctgtcctgtatgaagtgaaggctcctgttccttctgcctgtttcaggaatatttgtaagcaaatgacaaaaatgca

SEQ ID NO: 654074 - DNA, 98 bp, Homo sapiens
agcccggagcccggcgctttccccgcaagatggacggtttcgccggcagtctcggcgaggattaaatccaccacacagggtgaaatctatctccatga

SEQ ID NO: 654075 - DNA, 90 bp, Homo sapiens
aagttagtggattaaaatctcccaagaggaatgacaaacaaccagctcttcagatgtgggattgcaaggtttgcgtgaaaaaggtcaagg

SEQ ID NO: 654076 - DNA, 76 bp, Homo sapiens
atctgacagtgcttgcaggatctctcctggacaaatcaatcaggcattgaatgccccagaggagcccgaaacctcc

SEQ ID NO: 654077 - DNA, 100 bp, Homo sapiens
gcacctgcagctggcgcctctgcagtgggatctttgtggagttcacctctgtgtttgactgccagaaagccatgcagggcctgacgggccgcaagttcgc

SEQ ID NO: 654078 - DNA, 135 bp, Homo sapiens
gtttgtccagtggaagaccatctacatctcccacaggaagtgtcacacagcagtcaagtatgtcccaaacgtctgatcgtaacagttttactttgaaactggaagatactgaaaattggttgtatgaggatggag

SEQ ID NO: 654079 - DNA, 100 bp, Homo sapiens
ctgaagatgatcgaggaggcaggcgccatcatcagcacccggcattgcaacagccagaacggggaacaagatcactcaaggtgaaggataatctactaat

SEQ ID NO: 654080 - DNA, 94 bp, Homo sapiens
ctatgcgtccttggaggcctactgcaagcacaagtacccagagcagccgggaagagctccacgcaggagatcggtgaggagctgatcaacggag

SEQ ID NO: 654081 - DNA, 97 bp, Homo sapiens
tgatatttgcctttagtgcactcttctccttcacagtaaagtggctgctccagaacctgggtatcaacccagcaaacattggcttcagtaccctgac

SEQ ID NO: 654082 - DNA, 101 bp, Homo sapiens
ctgccagaggtggaggggaggattttgaggacacttgtggagagctcgaattccagaatgatgaaattgtgatctgcaactggaatatggacaaggacacc

SEQ ID NO: 654083 - DNA, 74 bp, Homo sapiens
tgaggaggaagggatggctgtggatctgctgtctgctcaggtatggtctctctggcagtgatgtcctggataat

SEQ ID NO: 654084 - DNA, 100 bp, Homo sapiens
tccactaatcaccagaacaaaatgtgcagtcactcagcctctgaagaagcttcgggttcagactcaggcagtcagtcggaaagtgagcagggaagtgatc

SEQ ID NO: 654085 - DNA, 101 bp, Homo sapiens
cgggccgcactcgcctgcgccccgcacccctccgagcagcccggggatccagcacgcaggtgctggagaatctggtaaaagcaccattgtgaagcagatga

SEQ ID NO: 654086 - DNA, 90 bp, Homo sapiens
agccggaccctttgccttcgccactgctcagcgtctgcacatccctacaatggctaaaacagcaatggctaaacctattcgtcccgggca

SEQ ID NO: 654087 - DNA, 97 bp, Homo sapiens
taatgcagtatcgaatggacaagtccgaggtgatagttacagtgaaggttgtctgggtcaaacagggagtggggccagccagcagaaacagtgggct

SEQ ID NO: 654088 - DNA, 100 bp, Homo sapiens
cgactcgggagctccgggagcggcccgcgcagtgtgaggatgatttggctgagaagaggagaagtaatgaggtgctacgtggagccatcgagacctacca

SEQ ID NO: 654089 - DNA, 75 bp, Homo sapiens
cccacatctggaatctggaatgaaatcttccaagtccaaggatgtcaaaccagtccagctacgggggcccagcca

SEQ ID NO: 654090 - DNA, 74 bp, Homo sapiens
tgactgactagcagcttcattttgaagacgggtagttttccaggttcctgactggcttcatcatctcttaatgg

SEQ ID NO: 654091 - DNA, 75 bp, Homo sapiens
agccgctccacctcccatgtcggcacagggtgtgggccgaagatatgctcatgtggtgttgaggaaagcagacat

SEQ ID NO: 654092 - DNA, 100 bp, Homo sapiens
gcagcctattatgcccagacaagtccccagggaatgccacagcatcctccagcacctcaggtgaaagaacttgtcctggacaacagtcggtcgaatgaag

SEQ ID NO: 654093 - DNA, 99 bp, Homo sapiens
tacaactcgaacaaagacagccagagtgaagggattcctaaggacggtctgaagagccaagagctatttgatgaaattagaatgacctacatcaaagag

SEQ ID NO: 654094 - DNA, 97 bp, Homo sapiens
tccgagcagaagctgctccgtcatagaagatgatggtttacaagctgccttcaccacagcccatgaattaggagaaaacaaagatgtgtctgaaaca

SEQ ID NO: 654095 - DNA, 100 bp, Homo sapiens
ggctctttgaagttgggttcaggagtgtagaattggcaaagttattgccagcttcctgtatgccgagattttgctgtcctggaggaccacaccctggctc

SEQ ID NO: 654096 - DNA, 100 bp, Homo sapiens
agcaagagagactattttacacagttggtattagcatgtttggtggacccccaaaagtacaagggcatatttaacggattctcagttacacttaaagagg

SEQ ID NO: 654097 - DNA, 90 bp, Homo sapiens
cgtccatccagaataactatggcgctggagtttactacaattcattgatcatgtgtaatggtagggaacaagactgccaatggagactgc

SEQ ID NO: 654098 - DNA, 101 bp, Homo sapiens
acggcaacgcgcttatcagcgctatgagaaggcaatgacatcattgcagcagccaagcgcatggctctgctgatggctgagatgtctcggctggtaagagg

SEQ ID NO: 654099 - DNA, 99 bp, Homo sapiens
tcggcaaagaccaatatccacaacagtcgcttgaacagattggcacccgaattgccaaagttttggaaaagagcagcccgacggccatggaggctgaag

SEQ ID NO: 654100 - DNA, 75 bp, Homo sapiens
gagccggccggagcacgccaggcctgagcacttttctgtagaaggtcagttggaattcagggcattgctatttat

SEQ ID NO: 654101 - DNA, 50 bp, Homo sapiens
gaaggggccagtctggagacagtcaaggcctcctacacctacctctctct

SEQ ID NO: 654102 - DNA, 75 bp, Homo sapiens
tccgtcatggggatccagacggacctggaggaacttgctttgtaccagatccagctgctgaaggacctcagacat

SEQ ID NO: 654103 - DNA, 119 bp, Homo sapiens
ccggcagctggcgctggggatccctgctcttcgctctcttcctggctgcgtccctaggctctggcttcatcatgtgcagcggcaaagagaacccggacagtgatgctgacttggatgtg

SEQ ID NO: 654104 - DNA, 95 bp, Homo sapiens
ggcctcggagcaacgagcgcagcgccgactaatagggatgccaaaggaaaaatatgatcctccagatcctcgcagaatttataccatcatgtcag

SEQ ID NO: 654105 - DNA, 100 bp, Homo sapiens
ccccagctgggagagcgcgttcatcaactgtcacgggtggtgaggaaccaacggtttgtctgccattgtggatttcctgggcagagtggagtgaaggtgc

SEQ ID NO: 654106 - DNA, 98 bp, Homo sapiens
ttataaactgcctggccgaatcagccttttcacgctcaaggtcatcatcagatttgaaatatttaaagtggatacaaaactatttcagcaatgcagac

SEQ ID NO: 654107 - DNA, 100 bp, Homo sapiens
atgaacaatcatcagctggaactggcaaagcagctacacaaagagggtcatctcttctattgtacctgcaggttgcagcattgcaggaagagaaaagtag

SEQ ID NO: 654108 - DNA, 99 bp, Homo sapiens
tggcgggtgccccctttcttgctccccatcctcttcttggcttctcatgtgggcccaaccgcttgcttatcctccacggcttcctggacgaaaacgtgc

SEQ ID NO: 654109 - DNA, 100 bp, Homo sapiens
ttgagagtgtcgctgatgccgctccgcctcaatattgaccaggatctcaaagatttcatgagacaagctggggaagtaacgtttgcggatgcacaccgac

SEQ ID NO: 654110 - DNA, 77 bp, Homo sapiens
taccttatcccctcaacaacttttcagtggcaaatacgtttgaaatggtttctgaagatgaagatgggaaattggga

SEQ ID NO: 654111 - DNA, 100 bp, Homo sapiens
tcagagcgtcacggcgtacgccctcatggggaaaatctccccggtgactttcagaaagctgaccttgcagttgctccactggctattacctatgttcgag

SEQ ID NO: 654112 - DNA, 75 bp, Homo sapiens
tctgcttgcgctgcaccaggtgtgattcagcatcagaagagctaacaattgctggaatgacctttacaacttttg

SEQ ID NO: 654113 - DNA, 97 bp, Homo sapiens
agaagtgccaggaccttcgtgccctcctcaagcgaaaacaccgctttatcctgctgcgatccccagggaacaagataacgaaggaggcccaacttca

SEQ ID NO: 654114 - DNA, 50 bp, Homo sapiens
cttggccgcaccattgcagaccatgagtggagtcaacatatcaatggagc

SEQ ID NO: 654115 - DNA, 75 bp, Homo sapiens
ccaccagatcggagaagacggacaggtgcaagtagaacttgctactaccagcaccatgccctaccaatatccagc

SEQ ID NO: 654116 - DNA, 100 bp, Homo sapiens
gtgcatcgaagtgttccaagctgtgacttaccttaacatgttcttgaagtaccatggcgtggattaaaaggcctatggcatgtctgcgttacctttaaat

SEQ ID NO: 654117 - DNA, 87 bp, Homo sapiens
acctccctaaactggttaatagtggcatggaagatccatttgttggttgaatctggcgatgtggaacccatggatatggagggctga

SEQ ID NO: 654118 - DNA, 98 bp, Homo sapiens
ttccaaggcatctgtgagcccgcggagtatacaccatgagcaaagctcaccctcccgagttgaaaaataatctatgccagcaattatgacaatgttag

SEQ ID NO: 654119 - DNA, 87 bp, Homo sapiens
tgtggtggaatatgccaaggaaaaactggagagcttcatcaaaaatagtgatagctttgataagtgactctgacatcattagaagca

SEQ ID NO: 654120 - DNA, 80 bp, Homo sapiens
tcgacagaaatatcactcatctgcaggttgaaatgtctcttccagatccctcttgggacttctccccaccctctttctta

SEQ ID NO: 654121 - DNA, 100 bp, Homo sapiens
gatgagaatgaggatgatttcatccaagtcactaaaaatggatcaggcatcctctggtatcacgattccaaaacccccaaagccaccagataagccgctg

SEQ ID NO: 654122 - DNA, 100 bp, Homo sapiens
tcccacccacttcagggatgccacctcccacctcagggcccccttcagccatgactcctccctacccgcagtttgagccctaccacttatgtcttggatg

SEQ ID NO: 654123 - DNA, 100 bp, Homo sapiens
gcttttcgcaagaacaagactctcggctatggagtccccatgttgtatttgactacagtcattccttatgagaaaaaaaacggaccaccgtctgttgaag

SEQ ID NO: 654124 - DNA, 75 bp, Homo sapiens
caagacctcatcaacaattaaggtaaatgagctggatggtatcccgttgatcctggacaactgcaacatcagtga

SEQ ID NO: 654125 - DNA, 73 bp, Homo sapiens
cagcttcccaagtagctaggactacagatcagagaagctaggagagctccagcaggggcacagaggattgggg

SEQ ID NO: 654126 - DNA, 90 bp, Homo sapiens
ttttcaggatttatgctcctgaagctccttacacatcccctgataaactaaaggctgtccatctggcccaggcaagcttccagattgaag

SEQ ID NO: 654127 - DNA, 83 bp, Homo sapiens
gagcgagctgggagggagccgcgcgcctttgtgcgcgcgccgagatgcttcaggactgccccaaggcccgcagggaggtggag

SEQ ID NO: 654128 - DNA, 100 bp, Homo sapiens
agagagggggactctgtgtgagggaaagaaaacaatttctcctgctctgcagcttctgttcagaaagaatcttcaagagggagacatagggaaaaggaag

SEQ ID NO: 654129 - DNA, 118 bp, Homo sapiens
agctttgactacaaccagaattcagaggcaggcagaaggattccagtgctggagagtgtgaagcctcagtttaggtcatctggtggttcagaacactcaacagagggctctgtatcct

SEQ ID NO: 654130 - DNA, 90 bp, Homo sapiens
cagccaagctcgtggcctgcctctgcgtgcaaggccccctgctgaggccggctggccggaggaccaccccgcagaccacgcgcccggggc

SEQ ID NO: 654131 - DNA, 102 bp, Homo sapiens
gaaaattaataggaggaagtctcaagaaacaaagtgtacaaagagagcacttcctaagaagagtcagttcttacagcagctgtgacacaagcctcactgcag

SEQ ID NO: 654132 - DNA, 100 bp, Homo sapiens
ctttctgggaacctttctgctatccatattgatcgcctggactgtgcagtatttccagtctgtctcagaatcatgatgaaacctggaggaattacttttc

SEQ ID NO: 654133 - DNA, 100 bp, Homo sapiens
atgacgtctccagccaaattcaaaaaggataaggagatcatagcagagtacgatactcaggtcaaagaagtaaattttcgcagaaggacttagaaatgct

SEQ ID NO: 654134 - DNA, 74 bp, Homo sapiens
ggaagcagccgatccagcctgcggagcctgtggggcagagaaagcatgggattatggcaaccacagaatctcag

SEQ ID NO: 654135 - DNA, 83 bp, Homo sapiens
accgcctgagctttctacaccggcatttgcaagtgaggaagcagcacaaccctgggttttagataatttctaacagagaggcc

SEQ ID NO: 654136 - DNA, 74 bp, Homo sapiens
cgcgtttccacttcagagatctgatatttccatggaaatgtcagagcacccagagggacttatggaacatcttc

SEQ ID NO: 654137 - DNA, 96 bp, Homo sapiens
gacgaggatgaggaggagggggacgagcagcagcggctcctcaacacccctcgaagtaatttgccatcttccatgtatgaatggtggccagtgcag

SEQ ID NO: 654138 - DNA, 100 bp, Homo sapiens
ctggatgagatttatgagagcagaaataacagcagagggttttttacgagaatttgggagactttgctctgaaatgggtctcctatggacagaagtgcgg

SEQ ID NO: 654139 - DNA, 100 bp, Homo sapiens
gtctctggcctcatttctgatcgggaagcctcatctagcccagaggatcggaatgacagatgaaatcatcgagttccccatcctaaagctaaatggccgg

SEQ ID NO: 654140 - DNA, 100 bp, Homo sapiens
cagccttcttagattcttcaaccttgcagctgttttttgacctgtatcattccatccctccttcattttcacctctgggcagccctgcactgtatcgaaa

SEQ ID NO: 654141 - DNA, 100 bp, Homo sapiens
ctttcttctaatttttaaaaagcagcctctggagccagccatgtttggcactgaatcttcatgaatttgctgacacaatatcttccgcctggtgctgggc

SEQ ID NO: 654142 - DNA, 74 bp, Homo sapiens
aagtcacaaaacagcagatttcccaagagcagcggaaaatgatccagtcacagaacatacatatgatagttgag

SEQ ID NO: 654143 - DNA, 82 bp, Homo sapiens
aacgcccggtccggcgcccagaccaaacgcgggggaaccggaagggcgaggcctccacacaatgcagatcttcgtgaagact

SEQ ID NO: 654144 - DNA, 90 bp, Homo sapiens
gcttggatatgctaatgctaaggagctgtgactgatgagaattaaaggccatggatgaagatgggcttgaattacaacaagagccaaact

SEQ ID NO: 654145 - DNA, 100 bp, Homo sapiens
catgaagggaacaggcatcatggactgtgcgcccaagcggagcgtgctttggacaccatgaattttgatgttataaagggcaagccagtacgcatcatgt

SEQ ID NO: 654146 - DNA, 101 bp, Homo sapiens
atcatcagattccatttcaacttctgccgacaacttttctcctgatttgagggatatcaatgcttacaattgtgaagagcccacagaaaagttaccttttc

SEQ ID NO: 654147 - DNA, 100 bp, Homo sapiens
tctgtgtgctgagcgttctaaaggaaggcgtccgttggccttcgtacccgtcttgattgaggacctcagcagccatgtcgaagccccatagtgaagccgg

SEQ ID NO: 654148 - DNA, 60 bp, Homo sapiens
gcatgggatgggactacagattatcaggtggagcagctcctgtacgaaagccctgagcgg

SEQ ID NO: 654149 - DNA, 75 bp, Homo sapiens
tggcgtgcagcgcaaccacgagacggccttccaagggtgtccgcaatgttgccagtgtctgtctgcagattggct

SEQ ID NO: 654150 - DNA, 100 bp, Homo sapiens
agaaggcggtggtccgccatttcgtggacgccgggtcaaaatgcagatcttcgtgaaaacccttaccggcaagaccatcacccttgaggtggagcccagt

SEQ ID NO: 654151 - DNA, 100 bp, Homo sapiens
acccggttccccggcccacagtgggggtgtgcaaacccgagagaactggattttaccaaatgttgcaagaactctggagttcttatggtagtaaaatgcc

SEQ ID NO: 654152 - DNA, 100 bp, Homo sapiens
gagttgtggcgaggcagatcctgccccgtggccgcggccgtctcgtcgcaatggaagaagagatcgccgcgctggtcattgacaatggctccggcatgtg

SEQ ID NO: 654153 - DNA, 95 bp, Homo sapiens
gttagaaagggaacagctggaatgggagagagagcgcagaatatcaagtgctgaatagcctaacatggcagaccagagacagcgctcactgtcta

SEQ ID NO: 654154 - DNA, 75 bp, Homo sapiens
gtttggagacttcaaagatgtattttggcaaacatgaattgactgggcataaagtagctgtgaagatactcaatc

SEQ ID NO: 654155 - DNA, 100 bp, Homo sapiens
ccagacagccatccaggaccaaccttccagttctgtctgtgaacgagtaacaaaggcatggagcatctgtacagcatgaagtgcaagaacgtggtgcccc

SEQ ID NO: 654156 - DNA, 90 bp, Homo sapiens
gctgttcttcagtggaccaagcatgatgattcttcagataacttctgtgaagctgatgggacttgcaacaaagcattgccagagaaccta

SEQ ID NO: 654157 - DNA, 90 bp, Homo sapiens
tcgagactctatcataagaatatggagtgtcaatcagcacaagttgtgtgacttcattgagacacattacctgaatgagcaggtgaaagc

SEQ ID NO: 654158 - DNA, 96 bp, Homo sapiens
gccggctgggctcggtattccccttcctgctagtcctggtggatctgcagtacgaaggaacctgttttgttcactggaacaatgaggaaaaacctg

SEQ ID NO: 654159 - DNA, 100 bp, Homo sapiens
cacgccaacaggtgtccccagcgcagccaatcggcttccgaagtagaagtgagcttgtagtggacaaaacaaagaggaaaaaaagaagagaactgtctga

SEQ ID NO: 654160 - DNA, 50 bp, Homo sapiens
tgggaaccagtctttcaaaatgagatatgtcagtattgaattctcccaga

SEQ ID NO: 654161 - DNA, 108 bp, Homo sapiens
tccacagctcacgaccagatgcaccagcaggagtccacatcgaggacgtcctccgggcactcccacgaccagaaaactgtcgctgaaaagcaggagaagagaaatcag

SEQ ID NO: 654162 - DNA, 75 bp, Homo sapiens
gcaggagaaaatttcagagctgcaaaattatcaggtcattcagtggtgcacccaccacaaggatgaccctcctcc

SEQ ID NO: 654163 - DNA, 82 bp, Homo sapiens
caagaaatgcagagtgatcccatctcaggagcacctgaatggtcaaagaaatggcagatgtccttaacccattaatcactgc

SEQ ID NO: 654164 - DNA, 75 bp, Homo sapiens
ggaagtctgtatgctagacaaggagattctgcttctcagaagatgcactattatagatactctaacgccaaggtc

SEQ ID NO: 654165 - DNA, 100 bp, Homo sapiens
ggcgcggcgctcgctcctacgggagaagatgtcaaccggacactagaaggtggaaggaaacctcttcattatgcagcagattgtgggcagcttgaaatcc

SEQ ID NO: 654166 - DNA, 75 bp, Homo sapiens
gtggctgctaccccactcctgggccgtccctgaaggtgccgtgagcgatgtggagatgcaggaacactatgatga

SEQ ID NO: 654167 - DNA, 90 bp, Homo sapiens
aagaattatcatgcctggcagcatcgacaatgggttattcaggaaacaaaccatcaggcctcccagaaagtatccgggatctgaaaatca

SEQ ID NO: 654168 - DNA, 96 bp, Homo sapiens
ctcgcctgggttctggaggctgcggggccatcgctccagtccgtagttcgtggtccttcgccggtgtccccggagcccagcggctgtggatggcag

SEQ ID NO: 654169 - DNA, 100 bp, Homo sapiens
caggcgtcttttttggagaccctccttcaagagccctgctgcctataaatcatagacctgcctagagctggaacgttacctccagagcgagccctgctat

SEQ ID NO: 654170 - DNA, 90 bp, Homo sapiens
ctgcagtacctgcagaaggtctctggagacatcttcagcagccgcagagacctggacattaaccggcctggaacggtgcccaatgccaag

SEQ ID NO: 654171 - DNA, 100 bp, Homo sapiens
gaaacctcaggacttgagtaacagcaacatgaatgaaactagtgatcgagaagatggcctccccaaaggacatcatgtgacagactctgagaacgatgag

SEQ ID NO: 654172 - DNA, 80 bp, Homo sapiens
tggagtttatctggagtgaggtggccggttcttggtgggatctgagcagccgagagggtgacctctctgggcaaggactg

SEQ ID NO: 654173 - DNA, 89 bp, Homo sapiens
cagattcgcagtggtcgcttcttctccttggagtggaggcagcacagacagtgaggacgaagaagaggaggacgaggaggaggaggaag

SEQ ID NO: 654174 - DNA, 76 bp, Homo sapiens
tcggaatgcactacaacaggaaaatcatattatagatggagtaaagattgagcttctagagcctcagagatggaat

SEQ ID NO: 654175 - DNA, 104 bp, Homo sapiens
cgggatcgtgaccgagaccgtgaccgagagcgtgaccgagagcgcgaatatcgtcatcgttagaaggtatatgccctcattttgcttaagacctctggccagag

SEQ ID NO: 654176 - DNA, 100 bp, Homo sapiens
ggaggccatccagctcatcgctcgcatcgctgccgccaacggggacatccaggcagaaattgatgcccacaatgacatatttaaaagcattgacggaaac

SEQ ID NO: 654177 - DNA, 95 bp, Homo sapiens
gatcttgaacttctcagcctccagaacggtgaagaacgaggtggagaagctcccccgacagcagcggaaggaaagcatgaagcagaagatggagg

SEQ ID NO: 654178 - DNA, 100 bp, Homo sapiens
tctttgttttcactcatgtacttgtacctgtctggattattcattattacatgaagtatcatgtttctggtttacagagtccacggggaatgggatgcaa

SEQ ID NO: 654179 - DNA, 89 bp, Homo sapiens
ggggacccagacgaggctcgggactttgcagccggccttagtgctcgcgcaggagcactcactgtgggcctcgtgcgacagtgtcaaac

SEQ ID NO: 654180 - DNA, 96 bp, Homo sapiens
tcaatggacacaacaaggactggttcaagatattaccaaaagaatgcaatggtgtaaagattccagttgatgccagtaaacctaatccaaatgatg

SEQ ID NO: 654181 - DNA, 50 bp, Homo sapiens
gggacgggccgtgggcccccggaacgagatgaaggatttgggggcagagc

SEQ ID NO: 654182 - DNA, 100 bp, Homo sapiens
aagaatgatatttccaaagtttgcagaaaagaatatgagagagtcccacgaactggctgggtatacagaaatgtccagaggccggagagcgtttcagatc

SEQ ID NO: 654183 - DNA, 119 bp, Homo sapiens
aaaaattcttcagattggaaaataccacaggatggagactacgagtttgtgctggagaatctggtaaaagcaccattgtgaagcagatgaggatcctgcatgttaatgggtttaatgga

SEQ ID NO: 654184 - DNA, 96 bp, Homo sapiens
cgttcaagttaatccaggtgagactttcacaataagagcagaggatggaacacttcagtgcattcaaggagcctcacagtctactcagagaaaaat

SEQ ID NO: 654185 - DNA, 90 bp, Homo sapiens
ttcttcgacaggaaaaaaatttgctggatattgatgcgccagtcactggtgtgactgaagaaatatcaaatgtttcctagtaagacagca

SEQ ID NO: 654186 - DNA, 101 bp, Homo sapiens
ccagtttgaggcggagcacacgccaaaagaccacgggctcctgtgctagtaccagttgatggagtttgcactgtagcaaattgcgttggaaaagaactagc

SEQ ID NO: 654187 - DNA, 82 bp, Homo sapiens
agatgttggatatttgcttggaaaaacgtgtgggtacgaccttgattggtttatcttggaagctaaagggcattgctcatcc

SEQ ID NO: 654188 - DNA, 50 bp, Homo sapiens
ctcgcctcccggccgagctgacggattccagaattggaaataacgggagg

SEQ ID NO: 654189 - DNA, 133 bp, Homo sapiens
gcgctacctgcctccgggcgcctgggcttcaggatgaaggaccgtctggagcagctgaaggcctgtcagatgtaagctcgggagagcttgccttgattatactggctttgggagtatgtcgtaacgctgagga

SEQ ID NO: 654190 - DNA, 51 bp, Homo sapiens
tcgtgcgcttcgaggacccccggtggcggcgggaaggccaaggtctctggc

SEQ ID NO: 654191 - DNA, 105 bp, Homo sapiens
tgaagagcgacaagccgctggcagccgcggatctcaccgccgctcaggatgatatcatcaagttgaatcgaaaggaagggaagaagcagaattttccaagactaa

SEQ ID NO: 654192 - DNA, 123 bp, Homo sapiens
ccagaaggaagatggcggatctggaggagcagttgtctgatgaagagaagatctttgggggatagcaagaaacatttgagtgaatgttgttgaagattttcagtagtatagaaaatgatggcg

SEQ ID NO: 654193 - DNA, 98 bp, Homo sapiens
gacaccatcgccacccgttttgacggaacacgccgaggagtcttgtaaatgtaatggctggaaaaaccctaacccctcacccactccccccagagccg

SEQ ID NO: 654194 - DNA, 83 bp, Homo sapiens
cttgtccttgctggtgcatgcgtcgtcggcctctgggcagcagtccggatgctgctgatagcacgtctttcgatgtccagcta

SEQ ID NO: 654195 - DNA, 100 bp, Homo sapiens
accaataaaaataaactgcttgaacatcctttgactggttagccagatcactttgggaagcagtgacatccaacctgtatcaagtcttctaatctgtgaa

SEQ ID NO: 654196 - DNA, 74 bp, Homo sapiens
gctcagaggaaagcctttgtgaccagccttatcatgcgagtaaccagctcataaatcacatcgaacagtttttg

SEQ ID NO: 654197 - DNA, 100 bp, Homo sapiens
attcaactcctgagtcctcagtctctagtcccgggaagaggcggggtttcaccatgttgcccagactggtcttgaactcctgagcttaagcaatccacct

SEQ ID NO: 654198 - DNA, 96 bp, Homo sapiens
gaaccattgaaaaatttgagaaggaggctgctgaggcctgtgatacttgggctgtgatcctctagagccagcttggactcacatcattctatgggg

SEQ ID NO: 654199 - DNA, 98 bp, Homo sapiens
gagaagcctgaaaagtcgcagcgagctggagccgccggaggttttataggatcacattgacaaaagtaccatggagttttatgagtcagcatatttta

SEQ ID NO: 654200 - DNA, 100 bp, Homo sapiens
gagcctattccacgccctccctgcacttttcaggattagaagaggctgtgtatagaaacatacaagcttgcaaggagcttgcccaaaccactcgtacagc

SEQ ID NO: 654201 - DNA, 74 bp, Homo sapiens
aaaggcttttccagtttgcataatgactttactgaagactctaaggaggacctgtatctgttgggatcctcagg

SEQ ID NO: 654202 - DNA, 82 bp, Homo sapiens
acaacgtgcgatccatgcccatccgaaaggatgatgaagttcaggagaatacttatctctggcgcacatcactatatttggc

SEQ ID NO: 654203 - DNA, 82 bp, Homo sapiens
caacaccacaataatccacagccaagtcccaggggcagccactggcctcccagcccccggtcgtcgacccctacgacatgcc

SEQ ID NO: 654204 - DNA, 100 bp, Homo sapiens
actggaccaatggtagcagctactctgaaacttggaattgctattttaaatggtgggaactccacagtacagcaggatatgaaaaatcccgaagcttaaa

SEQ ID NO: 654205 - DNA, 51 bp, Homo sapiens
cggacgagagcaaggagaggctaggggtgaggacgcttgagcggaagttag

SEQ ID NO: 654206 - DNA, 98 bp, Homo sapiens
tactgtgcgctcgatccagcaccatggggaagcgggacaatcgggtgaaaagccaggactctatttgaaaaaaatgctgccccgattttacatttatc

SEQ ID NO: 654207 - DNA, 97 bp, Homo sapiens
agaagacccgtgtgaagctgccctccggctccaagaaggttatctcctcagccaacagagctgtggttgttctcctgtgcctcctgttggctctctt

SEQ ID NO: 654208 - DNA, 98 bp, Homo sapiens
gaggcggcggcgccgccggctttggtgctgttgggaacacagaggaagtgactggctgggggttcagggaaagctccgtagaagagggaacacttgag

SEQ ID NO: 654209 - DNA, 75 bp, Homo sapiens
atatttcccaccttgtcagaaagaagaggaattcagaaaagcagctcagcaacaggaagaacaagaagaaaagga

SEQ ID NO: 654210 - DNA, 75 bp, Homo sapiens
gtgtgtgcaagcaaatgcttttattcaggactcgggggactatcctctgacagctccaggtctatcctggaagaa

SEQ ID NO: 654211 - DNA, 82 bp, Homo sapiens
attttatgaacctagagaagcagaatccttacttttctttcctgataaaagcctgggctttccttgtcggacctgaaagatt

SEQ ID NO: 654212 - DNA, 50 bp, Homo sapiens
agtagctgatcaaaccaaggatgggagtgtatatgacaggaaaagaactt

SEQ ID NO: 654213 - DNA, 82 bp, Homo sapiens
ggaacgcgctaaggcaaagcacctggttcaaaccttgtactactcagctgatcacaagctgcttgatgggaacctactagat

SEQ ID NO: 654214 - DNA, 75 bp, Homo sapiens
ccacccaccgccgccgcctcccagtcactcttgcaggactgatcctttgaaatactccagccatgactaaaagag

SEQ ID NO: 654215 - DNA, 54 bp, Homo sapiens
cccagctgcctgtggacgttgtgattggtactgcttctccgagatggccccagt

SEQ ID NO: 654216 - DNA, 50 bp, Homo sapiens
caggacctggtatgccaaacttgatgaggctggagtgcagtggcaagatc

SEQ ID NO: 654217 - DNA, 100 bp, Homo sapiens
atactttgcttgcaattggcactaagctaccagagaatcaagctatccaaatgcgattagttgatgtggcctgcaaggttttgcacactagggaccaaga

SEQ ID NO: 654218 - DNA, 95 bp, Homo sapiens
aagtgtggacacgtgaagtgtggcaagtgtgacccacaaaattctcgcccatattcagactcagattgatggacaacttttcttaattaagcacc

SEQ ID NO: 654219 - DNA, 82 bp, Homo sapiens
gcgaggaggcgcgggaggtgttcgagaacgaccccgagacggttccgtggggaccccactgcctggagtacaggtgcgcatt

SEQ ID NO: 654220 - DNA, 100 bp, Homo sapiens
gccagaacccggcccggaccgtgtcgccgacgccaaaggggacagcgagtcggaggaggacgaggacttggaagatactccatcttctaaaccaacactc

SEQ ID NO: 654221 - DNA, 100 bp, Homo sapiens
cagcagatggcggatgccctgcagtacctgcagaaggtctctggagacatcttcagcagatggacgacgaagacacgttgttacctaggaagttacaggc

SEQ ID NO: 654222 - DNA, 75 bp, Homo sapiens
cctttgaaaatgatatgctggctgttaacaaggaggacacagcagagcttggggttcatctggtgaactccctcg

SEQ ID NO: 654223 - DNA, 80 bp, Homo sapiens
atagtgccaggcctatgttggagatgccttcaattaagttgcagagttctgatggagagatatttgaagttgatgtggaa

SEQ ID NO: 654224 - DNA, 75 bp, Homo sapiens
tgatatgttatcaaaagtagagaaaatgaaaggagagcaagaatctcataggtagatgacattaatgctgataag

SEQ ID NO: 654225 - DNA, 83 bp, Homo sapiens
gtgggtactacacaaccgtctccagccttggtctgagtggactgtcctgcagctcttcagtgggtcatctgtgtgtcacagcc

SEQ ID NO: 654226 - DNA, 83 bp, Homo sapiens
caatggcaactatgtttggatgttggatctacactttctcaagcactgtgatcttcaaattagagacggggtttcaccgcgtt

SEQ ID NO: 654227 - DNA, 100 bp, Homo sapiens
gctgtgcagccgcgaggaggcgcgggaggtgttcgagaacgaccccgagacgtgtcttgggacaaggtgcgcattcctggtgtgctgcagcgattgggag

SEQ ID NO: 654228 - DNA, 100 bp, Homo sapiens
ccaaggactgcagctatggggctgttactagtccaacctctacccttgaaagcagagatagtggcatcattggttcagcttgttggtttagatgaggaga

SEQ ID NO: 654229 - DNA, 83 bp, Homo sapiens
ctaccagttcctcggggtgcagcaggtcagcccaaggccaaccccactgtcactctgttcccgccctcctctgaggagctcca

SEQ ID NO: 654230 - DNA, 75 bp, Homo sapiens
tcctttatatagaagggagatataccaacagatgttttaaagattgtgtattctgtgggtgctcagacaacagca

SEQ ID NO: 654231 - DNA, 100 bp, Homo sapiens
tgctggagtccgaggacctaatggagatgctggtcgccctggggagcctggtctcatgggacccagagtatcaattgctaggtgagattaattaccgtga

SEQ ID NO: 654232 - DNA, 100 bp, Homo sapiens
cagctcacccactgccagcagagtccaaaagaaactcttccttcaaaacctgtgaagaaagagaaggaacagaggacacgtcacttactcacagaccttc

SEQ ID NO: 654233 - DNA, 89 bp, Homo sapiens
gactctgcggcgcatggaggaggaggaggatttaaaccggatgaggagtgaattgctggtgcctgggtcacagcttattttaggtcccc

SEQ ID NO: 654234 - DNA, 80 bp, Homo sapiens
gctgcaaagtgccgaaacaagaagaaggagaagacggagtgcctgcagaaaacctgcctagagctggaacgttacctcca

SEQ ID NO: 654235 - DNA, 75 bp, Homo sapiens
cagcgaccccaagcaataccgatttctcactatgtgcaatagacactttggcagtgttgtggcacaaaccattcg

SEQ ID NO: 654236 - DNA, 83 bp, Homo sapiens
cgggacttccagacactggaaaactggatgctgcagacactgaacgaggagccagtgaacaagttgaaatcatcgcagaagga

SEQ ID NO: 654237 - DNA, 100 bp, Homo sapiens
ctttttattaatttgatcagtgatccttcacgttggagtaaagacaagattgcatcctacagcaaaactccaaaaattgaacgaagtgatgtgagcaagg

SEQ ID NO: 654238 - DNA, 82 bp, Homo sapiens
ggatccactcctattggcaaacagatcatgaagagaagctatggagatattttgcatagaatgaaggatctctgcagataca

SEQ ID NO: 654239 - DNA, 100 bp, Homo sapiens
gccacgctcagcgccgagggcgagatcgtgcaggttaaaagagcagaaccttgtgaaagagctgaggccccgagacctcctggagagcagcagtgacagc

SEQ ID NO: 654240 - DNA, 83 bp, Homo sapiens
ctgctttccactcggctcctgtcgtccgttctctcaggctcccgttcaggcgccatgtcagaaccggctggggatgtccgtca

SEQ ID NO: 654241 - DNA, 74 bp, Homo sapiens
cagaacctgaagtgtctgagtgctgctgaagaaaaggcataaagacagtgtttgcaggatccagttgcaatgat

SEQ ID NO: 654242 - DNA, 100 bp, Homo sapiens
gaaaaggaagactattcagacagaacaatcagtgatgaagatgaatcgagaatggatcttggagaatgtctgaaagtccatgacctggctttaagagcgg

SEQ ID NO: 654243 - DNA, 89 bp, Homo sapiens
cgactacggcgagcctgagcgcggcggcggcccacgcgcagcgacagggagaggaagctcttcgtgggcggtcttgactggagcacgac

SEQ ID NO: 654244 - DNA, 83 bp, Homo sapiens
ggcgcgcggaggggaaatggctgccgaaaacaagccggaagtactatactggcaattgctggagaagattttgcaattgttgc

SEQ ID NO: 654245 - DNA, 83 bp, Homo sapiens
cccgcggccgcaccttcccgccttctcagcccagctcaacattggcaatgtgctccctgtgggcaccatgcctgagggtacaa

SEQ ID NO: 654246 - DNA, 101 bp, Homo sapiens
cttcaaccacctcgagcggctgctggacgaaggggtaaaagcatgtctacgaagaaaagtatgtgaacaggaagaaaagtatgaaattcctgaaggtccac

SEQ ID NO: 654247 - DNA, 95 bp, Homo sapiens
cactttcaatggggaggcccacccaggtattgacctgatggacatggcttcggacatcctgcagcccaaaggagatgatgtggcccggatcagct

SEQ ID NO: 654248 - DNA, 74 bp, Homo sapiens
cggacgatcacaacggcctactacaggggtgcaatgcaccacaccccactctggccggagcacgccaagcagct

SEQ ID NO: 654249 - DNA, 83 bp, Homo sapiens
cgcctcctcgcagcagcgccatgccatccgggtgacctgcataggttcctgcggggtctccaacaaggctaatgacacagcgt

SEQ ID NO: 654250 - DNA, 101 bp, Homo sapiens
ttccggtgtgtccaattttgctcaacttattgtgagagccaatatatcaattgtagatatagatactaatcaggaggagaatatagcaacttcgtcttctg

SEQ ID NO: 654251 - DNA, 82 bp, Homo sapiens
gccttattttttctcatggatgttcttcttcgagtatttgtagaaggtctttcccagggaactccgatgaagtgttccaaca

SEQ ID NO: 654252 - DNA, 74 bp, Homo sapiens
caagaagtaggctatggcttttgtgcaaggtcctggacccaagccagaagcctctgcaaagcttccttccagac

SEQ ID NO: 654253 - DNA, 100 bp, Homo sapiens
attacatattccagtaatggtggatgaagttgttcattgtttgtcaccacaaaaaggacagattgttcagattccattctgtggggaaattgactgtgag

SEQ ID NO: 654254 - DNA, 100 bp, Homo sapiens
catagttgaaccgtcctggaatagaaacttcaccacaagcaggaatgcagactcagcctcagatagcaactgctgcacaaataccaactgctgccttggc

SEQ ID NO: 654255 - DNA, 98 bp, Homo sapiens
aaaagagtctttggaggatgcggctttgatgggaagctgaatatggtgggcatgatcagatagatttgtatgacgatgtcatatctccatctgcaaat

SEQ ID NO: 654256 - DNA, 100 bp, Homo sapiens
ggcagccatcaggtaggctgcgttgaggatctttgctcttccatccgcctttgatcgtcttcctcttcagccatccagggtcgagctgtgcagttttagc

SEQ ID NO: 654257 - DNA, 100 bp, Homo sapiens
ccggatgcgccatgagcgagttgtcatcatcaagaatatgtttcatcctatggattttgagaaaatgatgcatcctgttgccagcagtaatccagctttc

SEQ ID NO: 654258 - DNA, 90 bp, Homo sapiens
aattcattaaacattcacaacagataggtgatagttgggaatggagaccatcaaaggtataggactttcactaaccttggaccatatatt

SEQ ID NO: 654259 - DNA, 100 bp, Homo sapiens
ttttgatgtggatgatgccaaagttttattaggtcctggcattgatgtgcctgctccagacatgagcacaggtgagcgggagatgtcctggatcgctgat

SEQ ID NO: 654260 - DNA, 83 bp, Homo sapiens
cctaagcatcatgtccctctaacacggcctttcaactttgcttacacagtggaaggagaacatgaatctctcagaggcccaag

SEQ ID NO: 654261 - DNA, 100 bp, Homo sapiens
ctcaagcaatcctaccatgtcagccttcccagtagctggaactacaggctccacataaacacggtttccttgaaggccgccatgcagagctgtgcttcct

SEQ ID NO: 654262 - DNA, 100 bp, Homo sapiens
tgggactctaccatggtcaggtcctgtgcaagaagaataaatttggagctccacagaaggatgttaaatataaagacctgatgccacatgatttggctag

SEQ ID NO: 654263 - DNA, 82 bp, Homo sapiens
ctgatccccccctgccggggagggcccagcgcatccgacaggtactccaaagattcaggtttactcacgtcatccagcagag

SEQ ID NO: 654264 - DNA, 75 bp, Homo sapiens
tctacaacaagtgccccccgaatgcctcaggctacttcacccccctcaacaccccacagagctatgaaaccctgg

SEQ ID NO: 654265 - DNA, 75 bp, Homo sapiens
tgtgggactcctatctatatggacaggtgatttggcttctgcacagttaggaggagcaccaaaccgatgggaggt

SEQ ID NO: 654266 - DNA, 100 bp, Homo sapiens
agggcgtccctgctggccgcgctgctgtttgctgtccatcctgtgcacaccgagtgtcccacacatcttgctgacttcactcaagtgcaaaccattcagt

SEQ ID NO: 654267 - DNA, 101 bp, Homo sapiens
ggtggattagcggcttggggtggcgaacaggccgaatacatcaagcaatggtaacatctttaaatgaagataatgaaagtgtaactgttgaatggatagaa

SEQ ID NO: 654268 - DNA, 78 bp, Homo sapiens
gggcatccagggctcgtacttctgctcgcaggtaaatgagctggatggtatcccgttgatcctggacaactgcaacat

SEQ ID NO: 654269 - DNA, 83 bp, Homo sapiens
cgccagcgtagagcggcggtttggaggaaagatgagacgatttgcctgaagacctggataatctccatttttgtcatggactg

SEQ ID NO: 654270 - DNA, 82 bp, Homo sapiens
tgctgcccttgctgtcctcctctgcaccatggctctctgcaaccagttctctgcatcacaagacatcccggcacagcagcgg

SEQ ID NO: 654271 - DNA, 90 bp, Homo sapiens
ggactataataccttgggatgtggacacaatttgtaaggagatcatgaatcagacagataaaaatcaacaagaaatcccatcatacctta

SEQ ID NO: 654272 - DNA, 90 bp, Homo sapiens
gccgtccagcagatggcggatgccctgcagtacctgcagaaggtctctggagacatcttcagcagggttgatttgggaagcagagcacag

SEQ ID NO: 654273 - DNA, 98 bp, Homo sapiens
tgggacgcgcactggtcggtgccggctcaggagccggggaaatctactttcttcaatgtgttaaccaatagtcaggcttcagcagaaaacttcccgtt

SEQ ID NO: 654274 - DNA, 83 bp, Homo sapiens
gaaggactggacacctttctgggactgcagcaccagggtggctacgcctcccggctgcatttgacattgtgcagcaaagaaat

SEQ ID NO: 654275 - DNA, 83 bp, Homo sapiens
tcatgcccaaatcccggaaactccagcgtgtctccagccgtggtacatgtcccagagcaagcacacggaggcccgggagctca

SEQ ID NO: 654276 - DNA, 74 bp, Homo sapiens
gtggccaagacctctgctgcacagtttgcctatctggggcgcctggctcacgaggttggctggaagtaccaggc

SEQ ID NO: 654277 - DNA, 76 bp, Homo sapiens
cctcctcactcgcctccgcgcagagagggagcctgcacacatgatcctgaccgtcggaaacaaggcagatggagtc

SEQ ID NO: 654278 - DNA, 100 bp, Homo sapiens
tagtctgaaagggaaaacccccattcattctggattggtggatctgaagtacaaaatattttccaggtgtcatggagaaactccagctgggcccagagat

SEQ ID NO: 654279 - DNA, 96 bp, Homo sapiens
ccgtgctccaaagtcatcgtccggtttctcactgtgatgatgaagcatggtggagcggctgatcaaggagttctccatctacatgacaaaagatgg

SEQ ID NO: 654280 - DNA, 100 bp, Homo sapiens
gtcccgctggccctctgtctgcctgtgtccctgaccatggctccctgcagtaccctttaacggagcagcatccagttggacttccccgaaccacaggccc

SEQ ID NO: 654281 - DNA, 83 bp, Homo sapiens
cagctgatgaagcttctgaaccatccacacatcataaagctttaccaggagtcagtggatcggtggggaaaatgctgcttacc

SEQ ID NO: 654282 - DNA, 82 bp, Homo sapiens
gaacgctgaggtcccgcgctccccgaccgaggtgtggacactgccagcggctgcagccgacttggaatgacctgggagacaa

SEQ ID NO: 654283 - DNA, 75 bp, Homo sapiens
gtggttcacccgctgccgggcaccgaggaccagctcaatgacagtgtgccggtccaacaaaagcccttgggtctg

SEQ ID NO: 654284 - DNA, 100 bp, Homo sapiens
tctggaccctcgcggccgtgggcagcggctgccgcgcctgtctgcccgagggagggtgtcaaattgagaaccaggtagatccccaccacctacagtaaaa

SEQ ID NO: 654285 - DNA, 50 bp, Homo sapiens
catcagctgaagggaaaatgaaggttccagcaacagatagaaatgcttta

SEQ ID NO: 654286 - DNA, 88 bp, Homo sapiens
ggacagcacctagtcgtggccggaggagtctcagagctgtcagaaagtgttctcaggcgctgtggtctcaccttccactggggcaaca

SEQ ID NO: 654287 - DNA, 83 bp, Homo sapiens
tgacggagctgcggtggcgtctccacacgcttccccgggcgctgcctggacaggcctgcctgcgtgctgggacatgtctggcc

SEQ ID NO: 654288 - DNA, 50 bp, Homo sapiens
aagaagtccagaatattccctctgaatgccaagggaacagaagcacccgc

SEQ ID NO: 654289 - DNA, 90 bp, Homo sapiens
cccagagctgcagttcgggccgccagaacatccgcctgcacagcgactccagcagcagcacacagcctggcatgggagggcaggattgtg

SEQ ID NO: 654290 - DNA, 49 bp, Homo sapiens
cgacatggaacagggactcactggggactaaatgtgttaaatgggcttg

SEQ ID NO: 654291 - DNA, 100 bp, Homo sapiens
aatctgagattcttgatgaaacagatttatacaggtttttgccaaactatttactacctccttatgaggaagtggtgaaccgacctccaactcctccccc

SEQ ID NO: 654292 - DNA, 80 bp, Homo sapiens
aggagacacaagaagcggatccagggaactctaatgatccaggacaaagaagttaccctggagtatgtatcaagcctgga

SEQ ID NO: 654293 - DNA, 75 bp, Homo sapiens
catgtggctgctggggccgctgtgcctgctgctgagcagcgccgcggagtcctccctgctgctgtgtggacgaca

SEQ ID NO: 654294 - DNA, 83 bp, Homo sapiens
ctgtgtttgggagcctcatcattggttatgccaggagccttcacgtaaatgggtccagtcatgcctcccagtaagaagccaga

SEQ ID NO: 654295 - DNA, 83 bp, Homo sapiens
cagaggccccggtgctggcagctgagcccgaggctgacaagtacggccgtaccatttcagcttgctagtgcagaaagatgtga

SEQ ID NO: 654296 - DNA, 100 bp, Homo sapiens
attgaaaaccctgctgatgtcagtgttatatcctccaggaatactggccaggatgatgatgctgaagctatccttgctgcagacttcgaaattggtcact

SEQ ID NO: 654297 - DNA, 100 bp, Homo sapiens
tgcagtggcatgatcacagctcactgcagctttgacttctcaggctcaaatgatcctcctgcctcagcctcacagggaaaaagacctcgatgaagttctg

SEQ ID NO: 654298 - DNA, 101 bp, Homo sapiens
agcagcgctctggggctcgccttgtatctcaacaccctgagtgcggatttctgctatgatgacagtgatatcagtatcaagataaaagtttggaatgggag

SEQ ID NO: 654299 - DNA, 74 bp, Homo sapiens
tcaaccacagatggcactgccaacaggatcaacttgcagcagacatgtacaactttatggccaaagaaggggag

SEQ ID NO: 654300 - DNA, 82 bp, Homo sapiens
ccaggataatattctctcattgattaatgtcaatggtttgaatattggcagcggtgcattcgagacaaagacagctaacaaa

SEQ ID NO: 654301 - DNA, 101 bp, Homo sapiens
aggggacagaggcaccaaggacctccaagacaggccaggacgactggaatgggaccaggccgtcgctgaaggcccctcctgctaggccagtgaagggagca

SEQ ID NO: 654302 - DNA, 74 bp, Homo sapiens
caatcagcatgctgtgtctagctcaagggaccagttactctccacaagaaaattcacacaaccacagtgctctt

SEQ ID NO: 654303 - DNA, 75 bp, Homo sapiens
ggacttacgtcacgcctcctggcacaggtacatcaggaacgtctctatcaagaatacaatttcagcaaggctgag

SEQ ID NO: 654304 - DNA, 101 bp, Homo sapiens
acaagctgtgtggaaacctaactgtccaggagaattggcagagggggtcgatttgggaggaaaggtgtggctataaactttgttactgaagaagacaagag

SEQ ID NO: 654305 - DNA, 100 bp, Homo sapiens
ttggaactgtatgcagcagatcaggggaaacagcttgaatcccttgaccttactgatgagaaaaaggatacagttgatatattagttggatggcatatag

SEQ ID NO: 654306 - DNA, 74 bp, Homo sapiens
ccaggtacgctaggccgcggccttcgttcctcccagaaagggcgtctctggccgagcctctttttgtggaaaac

SEQ ID NO: 654307 - DNA, 100 bp, Homo sapiens
aatccctacagatcaatattgaagatcattgagactgaaaatatgatggaccgaattgtgactggcttgtctgagtctagtgtcaaggtgcggttagctg

SEQ ID NO: 654308 - DNA, 82 bp, Homo sapiens
tgaaccctggcgaccactgcttctccgtgggcagcattggcgaccagcgcttcacgggtgctggaaatgtaaacaagaatag

SEQ ID NO: 654309 - DNA, 100 bp, Homo sapiens
gccaagtatgtgtcccacggcgccacaggaaagagcgatcgtcttctgatcaaaggaggtaaaattgttaatgatgaccagtcgttctatgcagacatat

SEQ ID NO: 654310 - DNA, 89 bp, Homo sapiens
gcatcgggcgacagcaggtcacagtggacgaggtgttggcggaagggattcatcagaagtagtcatacattcagctgatgcatttgcac

SEQ ID NO: 654311 - DNA, 75 bp, Homo sapiens
actttgtcaataactatctttcaaaaggagtagccaagattgacagacacctaatattcatgacttgagaatatt

SEQ ID NO: 654312 - DNA, 96 bp, Homo sapiens
aatcgcggtgtgaagaagaaagcagcaaaacgaccactgaaaacaacgccggaaagagcatctacggtgagcgcttccccgatgagaacttcaaac

SEQ ID NO: 654313 - DNA, 75 bp, Homo sapiens
accaactagagataaaaataccagaaacatacccatttaatccccctaagcaatgacttgacttgaagagctcta

SEQ ID NO: 654314 - DNA, 100 bp, Homo sapiens
gttttggggaggctgctgcgacgaagagttccctcagcctccggccttgtgtgtccgactcggcagcagtgatagctgatcagcttccttgggttttgct

SEQ ID NO: 654315 - DNA, 75 bp, Homo sapiens
aaaatatgctttggcagtccgtcagggttatgtggtccgaatcagtggtgggaacgacaaacaaggtttccccat

SEQ ID NO: 654316 - DNA, 100 bp, Homo sapiens
atggaaacaccatggctgcggcggcccagctctctctgacacaggtgtctgcttttggggcagagttttcatcggaggcatgcagagagttaggcttttc

SEQ ID NO: 654317 - DNA, 101 bp, Homo sapiens
catcacttctcaggggaacgatgcaacacacctgcacgcaacagaagaagaccattaaaaatctcaagtgacgactttgggaaactctggttatccttcgc

SEQ ID NO: 654318 - DNA, 74 bp, Homo sapiens
ctgcttgctaactccaggaacagatgttctcaaatagtgatgaagctgtaatcaataaaaaacttcccaaagaa

SEQ ID NO: 654319 - DNA, 74 bp, Homo sapiens
tgcagctggctagagatatggcaaactgggaatggaggaagaagatgtgattgaagtttatcaggaacaaacgg

SEQ ID NO: 654320 - DNA, 96 bp, Homo sapiens
aaatctggaagcgattcaagccaagctgaccaagaagccaaagaactggctaggcaaataagctttaagaggccacagacacgccgatcgtcatac

SEQ ID NO: 654321 - DNA, 75 bp, Homo sapiens
cagcaaaagaaggagggtcctctcagtgattaagaggacgattatttatcatttctactaaagcaggatctctag

SEQ ID NO: 654322 - DNA, 98 bp, Homo sapiens
aaggacttgcccaaagcccacaccgcctttgagggggctctgaacgggatgacattttacgtggggctgcaggtctgggtgatcgccaacaaagtgca

SEQ ID NO: 654323 - DNA, 121 bp, Homo sapiens
gatggccccaggtgtaagcgcagaaagcaggcgaacccgcggcgcaataacgatcaatgaactgagccatgttcaaatccctgttatgttgatgccagatgacttcaaagcctattcaaaa

SEQ ID NO: 654324 - DNA, 100 bp, Homo sapiens
agatctgggacacagcggggcaggagcgcttccgcaccatcacctccactcacaatattcttctctatgaggatgggcatgctgtggtggcagattttgg

SEQ ID NO: 654325 - DNA, 101 bp, Homo sapiens
gcctttgcccccctcgataccaacggcaaaaatctcaagaaagaggtgggcaagatcctgtgcactgactgcggctacctgacagtcaacattgagcctct

SEQ ID NO: 654326 - DNA, 75 bp, Homo sapiens
tcccttccgttttcgcgtggttcttttgcaagggacacttgacattcagggacgtggccatagaattctctcagg

SEQ ID NO: 654327 - DNA, 100 bp, Homo sapiens
cttttttccattcttcaggaccttcggcaagtccagttacaacacagggatcacaacaaacacaaccgccacagaagcactatggcattacttctcctat

SEQ ID NO: 654328 - DNA, 74 bp, Homo sapiens
atgtggggggattctcgacctgctaacagaactggaccttttcgaaatcatgagtggaggatctcaagtccaca

SEQ ID NO: 654329 - DNA, 100 bp, Homo sapiens
ctgagttcctcttgctcacagagctctgtaaagagtgtttaatggggacagtgggcactctcctgcttgaaaacccacttgggcagaatggactcaccca

SEQ ID NO: 654330 - DNA, 97 bp, Homo sapiens
gtccggcgcggagacggtggagtctccgcactgtcggcggggagcctgcaggcctgaaccagggtgatgctgaagatgatgaccttcttccaaggcc

SEQ ID NO: 654331 - DNA, 100 bp, Homo sapiens
cctggatcaccgacagcacagacagaatccctgctaccaaggacagtgctgctgtgagtttgacgaagtggacatcacctgcagtcagtccagagctgcc

SEQ ID NO: 654332 - DNA, 83 bp, Homo sapiens
ccagaaacacaggctagactggaagctttactagaagctgcaggctacaagatcaagctgcagagaccattgaagctctgcat

SEQ ID NO: 654333 - DNA, 75 bp, Homo sapiens
tcctggattgaatattgaagaattaatagagaaacttcagtctggaatggtgacacagctccgaattgattcctt

SEQ ID NO: 654334 - DNA, 100 bp, Homo sapiens
agtatctgtgtcgccgccgcccgcggcgtccccggtttggtgttgcggcgcccaccttcgggaggatcagatcaatgaactgagccatgttcaaatccct

SEQ ID NO: 654335 - DNA, 90 bp, Homo sapiens
cctttgttgattaactggacaaattcaggagtggaagctggacacactatgtgacttgtatgaaaccctgaccatcacccaggcagtcat

SEQ ID NO: 654336 - DNA, 75 bp, Homo sapiens
ccgatgtcaagaagaggatcaaggaggccaagcagcgaatgtcaaaactggaccaatggggccaggctgaagtat

SEQ ID NO: 654337 - DNA, 74 bp, Homo sapiens
aatacgacttggcgaatcaggaccatatgattcgctcaattgaaggccagtatggcacactacaagcatatgtg

SEQ ID NO: 654338 - DNA, 100 bp, Homo sapiens
ctgcatccacttgttgtcagataaaaatctgcaaatccgcctgaagtccacggcaatacttcctcctgtcatctcaggtgggtctccatcctgagtacag

SEQ ID NO: 654339 - DNA, 100 bp, Homo sapiens
aagatcgtcaacaaaaacaatgtgagatgtctccagcatttttacggacccaatcatgagcactgctttaataggatttcagacagaggaggtggtgttc

SEQ ID NO: 654340 - DNA, 82 bp, Homo sapiens
gcgcactttttggatcggcatctagtctttccgcttcttgaatttctctctgtaaaggagggtcaacatatttcactggcac

SEQ ID NO: 654341 - DNA, 100 bp, Homo sapiens
cgactttcctccggactcctgcacgacctgctcctacagccggcgatccactcccggctgttcccccggaggtcaatgtgacggtggactacattagacc

SEQ ID NO: 654342 - DNA, 82 bp, Homo sapiens
ccggattggggatgagtatgcggaggacagctctgatgaggagatctggtggctggacccagagctgacctatggctgcgcc

SEQ ID NO: 654343 - DNA, 74 bp, Homo sapiens
gagaattcagagggctatcctctgctgctcaaagtgttacttcggatagaggcactctccattcctgattgttc

SEQ ID NO: 654344 - DNA, 90 bp, Homo sapiens
ctcggtactcttcagggatgagtcatgtggcagtggaaaatgcgctcgggctggaccagcagccatcccaggcctcaggacctgagttct

SEQ ID NO: 654345 - DNA, 83 bp, Homo sapiens
tgcatgatgtgcgatgtgcggaagggcacctccacccggatgaccgagtgggagacagcagcaccagcggtggcagagacccc

SEQ ID NO: 654346 - DNA, 100 bp, Homo sapiens
acgctcaccaagtaccctgactccagctccatatgtcaaagtatatcttttggaaaatggggcctgtatagccaagaagaagacaagaattgcacgaaaa

SEQ ID NO: 654347 - DNA, 75 bp, Homo sapiens
cccctactccacagctgtgagtacctcaggacatcggcagaaactagatgatcagaccaagcccgggagcttgtc

SEQ ID NO: 654348 - DNA, 97 bp, Homo sapiens
tcataccagtgccttatctgttgtgccccatcagtagcacctttaaatgtcactgtgtttctgaatgaatctagtgataatgtggacatcagatgga

SEQ ID NO: 654349 - DNA, 100 bp, Homo sapiens
acaaagtatgttgttctcagctacttgggactcctctctcaagagaagctgcaagagcaacatctttcctcaccccaagactccaattccagggtttcag

SEQ ID NO: 654350 - DNA, 100 bp, Homo sapiens
cgaatatattccctttgatgaaatgaaggaaagaatactgaaaattgtcactggatttaatggagctgaactagagaaacatggttataagatggagact

SEQ ID NO: 654351 - DNA, 74 bp, Homo sapiens
atcaaatgtggaacctatggaaaaggctcggcatggctgcccggggccacagctggccctgcctgcagcagacg

SEQ ID NO: 654352 - DNA, 51 bp, Homo sapiens
ccccttcaagttctagtcatggcaaagtgtttcatggatttcaaagctgga

SEQ ID NO: 654353 - DNA, 100 bp, Homo sapiens
cttggcaaagcttctccctcagtatttagaccaggcgggatgtagctcattttgggatacgagtctccatcgtggagcctggcttcttccgaacccctgt

SEQ ID NO: 654354 - DNA, 100 bp, Homo sapiens
cagaacctgagccagaacctgagcctgttaaagaagaaaaactttcgcctgagcctattttggtgtgatccctcacatccacaaatctctgattggaaag

SEQ ID NO: 654355 - DNA, 50 bp, Homo sapiens
gtccgggagagaatacacagagccaatggattctcgctctgttgcccagg

SEQ ID NO: 654356 - DNA, 106 bp, Homo sapiens
cctggagaagctggagaatgacaagagcttccgcggtgtcattctgacctcgccctgggcgctgcctatggcacagccaagagcggtaccggcattgcggccatgt

SEQ ID NO: 654357 - DNA, 75 bp, Homo sapiens
cggagtcagtcattttactgtcaagacatttcttcggcattctgcaacaggttttcctcctccaccaggcgctcc

SEQ ID NO: 654358 - DNA, 50 bp, Homo sapiens
cgacaggcggcgcgggcggcgattcccactggaaattcgttgtatgaatc

SEQ ID NO: 654359 - DNA, 73 bp, Homo sapiens
ctccctctccctgcagtccaccacagatgccacagcagtactcaggaataccacattgtgaagaagtctaccc

SEQ ID NO: 654360 - DNA, 75 bp, Homo sapiens
cgccatggagcccgactcggtgattgaggacaagaccatcgagctcatgcctcgaagcggaggatccctgtgtcc

SEQ ID NO: 654361 - DNA, 75 bp, Homo sapiens
acaagtacttcgacgaacactacgagtaccgatccatcacaaagcgaagtcatgggagagccacacttgatggtg

SEQ ID NO: 654362 - DNA, 100 bp, Homo sapiens
gggccctgggggtcctcagcgtggtctgcctgctgcactgctttgagctggagataagatgggtagactgctacttcccttttacacatccttcctttga

SEQ ID NO: 654363 - DNA, 98 bp, Homo sapiens
aggaccacctggaagcctagaaatgggctctacggtatttaatggggcccagaatggtgtgtctcagctaatccaaagggagtttcagaccagtgcaa

SEQ ID NO: 654364 - DNA, 50 bp, Homo sapiens
gccttctgcaactccgacatcggtgcagagcattgtagaccaaggagcca

SEQ ID NO: 654365 - DNA, 75 bp, Homo sapiens
aattggttatgctactgtgttctcagaaatacaggtatcaggatgaagatacacctcctcaagagcatatttccc

SEQ ID NO: 654366 - DNA, 90 bp, Homo sapiens
gaagaaaaagggccagtgtctcccaggtgaccattgtgaggtagatattttgttctaattttccagatgaggaagctgagaccctaaaag

SEQ ID NO: 654367 - DNA, 100 bp, Homo sapiens
ctcaacaccagcaccgcagatgttgtcaaggtggcctaccaggaggccaggggtgtcgccatggtggaacggcacatgtgtgatggggacattgttatct

SEQ ID NO: 654368 - DNA, 75 bp, Homo sapiens
ggctccgcagtgaccggactcgggggagactctgaagaagaagctatggagactacaccagccaaaggaaagaaa

SEQ ID NO: 654369 - DNA, 83 bp, Homo sapiens
cctcgctactcgcttgcctacccgccggcccgcgggtctacttcctcaaagttgttgacctcctgtactggagagacattaag

SEQ ID NO: 654370 - DNA, 82 bp, Homo sapiens
agacaagttcacccaacataactttcaagagtcaggtgacacacagtcttttgcacagaagctccagctccgggtgccctcc

SEQ ID NO: 654371 - DNA, 75 bp, Homo sapiens
atccaagttccacaatatattgactactgccacaattccgtttttcagttatgggacaaaaatattatatcaaaa

SEQ ID NO: 654372 - DNA, 80 bp, Homo sapiens
ttgtctgcccctattgtaagtgcagatggaacacaacaggccccttcacagatgtagtcactacaaatcttaaattgcga

SEQ ID NO: 654373 - DNA, 100 bp, Homo sapiens
ttcccctgaccacgttcgcgatgaattaaacaaccaccatgtcgagcaaaaaggcaaagaccaagaccaccaagaagcgccctcagcgtgcaacatccaa

SEQ ID NO: 654374 - DNA, 75 bp, Homo sapiens
gtcggcaagttctgtagagaaactcgggcaacctttggctgtggaaaatctctgttctcacaaagtctccccaat

SEQ ID NO: 654375 - DNA, 75 bp, Homo sapiens
ctgtgacgaggacgaggaggcagccacggggcccctggggaacccaccaagaccaacctggtcacattcttccat

SEQ ID NO: 654376 - DNA, 101 bp, Homo sapiens
attctctcccaggccacaagacatttcctgctcggaaccttgtttactaattgtgctggagaatctggtaaaagcaccattgtgaagcagatgaggatcct

SEQ ID NO: 654377 - DNA, 75 bp, Homo sapiens
gcggcttcctggcctgggcgctccggtggcggcggagccatcctggaagacgccggtgccgacgtcctgatggag

SEQ ID NO: 654378 - DNA, 73 bp, Homo sapiens
ttcgatgatcgtgtgtcggatgaggagaagaactcagttccagtactgtaactggagacctgacaacctgagc

SEQ ID NO: 654379 - DNA, 82 bp, Homo sapiens
tcgcggtgctcatagacgaactccgcaatgaggacgttcaggtactccaaagattcaggtttactcacgtcatccagcagag

SEQ ID NO: 654380 - DNA, 100 bp, Homo sapiens
acggtggcaagcaagtttaatcagacctgctcacacttcagaatagagaagattacaggctgtgccagccctggaaaaacagttacaattgttgttcgtg

SEQ ID NO: 654381 - DNA, 82 bp, Homo sapiens
cgtcaagtacactgaaattcatcctgagatgagctcacggatgattgatatccagaccaggatggctgggcgagcattggag

SEQ ID NO: 654382 - DNA, 90 bp, Homo sapiens
cggagcgctgaggcgggcgttttcttggatgaattgcttgctttggagaatcatgtcaaccctgccatggacttcacgcagactccacct

SEQ ID NO: 654383 - DNA, 97 bp, Homo sapiens
gcacatcacctacactaccacggccacactcaccactccatggccacacaggctgtgggtgagcgtggaggatgctcagatgcacaccgtcaccatc

SEQ ID NO: 654384 - DNA, 75 bp, Homo sapiens
cctcggatccattcacgaaaaacccttccttaccttcgaagaaggagcagctgaacacgaggggccggccattcc

SEQ ID NO: 654385 - DNA, 75 bp, Homo sapiens
cagcatgaggggaatgcaaccttggcccggaaaaatattgagaaaaagcttgtggtgaaggggggcaaaaaaaag

SEQ ID NO: 654386 - DNA, 101 bp, Homo sapiens
aaggaaagcaccatgacgtccatccatttcgtggttcacccgctgccgggcaccgaggaccagctcaatgacaggcatttggctttatgtcccgagttgcc

SEQ ID NO: 654387 - DNA, 76 bp, Homo sapiens
aacgaatcatccacgcacctgcagctctgctgagagagtgcaagccgtgggagttactggaggtgaactgtttgaa

SEQ ID NO: 654388 - DNA, 99 bp, Homo sapiens
gttgtgcgttgcggccagtcgccactgctatttctgcattgctatgaaccatggcccaactgtactacaaaaaggtcaactactcaccgtacagagacc

SEQ ID NO: 654389 - DNA, 100 bp, Homo sapiens
caagcgcgggacccgctatgaggttgcctgcaggagggaaggcggtgaacacagcccccgtgccaggccagacaccccacgatgagtccgaccgccggac

SEQ ID NO: 654390 - DNA, 101 bp, Homo sapiens
gatgtcgggaaggtcactgaacctgagtgagctgagtcgacagaaacttcatacccaagagctgctttctcagctggaaatggcaaatgaaaaggtagctg

SEQ ID NO: 654391 - DNA, 83 bp, Homo sapiens
ccgcgccgcgagggctccttccctcaggaacttgctactaccagcaccatgccctaccaatatccagcactgaccccggagca

SEQ ID NO: 654392 - DNA, 101 bp, Homo sapiens
ctcggcccccggagcggggaccacggagacagaccccggcccggcgaccgagctgggcccgtgagccactcggcctcagatcactggcgttatccttcttg

SEQ ID NO: 654393 - DNA, 75 bp, Homo sapiens
tcggcggagcttcgccaaggctggcgcagtcggtgacagagttagtccttgataattgcctgtgtgtcaatgggg

SEQ ID NO: 654394 - DNA, 126 bp, Homo sapiens
tcccctgccttccttgcagaggccatggaggacgaggagagacagaagaagctggaggccggcaaagccaaggtgaaggagtacctcctggcaactatgggaactatggctatgctaatagtgggt

SEQ ID NO: 654395 - DNA, 90 bp, Homo sapiens
gtgccgacaagatggcggacggggagctgaacgtggacagcctcatcacccggctgctggaggaacagggaattgatagctgctgagctg

SEQ ID NO: 654396 - DNA, 82 bp, Homo sapiens
gaggaaggtgaagtaggaccgaattcctgtgccgaagaggcctgcagtgggagagcaggagcactacaaacaccactggttt

SEQ ID NO: 654397 - DNA, 75 bp, Homo sapiens
agcagtctcaggcctttagtgatgatgtgcctggatcaaagtggaacagctgaagccatatcatgctcataaaga

SEQ ID NO: 654398 - DNA, 75 bp, Homo sapiens
gcgaggaaacgcaggcgagtgggaagctcggtgctgattatcacaactgtttggtgacctacttcactgacctgt

SEQ ID NO: 654399 - DNA, 105 bp, Homo sapiens
ttgaagaagggagccaacaaaaattgttttttctacctgttgacgtgtcaagcactaactgttgctccttgagggcaggacagttcttatggctttatccgttgc

SEQ ID NO: 654400 - DNA, 90 bp, Homo sapiens
ctccagtgctcatcttgttctcgagttttctctgccatgttgctattgcaggacggacttgtctccttcagatggagcccgtgaactacg

SEQ ID NO: 654401 - DNA, 90 bp, Homo sapiens
ccataatgacggtgaagagtcaaaaaccagtgctcaagtatttgagcggccatgcagttcctcactgacaagttccaggacctttgaagt

SEQ ID NO: 654402 - DNA, 100 bp, Homo sapiens
tggaaggtgcgcgagctggtggacaaagcgtttcctgaaatgcagtttttccagcaagaaaatgtgagaaaaattcttacagatgttcttttctgttatg

SEQ ID NO: 654403 - DNA, 83 bp, Homo sapiens
gtcctgagtccggatgaactgagaccatttgtttgtgactatgaagggtgtggcaaggccttcatcagggactaccatctgag

SEQ ID NO: 654404 - DNA, 90 bp, Homo sapiens
gttgcaaacatcagttcatttcaccccagcacttcaatatgcattgcattaactgtcctcatgctgataccgccagtggatgccagaatt

SEQ ID NO: 654405 - DNA, 82 bp, Homo sapiens
cgggctgcggcgtgtgcgcgcccgccagctgctccggagatacgtgcctccggagccagcgtggtggccatagacaacaaga

SEQ ID NO: 654406 - DNA, 103 bp, Homo sapiens
tccggcttcggagcgggagtgttcgttgtgccagcgactaaaaagagacctgcctagagctggaacgttacctccagagcgagccctgctatgtttcagcctc

SEQ ID NO: 654407 - DNA, 100 bp, Homo sapiens
ctatttgatgaagatgtcttttgaaaggtgtactgcaaggaacaaaatgtttgtaaattctccttttaccaagtactatggactacaaattttggaaaat

SEQ ID NO: 654408 - DNA, 135 bp, Homo sapiens
atgaaagctatactccaagcaagatctcagtcagagtaggaaataattttcacaaccttcaagaaattcggagggaaaattgcaacccttgcctacaaccagactgacagcataatttcttaggaatcaagaatc

SEQ ID NO: 654409 - DNA, 83 bp, Homo sapiens
gttaatgtttacggcgaagtctactcaacgtttccaaggccttagaaaatttacgtgtatacctgtgtgagaaaatcatagct

SEQ ID NO: 654410 - DNA, 100 bp, Homo sapiens
cgctgtccctgcggcttctggggcctgactttgaaaccaaaagttggctaaggagaagaatgtcatgtcctccacctgtcctcaagctgatcagtgcatc

SEQ ID NO: 654411 - DNA, 100 bp, Homo sapiens
cgacaacacggcttttatggacgagttcttttctgagacctgaaagatgtctgaaaattccagtgacagtgattcatcttgtggttggactgtcatcagt

SEQ ID NO: 654412 - DNA, 83 bp, Homo sapiens
gcgcagcctcttcgagcgccgcggacgcgtcatcgagtgtgacgtggtgaaagagatggtggccacacagcaggagatgatgg

SEQ ID NO: 654413 - DNA, 82 bp, Homo sapiens
aagttgcagctactttgcaagtgccagtaaatgatttaaatgcaggtatgataagtattatcagcaacataatagttctggg

SEQ ID NO: 654414 - DNA, 76 bp, Homo sapiens
gaagctggccgagcaggctgagcgatacgacggtgtggatgtggaagcagccaagcgggcagaagaggaattgctc

SEQ ID NO: 654415 - DNA, 89 bp, Homo sapiens
cgcgagtgaggaaaggaggtactgtaggaacccagaatgggggcttcgggacacagccctcctggaggacctgggaaaggccagtggcc

SEQ ID NO: 654416 - DNA, 76 bp, Homo sapiens
ggagaagactcactggccgaatggcagcagtagatgacttgcaatttgaagttccaagatgagatgggattctcca

SEQ ID NO: 654417 - DNA, 80 bp, Homo sapiens
aacagccctgaggcaagagaagaaaggaatagcgggttttgcagcaattgttgcatatggattatataaactgaagagca

SEQ ID NO: 654418 - DNA, 100 bp, Homo sapiens
ctcagcctctcgagtagctgggattacaggaggggattgtagcatattcctaatggagcaccaaggtgatgtgacactgctgcctggtccctgccctcag

SEQ ID NO: 654419 - DNA, 90 bp, Homo sapiens
gagaagagggaggtgttgaaaagaaggtgaagattgtccccagtggatggtccctatcacaatctctactagtgaagaccccaaccaggc

SEQ ID NO: 654420 - DNA, 74 bp, Homo sapiens
tggcctccgccaccgtgcacatccgaatgggagttccatctggaatatgacaaattagaagaacggcctcacct

SEQ ID NO: 654421 - DNA, 98 bp, Homo sapiens
tgtggtctacgggctggcagctaccatgatccaagaggtggaccggatacctgtggcagcctgcccccagttccctgactgtgccagctgcctccagg

SEQ ID NO: 654422 - DNA, 90 bp, Homo sapiens
cagttcctgggaaggtggagccaccagcctctccctggcagatccagttcctaatggtttgcgagctttgccagttttctatgcctgcac

SEQ ID NO: 654423 - DNA, 75 bp, Homo sapiens
accgtgaccgagagcgtgaccgagagcgcgaatatcgtcatcgttagaagggcctcctcccaaggagaacatgag

SEQ ID NO: 654424 - DNA, 95 bp, Homo sapiens
cgccacagctttaggaaacacctctacctcctgcgaggcctcccgggctccgggaaaactacactggccagatcatggaagggaagtggttgctg

SEQ ID NO: 654425 - DNA, 51 bp, Homo sapiens
tggtctctagcagcctgaatccagctccagtcagtctcagtcatcctacat

SEQ ID NO: 654426 - DNA, 134 bp, Homo sapiens
cgagggccactcgcctcacctgtgcgtgcagcgcctcgcgcgccctgtccggctgcggagatgagcgagtgctgttcctttgggaaccacggccaaagaagagatggagcggttctggaataagaatataggtt

SEQ ID NO: 654427 - DNA, 83 bp, Homo sapiens
ctcggagtccttggggacggagcagcgcgtcgtggggcgagcggcagggtctccctccactgctgtagtaacccgggtccggg

SEQ ID NO: 654428 - DNA, 100 bp, Homo sapiens
cctgtcatagttgattactgccttctgctgcagcgaaagtatccagctcacatagaagacattgactacgaggaaggaaaagtactcatccatttcaagc

SEQ ID NO: 654429 - DNA, 50 bp, Homo sapiens
ggacccccggaagcctagaaatggtggtcatgatcacgggagacaacccg

SEQ ID NO: 654430 - DNA, 101 bp, Homo sapiens
ctgacaaattatgctgcagcatattgtactggcctgctgctggcccgcaggcttgtgaacaccttcttcagcttccttcgacgcaaaacagactttttcat

SEQ ID NO: 654431 - DNA, 100 bp, Homo sapiens
tcaactgctctgaccagctcgacttcatggccatgggcaagttcttcaagggcctggccaggtcgctacgcatttcggatctggaaacctctagaacaag

SEQ ID NO: 654432 - DNA, 75 bp, Homo sapiens
ggaatttgtaaagttcatcctgctctgaatcaatacgagaattggagacccaaccagccagacagcttcttttct

SEQ ID NO: 654433 - DNA, 83 bp, Homo sapiens
ccagaccctggagcctcagttggaagcagccgatccagcctgcggagcctgtggggcagggtgtatgccatgtacaattccgt

SEQ ID NO: 654434 - DNA, 100 bp, Homo sapiens
tttggagcaatcagaggagaagctgtggctgggagaacctgagggaacagccaccgatcgctgcggcttttttccaggactgcatttcagagcaggacct

SEQ ID NO: 654435 - DNA, 101 bp, Homo sapiens
tatgaaatgaagttgatggatttagatgttgaacaacttggaattccagctaaagtaaataatgccagcctgattggactgggttatactcagacccttcg

SEQ ID NO: 654436 - DNA, 83 bp, Homo sapiens
ccagcctgcggagcctgtggggcagatttgtcccatcagatgaaaagaagaaacaaggttgtcaacgagaaaatgaaactcta

SEQ ID NO: 654437 - DNA, 90 bp, Homo sapiens
ataactttgtggaagttttagatgagtatttcagccgagtgtatgtgaggctatcatatgacaccaaacctgaagtcattctgcaacttc

SEQ ID NO: 654438 - DNA, 76 bp, Homo sapiens
gtgaaagctcatgaactcaaggagcacaacggacacatcacaggtcacagggattatggacccagaacagatgctg

SEQ ID NO: 654439 - DNA, 100 bp, Homo sapiens
actgaattcaaatgactatggttatgggggacaaaaaagacctttagaagatggaggttcttccaggggacccagccccctaaccatgggagctcaggac

SEQ ID NO: 654440 - DNA, 100 bp, Homo sapiens
cgcgctgatagccagtcttgcccttggagaccttatctatgtggtcattgatctccctatcaatgtatttaaggttcacaatatgtgcctaaatcttttc

SEQ ID NO: 654441 - DNA, 98 bp, Homo sapiens
ccaaggagttcaatcacttggcgtgacttcactacttttaagcaaaagacacacgacggttctgccctttatattaatcgagatgaggacatcgcacc

SEQ ID NO: 654442 - DNA, 101 bp, Homo sapiens
tgtcaccgtatctgagacccagcttctctgcgagcctcccaacctcaccgggcagcacaaggtcatggttctgagtcttctggtagtgtagggtcatctac

SEQ ID NO: 654443 - DNA, 80 bp, Homo sapiens
gagtctttgaggacacagcctcgctggaggcagtttctgggacccagacatggagctgcgggaagaagcctggtctccgg

SEQ ID NO: 654444 - DNA, 100 bp, Homo sapiens
gtggattttaaccgaggcacggacaacatcaccgtgaggcagggggacacagccatcctcagtgtttcctgaggttataggcgggtgtttgaggagtaca

SEQ ID NO: 654445 - DNA, 90 bp, Homo sapiens
gcgccacgacaaccagtgcatcctcatcaggttccttgcattgactccatggagagtatatcacctgatttccgtcatgatacttgggcg

SEQ ID NO: 654446 - DNA, 100 bp, Homo sapiens
ccagcaagagattaaagatgcagtacgccacggggccgctgctcaagttccagatttgtgaagaactgaatgtcatcatgtctggaatcaagcgaaccat

SEQ ID NO: 654447 - DNA, 75 bp, Homo sapiens
atcggaagtggctgcgtcgtcgacgctgggctttcgggtcccgcgcccagaaggtggtcttctgccctgttaaag

SEQ ID NO: 654448 - DNA, 101 bp, Homo sapiens
ttgccctccgccagcagctggaagaagtcaaagcgattaatttacagatgtttcacaaagctcagaataactgaagtgaagtgatggactccgatttggag

SEQ ID NO: 654449 - DNA, 90 bp, Homo sapiens
gaaagatgccaatggcaacagctttgccactcgactttccaacatttttgttattggcaagggcaagaagtacaagcccctggacctgcg

SEQ ID NO: 654450 - DNA, 80 bp, Homo sapiens
ccgcctctgcccacccactcatcctgcagatctggagcagcattccagggcctgctcctcaatcagtttgaaaacacagg

SEQ ID NO: 654451 - DNA, 75 bp, Homo sapiens
cgagccagcgagccgccgacccgccgagcaaaatggtttgtcctggttgtggtcaagactggatgatgtaactgg

SEQ ID NO: 654452 - DNA, 83 bp, Homo sapiens
tgacatgcagacctatccaccactcccagatatattcttagacaggtattctctgaaaccaaatgaccaaatcttggctgaag

SEQ ID NO: 654453 - DNA, 75 bp, Homo sapiens
ataggagctggggagcccttctgcgccacaggaagggaaaaggccgaggcatcagcgtgtgaagaccgcaaagac

SEQ ID NO: 654454 - DNA, 100 bp, Homo sapiens
gttctggagagcggggtgtggggtctcctctgagcctccggcctccataagacccaaaacagatgacacctcttcccagtcccccgcgccttccgaaaag

SEQ ID NO: 654455 - DNA, 82 bp, Homo sapiens
tctgcctccggggacaagaaactagagcaaataaccgttttgaaattgctggtcgtctgatgataaggaaattagttgcaga

SEQ ID NO: 654456 - DNA, 100 bp, Homo sapiens
agagagcgccctgagagaacagggtggccgcttggtccagggagaagatgtcaaccggacactagaaggtggaaggaaacctcttcattatgcagcagat

SEQ ID NO: 654457 - DNA, 100 bp, Homo sapiens
aaccgctggctgtcagacagcttcaaggagacggggtttgtgaccatgactctggaaagcctagaggaaatacaggatgtcagctgtgcttggaaagaac

SEQ ID NO: 654458 - DNA, 75 bp, Homo sapiens
atctcaggaagaatgaacctatcatcaaagtcagtgatcacagcaacaggcccagcgatctgctcacgagctgcc

SEQ ID NO: 654459 - DNA, 82 bp, Homo sapiens
ttcgcagtggtcgcttcttctccttgccctgggcgctgcctatggcacagccaagagcggtaccggcattgcggccatgtct

SEQ ID NO: 654460 - DNA, 75 bp, Homo sapiens
ctgggatttttgggtggtgcaaagccctgccaaggtaaccctgctggggtcagttatcttcacattccagcacac

SEQ ID NO: 654461 - DNA, 104 bp, Homo sapiens
gggacgtggatggggtgaggctgctgctggagcacggggcgaggaccgacatctgctttccgccgcaggacattctgagcatgtgagacctgaggactgcaaac

SEQ ID NO: 654462 - DNA, 50 bp, Homo sapiens
gccggcctgaatctccatccgcacccgggcccgcgatgctcccagcccgg

SEQ ID NO: 654463 - DNA, 100 bp, Homo sapiens
ggagtttgacgaagaggtggtttttgagtttcctggcatttaacatggacacagttgatgatctcgcctttctgttgaaagcagtgaaatttcgtgaaag

SEQ ID NO: 654464 - DNA, 98 bp, Homo sapiens
tctacccgacacttacatgccatggccttctacgttgtgaaaatgattttaaagaatgtggagtcttccagaactgttcagccacatttcctagaatt

SEQ ID NO: 654465 - DNA, 74 bp, Homo sapiens
gttcttgctaagattgtgaattacatgaagctacaggccaaatttgagcaccttaagagacttcaccaagaaga

SEQ ID NO: 654466 - DNA, 100 bp, Homo sapiens
gatcctctaacatcacctgcttcatccttgtttaatgactttggtgccctcaacatctctcagagacgaaaggaagccttatcagttgtgagtgaggacc

SEQ ID NO: 654467 - DNA, 75 bp, Homo sapiens
attggtccaaaattgaagagaaggaattattagaccaattacaacaaaagctgtatcttattcaaatgattcctc

SEQ ID NO: 654468 - DNA, 50 bp, Homo sapiens
ggaatcctaccaggaggtgacgatgcctgggaaccactcacctccttctg

SEQ ID NO: 654469 - DNA, 100 bp, Homo sapiens
cagcctgagccccagccaggacgagaggatgcggagcccgcagaacctccacagtcaagaggacgcctaggcgaggacttctaccgcgaggccatcgagc

SEQ ID NO: 654470 - DNA, 100 bp, Homo sapiens
tgagaatgaataatatccttgaagaagagagaaccattgtttcaagaggaggatgaagatgcaaatagtcagagtgggcctttggagtgacgctgtggga

SEQ ID NO: 654471 - DNA, 83 bp, Homo sapiens
gtgtccttcgtcgtcgggggcctcgctcattcttggaatcccagaacaggccttaagtcttctccacatggccatcgagccca

SEQ ID NO: 654472 - DNA, 80 bp, Homo sapiens
agggagtgcaagcttagagcgtctggccaagaatcagaggaagtggaggctgggaggcggcagaatgcagccagaggagg

SEQ ID NO: 654473 - DNA, 50 bp, Homo sapiens
tcttggcacaattatatgtgtaatgcccggtatgaaagccagcggatcca

SEQ ID NO: 654474 - DNA, 100 bp, Homo sapiens
ggtgctggaccgcgtgtttgagaggcagcactactcagacatcttcaccaccacagagcccatcaagcccgagcaggctgtggaaaatctctgttctcac

SEQ ID NO: 654475 - DNA, 95 bp, Homo sapiens
gcagccaccgccccccgacagccccagtatcaaggatgaggcccgcaggatgatccgttccgcccagcaggacgatctgctcagggcagttcaag

SEQ ID NO: 654476 - DNA, 97 bp, Homo sapiens
attgctatctgtctagattgtttacgaaataatgggcaatcaggggacaatgtagtaaaggtcatcactccccaaaatggacgttaccaaatagatt

SEQ ID NO: 654477 - DNA, 101 bp, Homo sapiens
cagacactcaggcagacgaggatgaaagagcccaggagagtcaggaaaaatcgcagccctcagagagtcgctggctgaagtatctagaaaaggactcccaa

SEQ ID NO: 654478 - DNA, 100 bp, Homo sapiens
tcacagtgaccattatccatgagaaggggagcgagctccattggaaagatgttcgtgaactggtggtagttaacaagcacaagccctggctggagcccac

SEQ ID NO: 654479 - DNA, 98 bp, Homo sapiens
aagaacttcagcaaaggcttggagaagtccagggcgacaacaaggtgcaccttcgctctgccaggcgtctctgtgagctctgctgtgccaaccggggc

SEQ ID NO: 654480 - DNA, 75 bp, Homo sapiens
cccggccggcccggccccagccccatggacctccgagcaggtactccaaagattcaggtttactcacgtcatcca

SEQ ID NO: 654481 - DNA, 90 bp, Homo sapiens
acccagaagggctatgaaaagaaaaggtccaaactcctatctccttacagcccgcagacacaaggaagtggttacctggaaggaaaggag

SEQ ID NO: 654482 - DNA, 50 bp, Homo sapiens
ctcgcctcctccagctgttgttgctgctgtttcgagaggcccgtgccatg

SEQ ID NO: 654483 - DNA, 50 bp, Homo sapiens
cacagcaatatctctgggctttcacagagctgtctgaagagcagcagttt

SEQ ID NO: 654484 - DNA, 100 bp, Homo sapiens
tgaggagtaagcggcgcggtagcgaaggccgccgaacctgcctggctagccggcgacttgagtgacgaagctgaagaagcaggtggagagtgccgagctg

SEQ ID NO: 654485 - DNA, 100 bp, Homo sapiens
tgaatatcagctcctgggtcatttttctccctgaggacaacctgaggacactgcccatctctaagataagaacctggaaaggggactctgttggccattg

SEQ ID NO: 654486 - DNA, 100 bp, Homo sapiens
gagaacctaccgaatttgagtatttgcgaaaagtgctttttgagtatatgatgggtcgtgagactaagtaaactgtttcacgttagacctgtaacccaag

SEQ ID NO: 654487 - DNA, 100 bp, Homo sapiens
aagcatttcgcctgaccattacacgcaaagatattcaaactctaaaccatctgaattggctcaatgatgaggactccctggaggaaaagcggaagcggca

SEQ ID NO: 654488 - DNA, 51 bp, Homo sapiens
tagaagcagacattttagcaatgctgtcttcgcagtgccatgcctacaatg

SEQ ID NO: 654489 - DNA, 100 bp, Homo sapiens
ctccgtggtggacggcaagcgcgacgccaggctgagaccgtccagtgatgcagaagaccacaagcctttgaaaaaaggaagtcgaactccttcagacagg

SEQ ID NO: 654490 - DNA, 83 bp, Homo sapiens
ccccttgttccctcagctctaagggccgcgatgttgtacctagaagactatctggaaaatgatatcatcaagttgaatcgaaa

SEQ ID NO: 654491 - DNA, 98 bp, Homo sapiens
cagcctatattgttacaattttttttcaagaactgccgtcttctttgcctgcactaatggctttgaagacaagattcccaaaaggagattctctgaga

SEQ ID NO: 654492 - DNA, 83 bp, Homo sapiens
cagtactttgagaaaatggacgctgacatcaatgtcacaaaagcggatgttgaaaaggttgggggccgtcccgctcctaaggc

SEQ ID NO: 654493 - DNA, 98 bp, Homo sapiens
gtttgattttactcatccatgtgaccatgaggaaatgagagaaatgcttacacacagaaatgggattaatgaaaatcaagttccatcctcagacaaga

SEQ ID NO: 654494 - DNA, 75 bp, Homo sapiens
tgccagagtttgtagcctattggaggaaaacacaccaagacaatgcagatcttcgtgaagactctgactggtaag

SEQ ID NO: 654495 - DNA, 100 bp, Homo sapiens
acctccacacactaaaaactggaggtcggttagaccccgtttaaccatctatgtctgccgggagcagccaagcagcacagtgctgcaagggcagcagcaa

SEQ ID NO: 654496 - DNA, 74 bp, Homo sapiens
ccgtctccaagatgtagctaatgaccgtggttcccactgaggatacagttgatatattagttggatggcatata

SEQ ID NO: 654497 - DNA, 90 bp, Homo sapiens
gccgaggccgcctccgagcgccaggtttattgaagtcaaaatgtccaaaaaaatcagtggcggttctgtggtagagatgcaaggagatga

SEQ ID NO: 654498 - DNA, 75 bp, Homo sapiens
cgccgcctctagggatggacgcggaaattctccaggcaaatgacctcctcacccaaggagttctgctgtacaaac

SEQ ID NO: 654499 - DNA, 100 bp, Homo sapiens
ggacattgaagaatcccttttggagccagcttcagctttagctgcagctgcctctgttcagccacttgcaacacaatgtttccaactctctaacatgttt

SEQ ID NO: 654500 - DNA, 88 bp, Homo sapiens
aatccagagaaagatctctgaccactaaatctgtgtgcagtaagactttgaccccgacgcaggcttcagtgattgccgcggatcagaa

SEQ ID NO: 654501 - DNA, 85 bp, Homo sapiens
cgtctggcaggaacctcggcctcagagccgccgccatgtctgcgcatctgcaatggatggtcgtgcggaactgctccagtttcct

SEQ ID NO: 654502 - DNA, 75 bp, Homo sapiens
tcagcgcgcgtggaaagtgctagcccgagcgaggatcatgaggcacgggccggtgcataaacttctcccgagttc

SEQ ID NO: 654503 - DNA, 106 bp, Homo sapiens
gtttcctcagaatggcctttacacacctcagaaatttatagataacaggatcatttcatctaagatccaaaatacggagctggcatatacttcaccaagaacctca

SEQ ID NO: 654504 - DNA, 74 bp, Homo sapiens
caacagcggcgcgggcaagaagcgctttgaagtgaaaaagctcattcttggaatcccagaacaggccttaagtc

SEQ ID NO: 654505 - DNA, 100 bp, Homo sapiens
gtcagtggatatccaaccctgaagatatttagagatggtgaagaagcaggtgcttatgatggacctaggactgctgcagacatggccgcttaccaacaag

SEQ ID NO: 654506 - DNA, 100 bp, Homo sapiens
atgccaaggaaaaactggagagcttcatcaaaaatagtgatagctttgataaggatagtaaagctctgaaggatgaaaatctacctcctgtcatctgcca

SEQ ID NO: 654507 - DNA, 82 bp, Homo sapiens
aagtaatacagaactgccccatcgatgtgcggcgtccgctgtataaggtcttcacacaacgagctagaaaagcacaggtaag

SEQ ID NO: 654508 - DNA, 99 bp, Homo sapiens
ggaagtggctgcgtcgtcgacgctgggctttcgggtcccgcgcccagctgaaactaagatctgcttcaaatactaccatggagtgagtggggccctgcg

SEQ ID NO: 654509 - DNA, 90 bp, Homo sapiens
gagccagggctccaaagaactcgttgctgacggtgcacggacgcaccaaggagcagaaggggcccctgtcgggtgcagcgtcctgggagc

SEQ ID NO: 654510 - DNA, 95 bp, Homo sapiens
attgttgcagtagccttattgtatggattatgttatggggctttaaaggattcctcatgtccataacatgttggatgaggctctgcagctcaccc

SEQ ID NO: 654511 - DNA, 73 bp, Homo sapiens
ctggacatgtctcggtccccttcttactggcttactgctaagtgttaggcggaaaaatactaaagagatgttt

SEQ ID NO: 654512 - DNA, 96 bp, Homo sapiens
gacgcttgatgagaaggacccacggcgtctgttcgaaggccctttctggttactgtggctttatggcagccaacctttatgctcgttccatatttg

SEQ ID NO: 654513 - DNA, 90 bp, Homo sapiens
agcgcccccatcccggaggtctccgccggctcccggacccctgagccccttccagtgctgcctgaggtgccctctacctgtgcctgcctc

SEQ ID NO: 654514 - DNA, 50 bp, Homo sapiens
gaagaacctcatcgctgcgacgaaaaaaggacagaataacgggctcccag

SEQ ID NO: 654515 - DNA, 74 bp, Homo sapiens
ctcgggcccatcgactccagcgtgctctctcggaataagacagaggcatgtggcgtcatagtagaattaatcaa

SEQ ID NO: 654516 - DNA, 96 bp, Homo sapiens
ggagacggtgggcatcaacctcttcctctacccgtggaagaaggaattcagaagcatcaaggctgcttctgatgcttggaagatatcctctcagcc

SEQ ID NO: 654517 - DNA, 96 bp, Homo sapiens
aagcaatatttcgagcagtttggcaagggccaaagaatgtggtgcttcgcctagctgtaaaattttttccacctgatcctggtcagctacaagaag

SEQ ID NO: 654518 - DNA, 87 bp, Homo sapiens
tttctttttttgatgcatctctacctggaactttgccgccaagtatcttcaagaccttctcatggagagtgtgaatttttcccccgc

SEQ ID NO: 654519 - DNA, 83 bp, Homo sapiens
gttcatcttggagataaagaacaatctaactgggcaaaagaagtacaaggaatttcagaacacctcactaagcagtcttttga

SEQ ID NO: 654520 - DNA, 101 bp, Homo sapiens
gggacacctggttccagctgcagcacgtggacgctgactcggaagtgcaggcctccggtgtggctgtctctgatggtgtcatcaaggtgttcaacgacatg

SEQ ID NO: 654521 - DNA, 100 bp, Homo sapiens
gttgacaatcagctttggaagttggatggaactacctggacttaaatttaaggactgggtatcaagtaaacgaaggatacatcattcactctttggggac

SEQ ID NO: 654522 - DNA, 75 bp, Homo sapiens
aggctttcaccaaacctgaagaagcctgcagcttcattttgaggaacggcagagtcgaaacaaacaatgagggcg

SEQ ID NO: 654523 - DNA, 75 bp, Homo sapiens
ggaaaaactttccagccattgtgagggtcgctgtctgcccattgatagaggccagattgtcttggaagttccaaa

SEQ ID NO: 654524 - DNA, 122 bp, Homo sapiens
ggcgggcccaaggcgtgaggcgccgcccgggtgtccccgcggcgcaggaggcggtggagcgcagagcgggcgagcgcgaggagctctacggtgactttgaagacttggaaacaggggacgtg

SEQ ID NO: 654525 - DNA, 93 bp, Homo sapiens
cgcagaaaccccgttgacaaggcactgctttttcatgacgcaaattgtggctactaatttgccccctgaagatcaagatggctctggggatga

SEQ ID NO: 654526 - DNA, 74 bp, Homo sapiens
aaacttgctgcggttgctcaagcttgctggagtggctgcccgacgttcccgaggacatccggtggatgaaggag

SEQ ID NO: 654527 - DNA, 75 bp, Homo sapiens
ggaggcagaggtggaggcgctttgaaagacccaacatgagtgaagtttcctgcaagaaacgggacgactatttgg

SEQ ID NO: 654528 - DNA, 98 bp, Homo sapiens
gatgtctcagccctccacggcctccaacagcttacctgagccagccaagaagaggttatcaatactctggctgaccatcatcatcgtgggactgactt

SEQ ID NO: 654529 - DNA, 75 bp, Homo sapiens
ccaacttataaaaccagatcgctgccatcactgctccgtctgtgataagaggagatgttaaagtaacccatcttg

SEQ ID NO: 654530 - DNA, 100 bp, Homo sapiens
aagaagccactgaaacagcccaagaagcaggccaaggagatggacgaggaagatctgactaaagagaccctgcacaagcagtaccacctggtaaaatcgc

SEQ ID NO: 654531 - DNA, 73 bp, Homo sapiens
cgctggccttctggacatatcaggctgctttgctggctctgcaagaaaatggactagacgcaactacagtgaa

SEQ ID NO: 654532 - DNA, 98 bp, Homo sapiens
aatgaggcaagttatcctttggaaatgtgctcacactgaacaagtggtgatgaacttggacagcaggcttctgatcttccctttatatatctgctgta

SEQ ID NO: 654533 - DNA, 100 bp, Homo sapiens
atgagtgatgtggaggaaaacaacttcgagggcagaacacactgccctccagaaacgatgggtgtcgctagatccagctgggactctgccagcctccggc

SEQ ID NO: 654534 - DNA, 100 bp, Homo sapiens
ggatgatgtgggccatggtgtcaaggttctttcagagcacggcttcggccccatcactaccgacatccgggagggacagactttctactatgcggaagac

SEQ ID NO: 654535 - DNA, 75 bp, Homo sapiens
gtaattaacactgtggatacctcccatgaggacatgattgttccccacgtgtgaaagtcaagaatctgattgaaa

SEQ ID NO: 654536 - DNA, 90 bp, Homo sapiens
cttacatctctagataacagtctgcactttcacccgtttcaggttttgggatttgagattgacgcggtgaactctgtccagttttcaaac

SEQ ID NO: 654537 - DNA, 75 bp, Homo sapiens
gggatggcagctgctgatttgtcccatgaggaccagctgccctctggcttccccaacatcgacatgggcccacag

SEQ ID NO: 654538 - DNA, 98 bp, Homo sapiens
ccccgaccttggcaccgcgtttgtcaagttttctactcttacaaaggaactgtccacactgctgaaaaatctggccctaggcgagcccctttaccggg

SEQ ID NO: 654539 - DNA, 50 bp, Homo sapiens
agggaagtcgcctctgtgctcgtatccatgtttctaaaggacaaagttca

SEQ ID NO: 654540 - DNA, 100 bp, Homo sapiens
tttgaaggatcactttcccctgtcattgcacccaaaaaagcaaggccttctgagactggatctgatgatgtgggaaaggtttttattcctggactgccag

SEQ ID NO: 654541 - DNA, 83 bp, Homo sapiens
gggtcgggcgcggagagaagccgcaaccagagccgccgccacggttcgagaacttgtcttggacaattgcaaatcaaatgatg

SEQ ID NO: 654542 - DNA, 75 bp, Homo sapiens
tctagaccatctacctcatctagaaggagagcaattagtgagacaggtgacttcatggtcatgacgattttcttc

SEQ ID NO: 654543 - DNA, 74 bp, Homo sapiens
ccctgtttgagaaaaggcctaagaattttggcattggaaaatatatgcagatgatgaacattcttaagccaatt

SEQ ID NO: 654544 - DNA, 83 bp, Homo sapiens
gtcggacctgcacgagctgtctgggcgtgatggtgggcatgggtcagaaggattcctatgtgggcgacgaggcccagagcaag

SEQ ID NO: 654545 - DNA, 74 bp, Homo sapiens
cttcaaaaagtgtctgtctgttggaatgtcaagagatgctgaaacagaaccgcatgagggaaagaggaaagtgg

SEQ ID NO: 654546 - DNA, 75 bp, Homo sapiens
gttgaaacgctgcctggaaaggaagtaccaggacttgcacagctgcggttggatttctcacgatgtccagtgtta

SEQ ID NO: 654547 - DNA, 96 bp, Homo sapiens
gcttcctggagattctacacgccaggtggtggtgcgctcagcctcctgacaaggtgatccgggcgggccccgcaggaattttatcccctcaccggc

SEQ ID NO: 654548 - DNA, 100 bp, Homo sapiens
cgggactccacggccagagcctgggatctgctgtggaagaacgtccgggagaggcggctggcaggtcctcagaatggttggaatgaccctccagctttga

SEQ ID NO: 654549 - DNA, 114 bp, Homo sapiens
tgagatatcatccttcttcagggagataaggaaaaaaagccacagggtcccggagagccaggggaatggtacggcttcaggtccagagcgtggagaagcctcagtaccgcggga

SEQ ID NO: 654550 - DNA, 100 bp, Homo sapiens
ctggagaagagcttcaactctgttcacctgcttgcagtgttttacctcaatcatatatccacacaagtgcttctcttgacatttctcgaaaatgggagaa

SEQ ID NO: 654551 - DNA, 75 bp, Homo sapiens
atcgcggagtcccaatgaaacgggcagccatggccctccacagcccgcagctacttccatatttgcactaaagga

SEQ ID NO: 654552 - DNA, 98 bp, Homo sapiens
cgctgagggaccgcggggttagccactgctggctgcttccagtgttcgccgagagcatcaagatggtgctcatgtggaccagtggtgacgccttcaag

SEQ ID NO: 654553 - DNA, 74 bp, Homo sapiens
agaagctgcagcggaggaaggcgaggatgtgggctctcttgatgagaagatgaagagcttggatgtgaatcagg

SEQ ID NO: 654554 - DNA, 111 bp, Homo sapiens
gaagatgcttcatctgcccctgcccagatccggaagaacggtgaatttcccccgcagttgctctaggtcgtaaccagcctttgaaaaaggagaaaccaaaatggaaaagcg

SEQ ID NO: 654555 - DNA, 100 bp, Homo sapiens
tgtgattggcggtgaccggatattcagttgcacatccccacatcaatgcactgccaatgaacaagttgaaatcatcgcagaaggataaagttcgtcagtt

SEQ ID NO: 654556 - DNA, 75 bp, Homo sapiens
cagcatccagctgtcaaatcaacaccaagggcgatgccagtccctccactccagaggagaacgaaaccacgacaa

SEQ ID NO: 654557 - DNA, 51 bp, Homo sapiens
catctacaaccttcgatctcctgacgattttcggctttgtgagaaacctta

SEQ ID NO: 654558 - DNA, 74 bp, Homo sapiens
catgaagccaggggacatccgccatgctccaaacaacttggcctcagagcacgaacttccaggagccggtgcag

SEQ ID NO: 654559 - DNA, 100 bp, Homo sapiens
actggtgacaactcaagagcaatcagtaccatctgatatgggcacggttatgaaatattttgtgttacttgtaacagttcaaagactctgcttgcctcag

SEQ ID NO: 654560 - DNA, 82 bp, Homo sapiens
gttcttagagcggtttaagtcttcagccagctggaagaagcacgccaaattcattctcgttttgaaaaagaatttagtttta

SEQ ID NO: 654561 - DNA, 100 bp, Homo sapiens
cagagattcatctttcatgcagtgacatgttgataaaaaatgatgatctcacttccctgctaaccggtgggcggcccgccggggtgcacctctcaggcct

SEQ ID NO: 654562 - DNA, 80 bp, Homo sapiens
ggaaagtgcagaaagaggagaaactgattggattgatgaacaatgaagcagctcagggcctactgcagtgcatgaaggtg

SEQ ID NO: 654563 - DNA, 50 bp, Homo sapiens
gtgcgtctgcagctggcgcggaagaggtcagctggccgccggcacctgtg

SEQ ID NO: 654564 - DNA, 83 bp, Homo sapiens
gccgtagacaccagctccgaaatcaccaccaaggtacactgaggaggggacggctccgtcttcacattgtgcacagatctgag

SEQ ID NO: 654565 - DNA, 80 bp, Homo sapiens
cgaagagttccccgtgccggctcttcaccatcccgttttccagcaagcgccatcatgaccgggtcctataacaacttctt

SEQ ID NO: 654566 - DNA, 82 bp, Homo sapiens
tcggaactgggaccaaggtcaccgtcctaggtctcagccggtcgtcgcgacgttcgcccgctcgctctgaggctcctgaagc

SEQ ID NO: 654567 - DNA, 100 bp, Homo sapiens
ctgagtgcggatttctgctatgatgacagctactctccagagagaccggatcttcaaacattttaccaggaagcgccaaagggctatgcgaaggcgagtc

SEQ ID NO: 654568 - DNA, 98 bp, Homo sapiens
cgttgtctaaatttcggtagccatggcacaagaatataggaaatcctcattgacgattcaatttgttgaaggccaatttgtggactcctacgatccaa

SEQ ID NO: 654569 - DNA, 101 bp, Homo sapiens
aatgatggccacgcgtcggactggtctgtctgagggagatggtgacaagctcaaggcctgcgaggggtcttgctcctcagaacaaaccagaattgcagaag

SEQ ID NO: 654570 - DNA, 99 bp, Homo sapiens
ctgcgtcgccgggaccctcgcgcgcgaccgccgaatcgctcctgcagcagagcaattctgtggtgttcttggtcacacatttatggagtttctgaaggg

SEQ ID NO: 654571 - DNA, 100 bp, Homo sapiens
caggcggcgccatcttcgaacttagacttccggaaggactttggcgagggtatgggctacgtgagttcgtggtgattgcccctgctgcacacagtgacgc

SEQ ID NO: 654572 - DNA, 75 bp, Homo sapiens
tcccggtgcccagctccgagcacgtcgccgagatcgtgggtcgccagggtgaccaagaatatggcccaggtgacc

SEQ ID NO: 654573 - DNA, 82 bp, Homo sapiens
ccagagcccaggtccccaggacagtgcaggttggtgttcgaggaagagacattgttgttcttggtgtggagaagaagtcagt

SEQ ID NO: 654574 - DNA, 90 bp, Homo sapiens
cagacagcagctaccctgcaaccagggtgaacggcgagcttaagagctcctaggcggggtttcaccatgttgcccagactggtcttgaac

SEQ ID NO: 654575 - DNA, 100 bp, Homo sapiens
ctggaactgctgaatcagcgaggccttcgagatccagggtttgcagacctgacagacgctgctgcccgcaacgcggagctgctccgccaggccaagcacg

SEQ ID NO: 654576 - DNA, 83 bp, Homo sapiens
gaacttcagtcaacatattttcattgactccttagtacaagggaaccttaatgaccaacaggatgaagatttgataaagtgga

SEQ ID NO: 654577 - DNA, 75 bp, Homo sapiens
cctgagggtcgccacctcccttccccacagctaggaaccaaggtggatcctgagacccattgtcatgcagaaagg

SEQ ID NO: 654578 - DNA, 100 bp, Homo sapiens
gtgtagggaaaatagagtgtgtatcagcagagaccaccgaagactgcatcgccaagatcatgggtgactgtcgttcctacagttacgtgtgtggaatctc

SEQ ID NO: 654579 - DNA, 90 bp, Homo sapiens
caaaccttggtttgctgaaaatcagcagataaggcaattgaaagggaagaaggtgggccatgcacagacacagctcatgtctcattaatc

SEQ ID NO: 654580 - DNA, 75 bp, Homo sapiens
gttgggagcgctgttttcgtgatcttcagaccccaggttctttggtacatgtcccagagcaagcacacggaggcc

SEQ ID NO: 654581 - DNA, 100 bp, Homo sapiens
ctttgatcttcagaaaacttcccttggaggggatgcaccagaagagccagagaacaagttgaaatcatcgcagaaggataaagttcgtcagtttatgatc

SEQ ID NO: 654582 - DNA, 100 bp, Homo sapiens
caagcggatcctgtgcctgttccgcccgcagtctggccgcgatccgcctcacggacacgctgggcaggctctcgcacatcctggagatggaccacttcgc

SEQ ID NO: 654583 - DNA, 75 bp, Homo sapiens
agccgatccagcctgcggagcctgtggggcaggtggaggagttactgatggccatggagaaggtaaagcaggaac

SEQ ID NO: 654584 - DNA, 75 bp, Homo sapiens
cccgggactagtggaccagctggtgaaggcagacagcgagtggcgacgatcctctgtgttctatgcctgagagta

SEQ ID NO: 654585 - DNA, 100 bp, Homo sapiens
cctcaacccagaggaatcgttactctttcaggtgtggggatattcagctttgccaggtatggcagtgatttttatagcatgcactataaaggcaaagtga

SEQ ID NO: 654586 - DNA, 75 bp, Homo sapiens
actttgcagccggccttagtgctcgcgcaggacccccgcagcaaacacaagtttaagatccacacgtactccagc

SEQ ID NO: 654587 - DNA, 98 bp, Homo sapiens
aaggagttttctcaaaatggagagaatttctgcaaacaggtcacatctgttcttcagcaaagctacccagaatggaatcctgacaatgatacaggaca

SEQ ID NO: 654588 - DNA, 50 bp, Homo sapiens
ccgaggcgagcgccgcgcgcaccactggtatgagttaatacagaaaggag

SEQ ID NO: 654589 - DNA, 82 bp, Homo sapiens
cgcggaccggcgtccccggcgcgaagaggctggactcggattcgttgcctgaggtcccgcagcccccggaagccaatagact

SEQ ID NO: 654590 - DNA, 100 bp, Homo sapiens
gggcacacccggctccccggacgcctcgatggtcatcatgggccagtgctactacaacgagaccatcggcttcttctataacaacagtggcaaagagctc

SEQ ID NO: 654591 - DNA, 90 bp, Homo sapiens
gtagatgagactaacatgtatgaaggtgtaggaagaatgctatttagcagacatgacccacaagcagaagaagcattagcaaagaggagg

SEQ ID NO: 654592 - DNA, 100 bp, Homo sapiens
cgcacccccgccccggtgcagatgaacctgtacgccacctgggaggtggaccggagctcgtccagctgcgtgcctagttgattcgatgtcatcagtcccg

SEQ ID NO: 654593 - DNA, 115 bp, Homo sapiens
aacctgctgcatttggtgacaaagagccagccagtagcccttcgagcctgtgggcttccctcagaaagcagaagccactggagaaaaacggccaagaggcagacctaggaaatgg

SEQ ID NO: 654594 - DNA, 83 bp, Homo sapiens
ccacccttctactttctgtctctaggaatttcactactctagattacctaggaacagtacgatttggggttatcacaaataaa

SEQ ID NO: 654595 - DNA, 83 bp, Homo sapiens
ggggaggctgagaggggcgcatgcaacaacaacttttggaaggacaatgcagatcttcgtgaagactctgactggtaagacca

SEQ ID NO: 654596 - DNA, 82 bp, Homo sapiens
ttcagggctgctatcaacgaagagatatcacgggttcaactagatatagcttcacaatctctggatcaagaaattttattaa

SEQ ID NO: 654597 - DNA, 100 bp, Homo sapiens
ttatgacgacccccaataaaggaaacaaggccttgaaggtgccttcatcaactgtggagtacctcaagaaacatggcattgatgtgcgggtcctccagac

SEQ ID NO: 654598 - DNA, 75 bp, Homo sapiens
ggcacttggagtccggacatctgaaacttggtacatcaggaacgtctctatcaagaatacaatttcagcaaggct

SEQ ID NO: 654599 - DNA, 97 bp, Homo sapiens
aaaggatccagcttccttctgaaaaggcgatcttcctgtttgtggataagacagtcccacagtccaggtactactgagcgagtgtgcttgatccagg

SEQ ID NO: 654600 - DNA, 88 bp, Homo sapiens
gcgcgtgtgtgagcgcgccggaccaagcgggcccagaagcgggaaggaagcagccaccctcgccatggcctccccgcccgcctgcccc

SEQ ID NO: 654601 - DNA, 76 bp, Homo sapiens
aactactccaaccgcagtggtgacactcccatcactgtgagcagggtggcagcactggaagcatcaggaaccctgg

SEQ ID NO: 654602 - DNA, 101 bp, Homo sapiens
gacgaggagcgcgtcgtgcgcctgggggtgcgcgcctgcgacctgcccgcctggcggcagactgaaggacgggtgcctgttttcagccatgaggtagtccc

SEQ ID NO: 654603 - DNA, 89 bp, Homo sapiens
aagcgtttgccctggtgtcagggccaactgcttcgaagcgccagactttcggagactgtggtgctgctgggggtgaaatctttgaccag

SEQ ID NO: 654604 - DNA, 100 bp, Homo sapiens
atcagaactgtgtaaaacttatgatcttcctgggaactttctgacacaggccggaaggtggtggtcgtacgctgtgaaggcatcaacatttctggcaatt

SEQ ID NO: 654605 - DNA, 106 bp, Homo sapiens
gaattccggcggctgccgtgactccagtgcaagtgctggagaatctggtaaaagcaccattgtgaagcagatgaggatcctgcatgttaatgggtttaatggagag

SEQ ID NO: 654606 - DNA, 75 bp, Homo sapiens
agcaccagatgaaggagcattcctcttgggatcacctgctgttaccagctaccacccataacaagaccacaagac

SEQ ID NO: 654607 - DNA, 85 bp, Homo sapiens
ccttctaggtgtcaacaacctggaattcaattggctcttgccttatgctaaatttattgtgaagaaatcagaagatgaagaagac

SEQ ID NO: 654608 - DNA, 116 bp, Homo sapiens
ctgatgcccccagtaaggatatctttgttaaattgacaacaatggccatgtatccatgagcaacaagcgttccaacagcttccgccaagccatcctgcagggcaaccgcaggctaa

SEQ ID NO: 654609 - DNA, 75 bp, Homo sapiens
tcgcactctgttcttccgccgctccgccgtcgcgtttctctgccggcgaggccagcaccaggtcccccagcaccg

SEQ ID NO: 654610 - DNA, 100 bp, Homo sapiens
gcttcggagtgcttatgccaagaggaacagcagtgtaaatgactcaggtggacaagagcaaggaccaagtgtggaaggtcttaatgtaccaacaaaggct

SEQ ID NO: 654611 - DNA, 75 bp, Homo sapiens
atgatatccttctcaaccttgtgggatgtgaaaactctgttactgaagtattttcatctcagcctagtgacgatg

SEQ ID NO: 654612 - DNA, 83 bp, Homo sapiens
gagacttttctcagatgttggatatttgcttggaaaaacgtgtgggtacgaccttgatatttggagtctgggagtgatccttt

SEQ ID NO: 654613 - DNA, 100 bp, Homo sapiens
gcctcaggaaggtccagtgaaagagagccattctacaactactgaaaaagctaatattgctttatctgcaggtcctgcattcagctcttttcacatttga

SEQ ID NO: 654614 - DNA, 74 bp, Homo sapiens
ctgaacgcccggcccaggtgaaggggcctttttatcattgatgataagggtattcttcggcagatcactgtaaa

SEQ ID NO: 654615 - DNA, 51 bp, Homo sapiens
atcagccacagacggaacaagcatgcagacaaactttccagaaatgatgaa

SEQ ID NO: 654616 - DNA, 131 bp, Homo sapiens
ctgttgttacctgggaaccctggaggggccttcctcatccgggagagccagaccaggagagctccccaggtgtgtcctggtagacaactgctcccaggagctggcatagaagcaaacctgcaggaaaagcc

SEQ ID NO: 654617 - DNA, 83 bp, Homo sapiens
ctattatcagatcaaccaccaaagtgggaaacattgaaatcaagtactgccaaatctgtcgaaagggagataatgaagaactg

SEQ ID NO: 654618 - DNA, 86 bp, Homo sapiens
tgtggtcgcgtctcggaaaccggtagcgcttgcagcatgaacaccttccaccatgaccacctcagcaagttcccacttaaataaag

SEQ ID NO: 654619 - DNA, 51 bp, Homo sapiens
gcaaaggagaagtaacttttgtgatttagccctgcggaattgttttctcac

SEQ ID NO: 654620 - DNA, 74 bp, Homo sapiens
ccagaacaaagcattgccagaaaacgttaaggtggcagctttggctatcgcaagtggcaatggcttgttactca

SEQ ID NO: 654621 - DNA, 76 bp, Homo sapiens
ggggccgccgcagcaccatggcgaccaccgtcagcactcagcgcgggccgatttggtcgtattgggcgcctggtca

SEQ ID NO: 654622 - DNA, 82 bp, Homo sapiens
gtctgggatgtggctgactacgtcttcccagcccagcttctgaaagttctgctgaagacagtgagcaggaagatgagagagg

SEQ ID NO: 654623 - DNA, 100 bp, Homo sapiens
gaggccgctgctgtgcggagacccccgggtgaagccaccgtcatcatgtctgaccaggacttgatagacgacctgaagtcagaactgagtggcaacttcg

SEQ ID NO: 654624 - DNA, 100 bp, Homo sapiens
caaatttgaaagacaagagttctttagtttcatctctctataaagttatccaggagccacaaagtgaggggctgcgatttatccagttgaaaaatccttg

SEQ ID NO: 654625 - DNA, 51 bp, Homo sapiens
tgggcccgtggacatgcgcacctcacacagcagcagccgctcttctaaaac

SEQ ID NO: 654626 - DNA, 75 bp, Homo sapiens
tcccacttgttcgcggcctatagaaatgagccgtcagactgctacagcattacctaccggtacctcgaagtgtcc

SEQ ID NO: 654627 - DNA, 82 bp, Homo sapiens
ccatcacccaccaacaacaccacaataatccacagccaagcatggcggacaccgacctgttcatggaatgtgaggaggagga

SEQ ID NO: 654628 - DNA, 88 bp, Homo sapiens
gcagccgcggatctcaccgccgctcaggatggagaaggatgaaactgtgagtgactgctccccacacatagccaacatcgggcgcctg

SEQ ID NO: 654629 - DNA, 82 bp, Homo sapiens
cggtggcgccgcccggggcgaggcagggccagcagcaggcgggagatgatatcatcaagttgaatcgaaaggaagggaagaa

SEQ ID NO: 654630 - DNA, 100 bp, Homo sapiens
cttgttgtctttgatactacattacaagaagaaaggcgaaggttgaaaaatgcaataattatccagtcatttattcgaggctatagagacagaaaacagc

SEQ ID NO: 654631 - DNA, 100 bp, Homo sapiens
ccaaattatgggatattcgagatggaatgtgtagacagtctttcacgggacatgtctcagatatcaatgctgtcagtcactttcatttggacccgtggat

SEQ ID NO: 654632 - DNA, 96 bp, Homo sapiens
ttctttacctgcttcccaatcccactgatgaggatcagcccatggcatgcatatcattctgtttcaactccccctgtttaccctcctaaaaatgtt

SEQ ID NO: 654633 - DNA, 83 bp, Homo sapiens
ggccaagagggatccttcacccgtgtctgcagcctcccgcgacgatgcccctcaacgttagcttcaccaacaggaactatgac

SEQ ID NO: 654634 - DNA, 82 bp, Homo sapiens
cctgcagggaccatggaatccagagctgaattcctggtcgggtggcttccagtggtcttcagtctgtcgtgcaccgatgaga

SEQ ID NO: 654635 - DNA, 83 bp, Homo sapiens
gacagtcctcgtcagcactgactttcagctatggaatcgtgagacggtttaagcggaagcatcttactgccattgactgccag

SEQ ID NO: 654636 - DNA, 74 bp, Homo sapiens
gcagcagtggggacgagctttgaaagaacttgccagacttaaacagctgagatctgtatctgtggacctgaatg

SEQ ID NO: 654637 - DNA, 98 bp, Homo sapiens
cttctctgaggcggcgagagatggtcaggtctggagctcgaccgggccagtgccggtggtggtgtgcacattgagccccggtatagacagttccccca

SEQ ID NO: 654638 - DNA, 108 bp, Homo sapiens
ccggacggcagccacagcgtccgactcgactcggagggtttctgtgagagacaaattgcttgttaaagatgaaggcattttcaaagctggagcagagaggtctgaaac

SEQ ID NO: 654639 - DNA, 83 bp, Homo sapiens
cccgactcaacgtgagacgcaccgcccggactcaccatggtgagaagccctaccactgcaactgggacggctgcggctggaag

SEQ ID NO: 654640 - DNA, 100 bp, Homo sapiens
cctggagtataaacagagtggcgagagcattgacatcattacgcgagcccatggcaatgtccagggttatatcctgtgttgtgacctcatggtttaagtg

SEQ ID NO: 654641 - DNA, 90 bp, Homo sapiens
cgccgatgcccggggctgcgacggctgcaggcgccaagcccatctttgtgtgcttgcatccaactgtgatgagcctatgtatgtcaagtt

SEQ ID NO: 654642 - DNA, 95 bp, Homo sapiens
gccttgcatcgttccgagtcctgtactggactgcatcaggccgcgtctcctcaggtgccggtggtggtgtgcacattgagccccggtatagacag

SEQ ID NO: 654643 - DNA, 100 bp, Homo sapiens
ccaccaggcaccactgaccaggacctaatcaagctgtgccaaccggagtggagcaactgctgtagtccaagcagcttattgtgcccctaaaaaggagaaa

SEQ ID NO: 654644 - DNA, 75 bp, Homo sapiens
tatttttaaagctagaagttgaagcagaaattgaccaagcaggaacggcagagtcgaaacaaacaatgagggcga

SEQ ID NO: 654645 - DNA, 100 bp, Homo sapiens
ccggcaagagctcggtgctggagaacttcgtgggccgtattaaaggtggaagaaggtccatatctttttctgtgggtgcttcaagtgttgttggaagtgg

SEQ ID NO: 654646 - DNA, 100 bp, Homo sapiens
cctcagcatctcccttcatgtctgggtcatggtggtgctgtggccatcccctcctgggggaagttctggctggctgtcctgaatgtttacagctgggaag

SEQ ID NO: 654647 - DNA, 75 bp, Homo sapiens
tgagctgagtgaggccgaggccgggaggccgtgcccggaggtttttagaacttcagccataaaaatgggcagaat

SEQ ID NO: 654648 - DNA, 75 bp, Homo sapiens
tgcaatcttaatttgcctgtatgggacccaagggccttcaatcaagcaggggcagggccgtacagtgaacttgtc

SEQ ID NO: 654649 - DNA, 100 bp, Homo sapiens
aagttttcacttatctcgaaagcctatcagcatagttaaggcccaggctgcaagcacaaaggaagtttgctcagtctcagccgaatagtcccagcacaac

SEQ ID NO: 654650 - DNA, 100 bp, Homo sapiens
ctgtgatcgagaagggtgcagacatcaaggactgcttgattggaagtggccagaggattgaagccaaagcaggcgaccatggggaacgtgttggctgcca

SEQ ID NO: 654651 - DNA, 75 bp, Homo sapiens
ggacacataaagctaggtcgtcccactgttccgtgtatcacttggataagaatgccagctgatgaagaccgagag

SEQ ID NO: 654652 - DNA, 100 bp, Homo sapiens
gaggtgcttggaggtccagacacaagaagaggattggaaccagttccgatacagcacaatgggctagtgccacgaggtttacttgactgttgtgtgaaaa

SEQ ID NO: 654653 - DNA, 74 bp, Homo sapiens
ctgggggccacaaatgctccttctcctggagacgcaactcaagagtgatcagcagctggactgtgccttggacc

SEQ ID NO: 654654 - DNA, 108 bp, Homo sapiens
ctggacaaagcgtccatcatccgcctcaccacgagctacctgaagatgcgcgccgtcttccccgaagggggggccctcagcctcttggccttgaacgggctgttcatc

SEQ ID NO: 654655 - DNA, 75 bp, Homo sapiens
ggaccagtccctcggggggaacgtggtcatcagtggtcagtggggatcctgataacttaagtgactctctctttt

SEQ ID NO: 654656 - DNA, 100 bp, Homo sapiens
gcaaggaccccctccggctcaagtgtgtcaagcaagatgatgattattctccaccgtctaagagaccaaaggccaatgagctaccgcagccaccagtccc

SEQ ID NO: 654657 - DNA, 90 bp, Homo sapiens
acctccattggatttaaaagacagtcctcgtcagcactgactttcagctatggaatcgacaagctgtaacccttcacgtgccttaccttc

SEQ ID NO: 654658 - DNA, 90 bp, Homo sapiens
gaagtgatgcactcaattctgcaatagataaaatgaccaagaagaccagggacttgcgtagacaggggcggcgaagaggacccgcaggct

SEQ ID NO: 654659 - DNA, 147 bp, Homo sapiens
gtggaaaaaacctgagaacttcctgatctctctcgctgtgagacatgtctgagactcctgctcagtgtagcattaaggctctttggtgtaacgggaaactgcgctgcctgtagtaagctcatccctgcctttgagatggtgatgcgt

SEQ ID NO: 654660 - DNA, 98 bp, Homo sapiens
tgcggaatggactttaattgctatggtgttgctgtcattgtttggacagaagggtaaagctattaggattgaaagagtcatctatactggtaaagaag

SEQ ID NO: 654661 - DNA, 100 bp, Homo sapiens
cgcgggagcctcgtggctgcgtcaccgccgcccccccagacaagatggacaccgcggaggaagtgtttgggaaatgggaagtaatgacagctggcacctg

SEQ ID NO: 654662 - DNA, 75 bp, Homo sapiens
atcgcacggaaggcaggtggccagacggagatcaagacctcagcagccatgtcgaagccccatagtgaagccggg

SEQ ID NO: 654663 - DNA, 75 bp, Homo sapiens
agacatatccttacaggcagagaggttatcctaccttgcggatagagaagaacgacttgagaagtgtcactcttt

SEQ ID NO: 654664 - DNA, 50 bp, Homo sapiens
aatgtttgacgacactgatggtttggaaaaatgccagctgtgggacaagg

SEQ ID NO: 654665 - DNA, 75 bp, Homo sapiens
gccattcagaaaggaaccagtgtctcccagaagatgtggacgagtgctcactagcagaaaaaacctgtgtgagga

SEQ ID NO: 654666 - DNA, 50 bp, Homo sapiens
aaagtttttgaacacaacatgtggtgacagtatgttgactgctgtctctg

SEQ ID NO: 654667 - DNA, 96 bp, Homo sapiens
actaacagatgaagaagtagatgaaatgatcagagaagcagatattgatggagacggacaagtcaactatgaagtccggttccagttgttggcaaa

SEQ ID NO: 654668 - DNA, 80 bp, Homo sapiens
gagacagggcacaccaaactccatctgtccctgaagaggaaggagaaggaatatgagcatgaaatggagcggctggcacg

SEQ ID NO: 654669 - DNA, 128 bp, Homo sapiens
tggttatccctcggtttactggagcgttgtatcccaaaggaaagcagtatccgtatcctaaggatatatttattgccagagaattgatcaacgtgactattccaacaatacagagaagacaaccaaag

SEQ ID NO: 654670 - DNA, 50 bp, Homo sapiens
cagctgtcctcatgtctctccagcagcttgctcctcttcagaaatatctg

SEQ ID NO: 654671 - DNA, 74 bp, Homo sapiens
gcaagatgaatgaggagatctccagcgactctgagagcgagaggacatagctcgccttttgcaagaaaaggagt

SEQ ID NO: 654672 - DNA, 51 bp, Homo sapiens
cctcaacatctctcagagacgaaagtttgcagttaacatgtttcgaacatt

SEQ ID NO: 654673 - DNA, 100 bp, Homo sapiens
ctgggggtcgtccgatcctgcagatttgggatgatgaaattgttgcagacttttacgtagctgttccagaaataatgcctgaacttaatcgattaaggaa

SEQ ID NO: 654674 - DNA, 74 bp, Homo sapiens
ccaccagtgatgccatctgcggggactgcttgccaggccagtacaggctactctgtcatctttgaagatgttag

SEQ ID NO: 654675 - DNA, 100 bp, Homo sapiens
taaagaacttattcctgaattcttctatttcccagagtttttggaaaatcaaaatcgtcatcctgtacagttctacagcatgaataggcctgcctctcgc

SEQ ID NO: 654676 - DNA, 97 bp, Homo sapiens
ggggacgtcacatgtcattataccttcacccagcatttcatccctcgtcgaaaggattggattggcatctttagatggaagacctggagcggaacaa

SEQ ID NO: 654677 - DNA, 99 bp, Homo sapiens
agggagccacctccgggcgcagaggcctacatcccacagagatacccagacaacaggatcgtctcgtccaagatgtccctggtagatttgggaaagaag

SEQ ID NO: 654678 - DNA, 100 bp, Homo sapiens
gccgtcttcagcttgagccccatcactaggtaacaaacctgaatttggcaactggcatcataaacagaagcagtgcttcagctcccccaaccctccgacc

SEQ ID NO: 654679 - DNA, 82 bp, Homo sapiens
agaaaccattacaatagatcgagcctgcagacaagaaacattcgtttatgagatgcctgagacctcagatcattgttccctc

SEQ ID NO: 654680 - DNA, 74 bp, Homo sapiens
tctttgtgcacatttacatcaaggtttgtggtaaatatgccagctctagaacacatgaatcagattttacacat

SEQ ID NO: 654681 - DNA, 50 bp, Homo sapiens
cttgactacggaggggttgccagattgagaggatccagaatccagatctc

SEQ ID NO: 654682 - DNA, 99 bp, Homo sapiens
gaaggatttatgtcttgaagacaaaagacgcattgcaaacttaattaaagaactggccagcctgcctagggtagttaaaagacgagtgaatgctctcaa

SEQ ID NO: 654683 - DNA, 75 bp, Homo sapiens
tttgattccagtgtgaactgtcaatcataagttttcggctttgtgagaaaccttaccatcaaacacgatggccag

SEQ ID NO: 654684 - DNA, 87 bp, Homo sapiens
ccagatgaaatggatgagttcggtctctgcaaggcatcctcatttccaacagttgtcatctatgtaatggacacatcgagaagtacc

SEQ ID NO: 654685 - DNA, 90 bp, Homo sapiens
ccatctgaagggaggaaatagtggcaggtgacagtctgcatgtgcagttttcagatcctgactgctgtcatggcgtgccctctggagaag

SEQ ID NO: 654686 - DNA, 82 bp, Homo sapiens
aagtagcaaaggcaagaaggcaacgacgttccatctgtggaaggacctaccaaccaggacttctgcacggacctggccgtct

SEQ ID NO: 654687 - DNA, 50 bp, Homo sapiens
gaagaagagcaaagggccttctgcaggttctccagagagcgggcatccag

SEQ ID NO: 654688 - DNA, 74 bp, Homo sapiens
ccccgcgcagccgcctgcgcctgcgggagccatacgtgcttttcaacatgccttcagcactaatgactgctcca

SEQ ID NO: 654689 - DNA, 90 bp, Homo sapiens
cctgcccagctgcctgcccccggaggtgcccacgcagctgcctggacaagtatgaacgctgccgtccgtgccgtggtgcgcatgggtatc

SEQ ID NO: 654690 - DNA, 75 bp, Homo sapiens
cccggcgccgccgtggctcgacggagaccagctagggtgatggtaatgcccgaaggagcagacacggtgtccagg

SEQ ID NO: 654691 - DNA, 100 bp, Homo sapiens
ggagcctcgccgcccgtccccggcacacgcgcagccccggcctctcggcctctgccggagaaacaggagaatcctgattattctgaagaaatccttaagg

SEQ ID NO: 654692 - DNA, 74 bp, Homo sapiens
ttgcgtctacagaacaaacagagcagaaggtgatttactacctctgcatcttattgaaagatccagtggaacca

SEQ ID NO: 654693 - DNA, 90 bp, Homo sapiens
atggacggtcactcagcctatggagatggacacccgctccgggagccagtgttccgtcaccccagaagccatactcaataatgaaaagct

SEQ ID NO: 654694 - DNA, 96 bp, Homo sapiens
gcaaattccgacgtcttgaagacttccgagtagatccccccgaatccaagcccaacttcacccctctcgccatcttggcccatgttctcggcgcca

SEQ ID NO: 654695 - DNA, 50 bp, Homo sapiens
acctgacttgtttgcagaaagtgttggctacgtttgtggttttaagaaag

SEQ ID NO: 654696 - DNA, 100 bp, Homo sapiens
aaatctcccatttttgatgcgacagaatcccactgagacgcttcggagagtgttgccaaaagtcagaaatgtggcagatcagattgcatttcaagctgct

SEQ ID NO: 654697 - DNA, 100 bp, Homo sapiens
agggatttggggaagagaacagtaaaacgtaacagaaatagcagcttcctgacacggtggaagtcatctggtgagagcaaagagcaggtggccaactcag

SEQ ID NO: 654698 - DNA, 75 bp, Homo sapiens
caagaagcaggaatgaaagtggcgctttctccgccccagctccccaggtgtgtcctggtagacaactgctcccag

SEQ ID NO: 654699 - DNA, 100 bp, Homo sapiens
attcagtgtgttgacaataatcagtctgttctagtatctgcacatacctcagcgggaaaaacagtatgcgccgagtcctggatgttctgaccaaagggaa

SEQ ID NO: 654700 - DNA, 90 bp, Homo sapiens
caggacgtctacctgtccaccgtcgtgaccgagctgagtccacctcaggacgaggccagtgcctgaaacgcatccgctaccatggcagag

SEQ ID NO: 654701 - DNA, 50 bp, Homo sapiens
tgataagctgaaaaagggagtcaaagggtttaaaaggatgcttaatcggg

SEQ ID NO: 654702 - DNA, 87 bp, Homo sapiens
tctaaactacgaaatacaccttatcaggtgatggacggggtgatatttgtaaagatgattttgacaatgacaacatcccagatattg

SEQ ID NO: 654703 - DNA, 98 bp, Homo sapiens
ccctgggtcctcgctgtggggcaatccgggcttgcagacgaggttaattatagaaaatgccaagtaggaaatttgccgatggtgaagtggtaagaggt

SEQ ID NO: 654704 - DNA, 95 bp, Homo sapiens
gcaggagctaccactcagcaccatgagcaccgccacaggggcgccatgttttggaagtttgacctgcacacaagctcgcacctggacacgctgct

SEQ ID NO: 654705 - DNA, 100 bp, Homo sapiens
ccttccccctgtctctgccctcctggcgggcccggcggctctcactatccaggtgcaattgctggtatagttgatcagccgatgcagaacttccagaaaa

SEQ ID NO: 654706 - DNA, 76 bp, Homo sapiens
aatactactctgaggggcttagaaattaacaggctctaagcgaaagacatgaggcctcagcctgaaatgaggttgt

SEQ ID NO: 654707 - DNA, 100 bp, Homo sapiens
tgaaggactccttgctggcccactcctctgaccctgtggagatgcggaggctcaactaccagaccccagcattcgggttgtggtcacggtggaacaaaca

SEQ ID NO: 654708 - DNA, 96 bp, Homo sapiens
aggaccccaagcagcggatcatcccctttctgccaggcagtcgatgatgtgaagaaaggttacatcaaagcagaagaaaagtcctatcaattacag

SEQ ID NO: 654709 - DNA, 100 bp, Homo sapiens
agggaggcgggcagcgtgactgccctggtgcagtgtgtcctgcgggccaccaagtggaatgcagtagccctctgggcctgggatattgtggttgataact

SEQ ID NO: 654710 - DNA, 99 bp, Homo sapiens
ctccgggcctggaatccctacgcgtccctttgggtttagcacgatgagctcaatcggcactggggctgaccggttccctgatgtgttacctgcttctgc

SEQ ID NO: 654711 - DNA, 100 bp, Homo sapiens
caccgggatcgtgaccgagaccgtgaccgagagcgtgaccgagagcgcgaatatcgtcatcgttagaaggaatgtcgttgtctgctgggtcttcccctct

SEQ ID NO: 654712 - DNA, 100 bp, Homo sapiens
acgcccgccataaagcgctggcaggaatcgtcatgaccaaagcatttttgaaacgttggggttgttggagtggttggattttccctggaattgagtgaga

SEQ ID NO: 654713 - DNA, 113 bp, Homo sapiens
gccgcttctagaccctactgcggtctcggatattgccgggaaaaggctgaggaggtgtatcgtctgtatcagaactcgcccctctcctcccaccccgtggtggccctgtcaga

SEQ ID NO: 654714 - DNA, 75 bp, Homo sapiens
gttcatccatcgcaagaagaagataagaagcacagcgtgctgatgtctgtgattgccggggaggctgtcgcatcc

SEQ ID NO: 654715 - DNA, 100 bp, Homo sapiens
gaggttcaccgccatcattggacccaatggctctggtgtcatggagaaactccagctgggcccagagattctgcagcgggaaaatccaaggcttatttat

SEQ ID NO: 654716 - DNA, 100 bp, Homo sapiens
ccacttctttgagtttctcaccaaggagctagccctgggccaggaccgccaggtgattggtgaaaacactaaacaaccctgagcccagggccaaccccta

SEQ ID NO: 654717 - DNA, 132 bp, Homo sapiens
cagtgtaatgctagaagtcctagaagaaatttggagtgtgcgtgcgcgccgagcggtactccaaagattcaggtttactcacgtcatccagcagagaatggaaagtcaaatttcctgaattgctatgtgtct

SEQ ID NO: 654718 - DNA, 90 bp, Homo sapiens
agaagctttacctcgctgaccctatgaaggctaatggaggttggcaggatgctactaccccttcatcagtgacctcccctacagaaggcc

SEQ ID NO: 654719 - DNA, 90 bp, Homo sapiens
aggacgagggccagctgacggagatggtgcagaagatggaggaggagactcgagtccgggcaggggagctggaccaggctctaggacggc

SEQ ID NO: 654720 - DNA, 51 bp, Homo sapiens
ggaggaccggagcggcctgtccgagccaacatcccatgcaccatcgtggag

SEQ ID NO: 654721 - DNA, 99 bp, Homo sapiens
ataggcatgtgatgttagagaactacagaaacctggttttcttggcctttctgagaaaagtctacagcattctttctctgcaggttctcttaactacag

SEQ ID NO: 654722 - DNA, 100 bp, Homo sapiens
gggaatttccttgtgcctccattcccgggaggggggagcggcgttggaggccaccgtttccagaagcttttgagattgctctgccacgagaaagcaacat

SEQ ID NO: 654723 - DNA, 74 bp, Homo sapiens
tccccgccagtcagaagttgaggtgaagatgaattctcttacggtttcgatggacgaggactcaaggcagaaaa

SEQ ID NO: 654724 - DNA, 100 bp, Homo sapiens
actcgtttatcgaagacaacgagctgaacattgtgctggagttggctgacgcaggggacctctcgcagatgatcaagctggctggaggcgtgatcctggg

SEQ ID NO: 654725 - DNA, 98 bp, Homo sapiens
tctcagctgccacctgcctttgacctttttgaagcctttgcaaaatcatgcccataaaaacacagtaatggaagtgaaattaaacctcaatggcaatt

SEQ ID NO: 654726 - DNA, 90 bp, Homo sapiens
cgctgggcatgatcgaggccacagcccaggtcacagtgaaaggccctacatcattcgaggaatggcgcccccgacgacgccctgcagcac

SEQ ID NO: 654727 - DNA, 75 bp, Homo sapiens
aaggaataaacatgcaatgaacccaaaaggcaaaacctggaaatccaccggaagataaaacagtctgagcaggag

SEQ ID NO: 654728 - DNA, 75 bp, Homo sapiens
ctcaaactcccacggtcaagcgatctgctggcctcggcctctcaaggtacctgtttcccaggcaactactgatca

SEQ ID NO: 654729 - DNA, 75 bp, Homo sapiens
cgctctccagcccgcttgaacggcaacaagattgacctggctgaaaggagagaggtttcccagcagcgagctgaa

SEQ ID NO: 654730 - DNA, 100 bp, Homo sapiens
aactcagtactgatgcccagtggggcattcgtcttggtaaacttggttatgtgccaagagttgtaacctctgcacaacagaaagcaggaagaactattac

SEQ ID NO: 654731 - DNA, 90 bp, Homo sapiens
atggaaatgagaaagaagttaaggagtatgcccaagttttccgtgaacatgccaacaaattgattgaggccttcacagagcttcaagcca

SEQ ID NO: 654732 - DNA, 119 bp, Homo sapiens
gggatttaatggtgaagattttgaacggcttacgaaaatttgtgcaacacatcaagagaactttatattgctgttggaatatctggagccatccaacatttagctgggatgaaagacag

SEQ ID NO: 654733 - DNA, 96 bp, Homo sapiens
cagcaaaaagctccgcaacaagatagcaggctagaaagagacatgtccaatgtcagcctgggcccgacccccatccccgagctcacgcacatcatg

SEQ ID NO: 654734 - DNA, 50 bp, Homo sapiens
agcacgagaaatacggcgtgggttaattatagaaaatgccaagtaggaaa

SEQ ID NO: 654735 - DNA, 75 bp, Homo sapiens
cgtcttggactcctatatgagagtcgcgagtgtgcagcagtggtctcacgtgtgaaacatggctacagattggct

SEQ ID NO: 654736 - DNA, 100 bp, Homo sapiens
cgggcagtttgtcgaacgatgttggactcatagtcactgccagaaagatctgccgacaccccaggccatcgagccccaggccatcgtgcagcaggtccca

SEQ ID NO: 654737 - DNA, 99 bp, Homo sapiens
cagtggatacgttcagggtataaatgatctcgtcactcctttctttgtggtcttcatttgtgaatacatagggtctgggatccccaaggcctgggcagg

SEQ ID NO: 654738 - DNA, 74 bp, Homo sapiens
tggcaggagattatagctctgtatgagaaggacaacacctacttagcacctacaggacttgggctgcttcaggc

SEQ ID NO: 654739 - DNA, 90 bp, Homo sapiens
ctcactgcagaggtgctggagctggcagtatgctcaggcttcagaagaggctcgcctctagtgtcctccgctgtggcaagaagaaggtct

SEQ ID NO: 654740 - DNA, 88 bp, Homo sapiens
ggggttccctatgcaaatgccaaaggaattggttatccaggagaaaattcagatccagttaacacaatcatttgagaaagaagagaag

SEQ ID NO: 654741 - DNA, 103 bp, Homo sapiens
aaaattaagcagatgctccagtttgagaaacctggatctgcgatctgtttgtggtttgtggtaaatatgccagctctagaacacatgaatcagattttacaca

SEQ ID NO: 654742 - DNA, 85 bp, Homo sapiens
ctgatcgaattggggactatgtccagtgtcatgggggttacactggggacatttattccaattctaacttgaagaataaaaacga

SEQ ID NO: 654743 - DNA, 50 bp, Homo sapiens
ctaccaaggacagcttttttcctgcaagttggaagcctccttagctgcag

SEQ ID NO: 654744 - DNA, 86 bp, Homo sapiens
ataagttgtcgactcatttggataaagaccaagaagtgggattactggattatatgaggggtgtttgatgcttccctcaaaatggc

SEQ ID NO: 654745 - DNA, 82 bp, Homo sapiens
cttctcagccattttccacagatcaggctccccacaggtgcaggaagccgccgcccagccatggacggggaggagcagcagc

SEQ ID NO: 654746 - DNA, 99 bp, Homo sapiens
tggtgcgcggcctgaaggccggggtgctcagccaggccgactacctcaacctggtgcagtgcgagacgctagagggaacggcagagtcgaaacaaacaa

SEQ ID NO: 654747 - DNA, 100 bp, Homo sapiens
aggagcagcagcagctccagcaggcgctggctcctgctcaggaagattcttacctctgaagacaatgttaggaccaagatatgatagtcaagttgctgaa

SEQ ID NO: 654748 - DNA, 48 bp, Homo sapiens
tatgttctccaagaaccacctaaagaacatgaacgattggatgcccat

SEQ ID NO: 654749 - DNA, 82 bp, Homo sapiens
ctatggccgtggctaccccggatttgctccaagctatggctatcagttcccagtacctggagtagaacagaaaaattattat

SEQ ID NO: 654750 - DNA, 75 bp, Homo sapiens
accaatgactcagaagggaaaatgggatttaaacacccaaaggaaaatctacttcctcatcaagcacccctacag

SEQ ID NO: 654751 - DNA, 82 bp, Homo sapiens
ctccatcacccaccaacaacaccacaataatccacagccaagctatatgttctcctttcagccaagacctttcaccagtgca

SEQ ID NO: 654752 - DNA, 50 bp, Homo sapiens
tgtaatacatcatgaactgcaggaacattaaccaggtggtatttgttgga

SEQ ID NO: 654753 - DNA, 98 bp, Homo sapiens
atctgaaggtgacactcagtccaattaaaactgatctgataagacctcagatcagacagagtggaaagttcgacgaactctagcattctccatccacg

SEQ ID NO: 654754 - DNA, 100 bp, Homo sapiens
gagcagcaagacaatcactgcagagataccaggaagtgcattttcagctgagcacctcaaacttcaactccagaaggaatccctaaatgagctgaggaag

SEQ ID NO: 654755 - DNA, 50 bp, Homo sapiens
caagaacgggaacaaaactctgacaggtgatttggcttctgcacagttag

SEQ ID NO: 654756 - DNA, 75 bp, Homo sapiens
tccaaaataacaattcttggcagtccttccatgggtgaaagaaaagatgttgtcccggttaagagtagtttccac

SEQ ID NO: 654757 - DNA, 100 bp, Homo sapiens
cggctcacctgtgcgggatggaacaaaagctgtcaaagctcgaaaaacagcagcagaggaaagaaaagaccagagctaagggaccttctgaatcaagcaa

SEQ ID NO: 654758 - DNA, 120 bp, Homo sapiens
ggaagagaagtttgcagaactgaaatggaggtcagagcttcattacagaaggtgacagagctgaatgaacctctctccaatgaagatcgaaatctcctctctgtggcctacaagaatgtg

SEQ ID NO: 654759 - DNA, 101 bp, Homo sapiens
ctggcctagggccggggctactagaacaaggatctttggaattagacactccttcacagccagtgaacaatcaccatgctcattcacatactccagtggaa

SEQ ID NO: 654760 - DNA, 90 bp, Homo sapiens
acctgcccaaaggaggaagacactgagtccccttcccctgagcccatctacaatagcgaggggaagcggcttaacacccgagagttccgc

SEQ ID NO: 654761 - DNA, 50 bp, Homo sapiens
ctttgaccagatgaacggagtggccggagcattttgaaagcgaagcagaa

SEQ ID NO: 654762 - DNA, 75 bp, Homo sapiens
ctgcgattaaccagttcacccaggccctggaccgccaaacagaccccccaccccctggattttccttctccctcc

SEQ ID NO: 654763 - DNA, 82 bp, Homo sapiens
cgcgctgcgcagccgacgcgggaatgaagcgggcgctgggcagtgacatgaagtccgagaggagacccccctcacctgacgt

SEQ ID NO: 654764 - DNA, 96 bp, Homo sapiens
cagagagtcggagggagtccatctggagcggccaaattgcaggatacctatatggggtgagcccaccagataacccccaggtgaaggagatccgct

SEQ ID NO: 654765 - DNA, 50 bp, Homo sapiens
cgagggccctgggcaaggcccgacaggtgctatgacaagcgtctgtggcc

SEQ ID NO: 654766 - DNA, 50 bp, Homo sapiens
ggaaaccctagccccgtgtctgcccagtgacctggggaagaacgcagggg

SEQ ID NO: 654767 - DNA, 80 bp, Homo sapiens
tgcgactggcccagtatccaggtcgaggttctgcagaaggttgtgactttagtatacaggtcatcacactgaaacggtgt

SEQ ID NO: 654768 - DNA, 140 bp, Homo sapiens
tggagagatacgtgtactgtgtgacccagcgctcccacctcactcaggaataccagagggagtcgatgcttattgtaacggcacagccaacaagatgaacggagctttggatcactcagaccaaccagacccagatgcca

SEQ ID NO: 654769 - DNA, 48 bp, Homo sapiens
aactttctaatttagccaaggaaggaactcgaatcatttatgacagaa

SEQ ID NO: 654770 - DNA, 90 bp, Homo sapiens
catgtttgaggtggccagagatcacctacaccaaacaggagaggccattcccctggtactggccctgtttgcctttgttggcttcatgct

SEQ ID NO: 654771 - DNA, 98 bp, Homo sapiens
gaactgagccgagtaattaccttggaaccagatcgtccagaggtatttgagcagcgagcagaagaagaacagttagaagctatattgtcagcagcaat

SEQ ID NO: 654772 - DNA, 99 bp, Homo sapiens
ctggtgcatctgtttgccggaggcccacacatcttgctgacttcactcaagtgcaaaccattcagtattcaaacagtgaagacaaggacagaaaaggaa

SEQ ID NO: 654773 - DNA, 117 bp, Homo sapiens
gaaagaggcagagcagctttgccaccggcttatggagcatggcatcatccagcatgaagcctccccagctttctgaggatgatatctggctaaaaagcgagggagacaactatagtg

SEQ ID NO: 654774 - DNA, 105 bp, Homo sapiens
cgaagacaaagcagagttggaaagtgatccaccttacatggaaatgaagactctgtttgctggctacacggacaacctggtgcgagtgtggcaggtgaccattgg

SEQ ID NO: 654775 - DNA, 100 bp, Homo sapiens
aatcaaaaagattgaaaatatcagccatctaacagagctgcaagagttctgggggctatacaaagcggaccagcggtttgggccaggtgtcgagacctac

SEQ ID NO: 654776 - DNA, 100 bp, Homo sapiens
tgttgtgaacgaagtcagaatttcctgtgttccctttgccgctcctggagttcactgggccatcactgtgcatgtccccatgccctcagcaggagtcgtg

SEQ ID NO: 654777 - DNA, 98 bp, Homo sapiens
ggtaccccattcctcaagtcatctggtacaagaatggccggcctctgaaggaggagaagaaccgagcagtgaggagaatgaataccttccaagaccag

SEQ ID NO: 654778 - DNA, 96 bp, Homo sapiens
gtgctgatcttcgatgagctctcggattccttatgcagagtggccgacttggtcgatttggtcagacaacgccaccacttgttgattttctcaagg

SEQ ID NO: 654779 - DNA, 82 bp, Homo sapiens
ctttatatcctgacactatgaatgctacttggatgcctcttaagtgtaaacaggaacatcgataagtagtgtaaaaacttgc

SEQ ID NO: 654780 - DNA, 104 bp, Homo sapiens
gatggcggccaatgtgggatcgatgtttcaatattggaagcgctttgatttacagcagctgcagagcacgagcggctccgcaaataccactgaagaggacacac

SEQ ID NO: 654781 - DNA, 50 bp, Homo sapiens
tgggaggccgaggcgggcagatcacaagggacggggtttcaccatgttgg

SEQ ID NO: 654782 - DNA, 75 bp, Homo sapiens
gccgatgcaccgagtccagcccaggaaaatggagaggttcaaaatcaaaggaagcccagaagggaggtcattttt

SEQ ID NO: 654783 - DNA, 100 bp, Homo sapiens
aagataatatggaaacttggatgaataattttcatactctcttaacattggataataagcttttacaaactgatgaagccctcaatctagaagagtagag

SEQ ID NO: 654784 - DNA, 100 bp, Homo sapiens
gaggacaccagcatgaaccttgttcagcctggcagtgagctggacaacttggaggagattttggatgatttgcagaatagtcaattaccacagcttttcc

SEQ ID NO: 654785 - DNA, 100 bp, Homo sapiens
gaggcagccaagtgtaacctgctggcagaaaagggaagcggatttgtcttggtgaaggcatcgcccgtgcggaattgttcctcttcttcaccaccatcct

SEQ ID NO: 654786 - DNA, 83 bp, Homo sapiens
caagatcgagcccagcgtcaacttcctcaagtcgcccaaagatcgcaccccctccctccctggcggagcccctgaaggagctg

SEQ ID NO: 654787 - DNA, 51 bp, Homo sapiens
gtgcatgcgtcgtcggcctctgggcagcagagaatggggagaaggaacccc

SEQ ID NO: 654788 - DNA, 88 bp, Homo sapiens
gctctcttggcagccttcctgatttctgcagctctgtgtgaagacacttggagaccagaaagcttctttgacaaagtgaagaagaaca

SEQ ID NO: 654789 - DNA, 100 bp, Homo sapiens
tttcggcggggtctttaggatttgcagctccaggaagcgagatgtcgaagccgccacccaaaccagtcaaaccagagcatgaataatctttcatttagtg

SEQ ID NO: 654790 - DNA, 74 bp, Homo sapiens
aacttggtgtcacctttaattacaatctagcagacggaactgaactcaggagtttgacaggaggagtcaatgga

SEQ ID NO: 654791 - DNA, 75 bp, Homo sapiens
agcccagaaccactgcctacaaaccaccctctcctgaccctgaagaactgtgctctggtcagcgatgctatccac

SEQ ID NO: 654792 - DNA, 103 bp, Homo sapiens
gaagacttgctagttaggattttattactggcagcatgtatatcttttagtgaagacatttccacctggacacctgaccatgtgcctgccctgagcagcgagg

SEQ ID NO: 654793 - DNA, 100 bp, Homo sapiens
cctggtgccaggtgtccatccccgtgctgagttccaaaagctgagacaagatcttgaaatggtactgtccactaaggagtcaaagaatgaaaagttaaag

SEQ ID NO: 654794 - DNA, 74 bp, Homo sapiens
agaaagcagttaacagtgccaccggtgttccaactgtttaaatgatgactatgactccaagaaacgcaaacagc

SEQ ID NO: 654795 - DNA, 83 bp, Homo sapiens
cgtgcgaacagctccagctgggaattacatgaacgacagccttcgcaccgacgtcttcgtgcggttccagccagagagcatcg

SEQ ID NO: 654796 - DNA, 82 bp, Homo sapiens
cttttatattcatctcaaaaacaaaattctgaactcaggacttggcaattttctgactcagaatgtgccaaaaaggctttgg

SEQ ID NO: 654797 - DNA, 100 bp, Homo sapiens
gaagatgcttacaagaaacagttctctcaatacataaagaacagcgtaactccagacatggacactcatgaggaccatgatacttccactgagaatacag

SEQ ID NO: 654798 - DNA, 73 bp, Homo sapiens
cagtgttctgctttcatggagttcacagaagagtcgaggagtggaggcaatgttcactgcaatgtgcgaatgc

SEQ ID NO: 654799 - DNA, 98 bp, Homo sapiens
ctggttcgcatcctccctctgttgctggttctgctgcttctgggccctacgcgcggcttgcgcggtatttgaagtataccatacaactgttttgaaaa

SEQ ID NO: 654800 - DNA, 100 bp, Homo sapiens
agtggcccctcctctgaagatcgacctactggattagttgtactgttacaagcatcctcagatacctcggatctgcattttcaagtgagcaaagaccgct

SEQ ID NO: 654801 - DNA, 83 bp, Homo sapiens
tgttcctattcggccatctttgctcctccctgcaactaactccattcttaattgaattcagcggggtgccaagtcgttttctg

SEQ ID NO: 654802 - DNA, 76 bp, Homo sapiens
ccggaatctgtctcctgatcatcattcaggcatgcatgtagggaataccggattcataaagagctggatcatccca

SEQ ID NO: 654803 - DNA, 75 bp, Homo sapiens
cagagcctcagtttgtgcaggacaccgacatggaacagggactcactggggagtccggcagcgtcttctcttgag

SEQ ID NO: 654804 - DNA, 75 bp, Homo sapiens
tatattaaacatcccctacagaacagcttcttggacacttaatgattgttggcaagaaatgtgctgctgatctgg

SEQ ID NO: 654805 - DNA, 75 bp, Homo sapiens
aatgaagttaagataagaagtaatctggaatcagaaagcactacgctaagaaataatgcaaaaggtgtcccaagg

SEQ ID NO: 654806 - DNA, 96 bp, Homo sapiens
ggcgcggcgcgacaccgggctccggaaccactgcacgacggggctggacgtaatctttggtaaatctagctgttcagaattttcaaaggaagccta

SEQ ID NO: 654807 - DNA, 74 bp, Homo sapiens
agatctgcagccaggagagcagcagtttgcagctgacggtctatcagccacagtctctgcaagtttccaagagc

SEQ ID NO: 654808 - DNA, 100 bp, Homo sapiens
ctgagggaaaggacaagatgaagtggaaggcgcttttcaccgcggccatcctgcaggcacagttgccgattacaggcatgaatgctttacagttgcagaa

SEQ ID NO: 654809 - DNA, 113 bp, Homo sapiens
gaacaccaatggaccaaaatgaacacagtcactgggccgcttacaaacacgcagatggcaagaagattgatggcaggagggtccttgtggacgtggagaggggccgaaccgtg

SEQ ID NO: 654810 - DNA, 76 bp, Homo sapiens
cagaaattatgggttgtacagggtgccaaactgcggtaaattttttatcagtgaagtggaagcatgtgttttgttt

SEQ ID NO: 654811 - DNA, 75 bp, Homo sapiens
gcgggcgagcggagcgcaacactcgcttggttggggagatcggcgcttggccgagccactgacaagactttaagc

SEQ ID NO: 654812 - DNA, 131 bp, Homo sapiens
aggaagtgtgtgcttgccgaagacaatggtctcaatttggcctttaccatcgcccatgagctgggccacaagtgtgatgaatgcagactctgctaccattttggctgtttggatcctcctttgaaaaagtc

SEQ ID NO: 654813 - DNA, 83 bp, Homo sapiens
agcgtcaaccttgaaggcatcgtgtggcaggaaacagaagatgtttcctgctctacgaaacgcactcttttgccttgaagcgg

SEQ ID NO: 654814 - DNA, 100 bp, Homo sapiens
ccggaacgggagccaacatggcagcggggttcgggcgatgctgcaggaaatgcaatggcacatcgtgattctgagatgaaagaagaatgtctaagggaag

SEQ ID NO: 654815 - DNA, 50 bp, Homo sapiens
cggaaacaacgttctcccgcaaaagacaacaccatcgacttcctggagta

SEQ ID NO: 654816 - DNA, 90 bp, Homo sapiens
tacaactgttcatcctcacctatgcaaagaaagggaagctattgctgggattttgaggagaacatccagtcatggataaaaatgagctgg

SEQ ID NO: 654817 - DNA, 80 bp, Homo sapiens
agtacctgctatgaagtggcgctcctgagctttgacagtgagaaggctggggaccgggaggtgcagaggacaatgctgga

SEQ ID NO: 654818 - DNA, 75 bp, Homo sapiens
aggcattttgctgtctcctcctaatacggaatatcagaagctctttcctgacattcccatagggtattctgggca

SEQ ID NO: 654819 - DNA, 100 bp, Homo sapiens
ctccagtgacccagacctggctgtggtcaaacccacccggcccaactcactaattcaggaagaagaatgggataaatacatcatacctgccaaatcagag

SEQ ID NO: 654820 - DNA, 100 bp, Homo sapiens
accattttctactgtccctgcgcgagtattgaagctgcttctggtggtaaagctgaagttatcacttgtgatgtactcttggtttgcattggccgacgac

SEQ ID NO: 654821 - DNA, 100 bp, Homo sapiens
agactcagctctgggatcctgggggcaattgggtttggccggaagtcgcctttgtctaacagcagcccactcacccagtgtacaacattggaccagacaa

SEQ ID NO: 654822 - DNA, 100 bp, Homo sapiens
gcctggatcagccacaaatgtacccccagtacacttactactatcctcattatctccaaaccaaggccgttgatgctcactgccatcagctgcatcctcc

SEQ ID NO: 654823 - DNA, 82 bp, Homo sapiens
ggtgctgtctctagcatcacctctcagcacgattttcccgagagttcacaggtgtgggcaagagcagtttactgttgcgttt

SEQ ID NO: 654824 - DNA, 100 bp, Homo sapiens
gcgtccgcggccccgcgagtacaaagcgggcgacctggtcttcgccaagatgaagggctacccgcactggccggcccggaccccaagactgcttctgaga

SEQ ID NO: 654825 - DNA, 75 bp, Homo sapiens
gcctcaggccagtcgcctccaggccaagagggatccttcacccgtgtctgatttggagcaagaggtggtggtggc

SEQ ID NO: 654826 - DNA, 83 bp, Homo sapiens
gagctgcttctggaagccagtcaggaatccgggcaggagacactgtgacactttaggtgagaagccctaccactgcaactggg

SEQ ID NO: 654827 - DNA, 82 bp, Homo sapiens
cacaggcctcaagtggaacctcagatattgggagtgtgtggcatgcatcctcatcatcaggaaactctaaaaaagaaccgag

SEQ ID NO: 654828 - DNA, 75 bp, Homo sapiens
caaaggcacgggcagccggaaggacaccaagatgcggatccgggcctttccggtatactgcaacatccagatggc

SEQ ID NO: 654829 - DNA, 100 bp, Homo sapiens
tttatgaagaaggttccaacaaaagactttttaatgttgatcggcatgttggaatggaggagatcgggcagttggtgaagcagatgctggatgactttgg

SEQ ID NO: 654830 - DNA, 90 bp, Homo sapiens
cagttgttaaattctcaacagctcacaccagtttcatatacactggagaagtcgtacatcgaatgctaacagccacacagtacatagcac

SEQ ID NO: 654831 - DNA, 100 bp, Homo sapiens
tgatgaatcagatgtcaaagacttagcttttaaattaaaaaggaagctattcaccattgagtcatagcacacatcggacatttggaaaacagcagtggca

SEQ ID NO: 654832 - DNA, 90 bp, Homo sapiens
gagctgcaacaccaccacagaagatgaggacctcaaaggaaagacgcctcttcccctggaatgggaaagccctacagcttgggatccttt

SEQ ID NO: 654833 - DNA, 83 bp, Homo sapiens
caaagctgtggaagactccaagccctactgggaggcacggagggtggcgaggcaggccttcctgggctatgtgctgtatggag

SEQ ID NO: 654834 - DNA, 96 bp, Homo sapiens
gaagaagtcattgtcacagagggagcgagcccagggcgtggtgctgaaagtgctcacaaacttcaagagcagtgagattgagcaggctgtgcagtc

SEQ ID NO: 654835 - DNA, 100 bp, Homo sapiens
tctgacccctgacgagcgcagcaaagagggctctatctggaaccaccagtgcaagcagctaatgactcagtctgtagactccaacagagggaacaggaac

SEQ ID NO: 654836 - DNA, 75 bp, Homo sapiens
ccataccttaccactaaatgtagtcttgcattgaaaggctctagttacagtggacttcttgaacgacatcatatt

SEQ ID NO: 654837 - DNA, 83 bp, Homo sapiens
ggatgtgtctggtgtgggtttcccaagcaaggttccttggaagaagatgtctgcagaggttcagcttgttggtttagatgagg

SEQ ID NO: 654838 - DNA, 80 bp, Homo sapiens
aactgcctttcttctgtgggctgtgattttcagaggggaatgctaagagcctaatcacacggatgctacagagagatccc

SEQ ID NO: 654839 - DNA, 101 bp, Homo sapiens
ctcggcagttcttcaatgttcagtggacagtttcataaagcataacatgagtagaagaatctactgccaataactgtttattatctgcaatcaagtgggct

SEQ ID NO: 654840 - DNA, 75 bp, Homo sapiens
ctgcagcatattgtactggcctgctgctggcccgcagggccctggccaacgtcaacattgggagcctcatctgca

SEQ ID NO: 654841 - DNA, 100 bp, Homo sapiens
tcactgtctctttttaaatttatgaactcgaaatgaagcggaaagcagatatgcgcgtcagcatactttggcggatggagtctcgctctgtcacccaggc

SEQ ID NO: 654842 - DNA, 100 bp, Homo sapiens
gccgggatggaggacgttaactctaacgtgaacgcggaccaggaggaaccaggacactgtgcagattttcatccaagtggcacagtggtggccataggaa

SEQ ID NO: 654843 - DNA, 88 bp, Homo sapiens
tggaaatacagtatgagctaacggacagactagccttctatctctgtggcaggaaaccagaaattcccttgtttcatgtcttaaatgc

SEQ ID NO: 654844 - DNA, 100 bp, Homo sapiens
gaaattcttaaggatgctttcaaatcaaatgactcacagcagccccagagttccaaaagttggtttgcatggacagattcagagcagtcccacagagccc

SEQ ID NO: 654845 - DNA, 82 bp, Homo sapiens
ggaggcagaggtggaggcgctttgaaaggagtgtggccatctggggccgtgtggtatttgccactcaggagacatgtcccta

SEQ ID NO: 654846 - DNA, 101 bp, Homo sapiens
agctgcgcagggcctgccaggtggcgctcgtcctcctgcatatgcccaagaggattgggagtggaatggacaccagcagaagcaccacagttattcctgta

SEQ ID NO: 654847 - DNA, 100 bp, Homo sapiens
caaggaacactttttgaactcattctggatcaattgaaggagctcacactagaaaatagtgaattgaagaagagcctagattgcatgcacaaagaccagg

SEQ ID NO: 654848 - DNA, 100 bp, Homo sapiens
cctcctggggaacccgttcagcacaccagtggggcagtgcctcgttatttctcaaactctgaggctgcggagttcacacattgaaatctgtcatcttttt

SEQ ID NO: 654849 - DNA, 75 bp, Homo sapiens
gccttattttttctcatggatgttcttcttcgagtatttgtagaaggagaagttgatgacgcctgagatgttttc

SEQ ID NO: 654850 - DNA, 146 bp, Homo sapiens
aaggcaagaccgaattcagaaggatatcgacgtcgtgatccagaagtccagagctgaggactgcctgtttgcagtgccggtggtggtgtgcacattgagccccggtatagacagttcccccagctgaccagatcccaggtgttcca

SEQ ID NO: 654851 - DNA, 82 bp, Homo sapiens
ggacagcacctcatcccctggatgggggaccacaagatcctcatcgacaggtctgactcccagcaccgcttctggaagccca

SEQ ID NO: 654852 - DNA, 75 bp, Homo sapiens
caacagcatacagcatttctcccaccagcataccctcggggaagtctgggtacagaagacatctgaaatgaatac

SEQ ID NO: 654853 - DNA, 82 bp, Homo sapiens
acccgggcacgcagggcgcgcctggcgagcgccccgggagggggatatgagactttctactcggaatatcctgagtgttgcg

SEQ ID NO: 654854 - DNA, 100 bp, Homo sapiens
ctttatcatctgcggcagtatacagaagccatatcagttggtgaaaaactttatcagttcatagagccttttggcacttcaggtggcaagacagctcctt

SEQ ID NO: 654855 - DNA, 100 bp, Homo sapiens
gacttccagaagggcctgaaggatggaactatcttatgcacgtcaaaatgcagatcttcgtgaaaacccttaccggcaagaccatcacccttgaggtgga

SEQ ID NO: 654856 - DNA, 95 bp, Homo sapiens
gcataggacagtccaaaatgaggaagaacgatctaccaaggattcctcctgctttacagtagttctcaacaatctccgtgtgtttctcatatttg

SEQ ID NO: 654857 - DNA, 56 bp, Homo sapiens
ttcaccagcaccggctccagtgggctctaaatgcttccatcatttcttcagaaagt

SEQ ID NO: 654858 - DNA, 100 bp, Homo sapiens
cactgcttgcctggacttctgtgctcatccccacagggacattcacaacatgaataatggaagcactgtgcagcacagtcagcagcctccattcaagagt

SEQ ID NO: 654859 - DNA, 75 bp, Homo sapiens
caggagctgaccgatgttaatggggtccggattgcagcacctgggaacagagttcagaggcagcagaaactggag

SEQ ID NO: 654860 - DNA, 74 bp, Homo sapiens
gggctacgctcctccatcacgtgtacatggactggacctgcctggagcccagcccagagcatctcctcagtgct

SEQ ID NO: 654861 - DNA, 101 bp, Homo sapiens
aagaagcaggtcccggatcgccgtataccgccgggttttctcccaacgtcaggcccgatggctcggcttccccaggaggattctctatgggaggatgcatg

SEQ ID NO: 654862 - DNA, 82 bp, Homo sapiens
ctgggccgggagcagagcgcccgtgagggctacgtgctgcaggtcaaaatgcagatcttcgtgaaaacccttaccggcaaga

SEQ ID NO: 654863 - DNA, 73 bp, Homo sapiens
ggttttcccttgggccagctccctacagaggcacatgctcacacacactggccgaagaacagttgagaattgt

SEQ ID NO: 654864 - DNA, 100 bp, Homo sapiens
gccaaagagaggaaagttacagccgaatgggctacatggatccatctcatgaagcaaacagcaatgcagtgagatttagagtgtgcctgctcataaacaa

SEQ ID NO: 654865 - DNA, 100 bp, Homo sapiens
tagtcaccacttcacttcacctctttctggaaaccagctgaactcgtttgagcagctgtgcatcaattacaccaatgagaagctgcagcagctcttcaac

SEQ ID NO: 654866 - DNA, 98 bp, Homo sapiens
tctacagctttcactatggggtggagacgtggtactcagcaagctcgagttaaagttggatgtgctggaacagaccatcagaagctggagcgtgaagc

SEQ ID NO: 654867 - DNA, 100 bp, Homo sapiens
ggaactgggatttcaacctgaaagtggaggctgcgaaaatagacacgtcaagttcttgaggagctgactgagttgcctgtgatggtggaactagcaagtg

SEQ ID NO: 654868 - DNA, 75 bp, Homo sapiens
ttacctgtatacaatggagaacactagtggcaaagatgacacaggctgtcctagcagccagtcagtgtctcctgt

SEQ ID NO: 654869 - DNA, 82 bp, Homo sapiens
aggagttcattgaactcatccggcagaataagagactggacgctgtgaggtgcagaggccaagaccgttttgcccaagaagg

SEQ ID NO: 654870 - DNA, 83 bp, Homo sapiens
cggtaacaaacgagggttcccgggattggaccgacgcagccatggctaaatttattgtgaagaaatcagaagatgaagaagac

SEQ ID NO: 654871 - DNA, 75 bp, Homo sapiens
aggggagctagagagaatcctagcagatcttgaggaagaaaacagacctgaaggaaaagattatgcccttcattg

SEQ ID NO: 654872 - DNA, 82 bp, Homo sapiens
tggaaaatgcgctcgggctggaccagcaggaaccagtgaccttcaaggacgtggccgtggacttcacccaagaagagtgggg

SEQ ID NO: 654873 - DNA, 88 bp, Homo sapiens
tccagcgctgggcaccgcggccggagctgtgggctggtgcagcggaactgctgcctgacgctctgcaacttcagcatccccgaggagc

SEQ ID NO: 654874 - DNA, 75 bp, Homo sapiens
aaccccgcgcccgcaggacgccccagccaggtgcccaagcaaggaaagaaataatgaagagacacatgtgttagc

SEQ ID NO: 654875 - DNA, 83 bp, Homo sapiens
tacatttctgcaattgagaaacaggcacacaagtgtgaggagttgctaaatgctcaggactcagtgacctttgaagatgtggc

SEQ ID NO: 654876 - DNA, 134 bp, Homo sapiens
tggcagcagaagggcgactgagtactcaacatattgactgtatttgggctgcagcacagagctccttaataagcatttatagtcagtttttggcagcaatagaatcactaaaggcattctgggatgttatggat

SEQ ID NO: 654877 - DNA, 100 bp, Homo sapiens
tgaagaagcagttctacaaggcgagccaggcagcaaagcacctgctctgagtggccatggggaagcgatacttctgtgactactgcgaccgctccttcca

SEQ ID NO: 654878 - DNA, 98 bp, Homo sapiens
tcaatatcagcaaagtatggacagtaaattatcaggaagatatcggcgacattgtggacttggcttcagtgagggcatgagccagaaggagagctcta

SEQ ID NO: 654879 - DNA, 100 bp, Homo sapiens
tcatttgaagacgttccttgaggaggtttgaaaaaggttacattttgccatctgcctttccagagtaagtggctctatgtgggcactgaacgaggtaata

SEQ ID NO: 654880 - DNA, 75 bp, Homo sapiens
caggaactaccattcttggcaacagcaagaaaagcaagccattttcaagtggtaagcatccgtggcattcaagac

SEQ ID NO: 654881 - DNA, 82 bp, Homo sapiens
caaggagctaaagcagcgtgcgttcagccctgggtgatgtcttggcattgcccattttcaagcaggaagattccagccttcc

SEQ ID NO: 654882 - DNA, 78 bp, Homo sapiens
ataaaattaaaacaggcttggctggtcttgaaatcggcatcttaggtggggcaagtccgtgggcatcatgttgaccga

SEQ ID NO: 654883 - DNA, 100 bp, Homo sapiens
gtacatccatgccatcttctccagccaccccagccagtggaaccaaggggacaaccccaacaagcccatgaaccctctgatcactggggtcttcggagct

SEQ ID NO: 654884 - DNA, 90 bp, Homo sapiens
ctgatgcagtttgcggaagtaaccagagctgtgaggcgaacctcttcccggccgctctggtgcacttgggagccgaggagccggcaggtg

SEQ ID NO: 654885 - DNA, 98 bp, Homo sapiens
acttcctcctctgtgctcccgtggcctgggattcacaccaggaaagaacgccacgaagaaggaatgtgtacctcctttattcctgaagcccgggcagt

SEQ ID NO: 654886 - DNA, 100 bp, Homo sapiens
aggctccttggtgagaagaccaccacagcggcagggagagacaaaggcagcgctgccctcgggggagtattggccctggcggaacgcagcaaccacgagg

SEQ ID NO: 654887 - DNA, 100 bp, Homo sapiens
tattgtgctcacacattcagaacctgttacccaaggaattccctaaagttgtcgagatgtccacagaaggaggatttggtggtactagcagcagtgatgc

SEQ ID NO: 654888 - DNA, 82 bp, Homo sapiens
agaacttgcagttgaaggagtataacacagtgttcctctgaacaacagggagaatatctctgatcccacctcaccattgaga

SEQ ID NO: 654889 - DNA, 101 bp, Homo sapiens
cttcctcaacttcacgctggcgcgagccccgtcctccttcgccgccgcgcacaaccgcacgtgcaggcgtccgacctccgatcatgaacgggcccctgcac

SEQ ID NO: 654890 - DNA, 100 bp, Homo sapiens
gtgcatcgtgtgattctgtgtcccttttgtgcaggaacagtggaggccatgtgtcttttggcagtcagtccagatgggaattggctagctgcatcaggta

SEQ ID NO: 654891 - DNA, 74 bp, Homo sapiens
aagattagaacattggatattgattgccagtttttaaggctaactcaggtgagatggagccgctatagtcctga

SEQ ID NO: 654892 - DNA, 100 bp, Homo sapiens
aatacatcctctaaaagaagttcattatcacacaagcaaattcaacacccaacagcttccttaatagcaaaggtagcaacagcccaggatgatataactg

SEQ ID NO: 654893 - DNA, 100 bp, Homo sapiens
ctctcctctggggactgcagagaagcaggacctcgggccatgggtaaagtgctgggcaacctgcagttgaacttgctgagcaagtccaaggtgtacgagg

SEQ ID NO: 654894 - DNA, 100 bp, Homo sapiens
tttggtttcagcatgtccttctctgaatgatgaatacttttactactgtgacaacattaacgttgttgaatgttgggtcacgaagatctcaacctggcca

SEQ ID NO: 654895 - DNA, 99 bp, Homo sapiens
gtgccggcctagcgtcctggaattacttcaatcaagtccccgcggaagccgcggtgtcggcgccatggcggagctgacggctcttgagagtctcatcga

SEQ ID NO: 654896 - DNA, 101 bp, Homo sapiens
gcaatagggaaagtgaggcagctgcaaggagggcggcgggactgcactcgagtgtccagacctgctcgatgagagacaagagagacacctccaacttcgac

SEQ ID NO: 654897 - DNA, 82 bp, Homo sapiens
aacaagaggacccaggagaaattcgccctcaaattggaatcgaagcctcttaaaatggcagatgacttggacttcgagacag

SEQ ID NO: 654898 - DNA, 100 bp, Homo sapiens
gagacatcggcctctgcaggcttgccgaagaagggaggctgagtcatcactagagagtgggaagggcagcagcagcagagaatccaaaccctaaagctga

SEQ ID NO: 654899 - DNA, 75 bp, Homo sapiens
gcgccaggacaatggggacccgggacgacgagtacgactacctattcaaagccttatgccagcctggaccatctt

SEQ ID NO: 654900 - DNA, 90 bp, Homo sapiens
aatagcaactaatggatttgtaagaggagatatgaagcaacagcatgtcatagaaaccttgattggcaaaaagcaacagatatctcttgc

SEQ ID NO: 654901 - DNA, 112 bp, Homo sapiens
atggctgtcacctattcgcggctcttcccgcccgccttccgccgtctcttcgagttcttcgtgctgctcaaggattatatctgtccaagatgcgagtctggttttatcgagg

SEQ ID NO: 654902 - DNA, 100 bp, Homo sapiens
cagggccactgtttagtgagaacaccctgcagttctacaatgagagatgaggagactgtccttcctgtttcgcagatgaggaaactgaggcttagagaag

SEQ ID NO: 654903 - DNA, 100 bp, Homo sapiens
gagatcatgactttggtagatgagactaacatgtatgaaggtgtaggaagaatgtgacactgatcccaactcatgactcagaagtgatgagggaatggta

SEQ ID NO: 654904 - DNA, 75 bp, Homo sapiens
gagccggagcgcggagcccggctcccgcaccatggaggaggacgacagctacggatgatcggctgaatgtaacag

SEQ ID NO: 654905 - DNA, 100 bp, Homo sapiens
cggctgcgctcctggcagaaggctgtcttctactgcgggggccaacaaatatgatgaggcagccagctacatccagagtaagtttgaggacctgaataag

SEQ ID NO: 654906 - DNA, 100 bp, Homo sapiens
cccctcagagtaccgcttggagatcctagagtggatgtgtacccgccgaggcctgcctggagccccagatcaccccttcctactacaccacttctgacgc

SEQ ID NO: 654907 - DNA, 75 bp, Homo sapiens
cacccaggcctccgcttctccggcctccctgctcttaccgggaggaagaggagatcccagaactggagattgacg

SEQ ID NO: 654908 - DNA, 87 bp, Homo sapiens
gggacaattgaaaatgaatgaatgtacacacctcattgtgcaagaaccaaaagcttgatcatgatttaaaacatgctcacgaactcc

SEQ ID NO: 654909 - DNA, 76 bp, Homo sapiens
ctaacgaggacgtcagtgggtttaaccattgcgagttaatgggatcgatttgcttagtggtataatacctgaactc

SEQ ID NO: 654910 - DNA, 90 bp, Homo sapiens
ttcacctctgcaaatatgagagattctgcagaaggctggctacagcaaacatcattcaagatgtccagcaaagggagcagcacagatggc

SEQ ID NO: 654911 - DNA, 100 bp, Homo sapiens
gctaaagtgtctcaagcactgtttgcaaaggttgcagcaaccaaaagccaggttaatgttgaagaaggaaaatgcggaagtcgtcatttgacaagtttta

SEQ ID NO: 654912 - DNA, 74 bp, Homo sapiens
gccatgcttcctgtacagcctgcaaaactgaactccatctcaggaaacttggccaggtatttcttcaaatgagg

SEQ ID NO: 654913 - DNA, 100 bp, Homo sapiens
cccattttagaggcatctgttctatcttcccatcataaaaaaggaaaagactactttgtgtgtatccattctggagagattgctccaagctatggaaccg

SEQ ID NO: 654914 - DNA, 90 bp, Homo sapiens
ctttgatatggctggacatcccttcttctatgagcactgaacctaccagatgtatttgggttggtcgtcctcccattggaactgaaacta

SEQ ID NO: 654915 - DNA, 100 bp, Homo sapiens
ggcggcgaacgcggagagcacgccatgaaggcctcgggcacggctaaccttgccgcgggccgagccctgcctcgccatggaccaggactatgagcggcgc

SEQ ID NO: 654916 - DNA, 49 bp, Homo sapiens
gccatcccagagcccgtggtgaggttagctgctgaatcaaagcttcaaa

SEQ ID NO: 654917 - DNA, 100 bp, Homo sapiens
ctcctggacgcgtcggcggaggtggcttcgtcccgcggagtccaggcttcagaatataacaccagcaatcctgacttgttgctagtcatatttcaagtga

SEQ ID NO: 654918 - DNA, 111 bp, Homo sapiens
ctgtccccgctggcgggcttccctgtcgccgttcgctgcgctgccgggcaggtgacaaacattaccaccccagctgtgcacgatgcagcagatgcaaccagatgttcacag

SEQ ID NO: 654919 - DNA, 100 bp, Homo sapiens
acagcaatggaggaaacagctatatgggaacaacatacagtgacgcttcacagggcagctgagtatgtcccagagaaggtgaagaaagcggaaaagaaat

SEQ ID NO: 654920 - DNA, 100 bp, Homo sapiens
ctcggagacgagtggtgggagaaccagccgactggagcaggcagcagcccagctgccactgcagagccccgccatggaagacacgccgttggtgatatcg

SEQ ID NO: 654921 - DNA, 75 bp, Homo sapiens
cctctatagccctaccatcaaaacccgcctgacaggagcaatggccaccagcaggtgaagggcatcgctgcccca

SEQ ID NO: 654922 - DNA, 90 bp, Homo sapiens
aggaatcttgcagaagaccgcagtgggataaatctcaaagatctcgtacaagatccttctttggaagaaacccttttttcttggagccag

SEQ ID NO: 654923 - DNA, 100 bp, Homo sapiens
gccgctgggcctgcaggtctctgtcgagcagcggacgccggtctctgttccgcaggatgataatttgcggtaaaagcctttcagtgaatgaaatgactct

SEQ ID NO: 654924 - DNA, 50 bp, Homo sapiens
aacaattggcttggacttcacaagagcagcacttgaggcatgtcacaagg

SEQ ID NO: 654925 - DNA, 82 bp, Homo sapiens
tgggaaggtggagccaccagcctctccttggagcacgtttgccgtggacgggaaagattgcaaggtgaataaagaagtggag

SEQ ID NO: 654926 - DNA, 75 bp, Homo sapiens
cccgaaggccctatcaggacatggagtatgaaagacgctgagtcagtgctgattctctcaaatagagcttgaagg

SEQ ID NO: 654927 - DNA, 75 bp, Homo sapiens
atcgggggaagctcattgaagcagaggacaacatgaactgccagggttccattcagagccgatacatcagcatga

SEQ ID NO: 654928 - DNA, 51 bp, Homo sapiens
gatttctgcagctctgtgtgaagttgatcacagccgagttaaattgacatt

SEQ ID NO: 654929 - DNA, 75 bp, Homo sapiens
gtgggagggagccatgaagcattacgagggtttgaaattcctgatatagatgctgaaaagttaatgtgtccacaa

SEQ ID NO: 654930 - DNA, 83 bp, Homo sapiens
cgctggacaagctggacgttaaagggaagcgggtcgttatgagcttggtgatccagctatttttcctgccgtaattgtggaac

SEQ ID NO: 654931 - DNA, 101 bp, Homo sapiens
gcctcaccatacaggaacagggcagacgttagcgtgagtgatcactctcaatcccgggtttctggtcctcataccgtgtggttgagtgaaatcaaaacttc

SEQ ID NO: 654932 - DNA, 100 bp, Homo sapiens
agcttacagacctgggcaaatgtctgatgaagcatgagttcaatctcatccctcccagcagctccccttccaccccccggggaactgaagattgtcctgg

SEQ ID NO: 654933 - DNA, 100 bp, Homo sapiens
gggaaggctcaagatggcgtgcttgttggagaccccaatccgcatgagcgtcctttcgatgtacagatcagctctcaaaatgtcttctgtgtcttctgag

SEQ ID NO: 654934 - DNA, 49 bp, Homo sapiens
gtcagctcccgcacagtaacgtgatgcaacacccgtctgaaggtggcca

SEQ ID NO: 654935 - DNA, 100 bp, Homo sapiens
cggacagagacgtgaagcactgaattatggactccaattgccttgacagtgtttttagtggctgttgcaacattatgtaaagaacaaggaataacagttg

SEQ ID NO: 654936 - DNA, 117 bp, Homo sapiens
gttagatcctgcaggacagctttgtgatgtaaaagtggctcaccatggggagaatcctgtgatgttctcaaatagtgatgaagctgtaatcaataaaaaacttcccaaagaactcct

SEQ ID NO: 654937 - DNA, 88 bp, Homo sapiens
ggcgggggcggcgtgcggcctagcgtctcagggccaattcctgtccccccagcagcatggcatcgtgtgctgaaccctctgagccctc

SEQ ID NO: 654938 - DNA, 82 bp, Homo sapiens
gcggcttcctggcctgggcgctccggtggcggcggagtcgaccgtgtgtgagaagatcatggagttgctgggacagaacgag

SEQ ID NO: 654939 - DNA, 75 bp, Homo sapiens
aatgcacaacatcctgaagaaataccaccagagacttagtgataaaactgggcctgtagctcaagagaaaagttg

SEQ ID NO: 654940 - DNA, 100 bp, Homo sapiens
ggggagccctgggtcactttcagtgagtcatcgctgacagctgaggaagtctgcatccacattgcacataaagttggtctgggtagatgctggaacgcag

SEQ ID NO: 654941 - DNA, 75 bp, Homo sapiens
ttcagcagaaataatcaagagttgacatcataccaggtggtaagttttcttcatacagttcttttgtgtgacaaa

SEQ ID NO: 654942 - DNA, 74 bp, Homo sapiens
gcctggccgacctgcaccccgatgttttcgccaccgcgcccaggtcaagtctggcaccatctttgacaacttcc

SEQ ID NO: 654943 - DNA, 75 bp, Homo sapiens
agatctggagcatcggctgcaggggtcagtgatggagctgcttcagctcccagatggacgtatcatcaaagttgg

SEQ ID NO: 654944 - DNA, 96 bp, Homo sapiens
gctgttcctattcgggcatcttggctcctccttgaaaggtgccatgcgggccagcgagacagtgtcggaggccagccccggctccaccgccagcca

SEQ ID NO: 654945 - DNA, 90 bp, Homo sapiens
tctgttgatgaccctcttccaggttacatacagcttacatcttgcatcctcaagcggttgaccccctgtttacagtgccagcgccaccac

SEQ ID NO: 654946 - DNA, 100 bp, Homo sapiens
ctgccccgtccctggattcggggctggacgcagcaagcggggcgctgtgtccccaagctccccgtcctcgggtgacgcagctggaccagaggctggcact

SEQ ID NO: 654947 - DNA, 112 bp, Homo sapiens
cgggaggaaggaacgaggcaaggagctaaagcagcgtgcgttcagccctgggatcatggaagggaagtggttgctgtgtatgttactggtgcttggaactgctattgttgag

SEQ ID NO: 654948 - DNA, 96 bp, Homo sapiens
ccaaagcacaggaatctcactctgttaaagctggtctgttctaactgaggttgcatcataaatacaaaggactgaagttataaaagagaaaagaga

SEQ ID NO: 654949 - DNA, 75 bp, Homo sapiens
ggctgccccggccgcctgcgcacccggcagcaccatgacagattcatgatgttgctatcaaaagttgagaaattg

SEQ ID NO: 654950 - DNA, 100 bp, Homo sapiens
tgtggatcttcaagaatcattgcctgatcaaccccgtataaccaaagatgtaatttgttttcatgctgaagatttcttagaagtagttcaacgaatgcag

SEQ ID NO: 654951 - DNA, 98 bp, Homo sapiens
tcagcctccccagtagctgatcctacagggacaatgactcattcttcccaggacactggttcttgtggcattcaggaagatggaaagctttatgtggt

SEQ ID NO: 654952 - DNA, 90 bp, Homo sapiens
gccgtcaacagcctggtcaatttgtacctgcaggcctcctacacctacctctctctgtccctgctccttcaatagacagaagcacgaaac

SEQ ID NO: 654953 - DNA, 75 bp, Homo sapiens
gtgctggtccgcattcttctcagagaactggagaagcatgaatgtcagcatcatcattcaaagaacaagaaacat

SEQ ID NO: 654954 - DNA, 74 bp, Homo sapiens
agatccgggagcacgtcatctccatcgagggctatgcccactggaagggccaagtgctgaattcagatgagctc

SEQ ID NO: 654955 - DNA, 82 bp, Homo sapiens
tagccttcctcaaaagtctgatgctagtcatctcggaaggcctcagaaaaagccttaaagtcactcaagactgcttgcaact

SEQ ID NO: 654956 - DNA, 97 bp, Homo sapiens
cctgcagtggcgcctaaagtctgagagagggaagtcgcctctgtgctcactgtgccctgtccacggtgcctcctgcatgtcctgctgccctgagctg

SEQ ID NO: 654957 - DNA, 85 bp, Homo sapiens
ctcttctcaatcctgcagtgtcaccctaagatgcctcctatgtggacccacttggccctcaaatagaacgaccaaaaactgcagc

SEQ ID NO: 654958 - DNA, 80 bp, Homo sapiens
cctgtttcctgtagcgtccatcctgccagagactgtactgcttagggggaagaaggagaaagggccaacccctgaagaag

SEQ ID NO: 654959 - DNA, 90 bp, Homo sapiens
gcggagagcaacagcgcgccgggaaatcctcattgacgattcaatttgttgaaggccaatttgtggactcctacgatccaaccatagaaa

SEQ ID NO: 654960 - DNA, 100 bp, Homo sapiens
ggacgggaaggcgggagacgagaagcctgaaaagtcgcagcgagctggagccgccggaggtgaagcgacttccagtcatttggaaaggatgggatgaaaa

SEQ ID NO: 654961 - DNA, 100 bp, Homo sapiens
gagctttgaaagaacttgccagacttaaacagggtgaggtggctttgaccccgggttgcccggccagcacgaccgaggaggtggctggacagctggagga

SEQ ID NO: 654962 - DNA, 51 bp, Homo sapiens
aaacccggagaccaaatccttgtgaagtaagaactctgctagagaggaaat

SEQ ID NO: 654963 - DNA, 98 bp, Homo sapiens
gtggaggtgggaaggtgtgtccggaggtttgcaggggtgcagtgtgtctggtcttatgaggagtccttcaataatgttaaacagtggctgcaggaaat

SEQ ID NO: 654964 - DNA, 75 bp, Homo sapiens
gtcagcctcgaacgccacagaaacatccggcccagacatgactatcaaggcatctccttggaaacaatgccatct

SEQ ID NO: 654965 - DNA, 100 bp, Homo sapiens
gcagcttcaagcttaggaccacccaccatgcctatccagaggaatgcagtagcatggatagttgatggtgaatttggagcagacgacttctgtttaactt

SEQ ID NO: 654966 - DNA, 95 bp, Homo sapiens
atgtcttcagccagtataaaaacacagctcgacagtacgcctacttctataaagtcatccagccggaaatcactgtggaaaatcttcccagttat

SEQ ID NO: 654967 - DNA, 75 bp, Homo sapiens
cacagacccagctggaactcgaggacaagaattttgggcagatttgaatgccatgaacgtgtatgaaacaactga

SEQ ID NO: 654968 - DNA, 101 bp, Homo sapiens
aagatgttgtcctgtgctggggctgacaggagccaaggcaaagagggaccactgtgctcatggacccatcgctgccttccaaggaccatttcccagagcta

SEQ ID NO: 654969 - DNA, 75 bp, Homo sapiens
gccttctgctggtactgcctggagtctctggacagcattctgctaagtgatgaatccagcgaggctgattctcag

SEQ ID NO: 654970 - DNA, 80 bp, Homo sapiens
agtaccaccctcttccttgaattacccaagtgggccacaagcctttactcagtactgacttttttgacaaggatggagtg

SEQ ID NO: 654971 - DNA, 101 bp, Homo sapiens
agatgttccagccttacagctccagtatgaccattgtaagggtcctgtagcatccacagtatcagcgttttctgtcctctcctctgggcctggccttcctc

SEQ ID NO: 654972 - DNA, 51 bp, Homo sapiens
ggcggggcggcggcgctgacagtcttggaggaggaactttttttggtctct

SEQ ID NO: 654973 - DNA, 75 bp, Homo sapiens
ttaaacaagaatccactgttgctactgaaagggccccagtgaaatatcatggagacagatcaaaggagagtttag

SEQ ID NO: 654974 - DNA, 76 bp, Homo sapiens
aaagcctgaagttccaccagctaaagggggagctgatcaccttctattactattggaagaagacccccgaagcagc

SEQ ID NO: 654975 - DNA, 80 bp, Homo sapiens
ctcgactttccaacatttttgttattggcaaggtcatccctgagctgaacgggaagctcactggcatggccttccgtgtc

SEQ ID NO: 654976 - DNA, 101 bp, Homo sapiens
caaatatgacccaagcattggtatctacggcctggacttctatgtgttccgccatggagtcatagttgcagctgactccagggctacagcgggtgcttaca

SEQ ID NO: 654977 - DNA, 50 bp, Homo sapiens
ttataaaatgtcagcttttaaggaaaaggaacggctgtagtagatctctc

SEQ ID NO: 654978 - DNA, 74 bp, Homo sapiens
caccaatgtgatggtgacagtggccaagtccttcgaggcaccaataaaatatccaggtggagcttgacctgaag

SEQ ID NO: 654979 - DNA, 100 bp, Homo sapiens
gcgacagcaggtcacagtggacgaggtgttggcggaagttcacagacattgggaccttcgagacagtgtggcaagtcaagttctacaattaccacaagcg

SEQ ID NO: 654980 - DNA, 90 bp, Homo sapiens
ccctctgggaggcttaccgagagtttgaaagtgcgattgtggaagctgctcggtgtgctggaattgatgttcgtctgtgtgatgttggtg

SEQ ID NO: 654981 - DNA, 100 bp, Homo sapiens
tggcacgagctggagggagaatttcaagaactgcagaacgaggtcactcggacactatggtgttcttttacctgtggattgtcttttatatcatcagttc

SEQ ID NO: 654982 - DNA, 75 bp, Homo sapiens
tcaaatctcctgctgtgaaccagcagaatttttgaacagttgaaacattgtagtcggtatatacatgacttattt

SEQ ID NO: 654983 - DNA, 73 bp, Homo sapiens
gaagacgtgcggctacaggagcgcacgagcggggacgtccagatcggtgacatcgtcacagtgggcgagtgcc

SEQ ID NO: 654984 - DNA, 89 bp, Homo sapiens
cggagcgcgacctgcgggacatcgaagccacgggcatcgcggtgcacgcgctcagcaaggaagcaggtcctggggaccaaggtggacgc

SEQ ID NO: 654985 - DNA, 54 bp, Homo sapiens
aggagtgaagctgcagaccttcgcgggagaaggctgtagttagcttggagacca

SEQ ID NO: 654986 - DNA, 74 bp, Homo sapiens
ggagactagaggctggataccaaatagcagtggaaaccgtgagaactcaacagaggcaaaagcagtagattcta

SEQ ID NO: 654987 - DNA, 90 bp, Homo sapiens
gagcactagtgtctagaaggcactaagggtacaccaggggttggaaaaaccacactaggcaaagaacttgcgtcaaaatcaggactgaaa

SEQ ID NO: 654988 - DNA, 75 bp, Homo sapiens
tttaccagagataattgataacaccctgtaacagctgaagcctgatttgaaaaagcggatccgtgtgcacttgct

SEQ ID NO: 654989 - DNA, 90 bp, Homo sapiens
cgaggctggagggggagaacacccaggagaatcttatttatactgctgatccagaatcctttgaagtaaatacaaaagatatggacagta

SEQ ID NO: 654990 - DNA, 101 bp, Homo sapiens
gccgctgcgcgcatgggcctgttcctggcccgcagccgccacctacccagtgaccatgatagttattgccttgtctgtcaagatccgcagttatgaagaac

SEQ ID NO: 654991 - DNA, 75 bp, Homo sapiens
caaggaagaaattgttcagttcttctcaggcatttgcaagtaaaatcactggcatgttgttggaattatccccag

SEQ ID NO: 654992 - DNA, 75 bp, Homo sapiens
ttgggttaactgtgtttgccatcaagaagaaagaccacagcaagattctttcattcgtctcctcctagcctgggg

SEQ ID NO: 654993 - DNA, 100 bp, Homo sapiens
agaacagatacaaggacatactgccattgtgtccaatgggttgatgatgcaaaactgaatcaactgaggagggaaggcattcgctatgccaggattcagc

SEQ ID NO: 654994 - DNA, 75 bp, Homo sapiens
agggcgttcccatggagccaggccaacctttgtacggcaccactgggtacacagacgacgccaggacggcaagtg

SEQ ID NO: 654995 - DNA, 101 bp, Homo sapiens
gctccgagccttcagcagaggcggcagcctggagagtcgaagcagcagctctcgctccagaagcttcactttgcatgaacaggctgaacactttgccacga

SEQ ID NO: 654996 - DNA, 100 bp, Homo sapiens
tgaatatatcctggtgattgacaaagcaaaaatggaatcccttgagtaaagccaatcccagctgaaggaatcaagtcaaatccttccaagcggcatagag

SEQ ID NO: 654997 - DNA, 75 bp, Homo sapiens
aaagaagagttgagcacaatcagttcttcctgtccaagatccggtcccacgtggctacttgttccaaataccaga

SEQ ID NO: 654998 - DNA, 100 bp, Homo sapiens
atatttgggcctttggacttgttttgtgggaagtggccaggcggatggtgagcaatgcagtctctggtcccagcccaccccatggcccctcccagtccca

SEQ ID NO: 654999 - DNA, 100 bp, Homo sapiens
gagaagacaagggcatcgccgcctcagccgccgccgccgccgttttcgcctgcagctgctcaccgactgtgccctgtccacggtgcctcctgcatgtcct

SEQ ID NO: 655000 - DNA, 75 bp, Homo sapiens
cagagacgatggtcggaatcagatttgaaaatgaaagtcagaaacagtcctgctccagctgtaacagcagcatct

SEQ ID NO: 655001 - DNA, 100 bp, Homo sapiens
gagctttacaggcgctgcaaactggaggaaatgggctttacagatgtgggcccagaaaacaagccagtcagaagtcaatgaaaggattctattttgcaaa

SEQ ID NO: 655002 - DNA, 50 bp, Homo sapiens
ctttgccaccattccttcaaatgaggttctcctgaaaagaaagctgaaca

SEQ ID NO: 655003 - DNA, 75 bp, Homo sapiens
tgccctccttcaagattgacttctcggaatggaaggatgacgaggaagctcttcgtgggcggtcttgactggagc

SEQ ID NO: 655004 - DNA, 75 bp, Homo sapiens
gcccagacggctcacctgtgcgggatggaacaaaagtttctacagcagtataatcactacaaatccaatgtggag

SEQ ID NO: 655005 - DNA, 75 bp, Homo sapiens
cgcctgtgctgaggaccaggtgttggacgcagacggcgtcacttgcttggctcatcaccccacgtcacaacatgg

SEQ ID NO: 655006 - DNA, 100 bp, Homo sapiens
attggtccagagcagtttccaatcaatgaacactatttcggattggtcaatgtaatcgtgctgtccacacgactcctgaagccacttaacattcctgagc

SEQ ID NO: 655007 - DNA, 74 bp, Homo sapiens
gaagaatagtggctgactgcctaacagattgttatcagataggaagccacaacggaggggaggtcagtgatgtt

SEQ ID NO: 655008 - DNA, 90 bp, Homo sapiens
ggaggtgaagcccaacccgctgcaggacgcgaacctctgctcacgcgtgttcttctggtgaccatgctcttctgtgtgtcagaatcaaca

SEQ ID NO: 655009 - DNA, 80 bp, Homo sapiens
tggccagggtgcttttggaaacgtggagtcttctttgtccatgagagttctcagctgcaacatggggcagccctgtgtga

SEQ ID NO: 655010 - DNA, 83 bp, Homo sapiens
aagataccacaatcagaccctccggacctttattgggcttgaggtcacttcagggcatgcccagttcctggacctggtttcag

SEQ ID NO: 655011 - DNA, 90 bp, Homo sapiens
gagagagcgagctgagtggttgtgtggtcgcgtctcggaaaccggtagcgcttgcagcatggagaagacttcatggcggcggctatggtt

SEQ ID NO: 655012 - DNA, 75 bp, Homo sapiens
ctctctgccactgtcactcctcagaaagctaagaggccggtgtcaccatacagcgggtacaatgggcagctgctg

SEQ ID NO: 655013 - DNA, 83 bp, Homo sapiens
gttttttattcaacttagaaaagaattgacacacgatagtaaggagcatttagcaatgatggaaaggattcttggacctctac

SEQ ID NO: 655014 - DNA, 87 bp, Homo sapiens
cgtctgtctggtgataccaggggcagagggaccactctgacaggaatgggtaccacagaccatgtcatcgtcctggcgtccacgaac

SEQ ID NO: 655015 - DNA, 95 bp, Homo sapiens
gcgctgatggccaacttcctcacacaaggccaggttgggtatctacagccattggttgctgttcaggtcagctttgctcctaacaacactgggaa

SEQ ID NO: 655016 - DNA, 100 bp, Homo sapiens
cggttccccggcccacagtgggggtgtgcaaacccgagagaactggagctgaagaagcaggtggagagtgccgagctgaagaaccagcggctcaaggagg

SEQ ID NO: 655017 - DNA, 100 bp, Homo sapiens
tggcccaggcgccgcgcggacccggcagctgtctgcgcacgccgagctccacggttgggggccgtcccgctcctaaggcaggaagatggtggccgcaaag

SEQ ID NO: 655018 - DNA, 100 bp, Homo sapiens
gagctagcagtggcgatgacagctgtaaagcacgaacaggaatacatggaagtccgggagagaatacacagagccaatggaaagaactccagtggatcca

SEQ ID NO: 655019 - DNA, 76 bp, Homo sapiens
accttcctgcccttcacgctccaggagctaggttttggctacgggcctccacctccaccgccagatcagtttgccc

SEQ ID NO: 655020 - DNA, 100 bp, Homo sapiens
aagaagagcatcttggcatcctggaaacattgtcaattgttgctgtggaactagaactgaaggatttcatgaatgttctcccagaagatggtactgcaac

SEQ ID NO: 655021 - DNA, 98 bp, Homo sapiens
ccggacaggacccccttgagcttgtccctcagctgccaccatgagcgatttgaaaaagggcgcatctatacgttcattggagaagtcgtcgtttctgt

SEQ ID NO: 655022 - DNA, 90 bp, Homo sapiens
aatcctgctttcttttcctcagaactactatattcagtggctaaatggctccctgattcatggaccgccgggagagcctgcccacctccc

SEQ ID NO: 655023 - DNA, 82 bp, Homo sapiens
cgggaaccggctccggagcgagaacgcgctacctggagtagaacagaaaaattattatgtctgtgttcccttgggactcatt

SEQ ID NO: 655024 - DNA, 75 bp, Homo sapiens
gaatatttgaaaaaagtggaggacaagagaataagggaatcatcatccagggacgtgccagaaaccacaagaaaa

SEQ ID NO: 655025 - DNA, 82 bp, Homo sapiens
cgggcgggtcctacagagacagttatgacagttacgggtcttgcctcacccaagctagagtgcagtggcctttgaagcttac

SEQ ID NO: 655026 - DNA, 82 bp, Homo sapiens
cgcagccgggaggccgaggactcggagttcacctgcaggtactccaaagattcaggtttactcacgtcatccagcagagaat

SEQ ID NO: 655027 - DNA, 100 bp, Homo sapiens
gcagctgccaggccagctcgaagaaggcgagcagggtgcgggagagccccttgcagaagacgccgtacgagtttctggcccccaaagacaaaccaagtgg

SEQ ID NO: 655028 - DNA, 88 bp, Homo sapiens
gaaaacatttcttttaatttttaaacttggtttgaaagtgcttacttttctggtgcagaaagattgttgggaacagacaggaaccaat

SEQ ID NO: 655029 - DNA, 101 bp, Homo sapiens
agagttccattttggaacgcccgtgccgcgtctccgcgttcccagcccgggtccccgcgttcacagccccagcgcagcagatataatttctacagtagaat

SEQ ID NO: 655030 - DNA, 82 bp, Homo sapiens
actccagcgagatccgggccgtgaacgaaagcagtgacggaggagcttgtaccaccgctcctggggagtttgcttcacctac

SEQ ID NO: 655031 - DNA, 101 bp, Homo sapiens
cgccgggaatacagtcgctttgagaaggagcagcaacaactcaactggaagcaggagccggtgaaacctgaagaaggcagagatatggcaaacaggattgg

SEQ ID NO: 655032 - DNA, 48 bp, Homo sapiens
ggcaccttcggcaaagtgaagggctcctacccagagattctacccagt

SEQ ID NO: 655033 - DNA, 82 bp, Homo sapiens
gcagcgggagctggacggcgagcgcgagcggcgcgagaaaacaaatttacatgtattggagaccagaccagaagcccttctg

SEQ ID NO: 655034 - DNA, 75 bp, Homo sapiens
aggagatcccgctggtgaccctgccgctggcgagcgccaccgcatgggtgctggagaatctggtaaaagcaccat

SEQ ID NO: 655035 - DNA, 100 bp, Homo sapiens
caaagtttaatcagcttcctgttgaggtaaaaatgcatttgcaaagggagaaaatgaaggccaaacagaagcaggctccagcttctgcaaaaacttggat

SEQ ID NO: 655036 - DNA, 75 bp, Homo sapiens
atcctaatgacagtctccaaattcgcctccatctgtaccatggtcctaaaaacatcctgagtttctttggcctgc

SEQ ID NO: 655037 - DNA, 83 bp, Homo sapiens
acctggtgttgggcctgagccacctcaacaactcctacaacttcagtgccctcctccagagttctgcaagtcgaaaaacccag

SEQ ID NO: 655038 - DNA, 83 bp, Homo sapiens
ggcctcgcgccggctatggccgtgccctggggctgagccctcagcaaccatgtccaagggacctgcagttggtattgatcttg

SEQ ID NO: 655039 - DNA, 51 bp, Homo sapiens
ggactaagaagtcagttggaattaaaagagacggagtttcgccatgttgcc

SEQ ID NO: 655040 - DNA, 87 bp, Homo sapiens
tcggtcaggccaagaagcatccgagcggccttcatcctagaataatcactgaaggatttgaagctgcaaaggaaaaggcccttcagt

SEQ ID NO: 655041 - DNA, 100 bp, Homo sapiens
cgtggcctgaggcttggataagtggggatgggaaggccattgtgactatgtggtgattacagttgtcttactactgagtttcctactgaaatcatggagg

SEQ ID NO: 655042 - DNA, 75 bp, Homo sapiens
cggaaggggtcccgaagccccctgcaggaactctacaacccaatccaggttatcaatactctggctgaccatcat

SEQ ID NO: 655043 - DNA, 74 bp, Homo sapiens
gcatcatggactgtgcgcccaaggacgcgtgaccaaaaccaaagacggccatgaagtgagatcgtgcaaagtag

SEQ ID NO: 655044 - DNA, 50 bp, Homo sapiens
tggccgcctctgccgcagctggagacaaatttacatgtattggagaccag

SEQ ID NO: 655045 - DNA, 76 bp, Homo sapiens
ggagcagaaccccaggactgcgcccccgggagcgggcgcccagagggacagagcagaatgggctgatatagatccg

SEQ ID NO: 655046 - DNA, 126 bp, Homo sapiens
gagaggcaccgggatcgtgaccgagaccgtgaccgagagcgtgaccgagagcgcgaatatcgtcatcgttagaaggttctaagctggtctatgtccatcaccttcttggagaaggagcctttgccc

SEQ ID NO: 655047 - DNA, 100 bp, Homo sapiens
tgctgccggatgacattgaggacgagtccacgggcctgaagaaggtgacagttaacaccaacatggttgatttaaatgactacttacagcacatattaaa

SEQ ID NO: 655048 - DNA, 98 bp, Homo sapiens
aaaccgcatgatccgtcttcaccctgatgggacagtgctgtatgggctcaggtctgaatttcctgctgctgttcacaaagatgctttttatctttaac

SEQ ID NO: 655049 - DNA, 98 bp, Homo sapiens
cagattcgcagtggtcgcttcttctccttgatagggccagatttgagtgtgtgaatttttgagtgaaacctggaacccaaatgagaagaaatctgcaa

SEQ ID NO: 655050 - DNA, 100 bp, Homo sapiens
ttgaacaaactcgaagaacagctgtggaaagaagttgcaaaacactggatcccccaattattgaaggaaatatggaggcagcaagagcagtggacttaat

SEQ ID NO: 655051 - DNA, 87 bp, Homo sapiens
aaaagggtgaaggaggcgaattttcagttgataggctaaagtaaataatgccagcctgattggactgggttatactcagacccttcg

SEQ ID NO: 655052 - DNA, 75 bp, Homo sapiens
cctccagaactacctgtaaattatgtgaaacctccaaatgtggatctaaagcgggaagccagtatctgtcatatg

SEQ ID NO: 655053 - DNA, 99 bp, Homo sapiens
gcctcccaaagtgctggtattacaggttcatgcatccaggagcatatgcaagatactgaacagttccgtcactacaaagatctcttgtgttgttcttct

SEQ ID NO: 655054 - DNA, 75 bp, Homo sapiens
cacgacctgctcctacagccggcgatccactcccggctgttcccccggagggaggagagagcgatggcttttttc

SEQ ID NO: 655055 - DNA, 104 bp, Homo sapiens
tggccccaggtgtaagcgcagaaagcaggcgaacccgcggcgcaataacggttgagaacttgttgcttagtaaccaagggaccattaagctgtgtgactttggc

SEQ ID NO: 655056 - DNA, 100 bp, Homo sapiens
catcgaggggaccaaactctccatcacccagggtgcggagcgggccctggtggcgcggccctccctggagagtctgctggcagctggcagccacatgctg

SEQ ID NO: 655057 - DNA, 82 bp, Homo sapiens
tacattaagtcaaatataagagtctgactacttgacacactggctcgtgagatgtataaaagagctcaaggaagaactcgga

SEQ ID NO: 655058 - DNA, 89 bp, Homo sapiens
ggctttttggctgccgagcaggacatccgagagtgtatccaaagtgtgtacatcagtaagatcataagcagtgatcgagatctcttggc

SEQ ID NO: 655059 - DNA, 50 bp, Homo sapiens
gttggggtgagaccctcacttcatccgcattagtgccagcagtagttccc

SEQ ID NO: 655060 - DNA, 100 bp, Homo sapiens
agggataaatcccaaacttcttaacccctagaccggtttttagtccattgactatgcagcctaatggtctatgttaacaatgaatgggcaaccagtgttg

SEQ ID NO: 655061 - DNA, 87 bp, Homo sapiens
tagtacctacagcagcactccaggtaatgagagacccccaaacaaaacgttccaggggctttggttttgtgacttattcttgtgttg

SEQ ID NO: 655062 - DNA, 75 bp, Homo sapiens
cagatttacaaactggccaagaagggccttactccttcacagatcgatgtcatgtggcctgtgttttggaccgtg

SEQ ID NO: 655063 - DNA, 51 bp, Homo sapiens
tgttctctaggccttttagaaaacatggtacatcaagagagtgtacacatg

SEQ ID NO: 655064 - DNA, 50 bp, Homo sapiens
tcgggggcggcggccacgccaaggacggggtacttttgacttcagtgaca

SEQ ID NO: 655065 - DNA, 100 bp, Homo sapiens
ggaaagcagtggcattgcaggaaccacctctgatgagcctgagcggattgggtgaggacgcttgagcggaagttagaagcaaaaatgatcaaggaggaaa

SEQ ID NO: 655066 - DNA, 96 bp, Homo sapiens
ggaggatgacgtgcagaacaccaactctgcccttagttgatgacagtgcaattttggattgccagttcagtgagttttatcatacgcctccacctg

SEQ ID NO: 655067 - DNA, 80 bp, Homo sapiens
agatccttaagttcgtcgtcttcatcgtcgcggttctgctgccgttatctccagaagaagaagagaaaaggagaatccga

SEQ ID NO: 655068 - DNA, 75 bp, Homo sapiens
gcctgggactgtcctgggccggcatgcttctggactatttccagttggcagatgtgaatggagtcattgaggagg

SEQ ID NO: 655069 - DNA, 75 bp, Homo sapiens
agagactgggctgccaaaggaccgtatttactgattcttgtagacactgtttgggctctgtcatacttgacagat

SEQ ID NO: 655070 - DNA, 75 bp, Homo sapiens
gattgccagagaattggcagaagaggagaggagacgccgtgagcgggacgaccagatgtaccgagagcggctgcg

SEQ ID NO: 655071 - DNA, 51 bp, Homo sapiens
cagctacatcctggtcttagaaatgtgctgtaaaatacctggagtgctcgg

SEQ ID NO: 655072 - DNA, 100 bp, Homo sapiens
agcttcatctgcgatggacagaataactgtcaagacaacagtgatgaggaaagctgtgaaagttctcaaggtcctgtacaatgggttcactggtcgaaaa

SEQ ID NO: 655073 - DNA, 100 bp, Homo sapiens
gtggaggaagtacagccagcaactggcattgctcgggtaccacttgctggagctgctggaggccctggggttggtagggcagctggtagaggagtaccag

SEQ ID NO: 655074 - DNA, 83 bp, Homo sapiens
tctgtgtcgctacaacctgcccgagagcgccccgacaatgcagatcttcgtgaagactctgactggtaagaccatcaccctcg

SEQ ID NO: 655075 - DNA, 82 bp, Homo sapiens
attatgggagcgcatttccccaggtcctggacgcacaatatccagcgagagaaagagtttctgcggaagctggtgaaagctc

SEQ ID NO: 655076 - DNA, 75 bp, Homo sapiens
acactaaagtgttacatgacagatgtatgagagtatctgactgtcttctctcagatgattgcatttcatgatcca

SEQ ID NO: 655077 - DNA, 75 bp, Homo sapiens
ccgccccgccgcccgtgggacagagaggctggcacggcctcaggcccaggcccaaggccaagtgagagagcccag

SEQ ID NO: 655078 - DNA, 100 bp, Homo sapiens
tttttatttggcagatctgaagggaaagctccagatactagtgcagcaggagcgggacgagctctatcggaagttcaccgcagccatccaggaggtgcag

SEQ ID NO: 655079 - DNA, 90 bp, Homo sapiens
gatttggggatctctagcctacaggatggcttggccttgcacataaggttgggggccgtcccgctcctaaggcaggaagatggtggccgc

SEQ ID NO: 655080 - DNA, 50 bp, Homo sapiens
aagaaccttttcagcaagtatgggaagaacatttccccagaggagctcaa

SEQ ID NO: 655081 - DNA, 100 bp, Homo sapiens
actccaggtacttcttccaaggacctaggtctctcgcccatcggaaagcccccaaatacatcaagatgtttgtactggatgaagctgacgaaatgttaag

SEQ ID NO: 655082 - DNA, 75 bp, Homo sapiens
gggctattgtgcgattctcaggagctgcaggctctgatcgggcccgggacacccagacagatgagattgtcgcac

SEQ ID NO: 655083 - DNA, 49 bp, Homo sapiens
gcacgctggagttcctggtgtcgagaaagcagcagctgccaacatagat

SEQ ID NO: 655084 - DNA, 100 bp, Homo sapiens
agaaaactaactttaaaactctgtcttccatggaagacttctggaaggtgtcattccacacatccacaaatctctgattgggaagaaaggacaacagaag

SEQ ID NO: 655085 - DNA, 100 bp, Homo sapiens
tagaaaaggaattcggggcgagccagagagggcccacacgactagaaggacgactgcctggcgcgatacaaaaatcatttcttctgaggccctgaagaag

SEQ ID NO: 655086 - DNA, 101 bp, Homo sapiens
aagactgtcgacctaaagcctgactggggcaaggcggcttacagggagaacacagttggcctccaccgtttctgccccacagaaaacgtagcaaagatcaa

SEQ ID NO: 655087 - DNA, 100 bp, Homo sapiens
ctggcagcttcacaaggcgcctggaacccgtggtatcagacgccatctatgacagtagtacaggtgaacaaaggcagagtaaactgtcaccccagatgca

SEQ ID NO: 655088 - DNA, 95 bp, Homo sapiens
cggaattgggaagtgctcagaagcttacaaagctgcctcgagaggcatggctattgcaccttgggagaagcctttaatcggttagacttctcaag

SEQ ID NO: 655089 - DNA, 82 bp, Homo sapiens
catcccccataggtcactgtgtggccatctaccactttgaaggaacttgctactaccagcaccatgccctaccaatatccag

SEQ ID NO: 655090 - DNA, 73 bp, Homo sapiens
actaccaccagtggagtccaggatgaggagtggctatgaatctgcatgtaaagactttgtccctcatgacttg

SEQ ID NO: 655091 - DNA, 125 bp, Homo sapiens
ttatcactaaaatatggcatcctaatattagttccgtcacaggggctatttgtttggatatcctgaaagatcaatgtgttcggctaatgaatgagttcactaatatgccagtacctccaaaaccc

SEQ ID NO: 655092 - DNA, 75 bp, Homo sapiens
aaacaacaaagccaaacttccattggtcaggtagtggattggacttggctgatgctttggatgatcaagatgatg

SEQ ID NO: 655093 - DNA, 75 bp, Homo sapiens
ctctgagaagggagacgacgctgctgggtccgctgagcggggcgacccgagatcagaaacctcttgaccttgccc

SEQ ID NO: 655094 - DNA, 51 bp, Homo sapiens
gcaaaatcgagcgggccattggtgctggagaatctggtaaaagcaccattg

SEQ ID NO: 655095 - DNA, 100 bp, Homo sapiens
tcagaggtggtggattcgaatccctacaggtggtttcagacaccctcacaggttttctaccatgcagcaactgaacatggaggaaaagatgtatatccag

SEQ ID NO: 655096 - DNA, 100 bp, Homo sapiens
tattcagagcgcgtatggagtggaaacgcttgtagggtttcaccaggaggtggtgagaaagcccgagcacttcacatatcaagaggaaaactattgccca

SEQ ID NO: 655097 - DNA, 51 bp, Homo sapiens
gatccagaacttgcagcaacaatagatctccaagaaggagaagcttctctc

SEQ ID NO: 655098 - DNA, 75 bp, Homo sapiens
gtgcggctgctggacgacagcgagtacacctgcaccatccaggttttgacacaagggcgcatatcttcaaagcac

SEQ ID NO: 655099 - DNA, 75 bp, Homo sapiens
gcagccagtactctatatgaacaatccgtctggatcacggatgtaggaagtgctttgacagatccaaatgcttct

SEQ ID NO: 655100 - DNA, 83 bp, Homo sapiens
ctcaaagccctgggtcgcttggaagaagccaagagtgctgcagcagctcccagtccagtgctaggaaacattcccccaggaga

SEQ ID NO: 655101 - DNA, 89 bp, Homo sapiens
gcgccgaactgctccggttcccggcactctcgagtggaccctgaggagctcttcaccaagctcgaccgcattggcaagggctcgtttgg

SEQ ID NO: 655102 - DNA, 76 bp, Homo sapiens
tggggaacctctaccatgacacatgcttcacctgtgcagcttgcactctaagcgaaagacatgaggcctcagcctg

SEQ ID NO: 655103 - DNA, 83 bp, Homo sapiens
ctcacctttgtctccccgatctacggggctgacatcagcggctctttgtatgatgaccccagctcaacattggcaatgtgctc

SEQ ID NO: 655104 - DNA, 120 bp, Homo sapiens
gacgagagggagagcaagaccatcatgctgcgcggccttcccatcaccatcacagagagcgatttctaatggcaagtctgtgtcatggtctgaaccaggtggaggacaggtgcccaaggg

SEQ ID NO: 655105 - DNA, 75 bp, Homo sapiens
ggacgacccaagcccgctgagcaggatgaggggcgccctgcgtccggcagaggaggcgagcatcccgctcaggtg

SEQ ID NO: 655106 - DNA, 97 bp, Homo sapiens
tcttggatgaatttgggtcacactaattgttatgtgaagatggatgttgaattgatgtccttgcattgcccatttttaagcaagaagagtcgagttt

SEQ ID NO: 655107 - DNA, 100 bp, Homo sapiens
cacgaccgtgtacattgaccaggtcaaaatgcagatcttcgtgaaaacccttaccggcaagaccatcacccttgaggtggagcccagtgacaccatcgaa

SEQ ID NO: 655108 - DNA, 98 bp, Homo sapiens
gggcccgggctgcggcgtgtgcgcgcccgccagctgctccggagatacggtcaaaatgcagatcttcgtgaaaacccttaccggcaagaccatcaccc

SEQ ID NO: 655109 - DNA, 75 bp, Homo sapiens
aagcctcttgtcccttcattgtcatctgcttttgagcatgtaaaagtcacatctgaggctctgggtcatgctggc

SEQ ID NO: 655110 - DNA, 75 bp, Homo sapiens
ctcgtcagcactgactttcagctatggaatcgaaaagcacttggttctgcttcgagatggaaggacacttatagg

SEQ ID NO: 655111 - DNA, 101 bp, Homo sapiens
actttccccttgacaagtcccttctacttcgttgcagcaactgggatgctgagactctcacagaggaccagctctacctacaaggactccaacactctgca

SEQ ID NO: 655112 - DNA, 90 bp, Homo sapiens
ctgagctgcagcactccagccactgctgtctccttagctgctcacatatggatactttcacagttcagacgctgaccggaaaggagattg

SEQ ID NO: 655113 - DNA, 75 bp, Homo sapiens
attcgcaccgtcatggtcacagcctgcccttcctcagtgtctgttgaagtaagtgcagatggggtaaatatgcta

SEQ ID NO: 655114 - DNA, 74 bp, Homo sapiens
tacacaaatctggaacgggtggccgattactgcgagaacaactacatacagttgatattcactgatggactcca

SEQ ID NO: 655115 - DNA, 100 bp, Homo sapiens
gcgagcggacatgcaggctccccgcgcagccctagtcttcgccctggtgatcgcgctcgttcccgtcggccgggggagtgcatccgccccaacccttttc

SEQ ID NO: 655116 - DNA, 87 bp, Homo sapiens
cagactgagcgcgtccaggcctgacagctctgcggctcgggccctgaggaaacccagcgtttgctggcagaaccagttcctggcatc

SEQ ID NO: 655117 - DNA, 100 bp, Homo sapiens
cccgggtgctgctggttagtgtgctctgagggagggtccgagccagccgctgttttgccggaggagcccctcaggccgctatgactttgcagccgtcctg

SEQ ID NO: 655118 - DNA, 101 bp, Homo sapiens
ccccagcccactgggctacgcaggagactataaatattcaggaagagatagtttgatttttttggttgatgcctccaaggctatgtttgaatctcagagtg

SEQ ID NO: 655119 - DNA, 50 bp, Homo sapiens
gagaactatagcaatctggttttcttggatttctcataggcatcagaaag

SEQ ID NO: 655120 - DNA, 100 bp, Homo sapiens
ttccgcccctttctggcaaagatgagggggattcttaagatacaaggtctcgctgttctacctaggctgttctagaactcctaatgtcaagctatcctcc

SEQ ID NO: 655121 - DNA, 100 bp, Homo sapiens
gccgctgccgctatggatgatcgagaggatctggtgtaccaggcgaagctggccgagcaggctgagcgatacgacggggataaaaacattcagatggcag

SEQ ID NO: 655122 - DNA, 90 bp, Homo sapiens
cactaatggcatttggattttggccgaactacgtatccagccaggaaaccccaattacacgcatggccgaaacagaagccctgtcgaagc

SEQ ID NO: 655123 - DNA, 97 bp, Homo sapiens
agtgatattgaccatgatggaatgcttgacagagatgagtttgcagttgtttaccgacaagactgtgaaactttcgggatggtggtgaaaatgctga

SEQ ID NO: 655124 - DNA, 89 bp, Homo sapiens
cccaagttctgcagccagtgcggagagaggctgcctcctgcagcccccatagcagcacgagaagccctgccaacgtgggataagcagat

SEQ ID NO: 655125 - DNA, 74 bp, Homo sapiens
tggagtaagaggggttggctgtgaatgtatccgttacagcactgatgtgagtgtagatgaagtaaaagctttgg

SEQ ID NO: 655126 - DNA, 96 bp, Homo sapiens
agaaccagtcagcattctacaaccccagaccaccgttaatccagatcgcatcaaacaactttcaggatgccaacccgcccctgaaggttattcccc

SEQ ID NO: 655127 - DNA, 75 bp, Homo sapiens
gctgcttcccgttctgccatgatgcactgtaatggcgttgactggcgtcagaagctggactctcagcgaggggct

SEQ ID NO: 655128 - DNA, 75 bp, Homo sapiens
tgtcttcggtggactccttcggcagtccacccaccgccgccgcctcccaggattctttctactaatccagatact

SEQ ID NO: 655129 - DNA, 100 bp, Homo sapiens
cgttaagaagcccgaagggcttttcagaaatcggtttgaagttagaaatgacagacctcttttcaagtacaaaacctcaagaagaacagaagacgagtct

SEQ ID NO: 655130 - DNA, 100 bp, Homo sapiens
cggcggaccgtcccgcgcggggcacgatgttgaacatgtggaaggtgcgcgagctggtggacaaagcggcaccagaactagcacctctgaaaagtaaaat

SEQ ID NO: 655131 - DNA, 83 bp, Homo sapiens
gtcttcggtggactccttcggcagtccacccaccgccgccgcctcccagttatacatgggaagctgttgataccaaaaataat

SEQ ID NO: 655132 - DNA, 96 bp, Homo sapiens
gagccgcgctgcgcagccgacgcgggaatgaagcgggcgctgggcaggtgaaaggaaagcaagccaggatggatatttacgacactcaaaccttgg

SEQ ID NO: 655133 - DNA, 100 bp, Homo sapiens
caacaggaaaatcatattatagatggagtaaagctgcccccactaggccttcctgccctgcagtggctgaaataccattgaggatggtcagcgaggagat

SEQ ID NO: 655134 - DNA, 90 bp, Homo sapiens
gtgattaccatggcgaggagtctctgtccgggggcctggctaaggaaaccctattacctccaggtacttctcccagcagctggtctctta

SEQ ID NO: 655135 - DNA, 74 bp, Homo sapiens
ccagaagttgttctaacgctgcctttgctttaaaacagtattacttgcgtgtttaactgctgaagagatctttt

SEQ ID NO: 655136 - DNA, 73 bp, Homo sapiens
gcggagagaagccgcaaccagagccgccgccacgatggctaagtatcaagttccacagaggtctggggacatc

SEQ ID NO: 655137 - DNA, 100 bp, Homo sapiens
agccaggcgtggaggaagaggcattgaggactttccttacctgtttttccagctcacccactgccagcagagagacaaataccgatactttgcttgtttg

SEQ ID NO: 655138 - DNA, 101 bp, Homo sapiens
gaatacagagagaaaattgagacggagctaagagatatctgcaatgatgtactgctggcaaacttccccagactctgcgaggaaacggaaaggattgttgc

SEQ ID NO: 655139 - DNA, 82 bp, Homo sapiens
tggagaagggcaacctgatgcacgtgctgaaagccgagatggagagaccagagaagagaacaagctgttgattcctaagcag

SEQ ID NO: 655140 - DNA, 73 bp, Homo sapiens
tctctgattatgcggtgaagatcgtcaaagccaacaagttagaccacgctggcagagaggctgatgacatcgt

SEQ ID NO: 655141 - DNA, 98 bp, Homo sapiens
gcgcgggggtgggcaaggcagtggtcagcgacccgcagtccatctgactcctgcttcccgggtgttgctcgtgaaccctaaggactctgcaatatgaa

SEQ ID NO: 655142 - DNA, 99 bp, Homo sapiens
cttggagaggcagagatccagatggattcctggaagcttgataagaaactggatcattgcctccctttacatggaaagttaccaggcagtgacattgcc

SEQ ID NO: 655143 - DNA, 75 bp, Homo sapiens
gattcacaactgctccttgattgcaagaatgtgacagtgatgataacatgggtgccaaaaatacttcaataggag

SEQ ID NO: 655144 - DNA, 75 bp, Homo sapiens
gcaggagcaagtgaccaggagcaggactggggacaggtcctgcagacattcgctttgtctgggagaagaatgggc

SEQ ID NO: 655145 - DNA, 82 bp, Homo sapiens
gagagggagagcaagaccatcatgctgcgcggccttcccatcaccatcacagagagcgatacacatcatctcagagttggag

SEQ ID NO: 655146 - DNA, 82 bp, Homo sapiens
gcagcgccagcggccgagcgggcggcttcctggcctgggcgctccggtggcggcggaggctgaccaactgactgaagagcag

SEQ ID NO: 655147 - DNA, 100 bp, Homo sapiens
gggagttgtagttcgggacggcgggctgacgcacttcgccgccggccgacgggcgccattgtgcggcgcgcgccgggtgtgtgtgaccatggaacgggag

SEQ ID NO: 655148 - DNA, 98 bp, Homo sapiens
cgtagtgagcaacctgctctattaccagaccaactacctggtggtggctgccatgatgatttccattgtgggtttgtcccatgaggagcacccccata

SEQ ID NO: 655149 - DNA, 100 bp, Homo sapiens
cgataaggagacctgctttgccgaggagggagcaaagcttgtattggcttgcaattcagcagctgcctacagaccctatagaagaacagtttcctgtcct

SEQ ID NO: 655150 - DNA, 50 bp, Homo sapiens
agcaatttgggcaactttaattatgggacaatggtgacagatccaggcac

SEQ ID NO: 655151 - DNA, 51 bp, Homo sapiens
aaggattccaagtaactcttatttggcagcgattattagtagagttcagtg

SEQ ID NO: 655152 - DNA, 100 bp, Homo sapiens
catacgtccagagtgggtacttgtctgtacgcttcacccgaacagttggaaggatctgagtatgatgccaaggtgcagacaggatttggaaggttgggct

SEQ ID NO: 655153 - DNA, 75 bp, Homo sapiens
cccgctctgagggccccggcccctggatgcacagccccggcgctgatctgccgacaccccaggccatcgagcccc

SEQ ID NO: 655154 - DNA, 97 bp, Homo sapiens
ctccaaactgcaagtgtatattgttcttggggtttggtgcagaaagaaagatccgtcaagctggtgtcattgactaaccacatccacaaagcacacc

SEQ ID NO: 655155 - DNA, 100 bp, Homo sapiens
agagctattcagagcctgaaaaaaatagtcaatagtgctcagactggtagcttcaaacagctcacagttaaggacgagcctgtggagtgggagacacctg

SEQ ID NO: 655156 - DNA, 95 bp, Homo sapiens
tgctacctgcagcgccgtgtggcacgacacaaaaatcagatagcctgggctggaagctcttctacgtcacaggctgcctgtttgtggctgtgcag

SEQ ID NO: 655157 - DNA, 90 bp, Homo sapiens
ctggctatctatccaccatgtgggaggaggaaaatcatcttatcagacgaaggcaaaatgtatgagatgctgttcagttaaatgtgattg

SEQ ID NO: 655158 - DNA, 83 bp, Homo sapiens
ggatttttttcgggtagtggaaaaccaggctcatcatatgcccgaagctcagtggttacggctgtgaaatttacaatttctga

SEQ ID NO: 655159 - DNA, 101 bp, Homo sapiens
tattgcaatcatggtgcagaaataccagtccccagtgagggtgtacaaatacccctttgaattaattatggctgccccttcacagatgtagtcactacaaa

SEQ ID NO: 655160 - DNA, 83 bp, Homo sapiens
atgagggtccccgctcagctcctggggctcctgctgctctggttcccagataacgaaggaggcccaacttcattcaataagga

SEQ ID NO: 655161 - DNA, 90 bp, Homo sapiens
cctcatttgcgccttgcagcactgctggaccagggatgttggtggtaaatgtaacgtggaggaacaagacatatgtaggtacactccttg

SEQ ID NO: 655162 - DNA, 101 bp, Homo sapiens
ccgacctggccgagctgcccagcgagatcctcggggccccagaggccgcggacaccgacctggaggcaagttaggaaatcaacattgaatcccaatgcaaa

SEQ ID NO: 655163 - DNA, 83 bp, Homo sapiens
gtttgccaatgttggagccgtctgcaaagtgtccccggcaagaagcatcaagatggtgctcatgtggaccagtggtgacgcct

SEQ ID NO: 655164 - DNA, 83 bp, Homo sapiens
gacagtactgcatcctgctcctcttctacttggcctacatccatgaagacagctatcatggtgaacttacttcagattgtgcg

SEQ ID NO: 655165 - DNA, 80 bp, Homo sapiens
acatatgaaggactcattgatgaaatttatggcattcagaacagaatccagcactacgccctgccctctactgactggag

SEQ ID NO: 655166 - DNA, 75 bp, Homo sapiens
agcctggatgaatctgacctctatagcctggcccattcctacctcggagaactacgatgacccgcacaaaacccc

SEQ ID NO: 655167 - DNA, 51 bp, Homo sapiens
aagatgattggtatgaaggactacaaagaacagagtcttgctctattgccc

SEQ ID NO: 655168 - DNA, 98 bp, Homo sapiens
tttaaaagacagtcctcgtcagcactgactttcagctatggaatcggacaacgtctgacatgagccgagtgttctgctcacactgtgggaacaagacc

SEQ ID NO: 655169 - DNA, 90 bp, Homo sapiens
ggcggcggcgagggtggtggcgactctaaaatagagctcaagcttgagaagagagaaccactaaagggcagagcaaagactccagtaaca

SEQ ID NO: 655170 - DNA, 83 bp, Homo sapiens
acgggactaaactggcgggctccgtggaagcgtggccggcagcgtcccggacgaggagaatcctcactatggatgggctcatt

SEQ ID NO: 655171 - DNA, 50 bp, Homo sapiens
gcggtggagcgggacacgaacgtgtactactataattccttgacccagca

SEQ ID NO: 655172 - DNA, 100 bp, Homo sapiens
agagattcaggccagagttgtgggccgccgtcggcagcaagaacagagagagaggtggacagatctgagagatactgagatgctgtacccctcaaggatt

SEQ ID NO: 655173 - DNA, 75 bp, Homo sapiens
cggacctttcccgctggcgcgcagcctcagctagagggtgatgagactggtgtgatggataatcttctagaagcc

SEQ ID NO: 655174 - DNA, 74 bp, Homo sapiens
caaccagtaagttgatccatccagatgaggatatatccctgagagtcaagtacctgctgaccccaagggaaccc

SEQ ID NO: 655175 - DNA, 100 bp, Homo sapiens
ccgcgcgctatggcaccttcgcctggcccaccactcccagagtgttctacgcagaaatagaagagctgaaactggtgtatccttatcacggcgttctaca

SEQ ID NO: 655176 - DNA, 97 bp, Homo sapiens
tcgtctcttacgtctgcggaagtgcagctgcctcagttcttagcgcaggcagcttgaaatccactctccagatgctaagcacacggtgatcctaagg

SEQ ID NO: 655177 - DNA, 102 bp, Homo sapiens
tgtctatgaaggaggggtgttctttcttgacattaccttttcaccagactatccgtttaaaccccctaagcatacagtttgaacatttattcgcctcctgag

SEQ ID NO: 655178 - DNA, 75 bp, Homo sapiens
caggctgggggaacacgcccgccaacgctcccaatgccatgaagcctaattcagtgctcaagagtgaagaaaatt

SEQ ID NO: 655179 - DNA, 50 bp, Homo sapiens
aacagttgttgcagcaagcgattcaggaagaatgttggtgaaaagcacag

SEQ ID NO: 655180 - DNA, 100 bp, Homo sapiens
ggcgcctccgtcgccaagccgcgccgtcgcggggctcccgggagcggcccttagcgaccccgcccgggccccctcagcaacacccctgagcccacttaag

SEQ ID NO: 655181 - DNA, 89 bp, Homo sapiens
ccaggggccgaagcccacccagggagttgatggtggtccacaattagtgaaaatctgtttgcaaccactggttatcctggcaaaatggc

SEQ ID NO: 655182 - DNA, 100 bp, Homo sapiens
tgcctcggcggagcagaggaaccacacgctgatcatggtgatctgcaactctttcaccatctgtaatgcggagatgcaggaagttggtgttggcctatat

SEQ ID NO: 655183 - DNA, 100 bp, Homo sapiens
tcctcctcctcctccacctcctccagaaggcggtcaccttctccttactatagtcgtggaggatacagatcacgttccagatctcgatcatactcacctc

SEQ ID NO: 655184 - DNA, 100 bp, Homo sapiens
aagttgattcagatccaagacaatggcaccgggatcagggtgattccctgaatgtggtggaagtgttcgaccccattgccaattgctgggagagatgccg

SEQ ID NO: 655185 - DNA, 98 bp, Homo sapiens
acgacagttcaaacaaagaggccgcggaggagaagccggaggaggacaacgactaccaccgcagcgacgagcagctgcatcttcctcccgtgaggctg

SEQ ID NO: 655186 - DNA, 75 bp, Homo sapiens
tgacttgtttctggatgattctaagaggttgcagtccatgagctgggaaaggaggcagtgctcttgggagaaaca

SEQ ID NO: 655187 - DNA, 100 bp, Homo sapiens
cgagattccgtgggcgtaggaccctctgagccagcagaagatggctgtgccacccacgtatgccgatcttggcaaatctgccagggatgtcttcaccaag

SEQ ID NO: 655188 - DNA, 90 bp, Homo sapiens
gtctgagactttctccttcaagtacttggcagatcactctcttagcaggaggctactcacagtcgaactacaactccccggggtccggcc

SEQ ID NO: 655189 - DNA, 100 bp, Homo sapiens
cggagcataggaggaaaattcatcatctggaatgctgaaatacttttaaagctgataaacctagggaaactgcctcctgatgccaagccccctgtcaacc

SEQ ID NO: 655190 - DNA, 90 bp, Homo sapiens
aggatgtgatggagaagttatcaactggtgttttcagcaccctcatcacatgtgtggattctgggattctcagagtctggcatgacaagg

SEQ ID NO: 655191 - DNA, 100 bp, Homo sapiens
ggcgagcctctcagccggccgggatggctaccacggccgagctcttcgaggactcacaccacccggcaagaactgctcactacggctccctgccccagaa

SEQ ID NO: 655192 - DNA, 83 bp, Homo sapiens
ccaggtccgacccgcgaacccctctgggatccccgccgctctgtctacaacccgaggaaatttggtgagcggcctccacctaa

SEQ ID NO: 655193 - DNA, 100 bp, Homo sapiens
aacccagaagtagctgaatgtgttactccattgctgaggagtgtttggacccaattaaatcctttgaagctcctgcaaccatcaattctgcatctcttca

SEQ ID NO: 655194 - DNA, 82 bp, Homo sapiens
cctcggtgggggcttagcgcactggaggagcggcgggcttcagacagatctgtgtgcctgtggagtcctcaagccccctggt

SEQ ID NO: 655195 - DNA, 83 bp, Homo sapiens
caagggcctccgtctggatttccaaggaagaatttcctctgaagcaccgggatgtttcagcagcccctgagaaggaagaggag

SEQ ID NO: 655196 - DNA, 83 bp, Homo sapiens
tggtatttcgaaggactctatccaacctattatatatggactcaccctgtcacccaggttggactgcactggcctcaacctcc

SEQ ID NO: 655197 - DNA, 76 bp, Homo sapiens
cggatgctatgcagcgaagaaatactcctacgggtggttgaagatggatatgaattttttgcaaagaggcagttgg

SEQ ID NO: 655198 - DNA, 75 bp, Homo sapiens
ctgggtcctctccgaaatcgacagcctcaaccttcataaacaggtgtgcctaccgcatgttgccgctgctgtttc

SEQ ID NO: 655199 - DNA, 101 bp, Homo sapiens
gaaaacctaaagtatttgccgttggtgattcaagggaaatgggtcctgatgaatatgaagagatggaagaagaggaggaggaggaagaggaggaagacgag

SEQ ID NO: 655200 - DNA, 96 bp, Homo sapiens
ccgcgagcaaggagcgcggaatcggggagcgtccggagctagctggatcctctaggcagggtgctttcatgtatcatcattccacttgaggctcaa

SEQ ID NO: 655201 - DNA, 82 bp, Homo sapiens
gtaccggctctggaaaatccgcaagaccatcatgcagggcgtgatggtgggcatgggtcagaaggattcctatgtgggcgac

SEQ ID NO: 655202 - DNA, 112 bp, Homo sapiens
ccttcggcctggtctacgtgctgaaccacgctgaggggctgggagccgcgcacaccaccatcacatctccttaggtgatgcacagtccaactacctgctaaccaccgccgag

SEQ ID NO: 655203 - DNA, 115 bp, Homo sapiens
gggagcgcggcgcgggagcccgaggctgagactcaccggaggaagcggcgcgagcgccccgccatcgtcccggctgacagataaggcagtgaaggactattccgcttaccgttct

SEQ ID NO: 655204 - DNA, 100 bp, Homo sapiens
gtcctggagctgtgaggagattcgggccgtcaccctgcctcccctgcgtcccgccaccggccgcttctgtcctcgaaataagcgggttttgaaaacaaaa

SEQ ID NO: 655205 - DNA, 75 bp, Homo sapiens
gcatgctctcactaagcagttggaggctgtgtctgttactaaaccaaggagatttaactgaaagacggacatgag

SEQ ID NO: 655206 - DNA, 147 bp, Homo sapiens
ggaagactgccacacctagactgatgcttattagtcatcaccgttattcctactaacgtcctgtgtcactgaggtgagcctgaatttaaatacattgggaatatgcatgggaatgaggctgttggacgagaactgctcattttcttg

SEQ ID NO: 655207 - DNA, 90 bp, Homo sapiens
gggtagcctcaccatgaaatcacagcttcagatcactggtatggcgtgagtcccgagaacattatcctctatggtcagagcattgggact

SEQ ID NO: 655208 - DNA, 82 bp, Homo sapiens
gggacccaccgctgccctcagctccgagtccagggcgagaaaccaaggtgtatgttggtaacctgggaactggcgctggcaa

SEQ ID NO: 655209 - DNA, 90 bp, Homo sapiens
gttgatctgtttgatggcaccagccagtcaacaggtcccaaaggcaagcagttagaaggaactgaatgtccactccatgttgttcatcca

SEQ ID NO: 655210 - DNA, 98 bp, Homo sapiens
ggaggcagaaatggaagcagctaggcatgaacaccaattaatgctaatgaggcaaggtgttacacataatattgcattacttcgagaggtgataatca

SEQ ID NO: 655211 - DNA, 75 bp, Homo sapiens
caagatcaggaacctgccctgtgatcaccagcagcttgcaaaacttatccaggagtcgccaaccgttgaactgaa

SEQ ID NO: 655212 - DNA, 135 bp, Homo sapiens
ccagccgaggattatgtgaaggttcgttgggaccctccggaggccagtggggtactgcaaaggaatgctgaaatacttttaaagctgataaacctagggaaactgcctcctgatgccaagccccctgtcaacctg

SEQ ID NO: 655213 - DNA, 75 bp, Homo sapiens
acccattgtgtcttctcaagaagaatatcctccgaatcctaaatctagagctccaaggatgctggtcattaagaa

SEQ ID NO: 655214 - DNA, 100 bp, Homo sapiens
tgatgacaccttagaattagagggtggagatgaagctgaagatcttacaaagaaacttcttgatgaacaagccgtttccctggggagatggtaaccatac

SEQ ID NO: 655215 - DNA, 83 bp, Homo sapiens
gttagcgaggcgaccacgaaaacggtgaaggtcggaaccgacagcctcctccgagaaggctttctaaaaccaatttttccaac

SEQ ID NO: 655216 - DNA, 50 bp, Homo sapiens
ctgccctgtgtgctggagcagaagagtgggaaatatggctatgagagtat

SEQ ID NO: 655217 - DNA, 74 bp, Homo sapiens
cagaaaatgggattgcccaccacgataatgcagttcttattactaggtgcagtcagcctcagtttccaaagccg

SEQ ID NO: 655218 - DNA, 75 bp, Homo sapiens
caggatattaatgattataaccggagattctcagggcaacccagatctggggacttgatctcatcttcatgccag

SEQ ID NO: 655219 - DNA, 90 bp, Homo sapiens
ctcctgagtagctgggattacaggaatgcttccggatcccaagaacactcacatcgtcatcagctggatgatcgcacagactgtcactgc

SEQ ID NO: 655220 - DNA, 75 bp, Homo sapiens
ggcagtccacccaccgccgccgcctcccagatgtcttcatgacccagttctctgccctgcagacagctcgatctg

SEQ ID NO: 655221 - DNA, 74 bp, Homo sapiens
gggaaggagcacgtacagaagtacctgctgacactcatgaacattggtgcttcaaggatgaccgcatcgtcttc

SEQ ID NO: 655222 - DNA, 82 bp, Homo sapiens
gtccaggcgggcctcccgtttctggctccgggctgagcttcctggagaagaggaaggagggtgtgaagacagagaatgacca

SEQ ID NO: 655223 - DNA, 54 bp, Homo sapiens
gttaaggattccaagtaactcttatttgaaatgactgctgtccatgcaggcaac

SEQ ID NO: 655224 - DNA, 76 bp, Homo sapiens
ctcctcgccagcagccgtccggagccagccaacgagcggatgtacagttacccagcacgtgtacctcctcctcctc

SEQ ID NO: 655225 - DNA, 80 bp, Homo sapiens
ctgtgttctggaaaggcacattgtaccctggatgcagcagatgtcttgtggcttcaagcactcagcagtggtcacttcag

SEQ ID NO: 655226 - DNA, 100 bp, Homo sapiens
gaggctttcctgctggtggcaaccgcctacgagacactcaaggtgatgagaagctacaaggcgaccatccagcagaccttggacatcctgttcctccggg

SEQ ID NO: 655227 - DNA, 82 bp, Homo sapiens
tggaagaagaagaagagcatgatcggcatgtccaccaaggcagatcacgcaggaggccggggaattcatgatcacatttccc

SEQ ID NO: 655228 - DNA, 82 bp, Homo sapiens
cctggacttcgcctttcccgagccctggaggtggggagaaaagtcaggtagcattggtgctgcagatagtcctgagaactgg

SEQ ID NO: 655229 - DNA, 98 bp, Homo sapiens
gcgcgggctggttcgggatgagcgatggcatcggtcaaggtggccgtgagggtccggcccatgaatcgcaggtgtgatcccctgggcccgtttgttgt

SEQ ID NO: 655230 - DNA, 90 bp, Homo sapiens
gaatgagtataaaggatgggttttaactacagacccagtctctgccaacactgagcttgctggttttattaaaaaagtgcgaagcaaaaa

SEQ ID NO: 655231 - DNA, 74 bp, Homo sapiens
ggagactgcatcaggctctcgagttgcatgctgagaatttgaaaaatgaagatgatgtagacactggactatta

SEQ ID NO: 655232 - DNA, 100 bp, Homo sapiens
cagaggagaatctgaaaaaaagagaaacctgggtgaactttcacggacaacctcagaggacaacgaagtgttcgggatagctgggagtatggccaccctg

SEQ ID NO: 655233 - DNA, 100 bp, Homo sapiens
ccagtttgaatcttcctttgagctccggaaagttggcaatgtgcagaatatacacaaggaagataaacctttaagtctgagtatgcctgtaattacagaa

SEQ ID NO: 655234 - DNA, 100 bp, Homo sapiens
ctacaatgaagtatatgcagaggaggtcccacaggctcctgccctggactaccgagatatgaaaaacagtagctccgtatcgaatacattgacaaatgga

SEQ ID NO: 655235 - DNA, 82 bp, Homo sapiens
ctgaaggaagagtgcaaagactttgtggacagtgccgggagcaaagagatgattaagacaccatcccaggcctcaagcccca

SEQ ID NO: 655236 - DNA, 100 bp, Homo sapiens
tcgtcttcctattgatggacaccagggagagccggtggcttcctgccgtcattgctgcaagcaagagaaaggttaagaatagacccaccagcatttcgtg

SEQ ID NO: 655237 - DNA, 74 bp, Homo sapiens
cgaaaaagaacgacatgatgcaatcttcaggaaagtaagaggatccaaaatacggagctggcatatacttcacc

SEQ ID NO: 655238 - DNA, 83 bp, Homo sapiens
cggaaagcagcgtcaggagccatagtacctacagcagcactccaggccgccatggcatcagatgaaggcaaactttttgttgg

SEQ ID NO: 655239 - DNA, 88 bp, Homo sapiens
acaggccatgcagagctttaattctacccagcaaaatgaaactgagcctaatcagcagaccctgatgctcccataagacagaaaatgc

SEQ ID NO: 655240 - DNA, 75 bp, Homo sapiens
tgaacatcatgaattcccaagaaggagtgaaaatgcctcgtgtaaaagcagctcaagctggaagacagagctctg

SEQ ID NO: 655241 - DNA, 51 bp, Homo sapiens
ggtgttttggatgcattctagaacacaggctctgaacaagaaggaacacag

SEQ ID NO: 655242 - DNA, 83 bp, Homo sapiens
gtcgcccaggagtcatcggacgccagaatctgataacgaaggaggcccaacttcattcaataaggagcctgacggatttatcc

SEQ ID NO: 655243 - DNA, 100 bp, Homo sapiens
ggggaccaggacagtcgcgaggttcgagtgttgcagagcctgcggggcaagatctgctgaccccgcactacatctacccaccagccatcgtgcagcccag

SEQ ID NO: 655244 - DNA, 75 bp, Homo sapiens
gccatcagcttaatcattcaccatgacagctacatcatggagaaagcagatcttgtcatagttggtgctgaagga

SEQ ID NO: 655245 - DNA, 75 bp, Homo sapiens
tacctcggggcagatccggaccaagatttctctatgaatcatcatcaagaactctgggagaacttttgaattcat

SEQ ID NO: 655246 - DNA, 75 bp, Homo sapiens
cctgtgcgggatggaacaaaaggtactactgagcgagtgtgcttgatccagggaacggttgaagcactgaatgca

SEQ ID NO: 655247 - DNA, 90 bp, Homo sapiens
caagcagcgcctcctcagctgcctcctgaagctcatttccaccgaggtcaaccccaagctggtacaaagtagatttcatagaagagaagg

SEQ ID NO: 655248 - DNA, 85 bp, Homo sapiens
taaaattcttcagacattacgagaaatgttagagaagaaagacagctttgtggaagaggcacaacttcctgaatggaccatgact

SEQ ID NO: 655249 - DNA, 90 bp, Homo sapiens
aaggctaccatagctgggggtggccagaagcctgtcttagatgttcatgcagaactagacagaattacacgaaaaccagttacagtttct

SEQ ID NO: 655250 - DNA, 75 bp, Homo sapiens
cggcgcggaccccgcgtgcgccttgctcgcccgcagccccgagaccgcaggccctgtttgtgctcttcgtcctgg

SEQ ID NO: 655251 - DNA, 51 bp, Homo sapiens
atgcagcttctcttgcagtgcaggtctgagaaagaaccccagtttaagttt

SEQ ID NO: 655252 - DNA, 75 bp, Homo sapiens
cccagatatagccgttggtacaaagttttctttttaaaagcggaaggagagttttacatggaagtggcttacaga

SEQ ID NO: 655253 - DNA, 75 bp, Homo sapiens
ggaggaggacctgaagcagctggtattacaagtggataaataatgtgcactgctctgagcccaaaggtacgcagt

SEQ ID NO: 655254 - DNA, 100 bp, Homo sapiens
ctgctggctgtatgggagtttgtgtttggcggttgggcccgaaggcatcctgcagaacggggctgtggacgacagtgtagccaagaccagccagttgttg

SEQ ID NO: 655255 - DNA, 80 bp, Homo sapiens
ctgcaagctctttgacacacagcagttcttgtcaggatcaggtctcctgggcatggctaacattgacctggaaaagagca

SEQ ID NO: 655256 - DNA, 100 bp, Homo sapiens
gtcattgtcgtcatcgttgcccgaccgctttccgggagactggagtcgaaggccgtgaggtatttttctaaggtttttggattcaaagcataaaaaccat

SEQ ID NO: 655257 - DNA, 82 bp, Homo sapiens
catcaaaaatagtgatagctttgataaattctctaaccatggcacaggtagagaaacgtggaggtttgctccggaaatcttc

SEQ ID NO: 655258 - DNA, 76 bp, Homo sapiens
aggaggatgtagtagcaacgaatgagaatgtggtaactttattcagtgcacagccagagaacaacacatcacacac

SEQ ID NO: 655259 - DNA, 90 bp, Homo sapiens
ggcaacagaggatgtcaacaattttttggagatatgactccacgtagcatgtcaaggactacattaatcaccaattcctttatttttccc

SEQ ID NO: 655260 - DNA, 76 bp, Homo sapiens
cttccacagccaagtgcgggagtccacggtgttcttcaacggtgccaacgtccggcaggtggacgtgcccacgctg

SEQ ID NO: 655261 - DNA, 95 bp, Homo sapiens
ggaatgctgcccgatggccctgggtcctcgctgtggggcaatccgggcttgcagacgagagttgtctgctggttctcagcttgaagaagattctg

SEQ ID NO: 655262 - DNA, 100 bp, Homo sapiens
ggcagcagcggcagcggcaagcaccctcaaagattagaacgactccgaaaagagagacaaaaccagatcaaatgcaaaaatattcagtggaaagaaagaa

SEQ ID NO: 655263 - DNA, 51 bp, Homo sapiens
gtttgctttttccttagtcaatcagccctgaccattgtggtcactgagtgg

SEQ ID NO: 655264 - DNA, 100 bp, Homo sapiens
gcggcgccatattgcggccctcagcggccgcgaccgagtcatggctgagacctacgactgtgccctgtccacggtgcctcctgcatgtcctgctgccctg

SEQ ID NO: 655265 - DNA, 100 bp, Homo sapiens
ggcccacagtgggggtgtgcaaacccgagagaactggataacagacgagtacctttggaaaggtcacgctctcgccacaatggagctatctcatctaagt

SEQ ID NO: 655266 - DNA, 100 bp, Homo sapiens
gtggatgatttgaagatattagcctaacaagatggaagcaggtttaaaattttacataagaagttacctttttcaggtttccactgtatccaaaaggagg

SEQ ID NO: 655267 - DNA, 101 bp, Homo sapiens
agagatgatagcaaaaatgcacatccggggcattgtcaaggtacaattcaacagtgttgtgatgccattgatcacctatgccgcatcattgaaaagaagca

SEQ ID NO: 655268 - DNA, 75 bp, Homo sapiens
aacccgaagaagaaaggattcgttacagccagagattggtcagcgacatcaaattccaggcacccaccggggagg

SEQ ID NO: 655269 - DNA, 83 bp, Homo sapiens
tggaggaacagaagcggaacagccacagcagcctcccaaggagtctgcaagttgaatcctcactatggatgggctcattgagg

SEQ ID NO: 655270 - DNA, 90 bp, Homo sapiens
accggcctggagatggagttcgactgcgagggcctgagacggctgcttggcaaggatgagaacaagttgagcagtgccaacggccatgaa

SEQ ID NO: 655271 - DNA, 100 bp, Homo sapiens
tgggaacctaaattattctgcaagacaaagggaagaaataaaattttcccatactgaccccagcatgagaccagatgtaagctctcctccatccagctcc

SEQ ID NO: 655272 - DNA, 112 bp, Homo sapiens
tggtgcagcgttggggcgccagggctgcgttcccgtctcgcgtcccggactgagaaggatgactcactggttgtgtggaaggaagtcgatttgacccggctgtctgagaagg

SEQ ID NO: 655273 - DNA, 80 bp, Homo sapiens
acgagcatggcatggccccgcaggtcttcacccaggccctggagtgcatgcgcagatggtccccggccatcacaaaaaga

SEQ ID NO: 655274 - DNA, 74 bp, Homo sapiens
aagatctcaaaaactttcatgtagacctttgtcgtccatttgctgctcactgaatctccctggaaaaggagaca

SEQ ID NO: 655275 - DNA, 100 bp, Homo sapiens
gcccgcggaggccggggagcagccgaccatggagccccagaatgtgggaggaggccattgccttgggcaaggagctagccgagcagtatgagaacgaaat

SEQ ID NO: 655276 - DNA, 100 bp, Homo sapiens
cttcacttaatcatatccgagctggtgaccaagaatatggcccaggtgaccaaagccctggacaaggccctgagcaccatggacctgcagaaggtctcct

SEQ ID NO: 655277 - DNA, 100 bp, Homo sapiens
gcaattttttgtggaacagaattggagcaggccagcgatctgtacatgagacccaggaattatttccaaagcaagattcatatgctgaaggggtaacaga

SEQ ID NO: 655278 - DNA, 100 bp, Homo sapiens
ctgcccagacggctcacctgtgcgggatggaacaaaagacggaaatggagagctggatttctccacttttctgaccattatgcacatgcaaataaaacaa

SEQ ID NO: 655279 - DNA, 82 bp, Homo sapiens
gacatccctggctgctggtttttcaagctgcctcacaagatgctgtttaagaagaacctatttgagatggcgattaaccttg

SEQ ID NO: 655280 - DNA, 98 bp, Homo sapiens
tgaggcatgggcaaaacttgatgtggtgaccaagaatatggcccaggtgaccaaagccctggacaaggccctgagcaccatggacctgcagaaggtct

SEQ ID NO: 655281 - DNA, 96 bp, Homo sapiens
tctctttctggcctggaggctatccagcgcctctggctgtacctggcagggagcagcctgccctgtctcacgctgattggctctcctaattttggg

SEQ ID NO: 655282 - DNA, 75 bp, Homo sapiens
tgagaaagccctgaagcagaagggcatcaccgtgaagcagaagagaacaaccccgtgccgcgcagccgacgcgag

SEQ ID NO: 655283 - DNA, 100 bp, Homo sapiens
tgatgaatcaggtcccgaaagtgctaaaaaggctgaactccagtgcacccagttagacttggagcggaaactcaagttgaatgaaaatgccatctccagg

SEQ ID NO: 655284 - DNA, 75 bp, Homo sapiens
agccccacccggagttcagcgcggactcccccagcccagctcgagcccagaaaactatcctctaagaccagacgt

SEQ ID NO: 655285 - DNA, 100 bp, Homo sapiens
aaatagtggcaggtgacagtctgcatgtgcagttttcagcctgctgagggatgcccaagaagttccagggtgagaacaccaagtcggcagcggcccgggc

SEQ ID NO: 655286 - DNA, 90 bp, Homo sapiens
aagcagttatttggacgcttgctctttaatgatccgagccctaatttgtttagaactgtaatatgcacagttaaaacaacttgtcctctc

SEQ ID NO: 655287 - DNA, 90 bp, Homo sapiens
caggacctggacccggacccaaagtgccatgtctttaataccaagctccacgaagatctctgtgagaagaggacggctgccacccttgcc

SEQ ID NO: 655288 - DNA, 100 bp, Homo sapiens
caacagagccagatcagaacccaggtcaccacctcccacagccctgctgcaccaggggagcaaggcttcggggaatgcctcctggccgtggccctggcag

SEQ ID NO: 655289 - DNA, 83 bp, Homo sapiens
cttgtctgaggcggaggcagccccgcgccgcgccggacccgaggaaaccacccctactcctaatcccccgactacagaagagg

SEQ ID NO: 655290 - DNA, 101 bp, Homo sapiens
tcaggctgcaacaaggagaagagccatggaaacaggaggaagaattcccaagccaaagctttccaggtactccaaagattcaggtttactcacgtcatcca

SEQ ID NO: 655291 - DNA, 98 bp, Homo sapiens
catctctgcttccagctcctggtcagattccactgccgcccgccacagcagggccctggctccgggcctgcggtcagaccaacgtgtcctgcagggtg

SEQ ID NO: 655292 - DNA, 88 bp, Homo sapiens
gagccgcagcgccgggcgaccccgcccgggcctcggaaaaagcttgagtctccacccccatctaccaatcccttcctggaagatgagc

SEQ ID NO: 655293 - DNA, 50 bp, Homo sapiens
aggaaacatatgttacgatagccgtcacggtctagatcacattctcgatc

SEQ ID NO: 655294 - DNA, 73 bp, Homo sapiens
ggagccgccgccatgggggcctgcctgggagcctgctccctgctcagctgcgccgagacgcatccagagcttt

SEQ ID NO: 655295 - DNA, 88 bp, Homo sapiens
gcactggctgctggtcaaggcttcagtgtggagtaattgacactttcgagggtcctgcagttctgagcttgggttccctttgcctgga

SEQ ID NO: 655296 - DNA, 100 bp, Homo sapiens
tagagaaatggttgttcaactactagatgactttaaaatatcaggagttaatggaacacccctgaaaagcaaaggcctcatctccatggcacaggtgatg

SEQ ID NO: 655297 - DNA, 83 bp, Homo sapiens
aaaggctctccttgcagctgcttagacgctggatttttttcgggtagtggaaaaccagaatagcctaacatggcagaccagag

SEQ ID NO: 655298 - DNA, 98 bp, Homo sapiens
gaggaagcaggagcagcccaagcgccttccctcacgaattacatgaacgacagccttcgcaccgacgtcttcgtgcggttccagccagagagcatcgc

SEQ ID NO: 655299 - DNA, 80 bp, Homo sapiens
ctatccaaatgcgattagttgatgtggcctgcaaggtttgttgataagccggggcccttcgtgggaccctgcggtcactg

SEQ ID NO: 655300 - DNA, 115 bp, Homo sapiens
ccaggttcccatggttgccggctcccctctcaggacaacccagatgtgcaacaaagtgcgatggccggatcacctcaacagtcacgtcagacaagtgcactcaacagaacggccc

SEQ ID NO: 655301 - DNA, 75 bp, Homo sapiens
cggccacggaggcaccatgaagaagtcttactcaggagaaggaagccaacatccttttggagccatgaatattgt

SEQ ID NO: 655302 - DNA, 83 bp, Homo sapiens
gagggaaagtgccgctttaaggagaactgcagccatcactggtgcaagctatatttaacggagatcctgatgaagttcgagca

SEQ ID NO: 655303 - DNA, 97 bp, Homo sapiens
agccactggagaaaaagaagaaaatgttaaaaagaacagatacaaggacatactgccattatatcctttcgggctctgatgacttcaacctgtacat

SEQ ID NO: 655304 - DNA, 51 bp, Homo sapiens
gcccccacgggctctacctgaccctgcaggaaattcgaaatgagtcccatg

SEQ ID NO: 655305 - DNA, 100 bp, Homo sapiens
tctgccctcggcgagaagaccgtcttcgggcaagagctccgagtaggtgctggagaatctggtaaaagcaccattgtgaagcagatgaggatcctgcatg

SEQ ID NO: 655306 - DNA, 75 bp, Homo sapiens
tggcagattgaggaacaaagataagggagaacaagcagaaactggtcagagattgttcagattccattctgtggg

SEQ ID NO: 655307 - DNA, 75 bp, Homo sapiens
ggaacagccatgcaaaggcaggggaggaagccacctcgaggaataagacgagttggaagaagacctgatcaacaa

SEQ ID NO: 655308 - DNA, 100 bp, Homo sapiens
gagatgtttatatgaagagaaacagaaagaacacatccatattggggagatgaagcagggctgctcttcacctatcgtggtgaagtttgctgacactcag

SEQ ID NO: 655309 - DNA, 80 bp, Homo sapiens
ccctcaatagccagcacccacagtgagctgagcacttacagcaacaattgttttaaaatcaaagatgggaaaatcggaga

SEQ ID NO: 655310 - DNA, 90 bp, Homo sapiens
gcaaagctgtcctaggccaaccagagattcatctttcatgcagtgacatgttgataaaaaatgatggtacaccaggggttggaaaaacca

SEQ ID NO: 655311 - DNA, 96 bp, Homo sapiens
aagcatgcaaactgaacagttcgagattgtcgtcatcctagaaggcattgtggaaacaactggtattttcttacactgctgacaaagaaatccgaa

SEQ ID NO: 655312 - DNA, 103 bp, Homo sapiens
ttgttctcaattatttgaagatacttacaaggaatcctgggcattcccttgccccggaaacgccgtgtccaggccgacctaagccaggagccgcaggggcggg

SEQ ID NO: 655313 - DNA, 75 bp, Homo sapiens
cacagctaagacgccaggacccactggaagcctagaaatggtactatcttggtcgtcggatgtttattgttattt

SEQ ID NO: 655314 - DNA, 80 bp, Homo sapiens
gggagaggcgagctcgcgatgagtggtctcggcaggctcttcgggaagggttcaacagagtttggaaaagatttctaaac

SEQ ID NO: 655315 - DNA, 97 bp, Homo sapiens
gacttggatgagacaataattatttttcactccttactcacggggacatttgcatccagatacgggaaggtgctcagaattttgatgtcatacgact

SEQ ID NO: 655316 - DNA, 100 bp, Homo sapiens
aggccttccgagaggaacctctatgccgacatcgacgccgcctggcaggccctgcgcaccagagcaaacgccctggaggagcagctgaaggagcaggagc

SEQ ID NO: 655317 - DNA, 49 bp, Homo sapiens
gacagcaaagtgggccccgaagtagctgctgggcctctctgtggccacc

SEQ ID NO: 655318 - DNA, 50 bp, Homo sapiens
gaattacactgtgatacgactgactgtccgggcccaccagctggtcttgc

SEQ ID NO: 655319 - DNA, 96 bp, Homo sapiens
aaataagcgtgccgttcagggtccagaagaaacaggtataagccactggctgatacattcctgcgtgagaagaaggaacagtcagctgccgagcga

SEQ ID NO: 655320 - DNA, 100 bp, Homo sapiens
cagctacatccaggagagaatgctgacagtcctgcaggtatccgttacagcactgatgtgagtgtagatgaagtaaaagctttggcttctctgatgacat

SEQ ID NO: 655321 - DNA, 99 bp, Homo sapiens
caacaggaccctgccgtctgtgagcaggaaagcagagttcatccaagatttagactatgtgtttgcgcacttcagtggcatctttcttacaagtactgt

SEQ ID NO: 655322 - DNA, 105 bp, Homo sapiens
gaagcctcccgggtggcttacagacgctgccagcatcgccgccgccaggtgtggacactgccagcggctgcagccgacttggaatgacctgggagacaaatacaa

SEQ ID NO: 655323 - DNA, 82 bp, Homo sapiens
tcgctcggctgcgggaaatcgggctgaagcgactgagtccgcgatggaggctgctccagttacagcaccacccggccgctgc

SEQ ID NO: 655324 - DNA, 50 bp, Homo sapiens
tgatgatgaagaaccgcagatccaggaatcatcatccagggacgtgccag

SEQ ID NO: 655325 - DNA, 75 bp, Homo sapiens
tggcaagcccatgtgtgttgagagcttctcagactatccacctttggaaatgggcaagttcatgaaacctgggaa

SEQ ID NO: 655326 - DNA, 100 bp, Homo sapiens
gtgtgtaccttggatgctgctgtttaaaccattggtccttcgccgtcagtatttgaggagaaagcatttggacaagggcacacaactggttccgttaagc

SEQ ID NO: 655327 - DNA, 90 bp, Homo sapiens
aggttgccgctggtgatgacaagaaaggggcaagattcttgccaagagaattaatgtgcgtattgagcacattaagcactctaagagccg

SEQ ID NO: 655328 - DNA, 74 bp, Homo sapiens
taatcctcaatttaagcctgatctaacccctagaaacaggcctccccaaagccagtcctgtgtcaccaatcaaa

SEQ ID NO: 655329 - DNA, 83 bp, Homo sapiens
ccacaaccagtttataagtgctgttaaatatgtgactaggactcaatgaaattgctgcccccatgttcctgaggctctgcaag

SEQ ID NO: 655330 - DNA, 99 bp, Homo sapiens
actccagaattcctaatagaacaaatcgaaaaggacaggtgccggcggaggtggtcccagatcctatggacatgtccctggacaaggcagaggcggcac

SEQ ID NO: 655331 - DNA, 98 bp, Homo sapiens
caacgatactgggggctgctctcacatactcactttgcaggcccgctcgccatggccctcttcggggccctcttcctagcgctgctggcaggcgcaca

SEQ ID NO: 655332 - DNA, 75 bp, Homo sapiens
ccagcgtgttcagcctccctgactccaagggaaatgtttcaacgtgcgcaagcgttgcggcggcgggcagaggac

SEQ ID NO: 655333 - DNA, 100 bp, Homo sapiens
ggagttccacttctccccgcaaacctagatattacaccaccatattgcctcagtagagaaacttgctttgactacttctggatgcccccttgtgatacag

SEQ ID NO: 655334 - DNA, 100 bp, Homo sapiens
ccccgccaaagtggcctccaagaatgtcatccctgccctggaactggtggagcccattaagaagcagggtccctgaggtcggtgctcaataaagagtctc

SEQ ID NO: 655335 - DNA, 80 bp, Homo sapiens
ttggaatgaatccttctagagacgtccacgaaagaagatgctgatatgctacaacacggatgaacctggaggacgtggtg

SEQ ID NO: 655336 - DNA, 73 bp, Homo sapiens
gcgccggcctcctccgtgcggagaagaagctgcggccgcacctggccaagatgaccaggataaaaaggtggaa

SEQ ID NO: 655337 - DNA, 75 bp, Homo sapiens
agatacgcagtattttggcccaggcacccggctgacagtgctcggcctccggaatgccccccgctgctgggcagt

SEQ ID NO: 655338 - DNA, 76 bp, Homo sapiens
gggattttcagggctttgaatgcatcagaaccatgcacggccatgacttgcttctggcagtcaaacagcaacagca

SEQ ID NO: 655339 - DNA, 100 bp, Homo sapiens
ggtgctgttctctgcagaggtccaagtacagaatatggcttttaccatgatttcttcctgggaaaggagaggaaggtggagttaaaagaccaaacgaaac

SEQ ID NO: 655340 - DNA, 75 bp, Homo sapiens
ggagtacgtcgttcccgctgcgctaggggaagcgggcagtttttggctttcacccccaaccagtgaccaaagact

SEQ ID NO: 655341 - DNA, 61 bp, Homo sapiens
atctgcggccatggcggcgactactgccaaccccgatggcgatgaagatgatgaagaggaa

SEQ ID NO: 655342 - DNA, 100 bp, Homo sapiens
cacactaactctggcagagcctccgtttcctcataggtcccacgtacctcggagatttatgtccaccgaagtggtcgaactgctcgagctaccaatgaag

SEQ ID NO: 655343 - DNA, 75 bp, Homo sapiens
cacttacatctctagataacagtctgcactttcacccgtttcagatctgctcactttagcactctggcaattaaa

SEQ ID NO: 655344 - DNA, 75 bp, Homo sapiens
gtgaatccccctaaacaggagcacctgctggcgctaaaaggaaccacgtgaatgttgagggggcgacacacaagc

SEQ ID NO: 655345 - DNA, 100 bp, Homo sapiens
ccggcagacactcctcatcttcttccaagacctgcacatccgagtgatgatgaccaaacggaccaaagacatgggcaagttcagttctgtcaccgtgtct

SEQ ID NO: 655346 - DNA, 75 bp, Homo sapiens
atctacctaccaatcgtgaaaactatattcacagtttggctgtagcagcaattcctgaaggtctccccattgtgg

SEQ ID NO: 655347 - DNA, 75 bp, Homo sapiens
cccactctagaggagctgaaagtagatgagggttacagctgaagtaaagcacaacatcaccaacactgtggtatg

SEQ ID NO: 655348 - DNA, 82 bp, Homo sapiens
tgattaagcagttttacagtcttttggtgagtgacacagcgtgggcatcagcaatagcagaaccatcttctttaacatcaag

SEQ ID NO: 655349 - DNA, 83 bp, Homo sapiens
ccgagggtttggaactcgcagagtaagactttgaccccgacgcaggcttcagtgattgccgcggatcagaagcctgagcactt

SEQ ID NO: 655350 - DNA, 88 bp, Homo sapiens
agaagcttgtattccaaatgaaaatttcctacatctgaggcatctgtgtaaaagggaatcatcatccagggacgtgccagaaaccaca

SEQ ID NO: 655351 - DNA, 87 bp, Homo sapiens
gaaggcttatgaggatggctgcaagactgtcgacctaaagcctgactggggcaagttctgtggctcctgatggatctgagaagatgg

SEQ ID NO: 655352 - DNA, 85 bp, Homo sapiens
acgggcaggcaagcagtgtcaatattgcagctactgcttctgagggctgttgataatcaggtgtatgtggccacagcctctcctg

SEQ ID NO: 655353 - DNA, 96 bp, Homo sapiens
gcagcccttgccttgagtcagtgcgccgctctccagcccgcttgaacgatcttgcttctgaaatatctacctgggatggagtgatagtaacacctt

SEQ ID NO: 655354 - DNA, 74 bp, Homo sapiens
ggcaatcttcacggggctggctgctctgtgtctcttccaagtttcttaaacaattaggtctacatcctaactgg

SEQ ID NO: 655355 - DNA, 97 bp, Homo sapiens
gcgtgcgcggacggtgtgcgggagcctgactacggggccctgtatgagggacgcaaccctggcttctatgtagaggcaaaccctatgccaactttca

SEQ ID NO: 655356 - DNA, 50 bp, Homo sapiens
tggagccatcgaccatatcagcctacatacagatcacttttgtggagccc

SEQ ID NO: 655357 - DNA, 100 bp, Homo sapiens
ggcctcctcagtgcgaagaagctgcagccgcacctggccaaggggcttcgtgggacacatatgcaacatgcctatgatttttacaagcctgatatgctat

SEQ ID NO: 655358 - DNA, 95 bp, Homo sapiens
ggaagcagaatattccttatatggtgctgaagaaaaaatcctaacagaattccgtgaagcttgccatattatacctcatgactttcacctgcagg

SEQ ID NO: 655359 - DNA, 75 bp, Homo sapiens
tggctccagctgttttccactaggagagtcgacttcaatgttcctatgaagaacaaccagataacaaacaaccag

SEQ ID NO: 655360 - DNA, 133 bp, Homo sapiens
caacaatgttccgtgttgaatatgcatctaaagttgatgagaactttgactgtgtagagattgcattcatggcttctctggcaacccacttcagcaatcagaacagtgggattatcttcagcagtgttgagac

SEQ ID NO: 655361 - DNA, 75 bp, Homo sapiens
ccaccgtcagcactcagcgcgggccgccaaaacagagtggagtacgagaaaagggtccgagcacaagccaagaag

SEQ ID NO: 655362 - DNA, 75 bp, Homo sapiens
aatagatcctcaccagatgtcaaatttgtttgtcagattgctcttaaacttggtgtgactgctaatgatgtaaag

SEQ ID NO: 655363 - DNA, 83 bp, Homo sapiens
cgaccccgtcccgaccctggccgccccgagcggagcctggagctgtttttggaaggaagaaagatggaaagcggtgcagttct

SEQ ID NO: 655364 - DNA, 100 bp, Homo sapiens
ctggcccttggcctcctcctgctgctactgtgtccagcgcagaatgaggaaaatggggagcaggaggctgacaatgaggtagacgaagaagaggaagaag

SEQ ID NO: 655365 - DNA, 82 bp, Homo sapiens
cagccaccagggctacagcactgaggctggcctgggttctgaggaaaacgcaatggtggccatggacttgggctctccctcg

SEQ ID NO: 655366 - DNA, 82 bp, Homo sapiens
caggaaattcagcctcaaaaccgtcctgctgcttgctgaccaaatgaggagcaggagcggcttcgcttggagcaggagcgag

SEQ ID NO: 655367 - DNA, 100 bp, Homo sapiens
aaggagaatacacacatcacaaagatcctggaatatataaatgtgttgtttgtggaactccattgtttaatttgagttcctgagatctagttggtgagag

SEQ ID NO: 655368 - DNA, 75 bp, Homo sapiens
gtggaaaacacagatccagagtgttactggcttacaaattggattgaggtaatgagagatccaaacaccaagcgc

SEQ ID NO: 655369 - DNA, 100 bp, Homo sapiens
gtactacgagacgtgtgctacatacgggctgaatgtggagagggtcttccaggacgcagagaagcctgtgttcttcccagccttcgcagccgaggcccag

SEQ ID NO: 655370 - DNA, 75 bp, Homo sapiens
gtcagctctgactctacagttcatgtacgatgagcatgaatacaactttgtctgagagccccttcaagtgtgatc

SEQ ID NO: 655371 - DNA, 89 bp, Homo sapiens
gaagtatccaatagggatattgtagaaactgtctttaacctgacaatgcagatcttcgtgaagactctgactggtaagaccatcaccct

SEQ ID NO: 655372 - DNA, 74 bp, Homo sapiens
ctgatgggacgacaggtttcatcaaccagaaaggattctgagtaacaataagatatccgagctgaagaatggct

SEQ ID NO: 655373 - DNA, 80 bp, Homo sapiens
aattaaaaaatttattaaaggaagcacacctaagagttgtctctgtgggaagtttgtcctccgtccattgcgaccatgcc

SEQ ID NO: 655374 - DNA, 100 bp, Homo sapiens
taactctttactgtggtctaatggagacagcactcgactgaaagtgaaggacccagactctagttatggcctgatatgaaggagtcacgcctcccgcctc

SEQ ID NO: 655375 - DNA, 103 bp, Homo sapiens
attatttttcattatccttttctgggtgctatgggtgatcattccaagagtgacttaagagattaaaattaatttggttgctgttggttctgaacaaataatg

SEQ ID NO: 655376 - DNA, 122 bp, Homo sapiens
tgccgccacctggtggtttgtgtatgacgccgagggacctcacatcaacttctaccagctggctcacggttttgaggagatccgtgctactttccttcagaccgatttgctgaagttgctgg

SEQ ID NO: 655377 - DNA, 100 bp, Homo sapiens
ctccacgctggactggtgcgaggagaactactccgtgacctggtacatcgccgagttctaggtggactagcagaaagactaaatggactgcagaatcgag

SEQ ID NO: 655378 - DNA, 82 bp, Homo sapiens
ggctgcggccgtcgcccaggagtcatcggacgccagaatctggtgcgcgcggagccatggttatcatgtcggagttcagcgc

SEQ ID NO: 655379 - DNA, 125 bp, Homo sapiens
ccctcttcgacagctacacaaatctggaacgggtggccgattactgcgagaacaactacatacagacattccactgcccttctcccaaaaagatgtcttttcgaaaaatggatcccagctgtaca

SEQ ID NO: 655380 - DNA, 82 bp, Homo sapiens
agcaaagatggtacaaaagagtctttggaggatgcggctttgatgggaaggagcgccccacctccctgaacgtgttccccct

SEQ ID NO: 655381 - DNA, 75 bp, Homo sapiens
aaaaagccctcagtaccagagacagaagcagatggattcgtccttttagctcaggtacctgacaatgatgagcag

SEQ ID NO: 655382 - DNA, 73 bp, Homo sapiens
gaggagcacgcagctgaacaagaagagagccatccccaatcagatgaactctttgccagcagagaggatccag

SEQ ID NO: 655383 - DNA, 156 bp, Homo sapiens
gccaatctgggcggcgtgcccagcaagagattaaagatgcagtacgccacggggccgctgctcaagttccagatttgcatcagccactatgtgattgtcatgtccatgaccatctttttggtgttcctcaatggcctggcccagctgctcacaacg

SEQ ID NO: 655384 - DNA, 100 bp, Homo sapiens
atggtatccattacctccatgcaaattgggtgcttcacagagacttgcctgattacatcaaccccagagccgtgcagctgggctcccttctcgtccgcgg

SEQ ID NO: 655385 - DNA, 100 bp, Homo sapiens
tgcacttcctcaaccctcaggaagctcagcggtgggcagtcctagtccgaggtgccaccgtggaaggacagaatggtgagcgacctgtgagagtttatgc

SEQ ID NO: 655386 - DNA, 96 bp, Homo sapiens
atggaacccaaacctcagaagagtccaggttgctccttgagggcaggacagttcttatggctttatccgttgcgtaagcacagagaggtctgcgag

SEQ ID NO: 655387 - DNA, 75 bp, Homo sapiens
ctcaggccccctcaccatcctagaggtcaagatcagctctggctagggggggccctcagcctcttggccttgaac

SEQ ID NO: 655388 - DNA, 75 bp, Homo sapiens
ggggaccttgccttgcccgggttgcacactgacaagaaacagatcagtgttgggttcattggctatccaaatgtt

SEQ ID NO: 655389 - DNA, 75 bp, Homo sapiens
tatggaaacaaatactatgaagacaacaagcaattttttgatatttgtcaggatacgaatcaggttctcttcaag

SEQ ID NO: 655390 - DNA, 100 bp, Homo sapiens
gccggcatggccggcccgctgcccgacgagcaggacttcatccaggcctacgaggaggtgcgcgagaagtacaaagaggtggggctggtgtccgagcact

SEQ ID NO: 655391 - DNA, 80 bp, Homo sapiens
ctgtaacaagatcgcattttacagatatcgcaaacggcaccagttcaggggggtaccgcccgcctcccagaaccaaagaa

SEQ ID NO: 655392 - DNA, 98 bp, Homo sapiens
ctgctgaccgagagagctcactcagccaggccctgtctctgcccctggtggtcatcgtccatggcaaccaagacaacaatgccaaagccactatcctg

SEQ ID NO: 655393 - DNA, 50 bp, Homo sapiens
gagctggggagcccttctgcgccacagattgttagaagatacagtgactt

SEQ ID NO: 655394 - DNA, 75 bp, Homo sapiens
ctgaaataatgtttgagtccttcaatgttccaggcttgtacattgctgtgcaggggagcctccacctcgcccacc

SEQ ID NO: 655395 - DNA, 46 bp, Homo sapiens
gctgcggaacaggacgccctctgatatcatggaagggaagtggttg

SEQ ID NO: 655396 - DNA, 98 bp, Homo sapiens
aaaagcacacaaagacctcctcctccacaggggagacagagattgaaaaccaaggccctgaatgctaactgtcttgcccagggtcatacagcccgtcc

SEQ ID NO: 655397 - DNA, 51 bp, Homo sapiens
ccaggggagttctctgtgtctgtgaactcttcaagaagcccagccccttca

SEQ ID NO: 655398 - DNA, 100 bp, Homo sapiens
agaaactgcgttgggtgaccgtaggctaccattataactgggacagtaagcctatggaccagctctcattgaacactgtcttttagaaaatggattctcg

SEQ ID NO: 655399 - DNA, 123 bp, Homo sapiens
cgacccagatcccagcggaaaggagcgcgcctctttttggcttggggagctgcagcgttcgggacgtccagatcggtgacatcgtcacagtgggcgagtgccggcctctgagcaagacagtgc

SEQ ID NO: 655400 - DNA, 100 bp, Homo sapiens
gctccttgcgtcccgcctccctgggagctccgcacgggtgattgtagagaaggctccaaaagccagggtgcctgatctggacaagaggaagtacctagtg

SEQ ID NO: 655401 - DNA, 75 bp, Homo sapiens
gttcttggcagaaattatattttccagcccgtgtctgcagattgccatcacgaaagccaaagtggatttctccag

SEQ ID NO: 655402 - DNA, 100 bp, Homo sapiens
caacctcaccgtgcaccttcgcaagaagcaccagttcaagtggccctcagggcatccccgttttcggaattacatgaacgacagccttcgcaccgacgtc

SEQ ID NO: 655403 - DNA, 100 bp, Homo sapiens
ttacgactcttatgaaatcctcggcaagtttgtaggaaaagatcaggttacaaaactcatccttccattaaaagaggacaaggacacactcagcattcac

SEQ ID NO: 655404 - DNA, 129 bp, Homo sapiens
gcggcccacgctgttccggttggcgagtgacaccactgatgacgatgatgcactcgcccttagagatttgtttgattccatggataaaacttcttccagtattccacctattattctactgcagttttt

SEQ ID NO: 655405 - DNA, 88 bp, Homo sapiens
tctgcaaccccgcagagcgcatccatcaaagctttgcgcaacgccaacctcaggcgagatgagtgaattactggaactgaaacggcag

SEQ ID NO: 655406 - DNA, 97 bp, Homo sapiens
attttctttctgcctgaccttcatacctgatgaattaaaaggctggacgtaaagaaagaagtgatgcactcaattctgcaatagataaaatgaccaa

SEQ ID NO: 655407 - DNA, 138 bp, Homo sapiens
tttggcctacagttcccgctggacctggatgtgagggtgaaggctgtgctgctgggagccacattcctcattgtcaactcctggagcggctccattgagattggggtgacagcgctggaccccagtgtgctggacttt

SEQ ID NO: 655408 - DNA, 98 bp, Homo sapiens
aaacctggccctcttcaatttctgacaaaagcttttctgggagaagaggctacaaggacttagtgcatcagatgtaacagaacaaattataaaaacca

SEQ ID NO: 655409 - DNA, 75 bp, Homo sapiens
ggacagcggcagcgacgagaacctggatcagacaaatttacatgtattggagaccagaccagaagcccttctgaa

SEQ ID NO: 655410 - DNA, 73 bp, Homo sapiens
aagcatttacagtacctaaaaacaggtccctggcgagccccttgcaggagattatggtgggctccatgtttca

SEQ ID NO: 655411 - DNA, 51 bp, Homo sapiens
gcggagccaagatgcgaatgggatctgtctatggcagtgcagaaattttcc

SEQ ID NO: 655412 - DNA, 100 bp, Homo sapiens
agacacacgccccttccagctcacagtggagaagctggagatggccctgagagaagctcactctgaggtcatctacacgaacaatcagaggtacatggct

SEQ ID NO: 655413 - DNA, 75 bp, Homo sapiens
caccgacagcacagacagaatccctgctaccaagcacaaagttatcattgttgggctggataatgcagggaaaac

SEQ ID NO: 655414 - DNA, 90 bp, Homo sapiens
cgggtagattgggagcggaggtttgaccacatgcagcagcattcaggtcgttcagattctaggagataagtttccatgcactttggtggc

SEQ ID NO: 655415 - DNA, 100 bp, Homo sapiens
ggaaagtgaggaattttgaagtacaccgtggtgacattgtatcattggtgagaataaaggcagccccgttgatgactgaaaatgacaaagcatccaccta

SEQ ID NO: 655416 - DNA, 100 bp, Homo sapiens
aacacctcgccaaagcagagaaatagttggacgtgataagtatgagcctgcagctgtttcagaacaaggtgataaaaagggcaaaaagggcaaaaaagac

SEQ ID NO: 655417 - DNA, 114 bp, Homo sapiens
tggccacgaaagccgccaggaaaagcgctccctctaccggcggggtgaagaagcctcatcgctacaggcctcgggccagcggccaggagctgcctcccccagcccccgtcccgc

SEQ ID NO: 655418 - DNA, 100 bp, Homo sapiens
ctggacattgagacccaggctggcatcgtggcccatatccaggaggcactggtgaggtggattgatgatgaatcttctggcacacctggagcaactccag

SEQ ID NO: 655419 - DNA, 98 bp, Homo sapiens
taaaagaaggacagatcctcaaactagctgctcggaacacttcagcacaagaacgctaccttttcttagagcttctaagtaggacatccttagaaact

SEQ ID NO: 655420 - DNA, 74 bp, Homo sapiens
gagactgtgaatgaaactgggtttcagctgaaggagcataaggagaattattttttactcccttataaagccca

SEQ ID NO: 655421 - DNA, 97 bp, Homo sapiens
tggttaaagatggagaaattgtatacactggaacagaatcaacccagaacggatagctccctcctggaaaaggtgatcgccatgatcaaaggcctgc

SEQ ID NO: 655422 - DNA, 100 bp, Homo sapiens
atggcaaagacatcttctggtcagagatacttcttaaaaagttatagaccttactcatgataacaaagatgatcttcaggctgccattgctttgagtcta

SEQ ID NO: 655423 - DNA, 73 bp, Homo sapiens
ggagggtcctctcagtgattaagcaaaacagtttctcatggagttaaactttctcagaagcaacgaaaaatga

SEQ ID NO: 655424 - DNA, 75 bp, Homo sapiens
cccaaagggagatccttctccagcctggagagttcactggaccggagggaccgtttggagggagccattcaccta

SEQ ID NO: 655425 - DNA, 94 bp, Homo sapiens
tgcctgggagcctgctccctgctcagctgcgtctcctctgagcctccggcctccataagacccaaaacagatgacacctcttcccagtcccccg

SEQ ID NO: 655426 - DNA, 83 bp, Homo sapiens
ctcacaatgaggctccctgctcagctcctggggctgctaatgctctgggtctctgttttcggctttgtgagaaaccttaccat

SEQ ID NO: 655427 - DNA, 101 bp, Homo sapiens
ggtgcggcgggtccagggtgtgctgcggggccgggcgcgcgcttcccatcgacggtcagtgcgcacgttgtaatcagctgaggccatgtcaggagacggag

SEQ ID NO: 655428 - DNA, 75 bp, Homo sapiens
cccaagatgggccaagtggtgtatgtgccggtcaagacgggctcggttattcagcttctcaaggctggaaaagcg

SEQ ID NO: 655429 - DNA, 88 bp, Homo sapiens
gctgaataacccttttaacgagtattccaaatttgatggcaaggtcacagcccatgagctgggaaaggaggcagtgctcttgggagga

SEQ ID NO: 655430 - DNA, 83 bp, Homo sapiens
atgacaccaatttggaaacccgcgagactgattcagaaaggcaccaagttagttttggaacaagttgtgacatccattgcatc

SEQ ID NO: 655431 - DNA, 100 bp, Homo sapiens
cggagaggcaggactactgcgagcagttttaccgcgacctccggaggccggcgtgacaggctctgtcactaaaatagacatggatgggtgcaaaaaagag

SEQ ID NO: 655432 - DNA, 100 bp, Homo sapiens
cttcactcgagagatgaggacactgaaattcagagaggggaagtgatttgcctcagcttgtactgaggagcaccgaacagccagttccctgagcagtggt

SEQ ID NO: 655433 - DNA, 100 bp, Homo sapiens
aatgtgtatcctggacccattgataactctggacttctcaaaggtggagccgccaccaaaatgcagattttcgtgaaaacccttacggggaagaccatca

SEQ ID NO: 655434 - DNA, 74 bp, Homo sapiens
gggcaagccacagagccatgagctgaccattcctcaagaattttgtatccaaggcccaaaagtttgttacccaa

SEQ ID NO: 655435 - DNA, 82 bp, Homo sapiens
aaggaagagagattcctatagttcaccgagtcttgaagattcatgaaaagtttactcctggcttgggggcattaggaagcac

SEQ ID NO: 655436 - DNA, 100 bp, Homo sapiens
gaccgagacccggcaccacctcccggtccgccctccagcaaacagtgacgaatctcagcttctgacaccaggaaagatgagtcagcgccaaggaaaagaa

SEQ ID NO: 655437 - DNA, 100 bp, Homo sapiens
ccgcgtcgccatggccgcggttcccgagttgctgcagcagcaggaggaggaccgcagcaagggcccccagatgccgacggccctctctacctcccctaca

SEQ ID NO: 655438 - DNA, 100 bp, Homo sapiens
gaattcagccagtggtcacagctggatgtttgcgacatcccagagagcttccagattgaaaacaatcctcgaacaggaaatcttggtgcactaattaagg

SEQ ID NO: 655439 - DNA, 98 bp, Homo sapiens
aatctgggcggcgtgcccagcaagagattaaagatgcagtacgccacggggccgctgctcaagttccagatttggttagcactctacgtatatgaata

SEQ ID NO: 655440 - DNA, 100 bp, Homo sapiens
ccgtcatcgagtatgagcagttcatcgcaggtacccaagatattgtatttggagaagtagatcggtgagcaggggagcagcgtttgatcccccctgccta

SEQ ID NO: 655441 - DNA, 80 bp, Homo sapiens
aacagaggaggctgcctgttactcctggtgttggacaaggtgctgcggatgctgtacgtgtgggcgctctgccgagacca

SEQ ID NO: 655442 - DNA, 83 bp, Homo sapiens
gcctgaggagccattttgagcaatggggaacgctcacggactgtgtgaccatctgcctgtgggacatcagtgccgttccaaag

SEQ ID NO: 655443 - DNA, 51 bp, Homo sapiens
agaaagaccatcaagtttaccagtgtcagaaactatttaaaagaagcactg

SEQ ID NO: 655444 - DNA, 98 bp, Homo sapiens
gagccagagagatgtcggatttcgacagtaacccgtttgccgacccggatctcaacaatcccttcaagaacctgagctggctggaggagaaagagaag

SEQ ID NO: 655445 - DNA, 100 bp, Homo sapiens
tggcagttgagagactgttggagcctcttgttacacagggagctcactcagtgggtttgatgtggtggatgctggctcgggaagttctgcgcatgcgtgg

SEQ ID NO: 655446 - DNA, 100 bp, Homo sapiens
cttttggaggaaaaggaggaattcattttcagcagacacaagaaaagcagtttttttttcagattgatgaggacatgactgcccgaattagcatggctga

SEQ ID NO: 655447 - DNA, 80 bp, Homo sapiens
caggcacgcgccactacactcgggcatccgtgtacaagatttgcagagaaatgtatgacgatggagtgggtttacccttt

SEQ ID NO: 655448 - DNA, 75 bp, Homo sapiens
agcatccccaccatcaacatggagaacaagaccacgtggtaggagagaagtttgctgaggaatgccttcaagcac

SEQ ID NO: 655449 - DNA, 100 bp, Homo sapiens
ggattaaataatacattcaattctaaaataagacatggcccattgaaggagaacgacctgctcagaatgagaagaggaaggagaaaaacataaaaagagg

SEQ ID NO: 655450 - DNA, 100 bp, Homo sapiens
ccgcggcgcccctcggcctcggagcaacgagcgcagcgccggagggtgaggacaaaatcttcttaatcaacaagcttcactccatctacgagaggaagga

SEQ ID NO: 655451 - DNA, 100 bp, Homo sapiens
tgcccgggcaggcccacgcccaggtcacgtggcacaagcgtggaggaaacctccctgcccggcaccaggtacggcttcaggtccagagcgtggagaagcc

SEQ ID NO: 655452 - DNA, 101 bp, Homo sapiens
catctaccagtgcttcgtgtggagcggcacggctgaggcccgcaagcgcaaggctggaagtgatggagagagtattggaaactgtcccttttgccaacgcc

SEQ ID NO: 655453 - DNA, 80 bp, Homo sapiens
cttgtgcaccggtgcctcacggagaggctgtgttacagaatgtctgaaggggacagtgtgggagaatccgtccatgggaa

SEQ ID NO: 655454 - DNA, 108 bp, Homo sapiens
agaggggaacatggacatgaagaggaggatccacctggagctgaggaaccggaccccggcagctgactggagactgatgcatgagggggctacggaggcgcaggagcg

SEQ ID NO: 655455 - DNA, 75 bp, Homo sapiens
tgaaggcctgttttgaagagaaggggaataagactgcatctgttcatatgagtagacccaaatgatttgtacatt

SEQ ID NO: 655456 - DNA, 74 bp, Homo sapiens
cagcgggcctggtatgaaagtacttctcatggataaagagacgatggattaccgggccttggtgcatgagcgag

SEQ ID NO: 655457 - DNA, 50 bp, Homo sapiens
ggccgctgccgcctccgccccagcaacgtggaaggaaccagaggctgtta

SEQ ID NO: 655458 - DNA, 48 bp, Homo sapiens
aagctgctgagtgtcttgcagcagaaaaattctgtaggccgttggaag

SEQ ID NO: 655459 - DNA, 75 bp, Homo sapiens
tttggacattttaaagaacatcttcgaaaacatacaggaggcggcgacggcggcggcggggggagaggaagagaa

SEQ ID NO: 655460 - DNA, 82 bp, Homo sapiens
ggctactggcaggagcacatgagagaggcctccaccatcatgttttccatcactttaatcaatcattttgacctaagtatat

SEQ ID NO: 655461 - DNA, 100 bp, Homo sapiens
atcgagcagctccatcggagatttaagcagctgagtggagatcagcctaccattcggaactgtggctgcaccatctgtcttcatcttcccgccatctgat

SEQ ID NO: 655462 - DNA, 100 bp, Homo sapiens
gcctgcgagggttgaagattgtgaagcaatagcctaaggtgtccaccccccagggttcctgacccctgcccctggacagcgaccccttctcagactccag

SEQ ID NO: 655463 - DNA, 100 bp, Homo sapiens
ctgactccacacctggtgtttgtgccaagaccccaggctgcctcccaggtcctctgggacagcccctgccttctaccagatgatgattcagatctgtact

SEQ ID NO: 655464 - DNA, 98 bp, Homo sapiens
tgttcgactgcatcgtccgaggcatctcccccaccaagggcccctttgggctgcggccggttctaccaggcgccctctatcgccctggggttccgtga

SEQ ID NO: 655465 - DNA, 100 bp, Homo sapiens
ttcgttatattagaaaacctattgactatacaattctagatgatattggacatggagtaaagcttgaattcggagtgatttaccactgcacagaggagcg

SEQ ID NO: 655466 - DNA, 100 bp, Homo sapiens
ctgagaagttcctccctgaaaggtatacatttgaactaagcagaaggactcatcttccggaagtattcctcagtaaggtacttgagccaaccctaaaaag

SEQ ID NO: 655467 - DNA, 133 bp, Homo sapiens
ggagcagcaggcgctgcgcctcgaggtgcgcgccggcccggactcggcgggcatcgccctctacagccacggaatcagtccccaatgcctggaaattcctcattggattactgtgttttaaacagaatttcgt

SEQ ID NO: 655468 - DNA, 87 bp, Homo sapiens
ggaggtgaagcccaacccgctgcaggacgcgaacctctgctcacgcgtgttcttctggtacgtcagcctgtcatatgcatcaacaac

SEQ ID NO: 655469 - DNA, 50 bp, Homo sapiens
ctcccgagtaggtgggactacaggataggatttttgggccttggtctcat

SEQ ID NO: 655470 - DNA, 100 bp, Homo sapiens
cctccgtgggacatggagtgttccttccgctagtgatcctttgcaccctgcttggagacggacttgcttccgacttcccaagtaagaagcggaagaggag

SEQ ID NO: 655471 - DNA, 76 bp, Homo sapiens
gccaccagtctgcagatttgcaaggatgtcatggatgccctcattctggcatggaaagctcacctgatgggcccag

SEQ ID NO: 655472 - DNA, 98 bp, Homo sapiens
ggcttctgagacggcggcagcagcggcattcagttcatggcctcccacgggaacgacgccgcgagagccaggtttgagtccaaagtaccctccttcta

SEQ ID NO: 655473 - DNA, 110 bp, Homo sapiens
cttagctgtgctcgcgctactctctctttctggcctggaggctatccagcgaactgtggctgcaccatctgtcttcatcttcccgccatctgatgagcagttgaaatctg

SEQ ID NO: 655474 - DNA, 51 bp, Homo sapiens
gagaaacatcctgaaaaattcaacagcagtatgccaccacgggctgttccc

SEQ ID NO: 655475 - DNA, 51 bp, Homo sapiens
aggcgtgaaccactgcacccggcgagacagagtttcgctcctgttacccag

SEQ ID NO: 655476 - DNA, 124 bp, Homo sapiens
agggacctctccatccatcatacattctctcgctgcgtcacagtccatggctccaatggcttgttgtactcccctgccctcaacaagatgttttgccaactggccaagacctgccctgtgcagc

SEQ ID NO: 655477 - DNA, 98 bp, Homo sapiens
tgtactgcgcatacacaatcccgggcatgggcggcaactctttgatgtactactataatgggaaagcggaaaacctcacagcacgggtagctctgaac

SEQ ID NO: 655478 - DNA, 74 bp, Homo sapiens
gagttgagccttccaagaagaggcagcttaagcaatatccaaggcagtgtcatctgcaacaatgctgtgatcga

SEQ ID NO: 655479 - DNA, 96 bp, Homo sapiens
tgggcctgcaggtctctgtcgagcagcggacgccggtctctgttccgcaggatggttttagctaaagaagatactgaggcagctattcaatcaata

SEQ ID NO: 655480 - DNA, 100 bp, Homo sapiens
tttggaaaataattctgaaactggagagttacagcctgtactacctgaaggagcttcagctgcccctgaagaagccccccaggttcgcctaatagtcttg

SEQ ID NO: 655481 - DNA, 101 bp, Homo sapiens
gtcggggacggctgcgcgggacggctctgtaggaaggaacttggttccccctccctcagcttccgccccaaaaggaggtcctgcacataggaagcgcccac

SEQ ID NO: 655482 - DNA, 80 bp, Homo sapiens
cgccgctgcctcaggagcggaacaacgtcggcgagcggggagcctagtaataaacgggtcaaacccctttcccgagtcac

SEQ ID NO: 655483 - DNA, 90 bp, Homo sapiens
tccatctggttcgaagtctcagcggtattctggtgcttatggtgcctcaggagtggaggcagcacagacagtgaggacgaagaagaggag

SEQ ID NO: 655484 - DNA, 100 bp, Homo sapiens
gctgcgggaaatcgggctgaagcgactgagtccgcgatggagattgcttattctctggagaatactgtacaaaaaaactttatggtatcaagcacaatta

SEQ ID NO: 655485 - DNA, 75 bp, Homo sapiens
tcacaattacactgccacatatccctaaattgcatctgatggtctcaagggtcgtgtgtttgaagtgagtcttgc

SEQ ID NO: 655486 - DNA, 100 bp, Homo sapiens
cggagagctgctgaacatgatcgtggctgttattgactctgcacagaaaaagcttgtggtgaaggggggcaaaaaaaagaagcaagttctgaagttcact

SEQ ID NO: 655487 - DNA, 73 bp, Homo sapiens
tggcaaacactggaatcctactttttctgcagacctgttatcctaaactaggtgagtcagcttttggtacatg

SEQ ID NO: 655488 - DNA, 82 bp, Homo sapiens
ttttcgtacgggcggccgtgcgcgaggcgaggcagcggaggaggaaatggcaggtcctaatcaactctgcattcgccgctgg

SEQ ID NO: 655489 - DNA, 100 bp, Homo sapiens
ctacctgtcagccgtgggcaccttcacctgggtctgcacgccctttctggaaagtatgtgatggtgatgggagtggttcaggcctgcagccctgagccct

SEQ ID NO: 655490 - DNA, 80 bp, Homo sapiens
actataaaagtctttaagaagatagcaaattttacttcagaataactgaagtgaagtgatggactccgatttggagagta

SEQ ID NO: 655491 - DNA, 100 bp, Homo sapiens
ggaagtgtcacacagcagtcaagtatgtcccaaacgtctgttgcacgttttcaaaaaatacctaatggtgaaaatgagacaatgattcctgtattgacat

SEQ ID NO: 655492 - DNA, 101 bp, Homo sapiens
atttgatccacaaagtcccctttgtgttcacataatgctgtcaggaactgtgaccaaggacccatacaatgtactggccccaaagggagcttcaggcacca

SEQ ID NO: 655493 - DNA, 100 bp, Homo sapiens
agcagtctaaacctgtgaccacccctgaagaaattgcacaggctattcctcagtatgctattccttgtcactccagctccaatgtggtggtggagcccag

SEQ ID NO: 655494 - DNA, 82 bp, Homo sapiens
gtgaagtacatgaactcagggccggttgtggccatgatacaagtactggttgaacctgaccacttcaaggttgcagtgaatg

SEQ ID NO: 655495 - DNA, 98 bp, Homo sapiens
tcgtctcttacgtctgcggaagtgcagctgcctcagttcttagcgcaggctgagtcatcactagagagtgggaagggcagcagcagcagagaatccaa

SEQ ID NO: 655496 - DNA, 75 bp, Homo sapiens
atctaggcgacatggagccattgaagggaacaacacccttgatgattgggaaaatgaggtacgttagtgttcgcg

SEQ ID NO: 655497 - DNA, 78 bp, Homo sapiens
gacgccaaagatgacttccctcttaggaaaacagatcctaattatctcatggctaatgaacgcatgaacctcatgaac

SEQ ID NO: 655498 - DNA, 74 bp, Homo sapiens
agcactttgaggacatggcctccgacgaggacatcagaaaaatatggctcaggagactaaccagaccccggggc

SEQ ID NO: 655499 - DNA, 75 bp, Homo sapiens
tgaactgaagaagcttgggctcacttccacaaatgtgaaaagagatttgaatgcccggaatgttctaaaaggttt

SEQ ID NO: 655500 - DNA, 100 bp, Homo sapiens
ccacacagtgtgcctgcaacctgtccggggatcccagggaggcttgggcactgtttaaaggaaagttccgagaaggcatcgacaagccggaccctcccac

SEQ ID NO: 655501 - DNA, 97 bp, Homo sapiens
gcagcccgaccagtccaagagccggcggcatgacgagagagaagtggatgggccctatacctccagccgtgaatgccagactttaagattgcccgga

SEQ ID NO: 655502 - DNA, 94 bp, Homo sapiens
cggctggaggctcgcaagaaagccaagaacaagcagctgggccatgaggaaggcatccgtgtcattctggaccttactcccaactaccggggtg

SEQ ID NO: 655503 - DNA, 89 bp, Homo sapiens
ggatacctacaatttggatacagataccatctcaaagggtaatcttccaggcatcaagcatgatggaaccatgtgtgatacctgccgcc

SEQ ID NO: 655504 - DNA, 82 bp, Homo sapiens
gacaagtgtttccggaagtgtatagggaaacctgggggctccctggacaactccgagcagcctcccggcatggtgctcaagg

SEQ ID NO: 655505 - DNA, 50 bp, Homo sapiens
tcagttcacatactatttatgggttgctgctgactcagccattctagaag

SEQ ID NO: 655506 - DNA, 87 bp, Homo sapiens
ggccacttgcttgggatcctttatcctggtcatcttctatttccaaatctgcatgaagaaatcagtgatttttatgaatacatgtct

SEQ ID NO: 655507 - DNA, 90 bp, Homo sapiens
gcgaggggagactgaagttcacgttccgctcttagtgcgcggtcccagtagggatggcacaatcagcgaggacaccatccgagcctctct

SEQ ID NO: 655508 - DNA, 74 bp, Homo sapiens
catcctgcgtcacctgggccgcacccttgccaagaagtatgatgcgtttttggcctcagagtctctgatcaagc

SEQ ID NO: 655509 - DNA, 100 bp, Homo sapiens
tgatgttggagaactacaggaacctgctttctctcgatgaggataacatccctccagaagatggtgtgttgaggctcctggaacacggggaggagtacgt

SEQ ID NO: 655510 - DNA, 82 bp, Homo sapiens
aatgttggagccgtctgcaaagtgtccccggcaagaaggtcaaaatgcagatcttcgtgaaaacccttaccggcaagaccat

SEQ ID NO: 655511 - DNA, 75 bp, Homo sapiens
ggcgtcctcctcccgctcggaaggaccgtataatagacgctggccccaaaggaaactactctcgatttatgaatc

SEQ ID NO: 655512 - DNA, 131 bp, Homo sapiens
cagtggagtatgtggttagtgtctatgctcagaatccaagcggagagagtcagcctctggttcagactgcagtaaccaactcacagatgaatgcttctcacccggaaacaaacttgccagttgggtatcct

SEQ ID NO: 655513 - DNA, 83 bp, Homo sapiens
cacaaaccccaagtcctccttgccaggccttcaaccactatctcagtgcaatggccgcttacaaacacgcagatggcaagaag

SEQ ID NO: 655514 - DNA, 75 bp, Homo sapiens
ggcgggccttccgggacgagggcgcgtgggtgaggaaggtcaggtctaggagaaaatgctgagaagcttctgcag

SEQ ID NO: 655515 - DNA, 83 bp, Homo sapiens
gagccgcgcgcctttgtgcgcgcgccgagctaagaagtatagaaaggtcgctggcaaagagatctactcggataccttagaga

SEQ ID NO: 655516 - DNA, 74 bp, Homo sapiens
acggtcactgcagctgaagccgctgcccctgctacaggtgagcgagtgctgtgctttcatgggcctcttcttta

SEQ ID NO: 655517 - DNA, 100 bp, Homo sapiens
gaggccacaaagacagatgttactgtggttaggtttccaccgggggccattgagactgccatggaagacttgaaaggtcacgtagctgagacttctggag

SEQ ID NO: 655518 - DNA, 97 bp, Homo sapiens
gtgaccgagcacccgcctccgggcatcttcaactacacgatgaggcgagtggtacgacagagcaagtttcggcatgtatttgggcaagcggtgaaaa

SEQ ID NO: 655519 - DNA, 103 bp, Homo sapiens
ctgttatgccagatggtcagtttaaagatatcagcctgtctgactacaaagctttgaaaagtccagccgcatttcatgagcagagaaggagcttggagcgggc

SEQ ID NO: 655520 - DNA, 50 bp, Homo sapiens
ccacccgcagacggcccttctggctccgctctgcattggataaaacagaa

SEQ ID NO: 655521 - DNA, 100 bp, Homo sapiens
ttggccgtcatgggccagaacttaattctgaacatgaatgaccacggctttgtgaatctccagccaagtcctccgtgctcgtggtgggaatcgtcatcgg

SEQ ID NO: 655522 - DNA, 80 bp, Homo sapiens
cagacagaacagttaatcctcaatttaagcctgatctaacccctagaaacagtggaagatagatgataagcctgtaaaaa

SEQ ID NO: 655523 - DNA, 90 bp, Homo sapiens
gggataacctttaccgccatgctgtgccttctgacatagcccagagatacaggataagcaaatacccaaccctcaaattgtttcgtaatg

SEQ ID NO: 655524 - DNA, 98 bp, Homo sapiens
cggcatccaggacgttccctcccccgatccaagttggaattagcatcctctcgggggtccaccatggagcccttgtgtccactcctgctggtgggttt

SEQ ID NO: 655525 - DNA, 75 bp, Homo sapiens
gtggcaaccagatcggtgccaagggcagctgcaatgactctccgcacggtattattgtcattgcaagcactattg

SEQ ID NO: 655526 - DNA, 83 bp, Homo sapiens
cagtgagctcggccggcaaccgagggacccgcgtccaggtcttgagtcaccacgtccgaatataattcttgggttagtaatct

SEQ ID NO: 655527 - DNA, 83 bp, Homo sapiens
cgtcagcctcccgccggccgtctccttaacaccgaacaccaatacccagaggatcagtagttctcaagccactcaacctcttg

SEQ ID NO: 655528 - DNA, 83 bp, Homo sapiens
gcggcagcggcggcgctgaggaccagcatctcagacatgtcgaaaaagatgttttgatccctaaaataatgagagaaaaggcc

SEQ ID NO: 655529 - DNA, 100 bp, Homo sapiens
ctaggcactctgcagaaagccagattcttaagcaccttctgaaaaatcttttcaagatattctgcctagtgatcagggccaaagcggtcagtgagaagga

SEQ ID NO: 655530 - DNA, 100 bp, Homo sapiens
ctgtgctacaacgtcggtcagaaaatgaagagtttgttgaagtgggaagattggggccttctgattattttgatgttctcaaatagtgatgaagctgtaa

SEQ ID NO: 655531 - DNA, 88 bp, Homo sapiens
cccagacatggcggacggcagcggctggcagtggtattgttggaaatagtgcaactgcattattgactaccattgaagaaatgcattt

SEQ ID NO: 655532 - DNA, 75 bp, Homo sapiens
agagcccacaggtgctaaagagagcagtaccctgatggagtcccttgcaggtcaatgagctgaaggagaaaggca

SEQ ID NO: 655533 - DNA, 87 bp, Homo sapiens
acgagttgaatcattgttcaaataaggtctatgaaggcctagacatcatcaccaacaaggtttctgcccaagagcagagaatctgcc

SEQ ID NO: 655534 - DNA, 75 bp, Homo sapiens
cgtcagcatcccagccgtgctcacggcccgcagcccgagtgtcgccgccatggcttcgccgcagctctgccgcgc

SEQ ID NO: 655535 - DNA, 100 bp, Homo sapiens
ggcctgggagcttgctgcagcttcaggtaccatgcatttcacggtggccttgtggagacaacgccttaacccaaggaagtgactcaaactgtgagaactt

SEQ ID NO: 655536 - DNA, 90 bp, Homo sapiens
cgatgccaaagaattgagctgaagcagggctacacatttttcatcccttccgcacctgtggaatcctctcaagaggaacagtcattgtgt

SEQ ID NO: 655537 - DNA, 100 bp, Homo sapiens
gctagttcctctccagctcagccgcgtagggacaagaatccttcaagaaacaggaaaaaactcctaaaacaccaaaaggacctagttctgtagaagacat

SEQ ID NO: 655538 - DNA, 100 bp, Homo sapiens
gcagcaccgacgaacccccaatgctgaccaaggaggagcctgttccagaactgctggaagctgaggggcctttacaacaactaaacggacaggcattcca

SEQ ID NO: 655539 - DNA, 90 bp, Homo sapiens
accacctcctgctctgggaccggaggagacatcggcctctgcaggcttgccgaagaagggaggggacggcaaaacagaacagaaaggcgg

SEQ ID NO: 655540 - DNA, 75 bp, Homo sapiens
caataccttgggcccagtcatgaagatggaacctctgaataacctccaggagtccttcaataatgttaaacagtg

SEQ ID NO: 655541 - DNA, 75 bp, Homo sapiens
aaatcatgactgcagtcacaatgaggatgtcacattaacttgttatgagtattgttacaatcacatttgacgtac

SEQ ID NO: 655542 - DNA, 100 bp, Homo sapiens
ggagtcagaccagagagaacataggatgtttgatcagcagcaaccaggttttcctgtgactgtgacagtagagagtccttcatcctctgaagttgaagag

SEQ ID NO: 655543 - DNA, 74 bp, Homo sapiens
ccagcctcaggaatttatggtcgcctttttgaatgagccacaatggtgcgcatgaatgtcctggcagatgctct

SEQ ID NO: 655544 - DNA, 97 bp, Homo sapiens
ctcagaccgtgcagaatgttacattgtcgctcactctgcccatcacgtgccacatttgcttggggaaggctgaagccgacgtagcttctctgaacag

SEQ ID NO: 655545 - DNA, 100 bp, Homo sapiens
ctggaacactggctacctcttccaggtggaatttgacgatgccaccgaggcatcagtttggcaatgaggagcagcagctggcgtgggccaagcgggagag

SEQ ID NO: 655546 - DNA, 113 bp, Homo sapiens
caagcaggagctgaagcaggacaacatagcggtgaaggcgaacgcggtctgcaagctgacgtatctgtgagccgtgagctttgaggcggtgggatgtgtcagcagaatgtctc

SEQ ID NO: 655547 - DNA, 96 bp, Homo sapiens
tatctggctcagatgacaccaaattagtaattagtaatccttacagcagaaagaaaaaagcttggccagaccacaagcgggaatgcaaatgcctta

SEQ ID NO: 655548 - DNA, 82 bp, Homo sapiens
agcggcagcaccgggagtcagcagagtgaagaacccttaggagaaatcttgagagtggacagcaattgtgaagatcgccaga

SEQ ID NO: 655549 - DNA, 100 bp, Homo sapiens
ggtgctgcccttccaggagctgcagatcgatgacaatgagtatgcctacctcaaagccatcatcttctttgacccagatttctaccactccaaacgccgg

SEQ ID NO: 655550 - DNA, 51 bp, Homo sapiens
ctccgggagcacttcgagaagctggagaagttccagctattcttcagatgc

SEQ ID NO: 655551 - DNA, 74 bp, Homo sapiens
gccgcttcgtcctctgcagtcaagacgctgggcgcgtcgaggactgggaatcagagatcattgatttcttcctg

SEQ ID NO: 655552 - DNA, 100 bp, Homo sapiens
gcccgacgcaaaccaaggatctggggatcttcgcactatcccaagatgccactgttgctggagaaatgtcactgctagagaacagaagactattattcca

SEQ ID NO: 655553 - DNA, 100 bp, Homo sapiens
aagaggcaaaaatggcaaaaattcagcgcacgcatgtatcaagtgggtttggaggatttgggacaacatctacaactgcaggttctgcattcagcttttc

SEQ ID NO: 655554 - DNA, 96 bp, Homo sapiens
cacggatgccgaaggtgaaggcgctgcagtgcgccctggcgctggagatcagctcagtaactcaactggacccaaataaatcattattggaggtaa

SEQ ID NO: 655555 - DNA, 83 bp, Homo sapiens
cggaccttaaaatacccgcaacagccccttcgtcccaaggcattgacactgagaggcccattctgcaagtggacagctgtgtc

SEQ ID NO: 655556 - DNA, 73 bp, Homo sapiens
tgaaaccacagacatgactgagtcctccatgaagagtttctctggaaacccccctggtaagtgtggaggaggc

SEQ ID NO: 655557 - DNA, 98 bp, Homo sapiens
atggatagctactccggaccttacggggacatgcgtgaacagagtatctgccaagcccgggcttccgtgatggtctacgatgacaccagtaagaaatg

SEQ ID NO: 655558 - DNA, 100 bp, Homo sapiens
cggctgttcagctgcgctccagtcggcccaggcgccgcggcgaggagcgagcgctgcgaggtggcggcctgagatgccatggacaatattaccaggcaga

SEQ ID NO: 655559 - DNA, 83 bp, Homo sapiens
gcccccagaagtgatcgctcagctggagaacgcggctaaagttctgatgatattaataaggcagcggaaagaagaaatatgaa

SEQ ID NO: 655560 - DNA, 100 bp, Homo sapiens
tctcaccctcaaaagaagatgacagcccgcagagagttaacttctgtttacatggaactcagacatctgcaaatcatggaattgaatgatctggcacggg

SEQ ID NO: 655561 - DNA, 100 bp, Homo sapiens
gaaagagaacagagagtcctggggacaggcagcaattccatttccgtgagggcgtttctagatgaagatgacatgagcttggaagaaataaaaaatcggc

SEQ ID NO: 655562 - DNA, 75 bp, Homo sapiens
agcaagacctggagcaggtgcagggagtgcatccgccccaacccttttccccctcgtctcctgtgagaattcccc

SEQ ID NO: 655563 - DNA, 50 bp, Homo sapiens
ggaggagtctcagagctgtcagaaagctgcgcaaaccatgcaggatgatt

SEQ ID NO: 655564 - DNA, 75 bp, Homo sapiens
catatcttcacttggcaaactcaacaagattttaggtgatgggcaagtcagaaagtcagatggatataactgata

SEQ ID NO: 655565 - DNA, 82 bp, Homo sapiens
tcggtgtctgctgcgttcacggcaggattcggttagacaatgcagatcttcgtgaagactctgactggtaagaccatcaccc

SEQ ID NO: 655566 - DNA, 87 bp, Homo sapiens
ccctgcagcgaaggatcctggttgctgctggaaacgcgttctgccaggctgcacagctgcacctgcagctccagagcaagcacgacg

SEQ ID NO: 655567 - DNA, 83 bp, Homo sapiens
catggggagcctcagcggtctgcgcctggcagcaggagccttcacgtaaatgggtccagtcatgcctcccagtaagaagccag

SEQ ID NO: 655568 - DNA, 100 bp, Homo sapiens
tcggagcccgggggcccccctgctcctcggcgtcggaccccccgagaaaatgtcttcccatgcacaagatgattaatacagatcttagcagaatcttgaa

SEQ ID NO: 655569 - DNA, 99 bp, Homo sapiens
ggaggctgaggaggagaggacagaggtgcctggggcaacctccaccttgacggttccagagacaaagcatggaggacacaagaatgggaggaaaggcgg

SEQ ID NO: 655570 - DNA, 83 bp, Homo sapiens
atcggcccaaggccagttctccgcaggtgtcgtgaaaactacccctaaaagccaaaatgggaaaggaaaagactcatatcaac

SEQ ID NO: 655571 - DNA, 51 bp, Homo sapiens
attcccatcagtgagcattacagatatgggaaaatagtctccacaaaggca

SEQ ID NO: 655572 - DNA, 100 bp, Homo sapiens
cagggcgctcctgagaccctccagcgctgcctggaggagaatcaagagctccgagatgccacagggcccagtgggctccgggtcctgccccagggctacg

SEQ ID NO: 655573 - DNA, 83 bp, Homo sapiens
gaaagacaagatgtccatcttctcatgaccaactgtatcaagaagcagaagctcctcctggggtagagacagatcttattgat

SEQ ID NO: 655574 - DNA, 82 bp, Homo sapiens
attataatgaagaagtggctgacttaaaggtcaggcagttcctgctccgactggggctcctccaggtggtcagccagattat

SEQ ID NO: 655575 - DNA, 97 bp, Homo sapiens
aacaccaaaaagctttctgctaggggtgtcatggagaaactccagctgggcccagagattctgcagcgggaaaatccaaggcttatttatgccaggc

SEQ ID NO: 655576 - DNA, 90 bp, Homo sapiens
cgaagccctcagcattattgtggatgaatataagtcaatcctttcccatggtaccgtggcagactgtgctgttgttggcaaggaagatcc

SEQ ID NO: 655577 - DNA, 82 bp, Homo sapiens
ctcagacctcaagctttttgcaaattttgactaaaggagaagttcaagtatcagataaagacacacacaactggagcagatg

SEQ ID NO: 655578 - DNA, 102 bp, Homo sapiens
ctgatattgatattattacagcttcatatgcaccagaaggagatgaaggtttggtgcacctcgatttggaggaagtagggcagggcccttatctggaaagaa

SEQ ID NO: 655579 - DNA, 98 bp, Homo sapiens
gattgcctgtttggtacctgtggaccagtttcaactttatcagaggttaaaatttgaaagagggaaatcctcattgacgattcaatttgttgaaggcc

SEQ ID NO: 655580 - DNA, 83 bp, Homo sapiens
cggggcctgcgggcgcccagagccgcgccgtccgcgccgcccgttctgattgacaagtatctctatgccatgcggctctccga

SEQ ID NO: 655581 - DNA, 75 bp, Homo sapiens
gagacttggatgaggtgaaagactatgtggccaagagcctgagcccttgtgaagccggcaatgacaagtctgtat

SEQ ID NO: 655582 - DNA, 100 bp, Homo sapiens
ctgctgatgaaatagcaactggagctcagccaaactgattatccaccagacactcagcgtcttagaagatattgtggagaatatctcgggggagtccacc

SEQ ID NO: 655583 - DNA, 100 bp, Homo sapiens
accacagccacccttggtgatgagcctcggaaagtgctcctgcggctgtatggagcgattttgcagatgattggtgctgaagacatggacggcttccagg

SEQ ID NO: 655584 - DNA, 82 bp, Homo sapiens
ccccagcgacacccgaggggctacacagtatataaggtcaccgcccgggtctctttttcagtcatgcaggagtcagtcgaag

SEQ ID NO: 655585 - DNA, 100 bp, Homo sapiens
tgaaattattttacacagtgtaaccactaatttatctagtactccttttggccatggtagtaaccagggtgtccgcaatgttgccagtgtctgtctgcag

SEQ ID NO: 655586 - DNA, 101 bp, Homo sapiens
ccaccatccacgccagccgcaccatgccgctcctaagcctgcacagccgcggcggcagcagcagtgagagaggatgccttctccgggacagattggatgtt

SEQ ID NO: 655587 - DNA, 75 bp, Homo sapiens
gagaacacatttatgatttacgatccctggaaaattaccactttgtagactttgagagttttgacctgcctgaag

SEQ ID NO: 655588 - DNA, 75 bp, Homo sapiens
cccactgaggcacccggacctcgtcaggccgctgcagatgaccattccaggtcctggatgcctcatcccttagtt

SEQ ID NO: 655589 - DNA, 100 bp, Homo sapiens
tgcctatgagagtggcctgatgccttacacgaattacacatttgatttcaagatttgggccaggcttagtcatctattggtatggatttatccaggagct

SEQ ID NO: 655590 - DNA, 99 bp, Homo sapiens
ccaagcaggcctgcgaaggaaacttacccaaagggaagtctcagagagagatcatcattgcctgaatttagctttgtgactgcaagagcaagaccagtt

SEQ ID NO: 655591 - DNA, 82 bp, Homo sapiens
ccatatcataagtggaattttggagatattcaaagagctccttaataagcatttatagtcagtttttggcagcaatagaatc

SEQ ID NO: 655592 - DNA, 102 bp, Homo sapiens
cttcagttaacacctatgaacagtctggccacctctgtattcagcatagctattcctgttgatggtgatgaagacagtgttttacctcaatcatatatccac

SEQ ID NO: 655593 - DNA, 139 bp, Homo sapiens
tgcgcttgacaggctgcacttggatgggagcacctggtgcctcgggactgctccgatgcccggccagagccaacgggctgaagtcttgtgtcattgtgatccgggtcttgagggacctgtgcactcgcgtgcccacctg

SEQ ID NO: 655594 - DNA, 106 bp, Homo sapiens
ggttctcctcatgactcagagcccctctgagaagagaaacagggagtttggccgctggaaagtaaataaccttgcagttgagagaagaaatttccttggctctcct

SEQ ID NO: 655595 - DNA, 50 bp, Homo sapiens
tttggactatcgggatctaatcaagtcaaaatgcagatcttcgtgaaaac

SEQ ID NO: 655596 - DNA, 75 bp, Homo sapiens
aacgactttccaagtttgaagttggagatgctgaaaatgttgcttcatatgacttctaaccgaaaatcttcagtt

SEQ ID NO: 655597 - DNA, 100 bp, Homo sapiens
gcccccgccccgccgcgcccgcggcgacctcacccactctggtctgtggcgggtgtgctgcatcgaagagaagaactgttcctacttcaggcattttaac

SEQ ID NO: 655598 - DNA, 90 bp, Homo sapiens
ttctcacaccaggcctccggatttcagtgtgatttgactacgaacaataggctataacaagggccacatttaaaaatagaaactggagcc

SEQ ID NO: 655599 - DNA, 82 bp, Homo sapiens
tggcatcagcacagacaccgctttgccgatagcacggggtcactctggtgcccattgaggagttcagcccggagttcgtgga

SEQ ID NO: 655600 - DNA, 74 bp, Homo sapiens
atttctgcttggagaagaagttgcccagtatgatggggcatacaagcttggtgatccagctatttttcctgccg

SEQ ID NO: 655601 - DNA, 95 bp, Homo sapiens
taggtgtatcaagtaatggtgcaaagcctgaaagtatcaatgtccaaatggatgaaaatacactccatgaaattctaaatgaagttgatttgaat

SEQ ID NO: 655602 - DNA, 115 bp, Homo sapiens
cgcctctgccctgcacgtggctgctgccaagggctacattgaggtgatgagccaaggactacgagaacgccatcaagttctacagccaggccatcgagctgaaccccagcaatgc

SEQ ID NO: 655603 - DNA, 100 bp, Homo sapiens
cccttcatcattgctgggtcctcaatgcagggggccatttcatagatgaaaatggctctcgccttccagcaattccccgtagagacggggtttcgccgtg

SEQ ID NO: 655604 - DNA, 50 bp, Homo sapiens
caattgatggtggaggaacaagctctagaggacaaaatcccagtccttgg

SEQ ID NO: 655605 - DNA, 101 bp, Homo sapiens
cctgctcaaagccctgggtcgcttggaagaagccaagaaagaaagtcgtgctgtatccctactgacttctccagctgctggtataaaaacagttgatcctc

SEQ ID NO: 655606 - DNA, 100 bp, Homo sapiens
aggcaccgtgacaggccaagtgcaggggccagaagacaaagtcaattccatacatgaagacatcttatccatcctcactgctgtcaacgatgatgtgagt

SEQ ID NO: 655607 - DNA, 118 bp, Homo sapiens
gatgggttgtccgactgggagcagaggaagccttgaggacctactcacagataggaattgaaggtgttggagcgggccggagagaagtagagtgggctgcgaggagaaggaaacaggc

SEQ ID NO: 655608 - DNA, 100 bp, Homo sapiens
cgcccagaagctgcagttggatagccccgaagatgcagagttcattgttgccaaggtgtggcggggcaccctggcccgcatgcggtacaaaagaaccaag

SEQ ID NO: 655609 - DNA, 75 bp, Homo sapiens
tcggggaggcaagatgatccaccagcggttccatcctacacttggcttagcagtgtctgcaaaaacgaatctttt

SEQ ID NO: 655610 - DNA, 75 bp, Homo sapiens
ccagaatccgcgcgcaccgcggctttcatgagaaggacaagaagccatattgccgaaaggatttcttagccatgt

SEQ ID NO: 655611 - DNA, 88 bp, Homo sapiens
ggctccttaccagctcacctctcaccgcgcatgtttggaggtaccaggatttctatgcattcgacctgtcaggagccactcgagtcct

SEQ ID NO: 655612 - DNA, 100 bp, Homo sapiens
cagctgtggaaagaagttgcaaaacactggatgccggtggccgtgggtccctacggacagtcccagccaagctgcttcgaccgtgtcaaaatgggcttcg

SEQ ID NO: 655613 - DNA, 75 bp, Homo sapiens
ctgcacttgctccacgggtcaggggatcggaggggtacactaccagaagatcatccaccgtgacatcaaaccttc

SEQ ID NO: 655614 - DNA, 100 bp, Homo sapiens
aacaacctcttgaggatcgaatcttcactcccgctgtctcagcagtctacagcacggccatgtttttggtatactgtgcactggagaaagaacctgtgcc

SEQ ID NO: 655615 - DNA, 100 bp, Homo sapiens
caaatcccaggcataatgaatgatgaaaaatttaacctgaagttggtcatcaaaccaggccaagatagccaggttaaccaaacgctttgaagcagccaaa

SEQ ID NO: 655616 - DNA, 100 bp, Homo sapiens
cacctctgagaagggagacgacgctgctgggtccgctgagcggggcgacccgagactgacattttctgaggaggctggggatgtgatttgtgattatggg

SEQ ID NO: 655617 - DNA, 75 bp, Homo sapiens
ctggttgttccgttgcgagctgcagctgcgatctctgtggtaggcccaggaggactcacgaatggcagtggaaga

SEQ ID NO: 655618 - DNA, 51 bp, Homo sapiens
ctttatctcagtttcatgctgccgtaggtatgagaaagtgccagtcatctt

SEQ ID NO: 655619 - DNA, 75 bp, Homo sapiens
tctcagtccacccaaggtctcctcggatcgcctggagaggcactcggacctgatctgaacataaagtctggtctc

SEQ ID NO: 655620 - DNA, 101 bp, Homo sapiens
gtgtactcttccttctcctccttctacaacaccaagaagaagttcttcacttcaggtagaggatgaggtgtttgaagagttttgtcgggagattggtgtgc

SEQ ID NO: 655621 - DNA, 101 bp, Homo sapiens
gctggacagccgggtcctgaacgctgtgaaatcttcaaggttactgactttttatgatgtttggtggctatgagactatagaagcatacgaagatgatctt

SEQ ID NO: 655622 - DNA, 100 bp, Homo sapiens
caggaaagtcaggctaaaagtgtctgctgctgctgccgccccccactccgcctccgggagaggaagcagcgacagcagtatataccttactagtagtgtt

SEQ ID NO: 655623 - DNA, 75 bp, Homo sapiens
gtggtgcttctgttgctcacagtacaaggcgagtggataattccaacacaagactggcagtccaaattgaaagag

SEQ ID NO: 655624 - DNA, 75 bp, Homo sapiens
acagagtgttgagaagtttattcagaaaattaatcctaccatatgaaagatttattaaaggagaagaagataagc

SEQ ID NO: 655625 - DNA, 90 bp, Homo sapiens
ccgctctaagccgccgcgcagcctgcgttttctccggtacaggttgaggctactaagatacgtcggtaacctttccagagatgtgacaga

SEQ ID NO: 655626 - DNA, 74 bp, Homo sapiens
gcagtgcgtcaatcagagcgtcctgtgcgggggatatgagactttctactcggaatatcctgagtgttgcgtgg

SEQ ID NO: 655627 - DNA, 82 bp, Homo sapiens
cagccaactccattgccacagcctcccccaccaacacagctgttgccaatacacaatcaggctgtgatgcagatccatccgc

SEQ ID NO: 655628 - DNA, 82 bp, Homo sapiens
agaggtacctctccttttccctctccctttccctaagatggcagaaacggtggacacaagcgaaatggtcaacggcgctaca

SEQ ID NO: 655629 - DNA, 101 bp, Homo sapiens
agaagatccgcagctccacgcagcaagacccgcgccgccgggacccccaggacgacgtgtacctggacatcaccgatttgcctctgcaacttgactctcct

SEQ ID NO: 655630 - DNA, 88 bp, Homo sapiens
ccagaccaaaattgaaaaaatggttgacctcacccaggccgtcgctttcgggttctctcatcgcttcgtcgttcgccaatgtttgagg

SEQ ID NO: 655631 - DNA, 80 bp, Homo sapiens
gggcacacaaaaaacgggtcgcccgcgattctcagggattgatcgcctcttcagcacggggtcactctggtgcccattga

SEQ ID NO: 655632 - DNA, 98 bp, Homo sapiens
ccagttcaaccggagttacctgagcccagaaggtctgcccaagatggaggtgtttcaggaatactacgggcttcctccaccccctggagccattggac

SEQ ID NO: 655633 - DNA, 48 bp, Homo sapiens
tctgttcacggctccatcgctgttaggtgcaacaccggaggatttcag

SEQ ID NO: 655634 - DNA, 74 bp, Homo sapiens
gttaatcttggcgacattgacaatgatggctttgaaggaaatgggtcctgatgaatatgaagagatggaagaag

SEQ ID NO: 655635 - DNA, 74 bp, Homo sapiens
gcaggcacagcccgagaaaccgcagcactacacggtgcaacaccggaggatttcagcaacctcccacctgaaca

SEQ ID NO: 655636 - DNA, 100 bp, Homo sapiens
atggaatcctaccaggaggtgacggtgtttgagaagctgcagctgctcaaccctgaaatagaagcagaacaaatattaatgtcgcccaactcatatataa

SEQ ID NO: 655637 - DNA, 75 bp, Homo sapiens
ggatcgtgtgcattacaggagtcctccacttgccactggtgcccgtccgtgatgatgggaacatgcccgacgtgc

SEQ ID NO: 655638 - DNA, 50 bp, Homo sapiens
agccgcgcagccctcggagcacgaaatacatgctacaggatttaactatc

SEQ ID NO: 655639 - DNA, 75 bp, Homo sapiens
cgggaaattcaacaggagctttccaggctcttgtcaggatggtgaagctgttcatcggaaacctgccccgggagg

SEQ ID NO: 655640 - DNA, 100 bp, Homo sapiens
tcccctgttccgaggtcaggaggatgcaagtcctgacagattcagcaacacttgcatgctgctgccaaaccagagatcacttgtagacttgaaagggaac

SEQ ID NO: 655641 - DNA, 97 bp, Homo sapiens
tgctccgcagcgacatcaccaagctggaggtggacgccatcgtcaacgccgctgtcgcctggttgggcccggaaatgggacgtcgcgctttctcagg

SEQ ID NO: 655642 - DNA, 90 bp, Homo sapiens
cactggtaatgtgtccattcgagggcggatcctctctgctgagatctgtatctgtggacctgaatgttgatccctcgcttcagattgaca

SEQ ID NO: 655643 - DNA, 90 bp, Homo sapiens
ttcgaaacctcaaagaacctcttctgacctttcgccttaacagagcctttatggaagcagcagttccagggtcacccccgagaggacaac

SEQ ID NO: 655644 - DNA, 90 bp, Homo sapiens
cggcacggcctcgtgcccttcgccttcgtgcgcttcgaggacccccgccgcttacaaacacgcagatggcaagaagattgatggcaggag

SEQ ID NO: 655645 - DNA, 95 bp, Homo sapiens
gagcttgagatacgccgctctgaatcttgccgccctgcactgccgcttcggtcactaagtcagcgaccacatggacctggggccctcagagctgg

SEQ ID NO: 655646 - DNA, 101 bp, Homo sapiens
agcttggtttcgggatctcggtgctgcagacggcgagacctcctgcacaggtgaaatgacaatggatgctctgttggctcgattgaaacttctgaatccag

SEQ ID NO: 655647 - DNA, 100 bp, Homo sapiens
ctactgcctgtagaagcagacattttagcaactgcctgaagttacatttagagactgaaatcactgcaccttaaaaacaaaagattgagctgcactgtat

SEQ ID NO: 655648 - DNA, 98 bp, Homo sapiens
atgagaaataaggacaaaagccaagaggaggacagttcgctacacagcaatgcatcgagagagtgattgactgcctggaggatgagaaggcaaccctc

SEQ ID NO: 655649 - DNA, 116 bp, Homo sapiens
gccgattcctcctccttggtcgccgcgtccttggctggcgtagagaagaagaaggaggttcctgctgtgccagaaacccttaagaaaaagcgaaggaatttcgcagagctgaagat

SEQ ID NO: 655650 - DNA, 98 bp, Homo sapiens
gaggctgaaggaagatggcggacggcgtggaccacatagacatttacgcggatgtcggcgaagagttcaaccaggcctgatcacttgaacggacatat

SEQ ID NO: 655651 - DNA, 75 bp, Homo sapiens
gccggagtgtaggcggcagaggattcgctcccagagcagctgcggccaggccaagtcatcaaggcatgggacatt

SEQ ID NO: 655652 - DNA, 80 bp, Homo sapiens
ggaagcagcaccatcggggagacaagcaagtgaggaaaatagcagctgaatactatgacaacctccctcactacaattcc

SEQ ID NO: 655653 - DNA, 82 bp, Homo sapiens
caaaccccaagtcctccttgccaggccttcaaccactatctcagtgcaatgggcccggaggctgtttgatgtcctgcacgag

SEQ ID NO: 655654 - DNA, 90 bp, Homo sapiens
gtccccggcgcgaagaggctggactcggattcgttgcctgaggttcaaaccttgtactactcagctgatcacaagctgcttgatgggaac

SEQ ID NO: 655655 - DNA, 78 bp, Homo sapiens
ccccttgccaggagtgttcaagatgctctctctggaccgatcccacttgtgtcaggaagctgtctgggaagccttcag

SEQ ID NO: 655656 - DNA, 51 bp, Homo sapiens
tggcatctcctctcacggatgcctcgatcactgtgtccactactatgatct

SEQ ID NO: 655657 - DNA, 85 bp, Homo sapiens
ccagatatatggagctctacacgtatcctcctgcctagcgcagataaacctctcataatgaaggcccccgctgtgcttgcacctg

SEQ ID NO: 655658 - DNA, 100 bp, Homo sapiens
aagcatttgtgcattcagatgctgctaaacaactcatggtgataaacaagacaaagtcaagcagaaagcgtttgtggagccgtattttaaaggtgatgaa

SEQ ID NO: 655659 - DNA, 75 bp, Homo sapiens
tggctgaatgtgcgcatttccattatgagaatgttgagttcggcagcatacaggcaaccactgagaaaacggaac

SEQ ID NO: 655660 - DNA, 90 bp, Homo sapiens
ctcttatccatggaatcagagggtgcattcaaagtgaccaagaatatggcccaggtgaccaaagccctggacaaggccctgagcaccatg

SEQ ID NO: 655661 - DNA, 50 bp, Homo sapiens
ctgctgttggtaccagacaaaatgtctaccctgatgggagagtctgcatt

SEQ ID NO: 655662 - DNA, 100 bp, Homo sapiens
tggattgtggcaggcaacatcactccttcctttgtggagggcttggccacgcccactcagcctgatagactaaagcagtttagtgtggcaccaagacact

SEQ ID NO: 655663 - DNA, 100 bp, Homo sapiens
caacatgtaccccagcaacaagaagaaaaaggtgtggagagaggagaaaggtcttaaagaaagtgcagaagagatggtcaaaaacaaattggaaggaaag

SEQ ID NO: 655664 - DNA, 100 bp, Homo sapiens
ccggccggtccctcgcctcccggccgagctgacggcatgctgcttgcagggtttctcatcagaaatatcccagtcatcaacgataatgtgcagatcaagc

SEQ ID NO: 655665 - DNA, 73 bp, Homo sapiens
ctgtcatggttccccttctactacatgctgaagatgaagtggaaagggaaggacctctttgatttggtgtgcc

SEQ ID NO: 655666 - DNA, 87 bp, Homo sapiens
ccctgactatgcggaatacatcttccatccaatggacctttgtacattggaaaagatctcatggaaccaagggattgacttgtggtg

SEQ ID NO: 655667 - DNA, 75 bp, Homo sapiens
gcagatcagcacctctctgcccaggttcgagaacttgtcttggacaattgcaaatcaaatgatggaaaaattgag

SEQ ID NO: 655668 - DNA, 100 bp, Homo sapiens
gtctccgccggctactgccgcttcagttctcccggtgtggccacgagtcggacttgtgtatgcggatacctgcttcagtaccatcaagttaaaagcagaa

SEQ ID NO: 655669 - DNA, 74 bp, Homo sapiens
agctaattaaaacatttttcagggacgtagccatccagagacctggtgatgactggaaaaagactttaaaactc

SEQ ID NO: 655670 - DNA, 101 bp, Homo sapiens
tgaggaggcccgagcggcggcggtggcggcgaaggccgaggcgtttgcctatctggggcgcctggctcacgaggttggctggaagtaccaggcagtgacag

SEQ ID NO: 655671 - DNA, 90 bp, Homo sapiens
ccacgactcccgatagtgagagacctgctcaagctctcttaagagattatggccaaggcagaggcttcctcaggagaccatcccactgac

SEQ ID NO: 655672 - DNA, 90 bp, Homo sapiens
tggggcagaatacagagatatggaatcaggcctcgggccagcggccaggagctgcctcccccagcccccgtcccgcggcccccagccgcc

SEQ ID NO: 655673 - DNA, 49 bp, Homo sapiens
agcatcccacattaagtcaacgagaatgtaactggtcactacatttccc

SEQ ID NO: 655674 - DNA, 100 bp, Homo sapiens
cctccggaatctaaaaagccctcagtaccagagacagaagcagatggattcgtccttttagatgctggctatgagtttgacatctgcttcacctcagtgc

SEQ ID NO: 655675 - DNA, 75 bp, Homo sapiens
tctttgttaaagaagagaataagatttttggaagaaaagcccatcagtgttggatcgtttgaatgctttgcttga

SEQ ID NO: 655676 - DNA, 82 bp, Homo sapiens
agtcggcactgctactgcgaagacagctggcaggagcacgtgaattgcctctgcttacgttcaggccctgtcctaaacccag

SEQ ID NO: 655677 - DNA, 100 bp, Homo sapiens
ctcccctgcaccgagggaacaactcgagctttgaggcttcctccaactaccacttgccagcaacaaaacagaagagcctgcaagtgacaaaggaagtgag

SEQ ID NO: 655678 - DNA, 90 bp, Homo sapiens
gtctgttcgcgatcctgccggagccccgccgccgccggcttgacaatgcagatcttcgtgaagactctgactggtaagaccatcaccctc

SEQ ID NO: 655679 - DNA, 108 bp, Homo sapiens
attcacctgctcatctccagcacttaactcaagacccccgtggatccaggaactggcataggtgcactcagcaacgatatttggagttcttacaacatggcagacatt

SEQ ID NO: 655680 - DNA, 129 bp, Homo sapiens
actgatctccaggaccagcactcttctcccagcccttagggtcctgctcggccaagggagaagcagaatttgcccgcatcatgagcattgtggaccccaaccgcctgggggtagtgacattccaggcct

SEQ ID NO: 655681 - DNA, 100 bp, Homo sapiens
taccaagcatgtggctcctggtcagtgtaattctaatctcacggatatcctctgttgggggagaagtacaagccagctgccatgttgtgagcacatacca

SEQ ID NO: 655682 - DNA, 98 bp, Homo sapiens
tttggatggcatttcccatgcacctaatgctgtgaaaaccgcattttatttagcagagttttttgttaatgaagctgcagaaccttggcctgaaaatg

SEQ ID NO: 655683 - DNA, 100 bp, Homo sapiens
cgcagccatgcccaccaccatcgagcgggagttcgaagagttggatactcagcgtcgctggcagccgctgtacttggtcctgctcaatctggaattttgt

SEQ ID NO: 655684 - DNA, 74 bp, Homo sapiens
atactatccgtttgttcaggaaccaccagtgacagagttttcctttggaatatggataaatacaccatgatacg

SEQ ID NO: 655685 - DNA, 101 bp, Homo sapiens
gccagagttctagggttctaagtgatgtccaggaaggaggaggaataatatttatggagcatatattatggaacacattaagtgggcagaccaacatccac

SEQ ID NO: 655686 - DNA, 100 bp, Homo sapiens
ttagccatggtcaaccccaccgtgttcttcgacattgccgtcgacggcgagcccttgggccgcgtctcctttgagattttatttggagagaagcaagcat

SEQ ID NO: 655687 - DNA, 96 bp, Homo sapiens
ttttgatcaccattggctgggaaggaaaaacagaatcagctgttccctgcgaaaggatattcatccgttctatgctgatttgatgaatattctcta

SEQ ID NO: 655688 - DNA, 100 bp, Homo sapiens
caagctgcaggaggaggagagagaaaggagagacaattatgttcctgaggtctcaggaccccacacccccctcagcacctcaggaagccacagaaggcag

SEQ ID NO: 655689 - DNA, 83 bp, Homo sapiens
gccactgctggctgcttccagtgttcgccgagaggtacatgtcccagagcaagcacacggaggcccgggagctcatgtactcg

SEQ ID NO: 655690 - DNA, 100 bp, Homo sapiens
ccgcctcagcatctggtacagccgagaaaatcatcagcgtgttagcattttctttgactatgcaagatgtagcaagaacactgcgtggccctactttctg

SEQ ID NO: 655691 - DNA, 51 bp, Homo sapiens
tgcgggcccgctccgacgcggaaggatattaccttccaaatgatgatggag

SEQ ID NO: 655692 - DNA, 50 bp, Homo sapiens
ggagactaggctggcattttgactttgggcatggagcagatccaactaaa

SEQ ID NO: 655693 - DNA, 73 bp, Homo sapiens
atcagaacaacagcctgccaccttacgctcagggcttggcctcccctcaggacttgattattcttagaaatgc

SEQ ID NO: 655694 - DNA, 78 bp, Homo sapiens
cggctggagggcgtttctcgggagcagttcatgcagcacctctacccacagaggcacagttgaatgctgttgatgctt

SEQ ID NO: 655695 - DNA, 75 bp, Homo sapiens
caggctccgggctgaagattgcttctcttctctcctccaagtcccatgaagctgaggtcttgaagcagctggctg

SEQ ID NO: 655696 - DNA, 100 bp, Homo sapiens
acgtgcggggcctgggcctcccggtccgcaagcaggattttctacaaggaatatgtcttacccctgactgtgaaggtgtcatttctaagattatcatctt

SEQ ID NO: 655697 - DNA, 100 bp, Homo sapiens
aaggatgggaggtggtggagtcggacctctatgccatgaacttcaatcccatcatttccagaaaggacatcacaggctgtcgacggacttcaggaagtgc

SEQ ID NO: 655698 - DNA, 90 bp, Homo sapiens
acaagatcctgacagtactaacagcttagtaagggaacacgggtctggctgagagaaaatggccagcattttccaagtactgtaaattcc

SEQ ID NO: 655699 - DNA, 100 bp, Homo sapiens
gatgacaaactctggagtaattggagccaagaaatgagtatagagaaagcaattgagctgcgtctggcaaaaattgaccatactgcaattcacccacatt

SEQ ID NO: 655700 - DNA, 100 bp, Homo sapiens
agcaagaacgggaacaaaactctgagtgaagtcaccctgctgagaaatgaagtggcacagctgaaacagcttcttctggctcataaagattgccctgtaa

SEQ ID NO: 655701 - DNA, 74 bp, Homo sapiens
cggggatgtggacgaaggggccgacctcctagaaattttactgcaggataaaactccaggataaaactgtcaag

SEQ ID NO: 655702 - DNA, 51 bp, Homo sapiens
cttcaatgcccagtccccagctcgccagcttgtatcacggactgattcacc

SEQ ID NO: 655703 - DNA, 82 bp, Homo sapiens
ttccaactggtcatggtttcagttgcgatgcatgcaagtcggaggaaacgctagtgcagtgcttgaggaatccaaagccctc

SEQ ID NO: 655704 - DNA, 75 bp, Homo sapiens
tcatcgctcctgacaagcatgaggagacatggaaatttacactacagaaggcaagacaaattgtcaagaagtccc

SEQ ID NO: 655705 - DNA, 100 bp, Homo sapiens
cggagcccggcgctttccccgcaagatggacggtttcgccggcagtctcggctggacgtaaagaaagaagtgatgcactcaattctgcaatagataaaat

SEQ ID NO: 655706 - DNA, 100 bp, Homo sapiens
cgtacattccaaaggactttgcgaccctctaccagggatggggtgtcagcggccctgggttggagcacagaggcattgtttccaagtcgtacgagtgccg

SEQ ID NO: 655707 - DNA, 83 bp, Homo sapiens
taaagaaggtccttcaaggaattatgagttattatcatgaggtcaatgtgacggtggactacattagaccagccagcccagcc

SEQ ID NO: 655708 - DNA, 90 bp, Homo sapiens
gattgaaccagacactgatgctcctcaagaaatgggagatgaaaatgcggaggcagctatccatgatgctgatgctggcgcagtcaaacc

SEQ ID NO: 655709 - DNA, 100 bp, Homo sapiens
ctgaactggcgggcttccaacgggacctgggcagcctgcgcaggctggcacacagcttccgcccagcataccgcaagatctcgaaaaccatcaacatgct

SEQ ID NO: 655710 - DNA, 74 bp, Homo sapiens
actgagcctggatgatcctgaggtggagcagtgacttctgacagctctctccatggaaggaggcggcggccgcg

SEQ ID NO: 655711 - DNA, 96 bp, Homo sapiens
gttgccaagcgctcggcgcttggcgctggcgctggccaaggcgcttcacctgaacctaaaatggtgagcgagagtcaccatgaggccctggcagcc

SEQ ID NO: 655712 - DNA, 80 bp, Homo sapiens
cagccatggcagattcctccgggcagcaggacccaacatgagtgaagtttcctgcaagaaacgggacgactatttggaat

SEQ ID NO: 655713 - DNA, 90 bp, Homo sapiens
aaggtgatacttacctcacctctaattagggacgaattggagaagaaggatggaggatcccttgacaagattgctgtggtaactgctgac

SEQ ID NO: 655714 - DNA, 100 bp, Homo sapiens
gtcaagcagggctacgtgaaaatccgcagcaggaagcttgggttccctgaatgtggtttctacggaatgtatgataagatcctgctttttcgccatgacc

SEQ ID NO: 655715 - DNA, 89 bp, Homo sapiens
gggatttctgttcttatgacctttccacaacttggaccagttcagcctattccttgttctgtggacaaagcttacaagttgctactgga

SEQ ID NO: 655716 - DNA, 75 bp, Homo sapiens
ccagagccccgcgtttcagccctagggaaggagccctgagtccctttgaatgtggatgtgtgtcgtctgattcgt

SEQ ID NO: 655717 - DNA, 98 bp, Homo sapiens
ctcaggaatcatgggctatcaaagagagactagcttgcaaaattttcctcatattgaggtggttcggaaaaaagaggagagaagaaaactgcttgggc

SEQ ID NO: 655718 - DNA, 98 bp, Homo sapiens
ctggcctgccttgggccggggatttaacacagcaaaagagtgcattgagaagagtcttctattactaaaatttctgcccacgggcataagttcaaaag

SEQ ID NO: 655719 - DNA, 75 bp, Homo sapiens
tggataacgggaggtgaatttccatgtcaacatagtcctgacaggagacaatttatccagcatgttgctagaaaa

SEQ ID NO: 655720 - DNA, 75 bp, Homo sapiens
ttggaaaagttgccattcccttgctgtccctgagatctgtatctgtggacctgaatgttgatccctcgcttcaga

SEQ ID NO: 655721 - DNA, 100 bp, Homo sapiens
ccgggcccagcacagccagcaccgcacgccctgcaagggagatttgtagccaaaccgtgcgccatagccctcaacattcaggccaatggaccacaaattg

SEQ ID NO: 655722 - DNA, 73 bp, Homo sapiens
tcagcacaaatctgaagatggtgtcaaagagaaattctgaccttttcacagatgctgctgagactgaaaaaat

SEQ ID NO: 655723 - DNA, 76 bp, Homo sapiens
cttgatcttggacttccagcctccagaactgttatttggcagctaattctagatttggatcattgcccaaagttgc

SEQ ID NO: 655724 - DNA, 100 bp, Homo sapiens
acttccataagcagcagccactgttcgtctctggaggagatgactataagattaagatgtgggacctaggaaaaggcctgaagattccccagctatacca

SEQ ID NO: 655725 - DNA, 100 bp, Homo sapiens
gctggaggatgcctactggaaggacgacgacaaacacgtcatgaggaaggagcagcgcaaggtcagtgcaggagcccagccgctgagccatgccgggccc

SEQ ID NO: 655726 - DNA, 90 bp, Homo sapiens
aagtgcatgcagctcactgatttcatcctcaagtttccgcacagatacttggcatatcgaaattttatgattgacacgtatcgtctaaac

SEQ ID NO: 655727 - DNA, 98 bp, Homo sapiens
tggatttccaaggaagaatttcctctgaagcaccgatgcctgaggaaacccagacccaagaccaaccgatggaggaggaggaggttgagacgttcgcc

SEQ ID NO: 655728 - DNA, 143 bp, Homo sapiens
tgcggacgcgactcgagggtgacgctcgctccgctcgtcccgctcgtcatggcctacccgggatacggaggagggattgtagaaggcatgaaacaaaaaatgtggagtattgaaaatattgccttcggttctggtggaggttt

SEQ ID NO: 655729 - DNA, 82 bp, Homo sapiens
gactttgccatccagttcaaccgcaacagattgcccccaggttcagtgtgttaggacatacaaggcactgcacccagatgag

SEQ ID NO: 655730 - DNA, 75 bp, Homo sapiens
tgtcacacagaagaaagtacctgatctagtttgaagcactaagaagaataagacatcagtttgaaaagaggctct

SEQ ID NO: 655731 - DNA, 83 bp, Homo sapiens
tgttagggggtgtcatcatgattctcatcatggtggtaatactacagttgagaagaagagggccggaagcagctggaaaagac

SEQ ID NO: 655732 - DNA, 82 bp, Homo sapiens
ccgacaacgacatcaaggactacgaggacctgcagtcagtgttcctctgaacaacagggagaatatctctgatcccacctca

SEQ ID NO: 655733 - DNA, 82 bp, Homo sapiens
aaaactacaaatcccaggagcacttcacgggaagcccgtcagcctgagctacagatgcccatgccgattcttcgaaagccat

SEQ ID NO: 655734 - DNA, 75 bp, Homo sapiens
gctgtttcatgtgcaggaagaaagtgggacttactggtaaatccatttcggatggccactcgtggcatgttcccg

SEQ ID NO: 655735 - DNA, 90 bp, Homo sapiens
gccccggccccggtcccggccctggcccgggcagcgtgcctgccagtgtagagccggtggagcagctgggctcggcgctgaggtttcgcc

SEQ ID NO: 655736 - DNA, 101 bp, Homo sapiens
ttattattgggcttttccaagtaaagctcttcatgcaaggaaacataagttggaggttctggaatctcagactatgagaagatgtttggcacgaaatgcca

SEQ ID NO: 655737 - DNA, 75 bp, Homo sapiens
atgtttcaagaaaatggatttaaacatatttccctgtggagtatcctagaaggaaaacatcaccatggctacaga

SEQ ID NO: 655738 - DNA, 78 bp, Homo sapiens
ggcaagataattgttttcaagtgttggaaggctgctatggagaaagtggccagcatcgaaatgttcagccttttagtg

SEQ ID NO: 655739 - DNA, 100 bp, Homo sapiens
aaaactgaccatagccagagaacagccctccatcttgcagcccagaagggcggactactggaagtcacagccaaagaaattctgtgattactgcaagtgc

SEQ ID NO: 655740 - DNA, 90 bp, Homo sapiens
tcgtcaactgtgaccccagaaaatgggacaactaatggatacaaatcaggattcactcagacaggcgcagatcaggcctctataaccgcc

SEQ ID NO: 655741 - DNA, 141 bp, Homo sapiens
ccgccccgaggtgggcattcccgacggcccgcccctcaaggacaacctcggcctgagacaccggaggaccgggagtgcgccggtctcggggaaatgcccggttccttcgtgcccacggtcaccgcgatcacaaccagccag

SEQ ID NO: 655742 - DNA, 117 bp, Homo sapiens
ggaaatcatgtcaagcgaagccttgaaaaagctgccctgagacggtgtcccgccgaaaggctctgcagaaggctttaaccaagcagataaggcaataaacaccgctgtaaagtcggg

SEQ ID NO: 655743 - DNA, 100 bp, Homo sapiens
aaccttcgatctcctgacgaacaatgattgaagctcacgttgatgtcaagactaccgatggttacttgcttcgtctgttctgtgttggttttactaaaaa

SEQ ID NO: 655744 - DNA, 75 bp, Homo sapiens
cttttgaaaccataatactgcttacaaaatttgcctgagaatacagatcaacccacagaacaaagcggatttcca

SEQ ID NO: 655745 - DNA, 75 bp, Homo sapiens
tgaagggtgattttgatgcttgcgaagagttgattgaaaaggctgtaaatgggggacctggacgatctaccatgc

SEQ ID NO: 655746 - DNA, 82 bp, Homo sapiens
tgcctgctaacatggataagcatgccctgaaaaagtatcgtcgagaagcctatcatcggtgtgatccctcacatccacaaat

SEQ ID NO: 655747 - DNA, 75 bp, Homo sapiens
agaaacatccacagcagcgactggcccaagttctttgaaaagaattatatccagatcgagagacagaagattctg

SEQ ID NO: 655748 - DNA, 89 bp, Homo sapiens
gtggtttgtctgtgatggctggaagttcctctgtaccagctgtacaggaagaggcacatacaaagaaaagaatccccgaaagggcggtt

SEQ ID NO: 655749 - DNA, 100 bp, Homo sapiens
agcagcagcgagtccttcatcagccgtctgctggccatcgtggcagacctctacgagcaggagcagtacagattgtagaaggcatgaaacaaaaaatgtg

SEQ ID NO: 655750 - DNA, 74 bp, Homo sapiens
agctttacatgcacttgaacagactagaaattgcaccacagatatatgggttggattaatgaaaatcaagttcc

SEQ ID NO: 655751 - DNA, 95 bp, Homo sapiens
ggagctcgggacgtgatcgtggtgtcaacagcatctccaccctggagcctgtgagccggtgccagcgcctgagtgagctgtacctgcggaggaac

SEQ ID NO: 655752 - DNA, 97 bp, Homo sapiens
ttttgcaaggagaaaattttggtggagaattatccaacaagaaaaagacctgtggctattaagataggtggagccgccaccaaaatgcagattttcg

SEQ ID NO: 655753 - DNA, 100 bp, Homo sapiens
aaaagaagaccatctcaccagagcatgtcatacaaggcagaagctcctcctggggtagagacagatcttattgatgttggattcacagatgatgtgaaga

SEQ ID NO: 655754 - DNA, 95 bp, Homo sapiens
agaccaagtcctcgctggactgctcagggtgccagacctcatcagggccgcggggtgaagattgcccgtgccctggtgggcaccttcatgtcagc

SEQ ID NO: 655755 - DNA, 100 bp, Homo sapiens
cctgacccaggcctgctcggccctcacaggtctgcgctcctcagaccaccggcaggtgaacagcctgatgcagaccgaggagtgcccacctatgctagac

SEQ ID NO: 655756 - DNA, 75 bp, Homo sapiens
agatgccagcgtagctgaatccagtaccaaaaacgtcaacaacagttttacgccgtgcttcctcaaagactggga

SEQ ID NO: 655757 - DNA, 73 bp, Homo sapiens
cacctacagaaacaaaatgtcaacaaattgatggcattccacgcctacgggaaggcaggcaagatgctggtgg

SEQ ID NO: 655758 - DNA, 83 bp, Homo sapiens
caacaatacattaaaggctgataataacacagttattaatggactgcttggaaatatagttggctgattgcaattctggccca

SEQ ID NO: 655759 - DNA, 88 bp, Homo sapiens
gaaagcctctctcttgcccaaaccacgatgggaatcaaccctgatctccggagaactgagcccatcttggagagccccttgcagagga

SEQ ID NO: 655760 - DNA, 111 bp, Homo sapiens
aagctgagcagagccctgcgatactattatgacaagatcgcccaggaccacaccgcagcgtaactgcaggcctctcagcgaaaaagggggaaagcaaagacccgggtgtgc

SEQ ID NO: 655761 - DNA, 82 bp, Homo sapiens
ttgcaagtttgtgccccatagctgcacaggtacaagcagtggtaccatggcttgttgggacatgaggttccagttgccaatt

SEQ ID NO: 655762 - DNA, 75 bp, Homo sapiens
ccggggcccaaccacaagacgactcaataggaggaagtttgaaaatctgaacacagttgctgagtgtctgttttc

SEQ ID NO: 655763 - DNA, 96 bp, Homo sapiens
agacatttgctacagcatcccacattaagtcaacgggcagcttttggcaaggagtctgaagttcttattgggaacctgggtgataaattaatccct

SEQ ID NO: 655764 - DNA, 102 bp, Homo sapiens
ctcattcataggatataaagagaaacctcaagatgtggatttaccttatcccctcaacaacttttcagtggcaaggaaacatgcacaattcttggattacaa

SEQ ID NO: 655765 - DNA, 90 bp, Homo sapiens
cgcacacataaagtcattgcagtcgtcaacaagatggtgagcatgatggagggtgtcatccagatttccatggtgtcagtgattcatatt

SEQ ID NO: 655766 - DNA, 90 bp, Homo sapiens
ggcagccttcctgatttctgcagctctgtgtgaagtgactgagatgctggtaaatgtcctcaacatctgctcagatgatgaactagggtc

SEQ ID NO: 655767 - DNA, 90 bp, Homo sapiens
cgacgcatgagtggcaggcccttcagccagttctgacccagtgggtgatatatgccatccgaaaccttaccgaagacaacagccaaaacc

SEQ ID NO: 655768 - DNA, 75 bp, Homo sapiens
gagacagaagcagatggattcgtccttttaggaaaacgggccttactatacatcatatcccccatcaccagattt

SEQ ID NO: 655769 - DNA, 88 bp, Homo sapiens
taacagaagcatttaagcttatcacttcagataaaaagtgatcaccagcagcttgcaaaacttatccaggagtcgccaaccgttgaac

SEQ ID NO: 655770 - DNA, 50 bp, Homo sapiens
cccgagggtcaacgagaaagagatcgggctagtgaatgttcccgaggaac

SEQ ID NO: 655771 - DNA, 99 bp, Homo sapiens
aaggattccaagtaactcttatttgtaacagatcaactcctagcaatcatgatcggatacagcgtctgaggcaagaatttcagcaagcaaagcaagatg

SEQ ID NO: 655772 - DNA, 97 bp, Homo sapiens
cagcttcggcggcggcagagggatggtggccgatcctgataaccctttggtgctggacatcctgacgggctcttccacctcttactccttcttcccg

SEQ ID NO: 655773 - DNA, 89 bp, Homo sapiens
caaggcgctgctgaccacctacggctatggcattgctggttctaccaacgtgacaggtgatcaagttaagaagctggacgtcctctcca

SEQ ID NO: 655774 - DNA, 100 bp, Homo sapiens
ctgggaggccggccggtgccagcacctttcggcttctgagacggcggcagcagcggcattcaggtgccaatgaactggctgtgcagaaagcaaaggcaga

SEQ ID NO: 655775 - DNA, 100 bp, Homo sapiens
tgcggacatgctgggtggatccggatcgcatggaagacgcagcctggccgcgctctcccagtatacccgaaatcttgtggatcaaggaaatggaaaattt

SEQ ID NO: 655776 - DNA, 74 bp, Homo sapiens
tcctgcatggattgggagatactggattgcagagggaatggcatacatcgagcggaagaactacattcaccggg

SEQ ID NO: 655777 - DNA, 97 bp, Homo sapiens
cttcaccacccgcacggcgcagtgccggaacactgtggcggccatcgaggaggtgagaattatgaagatgatgacctagtaaattctgatgaggtta

SEQ ID NO: 655778 - DNA, 51 bp, Homo sapiens
cgcaaagttgtcaagaaccaaatgaagtgtcctgatggaggagacaatgca

SEQ ID NO: 655779 - DNA, 90 bp, Homo sapiens
gggacgctgcaggtgctagcgctgctgggggccgcccatgaaagcgcagccatggcggtatgccgagattttgctgtcctggaggaccac

SEQ ID NO: 655780 - DNA, 80 bp, Homo sapiens
agaaggaggagcgggccgtggaggcttcgccgcctaggggtttgattcaggagatgagcggcgatgcttctgtgtgcccg

SEQ ID NO: 655781 - DNA, 96 bp, Homo sapiens
cccaactttactcctattttactacagtcaagtctgaagataacatatgaggttccatctcaggatgattccaaaccaacccagaggcaatttact

SEQ ID NO: 655782 - DNA, 100 bp, Homo sapiens
tgtacctcctggctgaggaggccgaaggcatcggggacaagagtgatggtgatgattttaattacatcattgcatttttccttggaacagcagcctgcct

SEQ ID NO: 655783 - DNA, 75 bp, Homo sapiens
gacaagcagcacattctcaagagcacacagctggaaagtgaaatttcaaccacagcagatgactgcagttcagag

SEQ ID NO: 655784 - DNA, 88 bp, Homo sapiens
gaggatgatgcggaaattaaccccaagggtcctgatgaagaagctgttgtggatcttggcaaaactagctcaactgtgaacaccaagt

SEQ ID NO: 655785 - DNA, 76 bp, Homo sapiens
tcgcctccaggccaagagggatccttcacccgtgtctgatgaataatacggcagctagtccaatgtctactgcaac

SEQ ID NO: 655786 - DNA, 75 bp, Homo sapiens
cttggagtcatcaatttgatctttcagataatttcatctctcaggaacagcatatgccatatatgagctggctgt

SEQ ID NO: 655787 - DNA, 75 bp, Homo sapiens
cccacgcagattttaattcccactctagattctggtcacgagaagagaatgccttctagatgcaaaatcacctcc

SEQ ID NO: 655788 - DNA, 90 bp, Homo sapiens
ttgttccttacaaggcaggaagaccggcagctcatcaacgctttgcagatcattcaacaccagccagccagtctcctcattcctctaacc

SEQ ID NO: 655789 - DNA, 51 bp, Homo sapiens
acaagtgggctgagtaccatgtttcaggaccacgtcaagacttgtggcaag

SEQ ID NO: 655790 - DNA, 90 bp, Homo sapiens
cctcaactatctcgctgacacgcagatttctccacccaggtgaactcctccctcacctccccgacggggcgaggctccatggctgccccc

SEQ ID NO: 655791 - DNA, 130 bp, Homo sapiens
gccggcgccatgggcaattgccacacggtggggcccaacgaggcgctggtggtttcaggtactccaaagattcaggtttactcacgtcatccagcagagaatggaaagtcaaatttcctgaattgctatg

SEQ ID NO: 655792 - DNA, 99 bp, Homo sapiens
tgaagatattttagagtacaaaagaagaaatgggctggaataaacttttgaaacactaatgtaagattaaaccggtcaagctcctcagagtgcagcaca

SEQ ID NO: 655793 - DNA, 93 bp, Homo sapiens
cgcgccgaggtggacctgcgggatctgcaccgcgaccagggccgcaggaagacgcaacaatgcagatcttcgtgaagactctgactggtaaga

SEQ ID NO: 655794 - DNA, 100 bp, Homo sapiens
ccagaacgtgccatggagacgcttaacggtgtttcccattaaacactaccaggacaaaatcaggccttacatccagctgccatcgcacagcaacattact

SEQ ID NO: 655795 - DNA, 100 bp, Homo sapiens
gacccacggagaccgccgcgccacggagtcccgtgacctcagcaagtacaactttgagaacaagcaacaagctttagaactagctttggatcgtgcagag

SEQ ID NO: 655796 - DNA, 74 bp, Homo sapiens
cagattcctccgggcagcaggggctttctctacgtgctgttgtctcactgggtttttgtcggagccccacgccc

SEQ ID NO: 655797 - DNA, 98 bp, Homo sapiens
cctgacaagaggtgatagttctggaagcagcaaaagcataggcaggctttcaaaaacaggtgtgtgggcaagtcttcgctctagcactcgcttgatca

SEQ ID NO: 655798 - DNA, 90 bp, Homo sapiens
ggcggccggcgaaaggagctggtgcctgtgcaagttgttgaggacagttcgtgtttggttaaagagagacagtggacagtattggccaag

SEQ ID NO: 655799 - DNA, 100 bp, Homo sapiens
agtatggagaacatgaagccagtcctgacaatgggcagaacgaattcagtgatatcattaagtccagatctgcacaaacatttcactgaagatattcaaa

SEQ ID NO: 655800 - DNA, 75 bp, Homo sapiens
caccacctccgccagttaagaggaaaaagatgaagctactgaatctttacatcaaacgtgcacaaacaggttctg

SEQ ID NO: 655801 - DNA, 48 bp, Homo sapiens
ccaaccacgtctactatgccaaggttgaaggggcccggccaggactcg

SEQ ID NO: 655802 - DNA, 75 bp, Homo sapiens
ggggtcttcctcctccgccgttgacagctgagcgggctttggacaccatgaactttgatgtgattaagggaaagc

SEQ ID NO: 655803 - DNA, 74 bp, Homo sapiens
acgggcaaggcggagagtgacggagtcggcgagcccccgcggcgacagggcaggtaagccccctcccggtttac

SEQ ID NO: 655804 - DNA, 100 bp, Homo sapiens
gtggagtaggaggcaggtctccgcggtctcggcgcggaagatggccggcggcgtggacggccccatcgggatcccgttccccgaccacagcagcgacatc

SEQ ID NO: 655805 - DNA, 49 bp, Homo sapiens
tagcaatttaaagatcctctccaaggtatagacacgtgtggccgtttac

SEQ ID NO: 655806 - DNA, 121 bp, Homo sapiens
gaacagacagtgacaatcaagccatactctctgagcagtggagagacgtacgtcctgcaagtgtctgtggcttggttgctggaatcctgtcacaggtctgaatgggtcactgactgacaag

SEQ ID NO: 655807 - DNA, 100 bp, Homo sapiens
gttaggtcaagatgaagacatggatgtcaaatactttgcacaggaagctataagtgtgaataaccctataccttccaatttgaaatcagaagcaaaaaag

SEQ ID NO: 655808 - DNA, 75 bp, Homo sapiens
agtgaaatgtcatgcctctgaaaatgaagaacattctagtatgccagtagaaaaaaatatcactttagaaaggcc

SEQ ID NO: 655809 - DNA, 100 bp, Homo sapiens
cctatcacagcttctagtcttcttgggaatgactaccgaccagactcccggaaatcatgttggtaggatcccagtctttttcgcctggagggcccaatgg

SEQ ID NO: 655810 - DNA, 100 bp, Homo sapiens
gccaacattccagttttttaagaagggacaaaagccaggcccagacatgtccgtccttgtaagttaaaagcttccatgggagccttccttcctaatcaag

SEQ ID NO: 655811 - DNA, 96 bp, Homo sapiens
gacttcacagcccgaaatgccaacgagctatcggtgctcaaggatgaggtcctagaggttggcctgctgtcttacagtcatcggccctccccactg

SEQ ID NO: 655812 - DNA, 88 bp, Homo sapiens
cagtccatcttctgcttagtatgtgtattcagacaggagagcacagaatggggattcaacacctcggcaatgcccttttagtgtgcga

SEQ ID NO: 655813 - DNA, 89 bp, Homo sapiens
gctaatcagtcacgaggctcccttgacaggcggctttgcatcggaaatcagctctacagttcagagtctcactctctcacccaggctgg

SEQ ID NO: 655814 - DNA, 97 bp, Homo sapiens
tatgtttcaacatctgaatcagatggtacagattgctgcagtggaaaatcagaatgtccctcttccagtggaaagcccaaccatgcagacatcttgc

SEQ ID NO: 655815 - DNA, 75 bp, Homo sapiens
ggccacgcagtgctttgcaacgctaattagactcatgccacttgaggatgaaaactttcggaagagaaagttgcc

SEQ ID NO: 655816 - DNA, 75 bp, Homo sapiens
cacgcacctgcagctctgctgagagagtgcaagccgtgggctagaacaacagaggcagcagttgcttactgaacg

SEQ ID NO: 655817 - DNA, 82 bp, Homo sapiens
cgggcgctgtgcatccacactggacgcgagctgcgctgcaagcccagctcaacattggcaatgtgctccctgtgggcaccat

SEQ ID NO: 655818 - DNA, 111 bp, Homo sapiens
cagggagagcttatggatggagaccaaacatccagatctggagtgccggcacagatttcttataggaaagacgtgcaggacacccacacgtacagtgcagaacttgaccga

SEQ ID NO: 655819 - DNA, 100 bp, Homo sapiens
ggtgaatgctgctaaaaacaagactggggctgctcccatcattgatgtggtgcgatcgggctcaagccaccaatctatgaagacctcaggccagggggtg

SEQ ID NO: 655820 - DNA, 88 bp, Homo sapiens
tcgtttttccttgagctgaacgtcttgcaacagtggccgcacgcataggtccggcgccagctgccagtcgaggaaccgaacccagcca

SEQ ID NO: 655821 - DNA, 46 bp, Homo sapiens
ccgggaccgtttaaaaaactggtttttcgttggaatatacgttgca

SEQ ID NO: 655822 - DNA, 75 bp, Homo sapiens
cgaggagagaaaagtctctaagtttgtgatcacaaaatttgtccaggatagacatagagctagaagaaacagact

SEQ ID NO: 655823 - DNA, 76 bp, Homo sapiens
tcagccgcccgctggccgggagcggagcccctgtggaaactaattctgaagcaagcccttatagttgtgctgcagt

SEQ ID NO: 655824 - DNA, 80 bp, Homo sapiens
atggagaccttattgtgggaggacctgggagtttctactggcaagactgaagttgctgaagatcctcaacaagtttcaac

SEQ ID NO: 655825 - DNA, 87 bp, Homo sapiens
tcttcattgttggactattgtggttggcttctgttacgctaggaatatggcaaactgtttgaaagatgtatggtgatcttgaaacct

SEQ ID NO: 655826 - DNA, 50 bp, Homo sapiens
tgacattcatctcaaagcacatggctggagtgcagtggcaagatctcggc

SEQ ID NO: 655827 - DNA, 82 bp, Homo sapiens
ctctccatcctgctcttcttccacaggcctccccaaagccagtcctgtgtcaccaatcaaaggaaaggaagccgtcagcaga

SEQ ID NO: 655828 - DNA, 75 bp, Homo sapiens
gggctactcctgcgctgctacacgcagatgtttatcattgacaaggtggatggggacatctgcctcctgaatgag

SEQ ID NO: 655829 - DNA, 96 bp, Homo sapiens
agctgacatgttaagaattaggacaaacagaacaacatttaggaatcgacgctctctggacacattcagctaacgtattttagcaggtggagtgag

SEQ ID NO: 655830 - DNA, 75 bp, Homo sapiens
gctgcagagaagaaagtgtcagagccggtatggagatggtccacgtcctcccaagatggcccgatacgacaatgg

SEQ ID NO: 655831 - DNA, 133 bp, Homo sapiens
gggatcggttcctccaggagaagttagcttcagagttctttgtggatggacttgattctgatgagaggggcataaggaaatggtggcaggcacttcctcctaacaagaaggaagtagttaaagaaaatataag

SEQ ID NO: 655832 - DNA, 100 bp, Homo sapiens
cagaaactagcaccagccccaaatttctccctctgtcgtgaaatcaagcaacgacgtcgaggagttgcctccattctgcgactatgccagcatcttttgg

SEQ ID NO: 655833 - DNA, 71 bp, Homo sapiens
gattttcagctcgatacaatttcacacctgggggtgcactatagccatctggagctgagccctggggagcc

SEQ ID NO: 655834 - DNA, 50 bp, Homo sapiens
cccaggacttcggaactagacgaggacaaggagtagatgaacctctttca

SEQ ID NO: 655835 - DNA, 100 bp, Homo sapiens
cagtattgtgctagaggaggaccacaaagtggaagagtcctgtgccattaaaaacaacaaggaagctttcagtgaaacttccattttagaagaatacagt

SEQ ID NO: 655836 - DNA, 87 bp, Homo sapiens
agcgctctccggaaaggaggcagatgcagaggttggtgttcgaggaagagacattgttgttcttggtgtggagaagaagtcagtggc

SEQ ID NO: 655837 - DNA, 82 bp, Homo sapiens
ggcaagatcgtgtatcccacggagaaggtgaactgtctggataaggttttgaacgaagaatgtgatcagaactggtacaagg

SEQ ID NO: 655838 - DNA, 71 bp, Homo sapiens
gaagcagcagcgagaggaagagctccgggaaatcctgccgtgggagccccagtgtttctgcagtaatttcc

SEQ ID NO: 655839 - DNA, 90 bp, Homo sapiens
ggcagactatgccgtagacatccggagtcctgctatttcagctcttcgtcagattgggcagaggacgataagcactgcttcccgcaggca

SEQ ID NO: 655840 - DNA, 75 bp, Homo sapiens
caggagaattatgggagcgcatttccccagggtcctcacacttcagcaaatgtaggtgttctaagtagttgcctg

SEQ ID NO: 655841 - DNA, 50 bp, Homo sapiens
cgggcgccaggaccggccgaacgcagaggcagtggaccaatccagctatg

SEQ ID NO: 655842 - DNA, 100 bp, Homo sapiens
agcagcgctctggggctcgccttgtatctcaacaccctgagtgcggatttctgctatgatgacagaatggagctggtttgtcaaaatccaaaggaagccg

SEQ ID NO: 655843 - DNA, 100 bp, Homo sapiens
tccacctacatcaggcaactggagagcaaagtgaggctgctggagggtgacaagctcctcgcacagattaagcctgatcaagatgacaacctcccaaaag

SEQ ID NO: 655844 - DNA, 100 bp, Homo sapiens
tggctgttctgaactgtctcttcgactcattgagccagatgctgagcttcagcgagaacccagacctttcccaaagctcaggattcttcgaaaagttgag

SEQ ID NO: 655845 - DNA, 100 bp, Homo sapiens
gatggttccatcatggcgtcaatgcagggtaaccaggagccgacaacaactcctgacgcaatggttcagccttttactaccatcccatttccaccacctc

SEQ ID NO: 655846 - DNA, 75 bp, Homo sapiens
gccagatgtaagattagaaggatgatggtggtgctaccccagtacaggatgaacgggattcagggtcagacggtg

SEQ ID NO: 655847 - DNA, 83 bp, Homo sapiens
ctttgacttggtgttgaaagtgaaatgtcatgcctctgaaaatgaagtacttggaccatgagactgtttcagccactttcatc

SEQ ID NO: 655848 - DNA, 74 bp, Homo sapiens
gtcaccccagacaacatgtgcatggggaggaccagtcgtgatcttagcaaagcaatgtctcaagatggtgcttc

SEQ ID NO: 655849 - DNA, 100 bp, Homo sapiens
aaaatggagcacgtccaggctgaccacgagcttttcctccaggcctttgagaaatgtgacagtgatgataacatgggtgccaaaaatacttcaataggag

SEQ ID NO: 655850 - DNA, 51 bp, Homo sapiens
caggagaggagaactgccagaaacgacacaactggagaaactggttatttt

SEQ ID NO: 655851 - DNA, 75 bp, Homo sapiens
ctgaaatatgctgaacaacttcctgtagctcagataatacaccagggatcccaatcacccttcagtaccttatca

SEQ ID NO: 655852 - DNA, 100 bp, Homo sapiens
ggcggaaaggataagcctcgacttagaagctaccgagttaccctaagaaagcttgcccagtttcgacaaagaaaagctcagtcggatgggcagagtcctt

SEQ ID NO: 655853 - DNA, 90 bp, Homo sapiens
aaatggaagaaaatgttccaatatttccattggagatgaggtgtacaagtgtgtggtcaaaagctgtgcccagacgttcccaaagctcga

SEQ ID NO: 655854 - DNA, 100 bp, Homo sapiens
tttcagtgcattgcctcccctgggtgctcttcatcttgggccactcgctctggtgggaccctcgtgcttgtggggctgggctctgagatgaccaccgtac

SEQ ID NO: 655855 - DNA, 138 bp, Homo sapiens
agaagtcgactccctagcagcagccgccgccagagaggcccgcccaccagttcgcccgtccccctgccccgttcacaatacgctaatgaactgaagacgatccttcgagagctaaagtacagaattggcatccagtcg

SEQ ID NO: 655856 - DNA, 80 bp, Homo sapiens
tgttcacgcacgggatccagagcgccgcgcacttcgtcatgttcttcgcgccctggttctggaggacacgtgccggcggc

SEQ ID NO: 655857 - DNA, 100 bp, Homo sapiens
gggagcagcgagcacgcgtttcccgcaacccgataccatcggacaggatttctccgcctcagcccaacggggaggtcaaaatgcagatcttcgtgaaaac

SEQ ID NO: 655858 - DNA, 82 bp, Homo sapiens
aacgtggctctcaaagttcagactcttctagtagcttcccaaaagctgacctgcaagaagaggacgcagaaatagaagtaga

SEQ ID NO: 655859 - DNA, 98 bp, Homo sapiens
tcactaatgtgcttccagagacagttcacactaccaagctctatggcaccacaacttttaagcaagctcatgaggctttcaaaatggctcaatccctt

SEQ ID NO: 655860 - DNA, 100 bp, Homo sapiens
cggggctgtccaggcacgcgaggcccctcaggaagcaagatttccagatgtagcaaatgggtttattgaggaaataattcattttaagaattattatgat

SEQ ID NO: 655861 - DNA, 98 bp, Homo sapiens
gggaagtgaaaagagatctgttttcagtgcagaaataccataccatcaatggtcataatgcagaagtaagaaaggctttgtctagacaagaaatgcag

SEQ ID NO: 655862 - DNA, 74 bp, Homo sapiens
gtgggcaagtcggcgctcaccatccagttcatccagttgccaccttccagagaagaggtacgagatgacaagac

SEQ ID NO: 655863 - DNA, 98 bp, Homo sapiens
ttcctcacagtttaggtctcaaggcaagcctattgagttaacacctctgccgctgctaaaagagccagctctcccaggcgctgaacggactgtcagac

SEQ ID NO: 655864 - DNA, 75 bp, Homo sapiens
tcttgttatttcttctttgagaaaaacctgaaagatgtctcaggccaaaagagaaacattggctactttgacaac

SEQ ID NO: 655865 - DNA, 101 bp, Homo sapiens
tggaggcaaaatgcatgacagtaacaatgtggagaaagacattacaccatctgaattgcctgcaaacccagttcctctgtgacgagggtgcaggtatctct

SEQ ID NO: 655866 - DNA, 97 bp, Homo sapiens
agccctcggccaaacggccagacgccgacgtcgaccagcagagactgatctccaggggagcccaccagcctagtcaacatggcctcggaagacattg

SEQ ID NO: 655867 - DNA, 90 bp, Homo sapiens
gctctaaagcccttcacagcaagacccaggaagccgcgggcaaactcagactcgaagggtgaggtggctttgaccccgggttgcccggcc

SEQ ID NO: 655868 - DNA, 100 bp, Homo sapiens
gcgcttcctgacgcagccgcaggtggtggcgcgcgccgtgtgcttggcgaggaggatggccgagaccagtccaggttggagacccaggtgtgggaggcgc

SEQ ID NO: 655869 - DNA, 82 bp, Homo sapiens
cggcgggctggagacatggaccgcggcgagcaaggtagacgttacatccaagaggaaataatccaggcaaggaagcacaagc

SEQ ID NO: 655870 - DNA, 121 bp, Homo sapiens
acctgacaccacagccacccttggtgatgagcctcggaaagtgctcctgcggctgtatggagcgattttgcagatgcttaatcgaaccctgaagaagatgggacagagaccttgatgatat

SEQ ID NO: 655871 - DNA, 85 bp, Homo sapiens
gaggtgaagcggccccagcactcccagctgcgcagggcctgccaggtggcgctcgctgtcaataccagcaaatatgcagaaagct

SEQ ID NO: 655872 - DNA, 96 bp, Homo sapiens
ggaagtagtagttgttgagcagagggaaagggataggagaaggatgtggactgcagtgctgcagtgccaggtgaagacattcagtgaagcttgcct

SEQ ID NO: 655873 - DNA, 100 bp, Homo sapiens
cgcccggtggctccgaagcggggaagtgggacaagatggtttacatctcgaacgctgggctcaaaatgcagagaactcaaagatattcatttcggccagt

SEQ ID NO: 655874 - DNA, 87 bp, Homo sapiens
cgggcggcgctcgtacttctggccactgggcgagcgtctggcagtcaggaagcatctaaatatggtgtcctccggaaaaaagtattc

SEQ ID NO: 655875 - DNA, 126 bp, Homo sapiens
gaaaccacttatccaaatacttacatttttgacttgtttggaggtgttgataaccttctgataacttaagagagattctccaaaatgtggccagattgcagggagtatcaaatatgagaaagctag

SEQ ID NO: 655876 - DNA, 98 bp, Homo sapiens
ggactccctggaccctccctccagcccagcctcgctagctccgcctgcggtacgtgctcccgcctccgactcaaatttacactgactgggccaaccac

SEQ ID NO: 655877 - DNA, 103 bp, Homo sapiens
ctttcataatgtttgcttcagtcctgcaaataaacccaagatcctggctaatgaaccagcctttcaaacagtttccagagatggattatcctactttactttt

SEQ ID NO: 655878 - DNA, 90 bp, Homo sapiens
ttttcaagaactgccgtcttctttgcctgcactaatgacaagttggatggcttgaggactggtactaaaaggaaacgtgactgggaggcc

SEQ ID NO: 655879 - DNA, 98 bp, Homo sapiens
atttaccagagataattgataacaccctgtaacagctgaccctgaagttcagtccatcttgaagatctcccaacctcaggagcctgagcttatgaatg

SEQ ID NO: 655880 - DNA, 83 bp, Homo sapiens
atacttcagaaagacagagattttactgctgaagattatgaaaaggtcttgacccctgaatttaagaaattcttaaagacaat

SEQ ID NO: 655881 - DNA, 100 bp, Homo sapiens
gttggaggtgaggatgagtcaacaggttggggcccaaaggcacagcgatcctgttctcagattgacctccgcgctctggcagctcctcttccgtgtgctc

SEQ ID NO: 655882 - DNA, 82 bp, Homo sapiens
ttgctggctacagcttcagaagaccgaagcgttcgtatctggaaggattgggggtgagaaggtcatcctgctgtcagcctct

SEQ ID NO: 655883 - DNA, 101 bp, Homo sapiens
aagacaagaggagacactgagggaacaaacacttctggatgcatccgccccttcacagatgtagtcactacaaatcttaaattgcgaaatccatcggatag

SEQ ID NO: 655884 - DNA, 83 bp, Homo sapiens
gacccgcaggcaccgggagatccagaagtgaaacgccaggctctctggaggccaggagatgagtcttttattcaaaacttcag

SEQ ID NO: 655885 - DNA, 75 bp, Homo sapiens
gctaaagagagcagttaatcttccaaggagtaaaactgctgatatgctactatcattcacgatggccatgaggag

SEQ ID NO: 655886 - DNA, 75 bp, Homo sapiens
ttgtgggccaggataatggagctgtaatggaatcacatgcagcccaactacagattcttatggaattcctcaagg

SEQ ID NO: 655887 - DNA, 100 bp, Homo sapiens
agcaccaggttccaaatcatcaatgaagcaagtaagattccaaaggttttcctaaaaatataaccaacaacagggggaaaaaaagatacccagattccaa

SEQ ID NO: 655888 - DNA, 90 bp, Homo sapiens
aaaaaacaccacagtactatcgtctatcattggatgaagtggctccggagatttactcccctgctggtgcctccctccttggcgcgcttc

SEQ ID NO: 655889 - DNA, 96 bp, Homo sapiens
cacttccgagccccgacccctgcagctgtgagggattcatccaaccatcatttctgagtcattccagaaggccctggaaaagggcattgaaatctt

SEQ ID NO: 655890 - DNA, 90 bp, Homo sapiens
gcgggagaggagtctccaccaggactgaccgctgccgcccagcacgtccagtctctagacctgtggaaaaggcattatgtgtgggacccg

SEQ ID NO: 655891 - DNA, 100 bp, Homo sapiens
ccagagctcgggtctccggggaccgaggactttccttatcccagttgattgtgcagaatacactgcctgtcgcttgtcttctattcaccatggcttcttc

SEQ ID NO: 655892 - DNA, 90 bp, Homo sapiens
ggagatctttgactctcgcgggaatcccactgttgaggttgatctcttcacctcaaaaggcagcacgctggctcttctcctgaacttcct

SEQ ID NO: 655893 - DNA, 75 bp, Homo sapiens
tggatctctctgatattgtagaaggcatactgaatgcacatgacaccacaaagagtcctgtgtatggaaactcac

SEQ ID NO: 655894 - DNA, 100 bp, Homo sapiens
gatcagtggtgggctattgatgatattgtgaaaacatctgttccttcaagagaggggcttaagcaggagttccatctggaatatgacaaattagaagaac

SEQ ID NO: 655895 - DNA, 100 bp, Homo sapiens
agcaccacctccagcccctgcgcctcgtccacctggaaggccgctgtggtggaaggatgtttgactgcagagatgtggcattcactgtgggcgaaggaga

SEQ ID NO: 655896 - DNA, 100 bp, Homo sapiens
cacggagggacttctgcagagagagtgcgcagaaggattccgggagcacagttccgccgagaatgggtaccacagaccatgtcatcgtcctggcgtccac

SEQ ID NO: 655897 - DNA, 100 bp, Homo sapiens
aagttcctgatgatgaacagtttgtcccagattttcagtctgataaccgtcaattcagtgaagatatgatacccacagtgggcttcaacatgaggaaggt

SEQ ID NO: 655898 - DNA, 83 bp, Homo sapiens
ctgctgctcatcccggtggccgccgcgcaggagcctcccggagctgtgctacacacgcagggccctgtcgatggcagccttta

SEQ ID NO: 655899 - DNA, 97 bp, Homo sapiens
gtagccggtaacaaacgagggttcccgggattggaccgacgcagccatgaatggagatgtatgcatttcgattcttcatccgcctgtagatgaccca

SEQ ID NO: 655900 - DNA, 83 bp, Homo sapiens
cccaacgcgaagacggtaacccgtgtgactttgactggttgctctaggtcgtaaccagcctttgaaaaaggagaaaccaaaat

SEQ ID NO: 655901 - DNA, 74 bp, Homo sapiens
ttcctttccgtctggcggcagccatcagcaacacagtcactcctggcggcaaaccaaacaaaaccagagtcatc

SEQ ID NO: 655902 - DNA, 101 bp, Homo sapiens
gggatttacgtggagatcaagcgcagcgatgtcaagagaatccatcccattaaatgacctgaagtcagaagtatcaccacggatttcagcagaggacctga

SEQ ID NO: 655903 - DNA, 100 bp, Homo sapiens
tcccgtggacttttggaaaaagacttccaaaaagtagcccactttattcacagaggaagagataccatggagatgtgcacccagaggaaaggccacgcaa

SEQ ID NO: 655904 - DNA, 128 bp, Homo sapiens
gttcgtcgcctccttgcccgtgaccgtcgctagaactcagttgtgcgttgcggccagtcgccactgcttgaagtttagcaactgcaatggaaaaagaaaagtacaatatgagagcagtgagcctgcag

SEQ ID NO: 655905 - DNA, 98 bp, Homo sapiens
ttaggaccacccaccatgcctatccagcggacccagcagtacagacagatggcagccctctctgctgccattttcacttcagccccaaggtgatgttc

SEQ ID NO: 655906 - DNA, 97 bp, Homo sapiens
cgatggcgcagaaaccccgttgacaaggcactgctttttcatgacggttaatttggagtggcccctggagtcagtttcctacaccatccgaggcccc

SEQ ID NO: 655907 - DNA, 100 bp, Homo sapiens
gtgaaaaaattcaaagtcgaatatcatgctggtggctctacccagaattcaattaaagtggctcaggtaatagagcatgaacatccagtaaataagattt

SEQ ID NO: 655908 - DNA, 75 bp, Homo sapiens
attcaggatcaacttgaacgaatatttctggccgtcgctttcgggttctctcatcgcttcgtcgttcgccaatgt

SEQ ID NO: 655909 - DNA, 97 bp, Homo sapiens
gaccatcctgctggtcagcactgcggctggtcctcgagaggttgcagcaaagaggatttgaaatcgtgggctcctgtgggggaggagtagactcgtc

SEQ ID NO: 655910 - DNA, 78 bp, Homo sapiens
gccctttccacctcgcggcagttcggaccaagaatcgccttcagccctgtctggtgcatccttggcagaaagtgagga

SEQ ID NO: 655911 - DNA, 74 bp, Homo sapiens
ggagacttggaagcctgggcccggaagtgaggaaaatgtttataggaggccttagctgggacactacaaagaaa

SEQ ID NO: 655912 - DNA, 100 bp, Homo sapiens
agtacaaggtggtaatgctgggagcagggggagttggtaaaagcggttctgggaacactttttatttatgtcttatttatggttgaggaattcagaaaag

SEQ ID NO: 655913 - DNA, 100 bp, Homo sapiens
gcgaggaggaggaggagccggaaagccctcggtcaagctcgccaccaattctcacaaagcccacgctgaagcgaaagaggatggagatgaagatgaggaa

SEQ ID NO: 655914 - DNA, 50 bp, Homo sapiens
gagaacttcttaagaagagtggattttgtgaaaatggaaaattatgaggc

SEQ ID NO: 655915 - DNA, 100 bp, Homo sapiens
aggatcgctgtcctgacagaagagacatttgaagacagtgatttgttccatttgattggtgttatctgtggcttagcaatttataattgtaccattgtgg

SEQ ID NO: 655916 - DNA, 100 bp, Homo sapiens
gagaggagcatgaatggagcaaaatggcggatcatgtgcagaacaaaatccagtctcatagcagaggagaatataatgtttacagcaccttccagagcca

SEQ ID NO: 655917 - DNA, 90 bp, Homo sapiens
gttctagcttcaccttcacgatgtttcccttggtcaaaagcgcactaaatcgtctccaaggacagcagaactgcattgcactgggcatgc

SEQ ID NO: 655918 - DNA, 80 bp, Homo sapiens
aagctgttttaaatctagtagataagccagatcctgtgtatcgatgaggccacagcaagtgtggaccagaagacagacca

SEQ ID NO: 655919 - DNA, 93 bp, Homo sapiens
ttagctgtgctcgcgctactctctctttctggcctggaggctatccagcaatctccggcctgtgaaactgtgaggggattcggccaagacgtc

SEQ ID NO: 655920 - DNA, 75 bp, Homo sapiens
gtaaccagttctattttgggacagggacaagtttgacggtcattccaatttgcctgagaatacagatcaacccac

SEQ ID NO: 655921 - DNA, 75 bp, Homo sapiens
agaaaataaacggatcaacatccaaagcaacaaggtcattacagcttgacctatacgaggcaggggaactgaaat

SEQ ID NO: 655922 - DNA, 100 bp, Homo sapiens
catgagaagtataatgatttatataagttccagcagccaagctacatcagtgatgtgggaccccctggtcgaagctctctggataacatcgagatggcct

SEQ ID NO: 655923 - DNA, 98 bp, Homo sapiens
ccagatatttccttcaaaacctgtctcaagagaagaccaatgttcatataaatggtggcagaaataccagaagtcaggtcaattcagtgaagatatga

SEQ ID NO: 655924 - DNA, 96 bp, Homo sapiens
tatcgggccaaacaagtgcaagtgtcatcctggttatgctggaaaaacctgtaatcaaggagttcatgatcaagtgttgcccacaccaaatgcttc

SEQ ID NO: 655925 - DNA, 98 bp, Homo sapiens
attgatgatgatatcattatgctgacctctgacgagctgcaatttggttatgagctgaccatgccactgcctcggtacggctccgggcagcagccact

SEQ ID NO: 655926 - DNA, 80 bp, Homo sapiens
gggtcccttttgcctcagatactattttgaaggtggagcggctgatcaaggagttctccatctacatgacaaaagatggc

SEQ ID NO: 655927 - DNA, 98 bp, Homo sapiens
tggaagtccaagtcaaacgcagaaggactgcctcactgagcaaccaagactaccaagtcaggattgttacccccaccacctgcgctccctccaagacc

SEQ ID NO: 655928 - DNA, 100 bp, Homo sapiens
gaggtacttaaagtgctttccgaagctgctatttcagagtcaatacagatttgtatgtgaagctattttgaaagtttatgaagaaggctttgttaaaccc

SEQ ID NO: 655929 - DNA, 75 bp, Homo sapiens
ctgatccggaagatgtcacctgagtggagtcaacatatcaatggagcaagtcacagtcgtcgatgccagcttctt

SEQ ID NO: 655930 - DNA, 100 bp, Homo sapiens
agaaatggggcctgggggacggtaggagcctccgtgcggagaccactgttcaaggccacaggaccaagaatcgccttcagccctgtctggtgcatccttg

SEQ ID NO: 655931 - DNA, 75 bp, Homo sapiens
ccactattctgaagaacacttggccaaaggacccatgccccctttgtgatgaagccaaggaagtactcaagcctt

SEQ ID NO: 655932 - DNA, 100 bp, Homo sapiens
cgggacctgcagccgccgccgtccccggagcacggggtggtgtgtgggggaagccgcccccggcagcaggaaacttcatggtgttatggtcaacttgccg

SEQ ID NO: 655933 - DNA, 75 bp, Homo sapiens
cagatattaatgggagcatatatgatgagacctccaatggaagtccgggcacatggcggagagcctcaccaacat

SEQ ID NO: 655934 - DNA, 100 bp, Homo sapiens
gctgtctcctgcagaagactttgtcctggtggcagaaacaaccatggccaggatacgaaggtacaatgccagggagtactacgaccacctgcccgagctg

SEQ ID NO: 655935 - DNA, 97 bp, Homo sapiens
gcagcatacacagatgaaggtgggaaggatggtccagaattcacttttactaccccaaagtttggtccaagaaaaagagtctgaatctaccactccg

SEQ ID NO: 655936 - DNA, 90 bp, Homo sapiens
ccttcagtggggctattggactgacttttcttatgctgggatgtgccttagaggattatggctccagggcccacaacggcagtgtcctac

SEQ ID NO: 655937 - DNA, 82 bp, Homo sapiens
gaaaactctacctttgtgtatcaagtcccactatcaaggataagccactattcctctacacagccgactagttatgatcaga

SEQ ID NO: 655938 - DNA, 82 bp, Homo sapiens
cgggaggaaggaacgaggcaaggagctaaagcagcgtgcgttcagccctggggtgtctcccagtctgctaaagccctaaggc

SEQ ID NO: 655939 - DNA, 100 bp, Homo sapiens
tgaacaagaaaggcgctagaattgattttaaagagattgagaatttatcacaagttgatggtcctcaagtggaagagcaacttctttcaaccacagttca

SEQ ID NO: 655940 - DNA, 83 bp, Homo sapiens
caagctcagaactgagaagctgtcaccacagtggaagatagatgataagcctgtaaaaattgacaagtgggatggatcagctg

SEQ ID NO: 655941 - DNA, 80 bp, Homo sapiens
gaactacagaaacctcgtctccctggaatgtgacagtgatgataacatgggtgccaaaaatacttcaataggagaagaat

SEQ ID NO: 655942 - DNA, 98 bp, Homo sapiens
aaggtcggcagagcaaggggcttacgcagaaggacctggccacggcccctgtcccagctggccctgccccaggtactggggctgatcctgaacctgcc

SEQ ID NO: 655943 - DNA, 80 bp, Homo sapiens
gtgtgccacacaggtagccctggacggcattcagtgttttggcactgggaagacctcaacgctggtcaagtatgcagaga

SEQ ID NO: 655944 - DNA, 49 bp, Homo sapiens
aaatatttcaataagtacccaaaaggtttctgctttgggacaaccatac

SEQ ID NO: 655945 - DNA, 80 bp, Homo sapiens
atctgtaccctgaagaacttccctaatgccatcgagcacaccctgcagcgtccagaggaccagaggttaatttattctgg

SEQ ID NO: 655946 - DNA, 125 bp, Homo sapiens
ccagccccagttccccggcagcgggacccggcgaagacgcgaccgcggcgcgagtcaccatgaataatccagaatggctactctgatctatgttgataaggaaaatggagaaccaggcacccgtg

SEQ ID NO: 655947 - DNA, 83 bp, Homo sapiens
gtctcgggggccgctctgggatcccggccaccagcaattgtccgtttggggcggaattccgaaggttctctctggaccgtcat

SEQ ID NO: 655948 - DNA, 75 bp, Homo sapiens
cgctactatcgtgtggcattttatgggcagatatgatgaagatcacagtggtgatgataaagtcttcctggactg

SEQ ID NO: 655949 - DNA, 83 bp, Homo sapiens
gataatcaaccaactgttacaatcaaggtctatgaaggtgcaggtgatggtcctaccagtgtgtctgttgaggtcacccgtcc

SEQ ID NO: 655950 - DNA, 100 bp, Homo sapiens
gccgtgcagctgcccatcgaccaggtactaggttttgacaagcttgcatcatgcgtgagtataagctagtcgttcttggctcaggaggcgttggaaagtc

SEQ ID NO: 655951 - DNA, 100 bp, Homo sapiens
attcagagcacagtgatgttagacaaacagaaagagcttgacagtaaagtcagaaatgtgaaggacaaggttatggggcactgctgggcctctcgctctt

SEQ ID NO: 655952 - DNA, 103 bp, Homo sapiens
gctgcgtcgggctgcaggagaagatggcggtctccacagattgtatgcaggcccagaggtagatatatggagcagtggggttattctctatgctttattatgt

SEQ ID NO: 655953 - DNA, 60 bp, Homo sapiens
agttaaggacattccaggcagaggcaaggtcccccccgcctccagccagcctgtgcagac

SEQ ID NO: 655954 - DNA, 86 bp, Homo sapiens
ctcaggagccgcagcgcccgcgggcccgggtgcgggcccggcgccgcaccagcagaacgacaatgcagatcttcgtgaagactctg

SEQ ID NO: 655955 - DNA, 83 bp, Homo sapiens
cgcaggacagcgccttcctcaacgacgcggacatggtcatgagctttgtgaacctgggctgaaggtgatgtggccgccctcaa

SEQ ID NO: 655956 - DNA, 73 bp, Homo sapiens
caccccggaagctgggaaatgaagttcaccatgtctattctcaagatccatgccagggagatctttgactctc

SEQ ID NO: 655957 - DNA, 99 bp, Homo sapiens
actgactcatgggccctggcggtggacgagcaggaagctgcggctgagtcgcaaatgcagccctgaggatttggctactgcatataacaacagggggca

SEQ ID NO: 655958 - DNA, 98 bp, Homo sapiens
tgtccacagctggcaaattcagtgcagatcaggccaggagtggtggctcacacctgtaatcccagctctgggaggccaaggccagtggattgcttgag

SEQ ID NO: 655959 - DNA, 90 bp, Homo sapiens
gtgcatgttggatgcagccctcgcaacgctcaacactcatgggaaggaagaaatgcagagtaacgtggaagtggtccacacctaccgcca

SEQ ID NO: 655960 - DNA, 100 bp, Homo sapiens
ctatgtttgaatctcagagtgaagatgagttgacaccttttgacatgagcatccagagagatggctgcccaaagattgtcaatctggggagctctaagac

SEQ ID NO: 655961 - DNA, 75 bp, Homo sapiens
cgaagagtggagaacggcaacccatccagatcaccatgccggcatgaaaacagccctggaagtctgccctggcgc

SEQ ID NO: 655962 - DNA, 98 bp, Homo sapiens
tgcttatgcggtggctcgctgctcagaacaggcccctagcccaggaggaggggatgtgtctggtcagcatgggggctacgagatcccggcccggctcc

SEQ ID NO: 655963 - DNA, 88 bp, Homo sapiens
gaaatgagatccgcttcctgcccaacggtggacccaagagccatatcagtgctagcaaaatggcagaattcatatagcatcaaagttg

SEQ ID NO: 655964 - DNA, 95 bp, Homo sapiens
ggctgacactaaagactttgtagccatcaacccgagtgcagtttcgatggaaaatgaaggtataagcgtgtcttttcagttggaactcatgcgat

SEQ ID NO: 655965 - DNA, 89 bp, Homo sapiens
ccgctgttctgcttcctgctgctctgtctcagcgccgcctccctgcttcttaacaggtatgaggatacatgggctgcacttcacagaag

SEQ ID NO: 655966 - DNA, 82 bp, Homo sapiens
ctccttttccctctccctttccctaaggaaaaccaattctgtgtcctcggaggaccacagcccagttgggccccaggcgaaa

SEQ ID NO: 655967 - DNA, 75 bp, Homo sapiens
gtgaggaagattttgaagacaatcgtcacttatacagctgtatgttgatgtctcatcttgaggaaccaaaagtaa

SEQ ID NO: 655968 - DNA, 88 bp, Homo sapiens
cccccaggcaggtggtcaactttgggcctggtcccgccaagctgccgcactcagaaaaaccatatggcatagttgaaaagaagtccag

SEQ ID NO: 655969 - DNA, 101 bp, Homo sapiens
tggaggcgaggaaggcctggtgtccgtgtgggattatcggatgaaccagaagctgtgggaggtgtattccggtcaatgccgtgtgccccgaggctgagctc

SEQ ID NO: 655970 - DNA, 95 bp, Homo sapiens
gagtttccgatttaaagctgagctgcgaggaaaatggcggcgggaggtacgccatcccaccagagcacggcaagcgcctggagcggctggccatc

SEQ ID NO: 655971 - DNA, 99 bp, Homo sapiens
gataaatcccaaacttcttaacccctagaccggtttttagtccattgactatgcagcctaatgggaaacagtgcttcttagtcctacgtcagcagcagt

SEQ ID NO: 655972 - DNA, 100 bp, Homo sapiens
acgcaggaacggctccagcatcaagatccgtctgacagacaatgcagatcttcgtgaagactctgactggtaagaccatcaccctcgaggttgagcccag

SEQ ID NO: 655973 - DNA, 90 bp, Homo sapiens
cgcgggagcctcgtggctgcgtcaccgccgcccccccagacaagatggacaccgcggaggaagactcgctctccgtctccagcaatgacg

SEQ ID NO: 655974 - DNA, 50 bp, Homo sapiens
cgaggcagggccagcagcaggcgggaggaaactactttgcttcgcacttt

SEQ ID NO: 655975 - DNA, 82 bp, Homo sapiens
ggtacttctgccactgctgctccgtggagatcgtcccgcgcctgccgttctgggaggtgatcagtgatgaacatggcatcga

SEQ ID NO: 655976 - DNA, 50 bp, Homo sapiens
tctcaaagtgctgggattacagtctcttccagttgcgcctcttctccttg

SEQ ID NO: 655977 - DNA, 90 bp, Homo sapiens
agtcgaccccaacagcaggaatagctcccggtacggacattgctgcaggagaagaggttgccatcaagcttgaatgtgtcaaaaccaaac

SEQ ID NO: 655978 - DNA, 75 bp, Homo sapiens
cttggggctctacctctttttcaaagggctggcaaggtttaattgcttatggatgtcattcacttgtggtagtga

SEQ ID NO: 655979 - DNA, 100 bp, Homo sapiens
gcgcttgagggggactggcctggcgtgcactccgcacctcggggacattattgcgcgtggaacggctgcttttggaagttggcccgccacaataaactgt

SEQ ID NO: 655980 - DNA, 51 bp, Homo sapiens
catcagaggcaccccagacacagctgaccaactgactgaagagcagattgc

SEQ ID NO: 655981 - DNA, 75 bp, Homo sapiens
cgggaagagccggggccgtggctgacatggagcagctttctggaagatgacagcctgtacctgctgaaggaatca

SEQ ID NO: 655982 - DNA, 100 bp, Homo sapiens
ctcactgagctggaagtcattcaacgggaattgaatagactgcctgaagttacatttagagactgaaatcactgcaccttaaaaacaaaagattgagctg

SEQ ID NO: 655983 - DNA, 80 bp, Homo sapiens
ccagcctgcggagcctgtggggcagttaacaagcacaagccctggctggagcccacctaccacggcatagtcacagagaa

SEQ ID NO: 655984 - DNA, 74 bp, Homo sapiens
tagcacagacccttggtcttgaagttctagtattgcagaaacttggaaaaactgtctggatggtgcaacggatt

SEQ ID NO: 655985 - DNA, 98 bp, Homo sapiens
cggagcgaacctcacctttccagggcgcaagacgcccactattgcttggttctacttcctttatcccgattggccgtcggacttatgccagtgcggcg

SEQ ID NO: 655986 - DNA, 89 bp, Homo sapiens
gatggacaagagacgatcattctgcaagcaggcaacctgaatacagatgctggcatcaccatctacatcaggtcagctgtctcagtttg

SEQ ID NO: 655987 - DNA, 75 bp, Homo sapiens
ccatcgccagcatcgccaacccggactggatcaacaccggggagtctgcgggtactattgggattttcagcccca

SEQ ID NO: 655988 - DNA, 48 bp, Homo sapiens
ctgcacaggaagccgtgaaactgatggctcatgatgccctcaatgccc

SEQ ID NO: 655989 - DNA, 75 bp, Homo sapiens
gaagaggaacagcctatgtgggcttccacggagtcagagagtccccaggaagctggccgcgggcacccctccttc

SEQ ID NO: 655990 - DNA, 99 bp, Homo sapiens
agcatgaagttcgacgagctgcagcggctgcggctcaacgactggaagatgatggagtccccggaaagaaaggcgggctggtccgagtctctgttttgg

SEQ ID NO: 655991 - DNA, 100 bp, Homo sapiens
cgcgaagccggaggctccgggacgtggatacaggtgcttttcagtgggaagaattggaagaagatatcaggaagaagttgaaagattctggggatgtttc

SEQ ID NO: 655992 - DNA, 75 bp, Homo sapiens
aatacctggaactcctgtctggatataagaaggatctggacaactctcctctgtccccaccttcaccaaggacca

SEQ ID NO: 655993 - DNA, 100 bp, Homo sapiens
gttgtttacagctctaacaaaatagacgaaatcaaccagactattatgaagtggtttctcagcccattgacttgatgaaaatccaacagaaactaaaaat

SEQ ID NO: 655994 - DNA, 88 bp, Homo sapiens
gtggttgccggaagttgagcggcgtacaagtatcaagtactcacacccgggagagacagatggcaccagactcctgctcatttgtgac

SEQ ID NO: 655995 - DNA, 105 bp, Homo sapiens
gggcgccgcggggcagccgccgctcctccggggcctcttctgaagagctgaaagctgcctaccggaggctctgtatgctctaccatccagacaagcacagagacc

SEQ ID NO: 655996 - DNA, 101 bp, Homo sapiens
cgctcccctcaaggcctgggtgcttctactgcagaaatatcagctagaaccatgcagtcaagtgactctgacatcattagaagcatgccagaacagactgg

SEQ ID NO: 655997 - DNA, 82 bp, Homo sapiens
tgtttctctccctctgcccccccttccccacgcaaccccagatccatttacactttacattaagtatgagagagaagctagt

SEQ ID NO: 655998 - DNA, 50 bp, Homo sapiens
cccctatcctatccgcaaacatatgagcccagaggacctggtcggccctt

SEQ ID NO: 655999 - DNA, 83 bp, Homo sapiens
tctctccctgtcctagctctgtaactgtttacagtggcatccgggacaagataatgagcagccggaagcacctccacctggtg

SEQ ID NO: 656000 - DNA, 100 bp, Homo sapiens
acagaggcaccaaggacctccaagacagccctggcctcccacgactacatcctgaagattgtgcccacggtttatgaggacaagagtggcaagcagcggt

SEQ ID NO: 656001 - DNA, 78 bp, Homo sapiens
gccatgcagttcttcaccaagggctaccaggagaccatctcagccgagagacacacaagattgcagtattttatgttg

SEQ ID NO: 656002 - DNA, 99 bp, Homo sapiens
caataataatatgaatcataatatgaacaaaaatgtctttagggaataaggaattgtggaggaagatgagaagctgccagagggtaattggttttccca

SEQ ID NO: 656003 - DNA, 141 bp, Homo sapiens
agctgacaacaggaggagaaacccagcagcagattcaagcagctatgggattcaagattgatggacagtcattttgtttactcattcagccctgttgcaggtcccaataaactcttcataaggttgacagaagcaccctct

SEQ ID NO: 656004 - DNA, 83 bp, Homo sapiens
cggcccggggccccgggatctcggctgtccttcctcccgattgtcactgctgttccaagggcacacgcagagggatttggaat

SEQ ID NO: 656005 - DNA, 83 bp, Homo sapiens
gaaggtgcacagtatttgatgcagctgataaaatactgggaagcattcctacctgaagccaaagccattgcctagcaataaga

SEQ ID NO: 656006 - DNA, 75 bp, Homo sapiens
agcctactatcacgacgggaagctgtgggttcaagggcagcaggaaagacgagatcctgggcatcgccaacaacc

SEQ ID NO: 656007 - DNA, 75 bp, Homo sapiens
gtgtacctaaaggaggccaatgccatcagtgtggaactgaaaaagaaggtgatcttggcattgtcgagccacctg

SEQ ID NO: 656008 - DNA, 90 bp, Homo sapiens
cccactgctagcaccccagagagtgaggagtggagcagcagccagcctgctcaaaagccaaaagtctctgagaacgactttgaagatctg

SEQ ID NO: 656009 - DNA, 82 bp, Homo sapiens
ttccgcggcccaggggcgccgggtttggtggcacagcgagccccctttctctagcggtctcggcgcggaagatggccggcgg

SEQ ID NO: 656010 - DNA, 100 bp, Homo sapiens
ctgcagcagagggagcttgccttgaaggacaagaacagcgccgtcaccagcaggtgtttccccccgggccggcctgccgtgacgatcacagccctgccgt

SEQ ID NO: 656011 - DNA, 75 bp, Homo sapiens
agagaggcatcctccttgaagtatttggctgaggagttttcaatcccaagtacccaagtggccttggaccatctg

SEQ ID NO: 656012 - DNA, 100 bp, Homo sapiens
ctggagtcacctcccatggcctgtcctgcgaaggctttctcctgtttctcagaggatttatcaattatgcaaaagttcggaagatgccagaaactttctc

SEQ ID NO: 656013 - DNA, 100 bp, Homo sapiens
atcaactcagcacattcaactcaatcagtcaaaatcgtcttttcctgctggtaaataacactgaaatggacaggccttcagtatttggcatcacctttac

SEQ ID NO: 656014 - DNA, 75 bp, Homo sapiens
ctctagaggcgttttttggccaagggaacatgaaaggctcccggagcagcgctgactcctccaggaaacactgag

SEQ ID NO: 656015 - DNA, 90 bp, Homo sapiens
ttcaaagcgggaggctccttgtgccacattcttgcagctgcctacaaattcaagagtgaccagggatgctatcatggtgaacttacttca

SEQ ID NO: 656016 - DNA, 51 bp, Homo sapiens
cgagagcctctgattctcctgtgccaggctggtaacagttcatgtttgctt

SEQ ID NO: 656017 - DNA, 96 bp, Homo sapiens
gaaaatggacatcgtaaacgatcttctcgacctgcttcagcctccagctctactaaagattacttctctaacaggatcaccagtttgctccacaaa

SEQ ID NO: 656018 - DNA, 74 bp, Homo sapiens
cgaggacgtgctgacccagatcgacagcgagcccgattggagctggagtgagccttccaggaattttggctgcc

SEQ ID NO: 656019 - DNA, 75 bp, Homo sapiens
cacaaaactagcatcctcctggaggagctcggctatacacagaatgggattttacatatgctggacagaaataag

SEQ ID NO: 656020 - DNA, 90 bp, Homo sapiens
gatacagctgctgatacttacgctccgacagttagttaatatgtgcatcaacccagatccagagaagcgaccagacgtcacctatgttta

SEQ ID NO: 656021 - DNA, 82 bp, Homo sapiens
cggggggcggctctgcgctggccgggggcgcgggcggcggcgccggcaggaagaccatggtgaatccgggcagcagctcgca

SEQ ID NO: 656022 - DNA, 50 bp, Homo sapiens
gagatgctgaaaatgttgcttcatatgaatctacaactcttgaaaaagaa

SEQ ID NO: 656023 - DNA, 74 bp, Homo sapiens
gaatcgctctctcccagatatccggcacccaaagtgtgtggaggtcattgcaaaggaaggacaaaacctgaaag

SEQ ID NO: 656024 - DNA, 75 bp, Homo sapiens
ggaagccgtgcggagcgagttacgagaattcccggccgctgcaaggggcgtccgagctgggccacagcctgaacg

SEQ ID NO: 656025 - DNA, 75 bp, Homo sapiens
gggcgccgcggctctgcttccctcggggtacaccaggggttggaaaaaccacactaggcaaagaacttgcgtcaa

SEQ ID NO: 656026 - DNA, 100 bp, Homo sapiens
gcctgattacattccaacagaggaagaaaggagagtcttcgcagaatgcaatgatgaaagcttctggttcagatgtgccgtgagcgatgtggagatgcag

SEQ ID NO: 656027 - DNA, 82 bp, Homo sapiens
gagctctttccagcagaagcccagcggcaaaaatctcagtgtgcaacttgctttggtgtttgctgttttattgccacagatg

SEQ ID NO: 656028 - DNA, 98 bp, Homo sapiens
gagtgatagatcattcacaatatctgtgtcgttcttggcagaaattatattttccagcccgtgtctgcaggttatacattggctcttcaaagacgttc

SEQ ID NO: 656029 - DNA, 90 bp, Homo sapiens
cctcgcgctgcaaggatgctcctgggatttcggagaggccgcaggagtcatttcgtggaggtcctgattgccataagcagcctcacgtct

SEQ ID NO: 656030 - DNA, 100 bp, Homo sapiens
atatgggggttctggagagcggggtgtgggaataccctctaccatctgctttggtcagggtgccgctcgaggatttaaaagcaacaagaagaaaaccaaa

SEQ ID NO: 656031 - DNA, 75 bp, Homo sapiens
cccgatatatgttctctaggccttttagaaaacatggtggttgtgtcaaaccgattggtgacatctccatgctgt

SEQ ID NO: 656032 - DNA, 101 bp, Homo sapiens
tgcagcgcctgcgcgtggcgttgcagaagctttccggcacagtctgcgggccaggcatcgacatccgcaacgactatcagcagctgaagcgcctggagaac

SEQ ID NO: 656033 - DNA, 100 bp, Homo sapiens
gggccggcctgcggcggagggaaaaaggaagaggagaaggaaattgtcccgaatccctgcagagtcctggcgggaccttttgctactatgaatttaggag

SEQ ID NO: 656034 - DNA, 98 bp, Homo sapiens
gcggctgcgcgaggagcaggaaaagagaatggaggtgttgtccaagttggagaattgttaccttgcaagatttgtggaagaacattctttccagtagc

SEQ ID NO: 656035 - DNA, 98 bp, Homo sapiens
cctgaatgggggcggcgtgcccgccggggggctagtggccacgctgcagagcctcggtttcccaggcagctgcagacttgaaacagttctgtctgcag

SEQ ID NO: 656036 - DNA, 83 bp, Homo sapiens
atcgtgatcccggcgacatactacctctggccccgagatcagaatgccgaacacaccacagccatcagcactggaatgcaaag

SEQ ID NO: 656037 - DNA, 100 bp, Homo sapiens
ataaagaaagcaaagcgcagaaatgttggatttgaaacctccaggttcctcctacttccgctatgctgagtcttccatgaagaacagcttcggcctaaag

SEQ ID NO: 656038 - DNA, 100 bp, Homo sapiens
gagggctctgtgctgcgtgtggtggaagagcgtcacggggttcggacgtcagatgatcgagaaaaccaagcagctggtggagtctaagtacacagtggag

SEQ ID NO: 656039 - DNA, 75 bp, Homo sapiens
attttggacctctggatagtagatcaggaataagacgagttggaagaagacctgatcaacaacttcagggtgaag

SEQ ID NO: 656040 - DNA, 99 bp, Homo sapiens
atcgaagaagagtccttggaacaagcaactggctattgaaaagagttgatctctctaatgtattagatcttcatgcctttgatagtctctctggaataa

SEQ ID NO: 656041 - DNA, 88 bp, Homo sapiens
aactgactttgcagccacggagagggcttgagcaattcagtttccctgcctgagtgttggtgacctgtgctgtgaaatagagagagac

SEQ ID NO: 656042 - DNA, 96 bp, Homo sapiens
accaagatgtccaaccgagtggtctgccgagaagccagtcacgccgggagctggtacacagcctcaggcagaagaaatccttagacaagagctgga

SEQ ID NO: 656043 - DNA, 98 bp, Homo sapiens
ctgaccttccggatctctccacacgccttcttccaggtgcctatgacagcatccggcatgcccatagccagtctgcagaggcagaacgtcgtgccaat

SEQ ID NO: 656044 - DNA, 50 bp, Homo sapiens
gaaatcaggaagattatgggagggattgtcaatgaggcagatcagattcc

SEQ ID NO: 656045 - DNA, 49 bp, Homo sapiens
catggcttccgaggagctgtacgaggtcaaaatgcagatcttcgtgaaa

SEQ ID NO: 656046 - DNA, 159 bp, Homo sapiens
ggaggatcatgactgcggcagcgaactgggtggcgaacggggcgagcctggaggattgtcactccaacctcttttcgctgctttgggatgcgacatcagcaaatgagaggaaaagcattaatgtgaaacagttcttcctaaatttggaggaccctcaag

SEQ ID NO: 656047 - DNA, 98 bp, Homo sapiens
aaattcgtcaaaggctctacagagaagaacaagctcagactgcaaagaggtccacggtcccccagtccagctggctgtggacgactcctcagacgaag

SEQ ID NO: 656048 - DNA, 111 bp, Homo sapiens
ggagcttttgtcctagctgacaatcttttagaaccaacaagggtctcaatgcccacagaaaatattgttgctagaacctgtctgtcaccagctctttgaattctatcgcag

SEQ ID NO: 656049 - DNA, 73 bp, Homo sapiens
tccctgggctggtgaagtacatgaactcagggccggttgtggccatgatgtgcagccagccagcagtcagcca

SEQ ID NO: 656050 - DNA, 102 bp, Homo sapiens
ggggaataaccctgcagaaaatggagatgccaaaacagaccagattatttgcatgggtgcaaaagaaaatggtttgccgctggagtatcaagagaagttaaa

SEQ ID NO: 656051 - DNA, 96 bp, Homo sapiens
catggcagcggggttcgggcgatgctgcaggatcaaagtggaaaaccagcttgacttccaggacatcaccagcgtggtcgccatggccaaaaccta

SEQ ID NO: 656052 - DNA, 100 bp, Homo sapiens
ctcgtctgaacttctctcatggaactcatgagctttccacaggctacaaatcaaacattgctagacaagtttaagcatcaacatgaagataattcttaca

SEQ ID NO: 656053 - DNA, 103 bp, Homo sapiens
gctgctgaacgctttcaccgcaacttttgagctaagtgatgatggccgctttgaggtgtggaatgcgatgactcgctaacaggcctcacctcttccattccgg

SEQ ID NO: 656054 - DNA, 75 bp, Homo sapiens
gagaaaaactggatgttggtagaaaaagcaagagtttgttatatagcaattgtagaaggcatgaaacaaaaaatg

SEQ ID NO: 656055 - DNA, 98 bp, Homo sapiens
atggaccatggatgcggaagcagatcattcaggaggtgaaaggtgtagcagtcactcggcctacacccacagcatcgaccttgtgaacccagcgacct

SEQ ID NO: 656056 - DNA, 50 bp, Homo sapiens
gaaagacacagtctccatcatcccaggaaacccctcctggagtttcccca

SEQ ID NO: 656057 - DNA, 100 bp, Homo sapiens
ctggctctgaaggcgaacgcttcgctggccatttaggagctctgctcaaagccagacgctgctctgttaaaagcgaaaatgaaacaattgcctgcggcaa

SEQ ID NO: 656058 - DNA, 74 bp, Homo sapiens
cgatgaaaagaaatacctgtgatttgctttctcggagcaaaagtacccaacatgagtgaagtttcctgcaagaa

SEQ ID NO: 656059 - DNA, 90 bp, Homo sapiens
agcgcctggtgaagaagcctgtgcccaagctcatcgagaagtgctggaccgaggacgaagtggaaggattacggccaggagatacaacca

SEQ ID NO: 656060 - DNA, 141 bp, Homo sapiens
cacttgtgaagtaacagaattaaccagagaaggtgaaacgatcatcgagctaaaatatcgtgttgtgatatcagtatcaagataaaagtttggaatgggagaaaaattctcaaagcctgaaagaaaatctgtaagaataaa

SEQ ID NO: 656061 - DNA, 51 bp, Homo sapiens
catttgaaactgtccattcaatggatggtgatggcccgctccctctcccca

SEQ ID NO: 656062 - DNA, 82 bp, Homo sapiens
attcactgtggtccagaagcagatatcggtgaggttggattcagatgccgaggacacagtacttcctcagaaagaagacaga

SEQ ID NO: 656063 - DNA, 100 bp, Homo sapiens
agaagaagcacacctgaaacatgaatttgatgcagacttacagttccctgaatgtggtttctacggaatgtatgataagatcctgctttttcgccatgac

SEQ ID NO: 656064 - DNA, 83 bp, Homo sapiens
ggcgcctgaaggagttgttgtctcggcagcgcccgcggagacgtgaagagatgccccttggtgtggccactgcaaggctctgg

SEQ ID NO: 656065 - DNA, 100 bp, Homo sapiens
atttaaatggttctggcaaactgctcaagcgcgttccttcacctcgggcagaataactttgcagaagcccacaggttcttcacagagatcttaaggatgg

SEQ ID NO: 656066 - DNA, 83 bp, Homo sapiens
ggatcatcaactcgcgggtcctcgtggatcagactacaggaagggaaaaggccgaggcatcagcgtgtgaagaccgcaaagac

SEQ ID NO: 656067 - DNA, 100 bp, Homo sapiens
agaagatacagatctggcagaaaactgtgaaggaggctcatttgacaaaggagggcaatgagccaggggagaccactcagatcacataccatcagcttct

SEQ ID NO: 656068 - DNA, 100 bp, Homo sapiens
gtcaccaccttggtggagaacaagaaagctcagctggtggtgattgcacacgacgtggatcccatcgagacttcaatccccgactcggaaagcaatctgg

SEQ ID NO: 656069 - DNA, 100 bp, Homo sapiens
cttggctctcaacttattcccttcaattcaagtaacagtgaaattaaatggtggcagacatgtccaaggaatattgcggggatttgatccctttatgaac

SEQ ID NO: 656070 - DNA, 82 bp, Homo sapiens
ggaggcggcccgcttcctggaatggcaagcgcagcaacaacagagagcacgtggtcttgaggaccggcccagctcaggctcc

SEQ ID NO: 656071 - DNA, 100 bp, Homo sapiens
ccgggggccagggggccggggactactgagaaggaggcccccacagcgtgcccccgctggcaaggccccggcggagcccatcgtggtgaggcttaaggag

SEQ ID NO: 656072 - DNA, 97 bp, Homo sapiens
caaggacaactgcaagggggaagtagagagataacaaaagctgctcagagtctcaatgaacttgaacattgggtgctttctgcttgaagttaccacc

SEQ ID NO: 656073 - DNA, 100 bp, Homo sapiens
cagccgcgtctgggccaggagaaaagcttggagggacggtttgaagatgaggagctgcagcagattcttgatgatatccagacaaagcgcagctttcagt

SEQ ID NO: 656074 - DNA, 100 bp, Homo sapiens
agatactgtgcctttgctccagggcatttgtggagaaaatggcaaatgcacgacagcggcctcctgaacatcaccaaggtatccttctcagaccgaggta

SEQ ID NO: 656075 - DNA, 97 bp, Homo sapiens
tcgcctcggaagtcccctggaccatcacagaagccgagcttcgggtaactctcacagtggaggagccaacacagatctatagatttcttcgaactcg

SEQ ID NO: 656076 - DNA, 90 bp, Homo sapiens
accacggcgactggacttacgaggagcagtttaagcaggactcctcctattttgaggacttctccaacatctccatcttctcctcgtccg

SEQ ID NO: 656077 - DNA, 100 bp, Homo sapiens
ctgccccttgtgtcccggatgcgatctggcatggagctcaccagaacagctaaccggaagctacatgacagtaatgatggccttagaagtgcccttgaaa

SEQ ID NO: 656078 - DNA, 75 bp, Homo sapiens
ggccgctgggggttgcggcggcgctgagccagcggggccgagaaccatggagtctggcagtaccgccgccagtga

SEQ ID NO: 656079 - DNA, 97 bp, Homo sapiens
tctggatgtcggtgggcctctgagatatgccgtttacgggaaagtggagaatgaggacatgaataaagaccagatcttgctggaaaaagaagctgag

SEQ ID NO: 656080 - DNA, 73 bp, Homo sapiens
tcctgtaggtaatgctgctgtatcctcagttgactcattcactcagggagaagagaagtttacctttattgag

SEQ ID NO: 656081 - DNA, 49 bp, Homo sapiens
ccttcagtcaagaccctccagcttgcctaaaggcctaaagaatgtattt

SEQ ID NO: 656082 - DNA, 75 bp, Homo sapiens
cgcggccggagaccgtggggcccccggttgccgccccctcggagttcaaggaggccttccagctgtttgaccgaa

SEQ ID NO: 656083 - DNA, 51 bp, Homo sapiens
taccttgattcagagagaagacaggaagcaagatttccagatgtagcaaat

SEQ ID NO: 656084 - DNA, 82 bp, Homo sapiens
ataagtagcttaaagatgacaccttgcattccctatttagcacgaaagcaagagattatcaaagtcactgaacaactgatcg

SEQ ID NO: 656085 - DNA, 80 bp, Homo sapiens
cgtcctcttccgttcttcacccctacaccttggagtgaaaggaaagcaagccaggatggatatttacgacactcaaacct

SEQ ID NO: 656086 - DNA, 100 bp, Homo sapiens
tggagtctgacttgtccagcagcacattgtcctcgtggtgaattctcttatcagttgggccatatggtgctcttcccagtctggttcctgtacagtctgc

SEQ ID NO: 656087 - DNA, 74 bp, Homo sapiens
agggcctgcagcgggagctggacggcgagcgcgagcggcgcgagaaattggacagagagactctgaagatgtga

SEQ ID NO: 656088 - DNA, 50 bp, Homo sapiens
atcgaggagaagtccagtttcttggaagaaactggcgatggaatatgaga

SEQ ID NO: 656089 - DNA, 97 bp, Homo sapiens
tgcgccgaggccagatcctctggttccggggcctgaaccgtatccagactcagaaaccagcctggacaccaagtctgtgtcagaaggccacctcaag

SEQ ID NO: 656090 - DNA, 100 bp, Homo sapiens
caagtccccagggaatgccacagcatcctccagcacctcaggctgtgatccaaaatcccttcagcaatggtggcagtccggcggccgaggctgtcagcgg

SEQ ID NO: 656091 - DNA, 141 bp, Homo sapiens
cttgtctcttatttagttctggggagcgcctcgtcgacatgagtgatgtggaggaaaacaacttcgagggcagaggacaatgactcattcttcccaggacactggttcttgtggcattcaggaagatggaaagctttatgt

SEQ ID NO: 656092 - DNA, 75 bp, Homo sapiens
tacttcaagggcgtgctcagtatctacaaagacccagatcatgctaaagaggaaaggacagtgtgcttggttaga

SEQ ID NO: 656093 - DNA, 75 bp, Homo sapiens
aacgttcagcttctctaaactccaagcttttcctccgcaaccatgtctgacaaacccgatatggctgagatcgag

SEQ ID NO: 656094 - DNA, 100 bp, Homo sapiens
atgctgaccaccaatcagatccgtaagataaacattgacgatcttgaggatgaccctgtggtgaacggggagaggtctggctgtgcgctcacagacgctg

SEQ ID NO: 656095 - DNA, 75 bp, Homo sapiens
ctacaaatggaggaggaggaggacgacgacgatggggatatcggtatccgttacagcactgatgtgagtgtagat

SEQ ID NO: 656096 - DNA, 60 bp, Homo sapiens
actcggtcatgtacccggtggactcggtgaagcaccatatgaaggcggagtatggaaagt

SEQ ID NO: 656097 - DNA, 100 bp, Homo sapiens
acttgaagcagaaagcaagtgaatacgagtcagaagggtattgtgtcactctgtctgctgtttgaaactcttcttcaaacttatcttccccaactctttt

SEQ ID NO: 656098 - DNA, 75 bp, Homo sapiens
gaccgggctgcgccgcgggagttcgagagttgcatgctgagaatttgaaaaatgaagatgatgtagacactggac

SEQ ID NO: 656099 - DNA, 75 bp, Homo sapiens
agattgtgaagcaatagcctaaggtagtgaagctgattttagctcctcgagcagcacaggcagcatttccgctcc

SEQ ID NO: 656100 - DNA, 75 bp, Homo sapiens
gcatcgacaaatggccatccataaaaggatgaagatgatctggccaatgccctgatctggcctgagattcaacag

SEQ ID NO: 656101 - DNA, 75 bp, Homo sapiens
gcgccgtgcccaccgaccggcctcgagcgccccggcgggagtccaatatcagatggaaatgatgcggagccttcg

SEQ ID NO: 656102 - DNA, 95 bp, Homo sapiens
caacttacccgagaacgtgcgggaagagaagatcatcgagcatttcaaacgacctggcagcctgggtgtcatggagtactacctgatggatgctg

SEQ ID NO: 656103 - DNA, 50 bp, Homo sapiens
ctctccagtgggacagcgcatcgcaagagtgagccatggagctacgtgtg

SEQ ID NO: 656104 - DNA, 74 bp, Homo sapiens
tatagagatgtgatgttggagaactacagaaacctggtctccctaggccccttcacagatgtagtcactacaaa

SEQ ID NO: 656105 - DNA, 75 bp, Homo sapiens
aaactgaggcctggaatttgattaactcattcaaggttacccagttgatcttggacatgatacctggatgtgcag

SEQ ID NO: 656106 - DNA, 100 bp, Homo sapiens
gtaaattatgtgaaacctccaaatgtggatggactcaccctgtcacccaggttggactgcactggcctcaacctcctgagttcaagtgatcgtcccacct

SEQ ID NO: 656107 - DNA, 82 bp, Homo sapiens
tttaaagctgagctgcgaggaaaatggcggcgggagtacctggagtagaacagaaaaattattatgtctgtgttcccttggg

SEQ ID NO: 656108 - DNA, 89 bp, Homo sapiens
ggctgtcgccaagagcaaactgagggagctcaacaagaagttggattccatgggttccaagagaagaagagctacctccccttccagca

SEQ ID NO: 656109 - DNA, 100 bp, Homo sapiens
gcaagcgcagggggacggggaccagcagctgtcgccgccgctctcaggcccagaggcagagctacacaaccatggaatccaaattaattcctgttctgtg

SEQ ID NO: 656110 - DNA, 75 bp, Homo sapiens
ggattttttaactgaagatagtgcctttcagccctaccagatattctatattgagcgcattataccaataatcag

SEQ ID NO: 656111 - DNA, 100 bp, Homo sapiens
cagagcccctcgtgaaggagtatgctgcgtttgtgctgggcgctgccttttccagcaatggcaccagcatgatatcattgatcattcctcccaaagacca

SEQ ID NO: 656112 - DNA, 75 bp, Homo sapiens
ctggaccaggatgtgcgggtgctgaaggtagtcaagcactttagaagtctggaagaaaggaaaaaacagcataaa

SEQ ID NO: 656113 - DNA, 100 bp, Homo sapiens
ctgaggagcgccgctgcctcgcctcggtgacgcggcgcacggcgcggatggtggccgagtggcagtgtgtgggcttctgccacggcgtgctcaacaccga

SEQ ID NO: 656114 - DNA, 90 bp, Homo sapiens
gtggagctcacgtttattcaacaaaaaatccagttacactcttaaaggaattgtcagtgataaagtctcgatatcaaactttgtatgccc

SEQ ID NO: 656115 - DNA, 101 bp, Homo sapiens
gcccttggagaactgctaacctagggctactgttgattttgactatcttcttagtggccggttgagcaatgtttaaagcgtttgaaaaacatgaatttgga

SEQ ID NO: 656116 - DNA, 88 bp, Homo sapiens
ttgccattgagaaggttaaactccgagtcttaaagagaatgtgatcaatgggcaggactacgaagtgatgatgcagattgactgtcag

SEQ ID NO: 656117 - DNA, 83 bp, Homo sapiens
cacgagtgccgccagcatgtctgacaaactgccctacaaagtcgggagaaaatccccttcaacattcctgggatatatatcta

SEQ ID NO: 656118 - DNA, 100 bp, Homo sapiens
aattagaagttttgaagtcagctgaagcagttggagtgaagattggcaatccagtgccctataatgaaggtggttatcactaggctaaaactggacaaag

SEQ ID NO: 656119 - DNA, 50 bp, Homo sapiens
ctcatactctgttatagataaacaaggtcctcagaatggttggaatgacc

SEQ ID NO: 656120 - DNA, 78 bp, Homo sapiens
gcgtctcggaaaccggtagcgcttgcagcatggaccgcagctgaatgcacagctagaaggttggctttcacaagtaca

SEQ ID NO: 656121 - DNA, 88 bp, Homo sapiens
tcaaattgagaaccaggtagatccccaccacctacagtaaaaagaaggaagaggcccagcagaagggactcgctgagccaccccccgc

SEQ ID NO: 656122 - DNA, 83 bp, Homo sapiens
gtttgccattcgctggggctttatccctcttgtgatttacctggcaatggctgccatccggaagaaactggtgattgttggtg

SEQ ID NO: 656123 - DNA, 100 bp, Homo sapiens
ggcggagctgatcgagcaggcggcgcagtacaccaacgcggtgcgcgaccgggagctggacctccggggcttctcgtcagtgcctcgcaggatggtaaac

SEQ ID NO: 656124 - DNA, 100 bp, Homo sapiens
tgaggaatggcatatcccccattattattgataataccaacctccacgcctgggaaatgaagccctatgcagtcatggtcatccatgcctggcttattat

SEQ ID NO: 656125 - DNA, 100 bp, Homo sapiens
cacggctccctcctcggtggtcgcggcgacctccggcggcgggaggcccggcctgggcaggttcatggaatccgagctggacctaaatgacatcattcag

SEQ ID NO: 656126 - DNA, 100 bp, Homo sapiens
ccgtcatggagatggaaaaggagttcgagcagatcgacaagtccgggagctgggcggccatttaccagctgaaactagaggaccgttctgtggtgccccg

SEQ ID NO: 656127 - DNA, 100 bp, Homo sapiens
aacagatcttcaacctgccaaaaaagtctcaccatgcaaactcccccacagcagcaggggaacaggaacctgataaagaatcaggagcctcagtggatga

SEQ ID NO: 656128 - DNA, 82 bp, Homo sapiens
gttcttcttcgagtatttgtagaaggacctgcctagagctggaacgttacctccagagcgagccctgctatgtttcagcctc

SEQ ID NO: 656129 - DNA, 100 bp, Homo sapiens
gaggacatggacctgtacagcatcaactacctgcactttggggagcctaagtcctggtagtgaagcgcgcagtggcgagccagccagactctgtggatgc

SEQ ID NO: 656130 - DNA, 80 bp, Homo sapiens
atgttgaagatgtccttaccagctttgacaatacaggaaatgtttgcttcacaggctgctcaagaagccgagatcaatgc

SEQ ID NO: 656131 - DNA, 98 bp, Homo sapiens
gttttgccaactgctcaaaaattagcagatgaaattctttcccaaaattcagaaatcaaccaagttcatggctgaagtcatcgatgtgagttatggaa

SEQ ID NO: 656132 - DNA, 75 bp, Homo sapiens
ctcgtcagcactgactttcagctatggaatcggttgctccttgagggcaggacagttcttatggctttatccgtt

SEQ ID NO: 656133 - DNA, 100 bp, Homo sapiens
gaaggaagctgtttccatatgacccttatgaacgagctcgccaaaagatgttattggagctattttgtaagacccactatgaaaatggagaatatattat

SEQ ID NO: 656134 - DNA, 102 bp, Homo sapiens
atttctcctattgaggagtcaacaatggtagataacgcagatcatctctggaaaggatattgatccgcctcatgtaaagtatgcttagttcctttccagtgg

SEQ ID NO: 656135 - DNA, 100 bp, Homo sapiens
gtacgacagcggcgcgggcggcggcacggccatcgccggctcggtggaggcggtggccagttgcctcttgaagtggatttaactaaagcgaagagacaag

SEQ ID NO: 656136 - DNA, 90 bp, Homo sapiens
tgcatcaaggaggccattctcttgttttcagataactattatcgtgcagaaatgattgatgccctggccaactctgttacacctgcagtc

SEQ ID NO: 656137 - DNA, 83 bp, Homo sapiens
acaattacttacctggcccaggaggatgggcccgttgtggctcaacagtcactggagcttatccagtcaaaaatagtaaaagc

SEQ ID NO: 656138 - DNA, 114 bp, Homo sapiens
agatcaaatggcacttcattggccacctacagaaacaaaatgtcaacaaattgatggaaaccagcctggacaccaagtctgtgtcagaaggccacctcaagaggaacatcgtgg

SEQ ID NO: 656139 - DNA, 75 bp, Homo sapiens
agacgaggagccaggctctgaggacgagcccagcagtgctcggtggtaccatggccacatgtctggcgggcaggc

SEQ ID NO: 656140 - DNA, 50 bp, Homo sapiens
agtggagaaggaactgtacacttgggtgattgtcagaagcttcagttctg

SEQ ID NO: 656141 - DNA, 75 bp, Homo sapiens
cggctgcagcgagcgctggacggagaggaaagcggttataaacaacttgtgaaatgagtgatttggaagatgatg

SEQ ID NO: 656142 - DNA, 83 bp, Homo sapiens
ccgaagcggggaagtgggacaagatggtttacatctcgaacgacctgcctagagctggaacgttacctccagagcgagccctg

SEQ ID NO: 656143 - DNA, 90 bp, Homo sapiens
caaaccaagaagttcctgtagcaccttcacagtccaggcaagaaaatatttacaccagcagctccagttcataccaataaagaagatcct

SEQ ID NO: 656144 - DNA, 100 bp, Homo sapiens
ggaacttgcagaaatcacattggaccctcctcccaactgtaggttaatttggagtggcccctggagtcagtttcctacaccatccgaggccccacccagc

SEQ ID NO: 656145 - DNA, 50 bp, Homo sapiens
cgcggagcttgacccgtccatcgctgtgccaaaacagagtggagtacgag

SEQ ID NO: 656146 - DNA, 101 bp, Homo sapiens
cctgcatctgccaacaagactggaagcagctgccactgcagagccccgccatggaagacacgccgttggtgatatcgaagcagaagacggaggtggtgtgc

SEQ ID NO: 656147 - DNA, 94 bp, Homo sapiens
cagattcgcagtggtcgcttcttctccttgtcctcatcaccgggggcatcgtggccacagctgggcgcttcacccagtggtactttggtgccta

SEQ ID NO: 656148 - DNA, 100 bp, Homo sapiens
ggctgctcccatcattgatgtggtgcgatcgtctgcagatctccaggggagcccaccagcctagtcaacatggcctcggaagacattgccaagctggcag

SEQ ID NO: 656149 - DNA, 80 bp, Homo sapiens
cagctgagacggccttggccggtgtggcacattggttgacctttgccagggcccccaccttcggcatactggacagattg

SEQ ID NO: 656150 - DNA, 74 bp, Homo sapiens
cagacctcgtggaagcgctggaaaaatttgggacaatatggagaagttgccccagtgcaaggcactgcattcga

SEQ ID NO: 656151 - DNA, 88 bp, Homo sapiens
cacaagacatgggccagattggtgtgcgcactcctctgggtcctcgagcttacagggatcttcagaccagggaagacatacggaatgc

SEQ ID NO: 656152 - DNA, 137 bp, Homo sapiens
cgacagccgcttcactgacctaccccctggacctggtcagagcgcggatggccgtaaccccgaaggaaatgggccctggcctccagtctgagtgctgacctcgaagagcccctgagtgaggaggagacagaacaccc

SEQ ID NO: 656153 - DNA, 87 bp, Homo sapiens
aagatacgaatctcttaaggggccgactatctctatccggagcagctgaaaatgactgttgtgaagctgatttcccaccgggagtgt

SEQ ID NO: 656154 - DNA, 97 bp, Homo sapiens
aagaatttttgcaacgcgccaaatctaaactgcggagctggagtttgttcagatcatcatcatcgtggtggtgatgatggtgatggtggtggtgatc

SEQ ID NO: 656155 - DNA, 78 bp, Homo sapiens
agacagtgcctgccttttcagagcgtacctgtgccactgtcaccattggaggaatttggagtcattcgttgcccagtt

SEQ ID NO: 656156 - DNA, 88 bp, Homo sapiens
atttgaacacctgaagctccccatcaagggaatgaacttcacaaagctgacgggtcgcctcatgctggccgtgggaggagcagtgctt

SEQ ID NO: 656157 - DNA, 100 bp, Homo sapiens
gggggattctcgacctgctaacagaactggaccttttcgatactagagtaaaaggatggtttcttctggacaattatatacccacatttatctgctctgt

SEQ ID NO: 656158 - DNA, 83 bp, Homo sapiens
cgcaccatgccgctcctaagcctgcacagccgcggcggcagcagcagtgagaggtcatcgacatcctgagggggaaggccacc

SEQ ID NO: 656159 - DNA, 100 bp, Homo sapiens
tctgctctgggaagcaccagggtgtccccgccgccctcagctcgaagtcagccaccatggaggcgcaggcacaaggccttggaaaaccattgcagagtga

SEQ ID NO: 656160 - DNA, 101 bp, Homo sapiens
cagaacgttgcaaactctggaaaaaaacttgggtgaactccagaaagccattgacttattcacagatgccatcaagctgaatcctcgcttggccattttgt

SEQ ID NO: 656161 - DNA, 98 bp, Homo sapiens
ttccacttcgtgttcttcctagcttccctgtatgtgatgatgaccgtcaccaactggttcaactgcagatctgggacacggccggccaggagcggttc

SEQ ID NO: 656162 - DNA, 82 bp, Homo sapiens
gcgcgcagcgcgcggggcctcagccttccgagtttacttctggagctggcaggtgcagggctcgcggcctggcaagaatgta

SEQ ID NO: 656163 - DNA, 74 bp, Homo sapiens
ccgggccatggataagaagaaagtgttggtcaagataaacaacccagacatgcgagtgcagatcctcaaagatt

SEQ ID NO: 656164 - DNA, 100 bp, Homo sapiens
gttggttcccctctttgacctggtaaatgcaggcttttatgcgagaggtttccaatacttatctacaggaatcgccatgaccccagctctgagggaggca

SEQ ID NO: 656165 - DNA, 100 bp, Homo sapiens
gctcgggcaggccttccgagaggaacctctatgccgacatcgacgccgcctggcaggccctgcgcaccagggggggccctcagcctcttggccttgaacg

SEQ ID NO: 656166 - DNA, 88 bp, Homo sapiens
aagatcagggatcaaaactcattcgaaaagctaaagaggcaccattcgtacccgttggtgtctgctttttcaacgtgggagaaggagt

SEQ ID NO: 656167 - DNA, 96 bp, Homo sapiens
cagctggctggcttcagtggaccagagttcatcctttgctgcctggcccgggaccctgcccgccggccctctgcccacagcctcctcttccaccgc

SEQ ID NO: 656168 - DNA, 100 bp, Homo sapiens
tttcccaaaggacaagaatgcgaatacccacccacacaagatgggttgggtatctacagccattggttgctgttcaggtcagctttgctcctaacaacac

SEQ ID NO: 656169 - DNA, 100 bp, Homo sapiens
ggctaaattacatattccagtaatggtggatgaagttgttcattgtttgtcaccacaaaaaggacagaatgttgtaccatctttgggtaggcagacttcc

SEQ ID NO: 656170 - DNA, 100 bp, Homo sapiens
agccaagatggtagaggctgccaaggattttatagctaccttgggaaaactttcaggattacatggccaggacctttttggaatttggagtaaagtctac

SEQ ID NO: 656171 - DNA, 75 bp, Homo sapiens
aaggatgtagacaggacccgtttagaggaatggaagttggatacactttgtgacttgtacgagacactgaccatt

SEQ ID NO: 656172 - DNA, 86 bp, Homo sapiens
gataacatccctccagaagatggcacagagtaccaagacattgagactgagaaaacctgccccgaatcacattcaccttcagaaga

SEQ ID NO: 656173 - DNA, 75 bp, Homo sapiens
cgaagccccctgcaggaactctacaacccaatccaggactctcaaatggtggtagactccttcaaatctggtttt

SEQ ID NO: 656174 - DNA, 100 bp, Homo sapiens
ctagagttgccatttcgctgggatttttgggtggtgcaaagactattgggaagaagttacctgcaactacagcaactccagactcatcaaaaacagaaat

SEQ ID NO: 656175 - DNA, 90 bp, Homo sapiens
caggcatcagctgggaagctggcgtgggcaggccagctgtacctggcctggagctccagctaaggcaggaacggatccaaattcagcagc

SEQ ID NO: 656176 - DNA, 75 bp, Homo sapiens
ccactattaaacttctcaatgaaactagagacatgttggaaaggaaatctgagaatgaagatgacagcgagtggg

SEQ ID NO: 656177 - DNA, 78 bp, Homo sapiens
gatgcccttcgaaaaatgatcaactattgaccatataggtgtgatccctcacatccacaaatctctgattggaaagaa

SEQ ID NO: 656178 - DNA, 100 bp, Homo sapiens
ctgacgtgagttcaagtacagatcacacgcccactaaagcccagaagaatgtggctaccagcgaaggcaaggattactgcaaagtaatatttccatatga

SEQ ID NO: 656179 - DNA, 101 bp, Homo sapiens
aatgaggtggagaagctgctgaagacgatcataagcatgccctgtaaacatgtgtcaatggcctgtgtccacctggcttccaagatagaagaggccccaag

SEQ ID NO: 656180 - DNA, 100 bp, Homo sapiens
ttttccttcttacagagatgtgactctgtttgagcaatggccaatgtacatggtggactatgccggcctgaacgtgcagctcccgggacctcttaattac

SEQ ID NO: 656181 - DNA, 50 bp, Homo sapiens
ctcgcctcctcgcagcagcgccatggaaaccacccctactcctaatcccc

SEQ ID NO: 656182 - DNA, 100 bp, Homo sapiens
atgctgtggcatctgttgtcgcaggtatattgtcatcagtgagttctgcctcagtcagctcccaagtgaggacgcagtcacctttgaagactccggaggc

SEQ ID NO: 656183 - DNA, 98 bp, Homo sapiens
tgtcaagacctgatggggaagttctagagatggtatagctgcatgctgggaaagaaatgcagcctggcgcctctgaaggaggagcttcgcatacaagg

SEQ ID NO: 656184 - DNA, 100 bp, Homo sapiens
acctgcgcattgggaggccgaagggtccccgggacccgcctgctgagtggacccgggtgaccaggtctccaaggacaaagcccttcagagcatggcgtcc

SEQ ID NO: 656185 - DNA, 100 bp, Homo sapiens
agacatggctcttcattatgcaaataaatataatatcatgttagtgagggacggcccaggtggcaggatgtcctggtctggccttctccatggcctcaac

SEQ ID NO: 656186 - DNA, 90 bp, Homo sapiens
cgaacatgcgcttttgacacattggagcaaggatttgtggagaagatggacaggtggatcccaactgtttcgttttggcacagtccatag

SEQ ID NO: 656187 - DNA, 100 bp, Homo sapiens
gtttatccagctgctgctgggagttgactacatgcatgagaggtactgtgagaatagagatgtttcgaaatatgcagaatgcagaaatcatcagaaaaat

SEQ ID NO: 656188 - DNA, 100 bp, Homo sapiens
gccaaaatggcgaccggcaactactttggattcacccacagcggggcggcggcggcggcggctgcggcccaatatagaatgatatggaacctagcaaagc

SEQ ID NO: 656189 - DNA, 100 bp, Homo sapiens
cagactgctgtcagcctcagagaacttgaggaagagaacacgagcttgaaggagaacacaaagttatacctcaatttacttgaaatggaatatagtggtg

SEQ ID NO: 656190 - DNA, 100 bp, Homo sapiens
gcagggaccagccacttccggatccggggcctccttcccctccaaggcatgctgacctgcaaatccaagagacacatctttggaagataagagagcttct

SEQ ID NO: 656191 - DNA, 100 bp, Homo sapiens
tggggaaagaccttaggtattcaggtatgatgatgtcaaacgtgatgctgatgctacagttacagcccctgctggcgcagcctctctgattctctctccc

SEQ ID NO: 656192 - DNA, 100 bp, Homo sapiens
cagaaacaaaatgtcaacaaattgatggtggactaaagaggatggacatagaacttccacctctgctgtccctaacctgtttgttccattgaacactaac

SEQ ID NO: 656193 - DNA, 74 bp, Homo sapiens
ttgatcgatggcttcgccatcgccagcttcgccaccctcgaggccttgcagctgtggccagaagagctccgaag

SEQ ID NO: 656194 - DNA, 95 bp, Homo sapiens
gaagacagagatttattcgtaatgcgactcaaagctgcacggcagtctgtttatgagttggatccacttgaacaagcaaaagtggatttggtttc

SEQ ID NO: 656195 - DNA, 100 bp, Homo sapiens
acaagaaacagagcaatggctcacaaagcagaaactgcacaaagaatggaatagtgaaggaagcccaggttggtttgttggaccttgaactcaatcggct

SEQ ID NO: 656196 - DNA, 82 bp, Homo sapiens
tcctgcagcagaggaactcctataaccaccaccaggtgtcgtgaaaactacccctaaaagccaaaatgggaaaggaaaagac

SEQ ID NO: 656197 - DNA, 75 bp, Homo sapiens
tcacagatggcgatgctgctttggaatttgcagacttctatgattttaggtatattcgaattgttgggactcaca

SEQ ID NO: 656198 - DNA, 100 bp, Homo sapiens
gggttgtactcatagattgtgtaggcgttggtcttctgatagcaactttaatgtggctttcctcggagacgggtggcatggggagcagctagaacaatgc

SEQ ID NO: 656199 - DNA, 75 bp, Homo sapiens
ccggggccgagccggccggcctggcgcacctggactattaccacggcggcaaggctggagtgcagtggcgcgatc

SEQ ID NO: 656200 - DNA, 88 bp, Homo sapiens
gaatttacaaccaattttctggattggactgatcagttcagtttgctgtgtgtttgctcaaacagaactgataaatttcaaacggaag

SEQ ID NO: 656201 - DNA, 98 bp, Homo sapiens
ccttcccagtagctgggaccacagactgaaactgttgaggagcccatggaggaagaagaagcagccaaagaagagaaagaagaatctgatgatgaagc

SEQ ID NO: 656202 - DNA, 100 bp, Homo sapiens
gtcccagaaggcggcgatcctgggctgcgggcaaggcgaaaatgcatccgatgcagatttatggctcctgaacagttgcactgtaaaaaacccagctgaa

SEQ ID NO: 656203 - DNA, 106 bp, Homo sapiens
aaccctcagcgacatctttctgcttttcaagagttccgatttcatcactcgtgacttcactcagccaacttgggaatcagtgaaacgtacaaccaggaaagagcag

SEQ ID NO: 656204 - DNA, 50 bp, Homo sapiens
gcctacagttttcacaaatctataatggagtgaagaaagtgaagtgttac

SEQ ID NO: 656205 - DNA, 80 bp, Homo sapiens
tgcagcatgccatcctgaacgtctctccctgtcctagctctgtaactgtttacagtctgttgagcgaccgtaagaaggtg

SEQ ID NO: 656206 - DNA, 90 bp, Homo sapiens
gatgccggccgtgagcctcccgcccaaggagaatgcgctcttcaagcggatcttggagaatgaagtttctagattagaagacataatgca

SEQ ID NO: 656207 - DNA, 96 bp, Homo sapiens
gtggaattgatgataaccttgatgaaattcccgacgcccttagagatttgtttgattccatggataaaacttcttccagtattccacctattattc

SEQ ID NO: 656208 - DNA, 100 bp, Homo sapiens
ggaatatctggattctgctcagaggaacttgtactgggatgtgatgatggagaactacagcaacttactctcactgggtgccttcaaatctcttgacaaa

SEQ ID NO: 656209 - DNA, 75 bp, Homo sapiens
cagaaactgaaggcaactttgtctatcgcacaggttctaaatggcttctaagaagttgggtgcagattttcatgg

SEQ ID NO: 656210 - DNA, 100 bp, Homo sapiens
gaactgggtggcgaacggggcgagcctggaggattgtcactccaacctcttttcgctgtttgtcccatgaggagcacccccatagccatcctctctatgg

SEQ ID NO: 656211 - DNA, 131 bp, Homo sapiens
gcaccacccccggagcccccctcaacacggaccgcgcccgccgggcacacaagaatggtcactgagggtgtgaagacagagaatgaccacatcaacctgaaggtggccgggcaggacggctccgtggtgca

SEQ ID NO: 656212 - DNA, 78 bp, Homo sapiens
tgtttcatcattactaacaggatattcctcatgacattgctgtctggatcagctcagctactatttaataaaacaaaa

SEQ ID NO: 656213 - DNA, 100 bp, Homo sapiens
ccttgggtgaaattgttaggcgtggagagggagtgatgtcttccagactcggtgctgtacccgccaaaaaaccgggaagatcctgacggagttcctccag

SEQ ID NO: 656214 - DNA, 100 bp, Homo sapiens
ccataataaccatctatcgggaagagggcattctaggatttttcgcgccgttaattaaggaaaagttgagccagggcgtgaccctcgtcgtggacagata

SEQ ID NO: 656215 - DNA, 95 bp, Homo sapiens
ccaatagtactaaagaggaggtggaaatgaattgggacatggtacagtgaaggagaacgacctgctcagaatgagaagaggaaggagaaaaacat

SEQ ID NO: 656216 - DNA, 82 bp, Homo sapiens
tcagcccacatgcccgctcacctgcgctgtgatgcctgcagagctgtggcttaccagctgctggctgatcgtggggactgcg

SEQ ID NO: 656217 - DNA, 90 bp, Homo sapiens
tgagcgccgcctgcctgggcccggaggtcaccacgcagtacggcggccaataccggacggtgcacactgaacaccttccaccatgaccac

SEQ ID NO: 656218 - DNA, 100 bp, Homo sapiens
ggaccggcggcgctggaggagcgaggcagctgtactaggactgggaacgggcctggtactgtggcgctccgtgaaattagacgttatcagaagtccactg

SEQ ID NO: 656219 - DNA, 78 bp, Homo sapiens
tcctgaagaggaaggagcggtgtcctcttaagaaaatgatcaaagacatcttaaagccagaaataatggaggagattg

SEQ ID NO: 656220 - DNA, 83 bp, Homo sapiens
aaaaaacacaataccaggcatacatttggcagaataaatgaaccaggttttgcactgattgcaaaaataaagtcctccgagca

SEQ ID NO: 656221 - DNA, 100 bp, Homo sapiens
tgatattgtagaaggcatactgaatgcacatgacaccacaaagaaccagacgtcctgggtcctctccagcatggcagccctctactggagggtgaaaggc

SEQ ID NO: 656222 - DNA, 80 bp, Homo sapiens
gttttactgaaaaaggcacctcctcaggtgaccaagaatatggcccaggtgaccaaagccctggacaaggccctgagcac

SEQ ID NO: 656223 - DNA, 100 bp, Homo sapiens
catctttcatcaaccaatatacagatgacaagatctggtcaagctacactgaatatgtcttctaccgtgaagcatatatgcgtttaagcaaactccccga

SEQ ID NO: 656224 - DNA, 100 bp, Homo sapiens
ccctggagaagcagatggaaaaggcaatccagcatccagcagatgagaagttgcaagagaaggcatggggtgcagttgttccactagtaggcaaattaaa

SEQ ID NO: 656225 - DNA, 75 bp, Homo sapiens
gtccaagtacatcgacaagacgatccgggtaaagttccagggaggccgcgaaggctcatcggaacctgtcccagc

SEQ ID NO: 656226 - DNA, 73 bp, Homo sapiens
tgaaatcagaggagatgtaactatcgtcaccaggagactaaagtccatcaaaaacatccagaaaattaccaag

SEQ ID NO: 656227 - DNA, 75 bp, Homo sapiens
gattcgcagtggtcgcttcttctccttgcaattaccagctctggctgggtcgccacaacttgtttgacgacgaaa

SEQ ID NO: 656228 - DNA, 101 bp, Homo sapiens
ttctgaagttgttcattaagacttcccagcattcctacagatataaataggaaccctctggatattgatgcctcgggtgtggttggactgtcatttagtgg

SEQ ID NO: 656229 - DNA, 75 bp, Homo sapiens
cgtttcctatatactggctctcagattggaagtcagatggctgcattacaaagtcctttctatggtgacaaaatg

SEQ ID NO: 656230 - DNA, 95 bp, Homo sapiens
gtacgcgttgctatacagaatctttggatatgtgcatcagtggtttatgccaaggaaatgtgtccttctcatgtccacagccacagactgtccct

SEQ ID NO: 656231 - DNA, 75 bp, Homo sapiens
ccgaagtcagaactttgacatcttgcaaagtgccatcagtaagcatttgatgtcatggcacccccagtaccggag

SEQ ID NO: 656232 - DNA, 101 bp, Homo sapiens
ctggcgctgggggcgctggcgggcgttggcgtaggaggagctcatgaaagacttcttagagaagagagacaaggggaaacttctcatacagagaagtagaa

SEQ ID NO: 656233 - DNA, 100 bp, Homo sapiens
tgcatttgcacctgtggcttatctacgctttttagaattgcacttggaggacaagagagtcccacgaactggctgggtatacagaaatgtccagaggccg

SEQ ID NO: 656234 - DNA, 98 bp, Homo sapiens
agaaccagatccgggagcacgtcatctccatcgaggcccaccttgggacaccttgactccaagcccagcagtaagtccaacatgattcggggccgcaa

SEQ ID NO: 656235 - DNA, 153 bp, Homo sapiens
agcaattaaattcattgtctcagttcaagagtgaatatagcaacttatgtgaacctgagcagtttgtggttgtgaaccagaagagtgtgttaattgcacagatgaatgccgagtgcttggtcattctgacaggtgctggatgccacagttccc

SEQ ID NO: 656236 - DNA, 98 bp, Homo sapiens
agatacacccccaaagagcaactgaagattcatacgcagctggcagatattatcatagttgctgcaggaaagaccgttttacagccctcagtaccgca

SEQ ID NO: 656237 - DNA, 82 bp, Homo sapiens
agactccctgtcccggaccgcaggaagcgccgcggagccatcaacagcaagcagctcacctacctggagaaataccggccca

SEQ ID NO: 656238 - DNA, 83 bp, Homo sapiens
ccggagcgggagtgacaccgagccggacccagcgcgacctgcggcggctccggggtgacagagctgaatgaacctctctccaa

SEQ ID NO: 656239 - DNA, 90 bp, Homo sapiens
ggctatggccgtgccctggggctgagccctcagactgattcttgctattccaaatcctcttccacgttgacagcccttcagatatttcaa

SEQ ID NO: 656240 - DNA, 98 bp, Homo sapiens
ttcattctggattggtggatctgaagtacaaaatattttccaggtgtactagccctctcttggtacccacctgatgtaaatgatgaaaatggagaacc

SEQ ID NO: 656241 - DNA, 82 bp, Homo sapiens
gaggcaaggagctaaagcagcgtgcgttcagccctggggagcttgaagaaatccgcaaatgtgggatgaaaaacttccgtaa

SEQ ID NO: 656242 - DNA, 74 bp, Homo sapiens
ggagggctgattttcgagagccgaatgcagaggttccaagaccaattccccagtatgctcaggtaatcaaaatg

SEQ ID NO: 656243 - DNA, 96 bp, Homo sapiens
gcagggcctgcagcgggagctggacggcgagcgcgagcggcgcgagaaaggaaatcctcattgacgattcaatttgttgaaggccaatttgtggac

SEQ ID NO: 656244 - DNA, 102 bp, Homo sapiens
attacaataagcagaggctgtttgacagagcagacttaccctgaagtagttagaatgagtgaaccagaggaaatgcctccagaagcaaagatgaggatgaag

SEQ ID NO: 656245 - DNA, 83 bp, Homo sapiens
cgcagccgcccagaccgcgcagcgcgggaggcaggttccgcacggctttatcctgtggataaacgcagagtgaacgagtttgg

SEQ ID NO: 656246 - DNA, 98 bp, Homo sapiens
ggtgaagaagcccaagatccgcaggaagaatctccctttatggcaagattgtcatgagttatggagtaaaaagcgaagaagacagaagcagatgggca

SEQ ID NO: 656247 - DNA, 71 bp, Homo sapiens
acccgcgagcggagcggcgcgtgggtcggttgcggtcggccccggcaggcaatgagaagcacgaccttcat

SEQ ID NO: 656248 - DNA, 75 bp, Homo sapiens
tgatgcttttgctacgacctcattttctgctggaactgggcttttttccagacttcaagctcccattccaacagt

SEQ ID NO: 656249 - DNA, 83 bp, Homo sapiens
tgccgtcgccgccgccaccatgcccaagagaaagactacgtctactttgagaactcctccagcaacccatacctgatccggag

SEQ ID NO: 656250 - DNA, 115 bp, Homo sapiens
ccccgcgagcacagagcctcgcctttgccgatccgccgcccgtccacacccgccgccagataacgaaggaggcccaacttcattcaataaggagcctgacggatttatcccagac

SEQ ID NO: 656251 - DNA, 50 bp, Homo sapiens
agttcagcatccccaagcagggggagattatggtgacaagctgaacatgg

SEQ ID NO: 656252 - DNA, 74 bp, Homo sapiens
ctggttgttccgttgcgagctgcagctgcgatctctgtggtaggcccaggaaattgacaatggcccttcagcta

SEQ ID NO: 656253 - DNA, 74 bp, Homo sapiens
cgggccctgcgcgcctgatgggtcgaggcggacgcgcggctgcgtcaggaactgcaagcacatgttgaccagat

SEQ ID NO: 656254 - DNA, 90 bp, Homo sapiens
gagccggggcgccgggagctattgggacctgcggatgaacaagagaactgggcaacccatgatccacatctacctggacaaggaaacagg

SEQ ID NO: 656255 - DNA, 100 bp, Homo sapiens
tctgagacccctccggccggccgcggcgtggggatgccgtcgcaccgaatgccctccgaagggatggaagcttcctggcgccaggtggccggtggccgag

SEQ ID NO: 656256 - DNA, 98 bp, Homo sapiens
acgagactctgcaaaacgaggcggacaaccaggagaacgttttatctcagtcttactactttgaccgcgatgatgtggctttgaagaactttgccaaa

SEQ ID NO: 656257 - DNA, 100 bp, Homo sapiens
ggagagaaatcctcagtgaacttgggaagtgtgttgctggaaaagtgcaggtcagctctgcggacgctcggctcatggtctttgacaagacggaagggac

SEQ ID NO: 656258 - DNA, 101 bp, Homo sapiens
caaggcataccatggcagcttttcaactatgtggcgaccatccctgacaacctactttggggataaaggattatttggtcttctggatttggaggcaatca

SEQ ID NO: 656259 - DNA, 98 bp, Homo sapiens
cgacgaacccccaatgctgaccaaggaggagcctgttccagaactgctggaagctgagatgcccttggaaatcacccgtagctttatccagaaccgag

SEQ ID NO: 656260 - DNA, 75 bp, Homo sapiens
ccaacatggcggaacgcaggagacacaagaagcggatccagcattgactgtgccggaatcctgaaactcagaaac

SEQ ID NO: 656261 - DNA, 51 bp, Homo sapiens
acgttactgtgacagaagccatcagacggatgctaaagagcaggtaagccc

SEQ ID NO: 656262 - DNA, 100 bp, Homo sapiens
ggaatatgccaaggaaaaactggagagcttcatcaaaaatagtgatagctttgataagcaagaaacctattggaattcgagacttaattaatgaagcttt

SEQ ID NO: 656263 - DNA, 50 bp, Homo sapiens
ccctctgaggagatggtcatgacaggacggctgtcctcagcgaggggccg

SEQ ID NO: 656264 - DNA, 132 bp, Homo sapiens
cacagactggggtggcccagaacaactgctacatctggatggagaagaggcaccgaggcccagggtcaacatatttcactggcacctattcacaagcttgaagaagctctgtatgaataccagccactgcag

SEQ ID NO: 656265 - DNA, 100 bp, Homo sapiens
tttgtggctcataaagcatttctgaaaaacagcaacctgcagcacatgtatatctatgttgctgacatattggctcatgaaattcatgttttggaaaaac

SEQ ID NO: 656266 - DNA, 100 bp, Homo sapiens
ctaacagcaacacagaaatttagaaagctgctttctaaagctggaaacaacgtggaggtagatgagtctttgttccaagaaatggatgacttggagctgg

SEQ ID NO: 656267 - DNA, 100 bp, Homo sapiens
aactagcggcgggtcgtgggcacctccagatctctgccatcccgagatcatcactcctagcctcctctggaaactctctgagagttggggaattgtctct

SEQ ID NO: 656268 - DNA, 100 bp, Homo sapiens
gggtcacccgcactgagtcaacagactgagcgcgtccaggcctgacagctctgcggctcgggccctgaggaaaatgtttataggaggccttagctgggac

SEQ ID NO: 656269 - DNA, 100 bp, Homo sapiens
cagcactcctggatcgaaggtgtccaagacaacatgaagctccataagccatcagtggcctatgtacataccacgccgggtctgccttcaggctgggaag

SEQ ID NO: 656270 - DNA, 90 bp, Homo sapiens
ttttacaatgggaataaaagagaaaagcagacagtccactcagtcttccgaaaactggtgatctttgacgagactctacagaagtgcctg

SEQ ID NO: 656271 - DNA, 82 bp, Homo sapiens
tgctcgtcgggcccccttcgggaggggccaaaccagtgctcctgccacctctctggctgccccctagagcctgcccatccca

SEQ ID NO: 656272 - DNA, 96 bp, Homo sapiens
cacgctcttcagcaccaccccgggagcttcaaactgttccaagcttcaccttctgtgccagccaaatacgtggaagacaaagagaagatgctgtct

SEQ ID NO: 656273 - DNA, 97 bp, Homo sapiens
tggctggcaagaacgggaccgatggacagaaggaggaagagcaagcaggccctgagggactataagaaggttcagatccagctggagaatctggaga

SEQ ID NO: 656274 - DNA, 82 bp, Homo sapiens
ccagccttctagggcggcggaggtcaaaatgcagatcttcgtgaaaacccttaccggcaagaccatcacccttgaggtggag

SEQ ID NO: 656275 - DNA, 100 bp, Homo sapiens
aaacagattatttcagcagatctattcagatggttctgatgaagtgaaacgtgccatgaacaaatcctttgatttgagctgcctctttgaattatacttg

SEQ ID NO: 656276 - DNA, 100 bp, Homo sapiens
gcagagctcacttggccaatcatgatgaactaatttccaagattatggcatcgtcaaagcattgtggtgtcttttttactgctgcttgctgtgcttatag

SEQ ID NO: 656277 - DNA, 50 bp, Homo sapiens
ccctcctgtacttgttccaactcaagaggcaaaaccttcaactgaggact

SEQ ID NO: 656278 - DNA, 146 bp, Homo sapiens
ggttgatgatcgttgtgttgtacagccagaaaccggggaccttaacaatccacctaagaaattcagagtcaggtcaattcagtgaagatatgatacccacagtgggcttcaacatgaggaaggtaactaaaggtaacgtcacaata

SEQ ID NO: 656279 - DNA, 90 bp, Homo sapiens
tcattcaccagacatcatggagcctatatatccttttgcacggccccagatgaataccaggccatccggctgtccttagagcaagccctg

SEQ ID NO: 656280 - DNA, 83 bp, Homo sapiens
tacaggcccacgccagacacgacgtctggcaggaacctcggcctcagaggaactgtggctgcaccatctgtcttcatcttccc

SEQ ID NO: 656281 - DNA, 100 bp, Homo sapiens
ggctctgaacacagcatcaatggcaggaggtttcctgttgaggttgaagccatccttgtcaatatatttggtggtatcgtcaactgtgccatcattgcca

SEQ ID NO: 656282 - DNA, 98 bp, Homo sapiens
aatgattgtggcagtaaagaagtgtatgtgatgccttcaattaagttgcagagttctgatggagagatatttgaagttgatgtggaaattgccaaaca

SEQ ID NO: 656283 - DNA, 100 bp, Homo sapiens
cgaacagttttactgtggcgacactgaagggaaaaaggtcatcgtattgaggaagttcctgaacttcctttggtagttgaagataaagttgaaggctaca

SEQ ID NO: 656284 - DNA, 83 bp, Homo sapiens
ctaaagcagcgtgcgttcagccctggggctggaggcaaagctggaaaggacagtgggaaggccaaggctaaggcagtatctcg

SEQ ID NO: 656285 - DNA, 95 bp, Homo sapiens
atggaggagatgcagcagcacaacatgtcctggattgagaggactactgagcccagccaggctgtatgccattgctgccaaagaaaaagatattc

SEQ ID NO: 656286 - DNA, 90 bp, Homo sapiens
tgaagtatccagcgctcattgggaatttagttaagaattatatccagatcgagagacagaagattctgaaagggttcaatgaaatgagag

SEQ ID NO: 656287 - DNA, 101 bp, Homo sapiens
tgtctgccaccatcctgggttgacaattctacacaaggagtttcattcattggctcccatgtactatcgaggctcagctgcagctgttatcgtgtatgata

SEQ ID NO: 656288 - DNA, 90 bp, Homo sapiens
tatgaaataaacgccactcctaaaggctggtcctgccactgggacaggcaagtactcaaacagatgccctgaaactgccaccttcccaac

SEQ ID NO: 656289 - DNA, 82 bp, Homo sapiens
acagtggagtctggcatcttattggtaatgctggaggatggaagaagcaaagggtttggcttcgtctgcttctcatctcctg

SEQ ID NO: 656290 - DNA, 101 bp, Homo sapiens
cggtgaccgaggcctgggccccggggaggtggggaagacagggctccagctaccacaggacgggctctgggtatagccgttccagtcagggacagccgtgg

SEQ ID NO: 656291 - DNA, 51 bp, Homo sapiens
gctgagccacgccggcatcctcaagagctctgcgtgcctcttgctgtgccc

SEQ ID NO: 656292 - DNA, 83 bp, Homo sapiens
tctcaatatctgtcttcggtggactccttcggcagtccacccaccgccgccgcctcccagtactatgagatgtcctatggctt

SEQ ID NO: 656293 - DNA, 75 bp, Homo sapiens
ttgtagccctcgtccagacgccccaaacaaacaatatgaccacattctgaagtgggaactcttccagctggctga

SEQ ID NO: 656294 - DNA, 100 bp, Homo sapiens
tcacctacaaagattttaccaaaaaccttaggaccaataaatgtgaatgttggaccccaaatgatcttgatgtggaagaaatggaggactcagaaccaag

SEQ ID NO: 656295 - DNA, 82 bp, Homo sapiens
caaaggaagacttgtaacctggagaagaggtttgtgttgctagttaagctagcttgtattgttgtggcttccttcgttctct

SEQ ID NO: 656296 - DNA, 75 bp, Homo sapiens
cctcgccgccgcggcctctgccagagccagacccagcctcgcctttaaggatggcaaacagtgccctgatctccg

SEQ ID NO: 656297 - DNA, 75 bp, Homo sapiens
cagtgccaagacttggttaaagtcattgaggactttccagcaaaggtcagcgtttctcgcagcacacatcccact

SEQ ID NO: 656298 - DNA, 100 bp, Homo sapiens
tgctgcgctcgctcctggagaccaacgaaatcccctcgcttatcctgtgggggccgccgggctgcggcaaggactttctgcagggcgactgcaccaaagc

SEQ ID NO: 656299 - DNA, 100 bp, Homo sapiens
ggcggcggtaggaagccggagacagcagggtgacaggcatcacccagccaatgcctgtctgattcccatctgttctctgtatggtgctgccgtcaccaca

SEQ ID NO: 656300 - DNA, 75 bp, Homo sapiens
attattttggaccttcagattagatttctctatgaatcatcatcaagaactctgggagaacttttgaattcataa

SEQ ID NO: 656301 - DNA, 90 bp, Homo sapiens
cgggcgggagcccagggtggcggcgcctgcggccgagcgccgggagcaggacacttcacggccatggtatggaagaacaccaagaagatg

SEQ ID NO: 656302 - DNA, 143 bp, Homo sapiens
ctgatgcgggagctggatgaggagggctctgatccccccctgccggggagggcccagcgcatccgacaggccaccagcccctcgggttccaagatgcagctactggagacagagttctcacacaccgtgggcgagctcatcga

SEQ ID NO: 656303 - DNA, 75 bp, Homo sapiens
acacccgcccctctcctgtgccagggcggctgtgagtgtggaccccttctatgagatgctggcagcgagaaagaa

SEQ ID NO: 656304 - DNA, 100 bp, Homo sapiens
aaacacaacttcagacttgcagaaaaccagtgaaggggtgtctgataactctgccgcggtcgtgccggcccagtacatctgtgccccggacagcaagcac

SEQ ID NO: 656305 - DNA, 96 bp, Homo sapiens
accaaagaatatgaaattcatcatgcggaagatccatccaaaagctatgtgaaattacgagactttgtgcttgtgaagctttgtcaagatttgccc

SEQ ID NO: 656306 - DNA, 74 bp, Homo sapiens
ctggatgagacatttgctacagcatcccacattaagtcaacggtttcagatctggatcgttgccatttatacct

SEQ ID NO: 656307 - DNA, 100 bp, Homo sapiens
cctgtgtatgctgctcgacttcgttagcatgctggtggtctaccactttcgcaaagcaaagggtggccattcagggcaactggggccttcgtcagttgcc

SEQ ID NO: 656308 - DNA, 75 bp, Homo sapiens
tctgatcgaaggggagtttccacagtgattgatgctgcctcagggttagaaaaaggttcttggaacatcgggaag

SEQ ID NO: 656309 - DNA, 75 bp, Homo sapiens
aagacatttcttcggcattctgcaacaggtggttgctgtatatggaactttatctgatttgctttctgtggccag

SEQ ID NO: 656310 - DNA, 50 bp, Homo sapiens
gagcgcagccatcggtgcgctgcagtgggtaattccagaattgattggcc

SEQ ID NO: 656311 - DNA, 75 bp, Homo sapiens
acacgagacacagaaacaccagctggaggagcccaggaggcccagcaggttgcagatatcaagaaagtcaacaac

SEQ ID NO: 656312 - DNA, 99 bp, Homo sapiens
ccctggacgctgcccgcagcagcatccgcgtcgttcgtgtatcctgtggtctgaggccatcttcctcgaggcaaggccccagaggaggaccaagagcgt

SEQ ID NO: 656313 - DNA, 75 bp, Homo sapiens
ggacaaggagaacaccggaagttggagaagcagtggacgtcagctcagcgaggtcttcatccagctgccctcgcg

SEQ ID NO: 656314 - DNA, 76 bp, Homo sapiens
ccgcatcccctcttattcaagaagcatctatagaggctaaaggcagcagttcactatactgtgggttgtctttgcg

SEQ ID NO: 656315 - DNA, 117 bp, Homo sapiens
caccggctggagcggatcccacacctccggaccgagggacgcggcaccctggaggagaagaggttctgctggaacaagctggtgtagatgcaagtgaaagctttgaagatgtaggac

SEQ ID NO: 656316 - DNA, 100 bp, Homo sapiens
cggggagcgcttggaccccggcttctgggacgcgtcagttgtatcacggactgattcaccgagcccaaccgtactcaactcacatatttctaccccaaat

SEQ ID NO: 656317 - DNA, 100 bp, Homo sapiens
ttgtgaaggagggttggctgcacaaacgaggtactctatcatcacccccaacatcttgcggctggagagcgaggagaccatggtgctggaggcccacgac

SEQ ID NO: 656318 - DNA, 98 bp, Homo sapiens
tgctcgccgtccccgccatgctgtctctagactttttggacgatgtgcggcggatgaacaagcggcagataagcttttcggaaagcggctcctgcagg

SEQ ID NO: 656319 - DNA, 130 bp, Homo sapiens
ctcgctccgtggccttagctgtgctcgcgctactctctctttctggcctggaggctatccagcgcaacatgagtgagaatgaggaagaggaaatttctcagcaagaaggcagtggggactatgaagtcga

SEQ ID NO: 656320 - DNA, 123 bp, Homo sapiens
ccgcaaacttccttcactggtgtagggacattggggttgatgaaacttacctctttgaatctgaaggtttagcgagtaaccagctcataaatcacatcgaacagtttttggatactaatgaaa

SEQ ID NO: 656321 - DNA, 75 bp, Homo sapiens
cgggcctgcaccatgagcgtcccggccttcatcgacatcagtgaagaagatcagctctccacacaaggagatgca

SEQ ID NO: 656322 - DNA, 80 bp, Homo sapiens
ctttggtccccagcgcagtgaagtggtgagcctttttgtcactgataacaacgaacttgatgcaagtgataggtttgcca

SEQ ID NO: 656323 - DNA, 100 bp, Homo sapiens
gtcacggagtacatgagcaagggccacggcatatgcctccaaggacggggtcctcactgaggccatgatggacgcctgtgtgcaagatgctgtccagcag

SEQ ID NO: 656324 - DNA, 96 bp, Homo sapiens
cctcccaaagcgctgggattacaggtgcggaatgacctgactggagttctgtatggcgaggacattgagatttcagacaccgagagcttctccaac

SEQ ID NO: 656325 - DNA, 75 bp, Homo sapiens
tcttcccaagaaagaggacgctttactctaccagagcaaggttgctggatttgtgcgactcggtgaaggatgatg

SEQ ID NO: 656326 - DNA, 101 bp, Homo sapiens
ggagctgaaggatgaccaggtcaaaaagatgttcatgagagcgcagtttgactatgatcccaaaaaggacaatctgatcccttgcaaggaggcgggactga

SEQ ID NO: 656327 - DNA, 100 bp, Homo sapiens
atatgagaaagctaggccatctgaataactttactaaggactacaatgatgaaattcgtcaggaacaactacgtgaattatcttacttaaatggctcaga

SEQ ID NO: 656328 - DNA, 83 bp, Homo sapiens
cccagaagagattcagccaaaccccccatcctctgggatgcttgacaaatttacatgtattggagaccagaccagaagccctt

SEQ ID NO: 656329 - DNA, 117 bp, Homo sapiens
ctcattccattcgatggggatctcttatccatggaatcagagggtgcattcaaaatggtggagccagggcaagatttactgcttgctgctttgagtgagagtggaattagtccgaat

SEQ ID NO: 656330 - DNA, 75 bp, Homo sapiens
tcccagctcggcccgcgggggagccccgggagccgcacgcttccttcaaaatgtctactgttcacgaaatcctgt

SEQ ID NO: 656331 - DNA, 101 bp, Homo sapiens
agcatcgcctactttcttctccagctctgtgcagtgtgcctagaagacttcaagcctcgagatgagttggggatttgcccatgtaagcacgccttccacag

SEQ ID NO: 656332 - DNA, 75 bp, Homo sapiens
ccaatgacaacatttgttgtctgtaatgaatgtggaaatcgatggaagactgaacctccattgaatactccagaa

SEQ ID NO: 656333 - DNA, 100 bp, Homo sapiens
cctcctggacgggaagtgcaccaaactttgagaatcactacaagaaaaactccttgtggtgaaggttctaagacgtgggatcgtttccagatgagaattc

SEQ ID NO: 656334 - DNA, 90 bp, Homo sapiens
acaaatcttgttatgaagatgagtggcagaatttagtgacatttggaagcttttcaaacatggttccctgtagtcatccatatattggta

SEQ ID NO: 656335 - DNA, 80 bp, Homo sapiens
ctctaagcgtcaccatcctgctcctgaacttcctgcgctcgcactggagccttcacgtaaatgggtccagtcatgcctcc

SEQ ID NO: 656336 - DNA, 100 bp, Homo sapiens
gttctgcgctggtcggcggagtagcaagtggccatggggagcctcagcggtctgcgcctggcagcaggtgtcatggagaaactccagctgggcccagaga

SEQ ID NO: 656337 - DNA, 75 bp, Homo sapiens
aggctgcgctaccggaatgtcatccagcgagtgattagtgaatggtagtgtctagaaagggtatgtcccttcaag

SEQ ID NO: 656338 - DNA, 75 bp, Homo sapiens
aaaagatgagcccaggaaaagggaatcccagatcattgagaagcagccaggccacattcggagcagggttttcag

SEQ ID NO: 656339 - DNA, 89 bp, Homo sapiens
tttattattttgaagtaaaaattgtcagtaagggaagagatggacatgaagaggagcatcggcggcgtgaggaagaaatgatccgacac

SEQ ID NO: 656340 - DNA, 75 bp, Homo sapiens
cctgcgctgcactcctgaccgcttccctgaaggctgcacgattgtcatagatgatgcaactatcttaatcctcgg

SEQ ID NO: 656341 - DNA, 101 bp, Homo sapiens
actgattatggctcaggctaccccaatggtacaggtttgcagattccgccagcagcacagcaagctctacagatgagtggctctttggcatttggtgctgt

SEQ ID NO: 656342 - DNA, 75 bp, Homo sapiens
agatgatcatctgatagaagagccaaatttgtatcctactgtggggcttcaaacaccaggagaagtggtcgatgc

SEQ ID NO: 656343 - DNA, 101 bp, Homo sapiens
gatagaaaccgagggagggagagagacagcgatcgagagagaccggagaggtggagagatgctggacgagaaccaccacctgatccagtgcatcctggagt

SEQ ID NO: 656344 - DNA, 90 bp, Homo sapiens
gcgggtgcgtctgccgcagagtcggcacctgaaggacatggagacacgttggtcgtcattgcctccgagcccactttagccctcagctct

SEQ ID NO: 656345 - DNA, 74 bp, Homo sapiens
ggagggatgtttctaacccgagcaatgtctgctcctgaaatacccactattgatcaggcatattcaaaactcag

SEQ ID NO: 656346 - DNA, 74 bp, Homo sapiens
gatggtatttgcaagtcatcagactgcataaaatcaggagccaaaaacctgtatatcatctccgtgaaggggat

SEQ ID NO: 656347 - DNA, 100 bp, Homo sapiens
ttacccgtgctttcccaagcctggaagaactcgtcatgctctttgtagcgtggtgcttctgttgctcacaggtaattttggccagctggtactggattta

SEQ ID NO: 656348 - DNA, 117 bp, Homo sapiens
attaccatggcgaggagtctctgtccgggggcctggctaaggaaaccctattacctccagacaatgcagatcttcgtgaagactctgactggtaagaccatcaccctcgaggttgag

SEQ ID NO: 656349 - DNA, 100 bp, Homo sapiens
tctcattgaaagccactcaacaactctttatgtgacagtcactgtgtgcccagtattctgcagacaaacgagaagatgagaagatgtgtgatcatttgat

SEQ ID NO: 656350 - DNA, 75 bp, Homo sapiens
ggctatgggcccatcgactacaaacggaacttgccgcgtcgaggactgtcgggtatatgaatgacctaaaggtac

SEQ ID NO: 656351 - DNA, 90 bp, Homo sapiens
gtaaccctgccaaatacatcagcttgtaggagacagagcctgttgctcaggctggagtgcaatggcacgatctgagctcactgcaaccac

SEQ ID NO: 656352 - DNA, 98 bp, Homo sapiens
ggatgccgcgtggaagccgaagccgcacctcccgcatggcccctccggccagagccacccagagttccctcactgaagatctgagcatgacccgggac

SEQ ID NO: 656353 - DNA, 100 bp, Homo sapiens
gagagggttgccttttcgtgcaactgaaaatgacattgctaatgcagcacacttctgcttttgttccttcatcaggacgaatttactcttttgggcttgg

SEQ ID NO: 656354 - DNA, 82 bp, Homo sapiens
ctccgacaagacgggcacgctcaccaccaatcagatgtctgtctgccggaggccagtcaccactgcacattttgggacaata

SEQ ID NO: 656355 - DNA, 82 bp, Homo sapiens
ctgcacggatctactcgcactggggggatatgagactttctactcggaatatcctgagtgttgcgtggatgtaaaacccatt

SEQ ID NO: 656356 - DNA, 99 bp, Homo sapiens
gcgtggaccacatagacatttacgcggatgtcggcgaagagttcaaccagattactacaagggaagacataaattcaaagcaggttgctacagtgaaag

SEQ ID NO: 656357 - DNA, 82 bp, Homo sapiens
caccctcgctccctctgctcttcctcccttcgctcgcaccatgacctcctgccccccgaggtctgcagtctcctgaacccag

SEQ ID NO: 656358 - DNA, 83 bp, Homo sapiens
agatcctggtttcgacaggggccagttccataagcagattgctgtcatgcggggccagtttggaagccgaggcaccatcactg

SEQ ID NO: 656359 - DNA, 100 bp, Homo sapiens
gtgaaggcaatgatttataccatgaaatgattgaatctggtgttatcaacttaaaagatgccacctctaagacttttggaaaagaatttgataaacattt

SEQ ID NO: 656360 - DNA, 96 bp, Homo sapiens
agaagggaaggcgcgagtgaggaaaggaggtactgtagagttgctggagaatgtaaccctaatccataaaccagtgtcgttgcaaccccgtgggct

SEQ ID NO: 656361 - DNA, 100 bp, Homo sapiens
gggcgcggctcgggggcgccccctgagcagagacctgtcggccatggagcctaatgatagtaccagtaccgctgtggaggagcctgacagcttggaggtg

SEQ ID NO: 656362 - DNA, 100 bp, Homo sapiens
cgcgggcgtggaggaggtggacatcccgtctaattccgtgtaccgctacccgcccaagtccgggaccattgcaatttagagatgtggccatagaattctc

SEQ ID NO: 656363 - DNA, 87 bp, Homo sapiens
cggcgccgccactgccgcagccaggagatggttcgggcctagcggagccgggactggagaatctcattttcagcttctgccagagcc

SEQ ID NO: 656364 - DNA, 74 bp, Homo sapiens
tacttgtacacctccaaggcttgggtaattccagaattgattggccataccattgtcactgtattactgctcat

SEQ ID NO: 656365 - DNA, 82 bp, Homo sapiens
tctacctaccaatcgtgaaaactatattcacagcatattgagtatcagtgctgatattgaaacaattggagaaattctgaag

SEQ ID NO: 656366 - DNA, 76 bp, Homo sapiens
ctgcatgtgcaaagcaggcttcgaggccgttgagaatggcaccgtctgccgagtaatccatggctgtgtactgaat

SEQ ID NO: 656367 - DNA, 100 bp, Homo sapiens
aggagattgctactctagacaacaagaatacaatgacagattccacaatacttttggaagatgtacaaaaaatgaaagataaaggtgaaatagcacaagc

SEQ ID NO: 656368 - DNA, 75 bp, Homo sapiens
caagaaggggagtgcccgcggcaggtctgataactttggaggaactacatcaacaggtgttgaagggaaggggca

SEQ ID NO: 656369 - DNA, 75 bp, Homo sapiens
cagtgactttttacttgatccatacaaggtctcctctgagcctccggcctccataagacccaaaacagatgacac

SEQ ID NO: 656370 - DNA, 75 bp, Homo sapiens
gacgccctggtgctcaccaagcaagcccgcggcgccatggctcacgtcggctcccgcaagcgctcgaggagtcgc

SEQ ID NO: 656371 - DNA, 97 bp, Homo sapiens
ttccacagggtgatcccttccttcatgtgccagatacagggtatgatacagcatcctacaagaatgagcaaacctattctgatggcaggagattgag

SEQ ID NO: 656372 - DNA, 142 bp, Homo sapiens
tgatgttggagaactacaggaacctgctttctctcgatgaggataacatccctccagaagatgaggagaggagacgccgtgagcgggacgaccagatgtaccgagagcggctgcgcaccttgctggtcatcgcggttgtcat

SEQ ID NO: 656373 - DNA, 98 bp, Homo sapiens
tgaaggcgaggagacggagttctacgtgtcccccgaggatctggaggcacagctgcagtctgacgagagggtgttctaagaacggaagcatctgggct

SEQ ID NO: 656374 - DNA, 50 bp, Homo sapiens
ggcaacttcggggagctccgcctagagtggcaggcaacacactacctttt

SEQ ID NO: 656375 - DNA, 100 bp, Homo sapiens
caaaacttcaagccaaacatcaagcagaatgtgatttgcttgaagatatgagactctgttgacgttcagggatgtggccatagaattctccctggaggag

SEQ ID NO: 656376 - DNA, 100 bp, Homo sapiens
gaggcctccccagccatgtggaacttgtaaacaggaacatcgataagtagtgtaaaaacttgcacaatgaaatccgaagccaaggatggagaggaggaga

SEQ ID NO: 656377 - DNA, 96 bp, Homo sapiens
aatgaagccgcggaccctcgcggtcaaccccacagaggagggcatgagagttctgactcagctggtggccacctacccccagggctttaaggtctg

SEQ ID NO: 656378 - DNA, 100 bp, Homo sapiens
gaaactatggctaaattacatattccagtaatggtggatgaagttgttcattgtttgtcaccacaaaaaggacagaatgtgacagtgatgataacatggg

SEQ ID NO: 656379 - DNA, 82 bp, Homo sapiens
cagcacagttcctgggaaggtggagccaccagcctctccctggtctttcactaccattcctacagtgattggcaagataccg

SEQ ID NO: 656380 - DNA, 74 bp, Homo sapiens
agactgattaaaaatcttggtggttaaagctgaagctcaacaaagatatagtgatctctgtgggcatttataat

SEQ ID NO: 656381 - DNA, 100 bp, Homo sapiens
ggcttatcgaacagagccgggagttcaagaagaacactccagagatgagaccctttttgctcttcctgctgcatctgagcctgtgatacgctcctctgca

SEQ ID NO: 656382 - DNA, 73 bp, Homo sapiens
acgacgagtactggcatgcgcacgtggacaagctcatgatggagcagtccaagaagtcctccctcatggtggc

SEQ ID NO: 656383 - DNA, 75 bp, Homo sapiens
cgtgatccatctggctcctccaatgttgtcatgactggatcttacaataatttcttcagaatgtttgacagaaac

SEQ ID NO: 656384 - DNA, 101 bp, Homo sapiens
ctggagcctcagttggaagcagccgatccagcctgcggagcctgtggggcagggcttttttccagacttcaagctcccattccaacagtaagagcttcttc

SEQ ID NO: 656385 - DNA, 82 bp, Homo sapiens
ccaaggtcctgggcaggaccggttctcagggacagtgcacgcagggggatatgagactttctactcggaatatcctgagtgt

SEQ ID NO: 656386 - DNA, 75 bp, Homo sapiens
cagaagaagggaaggcgcgagtgaggaaaggaggtactgtaggcccagacatgtccgtccttgtaagttaaaagc

SEQ ID NO: 656387 - DNA, 148 bp, Homo sapiens
ctacaactcgcccaccacgtccagcttcaccacgcggctgcacaactgcaggaacaccgtcacgctgctggaggaggcatgtgaaactattgaaccttcctgctagcctccggccacacaaaatgaaaagcttgctgggtcagaacgt

SEQ ID NO: 656388 - DNA, 100 bp, Homo sapiens
tgcgctgttcgtgctgctgggattcgcgctgctgggcacccacggagcctccggggctgttacagaatgtctgaaggggacagtgtgggagaatccgtcc

SEQ ID NO: 656389 - DNA, 82 bp, Homo sapiens
ttcgagtgacccgggtgccgaggagcgggaagagttgctgggggtaattttatggagtgtcagcccgagagcagcatctctc

SEQ ID NO: 656390 - DNA, 100 bp, Homo sapiens
ggaatgatagctggggttcttttgacctgagggctgctattgtatatcacactaaagcagtgagcccaaagagatagttgaaaagtccaaaatcccaggc

SEQ ID NO: 656391 - DNA, 99 bp, Homo sapiens
cttcaagatggcggtgcaggagtcggcggctcagttgtccatgaccctgaaggtccaggagtacccgaccctcaaggattgttaaaatgagtcttcgga

SEQ ID NO: 656392 - DNA, 80 bp, Homo sapiens
agaaggatcgtctggtacagcagcttaagcagcaggttgtctgcattcaaaagagcattctattaaagctaccttaattt

SEQ ID NO: 656393 - DNA, 130 bp, Homo sapiens
agcgtagagtcgctggagcgggcggagctgtgcgagagcctcctcacttgggtttgtctacagattttgagcgttcgaagttgacccctgactaagtatactttgctgctccctcagcctttgaaaaaat

SEQ ID NO: 656394 - DNA, 100 bp, Homo sapiens
cagccgtgaagcaagtgcagatagatggccttatgtacagatcagctctcaaaatgtcttctgtgtcttctgagcgtcttctaagacaattgcattagcc

SEQ ID NO: 656395 - DNA, 100 bp, Homo sapiens
tgaccaatttaaagaagcattaatactcatcttgtccagaactctgtcaaatgaagaacactttcaagaaccaggaatcacctcctcatgtagaaaatta

SEQ ID NO: 656396 - DNA, 100 bp, Homo sapiens
ccggtccgcgccgacccttggggctgctccagagtcctgggctaccgacaggctctacagctccgcagaattcaagctgattggggccctggtcctgtct

SEQ ID NO: 656397 - DNA, 60 bp, Homo sapiens
atgcagctgatgcagtccgagagctagatggaaggatgctggatgagtactttgaggagc

SEQ ID NO: 656398 - DNA, 100 bp, Homo sapiens
gtacagagtaggagaagccagatcccagggcggacaacgagaagtcgtcaggtgcaatggatgagcttcatagtctggatccaagaaggcaagagttatt

SEQ ID NO: 656399 - DNA, 75 bp, Homo sapiens
atcctgggcttccccatctggtgcttttcccatggagaacacacaaccagagaactgcgctatcctcaaggagct

SEQ ID NO: 656400 - DNA, 76 bp, Homo sapiens
cgttccttgtcctccctctgcacaaggtgtacagagccagtgggccggatggagccactggcagaggccagagaat

SEQ ID NO: 656401 - DNA, 87 bp, Homo sapiens
aatgatagacttaaaatatttcccatattatgggaaaaaactgcatggtgccaagaagagtgctattggtcagcgcattgtggcaac

SEQ ID NO: 656402 - DNA, 75 bp, Homo sapiens
ggacggggagctgaacgtggacagcctcatcacccggctgctggagggctcacgaggcccagggaatcctctgga

SEQ ID NO: 656403 - DNA, 100 bp, Homo sapiens
gagcatagtgggagagattgtaagctccctaagccagtgggtccatgcctgtgacactctggagttgaagcctcaggaccgtgagcagcttgacgccttc

SEQ ID NO: 656404 - DNA, 90 bp, Homo sapiens
gtgaaactcgatcctccggatattacctgtggagaccctcctgagacgttctgtgcaatggtctaacataagaccagactatgcagactc

SEQ ID NO: 656405 - DNA, 78 bp, Homo sapiens
aggattccaagtaactcttatttgaggcctggcactgtggactcggtgttgtctagcagagaggccttgaggaagtgg

SEQ ID NO: 656406 - DNA, 75 bp, Homo sapiens
ctcatctttgaactactgccggagcttctgccaggtgcagcagtaccgcgtcgccatgactgccaaggactgctc

SEQ ID NO: 656407 - DNA, 96 bp, Homo sapiens
gccccttcaagccggatcactaccgctactgagagccagacagagggagttacaaagcgtttggcagaaaagaatgactttgtgatcttcctgttt

SEQ ID NO: 656408 - DNA, 100 bp, Homo sapiens
attttacacccttggagaatgtgggctcatatccttttcagactacattttcctcacaactgttctttccagtattctctgaaaccaaatgaccaaatct

SEQ ID NO: 656409 - DNA, 90 bp, Homo sapiens
cggcctctcctaccagtctgcctggctcacggtgctgccaggcctcaagctccggggaaaggacattggaaagcccatcgagaaggggcc

SEQ ID NO: 656410 - DNA, 75 bp, Homo sapiens
atggagaacaagcccatcgtcacctggccgttgctccagggagaactgcaaatatcttcatccacccccacattt

SEQ ID NO: 656411 - DNA, 75 bp, Homo sapiens
cagaggatgaagaggaggaacgggaacatgaagtgatgacagctggcagtactccaaagattcaggtttactcac

SEQ ID NO: 656412 - DNA, 82 bp, Homo sapiens
ataaatctcgcccaaacaggaaagaccaaagagaaccctgtacagtaagaaatatggtgtggacctcatcagatacactcat

SEQ ID NO: 656413 - DNA, 100 bp, Homo sapiens
atatccgcagggttcggatgagaccagatgatgattattctccaccgtctaagagaccaaaggccaatgagctaccgcagccaccagtcccggaacccgc

SEQ ID NO: 656414 - DNA, 100 bp, Homo sapiens
cttagaaccgcagcagggacgtcggtttgctatcgggactcggcgaggacggctcagtagatgaaggcgtttctgagggcttgcctacacttcaaagcac

SEQ ID NO: 656415 - DNA, 100 bp, Homo sapiens
ccatgctggcacaaggatctcaggtgctagagtccacgccacccccacatgtgatgagagatctcactgatgaaaaggcctccaggtttttcacctttcc

SEQ ID NO: 656416 - DNA, 50 bp, Homo sapiens
gcccacagctcctggagccccacaggaaatctggcattttttaaagtttg

SEQ ID NO: 656417 - DNA, 100 bp, Homo sapiens
cgtcaaattttccagtggttattatgacttccttgtcgaagttgaaggtgacaaccggtatattgcaaataccgtagagccaaatttgtatcctactgtg

SEQ ID NO: 656418 - DNA, 50 bp, Homo sapiens
cctctgatcaaagcccccaagagagagcgtttcccaaagtgtattctgcg

SEQ ID NO: 656419 - DNA, 75 bp, Homo sapiens
agagatggacggtcactcagcctatggagcccagaagaatcagtgcggtttctgtggcagagcgagttgcatttg

SEQ ID NO: 656420 - DNA, 74 bp, Homo sapiens
agcccagacagcggccacctcaaggatgttcaagatccttcagtatttgtaactttccctttggaagaagatga

SEQ ID NO: 656421 - DNA, 100 bp, Homo sapiens
taaaaccacaggaaaacgtacttctgatgtcggtgcagatctcttgtccatgtgccagcgaaacattgccctcaacagccacctggctgccactggaggt

SEQ ID NO: 656422 - DNA, 100 bp, Homo sapiens
ggatccccgagttgatgatgacagcctgggcgagtttcctgtgaccaacagtcgagcgcgaaagaagaggacgagtcagcattaaagaggagcgagcttg

SEQ ID NO: 656423 - DNA, 83 bp, Homo sapiens
cctggcgatcctgggcggcgtggaggggcagcctgcctttgacgacccctatgccctggtggtgctggctgaggaggagctgg

SEQ ID NO: 656424 - DNA, 100 bp, Homo sapiens
tctgccacccacctcccggggctggccggctgtggggagccaggcggccgcagatacacaatcatcatcttactagttctctgtgttgctcgctaaccag

SEQ ID NO: 656425 - DNA, 83 bp, Homo sapiens
cggggttcgggtgtctcgtgtgtgaacatcacagaatttcgctaaggagtttgtgatcagtgatcggaaggagctggaggaag

SEQ ID NO: 656426 - DNA, 90 bp, Homo sapiens
cagcacctcaggaaaggtactggcgcgtgcggctgatcacctcaggaaaggtgaaaggtgtagcagtcactcggcctacacccacagcat

SEQ ID NO: 656427 - DNA, 98 bp, Homo sapiens
cggagccgacgggcggtggccgcactgggaccccggaatcccgcgcgctgcccacgattcgcttctgagatcctaagtatatcactgcagcctgtgag

SEQ ID NO: 656428 - DNA, 75 bp, Homo sapiens
tctggatgggcctcagcaaggtcaaggagtgtactaatggtcacttgatgtgcgctggctgttttatccacctac

SEQ ID NO: 656429 - DNA, 82 bp, Homo sapiens
gccgaggagcgggaagagttgctgggtgtcaacagcatctccaccctggagcctgtgagccggtgccagcgcctgagtgagc

SEQ ID NO: 656430 - DNA, 98 bp, Homo sapiens
tgggaaccgctcgagcctaccagaattgccaagaagatgcttttagaagaaattaaagccaatctttcctctgatgaggatggatcttcagatgatga

SEQ ID NO: 656431 - DNA, 103 bp, Homo sapiens
gcgggagcacctgggggaccgcttgcagcggggacgcgaggacccgggctgggctttcctcacccgggttgaagctccattcataccaaagtttagaggctct

SEQ ID NO: 656432 - DNA, 87 bp, Homo sapiens
cggaacaccattcttcgccaggccaggaatgtgtggcaaaacatgttggagatgccctcaaagaacatgcttccagatcatctcgaa

SEQ ID NO: 656433 - DNA, 100 bp, Homo sapiens
ctcatcatgaccttccagaattacgggcaagcgctgttcaaacccatgaaattcccgacagttaagcaatggggagacatttggctttgctcctgcttct

SEQ ID NO: 656434 - DNA, 99 bp, Homo sapiens
gaaaaggtgtatatcggaaaattaaatatgatccttgttcagattcaagatggaaaaggtgatgtaaccattacaaatgatggtgctaccattctgaaa

SEQ ID NO: 656435 - DNA, 82 bp, Homo sapiens
ctggaaaacacgtaccccgggcagtttttgtggatctggagcctacggtcattggcatcacgttgggtggtttccatttaga

SEQ ID NO: 656436 - DNA, 100 bp, Homo sapiens
cggcagccccacagggccgggtgcctggactgctagcaagctgggcggcattccgggagcgcatgaacctgaaggtgcccatctacttctccacggggct

SEQ ID NO: 656437 - DNA, 90 bp, Homo sapiens
ccggaggcagagcggctgccatgggagaagagaagtttacctttattgagaaatgtaacaaccctcgttctgtcacattattgatcaaag

SEQ ID NO: 656438 - DNA, 100 bp, Homo sapiens
ccacagcagcctcccaaggagtctgcaagttggtactagcaaaggccagacgtcttactcaacaacttccctgccaccacctccaccatcccatccggcc

SEQ ID NO: 656439 - DNA, 100 bp, Homo sapiens
cacatgacatggagtgtgaagctggatgatacagcaattttggcaataactcttatcactcctcaagaccctcatctggatccagtgtgcccaccacccc

SEQ ID NO: 656440 - DNA, 90 bp, Homo sapiens
agtgaataaagatttggaatttcagctccatgaaccatttcttctgtatagaaatgcaagctgccggagcctcaacagaaagctccttta

SEQ ID NO: 656441 - DNA, 83 bp, Homo sapiens
aagattatttcagagcaaggtcgtgcggtgtgtgtagaagattttgtccatcatgctgtactcctcaaaaaaggagatcaacg

SEQ ID NO: 656442 - DNA, 75 bp, Homo sapiens
caccaatggaagcagctggcttcactgctcaggtcggcacagacgcaacccagtctcctcccacctccgagagtg

SEQ ID NO: 656443 - DNA, 99 bp, Homo sapiens
cagacagacaagacaaatgtgcccttggctgggatcaccaggagaaattgcagctgcatgaatcccaaaaagcagtaagccgaaaggatgaagagttag

SEQ ID NO: 656444 - DNA, 100 bp, Homo sapiens
cttttctatttgtgaaattaatggcatgatccttgtaggactctggttaattcagtggctgctcttaaaatacaaagcattacagcattgtgaagaactg

SEQ ID NO: 656445 - DNA, 102 bp, Homo sapiens
gacttttggggggaaactaggtcgatggtcggcggcgcccggatgggcagctgaggtgacaaccagggcatccccatcatgtccagcatcaagctgaaagag

SEQ ID NO: 656446 - DNA, 75 bp, Homo sapiens
gctgctttggaaaagacctattatgagaggcttccatatcgaaattcatctgttgccatgggagcctcactttct

SEQ ID NO: 656447 - DNA, 75 bp, Homo sapiens
tcaggactctcttccagcatggccgaagacacctattcacacaaatcctcactatggatgggctcattgaggaca

SEQ ID NO: 656448 - DNA, 104 bp, Homo sapiens
tctctccctctgcccccccttccccacgcaaccccagatccatttacactttacaatggtcagtaggacagaaggtaacattgatgactcgctcattggtggaa

SEQ ID NO: 656449 - DNA, 98 bp, Homo sapiens
tgggtttcccaagcaaggttccttggaagaagatgtctgcagagggctgccaggcgcccagctgtgcccagatggatgggacagagacccggcagcgg

SEQ ID NO: 656450 - DNA, 85 bp, Homo sapiens
ttgaagtaaatagatcttgccctgagcacccttcagattaagcgtcagcttcctgttttatagcattatctgcatatcagagata

SEQ ID NO: 656451 - DNA, 99 bp, Homo sapiens
gcacgtgtttgcggttcagccctttgatgaccgcagcaggtgtgagcctcagcagcgatttcattgctggcttttgtggtgagacggaggaagatcacg

SEQ ID NO: 656452 - DNA, 100 bp, Homo sapiens
actgcaaggaacaaaatgtttgtaaattctccttttaccaaggttgaaatcacaaagattagacacctttttagataggtgttcttcagcaccactgaca

SEQ ID NO: 656453 - DNA, 82 bp, Homo sapiens
ctgccccagaatgtcctggacacctcgtggcccacgcccccacctgccctgcgtgaggtactgctataaccagaatttggta

SEQ ID NO: 656454 - DNA, 101 bp, Homo sapiens
ggaaaaccgaagttggaagtgtctcttagcagcgcgcggagaagaacggggagccagcatgatctccttctgtccagactgtggcaaaagtatccaagcgg

SEQ ID NO: 656455 - DNA, 126 bp, Homo sapiens
caactgtgaccgatttaaactgcacataccatatgctggagagacattaaagtatgatgatgtgcctgcagatatggttgcagaagaatcaggtcctggtgcacaaaatagtccataccaacttcg

SEQ ID NO: 656456 - DNA, 51 bp, Homo sapiens
gttgatattacaaccagtgacactgcaggtgataactaccccgtacagttc

SEQ ID NO: 656457 - DNA, 99 bp, Homo sapiens
agaaaaatgggtgaagcaaatgataaaccgcaataaggtcgtcaaggtgacagcaccagaagcccaagcaaagaacagctttgctgagccatcaaggtc

SEQ ID NO: 656458 - DNA, 90 bp, Homo sapiens
cgagagcgtgaccgagagcgcgaatatcgtcatcgttagaagatgattgccttgctcagtgtggcaaagattgcaaatcttactgctgtg

SEQ ID NO: 656459 - DNA, 51 bp, Homo sapiens
aagcgtttcagcgcctacaattacaggaccctaaagtaaattggttgaaga

SEQ ID NO: 656460 - DNA, 80 bp, Homo sapiens
cgaaggtctcgtagagcttccttagaagaggatcacctagcccgggtagaagaggcaatcacccgtatgcttgtgtgtgc

SEQ ID NO: 656461 - DNA, 82 bp, Homo sapiens
cacagtgccaaatggagctggaagcagtccagtgggtactccaaagattcaggtttactcacgtcatccagcagagaatgga

SEQ ID NO: 656462 - DNA, 98 bp, Homo sapiens
cggcggtggcgagaggtgcggcgaaggaggcagaggcacttatgcttgtcagggcggcgactggcggcgcgatggacctgaccgggctcctgctggac

SEQ ID NO: 656463 - DNA, 100 bp, Homo sapiens
gttgaaagcagataccccgaggcctcgcccagcctgcgctggagggaagaaggcgctggagactcctgaaacagactactctttgcctttttgctgcagt

SEQ ID NO: 656464 - DNA, 83 bp, Homo sapiens
tcgcgcctcccattgcagcctttgtgataactgcgtaggtgcagagcattgtagaccaaggagccatggataggagaagtatg

SEQ ID NO: 656465 - DNA, 100 bp, Homo sapiens
gacatccgaggtgcctttctccaaaaggttctggttaccacccaatgtcacgtggacagagctagaagaccgggatggccgtgtctacccccacccccag

SEQ ID NO: 656466 - DNA, 76 bp, Homo sapiens
ctcacctgtgcgggatggaacaaaagatgcccagcctacagagtctgagaaggaaatttataatcaggtgaatgta

SEQ ID NO: 656467 - DNA, 100 bp, Homo sapiens
gaggaagaggaaagtggcctccggggaagccagagctgactgaagtgctcccaaatgtgtcagaagaaacagtgtctcccaccagagcacggaacatgaa

SEQ ID NO: 656468 - DNA, 100 bp, Homo sapiens
agtgtgtacgtggtgggggcttcctcggtggcgggcatggaggcttcgcgctgccggctcagtcccagcggcgacagtttctcaagtcaaagaaggccct

SEQ ID NO: 656469 - DNA, 83 bp, Homo sapiens
cacatactcaccatacctcccctgtccagaaaagctgccttatatgcgtgagcgagtgctgtgctttcatgggcctcttcttt

SEQ ID NO: 656470 - DNA, 100 bp, Homo sapiens
agcacacaggaccaggctgcgagaacagcacctgcagcagcatgagagtggtgtagaaggtgagagctgctactaccactgcgttctgtgcaactactcc

SEQ ID NO: 656471 - DNA, 100 bp, Homo sapiens
caagtatgtggaagccaaggactgtctgaacgtgctgaacaagagcaacgaggactgtatctgggaaaccccatggacccccccgacctcctgagcgtgg

SEQ ID NO: 656472 - DNA, 100 bp, Homo sapiens
aggggtgggttccagctgcccgcacgccccgaccttccatcggccaattcctgtccccccagcagcatggcatcgtgtgctgaaccctctgagccctctg

SEQ ID NO: 656473 - DNA, 100 bp, Homo sapiens
caacctgcagcacatcagcgaccgggagaacatagacggtgatggatgtggacacactgtactaggccctgagagtggaacccttacatccataaactac

SEQ ID NO: 656474 - DNA, 82 bp, Homo sapiens
tgcgatccatgcccatccgaaaggatgatgaagttcagattgggaatcaagatgggaaaacaaggaattatcaacaaagaag

SEQ ID NO: 656475 - DNA, 75 bp, Homo sapiens
aaagaagagaaagacaaggatgaccaggaatgggaaagccccaggaactaagttttaatggcaaacctacagctt

SEQ ID NO: 656476 - DNA, 109 bp, Homo sapiens
agcgtccctccctctcaaccacaataacaggcggagggtcggcgtagggctcaaaatctccttcgccaagaccaaacatgcctgttcgatacttcataatgaagagtag

SEQ ID NO: 656477 - DNA, 100 bp, Homo sapiens
cgggcccagcccggcctagttcaggaacttacaatgtctcagaaaaatggtgggaatgttcttcagatgatgtatgagaaacctgaacgatggtctttta

SEQ ID NO: 656478 - DNA, 90 bp, Homo sapiens
cccgacgcaaaccaaggatctggggatcttcgcactatcccaagggaaaccctcagggaagaggaggaggagaaaaagcagctttctcac

SEQ ID NO: 656479 - DNA, 82 bp, Homo sapiens
cactgctgctccgtggagatcgtcccgcgcctgccgtgtccttgaatccgacccctactttgggtttgaagaagcaaagagg

SEQ ID NO: 656480 - DNA, 100 bp, Homo sapiens
ccccagagaccctatgcaacgggcagctgggctgcagtgaccccgctttcctcacgcccaggtcaaaatgcagatcttcgtgaaaacccttaccggcaag

SEQ ID NO: 656481 - DNA, 74 bp, Homo sapiens
acctcgagcggctgctggacgaaggtgtttcccattaaacactaccaggacaaaatcaggccttacatccagct

SEQ ID NO: 656482 - DNA, 75 bp, Homo sapiens
gatgacacccaggaggcatttgaagttccattctggacatggcaagacatgtgccactctatcgggcactgctgg

SEQ ID NO: 656483 - DNA, 75 bp, Homo sapiens
tctaccagagcatggtgctcttcttcttcgagaattacaccggggtccagaacaaaatccagtctcatagcagag

SEQ ID NO: 656484 - DNA, 100 bp, Homo sapiens
ggaggatcgcggagtcccaatgaaacgggcagccatggccctccacagcccgcaggttatcaatactctggctgaccatcatcatcgtgggactgacttt

SEQ ID NO: 656485 - DNA, 100 bp, Homo sapiens
gagatccctattcctccaggcctctaacaaggggtgaaatcggctgctttctcagccactactcagtctggaaagaggtgtatttcttacagtgtcgtag

SEQ ID NO: 656486 - DNA, 80 bp, Homo sapiens
ggtgccgggggtcgctggctctgctgctgccgccggcgaaggaggaggcgttgccggggaataaccagcaagtacctgtc

SEQ ID NO: 656487 - DNA, 96 bp, Homo sapiens
atgatccagttaaactttttaccaagaaacagggaaacagccttgcagctgaggactggtgtgaaggtgctgatgactggggaagtgatactgagg

SEQ ID NO: 656488 - DNA, 100 bp, Homo sapiens
gctgggatgtgccttagaggattatggagatgagtatgaagaagatggattctgtcagccatacagagggattgcatgtgcaagatttattggcaaccgc

SEQ ID NO: 656489 - DNA, 100 bp, Homo sapiens
aaagggaagaaggcgcggtggcaggagctgacagagtgatgggaaacgcgtgagccaggccgagagccattccacagattttgaagtacaccgaaactgg

SEQ ID NO: 656490 - DNA, 96 bp, Homo sapiens
gcgcctccttgatcaccaggataatattctctcattgattaatgtcaatggtaatggaactgctggtccatctgaataaacgtataaaaagccgcc

SEQ ID NO: 656491 - DNA, 75 bp, Homo sapiens
tttctatagtagatatggaggaggtccaagactaactggttgaatttagtattagtgacaaacagaggcctggac

SEQ ID NO: 656492 - DNA, 100 bp, Homo sapiens
cctccccctcccggccaagatgtctgacatggaggatgatttcatgtgcgatgatgaggaggactacgacctggcgctaatgtgcatgctacaacagcaa

SEQ ID NO: 656493 - DNA, 95 bp, Homo sapiens
gatagagacatatggaccacatgttcctgagcttgagatgctaggaagacttggaactacagttcctgaggaagaactaaatccaaagatactag

SEQ ID NO: 656494 - DNA, 100 bp, Homo sapiens
tacaacccgcgcttctggccgcgggaaggagaggtgtggacattgcaagcagtttgctccggaatatgaaaaaattgccaacatattaaaggataaagat

SEQ ID NO: 656495 - DNA, 100 bp, Homo sapiens
gggaccatggccgatcctcgcgtgagacagatcaagatcaagaccggcgtggtgaagcgatagggccagatttgagtgtgtgaatttttgagtgaaacct

SEQ ID NO: 656496 - DNA, 100 bp, Homo sapiens
gggaagtggagtatttgctgggccgggtaccatggacgtgggcgaacttctgagctaccagatggctcagcgacttcttctgaggaggttcctggcctct

SEQ ID NO: 656497 - DNA, 100 bp, Homo sapiens
ctgccctgccctgcgcccggggcgcgcccaccgcgccgcatccatgttcgaagtgtgaacatggctacgcctcttcattcccgtccatgccgagcccccg

SEQ ID NO: 656498 - DNA, 75 bp, Homo sapiens
ctggaacttgccctgtctcctcgcagatgagagccctgaggatgatgacaggaaggtccgaaggagagaaaaaaa

SEQ ID NO: 656499 - DNA, 95 bp, Homo sapiens
atggtcagctactgggacaccggggtcctgctgtgcgcgctgctcagctgtctgcttctcacagaatggctgcagtctgtccaggccaccatgat

SEQ ID NO: 656500 - DNA, 82 bp, Homo sapiens
cttgatccagcggacttacgggatattagaaatggctactccccagtcaattttcatctttgcaatctgcattttaatgata

SEQ ID NO: 656501 - DNA, 75 bp, Homo sapiens
caggcccagctgaccacctcctgctgcagctctactctggacgcctgcagaataatgcatatactgccatgtcag

SEQ ID NO: 656502 - DNA, 51 bp, Homo sapiens
cgtctctcccgccatcatcttcatacttccgggtcatcctcctcctcctcc

SEQ ID NO: 656503 - DNA, 75 bp, Homo sapiens
caaagtgccatgtctttaatatcaccgcagacctgctgtccaacggcatcgacgtgtacccccagaaggaatttg

SEQ ID NO: 656504 - DNA, 96 bp, Homo sapiens
catagattgtgtaggcgttggtcttctgatagcaactttaatgtggataccgcccaccaccattttcagaaaagttctttctagtagtaattgaga

SEQ ID NO: 656505 - DNA, 74 bp, Homo sapiens
gcagcagtagctatggcagtggcagaagattttaattagaagcgaatttatttcagacttcgaaacaaagcaac

SEQ ID NO: 656506 - DNA, 100 bp, Homo sapiens
ggcctgggccccgggtccccaagacccttgtgctcgttgtcgccgcggtcctgctgttgctgtggtcgccaggacccccccagagccaagaccttctcca

SEQ ID NO: 656507 - DNA, 98 bp, Homo sapiens
ctcggcctcggcctccgacacgctgtgtcagcgtgttatgatgccgtcccgtaccaacctggctactggaatccccagtagtaaagtgaaatattcaa

SEQ ID NO: 656508 - DNA, 102 bp, Homo sapiens
ctctgatgtcaccgcgcggctgcgacggcccaggagcgcgtctcggcgggagcctcaggtgagaagccctaccactgcaactgggacggctgcggctggaag

SEQ ID NO: 656509 - DNA, 100 bp, Homo sapiens
tgaacttgggtctgtcccgggtggacgacgccgtggctgccaagcacccggactgcaagatggaggaaggcgggaacctaggaggcctgattaagatggt

SEQ ID NO: 656510 - DNA, 100 bp, Homo sapiens
aagatactacaaaatcagtttatcaagatgcagaaggaagaacccccatccacgtggccatcagcagccaacacggtgtcatcattcagctgttggtttc

SEQ ID NO: 656511 - DNA, 51 bp, Homo sapiens
cctgaactcaaagatgcccttaaaagctgtgtattcttattacaaccaagg

SEQ ID NO: 656512 - DNA, 87 bp, Homo sapiens
ataaatcagacagaacagttaatcctcaatttaagcctgatctaacccctagaaacaggcaattcagcaacagagctcttcagaaac

SEQ ID NO: 656513 - DNA, 80 bp, Homo sapiens
aagctgtctaaatcagatgactgaaatatccttgccagcacattacagaatatttttgttgaaccttcttgagaattcag

SEQ ID NO: 656514 - DNA, 76 bp, Homo sapiens
caaatgctccttctcctggagacgcaactcaaggcgcttaaattcctagcgaagtgccgtaagaaaaagaaactat

SEQ ID NO: 656515 - DNA, 75 bp, Homo sapiens
cacaggagctgtagagaggaccccggtacatctgaaagccgggaaatgtactatactggcaattgctggagaaga

SEQ ID NO: 656516 - DNA, 90 bp, Homo sapiens
ctcctgccagccccagcccctggagaggatgcaggtccagaggtgtccttctaaagctggtagaggtttcacgagtcatcagggacccag

SEQ ID NO: 656517 - DNA, 51 bp, Homo sapiens
tcccgatccttctctaggtctcgtaggtttgtttaagcatcttaaacacgt

SEQ ID NO: 656518 - DNA, 82 bp, Homo sapiens
cttgtccaggcgggcctcccgtttctggctccgggctgagcttcctggagaagaggaagatacctgaaaaaagcggcagtct

SEQ ID NO: 656519 - DNA, 99 bp, Homo sapiens
aagcacactggtggtggcagggagtctggcagtgatgcctggaaacagtacatgagaaggtctacttgcgcgagccccgccgccgccgagcatggacga

SEQ ID NO: 656520 - DNA, 78 bp, Homo sapiens
atgagggaccgggccaccatccggcgcctgaatatgtataggcaaaaggagcgcagcacccagtcagcttgaagagtt

SEQ ID NO: 656521 - DNA, 83 bp, Homo sapiens
cagccccaaacaggacgaaggcgtgctgaagtaagactttgaccccgacgcaggcttcagtgattgccgcggatcagaagcct

SEQ ID NO: 656522 - DNA, 99 bp, Homo sapiens
gcctcattttggatatctgtgataaagttggtcagtctcgcactggattcagaccaggatgtagcactcaaacttgcccaggagcgagctgaaatagtt

SEQ ID NO: 656523 - DNA, 100 bp, Homo sapiens
ccgcgcgtgcgggattccggcgccgctctccgagctcgatccgctgctcgcacgggagccagctgggtggtaagaatgattgatgttggctgatattgga

SEQ ID NO: 656524 - DNA, 82 bp, Homo sapiens
catttgggcaagaaggagcttgggcagcttcacaacaggcacaataaagacattgccctggtcaacctggcaaacgttctac

SEQ ID NO: 656525 - DNA, 100 bp, Homo sapiens
gatcagtcttggctccctcagaagcatcgtgaaaagcctccttctggttccaaatgtattggtaaaggttttcaaggtgtcatgaaaagatggggattta

SEQ ID NO: 656526 - DNA, 82 bp, Homo sapiens
aaatgaatgtttccatctcttcagagatgaaccagcacccctgcagtggaccatgagtcggtaatgcccactgaggacctct

SEQ ID NO: 656527 - DNA, 100 bp, Homo sapiens
ccagttgatgctcttggaacggacctttctgaaccctagagccttcccagaggaacgctactacagacccaacatgagtgaagtttcctgcaagaaacgg

SEQ ID NO: 656528 - DNA, 75 bp, Homo sapiens
cagggtcacactgggtcggcatgtggagcagctggtggagatgctgccagggtccctgaagagggaagacacgcg

SEQ ID NO: 656529 - DNA, 100 bp, Homo sapiens
gagaaccaggcacccgtgtggttgctaaggatgggctgaagctggggtctggaccttgtgggtttggaggatttgggacaacatctacaactgcaggttc

SEQ ID NO: 656530 - DNA, 102 bp, Homo sapiens
gagaacagccccaatcaccgtccttacacggcctctgatttcatagaagaccgaagccaggacagcacagccgtagcactctcagactctagctcaacgcag

SEQ ID NO: 656531 - DNA, 98 bp, Homo sapiens
aatcaacaacagtttcctgcgcgaccacagctatgcgaccgaaggactacaagtctgaaaattcaaccctcctccccggtgccaagaacagcctgcaa

SEQ ID NO: 656532 - DNA, 95 bp, Homo sapiens
gcctagaagctgtgccgcccccgccagtcggagagcgaggagaaggttgtcacctatgaccacattgggcccaacgtctgcatgggagaccacaa

SEQ ID NO: 656533 - DNA, 97 bp, Homo sapiens
acagtagatccctcccggcttcccggcttcccgtctcgtcaccctctgattgtaaaccatggctgtgtggatacaagctcagcagctccaaggagaa

SEQ ID NO: 656534 - DNA, 99 bp, Homo sapiens
gatcgagagagaccggagaggtggagaggaaattcgaaatgagtcccatgactatcctcatagagtggccaagtttccagaaaacagaaatcgaaacag

SEQ ID NO: 656535 - DNA, 88 bp, Homo sapiens
acagcctggatctcctccatcctgctggccatgctctacgggacagccttgaaaagatcttttgaggtcgaggaggtcgagacaccca

SEQ ID NO: 656536 - DNA, 100 bp, Homo sapiens
cctcccaagtggctgggattacaggcttgggaacaatgggccgaggcattgtcatttcttttgcaagggccaggattcctgtgattgctgtagactcgga

SEQ ID NO: 656537 - DNA, 100 bp, Homo sapiens
ggaggccgtccagcagatggcggatgccctgcagtacctgcagaaggtctctggagacatcttcagcagaggcctaacatcgtgtcccagctcagccaag

SEQ ID NO: 656538 - DNA, 75 bp, Homo sapiens
cggatgtcggcgaagagttcaaccagggatccatatggctttggagacagtcgagattcaaggcgtgatcgatcc

SEQ ID NO: 656539 - DNA, 132 bp, Homo sapiens
agcatctttaatctgccaggcggagggggctttgctggtctttcttggactattccagagagactcactgccacaacgacattgtcaaccttctcctggactgtggggccgacgtgaacaagtgctcagatg

SEQ ID NO: 656540 - DNA, 90 bp, Homo sapiens
ggaacacgaaacagatgccaaccgagaggggcacagactccatcaagatggagaacgggcagagcacagccgccaagctggggctgcctc

SEQ ID NO: 656541 - DNA, 97 bp, Homo sapiens
ctaaggcaacacttccttgaagaaacaagcttacaggtctctgtgccttgcggagaatcctgaaaaaacagcctaacctccctgatgtcaaggtggc

SEQ ID NO: 656542 - DNA, 83 bp, Homo sapiens
ctcagctccgagtccagggcgaggtgaaatgacaatggatgctctgttggctcgattgaaacttctgaatccagatgacctta

SEQ ID NO: 656543 - DNA, 82 bp, Homo sapiens
gaagctgcacgacgtggacttctacaaggcccgcatggaggagctggtgtccgatgccaaccaacatgtcaagtctgccctg

SEQ ID NO: 656544 - DNA, 50 bp, Homo sapiens
ctgaagttccacatgaagacacttgggcatccgtgtacaagatttgcaga

SEQ ID NO: 656545 - DNA, 100 bp, Homo sapiens
tcaactatatttgagcatacccaggtgtcgtgaaaactacccctaaaagccaaaatgggaaaggaaaagactcatatcaacattgtcgtcattggacacg

SEQ ID NO: 656546 - DNA, 96 bp, Homo sapiens
atgtccttaccagctttgacaatacaggaaatgtttgttttataggatcacattgacaaaagtaccatggagttttatgagtcagcatattttatt

SEQ ID NO: 656547 - DNA, 74 bp, Homo sapiens
gagacaacgccttaacccaaggaagtgactcaaactgtgagaacttcagatgcagcaaatattttggtgatggg

SEQ ID NO: 656548 - DNA, 75 bp, Homo sapiens
tggacagacaaaaaatgatttggtggtcagcttgcctgaggagtcacttatataagaagaaccttgatgtgacca

SEQ ID NO: 656549 - DNA, 98 bp, Homo sapiens
cgacccggcctcctagggggtcgtcgtggtccagacagtttagcagaacagcctccgcggctccggggagaaggtacggacattgctgcaggagaaga

SEQ ID NO: 656550 - DNA, 51 bp, Homo sapiens
ccgagcccgtcaccctgagatggagtcccgcagcccccggaagccaataga

SEQ ID NO: 656551 - DNA, 97 bp, Homo sapiens
gagaggattttccacaagatttacatccagaggcacgacaatgtgagctgccactgcagagccccgccatggaagacacgccgttggtgatatcgaa

SEQ ID NO: 656552 - DNA, 100 bp, Homo sapiens
tattcatcatgttgtatccagttgcctctgttgaccaggttcttcagtgccgggggaagacatttccctccatccacctgtggacccggctcctgtcggc

SEQ ID NO: 656553 - DNA, 75 bp, Homo sapiens
gaagcttcaccgagtgcagatacaactatactgtttgtaaaaggagaagccactgaggcggctcccagctgcgtt

SEQ ID NO: 656554 - DNA, 75 bp, Homo sapiens
cgagccggagccgagtctgcgcctgggggattttttatcaagcagaaatgcatcgaacaacgagaatcaagatca

SEQ ID NO: 656555 - DNA, 51 bp, Homo sapiens
aaaggaaggaatatatcctgactgattacgctgttggaagctctgactgtg

SEQ ID NO: 656556 - DNA, 83 bp, Homo sapiens
ctgatccgcaagcatgctcagaccttcattgctctgtgtgccaccggtacaatgccagggagtactacgaccacctgcccgag

SEQ ID NO: 656557 - DNA, 111 bp, Homo sapiens
ccgggattttggaggccggggccgcgctgagggcgcccagctgagttgctggagaatgtaaccctaatccataaaccagtgtcgttgcaaccccgtgggctgatcaataaa

SEQ ID NO: 656558 - DNA, 100 bp, Homo sapiens
tacaaacaggacaagcactacggaggacaaggaagctgtgtttgaagtgtcagacactatgagtgccgtgctccaggtggccactggcgtcatctctacg

SEQ ID NO: 656559 - DNA, 75 bp, Homo sapiens
taaatacttgctttactggaaagacccagaatatgccaagtatctaaaatggcgttcaggaagtggcttatattc

SEQ ID NO: 656560 - DNA, 80 bp, Homo sapiens
gagatccacagctaagacgccgggactccctggaaacctagaaatgggcgtctctggccgagcctctttttgtggaaaac

SEQ ID NO: 656561 - DNA, 90 bp, Homo sapiens
ggtatttgcaagtcatcagactgcataaaatcagatgcgtttagcccagcccctgctggtaaccaaggtcctcctccaatgatgggtatg

SEQ ID NO: 656562 - DNA, 50 bp, Homo sapiens
ggcgggtgtcactggggacgttctgagggctctgtgtgctccgggatgga

SEQ ID NO: 656563 - DNA, 100 bp, Homo sapiens
ccgacaggcagacggactcggtattggagctgaaggcggcggcagagaacttgccggtgccagctgaggtgtagaatgagccaaggagactcaaacccag

SEQ ID NO: 656564 - DNA, 88 bp, Homo sapiens
tccaattctgtttactctgaattaccatcagctgaagggaaaatgaaggccctggccactgcagtcatcccccagtggcagaaggatg

SEQ ID NO: 656565 - DNA, 82 bp, Homo sapiens
agaagatcggctgcggcaacttcggggagctccgcctagaatcaagccagggaggacttcaaccaggacatcggctggtgtg

SEQ ID NO: 656566 - DNA, 100 bp, Homo sapiens
cttagaaaatcatccgaagtccatgaccatggattatgagctccagctggcctcatacacctcaggactggaaactctgctgaacatacctatcaagagg

SEQ ID NO: 656567 - DNA, 98 bp, Homo sapiens
gatgttggagaatatgtgcggcattatccacgaggcaaacggctggagcattggatttgctaaaggagcttaagaatattcctatgaccctggaatta

SEQ ID NO: 656568 - DNA, 51 bp, Homo sapiens
cgcctgcccagcaaatgcgaagatgggttgtacctggccattggttcccat

SEQ ID NO: 656569 - DNA, 75 bp, Homo sapiens
cagacagcatatttgagtcatttccttcgtacccacagtgcttcatgagaggtcacagggattatggacccagaa

SEQ ID NO: 656570 - DNA, 83 bp, Homo sapiens
cgcggattcgccgaggcaccgaggcactcagaggaggttttggctacgggcctccacctccaccgccagatcagtttgcccct

SEQ ID NO: 656571 - DNA, 51 bp, Homo sapiens
cgactggcccaagttctttgaaaagaaactggcgatggaatatgagaggag

SEQ ID NO: 656572 - DNA, 83 bp, Homo sapiens
aaagagcgtcgtgtggcagagtaccaggatcatctatgaccggaaattcctgatggagtgtcggaactcacctgtgaccaaaa

SEQ ID NO: 656573 - DNA, 113 bp, Homo sapiens
cgaaccgcagtatcatgctggccaagaagatcatcattaaggacggaggcacgcttcttaatgaagaggataactcagaatcatcggctatagagcagccacctacttcaaac

SEQ ID NO: 656574 - DNA, 51 bp, Homo sapiens
cttggatccaaaaatatgacagggagaaaactaaagttgccaaagttagcc

SEQ ID NO: 656575 - DNA, 82 bp, Homo sapiens
aaacatccccgtcatcgagtatgagcagttcatcgcaggcgtccgagctgggccacagcctgaacgagaacgtcctcaagcc

SEQ ID NO: 656576 - DNA, 100 bp, Homo sapiens
tgtggttattgacatctcttgtatttatggatgttgatgttagtgaagattcacctcctcccctacctgaaagaactcctgaatcgtttgtgttagcaag

SEQ ID NO: 656577 - DNA, 100 bp, Homo sapiens
attggaactaccaagcatgtggctcctggtcagtgtaattctaatctcacggatatcctctgttgggggagaagttgacttaagcacccttccatggtca

SEQ ID NO: 656578 - DNA, 75 bp, Homo sapiens
gaacagctggtagcccgaagtaacatcctgacactaatgtatcagtgcatgcagcacttgctctgaaatttgggg

SEQ ID NO: 656579 - DNA, 75 bp, Homo sapiens
ggccaagtatccgccagtcaataggaagtacgagtgaatcacagtgcattgataacaagtgtagtccctggggat

SEQ ID NO: 656580 - DNA, 75 bp, Homo sapiens
acagaacctagcctatcagctggggctggatgagtaatggacagcaaattatggatgaacctatgggagaggagg

SEQ ID NO: 656581 - DNA, 75 bp, Homo sapiens
ctcattacaactcatcatttgatggtgtatggaaatgaggctgaagctatgtgcatagttgggatgagggctgtg

SEQ ID NO: 656582 - DNA, 142 bp, Homo sapiens
ctggtggtgggcggggacggccggttctacatgaaggaggccatccagctcatcgctcgcatcgctgccgccaacgggattcaaaggattccaaggagaagaataaaatggaaatcctgtacatactagtgccaagtgtggc

SEQ ID NO: 656583 - DNA, 100 bp, Homo sapiens
cgacgctgctggccagggtccagctccgccgcatgcaagagatgattgcaaggatgcaggcgcagatgcagatgcagatgcagggcggggatggcgatgg

SEQ ID NO: 656584 - DNA, 98 bp, Homo sapiens
gaccctgcggaagctcatcgggagcgtggatgatctcctgccttccttgccgtcatcttcacggacagagccgattccacgactcttctttgcgggag

SEQ ID NO: 656585 - DNA, 82 bp, Homo sapiens
gattttgtcagcttgtcgtcaaggcggtgcgtctttctacgtgaataggattttgtggctggccagatacactgcatcatct

SEQ ID NO: 656586 - DNA, 100 bp, Homo sapiens
gaggcggcggcggcggcggcagtgacgtcgccggccccctgtcactatgaggggaaatattttaccctgggtgagtcttggctccgcaaggactgtttcc

SEQ ID NO: 656587 - DNA, 82 bp, Homo sapiens
ccggcctgcgctcccatccacacgctcgggaacccgagcgtcatgttagggtgaagcagaggacctcagtgctgaacatgct

SEQ ID NO: 656588 - DNA, 75 bp, Homo sapiens
ttcaaacagcaagttactgtatgttacaggttggcgatagtattgttcacaaagccagagagaccttggaacgag

SEQ ID NO: 656589 - DNA, 100 bp, Homo sapiens
ttagttatgatgtggactctgatcatgtagacataatatcagatggcaccaagaaagactctgggatggatgatcgttgccagcccaacagaaaatggac

SEQ ID NO: 656590 - DNA, 98 bp, Homo sapiens
ctgctctgaaagctcttcttgaaaaatgcaaagatgtagatgagagaaatgagaccctggtgggcagcagtgggaccattctgaccacaatgcctgta

SEQ ID NO: 656591 - DNA, 82 bp, Homo sapiens
ggcagtctttgcacatcattcgtggggaccctgcagtacctgtgtcacaccatgtctgaccggaaggcagtgatcaagaacg

SEQ ID NO: 656592 - DNA, 100 bp, Homo sapiens
cttgcgggaagcgaggagtttaatgccaccaaactgtttgaagttgtgtgggaattttgctgtcctcgtggatcttcatatcttgccacaaggttcaaac

SEQ ID NO: 656593 - DNA, 98 bp, Homo sapiens
ccaccccggccctgaagaggacactggattccatgaacagcaagggctgcaagatgatgattctgataccgagacgtcaaatgacttgccaaaatttg

SEQ ID NO: 656594 - DNA, 100 bp, Homo sapiens
gtggtcctgggaaagctggaatcaggatctatttgtaaaggccagcagcttgtgatgatgccaaacaaggatattattgctggattcctatataccattt

SEQ ID NO: 656595 - DNA, 100 bp, Homo sapiens
attcactacaaaggcagccccaatgcaaacgaaccacccctggtgtttgttgggaaaggaattacctttgacagatttcactgctcccaccagcttggag

SEQ ID NO: 656596 - DNA, 82 bp, Homo sapiens
cggaggcagaggtggaggcgctttgaaaggtcaccatcagaaaagctaagtttgctgtatagtgaggatcaggagatctgat

SEQ ID NO: 656597 - DNA, 131 bp, Homo sapiens
ctctcctcttcgtctccgccatcagctcggcagtcgcgaagcagcaaccatggaccgtatccttgatgagcttgacaaagacgatagtacccatgagtctctgtctcaagaatcagagtcggaagaagatg

SEQ ID NO: 656598 - DNA, 100 bp, Homo sapiens
aggaaacttacccaaagggaagtcttgcatctagtgagagtgaagctgaaaatcttgaagcacaaccccagtctactgtccgtccagaagagatccctcc

SEQ ID NO: 656599 - DNA, 75 bp, Homo sapiens
cacaggtgaatttaaaggagcagccctggtgtcacctatcagtaaaagatcctcagtttgtggtctgccagctaa

SEQ ID NO: 656600 - DNA, 96 bp, Homo sapiens
gcgctgtgtcagcggagtctggtgtccctggccagtgtccttccacctgtccacaagcatggggaacatcttcgccaacctcttcaagggcctttt

SEQ ID NO: 656601 - DNA, 100 bp, Homo sapiens
cgcgcagcccccggccgcagcgcaggcagcccagcaggctcttgtcaggatggtgaagctgttcatcggaaacctgccccgggaggctacagagcaggag

SEQ ID NO: 656602 - DNA, 100 bp, Homo sapiens
gtcagcctgggcccagccggggattaagtctcatgtccagtcagggcagtgtggactcagaccacctagacctcttaataaaacttatctcgaggtggta

SEQ ID NO: 656603 - DNA, 90 bp, Homo sapiens
aggtctgcttggtgacttggatacagaaatttcctgggctaaagtggttctggaatggagccgagatcaataccatgttttgtttgattc

SEQ ID NO: 656604 - DNA, 74 bp, Homo sapiens
agagatcgatctgtaccgcggggatccgaagtatgcttatccaggattattgcatcgagcttttagtgtcttct

SEQ ID NO: 656605 - DNA, 49 bp, Homo sapiens
gctcattgacttttctgctcagaatttctctgcaaagaatgtccaaaaa

SEQ ID NO: 656606 - DNA, 80 bp, Homo sapiens
gtggataacgggaggtgaatttccatgtcaacatagtcctggtgcagtctttgcaagccacatttggaacttttgagtcc

SEQ ID NO: 656607 - DNA, 50 bp, Homo sapiens
tacatgaagtatcatgtttctgacctgtatgaggctggagagaagaaatg

SEQ ID NO: 656608 - DNA, 100 bp, Homo sapiens
tttgtggctgcctttgttgctgctgcacattaggttgcagtatgtggccagttatttgcctcagtaaaagaatcctaattatctcatggctaatgaacgc

SEQ ID NO: 656609 - DNA, 100 bp, Homo sapiens
attctcagatggcctggaatccaacagcagcacccagtttgaggtgaagaaatatgagctctcggagcagattcagagggccctgcagctggaggaggag

SEQ ID NO: 656610 - DNA, 90 bp, Homo sapiens
ggcaagacgggttcagttcgtcatggggctgtttggaaagacccaggagaagccgcccaaagaactgtcatcgtccgtggttccggacca

SEQ ID NO: 656611 - DNA, 100 bp, Homo sapiens
agatgcaccggacactttgttattggagaaacatgcagattatatcgcatcctatggctcaaagaaagatgattatgagcagtatagcatcaagttctag

SEQ ID NO: 656612 - DNA, 98 bp, Homo sapiens
cgcaagacgactgacctggagatccgggagctggtcacaggtgctggagaatctggtaaaagcaccattgtgaagcagatgaggatcctgcatgttaa

SEQ ID NO: 656613 - DNA, 50 bp, Homo sapiens
cattatttatgaccttttctatggaaagaactggttagatcctgctaaag

SEQ ID NO: 656614 - DNA, 124 bp, Homo sapiens
aaagcttcccggaggaagtggtgcctaagctgtgctctgattcacgtttagaagctgaccagacaaagagaggacctgaaggagaagaaggagaaggtggaggagaaggcaagccggaaagagc

SEQ ID NO: 656615 - DNA, 100 bp, Homo sapiens
gaaggcccatcccatggtggactacctggtgcctctagtgaaaagaacaagaagtcttaccctcaggtcaaagaacttagtgatttggcccgtgaccctc

SEQ ID NO: 656616 - DNA, 50 bp, Homo sapiens
tgaagtgcagaggtttttttctgaaaaagcggatggtggttcctgctgcc

SEQ ID NO: 656617 - DNA, 75 bp, Homo sapiens
ttggcattgacatttaattttagggtcctttatatagaagggagagtaggctgtgctcctggcggacatcctccc

SEQ ID NO: 656618 - DNA, 74 bp, Homo sapiens
tcgaatgggcacacctgtgtaggtgtgatgaatgcagactctgctaccattttggctgtttggatcctcctttg

SEQ ID NO: 656619 - DNA, 89 bp, Homo sapiens
tccccttcctgctagtcctggtggatctgcagtacgaagtgggcagcccatccctcgagtggaatacatggaggaagaaaagaaaacat

SEQ ID NO: 656620 - DNA, 100 bp, Homo sapiens
ggccctggacacagcaatatctctgggctttcacaggtgagaagatgacagaggaagaagtagagatgctggtggcagggcatgaggacagcaatggttg

SEQ ID NO: 656621 - DNA, 147 bp, Homo sapiens
acacgctgtcatcaactatgatgcgtctacggatgagcatttagtgaaggatttgggcagcctcaatgggttactggggcttccggatgcagatgacgatgcgtttgaagagtacagtgctgacgtggaagaagaggagccagaggc

SEQ ID NO: 656622 - DNA, 83 bp, Homo sapiens
caccagccacctccacagtgactttgttgagtgtcaaaacatcctcaaggagctcgaggccatgagcagatataccagcccag

SEQ ID NO: 656623 - DNA, 100 bp, Homo sapiens
cagccggcgcaagcgggcgaaggtggcttcccacacttctgactcggacgttccttccggtgtcactgaggtggtcgtgaagctctttgactctgatccc

SEQ ID NO: 656624 - DNA, 100 bp, Homo sapiens
aagaaaaagcgaaggaatttcgcagagctgaagatcaagcgcctgagaaagaagtttgcccaaaagatggacggcaatggatacatagatgaaaatgaac

SEQ ID NO: 656625 - DNA, 100 bp, Homo sapiens
atctccaggaccagcactcttctcccagcccttagggtcctgctcggccaagcaccagatttgactagaacagtaagcttttctgtttatctgaaaagaa

SEQ ID NO: 656626 - DNA, 76 bp, Homo sapiens
ggttcaccccgtggtcgaggagtcgggcccaatggctgcaaaatcgcaacccaacattcccaaagccaagagtcta

SEQ ID NO: 656627 - DNA, 82 bp, Homo sapiens
cgtgctacggccctgtgggcctgggagctgcctctgaggaacacgccgcaggagccttcacgtaaatgggtccagtcatgcc

SEQ ID NO: 656628 - DNA, 100 bp, Homo sapiens
caaaaaggtttcaggtggagcagatcggagagaataaataccggatattgatgatgttaagaagttcaaaccgggttacctggaagctactcttaattgg

SEQ ID NO: 656629 - DNA, 51 bp, Homo sapiens
ccatcgagccagaagcagtatttgtcctgagcagcccgacggccatggagg

SEQ ID NO: 656630 - DNA, 100 bp, Homo sapiens
ccaatctgggcggcgtgcccagcaagagattaaagatgcagtacgccacggggccgctgctcaagttccagatttgatactcatttcaaagaacttccaa

SEQ ID NO: 656631 - DNA, 49 bp, Homo sapiens
ggagctggacagtttcatctcttgcatatggagtctccctctgtcgccc

SEQ ID NO: 656632 - DNA, 50 bp, Homo sapiens
aatgcaacagccacggaagattaagcagggagatacttcaggggattacc

SEQ ID NO: 656633 - DNA, 106 bp, Homo sapiens
aacaacctggatcttcgaacttttgacacggctttggaaacgacgtcatgtgttaggaactgcaagcacatgttgaccagataactgaaatggcagcagtaatgag

SEQ ID NO: 656634 - DNA, 75 bp, Homo sapiens
cggccccgcccgcgccggaagagccacgccgccgccgccatgatcctgctggaggtgaacaaccgcatcatcgag

SEQ ID NO: 656635 - DNA, 100 bp, Homo sapiens
cccgcgactacagccactactacacgaccatccaggacctgcgggacaagctttggacatcagacagtgcaggagaagaatgtgatgcggcagaaggggc

SEQ ID NO: 656636 - DNA, 98 bp, Homo sapiens
ataagagatgtcagttgcactccttagatacgcacaagccaaaacctttgggacgcaagatggctgtcctctctaaggaatatggttttgtgcttcta

SEQ ID NO: 656637 - DNA, 75 bp, Homo sapiens
ctgtactggctattggaaggaggagattctgaagataaggaggtccacatcttgatacagaaaccccgacagagc

SEQ ID NO: 656638 - DNA, 74 bp, Homo sapiens
tcatctgtcacgccaacgtcatccgctacatcgtgtgcagagaaaggagccgaaaggcgaggccagctcttcca

SEQ ID NO: 656639 - DNA, 82 bp, Homo sapiens
ggacgatggtgtgactgcaaacttcctaattctaagaccatggcaaaagttataaccaccgtactgaagttccctgatgatc

SEQ ID NO: 656640 - DNA, 83 bp, Homo sapiens
ggggacttggggccgcagggaggactgcctccgggcctgccaggagcagatcgaagccctgctggagtcaagcctgcgccagg

SEQ ID NO: 656641 - DNA, 50 bp, Homo sapiens
ctggagaggcactcggacctggctttgtccagggatctgaaaccactttg

SEQ ID NO: 656642 - DNA, 131 bp, Homo sapiens
acgtctccagccaaattcaaaaaggataaggagatcatagcagagtacgatactcaggtcaaagaaccttctgataacttaagagagattctccaaaatgtggccagattgcagggagtatcaaatatgag

SEQ ID NO: 656643 - DNA, 100 bp, Homo sapiens
tccagggtccctgggagagagccatctcgccaaacaaagtgccctactatatcaagataacaaagccattgacctttgccgattgtgttggggacgaact

SEQ ID NO: 656644 - DNA, 74 bp, Homo sapiens
ccttccacaccccctccgtgggtgtgtggtggacgacatccttggagaaggcagcgacgacagcgacagcgaga

SEQ ID NO: 656645 - DNA, 100 bp, Homo sapiens
ttgtggagaatgatctgtacatagattttggtggaaagtttcattgtgtatgtagaagaccagaagtggatggagagtaccagcatcaagatgatttatg

SEQ ID NO: 656646 - DNA, 51 bp, Homo sapiens
cgcgcggcgtgccctgcttgtcacagggttaagtttagagcaagttgacat

SEQ ID NO: 656647 - DNA, 100 bp, Homo sapiens
ctggtctccattatttgagatgagttacatcttggaggatggctgcagctcctccaagttactgttttgttgccttccctccacgtgctaaggatggtct

SEQ ID NO: 656648 - DNA, 50 bp, Homo sapiens
tgaggacttcatcgggtttgccaagtcagcccaaggccaaccccactgtc

SEQ ID NO: 656649 - DNA, 75 bp, Homo sapiens
cggacacataacaagcagcagtgaggacaccaaaggtgccttcttcatcccctacctcgtcttcctctttacctg

SEQ ID NO: 656650 - DNA, 95 bp, Homo sapiens
cctgggaagccaacgaccacacgcatcaccttcaggccattcagaggaggaaagagaggggaatatgaagtcagccaagccccaagtgaaccaca

SEQ ID NO: 656651 - DNA, 82 bp, Homo sapiens
ccgaaactgtcaagattggcaagattaaaaggagcccaagccccatctcatcctagcacaccctcctccactgtcctggcag

SEQ ID NO: 656652 - DNA, 83 bp, Homo sapiens
gccgagtcctagcgcctggcctgcgcgccgctgcccgcgccacagaagcaggaggtatgcgggaacctgacgctgcagcacca

SEQ ID NO: 656653 - DNA, 100 bp, Homo sapiens
aaaatgtccatggaggaattttagctgatgatatgggtttgtggaatactagagcaaagagagagaaactgacagagttaatgtttgaacactacaacat

SEQ ID NO: 656654 - DNA, 100 bp, Homo sapiens
tttctcccttgatccgggagtctttccactgggcaaatgaagaggattcttccagttctctagtgaaggatcacctttttcagcaagagacagttgttac

SEQ ID NO: 656655 - DNA, 75 bp, Homo sapiens
ttatacttgcttttgcttcagcgttctgtggttgtcaacaggtatgatctcgtgaaatcttgagagaaactgaat

SEQ ID NO: 656656 - DNA, 100 bp, Homo sapiens
ttttcagcgagggtactgtatttatggagaccgctgcaggtcacacagcggcagtgataaagagcacagggatgtggagagatctcaagaacaagaatct

SEQ ID NO: 656657 - DNA, 50 bp, Homo sapiens
ctgagcaccgccaccatggggaaggggacggatgtttccagtcctaaaga

SEQ ID NO: 656658 - DNA, 75 bp, Homo sapiens
gttggaagttaagggagacaaagttgaaaacaaagtgctgacttaattcagtgcacaaatgagatgaatgtgaac

SEQ ID NO: 656659 - DNA, 100 bp, Homo sapiens
cagagctgaggactgcctgtttgcagccaagtcattgttggataagcgagatggtagtacaattgtcagacagcttgactgatcttctggacaagttttc

SEQ ID NO: 656660 - DNA, 76 bp, Homo sapiens
gactgtctacaccaatagcaggattggtaattattcgaggtggaggacatattttaccctatgaccagcctctgag

SEQ ID NO: 656661 - DNA, 74 bp, Homo sapiens
tttgctggaggcataacaatgggaaacattggtcgacaactggcaatggcagaaatactcagtgtcctcagtca

SEQ ID NO: 656662 - DNA, 83 bp, Homo sapiens
ctgctgcagagccagtgaactcaggtcgggcttctcagctgcgcacagctgtctgtccccagaccccagagcacgtccggcac

SEQ ID NO: 656663 - DNA, 50 bp, Homo sapiens
cggcgaagtctactcaacgtttccaagatgcacagtaatcaaaagggctt

SEQ ID NO: 656664 - DNA, 87 bp, Homo sapiens
caatctgaaagtcccagccagccaagtgacgctgacattaaggaccagccagaaaatgatgcctgtgaggagccaccaacatttgaa

SEQ ID NO: 656665 - DNA, 103 bp, Homo sapiens
agcctccctggtagctgggattacaggaaagtccatcagcttgataatggaggagaacaatgactccacggagaacccccaacaaggccaagggcggcagaat

SEQ ID NO: 656666 - DNA, 83 bp, Homo sapiens
cagaagatggtgcagaagaaaccagccgaacttcagggtttccaccgttcgttcaaggatattagaaatggctactccccagt

SEQ ID NO: 656667 - DNA, 100 bp, Homo sapiens
gccctggagacacacaggcagacccatactgcatcgtccagccaagcagagaaggagctgacagattctcctgcaacctccaaacgcatctccttcccag

SEQ ID NO: 656668 - DNA, 76 bp, Homo sapiens
atcctgtttctcacatttgtttcattgaagaaatagttaaggatggccaggccatgttatgggatctcaacgaagg

SEQ ID NO: 656669 - DNA, 83 bp, Homo sapiens
ccgcgagctggaggagcaccgcctgcggaaggagtacctggagtacgagtatacgctcaacggcaagaaagtggaagttgccg

SEQ ID NO: 656670 - DNA, 75 bp, Homo sapiens
gtctgccagagcccgtttttagcataaagagagcagcacttgaggcatgtcacaagggctggggcgtcagcgtcg

SEQ ID NO: 656671 - DNA, 98 bp, Homo sapiens
aggagatggatgaaaggagacgtcagaacgtggcttatgagtacctttgtcatttggaagaagcgaagagatcctgaggtgcagaggcaattcccgga

SEQ ID NO: 656672 - DNA, 87 bp, Homo sapiens
cctgagtcactgcctgcgcagctccggccgcctggctccccatactagtcgccgaagtctggacagctgatcacctgaaagagagga

SEQ ID NO: 656673 - DNA, 83 bp, Homo sapiens
agtcaagccgccgcctcgacccagggcccgcgggccaggagagcgctcggcgggcagaagctcctcctggggtagagacagat

SEQ ID NO: 656674 - DNA, 105 bp, Homo sapiens
actatcattgtggcagaacttcagaaggtgcagatgaaggattttcggttttcttacaagtttaaaatggcctgcaaggaggacgtgttgaagctttgcccaaac

SEQ ID NO: 656675 - DNA, 75 bp, Homo sapiens
ggggacgtggcttttgtgaagcacagcacggtactggagaacacggatgggtgtccgcaatgttgccagtgtctg

SEQ ID NO: 656676 - DNA, 100 bp, Homo sapiens
ggagaccaagaaccaggactggagccaggcgatattatcattgtgttagatcagaaggaccatgctgtttttactcgatttagcatgtagactgctgggg

SEQ ID NO: 656677 - DNA, 99 bp, Homo sapiens
ctccagtgtcccacttgcatcaagctgggcatccagggctcgtacttctgctcgcaggatttggagtggatcagttacgagatgacaatctagaaactt

SEQ ID NO: 656678 - DNA, 100 bp, Homo sapiens
tccttgcattcctggaaaaatcaatgtggatcgacgtggaaatattgtctatattcacataaggtaatcaatattatcaatgctgcccaggaaagtagtc

SEQ ID NO: 656679 - DNA, 99 bp, Homo sapiens
cggccagcgcgggcgcggccggagaccgtggggcccccggttgccgccccctcggggtcacggagactcaccagttggcagaattaaatgagaagaaga

SEQ ID NO: 656680 - DNA, 90 bp, Homo sapiens
cttgagcaaagagatccgtccagtctgccgcaagttcatgcaagatgccataggaaaaggatacagagtagagtttcatgaacctgaaac

SEQ ID NO: 656681 - DNA, 82 bp, Homo sapiens
tacaaacataggatgttttggcgagagatgtattcagtggaggaagctgatgtctttggtggacttgggaaagaggttgcta

SEQ ID NO: 656682 - DNA, 123 bp, Homo sapiens
tgcgtgccgccacccgatggaagattcgatggacatggacatgagccccctgaggccccagaactatcttttcgggtctccgtctctccaccgggggcttcatccttccagggaggagaagag

SEQ ID NO: 656683 - DNA, 88 bp, Homo sapiens
ggggtgctggcttctgcatcaatcgcaaactggctttgaagatggctccgtgggccagggagtacctgacaggcttccacaagcggaa

SEQ ID NO: 656684 - DNA, 100 bp, Homo sapiens
ggtggtgcagcaggaggagggctggttccggctgcagcccgaccagtccaagagccggcggcatgacgactatcagttgagggatttgcagttgataaaa

SEQ ID NO: 656685 - DNA, 96 bp, Homo sapiens
ccgacttgccggcagaacttacgctgcgggaccccgggcactgttgctgctgcgggaggtgctgtaacacctgtgaagatgtgcgggaggcatatc

SEQ ID NO: 656686 - DNA, 100 bp, Homo sapiens
aactgccgcctctgacaccagttctccgctggaaaaagggacaaaagattgcccaaaagaatcagtgggcctttggagtgacgctgtgggaactcatgac

SEQ ID NO: 656687 - DNA, 100 bp, Homo sapiens
tacgaaggggcgtttgtggacggagagatcacgggagaaggccgccggcactgggcctggtcaggtggcagtgctccttttggacttttctctaggtttg

SEQ ID NO: 656688 - DNA, 100 bp, Homo sapiens
tcacggagctgaatctgccgcagctagaaatgctcaagaaccagctggaccaggacaggtacagcacaggcagcgacagtgcgagctttccccacaccac

SEQ ID NO: 656689 - DNA, 105 bp, Homo sapiens
ctcatctcccgcctggacctgcacatttgtgatgatagccagtcccgagagccagggtctttacggaataaaggatgatgtcttccttagtgttccttgcatttt

SEQ ID NO: 656690 - DNA, 82 bp, Homo sapiens
cgcagaggcggcggtggcgagaggtgcggcgaaggaggcagaggcacttatgcttgtcagagttgcctcactcacagagctc

SEQ ID NO: 656691 - DNA, 75 bp, Homo sapiens
ggagatccatagggaggacggcggaacatctggaggctgggaaatggattggcctaatgaagaagttcaacctgg

SEQ ID NO: 656692 - DNA, 97 bp, Homo sapiens
tcctgcctcagcctccccagtagctgggactacagctggattgccttttgcaattcttacttcaaggcatacccccttccaacgaggagtattctgt

SEQ ID NO: 656693 - DNA, 83 bp, Homo sapiens
cgcgggtctgctctgtgtgccatggacgggtttgaacggtgtccccgggagcatctgggactttgtttccggcagcttctccc

SEQ ID NO: 656694 - DNA, 83 bp, Homo sapiens
tatcgccgggttcctgcagagggaggtcattcccaaaagcaagttcgtcttggtgaagttcgacacccagtacccctacggtg

SEQ ID NO: 656695 - DNA, 90 bp, Homo sapiens
acgaggcaattaaacatgaagatccttgtgccaaacgtctggccaatgtcgttcgccaagtacaggaggagatgttaaagtaacccatct

SEQ ID NO: 656696 - DNA, 89 bp, Homo sapiens
gcgagcccacgaagaggtacgattccggagaatcgcgaggcagagcgggagcgcgcagccagaccagcatgttttggaaatttgatctt

SEQ ID NO: 656697 - DNA, 75 bp, Homo sapiens
agactagacgcacatcaggaagacagttgtgattcaatgggcatgaattgctgtgtgatgctggggaggtgtttg

SEQ ID NO: 656698 - DNA, 89 bp, Homo sapiens
ctgaaagctgaacagagaattctggcactgcactgggtaggaaaaaggtgcaccgggtataatttcttcaccatatgcaggggctgctg

SEQ ID NO: 656699 - DNA, 103 bp, Homo sapiens
gctgcaacctgcagcacatcagcgaccgggagaacatagacgacagcccacctgaggatattgaccataaggactcatatctcattacaagaagcatcatggc

SEQ ID NO: 656700 - DNA, 74 bp, Homo sapiens
caatggacagcatgcctcaccaagtcacatgacaagcatgattgcctcaccatcctatccatgccattctgcta

SEQ ID NO: 656701 - DNA, 85 bp, Homo sapiens
ggtggacgagcaggaagctgcggctgagtcgccccgacgaagacccatcatgagcaaccacacagctacgcacattctgaacttc

SEQ ID NO: 656702 - DNA, 89 bp, Homo sapiens
ttgatgacctagatggaacacatgctctgatggaatctctgaaggaagaagatgaatcagatgatgataatatgtaacatttactccag

SEQ ID NO: 656703 - DNA, 100 bp, Homo sapiens
tgcaggacttcgtgcgcgccttggaccccgcctccctcccgcgcgtgctgcgggtctgctcgggggtctacttcgagggcggagtctcactctgtcgccc

SEQ ID NO: 656704 - DNA, 75 bp, Homo sapiens
ctactttctgggccaaaccgactgaagatccgtattgatgctatgcatggagggaggcttgtggatcagaatctg

SEQ ID NO: 656705 - DNA, 102 bp, Homo sapiens
aatcttgtttgagaaccccgatcagaatgccaaatgtgtttgcatgctggatgctctacccatggtaccccaggaccagaaggcaaccatatttcagattta

SEQ ID NO: 656706 - DNA, 90 bp, Homo sapiens
cgcgtggccacgtggttcaaccagccggcccgtaagatccgcagacagtggtgaccgaggattttagccacttgcccccagagcagcagc

SEQ ID NO: 656707 - DNA, 100 bp, Homo sapiens
tgtggcaatcatcctgaatgaatttagagccaaactgtccaaggctttggcaaagaggatgtggagaactttgacgtgaccaacttgtctcaagacatgc

SEQ ID NO: 656708 - DNA, 50 bp, Homo sapiens
cagggccaggcgccgctcagaacgctgttgaaaatggacagatagatgtg

SEQ ID NO: 656709 - DNA, 76 bp, Homo sapiens
gttggaagcagccgatccagcctgcggagcctgtggggcagcatcagcgagagctttctaactgtcaaaggtgctg

SEQ ID NO: 656710 - DNA, 100 bp, Homo sapiens
gtgggggatgtctgtgatactaatgaagacaggacatccaggcctgctcggccgcctggaaggctgacggcgtgtgctccaccgtggccggcagtcggcc

SEQ ID NO: 656711 - DNA, 75 bp, Homo sapiens
acacacccaggaaaagactcaggacggacaagcacagtcttcggaagatcctgcgctatgagaatgaggtgttgc

SEQ ID NO: 656712 - DNA, 80 bp, Homo sapiens
ctggccagcattctcctctattagactagaactgtggataaacctcagggcaccatgccggtggaaaggatgcgcatgcg

SEQ ID NO: 656713 - DNA, 87 bp, Homo sapiens
cgggggcaagcggaaggtgatgcccaagatggaccagcttcctgcctgacacagctcacttcaagaagtgcacaatgtcagaacgtg

SEQ ID NO: 656714 - DNA, 74 bp, Homo sapiens
tagcgttcgccttcagccaccatggggaatgggatgaacaagggggggccctcagcctcttggccttgaacggg

SEQ ID NO: 656715 - DNA, 82 bp, Homo sapiens
ttcatgtgctgggtgggggacgtgtaccctgtctaccagcctgtgactggtattgctcgagttccacttgctggagctgccg

SEQ ID NO: 656716 - DNA, 51 bp, Homo sapiens
cgattttaccttggataccctgctttggtttttggtgttgagccagacttg

SEQ ID NO: 656717 - DNA, 100 bp, Homo sapiens
ctgagggaaaagcgaggcaaggcaggcggggatgtgagctcatttcaactcctgatcaagaccacactgactttactaagtgccttaaaatgctccaaaa

SEQ ID NO: 656718 - DNA, 82 bp, Homo sapiens
tctcccgcagcgacgcggctggcaagactgtttgtgttgcgggggccggacttcaagacaatgcagatcttcgtgaagactc

SEQ ID NO: 656719 - DNA, 82 bp, Homo sapiens
cccatctacatcgatctgcggggcatcgtgtctcgaccgcgtcttctgagtcaggtctgtggaaagacttttatctataagc

SEQ ID NO: 656720 - DNA, 102 bp, Homo sapiens
gttacgacagctgcccgcgggcccagcctgacgccatctcacgcctgctggaggacctgcaagcgcaggaccgagcccaccgcatcgggcagcagaacgagg

SEQ ID NO: 656721 - DNA, 75 bp, Homo sapiens
gaatgtgttactccattgctgaggagtgcctctcaacattgcctacagccacatctacagctcctacaggaattt

SEQ ID NO: 656722 - DNA, 74 bp, Homo sapiens
agaattagaaaggagctgcttcccaataaggaaacagaattggattcaagtacgtggctctgggagacctcatc

SEQ ID NO: 656723 - DNA, 82 bp, Homo sapiens
gtccagcagctgttgaagttcttaacctagtagcccaggaatgtagtgctggttacttttcacatagaaccatatagcaatc

SEQ ID NO: 656724 - DNA, 100 bp, Homo sapiens
caatctctagcatcaaagcatggatcagacatcacacgatttttgaataacaagcctttgtattcatttgaagataatgcagactatgtttatgatgtta

SEQ ID NO: 656725 - DNA, 100 bp, Homo sapiens
gctactgctgttgctgctgctcgtaccaaaagaattggtggagctccatttgaagctgatgaggaaaattggcaaatctgttactgcagacagatgggaa

SEQ ID NO: 656726 - DNA, 82 bp, Homo sapiens
cctccttcacgccacacacacgagcaggccgggctctcgccatgggtcactgtcgcctctgccacgggaagttttcctcgag

SEQ ID NO: 656727 - DNA, 98 bp, Homo sapiens
tgaaaagttgcccaaggccaatcacaacaacatccgggatttttgccaagcctgaccatgttaagatgacatatccaaagactcagcttcagcattca

SEQ ID NO: 656728 - DNA, 75 bp, Homo sapiens
agattcgcagtggtcgcttcttctccttgcaatgcttcccagactgtgtatgtgaagatgcttataacaatacct

SEQ ID NO: 656729 - DNA, 82 bp, Homo sapiens
ccgctggacatcgagtggctgatatcaccagctgataatcagaaggtggatcaagtggtgaaagaaaatggcccgaaccaag

SEQ ID NO: 656730 - DNA, 100 bp, Homo sapiens
tcgctccagaagcttcactttggttttctgtctcaactggtctctgacaagcctctgactgaatgtatccgtgctggccactatgcagcaagcatcataa

SEQ ID NO: 656731 - DNA, 82 bp, Homo sapiens
gcaagcaacctgaagccatagcattttgtaaggatgaaattacaagtgaactgtggctgcaccatctgtcttcatcttcccg

SEQ ID NO: 656732 - DNA, 98 bp, Homo sapiens
aacatgctttggtcacgaatgttaaaagacaacaaaaagaattggagaagagtttataagggcacctcctctgaatttgaagtggtcactcctgagga

SEQ ID NO: 656733 - DNA, 100 bp, Homo sapiens
cccttctgctttatgttggctacacgagtctgtatctggatagtcgtaaacttcctatgataagttatggtgaatggttgcatggatttgaaaaaaaggc

SEQ ID NO: 656734 - DNA, 100 bp, Homo sapiens
cagcgtggagcgcagcgagcgccggaagcggaggagtaccgactcttccagcgtctcgggctccttgcagcaggacatggatttgattgacatactttgg

SEQ ID NO: 656735 - DNA, 50 bp, Homo sapiens
aaaagttcttgggacaaacttcatttgtctacatcggtaaactctgcaaa

SEQ ID NO: 656736 - DNA, 100 bp, Homo sapiens
tgaggacactgaaattcagagaggggaagtgatttgcctcagcttgtacttacaaaattggacagctgtacatgatcagcaaacacagccatgaacagag

SEQ ID NO: 656737 - DNA, 76 bp, Homo sapiens
gagtgctgctgcagcttcccgagacatcaccttgtttaattggttggggtcagataagaagaggagtgacaatcaa

SEQ ID NO: 656738 - DNA, 98 bp, Homo sapiens
tccattcccccaaagaagaaacaagttatttcttgtaatgtctgtcagcttcgctttaactcagatgttctcttgccacatcaatatcccagatggta

SEQ ID NO: 656739 - DNA, 100 bp, Homo sapiens
cacactgtcaccatggcttgtatctctgccaaccaagccatgaccacagagattatggagaagtctggcgaggaaggaatgcctgatcttgcccatgtca

SEQ ID NO: 656740 - DNA, 100 bp, Homo sapiens
tagttgtgtgtatagttgcccatcttatatagcaaaagatttgatgaaagtacttcagggagtcaacggtgaggaaatggagttgttttttccttcaagt

SEQ ID NO: 656741 - DNA, 100 bp, Homo sapiens
agcatttggcacagaagtgctgccaggagaaactaagttgctgaacggccactgccaaaaaatatggtgtctcgtctttgtgaatctaaaaaggtttgtg

SEQ ID NO: 656742 - DNA, 100 bp, Homo sapiens
cttcaggtttgcagtcgagcgcaaacccaggccgttagtggaggtcattgaatctttgggaattattatttataaagcactggactatggtttgaaggag

SEQ ID NO: 656743 - DNA, 83 bp, Homo sapiens
cggtggtgaagctggcgcggcatcgagtcaccaaaacgcaggcatcacgttgggtggtttccatttagaccgaggccggttca

SEQ ID NO: 656744 - DNA, 82 bp, Homo sapiens
aagcagatcctgaaacacctgtcccgatcgccaaactgaggcagcaactacaacgcagtaaacagagtagtcgtcacagtaa

SEQ ID NO: 656745 - DNA, 83 bp, Homo sapiens
gtaatagattggaactcagtgaagacacagatgttcctgttcagagcaaccagctaatgtcatcatcagatttgaaatattta

SEQ ID NO: 656746 - DNA, 75 bp, Homo sapiens
cccactgacgggagcagcagaaatgaggtgtttatctcagtggatgatctggaacccccggagccccaggaccct

SEQ ID NO: 656747 - DNA, 100 bp, Homo sapiens
gcgccgccggccaggcccagctgtggccggacagggactggaagagaggacgcggtcgagtagaaagggaaggaaattctcacagataacaacatccctc

SEQ ID NO: 656748 - DNA, 100 bp, Homo sapiens
gcgcttccgacggggcggccgggggctcagagatccaagtgcgcgccctggcgggtccggaccaaggtgaatgaaaactttgccattgatttgatagcag

SEQ ID NO: 656749 - DNA, 80 bp, Homo sapiens
gagcaaatcaatgccttgggagctgacaatgaggtaaactgtcttgagccccaccctcacctgcctgtgctggcaaccag

SEQ ID NO: 656750 - DNA, 75 bp, Homo sapiens
cccgcctgcatcaggggcagactgtccagaggagactcactaaggtttcaaataaaggagaccgagtagtagaat

SEQ ID NO: 656751 - DNA, 108 bp, Homo sapiens
ttggatttaaaagacagtcctcgtcagcactgactttcagctatggaatcgtgttctacgcagaaatagaagagctgaaactggtgtatccttatcacggcgttctac

SEQ ID NO: 656752 - DNA, 95 bp, Homo sapiens
ctcgccagcagccgtccggagccagccaacgagcggagtacttcttgcaagcagagctgacaagcaacgtcttaaaaacaggcgtggtgcgctgc

SEQ ID NO: 656753 - DNA, 75 bp, Homo sapiens
gtccggggagcagtatgccggaagctggttttcaggccacaaatgctttcacagaattcaattcgtcataatctg

SEQ ID NO: 656754 - DNA, 98 bp, Homo sapiens
tgggcgtcgtggccttcggcctggtctacgtgctgaaccacgctgaggggctgggagccgcgcacaccaccatcacagtcactgtcaggcctgtctct

SEQ ID NO: 656755 - DNA, 98 bp, Homo sapiens
aggtgacgcctattggaccccagaggtcatcccagctccagacgtggacacattttcttccaatgtttttggctttcacccccaaccagtgaccaaag

SEQ ID NO: 656756 - DNA, 119 bp, Homo sapiens
tgggtctgggtgagccttctcgtggcggcggggaccgtccagcccagcgattctcagtcaggccgagtacagatgctgccccaggcggtgtgcctgctgcatgcgctgctggagaaggg

SEQ ID NO: 656757 - DNA, 100 bp, Homo sapiens
atgtagacaatggttagagaagaattttccaaatgaatttgcaaaacttactgtagctctttcgacgtgtagcagcagctttgccgggaatggaaagcac

SEQ ID NO: 656758 - DNA, 100 bp, Homo sapiens
agaagcaccttcagaatgtaactgcccagcagttccaaagaactactggttcagattttagctcttcccaagttgtgaaaatagtgaaggatgcttagac

SEQ ID NO: 656759 - DNA, 90 bp, Homo sapiens
tagcgccgctgggcctgcaggtctctgtcgagcagcggacgccggtctctgttccgcaggatggataaacgtcttgtacccggaggtgga

SEQ ID NO: 656760 - DNA, 100 bp, Homo sapiens
acgtcccaacgaagagaccacctgtccttcgagcaggagttggaattagttggtccctactgtcccccatgaggttgtgaacccctccccccaacttttc

SEQ ID NO: 656761 - DNA, 83 bp, Homo sapiens
caaggttcgagtggatgtcacataccctgctggattcatggatttcccagtttgaatggaactctatggcactgtcaacaaag

SEQ ID NO: 656762 - DNA, 83 bp, Homo sapiens
tgtaagatcgtcgagatgtctacttcgaagactggcaagcacggccacgccaagaaactaatctggattcactccctctggtt

SEQ ID NO: 656763 - DNA, 90 bp, Homo sapiens
accgagccacccgaatggcattttgacagagtacaccttaaagtatcagccaatgtttatccaacatatgattttgcctgccccatagtt

SEQ ID NO: 656764 - DNA, 100 bp, Homo sapiens
gacggttctggaagcgggctgagggccgtttggctggcggaggcagtgacctcagactctggacggtgaacggggatctcgttggacatgtccactgcag

SEQ ID NO: 656765 - DNA, 82 bp, Homo sapiens
agctgggtcagtccgccgctcaccccgcggccgcaccttcccgccttctcagggtgcaaatagctatgggcaacttggcctc

SEQ ID NO: 656766 - DNA, 100 bp, Homo sapiens
catcgttgctgccttcttcgtcaaggtatttgaaatggacatcgctaaacagttacaagcttatgaagttgagtaccacgtccttcaagaagaacttatc

SEQ ID NO: 656767 - DNA, 96 bp, Homo sapiens
aatggggggtcagagtgccggaccccagcacacagaagccgagacgaaggacagaataacgggctcccagattcacaagccccaccaagaggatca

SEQ ID NO: 656768 - DNA, 102 bp, Homo sapiens
gcgaggctttcagttctttggaattccattcttttccttattcttctgatgtggatccaggaacaagcacatcatgattgacttggggactggcaacaacaa

SEQ ID NO: 656769 - DNA, 74 bp, Homo sapiens
ccgagctccagccgaaggagaaggggggtaatgctggaggatggaagaagcaaagggtttggcttcgtctgctt

SEQ ID NO: 656770 - DNA, 98 bp, Homo sapiens
ccccccaaagtcctggagctgtgctcctctactagtgacctctccaactatgaccatgcttatctaaggcggagccctgaccagtgcagctcccaggg

SEQ ID NO: 656771 - DNA, 100 bp, Homo sapiens
gggtacagggcggagcgccaaggagcaggtgcttaggaagggtgacacctccggagacttcctgaaggccttgctggctctctgtggtggtgaggactag

SEQ ID NO: 656772 - DNA, 83 bp, Homo sapiens
attcacaccgtcttcggtctcctggggtcggcgccgagtgggaggatggcggaatgtgtcccggcatggatatccggaacaac

SEQ ID NO: 656773 - DNA, 82 bp, Homo sapiens
caggagtcggcggctcagttgtccatgaccctgaaggtccaggagtacccgaccctcaagaaggaagaggcccagcagaagg

SEQ ID NO: 656774 - DNA, 100 bp, Homo sapiens
gggactatgtgtgcacctggcaagtggacatttgggagcaataaaaataagaagaaaggaaaagccagaaaaatagagaagaaaggaaccatgaagaaac

SEQ ID NO: 656775 - DNA, 80 bp, Homo sapiens
tctggaaggggctcttctactgcatgtgggtgcaggatgaaccccttctacagaacttgaaggtgcacattcttgatact

SEQ ID NO: 656776 - DNA, 82 bp, Homo sapiens
cgcgaacccctctgggatccccgccgctctgtctacaacccgagcaagagcacacggagatcctgcgtggcctgcgcttcac

SEQ ID NO: 656777 - DNA, 100 bp, Homo sapiens
cccgtcaccctcaccaatgtcgtcttccggctcgaaggctctgggttacagaggcccaagatcctcaacgttggacgctgaccggaaaggagattgagat

SEQ ID NO: 656778 - DNA, 75 bp, Homo sapiens
gctctcatgaaagccctggaaatgccacaggacgggctctacgagtgcattctctgtgcctgctgtagcaccagc

SEQ ID NO: 656779 - DNA, 101 bp, Homo sapiens
gtcgccgccactgccgcaggaggcgtgagattccttgaaacaataagtgattgaaaggaaagtcaccctttccagggaggtttcactgtataaaattcagc

SEQ ID NO: 656780 - DNA, 83 bp, Homo sapiens
ccctcatcctggttctggaatcctcagttcaaggccaagaagcttgagagaagaaaaatttcagaaaaattgtctcaatttga

SEQ ID NO: 656781 - DNA, 75 bp, Homo sapiens
ggatccatttctcctattgaggagtcaacaattggcagagggggtcgatttgggaggaaaggtgtggctataaac

SEQ ID NO: 656782 - DNA, 82 bp, Homo sapiens
agcgctgtgctccaacgtgctgcagcacccatcctagctgggagcctgaaggctccactctggcttcgtgcttacttccagg

SEQ ID NO: 656783 - DNA, 100 bp, Homo sapiens
aggggcgacagaacatgatgttgacacgggctgggcgcccccagaagcccgggaacaaacttatagctgaggtggtaccagtttaagaagtgagaacttc

SEQ ID NO: 656784 - DNA, 98 bp, Homo sapiens
agctcagtgggcttattcgtatttaacctggcaaacctggaagtggaagctgctttgtattacaaggggcacgtgaagcactcagacagtgcctccct

SEQ ID NO: 656785 - DNA, 74 bp, Homo sapiens
ttgcctgtgtcccacttgttcgcggcctataggtgctggctgccagctgctgcgccccccatgtagaaggtgca

SEQ ID NO: 656786 - DNA, 101 bp, Homo sapiens
tgcaggtattgggagatccacagctaagacgccaggacccactggaagcctagaaatggtttgaagttgatcagctccagggtttgagaaattcagtccga

SEQ ID NO: 656787 - DNA, 82 bp, Homo sapiens
gtggaacgcgggcgcctgaaggagttgttgtctcggcagcgcccgcggagacgtgaagaggaggagaacatttgcctgcact

SEQ ID NO: 656788 - DNA, 102 bp, Homo sapiens
cttgccttgagtcagtgcgccgctctccagcccgcttgaacgggggatatgagactttctactcggaatatcctgagtgttgcgtggatgtaaaacccattt

SEQ ID NO: 656789 - DNA, 100 bp, Homo sapiens
cccctggccaatatgtgctgagtggactacagggaggccaagcaaaacatcttctcctggtggatcctgaaggcaaggatgattgtcttttgaaagtgtg

SEQ ID NO: 656790 - DNA, 100 bp, Homo sapiens
ctccgaaaccggtttgcaagtccttgtagagatcgaacggttggaagtaagcagccttgcccaaacatccagtgcagtggcctccagtaccgatggcagc

SEQ ID NO: 656791 - DNA, 100 bp, Homo sapiens
ggaaggaaaaacctgtatgtggaaccacctgatcgacgagaacgtgctaggagcccagctggacgttgaggccgcccattcagagatcctcaagtacttc

SEQ ID NO: 656792 - DNA, 74 bp, Homo sapiens
gcaaaaatggaacaagttccagcacaagtggcaccatgactcctgtgaggatgcagcactccctggcaggtcag

SEQ ID NO: 656793 - DNA, 100 bp, Homo sapiens
aggactacgacagtcaccgcaggttcgaagtttttggctttcacccccaaccagtgaccaaagacttgaccactcaaagtccagctccccagaacactgc

SEQ ID NO: 656794 - DNA, 88 bp, Homo sapiens
ctggacatgctgaccaaggtgatggccctagagctcgggccccacaagacacttctacaagcccatgcttcgacggggcagcagcaag

SEQ ID NO: 656795 - DNA, 100 bp, Homo sapiens
gagaccgtgaagattccaagttcaggagaactcgaccggtttttgagtcatgatgcaagaatctgggactgagacaaaaagtaacggttcagccatccag

SEQ ID NO: 656796 - DNA, 51 bp, Homo sapiens
catgaggcacctggcatccatgaggtcctaggcctacttacaagcctccag

SEQ ID NO: 656797 - DNA, 100 bp, Homo sapiens
tgctgtatctgttgctggagcatttagaaaaggaaaatcattcctgatggacttcatgttgagatacatgtacaaccagagtttcactcttgttgcccag

SEQ ID NO: 656798 - DNA, 75 bp, Homo sapiens
ctgatgctttatctcagtttcatgctgccgtagtgaatttatggcagaagaaagtaatgaaaaattttggcagtt

SEQ ID NO: 656799 - DNA, 90 bp, Homo sapiens
aaagaaactgctcatgatctggacgtgaaaagccccccggagcccaggagcgagattattttcgaaataccagtatttcgactccagggg

SEQ ID NO: 656800 - DNA, 100 bp, Homo sapiens
gctgaatgactcaagtctggacctgggacccactgcagatctacggaatccagaggcagcattgtctccaaccttccgtagtgacagcccagtgcctact

SEQ ID NO: 656801 - DNA, 98 bp, Homo sapiens
ccgagcaggaggcgccatcatgggtgagttctgcagtcagggtgtccgtgagggcctcatcgtgggcttcgtccactctatgtgccagacggctcaga

SEQ ID NO: 656802 - DNA, 83 bp, Homo sapiens
ggcatgaccattttcttcagcctccttgtcctagccatcactggtgcaagctatatttaacggagatcctgatgaagttcgag

SEQ ID NO: 656803 - DNA, 100 bp, Homo sapiens
cgcccgccgacccgcgccctgctccctctcagcacctgggcggacgaatcatcggactcaggtacatctgtgagtgagaacaggtgtcaccttgaaggtg

SEQ ID NO: 656804 - DNA, 75 bp, Homo sapiens
atttgttggcacaccttattacatgtctcctatctccagtctatgtgctgaagaagcagcagcccaagagcagac

SEQ ID NO: 656805 - DNA, 78 bp, Homo sapiens
gtgaggcctccccagccatgtggaactgtctcatctgagtagcagcttcctgccctccttcttggagataagtcgggc

SEQ ID NO: 656806 - DNA, 82 bp, Homo sapiens
gatctcagagaaggaggaggtgaccacgcgcgagctgcctgtggaggaaccgattgtgtccacagatgaggtcatcttccca

SEQ ID NO: 656807 - DNA, 82 bp, Homo sapiens
tgacgagaaggacttacgacgggagatcagctatgccattaagaacatccatggagtcagttatctccagaagaagaagaga

SEQ ID NO: 656808 - DNA, 75 bp, Homo sapiens
tcgtacccacagtgcttcatgagaggcacaacttcctgaatggaccatgactcccaccaaagatccctgtctctg

SEQ ID NO: 656809 - DNA, 96 bp, Homo sapiens
tttatagatcagaatctcagtccaacaaaaggttgacgatgtgtcacactgtgtaagggaatcgcatggagatgggcattccgaactgttaatggg

SEQ ID NO: 656810 - DNA, 95 bp, Homo sapiens
gtctaactatgaagtattagaatgcttgaagttcgattattatatgagataaatgatgtggaaactccggagggtgagcagccaccacctttgcc

SEQ ID NO: 656811 - DNA, 75 bp, Homo sapiens
cctgctgcattgctgttttcctggtcgagtctatgctgtcttgtcaaagagagaaggtcgggtacttcaagaaga

SEQ ID NO: 656812 - DNA, 105 bp, Homo sapiens
cgggaacagccatgcaaaggcaggggaggaagccacctcgagaccctcaaactgacacaagacctacagagaaaaccctttgccaaatctgctctcagcaagtgg

SEQ ID NO: 656813 - DNA, 51 bp, Homo sapiens
cccaaagctattctgggggcaacagaggatgcagaaaatgcgattgtgcat

SEQ ID NO: 656814 - DNA, 99 bp, Homo sapiens
cggtactcttcagggatgagtcatgtggcagtggaaaatgcgctcgggctggaccagcaggaaactactaaagttcctggggaagcaaagtagaatttc

SEQ ID NO: 656815 - DNA, 100 bp, Homo sapiens
gcctgggcgtggccaccgtcaaggccaacatcacgcccttcggcgccgaccaggcatcgttggcttcacagtatgactgatgatcctccaacaacaaaac

SEQ ID NO: 656816 - DNA, 75 bp, Homo sapiens
cagccccgcccaacatggacccagacccccaggcgggcgtgcagcacctgaactcctggggggaccgtcagtctt

SEQ ID NO: 656817 - DNA, 50 bp, Homo sapiens
cggggatggacctccagatttccttactgctgtcgcctggttgggcccgg

SEQ ID NO: 656818 - DNA, 72 bp, Homo sapiens
gcttccgccaggcggtgatgaagaatccccccgaaaggaccccccaggacatggatttgattgacatacttt

SEQ ID NO: 656819 - DNA, 75 bp, Homo sapiens
ttgagggagaaaggcgggcccgggaacaggtaaactgtcttgagccccaccctcacctgcctgtgctggcaacca

SEQ ID NO: 656820 - DNA, 50 bp, Homo sapiens
cagaaatcagctggtgccgaggtgaaagattactcaaagactgtcctggt

SEQ ID NO: 656821 - DNA, 76 bp, Homo sapiens
cccgcggcgggaggagcctgttcccctgagctctaacactccaagaaaggctgtgtttgcgggaagcatgcagttg

SEQ ID NO: 656822 - DNA, 82 bp, Homo sapiens
atctccatcacccaccaacaacaccacaataatccacagccaaggtctctgcagacaaactggtggcactggggctgttcag

SEQ ID NO: 656823 - DNA, 85 bp, Homo sapiens
cccgcgagcaccagagtcggcgtaactatcgcctgacagggattttttatcaagcagaaatgcatcgaacaacgagaatcaagat

SEQ ID NO: 656824 - DNA, 83 bp, Homo sapiens
ctatagaaactgggttggaagtcagagctgcacaaagggaaaggttgttgacctcctgtactggagagacattaagaagactg

SEQ ID NO: 656825 - DNA, 100 bp, Homo sapiens
tcaaagttaacatctttgatatggctggacatcccttcttctatgagaaattgtatgctgctatgcatgaacctgatggagtggccggagtcagtgcaat

SEQ ID NO: 656826 - DNA, 88 bp, Homo sapiens
tagaagcaagatggctgaactcaatactcatgtgaatgtcaaggaaaaggtctgcttagtggcctatcttggcttgtttatgctttgt

SEQ ID NO: 656827 - DNA, 100 bp, Homo sapiens
ctctgtccagttttcaaaccacacagcaaattgtggctactaatttgccccctgaagatcaagatggctctggggatgactctgacaacttctccggctc

SEQ ID NO: 656828 - DNA, 88 bp, Homo sapiens
cgagacgggggcggcggccgcgcgggtctggcgggaccggtttggaagactttgccggcctgcagtattctgacaagtccctgtacac

SEQ ID NO: 656829 - DNA, 75 bp, Homo sapiens
tgcgcctgggggtgcgcgcctgcgacctgcccgcctgggttagcatggcctcattgaaagaactagatcaaagac

SEQ ID NO: 656830 - DNA, 89 bp, Homo sapiens
ccgtggaagtcgcctggtgtgaactgcaggaaacattggcaaatttggagcgacagatctatgcttttgagggaagctacctggaagac

SEQ ID NO: 656831 - DNA, 100 bp, Homo sapiens
ggagcccccgagaagccctcatcagtggctggctcttcttccgatacctggctatcggaggacagtcattttgtttactcattcagccctgttgcaggtc

SEQ ID NO: 656832 - DNA, 98 bp, Homo sapiens
agaggggagagcggccgccgccgctgccgcttccaccacagctggaacagtgaaccatggagctgtatttcggtgaatatcaacatgtgcagcaggaa

SEQ ID NO: 656833 - DNA, 74 bp, Homo sapiens
tgggaccctatggctccggagacagtgcacccctcaggaagtgctcagcggctgcactggacgtcctcgccaat

SEQ ID NO: 656834 - DNA, 75 bp, Homo sapiens
ggagcacaacaagatggccatgtcccagacagaagccctgcagcagctgcagaaggactctgaggccatccgcag

SEQ ID NO: 656835 - DNA, 100 bp, Homo sapiens
tacgccgagggctccgtcaatggcttcatcagcactttggggaccaagaatcgccttcagccctgtctggtgcatccttggcagaaagtgaggaggaaaa

SEQ ID NO: 656836 - DNA, 90 bp, Homo sapiens
tgtccctgaagtgccgcaggcagctccgtgtggaggagctggagatgtgggcaccgtgactgtgatcagccccctggagcttatgcggac

SEQ ID NO: 656837 - DNA, 74 bp, Homo sapiens
cttagcctgcgccgcgaggtctgcggcctcggttcgaaaacatggccaaaagaaatgccgagaaggaactgaca

SEQ ID NO: 656838 - DNA, 128 bp, Homo sapiens
gcggcgtcttatccaaccttgcgctgcatccgctcgacctcgtgaagatccgcttcgccgcatgttggcagataaattgaacatgactccagaagaagctgaaaggtggattgtaaatttgattagaa

SEQ ID NO: 656839 - DNA, 51 bp, Homo sapiens
ctgagagatggctattatatccaaggaattacatgaatgacagtcttcgaa

SEQ ID NO: 656840 - DNA, 75 bp, Homo sapiens
taaaaaaagttgcagctactttgcaagtgccagtaaatgatttaaatgcagactcctttctacgaaaccgttcaa

SEQ ID NO: 656841 - DNA, 100 bp, Homo sapiens
atatcagaccagtgtggatcttcaagaatcattgttggcgtgcagtggtgtgatctcagctcattgcaacctctgcctcccggactcaagcaatcctccc

SEQ ID NO: 656842 - DNA, 75 bp, Homo sapiens
ccaggggactgtgcgaactgcagccaagacaatgcaaactccagtgaacattcccgtgcctgtgctccggctgcc

SEQ ID NO: 656843 - DNA, 80 bp, Homo sapiens
aagctgagcgagctgtcagagcccggggacggcgaggccctcatgtaccacacgccatcactggtgcaagctatatttaa

SEQ ID NO: 656844 - DNA, 101 bp, Homo sapiens
caacaaggagattttccttcgggagttgatctctaatgcttctgatgatctatcttgggatcccatggctttctttactgggctctggggccccttcacct

SEQ ID NO: 656845 - DNA, 50 bp, Homo sapiens
caacaactatttattgagggctaggtacaccaggaggatggaatcaacta

SEQ ID NO: 656846 - DNA, 101 bp, Homo sapiens
ccttacgtccccgagtgcggcagtaccgcctccttcccagccgcgcggcttcctccagacctctcggcgcggggacaatgactcattcttcccaggacact

SEQ ID NO: 656847 - DNA, 75 bp, Homo sapiens
cgggccgcgcagctgccgaacgacgtggtcctacaggtgaagtattacagacacttagcacctgatcacttgctg

SEQ ID NO: 656848 - DNA, 90 bp, Homo sapiens
ggagagttgaatgccagccaccagccatggattggtgctggtgaagagaagcaaaaggaaggaggcaaaaagaagaacaaagaaggatct

SEQ ID NO: 656849 - DNA, 75 bp, Homo sapiens
atttggatgtgggatccggttccttggtgtcatccagccttagcaaaccagagtactgccaaatctgtcgaaagg

SEQ ID NO: 656850 - DNA, 98 bp, Homo sapiens
ccggcagagtgacgaggtcggagaccgagaccatcgaaggccacaggagaagaaaaaagccaagggtttggttattgccttgtctgtcaagatccgca

SEQ ID NO: 656851 - DNA, 82 bp, Homo sapiens
gagagaccagacctgcaagctctttgacacacagcagttcttgtcagctgctgcagtgctcctgagcagcacaggcctgatg

SEQ ID NO: 656852 - DNA, 50 bp, Homo sapiens
gccctgtctcctcgcagatgaggccttggatggtatactgtaaattcagc

SEQ ID NO: 656853 - DNA, 100 bp, Homo sapiens
gccgcgcccgcgtcaaggagtacttcgtgttccggaaccaacatcccgggtaaccgggtggctgaaggacaggtgacgtgtccctacctcccccccttcc

SEQ ID NO: 656854 - DNA, 100 bp, Homo sapiens
gaatcatccacgcacctgcagctctgctgagagagtgcaagccgtggggttttgctgttactgctcagtgtagtcacaccttgaataagaaatggaaaac

SEQ ID NO: 656855 - DNA, 99 bp, Homo sapiens
aggagagaaaatggcgtccacggttggatatgtcaagtgaccagatagctgccaatctgcaagcagttattaatgaagtttgtaggcacagaccgctga

SEQ ID NO: 656856 - DNA, 100 bp, Homo sapiens
tggcgaaacgaggaggagataacgcggccttgggctctggccaagtcctgtatctgccatgtctgtggcgtccacctcaacaggctgcattcctgcctct

SEQ ID NO: 656857 - DNA, 87 bp, Homo sapiens
ggtccgggacgtgcgcttccccacgtcgcttgggggccacggcgcggacgccatggtggtgatgatgtccagcaactctgtgaagca

SEQ ID NO: 656858 - DNA, 100 bp, Homo sapiens
cagacaattcccgtggatgtggaggaagctttccttgcccatgccattaaggcattcactaagacctccttcttcctcgtgcgggaggacaccaaggctg

SEQ ID NO: 656859 - DNA, 100 bp, Homo sapiens
gaacgaagtaggccgtctcgctctgggtctccaggcccgcgaccgtccgccagtcgtcccgaggaagctcttcgtgggcggtcttgactggagcacgacc

SEQ ID NO: 656860 - DNA, 96 bp, Homo sapiens
cgaaaatggagcacgtccaggctgaccacgagcttttcctccaggcctttgagaaagcttttgagattgctctgccacgagaaagcaacattacag

SEQ ID NO: 656861 - DNA, 100 bp, Homo sapiens
caggaattgtggatggttcggggagcattggagctgcagtgggccaggagagacagcgtctggagaccatcctcagtctctgtgctgaatacacaaagcc

SEQ ID NO: 656862 - DNA, 82 bp, Homo sapiens
aacagacctagtgggcgttgcctttagacccagaattcagatcaggaaggaggtggaaagaaaaagaagaaaaagaaggaca

SEQ ID NO: 656863 - DNA, 75 bp, Homo sapiens
cccagagatgaccccttatgaagtctcatgcaagtggcaaactccggaagaagaaaaaaaaacagaaaaacaaga

SEQ ID NO: 656864 - DNA, 85 bp, Homo sapiens
gggaggagcctgttcccctgagcaggatgaagttaaaggaagtagatcgtacagccatgcaggcatggagccctgcccagaatca

SEQ ID NO: 656865 - DNA, 75 bp, Homo sapiens
tcctgacgcccccctcccgcccggaaagctgcccagccaccagcaaccccccagcctggtgtgtccgtttctctg

SEQ ID NO: 656866 - DNA, 75 bp, Homo sapiens
gaagcataaggtctgtcgatactgcatgcaccagcacctcaagggaaaaagagagttttgtcccacagtcagcag

SEQ ID NO: 656867 - DNA, 87 bp, Homo sapiens
ttgggcctcgcgccggctatggccgtgccctggggctgagccctcaggatgggagtcccagcttctggagacggggttcctggggat

SEQ ID NO: 656868 - DNA, 78 bp, Homo sapiens
atagactgcacaaggtgaagactgtctgcagcaaggttatgagtgccagtgagccgccttagatagaagcatcgtcag

SEQ ID NO: 656869 - DNA, 100 bp, Homo sapiens
gggaatccgggtgtccctgtacctgcagctgctgcagctgctgcacagaaattaatgcgaacagacagacttgagctgagatctgtatctgtggacctga

SEQ ID NO: 656870 - DNA, 74 bp, Homo sapiens
aagttgcaaagtatgatcttatatggatttgtgatagtggaataagaggattcgtgaagttttttggaaacctg

SEQ ID NO: 656871 - DNA, 82 bp, Homo sapiens
caaatacctggctatattgtcgatgattcagtcagagaatgatctttgctgagtgttcccccaacacttgcccatgtggcga

SEQ ID NO: 656872 - DNA, 100 bp, Homo sapiens
ccacttacgaaatcagggtcaagacatgcttcagcttatcaacaaccaagacagtgacttccctggcctatttgacccaccctatgctgggagtggggca

SEQ ID NO: 656873 - DNA, 60 bp, Homo sapiens
ataacaagttttgtgcagattgccagtctaaaggatctcatagatcagaacatactggag

SEQ ID NO: 656874 - DNA, 93 bp, Homo sapiens
acaaccgccaccgcgagctggagaaggaggtccgcgcgggccagggaagcagagactttcaaggaacaaggaaatgcatactatgccaagaaa

SEQ ID NO: 656875 - DNA, 96 bp, Homo sapiens
cttcacttttgagtgcaactgccttccaggtctacatccggataaaagacgatgaatggaatatttatcgccggtatacagagttcaggagtttgc

SEQ ID NO: 656876 - DNA, 78 bp, Homo sapiens
gcgtcttcccggtctcctttcccggccgcacaggacgttccatcctcagagcagcctgaactgttcctaaagaaactt

SEQ ID NO: 656877 - DNA, 100 bp, Homo sapiens
gctaatccctctgagaaaaactccccatctacccaatactgttacagcatacaatctctgttcttgtccccctctacacaagaatctggatgcacgagaa

SEQ ID NO: 656878 - DNA, 83 bp, Homo sapiens
ggcgttggtgggagccgtgctctacctctatccgtgcttcaccgatatagacacattttgggattgtggcagccagatatcgg

SEQ ID NO: 656879 - DNA, 75 bp, Homo sapiens
acacaaagaatagagttgagcctgtgggacacttcggactgcaaaattcaaaatggggctcaaggtattcgtttc

SEQ ID NO: 656880 - DNA, 50 bp, Homo sapiens
cacgccgcggtcctcgtcgtgggttctgcagcattccagaccttgagcac

SEQ ID NO: 656881 - DNA, 100 bp, Homo sapiens
aggcattttgctgtctcctcctaatacggaagcacaagcctatgcagacgacaacagtttgctgttcatggagacatcagcaaagactgcaatgaacgtg

SEQ ID NO: 656882 - DNA, 100 bp, Homo sapiens
caggttacaaacccagatctcacacaagtggtcagtttggttgtggaaagggaaggagagtcgctcccagatagccctcacgagtggccctggagcagga

SEQ ID NO: 656883 - DNA, 88 bp, Homo sapiens
gcgggcccgtagctgggctctgcgaggaggaggcctcggtggtaccagaagaggaggggctgatgtgaacatccggcattcaggccgc

SEQ ID NO: 656884 - DNA, 90 bp, Homo sapiens
tgaaatcaaaggcagcataactttaaatcttccccaagatgtatgaggaagaaattgttgagcttccagatttggattacctgcgaacca

SEQ ID NO: 656885 - DNA, 90 bp, Homo sapiens
caggaccctgcggccgtgtctctgcccacgtcgagcgtgcccgagacccgagatgagctgcttcagaaagagcaaaactattcagatgac

SEQ ID NO: 656886 - DNA, 99 bp, Homo sapiens
ccagagctcccagaaccttcagtgaaagtaaaagaaccttcagtacaagaggctacttctactaggagcattgcagagctacttttcttgttggagggg

SEQ ID NO: 656887 - DNA, 88 bp, Homo sapiens
tccgcagaaggggagacacattttatgttgtgtcatttcgaagggtggaatccatagagctccccatggacaacaagaccaataagag

SEQ ID NO: 656888 - DNA, 75 bp, Homo sapiens
tactactcagggctcatctacgatgtatcaggaatgccagctctgtgctctccaatttcccagggagggggtggt

SEQ ID NO: 656889 - DNA, 100 bp, Homo sapiens
gtaaccaccatcaaaaccattgaagaaaattcttttgggagccaaacccacggtgctgacagctgcagaagaaattgtacatggtgctgtacagaaggta

SEQ ID NO: 656890 - DNA, 73 bp, Homo sapiens
ccgaggcgagcgccgcgcgcaccactgtttctacagcagtataatcactacaaatccaatgtggagattttca

SEQ ID NO: 656891 - DNA, 110 bp, Homo sapiens
ctgagagtgacaaagacctttgtgaaacgcaatgttgagaaggtgttggaagtgacagtgaggtggaagagaggtctggactggtgttcctccaatgagacagattcctt

SEQ ID NO: 656892 - DNA, 100 bp, Homo sapiens
cacagttgtacagaagggaagaaaataggttgatactcctgttgcaggaccatttgaagtctgagagtttccagacccaacatgagtgaagtttcctgca

SEQ ID NO: 656893 - DNA, 100 bp, Homo sapiens
agcgggccctggctcaggaacagggacagcacctcatcccctggatgggggaccacaagatcctcatcgacaggtgctgtacttctttgcagtatacaag

SEQ ID NO: 656894 - DNA, 82 bp, Homo sapiens
ttcagaaacaagatgttgtctgtgtgggcggaagccaccagggcaggaatgtgactaataaaggtaccagaagaatatggct

SEQ ID NO: 656895 - DNA, 100 bp, Homo sapiens
taaacaagcaagcctgccataagtgagaagatgccttcaattaagttgcagagttctgatggagagatatttgaagttgatgtggaaattgccaaacaat

SEQ ID NO: 656896 - DNA, 110 bp, Homo sapiens
attcacattaattgccctcagagagaacagagagggtgataaggaagaagaccatgctgggaccttccaggtcaatgagtggtcattgaagataagaaaggaaatgagag

SEQ ID NO: 656897 - DNA, 97 bp, Homo sapiens
ggaacctctgacaagaccaagtactaccttcaaggtgtccctggccagtgtccttccacctgtccacaagcatggggaacatcttcgccaacctctt

SEQ ID NO: 656898 - DNA, 78 bp, Homo sapiens
gacaacaatattagagtaattggagatccagaagcagcaaggtctagcaattccaaaatcaccaccacgctgggtctg

SEQ ID NO: 656899 - DNA, 94 bp, Homo sapiens
gatcgcctaacttctactgacgaagcttggaagttgcagaaggtggatccataaagaacccagccaacccgcagagggaggggaggggctgagc

SEQ ID NO: 656900 - DNA, 105 bp, Homo sapiens
cgacctctacaactgggaggtggccatcttcggaccccccaacaccctctacgaaggcggctacttcaagtatgtgataccctccaccatgggatgagactctcg

SEQ ID NO: 656901 - DNA, 75 bp, Homo sapiens
aggcctcattggacagcattcgagattgtcactgctgttccaagggcacacgcagagggatttggaattcctgga

SEQ ID NO: 656902 - DNA, 75 bp, Homo sapiens
tagtcacccacctacatgttgaggcttgcattgatgacaatgttgatatggtgaagtttctggtagaaaatggag

SEQ ID NO: 656903 - DNA, 87 bp, Homo sapiens
tggcctttcaggaagagtgcttaaggtgcttgaagtttctgggaagtcggcatccaaccctggtgcttcccttggtgccagagcttc

SEQ ID NO: 656904 - DNA, 100 bp, Homo sapiens
cttccagacactggaaaactggatgctgcagacactgaacgaggagccagtggcctggttgcagcatgcttgaaatctgggatgtggaagacccttccaa

SEQ ID NO: 656905 - DNA, 75 bp, Homo sapiens
gacagattacgccccctatcctatccgcaaacaaatcctcactatggatgggctcattgaggacattaagcatcg

SEQ ID NO: 656906 - DNA, 75 bp, Homo sapiens
gcttcgtggcccggcaccgttccgcggacgtgctcggtgtgaatgacagaggtggtgccatccagcgcgctcagc

SEQ ID NO: 656907 - DNA, 75 bp, Homo sapiens
atgatgggcagcaagatggcgtctgctagtagggtcgttcagacgtcttgctgccctccaaaaaagaagagaact

SEQ ID NO: 656908 - DNA, 75 bp, Homo sapiens
cggcggcagcagcggcattcaggttattcagcttctcaaggctggaaaagcgaaggaagtttcctacaatgcact

SEQ ID NO: 656909 - DNA, 90 bp, Homo sapiens
gccgggattttggaggccggggccgcgctgagggcgcccagctgggattaaagcctgtggtttccacagaagcaccacctatcatatttg

SEQ ID NO: 656910 - DNA, 75 bp, Homo sapiens
gcaagttcccccgagacatgaaggccatgtccccaggtggtataagttgaaatccaaaccaggaaagaaggacaa

SEQ ID NO: 656911 - DNA, 82 bp, Homo sapiens
tgtgtcccacttgttcgcggcctataggtgcagctgaacctggtgttttagaggataccttggtcccagagtcatcatgaag

SEQ ID NO: 656912 - DNA, 88 bp, Homo sapiens
gcggcatcacagccctcacctccaagcacgagagaagatgactgaggaggaggtggagaccgttctggcaggacacgaggacagcaac

SEQ ID NO: 656913 - DNA, 101 bp, Homo sapiens
ttgaatgactggaaactgattggaaactctttgggaaagccactcgaaaagctggccaactcagccaatccgcacatttagctctccaactaccatacaac

SEQ ID NO: 656914 - DNA, 82 bp, Homo sapiens
gagcgcggcaggacttggctggacggcgcggccacggagaagggcgcggaccaaaatgtctttgactccaagaagaaagtga

SEQ ID NO: 656915 - DNA, 124 bp, Homo sapiens
acgggagtcctgggcccagagccgagatgagcagaacctgctgcagcagaagagcattgcagtgtcgagatggctatgaaccctgtgtaaatgaaggaatgtgtgttacctaccacaatggcac

SEQ ID NO: 656916 - DNA, 76 bp, Homo sapiens
gcagggatgacatattctatatcttgaacggtaacattcgtgatagataccaggttgcacaccgatgctccagaat

SEQ ID NO: 656917 - DNA, 100 bp, Homo sapiens
tgtatcggggatatagaccacgattccgcagcgggtcctctctatctagctccagcctctcgcctgcgccccactccccgcgtcccgcgtcctagccgac

SEQ ID NO: 656918 - DNA, 90 bp, Homo sapiens
tgtctgcagaggcccctcgcctgattgaggagtcctccgtagacgaggttagctcccagcgatgccagatgggatcagcacagccctgcc

SEQ ID NO: 656919 - DNA, 82 bp, Homo sapiens
gtgagtttattctgaagagcatccaggaactgcaagcacatgttgaccagataactgaaatggcagcagtaatgaggaaagc

SEQ ID NO: 656920 - DNA, 104 bp, Homo sapiens
agctttggtagccgaggtgatcaaagtaagactttgaccccgacgcaggcttcagtgattgccgcggatcagaagcctgagcactttggctcgagacaattaag

SEQ ID NO: 656921 - DNA, 88 bp, Homo sapiens
tgaaacagaacctgtccaggagctggcatgacgtgcaggtctctagcgccaccgtatgtgccctgaaattgcccgccttttgaccccc

SEQ ID NO: 656922 - DNA, 82 bp, Homo sapiens
tcgcaccaacgaagcaactgctgagcagacaatgcagatcttcgtgaagactctgactggtaagaccatcaccctcgaggtt

SEQ ID NO: 656923 - DNA, 83 bp, Homo sapiens
gaagaagaatttggacttgatgaagaagatgaagatgaggatgaggatgaagatataaagatgaagcgcagctgtataaagaa

SEQ ID NO: 656924 - DNA, 90 bp, Homo sapiens
gatcaaatggcacttcattggccacctacagaaacaaaatgtcaacaaattgatggtgccgcagaatggaattcggcattgttcctacac

SEQ ID NO: 656925 - DNA, 101 bp, Homo sapiens
ctccttttccgtcggactcttcgtcaaccgctttggcagcacaccatatggtccctcggccatcagtgccacctcctggtgccaatgaggagatccctgat

SEQ ID NO: 656926 - DNA, 100 bp, Homo sapiens
aactgaaggaggctgggagaggttgattgctgcctttgtgtacagaaggctctcaaaataggctgctgcaaaagctggtatattgtccggttgctctctc

SEQ ID NO: 656927 - DNA, 87 bp, Homo sapiens
ggaactcgactcttggcgccaccgcctcatgcactgtgtaggtctctaattaacagaagatggcaaagcccagccacagcagctatg

SEQ ID NO: 656928 - DNA, 51 bp, Homo sapiens
actgaggagtccaacatcaccatgcaggaattgaatgatctggcacgggac

SEQ ID NO: 656929 - DNA, 105 bp, Homo sapiens
gaatgttcttaacccagaagtagctgaatgtgttactccattgctgaggagtgggccagctctcaatgttgcaagaaaaaatagaccatttggagcgtttgctag

SEQ ID NO: 656930 - DNA, 75 bp, Homo sapiens
gctggctgtggtcggtgctggcggcggcgcttgggctctgtgctggagaatctggtaaaagcaccattgtgaagc

SEQ ID NO: 656931 - DNA, 51 bp, Homo sapiens
taactgtttggccttcacatgttgcattttgaaagcgaagcagaagccgta

SEQ ID NO: 656932 - DNA, 100 bp, Homo sapiens
agcagaagcggcgcctggaggcagaaatgagcaagcggcagcaccgcgtcaaggggtttaaagccaatttgtctctcttgaggaggcctggagagaaaac

SEQ ID NO: 656933 - DNA, 99 bp, Homo sapiens
cggaggcaagtttggtgtccagatggacagagttgatcaggcacacaagaattgtgggcagatgagtgagattgaggccaaggtccgctacgtgaagct

SEQ ID NO: 656934 - DNA, 50 bp, Homo sapiens
ggaagccatggatggccgggaacctatttggagcaagaggtggtggtggc

SEQ ID NO: 656935 - DNA, 90 bp, Homo sapiens
ctgttttagagctggcagcagcatctcagcccaagagaaggaggaaatgagtctcaaccagacagccaggaagacccccgagaagtactt

SEQ ID NO: 656936 - DNA, 97 bp, Homo sapiens
tgaatggaggtgatgaagtctacgctaactgtatggtgattgatcaggttgacaggactgaggtgattcgcacctgcataaacccagtgtactcaaa

SEQ ID NO: 656937 - DNA, 75 bp, Homo sapiens
cttcacaggaattgccatttcgtgtccggagcggtgactggaaggggtacacaggcaagaccatcacggacgtca

SEQ ID NO: 656938 - DNA, 100 bp, Homo sapiens
tctcccccaagtcctttgatgcctattattgctctggagcatgccagttccccatgccaaagttggatatgtcaagtgaccagatagctgccaatctgca

SEQ ID NO: 656939 - DNA, 100 bp, Homo sapiens
aaaacggaaacagagcacccaagatgaagatgctgttagcctttgcagtctcgacataagtgttcccgtgtcagtggctatgatgacacctcaagttatc

SEQ ID NO: 656940 - DNA, 82 bp, Homo sapiens
cggcgagcgcgagcggcgcgagaaagacacaactcagatgggaagttcatcgcccgggcacagcggatagagtacgactgtg

SEQ ID NO: 656941 - DNA, 100 bp, Homo sapiens
ggatggctgctactccttctggcaggcggggctcctgcccctgctccaccgcgcactgcacgcccaaggtctctaattaacagaagatggcaaagcccag

SEQ ID NO: 656942 - DNA, 100 bp, Homo sapiens
gccgcactcgcctgcgccccgcacccctccgagcagcccggggatccagcacgcagggcgtgatggtgggcatgggtcagaaggattcctatgtgggcga

SEQ ID NO: 656943 - DNA, 50 bp, Homo sapiens
tgcgccctcaacctgctttacaccgtccctagctgttggtagtaagtccg

SEQ ID NO: 656944 - DNA, 49 bp, Homo sapiens
acagggacgtcctcattgtcctcggcagcagtgaggatgccagagttca

SEQ ID NO: 656945 - DNA, 100 bp, Homo sapiens
aaaagaagatctcggtcaagggacaggaagcgtctgagctggaattgagacggaaacagtttcatgttcttcttagtaccatccatgaacttcagcaaac

SEQ ID NO: 656946 - DNA, 90 bp, Homo sapiens
ttgatgctgtggttggatatttagaggacattatcatgggagagctggaggtgtttcagaaagatggggaacgaaaaattcagagtcgac

SEQ ID NO: 656947 - DNA, 97 bp, Homo sapiens
tcatgtacatagaagttgataaagtaacagagagggtttctgaaggggctgcaggtgaggccggcccctctctcagctgagcttcaggctgcgctgg

SEQ ID NO: 656948 - DNA, 82 bp, Homo sapiens
ggaggagcagctcacctgagagacggagccccggctcgcccgtgtgcagagaacccagcgggtgccgcttctccacccgagg

SEQ ID NO: 656949 - DNA, 100 bp, Homo sapiens
caacctgctgctggaggaggataacaagttttgtgcagattgccagtctaaagtttgggagcctctggtggagcaagtaattgggattcctacagtgacc

SEQ ID NO: 656950 - DNA, 76 bp, Homo sapiens
attttggcattgacatttaattttagggtcctttatatagaagggagagtagatgaccatgctgactgtcatagag

SEQ ID NO: 656951 - DNA, 75 bp, Homo sapiens
gagaaagaagtgggaaggatctgcgcggcggacaaggcaaaatctcagcaagttcggacctctagtacaataagg

SEQ ID NO: 656952 - DNA, 73 bp, Homo sapiens
ttggtgaatggagatgcagctcagcagagtttcgctgttgttgcccaggctggagtgctggagtgcaatggca

SEQ ID NO: 656953 - DNA, 50 bp, Homo sapiens
ggcgagagggagccgcagctgatgtcagacctcgaagtagggggaaaact

SEQ ID NO: 656954 - DNA, 100 bp, Homo sapiens
cttgtggagccggagctgggcgcggattcgccgaggcaccgaggcactcagaggaggctcacagaacatttcctgcctgttgctcacactctgttgtcca

SEQ ID NO: 656955 - DNA, 90 bp, Homo sapiens
aggagaagctcaccatgtctctctcagaacttggtgctgctagaatgcaggaacagcaggatccactagttcctggactatgggaactga

SEQ ID NO: 656956 - DNA, 76 bp, Homo sapiens
ggaacagaaccaaaggctattggatcagctcagcaggatcaccagcactcccctaggattggatctcctggaaatc

SEQ ID NO: 656957 - DNA, 96 bp, Homo sapiens
taaaatcttactcacagaacctcctatgaacccaaccaaaaacagagagaagattgtagagatgaactgagcgccaatggacaatatcaatgtctt

SEQ ID NO: 656958 - DNA, 75 bp, Homo sapiens
aaggatgttggcggtccctgtgacctgtggagacacggccagatctgccctccataaacattgctatcttcagaa

SEQ ID NO: 656959 - DNA, 87 bp, Homo sapiens
ccattttcttcgtgagaaagaaatcgacgtgctgttttcatagggaatgtatcctgtcaggtataatgtcagtgaatggcaagaaag

SEQ ID NO: 656960 - DNA, 100 bp, Homo sapiens
caaagcccccacgcccagccaggagcaccgccgaggactccagcacaccgaggattgaccgactcatcagtcacggggccgacatcctgaagcctgtaat

SEQ ID NO: 656961 - DNA, 82 bp, Homo sapiens
gcgtcatcgagtgtgacgtggtgaaagacacgatgaggcgagtggtacgacagagcaagtttcggcatgtatttgggcaagc

SEQ ID NO: 656962 - DNA, 98 bp, Homo sapiens
tcaggcctgcggctgtcggctggtgcttggcggcagggacgatatgcagtggcagaacgtggagcacgttggtgaccagagcccctacgtcacctctg

SEQ ID NO: 656963 - DNA, 97 bp, Homo sapiens
cctctacgccaccaatccgccctggatcttcacccaggaggccccggaggaggggaccgggggcttcggcaagtgaaccggagcaaacgacttccga

SEQ ID NO: 656964 - DNA, 74 bp, Homo sapiens
gcgacgcccgggacccagattgcgggttcaggttatatcttaagtgtggtgctgctaacattgcccaggcagca

SEQ ID NO: 656965 - DNA, 75 bp, Homo sapiens
tttacgcttgtgtgataaaactggggcctctaattgtggcattgtagaaagtatcctgaactgggtgaaatttaa

SEQ ID NO: 656966 - DNA, 100 bp, Homo sapiens
tgaattccgggaagtgggagcttcaggctcgctccgtgcgggttcattttgatggttgggaccataagtatgactactgggtggaggcagacagccctga

SEQ ID NO: 656967 - DNA, 82 bp, Homo sapiens
agaagctttgaaggctgtgaagcgtgcttatgcgcgaagagactgaactgaagacgctgcagactcagatagcaaaataata

SEQ ID NO: 656968 - DNA, 100 bp, Homo sapiens
gcggttcttgccggaagcggagagcggctgatcgcagtccggagatcactccaagaactgaggcccctgtcagcagtgtcagtaatagtttggagaatgc

SEQ ID NO: 656969 - DNA, 80 bp, Homo sapiens
ttaatcaacagagtgggacctaatggtgagaggatcttctcttagaaatctacagaagtataggggagccagatagtttg

SEQ ID NO: 656970 - DNA, 75 bp, Homo sapiens
gataaatctcaaagatctcgtacaagatccttctttgtacctactgtcaacaacgggaagtggaggccattactg

SEQ ID NO: 656971 - DNA, 50 bp, Homo sapiens
cttggattcagacgccgattcgcccagcaagtgcagccgcggagccctgt

SEQ ID NO: 656972 - DNA, 50 bp, Homo sapiens
tcctgtacagcctgcagaacttcccacaggatcacatgttgaatggtgta

SEQ ID NO: 656973 - DNA, 100 bp, Homo sapiens
caggcttggtgcaggaaggagagcccttcagcgaggaagctacacttttcaccaaggaactggtgctgcagcgagagttaaaatgcgcacaatactggcc

SEQ ID NO: 656974 - DNA, 75 bp, Homo sapiens
taatggattcagtaaacctggcagctgaagataaaaggagaatacttatctctggcgcacatcactatatttggc

SEQ ID NO: 656975 - DNA, 100 bp, Homo sapiens
cgcgcggcaggcgcggccatggcgcagctgggaaagctgctcaaggagcagaagtacgaccggcagctgaggtggctgggagcccgagccccacacctgc

SEQ ID NO: 656976 - DNA, 100 bp, Homo sapiens
tttctgactgcccgcctggcactgaagccgagctcaaagaggatcttatgtctctccttgatgccgacattcattctgcccacccaagtgtcattattga

SEQ ID NO: 656977 - DNA, 50 bp, Homo sapiens
gccaggacgaaggccctactgggcaaggcattcctgcatcgcatccggca

SEQ ID NO: 656978 - DNA, 76 bp, Homo sapiens
agactacgagggagtttgacagctattaaaaccagggctccacagttaggagccatattttctgctcttaagaatc

SEQ ID NO: 656979 - DNA, 80 bp, Homo sapiens
gatcttgggacccaccgctgccctcagctccgagtccagggcgaggagaagaaggaagttgtggaagaggcagaaaatgg

SEQ ID NO: 656980 - DNA, 90 bp, Homo sapiens
gtggacgtgtcttttgaaactgctgctctttcacttctcaggcgtcaccgagagctcagatggtgtcggacggcatgacaggcagcaatc

SEQ ID NO: 656981 - DNA, 100 bp, Homo sapiens
ggtattatttccattccaccttttgccaactacctggtcttcttgctaataggcatttcatccttcatgaagccattcaggattttgaattgcatatgag

SEQ ID NO: 656982 - DNA, 78 bp, Homo sapiens
tgcttgtgaaaggctccatggtcttgcctccttgcagaattaaagctatagagagtcccaacaaagaagatgataccc

SEQ ID NO: 656983 - DNA, 97 bp, Homo sapiens
caggctcaagcagtcctaccatgtcagccttcccagtagctgggaccacagccatgaagctcatgactgctctggtgaatgttgccttaaacctcag

SEQ ID NO: 656984 - DNA, 98 bp, Homo sapiens
acgtggagatctggaagatcaagaagctcattaagagcttggaggcggcccgcggacctttccaaagtgaaactgatgagatttgatgatccactgtt

SEQ ID NO: 656985 - DNA, 75 bp, Homo sapiens
aagagcgctcccaggagaaacaatgttatgctttcagagccttgagatttctcttcagtatggaaagaaacagac

SEQ ID NO: 656986 - DNA, 75 bp, Homo sapiens
agccatagatggcctagacagaaatctccactattttaacagtgatagcaactacagtttctcaacagatggttt

SEQ ID NO: 656987 - DNA, 100 bp, Homo sapiens
aatcaaacgagataatgtatgctgaggcatgctgtgaacactacgtgctgggtacaggagggaccagtccaacgtcaggcggatgcacacggctgtgaag

SEQ ID NO: 656988 - DNA, 75 bp, Homo sapiens
ctccgtccgcttctggtcatgagagtatgagcccagaggacctggtcggcccttgtaccaaagaagaatctcatc

SEQ ID NO: 656989 - DNA, 100 bp, Homo sapiens
aaacaatcatgggaatttccaaggggattcaaacttcaacagaatgtggcaaccaggtgtcatggagaaactccagctgggcccagagattctgcagcgg

SEQ ID NO: 656990 - DNA, 100 bp, Homo sapiens
tgaaccttatctgaagagtttctatgttaggtcaactgatccaactatgatcaagacactgaaggcagagatcctacaagaatccaggatgatgatccca

SEQ ID NO: 656991 - DNA, 100 bp, Homo sapiens
ggcctgagccccaaacctcagctgctgttccagaacttcccggaacttgcacagtcactatcatgaggcccccatgacccggaagcactatcaggtcacc

SEQ ID NO: 656992 - DNA, 100 bp, Homo sapiens
catctgatgctgtggaacttgcaaatcgaagcctcttcggtgatctttggtctgaagggctatgtggctgagcggaagggtgagagggaggagatgcagg

SEQ ID NO: 656993 - DNA, 102 bp, Homo sapiens
ttagtggccagcatcctcctgctgcagagatgggtctcggctgtgttacctaagctggagtgcagtggctattcccagcacaatcatagtgcactacagtct

SEQ ID NO: 656994 - DNA, 82 bp, Homo sapiens
cgggacttccagacactggaaaactggatgctgcagacactgaacgaggagccagtgactttgggtcacttggaaaaagcag

SEQ ID NO: 656995 - DNA, 132 bp, Homo sapiens
ccattttggaacgcccgtgccgcgtctccgcgttcccagcccgggtccccgcgttcacagccccagcgcagacctggaatggccaaatatcaaggtgaagttcaaagtttgaaactggatgatgattcagtt

SEQ ID NO: 656996 - DNA, 83 bp, Homo sapiens
aggatatcgacgtcgtgatccagaagtccagagctgaggactgcctgtttgcaggaaacattggcaaatttggagcgacagat

SEQ ID NO: 656997 - DNA, 75 bp, Homo sapiens
gttcaatggctactgcttgtcctccagactcatatgatgcttcctggtgtgtttagtggttggtgccattccaat

SEQ ID NO: 656998 - DNA, 75 bp, Homo sapiens
tcagccccgcgtacggcctttcacgagtcttcaagccttcaggcattcgtccctacaaatgcaacgtctgcaata

SEQ ID NO: 656999 - DNA, 82 bp, Homo sapiens
gcaaccccgtgggctgatcaataaagggaactggtgctacattaatgctcacggatgataccatcggggaccttaagaagct

SEQ ID NO: 657000 - DNA, 100 bp, Homo sapiens
gaatggctggtacccattggcaactgcctatgcaacgctgggcatgaggagcggagcggagaatgccaagagtgtgaacatggctacgcctcttcattcc

SEQ ID NO: 657001 - DNA, 90 bp, Homo sapiens
cttcgccccgggccccccagcatgaagaccccggcggacacagaattaaacaaccaccatgtcgagcaaaaaggcaaagaccaagaccac

SEQ ID NO: 657002 - DNA, 50 bp, Homo sapiens
ctggagtactcttattttgaaaagggggtgctcaaaggatttaaaggaga

SEQ ID NO: 657003 - DNA, 125 bp, Homo sapiens
ggacagggctgaggaaccatgtctccatccccgaccgccctcttctgtcttggtgctggagaatctggtaaaagcaccattgtgaagcagatgaggatcctgcatgttaatgggtttaatggaga

SEQ ID NO: 657004 - DNA, 78 bp, Homo sapiens
agctaatcttgtcaagaccatcaaggcgcagaaggagaactaccggcaggagaagaagcgcgccacacggcagctgct

SEQ ID NO: 657005 - DNA, 75 bp, Homo sapiens
agaagtcgggattaatgaaaattgtactcagctcaggtcttatcgaatgttacttagcctccaacagtattcgag

SEQ ID NO: 657006 - DNA, 100 bp, Homo sapiens
tgataccaatggagctggagatgcatttgttggaggacttccaatagtagtcagacattatcatcctgtcatactatggagccatgtacatcagatgaat

SEQ ID NO: 657007 - DNA, 100 bp, Homo sapiens
cgcaccggattccggagcacaagctccaccgcgcatgcgcacacgccccagacccaggctcaggttcaaaaacatttccccagctgatgctcatcggaac

SEQ ID NO: 657008 - DNA, 82 bp, Homo sapiens
tggaaggcgccgtggccctccccggaatgactggagactgatgcatgagggggctacggaggcgcaggagcggtggtgatgg

SEQ ID NO: 657009 - DNA, 90 bp, Homo sapiens
ggcggcgcgatggagcagcgaaaacgtggttgtagagttccgtgactcccaggtacaaattgttaccaagaaaatagacctaagccatgt

SEQ ID NO: 657010 - DNA, 94 bp, Homo sapiens
ggaaaaactggagagcttcatcaaaaatagtgatagctttgataagctgaagtacagtggtgtgatctcggctcacggcaacctctgtctccca

SEQ ID NO: 657011 - DNA, 101 bp, Homo sapiens
catccataaaaattcatcagagagcattttactactgagctgcaaagattcgcttcaagctcagcttatcaatatgggtgttattcctaccttagtgaaat

SEQ ID NO: 657012 - DNA, 99 bp, Homo sapiens
aaccttgccatttcacttccagaaaaccacaagttacttccaatggtggagttaccttaggaatggtgcttttatgtgaagctgctacctctgacatgg

SEQ ID NO: 657013 - DNA, 74 bp, Homo sapiens
tagccagtccctggagctggtgcacaggttccagcgcaaatctgtccaaggctgcctggggagcattggagaag

SEQ ID NO: 657014 - DNA, 145 bp, Homo sapiens
cgacaagaagctcatgagcagcctgcccaacttctgcgggatcttcaaccacctcgagcggctgctggacgaagtgaactccggagacggcattgactacagccagcagaagagggagaacattggggacttgatccaggagaca

SEQ ID NO: 657015 - DNA, 100 bp, Homo sapiens
cggaaacgatggcgcgaggccgcagagctaaatgggggcctctccagggagtgctctgttcacggctccatcgctgttacgtccttgagactttgtgctg

SEQ ID NO: 657016 - DNA, 83 bp, Homo sapiens
gaggggtccatacggcgttgttctgggaaccctaaggactctgcaatatgaataattccctagagaacaccatctcctttgaa

SEQ ID NO: 657017 - DNA, 75 bp, Homo sapiens
gattttgctgtcaaagttgtgtcagtgaatacaaacagtaatccagtccctcatagcactggtgaatgaccccca

SEQ ID NO: 657018 - DNA, 82 bp, Homo sapiens
gcgagcagcgttgggtttatgtctttatttgacgaaaacgggcgaccattgacgaggtggagacggacgtggtggagattga

SEQ ID NO: 657019 - DNA, 144 bp, Homo sapiens
tcaaacaaccaaccctgatttcctgcttctccttttcatgagtgttcctgtggtctctgcacctcctttctgcaatggtggcttgctatccgggaaatggaacaggttatgttcgccacgtggacaaccccaacggtgatggtc

SEQ ID NO: 657020 - DNA, 82 bp, Homo sapiens
cgcagcgtgtcaggcggagagacccgccgccaggtgagaagccctaccactgcaactgggacggctgcggctggaagtttgc

SEQ ID NO: 657021 - DNA, 98 bp, Homo sapiens
accaccatgcatgttatgaaagatctccttccagaaaccacctaccggttgagcaatgtttaaagcgtttgaaaaacatgaatttggagggctcaatt

SEQ ID NO: 657022 - DNA, 87 bp, Homo sapiens
ggagatcgcgcaggatttcaaaaccgacctgaggtttcagagcgcagccatcggtgcgctgcagtctcacagaaagttctccgctcc

SEQ ID NO: 657023 - DNA, 106 bp, Homo sapiens
tttgacatagacctggaccagccagaggacgcgggctctgaggatgagctggaggaggggatgatgaaccaggtggaagggcagcagaagaaccttgtgcacgcca

SEQ ID NO: 657024 - DNA, 51 bp, Homo sapiens
ctgagaagggattatctagcattaaaaggcaggaagagtgaggaagagaac

SEQ ID NO: 657025 - DNA, 90 bp, Homo sapiens
gattcttctgcctcagtctcccgagtagctgggactttagttcctgaggaggtgataaagaaggaaactgactccttaaaagtggcagcc

SEQ ID NO: 657026 - DNA, 51 bp, Homo sapiens
gtatactacatggcaaaatgggaaaggaatacaaacagaagcttgcacgag

SEQ ID NO: 657027 - DNA, 50 bp, Homo sapiens
tggacacagaccattgcaatggaaatggtcctgttctcgaacatcgaaga

SEQ ID NO: 657028 - DNA, 100 bp, Homo sapiens
cagttgccaatttggacactctagtagctgtaatagaatgccagcaaccagaagcagacttatacaggatggacagattcctggtgaaaggggctcaagg

SEQ ID NO: 657029 - DNA, 143 bp, Homo sapiens
tggggagtctgcctccagactgctgttcttatcaatgcactgggcactttcgattccttctttccaggctctaggtgctttgcagtccgctctctgggctgggtagaggtacctgaagaggacctggcaccggggaagagcag

SEQ ID NO: 657030 - DNA, 83 bp, Homo sapiens
gatcttcaacaagaggacccaggagaaattcgccctcaaagagtgtggccatctggggccgtgtggtatttgccactcaggag

SEQ ID NO: 657031 - DNA, 100 bp, Homo sapiens
gtgagatgcatttagagaaagctctgcgagagttgagcgttgtgtgtttggtctcctctgagcctccggcctccataagacccaaaacagatgacacctc

SEQ ID NO: 657032 - DNA, 100 bp, Homo sapiens
ttctatcctccatgctgctcactagaaaaggggctgtgaactacgaagttatacggaagcgtctcctcattgatggagatggtgctggagatgatcggag

SEQ ID NO: 657033 - DNA, 82 bp, Homo sapiens
ctcaaagaagtttgtccttctgctattgatcctgaagggatggcaccacagatgtgacgcggacaatgcattttgggacccc

SEQ ID NO: 657034 - DNA, 100 bp, Homo sapiens
tcaattggatgaaaacacaataggctacttcaaatctgaactgaattgtattcctattgaagagcagcttcagttggtgttgggcaatgctggatacaag

SEQ ID NO: 657035 - DNA, 100 bp, Homo sapiens
caaagcgcctgaggaccggcaacatggtgcggtcggggaataagactgggctggcttagatgaagatgaagatgcacatgtctgggaggataattgggat

SEQ ID NO: 657036 - DNA, 119 bp, Homo sapiens
ctcagccaggcagtggtcccaccatccgcaaacccagcccttcctagtcagcagactcaggccgcttacccaaagagacctgttctgatgatgtgtgtggtcctcaccacactgccctg

SEQ ID NO: 657037 - DNA, 83 bp, Homo sapiens
ggccttctgcgacgcgcagtccacgcaggagatccatgagaaggaactctgcgaccttcaagtcgtttgaggaccgagttggg

SEQ ID NO: 657038 - DNA, 75 bp, Homo sapiens
gacctggccaattctgacgccctcaaggtcgccaaggaggtggacccccagggggccttcaagctctacgacttg

SEQ ID NO: 657039 - DNA, 100 bp, Homo sapiens
gacaaacaagctgctgccaatgcaagtggatggagaaccctggatgcagccatgttgcacggttttgagcaaaattttggactgtgaagcaaggcattgg

SEQ ID NO: 657040 - DNA, 97 bp, Homo sapiens
tgcgggcccgggccatggccgccgccgatgccgaggtgtcatggagaaactccagctgggcccagagattctgcagcgggaaaatccaaggcttatt

SEQ ID NO: 657041 - DNA, 102 bp, Homo sapiens
aagtatgttgtaccttgtgacagaatatgccaaaaatggagaaatttttgaaagaactgatttcccttccgtataaaccaaaagccaaagaacacaaagcaa

SEQ ID NO: 657042 - DNA, 50 bp, Homo sapiens
agaaaaacatggagtcttctgtctgctggtaaccaggagccgacaacaac

SEQ ID NO: 657043 - DNA, 75 bp, Homo sapiens
gcggcagaactagctctgaaaactctgagcaagaatgttggctcaattaagaaacatcagggagataaattcaac

SEQ ID NO: 657044 - DNA, 51 bp, Homo sapiens
tgaaatacagactgttggggaacaagagagtgatattcccacagcccagag

SEQ ID NO: 657045 - DNA, 82 bp, Homo sapiens
cgcgcgcccactggagccgagcggtgaggaataaccggaccgacccccgacggtgcgtgtaacgaatccagaaaactctgga

SEQ ID NO: 657046 - DNA, 83 bp, Homo sapiens
ctgccaccagagtatcccatgaaaccaccaagcattattctcctaacggcacggagtgtgaatgtgaagacacaagctctttc

SEQ ID NO: 657047 - DNA, 80 bp, Homo sapiens
gctttcatcacagcctgaaaattcactggagtaatagctcttcaagtctgcaataaaaaatggcctccaacaaaactaca

SEQ ID NO: 657048 - DNA, 87 bp, Homo sapiens
ggaactggagccgaggcgcaggtggcgctgggtctcggcgcggaagatggccggcggcgtggacggccccatcgggatcccgttccc

SEQ ID NO: 657049 - DNA, 100 bp, Homo sapiens
tttcctatgtgaacaacagcatcgcccgggtggtgatctttgtgaagtctgtgcagcggtgcattgccttggcccagctactagtggagcagaacttccc

SEQ ID NO: 657050 - DNA, 75 bp, Homo sapiens
gaggaagatggcggcgggggcgaggttctcctgaaaagaaagctgaacattcatctataaatcaagaaaatggca

SEQ ID NO: 657051 - DNA, 98 bp, Homo sapiens
gcaactccgccgcccaccatggcttccgaggagctgtacgagacaaatcttcctattttcaagctgaaagaatctactgttagaagaagatacagtga

SEQ ID NO: 657052 - DNA, 75 bp, Homo sapiens
ggtgagggtgatgttcgggaggaggccttgtccacagcttccttcaaaatgtctactgttcacgaaatcctgtgc

SEQ ID NO: 657053 - DNA, 90 bp, Homo sapiens
ccagaactacaggggctctggccatcttcgtgaattaaacaaccaccatgtcgagcaaaaaggcaaagaccaagaccaccaagaagcgcc

SEQ ID NO: 657054 - DNA, 95 bp, Homo sapiens
ccattggcgtggatccgctggcctaaagtggtaaaatagctgtggagtgcagacccagtgaagagattgtagatgtcagatgggaagaactacac

SEQ ID NO: 657055 - DNA, 75 bp, Homo sapiens
catatgaaggactcattgatgaaatttatggcattcagaacaatgtatcggcaagcagtgtaaacggaggacttg

SEQ ID NO: 657056 - DNA, 75 bp, Homo sapiens
tcttggacccgcacagaaacctggagcaggtgagcacctgcggatctgtccccagggctacacctgctgcaccag

SEQ ID NO: 657057 - DNA, 75 bp, Homo sapiens
tggtcgtcttcagttaatggcaagacttgcagagggagaaagttactgttatgagcaccattaatccaactaagg

SEQ ID NO: 657058 - DNA, 82 bp, Homo sapiens
cacaaccatcgcagttggaagcccatggggcaggtgtgaacccacatccctgcccccagggccacctgcaggacgccgacac

SEQ ID NO: 657059 - DNA, 100 bp, Homo sapiens
gtgctggaggagcagaccaaggcagcgcagcagggtgagccccacccggagttcagcgcggactcccccagcccaggacacaactcagatgggaagttca

SEQ ID NO: 657060 - DNA, 97 bp, Homo sapiens
gctgaaagatttactgcctgaacatctgaaattgacacttatggtgctgctatctggagtaatagctttcatggtgaacttatcaatttattggatc

SEQ ID NO: 657061 - DNA, 97 bp, Homo sapiens
aaggtgttcacattcacacacaatccccatcagttgcacgtcttcgaaacctgctataaccccaaaggctggagggcagttgtgcgatcttgattca

SEQ ID NO: 657062 - DNA, 73 bp, Homo sapiens
tttgatgatcatgatacagttgataaaattgttgagttgccatataatgattactttgagtattttggaccag

SEQ ID NO: 657063 - DNA, 100 bp, Homo sapiens
gagcgagctgagtggttgtgtggtcgcgtctcggaaaccggtagcgcttgcagcatggactaaaaacagcccttgtagaaagagatgatttctcatcagg

SEQ ID NO: 657064 - DNA, 101 bp, Homo sapiens
actggcattggaacttcctgttctgatagcgtggaagataccatgtttgtgtggaagtgccccgtgtttgctatgccgatgctgtcctagtggaaacaact

SEQ ID NO: 657065 - DNA, 110 bp, Homo sapiens
tctgacacatgattggagctctttttgaaatgtttcttgcccttcctggagcagaggagccattatttatgcagttttttgtagcatcagatccaacagttaaaacagat

SEQ ID NO: 657066 - DNA, 75 bp, Homo sapiens
cagggccttctgctgcatttcctgcccagaggccgtggtccatatgaacgggaaggaggtgagcgggcggctgct

SEQ ID NO: 657067 - DNA, 80 bp, Homo sapiens
aatattcatcctgacttctttcctgaaatgctgtttgcaaagagagtgacttatatgtttgtcaagggctatttaatgag

SEQ ID NO: 657068 - DNA, 97 bp, Homo sapiens
tgagcctgcagagcgcgcagtacctccgctgtatttaaacttgaaacagatagaagtatatggcccttgataagaatctatcggggtggctttcttc

SEQ ID NO: 657069 - DNA, 75 bp, Homo sapiens
gaagatgctcgccgccgtctcccgcgtgctgtctggcgcttctcagaagccggactgcatcgacgtaggctggtg

SEQ ID NO: 657070 - DNA, 100 bp, Homo sapiens
tttcaatgctgcgaaagctgccaaaagtgacatgcagctattcaaaatcgtaatcctgtgtggtatcaggcactgactcacggtcttaatgaagaacaaa

SEQ ID NO: 657071 - DNA, 100 bp, Homo sapiens
cgcagaatctaccaacttcgccaccctgcggtggattgactacggcaaagtggccactcagggactggtgattgcagctggaagtgcccatgaccgagct

SEQ ID NO: 657072 - DNA, 98 bp, Homo sapiens
aactttcagctttggctttgctctctcttctgccatctgataatagaaagtcagaaacatggccctggatgatgtcgtgatcctgaatgtggacacca

SEQ ID NO: 657073 - DNA, 117 bp, Homo sapiens
gtggtgacccggtggtaccgggctcccgaggtcatcttgaattggatgcgctacacgcagacggggcaaacggattgtaagtgaaaagcctaccagagcaaggaaccaaggcataga

SEQ ID NO: 657074 - DNA, 85 bp, Homo sapiens
ggaaaaacaccttggcccgccggaagggcaggcacatgggcataggcaagcaccggaagcaccccggcggccgcggtaatgctgg

SEQ ID NO: 657075 - DNA, 100 bp, Homo sapiens
gaaggagaatacacacatcacaaagatcctggaatatataaatgtgttgtttgtggaactccattgtttaacactttgcgtcagagagcagatcctgttt

SEQ ID NO: 657076 - DNA, 101 bp, Homo sapiens
acagcctcagccaggttctccagagatgtgaaaggtgtagcagtcactcggcctacacccacagcatcgaccttgtgaacccagcgacctgactgccttgg

SEQ ID NO: 657077 - DNA, 75 bp, Homo sapiens
cggggtgtcagtgtggaggagactgagaggtcattttcttctgaggaagtcattcttaaggactgttctgtcccc

SEQ ID NO: 657078 - DNA, 100 bp, Homo sapiens
cagccacctccactgactcctacctccaaagtttatactatcagaccttattttcctaaggatgagctgaaagtacccatggcagacaagcctggtaaca

SEQ ID NO: 657079 - DNA, 75 bp, Homo sapiens
ctttaagaaattttatcttttgaaacacgttctgattaaccaagggcgcggatcaagaagatcatgcagacggac

SEQ ID NO: 657080 - DNA, 51 bp, Homo sapiens
gcagatcaactgacatccttaaagaactcacttgaaagcagtggggtccgg

SEQ ID NO: 657081 - DNA, 75 bp, Homo sapiens
aaagaccccacggacccgttcagctcaaactttggaacaaataccgaatttccaacattccatcactaatattcc

SEQ ID NO: 657082 - DNA, 74 bp, Homo sapiens
cttcaccaatgccgtccagctgctgctgacgctgaaggggtatcatcttatttcgtccttcacatctcactaac

SEQ ID NO: 657083 - DNA, 96 bp, Homo sapiens
tcactgacttcaagaatgaagccacggacccttgcggggaacgcccttttgcttgtgactggcagggctgcgacaagaagttcgcccgctccgacg

SEQ ID NO: 657084 - DNA, 50 bp, Homo sapiens
gaaattatgggtacccctgaatatgtggaaacggagcacactctgtcacc

SEQ ID NO: 657085 - DNA, 100 bp, Homo sapiens
agaaggggacttgggcccagtttatggcttccagtggaggcattttggggcagaatacagagatatggaatcagatgtcaccgggtgcgcatcaatgtac

SEQ ID NO: 657086 - DNA, 109 bp, Homo sapiens
gagcggttgtgcgatcagatcgatctaagatggcgactgtcgaaccgcagataatctcagtgataccttgaagaagctgaagataacagctgttgacaagactgaggat

SEQ ID NO: 657087 - DNA, 100 bp, Homo sapiens
aaaattaaaatgtgaagcagttgttgctgatgtcctagataaaggatccggtgtagtgattattatggatggaatagaaggacagtctgtggaagtttcc

SEQ ID NO: 657088 - DNA, 50 bp, Homo sapiens
cctgggcctcccggtccgcaagcagaaacctctgcgccatgagagccaag

SEQ ID NO: 657089 - DNA, 83 bp, Homo sapiens
cgcagccgccggcaatgccgcgaaggaaggtacatgtcccagagcaagcacacggaggcccgggagctcatgtactcgggagc

SEQ ID NO: 657090 - DNA, 96 bp, Homo sapiens
tcccgcgccggcggctcagcctagccccgttcggccggccgagaattctgagggggatgcccagacgctgacggaagtggacctcttcatttccac

SEQ ID NO: 657091 - DNA, 82 bp, Homo sapiens
aaacatccatatcataagtggaattttggagatattcaaaggacccttcaaagttgtacaagaaagcagatgatgttgcagc

SEQ ID NO: 657092 - DNA, 100 bp, Homo sapiens
atgaattcttcgtcaaagtctacccctcctgtcggggaggcaaggtggttttggaccagacaggcgtgtctaaagcaatggtggaacaaagcggcaaaag

SEQ ID NO: 657093 - DNA, 100 bp, Homo sapiens
ggaaaatatctgttaacagactgcttttacacctacgtgctggagaatctggtaaaagcaccattgtgaagcagatgaggatcctgcatgttaatgggtt

SEQ ID NO: 657094 - DNA, 82 bp, Homo sapiens
attcaagccaagctgaccaagaagccaaagaactggctaggcaaataagctttaaggttctctacttaaaagacaatgacta

SEQ ID NO: 657095 - DNA, 98 bp, Homo sapiens
gaacaactacaaaggctatgaaaagaagccctattgtaatgcgcttgcttccggcgtcatggctcaaagggccttcccgaatccttatgctgattata

SEQ ID NO: 657096 - DNA, 101 bp, Homo sapiens
tgaggtgagcaggcccggggagggtggttaccgctgaggagctgcagtctctgtcaaggttcacaatctatacagttgcataaaagtagcagaagactttg

SEQ ID NO: 657097 - DNA, 95 bp, Homo sapiens
tcacggcaagccatagcgtgggcagagtgatgatgcgggtgtgctggttggtgagacaggacagccggcaccagcgaatcagacttccacatttg

SEQ ID NO: 657098 - DNA, 90 bp, Homo sapiens
ggcgtttcacggtggcacatacatggtttgatgaacttgtgaaaaaattcaaagtcgaatatcatgctggtggctctacccagaattcaa

SEQ ID NO: 657099 - DNA, 74 bp, Homo sapiens
ggtgaggacagcctgccagagtctggccctggccaacgtcaacattgggagcctcatctgcaatgtaggggccg

SEQ ID NO: 657100 - DNA, 122 bp, Homo sapiens
cggccgtcccacgagctcacagagctatgaacagaatatcaaacagattggcacctttgcctctcaataatgacgatgaggacctgacaccagagcagaaggcagagcgtgagaaggagcgg

SEQ ID NO: 657101 - DNA, 100 bp, Homo sapiens
gagggacccaccgtagagactaaggtcaatgagctgaaggagaaaggcaacaaggccctgagcgtgggtaacatcgatgatgccttacagtgctactccg

SEQ ID NO: 657102 - DNA, 75 bp, Homo sapiens
ttttgcagcctgcaccggccaacggctgagtatgagtttatcagctctggtctctacctagtggtgttattgcac

SEQ ID NO: 657103 - DNA, 75 bp, Homo sapiens
tcagcgactcttctgacctccgcgcgacgtacccgccgccgccgttggctggagtacaaaattggacagctgtac

SEQ ID NO: 657104 - DNA, 100 bp, Homo sapiens
gtgtgagccaccgcgcctagccagactccatcagcagctatgaagcccagatcaccgccctgaagcaggagcgacagcagcagcagcaggactgtgagga

SEQ ID NO: 657105 - DNA, 100 bp, Homo sapiens
tgaagatgggggagctggccagcgagagccagggctccaaagaactcggtgaggcggaaccaaccctcctggccatgggaggggccgtggtggacgaggg

SEQ ID NO: 657106 - DNA, 76 bp, Homo sapiens
gtggccagggcgggaactgggagacctggaaggaagcgactgcactgatccaggatgagttccacccgttcatcga

SEQ ID NO: 657107 - DNA, 75 bp, Homo sapiens
gggacatcagggagaccaggacagaccaagagaataaggaccctctttatttgcagctccttcagcagactgcct

SEQ ID NO: 657108 - DNA, 75 bp, Homo sapiens
cacgaatctgcccacccctcctgtaacccagcctgtttcacttcttgaggcggggtttcaccatgttgcccagac

SEQ ID NO: 657109 - DNA, 51 bp, Homo sapiens
actaagtctacagtaaataaatgggccctgaaagcagatttggttccatac

SEQ ID NO: 657110 - DNA, 75 bp, Homo sapiens
ggaccatgctgctgaaagagtaccggatctgcatgccgctcaccgtagacgagttttttgtagcatcagatccaa

SEQ ID NO: 657111 - DNA, 99 bp, Homo sapiens
gctaaaggaaataggttattcatgagatttgctacaaaagacaaggctgggtttggaaataacttcaccacagtggacaacaaatccacagcccaaaat

SEQ ID NO: 657112 - DNA, 48 bp, Homo sapiens
aacaggcgttttgcaatgcagatgtagcctacaaggagaagatgaagg

SEQ ID NO: 657113 - DNA, 75 bp, Homo sapiens
tggatttacctgttttctgggagcttcgaagtgggtaattccagaattgattggccataccattgtcactgtatt

SEQ ID NO: 657114 - DNA, 74 bp, Homo sapiens
tagtatcggacatgatcctcatcttttatacactcttagtgctgtccagtgttctggacttggtgcctctttct

SEQ ID NO: 657115 - DNA, 100 bp, Homo sapiens
gctggcttatcaatattgctgtttgatgcgatcctgaccagtgcaaccacgggatggtgtcatggagaaactccagctgggcccagagattctgcagcgg

SEQ ID NO: 657116 - DNA, 100 bp, Homo sapiens
cggttccgggctcagggctcgttctggtctgcctagtcctgggctctaagggatggaaataagctggcacagatggaagaggctccacttttcccaggag

SEQ ID NO: 657117 - DNA, 90 bp, Homo sapiens
gtcggatacacacatattcatcatcatgggtgcatcggagatggcgtctaccagaaggggatggacttcattttggagaagctcaaccat

SEQ ID NO: 657118 - DNA, 100 bp, Homo sapiens
aatcgctcggcgacgggtcctgtccccgctcgttctgccttgggccagggcaaggcaatacagaagtgatccacacagggacattgcagagacaagcaag

SEQ ID NO: 657119 - DNA, 51 bp, Homo sapiens
gacgcgctgccgaggagaacccagcggggaggtggggaagacagggctcca

SEQ ID NO: 657120 - DNA, 100 bp, Homo sapiens
ccgagcgcggccctgcaggcgatgtcgccgaaaccgggctgcaggcggattgttcagattccattctgtggggaaattgactgtgaggactggatcaaaa

SEQ ID NO: 657121 - DNA, 110 bp, Homo sapiens
gccctggagtcaaagactgctgccagcggggtggaggcgaacagcagaccgtggtgaagccccctaatgtcctgactccacagttcctgtcccatgaccagggccagctc

SEQ ID NO: 657122 - DNA, 96 bp, Homo sapiens
ggacgtggtcaggctgcggccctgtgagaagaagcgggtgtggatgtcagcatgaatacacatcttaaagctgtgaaaatgaccctgaagaacaga

SEQ ID NO: 657123 - DNA, 50 bp, Homo sapiens
ggtgaaacaccactgaagcattgccaagaatgccgggacattctgcttcc

SEQ ID NO: 657124 - DNA, 74 bp, Homo sapiens
gaaggagagctgcatgatctgattgcagagagccctatgagtttgtctctctggaatggctgcaaaagtggttg

SEQ ID NO: 657125 - DNA, 50 bp, Homo sapiens
ccccgagtcggttggcattaagaggttttcctttggaatatggataaata

SEQ ID NO: 657126 - DNA, 75 bp, Homo sapiens
ggccggagcctcacagctgtattcatgtgggatgacgatgtcgataccaagaagcagaagaccgacgaggatgac

SEQ ID NO: 657127 - DNA, 74 bp, Homo sapiens
ggccgtcaaggagctggacctctacctggcctacttcgtgcgtgagcgaggggaacgcccttttgcttgtgact

SEQ ID NO: 657128 - DNA, 108 bp, Homo sapiens
gggttttcttagccctctacttttcaagacaccaagtgagaggccaaccagaccattcctcaagaattttgtatccaaggcccaaaagtttgttacccaagatgatga

SEQ ID NO: 657129 - DNA, 100 bp, Homo sapiens
gacagcaatgaggtgaacccaggggccgaagcccacccagggagttgatggctgcctgctgtttcccggggagatcatgaaacgaggtcgccttcccagc

SEQ ID NO: 657130 - DNA, 74 bp, Homo sapiens
tcgcctgtccccgccggcttcggcttcagcgccgcgggacgactgggtttggattcagaagaggattattatac

SEQ ID NO: 657131 - DNA, 76 bp, Homo sapiens
cgaggatcaaaatcttcgaaggagggggataagagcactgattatgctaatttttaccagggattgtgggattgta

SEQ ID NO: 657132 - DNA, 100 bp, Homo sapiens
ctgggagcctagaatgcatcagtgcccttgtggcgaatggggctcacgtcgaggctcaaaatttgggcggggaactggactcactcagccttctcaacgc

SEQ ID NO: 657133 - DNA, 98 bp, Homo sapiens
caaagacttatcagagtttctgagaggacttgtaatgaactatccacatattacaaatcttaccaagatccatgaagaggagtcggcagtggtgtgcc

SEQ ID NO: 657134 - DNA, 75 bp, Homo sapiens
atcatgctggccaagaagatcatcattaaggacggaggcacgaacatccagtcatggataaaaatgagctggttc

SEQ ID NO: 657135 - DNA, 90 bp, Homo sapiens
atcttggttgtaaacttgacctaaagaccattgcacttcgtgcccgaaacgccgaatataatcccaagtctctagtgatccctgaaaagt

SEQ ID NO: 657136 - DNA, 50 bp, Homo sapiens
caaggagtctcgctgcttttgtgggggacagccgcgccgctgctgctttt

SEQ ID NO: 657137 - DNA, 80 bp, Homo sapiens
cgccccagcaccgccggctccaagatcaagaaacacccagacttcccaaagaagcccctgaccccttatttccgcttctt

SEQ ID NO: 657138 - DNA, 97 bp, Homo sapiens
gaatcttgtcactttagccactgctactacagtgtgtggattctcatgccatataacttgtgtaaacaaagctccaaccacttgtccagttcctcct

SEQ ID NO: 657139 - DNA, 100 bp, Homo sapiens
tcaggggctgttcttttgctgcaaatgaagttgatggaattacactgtgatacgactgactgactgccattttcattaagaactgccacttagaggtacc

SEQ ID NO: 657140 - DNA, 128 bp, Homo sapiens
aaaccatgactgcgctggccaaggccatctccaagaacgtgctcttcgctcacctggatgacaacgagaggaggttgacatcatggacatatgtgagtccatcctggagaggaagcggcatgacagcg

SEQ ID NO: 657141 - DNA, 51 bp, Homo sapiens
agataggactccgaaaggcacccagttcttctcaccactaaatccaatacg

SEQ ID NO: 657142 - DNA, 96 bp, Homo sapiens
cgctcaccccgcggccgcaccttcccgccttctcaggtgcagaggccaagaccgttttgcccaagaaggagaaaatgaagctgaggcgtgagcaat

SEQ ID NO: 657143 - DNA, 83 bp, Homo sapiens
gatcttgcaaagtcctcaaggccagcagtgcattgaagtaatgggagatggatgccttaataatgaacactttgaagaactgg

SEQ ID NO: 657144 - DNA, 75 bp, Homo sapiens
tgcccggcgaggagaaccaactggtcccgaaagaggtggcttaccttatccaacaaaatgttatcccaccttttt

SEQ ID NO: 657145 - DNA, 98 bp, Homo sapiens
ttcacccatctgaagggaggaaatagtggcaggtgacagtctgcatgtgcagttttcaggtacaactccaaaaggagacattggagaagaaccaagct

SEQ ID NO: 657146 - DNA, 76 bp, Homo sapiens
cctcctgtggtttttgattcaagtcctgttctacctactgccaattggaaaggtgcagctatcttctttgaattca

SEQ ID NO: 657147 - DNA, 100 bp, Homo sapiens
agaactacagaaacctggtctccctagggtgtcctgatgtcagaagaagaagtgtttgaacttgttcctgatgatgagcggcagtgttcagcatgcagaa

SEQ ID NO: 657148 - DNA, 100 bp, Homo sapiens
caagtacctgtggaccgtgtgctgccactgcgggggcaagacgaaggattggtagcttatgtcgatcttgatgaaagagcaattgatgctctcagggaat

SEQ ID NO: 657149 - DNA, 90 bp, Homo sapiens
agcatattaatgaaaagtgccataaactgaaaaaccaaacatgagggtagcaggtctagtgacggagcccgcgcgcggcgccaccatgcg

SEQ ID NO: 657150 - DNA, 75 bp, Homo sapiens
agcaagagcaagatcaccgtgacatccgaggtgcctttctccaaaagggcagcccaatggatccaatggtgatga

SEQ ID NO: 657151 - DNA, 74 bp, Homo sapiens
ctgtgtgtacatcacccccatggaggccctggcagagcaggtattcctccacctcgtcctggcatgatgcgccc

SEQ ID NO: 657152 - DNA, 98 bp, Homo sapiens
atcgaagaatgaaaccggcttgttgtcttcaattaaaaaatttattaaaggaagcacacctaagctcagcaaagacccaaatatcgtcatagccaaga

SEQ ID NO: 657153 - DNA, 48 bp, Homo sapiens
catccgcgtctccgacaacttgccgacccagcctgggatggagagcga

SEQ ID NO: 657154 - DNA, 80 bp, Homo sapiens
catctacgagcaagtcaggctgaagctgaacagatgggtaaggatggcaggggttatgtcccagctaccatcaagatgac

SEQ ID NO: 657155 - DNA, 98 bp, Homo sapiens
cggcgccttctgcgtctcccggctggtggggaagcctctgcgccgccggcaccatgagttgcttcatcaagactgcagaggttagacaactccactgt

SEQ ID NO: 657156 - DNA, 83 bp, Homo sapiens
gggctgagcttgcaagaggatcaacatgcctgttctgtcaaaggaagagccctggggctgtgcgggcgctgcttccagaggag

SEQ ID NO: 657157 - DNA, 98 bp, Homo sapiens
cgacgttgacaggtctggtaccatgaattcctatgaaatgcggaaggcattagaagaagcaggctttggcagagcatgaggacgagctcccggagcac

SEQ ID NO: 657158 - DNA, 100 bp, Homo sapiens
caggagaggaagacccagtacagctggacgtttgccgtccactctgagacaaggcgaccagccagctcctgttggagacagattgggagtccattttgca

SEQ ID NO: 657159 - DNA, 82 bp, Homo sapiens
aaatgagtcgcatcttcaacccccatctaaaaagcttgtggtgaaggggggcaaaaaaaagaagcaagttctgaagttcact

SEQ ID NO: 657160 - DNA, 51 bp, Homo sapiens
aagctagttactagagggcctacaaaggctcacgaggcccagggaatcctc

SEQ ID NO: 657161 - DNA, 129 bp, Homo sapiens
tctagttcagctaagtgtcgttgttggtccttctctaaacgaccatctgaagcatctgcttacaagcagccttgcaaaggaccatcgcatgaaacttatgcaacaacaacaggaagtggctggactctc

SEQ ID NO: 657162 - DNA, 100 bp, Homo sapiens
tcccaaaaaactatcaagttgggatcaggcagagatgaagtggctgtaattgatgaaattcaaatgattagagatccagccagaggatgggcctggacca

SEQ ID NO: 657163 - DNA, 136 bp, Homo sapiens
gaagacttatgaacgccttgttgcccagttccccagttctggcagattctggaaactgtacattgaagcagaggtaaatgagctggatggtatcccgttgatcctggacaactgcaacatcagtgacagtaacccc

SEQ ID NO: 657164 - DNA, 74 bp, Homo sapiens
tattatgcaggtggtctgtgaagccacacagtgtccagatacgagggcacctgacttggactctgaagctgctg

SEQ ID NO: 657165 - DNA, 99 bp, Homo sapiens
agcagagatggaagatcaagtggtgacaccagctctgaagtaagcacagtagaactgctgcatctgcaacaacagcagatgctgtcattttttcagggg

SEQ ID NO: 657166 - DNA, 100 bp, Homo sapiens
cttcgtcgtgagatgtttgttttcaaggtgtactttcggctccatgcttccatcctgaagctcctggggaagcccgattctggggttggtgcagaggtcc

SEQ ID NO: 657167 - DNA, 111 bp, Homo sapiens
aaggtcccggaccccccggatctgacggggcgggacctggcgccaccttgcaggttccggagtctcaccactgcatttttcagagacgccatgggcttcttattaatgttt

SEQ ID NO: 657168 - DNA, 94 bp, Homo sapiens
aggcagaggagctgaagactccagtatgcaactgactacaaggaggcttgggcactgtttaaaggaaagttccgagaaggcatcgacaagccgg

SEQ ID NO: 657169 - DNA, 50 bp, Homo sapiens
accccactcctgggccgtccctgaagctgtgtcagcgtgttatgatgccg

SEQ ID NO: 657170 - DNA, 100 bp, Homo sapiens
caaagctcctcaagtctctctttcccgtccgcgatgagaagaggggcaagcggccgtctcccctcgcacaccagcgcaccatcctgggaagtgcatgtct

SEQ ID NO: 657171 - DNA, 98 bp, Homo sapiens
ctcacctgtgcaaccccagggacctggaaagacagacaggatggggaggaggttcttcagtgtatgcctgattatggtgacaagctgaacatggagct

SEQ ID NO: 657172 - DNA, 82 bp, Homo sapiens
caaagattgcagcaatcgatagcctgaatcagtatacacgaggcttttttggatgctcttccaagagtcacatgtccaaacc

SEQ ID NO: 657173 - DNA, 75 bp, Homo sapiens
tttacctgcttcccaatcccactgatgaggatcagcccatggtttgtggtaaatatgccagctctagaacacatg

SEQ ID NO: 657174 - DNA, 100 bp, Homo sapiens
gacaatcgaattcttgttattacatccaaagcagtactatactggcaattgctggagaagattttgcaattgttgcttctgatactcgattgagtgaagg

SEQ ID NO: 657175 - DNA, 73 bp, Homo sapiens
gacaccaaacaacattatgttgggggataaggacaaagtaaccgttaggtcctgatgaagaagctgttgtgga

SEQ ID NO: 657176 - DNA, 51 bp, Homo sapiens
agatgttccacgtaataatgctggtgcttttgaagatgatgatatcacgca

SEQ ID NO: 657177 - DNA, 96 bp, Homo sapiens
cagacacccttgaagacttgtttccaaccaccaaaatcccaaatcctcgatttcagagattatttcagcatcagcttctgagagataatcgagctg

SEQ ID NO: 657178 - DNA, 100 bp, Homo sapiens
gccggggagggttctgctgcttcgaaagctggtaaggcctgaggttttggcacaaataccagtgggaatagtatttttggaagtaaaccagcacctggga

SEQ ID NO: 657179 - DNA, 83 bp, Homo sapiens
ctttgcagtggtcatctatttccaggaatccttaccagagatccagaaagaacatcgcaatctgcttcaagaattaaaagtta

SEQ ID NO: 657180 - DNA, 95 bp, Homo sapiens
ctgtaatcaggttgtcaaaccgcaggcatttcaatcacattatggagggagctctgacagcctttcgcaagacatatgacaaaactgtggccctg

SEQ ID NO: 657181 - DNA, 100 bp, Homo sapiens
ggggatgtgagcgctgagcccttggcagttctccaaggagaagtacatcctggactcatcgccagagaaactccacaaggaattggaggaggagctcaaa

SEQ ID NO: 657182 - DNA, 100 bp, Homo sapiens
aaatgggctaataatgctggcaaagtggaaaaatgtgcggtgttggggatacacagtgaataagaggtaagccctggcctctaagggctcctatgctggg

SEQ ID NO: 657183 - DNA, 95 bp, Homo sapiens
gatttgttaaggattccaagtaactcttatttggccatcgaagacggcaatttggaggaaatggaagaggaagtacggcttaagaagcgaaaaag

SEQ ID NO: 657184 - DNA, 50 bp, Homo sapiens
ctgtccacctgcaaggattcaaagaaggctaacctctgctttgtggacat

SEQ ID NO: 657185 - DNA, 98 bp, Homo sapiens
gaaaagtgaaacaattcaggacactgtggtcaagaggccccggaaggtccaggtggccgcacttcaggccagccctcccctggatcaggatgaccggg

SEQ ID NO: 657186 - DNA, 125 bp, Homo sapiens
cagttagaggaggcagaagatttctggccagtggagagaggaattcctcaagacaccattccagactggtcttctgaggacctctgccctctacacagcggcctcttcaggtgcagggaggaaat

SEQ ID NO: 657187 - DNA, 133 bp, Homo sapiens
gcggcgacccctcggcgccgatgtccctgatccctggagcgacgacggccgctgcctaagctggaaagaacttgcttgctagaaaacaaagtgcaaggcttgacaaacacaatgacttgggatggaagttatt

SEQ ID NO: 657188 - DNA, 75 bp, Homo sapiens
caaaagcacaaggattctcgctgtgacagagacaacaccgagtatgagaagggaaggggaggagttacagcccgg

SEQ ID NO: 657189 - DNA, 75 bp, Homo sapiens
gaggtgaagacagatcatgggactgataaattggattatgttgacaaagagaaggcaattgccaaagccttggaa

SEQ ID NO: 657190 - DNA, 50 bp, Homo sapiens
agcagctggctaaccagaccgtgggcagatttcgccagaagtttgagtat

SEQ ID NO: 657191 - DNA, 90 bp, Homo sapiens
tccgaccccagcgtggcgttgctgcagcaggcgcagggccagtgggtgcaggcccagtgcaggatgccgagaacctcctcgtgggagcgc

SEQ ID NO: 657192 - DNA, 101 bp, Homo sapiens
tacgaggcgcctcgggtccccgcaccacctcctgctgccttcccgtcgccgctcccgaagcttttccagtcccagaaatcctggatagaaagcactttgac

SEQ ID NO: 657193 - DNA, 75 bp, Homo sapiens
gcgcggttggggccactgcgaggccgttttagaatgtgcagctctcactgctaacagaaagagggatgggtgaag

SEQ ID NO: 657194 - DNA, 80 bp, Homo sapiens
tcacaatttcagatcctaaactggttgctaaatggaaagattcagccatccctgtggaaagtgacaccgatgatgaagga

SEQ ID NO: 657195 - DNA, 80 bp, Homo sapiens
ccgtaaccacaaggaggacgaggtccagctgggagctccccgacctccaggagggcaagatccaagccatcagcgactcg

SEQ ID NO: 657196 - DNA, 100 bp, Homo sapiens
cgtggtcaccacgctcgtgctcatctcctactgtcccacggccaccgaagaggtttctgaaggattgtcattcttgcatagcagtgtgaaaatggtgcat

SEQ ID NO: 657197 - DNA, 82 bp, Homo sapiens
gccgcattttttaaccctagatctcgatgtattgctgtccttgaatattagcccatttgaaaacgcctgggaagttcagcca

SEQ ID NO: 657198 - DNA, 96 bp, Homo sapiens
tacgtgtcgtacaaaaaaacctcgtctttgttgtaggtttatctcagcgcctagcagacccagaggtatggggaggatgtcaggcaggaccagcag

SEQ ID NO: 657199 - DNA, 74 bp, Homo sapiens
tcagaaaccttcacatcttggtcaaggctttcgggtcacctccagcagctcccagttcagctcacgtgattcgg

SEQ ID NO: 657200 - DNA, 100 bp, Homo sapiens
gacaagaccctggtgaaggaggtcgtacagaggagatcgccaagcacaaggggcccccggtgttcactcaggaggagagatacaagatggtgcaggccat

SEQ ID NO: 657201 - DNA, 100 bp, Homo sapiens
aggcagcggggccgggatggaggacgttaactctaacgtgaacgcggaccaggaggaccaagaatcgccttcagccctgtctggtgcatccttggcagaa

SEQ ID NO: 657202 - DNA, 100 bp, Homo sapiens
cttacctacgtgctggccgccacagaacttacctgcctcttcatgcagttctccatcgtgccattctttccaaatggcaatgcatttgccactggctcag

SEQ ID NO: 657203 - DNA, 75 bp, Homo sapiens
ctaaagcagcgtgcgttcagccctgggggagcatttcctgaagacgtagtcatgcagcacgtcagcagctcccag

SEQ ID NO: 657204 - DNA, 49 bp, Homo sapiens
acaacagcctggcgtccgccacggaagagaagttaaacttctagagaaa

SEQ ID NO: 657205 - DNA, 82 bp, Homo sapiens
ggtgaccaacttgctgcggtttttgttcctggggctgagtgccctcgtgtactaatggtcacttgatgtgcgctggctgttt

SEQ ID NO: 657206 - DNA, 100 bp, Homo sapiens
tggcaaggaaagctccaaatccatgacagtcgaagtctctggtgaaaaggagaacagcttgaagacagatgattatggccgagacctgtcttctgtgcag

SEQ ID NO: 657207 - DNA, 100 bp, Homo sapiens
cggcgccgccactgccgcagccaggagatggttcgggcctagcggagccgggactggagaggcaaatttctggagatgtgcaatgatctcttagctagag

SEQ ID NO: 657208 - DNA, 75 bp, Homo sapiens
gcgatcgagagagaccggagaggtggagagtgtcttgggacaaggtgcgcattcctggtgtgctgcagcgattgg

SEQ ID NO: 657209 - DNA, 98 bp, Homo sapiens
cagacagcgaggaggagatgaataagtgggttcgttgtatttgtgacatctgtgggtttaatccaacagaagaagaatgtgaaaacctttgcatcttc

SEQ ID NO: 657210 - DNA, 94 bp, Homo sapiens
gggattcgcgctgctgggcacccacggagcctccggggctggagcaggccgggctctcgccatgggtcactgtcgcctctgccacgggaagttt

SEQ ID NO: 657211 - DNA, 100 bp, Homo sapiens
cccatctgaggcgtttgttgcagctacctgcacttctagatgttgggtgctgattgaccggagcggccgtcactttggtacaatcctcaattacctgcgg

SEQ ID NO: 657212 - DNA, 100 bp, Homo sapiens
cttcaacgcgggctgcgtgcacctgctggccggggaccccgaggccgcgctgcgggaaaccgtggctgccaggctttctgtttcactcttgcgtcacacc

SEQ ID NO: 657213 - DNA, 127 bp, Homo sapiens
aaatccgttaatgtcagggaaaaagttatcagttttatagagaatacatcaactcctgtggatcgatatctggtgatggacagaagtggtggataagaattagcgagtggccaatagatgatcattt

SEQ ID NO: 657214 - DNA, 101 bp, Homo sapiens
ctcacctcaccgtattttttgccaaggaaacttggatttaactggccagaagcaggtattcaaagcagagaacaatccctgggtgacccccattgcagacc

SEQ ID NO: 657215 - DNA, 100 bp, Homo sapiens
cgatgacgcagactggagggaggtgatgatgccctattcgacagaactgatattttatattgaaatggatcctccaggcattgctcatcgtgatctgaaa

SEQ ID NO: 657216 - DNA, 51 bp, Homo sapiens
gacgatgacgatgaggaagatgagtccatgttgtacttagatgggcagcgg

SEQ ID NO: 657217 - DNA, 90 bp, Homo sapiens
gctgccgccgccgggactcccgtcccagcagaacaccttccaccatgaccacctcagcaagttcccacttaaataaaggcatcaagcagg

SEQ ID NO: 657218 - DNA, 96 bp, Homo sapiens
cagggaccaccaggaccaccagggattcctgggccaataggtcaacctggtgaaagcccagcctccgtggttcttaatgcctcaggaggactattt

SEQ ID NO: 657219 - DNA, 100 bp, Homo sapiens
gcgatgtgaggaaaggcacctccaccagctctccgatgcggagataatggggaagctcttggcatggttggctgtaggtatgtgataccggaggagcagg

SEQ ID NO: 657220 - DNA, 75 bp, Homo sapiens
cttggatgaaaatatggattacaggttgatgtgggagtctttcccagggaactccgatgaagtgttccaacaaaa

SEQ ID NO: 657221 - DNA, 90 bp, Homo sapiens
cagacttcaaataactgcaagaactcctagactgtgaactgctctacacttggcctgtgccagtggccatgtgcaagtggtcactctcct

SEQ ID NO: 657222 - DNA, 101 bp, Homo sapiens
atccaacgctaaatgacagatatttgttgttacatcttttgggtagaggaggtttcagtgaagtttacaagtttaccaaacgagaaccagaagatacgaaa

SEQ ID NO: 657223 - DNA, 100 bp, Homo sapiens
cgagatgacgggctttctgctgccgcccgcaagcagaggctggccctgcataactcccgtttcctgagtctctgctctgagctggatggtcgagtccggc

SEQ ID NO: 657224 - DNA, 100 bp, Homo sapiens
tggaatcaaggagcttgagattggccaagcaggtagccagagagcgccatcagccaagaaaccatccactggcaagtgtcgtggacttcgtactgctagg

SEQ ID NO: 657225 - DNA, 122 bp, Homo sapiens
agatggcggatgccctgcagtacctgcagaaggtctctggagacatcttcagcagtctgcgctcctcagaccaccggcaggtgaacagcctgatgcagaccgaggagtgcccacctatgcta

SEQ ID NO: 657226 - DNA, 51 bp, Homo sapiens
agaagatggaattgtcaaagcttgtgaaagaagccggaagagattttacct

SEQ ID NO: 657227 - DNA, 80 bp, Homo sapiens
tgatcttgaacttctcagcctccagaacggtatgagcagcagcgggacaatcttgcccaacagtcattcaacatggaaca

SEQ ID NO: 657228 - DNA, 95 bp, Homo sapiens
ggcagaaggagccccagagctcaatgggggaccacagcatgcacttccttccagcagctacacaggttatcaatactctggctgaccatcatcat

SEQ ID NO: 657229 - DNA, 100 bp, Homo sapiens
tatacaacacaattataaaatgtcagcttttaaggaacatgccaattacttcggcgtggatgagaagctggggccagtggctgtgagcattaagcgggag

SEQ ID NO: 657230 - DNA, 83 bp, Homo sapiens
ggagaatgcgctcttcaagcggatcttgcaaattcaacacccaacagcttccttaatagcaaaggtagcaacagcccaggatg

SEQ ID NO: 657231 - DNA, 83 bp, Homo sapiens
tcaaatctactactgttcatggcagggcttatttcaaaacctttgtccctcagttccaggaggcagcatttgccaatggaaag

SEQ ID NO: 657232 - DNA, 75 bp, Homo sapiens
ttttcttttcatgtaccaagtcttgaagagcttgctggaggtggtggtatcatggatacagaaatgtctgaagat

SEQ ID NO: 657233 - DNA, 51 bp, Homo sapiens
cagccgcccgttgccagttctgcgcgttggagaccatcctgggcctcacag

SEQ ID NO: 657234 - DNA, 100 bp, Homo sapiens
cctcggtgaagagaggatatccatctgtgtagccgcttctctatacgggattccagggaactccaaattcagctaatacccaaggaaattcaacaccaaa

SEQ ID NO: 657235 - DNA, 121 bp, Homo sapiens
ggctgaggaaccatgtctccatccccgaccgccctcttctgtcttggcccggaggctgtttgatgtcctgcacgagcccttcttgaaagtaccctgatgaccccagctgccaaggaaaccc

SEQ ID NO: 657236 - DNA, 80 bp, Homo sapiens
ggcggacacctccacatcgccttttgccacctttccctttatttccggaggagaatggggtactaagagaaaagcacgaa

SEQ ID NO: 657237 - DNA, 88 bp, Homo sapiens
cagcaagttgtggaacttctacaggaacggattcgcttcaagctcagcttatcaatatgggtgttattcctaccttagtgaaattact

SEQ ID NO: 657238 - DNA, 75 bp, Homo sapiens
tgcagctgcctcagttcttagcgcagagttgtgtgggaccccagggtatctagcgccagagatccttaaatgctc

SEQ ID NO: 657239 - DNA, 96 bp, Homo sapiens
cgttcctatggacagacgcacagacacctgcaggtgaccttgggaaaggtgttgaaagtgatcgtcgtcatgcggagcctgttcattgatcgaaca

SEQ ID NO: 657240 - DNA, 51 bp, Homo sapiens
caggcacatcttaaagttcacacagcactgtaatctatgccagcaattatg

SEQ ID NO: 657241 - DNA, 100 bp, Homo sapiens
ttcaatgtagtcaatgtgacatgcgtttcatacagaagtacctgcttcagagacatgagaagattcatactggttgatgataattagaagcatgctttcc

SEQ ID NO: 657242 - DNA, 75 bp, Homo sapiens
acggtggacacgtcattctgagaggtttttgatgactgccacgaaggtggtgagatttcaccatctaactgtatt

SEQ ID NO: 657243 - DNA, 75 bp, Homo sapiens
caggacctgccgccgctgcacagccctttggagtgaatcaacctggaccttatatcatgtatacaactgtagatg

SEQ ID NO: 657244 - DNA, 82 bp, Homo sapiens
cctggagcctcagttggaagcagccgatccagcctgcggagcctgtggggcagagaaagtctattcgtgtgaccaggagagg

SEQ ID NO: 657245 - DNA, 83 bp, Homo sapiens
ttcttcagccgaggccgccgccgcctctccttgctgcagccatggaaattcagaaggagctggcggacatcactttagaccct

SEQ ID NO: 657246 - DNA, 100 bp, Homo sapiens
aggaagaaaacattcctgctctgaaagctcttcttgaaaaatgcaaagatgtagatgagagaaatgaggttgagactgagctaaagttaatctgttgtga

SEQ ID NO: 657247 - DNA, 75 bp, Homo sapiens
ggggagtggaaaggctctcagtgaaaaaggatgacgcggcatggcaagaactgcaccgcaggggccgtctacacc

SEQ ID NO: 657248 - DNA, 100 bp, Homo sapiens
cgctacgtcctgagcttcctgcggacgtccaagctgctgcttccggatgactttaagatgctcagtgacctccaggagtctgtggccagctctcgccccc

SEQ ID NO: 657249 - DNA, 101 bp, Homo sapiens
catgaatatgcagctcctgctgagatgtaatccctgttcattactacttaatacctccaccaacaaagactaagaatggcagcaaagataaggaaaaagat

SEQ ID NO: 657250 - DNA, 97 bp, Homo sapiens
ggacaaaaatgcaaaagactgctaaagtgagagtgaccaggcttgttctggatccctatttattaaagcttggatttacactgggcaacgtggttgg

SEQ ID NO: 657251 - DNA, 90 bp, Homo sapiens
cgccgggggcttcccggaggccaaccgtatcgccagcaagtacggattcatcaacataggacaggcagagattgtcaagaggctgaatgc

SEQ ID NO: 657252 - DNA, 100 bp, Homo sapiens
gggagaatgtaactgaaagatacatggcttgcaaaaagtaaaccacgatcgttatgctgagtatctggaatcccggcgcctagaacgtgtttttcgggag

SEQ ID NO: 657253 - DNA, 90 bp, Homo sapiens
tcgggggccaactctgaggagtccactgcagcaggttaaaaagatcaagtggcatgagcagccttttggggaaaattggtgccaagaagc

SEQ ID NO: 657254 - DNA, 74 bp, Homo sapiens
tagaacactctctccccagaaatccaacttctcaagattcatgttacatgtaaagctgtcctcatttgtgacta

SEQ ID NO: 657255 - DNA, 75 bp, Homo sapiens
ttccggtcacgccatcgttgctgccttcttcgtcaaggcctatgaaaggaggttccctacatgtcctttgattcc

SEQ ID NO: 657256 - DNA, 100 bp, Homo sapiens
cagaggagcagctgtgtcacttgtggctgcagaccctgcgggagatgctggagaagctgaatgtagccatagctgtaacgtataaccatgatgggtctta

SEQ ID NO: 657257 - DNA, 98 bp, Homo sapiens
aaagacggacagcccatcgtgtgaactatagagtttgtggacagatttatattggggtcctactgggcaatagacaccaatccgaaggaagatgtgct

SEQ ID NO: 657258 - DNA, 97 bp, Homo sapiens
cgccgccgccgcctcggccgaccagggacctgcccgcctgcggctgctccggtttgcctgagaatacagatcaacccacagaacaaagcggatttcc

SEQ ID NO: 657259 - DNA, 100 bp, Homo sapiens
tgggtcaggacaattccatttggggaccagagatggacggtcactcagcctatggagaatctgcaaaatggctgataatttggatgaatttattgaagag

SEQ ID NO: 657260 - DNA, 90 bp, Homo sapiens
ggccaccagtttccggacagcttcgtgctggcctggagatgcccaaagatgagctgcccaaccataactgcattaagcacctgcgctcag

SEQ ID NO: 657261 - DNA, 100 bp, Homo sapiens
cttttatggacgagttcttttctgaggttctgaagctgctgctcgtggcctgggatcgccgcctcatttttgccattggcacctccagcaccacaggcga

SEQ ID NO: 657262 - DNA, 82 bp, Homo sapiens
tgaagttttaaaggatgatgaacgaaggcagagcacatttgtgtgtccaactgaaattatcgcttttggcgacagacttgaa

SEQ ID NO: 657263 - DNA, 74 bp, Homo sapiens
ttgaagtcaaagaattgaaaccctccaaaccacgtcatctgattgtgctagaagcccatggattgaaaccagtt

SEQ ID NO: 657264 - DNA, 100 bp, Homo sapiens
ttattcatttctgtgcaaaacaggactggctgatactacatattccagatgggcgaaatgaccctgaatgtgacctgtgtggtggagacccagaaaagaa

SEQ ID NO: 657265 - DNA, 100 bp, Homo sapiens
attctggaagttctgaggaaaagcagcgcggtgtggaggaaactgcagctgagtgccgaaaactaggcgtcactgcgcatgcgtatgtggtagactgcag

SEQ ID NO: 657266 - DNA, 110 bp, Homo sapiens
acgctgtttcagagcgtttgggtcctctgaggccccttgaccaggattttgcaggttaattcctcacacacgttcaccaggtacttggacaatatattttgaaggtgcag

SEQ ID NO: 657267 - DNA, 100 bp, Homo sapiens
aagataataaagtgttgaagaaataaacaaaatcagaatatatgggatcagttagaaagctcttatttaaggaaggtgggagtcaatcattttgacaagt

SEQ ID NO: 657268 - DNA, 101 bp, Homo sapiens
gctgatctaaacgtggaaaaatacccggcagtgtcacctgctcctggatgtcttcaactccaccgagcatgagctgaccgtcagcaccaggagcagcgagg

SEQ ID NO: 657269 - DNA, 83 bp, Homo sapiens
cttccggagcttctcagaagacagagggttttcttttgagtgctactggcgggacgtgtggaaggaacaaggctgaggttggg

SEQ ID NO: 657270 - DNA, 101 bp, Homo sapiens
ggagaagctgcctgtctacatcagcctgggctgcagcgcgctgccgccgcggggccggcagaacattgatgatggcacctcagatcgcccctacagccatg

SEQ ID NO: 657271 - DNA, 82 bp, Homo sapiens
ggaagcaccgcacatttttcaggtgctccatctcgaaaagcgagaaaggcctccagaccaccaacactcagctcaagtcaaa

SEQ ID NO: 657272 - DNA, 74 bp, Homo sapiens
tatatgcttgtgcttctccaaaaacacccatccaggcagggggatatggaactctaactccttgccactcaaga

SEQ ID NO: 657273 - DNA, 83 bp, Homo sapiens
ctgcagtggcgcctaaagtctgagagagggaagtcgcctctgtgctcgtcctcagaatggttggaatgaccctccagctttga

SEQ ID NO: 657274 - DNA, 100 bp, Homo sapiens
gcagaaggggagacacattttatgttgtgtcatttcgaagggttaatacaatctgttggaatgacactggagaatatattttatctggctcagatgacac

SEQ ID NO: 657275 - DNA, 100 bp, Homo sapiens
cacgcgagtcccgctccaaggcttcaaggctttgcaagggggcatgtgtccgtttcgccacatcagtggtgagaagacagttgtgtgcaaacactggctg

SEQ ID NO: 657276 - DNA, 100 bp, Homo sapiens
cctgtcttcagatcttcacagcacagttcctgggaaggtggagccaccagcctctccctgggccgccgtcccacccccacctcgcccgagtccggggcgg

SEQ ID NO: 657277 - DNA, 116 bp, Homo sapiens
ggaaaacaagcctggttcagttaaacctactcaaactattggagctgctgctcaagaggtcatcaaaataatcaccaaacaatttgtaatttttaataatacttacatttacagtg

SEQ ID NO: 657278 - DNA, 50 bp, Homo sapiens
ctaaagcagcgtgcgttcagccctgggaacccagcgggtgccgcttctcc

SEQ ID NO: 657279 - DNA, 74 bp, Homo sapiens
ctgtcgctgcccgtgtgattactgagactcaggatgtacagttacccagcacgtgtacctcctcctcctcctat

SEQ ID NO: 657280 - DNA, 75 bp, Homo sapiens
ggaggcaccctgaggacgccaagaggcagccccgaggccggcccagaacaaagttctggacgtggatggtgtgaa

SEQ ID NO: 657281 - DNA, 82 bp, Homo sapiens
ttcagagcgcgtatggagtggaaacgcttgtagggcttcaccagaaacacagtgctctgtgcctatacagtgtacggataaa

SEQ ID NO: 657282 - DNA, 82 bp, Homo sapiens
accagggtgacttctcgctctccgtcagcaagagtgagccatggagctacgtgtggggaacaagtaccgcctgggacggaag

SEQ ID NO: 657283 - DNA, 74 bp, Homo sapiens
tccttacccgacctcagatgctcccttctgctcctgaactttcacgatggccgtaaagcacagcagcacatcga

SEQ ID NO: 657284 - DNA, 75 bp, Homo sapiens
agcaatctcctcctccactgccactacagggaagtgcatcacatgtcagacaagttggatggcttgaggactggt

SEQ ID NO: 657285 - DNA, 83 bp, Homo sapiens
caacccctgctgcctgtgctggtgctgctgctgtagctgctcctgggaacggcaggagcagctgatgggatatcggaagagag

SEQ ID NO: 657286 - DNA, 101 bp, Homo sapiens
acgttcccaaggttgtgagtgcttatggccacattcctgcatcagctcagccatcgcgaactcccccactggaaaggattctgaaagaaatgaagtcagcc

SEQ ID NO: 657287 - DNA, 98 bp, Homo sapiens
gctcgggatggtgccacaggaggctgtgcgggccccgctccgcttcgaatggcgcttctctgaagtagctttggaaagtagagaagaaaatccagttt

SEQ ID NO: 657288 - DNA, 82 bp, Homo sapiens
gttgtccaccaagctccttacttcggtgctggttcaactccaccagtaactgttttcaaaggttcaaaaaaaccttacttaa

SEQ ID NO: 657289 - DNA, 75 bp, Homo sapiens
gtgggcctcatcatcttcctcctgtgcaccctcttcatcaggtcagccatgtcatctgagcctcccccaccacca

SEQ ID NO: 657290 - DNA, 82 bp, Homo sapiens
cgggggaagcagcacgggatcccagcctcaggcctgcacggacggtgttggttggggtcaaaatgcagatcttcgtgaaaac

SEQ ID NO: 657291 - DNA, 82 bp, Homo sapiens
caggatctcgggctcggaacgagactgcacggtggagtgtgttactcttggggctggaatgagcatggcatgtgcggagatg

SEQ ID NO: 657292 - DNA, 95 bp, Homo sapiens
ccgcagtgtgtgcattttccttcccaacgatgaatctctgaacatcatcataaatggtcagcgccaaactggaggggaatgaaacactaaaagtt

SEQ ID NO: 657293 - DNA, 101 bp, Homo sapiens
gttccccgccaaccgcaaccattgacgccatgtcgggttattcgagtgaccgagaccgcggccgggaccgaggggaaccgaagacgtgtttgcaaatgtcc

SEQ ID NO: 657294 - DNA, 100 bp, Homo sapiens
tacgacagatccgacatcgacgcagtctacgttatcaatactctggctgaccatcatcatcgtgggactgactttggtggaagtccttggttacatgtca

SEQ ID NO: 657295 - DNA, 101 bp, Homo sapiens
gaagaggattggaggtgtcagtgttaaaggaacctctacaacgaaggtgaagccacggaagataaggccccttcccagctgcctgcctgccctagccagct

SEQ ID NO: 657296 - DNA, 90 bp, Homo sapiens
cagaaaattgctgatggagtgaagacttaactgatggttcatatgatgatgttctaaatgctgaacaacttcagaaactcctttacctgc

SEQ ID NO: 657297 - DNA, 122 bp, Homo sapiens
ccactgaagtaacagcagcaatgaccttccctcgggaattccacctctgcgtttttccctccaggcaccagagagcgtccttgccgagcactaccaggacctgcggaggaagcccttctacc

SEQ ID NO: 657298 - DNA, 97 bp, Homo sapiens
ggaaaggatgcaaattctccagaatttcaagcacaaccccaaaattaacaccatcttcatatccaagctctggccaagtattttatttcgtccctaa

SEQ ID NO: 657299 - DNA, 100 bp, Homo sapiens
tggccgccggctccgcggcgatggcgctctataacccctaccgccacggctgacggggtacgggatccaccactgctttgccaggagcatgatgggccac

SEQ ID NO: 657300 - DNA, 74 bp, Homo sapiens
aaatgggaaaactcgaaacagattttaaagtgaagtcactgcttttgctgtcttggatcaagaccagaaagaaa

SEQ ID NO: 657301 - DNA, 82 bp, Homo sapiens
gtcggtgccggcagccagcacggccaaaccccctcctctgcctcgctccaacacaggtgagaagccctaccactgcaactgg

SEQ ID NO: 657302 - DNA, 100 bp, Homo sapiens
ggtatcaaatggaaagtttttccaaatattcatctgtacagtcagtggaacctagtgaagtgaaacaagcaacttcaacatcaggaccagcatcagcagt

SEQ ID NO: 657303 - DNA, 100 bp, Homo sapiens
ccacaccacgctctcagtcagcctggggaatgagacccaaactgctcatacagaattacgcatttccacttctaatgattttagatgctgtgagcctaga

SEQ ID NO: 657304 - DNA, 98 bp, Homo sapiens
ctgcatcacagaagctggaagttctgatgttccactgaaatcacaatggaaagtcttgacttgactgatcttcccagacccgtcagattttgaccgct

SEQ ID NO: 657305 - DNA, 83 bp, Homo sapiens
cgcaggtcctcgcggtgcgcaccgtttgcgacttggccaccagcccctcgggttccaagatgcagctactggagacagagttc

SEQ ID NO: 657306 - DNA, 100 bp, Homo sapiens
gtttcggcggccgggagggagttgtcggcgccgcggccgctgcggacggacgctcgcctgccggctgaggttctctacttaaaagacaatgactactgat

SEQ ID NO: 657307 - DNA, 100 bp, Homo sapiens
cacggattgctttgaaagccttgatcaggggaaaggtacctgtctattgcactaagactggtgtaaaacatttgcaccacaaggctcaagagtttgacat

SEQ ID NO: 657308 - DNA, 98 bp, Homo sapiens
atccaacgagatgaagatagctatgtaattaacggcaaaaaatggtggagcagtggtctcaacaaatggcagctattacatcagacagtgacgagtcc

SEQ ID NO: 657309 - DNA, 100 bp, Homo sapiens
tcctgttccaccttcagagcgtcacggcgtacgccctcatggggaaaatctccccggtgactttcagtacctggagtagaacagaaaaattattatgtct

SEQ ID NO: 657310 - DNA, 137 bp, Homo sapiens
ggctggcgctgcgccgggccccgggccccgatggccccgaccgcgtgctggagctcttcgacccacccaagacacgatgaggcgagtggtacgacagagcaagtttcggcatgtatttgggcaagcggtgaaaaatg

SEQ ID NO: 657311 - DNA, 100 bp, Homo sapiens
ctccacttggcccgtccatagagccagaccctgaaggaagattgggaatctgaaaaagatttatgtttagaaaatctacgcaaagaactgtctgcaaagc

SEQ ID NO: 657312 - DNA, 99 bp, Homo sapiens
cgagaagtgaccccagcaaaagaaaaatattgctgtacctaaattcaaggaagaggaagaacgtctgagaaataaaattcgagctgatcatgagaaggc

SEQ ID NO: 657313 - DNA, 100 bp, Homo sapiens
ccgggatggactgcgaggagcccagacacaaggagctgcgggcgtctttggagacacagcgtgctcagagcagtcgactctgcgtggcactgaaacacga

SEQ ID NO: 657314 - DNA, 126 bp, Homo sapiens
cactgtgtgagggtccatcttcttctgatcacagatggagtggaatggcttgaagatgcaattgctaaccatccaggaggagttaaacaacaaaaagtcagaattggaacaagcaaaggaagagca

SEQ ID NO: 657315 - DNA, 90 bp, Homo sapiens
attgcacttcattgtcgagaatgtaagaacttcaattccatgtttgcaataataagatttgaatataacctgccgctttgcaggtgtatt

SEQ ID NO: 657316 - DNA, 90 bp, Homo sapiens
agctgaccctgggagacatcgacggttctgggccggagaaggggcgacgttcgggcaccccccgaatggacaatctttccttctgtcaac

SEQ ID NO: 657317 - DNA, 75 bp, Homo sapiens
gatggctgcgttgacacgtcttatttaatccacatcataggaaactaaatatattttgccaactttggaaaaaga

SEQ ID NO: 657318 - DNA, 75 bp, Homo sapiens
ttacccttcaggttattcttccagttacacagtgaccattgtgaggtagatattttgttctaattttccagatga

SEQ ID NO: 657319 - DNA, 50 bp, Homo sapiens
ggggctgaacgcggctttctggctgtcagcccatcagaatggagacttct

SEQ ID NO: 657320 - DNA, 100 bp, Homo sapiens
gcgcccgctggccgggctggctgcggccgccctgggccgggccccaccggacgcgcgggaggtgacagtgacagggccgctacaggatgcagaggccacg

SEQ ID NO: 657321 - DNA, 100 bp, Homo sapiens
caaggggggcaagggttcggccgtgccctccgacagccaggcccgcgagaagtactccaaagattcaggtttactcacgtcatccagcagagaatggaaa

SEQ ID NO: 657322 - DNA, 74 bp, Homo sapiens
aatgtcagggaccttctggatattttacgggaaagaggttgcccccaagtttcctggcagtgtgtgatactgag

SEQ ID NO: 657323 - DNA, 75 bp, Homo sapiens
gacctcttgacacttcctagagctcagcctggttggttcttacttgaaatctccaaaattccctatttggattgt

SEQ ID NO: 657324 - DNA, 99 bp, Homo sapiens
tcagagaagaaataatggcaaataacttttccttggagagtcataacatatcactgactggcaccgaccgtcacgagctaacttcctggaagagctttc

SEQ ID NO: 657325 - DNA, 74 bp, Homo sapiens
gtggctgacagcctgagctccatggaaagggtgaggtggctttgaccccgggttgcccggccagcacgaccgag

SEQ ID NO: 657326 - DNA, 75 bp, Homo sapiens
aaggccttggtggtatagatttcagtagctcctcagataaaaagactcgaagagtgtggaaaaactaccttcctg

SEQ ID NO: 657327 - DNA, 51 bp, Homo sapiens
attagacaacagagtcattgatcttagggtgatgatgaacagtctacacag

SEQ ID NO: 657328 - DNA, 100 bp, Homo sapiens
ctgcgctgggaaacatggcgaccgagggaatgatccttactaaccacgaccatcaaatccgtgtcggagtccttacaggcctggtctccaagtcctctcc

SEQ ID NO: 657329 - DNA, 85 bp, Homo sapiens
gaggggccgcgccgccaccgtctgaactaggatgtcccgacatgaagttgatgcggatgaaattaaaaggctaggaaagagattt

SEQ ID NO: 657330 - DNA, 100 bp, Homo sapiens
gacccggaaacttaggggccacgtgagccacggccacggccgcataggtggtgttcccactgatgaagagcaggcgactgggttggagagggagatcatg

SEQ ID NO: 657331 - DNA, 112 bp, Homo sapiens
tggcctccaaccagtcggagcgagacatggcgtgggtgaaaagagttggggatgatcagcggatgttcccattcctgtcatttactgtggccgggctggagcccaccagcca

SEQ ID NO: 657332 - DNA, 100 bp, Homo sapiens
attgtcatgcagggcttggtcgaacagataaatcgattcatgtaaagctggacgtgggcaagctgcacacccagcctaagttagcggcccagctcaggat

SEQ ID NO: 657333 - DNA, 96 bp, Homo sapiens
aggaggagcggcagggcatgaaggtccaggcgctggccagggttctcatgtatcagccatcttctgtaagggtgcccagtgtgacttcggttgatc

SEQ ID NO: 657334 - DNA, 100 bp, Homo sapiens
gaggtagccatgatgccccacttggtgaatggagatgcagctcagcagatgggagaagaagttgtccatgttcacactgggtgaaggaagctgaaaccac

SEQ ID NO: 657335 - DNA, 50 bp, Homo sapiens
gctggcggtgcctggacgtacaaggttcaggataagtttgaggtgctgaa

SEQ ID NO: 657336 - DNA, 100 bp, Homo sapiens
gattaccaccaggagattgcaaggcaggggaaatggaaggtgatgcagtcgaagccattgtggaggagtccgaaacttttattaaaggaaaggagagaaa

SEQ ID NO: 657337 - DNA, 88 bp, Homo sapiens
ccggaccgcccagccgagacggagccggacccgccgcctcccggcggaaggagagttttacatggaagtggcttacagaaacttggcg

SEQ ID NO: 657338 - DNA, 50 bp, Homo sapiens
cttcccatgaggcaggctcttcagggaatcccggaggcaagacacttgag

SEQ ID NO: 657339 - DNA, 76 bp, Homo sapiens
cggcgaaaggagctggtgcctgtgcaagttgttgagccagatgacgtgtactactgtggaataaagtacatcaaag

SEQ ID NO: 657340 - DNA, 100 bp, Homo sapiens
acagcctggatccctggggcatcaccaagccgctaaaccattctcagtaactccttaccttcagaggtgctggagaatctggtaaaagcaccattgtgaa

SEQ ID NO: 657341 - DNA, 95 bp, Homo sapiens
gggatggacaacctgcattggacccagctattgctgcagcatttgccaaggagacatccctcttagcaattctgtggtgttcttggtcacacatt

SEQ ID NO: 657342 - DNA, 83 bp, Homo sapiens
cgtctgtgttgtgactgctttggacgtgggagtcacctgaaagccaggaaatggtagttgatgtcacttggcgatattcctgc

SEQ ID NO: 657343 - DNA, 75 bp, Homo sapiens
tttactttctgacaatgcagcttctcttgcagtgcaggctccggtagattgcaaatgacctgctttctttctgtt

SEQ ID NO: 657344 - DNA, 100 bp, Homo sapiens
gccaggggcgtgccagtggctgaatttaacacggagaccaccccagctacgaacagattcaggtggtttcagacaccctcacaggttttctaccatgcag

SEQ ID NO: 657345 - DNA, 100 bp, Homo sapiens
gatttctctagtggacagataacccaagtcaaatctaagcatttaaaagacaggtatgagcagcagcgggacaatcttgcccaacagtcattcaacatgg

SEQ ID NO: 657346 - DNA, 90 bp, Homo sapiens
gggactgggagtcgttagtgagttcgatcctttggtacagaagacagaccgacagatcgtccaataccacctcgagatgaagtctttgaa

SEQ ID NO: 657347 - DNA, 89 bp, Homo sapiens
cgctggctctgctgctgccgccggcgaaggaggaggcgttgccgggagcatattaatgaaaagtgccataaactgaaaaaccaaacatg

SEQ ID NO: 657348 - DNA, 100 bp, Homo sapiens
ttcctggatgttcctggatgcctgacatcacattgatacatgctggaggtctggctcagaataactgaagtgaagtgatggactccgatttggagagtag

SEQ ID NO: 657349 - DNA, 102 bp, Homo sapiens
atgactttgagccctaccttactggacagtcaaatcagagtctgtagaagaggcgacaccagggcttccaaatgaacaaccgaaaggaagatatggaaatca

SEQ ID NO: 657350 - DNA, 50 bp, Homo sapiens
cggacagagcccgtggtcgcgcaggtaaatatttccaactacagtctggt

SEQ ID NO: 657351 - DNA, 74 bp, Homo sapiens
ttgcggatagctccaaactgggatattctcagaccagtatccttcaggggttctcttactctgatttgcggaaa

SEQ ID NO: 657352 - DNA, 88 bp, Homo sapiens
gggtgtccttcggagtggacgaggaggagcgggtccgggtgctgcagggtgtccgggattttttatcaagcagaaatgcatcgaacaa

SEQ ID NO: 657353 - DNA, 74 bp, Homo sapiens
gattcgcagtggtcgcttcttctccttgaggatgtctacagttgctttcgcttcctacgtgatgtttttgcaga

SEQ ID NO: 657354 - DNA, 82 bp, Homo sapiens
gcggggcccgccgccgctcaccgcagccccctcctggcgacccgcaatcaggatggctaaaggtgaccccaagaaaccaaag

SEQ ID NO: 657355 - DNA, 100 bp, Homo sapiens
tggaggaagcaatacatccagtatgaggatatccgacatgaagccagtgacttcccatgtagagtggccaagcttcctaagaacaaaaaccgaaataggt

SEQ ID NO: 657356 - DNA, 75 bp, Homo sapiens
aaagcaaagcgcagaaatgttggatttgaatcaggatttgcatgaagatgtcgaagaagctggtgcactgcagaa

SEQ ID NO: 657357 - DNA, 50 bp, Homo sapiens
caaagtcgaatgattcagacttgcaagtgacattgtgaggaagattgatc

SEQ ID NO: 657358 - DNA, 90 bp, Homo sapiens
ctcaaccctgagctgcgtgagaacccgcccatgaagccagatttctcccaggggcaagattcttgccaagagaattaatgtgcgtattga

SEQ ID NO: 657359 - DNA, 120 bp, Homo sapiens
ggaatgtgatcacagagcctatttacccagaagtagtccatatggcgcttcatctaattgatgaaatggatttgaatggtgacaaaaagctctctgaagaagagattctggaaaacccgg

SEQ ID NO: 657360 - DNA, 100 bp, Homo sapiens
agaaacaaaatgtcaacaaattgatggccatccgggtgacctgcataggttcctgcggggtctccaacaaggctaatgacacagcgtgggtagtggagga

SEQ ID NO: 657361 - DNA, 51 bp, Homo sapiens
cagattcgcagtggtcgcttcttctccttgttgctctaggtcgtaaccagc

SEQ ID NO: 657362 - DNA, 74 bp, Homo sapiens
aatatccagtttgagccatcggatctaagatccaaaagacatgtagactgccaaagtgtatgggatgctttcaa

SEQ ID NO: 657363 - DNA, 75 bp, Homo sapiens
aagagtttgaggacatggagagaagtctgccactagctgttttggagtcagcggaagatcaccaaggccagggag

SEQ ID NO: 657364 - DNA, 75 bp, Homo sapiens
cggagctgtgcgagagcctcctcacttgggagtctgctacaccatttttgatttgggcttccgctttgatgtggc

SEQ ID NO: 657365 - DNA, 78 bp, Homo sapiens
tgaggatcttgacagcttgggaggacacagcattgttggttttgccatgtactattttacctatgacccgtggattgg

SEQ ID NO: 657366 - DNA, 83 bp, Homo sapiens
caaacttctcagatgttaataccaaccgttgtgaatcagctcccggccgactttaggattcttctggattttaaattttttct

SEQ ID NO: 657367 - DNA, 100 bp, Homo sapiens
agccggacttttgaagaatgattcgtgaatccggaatgggtgacagcgtcatcacggcattttattggtcagaagagatcaattctacagaaatttccag

SEQ ID NO: 657368 - DNA, 100 bp, Homo sapiens
gactgagcgccagagaggacgtttccaactcaaagggtattgtccagtcagaagaaaaacttgtcatcagtgcatcctgggcaaaagatgatgatatcag

SEQ ID NO: 657369 - DNA, 82 bp, Homo sapiens
ctgtaatcccagctctttgggaggccaaggcgcagcagaacaagtccctgattttgtcaccttcctttaccaaataactaga

SEQ ID NO: 657370 - DNA, 82 bp, Homo sapiens
gcatattagcgctagccctgcagacagaggtgtgctgacgacctgctacaacagaaaaagtttcctacactactgaggttta

SEQ ID NO: 657371 - DNA, 75 bp, Homo sapiens
ggtttctcatcactccaaccaggtattgttgcagcatctggcagtgagactgaggatgaggacagcatggacatt

SEQ ID NO: 657372 - DNA, 100 bp, Homo sapiens
caggaacctgctttctctcgatgaggataacatccctccagaagatgatagaatgagtccatttaagtcccaggacggtggaaactagctagtagattgc

SEQ ID NO: 657373 - DNA, 75 bp, Homo sapiens
acaggcaatggccttacctccctgccgcccaatttggccgtcgcagaacaatttgagagggaagatctgatctcc

SEQ ID NO: 657374 - DNA, 73 bp, Homo sapiens
tggagcagtgtcagtcccaaaagtccacaggtcctggctaccctgggaagagacaagaagtaaatgaagaaag

SEQ ID NO: 657375 - DNA, 96 bp, Homo sapiens
ctgttgcagctgggtttgctgttgctaggggccatcgaagacggcaatttggaggaaatggaagaggaagtacggcttaagaagcgaaaaagacga

SEQ ID NO: 657376 - DNA, 98 bp, Homo sapiens
gtggaggccaaggcgtgagaattcctcaatgactgccctctaaaggaagagcgctaagctgcaacgaaaacgacgcagagcacctggaccgtgaccag

SEQ ID NO: 657377 - DNA, 97 bp, Homo sapiens
tactggccctgagtctttgggggcagcctgcagaggctgcggtattatacctgaagaaccttagccctcgggtgactgaaagagatcttgtgtcatt

SEQ ID NO: 657378 - DNA, 82 bp, Homo sapiens
gatccacccttaagaaaggagacagaaccacatcatgaacttttgttgacctcctgtactggagagacattaagaagactgg

SEQ ID NO: 657379 - DNA, 100 bp, Homo sapiens
ccccgcagccccaacccatctccagagagaccaaggtgttggggcgatgtttcctgactgtggtgcaagtccatttccagtttttgactcatgcgttaca

SEQ ID NO: 657380 - DNA, 98 bp, Homo sapiens
tgaccactgggcacccattcattatgcatgctggtatccagctcacatagaagacattgactacgaggaaggaaaagtactcatccatttcaagcgtt

SEQ ID NO: 657381 - DNA, 98 bp, Homo sapiens
agcgccctgtaaggtatattcggaaacctatcgattacacagttctggatgatgtgggccatggtgtcaaggatatggctttagttgcccctgaagct

SEQ ID NO: 657382 - DNA, 100 bp, Homo sapiens
ccgctgccgccctgagtcactgcctgcgcagctccggccgcctggctccccatactagtcgccggctactgcagcactggggtgtcagttgttggtccga

SEQ ID NO: 657383 - DNA, 98 bp, Homo sapiens
tcccggccaagatgtctgacatggaggatgatttcatgtgcgatgatgaggaggactacgacctggaaattgcaagacctaacatggctgaaagagaa

SEQ ID NO: 657384 - DNA, 101 bp, Homo sapiens
gcgcctaaagtctgagagagggaagtcgcctctgtgctcgctctggcacgttttgggggaggtgcctgcaggacccaacatactcaatgagcttccagcgc

SEQ ID NO: 657385 - DNA, 82 bp, Homo sapiens
cctccaagagcactagtgtctagaaggcactaagggattctgtttcactgaggccatctatccgatttcaaggaagccaagg

SEQ ID NO: 657386 - DNA, 110 bp, Homo sapiens
cgtcactggccttcagacagagccaaggtgcagggcaacacctctacaaggatctgcagccatttatattgcttaggctactgagcgatcgtcttctgatcaaaggaggt

SEQ ID NO: 657387 - DNA, 82 bp, Homo sapiens
ccaccaccatctccatcacccaccaacaacaccacaataatccacagccaaggggctttgttatgcacctaaagccatattg

SEQ ID NO: 657388 - DNA, 82 bp, Homo sapiens
actaatgagctctccagaaaattgatgcaggctttcgccaaggtcttcaacacaacccctgatgacttggacctacatgtga

SEQ ID NO: 657389 - DNA, 100 bp, Homo sapiens
acacactttttaagaggttatttcaagtatggagagaaatacgttttcaatggattgccacagtaagataaacaggggtcacatgacgacagaagccaag

SEQ ID NO: 657390 - DNA, 108 bp, Homo sapiens
gcagtctctctgtgtggctgtaacttacgtgtactttaccaacgagctgaagcagttgaaatggatgcagtcagaactgaatgttgaagaagtggtaaatgacaggag

SEQ ID NO: 657391 - DNA, 83 bp, Homo sapiens
ctgagaaggtcaaggtggaggtgaagaagtttgtgaagatcggccgcccgggctacaaaggtctgtctgctatcagctatgcc

SEQ ID NO: 657392 - DNA, 55 bp, Homo sapiens
gtcactgcagcactggtggaacttgagctatcaaagcagaggaacataataaaag

SEQ ID NO: 657393 - DNA, 98 bp, Homo sapiens
tgtacctgttttatacttgcttttgcttcagcgttctgtggttgtcaacagatctcacattcttgaaggtggcattgaagagcactaagatcggaaga

SEQ ID NO: 657394 - DNA, 83 bp, Homo sapiens
tcacgctgacgtcggacccacggctgccgtacaaagtgccttgtttgtatgaagtccagcacatctgtggttgagcttgttat

SEQ ID NO: 657395 - DNA, 48 bp, Homo sapiens
acctgctggtgttcgcccacgaccatgatgtgtgcaacagcaccgatc

SEQ ID NO: 657396 - DNA, 76 bp, Homo sapiens
gccaccgtcgcccgcccagcctccgcccggtgcagaggccaagaccgttttgcccaagaaggagaaaatgaagctg

SEQ ID NO: 657397 - DNA, 100 bp, Homo sapiens
tcctgtatgaagcggttggcaccactgaagtgaccgaatgaggtagatttcgggcagacaacttgaacaagctgaagaacctatgcagcaagacaatcgg

SEQ ID NO: 657398 - DNA, 75 bp, Homo sapiens
cgccccgcctcccccgtccggtccctctctccacggtctacatgttcaagtgcgtgtggcggtgctacagattga

SEQ ID NO: 657399 - DNA, 71 bp, Homo sapiens
cggcgagaggcggcgagaggcgggctgaggcggcccagcggcggcaggaacttgctactaccagcaccatg

SEQ ID NO: 657400 - DNA, 75 bp, Homo sapiens
gaaacttaaagcctggaatgatatcaaaaaggtgtttgtggcttgatcgtcccccaggaagacatgccattttgt

SEQ ID NO: 657401 - DNA, 98 bp, Homo sapiens
cagttgtcatccagagaagtcaaaggaaatgctgcttggggatgagcatcacttttcaggattagaagaggctgtgtatagaaacatacaagcttgca

SEQ ID NO: 657402 - DNA, 75 bp, Homo sapiens
gtaggagaagaaatccgcagaagcttattaaagttaagggcatttcaccagatgaacttaaagatgaactacctg

SEQ ID NO: 657403 - DNA, 82 bp, Homo sapiens
ggagttgataacaacaagaataaagggcagctgactaagctcctaactgggcaactcaagattctggcttctactgaagaac

SEQ ID NO: 657404 - DNA, 95 bp, Homo sapiens
cgagagatggtcaggtctggagctcgaccgggccagcaattctgtggtgttcttggtcacacatttatggagtttctgaagggcagtggagatta

SEQ ID NO: 657405 - DNA, 90 bp, Homo sapiens
cacagactatacctgccattgatcccgcacttttcaatacaatttcccaggctcttttggtacaccagaaggccagaatggaacgacttc

SEQ ID NO: 657406 - DNA, 75 bp, Homo sapiens
ttagaacagctcataggagagtcatgattttgaatcacccagataaaggaaaaccagtagattcccagacatcgc

SEQ ID NO: 657407 - DNA, 98 bp, Homo sapiens
tttcagttgcagactttaggcctgaaaggtgtcatggagaaactccagctgggcccagagattctgcagcgggaaaatccaaggcttatttatgccag

SEQ ID NO: 657408 - DNA, 83 bp, Homo sapiens
gctttggagcctgagctcgaggcccggctggcgcacctgggcgtgcaggttgaaaggattgttgacaaaaggaaaaataaaaa

SEQ ID NO: 657409 - DNA, 75 bp, Homo sapiens
ggcccgtgctggaaaagtgagaggtcagactcctaagggaagaactgctaaagctttgaggtcattacaatttac

SEQ ID NO: 657410 - DNA, 100 bp, Homo sapiens
acatgcacttcttggagaaccaggttcgacggtctggaaaatcccgaagcagaagcccgtattcatctaggcattcaagatctcgtagcaggcacagatt

SEQ ID NO: 657411 - DNA, 90 bp, Homo sapiens
gcgagctggaaatcgtgcctgtgcggcgctcgctcaaggaactgatcccgatcactgtcgtcttcctgaaagatgagaagtaccattctt

SEQ ID NO: 657412 - DNA, 83 bp, Homo sapiens
ctttatggccaaagcgatagctgaccggagtccttcaataatgttaaacagtggctgcaggaaatagatcgttatgccagtga

SEQ ID NO: 657413 - DNA, 75 bp, Homo sapiens
tgcgcctgcttcctctgcgccagaagaaggcccacctgatggagatccaggacagcctgggcggaagggttcgtg

SEQ ID NO: 657414 - DNA, 98 bp, Homo sapiens
aggaaagttatatatttgagtcaaagggtgatggaggaggaggggaacacccagccccagaaacaggctgaagaggacgcccacctggatggggctgt

SEQ ID NO: 657415 - DNA, 100 bp, Homo sapiens
ggcaacttcaggatgacaaaaaccaaagtctcttctgctgggaaatcccagtacagatcgcagtgctgagccctctcatagccatcgcactgaaaatatc

SEQ ID NO: 657416 - DNA, 82 bp, Homo sapiens
gatctaccttctggaagctactactacgtggtgcttggaaaggtgtttcccattaaacactaccaggacaaaatcaggcctt

SEQ ID NO: 657417 - DNA, 83 bp, Homo sapiens
acctgaataaaggcatcggaatgggaaacataggtcccgcaggtgggaacatccagttgcaggaaaacaagcttaacacgccc

SEQ ID NO: 657418 - DNA, 100 bp, Homo sapiens
ggggccctcttgataaaaagagatgtggggggattctcgacctgctaacagaactggaccttttcgtggtggctggacctcgtggaagcccctctggctg

SEQ ID NO: 657419 - DNA, 98 bp, Homo sapiens
tgaagactgagacgttggagttttatcctagaggataaaggaaatctttgggaaagtcagtattttatatagcaacttgaacatgcgaaagtgacaca

SEQ ID NO: 657420 - DNA, 100 bp, Homo sapiens
tggggagtctcctctcgaccagatcccccgtcagctgccatcttagttgtctacctggatcgggcccaggatcttcctgctggatgagaatgaggatatg

SEQ ID NO: 657421 - DNA, 128 bp, Homo sapiens
gtccctctttggggtggctctttgctaagtgctgctgttgcttcccgtgtagaggtggtccattatggctgacatgcaaaatctggtagaaagattggagagggcagtgggccgcctggaggcagtat

SEQ ID NO: 657422 - DNA, 90 bp, Homo sapiens
attggatccgagcagttaccaaggttcgactccagctgcaggagacaaaacttacctggggtccctacttatggttttacatgcttcggg

SEQ ID NO: 657423 - DNA, 75 bp, Homo sapiens
gccaagcaagatgccataaagcgcactgacaagataactgttcctgcaaaagaagctatggagatattttgcata

SEQ ID NO: 657424 - DNA, 100 bp, Homo sapiens
cccatcgacaagaaggcacctgttcagcagctggacatggagaaccaacgctcatcacctctgtcgttccccagtgttccacaagaagaaaccttacgtc

SEQ ID NO: 657425 - DNA, 154 bp, Homo sapiens
aaattcctcggagctttcgtcacctgtccttctacattttcgatagagacgttttccggagggattccatcataggtactccaaagattcaggtttactcacgtcatccagcagagaatggaaagtcaaatttcctgaattgctatgtgtctgg

SEQ ID NO: 657426 - DNA, 100 bp, Homo sapiens
ttccacgagcgcaccttcgtgcaggagttggaaagatacaaggagtctaacttctccctggccatcctgaatgtgggggccccggcggctggcatgaatg

SEQ ID NO: 657427 - DNA, 90 bp, Homo sapiens
ctctggctgatcaaagaagagcagcccatgatcatggaagggaagtggttgctgtgtatgttactggtgcttggaactgctattgttgag

SEQ ID NO: 657428 - DNA, 100 bp, Homo sapiens
cgcggacccgcccggagatgagtggaaggaatgaaggccagctgaatggtgaaacaaatacacccattgaaggaaaccaggcgggtgatgcagctgcctc

SEQ ID NO: 657429 - DNA, 98 bp, Homo sapiens
cttcccaggctgtcatataactcctgagaatagtggttcttaactctgtgctggagaatctggtaaaagcaccattgtgaagcagatgaggatcctgc

SEQ ID NO: 657430 - DNA, 74 bp, Homo sapiens
actggttcctgggcaccgaaagactgggctggcttagatgaagatgaagatgcacatgtctgggaggataattg

SEQ ID NO: 657431 - DNA, 98 bp, Homo sapiens
agatgattgcatttcatgatccagagctgagtaatcatctcaatgagattggtttcattccagatacttgggaagatccccatgaaaaagataagagc

SEQ ID NO: 657432 - DNA, 95 bp, Homo sapiens
gaatcattcccttggctgttaatttctcagagccaccaaagtccttggcactgtcaaatggttcaacgtcagaaatggatatggatttataaatc

SEQ ID NO: 657433 - DNA, 100 bp, Homo sapiens
cagcctgaacggagtgtgcgacggattgggaggctctccaagtggcccggcagttcctgctgcagcaggcctcaggcctgagctccccagggaacaatga

SEQ ID NO: 657434 - DNA, 99 bp, Homo sapiens
cgatcacctttccccttccctacctgctgtggaaaaattgtcttccgtgagactggtccctggtgccaaaaagatgatgattattccccaccttctaag

SEQ ID NO: 657435 - DNA, 101 bp, Homo sapiens
ctaactttgaaggtgatacttacctcacctctaattagggacgaattggagaagaaggatggagcttttgtctggtcctctgagccccagtgagagtttcc

SEQ ID NO: 657436 - DNA, 100 bp, Homo sapiens
tttatctcaaggcctgagtagccggtaacaaacgagggttcccgggattggaccgacgcagccatgaaacgccacctcctggatatatcagtgaagatgg

SEQ ID NO: 657437 - DNA, 100 bp, Homo sapiens
aattgattgtatatacatacttcttttctgcctcagaagaagtggttcctgagaaagcgatagatctggctagcaaagcagcgcaagaagacaaggctgg

SEQ ID NO: 657438 - DNA, 98 bp, Homo sapiens
cgagcggtcccagagcgcggcgctggaaccgagctccagcgcggacgcagtcaggatggctaaaggtgaccccaagaaaccaaagggcaagatgtccg

SEQ ID NO: 657439 - DNA, 88 bp, Homo sapiens
gctggttccccaacatgcctcaccctcatctatatcctttggcagctcacaggtgccgtttcatcagggaacgagaccgtgctgtcaa

SEQ ID NO: 657440 - DNA, 75 bp, Homo sapiens
tcctgaatatgaacgtctgaaaaaatcactgatcaacaacccctccccgtcgtaaacgctgaggaatgatgtggc

SEQ ID NO: 657441 - DNA, 89 bp, Homo sapiens
aggtcgtcggctggcggagcggcttagtgcttgtgcacagagctcgaaaactagctcaacaatactatcttgtgtaccaagaacccatt

SEQ ID NO: 657442 - DNA, 100 bp, Homo sapiens
ccgtccagccccctacatcatctttgggcctccaggcaccggcaagactgtcacgttagtggaggcaattaagcagaatgtcaaaactggaccaatgggg

SEQ ID NO: 657443 - DNA, 100 bp, Homo sapiens
ggaagatgggaaagttattgaacggctgggccagagcgtggttgctgaccagttgaaaggaagaggatcacctagcccgggtagaagaggcaatcacccg

SEQ ID NO: 657444 - DNA, 100 bp, Homo sapiens
ggtgattgttgcaaagagcaaagaagaggcctgcaaagctgtacaagagatcatgcaggacatggtctgctatacagctcagactctcgtccgaatcctc

SEQ ID NO: 657445 - DNA, 100 bp, Homo sapiens
tgtctctgcttcatacgcaggatgtcctcttcgtgctcaacagcaaagaagtggcacaggccaaggccaagtcctgtatctgccatgtctgtggcgtcca

SEQ ID NO: 657446 - DNA, 74 bp, Homo sapiens
agttggcgagtagtagcgaggagacgaagatgaggaaaccagcgtggtgatagttgggaaaatttccttctgtc

SEQ ID NO: 657447 - DNA, 98 bp, Homo sapiens
ctccggcgcagcccggaaatgtccggcaagatcgagaaagcaggaaggaaaggaggtgagctggcctcagctgtccacgcctacacaaaaacaggaga

SEQ ID NO: 657448 - DNA, 98 bp, Homo sapiens
agctcccagcgtgatcgacgcagaagacaggtgatttctgcatttccgactgaggatacaatgtctctttgctatatgaccttgaaaatcttccggca

SEQ ID NO: 657449 - DNA, 100 bp, Homo sapiens
gggaacgctcacggactgtgtgcatgttggcagataaattgaacatgactccagaagaagctgaaaggtggattgtaaatttgattagaaatgcaagact

SEQ ID NO: 657450 - DNA, 100 bp, Homo sapiens
tccagcccttctggtgtcacctcccagggtgactcaactccaggtctcctccgggctggggctgagcaagccctcggagtgaccgtgggtgacagcggct

SEQ ID NO: 657451 - DNA, 83 bp, Homo sapiens
ctgcctggaggagaatcaagagctccgagaagctggcagggcggagatgctggaccacgccgtcctgcttcaggtgatcaaag

SEQ ID NO: 657452 - DNA, 98 bp, Homo sapiens
gaatatgcattgaagcaaattgaaggcacaggaatatccatgtcggcttgtagagagattgcactaaagccaattcaaatactttcaaatccactgtc

SEQ ID NO: 657453 - DNA, 100 bp, Homo sapiens
gtcaattcctgatctcacaccaaagcaagttgacatgtggcaaacacgtcttagtacacatttgaataccaagctgctattttacacttgaagagggagc

SEQ ID NO: 657454 - DNA, 100 bp, Homo sapiens
tttgtggaggagttgtttgaagtgacatcctgttatttccctatcgattttacccctggtgtcctatagactttgtcatggagtgaaacagaaacaaatg

SEQ ID NO: 657455 - DNA, 97 bp, Homo sapiens
cagatgcccgggaccttgtcaaaaagtttgacagggacagggatggacgaattacggtggcggagctgcgggaggcggtaccggctctgctcgggga

SEQ ID NO: 657456 - DNA, 51 bp, Homo sapiens
cagatggccccaagagcccagatccagcgtggagattggtgaaagcgtgag

SEQ ID NO: 657457 - DNA, 51 bp, Homo sapiens
tgccctaccagtacccatatgcaggaaaacgggccttactatacatcatat

SEQ ID NO: 657458 - DNA, 112 bp, Homo sapiens
gtgtgccccagctttaccgcaaccaccgccaccagtccacggagggcatgagattattttcgaaataccagtatttcgactccagggggatgttcatttctatagtattttc

SEQ ID NO: 657459 - DNA, 113 bp, Homo sapiens
gagcagcgccagcggccgagcgggcggcttcctggcctgggcgctccggtggcggcggagcagcctcccgcgacgatgcccctcaacgttagcttcaccaacaggaactatga

SEQ ID NO: 657460 - DNA, 82 bp, Homo sapiens
gctccgtggccttagctgtgctcgcgctactctctctttctggcctggaggctatccagcacggagtcttgctctgtcgccc

SEQ ID NO: 657461 - DNA, 75 bp, Homo sapiens
cttctggccaaggtgattcagattgcaacgtcatcctccacagctaaggagggtgaggacaaaatcttcttaatc

SEQ ID NO: 657462 - DNA, 99 bp, Homo sapiens
accagtacagggataagagatgaagagacaggccaggtcaggctcaccaagcaggcagtcgatgatgtgaagaaaggttacatcaaagcagaagaaaag

SEQ ID NO: 657463 - DNA, 74 bp, Homo sapiens
taacccagcctgtttcacttcttgcactgccagtgaaagatgtagaagataaacctgaacaacaaaccagaaca

SEQ ID NO: 657464 - DNA, 98 bp, Homo sapiens
ttggggacaccggggagggctgggagaacgctcactctggggaagctggttgccatgtaaaagtactactgccctgagaccaccatgctgtgaggaag

SEQ ID NO: 657465 - DNA, 82 bp, Homo sapiens
cgccgcccgtccacacccgccgccaggacatggatttgattgacatactttggaggcaagatatagatcttggagtaagtcg

SEQ ID NO: 657466 - DNA, 75 bp, Homo sapiens
aagccttgaaaaagctgccctgagacggtgtcccgccgaaagttcacacaaaagatgttggacaatttctacaat

SEQ ID NO: 657467 - DNA, 100 bp, Homo sapiens
cgtgttctggggcttcgtcggcttcttggtgccttggttcatccctaagggtcctaaccgggggttagctttgtacatagcatctcactttgcacaacaa

SEQ ID NO: 657468 - DNA, 101 bp, Homo sapiens
ctagctcatccgtgccctctgcccctgaagaggaggaagagactgtggccagcaagcagactcatattctggagcagaaggagcatttctaccagaggcag

SEQ ID NO: 657469 - DNA, 101 bp, Homo sapiens
ccgggggtggaggtggtgcctctggcagtgacgaggacgaagtgtccgagactggatacacgtctgtttaactacgcaaaaggtaatgctggcatggctta

SEQ ID NO: 657470 - DNA, 100 bp, Homo sapiens
gttctcgctccggagccgctgcacatttcgcactgatagccattgggcgatacagcatgacaatagagactgtggatgtcggatggtgtaaagaaatcac

SEQ ID NO: 657471 - DNA, 75 bp, Homo sapiens
cagacgctggcgggcgcagtttctcacgacgggccgagcctgccactccgagcctcttgaagccattcttacaga

SEQ ID NO: 657472 - DNA, 98 bp, Homo sapiens
tcgaaagcgatatgcattgacaggacagaaatggcagcacaagcacatcacttacaggtgttgacttcaaaatcaaaactgtagagctaagaggaaag

SEQ ID NO: 657473 - DNA, 82 bp, Homo sapiens
gatctgggtaaaagtagagaaggatcaaggacggatgatgaagtagtacagaggcaccgttcctgccttgggcgctcatggg

SEQ ID NO: 657474 - DNA, 82 bp, Homo sapiens
cacggcgagcagtctcaggcctttagtgatgatggttttgggatttgagattgacgcggtgaactctgtccagttttcaaac

SEQ ID NO: 657475 - DNA, 121 bp, Homo sapiens
cgcgctcgctccggcgccggcctcgcctcctcgcagcagcgccatgacaatgcagatcttcgtgaagactctgactggtaagaccatcaccctcgaggttgagcccagtgacaccatcgag

SEQ ID NO: 657476 - DNA, 100 bp, Homo sapiens
ttatcaggtggtctattattatacagtcacccccagttatgctggacggccaaccgccatgtgatgtaagcctccatacgaaagcactgttgcagataga

SEQ ID NO: 657477 - DNA, 75 bp, Homo sapiens
tcgtgatcgactcggacacagaggacagcggcagcgacgagaacctggatcaggacgccaggaaagcatgtgcag

SEQ ID NO: 657478 - DNA, 101 bp, Homo sapiens
gggccagcctggggcggccggccaggaaccacccgttaaggatttaagtgccctgtatgctcaaaatttgtatcctcagatgaaatggatttgcatcttgt

SEQ ID NO: 657479 - DNA, 74 bp, Homo sapiens
tagtggaagatgtaaagcaatatttcgagcagtttggcaaggttcagcttgttggtttagatgaggagagttca

SEQ ID NO: 657480 - DNA, 100 bp, Homo sapiens
atggctcatagttcaccccagagcattttagatgatgttgccatgcatcagcgagagctttctaactgtcaaaggtgctgccctttttctaccacgggga

SEQ ID NO: 657481 - DNA, 101 bp, Homo sapiens
gtaacggtgccaactccaatttaccaaactagcagtggacagtatagtgctcatgtgactatcacggatcgaaaagtagcattagaatttcttaaatcaaa

SEQ ID NO: 657482 - DNA, 101 bp, Homo sapiens
gagacggcgacccaggcatctggggagccacagaagtcgtactcccttaaaccgtcatcatcagatttgaaatatttaaagtggatacaaaactatttcag

SEQ ID NO: 657483 - DNA, 83 bp, Homo sapiens
cctaaaccatcagctattgaatgaccgggtttttcgttggaatatacgttgcacatttatggcgattctgagtgtgagggcag

SEQ ID NO: 657484 - DNA, 98 bp, Homo sapiens
taatgaataaacgagcaaagtttgaactgaggaagccattagtgctctggtctctgacccttgcagtcttcaggcaagaagttatgaaatggaatgga

SEQ ID NO: 657485 - DNA, 83 bp, Homo sapiens
cgacgtcttgcctgtgtcccacttgttcgcggcctataggtcccgcggcagtgctggtggccatggttcccgtagccagaagg

SEQ ID NO: 657486 - DNA, 74 bp, Homo sapiens
ggtcggactcccgcggcgggaggagcctgttcccctgaggatggtgattgctcacaccaaagccttggacccct

SEQ ID NO: 657487 - DNA, 100 bp, Homo sapiens
ggactggacggctgagctgggcatccgacacgtactgctggtatatttgaaggctcccatgattctgaatggagtctgtgttatctggaaaggctggatt

SEQ ID NO: 657488 - DNA, 75 bp, Homo sapiens
tggcctgtccctcacatccgatgcaccctttttgtcagattatcaggatgaggaggaaggaacagagccacagag

SEQ ID NO: 657489 - DNA, 100 bp, Homo sapiens
agcccgggaaatctccaagtcagaaagcgatgactacctgtccctggagggttcccgctggccaccagccatcaggcaggccacacgctggaagtacacg

SEQ ID NO: 657490 - DNA, 75 bp, Homo sapiens
caatccagatggcagccagtcagtggtggaggtccagtgcacgtgccaacattacactgtcagggaagaagcgca

SEQ ID NO: 657491 - DNA, 100 bp, Homo sapiens
agagttccattttggaacgcccgtgccgcgtctccgcgttcccagcccgggtccccgcgttcacagccccagcgcagggtttcctatcgctgaagtgttc

SEQ ID NO: 657492 - DNA, 100 bp, Homo sapiens
ccactgtgaggtgaacagggactggctccagcctctgttgcacagggtcaaagaggtaagaaccttgatgctgtccatgatatcactgtggcgtatcctc

SEQ ID NO: 657493 - DNA, 75 bp, Homo sapiens
tacatcatttacggcatgtacttctgcatgaacatctccagccaggaaaatgtggacacagacttgccaggcagc

SEQ ID NO: 657494 - DNA, 75 bp, Homo sapiens
tctgggggccacaaatgctccttctcctggagacgcaactcaagtgtcgggcggccgaagcacatgcgggtgatg

SEQ ID NO: 657495 - DNA, 83 bp, Homo sapiens
cggccaagcagccaaccatgctcaacttcggtgcctctctccagcagactgcgcattccaaaatatgcccggtgctatccgcc

SEQ ID NO: 657496 - DNA, 100 bp, Homo sapiens
gcgagcgctggacggagaggaaagcggaaacagagcaaatgcagcgttacaatcaaagacttattgaggaattgaaaaacagacagactcaagaaagagc

SEQ ID NO: 657497 - DNA, 101 bp, Homo sapiens
ccccttttgtgtcctgggtccgacaaggtgtggatgaggtcaccattgtcaacattttgaccaaccgcagcaatgcacagagacaggatattgccttcgcc

SEQ ID NO: 657498 - DNA, 75 bp, Homo sapiens
ggggacgagctttgaaagaacttgccagacttaaacagagagacaagagagacacctccaacttcgacaaagagt

SEQ ID NO: 657499 - DNA, 75 bp, Homo sapiens
atcaagtgctgtttgtatgcacgacttgaagacacgcacttatcattcagtggtgaaactggaacgccaagctga

SEQ ID NO: 657500 - DNA, 51 bp, Homo sapiens
tcattgcatggtctccagatcattctcataaatggaatctatttggaattt

SEQ ID NO: 657501 - DNA, 100 bp, Homo sapiens
actttggacacagctcacccccgacagggggccgtcctgatttctttaccaactcccgcctcccacagccgcccatgccttcaaacttcccagagccccc

SEQ ID NO: 657502 - DNA, 130 bp, Homo sapiens
tgtttctgcttaagttggcaagacactccaagtttggcatgaaagttgtttttaagggaaatgaatagaaacaatccactttgaagaagccatggcgaaatcaaagacaaaacatagactttgttctcag

SEQ ID NO: 657503 - DNA, 50 bp, Homo sapiens
atctgtcccaagcaggagaacattgcagatgagtgtcaaatgcctgaaca

SEQ ID NO: 657504 - DNA, 74 bp, Homo sapiens
agtcatacaaagacagcacgctaataatgcaattactgagagacaacttgacacaacggaagagtcctgggcgg

SEQ ID NO: 657505 - DNA, 82 bp, Homo sapiens
ccaccactccctgccgaagcccagcccctgatgtcccagcagagcactacaaacaccactggtttcccgaaaagccgtccaa

SEQ ID NO: 657506 - DNA, 100 bp, Homo sapiens
ttaagcagcagaggagcacgaggatcgtgggagctaagaaactggtgaattttcagctcgtttccttttgaagctgcccgtagatttcagcaatatcccc

SEQ ID NO: 657507 - DNA, 98 bp, Homo sapiens
ctctcgaccccctctcttggggtttaaggggccgttgcatcctccattgccccctccgcatcagcctcagcctcagcaacctcagcaacagcccccgc

SEQ ID NO: 657508 - DNA, 99 bp, Homo sapiens
gtaaggtcactgggcctggggcagaggctgtccaaattgtggcaaaaaacacagtcactctggaaggagctcattgccaagttagatcaggcagaaaag

SEQ ID NO: 657509 - DNA, 95 bp, Homo sapiens
ctatgccttgagctcctcaatgtgggtgtagagtctaaactcatccttaaaggggtcatactgctgaaaactttagaaactgttcctttggagag

SEQ ID NO: 657510 - DNA, 98 bp, Homo sapiens
agcctaaagagagcccggagccagcgtgggaggccgctgccgtcgcgcgccttgggatttatttaatggggatgtgttcaaggcaagagcgaattcag

SEQ ID NO: 657511 - DNA, 75 bp, Homo sapiens
aaatgtgcatactcacagagttagagagagggatggtgcacccccaaattcagaaggagtcccagtatatcaagt

SEQ ID NO: 657512 - DNA, 50 bp, Homo sapiens
aggtcgcctggggaccccagaaggaacagatggagtcggataactgttca

SEQ ID NO: 657513 - DNA, 97 bp, Homo sapiens
tcgtgtccctgtacgcggagggctcggtcaacggcttcatcagcaccttggggtggctttctagaagatgaccatagaggaccttccagattttcca

SEQ ID NO: 657514 - DNA, 73 bp, Homo sapiens
tcgtggtctaaagcttcggcacaagggcccaactggaattccacttacgggctcataggtggaagggacttgc

SEQ ID NO: 657515 - DNA, 50 bp, Homo sapiens
tgctaaatgaaaaagggcaagatactgggaaagaactggttgtcttcttg

SEQ ID NO: 657516 - DNA, 98 bp, Homo sapiens
gagacaggaggcagtagccaaacacccagaagaagctcattcacacagaagacccatttaatgatgaacatcaggagaggcaagaggtggaaatgttg

SEQ ID NO: 657517 - DNA, 51 bp, Homo sapiens
gcctccccagccacgtggaactgggaactgatcacagccgcacatgagctt

SEQ ID NO: 657518 - DNA, 75 bp, Homo sapiens
tcaagactaaaaactaaaggcctgggcctgagaactgaatcaggtcatcatcagatttgaaatatttaaagtgga

SEQ ID NO: 657519 - DNA, 90 bp, Homo sapiens
ggctggtcctactacgcctacgccatccagctgtgcatagctgagatgagtgaactgagtgtggcacagaaaccagaaaaacttttggag

SEQ ID NO: 657520 - DNA, 98 bp, Homo sapiens
ccagctgggcaccgagatgatcgtcaccaaggccggcagggagcttctgataattggaggtgttgcagcccgggatcagctctctgttttggaaaatg

SEQ ID NO: 657521 - DNA, 100 bp, Homo sapiens
caagtttggatcagacatcataaaactgagtatagtcatggccaacagcaaaaaactcaagagggggaactgaaaattagtgctgtgttttcagtcagtg

SEQ ID NO: 657522 - DNA, 100 bp, Homo sapiens
atttcattagcctcagaacgatatgataaagacgatgaagccccctctgatggttgcacagtgaattaaaagatgctgttgaaaaaaaattggaggcctt

SEQ ID NO: 657523 - DNA, 89 bp, Homo sapiens
caatgatgctcactgaaagttgtaagctgcgaggtcttcatcacaggatatgatggatgatatctgtcaggagcaatttctagagctgt

SEQ ID NO: 657524 - DNA, 100 bp, Homo sapiens
gccgccgccaccatgcccaagagaaaggtggaggtcctgattgccataagcagcctcacgtctccgctgctgttcacagcctctggatatctgtcattca

SEQ ID NO: 657525 - DNA, 75 bp, Homo sapiens
ggcatcagttggtactcgccatgaaactcaaagatcgagaggtggtccgtactgagaagaacagtttgaacaacc

SEQ ID NO: 657526 - DNA, 80 bp, Homo sapiens
acagccgcgcgctgagggtctcggggcgggcgccgcgggacctctccgggccatgggtctctaattaacagaagatggca

SEQ ID NO: 657527 - DNA, 100 bp, Homo sapiens
caagatggacaccgcggaggaagcctaccgtatgtgaacgggagctgtgtgtgtttgcttttcaaaccctgggagtaatgaatgaagctgctgatgaaat

SEQ ID NO: 657528 - DNA, 100 bp, Homo sapiens
ctggatgtcatttggaaaaacactagagacagacggctggcaggctggagcattggatttgctaaaggagcttaagaatattcctatgaccctggaatta

SEQ ID NO: 657529 - DNA, 100 bp, Homo sapiens
agccgatccagcctgcggagcctgtggggcaggaatggtttgcagtgtatgtggaacttaatcagcaaattgcagcactcttgaatgctggcgatgagga

SEQ ID NO: 657530 - DNA, 100 bp, Homo sapiens
cctgccgcctcccctctatgtcctctttgttcaggccactgcgtatgggcaggcctgtgggccatcactgtgcatgtccccatgccctcagcaggagtcg

SEQ ID NO: 657531 - DNA, 75 bp, Homo sapiens
agagcgcagccccggcgccggcggcgggaccgcggaccgaactaaaattccagatggcaaactcaatgaatggca

SEQ ID NO: 657532 - DNA, 137 bp, Homo sapiens
aggtaggctgcgttgaggatctttgctcttccatccgcctttgatcgtcttcctcttcagccatccagatcgactagagactgctaacaggcaactatccagcagggaatacgaagggcatgaagacaaagctgcag

SEQ ID NO: 657533 - DNA, 91 bp, Homo sapiens
gcgcgcagcgacggagctggggccggcctgggaccatgggcggtactccaaagattcaggtttactcacgtcatccagcagagaatggaaa

SEQ ID NO: 657534 - DNA, 74 bp, Homo sapiens
agaagaactttgtggtcgtcatggtgaccaagaatccttgttgcctgatgactatgtggttccccttgactgga

SEQ ID NO: 657535 - DNA, 75 bp, Homo sapiens
ttcccaagagcagcggaaaatgatccagtcacaggaaccaaccggtgagccctctcctaagagacccaggggaag

SEQ ID NO: 657536 - DNA, 100 bp, Homo sapiens
agagtcttcggcatcgggcgacagcaggtcacagtggacgaggtgttggcggaagggggaaatttgcagtggtgagaaaatgtataaagaaagattctgg

SEQ ID NO: 657537 - DNA, 101 bp, Homo sapiens
cagattgacttcagtcgtccatatgaccccagaagggatctcttcagggtggaatacgtcattggaaatggatcagacaatggctgccaatgctcagaaga

SEQ ID NO: 657538 - DNA, 124 bp, Homo sapiens
ttgggggacccattccgaacttgcagaggaccgtagctctcctggcctggagagtgtgaacaggtatatttgaaggctcccatgattctgaatggagtctgtgttatctggaaaggctggattg

SEQ ID NO: 657539 - DNA, 97 bp, Homo sapiens
acgctgtctactggaacagcagcaaccccagtcttcccacacaggttgagagaggaggggatccaattgcctgtgaggaggacacggctcctgggtg

SEQ ID NO: 657540 - DNA, 100 bp, Homo sapiens
aacacaccgtgaacgccagttggattgcagttcagatcgccacatcacagaatcgtatctatctcacagctgacaaccttgtgctgaacctacaggatga

SEQ ID NO: 657541 - DNA, 100 bp, Homo sapiens
tgtggttccgtgaaggagatgagagaaagatacgccaaaatcgtcgagatacccttcaactccaccaacaagtaccagcttgccctcgccctccgtgtac

SEQ ID NO: 657542 - DNA, 98 bp, Homo sapiens
gaaaggaaacgcatgcaagctaaggcagctgagaatccttgcagcctttcctggaagcctgtagcaactctttattttttcgtacttgctctgtgctg

SEQ ID NO: 657543 - DNA, 126 bp, Homo sapiens
ccaggacctttgtccaggggctgactgtgggcagagaagttgcaaaccgagtttccaaggcagttcaattaacctccagaagatggctgaacctgcaggaataccagagcaagaaactgatgtctg

SEQ ID NO: 657544 - DNA, 98 bp, Homo sapiens
ggaccttccggagcttctcagaagacagagggttttcttttgaggaatatatgcagaacatgtcctgcggcccaagaatcttggacttgcacatcaga

SEQ ID NO: 657545 - DNA, 100 bp, Homo sapiens
catcctgggagctccattccctaaggcactgtgcttgtacatgcagtggccatgcaaatatctgtcatctgcacacaggaaaatgtttctgcacaactaa

SEQ ID NO: 657546 - DNA, 74 bp, Homo sapiens
aatcatttcggctctcatgttcctccatgataaaggaatcatctatagcacaagcagcaggagacccagaatat

SEQ ID NO: 657547 - DNA, 75 bp, Homo sapiens
accgcctcggttcgccctcagccgccccgtgccctctggtggtcagaagatgctgtgctgtctcgttaggatgaa

SEQ ID NO: 657548 - DNA, 51 bp, Homo sapiens
gggtacagctggctgctcctcagtggacagagcgggatgccaccagcttgt

SEQ ID NO: 657549 - DNA, 100 bp, Homo sapiens
tctacagccaaacatgcaggactctagtaacccgcgaaatgatgggatagcgttgcaaatccttaaaagagtcttaacgttggctaagtggaagacagct

SEQ ID NO: 657550 - DNA, 96 bp, Homo sapiens
tgatcatgatacagttgataaaattgttgtccaagctcagcgccggagccgggagcagtcacgatctgccagtgcactaagcatcagtgggggtga

SEQ ID NO: 657551 - DNA, 100 bp, Homo sapiens
actgtcgctctgcctttgacaggagaggctgcttcttgtagaggtacagaggtgcagttccatggtacaccataaatcttgacttaccaccctacaaaag

SEQ ID NO: 657552 - DNA, 100 bp, Homo sapiens
acgagatgacaactccgcagcaaacaactccgcaaacgaaaaagaacgacatgatgcaatcttcaggaaagtaagaggggtgcaggaattgaatctggag

SEQ ID NO: 657553 - DNA, 75 bp, Homo sapiens
tgtaaaacaatgtgaaatcaattatgtgctttggaactgcgacataactagcgatggctgctgcgatctcacaaa

SEQ ID NO: 657554 - DNA, 75 bp, Homo sapiens
ccggtgttcccgcgctttatcaagattatcgagagctcccagctcctccagcagccgacaggaggcccgtcaaga

SEQ ID NO: 657555 - DNA, 87 bp, Homo sapiens
ggactatggcatctatgttatcaaccagaaatcccaactacccttatgagttctcacggaaagtacccacatttgcaaccccctggc

SEQ ID NO: 657556 - DNA, 81 bp, Homo sapiens
tatacatggagttgatattacaaccagtgacactgcaggggaaagcctcctgaagctgatggtgtggatagatcatttggc

SEQ ID NO: 657557 - DNA, 75 bp, Homo sapiens
cgcgctccgccccggcctagggccttgccccgggagcccgcgagggtaagaatgattgatgttggctgatattgg

SEQ ID NO: 657558 - DNA, 74 bp, Homo sapiens
ggggagcgtccggagctagctggatcctctaggcaggtgtttcagtcacctccagtaacacgggcgtgccagat

SEQ ID NO: 657559 - DNA, 75 bp, Homo sapiens
ggtggctcatcagcggccccctcaacgccagagaatggatcttggagaatgtctgaaagtccatgacctggcttt

SEQ ID NO: 657560 - DNA, 50 bp, Homo sapiens
cgctgctgctcgttcgagtcgcaggtgtcatggagaaactccagctgggc

SEQ ID NO: 657561 - DNA, 51 bp, Homo sapiens
ccgggagcgagcccaggcggcagatgaggacacttgaggttcggagacgtg

SEQ ID NO: 657562 - DNA, 51 bp, Homo sapiens
cagaccctcactctctctgtcagaaaaatgcacgccagccccacgggcctg

SEQ ID NO: 657563 - DNA, 100 bp, Homo sapiens
agccccccagctctccctgcagatcggcgatgtggtgcgaatacaggagacgtgtggagatttacattggtgcagaagcatacagtggaatttaaccaag

SEQ ID NO: 657564 - DNA, 100 bp, Homo sapiens
tgtctgggaaatactagtgaatgtttccaaaacttcagtcagagccacaacaagtgatagaggttgtcaagtctgcatgtggccctttcccaaatcctct

SEQ ID NO: 657565 - DNA, 75 bp, Homo sapiens
atcgtgcacatccaggctggtcagtgtggcaaccagatcggtgccaaggcaggtaaaaatcaaggtgaccccaag

SEQ ID NO: 657566 - DNA, 83 bp, Homo sapiens
ccgcgccgcgcgccggcggcaccatgaagtcagcggaggaaggtgacttaagagattaaaattaatttggttgctgttggttc

SEQ ID NO: 657567 - DNA, 82 bp, Homo sapiens
tgacaccactcagggcaagggtgtccgacggctggagcggtgagcgagtgctgtgctttcatgggcctcttctttatgaagc

SEQ ID NO: 657568 - DNA, 75 bp, Homo sapiens
gaaattatctctggtgctgcagctcttgtgggcgaaatgctgaaaacttcgaccgatttttcacccgccatccac

SEQ ID NO: 657569 - DNA, 75 bp, Homo sapiens
gtagcgaacacggtgctactcaaggcccgggaagcccctcggagggccacagttatcagaacagcggtctggacc

SEQ ID NO: 657570 - DNA, 99 bp, Homo sapiens
ccgaaatgaaggagttcacccctgaatacaaagaactttacagactagcatggcaaagcttctctccgatcttagtgtggacagtgctcgctgcaagcc

SEQ ID NO: 657571 - DNA, 82 bp, Homo sapiens
acacctaatacccacagtcctccagcacggggtcactctggtgcccattgaggagttcagcccggagttcgtggagccccgg

SEQ ID NO: 657572 - DNA, 82 bp, Homo sapiens
tcgtcgccacctggatgctggaggtttttagaacttcagccataaaaatgggcagaattttccttgatcatatcggtggtac

SEQ ID NO: 657573 - DNA, 83 bp, Homo sapiens
gcaccatcatccacctcaagtacccgctgaactgctccgatcccactagtgagagagcatttgaagatgagaagaaggctcgg

SEQ ID NO: 657574 - DNA, 74 bp, Homo sapiens
catacctcagcgggaaaaacagtatgcgccgaggaaacccccatcagcacctccccctgactcacaaagcatcc

SEQ ID NO: 657575 - DNA, 87 bp, Homo sapiens
ggattccaagtaactcttatttgagcccccctccatgcgcctgaaggcccgacccagcagccctggcttttccgtgcttacctgcag

SEQ ID NO: 657576 - DNA, 71 bp, Homo sapiens
agcagtgaaatatcagagcaaggcccggagggttctgtacagagtaatgagatgtgtgacggctgcaaacc

SEQ ID NO: 657577 - DNA, 50 bp, Homo sapiens
acgagtcggccaagttgatgaatgttgttctaagaacggaagcatctggg

SEQ ID NO: 657578 - DNA, 98 bp, Homo sapiens
cggcgccaagccgccgtcatcttcttcctgtgccaggttcatctgcagaagccagcggacgcctctgttcaacttgtgggttacctggctcatgagac

SEQ ID NO: 657579 - DNA, 96 bp, Homo sapiens
gctgagtgtgatgaagatgcagaaaatgttggatatcgtagtaaagtgttatcccgttggctggctggcttaccattgcaacttgctcatcttggc

SEQ ID NO: 657580 - DNA, 100 bp, Homo sapiens
cacagttccggaaagcacagccaggttctgatctacaatggccaactggacatcatcgtggcagctgccctgacagagcgctccttgatgggcatggact

SEQ ID NO: 657581 - DNA, 118 bp, Homo sapiens
aggacgttccctcccccgatccaagttggaattagcatcctctcggggcttcctgcctgacacagctcacttcaagaagtgcacaatgtcagaacgtggaattaagtgggcttgtgaa

SEQ ID NO: 657582 - DNA, 75 bp, Homo sapiens
cggtaggagcctccgtgcggagaccactgttcaaggccacagctgcctgtggaggaaccgattgtgtccacagat

SEQ ID NO: 657583 - DNA, 100 bp, Homo sapiens
tgaggaaggacctatgatagaacaacttagcaaaatgttctttactactaagcaccgttggtatcctcatggacgcaattaccagctctggctgggtcgc

SEQ ID NO: 657584 - DNA, 50 bp, Homo sapiens
actatccaaaccagcagcactaacaggtgactgcttagaaaactgcacag

SEQ ID NO: 657585 - DNA, 100 bp, Homo sapiens
caccgggatcgtgaccgagaccgtgaccgagagcgtgaccgagagcgcgaatatcgtcatcgttagaagcttggtgttctcaagagtctgccctttccga

SEQ ID NO: 657586 - DNA, 100 bp, Homo sapiens
ggtcacacaatgtcggggatggacctccagatttccttactgcccgaccctgcccgccctggactggcagctgccgtcccactcaggcccgtatgagctt

SEQ ID NO: 657587 - DNA, 51 bp, Homo sapiens
cgggcgggccgtcgcgggagagactggagtcgatggaagttgatctctctc

SEQ ID NO: 657588 - DNA, 101 bp, Homo sapiens
actcatgcaccatgaaaagctgctgttttgcaggagatcgtgaccagcctttccgctgtgcccattgccattactcctgcaacatatctggctctctgaag

SEQ ID NO: 657589 - DNA, 90 bp, Homo sapiens
agacaagggtcctaaaacaggatcagtaaagaaggaaaaagcagtaaagccagaggaagaaaatgatgcatcctgttgccagcagtaatc

SEQ ID NO: 657590 - DNA, 73 bp, Homo sapiens
ctgatgtcaatcttgagggctaggatgaaaactttcggaagagaaagttgcctgtggtaagttcagttgttaa

SEQ ID NO: 657591 - DNA, 100 bp, Homo sapiens
cttctccttcacagtaaagtggctgttcacacaaaagatgttggacaatttctacaattttgcttcatcatttgctgtctctcaggcccagatgacacca

SEQ ID NO: 657592 - DNA, 83 bp, Homo sapiens
ggagggccgccggaggaaacgctgtcactgtggaaacggtgtggacactgccagcggctgcagccgacttggaatgacctggg

SEQ ID NO: 657593 - DNA, 97 bp, Homo sapiens
atgaccagggcagaagaagccatggaactttaccacatagcactgttcttggaatttaacatgcttgcacaagaccacctggtggcccatggtagaa

SEQ ID NO: 657594 - DNA, 97 bp, Homo sapiens
cagtttaggaggaagatgcaagcggtttgggaccttgaacaaggcaaatatggttttggacctacctgacttggaagatgatgatgaaacaggcaaa

SEQ ID NO: 657595 - DNA, 50 bp, Homo sapiens
gcgtcacactacgacagtgagaaaggagtccagtcaacctgcaaccaaaa

SEQ ID NO: 657596 - DNA, 101 bp, Homo sapiens
cgtctctctgctgcggcgcggggaccgctgtgctctcggagccaaggcaaagagggaccactgtgctcatggacccatcgctgccttccaaggaccatttc

SEQ ID NO: 657597 - DNA, 82 bp, Homo sapiens
caccgctgccctcagctccgagtccagggcgaggccaagactaaggggctgcagagcggggtggacattggcgtcaagtact

SEQ ID NO: 657598 - DNA, 75 bp, Homo sapiens
gggacaatggtcaccgtctcttcagcaaaagactgttgaagtagagagcattttgcccagctcactcggattctt

SEQ ID NO: 657599 - DNA, 75 bp, Homo sapiens
gtggcgctggatccggcagcagctgatccaacttagaaataatgtttcattcaagataaggctcgtggcttagga

SEQ ID NO: 657600 - DNA, 97 bp, Homo sapiens
ggaataaacatgcaatgaacccaaaaggaatggaatcactagttccccttgtacagagtttgaaaaaacggatggaagtaccagactatgaaatggt

SEQ ID NO: 657601 - DNA, 50 bp, Homo sapiens
cgggaagatggcggctgggttcaaacacgttggtcgtcattgcctccgag

SEQ ID NO: 657602 - DNA, 98 bp, Homo sapiens
ctgagtagctgggagccatcacgcccagctagccatcttctaattttcattccttcaaaggagcctcctcaacaagcccaagagtgagatgaccccag

SEQ ID NO: 657603 - DNA, 101 bp, Homo sapiens
ctcaacggagctgtggccgtgaagatgcgcgccttccaggcatagaatgtcaagctaaccaggcgtccgctacttcagaagagtgtactgtcgcatgggga

SEQ ID NO: 657604 - DNA, 99 bp, Homo sapiens
agatgtcatcacaatggatcccaaagacaattgttcaaaagatgcaaatgcgtgtgaaggcaaagaagaatgctgctccattcagaagtgaagtctgct

SEQ ID NO: 657605 - DNA, 88 bp, Homo sapiens
tgcccccgaagtgaaagagatggcctggtggaaagcctgggatccaaactactggatacaggtgcatcgcttggaacatggagatgga

SEQ ID NO: 657606 - DNA, 98 bp, Homo sapiens
gcagagctcacgtgcctcaacgaagcctcggtgctgcacaacctcaaggagcgttactactcagggctcatctaccactgtaatggcgttgactggcg

SEQ ID NO: 657607 - DNA, 75 bp, Homo sapiens
ctctcccagaaactgaagaccacttacaaggcttccaccagcaaggtgaccaagaatatggcccaggtgaccaaa

SEQ ID NO: 657608 - DNA, 125 bp, Homo sapiens
cctgactccacccctccaatcctcagtggagctggtcgcagatcctgagacccggacagtggcagtgaaacagtgggctcgggatgagtttgaaggcctcttcaagcagccagcagaaaatgtca

SEQ ID NO: 657609 - DNA, 98 bp, Homo sapiens
ttcgcctcgccccgccggttcctcaccctcggggagcaacatgggttctccagaagctggggaaggcagatgagaccaaggatgagcagtttgagcag

SEQ ID NO: 657610 - DNA, 100 bp, Homo sapiens
cgccacagttaatgtaaccaccaagaaaacgctactgtaagattgatgttaaaggcatggtgttcaccccacttcatcagcgtacataagttatctcttc

SEQ ID NO: 657611 - DNA, 113 bp, Homo sapiens
ccacaatttccatcaaaaagtgattaagcagagaatggagaagaaggttgattccagaaacctgatgtgagactctctcgaggcagtattgacagggaggatggaagtcttca

SEQ ID NO: 657612 - DNA, 88 bp, Homo sapiens
ctgacctgtgacaccatcttcatccagcacaacggactcatcaagattggctctggctcctctcctgccccggttgggtctcttggct

SEQ ID NO: 657613 - DNA, 80 bp, Homo sapiens
gccggctcagtcagtgctatgtttggtatagtggaggattacaagccaccgttctacgatgtggttcccaatgacccaag

SEQ ID NO: 657614 - DNA, 97 bp, Homo sapiens
ccccctcaacacggaccgcgcccgccgggcacacaagaatggtcactatcaggatcctcatgaccagccaaagagaagaagaattaggaagcataaa

SEQ ID NO: 657615 - DNA, 90 bp, Homo sapiens
cttcatcttctgtaggatctgatgaaaattctcttcattctcttggactgaacttaaatactgatagagtgttgcggagataggaacatg

SEQ ID NO: 657616 - DNA, 100 bp, Homo sapiens
atcctctgtaacatcttgtcaggctagtctttggatgggaagagctttccatccaggtgtcatgcagaattatggggatcacccttgtgagcaaaaaggc

SEQ ID NO: 657617 - DNA, 73 bp, Homo sapiens
aaacaaaatgaagactcaaaacgtttggaccctgatgctcccataagacagaaaatgccccttgatgatctgg

SEQ ID NO: 657618 - DNA, 85 bp, Homo sapiens
agcactgtacgttactgacaatgatgaggctcatttgcaggggggagccaaaagggtcatcatctctgccccctctgctgatgcc

SEQ ID NO: 657619 - DNA, 75 bp, Homo sapiens
gcggcattttgaggcggtcctcctagcggcctgtaagactttgaccccgacgcaggcttcagtgattgccgcgga

SEQ ID NO: 657620 - DNA, 90 bp, Homo sapiens
caaacacatcggatcgatgctacgctaacctatcgggttctctctccgcgcgttcaggcagcagtgaggatgccagagttcatgggtttc

SEQ ID NO: 657621 - DNA, 75 bp, Homo sapiens
aggcccagaagaacaattagggtgacgtgtgcattgagtaaacaattatatccagatcgagagacagaagattct

SEQ ID NO: 657622 - DNA, 103 bp, Homo sapiens
cccatgtcagccccactggatgccgtcttgggcgtctttggtactggcttttttaggggtctgcctggggattacccttgctgtggatagaagcaactttaag

SEQ ID NO: 657623 - DNA, 80 bp, Homo sapiens
atagaaatcttccaaacattaccagttcatcaccggcgtaatcaacccagcgttggacaaatactttccgtcagactctg

SEQ ID NO: 657624 - DNA, 101 bp, Homo sapiens
gtctcaagtacaaggctggccggccaggaggaagaagaggaggatgaggaggctgcctcaaggtactatgttcccagctacgaggaagtgatgaacacaaa

SEQ ID NO: 657625 - DNA, 100 bp, Homo sapiens
ggaagatgcaatgctgatgtttgataaaactaccaacaggcacagaggtgcagtagacattgttgcaatcatgatcggcaatctgaaaggcacaaaaatt

SEQ ID NO: 657626 - DNA, 82 bp, Homo sapiens
ctcacggagctgggcgacgagctgaccctgggagacatcgacggtcgcctgcgaggccgctggccaggcctgagcctctgcc

SEQ ID NO: 657627 - DNA, 99 bp, Homo sapiens
ttagagccaaactgtccaaggctttggcattttctgaatttccagatcccatgtggggttcagattatgtgcagttgtcaaggacaccaccttcatctg

SEQ ID NO: 657628 - DNA, 100 bp, Homo sapiens
attctccatggacttggtattcagccttcttaggagttgactttggctactactggttccatcgtatggctcatggcaccgaccgtcacgagctaacttc

SEQ ID NO: 657629 - DNA, 75 bp, Homo sapiens
cagcctggcacgctacatccactgtcccaagccgctcctctccaccaaactgccatattgccgtgagaatgtgtg

SEQ ID NO: 657630 - DNA, 89 bp, Homo sapiens
cgtgtatggaaactcatcaggacggaagcacaggggccactcagagtcgcccgagaagtaagaatgattgatgttggctgatattggag

SEQ ID NO: 657631 - DNA, 90 bp, Homo sapiens
gggcggcggcgccggcaggaagatggcccactgcgtgaccttggttcagctgtccatttcctgtgaccatctcattgacaaggacatcgg

SEQ ID NO: 657632 - DNA, 75 bp, Homo sapiens
gatcacagagcctatttacccagaagtagtccatatgggtatgttagagcccaccaaggaaccactgaaaccact

SEQ ID NO: 657633 - DNA, 98 bp, Homo sapiens
aggccatgcctttcaagtgcatgcagctcactgatttcatcctcaagtttccgcacagaaaaagaaggggagcgttcaattccaaacagctgctttat

SEQ ID NO: 657634 - DNA, 75 bp, Homo sapiens
tttccaactgcttaataatttcctccgaaatgacatcaccaggtgtcaagatgctgcaagtacataggactggac

SEQ ID NO: 657635 - DNA, 82 bp, Homo sapiens
ccaccgggatgactaggcaccagagctggaagtcgagtgtgctactcaactcaggagatttggagacaaactgaacttccgg

SEQ ID NO: 657636 - DNA, 100 bp, Homo sapiens
gataccgtttattaaaagagctgtggctctagagaccgttggatggcagcttaaccttcagatggctcactctgctcaagcaaaactaaaatctcctcaa

SEQ ID NO: 657637 - DNA, 97 bp, Homo sapiens
ccatggctgtagaacccagcagctcagaatccattaaaaggagagctgggaggagcctggagcattggtaagcgtcacactgccaaagtgagagctg

SEQ ID NO: 657638 - DNA, 90 bp, Homo sapiens
cagattcgcagtggtcgcttcttctccttgaggagagcgggaatgacgaggctcgggtggaaggccaggccacagatgagaagaaggagc

SEQ ID NO: 657639 - DNA, 82 bp, Homo sapiens
tggaatgaatccttctagagacgtccacggtttttagaacttcagccataaaaatgggcagaattttccttgatcatatcgg

SEQ ID NO: 657640 - DNA, 90 bp, Homo sapiens
cagaaggagcaggagctagccagagccaaagaagccttgcagggaaggatctgagtctctccctgcggagacagccctgaagaactcctg

SEQ ID NO: 657641 - DNA, 83 bp, Homo sapiens
gtttccagaccctcagaggcaaagaaagctcatcacagctcacgtcagcccaaggccaaccccactgtcactctgttcccgcc

SEQ ID NO: 657642 - DNA, 75 bp, Homo sapiens
caaaaacaagctcagggatcccactgattctactttacgaggcggggtttcaccatgttgcccagactggtcttg

SEQ ID NO: 657643 - DNA, 50 bp, Homo sapiens
cggggggctgccgaaactacccaggtctgaatttcctgctgctgttcaca

SEQ ID NO: 657644 - DNA, 83 bp, Homo sapiens
cccctttccaatctggcaatcccaggaacaagttccagttccagtctaccacccaacacctagccagactcggctagcaactc

SEQ ID NO: 657645 - DNA, 100 bp, Homo sapiens
cagactctcaccagtgcgcatgcgtggctctccggcaccggtccgtactccagcgagggagtggacatccgccataacaaggaccgaaaggttcggcgca

SEQ ID NO: 657646 - DNA, 99 bp, Homo sapiens
cttgaatgttgaagatgtccttaccagctttgacaatacaggaaatgtttgtctggtgagctgtaccttctttctggcagtgaatggtctgtattcctc

SEQ ID NO: 657647 - DNA, 100 bp, Homo sapiens
acagagtatggctgcagaggatccatctgtcttagcaaggctgtcatcacaaactacattaccatggacgagctgcgccgcgagctgccacccgaccagg

SEQ ID NO: 657648 - DNA, 80 bp, Homo sapiens
tagaacaagaaagatctaaagtgaaagtattacaagcagagttagccaaataccagtttaaggaagaaatctctaaacgt

SEQ ID NO: 657649 - DNA, 75 bp, Homo sapiens
tcttaagcttccaaggctaaaggctgaccagtgcaccggtcttcagggcttcttggttttccacagctttggtgg

SEQ ID NO: 657650 - DNA, 80 bp, Homo sapiens
cttttccctgagcttgttgatgattttcagggaaatgatcttcattggttagcatgtgccttatatgtggcttgcagaaa

SEQ ID NO: 657651 - DNA, 100 bp, Homo sapiens
ggagcagaggaagccttgaggacctactcacagataggaattgaaggtacaccaggggttggaaaaaccacactaggcaaagaacttgcgtcaaaatcag

SEQ ID NO: 657652 - DNA, 100 bp, Homo sapiens
ctgaattcctgtccttactccctctttaagattgcgtacccactgcagagtgctgaagacggggtagccacgaggagacgaaaccagacagagggtcaag

SEQ ID NO: 657653 - DNA, 75 bp, Homo sapiens
tgcgacttataaaggaccagacaaatcaaattagtggttttggtgaagacattcagtgaagcttgcctgatggta

SEQ ID NO: 657654 - DNA, 83 bp, Homo sapiens
aatgagcgatgggcccgccctcctgcagtgaccagtaatggcactttacactcgatgtcccaggagagaggagtacagccagc

SEQ ID NO: 657655 - DNA, 100 bp, Homo sapiens
gatgtgaactgtttctcttctgcagaaaaagaggctcttcctcctcctcccgcgacggactcgctcagcagcagcctgaaaacttgctacaagtatctca

SEQ ID NO: 657656 - DNA, 100 bp, Homo sapiens
cctgcaggaggaggaggaagaagagaagctggacgctctgcaggggatcctctctgctttcctgcagcgtcaccctttacaccagaaagctggcgggcac

SEQ ID NO: 657657 - DNA, 75 bp, Homo sapiens
cagtggttgaatcataggcaagtggtgtgtggcacaaaatgcaacacgtggtcaagcagaggatgcagatgtaca

SEQ ID NO: 657658 - DNA, 99 bp, Homo sapiens
aacatggagtcgggcaagatggcgcctcccaagaacgctccgagagatgccttgcgccctgcccacccttggagccaggcacacagtgacgactcggag

SEQ ID NO: 657659 - DNA, 113 bp, Homo sapiens
ggaaaacctaaccatgaagacttgaacttaatacagcaagaaagaccatcaagtttaccaggattaaagcctgtggtttccacagaagcaccacctatcatatttgccacacc

SEQ ID NO: 657660 - DNA, 98 bp, Homo sapiens
gctgcagggacccggtgacagcgtgagaggttcgcagaggtgtaccagtgatggcaataagaaacaaaatgatatcagaaggactagacccagatctt

SEQ ID NO: 657661 - DNA, 82 bp, Homo sapiens
gttctcagcctgacaccgtcgttcccagaacccagcgcgctctgtccgcgggagagctgtggggcttggtgagtgtttcgtg

SEQ ID NO: 657662 - DNA, 98 bp, Homo sapiens
ggtgaggacgcggcgggcgagcgagaggccgagggctcagggtttggagcggccaccaaggccatgtgcatcggcctgcggtactggaagcctgagcg

SEQ ID NO: 657663 - DNA, 74 bp, Homo sapiens
caagctctttgacacacagcagttcttgtcaggtcttgttgcagtaggagaaagagcacaaaagaggtctggga

SEQ ID NO: 657664 - DNA, 75 bp, Homo sapiens
gaaagtaaaagaattgaatttacatgaggtttccacttgagcggcacagtgacagaacctgcaatacaatcggag

SEQ ID NO: 657665 - DNA, 74 bp, Homo sapiens
aatagagccataaagaaagcaaagcgcagaaatgttggatttgaaacattgcctaagatactgagccatatcgc

SEQ ID NO: 657666 - DNA, 100 bp, Homo sapiens
tccggaaatatggcctcaatatgtgccgccagtgtttccgtcagtacgcgaaggatatcggtttcattaagggcaaactctttgattctacaatagctga

SEQ ID NO: 657667 - DNA, 118 bp, Homo sapiens
ggggaggagaccatggctgactacctgctgtacaccctcaacaaacaccagcgctttggacctgcctagagctggaacgttacctccagagcgagccctgctatgtttcagcctcaga

SEQ ID NO: 657668 - DNA, 100 bp, Homo sapiens
aacaaggcctttaaaaaatccaaagtgtgtggagtttgcaaacaaattattgacggtcaaggtatttcatgccgaggggatcatgagtggaaaaacaaag

SEQ ID NO: 657669 - DNA, 50 bp, Homo sapiens
tcaaattcgtcaagatgcagtaaaagaggaagaggtggtggacaagatgg

SEQ ID NO: 657670 - DNA, 100 bp, Homo sapiens
gccttctttgaagccagagaaaataatgcagtgtatgccttcttaggcttgacagccccacctggttcaaagtggtggtgaccgcggtggcttcaaaaat

SEQ ID NO: 657671 - DNA, 118 bp, Homo sapiens
actcatgtttgcacccgcggtgatgcgtgcttttcgcaagaacaagactctcggctatggagtccccatgttgggcgtctctggccgagcctctttttgtggaaaacgacagcagcag

SEQ ID NO: 657672 - DNA, 80 bp, Homo sapiens
gagcaagcccaggcacagccgacgccgcgggcaaattgtggctactaatttgccccctgaagatcaagatggctctgggg

SEQ ID NO: 657673 - DNA, 76 bp, Homo sapiens
ctcaggagctggagaccaaagctgagctcctccagtctgctatcagttgagggatttgcagttgataaaatggctg

SEQ ID NO: 657674 - DNA, 74 bp, Homo sapiens
agaacctgaacgacctgatgctgcttcaggttggatggcaagcatgtggtgtttggcaaagtgaaagaaggcat

SEQ ID NO: 657675 - DNA, 82 bp, Homo sapiens
agctggacaggcagagtgctgatgtgaaaaataccacgacaaaaccaccctagctatggtgaactaaacggtaatgctggag

SEQ ID NO: 657676 - DNA, 75 bp, Homo sapiens
caggtgtaagcgcagaaagcaggcgaacccgcggcgcaataacgatgttgatgttagtgaagattcacctcctcc

SEQ ID NO: 657677 - DNA, 74 bp, Homo sapiens
aaggattccaagtaactcttatttgggttgacagggattcaaggaacaaacactgtgatgtactattggtggaa

SEQ ID NO: 657678 - DNA, 83 bp, Homo sapiens
gcactattattcatgaggcaaatgaggaacagggcaatagtatgatgtgtttgatatcgtgaggaactatactgcagattatg

SEQ ID NO: 657679 - DNA, 100 bp, Homo sapiens
ctgaatcatatgtttccttcacaaccaaactggatattcctactgctgctaaatatgagactctaaaatagagctcaagcttgagaagagagaaccacta

SEQ ID NO: 657680 - DNA, 94 bp, Homo sapiens
tggcttctcgactcggtcctgtttcgacagcgaacatgtcgcggcctgtcaggaaaaaggcctgtgtcatatcaacacttatctaacagcatgg

SEQ ID NO: 657681 - DNA, 87 bp, Homo sapiens
gttcctcatggagctggcccgcaggaaagggttcagggttgaaaatgagctcagttggtagctggcagtgttgtgatggcttttgaa

SEQ ID NO: 657682 - DNA, 90 bp, Homo sapiens
ctttgaagttctgtaatttggctttattgcttcctactgttaccaaagagttcaaagttagagaaacctgagaggggtgtactggtatga

SEQ ID NO: 657683 - DNA, 100 bp, Homo sapiens
gcgaccggatgcggagactcagaagtccgagcttggacccttaatgaggaccacactccaacgcggggcgcagtggtactttggtcaataatgtccgact

SEQ ID NO: 657684 - DNA, 82 bp, Homo sapiens
gttacattctctatctgcgcaccttggagtccaagcttgtgctctttgggtttctcaataccaccttcctcctcatggggtg

SEQ ID NO: 657685 - DNA, 75 bp, Homo sapiens
ggcttcccttactacctgaagatcaactactcctgcgaggaaaagcaggttcaggagaagtggcacctggtggag

SEQ ID NO: 657686 - DNA, 75 bp, Homo sapiens
ccgtggaataggtgtatcaagtaatggtgcaaagcctgaaaaagaacatactggtcgtcttgttataggagatca

SEQ ID NO: 657687 - DNA, 98 bp, Homo sapiens
cccctgtctcccggaggagcgcgcaccggctgcaaagtatgccaggggagtatgtagcccggggtggtccaatgggtgtgagtatgggacagccaagt

SEQ ID NO: 657688 - DNA, 95 bp, Homo sapiens
gaccatggatataaaatcacaggcctcaagcccttctcaggatgcgcaggatgccaggcggccacggagcaggaacccctccgcctggactgtgg

SEQ ID NO: 657689 - DNA, 75 bp, Homo sapiens
aaattgagactttgacaagtcaaagagcacagctggaatgcaagtcaagcatcacgttgggtggtttccatttag

SEQ ID NO: 657690 - DNA, 90 bp, Homo sapiens
ctataatcaagtaaaaacaatagctcaaggaaacctttccaacacagatgtccaagctgccaagtatattgaagcaagtcaaagattaca

SEQ ID NO: 657691 - DNA, 75 bp, Homo sapiens
agcggagccggccgtacgcggtgctgcgagggcagaacctggtttgtctttgtcagcgccacgtgagacacctac

SEQ ID NO: 657692 - DNA, 100 bp, Homo sapiens
ctgcagaagaaggcctgggagatgaagatgaaaagagaaaaatctcagctattcggtcatatagagatgtcatgaaggagctgcggcgccaagatgagtg

SEQ ID NO: 657693 - DNA, 100 bp, Homo sapiens
ggcgcgtaccgccccagcccgggtgcccacactggccgtcccggccatctcgctgcccgacgatgtccgcaggcgtttggcaatgaggagcagcagctgg

SEQ ID NO: 657694 - DNA, 101 bp, Homo sapiens
cggggcccaaccacaagacgactcaataggaggaaggaaagaagattctatatgatatacttgcctttgccaaagaaagtgtgaattctcatgttaccacg

SEQ ID NO: 657695 - DNA, 50 bp, Homo sapiens
gtcaaccgattctgcctgtccaagcctgtctatggggtggagctgttcct

SEQ ID NO: 657696 - DNA, 100 bp, Homo sapiens
gcgacgtacccgccgccgccgttggctggagatctagaaatggccattgcctactggaacttagtgcttaatggaagatttaaattcttagacttatgga

SEQ ID NO: 657697 - DNA, 83 bp, Homo sapiens
gtggaggtgtacgagacccatgcccggatcgccttggagaagcctggtccgacccccagtggcactaacgtgggatcctcagg

SEQ ID NO: 657698 - DNA, 73 bp, Homo sapiens
gtgagcccatcccgttctctgatttgcagcaggccaaacgtaccaagaaagtcgggatcgtcggtaaatacgg

SEQ ID NO: 657699 - DNA, 75 bp, Homo sapiens
tcggctggacttctccatcaccaaggcaacagagatgcttatttttggaaagaagttaacagcgggagaggcatg

SEQ ID NO: 657700 - DNA, 100 bp, Homo sapiens
aaaacttagattgcaacagtgattcacaggtgtttccctctttgaatgtgggaaaggtttttattcctggactgccagctccctctctgacgatgtccaa

SEQ ID NO: 657701 - DNA, 76 bp, Homo sapiens
cccctacatcggacacccccaagatgccccttggtgtggccactgcaaggctctggcccctgagtatgccaaagcc

SEQ ID NO: 657702 - DNA, 100 bp, Homo sapiens
ggaggagcaacggctgcgcaggtgactcggtggcctcaagtgtgctgggagtcctccgtcagcatcagctccggctccggtgtcctccttctctcgcact

SEQ ID NO: 657703 - DNA, 75 bp, Homo sapiens
cactgatccatggacagggtaggcaggctttctcggtatcagcagtttaaagattttcaacgacgaattcttgtg

SEQ ID NO: 657704 - DNA, 73 bp, Homo sapiens
gagttccgatcgacccggtaccaagaaggggagtgcccgcggcaggcaccaccttccatggtcaataatgaac

SEQ ID NO: 657705 - DNA, 96 bp, Homo sapiens
agcgcaacactcgcttggttggggagatcggcgcttggccggttcgtgagccacacatctccccacaccaagctcctccatacaagacctcggact

SEQ ID NO: 657706 - DNA, 100 bp, Homo sapiens
ggcaaggtggttttggaccagacaggcgtgtctaaggcttggcctctgtgttctccaaccgcacatcccggaagtcagccttacgtgcggggaacgacag

SEQ ID NO: 657707 - DNA, 97 bp, Homo sapiens
ggagccgtctattactgtccttggcccgcggaggggtctgcgcagtgcaggcagataccgtttgacaccaccatggtgccaccgaacatcgcagaac

SEQ ID NO: 657708 - DNA, 90 bp, Homo sapiens
gaggagccattttgagcaatggggaacgctcacggactgtgtggaggtgttggaattggccttctccatcctgtatgaccctgatgagac

SEQ ID NO: 657709 - DNA, 73 bp, Homo sapiens
tgagaaaaggcctaagaattttggcattggtgtctgatgatttgtgagcctcaagtgactactctgtggaatc

SEQ ID NO: 657710 - DNA, 50 bp, Homo sapiens
gatgaatttgcttttctggaagatttggacacctcccacactgagtcccc

SEQ ID NO: 657711 - DNA, 100 bp, Homo sapiens
accttggagctgatgtcaatgccgctgacaagcatggcatgactacggggccccccaggaggcgactctcggggccaacaaggtgatcgaaggcctggac

SEQ ID NO: 657712 - DNA, 100 bp, Homo sapiens
cccggcgggagcggcggcaagaaaaatgccagccagaagaggcgttcgctgcgcgtgcacattccggccaagtcctgtatctgccatgtctgtggcgtcc

SEQ ID NO: 657713 - DNA, 87 bp, Homo sapiens
caagaccatcttccaaggcattgctgcaaaagtgggaactggagaaccctgctgtgactggctctggattaatcgaattacagctgc

SEQ ID NO: 657714 - DNA, 50 bp, Homo sapiens
ggacccgctttctaccattaaggttttgagcaaaattttggactgtgaag

SEQ ID NO: 657715 - DNA, 51 bp, Homo sapiens
tggtgtaaagattgtggtagtagatgaaacagagtctcgctctgtcatcca

SEQ ID NO: 657716 - DNA, 100 bp, Homo sapiens
gaaaaatctctggagtcagaggcctgggcgcagctctggactctgcgtataacagatctagtgaaaagccatttgatgtatgcggtcagagaagaagtgg

SEQ ID NO: 657717 - DNA, 82 bp, Homo sapiens
ttgtttgaaaaccagctgcttcaaattggacttaagtctgaatttcggcagaatttagatgtgaagttcatttccaatccgc

SEQ ID NO: 657718 - DNA, 100 bp, Homo sapiens
cagaggctagcgagcgagccccaggaccctgcggccgtgtctctgcccacgtcgagcgtgcccgagacccgagatacccagtatctccaagataccatga

SEQ ID NO: 657719 - DNA, 50 bp, Homo sapiens
ctcaggcgtgcgcggacggtgtgcgggcctttgtggaggcccagaataag

SEQ ID NO: 657720 - DNA, 87 bp, Homo sapiens
gcctgccagcacccctggagaagcgcgttaaggagctggctcaggcatttgatctaacagagcaaagatacgtagctgtgaaaattc

SEQ ID NO: 657721 - DNA, 74 bp, Homo sapiens
attgaagctgactactaaggagaataagaaaatggtgtgaatggaacattaacttcaaatgtagcagactctcc

SEQ ID NO: 657722 - DNA, 90 bp, Homo sapiens
ggaggaggtgcgccagcgagccctggctctggatgaagccgtgtcccagtccacacagacgctgaccggaaaggagattgagattgacat

SEQ ID NO: 657723 - DNA, 100 bp, Homo sapiens
gagacccgagttcatcgcctacccccatctccgcatcaggaccaagttcgtctaatgattgaaaatccttacgagacccgctctgacagcttctactttg

SEQ ID NO: 657724 - DNA, 75 bp, Homo sapiens
ccgctgcctcgcctcggtacgccgcgcggcgcggacggcgccaggacagctggcctgaagctcagagccggggcg

SEQ ID NO: 657725 - DNA, 99 bp, Homo sapiens
atatccgtgcagagaccctttcttcaaaatgttgaaccggtccctctccacgttcatgaacgccttcacagtcaccaggagactaaagtccatcaaaaa

SEQ ID NO: 657726 - DNA, 74 bp, Homo sapiens
tggagacaggggcttttatttcagtcacggtgcatacctgtttaccatccagagttcatcactgctgaagagtc

SEQ ID NO: 657727 - DNA, 99 bp, Homo sapiens
gactcctacctgaaacatacggagattgacaatcaatgggccatcttggacgagaaaatttgtcaaaggatctttacttgatatctcaaatggatagtg

SEQ ID NO: 657728 - DNA, 96 bp, Homo sapiens
gagatgactgtgagctcatgttgcaggtttgtctgccattgtggatttcctgggcagagtggagtgaaggtgccaaaagccaagaagacactgagg

SEQ ID NO: 657729 - DNA, 100 bp, Homo sapiens
acctatgctggtggaacagcctcggccaccaagagaccaaatgagagggttgacactgtatcagaaaaaccaagggaagaaccagtactaaaagaggaag

SEQ ID NO: 657730 - DNA, 83 bp, Homo sapiens
cctactaagaactacctgagctacctgacagccccggattattctgcctttgaaattccaagaaaggtggtgtatgaccagct

SEQ ID NO: 657731 - DNA, 90 bp, Homo sapiens
tgtctgaactggatcataaatgacaggttggtcaaagaaaaagtgatgtatgaaaaagaggcaaaacaacaagaagaaaagattgaaaaa

SEQ ID NO: 657732 - DNA, 100 bp, Homo sapiens
agatcccagactgcgtggagcagagtctcacattcccagtcaggaggtcccaggcacccaggtgggacaaggaggaaagctatgggatcccagtgtccag

SEQ ID NO: 657733 - DNA, 90 bp, Homo sapiens
caactgtggccttaatgagcatgttgacagcatcgatgctagacagacatttttcagttatgggacaaaaatattatatcaaaacactga

SEQ ID NO: 657734 - DNA, 74 bp, Homo sapiens
tctgcatggaggaggtcattctgccctttcttgggctgtgttcacggcaccattcaggaagattacctaagaga

SEQ ID NO: 657735 - DNA, 50 bp, Homo sapiens
aagaaacatctcaccaatttcaaatccggaccccactggaaatcggactg

SEQ ID NO: 657736 - DNA, 114 bp, Homo sapiens
gagccaaggaataaacatgcaatgaacccaaaagggcatgacagcaagcgctgtggcggctttgatcctcatgacgtcctccatcatgtcggtcgtggggtccctgtacctggc

SEQ ID NO: 657737 - DNA, 100 bp, Homo sapiens
agagtttggtggtaaaagacccacatttggaaaatcttgacaccattattaagcaaatcgcagtcttctccaggctgacaaggcgaagggcatggcttcg

SEQ ID NO: 657738 - DNA, 100 bp, Homo sapiens
caagcatcatatggcaccattaaaattgggatttaccaaagcttgaagcgcttattcgtagaacgtttagaaggttcagccctatgtagctacaacctaa

SEQ ID NO: 657739 - DNA, 100 bp, Homo sapiens
tgatgaagaagatccttcaaaattaaaagaggagcagcatggcatttcagtcactggtttgcagagtccaggtgatgctgggagcagaactccaaaagac

SEQ ID NO: 657740 - DNA, 100 bp, Homo sapiens
ggaagatccaagaacgtagggatgcctattgccatgcttttacacactgatggagagcatgaacggccaggagatattgagctcctggcagcttgcagag

SEQ ID NO: 657741 - DNA, 82 bp, Homo sapiens
aatccaagtcgttcttcgacaacatctcttctgaactcaagaccaggtttggtgcacctcgatttggaggaagtagggcagg

SEQ ID NO: 657742 - DNA, 95 bp, Homo sapiens
ggcctcgcctcgcacccccagccagtccgtcgatccagctgccagcgcagccgccagcgccgggtgctggagaatctggtaaaagcaccattgtg

SEQ ID NO: 657743 - DNA, 82 bp, Homo sapiens
cggagctgcagtcggcactgctactgcgaagacagctggcaggacaagatcgcagaggaaggtgggcggcgggagtgcccag

SEQ ID NO: 657744 - DNA, 50 bp, Homo sapiens
ggacggcgacgcagcccgcggcagaagaacccagcgggtgccgcttctcc

SEQ ID NO: 657745 - DNA, 74 bp, Homo sapiens
tatttaaaggatttgatgctctgcaatatcaggaacattatacatggcagtgattctgtggagagtgcagagaa

SEQ ID NO: 657746 - DNA, 100 bp, Homo sapiens
gaaggatctctccttaacgcctttcaccattaagaggaaagcgatggaggagctgagcgctgatgagaaatgcactcggtgatggaaagagagccactat

SEQ ID NO: 657747 - DNA, 98 bp, Homo sapiens
ttcggtcatctaaaggaggttttaaacagtataacaggcaccacactgtaactcgaggcatcaccaaaggcgtgaaggaggactttcgcctggccatg

SEQ ID NO: 657748 - DNA, 101 bp, Homo sapiens
tttctctgttgtctcggtagaaggccagagtcacacacggtcctaagagctgggcaccaggaagcgaaggctggcttcaacggaccacaccaaaatgccat

SEQ ID NO: 657749 - DNA, 130 bp, Homo sapiens
attggcaggtaacgagcggcggcggcggcagcgggtcttgggtcctccgagagcagcagcgctgctgtcccccagcaacgtggccatctacggtggcctgtgcgccttggctacctttgaccggcaggag

SEQ ID NO: 657750 - DNA, 98 bp, Homo sapiens
ccagagcctggagtctgcgaaggccgggacccggttccccggcccacagtgggggtgtgcaaacccgagagaactggttgggagctgaaagtgccgac

SEQ ID NO: 657751 - DNA, 75 bp, Homo sapiens
aagcaagcatctggaacaatggtgtatgggttgtttatgttacaaaagggcatgagccagaaggagagctctaag

SEQ ID NO: 657752 - DNA, 89 bp, Homo sapiens
caggaactgcgcagcctcttcgagcgccgcggacgcgtcatcgagtgtgacgtggtgaaaggacttcaaacaagtgtgaagaggctgtg

SEQ ID NO: 657753 - DNA, 98 bp, Homo sapiens
tcctaggaatggatttctcctctaatgacaggtggcagatatctacctagcatctcagtacacatcctatgccataagtggtcccacagtacaaggtg

SEQ ID NO: 657754 - DNA, 100 bp, Homo sapiens
ttccactcttcggcgaagctttacgttcatgtaaacagcatgacgtgaggccgtggatgcaggcattaagctgagtcagtgctgattctctcaaatagag

SEQ ID NO: 657755 - DNA, 100 bp, Homo sapiens
ttgaggccattaatatcaccaacaatgagagagtggttgtaaaaatcctgaaggtccttggtatagtagtgggagttctccttcaggatcatgatgttcg

SEQ ID NO: 657756 - DNA, 121 bp, Homo sapiens
agaagtttactagagcggaaacaagtcagacccatgctgctagttgatgatcgggcactacctgatttcaaaggactctgaaaaggaatcttgcccaagcagtgatgaagttgatgaggag

SEQ ID NO: 657757 - DNA, 123 bp, Homo sapiens
ccagcacaccccaggagagaggactggggtcccaggagtaggaggaggggctgaggaagctgccctcgaaaccctccagaagacatctgtcctgcagaggccctaccactgcgaggcctgcgg

SEQ ID NO: 657758 - DNA, 82 bp, Homo sapiens
gcttaaaaagccaccgcggctccaggagtcctgtgactcaggtgtcccgacccaggctaagcttgagcatggctgagcagga

SEQ ID NO: 657759 - DNA, 75 bp, Homo sapiens
gcctcgcctggatgtgagtttcagccaggctgcaaactacttagacatcaaaggtttgcttgatgttacatgcaa

SEQ ID NO: 657760 - DNA, 100 bp, Homo sapiens
attcctgggatgtgacgggcaccagaatgctccctctccaaaggatctaaggaccaaagctgacagtttctttacttgaattaaacaaccaccatgtcga

SEQ ID NO: 657761 - DNA, 100 bp, Homo sapiens
ttgaatttctctctgtaaaggaggggcatatgatattttcctgaatgcaaaagagcaaaacattgtgtttaatgctgaaacctacagcaatctcattaaa

SEQ ID NO: 657762 - DNA, 76 bp, Homo sapiens
gcaagaggccatggaccctgtctcagtggtgctggagaatctggtaaaagcaccattgtgaagcagatgaggatcc

SEQ ID NO: 657763 - DNA, 74 bp, Homo sapiens
cacagctaaggctgtgttggagcccattcagagcaccagtctagatagcagcatcaaggagcattgtgtacatg

SEQ ID NO: 657764 - DNA, 100 bp, Homo sapiens
tggaagtggaatcgcccaggagacagacttcttgatttagatcagggagcagagaaacatgaaggcacaggtcagtcctctgggatcactgatcaagaga

SEQ ID NO: 657765 - DNA, 75 bp, Homo sapiens
tgacatctccaattattcgagaagagaacatgagggaaggagactgcaaaattcaaaatggggctcaaggtattc

SEQ ID NO: 657766 - DNA, 100 bp, Homo sapiens
tggggctctggccgcgcctggcctggccgggaccatggctattgagggcacctacattgacaagaaatgccccttcactggtaatgtgtccattcgaggg

SEQ ID NO: 657767 - DNA, 75 bp, Homo sapiens
tcagtgaaggaaatgaagtccctgagatgaatcactttcacagtaaccggatctatgattacaacagtgtcatcc

SEQ ID NO: 657768 - DNA, 100 bp, Homo sapiens
ttcacggaggcaatagctagccgcatttgacattgtgcagcaaagaaatggttatggagaagcccagtccgctgcttgtagggcgggagtttgtgaggca

SEQ ID NO: 657769 - DNA, 100 bp, Homo sapiens
acttattcgagagcagcatccaaccaaaatcccgagctgtaggtaaaacttgcctactgatcagttacacaaccaatgcatttcctggagaatatatccc

SEQ ID NO: 657770 - DNA, 75 bp, Homo sapiens
gtggccggttcttggtgggatctgagcagtgtggcaaaggagcagagaactttgacaagttcttcacacgaggac

SEQ ID NO: 657771 - DNA, 75 bp, Homo sapiens
tttgaatactccccctgagatacaagcaggttgtatattactcgaggggtttttaaatattgtcaggaaaaagaa

SEQ ID NO: 657772 - DNA, 98 bp, Homo sapiens
gaattgtaggtattgaaaggaaactggaagaaaaaagaaaagaaactgacaaaaacatttctgagctgacatctgaaatgtttgaagcagatcttgag

SEQ ID NO: 657773 - DNA, 95 bp, Homo sapiens
gccttgggggcggccctacgtagcctggcttctggggtcatcgagcagctcggtgggaagcagctggtcatgaaccacatgcatcatgaagacca

SEQ ID NO: 657774 - DNA, 100 bp, Homo sapiens
agtgccgtgcgccgcagcccgggcccaggccccggcagcgcctgggacaagccatcatcgtctacagactgccgtggacctggaaatgcagcaagctcct

SEQ ID NO: 657775 - DNA, 100 bp, Homo sapiens
ctcaagatccccatggacaacaaggagtactttggaagtgttgctgaaatcatcaggaatcatcaacatagtcctttggttcttattgacagtcagaata

SEQ ID NO: 657776 - DNA, 100 bp, Homo sapiens
aagactacaggagaattcggtttgtaggtcgtcagaaagagatggcccactgcgtgaccttggttcagctgtccatttcctgtgaccatctcattgacaa

SEQ ID NO: 657777 - DNA, 100 bp, Homo sapiens
gcgtggcttctttctactgtgcctgccccatgggcaagactgcctcgaagcggaggatccctgtgtcccagccgggcatggccgacccccaccagctttt

SEQ ID NO: 657778 - DNA, 75 bp, Homo sapiens
tctgctgggacccgaggctgagccaagcaggtccttattccttaaatggatacagagtgagagtatatagacaag

SEQ ID NO: 657779 - DNA, 90 bp, Homo sapiens
catcgtcacggacactcctgagctacagagactgaagaggactcaggagcaaatcagtaatagtgatgaggtcctcaccgtcatcaaagc

SEQ ID NO: 657780 - DNA, 100 bp, Homo sapiens
gagttctacagagtcaccactgaacaatatcagaaagctgctgaagaggtggaagcaaagttcaaatgtatcggcaagcagtgtaaacggaggacttggg

SEQ ID NO: 657781 - DNA, 100 bp, Homo sapiens
ccctgggaattcaggagcccctcagctgcaagcaaatcaaaatgtccagcatgcaggtgcaatgaagggcgtgttggtagacattgtgaatgcagcacag

SEQ ID NO: 657782 - DNA, 80 bp, Homo sapiens
gtctctctgctgcggcgcggggaccgctgtgctctcgggatttggacatttggtgccatcttcagaagatccaggagtcc

SEQ ID NO: 657783 - DNA, 100 bp, Homo sapiens
tctgatgaaagctatactccaagcaagatctcagtcagagtaggaaataattttcacaaccttcaagaaattcgggtccagtttggccatgctggagctt

SEQ ID NO: 657784 - DNA, 90 bp, Homo sapiens
tgggactgcaccgcaccgagggcgagctccaggtgtgttccagagaacaagccttcagacatttgctatattgacgctgagctgtcaggg

SEQ ID NO: 657785 - DNA, 100 bp, Homo sapiens
actgtaagaagaggaaagacttgtctcagttcatgagcggcccagttctgtaccaggagaagctgctgaagccggcagctttgctgctggagaagggtgc

SEQ ID NO: 657786 - DNA, 80 bp, Homo sapiens
ataactcagtcactggctgcaacaggaccacagtcaagacgatcatagtcactgtccagaacacatattacataatggag

SEQ ID NO: 657787 - DNA, 97 bp, Homo sapiens
gtcctctcccaagtattcactctatgaagtgcatgtcagcggaggccgggtgagagcaaaactttcagcaccacttgctggcatgggaaatgccaag

SEQ ID NO: 657788 - DNA, 96 bp, Homo sapiens
gaaccatttgcttttctggggagtcctggcggtttttattaaggctgttcatgtgaaagaatgtatgacaacatgtccacaatggtgtacataaag

SEQ ID NO: 657789 - DNA, 83 bp, Homo sapiens
tgaagacgacttcgaccctgcccagcacgaccagctcatgcaggtgggagatgccatcccagcagtggaggtgtttgaagggg

SEQ ID NO: 657790 - DNA, 90 bp, Homo sapiens
gaagcgggcggcctgcactcgggctgggtagttgggtctctggatattcttggcagccctgcaagcctggtgagaagcatcgggaacggg

SEQ ID NO: 657791 - DNA, 49 bp, Homo sapiens
ccctcaaggccatgatcaaaacgtttgaacaggccatccaggcagccag

SEQ ID NO: 657792 - DNA, 50 bp, Homo sapiens
aattaaagagtaaagttgtgctcaacgatgaaccagaaactcgagatgca

SEQ ID NO: 657793 - DNA, 50 bp, Homo sapiens
aaaaacttcctttgcttgtgctcagaactttcacgatggccgtaaagcac

SEQ ID NO: 657794 - DNA, 100 bp, Homo sapiens
gctctacagtagcttcacaaagtgccaaccatacacatggcaccacctcacacagggaaacgctatcagttgagggatttgcagttgataaaatggctgg

SEQ ID NO: 657795 - DNA, 100 bp, Homo sapiens
tggtacaggtcaccacgcaccgactatgtcgcctgccaccgagccgggcccacctccccaccaaggaagcgggctgacgcacgaggcacacaggaaggag

SEQ ID NO: 657796 - DNA, 82 bp, Homo sapiens
caagatgatttatggtaataaggcttctgggaacttggcagacgcagcttagagagactcaccagcgagcgtcattgttgtc

SEQ ID NO: 657797 - DNA, 110 bp, Homo sapiens
ggggaagacaaatatggaaacaaatactatgaagacaacaagcaattttttgagctctgaggaacatgaatacagtgatgaagctcctcaggaagatgagggctttatgg

SEQ ID NO: 657798 - DNA, 74 bp, Homo sapiens
ggaaatgggaagaggcccagtccagagaggattaaactgcaaatatctcatgaagctgctgcctgtatcactgg

SEQ ID NO: 657799 - DNA, 74 bp, Homo sapiens
ctagttgcaggaaaacaagctcagggctcccacggattctacattatggctatgtcgacaccacccactggaag

SEQ ID NO: 657800 - DNA, 100 bp, Homo sapiens
tccgcccccatcttcacggtgatcatgtctcggatgattctgggggagtacacagatctttaatctcatgaagtacgacagctacagccgcttcttaaag

SEQ ID NO: 657801 - DNA, 101 bp, Homo sapiens
aggacatctatgctcacatattcatcctgaagtgttggcgggagtcggagaagacacaaatgccagaccctaagaccttcaagcagcactttgagagcaag

SEQ ID NO: 657802 - DNA, 98 bp, Homo sapiens
tacaaaggacacacagggattttgaaaatgctgcacatcccttaatagtcatctacatagacacgatgaggcgagtggtacgacagagcaagtttcgg

SEQ ID NO: 657803 - DNA, 80 bp, Homo sapiens
cattgacgatcaagatatcacctatgctattggcatgatacttacatttgttgttctggtgctgatgaaaaaggggcaac

SEQ ID NO: 657804 - DNA, 82 bp, Homo sapiens
accagccaatgatcttttcaatgctgcgaaagctgccaaaagtgacatgcaggtttaacttgtggccctaaagaactggaaa

SEQ ID NO: 657805 - DNA, 50 bp, Homo sapiens
tgaggagtcgccgccgccccgagtcccggcttacaaataccttcgagaag

SEQ ID NO: 657806 - DNA, 90 bp, Homo sapiens
ggaagattctggtgtccacgtgatcattggggggcacgattctccctctcctagaggcgcatcttcatgatacagttaagaggaatcttg

SEQ ID NO: 657807 - DNA, 74 bp, Homo sapiens
ctcagcctcctaagtagctgggactacagatgaggaaagtgaggcccaaagaagatttatgttcaggaccattt

SEQ ID NO: 657808 - DNA, 76 bp, Homo sapiens
ctttggagaacttctggagctggccaacgtgcaggagtttctggcccccaaagacaaaccaagtggagacacagca

SEQ ID NO: 657809 - DNA, 100 bp, Homo sapiens
atcccaggaccctcttcgcgggcgattcgcgtagcctcagggtgtgaacaaagactcctatctgatcctggagacgctgcccacagagtatgactcgcgg

SEQ ID NO: 657810 - DNA, 100 bp, Homo sapiens
ctccagtttgagaaacctggatctgcgatctgtttgtggaatgttacgttcataacttactaaggattagtgtatattttccaaccttgaggcatgaaat

SEQ ID NO: 657811 - DNA, 89 bp, Homo sapiens
tcttgaaacacaaatggtttttggccactcctcaggatagtcaggaaggaacctttgggtcagagcattcagcgtcaccatcacaaggg

SEQ ID NO: 657812 - DNA, 95 bp, Homo sapiens
atttctcctgaatttggaaactatttgaagaatatgttcaagagggaataagatggacacccattgagtactttaataataaaatcgtatgtgac

SEQ ID NO: 657813 - DNA, 100 bp, Homo sapiens
ttaagttcgtcgtcttcatcgtcgcggttctgctgccgattgtgaagtttgcccgagggccacgtgccaaggtctctccagtcaatgacgtagatgttgg

SEQ ID NO: 657814 - DNA, 100 bp, Homo sapiens
ctatggaggagaccgaggtgggggctacggaggagaccgaggtggctatggaggcaaaatgggaggaagtgtgacagctatgaaattcgccctggtaaac

SEQ ID NO: 657815 - DNA, 100 bp, Homo sapiens
aggccttccagctgtttgaccgaacagacaaggcgaccagccagctcctgttggagacagattgggagtccattttgcagatctgcgacctgatccgcca

SEQ ID NO: 657816 - DNA, 98 bp, Homo sapiens
agagaccaggacctcggagcctcactgctcccagcagcacctcagatggagggagcgaggaaccaccggatcgaagacagtcaagtgtagactctcgc

SEQ ID NO: 657817 - DNA, 100 bp, Homo sapiens
gaagctactactgccttaaactttttgcacttataccatactattatactttgtcatacttcagaaagtttggacccaattaaatcctttgaagctcctg

SEQ ID NO: 657818 - DNA, 82 bp, Homo sapiens
gccgagttctccagcctgctgcgcaggataaaaggcaaactcttcacctgtttggtgccctggttgtcagatgttggaaagc

SEQ ID NO: 657819 - DNA, 74 bp, Homo sapiens
tctgatgagctgagaaacaaagccacccagccaatgaaggttcgttccaccagtcataaaccagatgaaatcta

SEQ ID NO: 657820 - DNA, 96 bp, Homo sapiens
caagttggataagggcctggaacagcgggatcaggctgccgagaggctgcggaagattgttgatcgaatcgacaatgatggggatggctttgtcac

SEQ ID NO: 657821 - DNA, 78 bp, Homo sapiens
gaaaaaatcccagaaattggcaaatttggggaaaaaggttctggggattaggacacggacatttctatttggcagcca

SEQ ID NO: 657822 - DNA, 100 bp, Homo sapiens
cttgagtctactctgtcgctcttgtgccctagcaccccgagaaccgtcagtttgagccagatgatgtgactacccctgaatctacaaagaatcttgtgga

SEQ ID NO: 657823 - DNA, 98 bp, Homo sapiens
gagcagctgcgagccgaccatgtcttcatttgcttccacaagaaccgcgaggacagaggaatcaaagatcaactcccactgaggacaaatggacctgt

SEQ ID NO: 657824 - DNA, 98 bp, Homo sapiens
aaaaggcgaatgacttcagattccatggcaggtcaaaatcagaactggtaagatttctgcatatctgcaccagaaagtttgatgcaggcattggaaga

SEQ ID NO: 657825 - DNA, 74 bp, Homo sapiens
gttgatccatccagatgaggatatatccctgatagtgctgcaagagggaaattcccaaaagaagtcaaatattt

SEQ ID NO: 657826 - DNA, 87 bp, Homo sapiens
caggtggtcagacatgtcatcaactcagctgatctgccgacaccccaggccatcgagccccaggccatcgtgcagcaggtcccagcc

SEQ ID NO: 657827 - DNA, 100 bp, Homo sapiens
agcatttcagattatgcaagaagagctcaggcaggaaaacctctcctggcagcatgagctgcatcagctcagagaaactccagaaaatcttgccaaactt

SEQ ID NO: 657828 - DNA, 83 bp, Homo sapiens
ccgcgcgcagggcctgcagcgggagctggacggcgagcgcgagcggcgcgagaaagtgctcatctgccggaactaccgtggcg

SEQ ID NO: 657829 - DNA, 100 bp, Homo sapiens
accccaaaaaggagaagaaatctctagactcagatgagagtgaggatgaagaagatgactaccagatctgcagcttcactcctgagcccagcgagaccac

SEQ ID NO: 657830 - DNA, 75 bp, Homo sapiens
gctggatccgcggtgcggctgtgggttgttcctggtcattgagtacgtcaacggcggggacctgatgttccacat

SEQ ID NO: 657831 - DNA, 100 bp, Homo sapiens
agtgtatgcactttactacaaagatggacttctctgtacaggttgtggcagcactgcctgaaggtatgagaccagattctaatctttatggttttccatg

SEQ ID NO: 657832 - DNA, 82 bp, Homo sapiens
tgatctacctaccaatcgtgaaaactatattcacagaaactaatctggattcactccctctggttgatacccactcaaaaag

SEQ ID NO: 657833 - DNA, 100 bp, Homo sapiens
gccctcaagggctgaaaataaatagggaagatggagacaccctctgggggtcctctctgagtcaaatccagtggaaggcgaccggcagcctcgggcaggg

SEQ ID NO: 657834 - DNA, 75 bp, Homo sapiens
aattatttgctgttggatcgtttcatactttacgcttgtgtgataaaactggggaccccctggaacagctgtccc

SEQ ID NO: 657835 - DNA, 100 bp, Homo sapiens
atgaagaagaagatgcctttaccgacctttcttatctcagtcatcactatggtgcttctgacgttgatgactgtcacactggatcctcctcagaaactac

SEQ ID NO: 657836 - DNA, 109 bp, Homo sapiens
ccacgttcagtccgacccgcagagggctttcttcgccgtgctggccgcggcccgcctcagcatctggtacagccgagatgaatttcacccattcatcgaggcacttctt

SEQ ID NO: 657837 - DNA, 82 bp, Homo sapiens
cctggcctgccatgtccgggagaagacagtaaggctggcctctctgcagtcagaggtctgagctctgccatggggatagggg

SEQ ID NO: 657838 - DNA, 100 bp, Homo sapiens
ccactgttcccccaggatcactcaagaccctgtgacttgtggtcactgatgagtggaccaagtgaagggagtggttttcagagacatttcagaaagtgaa

SEQ ID NO: 657839 - DNA, 100 bp, Homo sapiens
gagaggaggaggaggatgatgagtacttccccattatcctggtttcggggcctggaggatgatgctgtggctgcagaacttgggctggactttcagagat

SEQ ID NO: 657840 - DNA, 100 bp, Homo sapiens
gaccccccgggctccctggaccacctggacctgatgttttagaaagagcgttttcgctacgtaaagcacattcgataaaggatatggaaaatactttgca

SEQ ID NO: 657841 - DNA, 51 bp, Homo sapiens
tgaagaatcccttttggagccaggacacatgacggaagtgtgtatttttgg

SEQ ID NO: 657842 - DNA, 75 bp, Homo sapiens
gctgtgtggtgtgtggacgctgactccagaagctgcacctggccgagaacgccgagcctgaggagcagtccgctg

SEQ ID NO: 657843 - DNA, 100 bp, Homo sapiens
gcaagtctttacaatggcagtgtgtgtgtttggaatcatgaaacacagacagattatgagggacaagccaagaaactcctggaactgatggaaaacacgg

SEQ ID NO: 657844 - DNA, 83 bp, Homo sapiens
cttgaaaagactgggcttgtccttgctggtgcatgcgtcgtcggcctctgggcagcaggtcactgcagccagaggggtccaga

SEQ ID NO: 657845 - DNA, 50 bp, Homo sapiens
cacatcggtcagaaaaagatgcctctaattgtggcattgtagaaagtatc

SEQ ID NO: 657846 - DNA, 76 bp, Homo sapiens
tctgctaaaaggctccttcagtgagcaaggcatcaacgagtttctcaggtgtgactgcacagaaaagttacaaaac

SEQ ID NO: 657847 - DNA, 75 bp, Homo sapiens
gcgctcgccccacgggccgcgcgtggagggtcccgctctacaaaaacctctggggcgctgtcctgcaggaaagca

SEQ ID NO: 657848 - DNA, 75 bp, Homo sapiens
cgaatttgaagatagagacaggtctcatcgggaggaaatggagggttcacctttagatgttcttaaagatgaaag

SEQ ID NO: 657849 - DNA, 129 bp, Homo sapiens
aatcctactccacccataggaagacccacgtccacacctactcctcctcaggttaatacctctgccaaccgaggccaccctccctcggacccccattcggaggaagcagacccaagttcgaattctgac

SEQ ID NO: 657850 - DNA, 80 bp, Homo sapiens
cagagagggaagagattcagccagcacactcctcgcgagcaaggccgatacaaagcaggggaaaaggagccagatcccaa

SEQ ID NO: 657851 - DNA, 82 bp, Homo sapiens
agctgtgcagccgcgaggaggcgcgggaggtgttcgagaacgaccccgagacgctgtcccccgaggcagcctatgatgtgct

SEQ ID NO: 657852 - DNA, 100 bp, Homo sapiens
tcatttctttacccaagaatgacctgctgcagagacttgatgatgggtgagtcaagtgaagacatagaccaaatgttcagcactttgctgggagagatgg

SEQ ID NO: 657853 - DNA, 100 bp, Homo sapiens
cgcaggtcctgcccccagatactctgcccaaccgcacggtcaccctgtattaattaatcttcgcaacccaaattatgaaaacggtgattctcttagtttc

SEQ ID NO: 657854 - DNA, 75 bp, Homo sapiens
agcctcctgcaacacctgcggcctcactgggacccccaggaggtgaccctgcagccatgaagctcatgactgctc

SEQ ID NO: 657855 - DNA, 90 bp, Homo sapiens
catcaaatcagagagaaggaatccaccttcttacgctatggcagtttgcagctcaccttgtgaagatgaaatatccaagaatctgtattc

SEQ ID NO: 657856 - DNA, 98 bp, Homo sapiens
tcggccgcactcgcgctgtacgggccgccactggacgcaggtctcggcgcggaagatggccggcggcgtggacggccccatcgggatcccgttccccg

SEQ ID NO: 657857 - DNA, 100 bp, Homo sapiens
gtgcctcagagtgcagttcccaaggaggcttcaagacaaagggccccttacacaccagacagcttcttaatgaagaggataactcagaatcatcggctat

SEQ ID NO: 657858 - DNA, 80 bp, Homo sapiens
gccgggtccgcatcgagaagatgagctcagaggtggtggattcgaatccctacagcatgacagtgatatatcagcatata

SEQ ID NO: 657859 - DNA, 74 bp, Homo sapiens
gatggccaagaactaagtaacgatctggatgcccagctggcgtgcggccaggatgggcagctgaagggcttcgc

SEQ ID NO: 657860 - DNA, 82 bp, Homo sapiens
ccctatccaagtagcctgctgtcgcccagccgcggtatggctgatggcaagcattgtacttttccacatctgcctggcaaaa

SEQ ID NO: 657861 - DNA, 82 bp, Homo sapiens
aatgacatcagtttctggaagaagaagaagagcatgatcggcatgtccaccaagatgtggacgagtgctcactagcagaaaa

SEQ ID NO: 657862 - DNA, 90 bp, Homo sapiens
aagaacatttcctctagtttctggataatgagcaggcacacagatcttccatggtggcttattctaattcggcagaaagcattggtgggc

SEQ ID NO: 657863 - DNA, 100 bp, Homo sapiens
ctgtaccagacttcaccattatgaagacggaggtcccgcacagtcgggcatcctggtggaccgcgaggtggtcagcctcttcctgcacttcaccgtcaac

SEQ ID NO: 657864 - DNA, 71 bp, Homo sapiens
actacgtaaaactacctaccattggcaagaactgagattgtttttcagcaagggacaacaaagctcagtgt

SEQ ID NO: 657865 - DNA, 83 bp, Homo sapiens
ctgagccgtcgcggagccgcgcagccctcggagcacggtgaaaggtgtagcagtcactcggcctacacccacagcatcgacct

SEQ ID NO: 657866 - DNA, 100 bp, Homo sapiens
ttttggactgtgctctcaaactttactttgcctcatttgaggagtgggaacaggcttcggcgaacacaaagatctttgtagaatttgatggctgtaactg

SEQ ID NO: 657867 - DNA, 96 bp, Homo sapiens
cgcccgtgccctcccgctcggccccgccagcagcactgtggaggccgtcctcggatgatcggctgaatgtaacagaggaactaacgtccaacgaca

SEQ ID NO: 657868 - DNA, 74 bp, Homo sapiens
tcccaacgtcgccccggtttgacgcacacggcaccaaactgcagtttgaaaattgcaaggagggactttaagac

SEQ ID NO: 657869 - DNA, 98 bp, Homo sapiens
gactccgcggccggcccggcgcggcccagcgccctcaggtatgacgctgggcgggatggcttcatcgacctgatggagctgaagctgatgatggagaa

SEQ ID NO: 657870 - DNA, 82 bp, Homo sapiens
cagtatacagaaacagagccgtatcataattaccgactgagcgggctttggacaccatgaactttgatgtgattaagggaaa

SEQ ID NO: 657871 - DNA, 98 bp, Homo sapiens
aggagctcatcgtggtgtttggcggcggcaacgagggaatagtggacgaactgcacgtgtacaacacgggtaactgcatcctgcccagcatgacggcc

SEQ ID NO: 657872 - DNA, 96 bp, Homo sapiens
ctgggcgattccatctctgaagcaacaaggggaatggggtcaaaatgagcagatcctggtgtatagcctggaagcaggacgccgcctcttgaagct

SEQ ID NO: 657873 - DNA, 75 bp, Homo sapiens
tgggagtgatttgcgccatcatcctcatcatcatcatagatttgatgagcctgtcccagacctctgcagcctcaa

SEQ ID NO: 657874 - DNA, 83 bp, Homo sapiens
ctggagtattccctgaagctaacgcaagatgtatatgccatgaagccactgtcaccatcaacatgcagaacacttccatcgcc

SEQ ID NO: 657875 - DNA, 75 bp, Homo sapiens
ccgcgccggtgctggtggttctgcgctacctcttcaccttcctcaaccacaatgcctcctgcaccaccaactgct

SEQ ID NO: 657876 - DNA, 129 bp, Homo sapiens
tctacaactgggaggtggccatcttcggaccccccaacaccctctacgaaggcggctacttcaagtcatccgtccttggctcaggatttggagagcttgcaccaccaaaaatggcaaacatcaccagct

SEQ ID NO: 657877 - DNA, 102 bp, Homo sapiens
ctgaattgtgctgccttggccaaaagagaggtcccccctattggaagtaaaggggaacatagaactgaagagacctctgattaaggccccttcccagctgcc

SEQ ID NO: 657878 - DNA, 50 bp, Homo sapiens
ggagactccagccggcgggcgagcagggctgaccccgcactacatctacc

SEQ ID NO: 657879 - DNA, 82 bp, Homo sapiens
tccttcagaaaaagcatccccgaggaggaagacgaatcgttaaacatctgaaagggtcagtttgagttcctgagatctagtt

SEQ ID NO: 657880 - DNA, 101 bp, Homo sapiens
gcaggggctggaggaggaagaagaggtggatccccggatccagacaatgcagatcttcgtgaagactctgactggtaagaccatcaccctcgaggttgagc

SEQ ID NO: 657881 - DNA, 82 bp, Homo sapiens
caaatttcctcttccaatggaagtgtttaagaataccctctaccatctgctttggtcagggtgccgctcgaggatttaaaag

SEQ ID NO: 657882 - DNA, 50 bp, Homo sapiens
gccctgcgatactattatgacaagaaaacgttgtgtgacgtgatcctcat

SEQ ID NO: 657883 - DNA, 97 bp, Homo sapiens
cagtaacatacagcactttgtggagaaagtcgtcttccacttgcacgaaagctttcctaggccaaaaagagatatttgatcctgatgacctttattc

SEQ ID NO: 657884 - DNA, 100 bp, Homo sapiens
caccattaaagatcactggttgaaacacccgaaagtggagctgttccaaaaagaaaagaccccttaacacacactagtaattcactgcctcgttcaaaaa

SEQ ID NO: 657885 - DNA, 50 bp, Homo sapiens
gtaaaaagggagcacttaaggaagaaattctgcttggtcagaatcgtgat

SEQ ID NO: 657886 - DNA, 100 bp, Homo sapiens
agtccacaaaacaatgccttcaagtgccaagaaacagtgcgacttcaaccaagcatcgagagtaaacatgaggttacgatcctgggaggacttaatgaat

SEQ ID NO: 657887 - DNA, 100 bp, Homo sapiens
aaggacatgaagactaccacatgatggtcttgggcgtctttggtactggcttttttaggggtctgcctggggattacccttgctgtggatagaagcaact

SEQ ID NO: 657888 - DNA, 83 bp, Homo sapiens
agaagaccacacactgggaaacatcattaaatcggtctccatcacccaactccatgcttcgagtcctgctctctgctcagacc

SEQ ID NO: 657889 - DNA, 100 bp, Homo sapiens
caatggtgttcgcattttggaaggtctttctgatcctaagctgccttgcaggtgcagtagacattgttgcaatcatgatcggcaatctgaaaggcacaaa

SEQ ID NO: 657890 - DNA, 82 bp, Homo sapiens
ggtgcctctctccagcagactgcggctgtctgtccccagaccccagagcacgtccggcaccaccatgactgggctgttgaag

SEQ ID NO: 657891 - DNA, 97 bp, Homo sapiens
aacatttcgtttgatatttttggtcgcaccaccactccacagcagaccaaactgctttgccagcaacatgctcaattcccgatcatcgctcaaagtg

SEQ ID NO: 657892 - DNA, 75 bp, Homo sapiens
aatctctgttccaaatgctttgctggctgtgggtgagcgtggaggatgctcagatgcacaccgtcaccatctggc

SEQ ID NO: 657893 - DNA, 117 bp, Homo sapiens
gctgcgctactgcgagaacaagtttaacgacaagcacatcaccactctgcagagtgttgcggagataggaacatgggagagaaacaatctgggtaacatgaaagtgatgctggttgc

SEQ ID NO: 657894 - DNA, 96 bp, Homo sapiens
ggcaggtcccaggcgcgaagtttctcggcctggaggagggggtcgcgcgaagtgccagatgcaggcggggaagtgtttgattgcatcgaggtctat

SEQ ID NO: 657895 - DNA, 75 bp, Homo sapiens
atatggaattatttcgtgatatccaagaacaagcactgcagagcctggcccaactagagaatctgtgcaaacagc

SEQ ID NO: 657896 - DNA, 75 bp, Homo sapiens
ggtctgtgagatgtcctcactgtttcaggaggtcaaaatgcagatcttcgtgaaaacccttaccggcaagaccat

SEQ ID NO: 657897 - DNA, 82 bp, Homo sapiens
tgaaaatggaagaccctgtttgttcgatacaagaggctgttttcctagcgtggcttgctgcctttggtaagaacatgtcgtc

SEQ ID NO: 657898 - DNA, 102 bp, Homo sapiens
cgcgttcctgctgctctgcctgctccacaagcggcgccgcgccctcggcctgcacgggtaacagttaacctcttccacatgcagcatctgcaggctgcttcc

SEQ ID NO: 657899 - DNA, 100 bp, Homo sapiens
gtgtggatcttcaagaatcattgttcgttccaccagtcataaaccagatgaaatctatggcatgattgaaagactatctcctggcactcgcaagattgag

SEQ ID NO: 657900 - DNA, 75 bp, Homo sapiens
gcctggcaaaccgggcacccgaacctaccccacagcaggtagcaggtaccatgaagctggaattggctcagtatc

SEQ ID NO: 657901 - DNA, 100 bp, Homo sapiens
cagaaggagagagatgttatcatgagggaattccggtcagggtcaagtcgtgttctgatcactactgacttgttgatcctggtgtatagcctggaagcag

SEQ ID NO: 657902 - DNA, 100 bp, Homo sapiens
cagggcgatggacggccgaaccccgcgcccgcaggacgccccagccaggaaatctactttcttcaatgtgttaaccaatagtcaggcttcagcagaaaac

SEQ ID NO: 657903 - DNA, 100 bp, Homo sapiens
tcctgattacggggacccctcttcagaattccctcaaagagctctggtccttgctgcactttattatgccggagaataatggaggggaaagttccagtcg

SEQ ID NO: 657904 - DNA, 100 bp, Homo sapiens
ccagcctcatgcggatcaccctgcggaacctggaggaggtggagttctgtgtggaagcctggagatttgaaaaagagaattgaatctctgatagacagag

SEQ ID NO: 657905 - DNA, 100 bp, Homo sapiens
caggcctgcagaggtgccgacatggggcttaagatgtcctgcctgaaagagtaatcaagtcagaggattatatgacttttatctgcctagagaagaacta

SEQ ID NO: 657906 - DNA, 98 bp, Homo sapiens
tgatggcacaccttggccagcagtggggattgcaaagcgaactacatatggaggagtgtctggatagattcccagaagtgggataactggatcagagg

SEQ ID NO: 657907 - DNA, 101 bp, Homo sapiens
gaaaaagagccttggactagaaagagacataggatggtggccgaacccccaggccaggagtggtggctcacacctgtaatcccagctctgggaggccaagg

SEQ ID NO: 657908 - DNA, 100 bp, Homo sapiens
ccaggattctgacaaaagtactctccgaagaggaattgacatagagaatgtcaccaatggcacagtgggcggcacagcagagccggggcacgaggaggtg

SEQ ID NO: 657909 - DNA, 75 bp, Homo sapiens
ctaccactgtctctgctcacagtgccaaggttaatttggagtggcccctggagtcagtttcctacaccatccgag

SEQ ID NO: 657910 - DNA, 100 bp, Homo sapiens
gagccccaggcttctatccaggtgcaagccctacagaatttgggacctacggaccagctttatccagggactctaccattcccacccctttggccccact

SEQ ID NO: 657911 - DNA, 75 bp, Homo sapiens
acccccgcagtttccaggatttcctccacctgtacctccagaacctcaagaggctttgttttctgtgaaacagta

SEQ ID NO: 657912 - DNA, 98 bp, Homo sapiens
aaatcagaaagaacccctcgtcaggtacagcaggtacagactgtgcagcaggtacaacatgtctatcccgctcaggtgcagtatgtggaaggaagcga

SEQ ID NO: 657913 - DNA, 100 bp, Homo sapiens
gcgcgcccgaagggcaactgcctgccttcaacaatatgcttttaaggctattaaccagggtggccttacatcagtagctgtcagagggaaagactgtgca

SEQ ID NO: 657914 - DNA, 99 bp, Homo sapiens
cagatcccagcggaaaggagcgcgcctctttttggcttggggagctgcagcgttcggattttgcctaccattttacagtatttgtcttctattttggag

SEQ ID NO: 657915 - DNA, 83 bp, Homo sapiens
gaatcatggcatggaaggtgaagcttgcacaggaggggatttggtagctggcagtgttgtgatggcttttgaagaagtatgcc

SEQ ID NO: 657916 - DNA, 90 bp, Homo sapiens
gaagaagaaacggaaagtggagccccccacaccacaggactcagcccaggagagtgttattactcgagatattcatcgtacatttcccgc

SEQ ID NO: 657917 - DNA, 75 bp, Homo sapiens
agtttttgtttcctgcaagctccatggtgaatccactaggaatgtcattgaagacggggtttcgccatgttggcc

SEQ ID NO: 657918 - DNA, 98 bp, Homo sapiens
ggacaccatcgccacccgttttgacggaacacctgcttttctaacccaaactgtatgtcttgatgacactacagtaaagtttgaaatatgggatacag

SEQ ID NO: 657919 - DNA, 98 bp, Homo sapiens
cttcctcctcctcctccccaccaccaccatctccatcacccaccaacaacaccacaataatccacagccaagattcaaacatctacttctttgggaac

SEQ ID NO: 657920 - DNA, 98 bp, Homo sapiens
atgctgtctggtatgactacgagactgtcatctttaacagtgtggagaagttctacatccctggaggggacgtcacatgtcattataccttcacccag

SEQ ID NO: 657921 - DNA, 82 bp, Homo sapiens
ccgccgccggcccggacatggccgccaacatgtacagggtcggagagaaccatggagtctggcagtaccgccgccagtgagg

SEQ ID NO: 657922 - DNA, 78 bp, Homo sapiens
tgagccctgtttttgccaccacactccagcctggaatcctcactatggatgggctcattgaggacattaagcatcggc

SEQ ID NO: 657923 - DNA, 100 bp, Homo sapiens
gtgacccccacaacgatgcgtctcctggatggctgatgaaaccaaggccctgaaaggttcaccaagttgccagggtcgtgcagatcaacaaactgcagaa

SEQ ID NO: 657924 - DNA, 100 bp, Homo sapiens
cctcaaacaggagctggagcagctcaaagagtgacttctgacagctctctccatggaaggaggcggcggccgcgatgagccttcagcctgccgggcaggg

SEQ ID NO: 657925 - DNA, 90 bp, Homo sapiens
acggggcgccggcgccgccgcccccgggctcgcggcctgcagcacccgacagctacaaagtgcaagataagaaaaatgcctccagccgcc

SEQ ID NO: 657926 - DNA, 100 bp, Homo sapiens
gggtgcggcccggcgtctcggcccttgcctgcgcgcctaccaggctcgaccccaggaaaattacgggcagaaggaggctgagaaagtggcccgggtgaag

SEQ ID NO: 657927 - DNA, 51 bp, Homo sapiens
acttcccgtccgcggcgtggagggtcagaagacatgtcttcatctacatgg

SEQ ID NO: 657928 - DNA, 90 bp, Homo sapiens
cgtagcctgccactccgtgcatgacgtccggttgtttgccttcgtgcgcttcaccaccggggatgccatgagcaagaggtccaagtttgc

SEQ ID NO: 657929 - DNA, 100 bp, Homo sapiens
aaacatttcagggcaagccaattatggaagagtctaacctgtctctgcaagctcttgagtcccgccaagatgatattttaaaacgtctgtatgagttgaa

SEQ ID NO: 657930 - DNA, 97 bp, Homo sapiens
gaggcagtacagctgatggcggaggccgagaagcgagtcaaggcctcccactccttcctccgagggctgtttgggaacccaagacagaccaggatga

SEQ ID NO: 657931 - DNA, 100 bp, Homo sapiens
agaaaagcctatcgaaatcaagttgaggaatccactaaacaaatacaggttcttcaagactggatacacgtctgtttaactacgcaaaaggtaatgctgg

SEQ ID NO: 657932 - DNA, 95 bp, Homo sapiens
cggccgctgctgtgcatcccggccgtctgggcggccgccgcgcttctgctctcagtgtcccggacttcaggctggagtgcagtggcgtgatctcg

SEQ ID NO: 657933 - DNA, 74 bp, Homo sapiens
ctcttacgtctgcggaagtgcagctgcctcagttcttagcgcaggccaggtcagagcagcccaccatgggatgg

SEQ ID NO: 657934 - DNA, 100 bp, Homo sapiens
gacgtggctattgtgaaggagggttggctgcacaaacgagccgagaaggtgagctccctggggaaggactggcacaagttctgcctcaagtgcgagcgct

SEQ ID NO: 657935 - DNA, 100 bp, Homo sapiens
tctgggagccgttatgccaaggcttggtacgcaaagagaaccagtggtgtgaagagaagtgaaatgttgtgcctgacactgtaacactgtaaggattgtt

SEQ ID NO: 657936 - DNA, 75 bp, Homo sapiens
tagtggaaccttatgtgacctgggggtctcctcctctcacaatgcttttcctctgtgctacaaaattttctgcct

SEQ ID NO: 657937 - DNA, 88 bp, Homo sapiens
gccgtgctgcttatggcggcgctggagagggggcgctgagctgttgggggcggcaccttcctacttctgcccagccacagccctcccc

SEQ ID NO: 657938 - DNA, 100 bp, Homo sapiens
atgctgcagaaatcatttcggctctcatgttcctccatgataaaggaatcatctatagaaactgaaggagattgcattcccaaggacagatgaattgaaa

SEQ ID NO: 657939 - DNA, 82 bp, Homo sapiens
caacggcaaagttttgcagatcttcaacaagaggacccaggagaaattcgccctcaaacccgcggcgccatggctcacgtcg

SEQ ID NO: 657940 - DNA, 50 bp, Homo sapiens
ccgaggtgggaggatcacctgaggctggtctcgaactcccaacctcaggt

SEQ ID NO: 657941 - DNA, 82 bp, Homo sapiens
cgagggcggggaccggcggcgctggaggagcgaggcagctgtactaggactgggaacggatcgcaccccctccctccctggc

SEQ ID NO: 657942 - DNA, 82 bp, Homo sapiens
cccaggcactgatgaggccagctcagcctgcagcacagactgggcttctcagatgaccaagatggtgctgcagatggtgctg

SEQ ID NO: 657943 - DNA, 100 bp, Homo sapiens
ggtatcatttttacgggccttctggagatgcttccgaactgtgggcaaaaatggcggtctcaacaaatggcagctattacatcagacagtgacgagtcct

SEQ ID NO: 657944 - DNA, 75 bp, Homo sapiens
gcccgaggaggcagccaagctcgtggcctgcctctgcgtgcgacctgaaggagaagaaggagaaggtggaggaga

SEQ ID NO: 657945 - DNA, 100 bp, Homo sapiens
taaacatgaagagcttgaaagcgaagttcaggaagagtgactctccacaaaccggaggactacccccagactgcagtaagtgttgtcatggagactacag

SEQ ID NO: 657946 - DNA, 50 bp, Homo sapiens
atactacctttatttccaccatagatcttcccagacccgtcagattttga

SEQ ID NO: 657947 - DNA, 100 bp, Homo sapiens
agggacaaacctatcacatttactcaggatgcttatagaattttatgagtcaccagatccagaaagaagaaaaagatttcctgggaaaagtgttaattcc

SEQ ID NO: 657948 - DNA, 100 bp, Homo sapiens
cgcagcagtcagggacatttctgaagcgagcgtcttcgatgagcttgtggacaaatgtataggatcaagaattcacatcgtgatgaagagtgataaggaa

SEQ ID NO: 657949 - DNA, 75 bp, Homo sapiens
ctcaaagagacccattctcatctttcttcagaagttacaaaggtgctagtattgtctcaagactatggcaaacac

SEQ ID NO: 657950 - DNA, 82 bp, Homo sapiens
gcctcgcctttgccgatccgccgcccgtccacacccgccgccaggtggacgacatccttggagaaggcagcgacgacagcga

SEQ ID NO: 657951 - DNA, 98 bp, Homo sapiens
ttgtagcctcaaactcccaggctcaagcagtcctaccatgtcagccttcccagtagctgggaccacaggttgattgcactgccaacactaacacctgt

SEQ ID NO: 657952 - DNA, 83 bp, Homo sapiens
ctctagaggcgttttttggccaagggtgttctaagaacggaagcatctgggctggatggaatttagcatcaagcagagtcccc

SEQ ID NO: 657953 - DNA, 97 bp, Homo sapiens
tcaagaagcagctccacgaaaggcagccgcggatcgccgcgctcagcgacaaacaagaccctttgaggatgccctgaagttgcatgagtgctcagtg

SEQ ID NO: 657954 - DNA, 74 bp, Homo sapiens
ccattgaagcttgagagaaaagcccccaaaagcagctattcaggccagctgcgggccgtccagcggctgtgcca

SEQ ID NO: 657955 - DNA, 98 bp, Homo sapiens
ctcattctcaccaataatagtctcgtggaactgttgctacccaagcattgtgccaaaactatcagtcaagcagtgaataagaaatcaaaaaagcagac

SEQ ID NO: 657956 - DNA, 100 bp, Homo sapiens
acctgcgaggagtgtgggaagcccatcggctgtgactgcaaggctcgtggtcccaagaagcatctgaagcgggtggcagctccaaagcattggatgctgg

SEQ ID NO: 657957 - DNA, 98 bp, Homo sapiens
ctgggggattcgcagggaggatgtcgggacaccccggaagctgggaaatggtgcttgtataactgtaaagatattgtattacgaagaaacacagctgg

SEQ ID NO: 657958 - DNA, 100 bp, Homo sapiens
tccggaagatcaactgcagactgtcctattgcatctcaagccgtctcggcgcggaagatggccggcggcgtggacggccccatcgggatcccgttccccg

SEQ ID NO: 657959 - DNA, 50 bp, Homo sapiens
atgccgctgaacttcactggagagacaaagcatggaggacacaagaatgg

SEQ ID NO: 657960 - DNA, 90 bp, Homo sapiens
tttcgtggatgatcagcagactttcttctgtggcaacgtggctcatcagcagcttatccaggactttgccattgatattattaaaagcac

SEQ ID NO: 657961 - DNA, 75 bp, Homo sapiens
cgggcagtaccttcttcaagagaaatggagcccttctccaagatcagtgtactgttacccggacatacctattcc

SEQ ID NO: 657962 - DNA, 82 bp, Homo sapiens
acagtcttgagtgttcctgtccatgaacatgtgttctaagaacggaagcatctgggctggatggaatttagcatcaagcaga

SEQ ID NO: 657963 - DNA, 82 bp, Homo sapiens
gcgtcttccgctgcatccccatcttcggcatgtccttcgcctgccagtcagctcccagctcctccagcagccgacaggaggc

SEQ ID NO: 657964 - DNA, 85 bp, Homo sapiens
tgacgactgttctcggtcccggcacagggaccagcgtgatgggttctctgtggacattgactcggagctggtggaggagctgccg

SEQ ID NO: 657965 - DNA, 96 bp, Homo sapiens
ctaactccagaatcccccattgatcccccagattagttatgcatcaacggcacccgagctaagtgatgaccggcgctatgacttcttctctcgcgt

SEQ ID NO: 657966 - DNA, 100 bp, Homo sapiens
aagccctttttgtgccaggtgtcccgttaacgtctctgttagttcagagtggatggtgtcccccatggtcgctgagactccccttcgaggattgcacccg

SEQ ID NO: 657967 - DNA, 100 bp, Homo sapiens
ggggccgtccccaggacactgtccggatcttccctccctggctggacgtaaagaaagaagtgatgcactcaattctgcaatagataaaatgaccaagaag

SEQ ID NO: 657968 - DNA, 75 bp, Homo sapiens
gagacggaggcgctgcagcgcttcttcgaagattcatgatgttgctatcaaaagttgagaaattgtcagaagaaa

SEQ ID NO: 657969 - DNA, 50 bp, Homo sapiens
tgttcctggggctgagtgccctcgatcaggatcctcatgaccagccaaag

SEQ ID NO: 657970 - DNA, 100 bp, Homo sapiens
cccccgtggtgcagcgaatcctcaagcataacatggtgccagcgagatttcagattcctgtaaacctctaaagaaaaggagtcgcgcctcaactgatgta

SEQ ID NO: 657971 - DNA, 100 bp, Homo sapiens
tcctgcacatcaccaagcagaggaacaagaacgcgctcctccgcctgctgcccgggctgggagcttactccacgggaacagcctctagataatctgagtt

SEQ ID NO: 657972 - DNA, 100 bp, Homo sapiens
ggatgaaggggaggcctggctgagctgtcatcccccaggtggaattctactaagtatcagtcggccctacaagacaaagcccacccacggcattggaaag

SEQ ID NO: 657973 - DNA, 100 bp, Homo sapiens
attcctcgtcagcaacatgctcctagcagaagcctatggatctggaggcagaagctcctcctggggtagagacagatcttattgatgttggattcacaga

SEQ ID NO: 657974 - DNA, 97 bp, Homo sapiens
acgccatgtcgggttattcgagtgaccgagaccgcggccgggaccgaggatgccatggacaatattaccaggcagaaccaattctacgatacccaag

SEQ ID NO: 657975 - DNA, 100 bp, Homo sapiens
gatggtgtgtatgatggcctggcgacccattcaggcacttatggccatttcagccaatatttgttcagtcgaatcaaggtgaagaggaaacaacaagaat

SEQ ID NO: 657976 - DNA, 80 bp, Homo sapiens
taatctcattgaaagccactcaacaactctttatgtgacaggtgaaggtacaagtaagaagctggcgaaacatagagctg

SEQ ID NO: 657977 - DNA, 83 bp, Homo sapiens
agccgcgcgcctttgtgcgcgcgccgaggtgacttaagagattaaaattaatttggttgctgttggttctgaacaaataatga

SEQ ID NO: 657978 - DNA, 83 bp, Homo sapiens
ccgagggtttgatgaaggtggaggcagcgcggctctcagtaatttctatgcagcccccgacccagagccgagctccacttctg

SEQ ID NO: 657979 - DNA, 100 bp, Homo sapiens
catcagcccagtctccagagagacaggaaaatgcaacatggcagcagcaatggaaacagaacagctgggtgttgagatatttgaaactgcggactgtgag

SEQ ID NO: 657980 - DNA, 90 bp, Homo sapiens
acaacaaatgaaacagcaacaggtgatgatggagatgaagtatttgtggaggcagaatctgaagggtgttatgaagcggagattgaggag

SEQ ID NO: 657981 - DNA, 96 bp, Homo sapiens
tatggagacgtggccacaggatgccgagaaattcatctgttgccatgggagcctcactttcttgctcagaatattccctaaaggtaacagatgtga

SEQ ID NO: 657982 - DNA, 125 bp, Homo sapiens
atctctctcatctcgctcggctgcgggaaatcgggctgaagcgactgagtccgcgatggaggttttaaaatcaaagatgggaaaatcggagaaaattgcccttccccatggccagcttgttcatg

SEQ ID NO: 657983 - DNA, 100 bp, Homo sapiens
gtgctgcgcagcaaggtgtctcggctcacggagcggctccgcaagcgctaccccaccaacaacttcggtagatgacattaatgctgataagaatatctct

SEQ ID NO: 657984 - DNA, 75 bp, Homo sapiens
cctcagtgactgccaccctggaggacagggcacaacaaccgtttctggccctgccccgctccctgggaaagctga

SEQ ID NO: 657985 - DNA, 96 bp, Homo sapiens
ccgagctcagcagatcatccagctcaacatccaaggtacgaggtctgcagcacttccgtggatggctcggaatgtgtcacgcttccagtctacttc

SEQ ID NO: 657986 - DNA, 90 bp, Homo sapiens
ctgatagacatgggggcctcaaacgtggagatcaactcctctctgttaatggagtgtaacaacatgctgtaccccaaggaagacaaggag

SEQ ID NO: 657987 - DNA, 51 bp, Homo sapiens
gacaccactggaactcacaaagtgtggggctgccttccaggaggatgatgt

SEQ ID NO: 657988 - DNA, 75 bp, Homo sapiens
agtgcaggcgcttcaccacagacgcggagctccctgggtcctcagcagtgaggctggcctccctgcgtgacctgc

SEQ ID NO: 657989 - DNA, 82 bp, Homo sapiens
agccgatccagcctgcggagcctgtggggcagaaaacaaccctttttgctgcacatgtaagtggagctgtgcttacctttgg

SEQ ID NO: 657990 - DNA, 76 bp, Homo sapiens
ctggttctggaatcctcagttcaagagatcctacagtaaggaattgtttgaagaagttatttcaaagatgcggaag

SEQ ID NO: 657991 - DNA, 75 bp, Homo sapiens
ttggagagggaagtgcgtctggatgactactaagggccaattcctgtccccccagcagcatggcatcgtgtgctg

SEQ ID NO: 657992 - DNA, 89 bp, Homo sapiens
acactggcccaaatatttcctgcagggattaaagcctgtggtttccacagaagcaccacctatcatatttgccacaccaactaaactga

SEQ ID NO: 657993 - DNA, 75 bp, Homo sapiens
agagatcaaacaattgtagatcccttcagttcaaaacataatgtgattgggtttgtggatgcacttagatgtttg

SEQ ID NO: 657994 - DNA, 82 bp, Homo sapiens
gattgcagagctacctcagtcggtgggaccgggcaaatgcgtgctggttcttaaagagcctccaaaggaattcaaaatatgg

SEQ ID NO: 657995 - DNA, 83 bp, Homo sapiens
accggccgctctcccctcctctcacggcacctcccaccatgaaggtcaaaatgcagatcttcgtgaaaacccttaccggcaag

SEQ ID NO: 657996 - DNA, 75 bp, Homo sapiens
cttggaatagtagcaggcggcggcggcggaacgccaggcagcccgagcgggaagaagttccgcagcaagccgcag

SEQ ID NO: 657997 - DNA, 97 bp, Homo sapiens
gcggcggcggccgaggacggggacagcgacgacgcggaggcagagaagggaacgcccggcccagccccgtgtcatggagaaactccagctgggccca

SEQ ID NO: 657998 - DNA, 75 bp, Homo sapiens
tttgttaagattcaggtcaaagacaggaatgatgagaagacagcagctgattacaagattttaggtggttcagtc

SEQ ID NO: 657999 - DNA, 75 bp, Homo sapiens
atatatacgactaagatatcagaggcagtaggggacacattagaagaactgtggatctcctacaattttattgag

SEQ ID NO: 658000 - DNA, 76 bp, Homo sapiens
tgttccagggaggtgggattgagtaatcaatattatcaatgctgcccaggaaagtagtcccatgcctgtgacagaa

SEQ ID NO: 658001 - DNA, 82 bp, Homo sapiens
gcaaaacacactaaagattgggcagtcactggggagaacctggtcctggactcccagaagcgagtcttctcctggggctttg

SEQ ID NO: 658002 - DNA, 100 bp, Homo sapiens
cagccatggaggccaactggaccgcgttcctgttccaggctgcctgctgtttcccggggagatcatgaaacgaggtcgccttcccagcagcagtgaggat

SEQ ID NO: 658003 - DNA, 100 bp, Homo sapiens
gtaaccacagctgtacatccatgccatcttctccagccaccccagccagtggaaccaaggtgccttggcatctcccaatggggtggctttgctctgggct

SEQ ID NO: 658004 - DNA, 87 bp, Homo sapiens
gcatccgcctggcgctcatccgcttccacgtcaaggtatggaacgccgtggactccgggcactgcctgcagacctactccctgcaca

SEQ ID NO: 658005 - DNA, 92 bp, Homo sapiens
cgcccggcagccaccccatctgggaagatgtcattgacaaacagttctgcctgtcatcttctctgctgggctggtacccaagagactacaga

SEQ ID NO: 658006 - DNA, 97 bp, Homo sapiens
tttctcctactcagtgtgggtgctgagagacttcccagaagatggcctgaagccagaagacgcatctggaggctccagtcccagtgggacctcaaag

SEQ ID NO: 658007 - DNA, 88 bp, Homo sapiens
ccatgattgtgaggcctccccagccacgtgaaacttaacaacatgctgtaccccaaggaagacaaggagaaccgcattctgctctacg

SEQ ID NO: 658008 - DNA, 100 bp, Homo sapiens
gaccggtttggaagactttgccggcctgcagcactctgaataaccctgctgatcaaatggatgtgattggagtaggcggcattgactttgaagataacat

SEQ ID NO: 658009 - DNA, 100 bp, Homo sapiens
cggctgcgctgttcgtgctgctgggattcgcgctgctgggcacccacggagcctccggggctgagcccagccctgaccctgctgctggtggacgaggcct

SEQ ID NO: 658010 - DNA, 90 bp, Homo sapiens
ctggccaagaagatcatcattaaggacggaggcacgactgattttgcacgatttagcggaacaaatgtggaaactgactttgtagaggtg

SEQ ID NO: 658011 - DNA, 50 bp, Homo sapiens
tcgcctatgcctgccaggctgctgactgcttttggcttctggatgccctc

SEQ ID NO: 658012 - DNA, 90 bp, Homo sapiens
tgccaaggaaaaactggagagcttcatcaaaaatagtgatagctttgataagatacagttgatatattagttggatggcatatagatcat

SEQ ID NO: 658013 - DNA, 82 bp, Homo sapiens
ccgcccttgcgctcagcgccctctcaccgcccgacaatgcagatcttcgtgaagactctgactggtaagaccatcaccctcg

SEQ ID NO: 658014 - DNA, 90 bp, Homo sapiens
agtgatgtggaggaaaacaacttcgagggcagagctgggatatgaagaacaacagcctgaggttccaattctttatcatgatgtaacatc

SEQ ID NO: 658015 - DNA, 98 bp, Homo sapiens
ctaagagcccccttcagtcgcagcctcactctaggacaaatatggtcttggaaccaggcttcagcgaccacgagctggtgcatccatcagtacccttg

SEQ ID NO: 658016 - DNA, 83 bp, Homo sapiens
ggctgatggcggaggcttcgagtgacccgggtgccgaggagcgggaagagttgctgggcaattctgtggtgttcttggtcaca

SEQ ID NO: 658017 - DNA, 75 bp, Homo sapiens
acttacatggaggagacgtgtcgtcactatgtggcccatgtgaagaactctcttgatagagcccaagcagccaag

SEQ ID NO: 658018 - DNA, 75 bp, Homo sapiens
atgcgggccctgctggaccagctcatgggcacggctcgggacggctgctctttggcgtaaattgcaatcgattag

SEQ ID NO: 658019 - DNA, 100 bp, Homo sapiens
cgttgctgccttcttcgtcaagagtggagactgctgcacggactctggaaccatgaacatatttgatcgaaagatcaactttgatgcgcttttaaaattt

SEQ ID NO: 658020 - DNA, 90 bp, Homo sapiens
tttcttcgacttcattgtggcctttgggtgaggagaaaggactcgctgattcttgagaagagtcaaaactggagctctcaaaaaatggac

SEQ ID NO: 658021 - DNA, 74 bp, Homo sapiens
ggttctggactttgggcgtcccattgccatgagagcccgagcccagcacattgtgccctgtactatatctcagc

SEQ ID NO: 658022 - DNA, 98 bp, Homo sapiens
tgtatgttacctctccattagtaaacaataaactgggagtgatttttccatgtttgaagctttgcgagatactatttattctgaagtagctacattaa

SEQ ID NO: 658023 - DNA, 82 bp, Homo sapiens
cccactggcctgagcacatgaagtcctgcacccagtcagtgtgtaatgcatcttgaagaccggttgcaggagctatacttca

SEQ ID NO: 658024 - DNA, 75 bp, Homo sapiens
aaaccgcccagtcacccgacttcccacagtctcagcagtggaggccatagtggagtttgactaccaggcccagca

SEQ ID NO: 658025 - DNA, 101 bp, Homo sapiens
gaagaaacacccggactcttccgtcaatttcgcggaattctccaagaagtgttcggagagatggaaggtgtttgacctggtgatgcttttcatcatctata

SEQ ID NO: 658026 - DNA, 83 bp, Homo sapiens
gccgacatgttcacgcacgggatccagagcgccgcgcacttcgtcatgttcttcgcgccctgcttcctgcctgacacagctca

SEQ ID NO: 658027 - DNA, 82 bp, Homo sapiens
caaggctagaagaatcttagagctttctggatccagttcagaggattcagagaaggccatgggtgtatatggagccctcacc

SEQ ID NO: 658028 - DNA, 90 bp, Homo sapiens
gggagcgcctcgtcgacatgagtgatgtggaggaaaacaacttcgagggcagaggcgtctctggccgagcctctttttgtggaaaacgac

SEQ ID NO: 658029 - DNA, 100 bp, Homo sapiens
aatcgagactcatgactcccagagaggatggcatctagaagagtccgatgggtggtccttttattcctgctgctcctgtcaaaactgccttgcctgctgg

SEQ ID NO: 658030 - DNA, 99 bp, Homo sapiens
gaattgccatggctgctggaagaagtctcaaaaagctcccgactagggaagaatatttctcagccctccgttctcaagacagatgagtgctttagaaag

SEQ ID NO: 658031 - DNA, 96 bp, Homo sapiens
gaataactcaagtcacctgtactggaaatcagtttgctgaaattaatcaacgattcttgaagttgaagaaaagccatctatcacacctgtgaggcc

SEQ ID NO: 658032 - DNA, 100 bp, Homo sapiens
tggaagagggagtcaccactggacctccaaggaagccacgtgcagacatctacaaccttcgatctcctgacgaatcctcgttcctagctgcctgccagcg

SEQ ID NO: 658033 - DNA, 98 bp, Homo sapiens
tgcgactcatgaaggtgttcgtcacccgcaggatacccgccgagggtagggtcgcgctcgcccgggcggcagagtgaaacaccattcaaagtcgtagt

SEQ ID NO: 658034 - DNA, 50 bp, Homo sapiens
ctgccgaggctgttgctgttgatctgtggcctccccatggccacccatgg

SEQ ID NO: 658035 - DNA, 122 bp, Homo sapiens
tgaccctgtaacccaaaggaggaaacagctggctaagctcatcattgttactggcagaggtggaggagacactgaagcgactgcagagccagaagggagtgcagggaatcatcgtcgtgaac

SEQ ID NO: 658036 - DNA, 98 bp, Homo sapiens
ctccactcacaatgggaacatgtacacctcatccctgtacgggtgcctggcctcgcttctgtcccagtggtccattatggctgacatgcaaaatctgg

SEQ ID NO: 658037 - DNA, 73 bp, Homo sapiens
ggcgagtccgcgacggtcgccgcccacggcgagatgaccactcccgggtcctgctgaaggcggagaacagcca

SEQ ID NO: 658038 - DNA, 74 bp, Homo sapiens
atcgatgtcttcacatcccttcatgcggttgttctctttttcggctttgtgagaaaccttaccatcaaacacga

SEQ ID NO: 658039 - DNA, 80 bp, Homo sapiens
gtgcggagaccactgttcaaggccacaggcggacctggtgaatgacctggggaacaaaggctacctggtatttggcctca

SEQ ID NO: 658040 - DNA, 100 bp, Homo sapiens
ctcctggagcttccagccagagggggccgacactactgtgtcggagttgctctgaaacctaccgcatgccagtgatggagtacaaaatgaatgaaggtgt

SEQ ID NO: 658041 - DNA, 98 bp, Homo sapiens
gggcagtcagagcggagccaagatgcgaatggggcaagtgtcaattgaggagggagagaggaaagccaaagagctgaatgttatgtttattgaaacta

SEQ ID NO: 658042 - DNA, 100 bp, Homo sapiens
ggaaaatcatggaagttgattactcagtctctaaaaagctaaggcaaggcagtttccccggcatgaaccagagtggacttatggcttccagctctcccta

SEQ ID NO: 658043 - DNA, 80 bp, Homo sapiens
ttttgaagatagtcatggtcaccacacaggaaaacgggccttactatacatcatatcccccatcaccagatttgtgacct

SEQ ID NO: 658044 - DNA, 51 bp, Homo sapiens
gaaaccccctcacagtttagagtttgcctcattccgaaatcagcacatggg

SEQ ID NO: 658045 - DNA, 87 bp, Homo sapiens
ccagtcggccctcagagcccttgcccgctcgggtatgaagatcgggcggattggtgaccagaagtcagcagcttcccagaagccccg

SEQ ID NO: 658046 - DNA, 89 bp, Homo sapiens
caggatgcagtttctcagctggattctgagctgatggacataactaagtgtaagaagaagcttgggaagctgccacctcagtatgccct

SEQ ID NO: 658047 - DNA, 74 bp, Homo sapiens
tcagagtcaaaacagagcttttggaatctgaacaaggggtcccaaaggcaagcagttagaaggaactgaatgtc

SEQ ID NO: 658048 - DNA, 101 bp, Homo sapiens
cttcttccacatgaaaaggataaggcaatttatcatctcaagttccccttaagagacttctgaacacctggacaaacagatatccagatgctaaaatggac

SEQ ID NO: 658049 - DNA, 100 bp, Homo sapiens
cgcagaacccgggagtaggagactcagaatcgaatctcttctccctccccttcttgacatttgtcttcaccgacagcccagacaaaggcctccaggagag

SEQ ID NO: 658050 - DNA, 100 bp, Homo sapiens
agcagtggtgggttccatgtgatggtggagtaggaggcaggtctccgcgtgtttctgaaagatctatccagcactccgatggccagcaacaacaccgcca

SEQ ID NO: 658051 - DNA, 90 bp, Homo sapiens
gagagatttttgatgatgaccttgaagatgatgcccttgatgctgatgagaaagtcgggaacatgccctgtgtgccgccgtcatttccca

SEQ ID NO: 658052 - DNA, 100 bp, Homo sapiens
gccgggagtcgctgggtgcgtggggctgcctcgccgcgtctcgccacgggtttggaaatcccttgtctccaggttgctgggattgacttcttgctcaatt

SEQ ID NO: 658053 - DNA, 75 bp, Homo sapiens
agattccatttatagacacccttcattgcaagttcttatttgtaagctctacattaatcatactcctccaccact

SEQ ID NO: 658054 - DNA, 49 bp, Homo sapiens
cttaagaaaactcagcctgagaatgggtttcgtgcacctgaagttgcca

SEQ ID NO: 658055 - DNA, 100 bp, Homo sapiens
gccagtgatttacaatagagcaagataattctgaaataatcagcagaaacggaatggaatgccaagaatctgcattgagaataactaaacattgttactg

SEQ ID NO: 658056 - DNA, 75 bp, Homo sapiens
gtcgatctggagcttttcccctccccggtttccataccttccaccccactgctccccagagagaaatgtgacaat

SEQ ID NO: 658057 - DNA, 128 bp, Homo sapiens
tgggatttaaagcttcagaggcagaaaggcagaagtggaagcaacttctatttagtgatcatgatggtgcgtgagcagtacactacagccacagaaggcatctgcatagagaggccagagaatcagta

SEQ ID NO: 658058 - DNA, 95 bp, Homo sapiens
tgctgttctttatcctgctggggctgcgacagaagaagcccaccatctccgtgaaggaaggccatgcggaccctcagttggaagcacaccctggg

SEQ ID NO: 658059 - DNA, 80 bp, Homo sapiens
cccggccgcgacgcccgggacccagattgcgggttcagatatgtgctgattagaaggctcacttgtgcagtgtggaggat

SEQ ID NO: 658060 - DNA, 96 bp, Homo sapiens
aagaaaacacagagccaccctggaaaggatgaatttcacccattcatcgaggcacttcttccacatgtccgtgcaattgcctatacttggttcaac

SEQ ID NO: 658061 - DNA, 87 bp, Homo sapiens
ctccaggacagcacctagtcgtggccggaggagtctcagagctgtcagaaagatcaggagaacctcagtctgacgacattgaagcta

SEQ ID NO: 658062 - DNA, 80 bp, Homo sapiens
cagctggcaagaggcagcctgggggccacagctgcttcacaagagtgagccatggagctacgtgtggggaacaagtaccg

SEQ ID NO: 658063 - DNA, 101 bp, Homo sapiens
gaagtcagttccttgtggagccggagctgggcgcggattcgccgaggcaccgaggcactcagaggagattcagaatggacagtttagaagaacctcagaaa

SEQ ID NO: 658064 - DNA, 122 bp, Homo sapiens
cgggccagagcattgcagaaacgtcatgaagattttgaagaagtggcacaggcagtttgaagagaacacatgaagaagaggatgattttggaaccatgcaagtggcgactgcacagaatggc

SEQ ID NO: 658065 - DNA, 75 bp, Homo sapiens
ctgcatttgtcactgaccactgaagtgtatgtttgtgcaaggatgaaaactttcggaagagaaagttgcctgtgg

SEQ ID NO: 658066 - DNA, 75 bp, Homo sapiens
ccccacagctactccaacccaaacaacaaccaagccagtttaatgggcggcgactggcggcgcgatggacctgac

SEQ ID NO: 658067 - DNA, 82 bp, Homo sapiens
tcgtggtgcatgcagaggacggcaccacctccaaatactttgtggacggaaagtcccgggattctttgcgagccttcacccg

SEQ ID NO: 658068 - DNA, 75 bp, Homo sapiens
cttggacttcctagcctccagaaccgtgagaagtaaatttctgtttgagtggaatttgaggcctccccaaccacc

SEQ ID NO: 658069 - DNA, 98 bp, Homo sapiens
ccagccacgctctgcgccagctccgcttgactcagctcaccggtacaggtttgcagattccgccagcagcacagcaagctctacagatgagtggctct

SEQ ID NO: 658070 - DNA, 75 bp, Homo sapiens
acaacaccatggaaatatttgacattgagagagtaaaacttgtctcggcacagagtcaagtaaagaaagccaaca

SEQ ID NO: 658071 - DNA, 90 bp, Homo sapiens
ctcaaaaccagataccactgctcctccttcatctcccaaggttcaacagagtttggaaaagatttctaaactggagcaggaaaaagaaca

SEQ ID NO: 658072 - DNA, 74 bp, Homo sapiens
ccgacccttcctgtcgctgacggcgactgcgggaggccagaactgataaatttcaaacggaagagagtggcagc

SEQ ID NO: 658073 - DNA, 97 bp, Homo sapiens
aaacttgtaaaacctggaacagcagcatcattgtcaaaggtgcagagtgtcgatatcgcagctttcaacaagatctgaagcctgagtgtgtgtacgt

SEQ ID NO: 658074 - DNA, 96 bp, Homo sapiens
gccgggattcgcggcccggagctcgggaccgctgaagaagcatctgtagggaatccagaaggagcgttcatgaagatgttacaagcccggaagcag

SEQ ID NO: 658075 - DNA, 95 bp, Homo sapiens
gaggctattatccaatgaagaggaaaagaacagagccatcattcaagaagtttgcttcatgatttggtacacacagaggggcagcttcaaaatga

SEQ ID NO: 658076 - DNA, 50 bp, Homo sapiens
cgcgaatatcgtcatcgttagaagtctgcaggcccaggtggggcttcatg

SEQ ID NO: 658077 - DNA, 100 bp, Homo sapiens
ggccggcgggatagacgggaagccccgtacctcccctaagtccgtcaagttcctgtttgggggcctggccgggaggagctggagttctgtgaaaagctgc

SEQ ID NO: 658078 - DNA, 50 bp, Homo sapiens
catcctgctcatgaacgagtactacaggattcatctaattgatgagttta

SEQ ID NO: 658079 - DNA, 100 bp, Homo sapiens
gcatcgcgtggtaccagtgccgctgggcacactggcttcacgccggctccgcctcaccagcaagcgcattcccagagagtggtttttcctcctgtctcat

SEQ ID NO: 658080 - DNA, 85 bp, Homo sapiens
gggcaggggcggaggcggaggcagaggtggaggcgctttgaaaggagaaggaagccaacatccttttggagccatgaatattgtc

SEQ ID NO: 658081 - DNA, 114 bp, Homo sapiens
atggaaaaggagttcgagcagatcgacaagtccgggagctgggcggccatttaccagacaatgcagatcttcgtgaagactctgactggtaagaccatcaccctcgaggttgag

SEQ ID NO: 658082 - DNA, 100 bp, Homo sapiens
gctggggcggcaccggatcaccaagacggagacttagaaatggctgttgcgtattggaaattagtgttatctggaaggtttaaatttttagatctctgga

SEQ ID NO: 658083 - DNA, 100 bp, Homo sapiens
gaaggaaaagaagaaccacagaattatacagatagtagttcctcttctacagagtcctcccagagttcccaaggttacgagaagtttctgagaagctgaa

SEQ ID NO: 658084 - DNA, 90 bp, Homo sapiens
accgcctcaaccgcgacgccgaggttatgggagaagatatcccagaaaaaataaaagatgaagttcacccagaggtgaagtgtgttggct

SEQ ID NO: 658085 - DNA, 98 bp, Homo sapiens
gactaagacatataatgacatagatgctgtcactcggcttcttgaggaggcaggggaaatggaaggtgatgcagtcgaagccattgtggaggagtccg

SEQ ID NO: 658086 - DNA, 75 bp, Homo sapiens
caagaggtgtcggaggtctcatctttgaactactgccggagcttctgccaggttgacatcatggacatatgtgag

SEQ ID NO: 658087 - DNA, 96 bp, Homo sapiens
ttactccaaccatgtcatccattgaagagaatttctacagacagttcaaggaaattgctgcagttattgaaacggtgtgaagacggattctttggt

SEQ ID NO: 658088 - DNA, 51 bp, Homo sapiens
cagtaaacacatctctcaccgcggagactggactctgaaatgggcatgtac

SEQ ID NO: 658089 - DNA, 75 bp, Homo sapiens
aaaatgaacctgaacgatttcatcagtatggatcccaaggtttgaatcttcagacaaacttctgggaggactcgg

SEQ ID NO: 658090 - DNA, 100 bp, Homo sapiens
cttcctgcctgaggatgaaaacctgagggaaaaaggggactggagccagttcacgctgtggcagcaagaattttctcccaaactggttggcttgactggc

SEQ ID NO: 658091 - DNA, 90 bp, Homo sapiens
catctcaatcagaattactagattttctctcaaactacgaggtctatgttaacaatgaatgggcaaccagtgttggggaaggagggagct

SEQ ID NO: 658092 - DNA, 100 bp, Homo sapiens
ttggtggagaagatcaccaagatgctggaccgaggcctggatcccaatttccacgacccggagaccggagggtactggaagatgaaagagactatacaag

SEQ ID NO: 658093 - DNA, 75 bp, Homo sapiens
aagagaggttctctcccctcactaccaatctgatcagatgcagactcttcttattttaaaatctttaagacaaaa

SEQ ID NO: 658094 - DNA, 96 bp, Homo sapiens
agaacccttccggtgggctaggtactgagcgcgcgaggttggagcaaaacgtcccactcactggaggcacctgaggacgacgggggctggtcaagt

SEQ ID NO: 658095 - DNA, 97 bp, Homo sapiens
cagggccggagcccgagcccttggaggtgagcatctgcctggagtgtaacagcagcaaactgcgcgggctgaagcggaagtggatccgctgctcagc

SEQ ID NO: 658096 - DNA, 96 bp, Homo sapiens
cttggctagcaagacaaacgtgtacatctctagcagtgctggagccaggtggcgagagaatatgacagatacctagcatctagcaaaataatggca

SEQ ID NO: 658097 - DNA, 151 bp, Homo sapiens
gataaaaaggagcaaaagaaaaaagaatgggtcaaccaagaacgtcaaacactccaacgattgagagcatttaaagatgcggagtctcactctgtcacccaggctggagcacaatggcatgacctcagctcaccacaacttccgcctccca

SEQ ID NO: 658098 - DNA, 100 bp, Homo sapiens
gaagatggaagatataaaagaagtgaaccaggcactgaagacagcacccaagaaaacctcatttggctcgctgaaggatgaagaccggattttcaccaac

SEQ ID NO: 658099 - DNA, 88 bp, Homo sapiens
tttaagcaaggaaattgaactaagaaatggagagacttttcccaggtccctcgtatcaaaacattaagagtataatggaagatagcac

SEQ ID NO: 658100 - DNA, 76 bp, Homo sapiens
tggatgctctatcacagtttgatctcaacaattatgcaatattgaatttgaccgggattgtgactattttgcgatt

SEQ ID NO: 658101 - DNA, 50 bp, Homo sapiens
catggccttctacgttgtgaaaatggcggttttggtgaataacatcacca

SEQ ID NO: 658102 - DNA, 50 bp, Homo sapiens
cggagctcccccaagagccggaaaggtagaatgtaagaaagctcagccga

SEQ ID NO: 658103 - DNA, 101 bp, Homo sapiens
aatgaaatcgccaatgccaactcccggatgaggagaatttctgtgccactgtgcccaaggatggacgttcctattccccaactctctttgcacagacagtt

SEQ ID NO: 658104 - DNA, 100 bp, Homo sapiens
gtggaaacgcttgtagggcttcaccagtggaagcatcagttcacagcagtaatgcacactgtacagataagacaattgaagctgctgaagccctgcttca

SEQ ID NO: 658105 - DNA, 75 bp, Homo sapiens
catgatacagttgataaaattgttggtgttcctggtgaggaaggtgaaggggtccgacgctgggcagctctacgc

SEQ ID NO: 658106 - DNA, 102 bp, Homo sapiens
tccagtgcattccagtatcacttctgatgactccctggagcacactgacagttcaggacttcctcgttctgcccatcttcctaacaaggctatggctgataa

SEQ ID NO: 658107 - DNA, 75 bp, Homo sapiens
gaagagctgcagtctttgtgggacaaggtacatgagaagctggggtcagagctgccaggcctggagccagccctg

SEQ ID NO: 658108 - DNA, 75 bp, Homo sapiens
agagctgtcgacagttacgtcaacatctctccatttcaaggactaaaacagtcttgcgttaagtaaaaacctgtg

SEQ ID NO: 658109 - DNA, 100 bp, Homo sapiens
ccagatttgacgtgcaactcaaagacctggaaaaatggcagaataatctgcttccatcccgccagtttggctgaccctctggtgggcagcatcgccacac

SEQ ID NO: 658110 - DNA, 97 bp, Homo sapiens
gagacggtcgggtttgccagggccgggcgggaccgcggggaccatggcggagccgcctcggacttgaaactgcatctgcagagcactgattatggta

SEQ ID NO: 658111 - DNA, 75 bp, Homo sapiens
cgaagcgactgtgtctgtccaagaccacgcggaacaaatgtggtatctggggctggcggtctgagaagatggaaa

SEQ ID NO: 658112 - DNA, 51 bp, Homo sapiens
ggtctcggcaggctcttcgggaaggaacctgcagatgacagcagcttctcg

SEQ ID NO: 658113 - DNA, 100 bp, Homo sapiens
aatcaaagataaatccaaatactgcatatcagaaacaacagcaactttcatcctttgaaacgtgtgctgaaaaagaagaatcagcaaatactactgaaag

SEQ ID NO: 658114 - DNA, 80 bp, Homo sapiens
gttagaatctgggactttcttcgttgccatgaggaaagaattctccgaggtactccaaagattcaggtttactcacgtca

SEQ ID NO: 658115 - DNA, 75 bp, Homo sapiens
tggattgggcacagatggcatgtcaccgatgtctggtgtatctgggggatttgtatgatgatgaacatgattatg

SEQ ID NO: 658116 - DNA, 100 bp, Homo sapiens
ggagtcccgcaggaaggaggccttcttgtttttcttcccccagtccctcagctgctgctgctgctcaggaggtcagatctgccactgatggtaataccag

SEQ ID NO: 658117 - DNA, 75 bp, Homo sapiens
ttgaatgactggaaactgattggaaactctttgggaaagccactcgaaaagagtcttttatgacatcaagagaaa

SEQ ID NO: 658118 - DNA, 50 bp, Homo sapiens
ctcggggactcccccaaagacaagcctgagagacactctcgtaagttaca

SEQ ID NO: 658119 - DNA, 100 bp, Homo sapiens
aaaggtgatctggacaaaggaacaggtatctcagcaccagcattggatgttgattggcagagcaacaacacctttgcttcttgtagtacagatatgtgca

SEQ ID NO: 658120 - DNA, 74 bp, Homo sapiens
ggccacgcagtgctttgcaacgctaattagactcatgccacttgaggatgcagaaaatgcgattgtgcatatgg

SEQ ID NO: 658121 - DNA, 51 bp, Homo sapiens
cctgcaggcacagttgccgattacaggccttcctgggctatgtgctgtatg

SEQ ID NO: 658122 - DNA, 98 bp, Homo sapiens
gctccttcccgctccctcacacaccggcctcagcccgcaccggctcccctcggactggctgagcctggacaagtccatgttccaactagtggcgcaga

SEQ ID NO: 658123 - DNA, 100 bp, Homo sapiens
gggagacccatctggactaccaaggagaagctatagactacttctactccaccaggaagacgctgaccggaaaggagattgagattgacattgaacctac

SEQ ID NO: 658124 - DNA, 98 bp, Homo sapiens
gccagagcaggcaacctggacaaagttgtggaatatctgaaggggggcatagacatcaatacctgcaatcaggtagtgtgccagtatttgaaaaatcc

SEQ ID NO: 658125 - DNA, 83 bp, Homo sapiens
gccgcaccatgccgctcctaagcctgcacagccgcggcggcagcagcagtgagaggaagctgtcttctgctgttggctgctgg

SEQ ID NO: 658126 - DNA, 95 bp, Homo sapiens
ctcagggctccagtcaggccgatccgctccgctcacggttacaggaggttccagtggcatcgggaagtgcattgctatcgagtgctataaacaag

SEQ ID NO: 658127 - DNA, 100 bp, Homo sapiens
cgggaccaccctgggcacagcaggcatcggaggagtgagatgtggatgttgcttttgcacctacgggggcatctgagtccagctccccccaagatgagct

SEQ ID NO: 658128 - DNA, 100 bp, Homo sapiens
aagcttctgcgctcccttcctcagcgtttcaagaaattacagaagacatccccgtgaagactttgaatatgaagactgtgtatgtttctgtgttaccaac

SEQ ID NO: 658129 - DNA, 74 bp, Homo sapiens
agacgatattgatattgaagcaatgcttgaggctccttacaagaagagggagacgtggtgggcggtccttcctg

SEQ ID NO: 658130 - DNA, 82 bp, Homo sapiens
agaagaaataatggcaaataacttttccttggagagtcataacatatcactgactggtcaaaaggctgagtttcaaattctg

SEQ ID NO: 658131 - DNA, 98 bp, Homo sapiens
gtggtttttcggatcatgtctggtggctccgcggattataacagcaccggaagcagtactcagaacaagtcatacctaatgctgcaggaaacatttcc

SEQ ID NO: 658132 - DNA, 75 bp, Homo sapiens
cgggtcgcgtcgttgtcctccgcgagcgtccggattgcagactgccactctccgcccctacctgagtgccgtgcg

SEQ ID NO: 658133 - DNA, 83 bp, Homo sapiens
aaatccccctgaaggtaccgcggacctcgccccgggacagcgaggagctgagggaccctgtactggctgtgatcgaacttctc

SEQ ID NO: 658134 - DNA, 76 bp, Homo sapiens
cggctctctgctcattggggcgttgaggattaagctgaaggaatctgttgttgaaaatcatgcagtgttaagttat

SEQ ID NO: 658135 - DNA, 90 bp, Homo sapiens
attattgcgcgtggaacggctgcttttggaagaagtttcaggcacctgcaagagagacctgcgtggaatgtcagaagacagtctatccaa

SEQ ID NO: 658136 - DNA, 75 bp, Homo sapiens
gagctgggttctattttccctcctcaaactgactttgcagccacggagaggctattactccaaagcgactcctca

SEQ ID NO: 658137 - DNA, 82 bp, Homo sapiens
aaccgggtggtgcgaaccctccagaacagttgattcttcaccacactgaaaccattaggaaaaatccttgtggttaacagca

SEQ ID NO: 658138 - DNA, 82 bp, Homo sapiens
ggaggaggaggaggagccgagaggagctgagcgagcgcggaaggcttgggcactgtttaaaggaaagttccgagaaggcatc

SEQ ID NO: 658139 - DNA, 75 bp, Homo sapiens
agagaatgtatgaagaacagtcacaggacaggcaagtgtcaattgaggagggagagaggaaagccaaagagctga

SEQ ID NO: 658140 - DNA, 89 bp, Homo sapiens
ctttgtgaggataaacagctcgttggcagtagcagcttatgaggatggcaagccaaattagagctgagagttgctgtagcaaaagtgga

SEQ ID NO: 658141 - DNA, 90 bp, Homo sapiens
gtgctacaagggatcaagatcagctccaggcctgggaaagtgaaggcttcacaggctgctcaagaagccgagatcaatgccagaaaagcc

SEQ ID NO: 658142 - DNA, 97 bp, Homo sapiens
tgacagcaaaaatgacccaccaatggaagcagctggcttcactgctcagacccgctacgacttcacctcatgcatgggcgtgctcctggtgagcatg

SEQ ID NO: 658143 - DNA, 74 bp, Homo sapiens
cgggagccaacatggcagcggggttcgggcgatgctgcagggaacttaaaaggagtctagaaaatccagcagaa

SEQ ID NO: 658144 - DNA, 98 bp, Homo sapiens
taaggattccaagtaactcttatttggaaaaactggtctacttcctggattgttctttctagtcgaagaattgaattttacaaagaatccaagcaaca

SEQ ID NO: 658145 - DNA, 50 bp, Homo sapiens
tggcaaatgctgtaaggaatgcaaataccagaggaagagtcttcatcatc

SEQ ID NO: 658146 - DNA, 100 bp, Homo sapiens
gtacgcgcctgcgggctctgaggtcgaccgcgtcatcctcaaggaattggtggagagaaggcgcaccatgatggaagatttccggaagtaccggaaaatg

SEQ ID NO: 658147 - DNA, 51 bp, Homo sapiens
aagaggcagctgttcatagaaatgcatgttagtaggcaggaagaggcggag

SEQ ID NO: 658148 - DNA, 83 bp, Homo sapiens
cgaacgaccaagagggtgttcgactgctagagccgagcgaagcgtcgcgtggggcaggcagtggcgctgcgggccaaggcctt

SEQ ID NO: 658149 - DNA, 50 bp, Homo sapiens
gctctcctgttccagcaattgggtgatgatgaacagtctacacagatggc

SEQ ID NO: 658150 - DNA, 98 bp, Homo sapiens
gaatttgtatagagatgtgatgttggagaactacagaaacctggtctccctaggtgcttttcagtgggaagaattggaagaagatatcaggaagaagt

SEQ ID NO: 658151 - DNA, 90 bp, Homo sapiens
cttccaaggcactaccaatatgttatctccagatgccgcgcaactgtctgatctcagttcatgagaaagcttcttgctatctacctccac

SEQ ID NO: 658152 - DNA, 75 bp, Homo sapiens
aggccttcatgattaccgtcaagtttgtggaggactgacaggctccaactacccgggactcagtattagccttcg

SEQ ID NO: 658153 - DNA, 74 bp, Homo sapiens
tgatcactgaaaatgatttatgcaagtttaaggatttcaaatatgcgtgcattagagaatgattttttcaattc

SEQ ID NO: 658154 - DNA, 82 bp, Homo sapiens
ccggactacaaggtcgcctacgtgcagctggcgcgcctcaagttccccatcgactacccatactctccaccagcctttcggt

SEQ ID NO: 658155 - DNA, 100 bp, Homo sapiens
tggactacgtctgtgcggctgcgtggggctcggccgcgcggactgaaggagactgaaggttaatgttgaagaaggaaaatgcggaagtcgtcatttgaca

SEQ ID NO: 658156 - DNA, 75 bp, Homo sapiens
ggagtcgctgggtgcgtggggctgcctcgccgcgtctcgccacgtaagactttgaccccgacgcaggcttcagtg

SEQ ID NO: 658157 - DNA, 90 bp, Homo sapiens
gtttcaatcacaatggaaacatatttgcatacgcttccagctacgactggtcaaagtacggcaagaagaagctgaaatacctgccctaca

SEQ ID NO: 658158 - DNA, 50 bp, Homo sapiens
ccgaggccccctcttcgcctcctccagatcagcttgaacgggtcttttta

SEQ ID NO: 658159 - DNA, 75 bp, Homo sapiens
ggcgtgcgacaacgcggcgcagaagtctccttgaagaaaatgatattttcaggaatgctcaagcaggtgttctca

SEQ ID NO: 658160 - DNA, 100 bp, Homo sapiens
cccgctcccccccctacactgatgatgtcaaatggttgctggggctggcagcaaagctgggtgtctgcccccagcctctgcgcctgtgagaccttctctc

SEQ ID NO: 658161 - DNA, 101 bp, Homo sapiens
tggccgagcaggctgagcgatacgacgcttagaccatgctcagcctccaagcagccttgtcatcgacaaagaatctgaagtttacaagatgcttcaggaga

SEQ ID NO: 658162 - DNA, 100 bp, Homo sapiens
gcaacacggtgcaccggaccctgccagatgagcgtgaagccgtgcagaagaagaccttcaccaagtgggtcaattcccaccttgcccgtgtgtcctgccg

SEQ ID NO: 658163 - DNA, 82 bp, Homo sapiens
cagcgctgctctccgccgcagcttcagcacctcggcccaggaccgaccagctgggcatgttcacgcacaaggagtttgagca

SEQ ID NO: 658164 - DNA, 50 bp, Homo sapiens
ccctcattcaggcccagccctgaatctccagccaagtcctccgtgctcgt

SEQ ID NO: 658165 - DNA, 82 bp, Homo sapiens
tcccagctcggcccgcgggggagccccgggagccgcacgctgctgatgcaaggaatcccctgggctcccgtccactccactg

SEQ ID NO: 658166 - DNA, 83 bp, Homo sapiens
tcgcctcagggcattcatttcaggctccttctaaatggccaagtttaaaattggtggtgaatggtggacatggatcgattata

SEQ ID NO: 658167 - DNA, 98 bp, Homo sapiens
ccggagcgagagcgagtgcctgagcaacatccgcgagttcctgcgcggctgcggggcttccctgcggctggaggagggccctcctggacccgggagcg

SEQ ID NO: 658168 - DNA, 100 bp, Homo sapiens
ttttcttctactcctaaagattttctggtttctatcagtgacagctgttccatttcctccaagtcaccggcttacagcaaaagaagtgtttgataatgat

SEQ ID NO: 658169 - DNA, 83 bp, Homo sapiens
ccgggcccgacgagggcgaggtggactcctgcctgcggcacatcgagagtaaacatgaggttacgatcctgggaggacttaat

SEQ ID NO: 658170 - DNA, 78 bp, Homo sapiens
tcggcgccagcagcccggaggcccggcccgcgcaggaggcgctcctccttcccaccgaccagcatctcagacatgtcg

SEQ ID NO: 658171 - DNA, 100 bp, Homo sapiens
ccgacctgcgatgagaaggtcgtctggactgtgttccgggagcccattcagcttcacagagaacaggccagaagaatgtttgaaggtgagatggcaagtt

SEQ ID NO: 658172 - DNA, 100 bp, Homo sapiens
actgaaagaagtggatgatgtgcttggtggagcagctgcctgggagaatgttgactctactgcagaattaacactgaatcctccggaaggaattgtagca

SEQ ID NO: 658173 - DNA, 99 bp, Homo sapiens
ctcactgcagaggtgctggagctggcagccggaagtcggtgcagcccacctcagaggagcgcatccccaagaccatcgagatcaagtccatcacgcacg

SEQ ID NO: 658174 - DNA, 83 bp, Homo sapiens
cttgccttgagtcagtgcgccgctctccagcccgcttgaacgatctaaccatgagctaccctggctatcccccgcccccaggt

SEQ ID NO: 658175 - DNA, 75 bp, Homo sapiens
ggccctcagggaagagaccctgcaaagatcctgggagaccaaggagaagcaaaccaagccagcagaagcgccccg

SEQ ID NO: 658176 - DNA, 87 bp, Homo sapiens
ggggcgcctggagtgagggttctggttcccgccggcgaggtgtcttctctttagggatggtgaggttggaaaaaggctcctgtaacc

SEQ ID NO: 658177 - DNA, 100 bp, Homo sapiens
cacgcagtcttcccgacatcttccatgagtcagcttctccagatggtcctgcaaggctggaagttcaatggtggaagcttatattatttttctagtgtca

SEQ ID NO: 658178 - DNA, 127 bp, Homo sapiens
gtcgaatctgagcaaaggcacgggcagccggaaggacaccaagatgcggatccgggcctttccgggagataaagaagctgaattagggcttccattttccccactttgtgatcggaagtcaaccatg

SEQ ID NO: 658179 - DNA, 74 bp, Homo sapiens
ccaagttggatgccatgctggaggagttcaagaaggctgcggtctcctgtttgataaaagaatattggccagta

SEQ ID NO: 658180 - DNA, 100 bp, Homo sapiens
cgagcagcggcgggctggcaggcggtcgtccggccggggacccggcccgggaccggcggcgcgcggcggccgaggccagatgcagaggccaggatgtggg

SEQ ID NO: 658181 - DNA, 75 bp, Homo sapiens
cgcggacctagacctggaatcgcccaagtccctctactcgcgaggtgagaagccctaccactgcaactgggacgg

SEQ ID NO: 658182 - DNA, 90 bp, Homo sapiens
aaataaacatggagtccatcttccacgagaaagaaagaccacagcaagattctttcattcgtctcctcctagcctgggggaccaggctcg

SEQ ID NO: 658183 - DNA, 100 bp, Homo sapiens
tgctgatgagagctataacttaatggatacaacttcagtattaaaggaggaacatgttacaacctttgaagatgaaggatcctatataattcaagaacag

SEQ ID NO: 658184 - DNA, 100 bp, Homo sapiens
ctcatgttcagctccatcgtctgcagcgtcccgcacacctggcagcaaaagaggacaagatcgcagaggaaggtgggcggcgggagtgcccagccgtgtg

SEQ ID NO: 658185 - DNA, 128 bp, Homo sapiens
cttggattcatccacagagacatcaaaccagacaaccttcttttggacagcaaggaaaaggccaaagttgttgagcccctggactatgagaatgttattgcccaaagaaaaacccagatttacagcga

SEQ ID NO: 658186 - DNA, 88 bp, Homo sapiens
gtggttgtacgagacgtggcctgtggcgctaaccacacgtctctagtgatccctgaaaagttccagcatattttgcgagtactcaaca

SEQ ID NO: 658187 - DNA, 90 bp, Homo sapiens
tcagactcttggagccagaagctacatgacccctaaacggctcattggtgggcagtattacttatgggaattgctctgatcatgctaatg

SEQ ID NO: 658188 - DNA, 75 bp, Homo sapiens
ggatcacggatgtaggaagtggtgctccttgtcttctgagatgttgggcccctcttgggatggagatgaagcaga

SEQ ID NO: 658189 - DNA, 100 bp, Homo sapiens
ctagttcctctccagctcagccgcgtagctgcctgtggaggaaccgattgtgtccacagatgaggtcatcttcccactcaccgtttcactggatagactg

SEQ ID NO: 658190 - DNA, 88 bp, Homo sapiens
ctgcggaagtgcagctgcctcagttcttagcgcagacgaagttatacggaagcgtctcctcattgatggagatggtgctggagatgat

SEQ ID NO: 658191 - DNA, 101 bp, Homo sapiens
gatgcttcctcttctctcaatatattctcacttatgggtataaagttgtattccctgaatgactataaaccacccatttcgaaagcgaaaatgacccaaat

SEQ ID NO: 658192 - DNA, 100 bp, Homo sapiens
cggcgagaagccccagctgcactacgcggtttttcgttggaatatacgttgcacatttatggcgattctgagtgtgagggcagacttctgccaggctcag

SEQ ID NO: 658193 - DNA, 83 bp, Homo sapiens
ctccttcacgcacgccctgcgcctggtgaaccaagttgaccacgttgttcctgagcctgggacaagcctgctcgctgcctttg

SEQ ID NO: 658194 - DNA, 75 bp, Homo sapiens
cagatactttgaagtagaagaagctgatggggatcatcgtcttgctcttcttttatctcagtttgtgggtagcca

SEQ ID NO: 658195 - DNA, 100 bp, Homo sapiens
tggggctgggcatcaacggcaaagttttgcagatcttcaacaagaggacccaggagaaattcgccctcaaacgccgtgccgtccctgcagtgacaccgag

SEQ ID NO: 658196 - DNA, 100 bp, Homo sapiens
cggcgagcagtctcaggcctttagtgatgatgtccaatatcagatggaaatgatgcggagccttcgccatgtaaacattgatcatcttcacgtgggctgg

SEQ ID NO: 658197 - DNA, 98 bp, Homo sapiens
ttcaacatgattgaccagaaccgtgatggcttcattgacaaggaggacctgcacgacatgctggcctcgctgggaagttttattcagtgtatgggtct

SEQ ID NO: 658198 - DNA, 99 bp, Homo sapiens
ggccaaggtggatattgatgaccacacagacctcgccattgagtatgaggtatttaacagactcccgacaaaaagcagaatgatcagcgaaatcggaaa

SEQ ID NO: 658199 - DNA, 83 bp, Homo sapiens
ccggaacagtccgtgatgcaagctctcgagagtctcacggagacgcagagagtcacaccccaaagcctctttattcttttcgg

SEQ ID NO: 658200 - DNA, 90 bp, Homo sapiens
cccatctggccgggcagtaccttcttcaagagaaatggagcccttctccaagatgccatggacaatattaccaggcagaaccaattctac

SEQ ID NO: 658201 - DNA, 88 bp, Homo sapiens
ctgcagagctcggaggggcgctgtgtgtacatcacccccatggaggccctggcagagcaggatcctggaggtgatgggatagactggg

SEQ ID NO: 658202 - DNA, 50 bp, Homo sapiens
ctggaacattcagaatctacggagagatcccagatgcagtgactggttac

SEQ ID NO: 658203 - DNA, 98 bp, Homo sapiens
ccggggtcctggtcggggtggtctgtctgctcctggcatgccctgccacagccactggtaggagcattgcttttcgtggtgaaagaggcaatgatgaa

SEQ ID NO: 658204 - DNA, 91 bp, Homo sapiens
gcctcagttggaagcagccgatccagcctgcggagcctgtggggcagaacccagtgacttgattgtaaaaatttacagagcggaatcatat

SEQ ID NO: 658205 - DNA, 95 bp, Homo sapiens
tgcagttggatggcggtgactgcgtggtattatacctgaagaaccttagccctcgggtgactgaaagagatcttgtgtcattgttcgctcggttc

SEQ ID NO: 658206 - DNA, 74 bp, Homo sapiens
tgccctgagacggtgtcccgccgaaagatgacagtcatgtccctttccagggacctcaaggacgactttcacag

SEQ ID NO: 658207 - DNA, 96 bp, Homo sapiens
aaagctgcggcctgtatcaccagaggagattagacgtagcagattagaaaggggagtgtgtttgcctacagtgtctctctggatcctctttgttta

SEQ ID NO: 658208 - DNA, 95 bp, Homo sapiens
gcagttcagaagagccaaggaataaacatgcaatgaacccaaaagggtgttcctccaagaaaagctggttatattgaagacctggttttgatgct

SEQ ID NO: 658209 - DNA, 74 bp, Homo sapiens
ctcgtccgcgggtttgcattctggggtggacgagctgggtgagaagccctaccactgcaactgggacggctgcg

SEQ ID NO: 658210 - DNA, 75 bp, Homo sapiens
atgacaatgactttgagccctaccttactggacagtcaaatcagtcgtgtggagaaatctatgcggtgagaaact

SEQ ID NO: 658211 - DNA, 75 bp, Homo sapiens
caaaggtcatgctgttggtgatattcctggagtccgctttaaggttggtcaaagaaaaagtgatgtatgaaaaag

SEQ ID NO: 658212 - DNA, 82 bp, Homo sapiens
gtggaagccgaagccgcacctcccgcatggcccctccggccagacaatgcagatcttcgtgaagactctgactggtaagacc

SEQ ID NO: 658213 - DNA, 100 bp, Homo sapiens
gtccatgttcacactgggtgaaggaagctgaaaccacagacatgactgagtcctccatgaagagtcaaaatgcagatcttcgtgaaaacccttaccggca

SEQ ID NO: 658214 - DNA, 75 bp, Homo sapiens
cgggctcctgcgagaagcaagcggaacttcctgaggagccatgtggctagaaatcctcctcacttcagtgctggg

SEQ ID NO: 658215 - DNA, 100 bp, Homo sapiens
gtcctttacttggtgcattactgcggatggaatgtgagcaatcatttggggaagaatctacagttgctgatggacagagtggatgaaatgagccaagata

SEQ ID NO: 658216 - DNA, 90 bp, Homo sapiens
caaagacatcaccatgaacactagcagtccaccgggcatacttagtatctttggacaaataggaattcaatgaaaacgtattcttaaagg

SEQ ID NO: 658217 - DNA, 90 bp, Homo sapiens
ccccaaacagcggcgtttcacggtggcacatacatgctcagaggctgagaatggtgtggaggagaaaaagaaagcctgcaggtcgccaac

SEQ ID NO: 658218 - DNA, 75 bp, Homo sapiens
aaactcagcaacacttcgtaccagatccagggcagcgacgccggctggactttgggctacatgctgaacctgacc

SEQ ID NO: 658219 - DNA, 100 bp, Homo sapiens
ttgaatgaaataatgtctattcttccaaagaagcatgttgactttgtacaaaagggccaggtctaaactgcagtaatccatttactcagctggagaggag

SEQ ID NO: 658220 - DNA, 82 bp, Homo sapiens
tgctcctctagaagatttcacagcaatgctggactgcagtgactatgttctagcaatggctgccatccggaagaaactggtg

SEQ ID NO: 658221 - DNA, 74 bp, Homo sapiens
gtcctactcaaaggagacccagactcctcttgccacgcatcagtctgaaggtgtcatggagaaactccagctgg

SEQ ID NO: 658222 - DNA, 98 bp, Homo sapiens
aaatgcaaagtgtgtgcaagcaaatgcttttattcagggacatgccacccccgttttaggagaacttgtatttggtttgagaaggaattggaatcacg

SEQ ID NO: 658223 - DNA, 89 bp, Homo sapiens
cctactcacagataggaattgaagccagagtcctggtggaggacgatgagatcatgcagggattcatcagggctttcaggcccctgccc

SEQ ID NO: 658224 - DNA, 101 bp, Homo sapiens
cacttcgttcaagacaggtgtttaagcggggtgctcaaaggatttaaaggagaactaattcatgtatttaacaaacatgatggtgccttgaggaatacaga

SEQ ID NO: 658225 - DNA, 50 bp, Homo sapiens
acagaaccaagtctcttcactaacccaacatgagtgaagtttcctgcaag

SEQ ID NO: 658226 - DNA, 100 bp, Homo sapiens
tctctctcgaccccttctgcccggcgcttcggcccgggccgctcaggtgcagctcctcttctgcagaacgccagtgggtggagagcagccccaagcccat

SEQ ID NO: 658227 - DNA, 100 bp, Homo sapiens
ttagctgttactccagccaacactgatcttgcaaactcagatgcgctgaagctagctaaagaagttgatcctcaagatccagaatataagaagtttttag

SEQ ID NO: 658228 - DNA, 75 bp, Homo sapiens
aggagtcatgagcgacagcggcgagcagaactacggcgagcggaaccaggacaatcctgtgattgatgaaataga

SEQ ID NO: 658229 - DNA, 99 bp, Homo sapiens
actccccatcgcgttttgccagcgataatacgcctcagagactaaggtgtcagtatgttcttcaagctgctctgctcctgggcccaagctattctcctg

SEQ ID NO: 658230 - DNA, 100 bp, Homo sapiens
acctggtggtttgtgtatgacgccgagggacctcacatcaacttctaccagctggctgcaggccaacttcaccatccgggaagatgccaaccccagctcc

SEQ ID NO: 658231 - DNA, 100 bp, Homo sapiens
aagatgaaaactgaatggaaatccaatgtgtatctggcacggtctcggattcaggcccagaggcagagctacacaaccatggaatccaaattaattcctg

SEQ ID NO: 658232 - DNA, 75 bp, Homo sapiens
gttggaagagtacaagctgatcctgtccacaggtggaagatgcaatgctgatgtttgataaaactaccaacaggc

SEQ ID NO: 658233 - DNA, 101 bp, Homo sapiens
gctgctgcccgccgcccttctgctccacgaggagcacagccgggccgctgcgaaggttatgatgtgattgctcaagcccaatctgggactgggaaaacggc

SEQ ID NO: 658234 - DNA, 82 bp, Homo sapiens
aggtcctggaggtgccatttccctctctgttgaagcaaaggccggggcagacctcctagtcgttcagattctaggagataag

SEQ ID NO: 658235 - DNA, 76 bp, Homo sapiens
cccgaagcccagggagagcaaggcgcgcggcgactccgaacaactctgctcatggtgattacatgcaaaataacga

SEQ ID NO: 658236 - DNA, 75 bp, Homo sapiens
atttgcttttgtaacttttgatgatcatgatacagttgataaaattgttgcagccaacagggaagagtgtcgcac

SEQ ID NO: 658237 - DNA, 98 bp, Homo sapiens
agagcaggcggaggtagacgaggtttttgagtcatgatgcaagaatctgggactgagacaaaaagtaacggttcagccatccagaatgggtcgggcgg

SEQ ID NO: 658238 - DNA, 75 bp, Homo sapiens
ctctgccctatgaacagcttaagcacttttaccgaaaaccttctccccagatcatggaagggaagtggttgctgt

SEQ ID NO: 658239 - DNA, 83 bp, Homo sapiens
cacagcccaaactcgctgtcatccaggaagcccggtttgcccagagcgccccagcaccactgccggaactgtggccacatctt

SEQ ID NO: 658240 - DNA, 82 bp, Homo sapiens
ccccctgggagctgctgccccgtatgccggggttttaaaatcaaagatgggaaaatcggagaaaattgcccttccccatggc

SEQ ID NO: 658241 - DNA, 100 bp, Homo sapiens
cgatttggccgcctggattgtgttgtcaacaacgctggccaccgaattatgggcccaccgtgttagtgcaacaggaggcactcaagcggggctgtgaaca

SEQ ID NO: 658242 - DNA, 100 bp, Homo sapiens
gcggcgcccaggcctcccagcagcagtcccgagcagagaaatctccaaattggacatccagagcagcattcttgttctgtctacgtcttgaattagaaac

SEQ ID NO: 658243 - DNA, 75 bp, Homo sapiens
ccaggcccatttccctttcatcttgtgctggagaagagaaacgagttggcacacgcacagtgtttgttggcaatc

SEQ ID NO: 658244 - DNA, 90 bp, Homo sapiens
attcaccaaataagctatatactttggttacctatgtacctgttaccactttcaaaaagaaaggtgatgcagagccagagagtccagaca

SEQ ID NO: 658245 - DNA, 75 bp, Homo sapiens
gccgcgcttcgaaggacgccgccgggagctgcggagggaactgctcgcagaaagaagaaggtggttcatagaaca

SEQ ID NO: 658246 - DNA, 85 bp, Homo sapiens
ctcttggaaatctcagacctcaacgagctcctgaagccacagcctggcagctctgatcaggaaagtgaggaacagcaacaattcc

SEQ ID NO: 658247 - DNA, 98 bp, Homo sapiens
gggcatgacggctacaggatgggcgcgaacaatggcaaacagtacggcagtgagggtggatggaatggacctcagagatgcaagccatgaacaagctg

SEQ ID NO: 658248 - DNA, 83 bp, Homo sapiens
gaggcaaggagctaaagcagcgtgcgttcagccctggggtgctgggcgtcctcttctttgccatagcctgcttcttatacaag

SEQ ID NO: 658249 - DNA, 93 bp, Homo sapiens
gaaagaggaagcaaatataataatggcagcacagagctacattcgaggaatttatcatggcatccagcattgaccactacaagtaaaatgcga

SEQ ID NO: 658250 - DNA, 98 bp, Homo sapiens
tactacaagccagctgaaattaagtggcccgttgccgacaagccctggtgccgcgtgccttccatgcttcagctgtggggctaaggtcttcagatgag

SEQ ID NO: 658251 - DNA, 75 bp, Homo sapiens
ccagagagccaggagcatcctgaagctgacccaggtatgcaagcatctcttggcagtttacctgagtcaggttat

SEQ ID NO: 658252 - DNA, 98 bp, Homo sapiens
tctccatcgccttgtctgtggggtgcactgggttctgatcccactgcattctccgtccttacccaagccatcactggccaggtgggttttgtggatgt

SEQ ID NO: 658253 - DNA, 74 bp, Homo sapiens
acaggccatgctctggcaaaaacgactttgaagaatatcctgaacatagaacgaactttttcttactacttcag

SEQ ID NO: 658254 - DNA, 83 bp, Homo sapiens
acctgctgctggaggaggataacaagttttgtgcagattgccagtctaaagctgtggaaagtgaagaaggcattgaagatgac

SEQ ID NO: 658255 - DNA, 100 bp, Homo sapiens
aatgacagcagcattaaacatatatgtgaagagtccccgatgtttgtagaccttatcatgttacaccagacagctatattccatgccttgcagacctgtg

SEQ ID NO: 658256 - DNA, 75 bp, Homo sapiens
caagccagacagctgggccggagcagccgcgggcgcccgaggggccgagcgaggggccgttcctcggggcatgac

SEQ ID NO: 658257 - DNA, 100 bp, Homo sapiens
cctgtcctacgatgtggaggaggaggaggagttccaggagctggaggttacagaactcaataatgtgaagaacgtagctcgattgccaaaaagcaccaag

SEQ ID NO: 658258 - DNA, 83 bp, Homo sapiens
cgacaattcgaccccacacaaggaggatctaagcagcaaggtgttggagagcacaatggctgaacaagtccttcctcaggctt

SEQ ID NO: 658259 - DNA, 100 bp, Homo sapiens
cttcaaaagccaatgctatttggagacaggcatccaaagcctctgggatgtgttctgactgtaaaaactctgatgttgtgaaaaaagcttacgctttgcc

SEQ ID NO: 658260 - DNA, 90 bp, Homo sapiens
aaaaaccaaagctccctgctgcataagaccttgtcagagcttccttcttcttcaacgtggggccagcagtccaatacaacagcatgtcag

SEQ ID NO: 658261 - DNA, 51 bp, Homo sapiens
gtgatgcctgcagagctgtggcttaccagatccggccccacatcgcaactc

SEQ ID NO: 658262 - DNA, 75 bp, Homo sapiens
tcctgaggacaatggcgcaagatcgtcttcagctgttcatagccttcgggctcagaatcaggttctgaaaaaagg

SEQ ID NO: 658263 - DNA, 75 bp, Homo sapiens
atgaatatgagcagctgtcctctgaagccctgtaccagcagctgctgcgcgccctcgccaggctggacagctacc

SEQ ID NO: 658264 - DNA, 96 bp, Homo sapiens
ctttgtggaggtccctgagaaggaggggtatgagccacacatccccgaccacttgcggcctgagtatgggacgcatggaatacctcgtgaaatgga

SEQ ID NO: 658265 - DNA, 100 bp, Homo sapiens
ttacttcccccctctctctctgcttggtaccacaggagccttcacgtaaatgggtccagtcatgcctcccagtaagaagccagaaagctcaggaattagt

SEQ ID NO: 658266 - DNA, 100 bp, Homo sapiens
tgatgtggtgcttttgaaccactggaaagtgaggaattttgaagtacaccgtggtgacattgtatcattggttccagaaaaggctttgaaagactcacta

SEQ ID NO: 658267 - DNA, 100 bp, Homo sapiens
cacgtcgccacctacggcccgagacacaccaggccggcaggctgagaaaagcgagaccgcgtgcgaggaccgactacgtctactttgagaactcctccag

SEQ ID NO: 658268 - DNA, 100 bp, Homo sapiens
cgtcggctgcggttctctctcgaccccttctgcccggcgcttcggcccgggccgctcaggtgcaggcgccaagcccatctttgtgtgcttgcatccaact

SEQ ID NO: 658269 - DNA, 98 bp, Homo sapiens
ggcagacgcggtcctggatatacttcagttacagccaagttctacttctgaatctatggatcaactactaaacaaaaatagagagggagaaaaatcaa

SEQ ID NO: 658270 - DNA, 74 bp, Homo sapiens
ggacccgaggccaggagccaggggcccagaagctctcctgccacagctcctcaccccctgaaaatgttcgcctg

SEQ ID NO: 658271 - DNA, 96 bp, Homo sapiens
agtgcttaggctttggaagtggtcatttcagatgtgattcatctaatccagtctctcaagattctactgtttcccaagaggagaactcaaaagagg

SEQ ID NO: 658272 - DNA, 82 bp, Homo sapiens
tgcccacagacgctttaactttgacacggatcggcccctgctcagcaccttagaggaggtcttgttgcagtaggagaaagag

SEQ ID NO: 658273 - DNA, 100 bp, Homo sapiens
cgggctcctggacttcgcctttcccgagccctggaggtggggagaaaagagtcatgtgctgttcctggggcttggatgatgtaggggaagcaaggtgaaa

SEQ ID NO: 658274 - DNA, 83 bp, Homo sapiens
cagaaaccgctgcctgtgagccgctgggctcagatccacctggtgaaggcaaaatacatatctcagtgcattgatgagatcaa

SEQ ID NO: 658275 - DNA, 100 bp, Homo sapiens
gtcctgcacctatcctgaataaagctggagagcgtggtggaagtggaggagggcgaggtgaacgggcaggagctgtgcatcgcatcccactccatcgcca

SEQ ID NO: 658276 - DNA, 100 bp, Homo sapiens
atttcccacacccactactccgctgactgggagggatggtagcctggccagcaacccttattctgatccaggatgggggccccgtttgtctgggccttgg

SEQ ID NO: 658277 - DNA, 100 bp, Homo sapiens
aattgttgcctgaagaataccaaggaggatcttttaggttgtttttgagcacgttcactctcgcagtgtcagctggggctgttttgcttttacccttctc

SEQ ID NO: 658278 - DNA, 90 bp, Homo sapiens
tttgcgtgtgttgaaagtacaattctattgcacatcaatgatatcatcccagtgaacttgaagatgatttacttggagaagatttgctat

SEQ ID NO: 658279 - DNA, 99 bp, Homo sapiens
cgccgagctggacccggaccggttttggacctgcgaccgcatcaagcagtccgccagcggaaccaagcggcgcgtgttcatcatcgagaccatgggcgg

SEQ ID NO: 658280 - DNA, 50 bp, Homo sapiens
caggacaggtggcactctttcagaaaccaggaatggatctggcagacacc

SEQ ID NO: 658281 - DNA, 99 bp, Homo sapiens
aacaggactggctgatactacatattccagatgtggtattcatgggtagtttgaaatatccagatgagaatggatttgatgccttcctgaagaagcatg

SEQ ID NO: 658282 - DNA, 75 bp, Homo sapiens
ggatatctgtgataaagttggtcagtctcgcactgggagaacctccatttctaccagaatcctttgaccgaattc

SEQ ID NO: 658283 - DNA, 100 bp, Homo sapiens
gggtgctgagtgatcaagcaaggtacctgcaggacccatttgtgtccattgatctcttggagcagctggggatcatggcattgaagttgatatcgatgtg

SEQ ID NO: 658284 - DNA, 75 bp, Homo sapiens
cttaagctatcctcccgccttagcctcctgaatagctaggaccacagttctgtgcattccttggctcctggctgg

SEQ ID NO: 658285 - DNA, 100 bp, Homo sapiens
agaaaggatcaggactggcggggatggagccccccaaacagaaattatcaatgctcatacgaaggaaactcgctgggctctccctgaaggaagagagtga

SEQ ID NO: 658286 - DNA, 100 bp, Homo sapiens
tggcgagggggtcaccctagagtttgctcaggttcactaccttatggttctgtctgccaactgggcctatgtgaaagacgcctgccggatgcagaagtat

SEQ ID NO: 658287 - DNA, 50 bp, Homo sapiens
tgtggatgaatttgcttttctggaaggatcaaaatggtttcaatcccaga

SEQ ID NO: 658288 - DNA, 58 bp, Homo sapiens
caggaaccacagctgctcagaaggccagaatgtactcaagactgatcttctaagttca

SEQ ID NO: 658289 - DNA, 100 bp, Homo sapiens
gggaaactatgggagttcccaattaacaatgaagcaggctttacaggaagtatggtgctggcatctgcttggcttctagagagtcttacaatcgtggagg

SEQ ID NO: 658290 - DNA, 96 bp, Homo sapiens
cgcgccagagctgagcggagggcgcggcgcgagaacgaccgtataatagacgctggccccaaaggaaactactctcgatttatgaatcacagctgc

SEQ ID NO: 658291 - DNA, 75 bp, Homo sapiens
agaaggtcgtggagcagcaccttgcctgcaggtctgccatcatggatgttctcgcagaagcaaatggcacctttg

SEQ ID NO: 658292 - DNA, 50 bp, Homo sapiens
atggattacaggttgatgtgggaggaaagaccacagcaagattctttcat

SEQ ID NO: 658293 - DNA, 100 bp, Homo sapiens
cacaaccttccctgagagccatcttcggactcctcagatgccaccaacaactccatccagcagtttcttcaccaaggacattcagtcagaagaaggctgc

SEQ ID NO: 658294 - DNA, 83 bp, Homo sapiens
cccaagaagcactcagtgcccttactgctcgtctcagcaaggaggagactgtgctggcgaggcaagtgaggcctatctggttg

SEQ ID NO: 658295 - DNA, 100 bp, Homo sapiens
atccaaaggtgaatcttttggttggtgattttgatgatagccacaaagcaagcaggtactaaggctcgtacgtctgcatcgattatcttacgtggggcaa

SEQ ID NO: 658296 - DNA, 83 bp, Homo sapiens
caagccggggaccaagccggggactaaggcgagccggagaccgagcccgaacagcaggtgagaagccctaccactgcaactgg

SEQ ID NO: 658297 - DNA, 75 bp, Homo sapiens
ctgcacagagctcttgctgtggatggatttggtgctatggagaaatttttggtagaatataagagtgcagtggag

SEQ ID NO: 658298 - DNA, 100 bp, Homo sapiens
aaagatccccgttcctggagattctgattgaggtgcatctgcagacgcagcaggaggtgaagctgcgcatgacgggcatggcgctgcgggtggtgcgtac

SEQ ID NO: 658299 - DNA, 88 bp, Homo sapiens
gaaacgattctttgccttgccttatgtggaccattttctcaggactttgtgtcattgtatcaagattttgaaaacttttatacaagga

SEQ ID NO: 658300 - DNA, 100 bp, Homo sapiens
aggctgcaccaagtggcgaaggagccggctccaaggaagatgaagtcctcagtacattctgaagaagatgattttgttccagagctacatagaaatgtac

SEQ ID NO: 658301 - DNA, 96 bp, Homo sapiens
gtttgatgttgttgaaggagaaaaggtttgcagacaagccaggatgcacgcttttatgctctgtcggccagtttcgagcctttcagcaacaaaggc

SEQ ID NO: 658302 - DNA, 90 bp, Homo sapiens
accctgggagattactaccagggccggaggattaccatcaccggaagtgcttatgggcaacgttccagaccgggggggccgcccaaatga

SEQ ID NO: 658303 - DNA, 50 bp, Homo sapiens
caccaatgtgtgaagtgacaggcgtcaagctgcagtttcagctcaggcca

SEQ ID NO: 658304 - DNA, 100 bp, Homo sapiens
ccaagatgtcgcagacggccatgtccgaaacctacgtgcatttgcccagtataacatggatcagttcacgcctgtgaagatagaaggatatgaagatcag

SEQ ID NO: 658305 - DNA, 83 bp, Homo sapiens
ctcactgctagctgagcaaggttcgaaggaaggacctcagaaatgttctgccagcgcaaagcatgttggcagataaattgaac

SEQ ID NO: 658306 - DNA, 83 bp, Homo sapiens
ggatctagcgaaatatggctacagagagccctgctacgcgtcgggtccagacctaatctgggagcctgcaagtgacaacagcc

SEQ ID NO: 658307 - DNA, 100 bp, Homo sapiens
gaggagatgggcgatgagagcgaggagttcctgcaggagagaagtggatgggccctatacctccagccgtgaatgccagactttaagattgcccggagga

SEQ ID NO: 658308 - DNA, 75 bp, Homo sapiens
ccaacatgtggttcaagaaccttgacaagctcatccggctggtaaatgcgcagtgatgatgatgatgattttgat

SEQ ID NO: 658309 - DNA, 96 bp, Homo sapiens
cgtcaacaccaagtgcatcaccatccccagccgggaagatttccagaggattccagaacttgccatcaacccactgggggaccggatcatcaatgc

SEQ ID NO: 658310 - DNA, 82 bp, Homo sapiens
ctcggtgctgcagacggcgagacctcctgcacaggtcagtaacatcaaccagcccctggagattacagccatctcgtccccg

SEQ ID NO: 658311 - DNA, 100 bp, Homo sapiens
ggcccctgcggccgcaggtcgtcacagacgatgatggccaggccccggaggctaaggacggcaggttggtgacatcgtgaaagtcacaaggatgaatata

SEQ ID NO: 658312 - DNA, 83 bp, Homo sapiens
cagacggtgccccatagatggccagctttcccccgagggtcaacgagaaagagatcgtgctggctgaagatgcaatcaaggcc

SEQ ID NO: 658313 - DNA, 90 bp, Homo sapiens
aaaactgtatcaggttcctgtatgtccactggttttagccgagcagtacaaacacacaggacagtcattttgtttactcattcagccctg

SEQ ID NO: 658314 - DNA, 100 bp, Homo sapiens
atagacatcttcactaaagaaaacttaacagcacctggaaggagattatttggtagcaattgaagagaaaaacaaagctacatttctacgtgcttatgtg

SEQ ID NO: 658315 - DNA, 90 bp, Homo sapiens
aaactcttcaagttttagaaaagcataaagctgatgttgtaaaggatgtacagttacccagcacgtgtacctcctcctcctcctattgct

SEQ ID NO: 658316 - DNA, 100 bp, Homo sapiens
cagaactaaagaaagctttaaaagaaaaagaaaacagattattattgcaacaaagctcctgaaactctgatgagagccctggaacttttgaattacctgg

SEQ ID NO: 658317 - DNA, 74 bp, Homo sapiens
gaagtgcatccagatccgccggaagctgcgcatcgagaagcgccagcagggttggggtgctggaggactgcttc

SEQ ID NO: 658318 - DNA, 75 bp, Homo sapiens
cccagagagcgccctgagagaacagggtggccgcttggtccagaaccacatcactgccttcgcagaagtcacatg

SEQ ID NO: 658319 - DNA, 75 bp, Homo sapiens
ctctacagcaagggcaaccacgatggggctgtccagcaatatatccggtgacccgttgcctgcccgccaggaagg

SEQ ID NO: 658320 - DNA, 76 bp, Homo sapiens
gagcttcgtgaacatctagcacagaaaccagtatttctccccagccttatgccagcctggaccatcttggaggcag

SEQ ID NO: 658321 - DNA, 52 bp, Homo sapiens
gttgaaccagctgtgggagaaggcccagcgaatttaatccagagactgactt

SEQ ID NO: 658322 - DNA, 98 bp, Homo sapiens
acaacacagcccaaatccccctgtctgactgccttggatacaactgggaaagccgtctacactctcacctatggaccgtggcaaggaggtgtacagcc

SEQ ID NO: 658323 - DNA, 75 bp, Homo sapiens
cagtcagtctcttggtttggtctctaaaagtaaaggtccaagtggtaagaagttcagaagcaagcctcagttggc

SEQ ID NO: 658324 - DNA, 50 bp, Homo sapiens
cttggaccagacctacttggatgatggccataggaaaaggatacagagta

SEQ ID NO: 658325 - DNA, 100 bp, Homo sapiens
cttctggatgaggagggccacatcaaactcactggctttaaactccagagaacctcatatgtgtttagtaagagatatttcaaactgctgggcccccaaa

SEQ ID NO: 658326 - DNA, 80 bp, Homo sapiens
tggggccggcgatgtgccaccgaggctgaggatgatggtagattgccaggaaacggggtctctgggggatccagtgacgt

SEQ ID NO: 658327 - DNA, 75 bp, Homo sapiens
ccttagcccatctactggcattgtgggttccaaaaggtcccaggtgtcctctccgtgcagtcggaaaaagccccg

SEQ ID NO: 658328 - DNA, 83 bp, Homo sapiens
ctggaggatgcagtgaaagaaacttcctcagtaaagcgctaatgtaatgcttgaatatgatattgatgaagctcaggcattgt

SEQ ID NO: 658329 - DNA, 80 bp, Homo sapiens
gcagtgggaccgactggtgctcaacacgccctccttgaggagaatgaccagctgatccgctgtattgtggagtatcagaa

SEQ ID NO: 658330 - DNA, 98 bp, Homo sapiens
tgctgaccgagagagctcactcagccaggaaagtctttgggttcggaggattccagaaacatgaaggagaagttggaggacatggagagtgtcctcaa

SEQ ID NO: 658331 - DNA, 100 bp, Homo sapiens
cagtccacctccgaggcgctgtgctcaccagaagctgacgggtcgcctcatgctggccgtgggaggagcagtgcttggctccctgcagtttggctacaac

SEQ ID NO: 658332 - DNA, 83 bp, Homo sapiens
ctccggctccggcttctgctgttgctcttctccgccgcggcactgatccccacagtgatgtcttggcattgcccattttcaag

SEQ ID NO: 658333 - DNA, 116 bp, Homo sapiens
ccaggagtcatgagcgacagcggcgagcagaactacggcgagcggatttcagagacaactgtctgaaccctgccaccccttccctcctcagccaggagttcctggagataatcgcc

SEQ ID NO: 658334 - DNA, 83 bp, Homo sapiens
ctcagatcgacattactgctcatgcctaaccttctatgaggcagagatcaatcttcaggtggataatattaatgcagctgtga

SEQ ID NO: 658335 - DNA, 101 bp, Homo sapiens
ccggagctgggaatcgggagccgggcgcggggagctgcgcgaagccggggcggagcacgcgagctatgaattcctagaggacctgtgcaacaacctcttga

SEQ ID NO: 658336 - DNA, 80 bp, Homo sapiens
tctaccacaacaactgctacttcagttgcgcagacagtatcaacccgtgccccgcatcatggtgcagtcagccagcccgg

SEQ ID NO: 658337 - DNA, 100 bp, Homo sapiens
tggccgcgattttctgcaggccccacgagtgggaggtgctgagccgctcaggtcttaaagaaagtgcagaagagatggtcaaaaacaaattggaaggaaa

SEQ ID NO: 658338 - DNA, 100 bp, Homo sapiens
gaaatcgacacacaaagaatagagttgagcctgtgggacacttcggtttgtgaagaccatggtgctggtggtgctgacgtttgccatctgctggctgccc

SEQ ID NO: 658339 - DNA, 100 bp, Homo sapiens
gtttgcgacatcccagagagcttccagaggtaaaaaggaactccaggtctctctttttcaaacactggtgctgctaatgtttaatgagggagaggagttc

SEQ ID NO: 658340 - DNA, 100 bp, Homo sapiens
tccccagggcccacgggccagccccgccgccctcgcaacctggcagccgccgccgtggaagataccatggcctgggagaccatcctgatggatacactgg

SEQ ID NO: 658341 - DNA, 75 bp, Homo sapiens
agccgcggcggcagcagcagtgagagccttgaaaagatcttttgaggtcgaggaggtcgagacacccaactccac

SEQ ID NO: 658342 - DNA, 100 bp, Homo sapiens
tgcaatcttaaaagaaactgtgaagcaaattcgtcagatcaaagaacaagttttctgagtttaaccagtaatgccattcagttgccaatctcaagcaaag

SEQ ID NO: 658343 - DNA, 90 bp, Homo sapiens
tctagaagaaatatgttctttccagcaaatgctcgtacagtctttagaagaatgcaccaagctgtggaaaatctctgttctcacaaagtc

SEQ ID NO: 658344 - DNA, 83 bp, Homo sapiens
cttggactgagtcctgcaggacacagtatgttttgtgaaagcactttatgattatgagggccagacagatgatgagttatctt

SEQ ID NO: 658345 - DNA, 90 bp, Homo sapiens
ctggatggttaagaggaaggagacaaaagaatggtgtccagacttgccttcaaggtgtgcaagtaaggacttatctccagaaaagaacac

SEQ ID NO: 658346 - DNA, 100 bp, Homo sapiens
cttgaaacacaaatggtttttgcaattctgtggtgttcttggtcacacatttatggagtttctgaagggcagtggagattactgccaggcacagcacgac

SEQ ID NO: 658347 - DNA, 101 bp, Homo sapiens
cgaagacaccgactgtccctgcgtggtggtgtcctgccctcacaagtgcagcgtccagactctcctgaggagcgagctccaggcggacgacgtgggccgaa

SEQ ID NO: 658348 - DNA, 78 bp, Homo sapiens
ccagaaaagatacgaggctctaggagagggagatgcacttatttacatggaaccagagaaacaagtgatgtccaggtc

SEQ ID NO: 658349 - DNA, 82 bp, Homo sapiens
ctccgaccgcggccgggaggctcctgggggccggggctccgagatgagaacacagacattgctgaaaacctctatcagaaag

SEQ ID NO: 658350 - DNA, 75 bp, Homo sapiens
gcttaaaaccagaaatcgagaatccatttctctgctcatgcgcttgcacctttggggagttgaagacggtccgcc

SEQ ID NO: 658351 - DNA, 75 bp, Homo sapiens
aaaggcctaagaattttggcattggtctacttccccagcaggacagcatcattctcctatatcttctagacatca

SEQ ID NO: 658352 - DNA, 100 bp, Homo sapiens
attgctaaaagtctgacccctgatgttatcaatagtctggctgtctatcgtcatcgtgagactgactttggtgtaggagttcgagaccaccctggccaac

SEQ ID NO: 658353 - DNA, 50 bp, Homo sapiens
aaaacaattcaaagctcttaaggttgttcggaatcctataattgaaaaac

SEQ ID NO: 658354 - DNA, 73 bp, Homo sapiens
tgaactcttcagataatcagagtggaggaagtacagccagcatgggacaattgatgactgtgagttggtggaa

SEQ ID NO: 658355 - DNA, 82 bp, Homo sapiens
tgggatccggttccttggtgtcatccagccttagcaaaccagaggaattggcagcaatgaaacagattctcgttaagatgca

SEQ ID NO: 658356 - DNA, 100 bp, Homo sapiens
ggcgggtgttgtgagcgggaagatcccccaattattgaaggaaatatggaggcagcaagagcagtggacttaatcccatggatggagtatgaattccgcg

SEQ ID NO: 658357 - DNA, 82 bp, Homo sapiens
ttcagacgaaagagattgtacagaaactacaaggccacacagtgcccatgacgcttccggagacaaccctggaaacactgaa

SEQ ID NO: 658358 - DNA, 99 bp, Homo sapiens
agcgtgtggaagatccgagtgtggcacgacaacaaagggctcgctggtactccatggagatggctggcatcgtctgcttcacaggggccaacatcatca

SEQ ID NO: 658359 - DNA, 75 bp, Homo sapiens
caacgtggccatctgcctccagcaaatgccagatgttaatgtaagctgggatggagagggcccaaagcaactgcc

SEQ ID NO: 658360 - DNA, 101 bp, Homo sapiens
tgtgaagttagctccaaatcccagactagctgctaccccaagcccgggagcttctcagaagaccgtgatgataatcgtagcaatcagccccaaatacaaac

SEQ ID NO: 658361 - DNA, 100 bp, Homo sapiens
aattacttggagcaaagggcagtcggcggagcttcgccaaggctggcgcagtcggtttggtgcacctcgatttggaggaagtagggcagggcccttatct

SEQ ID NO: 658362 - DNA, 75 bp, Homo sapiens
aacaacagtgacggaatgcctccatacatcaagccagggctgagcaggaagaagaattcattagtaacactttat

SEQ ID NO: 658363 - DNA, 100 bp, Homo sapiens
tgacatccgaggtgcctttctccaaaagctcagccagacgtccaggatcccaccccttgcaaaagaccaggccgtggaagccatgttcccaccagccagg

SEQ ID NO: 658364 - DNA, 100 bp, Homo sapiens
cgttccggaggcccggccacctctgagaagggagacgacgctgctgggtccgctgagcggggcgacccgaggtcaccagtcatttatggctccttcttgt

SEQ ID NO: 658365 - DNA, 96 bp, Homo sapiens
atacactggacctgaaagttatgtggctcaaatgattgtgtattctacgcacctgcatctagcagatgattgtatgaagcacttcaagggctcggt

SEQ ID NO: 658366 - DNA, 75 bp, Homo sapiens
cagagccccacggcctcgctatggttacacaaggacaggctcaatctttctggcccaaactcaggaccgactgat

SEQ ID NO: 658367 - DNA, 75 bp, Homo sapiens
cagaggtcgtggaggtggccgtggaggcagaggtggcatgggggacagagcagaatgggctgatatagatccggt

SEQ ID NO: 658368 - DNA, 83 bp, Homo sapiens
tcatcgtttgtcagaagaaagcagctggctcagaaaacagacaatgcagatcttcgtgaagactctgactggtaagaccatca

SEQ ID NO: 658369 - DNA, 100 bp, Homo sapiens
aacaagaagaacgctctcatccggaggcaggaccagctgcagctgctcttcgccgacacgaggtgaccatctgcaattacgaagcatctgccaacccagc

SEQ ID NO: 658370 - DNA, 100 bp, Homo sapiens
ggtaaagttcctgcattaggaatttcctattgatgaacttggcttttgaccatatccacacctggaaacacagaggttatcaatactctggctgaccatc

SEQ ID NO: 658371 - DNA, 90 bp, Homo sapiens
ctcctatccctcacgatggaagtgctgtgacatgtatatggatgaatgaacagtgtagcagtatcatcacaggaggggaagacagacaaa

SEQ ID NO: 658372 - DNA, 75 bp, Homo sapiens
gcgaccgacggccgcctcacctgcccgctgtgccaatgctgtgggccctgagggaaaggatcacagaggcgctga

SEQ ID NO: 658373 - DNA, 98 bp, Homo sapiens
ctgtggtccggatccagagaaagcatgttggagacttgggcaatgtgactgctgacaaagatggtgtggccgatgtgtctattgaagattctgtgatc

SEQ ID NO: 658374 - DNA, 100 bp, Homo sapiens
caaaacgggtccatctgatgaatcctatggttccaggattaacaggcagcaaaatgagctcttcagaagaggaacagctggaggaaatggaagaacgcca

SEQ ID NO: 658375 - DNA, 75 bp, Homo sapiens
accgatgcttcaaatttaacagggctactacaaagttctgggaaagggaaagctcccaaagcagcctgtcatcgt

SEQ ID NO: 658376 - DNA, 100 bp, Homo sapiens
ggtttgtgtggatggggtcaacacttacaactgccgctgtcccccacaatggacaggtttgttatccaggcataagaccaagaaattatcttcagaaaag

SEQ ID NO: 658377 - DNA, 101 bp, Homo sapiens
ctgagcgtatgtgccacgccgcccaggagacccctctgctgcaccacttcatgatggaggtgcagcgccggccctggttagtgaagtacggggacagcggg

SEQ ID NO: 658378 - DNA, 100 bp, Homo sapiens
tcctgtggtgatttaatgttcctaatgaaatgttcctctgtgacgagggtgcaggtatctctggggactacatcgatcgcgtggacgagcccttgtcctg

SEQ ID NO: 658379 - DNA, 96 bp, Homo sapiens
ggaaaaactggagagcttcatcaaaaatagtgatagctttgataacttggatttacactgggcaacgtggttggaatgtatctggctcagaactat

SEQ ID NO: 658380 - DNA, 100 bp, Homo sapiens
ctagtgttttcttatttagccggagtgagaagcaagaaggccctggacacagcaatatctctgggctttcacaggtgccagcgagatttcagattcctgt

SEQ ID NO: 658381 - DNA, 98 bp, Homo sapiens
catcttccctgtgggctggtgttccttgactggagacaacctgcagcctcctggcaccaaaggtatgagggtgctggttgatgctcgagagaagcttc

SEQ ID NO: 658382 - DNA, 90 bp, Homo sapiens
gtccagaaagcggcttatcgaacagagccgggagttcaagaagaacactccagaggaatgtatcctgtcaggtataatgtcagtgaatgg

SEQ ID NO: 658383 - DNA, 82 bp, Homo sapiens
tttatgaaccagtgtatcccaaggtgaggatccacgacctccgcagtggtaacatcgccctgtcgctctccgcccatcagct

SEQ ID NO: 658384 - DNA, 86 bp, Homo sapiens
acctacccattggtctaaacttgatccaaagacaatgaagaggtgtgttgcagtcactcattgaaaaacattttcctgctccagac

SEQ ID NO: 658385 - DNA, 98 bp, Homo sapiens
aaggaaactgatgaacaccaatgatctggaggagtccaggcagctcacggaggagatccagcggcatctggatgaacattaatcctgatgttcttttt

SEQ ID NO: 658386 - DNA, 90 bp, Homo sapiens
cgccggccagctgctcttcgccaacttcaaccaggacaacacgtggacggcctgttcatcatcgggtggatgtacctgcctccccatgac

SEQ ID NO: 658387 - DNA, 50 bp, Homo sapiens
tcccagggatattctgtgctgaacaggaggtgaggttccgccctgcacac

SEQ ID NO: 658388 - DNA, 82 bp, Homo sapiens
agatcctcaagaagaagaagttgcgaaggatccccaacggggaggccaacgtgaagaaaaaaagagccgggaggagtctagt

SEQ ID NO: 658389 - DNA, 109 bp, Homo sapiens
ggccaacctgctgctggaggaggataacaagttttgtgcagattgccagtctaaaggcaagaaactatattcagtctttgactcagatgccgaagatgaactttgcgaa

SEQ ID NO: 658390 - DNA, 82 bp, Homo sapiens
cccgagcattgtgggcctcatcatcttcctcctgtgcaccctcttcatcagtgattcatcagaaagtggcatgctgtcccgc

SEQ ID NO: 658391 - DNA, 75 bp, Homo sapiens
tgagagccagccctgacgtgaactcattttatctgccacgacccagaagcaaaagctggcaggctgacagaggcg

SEQ ID NO: 658392 - DNA, 75 bp, Homo sapiens
gggagcctgaaaactgtgaatgggacctaatacctatcattgctgctctggaatataatcagtggttcacaaaac

SEQ ID NO: 658393 - DNA, 100 bp, Homo sapiens
ctgcccaagcgacagctgtcagaggggcaggagcttctgggagccaccgtctgaaggctttacaggaagtatggtgctggcatctgcttggcttctagag

SEQ ID NO: 658394 - DNA, 100 bp, Homo sapiens
aggaagtcagactcccgaaccattgctccaaatatccgttgaagcaggactgcaagatggaggaaggcgggaacctaggaggcctgattaagatggtcca

SEQ ID NO: 658395 - DNA, 97 bp, Homo sapiens
cgaaacctagccccggacgagaagcgcagcaacgtgcggtgggaccacgagagctccaccacaaattaaagatgaacctgaagatgatggctatttt

SEQ ID NO: 658396 - DNA, 80 bp, Homo sapiens
actttcactgccatcggggacaaggtccatgagctgattccagctgtgatgacctgcatcgtgagcagacagttgtgcct

SEQ ID NO: 658397 - DNA, 50 bp, Homo sapiens
tgggcagccagggtcggtgaaggtgccaagtctagtggtggcagggaaga

SEQ ID NO: 658398 - DNA, 100 bp, Homo sapiens
cttaccttcaacagactcaagaactggttatacttgaaaccataatgctacaaactctaggtgggaccagggagattggatctgctctcaccaggatgtg

SEQ ID NO: 658399 - DNA, 98 bp, Homo sapiens
ttttgattaacaccttaataaccagcggagctgacacagccaattctcacaataccttcatgaaaatgcgtcctatgtccgccctcttgaggaaggaa

SEQ ID NO: 658400 - DNA, 83 bp, Homo sapiens
gcgcatgatggcctactgcgaccagatcttccaggacgagacgggcaagaaccgataacgaaggaggcccaacttcattcaat

SEQ ID NO: 658401 - DNA, 75 bp, Homo sapiens
tgacctcgctgtacgccgagcacccaggcgactgcctcatcttcaagcatcctgaggttagcattacacttctcc

SEQ ID NO: 658402 - DNA, 100 bp, Homo sapiens
acttatgacgtctggaacacttaaaacgtatgatctcgtgaaaccttgagagaaactgaatgacgaatgaaactattgttcctgtttcacacagaagaaa

SEQ ID NO: 658403 - DNA, 101 bp, Homo sapiens
cgcccagcctgcacgtcgacgacagcctgcggtggaagcacacctcctccctgaaggtggccaacgagcccgtcttagccttcacgcagggcagccctgag

SEQ ID NO: 658404 - DNA, 90 bp, Homo sapiens
cggctcggggacccacagacacagccggggtcgggagccgcccggggcagggctcgggagagcggagcatgtctgttcgatcctggcttc

SEQ ID NO: 658405 - DNA, 83 bp, Homo sapiens
tggacggcgagcgcgagcggcgcgagaaagaatgcagtttattctactccaagagattctgcctcccttgtgtccgggagaac

SEQ ID NO: 658406 - DNA, 75 bp, Homo sapiens
ttctcgacctgctaacagaactggaccttttcggtataccttgttagtgggcaaaccaccttttgagacttcttg

SEQ ID NO: 658407 - DNA, 75 bp, Homo sapiens
gaagttcacctcaagttctctgccaaggtttctgtggacgctgcccatggttacagtccccgggccattgacatg

SEQ ID NO: 658408 - DNA, 83 bp, Homo sapiens
gcatccccgaggaggaagacgaatcgttaaacatctgaaagggtcagatcacttatgtgaaaggagacctttttgcatgcccg

SEQ ID NO: 658409 - DNA, 83 bp, Homo sapiens
gtacgcgcaggaggccgtcaagaagggctcgaccgcggaatggtcctcgtccgaagtgagaatgggcagttgttaatgattcc

SEQ ID NO: 658410 - DNA, 100 bp, Homo sapiens
caattaagagagctcaaataatggcttgtagaccctggagttaaggcatggacacccactaaaggaaaacaaaatgtgattatgtttgttggattgcaag

SEQ ID NO: 658411 - DNA, 111 bp, Homo sapiens
accctggccactgacatgggtactatgcaggaaagaattaccactaccaagaagggatctatcacctctgtacagattctggggagcaggtcctggtggatgtggagacca

SEQ ID NO: 658412 - DNA, 100 bp, Homo sapiens
caggatccgagcgttctgcacaccgaggaaatgcgcttcctgagggagtgggtggagagagccccccaagatgaacccagtggtggagccactgtcctgg

SEQ ID NO: 658413 - DNA, 98 bp, Homo sapiens
ctggcatcaccatctacatcaggtcagctgtctcagtttggggcaagtttatacgggcaacaaaatgatgtgcgaggtgatgccgaccatcagcgaag

SEQ ID NO: 658414 - DNA, 76 bp, Homo sapiens
catctctacttccatccctgtaatttcacagccccaggtaagaatgattgatgttggctgatattggagtgctcat

SEQ ID NO: 658415 - DNA, 75 bp, Homo sapiens
ggtgacaagctgcgcacctggaaagttacccggctgtctggtggattctccacagttttcctcgtgcgtactcac

SEQ ID NO: 658416 - DNA, 87 bp, Homo sapiens
ctggtgggagggacagatcaacggcaggagaggtttgttccctgacaactttgtaagaattatatctgggtgttggcacccagccac

SEQ ID NO: 658417 - DNA, 75 bp, Homo sapiens
gctgcagaccctcgggatcgtcgctggtggacaacgcgtactggctgtggactttccagggacgcctcctgcaga

SEQ ID NO: 658418 - DNA, 82 bp, Homo sapiens
cggggatgcgcctgcgcaacaagttcggcggggaagatggcggatgacaaggtcaatgtgacggtggactacattagaccag

SEQ ID NO: 658419 - DNA, 74 bp, Homo sapiens
ttgaatgtgaacatggttttggaagagttgtctgcaaagtgcctctggatgttcctcctgctgatcaagagaag

SEQ ID NO: 658420 - DNA, 100 bp, Homo sapiens
ctccagtcgacactctcgcgcccggaggatgacagtgccgatttgaggtgccagctccagtttgccaaagaggaagccttcctgatgcgcaaaaagatgg

SEQ ID NO: 658421 - DNA, 90 bp, Homo sapiens
aagccttcctttatcgctttcaggacttcgcaggtgagcagtaacggaaatcagccccgtttattcctcccagcacctgccttatccaac

SEQ ID NO: 658422 - DNA, 73 bp, Homo sapiens
gacagcccccagacctggagaggatccgcacacttctggagcctaacaggacgtattatctgatggaccccag

SEQ ID NO: 658423 - DNA, 80 bp, Homo sapiens
cttcaactacaagggcaagaacgtgctgatcaacaaggacatccgttgcaaggatgaccaactcttggatgatggcaaga

SEQ ID NO: 658424 - DNA, 50 bp, Homo sapiens
ccactgcgggccggcgaaagctgcccatggcgaattgtggatgattgcgg

SEQ ID NO: 658425 - DNA, 90 bp, Homo sapiens
ctcctgtcttcccagtcaacagccatcaatacagtgtgtggagctccggactttgagaatcactacaagaaaaactccttgtggtgaagg

SEQ ID NO: 658426 - DNA, 75 bp, Homo sapiens
tattaactgcctttcttctgtgggctgtgattttcagaggggaatgctaagaggcataatcaccagcaacacccg

SEQ ID NO: 658427 - DNA, 100 bp, Homo sapiens
caagcaagtgcctcaaaagctggaacagtgcatggccagcaagcactatctcagtgccactgacatgttgactgctgtggatgtttttcgaaggataatt

SEQ ID NO: 658428 - DNA, 100 bp, Homo sapiens
tttctctcgatgaggataacatccctccagaagatgtgggctcgggatgagtttgaaggcctcttcaagcagccagcagaaaatgtcaaccagtacctca

SEQ ID NO: 658429 - DNA, 100 bp, Homo sapiens
ggagaagcactgttgttttccacacagaatcttgacaaaacttttggaagtgtcagatgatccccaagtcttagctgttgctgctcacgatgttggagaa

SEQ ID NO: 658430 - DNA, 82 bp, Homo sapiens
cccagtgacgggtctggagtgcgtgggggaccggctgttggcgggtcctcagaatggttggaatgaccctccagctttgaac

SEQ ID NO: 658431 - DNA, 80 bp, Homo sapiens
gccatggctcagaaaatggactgtggtgcgggcctcctcggcttccagctgtgctgactccttagttgctgagatgagct

SEQ ID NO: 658432 - DNA, 75 bp, Homo sapiens
gcaaggtcgccctcaaggccatgatcaaaacgtctccgatgatgacctcgacccatcctttactgtctcaaccag

SEQ ID NO: 658433 - DNA, 83 bp, Homo sapiens
ctatgcctttcagcgaattcacaacagtaactatggccaagatcaatcctccatgagtagtggtggtggcagtggtggcggtt

SEQ ID NO: 658434 - DNA, 51 bp, Homo sapiens
cccgaagagcttctgtcgccgctctaggatatttgaatggtggtacttcca

SEQ ID NO: 658435 - DNA, 90 bp, Homo sapiens
aacggaaagcaggggtggatcctctggtaccgctgcgaagcttgacaatacacattccaactatggagaatggtcctaagctggcaagcc

SEQ ID NO: 658436 - DNA, 100 bp, Homo sapiens
caaacggcaagatgtccagtaatgtcccggcggatatggtggtgaagaaggtgaagtccatgcagatgttccacatgcccatcacttcagccatgcaagg

SEQ ID NO: 658437 - DNA, 50 bp, Homo sapiens
gtttgttccctgacaactttgtaagacttttcggagactgggaagcccaa

SEQ ID NO: 658438 - DNA, 74 bp, Homo sapiens
tcggagattggctgcctcatccgcttctatgcagtggaagatagatgataagcctgtaaaaattgacaagtggg

SEQ ID NO: 658439 - DNA, 90 bp, Homo sapiens
ggatttcattccgcggcgggggctccgcgagcggaattccggcggctgccgtgactccagtgcaataattcgccaaaatgacgaacacaa

SEQ ID NO: 658440 - DNA, 96 bp, Homo sapiens
tgaaatacatccaggaaagacatggagattctcttaaaaagggcaaaataacatggcagccagacgaattacacaggagacttttgatgctgtatt

SEQ ID NO: 658441 - DNA, 74 bp, Homo sapiens
aacaagatgttgtcctgtgctggggctgacagcgggacctggacttcaccatcgacctggacttcaagggccag

SEQ ID NO: 658442 - DNA, 82 bp, Homo sapiens
tccgagaggaacctctatgccgacatcgacgccgcctggcaggccctgcgcaccaggcttcttccccgggagctcgcagggc

SEQ ID NO: 658443 - DNA, 100 bp, Homo sapiens
cagtgttttgggcatgcacgtgatactcacacagtggcttctgctcaccaacagatgaagacagatgcaccaacgaggtgctatacttggtagatcagaa

SEQ ID NO: 658444 - DNA, 100 bp, Homo sapiens
aagaaagctatctagggacgagatctagaatcaactgagagagatgcttaaaaatcaccagttactttaatgaggagtcgtcgcatggtggatgtcatgg

SEQ ID NO: 658445 - DNA, 75 bp, Homo sapiens
gccgacggcctgtccggcactgctgaaggaaattcagttcatgaagataagaagtttcttgacaaatacatgccc

SEQ ID NO: 658446 - DNA, 100 bp, Homo sapiens
cattcgagggcagccggcgggaggaacgctcactgtcagcgcctggaaacttgctcacgtaaaaaagagtgtcaagtggacatgcaaagcttgtggagag

SEQ ID NO: 658447 - DNA, 100 bp, Homo sapiens
ccagtggctgtcgagaagacatcaggaggaggaagacccaaggagaacaaggggaacagaaccaaccaggctttacagggtgaacacggccaaaggattg

SEQ ID NO: 658448 - DNA, 98 bp, Homo sapiens
gcatcccggtcaacacgcggtacctgaacctgcaagagaacggcatccagaatgggttctgggtgggtcccctgggtggtggctctgctagtgaatct

SEQ ID NO: 658449 - DNA, 75 bp, Homo sapiens
ggactttccttacctgtttttccagctcacccactgccagcagagggtttccctagccagcagagcttacatcaa

SEQ ID NO: 658450 - DNA, 100 bp, Homo sapiens
agctgttctgcaggatcccatgagaagtgagcatttgtcctgtgctttcacattctttctgcatggagaaagtaatgtatgcacaagtgtggagattgcc

SEQ ID NO: 658451 - DNA, 98 bp, Homo sapiens
acaaggaccggagctggatccgcggtgcggctgtggtcatcagtgagttctgcctcagtcagctcccaagtgaggacgcagtcacctttgaagactcc

SEQ ID NO: 658452 - DNA, 83 bp, Homo sapiens
aaattcaccagtgaagccgtgacatcctgggatattctttgttgagagatgaccttcctgaacttcaggcagttcaaagtgat

SEQ ID NO: 658453 - DNA, 121 bp, Homo sapiens
actcggacacagaggacagcggcagcgacgagaacctggatcagggattaaagcctgtggtttccacagaagcaccacctatcatatttgccacaccaactaaactgacctccgattccac

SEQ ID NO: 658454 - DNA, 100 bp, Homo sapiens
aacagtcgcttgaacagattggcacccgaattgccaaagttttggaaaaggtgccaatgggtcatgtttggttagaaggtgacaatctacagaattctac

SEQ ID NO: 658455 - DNA, 101 bp, Homo sapiens
cctctaccttgcgagccgtcttccccaggcctgcgtccgagtctccgccgctgcgggcccgctccgacgcggaagaatataacaccagcaatcctgacttg

SEQ ID NO: 658456 - DNA, 83 bp, Homo sapiens
gggcgagggcacaaaataaccacttaccccttctcaccgaggaagagcgggagaaaggatgggcttcgacggcttcttctttg

SEQ ID NO: 658457 - DNA, 82 bp, Homo sapiens
aaagataggcggccatggtccaaccttgaagacacaaatgccagaccctaagaccttcaagcagcactttgagagcaagcat

SEQ ID NO: 658458 - DNA, 50 bp, Homo sapiens
aattatgggtacccctgaatatgtgggacttaaccaccaccatgtcgagc

SEQ ID NO: 658459 - DNA, 100 bp, Homo sapiens
cagaaaacagggaatatactgctgaaataatgtttgagtccttcaatgttccaggcttgtacattgctgtgcaggaaagtcatctcccaaaactcattac

SEQ ID NO: 658460 - DNA, 90 bp, Homo sapiens
attacgaaagtgctcccccatccccacagtataaaaaggcatcagcaggactcagacctctcagcagcgtgctctgacgctgacctccac

SEQ ID NO: 658461 - DNA, 90 bp, Homo sapiens
cagcaagttgtggaacttctacaggaacggttctttaggtgctgggaatgtagccgatcgtgttttggctcagctcttaacagaaatgga

SEQ ID NO: 658462 - DNA, 100 bp, Homo sapiens
ctcaggttgtggtagaggcggaggctcaggcagcttgaggatgatcacggacgtgcagctcgccatcttcgccaacatgctgggcgtgtcgctcttcttg

SEQ ID NO: 658463 - DNA, 87 bp, Homo sapiens
acaaatgctagaagctatcaaagcccttgaagtcagctctttcaccatgcctggatcacttcctttgaatgcagaagcttgctggcc

SEQ ID NO: 658464 - DNA, 74 bp, Homo sapiens
tctcccgccgaaagaagatttcagccaagacactgacagatgaggtggaacgtgtgatcaccattatgcagaat

SEQ ID NO: 658465 - DNA, 83 bp, Homo sapiens
ctctgggcgaaaattggatgtgaaaatgaagccagaccgaggatgccttccgcgccttccaccctgacctggaattcgtgggc

SEQ ID NO: 658466 - DNA, 99 bp, Homo sapiens
ctgcatgtactgggggattcgcagggaggatgtcgggacaccccggaagctgggaaatgaatgattacggacctgaagccaaagaacaagatgcgctag

SEQ ID NO: 658467 - DNA, 82 bp, Homo sapiens
aggagtcggaggagccgcgggcggcgcggcccagctcgttccagctttagccagggccctctgaaggatgcacccaacctca

SEQ ID NO: 658468 - DNA, 100 bp, Homo sapiens
ccacatgagaactacctacatatacagaagtgctctctttaatctgttacaagcatgacttctattaaacctataggagcaatttacagcaatgagggat

SEQ ID NO: 658469 - DNA, 90 bp, Homo sapiens
gaagccggtggtgggcgaagtgtacgatcaaggccctgctgctcctgggggccgccgccctggcctgcctcgccctggacctcctcttcc

SEQ ID NO: 658470 - DNA, 75 bp, Homo sapiens
agctctgaaatagaagatcttgcaagggccaagtcctgtatctgccatgtctgtggcgtccacctcaacaggctg

SEQ ID NO: 658471 - DNA, 74 bp, Homo sapiens
gaactacctgtaaattatgtgaaacctccaaatgtgggctactgcagcactggggtgtcagttgttggtccgac

SEQ ID NO: 658472 - DNA, 100 bp, Homo sapiens
agagacgtcatacttggaaatggctgcaggttcagaaatggtcctagtgccagatcgtgtcataaaatgtgcattgatattcaacggaggcaaatctaca

SEQ ID NO: 658473 - DNA, 100 bp, Homo sapiens
attgagcctcaaaatgaagatggcacatggcccaggcagaccttgcagtcaaatgtattctggaggtcgaatggtcacatatgaacatctccgagaggtt

SEQ ID NO: 658474 - DNA, 75 bp, Homo sapiens
tacagaaagagtcaacagcagtggcaacagcaaccctgatctccggagaactgagcccatcttggagagcccctt

SEQ ID NO: 658475 - DNA, 74 bp, Homo sapiens
tccctctccctgcagtccaccacagatgccacagcagtactcaggactccgaatattgaccgccttgcagagga

SEQ ID NO: 658476 - DNA, 100 bp, Homo sapiens
tctacaaggaggtgaaggacaagctcctacaaggcaggcagtattgggtgcagttgaggagctcaagcttgggaaaatggtgtgcattccttgtatcgtc

SEQ ID NO: 658477 - DNA, 78 bp, Homo sapiens
tcagtctacggctggggccgtcccagttcgcaatgagaaagctcagcaaagacccaaatatcgtcatagccaagatgg

SEQ ID NO: 658478 - DNA, 100 bp, Homo sapiens
agtaagctccgccgccccctaaagcggaaccggatcaccgagggcatttacggcagtattcttgccatgagaaaaagaatgtgataagttattcaactta

SEQ ID NO: 658479 - DNA, 102 bp, Homo sapiens
gtccgaaacaactaccagtttggttcttgaaagatatttctctatgaatcatcatcaagaactctgggagaacttttgaattcataaccaagccaacatctc

SEQ ID NO: 658480 - DNA, 99 bp, Homo sapiens
ctgcgacagaaggaagtagacttctgcatctcactgcttcgggaacgggtcgggactgcccaaactcagggcaggcctctccgtgtgcatcggagcaga

SEQ ID NO: 658481 - DNA, 100 bp, Homo sapiens
cctcaacttcttgtcctcaagtgatcctcccaccttagcctcctaagtagctgggaccacaggaccatctaaagcaccaagtttctggtataaaatagat

SEQ ID NO: 658482 - DNA, 90 bp, Homo sapiens
ctttcctgcttttggtttccctggcaggggttgaactgtggagtgtgtggatggcccactgcgtgaccttggttcagctgtccatttcct

SEQ ID NO: 658483 - DNA, 98 bp, Homo sapiens
tccgcgccgcggccgttagtcatgtcggttttttgctccactcaagcctgttagaatcaccatggaatacagctccagtgggaaggccactggagaag

SEQ ID NO: 658484 - DNA, 97 bp, Homo sapiens
cttcggagtgcttatgccaagaggaacagcagtgtaaatgactcaggtatgtcaagagccccaccttcctcgggggcacctccagcctcaacagcac

SEQ ID NO: 658485 - DNA, 100 bp, Homo sapiens
catcatcacatgaccaaagcattcctcttctatgaatttcagaaactgtggaggagtgtcactgtagattccatggacgaggagaaaattgaagaatatc

SEQ ID NO: 658486 - DNA, 89 bp, Homo sapiens
ctcaccgaccgctcgctctggctggccagctgctactgccgtgccctgcaggctgtcacgtacagcaaaccagtccagctacgggggcc

SEQ ID NO: 658487 - DNA, 90 bp, Homo sapiens
cagaaacccgagccggtgcagtacacacactggaacacacaccagccgcatgcctgggaaccactcacctccttctgtgccatgaggcca

SEQ ID NO: 658488 - DNA, 75 bp, Homo sapiens
tcggatagacaataccacaacaacacattttgcagaggcatttgtaaaggatgttcatgaagattcaataacagt

SEQ ID NO: 658489 - DNA, 100 bp, Homo sapiens
ccctgaagaaaccgaagcagaatgtaccagggacacatgcagcaaaagctgatgaagcattgaaagccaaagaaagaaatgaggaagaagcaaagagaag

SEQ ID NO: 658490 - DNA, 85 bp, Homo sapiens
acagcccgagaaaccgcagcactacactctatcaggtgtttgaaagtgtggctaagaagtatgatgtgatgaatgatatgatgag

SEQ ID NO: 658491 - DNA, 50 bp, Homo sapiens
caaactaagccgattttccggaaaaaggtatttattacagtatcaggagc

SEQ ID NO: 658492 - DNA, 98 bp, Homo sapiens
tgtggtcggaagatgaggaatgaggtggtccataaagtgagctttgtcacccgaaagaaccgccaagtgtgtgccaacccagagaagaaatgggttcg

SEQ ID NO: 658493 - DNA, 100 bp, Homo sapiens
ttcaggaaaactcgtgtccatcaaaatccagatgctggatgacacccaggaggcatttgaagttccagtccttatgtcgtcagaagatcgagaagctcag

SEQ ID NO: 658494 - DNA, 100 bp, Homo sapiens
ttaaaactgaagattgtcatgattgtttatcctaatcccaatgctgaagtaagattgtcttggaaatactaagttgggattttgtgaaaatggaaaatta

SEQ ID NO: 658495 - DNA, 99 bp, Homo sapiens
gtcctggacatcatggtcactaagcccaaccgggaacggcagaagctgatgagggagcagaacatcctcaaacaggtggacgccctgcttcatctggcc

SEQ ID NO: 658496 - DNA, 100 bp, Homo sapiens
tacgtcgccatcttggatccgcgggacaagaaaattcatgcggcatcattcttaacaaagaagttaaatattggtgggaaaagagtaaaccttgccatat

SEQ ID NO: 658497 - DNA, 83 bp, Homo sapiens
gcgtgaggccggcatcgtctttccgtcctctgaggcgacggccgcggctgcacaggccttccagcaggaaatttcactgaacc

SEQ ID NO: 658498 - DNA, 73 bp, Homo sapiens
agaatcctatagaccagtgtaataccctgaatcccagttcacatgagactctgaatatagtggaggagaagaa

SEQ ID NO: 658499 - DNA, 100 bp, Homo sapiens
ctttcttatcgccagcaggcggccaatctgcttcaggacatggggcagcgtcttaacgtgaaacatgacagctgccctacaggcagctctgaagaacccc

SEQ ID NO: 658500 - DNA, 75 bp, Homo sapiens
gaggaaagcaggaggaggtggcggcggcgggaagattcttcccgaggctgctgtccatgacactgagtccagatc

SEQ ID NO: 658501 - DNA, 75 bp, Homo sapiens
ttcaggaaaggattttgcacttgtgcagaccgggcgagcagagtaagaagcaggaagaaatgttggctatttggc

SEQ ID NO: 658502 - DNA, 100 bp, Homo sapiens
tgcccagccgggaactccccatcgcgttttgccagcgataatacgcctcagcagcagcagttgcaagctcagcatctttctcatggccacggacccccag

SEQ ID NO: 658503 - DNA, 75 bp, Homo sapiens
ggcctctggaatttagcgctcgcccagctagccgcagacctgcctagagctggaacgttacctccagagcgagcc

SEQ ID NO: 658504 - DNA, 97 bp, Homo sapiens
agcccttccacggcgatatccagtgcggcggccacgcgccggtgcgggagatggaggcagagctggaggacgagaggaagcagcgctcgatggcagt

SEQ ID NO: 658505 - DNA, 101 bp, Homo sapiens
ggggttcgggtgtctcgtgtgtgaacatcacagagccataagtgtgatccttggtgacaggtggaagaaaatgaagaatgaagagagaagaatgtacacat

SEQ ID NO: 658506 - DNA, 100 bp, Homo sapiens
tgaagtgtgtgactgtggcaccgtgtgtgagactcggacagaattacaccgagtggctgcaggatctcaaagagaaaggccccacgctgctgaagcaccc

SEQ ID NO: 658507 - DNA, 101 bp, Homo sapiens
aaaggatctaagaatcaaaacttcgattttgaagatgtaactgagtttctggaagaggtcattgaagccttgatattggatgaggaagttagaacatttcc

SEQ ID NO: 658508 - DNA, 100 bp, Homo sapiens
ctagcttatactctacttaataaactgacaagtaagaatgaacctctacttaaacctggagacagattgttcacagggcttagagctcctgccagagggc

SEQ ID NO: 658509 - DNA, 100 bp, Homo sapiens
attcaccatgtacacagcctgtacccttctgctcctttcctggcagcaggggtttcaatgggagggaaaacggacgatgtattactaagctggaaaacat

SEQ ID NO: 658510 - DNA, 80 bp, Homo sapiens
acgagggttcccgggattggaccgacgcagccatgatgacagtcatgtccctttccagggacctcaaggacgactttcac

SEQ ID NO: 658511 - DNA, 75 bp, Homo sapiens
atcgtgaaggacgccagcatcatacaccggctgttcgaggccttgactgtaggtgatgtgtccaatctagatccc

SEQ ID NO: 658512 - DNA, 50 bp, Homo sapiens
tccagatgttcctgtggaccccagtccagtgcccttgctaccagttccga

SEQ ID NO: 658513 - DNA, 100 bp, Homo sapiens
tggactttgatggtttccaatcattactttctcctctgtgtcaatctgcctcttcgagaaattcatactcctgggaagtggaaaatcaactttagccaaa

SEQ ID NO: 658514 - DNA, 76 bp, Homo sapiens
tataaaagcacagttttaagagagcactggcttctctggactttgcacacctccaggagaagaacccagaaaattg

SEQ ID NO: 658515 - DNA, 74 bp, Homo sapiens
cagcagatgaatggacaccttgaagcagaggagcagcaggaccagcctgaaaagcatcattggaattggagttg

SEQ ID NO: 658516 - DNA, 75 bp, Homo sapiens
aggtgctcaaaacgcccgtgcggaccacggcctgtcagcacgtgccaagaagcttgagagaagaaaaatttcaga

SEQ ID NO: 658517 - DNA, 90 bp, Homo sapiens
gcgcgcgctgtggtgcagccgccgcgacggcggcctccagctccgacccgaggattccacagatgttggtgaggaggacagcttccttgg

SEQ ID NO: 658518 - DNA, 95 bp, Homo sapiens
caagaacagaaatacaaatggagaactggtcaaaagatctacggaatccagaggcagcattgtctccaaccttccgtagtgacagcccagtgcct

SEQ ID NO: 658519 - DNA, 80 bp, Homo sapiens
atggttgcagaggagacagtgataccttgggagcgctacatgatctagccaacagcaatcatcctcttccagtggtagcg

SEQ ID NO: 658520 - DNA, 76 bp, Homo sapiens
agcagaagaaacacttcctataaatctcgcccaaacaggaaaggaggaagttaagtcttcagagcctactgaggat

SEQ ID NO: 658521 - DNA, 100 bp, Homo sapiens
cagtctgctgtagagtgtatcgcagtgttggctttcaaattctgcctccaatacacgcgtaaggctgaattccgtaaactgtgtgacaatttgagaatgc

SEQ ID NO: 658522 - DNA, 115 bp, Homo sapiens
cctgaccgctgccctcgccgcccgccgggcgctctcgcttcagtcagtcgggccgcgccgcgcctcagctctggtactccaaagattcaggtttactcacgtcatccagcagaga

SEQ ID NO: 658523 - DNA, 80 bp, Homo sapiens
agcagtgtcctgtgctgatggtgttggcaggttagtggatgacagatgtgtggtgcacccagaggccggggaccttgcca

SEQ ID NO: 658524 - DNA, 83 bp, Homo sapiens
gccgctcgtcagactccagcagccaagatggtgaagcagatcgagagcaaggctatggaaagggcaaatggaatggagctgga

SEQ ID NO: 658525 - DNA, 83 bp, Homo sapiens
ccaccgcactgtcgctgcccgcctgccctgaggagtccccgctgcttggtgtcgtgaaaactacccctaaaagccaaaatggg

SEQ ID NO: 658526 - DNA, 82 bp, Homo sapiens
ctgctttctgatgtcataactcattcctggatacagctgggtcaacaagcttaggagtagacttgccttcaaggtgtgcaag

SEQ ID NO: 658527 - DNA, 83 bp, Homo sapiens
cagaaggtctctggagacatcttcagcagcacccaccaaggctccggatgtgttccccatcatatcagggtgcagacacccaa

SEQ ID NO: 658528 - DNA, 99 bp, Homo sapiens
gctggcagaacggcgcgactgcaaagattacgtgagcatcttcgtctgcagtgattggcagctcctgcggaagaagaagatggtggtcttgaagccttc

SEQ ID NO: 658529 - DNA, 90 bp, Homo sapiens
agttcctgctgctgcccaggtgcatctgaactgctgagaaggaagaatttgaacatcaacagaaagagctggagaaagtttgcaacccca

SEQ ID NO: 658530 - DNA, 98 bp, Homo sapiens
actgaagaagataacaatcaagatgaatatgaccctatggaagcagaagaagctgaggatgaagaagatgaccgatttgggatgttgcccctggatga

SEQ ID NO: 658531 - DNA, 83 bp, Homo sapiens
aatggatgatgaagagagtggagcttcacaaggtcaagaaatccctgaggagggacgggaagtagaggaattttcagaggacg

SEQ ID NO: 658532 - DNA, 96 bp, Homo sapiens
gccaaagctacatgaaacagttgatgccactagtgaaactcacatctaccagatttacaagggtcccgactcttccttccggtattccagccttca

SEQ ID NO: 658533 - DNA, 51 bp, Homo sapiens
gtaaaaattgtcagtaagggaagagatggtgtcaacgagtactaccaagag

SEQ ID NO: 658534 - DNA, 97 bp, Homo sapiens
ggagaataactcatcagaatcatcttttgcagattcttctgtagtttcaggagacattcccttacaccttaatataagggaagcttcagatacaggc

SEQ ID NO: 658535 - DNA, 51 bp, Homo sapiens
ggaagaaagaggagcggcagagcctgctggccgatacggaagatgtgtgca

SEQ ID NO: 658536 - DNA, 82 bp, Homo sapiens
cagaaaagcaggggtgtcgtcatgctcaacagagtgatggagaaaggttcggagtaaaagtccctcgcaatttccgactgtt

SEQ ID NO: 658537 - DNA, 99 bp, Homo sapiens
tggagccggagctgggcgcggattcgccgaggcaccgaggcactcagaggaggtttttagaacttcagccataaaaatgggcagaattttccttgatca

SEQ ID NO: 658538 - DNA, 137 bp, Homo sapiens
tgttggtctgctggtgggactcaatgttctcgatgccaatctctgcttgaaaggagaagacttggattctcagggcaggagcgatttggcaacatgacccgagtatactacaaggaagctgttggtgcttttgtagt

SEQ ID NO: 658539 - DNA, 50 bp, Homo sapiens
gaccccggcttctgggacgcgtcaggccctgtttgtgctcttcgtcctgg

SEQ ID NO: 658540 - DNA, 98 bp, Homo sapiens
cttatgggtttctagaaggaaaatcacagaggtaaagcatcatttcatcacatcctgtcaaggtcacattaactttgctctagaagacaactttacaa

SEQ ID NO: 658541 - DNA, 96 bp, Homo sapiens
aatttgtgacagctgcagttgctccccgcccccgagcagccgagactggcattgctcgggtaccacttgctggagctgctggaggccctggggttg

SEQ ID NO: 658542 - DNA, 95 bp, Homo sapiens
gcattcttcaggtcatctgaaccttctgagaaaacatggtcaacgtcttgaaaggagtgcttatagaatggtatctagaagagcagaagacagag

SEQ ID NO: 658543 - DNA, 98 bp, Homo sapiens
gcgcggggcgacgctggctgcagggacccggtgacagcgtgagaggatcagtggcccctctggacatgcctctcctggaaggttctgtgggggtggag

SEQ ID NO: 658544 - DNA, 98 bp, Homo sapiens
aacctcatcatcttcaaggagcaagggggaacttttggggaccactgcccagaccaaagtgtgactgtcctctgcaaaggatagaaaatgaagtggaa

SEQ ID NO: 658545 - DNA, 96 bp, Homo sapiens
tcgctctcaactaactacaattgtattggcagctagagaggcatcttataagccattgttgaagcaagttgtggaggaaatatttcatcccgagag

SEQ ID NO: 658546 - DNA, 100 bp, Homo sapiens
aaatgccctccgggtcacaggataagttaaagattggtgcctggccagaaatgcctgtgaaacagctgtggtttaagcttcaactgtaaaagacagacgg

SEQ ID NO: 658547 - DNA, 156 bp, Homo sapiens
tttcttctatttcttgtggatattatggctaataacacaacaagtttagggagtccatggccagaaaacttttggggtactaggttttgacaagcttgcatcatgcgtgagtataagctagtcgttcttggctcaggaggcgttggaaagtctgct

SEQ ID NO: 658548 - DNA, 100 bp, Homo sapiens
tttgcattgactggaaacaatggcatttacagaaagagtcaacagcagtggcaacagagggagaccaagacatcattgttttgaagtttctgaaagtgtt

SEQ ID NO: 658549 - DNA, 80 bp, Homo sapiens
cttggagcacttcctattccactggattgggaaagaccatggcaggaatgacatctttgtgttcctgttaagcacacgag

SEQ ID NO: 658550 - DNA, 114 bp, Homo sapiens
cccgagactctccttgcttggaattctgcccactctgcggagttagcagtcacgacctccagcacagctaaaccaggtggacaggtgaaatgtcagtatatctctgctgtggat

SEQ ID NO: 658551 - DNA, 100 bp, Homo sapiens
gaagcggagttccagggctacaatgttctgctcagtctcaacaagggagacatcctaagggcagagcggcttgggtaaatccaccttaatcaacaccctc

SEQ ID NO: 658552 - DNA, 100 bp, Homo sapiens
ggatatgaagaccctggagtagacctggagtggaagatcatttatgttggctcggctgagagtgaggaatttgatcagatcctagactcggtgctggtgg

SEQ ID NO: 658553 - DNA, 51 bp, Homo sapiens
agactagaactgtggataaacctcagctcggtcaaggagtgtgatgactgg

SEQ ID NO: 658554 - DNA, 100 bp, Homo sapiens
ggcacattccatgacagtacaggattatcaggatctcatagaccgaggatggcgaagaggattccacagatgttggtgaggaggacagcttccttggtca

SEQ ID NO: 658555 - DNA, 75 bp, Homo sapiens
cactgggccctgtatataggagatggctacgtgatccatctggctcctccaaggaactgtccaggtttattgctg

SEQ ID NO: 658556 - DNA, 75 bp, Homo sapiens
gaatgtgttactccattgctgaggagtgatgtcatttgtcagagtgaaccgctgtggtccccgagttggtgtaag

SEQ ID NO: 658557 - DNA, 90 bp, Homo sapiens
cgacgctattcttacaaaggacaacaatattagagtaattggagcctccagggtcgtatagacctccccctcctatgggcaaaccaccag

SEQ ID NO: 658558 - DNA, 100 bp, Homo sapiens
attctgtggtgtggattttcatgcaccttacaaacttccatacaaggaattcctcctgatcagcagagactgatctttgctggcaagcagctggaagatg

SEQ ID NO: 658559 - DNA, 83 bp, Homo sapiens
ggcaccgtgggccgactgaacatcacggtggtacagccgaggtgctcggtggagtcatggcagtgccctttgtggaagactgg

SEQ ID NO: 658560 - DNA, 100 bp, Homo sapiens
caccctgaaggtcccggtgctcacttggacatggctcagcttgtcaatcggaaacagaaattagagtctgtggaactttctagccaatcagaaattcaac

SEQ ID NO: 658561 - DNA, 83 bp, Homo sapiens
cgaaggtgcggcggcggaggggagccagggcgccccagcaggcagaaataaaacgtcttcaagaagccaataaggcagctcgg

SEQ ID NO: 658562 - DNA, 82 bp, Homo sapiens
cggaggagacatcggcctctgcaggcttgccgaagaagggaggtgtggacactgccagcggctgcagccgacttggaatgac

SEQ ID NO: 658563 - DNA, 82 bp, Homo sapiens
gctgcaggcggcccactggcagttcgaggtagctacagcaagctgggtagcaggcagatccaaaggatatcatgaagtttcc

SEQ ID NO: 658564 - DNA, 75 bp, Homo sapiens
cgtcgtgcacgcgggccagaggcggacggatacagagtctgagctggacctcatcagccgcctttccagagaaca

SEQ ID NO: 658565 - DNA, 74 bp, Homo sapiens
gcgaccacagaaggaaattcaacagaacttagcataaatgctgaagtattatgcagatatgccagcagaagaaa

SEQ ID NO: 658566 - DNA, 50 bp, Homo sapiens
tcgggagttgatctctaatgcttctgataatggtgcctggcacatagcag

SEQ ID NO: 658567 - DNA, 75 bp, Homo sapiens
agcaagaaacagaaatatgaaaaaaacaatgagtcatctgatagctcatcattccctgtattgaacactgatata

SEQ ID NO: 658568 - DNA, 82 bp, Homo sapiens
gcctgcgcctccggggccggccctgcagatgaaggatttgggggcagagcacttggcaggtcatgaaggggtccaacttctc

SEQ ID NO: 658569 - DNA, 100 bp, Homo sapiens
ccacaacgtccgactgcactcacacgacgtgcgctatgggtcagctgataggaagatgtcttcaggaaatgctaaaattgggcaccctgcccccaacttc

SEQ ID NO: 658570 - DNA, 76 bp, Homo sapiens
caggaagactccctgcctcctgagtcccagtgctgaccttaaggaaagagccaaaatgagttccagtgaagttggt

SEQ ID NO: 658571 - DNA, 100 bp, Homo sapiens
aacccaggggaagttacacgaggttggtcatgaaagagattccttgcagagacagctcaacacggcacttccacaggttgctatcaagatcatagataag

SEQ ID NO: 658572 - DNA, 74 bp, Homo sapiens
ccggttccttgcggtcaagatgctgcaaaacgtgactccccacaataaatgtcatctgggtgattctcagtgtg

SEQ ID NO: 658573 - DNA, 82 bp, Homo sapiens
gatccatcttagtgaagaattaggatacagattcaaccaactctggtgataacatgtatactttaatgaatgcagtacctcc

SEQ ID NO: 658574 - DNA, 100 bp, Homo sapiens
gagactgaagaggactcaggagcaaatcagtaatagggagaaagaagtggtcttacctaacgttcaccagcacaaccctgactgcgacatttgggtccac

SEQ ID NO: 658575 - DNA, 102 bp, Homo sapiens
tgggtttcccgggagatcccaggcggtgacagagtggagccatggctagagggagtgcatccgccccaacccttttccccctcgtctcctgtgagaattccc

SEQ ID NO: 658576 - DNA, 50 bp, Homo sapiens
gcttctcagccattttccacagatcagattcctggtcgggtggcttccag

SEQ ID NO: 658577 - DNA, 83 bp, Homo sapiens
ccacgactttctgggagactcacaatgcagatcttcgtgaagactctgactggtaagaccatcaccctcgaggttgagcccag

SEQ ID NO: 658578 - DNA, 100 bp, Homo sapiens
aagctgcagaggggcattatgcttcccagagtgctttggagcttgctgatgtgtctaatgaactgccagggctgaagtggatgcctggaatcacacagtg

SEQ ID NO: 658579 - DNA, 80 bp, Homo sapiens
cagccgatccagcctgcggagcctgtggggcaggaggctgctggaatcttccctcatttcattatcccgttatgatggag

SEQ ID NO: 658580 - DNA, 83 bp, Homo sapiens
ctgctatgaagtggcgctcctgagattgcagagggaatggcatacatcgagcggaagaactacattcaccgggacctgcgagc

SEQ ID NO: 658581 - DNA, 90 bp, Homo sapiens
tccggggtgcaccgctccctgggcgtccatctgagcttcatcaggcctggccagcagccccgagtgtgcttgtggtcggagccacttcac

SEQ ID NO: 658582 - DNA, 83 bp, Homo sapiens
ggcaagagtaacagcagcgccgtcccgtccgacagccaggcccgggagaacgccgtgccgtccctgcagtgacaccgaggtgc

SEQ ID NO: 658583 - DNA, 114 bp, Homo sapiens
gcggcgttagtattggccgtgtacccgaaaaactgattgactgggctggcgttaactgtgcggaggcaggtgttcagaatgccaggattccctcaccaactggtactatgagaa

SEQ ID NO: 658584 - DNA, 75 bp, Homo sapiens
acaaagaacacaagaaggagaaggaccgggaaaagtccaagcatagcaacagaaaaagcttgtggtgaagggggg

SEQ ID NO: 658585 - DNA, 83 bp, Homo sapiens
gcacgttggaaccgaagagagctctgttgttgcaacttaattcagtgcacaaatgagatgaatgtgaacatcccacagttggc

SEQ ID NO: 658586 - DNA, 100 bp, Homo sapiens
gatcatgctcagaggagcctctacagagatgtgatgctggagacctgcaggaaccttgcctccttggattcttggtgccaccattgagaactccaggatt

SEQ ID NO: 658587 - DNA, 98 bp, Homo sapiens
gacgatttaaggatttttaccagtttacttttaattttgcaaagaatccaggacaaaaaggattagacagcgtggaagatgaactggagatggccacc

SEQ ID NO: 658588 - DNA, 109 bp, Homo sapiens
gcctgactgcagagattgaaggagtgaattattcaggattgggtgctgacccaggaagaggacagaccatcaggatacctttgtggcagtattttcatttctgtctgga

SEQ ID NO: 658589 - DNA, 75 bp, Homo sapiens
gttgcaaaaacaagctcagggatcccactgattctactttacggaatcccccatcccagaagacaaagaccgcag

SEQ ID NO: 658590 - DNA, 75 bp, Homo sapiens
cacgttacgctattcgttgtggtccaaaacagtttacctcttatctaacagactgtgccataacacacatttgat

SEQ ID NO: 658591 - DNA, 88 bp, Homo sapiens
acgattcacctgtccagcatccgaccaccgaggctggagggggagaacacccagggagtgcatccgccccaacccttttccccctcgt

SEQ ID NO: 658592 - DNA, 100 bp, Homo sapiens
cggcccgtagtgtggaagcagcttcagagatttgccacaatatggacagaagcagtggcagtcctattttggaagaacttttgatgtttacaccaaactc

SEQ ID NO: 658593 - DNA, 82 bp, Homo sapiens
gtaggccaggctgatggagagctgaacattactcttccagaagagttgatgaggaatctggattaaaggattcagaaccaga

SEQ ID NO: 658594 - DNA, 101 bp, Homo sapiens
ttttggacctgaaacagaaattctggaacacctatatgctggactgtgctgctgccatctcggctcactgcaacctccctgcctgattctcctgactcagc

SEQ ID NO: 658595 - DNA, 104 bp, Homo sapiens
gatctatagcactctggctggcaccaggaaagatgttgaagtgactaaggtgcacagccagaggacaacacatcacacacaagaaacagttgtgctcatgtgat

SEQ ID NO: 658596 - DNA, 109 bp, Homo sapiens
tcagtagcctctcactgaatgagcctgaagacaaggatgtgactagatggacagagacgtatgtgcgttggtctcctaagggcacctacctggctacctttcatcaaag

SEQ ID NO: 658597 - DNA, 100 bp, Homo sapiens
tgtacaacccgacgaggaacgaatgggacaagatcccgtccatgaatcagagcactacaaacaccactggtttcccgaaaagccgtccaagggctccggc

SEQ ID NO: 658598 - DNA, 100 bp, Homo sapiens
acgaggatgtgaagaagagaagggaaaagcaaaggagaagagacaggacgcgggaccgtgcagccgacagcgtctgctgcagagaccatgtctgccgacg

SEQ ID NO: 658599 - DNA, 99 bp, Homo sapiens
cctcgtcggataccctcccgagtgcctggatctcagcaatggggataccattctggaagacttgcccatccaatctgacaaaatagaagccacctggag

SEQ ID NO: 658600 - DNA, 100 bp, Homo sapiens
aaatcaaccagtaaaatcttccaaagaaaatcggaagagaagtcaacatgaatctgggagaatagtgtctttcctgaagactatcttcccgtctcaaaat

SEQ ID NO: 658601 - DNA, 82 bp, Homo sapiens
ccgccatcagtaccgggcgctcatcaactccgtccaacaccgcgctgagcacgttcttccaagaaaccaacattcccaacag

SEQ ID NO: 658602 - DNA, 100 bp, Homo sapiens
ctctgctgcatcatgatgtcaacaaccgtggctcacaagatgaaagagcactgcaaggatgatgctgaaaggaataacaaggcttatctctaggatccat

SEQ ID NO: 658603 - DNA, 99 bp, Homo sapiens
tacagcaccgaggggctgtccgccgccctggcctctctcaggaatctctatactcccaacgtgaaggacatggatttgattgacatactttggaggcaa

SEQ ID NO: 658604 - DNA, 90 bp, Homo sapiens
tcccgtctccagcccgggcttacgccccgccgacagatggagtcatcagaacccactgtgaggaagtgacttctccttgaggtcacccag

SEQ ID NO: 658605 - DNA, 75 bp, Homo sapiens
ccctgaggttggacgtggggaatttctcctggggctcagagtatattaacctggctgcagagccaaaagtgaacc

SEQ ID NO: 658606 - DNA, 100 bp, Homo sapiens
gtcctgaagatgatgctgccattaccttgacttattcgtctaatggaagagatcatgagtgagaaggagaataaaaccattgtttttgtggaaaccaaaa

SEQ ID NO: 658607 - DNA, 75 bp, Homo sapiens
caagcgaaaacatgaccgctgagcccatgagcctgacatttaccccggtaactgctgggcatttaaaggctccca

SEQ ID NO: 658608 - DNA, 75 bp, Homo sapiens
tggtgggggttggcatgaccaagtgctgaagctgctgaaagatggcagaagaagtggtggtagtagccaaatttg

SEQ ID NO: 658609 - DNA, 75 bp, Homo sapiens
cgcctcttcctcgggcttcgtggcggcactaggaagcttttattttcttcatgagtccttaaaaaacatctacca

SEQ ID NO: 658610 - DNA, 100 bp, Homo sapiens
cggaaagaagaaagccacagtcaagtatctgtctgagaaatgggtcttaggtcaaaatgcagatcttcgtgaaaacccttaccggcaagaccatcaccct

SEQ ID NO: 658611 - DNA, 100 bp, Homo sapiens
ctgggagggaacttatagtacctcgcaggtctcctctgagcctccggcctccataagacccaaaacagatgacacctcttcccagtcccccgcgccttcc

SEQ ID NO: 658612 - DNA, 100 bp, Homo sapiens
agcagcgctctggggctcgccttgtatctcaacaccctgagtgcggatttctgctatgatgacagacttggattctcacttgcatttatcttcagctgct

SEQ ID NO: 658613 - DNA, 51 bp, Homo sapiens
gctggagggcgaggagagccggttgtcatttagtaaaaacggagtagttag

SEQ ID NO: 658614 - DNA, 48 bp, Homo sapiens
gactgtgggctggtgtgtggaactgattgaggaacagttgactttgga

SEQ ID NO: 658615 - DNA, 100 bp, Homo sapiens
cttcaaaatgctgcagaaatgctcactgcaaaagtgaaagggggacttaggagccattgatgaaaaatacgacgtggctatatcatcctgttgtcatgca

SEQ ID NO: 658616 - DNA, 74 bp, Homo sapiens
ggcactctcatccctaagtccagtgacccctgctgaatgaactgagtgtagttgaggctgagctgcttctcaaa

SEQ ID NO: 658617 - DNA, 83 bp, Homo sapiens
ctttgccatccccggctccagcttcctggtggtcagaatggcttcaacattcctcaagtcaccccatgcccagaagtaggaga

SEQ ID NO: 658618 - DNA, 105 bp, Homo sapiens
ccgcggagcggcgcctgggccgcgccgacctggtcatgagcttcgttaacatggacaatgcagatcttcgtgaagactctgactggtaagaccatcaccctcgag

SEQ ID NO: 658619 - DNA, 100 bp, Homo sapiens
gacctgcccaggccgccgctcaggaatgaattcagtctctgctggatgaaccgaatcctaacagtccagccaatagccaggcagcacagctttatcagga

SEQ ID NO: 658620 - DNA, 100 bp, Homo sapiens
aaacaagatattaaagtggcaatgtgtgctgacaagttgaaaccaagactgaagactgaacctgaagaagtttccatagaagacagtgcccagagtgacc

SEQ ID NO: 658621 - DNA, 110 bp, Homo sapiens
acactgggaagaagatttttgctgtctctggcctcatttctgatcgggaagcctcatctagcccagaggatcggaatgacagatgtgctgggactctggtgcccccaacc

SEQ ID NO: 658622 - DNA, 100 bp, Homo sapiens
agcagccgctgccgccgccgcgggagccgctgcccgaactcccggcccgaactccagattgggaaaatgaggtacgttagtgttcgcgattttaaaggca

SEQ ID NO: 658623 - DNA, 105 bp, Homo sapiens
ctggaggagcagttgtctgatgaagagaaggtgaatctggattgggaaagtcgacattaatcaactcattattcctcacagatttgtattctccagagtatccag

SEQ ID NO: 658624 - DNA, 100 bp, Homo sapiens
cgctgggagtactggttgccctttcctcaggtgtcatggagaaactccagctgggcccagagattctgcagcgggaaaatccaaggcttatttatgccag

SEQ ID NO: 658625 - DNA, 83 bp, Homo sapiens
cgggagtaggagactcagaatcgaatctcttctccctccccttcttggtgggcagtgtcaaaccgggaaatgcttatagctca

SEQ ID NO: 658626 - DNA, 100 bp, Homo sapiens
gtggaggaagaggcattgaggactttccttacctgtttttccagctcacccactgccagcagaggaggaccactctctgtggcaccctggactacctgcc

SEQ ID NO: 658627 - DNA, 100 bp, Homo sapiens
ataattccaggtggaattgctgatagacatgggggcctcaaacgtggagatcaactcctctctgttaatggagtgttgcagagcttgaagtgaaaaccag

SEQ ID NO: 658628 - DNA, 74 bp, Homo sapiens
ggaagcggccaccgactactgtcagcagctgtgccaggcacaagtgatccttatgtgaaatttaagctgaatgg

SEQ ID NO: 658629 - DNA, 90 bp, Homo sapiens
agtagacgtttctgagtgtgtcgcggtcaccatgatacagatgtggtgtataaaagcgagaatggacatgtcattaaactgaatatagaa

SEQ ID NO: 658630 - DNA, 85 bp, Homo sapiens
acagttgccatccacagtgatgttgatgctagttctgtgtgtctgacttgctgctccagggatgtcatagttaaagttgaccaga

SEQ ID NO: 658631 - DNA, 88 bp, Homo sapiens
ggcctctgtgactatcaggtcctcgcgctgccgcggcatccaggcgttcagcttggcttgtggagatgttgaaggaaagtttgatatt

SEQ ID NO: 658632 - DNA, 80 bp, Homo sapiens
acatgtgttcttttgacaacgaacagctcttcaccatgaaatggatagatgaggaagacggagtctcgctctgtcgccca

SEQ ID NO: 658633 - DNA, 100 bp, Homo sapiens
tcggcccctggctcctgctcctggcatcagacaacagtcagcgctttcgagaaacctgttttgcatttgccttgacaccacaacaagtgcagcaaatcag

SEQ ID NO: 658634 - DNA, 90 bp, Homo sapiens
tggtggggctcacggcgcctgccttggcgctggccggctacatcgaggctgcctgataggggctgtaaatctcaaatccagcaatcgaac

SEQ ID NO: 658635 - DNA, 98 bp, Homo sapiens
ctctgcctgaaaatagcgagacagatcttagcaaagcaatgtctcaagatggtgcttctcagttccaagaagtcattcggcaagagctagaattatct

SEQ ID NO: 658636 - DNA, 90 bp, Homo sapiens
ttcgaacagatgacagagtagaacgtgtacgcagaacccagcctcacccctgcccagcttcgacgaggtagactcgggggaccagcctcc

SEQ ID NO: 658637 - DNA, 100 bp, Homo sapiens
tttcacagtgggctttactgtgttgaggtcgatttggtcagacaacgccaccacttgttgattttctcaaggacattttgagaagatatccagaaggagg

SEQ ID NO: 658638 - DNA, 74 bp, Homo sapiens
tgtgtgagcagaggggagagcggccgccgccgctgccgcttccaccacaggtcctggctataagtcaccatggc

SEQ ID NO: 658639 - DNA, 75 bp, Homo sapiens
ttatagatcttctgcactgtttacaggcacagggacagagcagaatgggctgatatagatccggtgccgcagaat

SEQ ID NO: 658640 - DNA, 110 bp, Homo sapiens
gctgggtctggagacgccgtggcagcctgaacggagtgtgcgacggattgggaggtttgcctgcaatgagatttcattctctacatttaaaggacatcctttctgagctg

SEQ ID NO: 658641 - DNA, 100 bp, Homo sapiens
tatccatatacaacaatgggcacttactgaaggccgtcttaaagttacgttgttagaatgtagcaggacatgtatgatctccatcatctgtacctcactg

SEQ ID NO: 658642 - DNA, 98 bp, Homo sapiens
aggacagttcgctacacagcaatgcatcgaggtacttaaagctttcaccaaaacacccagaatcaaatactgctggaatggacatctttgccaaattc

SEQ ID NO: 658643 - DNA, 74 bp, Homo sapiens
ggcagcatggaccacggttgctgggcggatggggagcgtctatggtcagtctggctcttgctgattgaattcct

SEQ ID NO: 658644 - DNA, 122 bp, Homo sapiens
gttcgggcgcagcacgccggccgcaggagcacggatgccccccggagccgcgggctggcagcagtggtctcggaaagagggtcgtggtcccgcacggatgcgcttgttgggagaaaccttgg

SEQ ID NO: 658645 - DNA, 75 bp, Homo sapiens
gccgatccagcctgcggagcctgtggggcaggtggacgacccaccggagcccgtgtacgcgaacatagagaggca

SEQ ID NO: 658646 - DNA, 82 bp, Homo sapiens
ctgacagcgggaggcagagggaggaacctggacgccggaagccgggaaatggttgtggcagcactgcctgaaggtatgagac

SEQ ID NO: 658647 - DNA, 95 bp, Homo sapiens
accaggagaaattgcagctgcatgaatcccaaaaagtttttggctttcacccccaaccagtgaccaaagacttgaccactcaaagtccagctccc

SEQ ID NO: 658648 - DNA, 96 bp, Homo sapiens
tggcaagatggtgttggaaagcactatggtgtgtgaagccttctccttccaaaaagtttcggtctggctcatctttctctcggcgagcaggctcca

SEQ ID NO: 658649 - DNA, 90 bp, Homo sapiens
gtttcatgcattccaaagaagcaacagcaagagaaaaagacttattccgcagcgtaaagataacatagatcatcagtagaaaacttcttg

SEQ ID NO: 658650 - DNA, 90 bp, Homo sapiens
cgactgcgagggcctgagacggctgcttggcaagcatacgtgagaaggctgttcgagagctgcttacccggcactgccagctgttggaga

SEQ ID NO: 658651 - DNA, 100 bp, Homo sapiens
gtcagaacaatcttgaatcatgaagctactaaccagagccggctctttctcggtcatgaaacgagtgcgtaccgagcagattcagatggcagtgtcctgc

SEQ ID NO: 658652 - DNA, 100 bp, Homo sapiens
gctgcgatggccgtggccgtggggagaccgtctgtgatgcaactgtgacaatagctcacagatacacccccaaagagcaactgaagattcatacgcagct

SEQ ID NO: 658653 - DNA, 82 bp, Homo sapiens
ggagctctggctgctgctgtcagataccatgtttgtgtggaagtgccccgtgtttgctatgccgatgctgtcctagtggaaa

SEQ ID NO: 658654 - DNA, 90 bp, Homo sapiens
ggggactggagagacaagtaaactctcagagtaactgtcccctctgactaccatttctaagtgtcagctaatggaacatcaggggaacga

SEQ ID NO: 658655 - DNA, 51 bp, Homo sapiens
tctactcggggtcgggctcgggctctgacctgatctccagcttcctgctca

SEQ ID NO: 658656 - DNA, 113 bp, Homo sapiens
cagaagtgtttcagggggtcgaggtcgtggtggaccacgtggtggcaaatcctccatcagttctggtgaagcaaaaaatttattgccatatcttggaccccacaaaatgagag

SEQ ID NO: 658657 - DNA, 100 bp, Homo sapiens
cccaccccgccagctccagagccaccttagaccatgctcagcctccaagcagccttgtcatcgacaaagaatctgaagtttacaagatgcttcaggagaa

SEQ ID NO: 658658 - DNA, 51 bp, Homo sapiens
gaaggctgcaatcacatgcagtgtgctaagttccgatgaagttaaattccg

SEQ ID NO: 658659 - DNA, 99 bp, Homo sapiens
gcagagtcttctcgacatgtgtgtggggtttgtgaaatggctgctgacatttctgaatccagcggggctgactgcaaaggagacccaaggaacagtgcc

SEQ ID NO: 658660 - DNA, 98 bp, Homo sapiens
caagaaagacaaagacccagtgaacaaatccgggggcaaggccaaaaagaagttgctgtgatgttcaacttcccagaccctgcaacagtaaagaaagt

SEQ ID NO: 658661 - DNA, 50 bp, Homo sapiens
tttacaagagcttcttgataaagaaaagcaatatcaagatgctattcgag

SEQ ID NO: 658662 - DNA, 83 bp, Homo sapiens
ccggaatcagagccgcgggtgagatccccagtgttctaagaacggaagcatctgggctggatggaatttagcatcaagcagag

SEQ ID NO: 658663 - DNA, 98 bp, Homo sapiens
cgacgaccctagtgctcgtcgccgtggcgccatgggtgttgtccgcagccgcagggtcctcactgagcagcgagtcgtcccccgtgtcctctccggcc

SEQ ID NO: 658664 - DNA, 97 bp, Homo sapiens
aggccttccagctgtttgaccgaacaggcgggattgtgcggatgacactgagcctgaccgtcatcatgatggaggccaccagcaacgtgacctacgg

SEQ ID NO: 658665 - DNA, 100 bp, Homo sapiens
ggtgtcacctcagtctctcagatcttccacagcccagctcccgcctcggcctgcctcctgctgatgctcctggccctgcccctggcggcccccagctgcc

SEQ ID NO: 658666 - DNA, 100 bp, Homo sapiens
atgccaagaagatgagaccgggggaggcgacgctaagttgctgatcgtggcgggcacttgaaatggaccaaagctgaggacattgacatagaaaccccag

SEQ ID NO: 658667 - DNA, 98 bp, Homo sapiens
ttccatccattctgattcagaaagtcaggtgtgatgaatgcagactctgctaccattttggctgtttggatcctcctttgaaaaagtctcctaaacag

SEQ ID NO: 658668 - DNA, 75 bp, Homo sapiens
gcggacggctgcatttacggggtctcccggagggccagagtcgattccaggtacaacctccttaggcatgtctgt

SEQ ID NO: 658669 - DNA, 75 bp, Homo sapiens
gctgctggtgaaaagcttctccgagaggcgtctgtagaggcttctggtgaaatcgcattatgcaagactggattt

SEQ ID NO: 658670 - DNA, 100 bp, Homo sapiens
ccaagcagtggcgaagggaatcgcaaggctcttccctgaccattttctactgtccctgcgcgaggaaactcccagtacagccagcagcaggccgggtacc

SEQ ID NO: 658671 - DNA, 75 bp, Homo sapiens
ggagagggcaattccaagaagagggaaaagcttgtgcacagtgggtaattccagaattgattggccataccattg

SEQ ID NO: 658672 - DNA, 100 bp, Homo sapiens
cccatgggcctctacatcgtcaggacagtgaatgattctccacggcttcaaagaccaagttggggaagataactggcagcagttctctgagcaattcccg

SEQ ID NO: 658673 - DNA, 83 bp, Homo sapiens
attctttacaactgtacccggacagcgaccgtcaagaaaacgggtatgcaggagattagaagccagtgggcatgagcgtggct

SEQ ID NO: 658674 - DNA, 102 bp, Homo sapiens
atgttcactggaaggaaaatgggacattagttcaagtagcaactatatcaggaaaggcagactacaagttactgagcacctccctgagaaaattgaaagtag

SEQ ID NO: 658675 - DNA, 82 bp, Homo sapiens
atgagcactgcagcgattgcgagaatgaggaggacaacagctacaaccgggggtgaagtagtatttgaagcttttcatcagt

SEQ ID NO: 658676 - DNA, 50 bp, Homo sapiens
gaatgctacttggatgcctcttaaggaggtggccaggtggaagtaaaatc

SEQ ID NO: 658677 - DNA, 50 bp, Homo sapiens
ccctgcctgaatccctcaagcgcattccgctgtttgccacggaagccaca

SEQ ID NO: 658678 - DNA, 90 bp, Homo sapiens
tcacctctctctgctcatgcaggatggctttagatgacaagctctaccagagagacttagaagttgcactagctttatcagtgaaggaac

SEQ ID NO: 658679 - DNA, 100 bp, Homo sapiens
ctagtacttccgttctccagcgctgggcaccgcggccggagctgtgggctgggactgccaaaaagagcaagatcctgtccaaggaagaacagaaagtggt

SEQ ID NO: 658680 - DNA, 75 bp, Homo sapiens
cacgtgtggagccccggcagcaggagcgtcgcaggtgcttggattcgccctcatagtcctgtgtacctccagcgt

SEQ ID NO: 658681 - DNA, 90 bp, Homo sapiens
ccggcgagctggccaagcacgccgtgtccgagggcaccaaggcggtcaccaagtacaccagctcgaactgcaccaaagccagctggagct

SEQ ID NO: 658682 - DNA, 82 bp, Homo sapiens
tcagcttcagctccagctccgctctcttcggctgccccaatccccggcagctctctcagctgactcttttggtgatcccttc

SEQ ID NO: 658683 - DNA, 82 bp, Homo sapiens
ttgttgtatcagatccagaagatattacagagcccacaggcggttttgtgagctgcttccccaggagcagcggagcgtggag

SEQ ID NO: 658684 - DNA, 75 bp, Homo sapiens
ctggcagatctaccgtcaccagcagaagataaagacagcacccaagaaaacctcatttggctcgctgaaggatga

SEQ ID NO: 658685 - DNA, 50 bp, Homo sapiens
gcttactgctgatgctagactgttatgtacccgaataggcttcgccccct

SEQ ID NO: 658686 - DNA, 75 bp, Homo sapiens
atactgcgagccctgctacattgctgaagaaatgtcaacaattgggagttttgaaggattccaggctgtgtctct

SEQ ID NO: 658687 - DNA, 75 bp, Homo sapiens
ggtggggccggtgaagcagtgcttcgtggtgactgaaaaagatgggttacttatgaatatggcagttacagaggg

SEQ ID NO: 658688 - DNA, 83 bp, Homo sapiens
cagactccagcagccaagatggtgaagcagatcgagagcaagcgttacagtgtttctgccacctctgtacaaaagacaatttt

SEQ ID NO: 658689 - DNA, 100 bp, Homo sapiens
gtgggatcgatgtttcaatattggaagcgctttgatttacagcagctgcagttcaacttcctcaattgctttgcctcactcttctatattgcctttgtct

SEQ ID NO: 658690 - DNA, 75 bp, Homo sapiens
gggcacgatgttgaacatgtggaaggtgcgcgagctggtggacaaagcattttgatgaatgtcactctaatccct

SEQ ID NO: 658691 - DNA, 100 bp, Homo sapiens
gaggcgacatggggcacccggtgtaccgcggcgagaagccccagctgcactacgcgcaaagtgtgggatgctgtctcaggagatgaattgatgaccctgg

SEQ ID NO: 658692 - DNA, 89 bp, Homo sapiens
ggttaatttcaaagcttttcccatggagaaccagacgtcctgggtcctctccagcatggcagccctctactggagggtgaaaggccaag

SEQ ID NO: 658693 - DNA, 100 bp, Homo sapiens
acaacacaggtgtcacactactacttggcacagctcactagtgtgaggcagtggggtgatcttgatactgcagcagtaaaagtggaatttgatgaagaat

SEQ ID NO: 658694 - DNA, 74 bp, Homo sapiens
gtggactgggatgaagaccaccctccaccaatgggggaggaatattcccaaacctctggacgagaccagccaga

SEQ ID NO: 658695 - DNA, 75 bp, Homo sapiens
gtcaattaggtcacttcaacctcttattggaagattatccaaaagtgaaactggaacgccaagctgaagaagaac

SEQ ID NO: 658696 - DNA, 97 bp, Homo sapiens
ccccagttggttgcagttccagaaattcttatgccggtctagatccaagcaaccagccatcagtggcctatgtacataccacgccgggtctgccttc

SEQ ID NO: 658697 - DNA, 75 bp, Homo sapiens
aaagcctcctggaccgtccaagaagtttttagaacttcagccataaaaatgggcagaattttccttgatcatatc

SEQ ID NO: 658698 - DNA, 98 bp, Homo sapiens
agagggccacctccttgcctgttcgcagtgctctcagtgctatcacccttactgtgtcaacagcaagcgcttctatgcagccacatcacggcaactga

SEQ ID NO: 658699 - DNA, 75 bp, Homo sapiens
aacgaaagaaacgtcggcaggaacttgctcgactgagagactcagattgggatcaaagccactcacattaagtta

SEQ ID NO: 658700 - DNA, 130 bp, Homo sapiens
gatgaatggagtcgccttctgcctggtcgggatcccgccccgcccggagccccggcccccacagtaaatacctgggcacaggacttcaaagcaaacacagattccccctcccccttaatatttaagaatt

SEQ ID NO: 658701 - DNA, 100 bp, Homo sapiens
cagtaccagcagccagatcggaggaccggtaccggaatcccaaaggagcacggtctgaatctgcacagagcaagatgctgagtggagtcgggggctttgt

SEQ ID NO: 658702 - DNA, 83 bp, Homo sapiens
ctctccttttccctctccctttccctaagggagccagcgccggcagccaccatggcgtcacgcatagggttgcgcatgcagct

SEQ ID NO: 658703 - DNA, 82 bp, Homo sapiens
aacgtgaatgctgctgatagtgatggatgccaaactgaaatcggtaaaggaggttttacacttttctggaccagacttgaag

SEQ ID NO: 658704 - DNA, 51 bp, Homo sapiens
cccgaacgcagtgtgtggaaaggttcaattcccatgaaagtgcagcacatg

SEQ ID NO: 658705 - DNA, 100 bp, Homo sapiens
cctggacaccaactattgcttcagggagaactaatgccgacgtgatgaccgccctgtcccagggctacaggatgccccgtgtggagaactgcccagatga

SEQ ID NO: 658706 - DNA, 101 bp, Homo sapiens
ttgagaagagagaaccactaaagggcagagcaaagactccagtaacactcaagcaaagaagagttgagcacaatcaggtcatgtaatgtttgcagaaataa

SEQ ID NO: 658707 - DNA, 75 bp, Homo sapiens
gctggcgagcgccaccgcatgggttgcaataaattgacagaccagaccctgatctacctacggcgcattgccaac

SEQ ID NO: 658708 - DNA, 98 bp, Homo sapiens
acgtgttcgctgcccagaagaagggaaggcgcgagtgaggaaaggaggtactgtagtgatcttccattgtttgaagcactggacctttaatccactgt

SEQ ID NO: 658709 - DNA, 101 bp, Homo sapiens
cgctgttgctgccgccatacgcgctctccctgtttagctctggcaggctgccctgagcacgctcaaccccaaccccacggacagctgtcccctctacctga

SEQ ID NO: 658710 - DNA, 90 bp, Homo sapiens
actacaaggccaatgtggccaaggctggcttggtggatgactttgagaagaaggctatctatgtgcctgctgatgacttgactgaccctg

SEQ ID NO: 658711 - DNA, 113 bp, Homo sapiens
cttccgacgtgggcggtgggccccagccccacagaccagcccagcattcagagcaacttgctggatgtgaatcagatcatcaaggacttggcctccatggtgtcagagcaagg

SEQ ID NO: 658712 - DNA, 83 bp, Homo sapiens
atcgaagatttagaggccgctacagaagtccttaaggagcaggagcggcttcgcttggagcaggagcgagagcaggaacagaa

SEQ ID NO: 658713 - DNA, 100 bp, Homo sapiens
ctggccagtgattcacgaaaacgcaaattgccatgtgatactccaggacaaggaccattcccggagtaataaatccagttggagcagcagtgatgagaag

SEQ ID NO: 658714 - DNA, 97 bp, Homo sapiens
gagaccctggtggagtttgctattgaaaaatcagagatggtgccaagttgcccctttatctatatcatccgtaaggatgtagatgtttactctcaaa

SEQ ID NO: 658715 - DNA, 100 bp, Homo sapiens
gactcagtcccatcactccaaggagagaaggtcgttccaggggtagaggaggcatgaaggatgaccgtcgggacagatactctgcgggcaaaaggggtgg

SEQ ID NO: 658716 - DNA, 75 bp, Homo sapiens
ggtctgaaattcttgaagagacagggcagctgcaatgactctccgcacggtattattgtcattgcaagcactatt

SEQ ID NO: 658717 - DNA, 100 bp, Homo sapiens
ggcggaggctgcggcggggcggacggtcgcgcggcggcaggcacagatttgataatgggctgcattaaaagtaaagaaaacaaaagtccagccattaaat

SEQ ID NO: 658718 - DNA, 100 bp, Homo sapiens
acgtcccgagctacctctttcctgctggctttggagcctgagctcgaggcccggctggcgcacctgggcgtgcaggttaatttggagtggcccctggagt

SEQ ID NO: 658719 - DNA, 90 bp, Homo sapiens
agatgagactaacatgtatgaaggtgtaggaagaatgtgaccattgtgaggtagatattttgttctaattttccagatgaggaagctgag

SEQ ID NO: 658720 - DNA, 96 bp, Homo sapiens
gtggatcaagtctagggggcctcaggaggagggaggtgtcgtgcttccgtgaggagagggacgtgttggtgaatggggaccggcggtggatcacgc

SEQ ID NO: 658721 - DNA, 82 bp, Homo sapiens
aggagaccatggctgactacctgctgtacaccctcaacaaacaccagcgctttgggtgcaactgacatgggtgaaccccagg

SEQ ID NO: 658722 - DNA, 75 bp, Homo sapiens
atctaaaggaggttttaaacagtataacagcctcagactatggcatgaaactgccaatcctgcgttccaaccctg

SEQ ID NO: 658723 - DNA, 83 bp, Homo sapiens
cgtggaggagacgctgacggagacgaaccgcaggaacactgtggacctgcaaatggaacggttcaaagttgtggaacgagaga

SEQ ID NO: 658724 - DNA, 51 bp, Homo sapiens
caagggtgttcccgaactagagtgggttattaagtgtgatatgctgtgatc

SEQ ID NO: 658725 - DNA, 75 bp, Homo sapiens
tggcttggattatctcaacattctgttgacttaattcagtgcacaaatgagatgaatgtgaacatcccacagttg

SEQ ID NO: 658726 - DNA, 75 bp, Homo sapiens
taagagctggggtctatcctgacaaatctgtatagacccaaatgatttgtacattgtagaacccctcaagttttc

SEQ ID NO: 658727 - DNA, 50 bp, Homo sapiens
gggcaaagaatgtagtcaatttaggatctgtgccagttcagaagcaggcg

SEQ ID NO: 658728 - DNA, 82 bp, Homo sapiens
ctgggggcgacctggacctgctggctcagcccctccctgcagacggcgccggcgcccagaataccctctaccatctgctttg

SEQ ID NO: 658729 - DNA, 75 bp, Homo sapiens
ccatcatcaccgtgcccgtggttctgctgaacaaaggcagtatctctgcattagccagattggacatatgtaaag

SEQ ID NO: 658730 - DNA, 82 bp, Homo sapiens
gacatttcttcggcattctgcaacagactgcctctgtcaccgggtccctccacccttgtctcctgtgcggccagcgtcagag

SEQ ID NO: 658731 - DNA, 100 bp, Homo sapiens
tgaaaacgtgctgcatttcaaagacggtgtgaagggagacctgctgattgacatcggctctggccccactatctatcagctcctctctgcttgtgaatcc

SEQ ID NO: 658732 - DNA, 100 bp, Homo sapiens
gctgcatttgttctgcctgacttggaccctggaaaacctggccctcttcaatttctgacaaaagaagatggcagtgaacgtatactcaacgtcagtgacc

SEQ ID NO: 658733 - DNA, 75 bp, Homo sapiens
cgcagttggaagcccatggggcagattggtgtctccgctgtgcctggctccgtatttccggttactgagactttg

SEQ ID NO: 658734 - DNA, 100 bp, Homo sapiens
tttctcgctgatcgcctaacttctactgacgaagcttggaagttgcagaagaaaaattgtatggcgacttcttgagctggaagctagaggaaacccttgc

SEQ ID NO: 658735 - DNA, 100 bp, Homo sapiens
attatcaccaccccagatgacctggaggggaaaaatgaggactcagtggaactgctggtgttgggtttccctaatgtgggaaagtcctcgctgatcaatg

SEQ ID NO: 658736 - DNA, 88 bp, Homo sapiens
agaatccgtgtctgggagaaacctcgtggcctggtctccattatttgagatgagttacatcttggagcaaatgccagatgttaatgta

SEQ ID NO: 658737 - DNA, 97 bp, Homo sapiens
gctagaccgaagtgtactagccaaggagttgaagtttgtgactttggtggcctcagccccgagtccaagaagatcctgacacccgccctcaagaagc

SEQ ID NO: 658738 - DNA, 100 bp, Homo sapiens
acagaattgactataacgttgaacagtcctgtatcaaaactgaagatggtttgaaacagcttcacaagtgaaaatgcctcgtgtaaaagcagctcaagct

SEQ ID NO: 658739 - DNA, 100 bp, Homo sapiens
gggagaaacaatctcttcctctgcccgggttgcgtggatctccagtggaaaggaatggcaaaactctattcagaagaatgcaggacttgcatttattgag

SEQ ID NO: 658740 - DNA, 75 bp, Homo sapiens
gcggcctcctgaaggaggggaagggacgtgggggcggccacggcaggttgaagaattagccctccaatcaatgat

SEQ ID NO: 658741 - DNA, 134 bp, Homo sapiens
cgccgctgggcctgcaggtctctgtcgagcagcggacgccggtctctgttccgcaggatgggggagaagcgagcggacatccagctgaacagcttcggtttctacaccaatggctctctggaggtggagttgag

SEQ ID NO: 658742 - DNA, 90 bp, Homo sapiens
cttggactctcccccaggttggctcagctcctcaccaccatcccactgcctgttgttgggcctgcccttctttgtccttgcactgacagc

SEQ ID NO: 658743 - DNA, 100 bp, Homo sapiens
gagcgacgcccctcagcagcctggcagcagcccccggggcaagagcaggagcccggcaccccccgccgacaaggaggaaggaagaggcccagcagaaggg

SEQ ID NO: 658744 - DNA, 100 bp, Homo sapiens
cggccacctcggcctcttcctgttgcaccaggttcttcgaaaactgaagcagatgttgaacaacaagggaatatggagccattgatgatgtagatattga

SEQ ID NO: 658745 - DNA, 101 bp, Homo sapiens
cggctggggtgtgtgctcctggatgtacagttacccagcacgtgtacctcctcctcctcctattgctcgggctgtagtgccctcgaaacgtcagcgtgtat

SEQ ID NO: 658746 - DNA, 75 bp, Homo sapiens
cggggatggacctccagatttccttactggtatcatgatattagctggtttgacatcaagtcatttgtgagtcat

SEQ ID NO: 658747 - DNA, 83 bp, Homo sapiens
agtcctgcctcatcccagccatgtcatcttatctacgaaatgattcaggaatgtggttcctgttttaacgtagtacatgtcag

SEQ ID NO: 658748 - DNA, 75 bp, Homo sapiens
gcctcaaagaagatactctgcaattcctgataaaagagccatccaaaactctgtttgtcaaaggcctgtctgagg

SEQ ID NO: 658749 - DNA, 100 bp, Homo sapiens
cgagaagcagctgcagaaggacaagcaggtctaccgggccacgcaccgcctgctgctgctgggaatactcccccagttgcaagaggcgcaggaccgtgga

SEQ ID NO: 658750 - DNA, 76 bp, Homo sapiens
cggcgggcgactggacggccggacagacttcccaagtaagaagcggaagaggagccgctggaaccaagacacaatg

SEQ ID NO: 658751 - DNA, 75 bp, Homo sapiens
acgctactacctggtgcagggcctgattgaggactgccagctggcgctgcagacagagtgggaagctttggagct

SEQ ID NO: 658752 - DNA, 74 bp, Homo sapiens
tatgcactgctgttctagagcagggatcagcaaacttgctgtaaagagccagggcagctgcaatgactctccgc

SEQ ID NO: 658753 - DNA, 82 bp, Homo sapiens
gtgattgctgcggtgtttgaccgagacataaactgcagaagagcagcctctggggatatgagactttctactcggaatatcc

SEQ ID NO: 658754 - DNA, 100 bp, Homo sapiens
ggcgaaccgtggcaccgagagcaagaaaatggccaaagaggtgctgaaaaaatatttggagtccaaggaggatgtggctgatgcacttctacagactgat

SEQ ID NO: 658755 - DNA, 75 bp, Homo sapiens
cagcccaaacacatcaaacttgctaagcggcggatacccccagcttctaaggcatgaccaacggctttggaaaac

SEQ ID NO: 658756 - DNA, 83 bp, Homo sapiens
cactgtcttgttccgaggcggccccagagatgtccagctcgccgctgtccaagaaacgtcgcgtgtccgggcctgatccaaag

SEQ ID NO: 658757 - DNA, 100 bp, Homo sapiens
ctccccagccatgcagaactaatggtcagttggagtgcgtacgctggatggtgagcgaaacagaagccattgcagaactgagttgttctaaggattttcc

SEQ ID NO: 658758 - DNA, 90 bp, Homo sapiens
gctaaaagaaagctgtcgaattgccagcagtgttaattggtcagatgtagacctttcacagtttcaagggaatggagcaacaacttctac

SEQ ID NO: 658759 - DNA, 90 bp, Homo sapiens
cctgggcctaactccaaaagggccaatacgcatattcgagactttctacagggtgcaaaaatgcagagtaataaaacttttaacttggag

SEQ ID NO: 658760 - DNA, 93 bp, Homo sapiens
gtgaagtcattgatctgaggactataataccttgggatgtggacacaatttgtaagtctccagagaatacagagggcaaagatggatccaaag

SEQ ID NO: 658761 - DNA, 96 bp, Homo sapiens
atgagttcaagatcacatggtgagtgatcagcagctggactgtgccttggacctaatgaggcgcctgcctccccagcaaatcgagaaaaacctcag

SEQ ID NO: 658762 - DNA, 133 bp, Homo sapiens
ctcagaagcatgtgtcttccccagctctgcagccacatactatccgtttgttcaggaaccaccagtgacagataccaaatatgccccaacagcggcaagaccagcatcatcagagtgccatgatgcacccagc

SEQ ID NO: 658763 - DNA, 90 bp, Homo sapiens
ctgttctgccctggctgcctcagccctaccagcactggtcatgtctaaaggactccctggaggaaaagcggaagcggcagcggtctgaac

SEQ ID NO: 658764 - DNA, 100 bp, Homo sapiens
gcccagcagaatttgtatagagatgtgatgttggagaactacagaaacctggtctccctagctgatggtgagaccattctaaaaggcctccagtccattt

SEQ ID NO: 658765 - DNA, 89 bp, Homo sapiens
cagattacgaggattatggatgaacgtaacagacagggcggcgactggcggcgcgatggacctgaccgggctcctgctggacgaagaag

SEQ ID NO: 658766 - DNA, 75 bp, Homo sapiens
gcaaagcccaacaccttcccccactgctagaacaacagaggcagcagttgcttactgaacgccaaaacttccaca

SEQ ID NO: 658767 - DNA, 100 bp, Homo sapiens
ggcatcattaacggaccttttaccatgaatagttctactccttctacaggttccagcagcactgatgtgaaggaaaaccgcaatctggacaacgtgtccc

SEQ ID NO: 658768 - DNA, 75 bp, Homo sapiens
gtggttcctgcatgaagacagtggctggcggtgcctggacgtacaacacgtgcagcacatccgcatcgatggctc

SEQ ID NO: 658769 - DNA, 100 bp, Homo sapiens
gcgggatcaagctgtgtgcattagtacaaatggattcactccttctccagttgcacagccacacccttcagctggccttaatgttgactttgaatctgtg

SEQ ID NO: 658770 - DNA, 140 bp, Homo sapiens
gccggaccatcggagagcagtgcagcgtgtgtggggtcgagcttcctgataacgaggctgtggagcagcacagttggaaaatggatataccttatttgattatgatgttggactgaatgatataattcagctgctagttc

SEQ ID NO: 658771 - DNA, 98 bp, Homo sapiens
agagcgtcacggcgtacgccctcatggggaaaatctccccggtgactttcaggtcagcagatccggaagctcatcaaagatgggctgatcatccgcaa

SEQ ID NO: 658772 - DNA, 142 bp, Homo sapiens
tgaatgaggagaaggaagagctgaagaagcaagtggagaagctgcaggcccaggtcaccctgtcaaatgcccaggataaagctgaaggttcaaacaagtggtggaaggagtatggaaattaatcttgtggaagtggttctct

SEQ ID NO: 658773 - DNA, 82 bp, Homo sapiens
tggggacccgggacgacgagtacgactacctattcaaaggattttttatcaagcagaaatgcatcgaacaacgagaatcaag

SEQ ID NO: 658774 - DNA, 101 bp, Homo sapiens
actcgatccgcctgcctgcgcacctgcgtgctgctacccccgtatgatgatgccactgtgaatggtgctgccaaggagccaccgccaccttacgtgtctgc

SEQ ID NO: 658775 - DNA, 100 bp, Homo sapiens
catctgacgtgagttcaagtacagatcacacgcccactaaagcccagaagaatgtggctaccagcgaaggcttctagtgaggacgttgccagctccccgg

SEQ ID NO: 658776 - DNA, 82 bp, Homo sapiens
gcggaagtccccgaggcagcctccgcggaggagcagaaggcaacagcattattgagaaaagcccttacagaagagtgtggcc

SEQ ID NO: 658777 - DNA, 98 bp, Homo sapiens
gaagattcgaggcggcgggggacaagtcggcgccccagagcggacgaggtatggcacagtcacaagggtgggtgaaaagatacatcaaggccttttgt

SEQ ID NO: 658778 - DNA, 74 bp, Homo sapiens
aaggaggagcttgccaagaagtgtggcatcaccgtgtctcaggaatttgctgacacaatatcttccgcctggtg

SEQ ID NO: 658779 - DNA, 74 bp, Homo sapiens
gttcattcagggcctgctgtggaagaccagccccaaagggaggaggacctggttgatagaagaatttatctcgt

SEQ ID NO: 658780 - DNA, 75 bp, Homo sapiens
ggcgagacctggagatggacctgtgatctgggtatatatgagagatcgagaaattgctgccacagccagagacct

SEQ ID NO: 658781 - DNA, 75 bp, Homo sapiens
gaggtccagatgaaagagaagtttctggtcactccccaggattatgcgcgcaccagtggcagttcgcagcctcca

SEQ ID NO: 658782 - DNA, 52 bp, Homo sapiens
tagctccacattcctgtgcattgagggaatcaggaaacccaggcccaacggc

SEQ ID NO: 658783 - DNA, 100 bp, Homo sapiens
actcctgcccctcttcaacacctggacaccttgttagatggaacctacaagcagaatttcgctaaggagtttgtgatcagtgatcggaaggagctggagg

SEQ ID NO: 658784 - DNA, 82 bp, Homo sapiens
tcggccagaaccaccagggcgacctggacgtagccaagcgcatgatccgcatggccaaggtttagaacttcaggagagaagc

SEQ ID NO: 658785 - DNA, 74 bp, Homo sapiens
ctacccagggagaggaattacgggaacagaaagaaaagtccgaaagagctgcacttttccagccattaactcca

SEQ ID NO: 658786 - DNA, 100 bp, Homo sapiens
aaaacatcaaagaggtctagcaaaggttattcagcttctcaaggctggaaaagcgaaggaagtttcctacaatgcactagcctcacacataatctcagag

SEQ ID NO: 658787 - DNA, 74 bp, Homo sapiens
tggtcaagcgggccacgcacctcgtcaccaaggccaagatgtgacaagccgaggcggtgagccgggcaggagga

SEQ ID NO: 658788 - DNA, 100 bp, Homo sapiens
aagtctttgtcttccttcctgactgactcatcaggaagtcagactcccgaaccattgctccaaatatccgttgaagcagaaaccagactgtgatgactgg

SEQ ID NO: 658789 - DNA, 50 bp, Homo sapiens
ccaagctcgtagcctgccactccgtgcaaagtcctacctccatctccgtg

SEQ ID NO: 658790 - DNA, 82 bp, Homo sapiens
ctgattgctacagatgtggcctccagagggctagggcacaggtgcccgaccatacactgggaaagttggtgctgaggatgcc

SEQ ID NO: 658791 - DNA, 51 bp, Homo sapiens
ataggatttaaccgctctctgcctcccagaatcatgtgagggccaaccggg

SEQ ID NO: 658792 - DNA, 75 bp, Homo sapiens
cagggaggatgtcgggacaccccggaagctgggaaatgatcgtcagtatttaaacagatcacatcatgcgtgagt

SEQ ID NO: 658793 - DNA, 74 bp, Homo sapiens
aaaagcccaggcataaaatcatctccatattctcaggcacagagaaaggatttgttaaggattccaagtaactc

SEQ ID NO: 658794 - DNA, 82 bp, Homo sapiens
agcaagttcatggtcacggagaaggcagcctacataggtcaaaatgcagatcttcgtgaaaacccttaccggcaagaccatc

SEQ ID NO: 658795 - DNA, 74 bp, Homo sapiens
tggcaagaggagtcaaaatacgatcttatttcaatatggtttcaaaacctttactttggggaagaatgaataaa

SEQ ID NO: 658796 - DNA, 80 bp, Homo sapiens
accgctgccctcagctccgagtccagggcgagttgcaagaatgtagtaactctgatcagctacaaggaaaggaggaaaga

SEQ ID NO: 658797 - DNA, 82 bp, Homo sapiens
gatcatgtctgcgagccaggattcccgggccagccaagtctcgggatggtgaacgtactgtctattgcaacgtacacaagca

SEQ ID NO: 658798 - DNA, 100 bp, Homo sapiens
gccgccgacggccctaccgtgtgctgcaacccctaccacttcagccggctctgcgggcccggtgtcatggagaaactccagctgggcccagagattctgc

SEQ ID NO: 658799 - DNA, 88 bp, Homo sapiens
ctggccgcctctgccgcagctggaggactcacaccacccggcaagaactgctcactacggctccctgccccagaagtcacacggccgg

SEQ ID NO: 658800 - DNA, 101 bp, Homo sapiens
cagggggaacaccaggccaatgcatcccattcagcaaagtagagttccccatggtagaatgagggagctctgacagcctttcgcaagacatatgacaaaac

SEQ ID NO: 658801 - DNA, 100 bp, Homo sapiens
cggagttccggcgcgccgggagccgttggtagctggcagtgttgtgatggcttttgaagaagtatgcccggacagaatagatctgattcataaaaattac

SEQ ID NO: 658802 - DNA, 97 bp, Homo sapiens
ggcagccggtggggaagacaaggagggcttgccgctgttccgtaacccagtgattccagtcttggctgtggtatgaatcacttagggatcctattaa

SEQ ID NO: 658803 - DNA, 95 bp, Homo sapiens
cgtgagagtcgtcagtgccctattccttcacatgtaattcagaaattagggacagttgatcatggccttgccaggttggtgacagtatattgtga

SEQ ID NO: 658804 - DNA, 99 bp, Homo sapiens
gtccctcgcctcccggccgagctgacgatacactgaagagatggtgccttggcacccttgcctggaactcgttagcaactgcgagcagaagctttccag

SEQ ID NO: 658805 - DNA, 100 bp, Homo sapiens
gtgaccgttggagtttaatgagaggaatatactcatcatcagtctatttagaagagggtacaggcatccttcacctgctattgttgcaagaacagtcaga

SEQ ID NO: 658806 - DNA, 87 bp, Homo sapiens
ccgccccgaactaagcagggcggtcgggggcacacattctggcagttccgccatgagaacccccagacccgggttgggggcccgccc

SEQ ID NO: 658807 - DNA, 80 bp, Homo sapiens
ctcaactccaaccacgacggggccgacgagacctcaggggaggtcatcaaggcttgggacattgccatagccaccatgaa

SEQ ID NO: 658808 - DNA, 48 bp, Homo sapiens
ctgcagtcagtccagagctgcccagatggagctatgacattgaagaga

SEQ ID NO: 658809 - DNA, 75 bp, Homo sapiens
gaaacctattgttcgcagaaacacacaaggagagagaagctcttcagaaacagctggatgaagcaaatcgagaag

SEQ ID NO: 658810 - DNA, 90 bp, Homo sapiens
catggcgctcctgctgtgcttcgtgctcctgtgcggagtagtgggttgatgataattagaagcatgctttccactgaacttcccgacaac

SEQ ID NO: 658811 - DNA, 50 bp, Homo sapiens
cagaaaaccttccatttccagggtgatcccattaagatactaatgccatc

SEQ ID NO: 658812 - DNA, 100 bp, Homo sapiens
agaagttgcaaaccgagtttccaagagctctcagcatggcggctcctctacgtcacttgcgtccaccaaagtctgcagctcgatggatgagaacgatggc

SEQ ID NO: 658813 - DNA, 100 bp, Homo sapiens
cagcgagttgactacatcatgcagctgcctgtgcccatggatgcagcccttaacaaaggaaagtctttgggttcggaggattccagaaacatgaaggaga

SEQ ID NO: 658814 - DNA, 99 bp, Homo sapiens
tggggctgaaattgccaagaatctcatcttggcaggagtgaaaggactgaccatgctggatcacgaacagagggagcactatgtctgcggaagtccccg

SEQ ID NO: 658815 - DNA, 71 bp, Homo sapiens
tgccggaccccagcacacagaagccgagacgttttctgaatttccagatcccatgtggggttcagattatg

SEQ ID NO: 658816 - DNA, 75 bp, Homo sapiens
cctgtttgagaaaaggcctaagaattttggcattggacttggacagaatgctttagggttgactttgggaactac

SEQ ID NO: 658817 - DNA, 122 bp, Homo sapiens
attttgaattttttggcagcagaagggcgactgagtactcaacatattgactgtatttgggctgcagcacagcacccttacccttctgaagaacagaaaaagcagttggcacaagacacggg

SEQ ID NO: 658818 - DNA, 88 bp, Homo sapiens
tgaaaggcaaagaacaagagaagacctcagatgtgaagtccattaaagaacaaaagtgcctttttatgtggagtcatgaagacttaca

SEQ ID NO: 658819 - DNA, 100 bp, Homo sapiens
gcctggctgtgactactcactttttaaggatgctgcagctgattcagagtaggctacaagaagagcattcacttcaagatgtgatatttaaaagtgcttt

SEQ ID NO: 658820 - DNA, 108 bp, Homo sapiens
atccgcggaggccgacaggattcgttggctgccgtccccgctgctgtgcattggtcgtgagatggagaataaagaaactctcaaagggttgcacaagatggatgatcg

SEQ ID NO: 658821 - DNA, 80 bp, Homo sapiens
aggccaccttccagatggagctgcccaagaaagccttcatcaccaacttctccatgttttcctccctcaagcaattcgac

SEQ ID NO: 658822 - DNA, 75 bp, Homo sapiens
cctatggacccttctacctggaatactctcttcttgcagaattgtaaggttgataacggcaaaacaaaggatcta

SEQ ID NO: 658823 - DNA, 82 bp, Homo sapiens
gtcgaggaggcgcaggagactgaccgcaacggcaggggcgtgatggtgggcatgggtcagaaggattcctatgtgggcgacg

SEQ ID NO: 658824 - DNA, 87 bp, Homo sapiens
tgtattctttacctgcttcccaatcccactgatgaggatcagcccatgagagacaagagagacacctccaacttcgacaaagagttc

SEQ ID NO: 658825 - DNA, 100 bp, Homo sapiens
ggcggacagtgcggaactaaagtgtcatcttgcattacaacatataagaagacaccacctccagtcccacccagaactaccacgaaacctttcatttcta

SEQ ID NO: 658826 - DNA, 122 bp, Homo sapiens
ttccagtttcccggaggaaatgacaattacctgacgatcacagggccttcgcaccccttcctgtcaggggccgaggatgtacagttacccagcacgtgtacctcctcctcctcctattgctc

SEQ ID NO: 658827 - DNA, 83 bp, Homo sapiens
gagccttcaaaagcagtgcaactggctcagtattcacagggaaagctgtgaggtcagggcctttctacttacaaggaactttg

SEQ ID NO: 658828 - DNA, 75 bp, Homo sapiens
ttggcgtggatccgctggcctttgaccactgaaaaacacacatactatctgactgcagattctcccaatatattg

SEQ ID NO: 658829 - DNA, 101 bp, Homo sapiens
ccgcggccaacatgagcttcttgttttcctgggcttcccgatggactcgagtttttactatgtgagcatcccggtgcctgcacagcaaggactctcattgg

SEQ ID NO: 658830 - DNA, 100 bp, Homo sapiens
gccggcgctgagaggggctgcggccggagcgggcggctgagacaaaggcgacgacacttgtgtaacaacaaggaatagcaccagttgtacatcttcaact

SEQ ID NO: 658831 - DNA, 51 bp, Homo sapiens
agagactgcatcagagccactgtctgaggtggccaaacaggagaagaagaa

SEQ ID NO: 658832 - DNA, 75 bp, Homo sapiens
cgggagccaacatggcagcggggttcgggcgatgctgcaggtggccagcattggctgtggattggtttgaataaa

SEQ ID NO: 658833 - DNA, 75 bp, Homo sapiens
ctattttttattatgttgcacggagctccagtgatccacaagctcagaaatacatcgcggaaagtaaatgtttag

SEQ ID NO: 658834 - DNA, 80 bp, Homo sapiens
gcgccagcggccgagcgggcggcttcctggcctgggcgctccggtggcggcggaggcttcagtttcacattcttggtacc

SEQ ID NO: 658835 - DNA, 82 bp, Homo sapiens
aggtgatccagcaaggtcggcagagcaaggggcttacgcagaaggacctggccacgatggagaaggaggagacaacccggga

SEQ ID NO: 658836 - DNA, 75 bp, Homo sapiens
cttttccctctccctttccctaaggtggttttttggcaaaatccccagagccaaggcagaagaaatgcttagcaa

SEQ ID NO: 658837 - DNA, 75 bp, Homo sapiens
attagatgatccaagtcaccaagaaattactgtctcaagtgatacgaacccagcccttgctgacatctacacaga

SEQ ID NO: 658838 - DNA, 51 bp, Homo sapiens
tcccactgatgaggatcagcccatgaagttgggatatctaaagcagaagcc

SEQ ID NO: 658839 - DNA, 100 bp, Homo sapiens
gaagaggttgttcacaacaggtatccagcaatgaggacctgggttcatgcttgaaccagatccggaacatagacctgatatatttcaagtgtcatatttt

SEQ ID NO: 658840 - DNA, 100 bp, Homo sapiens
ttgactttggacacatggaggctgtgaacctgctgagttcaaacagatacacggaaaagcagatcgtgtggcatgcagcattttggaaggaaaattgaag

SEQ ID NO: 658841 - DNA, 50 bp, Homo sapiens
acaagatcagcaaatctaactgaccagatcatggaagggaagtggttgct

SEQ ID NO: 658842 - DNA, 50 bp, Homo sapiens
aagctgtgcgacgtgaccctcaagggaccatgcctggccggatgctgccg

SEQ ID NO: 658843 - DNA, 75 bp, Homo sapiens
cagcacttcatccagcagtgcacaggtgcagcagtaccgcgtcgccatgactgccaaggactgctccatcatgat

SEQ ID NO: 658844 - DNA, 75 bp, Homo sapiens
aattctgctatggcaaacatgtacatcaataccatgaggaactgtgggggattggaaaaaccacttcactgttgc

SEQ ID NO: 658845 - DNA, 74 bp, Homo sapiens
ccgcatcctgcaccagacccaggactcccaggtctactggacagtggcgtgtgaccccccaaagacacacgtga

SEQ ID NO: 658846 - DNA, 100 bp, Homo sapiens
gtttgaatgaaattaatgaagctgtacctcaggtgaagttttatgaagaggttctgatctacaatggccaactggacatcatcgtggcagctgccctgac

SEQ ID NO: 658847 - DNA, 82 bp, Homo sapiens
tcgctccggagccgctgcacatttcgccattttgcagactctgatcacagtgaaacgttccatgggaacttgggccatgaga

SEQ ID NO: 658848 - DNA, 156 bp, Homo sapiens
cgtcgtggactatttccctagcgaggacttctaccgctgcggctactgcaagaacgagtcgggcagccgctccaatgatctttaatctcatgaagtacgacagctacagccgcttcttaaagtctgacttgtttttaaaacacaagcgaaccgagg

SEQ ID NO: 658849 - DNA, 98 bp, Homo sapiens
acaatggcatttacagaaagagtcaacagcagtggcaacagcagataatctcagtgataccttgaagaagctgaagataacagctgttgacaagactg

SEQ ID NO: 658850 - DNA, 75 bp, Homo sapiens
caacctcccacaccgaccaatcctcacgattgagtgtcaaagaagaaaacatccagtacagacctttctgatatc

SEQ ID NO: 658851 - DNA, 100 bp, Homo sapiens
gcccgatccaagaaccttctggactaatgatgatccaggatcaagaattggttaaaatagttggaatacgatatgaagttgggccccctacactctgttg

SEQ ID NO: 658852 - DNA, 75 bp, Homo sapiens
caactcccaagaaccccataacatcctgccactggcatccagtcagatcaggtgtggggatattcagctttgcca

SEQ ID NO: 658853 - DNA, 100 bp, Homo sapiens
gaacgattgggctgagcagaggacgacatgttgcttttcgtggagagtattgggaaagggtcgttgtggtgcatagacccagagtatagacaaaatctaa

SEQ ID NO: 658854 - DNA, 88 bp, Homo sapiens
cagcgtgcgttcagccctgggtgtactcgacagattatctctgagaagctaggccgtggctcaagaactgtggaccttgaacttgaag

SEQ ID NO: 658855 - DNA, 90 bp, Homo sapiens
cttgcagatgctgtgagatccagagctaagactccacgacatcccggaagccgaaaaatgatgtaaaaaaagattggtctgaccatgctc

SEQ ID NO: 658856 - DNA, 100 bp, Homo sapiens
gctgaagcacataacctctgcaccctgctagaaaatgccatacaggacactgtgagggaacaagaccagagtttcacgatgctgggctcttgcactgttt

SEQ ID NO: 658857 - DNA, 75 bp, Homo sapiens
cccagccccgacctggcggggccaggacgctggttcatacactccaagagttttgctctgattgcccaggctgga

SEQ ID NO: 658858 - DNA, 50 bp, Homo sapiens
gcagtcaagctgcggcgagatagcatcttcaatagtcaaggaggacaaag

SEQ ID NO: 658859 - DNA, 117 bp, Homo sapiens
gaagactacagatattatgaatacaaccatgatctcttccaaagaatgccacagaatcaggggaggcatgcttcagatgcagcacctgaggtccactgcgacgcctagcccgtcccc

SEQ ID NO: 658860 - DNA, 87 bp, Homo sapiens
tgcagcccggctccggccccgggactaggggcgactgcctggggcgccggcgaggtttacccaaggtccagcctagcccctaggcac

SEQ ID NO: 658861 - DNA, 102 bp, Homo sapiens
gttcgcccgtccccctgccccgttcacaattctgaagatgatgagaaactgaaaaagaggaaggagcgatttgggattgtcacaagttcagctggaactgga

SEQ ID NO: 658862 - DNA, 100 bp, Homo sapiens
ccaaaatgcaaactgacaaaccttttgaccagaccacaattagtctgcagatgggcactaataaaggagccagccagctctcctatgtggacgccgaggg

SEQ ID NO: 658863 - DNA, 76 bp, Homo sapiens
cttcttctgaaaaagagatcttgctctcaagaggcagaatttatataataatcctttcaactctatgagttacacc

SEQ ID NO: 658864 - DNA, 75 bp, Homo sapiens
agaagctggagctcacggagaagaaggcctccgacggagctgcagtccatggctgaccaggagcaggtgtcacca

SEQ ID NO: 658865 - DNA, 98 bp, Homo sapiens
tgccgctgttctttgtttccccggtgtctgttgcagcttgcgtttggggctttcgacatgacaggtcactagaggctttgatggtgaggaaaggaaag

SEQ ID NO: 658866 - DNA, 96 bp, Homo sapiens
cttggggacggagcagcgcgtcgtggggcgagcggcagatgccatggacaatattaccaggcagaaccaattctacgatacccaagtcatcaaaca

SEQ ID NO: 658867 - DNA, 82 bp, Homo sapiens
cccagaccctggagcctcagttggaagcagccgatccagcctgcggagcctgtggggcaggcatttgcctggtggcctgatt

SEQ ID NO: 658868 - DNA, 99 bp, Homo sapiens
ctttaaagttcaaagctgcagtaatggaaattggaagagttcttgctcatcgtggtggctattggactctgcttcagaactgctgtcgggccttatgga

SEQ ID NO: 658869 - DNA, 83 bp, Homo sapiens
ctgcccgggacgcccgcaccaactcctgcgcgcggatgacccctccggcgaaggtgtcctgccctcggcccgcggcccagcca

SEQ ID NO: 658870 - DNA, 109 bp, Homo sapiens
caaatggcggacttcgacacctacgacgatcgggcctacagcagcttcggcggcggcagagggaagccaccattcttcagagggcaatgaaggcacagaaatggaagta

SEQ ID NO: 658871 - DNA, 82 bp, Homo sapiens
ggagctgggcgacgagctgaccctgggagacatcgacgccattgagacccagagcagcagttctgaagagatagtgcccagc

SEQ ID NO: 658872 - DNA, 74 bp, Homo sapiens
aaggagcaattctccaatacttacagtaatctcatattaacaggagaagactttgcagttgtgcagcaagaaat

SEQ ID NO: 658873 - DNA, 101 bp, Homo sapiens
gggagctgctgggcgaagcacgctactacctggtgcagggcctgattgaggactgccagctggcgctgcagggctactacaaagttctgggaaagggaaag

SEQ ID NO: 658874 - DNA, 100 bp, Homo sapiens
cgtggtgaaggtccggggcttgccctggtcttgctcggccgatgaagtgcagaggtttttttctgaagatgattgaagaatcactgaagattaaaataaa

SEQ ID NO: 658875 - DNA, 83 bp, Homo sapiens
ctctacttccctctgctccttcccagacattccacttcttccatctattacatctctgagtctaaatgaaaatgaagagaaga

SEQ ID NO: 658876 - DNA, 100 bp, Homo sapiens
ggccggcgagccaaagaggagccggccgcgcgggccgggaggggacggccgccggagccgcgaggccaagtaaccagttaggggccttggtacatcaaag

SEQ ID NO: 658877 - DNA, 100 bp, Homo sapiens
tggcggagggcggcagcccagacgggcgggcagggccgggctccgcagctgccgggccgcaagtacagccctgggtacaacaccgaggtgggagacaagt

SEQ ID NO: 658878 - DNA, 74 bp, Homo sapiens
cgaatatactgggcctgagagttacgtggcagaaatgatcaaggtgagctgtcagggagaaatgtcgaaacagg

SEQ ID NO: 658879 - DNA, 50 bp, Homo sapiens
gagctttgcgggaaagcagcggaaaccacccctactcctaatcccccgac

SEQ ID NO: 658880 - DNA, 50 bp, Homo sapiens
cccgcagtcctaccccattgtgacaggagtggcaaaattctattcagaag

SEQ ID NO: 658881 - DNA, 50 bp, Homo sapiens
ttctgatggtcagcgtcgttctagtaaactttggagtcggagtttaaaac

SEQ ID NO: 658882 - DNA, 98 bp, Homo sapiens
cagggttgaggcgattccagagagcggcggaaaggataagcctcgacttagaagctaccgagttaccctaagaaagctacagagggccggagctggag

SEQ ID NO: 658883 - DNA, 132 bp, Homo sapiens
ctccaccaaaacccaacagaccaccaaatgttgacctgacgaaattccacaaaacctcttctggaaacagtgtctgtgggaggttatgtttatttgagacttctccatcgggatcgcctggtgtcaccaagt

SEQ ID NO: 658884 - DNA, 90 bp, Homo sapiens
aaaccctatgaagaagcactgcaagacactaagggcgactaccagaaagcgctgctgtacctgtgtggtggagatgactgaagcccgaca

SEQ ID NO: 658885 - DNA, 111 bp, Homo sapiens
cttctccactttcgccagcccgtgccgcgagcgcggcctgcaggaggtccgcgggagagctgtggggcttggtgagtgtttcgtggcctctcgggttggtcagcaccccca

SEQ ID NO: 658886 - DNA, 75 bp, Homo sapiens
ccaacccaccccacatggcccacgtacctcaggattttttatcaagcagaaatgcatcgaacaacgagaatcaag

SEQ ID NO: 658887 - DNA, 100 bp, Homo sapiens
gaagaggctgtggattcactgtctccagcgcctcttctttgagaaccaccctgcctccatccctgccaaggatcaagcaccccaacattgtagccctgga

SEQ ID NO: 658888 - DNA, 100 bp, Homo sapiens
accccttccacgtcatccgcatcaacaagatgttgtcctgtgctggggctgacaggtatgatgttctgtccccgggggagatgcaacggctctcctttgc

SEQ ID NO: 658889 - DNA, 83 bp, Homo sapiens
aggagctaaagcagcgtgcgttcagccctggggtacactgaggaggggacggctccgtcttcacattgtgcacagatctgagg

SEQ ID NO: 658890 - DNA, 75 bp, Homo sapiens
acactgtattcgttgacagagctttgatagtcgtaccatatgcagaagttatcttacagactggagagagtgcta

SEQ ID NO: 658891 - DNA, 100 bp, Homo sapiens
acgtgtcccggggccgacccggcccgtagtgtggaagcagcttcagatatgttgatgatgtgatcagccgcattgacaggatgtttcctgaaatgtccat

SEQ ID NO: 658892 - DNA, 75 bp, Homo sapiens
ctgttccgggccgcgcagctgccgaacgacgtggtcctacagagatctcggctcaccaaattccacaacctgaag

SEQ ID NO: 658893 - DNA, 83 bp, Homo sapiens
cagattcgcagtggtcgcttcttctccttggaggagaaggagaagcggcgcctcgaccagctggaacgtaagaaggagacgca

SEQ ID NO: 658894 - DNA, 89 bp, Homo sapiens
cctaaaacaggatcagtaaagaaggaaaaagcagtaaagccagaggaagtctgcagatctccaggggagcccaccagcctagtcaacat

SEQ ID NO: 658895 - DNA, 75 bp, Homo sapiens
gcctggagaggatggaccgcatcgagaaggagcgcaagcaccagaaggatgctggcacgtgtgtcctggtcctca

SEQ ID NO: 658896 - DNA, 100 bp, Homo sapiens
cggggacattattgcgcgtggaacggctgcttttggaagctccattgatatcttgatgatggggtatacctgagaggacagcagggaggtgagaacaatg

SEQ ID NO: 658897 - DNA, 90 bp, Homo sapiens
gaaggcgtccgttggccttcgtacccgtcttgattgaggttaatttggagtggcccctggagtcagtttcctacaccatccgaggcccca

SEQ ID NO: 658898 - DNA, 95 bp, Homo sapiens
caaggtcggcagagcaaggggcttacgcagaaggacctggccacgagtaatcaagtcagaggattatatgacttttatctgcctagagaagaact

SEQ ID NO: 658899 - DNA, 82 bp, Homo sapiens
aagatgttcagcgtagagtcgctggagcgggcggagctgtgcgagagcctcctcacttggattatgatgcatcattatcaca

SEQ ID NO: 658900 - DNA, 75 bp, Homo sapiens
gcagacatcagctcctggttcaacgaggccattgacttcataggctgaacatgaactaaatctggcaagaaaaat

SEQ ID NO: 658901 - DNA, 75 bp, Homo sapiens
tgagaggtcacttctgcctttccagtgacaaaatggtgtgcagcagcccatcaataagggaggggtcaggactcc

SEQ ID NO: 658902 - DNA, 75 bp, Homo sapiens
agctggtgttcgtgattgggatcaaccagacggaaaacccgaaaaggtgtgagcggtactgggcccaggagcagg

SEQ ID NO: 658903 - DNA, 100 bp, Homo sapiens
atgttgccctttggagacaaaacaagatcctccgagcggcggcgacggctgttgctaagggaggggacgcgcgaggaagcgcgacccgggcggcagacgg

SEQ ID NO: 658904 - DNA, 72 bp, Homo sapiens
cgagatttgctgctaggggaccaaggatggcaaaacgacgacaggattcagtgtcatttgaagatgtggctg

SEQ ID NO: 658905 - DNA, 100 bp, Homo sapiens
atccctggcttccgtgcccgctggcattgctaaacacgtggaaagaatcaatttggggcacatccatctggaaggcctttttcttcacccccaacttcaa

SEQ ID NO: 658906 - DNA, 118 bp, Homo sapiens
tggtcgactacaagaagagggcggagcggagacgggagtattatgaaaagatcgcctgtagtggtggagacacgcccagtggatgatcctactgctcccagcaacctctacatccagg

SEQ ID NO: 658907 - DNA, 100 bp, Homo sapiens
aaggagctaaaggaaggagatattcctgaaattgagtggtgggactcttacataatccccaatggctttgatctgctattcaagatctctggcagtggag

SEQ ID NO: 658908 - DNA, 75 bp, Homo sapiens
cgcattcttctcagagaactggagaaggacccctatggtgtagccgtgggtggaactgtggggcactgcctgtgc

SEQ ID NO: 658909 - DNA, 60 bp, Homo sapiens
gaccctgtggaagaaccagatccagaagtcatggctaagcgcacgtaccgggtgccgaag

SEQ ID NO: 658910 - DNA, 87 bp, Homo sapiens
ggtgaaggtccggggcttgccctggtcttgctcggccgatgaagtgcagaggtttttttctggtcttgggcgtctttggtactggct

SEQ ID NO: 658911 - DNA, 80 bp, Homo sapiens
caggttgtgaggaccaagcacgcctcttcaaagacgaggtgcctgtccttgatccctctcccttcccttcagcatctaca

SEQ ID NO: 658912 - DNA, 100 bp, Homo sapiens
ccgggaactccactttgtggcaccgtgagattctccagtcgtgtctgttcaaaccggcacggtctgatccggaaatatggcctcaatatgtgccgccagt

SEQ ID NO: 658913 - DNA, 75 bp, Homo sapiens
agctgggcaaccttttcctgaatgaagatctggaggtgaaaataggtacagtctttgcccgctgcctgatttttc

SEQ ID NO: 658914 - DNA, 83 bp, Homo sapiens
ggtgaacaggtgaccataactctgccaaatatagaagccaacatagccgaggtagaggtctccatccctgccaagctgcacaa

SEQ ID NO: 658915 - DNA, 82 bp, Homo sapiens
tccatcacccaccaacaacaccacaataatccacagccaagatgagatcgtggggctcaccagcgtcccccatggcttctga

SEQ ID NO: 658916 - DNA, 100 bp, Homo sapiens
agaggaggacatcccatgcggctactcctgcccagcgtggtggggcagcagaagctccagagcccagacttgcagggaaagcaggcaggatgggagagtc

SEQ ID NO: 658917 - DNA, 100 bp, Homo sapiens
ttaatcctcaatttaagcctgatctaacccctagaaacagatcttgagccagatgattgtgcatccatttacatctttaatgtagatccacctccatcta

SEQ ID NO: 658918 - DNA, 90 bp, Homo sapiens
tcaggcgtgcgcggacggtgtgcgggccttagaaaatttacgtgtatacctgtgtgagaaaatcatagctgagagacattttgatcatct

SEQ ID NO: 658919 - DNA, 82 bp, Homo sapiens
ccgcgggtttgggaggagtatgccaaccagcatggccctggacagatttggtgttgtactgcgaggcattcctgaccaccta

SEQ ID NO: 658920 - DNA, 90 bp, Homo sapiens
atttgaagggggaagtctcttgcaaattccagtcaaggccctaaaatataggaattacatgaatgacagtcttcgaaccaatgtgtttgt

SEQ ID NO: 658921 - DNA, 74 bp, Homo sapiens
caggaagattgctggctcagaggctctatgcaggttccactgtcaaggtggacccaagtggagagattgtggaa

SEQ ID NO: 658922 - DNA, 51 bp, Homo sapiens
atttagcgtatgaaactgtggcacagatactgagccttcataagggttgac

SEQ ID NO: 658923 - DNA, 74 bp, Homo sapiens
tggagtcgaaggccgtgaggtatttttctaaggaaggaagcagccaccctcgccatggcctccccgcccgcctg

SEQ ID NO: 658924 - DNA, 50 bp, Homo sapiens
agaatcttttatggggggcttatctggagtccatctttcaccatcttctc

SEQ ID NO: 658925 - DNA, 83 bp, Homo sapiens
gcgttgtcgccgccgctatggggcccaccttgggacaccttgactccaagcccagcagtaagtccaacatgattcggggccgc

SEQ ID NO: 658926 - DNA, 75 bp, Homo sapiens
ccagccctgcctctccctgggctctgtttgaagaaaacaggtctgaaacaaggtcttacccccagctgcttctga

SEQ ID NO: 658927 - DNA, 80 bp, Homo sapiens
aggcgctgcgccgcaacgccgagcgcaccgacatctgcctgctcaaagggaaatcctcattgacgattcaatttgttgaa

SEQ ID NO: 658928 - DNA, 100 bp, Homo sapiens
gccaggaatgatggatgaactctccgagttgagagaattctatgatccagatacagtggagctgatgaactggattaagagagaagtttgctgaggaatg

SEQ ID NO: 658929 - DNA, 101 bp, Homo sapiens
caacaccaccgggaagcagctatttgaccagatcctaaatgcccaggagatgttgattttcataatagtgactgggacattaagacaatcaccagctcctt

SEQ ID NO: 658930 - DNA, 75 bp, Homo sapiens
cagaagccgagttcaacatcctcctggccaccgactcctacaagaaacgcttcgttaagggactcaggcagtacg

SEQ ID NO: 658931 - DNA, 113 bp, Homo sapiens
ctgctcgataaatcagacagaacagttaatcctcaatttaagcctgatctaacccctagaaacaggttcaaaccttgtactactcagctgatcacaagctgcttgatgggaac

SEQ ID NO: 658932 - DNA, 73 bp, Homo sapiens
gcgcctcccattgcagcctttgtgataactgcgtagtgatcctgccatgaagcagtttctgctgtacttggat

SEQ ID NO: 658933 - DNA, 75 bp, Homo sapiens
ggatcgctgtgatcgtcacttggtgtttaaggataattgctgcaagagagaaattctggctcttcagatctattg

SEQ ID NO: 658934 - DNA, 100 bp, Homo sapiens
tggtgctgggtgcagatgcagtgtggctctggatagcaccttatggacagctatgctaagaaggaatctgatcttaatggcgcccagatcaagcttcgag

SEQ ID NO: 658935 - DNA, 90 bp, Homo sapiens
ctcagtcaacagctacagccaattttgctaactttgcacatttcaacagtcatgcaggaaataatgaagatgtttcattttcaagaccag

SEQ ID NO: 658936 - DNA, 82 bp, Homo sapiens
ccagggaaccctggtcaccgtctcctcagacacatgcctcactcctgtcagcagttccaccttttcatggttgaggagcaca

SEQ ID NO: 658937 - DNA, 90 bp, Homo sapiens
ctgagtatgagagagaaccaaatcacaataagtctttagctgcaggtgtgtgggggaagttaagatatgccaacaacagcaattacaaga

SEQ ID NO: 658938 - DNA, 100 bp, Homo sapiens
gtgggttacaaatttaagaacagatgaacaaggccttattgttgaagacctagtagaagaggtggaagaattgtatttgcaacgggtagcagaattggac

SEQ ID NO: 658939 - DNA, 100 bp, Homo sapiens
cggcgtttgggctacggttgttgttggcgactgtgcttcaagcggtcctcagaatggttggaatgaccctccagctttgaacagagtacccaaaaagaag

SEQ ID NO: 658940 - DNA, 100 bp, Homo sapiens
aactgtcaggtacctcaaagcgagcctgattccccacgtgtcacattggtccgtgacgtttccccactaagggtgagacccattactgagaacaaacccc

SEQ ID NO: 658941 - DNA, 83 bp, Homo sapiens
gcagatcctgacctctctgatgagatggatcgggagcatcgagtacagctgtccggcctccaacgagtgtgagatcaccaagc

SEQ ID NO: 658942 - DNA, 82 bp, Homo sapiens
ctgggacgtccggttgaccgcggatcttagaaatgaagttgaaaaattacgcaatgaagtgaatgaaagagagaaagcaatg

SEQ ID NO: 658943 - DNA, 90 bp, Homo sapiens
caagaggttatacaagaagaggaagagataatccatgaagataatgaatgggtgtgcaacttgctttggtgtttgctgttttattgccac

SEQ ID NO: 658944 - DNA, 88 bp, Homo sapiens
acaccaaggctatgacacaaagtcggacatctgatgttccatttaagcagacctcttccatagctgtagctggagcggtaattggagc

SEQ ID NO: 658945 - DNA, 83 bp, Homo sapiens
aggccagatgcagatctgaagacctattttactgataagaaaacacatctttacacactaaacctcctgccccccgaggtctg

SEQ ID NO: 658946 - DNA, 100 bp, Homo sapiens
caaacttatcatttatgacattgttgacatgcatgcagctgcagacatcttcaaacactacatgaagaaaaagcttgtggtgaaggggggcaaaaaaaag

SEQ ID NO: 658947 - DNA, 75 bp, Homo sapiens
cagagagcgccctgagagaacagggtggccgcttggtccaggttatttggaaatagcggtgcttgcagcgcttgc

SEQ ID NO: 658948 - DNA, 88 bp, Homo sapiens
gactccttcggcagtccacccaccgccgccgcctcccagggtaacaagatgctcaactatagtgctcccagtgcagggggttgcctgc

SEQ ID NO: 658949 - DNA, 97 bp, Homo sapiens
tcagcctcctaagtagctgggactacagtctgcgctcctcagaccaccggcaggtgaacagcctgatgcagaccgaggagtgcccacctatgctaga

SEQ ID NO: 658950 - DNA, 90 bp, Homo sapiens
aaaatggcggacgggaaggcgggagacgagaagcctgaaaagtcgcagcgagctggagccgccggaggcaaccactgagaaaacggaacc

SEQ ID NO: 658951 - DNA, 83 bp, Homo sapiens
ccggaagcttgtggcgctgaaaacgaacggtttatggttggctgtgggagatgtgatgactggtttcatggtgattgtgttgg

SEQ ID NO: 658952 - DNA, 75 bp, Homo sapiens
acagaagagaaggaaaacttacccggaggatacagtggaatgtccagctctgaagggcaaagtgcagaagatcct

SEQ ID NO: 658953 - DNA, 75 bp, Homo sapiens
ttttgatctcaactgcaaaatctgcataggctccttctcctgaaaaagccgaggaggagagtgagaggcttctga

SEQ ID NO: 658954 - DNA, 74 bp, Homo sapiens
ctacgaaccttacccggatgatggcatgggctacagagggccggagctggagatgtggtctctgggagtcactc

SEQ ID NO: 658955 - DNA, 98 bp, Homo sapiens
gagctcaaggggatgtcgctgctggttcgggcagagtccgacgatcccatacagtggtccacagaccaagtcctgcattgggtggtttgggtaatgaa

SEQ ID NO: 658956 - DNA, 98 bp, Homo sapiens
ctaatagtagttgggtggtggtcttcaaatctctcattacaactcatcatttgatggtgtatggaaatgagtaccaaaagaattggtggagctccatt

SEQ ID NO: 658957 - DNA, 100 bp, Homo sapiens
ttaaggattccaagtaactcttatttgatgagttttgatcatcctgagaaaaatgggccttggcctgcagacccaataaaccttccctcccatggataat

SEQ ID NO: 658958 - DNA, 98 bp, Homo sapiens
cttccaacggggtgacctcatccgtattctgagcaaggtccacctgcgtgtgcacagtggagagcgtccattccagtgtgccttgtgccagaagagct

SEQ ID NO: 658959 - DNA, 100 bp, Homo sapiens
ccccatcttgatcttacagaatcagaggtgcagccgcaagaaaggtaatgtggaccgaactaccatgtacaaatttccatcttcttctctgttgtgctat

SEQ ID NO: 658960 - DNA, 96 bp, Homo sapiens
cctgaactctagggagccgggttgatttttaaagcttcaaaatcctaagactcagcactgttgcgggctcaacatgaactctgctcctacattcat

SEQ ID NO: 658961 - DNA, 74 bp, Homo sapiens
gacgacgaggaagaggaggtttctgagcttagcagtgtctgcaaaaacgaatcttttcctacaacctgttaact

SEQ ID NO: 658962 - DNA, 98 bp, Homo sapiens
tgcccgcggctgcagtcggggcggcagctgaggcggaggctgacgaggaggcggatcccccggcgtcaggtcgggaaagaggttaaagaagacacgca

SEQ ID NO: 658963 - DNA, 98 bp, Homo sapiens
caaaatctatgaatgaaagcatgaaaaatcaaaaggagttcatgcttatgaatgctcgacttcagtatggtggtgatattacccgaaaaatgaagctt

SEQ ID NO: 658964 - DNA, 100 bp, Homo sapiens
cagagagagagcttggttaacttgggagaaagtttcatctgtggatggagtattggtgctactcgtgagcagtagtcgccatccagacagatggattgtc

SEQ ID NO: 658965 - DNA, 75 bp, Homo sapiens
aggagttggaaaaaggagaggcccatcgggaagggcttgcttccggcgtcatggctcaaagggccttcccgaatc

SEQ ID NO: 658966 - DNA, 98 bp, Homo sapiens
cttcaatggaaccctccacttttccatgtccgagaaatgtggtttgtggtaggaaggaatggtggcctactccatgagcagagcctgtgggggctgaa

SEQ ID NO: 658967 - DNA, 75 bp, Homo sapiens
ctcggacggccacgagactcgggagccaaaaacctgtatatcatctccgtgaaggggatcaagggacggctgaac

SEQ ID NO: 658968 - DNA, 89 bp, Homo sapiens
attttactaccaagccctgtcagtagctcctcagattggttggggggagttggagccacaaatagatggtcagacctgggctgagcggg

SEQ ID NO: 658969 - DNA, 80 bp, Homo sapiens
caagaaattggcattgaagttacatcctgataaaaacccgggccgcccaataactccagtatacacggtggctccaaacg

SEQ ID NO: 658970 - DNA, 82 bp, Homo sapiens
cggaaacatgtggccctacatcaggaatttcatggcaaggaacattcagaagattctcggccttgccccttcacgagccgcc

SEQ ID NO: 658971 - DNA, 90 bp, Homo sapiens
aaaggatgttggcggtccctgtgacctgtggagacacggccagatctgccctccaagaaaattcctgttccaagagaaaataaggcaaca

SEQ ID NO: 658972 - DNA, 82 bp, Homo sapiens
ctagcatctaagcctgttccctgttcaggaaagctcatcatctgcaatgtcactggcattgcccacaggcgtccccagggtg

SEQ ID NO: 658973 - DNA, 82 bp, Homo sapiens
cgcctgggccgcgccgacctggtcatgagcttcgttaacatggatgaaggatttgggggcagagcacttggcaggtcatgaa

SEQ ID NO: 658974 - DNA, 80 bp, Homo sapiens
catcagtccatcctcttccgtcagagtggcctcgaggtggtggcagggccgccccctgcagtccggagacgaacgcacgg

SEQ ID NO: 658975 - DNA, 90 bp, Homo sapiens
caatgactgcggagactacagtgatgagacacacgccaactgcaccaaccaggatgatgaccactggatcgtcgacacagactacgacac

SEQ ID NO: 658976 - DNA, 51 bp, Homo sapiens
ctgggttccccgcacctcctgcagtgaagatagtgatccggggagacagga

SEQ ID NO: 658977 - DNA, 99 bp, Homo sapiens
cggtaacaaacgagggttcccgggattggaccgacgcagccatggacacaactcagatgggaagttcatcgcccgggcacagcggatagagtacgactg

SEQ ID NO: 658978 - DNA, 129 bp, Homo sapiens
gggacccatttctcctcctttgacagggacatcagtggagccttctcagacccacagctgggagtgtccactcgccttccaccagcatggcaacgtcttcacagtaccgccagctgctcagtgactacg

SEQ ID NO: 658979 - DNA, 101 bp, Homo sapiens
tccggggaaggatgggacaggctgctgagtttcattcattggctcccatgtactatcgaggctcagctgcagctgttatcgtgtatgatattaccaagcag

SEQ ID NO: 658980 - DNA, 100 bp, Homo sapiens
agaaagtgttcagctctgaaagactgttttcttggaaaggcattaagaagatgagaagtttttgtctgaagtttttgcacaattaacagatgaggctaca

SEQ ID NO: 658981 - DNA, 100 bp, Homo sapiens
caagacagcatcaaacctcactgtctctgtcctggaagcagaaggagtctttgaaaaagttcagcggaccaggagaggagaaattgaaacatgctgctgc

SEQ ID NO: 658982 - DNA, 52 bp, Homo sapiens
gcctctcaaagtgctaggattacagagcaggctcatatgaatcaaccaactg

SEQ ID NO: 658983 - DNA, 74 bp, Homo sapiens
cctcagccgcctcctagcggcgcggcgctcgctcctacgatccagacatttaatgtggatgcaccatgccagac

SEQ ID NO: 658984 - DNA, 104 bp, Homo sapiens
cgccagccgcaccatgccgctcctaagcctgcacagccgcggcggcagcagcagtgagagcaaatggagctgctcctggtgaacaagctcaagtggaacctggc

SEQ ID NO: 658985 - DNA, 100 bp, Homo sapiens
tcctctgtttctctgctgcaccgacctcgacgtcttgcctgtgtcccacttgttcgcggcctatagaatgttgtaccatctttgggtaggcagacttccc

SEQ ID NO: 658986 - DNA, 75 bp, Homo sapiens
ttctccgacacttcttgacgctctgctccagaacctttacgactttgatgaagtggctgtaattgatgaaattca

SEQ ID NO: 658987 - DNA, 50 bp, Homo sapiens
actcagccttttaaaaactggagagtccctgtgaagcaggaagagtgagg

SEQ ID NO: 658988 - DNA, 75 bp, Homo sapiens
tccccaggaagccctcggcccccaagaagggagacagttctgccctgggcatgttcagcgcagccttggcctcgg

SEQ ID NO: 658989 - DNA, 74 bp, Homo sapiens
gattggggtggtcgcagtcacagctactcggactgcttgtagccgaatacatcaagcaatggtaacatctttaa

SEQ ID NO: 658990 - DNA, 83 bp, Homo sapiens
ctcggccgccctgcccagctgcctgcccccggaggtgcccacgcagctgcctggacaagattttttatcaagcagaaatgcat

SEQ ID NO: 658991 - DNA, 50 bp, Homo sapiens
cttcagtcaaagacagtagattatgaggttcttgatcaatatgaacgaga

SEQ ID NO: 658992 - DNA, 83 bp, Homo sapiens
gcaagcgcagggggacggggaccagcagctgtcgccgccgctctcagaaatatggctacacacacctttctgcaggagagctg

SEQ ID NO: 658993 - DNA, 99 bp, Homo sapiens
gtcgctgctgctcgttcgagtcgcaggcctttggacaagcacacacaaaccacaagaaggtggctgctgacggagagagccgggaggagagcctgatcc

SEQ ID NO: 658994 - DNA, 87 bp, Homo sapiens
gaggtcgataagctggaactgatgactacgtctactttgagaactcctccagcaacccatacctgatccggagaatcgaggagctca

SEQ ID NO: 658995 - DNA, 85 bp, Homo sapiens
agcatccccctcaaaatgtgctacgtcactcggagtatggccttggccgaccctgagaacagatgatcatgggaacagcaatagt

SEQ ID NO: 658996 - DNA, 100 bp, Homo sapiens
cacagagttagagagagggatggtgcggtctgtatggacccaggcttgtcaaactgtactatacacatcgtgacagtcaccattaacggagatgatgccg

SEQ ID NO: 658997 - DNA, 100 bp, Homo sapiens
agcaatcctaccatgtcagccttcccagtagctggaactacagtttacaggagagccgaccattttcagttgactttttcaggaaaatgattcagtttga

SEQ ID NO: 658998 - DNA, 100 bp, Homo sapiens
cgcggacgagccctccttcagcgaccccgaggacttcgtggacgacgtgagcgaggaagaactaaatccggattctggggctggaggacagataaagcag

SEQ ID NO: 658999 - DNA, 75 bp, Homo sapiens
ctctctgctgcggcgcggggaccgctgtgctctcggtggtgatgatgtccagcaactctgtgaagcaggagaaga

SEQ ID NO: 659000 - DNA, 50 bp, Homo sapiens
ggccacccagagggcccttgtgtccaaggcacttgcactgttgcctagac

SEQ ID NO: 659001 - DNA, 100 bp, Homo sapiens
ggcttcttggaagcgcttgcctagacgagacacagtgcataaaaacaacttttgggggacaggagctggagtgccttcaggaccatctggatgacttggt

SEQ ID NO: 659002 - DNA, 116 bp, Homo sapiens
gtttgtttctccaaggtttgaaaagcagctggcctgcaagatgtgctcatcttttgctacgggacccagacaatacgatggaatattctatgaatttcgttcttattaccttaagc

SEQ ID NO: 659003 - DNA, 75 bp, Homo sapiens
cttacaagatggacagggatgataattgggcctccaagaaatgtctgtaaacctgtggaggagacacagcgcccg

SEQ ID NO: 659004 - DNA, 49 bp, Homo sapiens
caccgatttcctctcgccgagcggcggagctgcggtgcaaccctgggca

SEQ ID NO: 659005 - DNA, 90 bp, Homo sapiens
ctcggcatggctctcctggtgctcggcattgaacctggccacatcccaggtaccgtgaacatccccttcacagacttcctgagccaggag

SEQ ID NO: 659006 - DNA, 75 bp, Homo sapiens
cccgtggccatgctgaagcggaggcggccgctgctcgagctgttccatttcctccaagtcaccggcttacagcaa

SEQ ID NO: 659007 - DNA, 75 bp, Homo sapiens
ttctgctggagcattctgtgaagaaggcagtacattttgggttaccggagtccagctacttgctcttttagttcc

SEQ ID NO: 659008 - DNA, 75 bp, Homo sapiens
caaccagagattcatctttcatgcagtgacatgttgataaaaaatgatggtatcatctttatcagaaagtgagga

SEQ ID NO: 659009 - DNA, 100 bp, Homo sapiens
atagcctggacccacgacggcaggaattattggaggccaggtttactggagtaggtgttagtaaggcctcatgcattgtgcgtcagcagcaatgtttatg

SEQ ID NO: 659010 - DNA, 100 bp, Homo sapiens
ctcttgaccatgtgacatctgatgctgtggaacttgcaaatcgaagagatcctgaattaatttacttttgagtattgaccaccagattgtaccattgaaa

SEQ ID NO: 659011 - DNA, 100 bp, Homo sapiens
ttggtgtgttcacatttgatcatggcatgccgagaccgacccgcccgcccgcggccccgcagcagctccaagaaggaaccaagagaccgaggccttcccg

SEQ ID NO: 659012 - DNA, 117 bp, Homo sapiens
gacagaaaagacagtgttctgctttcatggagttcacagaagagtcgaggagattggaaccaaccagatggctgtgtgtgccaaagcacagaacaaacctttctatgtggttgcaga

SEQ ID NO: 659013 - DNA, 51 bp, Homo sapiens
aaaaacacgaggatgccaataaggattatattccatcacaacaagatattc

SEQ ID NO: 659014 - DNA, 100 bp, Homo sapiens
tgacctttctcatctgactcgtgatctgcccatcttgttactccctagcagtgtggtaagccgaatttgccatgtactgataacgtagcattcgatatgg

SEQ ID NO: 659015 - DNA, 90 bp, Homo sapiens
gggagcgccgaaatcgtggccgagttcttctgtgacaatccttacccttccaaggaggacacccctaccagcagtctggactcactttcc

SEQ ID NO: 659016 - DNA, 75 bp, Homo sapiens
cgagactcatgactcccagagaggatggcatctagaaggtggagccgccaccaaaatgcagattttcgtgaaaac

SEQ ID NO: 659017 - DNA, 71 bp, Homo sapiens
gagctggacccggaccggttttgggctcagctgtcgcaggccctggaggagctgggaggccagaaacaaag

SEQ ID NO: 659018 - DNA, 83 bp, Homo sapiens
ctggaatgcatccaagagaatccctcaacatgctgaatgagtccctggaacgccagatgcgtgaaatggaagagaactttgcc

SEQ ID NO: 659019 - DNA, 82 bp, Homo sapiens
cgctcccgggaaccgttcccgggccgttgatcttcggccccacacggtaactaggatttctacctcaaccgcgagacctatg

SEQ ID NO: 659020 - DNA, 50 bp, Homo sapiens
tctcagcaagaacgggaacaaaactctgggttctgtacattggcctggcc

SEQ ID NO: 659021 - DNA, 50 bp, Homo sapiens
catttgagggcttcctcatcgacttaaagaatttgccattttcagtggaa

SEQ ID NO: 659022 - DNA, 75 bp, Homo sapiens
ttctcgacctgctaacagaactggaccttttcggttggatggcaagcatgtggtgtttggcaaagtgaaagaagg

SEQ ID NO: 659023 - DNA, 101 bp, Homo sapiens
gcggcctttgctgcgggcgccggcgctggcggccgtgccgggaggtgctggagaatctggtaaaagcaccattgtgaagcagatgaggatcctgcatgtta

SEQ ID NO: 659024 - DNA, 88 bp, Homo sapiens
cgaaaaccgtgtatgagggattcatctcggctcagaactctaagaaggagctgatgtggaggagcagctgagacagttcaagatgacg

SEQ ID NO: 659025 - DNA, 100 bp, Homo sapiens
cttagtcgtatagtcttccgtcacttagctgaccatgggcaactttctgggatccagcgagcgacatggattaatgcagtatcgaatggacaagtccgag

SEQ ID NO: 659026 - DNA, 98 bp, Homo sapiens
ctcgatttgaaaaaatggacaacctgctgcgggatcccaaatcggaagtgaattcggattgtttgctgagcaaagactcaggtggactgaaggccgct

SEQ ID NO: 659027 - DNA, 101 bp, Homo sapiens
agtgcacagcttccccacactcaagttctttcctgccagtgccgacaggacggtgatgttctgcaccctgaacacccacaaagtggacatggacaagctcc

SEQ ID NO: 659028 - DNA, 100 bp, Homo sapiens
ctcttctcctaagagctgcctgctgccttctgcaatgccaagtgagtacacctatgtgaaactgagaagtgattgctcgaggccttccctgcaatggtac

SEQ ID NO: 659029 - DNA, 100 bp, Homo sapiens
ctaaaaacaagactggggctgctcccatcattgatgtggtgcgatcggtagatgacaaggtgaatttccattttattctgtttaacaacgtggatggcca

SEQ ID NO: 659030 - DNA, 102 bp, Homo sapiens
aagaggtcccaatcccccactctttccgccctaatggaggtctccagtttcggaatcccagtcagaagttccagcctgccactgttctctgatgccatgcca

SEQ ID NO: 659031 - DNA, 75 bp, Homo sapiens
ccttcaaaagcccacttggcgatgggttacagtaagagggcagctggtggaatttttgaagaaaatggaatctcg

SEQ ID NO: 659032 - DNA, 80 bp, Homo sapiens
tggactgtcctctacagaaggaagcacaaaaagggacagtcgcatgccaatgaagatgtggaaagaatgttactaggaaa

SEQ ID NO: 659033 - DNA, 83 bp, Homo sapiens
gccggcgcggtcgcagtctccacggcgcaggcccacggtagcgcagccgctctgagctcaatgtacttctccagttcctaccc

SEQ ID NO: 659034 - DNA, 51 bp, Homo sapiens
ctacttggatatctcaatggtgaagcgttgctgaagctgctgaaagatggc

SEQ ID NO: 659035 - DNA, 97 bp, Homo sapiens
cgcggctggagcgctcggccggcgtgggagcgccaaggccgcaggcatgttatttgaaagcaattgagacgcaaccgaactttgcagtagcttggag

SEQ ID NO: 659036 - DNA, 83 bp, Homo sapiens
cctggcctgggcgctccggtggcggcggaggttgacatcatggacatatgtgagtccatcctggagaggaagcggcatgacag

SEQ ID NO: 659037 - DNA, 51 bp, Homo sapiens
gttaaggattccaagtaactcttatttgattggcccccgccgcatccacac

SEQ ID NO: 659038 - DNA, 74 bp, Homo sapiens
ctcctatgttctgccatagtgatgagcaagttaaggtgaactgcacagctgaagtactttacccttcaacggga

SEQ ID NO: 659039 - DNA, 76 bp, Homo sapiens
tctttacttggtgcaggaaggcagtctttgctacgtacagcaaaaggttgctccttgagggcaggacagttcttat

SEQ ID NO: 659040 - DNA, 90 bp, Homo sapiens
aatcagtgaaatcgctgctgtcagcaaaagacctgagaaggtcctgaacgaggctgtgggggccctgatgtaccacaccatcactctcac

SEQ ID NO: 659041 - DNA, 83 bp, Homo sapiens
cctggaggcagccggtccaacacaatgcagatcttcgtgaagactctgactggtaagaccatcaccctcgaggttgagcccag

SEQ ID NO: 659042 - DNA, 120 bp, Homo sapiens
ctcgagttcctggaccgtgagagcatcaagctcgtgtccatcgaaaccctggccctggatgcccatgttggctgccctggttgcagtaacagccatcgtgctgtacgtgccaggtctggc

SEQ ID NO: 659043 - DNA, 82 bp, Homo sapiens
ctgaaaagcaatttgcaatctttgcattaggatggctggctgtggtgaaattgatcattcaataaacatgcttcctacaaac

SEQ ID NO: 659044 - DNA, 75 bp, Homo sapiens
cgggctgaacagcaaattaaagataacttgcgagaggtcgaagtggttctggaaactttggtggtggtcgtggag

SEQ ID NO: 659045 - DNA, 87 bp, Homo sapiens
gcaactcatggcttgttgtcttctgacgccccccggcggattgaagagtctgccattgatgagatgcttgctctgtcaaggcacagc

SEQ ID NO: 659046 - DNA, 100 bp, Homo sapiens
gggcatccgacacgtactgctgccgagtcgtccggaaatccattgcccgtgttctcacagttattaaccagactcagaaagaaaacctcaggaaattcta

SEQ ID NO: 659047 - DNA, 82 bp, Homo sapiens
cacgttcagctacctggaggtccaggccatggcgctgcaggagacaccccctcaggtcacgcatgaagggagcaccgtggag

SEQ ID NO: 659048 - DNA, 75 bp, Homo sapiens
agcaccacagtccttctgcagtccctcgtccagccacccccaggcttgcgaggatccctggaacgcctccagctg

SEQ ID NO: 659049 - DNA, 127 bp, Homo sapiens
tgaagctgtttcgggccagcgacccgctgctcagcgtcctcatgtggggggtaaaccactcggaactttatattgctgttggaatatctggagccatccaacatttagctgggatgaaagacagcaa

SEQ ID NO: 659050 - DNA, 85 bp, Homo sapiens
ggctaaccagttagtggtgctcaacgtgtacgacatgagcccacccacctttgggttcctgttggacatcgatggagtgcttgtg

SEQ ID NO: 659051 - DNA, 50 bp, Homo sapiens
gcaaccccagatccatttacactttacactgtccccgccctactccggac

SEQ ID NO: 659052 - DNA, 75 bp, Homo sapiens
acaactgtattttctataaaaaccacagaggtgctggagaatctggtaaaagcaccattgtgaagcagatgagga

SEQ ID NO: 659053 - DNA, 75 bp, Homo sapiens
tggctgccgttaaggaccgttacgtttcccgggtttcattgaaaacagatcctgcaaaagttccaggtgcccaca

SEQ ID NO: 659054 - DNA, 75 bp, Homo sapiens
ctgtagcaacatggcagaatatccaggctgctggcacccaaaaaaccaccctagtgccgctgttccggaactcgc

SEQ ID NO: 659055 - DNA, 90 bp, Homo sapiens
tggaaaccggccctatgacaagcacatcagccctcggcagaacccactcgtcgctctgggtgccattgcacgagaagccctgccaacgtg

SEQ ID NO: 659056 - DNA, 75 bp, Homo sapiens
gcggcggtagcgtctctgtttccttgtgggcgctcgcgcggccctggaaaagcacttggttctgcttcgagatgg

SEQ ID NO: 659057 - DNA, 74 bp, Homo sapiens
ccctgcagaggctcttcctcatcatctcagccacgaagtacagccggagggtgtcttttatgaataatcaaaag

SEQ ID NO: 659058 - DNA, 75 bp, Homo sapiens
aagacccagaatatgccaagtatctaaacatttgccgaaacagccagtggatctgcagcaatgaagaatgtccag

SEQ ID NO: 659059 - DNA, 75 bp, Homo sapiens
cctgccttggcgctggccggctacatcgaggtggacgacccaccggagcccgtgtacgcgaacatagagaggcag

SEQ ID NO: 659060 - DNA, 50 bp, Homo sapiens
accaactgtcctactggcaccactgatcagcatctcatggaatacttccg

SEQ ID NO: 659061 - DNA, 75 bp, Homo sapiens
gtgccttttgcctcccaccgtgattctgaggcctccccaaccatgtgcaattgaagctcttcgtgggcggtcttg

SEQ ID NO: 659062 - DNA, 100 bp, Homo sapiens
ccatttattcaccagagaaagtggaagaatacaggaacagaaatttttatgaactgagccctcacatgctcataaaggactcagtgcagcatttacagac

SEQ ID NO: 659063 - DNA, 75 bp, Homo sapiens
caagatggagaagaaggtgtctaagcgctcgcggaaggaggagtttgatgaaggccggaacaactttgaagggga

SEQ ID NO: 659064 - DNA, 50 bp, Homo sapiens
gtctgtgacctgccccttctctttacacactcttgcactcctgtaatgag

SEQ ID NO: 659065 - DNA, 82 bp, Homo sapiens
atgctggccaagaagatcatcattaaggacggaggcacggaaaacgaagccccctcctgtattgacagctgggaattgtgga

SEQ ID NO: 659066 - DNA, 74 bp, Homo sapiens
ttggttaaaacctgacacttttaacagctgcagaaccttggcctgaaaatgctacattatatcagcaattgaaa

SEQ ID NO: 659067 - DNA, 83 bp, Homo sapiens
gccccgcgccggacgaggacgccgaggcggcgggcgccgagcagtgttcctctgaacaacagggagaatatctctgatcccac

SEQ ID NO: 659068 - DNA, 50 bp, Homo sapiens
gcaagtgcagatagatggccttggtccctgcaagtcatgaacaaaacgag

SEQ ID NO: 659069 - DNA, 82 bp, Homo sapiens
cggcgaggcgctcaacggcgagccagagctggacctcaccagcaagacttcccaagtaagaagcggaagaggagccgctgga

SEQ ID NO: 659070 - DNA, 90 bp, Homo sapiens
ctccgccgtcatggcccggcatcggaatgttcgaggctataactacgatgaagctgtggaaatacaaagaactctgaatcaacttggaac

SEQ ID NO: 659071 - DNA, 97 bp, Homo sapiens
ttccgaagatgccggactccggaacagcaagaactgcaccgaaccaggttggccttcattccacgatgtgatcaattctgaggcaatcacattcaca

SEQ ID NO: 659072 - DNA, 75 bp, Homo sapiens
cctgactacagctggagcgcccagaggcgagccctggtggaggaagaggtggaagttaaacgagctgagcctcgg

SEQ ID NO: 659073 - DNA, 82 bp, Homo sapiens
gggcctacagcagcttcggcggcggcagagggacagagcgggatgccaccagcttgtccaaagggaagttccaggagctcct

SEQ ID NO: 659074 - DNA, 75 bp, Homo sapiens
aggtggccgtggaggcagaggtggcatggggggaaatggagaagcacctgctgctcctctccgagctgctgccgg

SEQ ID NO: 659075 - DNA, 83 bp, Homo sapiens
attgctggctacagcttcagaagaccgaagcgttcgtatctggaaggtatcatgatattagctggtttgacatcaagtcattt

SEQ ID NO: 659076 - DNA, 100 bp, Homo sapiens
ctataatcaggcaattatgtcttctaaaaatattgcacaggtgaatgaaaactttgccattgatttgatagcagagcagcccgtgagcgaggtggagact

SEQ ID NO: 659077 - DNA, 96 bp, Homo sapiens
ctcggctgcgccgcgtgtcctcggagcgcggtccctgtattggtctcctgctcctagaggcaccccctgtaatggcctatcctgctactacaccaa

SEQ ID NO: 659078 - DNA, 75 bp, Homo sapiens
catccacgcacctgcagctctgctgagagagtgcaagccgtgggaaggacagaataacgggctcccagattcaca

SEQ ID NO: 659079 - DNA, 100 bp, Homo sapiens
gtatgcatttatcaccttctgtggaaaggaagctgcacaggaagccgtgaaactggctaacagagaccctgatgctggaattgatgaagctcaagttgaa

SEQ ID NO: 659080 - DNA, 101 bp, Homo sapiens
tccgagaggaacctctatgccgacatcgacgccgcctggcaggccctgcgcaccagtatgaccctcaatttggcgatgccttctggaacagcagcaaatac

SEQ ID NO: 659081 - DNA, 74 bp, Homo sapiens
ttgattgatatatatgctgacgaggagttcaaccaggcgcagacggggaagcggagccaacatgccagtggccc

SEQ ID NO: 659082 - DNA, 100 bp, Homo sapiens
gagtcatgtggcatgcagatgcaacctctgcctttttccgctgtaaataattaagaagaccaagtagcatccaaggtgaatctggattgggaaagtcgac

SEQ ID NO: 659083 - DNA, 100 bp, Homo sapiens
ccgagagcgtggagcgggctgggccagggaatgaaagctactggttgattttaaagtgcctgggcctcacaggtttggagatgtcccagaataaggcaca

SEQ ID NO: 659084 - DNA, 100 bp, Homo sapiens
gtacctactgatggtgctgtaaccacctcacagattccagcttcggaacaagagaccctgggattatctcaatgatgaggccttatggaacaagtgccga

SEQ ID NO: 659085 - DNA, 75 bp, Homo sapiens
ggtgcgatggccaagtggactgcgacaacggctcagacgagcaaggctgtccccgcgggaggactcagactccag

SEQ ID NO: 659086 - DNA, 50 bp, Homo sapiens
cgagagcttcgagcggactcaggttgctgcagcaactggtcacacagtag

SEQ ID NO: 659087 - DNA, 77 bp, Homo sapiens
tccggggccctctcagcaagaacgggaacaaaactctggtgacttaagagattaaaattaatttggttgctgttggt

SEQ ID NO: 659088 - DNA, 100 bp, Homo sapiens
caaactgggcgtctgttccggcgccggacccctatttgcaaagaaagttcaggagccctggaaaggagaaggaataagacggcaggaggaagagagagag

SEQ ID NO: 659089 - DNA, 83 bp, Homo sapiens
gctctcgcggcctagctttacccgcccgcctgctcggcgaccagtaatctcaggggcgatataatcaatgaggtggtcctaaa

SEQ ID NO: 659090 - DNA, 118 bp, Homo sapiens
cgcaggacagcgccttcctcaacgacgcggacatggtcatgagctttgtgaacctgggttttaaaatcaaagatgggaaaatcggagaaaattgcccttccccatggccagcttgttc

SEQ ID NO: 659091 - DNA, 75 bp, Homo sapiens
acctcagtttcaaggcaacttggcagaaggaacaggaaatatagtggtcattatgattagctatccaaaaggaag

SEQ ID NO: 659092 - DNA, 98 bp, Homo sapiens
gggataattatccaaataaattgcaagcattctatccaaatgtttcaggatctgaagctgagggaattctactgtgagggaaacccactgttcctgca

SEQ ID NO: 659093 - DNA, 82 bp, Homo sapiens
gcagagtggagtatctggtgaaatggagaggctggtcgcccaagtgtctcgtgcctctgctggaccctgactctgggctcct

SEQ ID NO: 659094 - DNA, 80 bp, Homo sapiens
ataaaatagccatctcacctttgaaatcgccaaataaggattacttccttaggatagattgccagaagtggagttactgg

SEQ ID NO: 659095 - DNA, 51 bp, Homo sapiens
ctggatgtcatgttcagtgaactggtgatacactgcctctaggactgggac

SEQ ID NO: 659096 - DNA, 76 bp, Homo sapiens
agcctaactgcccagtggcttccagatgtaaccagggatgaaaaaatcccgttctctggagaatgagaaccttcaa

SEQ ID NO: 659097 - DNA, 75 bp, Homo sapiens
ctttcctctgctgccgctcggtcacgcttggacctgcgcgaagtctggctcaattatcctctccacccactccaa

SEQ ID NO: 659098 - DNA, 107 bp, Homo sapiens
ccatgtcagacgcagccgtagacaccagctccgaaatcaccaccaagacctcctgccccccgaggtctgcagtctcctgaacccagcagccatctacgccaacaacg

SEQ ID NO: 659099 - DNA, 100 bp, Homo sapiens
ttgccttgagctggagatcgtacaaacatacgaacagccaatttctctattttgcaccagacctagtctttaatgagtgacaatccttacccttccaagg

SEQ ID NO: 659100 - DNA, 90 bp, Homo sapiens
cagaggtggaggggaggattttgaggacacttgtggagagctcgaattccagaatgatgaaattgtgtatacaaaactaggatatgctgg

SEQ ID NO: 659101 - DNA, 71 bp, Homo sapiens
ggcccgcgacgtgccccgacacccagttcctggccattttctatccaagatgtggtacaacctcttaccct

SEQ ID NO: 659102 - DNA, 128 bp, Homo sapiens
catcatgaaaggcggctcgaagggatactggttcgtccttactgcggaaagcttgtcctggtataaagatgatgagccttggaatggatggctttggccaaccagttggcattcttggacgccctgcc

SEQ ID NO: 659103 - DNA, 100 bp, Homo sapiens
tggccccggaggagcacccagtgctgctgaccgaggcccccctgaaccccaaggccaacagagagaagatgactcaggagggcatcctggctgtttcacc

SEQ ID NO: 659104 - DNA, 88 bp, Homo sapiens
tgtggcagttatatgtccttattgtgagaagaatttttgcctgaggacacagaagacttagatcactatgaaatgaaagaggaagagc

SEQ ID NO: 659105 - DNA, 101 bp, Homo sapiens
ctgtaattgctgaacttaaaaagcagtctaaacctgtgaccacccctgaagaaattgcacaggcagaggaagcggctgctgagattactaggaagctggag

SEQ ID NO: 659106 - DNA, 83 bp, Homo sapiens
tctccctgaagcccaccggtccccaacgcatcatgccagggagccaagcgtcctgcccggccacaaaaggatgccacggagaa

SEQ ID NO: 659107 - DNA, 75 bp, Homo sapiens
gaggccggaaaatgccctcaaacgcgccaacgggcaagttaaagtcttcagagccctgtatacgtttgaacccag

SEQ ID NO: 659108 - DNA, 97 bp, Homo sapiens
tctgcaggatggcatttaacggatgctgccctgactgtgagtgtcccctccatgctgtctgagcggccccgactgctggagtgcaatggtgcgatct

SEQ ID NO: 659109 - DNA, 75 bp, Homo sapiens
atacatcgaagcccacggcacaggcaccaaggtggctatggcggttccagcagcagcagtagctatggcagtggc

SEQ ID NO: 659110 - DNA, 101 bp, Homo sapiens
acagggtggccgcttggtccagaaaaaagcttggccagaccacaagcgggaatgcaaatgccttaaaagctgcaaacccagatatcctccagactccgttc

SEQ ID NO: 659111 - DNA, 90 bp, Homo sapiens
aaccacattagcacaggaagagccagtggcagcgccagagccgaagaagaccaagcggagcagccagctggcagtagcgccctgtaggac

SEQ ID NO: 659112 - DNA, 90 bp, Homo sapiens
ccttagtcgtcacccttctccacttgaccaggctgaggcatttcatccttcatgaagccattcaggattttgaattgcatatgagtgctt

SEQ ID NO: 659113 - DNA, 75 bp, Homo sapiens
gggacactcctgaagtcgggaaatgtgtctttggtgcaacactaacaaggcttgtctggactacccagttacaag

SEQ ID NO: 659114 - DNA, 100 bp, Homo sapiens
cttatgtttgtaaatgtgagtggaagccatgaggccaaaggcagttgtattgctggtaagcgggcccctcagtgctaccccagttccgtcaactctgcca

SEQ ID NO: 659115 - DNA, 126 bp, Homo sapiens
catggtgcagaaataccagtccccagtgagggtgtacaaatacccctttgaattaattatggctagcatgcaagcggcaagatgtcctacagatgaattatctttaaccaattgtgcagttgtgaa

SEQ ID NO: 659116 - DNA, 83 bp, Homo sapiens
gaaggaacgaggcaaggagctaaagcagcgtgcgttcagccctgggacacatgcctcactcctgtcagcagttccaccttttc

SEQ ID NO: 659117 - DNA, 83 bp, Homo sapiens
cgctgctggcgctctggctgtgctgcgcgacccccgcgcatgatgaggacggggacttggttgccttttccagtgacgaggaa

SEQ ID NO: 659118 - DNA, 50 bp, Homo sapiens
ggctacatcagtgaagataccagggaaccactcgttttgactattatttt

SEQ ID NO: 659119 - DNA, 100 bp, Homo sapiens
ttgtggaagggggcccggctccctaggcgtcccatctcgaaaaatggctacaaacttcctagcacatgagaagatctggttcgacaagttcaaatatgac

SEQ ID NO: 659120 - DNA, 100 bp, Homo sapiens
atatggtgcagaggccctccacggtggggtggaagacaacccgtgagtattacaccttcatgtgggttactttgcccattgacctaaacaacaaatcagc

SEQ ID NO: 659121 - DNA, 100 bp, Homo sapiens
tacaagtacccgtttgagctggtcatggcggactcagcccaggagagtgttattactcgagatattcatcgtacatttcccgcacatgattactttaaag

SEQ ID NO: 659122 - DNA, 136 bp, Homo sapiens
gaagcaatgtttgaacaaactcgaagaacagctgtggaaagaagttgcaaaacactggggcagagcggcttgggtaaatccaccttaatcaacaccctcttcaaatccaaaatcagccggaagtcggtgcagccca

SEQ ID NO: 659123 - DNA, 144 bp, Homo sapiens
aagatggcgccagcggtcaagagcgaggtcagcggggctgcgagcactatgacagaggatgtctcctaaaggtagttggcaaaaaaggagaaagccactaaggtacaaaagacactggacaaccatattgcaatcagatctaca

SEQ ID NO: 659124 - DNA, 50 bp, Homo sapiens
cccggagcccccagcgcagcggccgcgccatcatcgtctacagactgccg

SEQ ID NO: 659125 - DNA, 90 bp, Homo sapiens
ttcaaaaattaccattttatgatttactggatgaactgataaaacccaccagtctagtgagggagataaatctgcaggacatcaaggaag

SEQ ID NO: 659126 - DNA, 100 bp, Homo sapiens
cgaactgaaaaggaaagaaaatctgtttcagctgagatcaactatggaataaggtttactcagatgacattaatgctgataagaatatctcttctgcaca

SEQ ID NO: 659127 - DNA, 100 bp, Homo sapiens
gaagatcatcattaaggacggaggcacggagtgtggccatctggggccgtgtggtatttgccactcaggagacatgtccctatgacatagcagtggtgag

SEQ ID NO: 659128 - DNA, 90 bp, Homo sapiens
gcttcggctacctgaaagatgcaatgtggtgggctggatttctcaccagtggagcttctggtgatgaaggccctttcggtggggctggtg

SEQ ID NO: 659129 - DNA, 100 bp, Homo sapiens
atcaagatgaatatgaccctatggaagcagaagaagctgaggatgaagaagatggatctggcgacatggccagaaaggctctcaagcttgcttcgtggac

SEQ ID NO: 659130 - DNA, 100 bp, Homo sapiens
agcagtatcctgcatcgggagaaaacaagtccaaggatgaatcccagtccctgttacggacatatgtagagtgtgtcggtcagaaggaacacctgagaaa

SEQ ID NO: 659131 - DNA, 151 bp, Homo sapiens
gatcggatcggagcggatcggagcacaccggagcaggctcatcgagaaggcgtctgcgagaccatggagaacggatatgttcctaaaacatccctgagttcaccaccttggccagaagttgttctgccagacccagttgaggagaccagac

SEQ ID NO: 659132 - DNA, 83 bp, Homo sapiens
ggactctccgttattttaggaggtctgcgggactaggtcctccaagcgcatctccaagctggcctatcaccaaggcgtggtca

SEQ ID NO: 659133 - DNA, 82 bp, Homo sapiens
aaaaatcaccagttactttaatgagagctcgaggccatgagcagatataccagcccagtgaacccagctgtcttcccccatc

SEQ ID NO: 659134 - DNA, 50 bp, Homo sapiens
tccacccgagccaggatgaagatatctgggcggaccccggcaaatacgcc

SEQ ID NO: 659135 - DNA, 87 bp, Homo sapiens
gaaccatgggagaaaggaagcaggaaaacagcgggccagacagggatgtgcggaggggttgttcggaatcctataattgaaaaacag

SEQ ID NO: 659136 - DNA, 83 bp, Homo sapiens
gaaggcaccgacgtcatcatgctgaccaccaatcagatccgtaagatgagcgggatcgtgtgcagaagaaaaccttcaccaag

SEQ ID NO: 659137 - DNA, 100 bp, Homo sapiens
cagagagtccccagcaggaaggtctcacctgaggtgaaccttcgaccttggacttctcagcctccagaatgtagagacggggtttcaccatgttagccag

SEQ ID NO: 659138 - DNA, 80 bp, Homo sapiens
ggcagggggacgacaaggagggcatgatcaacctcgtcatgtcctacgcgcggagcgtgctttggacaccatgaattttg

SEQ ID NO: 659139 - DNA, 50 bp, Homo sapiens
cccttaatagtcatctacatagaattaaacaaccaccatgtcgagcaaaa

SEQ ID NO: 659140 - DNA, 75 bp, Homo sapiens
ggaagatctccgcactctggagcataatgttgtcaacctaagaaaaagtctacgccactgaagtatgaagttgga

SEQ ID NO: 659141 - DNA, 100 bp, Homo sapiens
ctgccgtctcaagaagtgcttccgggtgggcatgaggaaggaggacctgcctgaccagtgcacgcccaacccctgcgataggaaggggacccaagcctgc

SEQ ID NO: 659142 - DNA, 100 bp, Homo sapiens
ggcggcggaggctgccatggacgacgaggaggagacgtaccggctctggaaaatccgcaagaccatcatgcaggctttatcctgtggataaacgcagagt

SEQ ID NO: 659143 - DNA, 97 bp, Homo sapiens
ccctaatgatgatgctcagtttgatgcgtcacactacgacagtgagaaaggaggtctccctccccgcgtttggggctgctgaagctggagctataag

SEQ ID NO: 659144 - DNA, 115 bp, Homo sapiens
ccgagaccggagcgccgctcgccgcagacttacttccccggctcagcagggaaagggttattttggagctgttggagcactccttgagctgttgaagatcccgtgatcattacct

SEQ ID NO: 659145 - DNA, 110 bp, Homo sapiens
gtctgcatggccaatggccgtcctgaacctgttatcacctggagacaccttacaccaactgatgtgtatatctcatgattgatatggagaaactagtcatgggccaaagg

SEQ ID NO: 659146 - DNA, 74 bp, Homo sapiens
gaaatactgtatcttctcatgaaggaaggaaccgaagttactccacaggatccgctgaacataggatgttgcca

SEQ ID NO: 659147 - DNA, 82 bp, Homo sapiens
caccatcgtctaccacctggcccggcaaggcaacggtgtttcagctgaaccatccgttcatcttcaagccatcatgagctgt

SEQ ID NO: 659148 - DNA, 75 bp, Homo sapiens
cagatccgcaggcgcaaggcttcaggcgacccgtactgggcctactctgggtgcacttgatctatctgatgtaca

SEQ ID NO: 659149 - DNA, 98 bp, Homo sapiens
accctgcctgcctgaggaggcctcggttggatgcgaaggagctgcagcatccaggatcaagtcttccataccagggaccaggccaaaaccagactgcc

SEQ ID NO: 659150 - DNA, 100 bp, Homo sapiens
ttaaacacagcccaacagtgaaaagagaacctccatcaccccagggtcgatccagcaattctaggtatcaacttgaactgaaggatgactacatcattag

SEQ ID NO: 659151 - DNA, 75 bp, Homo sapiens
caggaacagggcagacgttagcgtgagtgatcactctcaatcccgggtcttcaaagcttcacctttctccaaagg

SEQ ID NO: 659152 - DNA, 75 bp, Homo sapiens
acagatgtgatcattgagaccatgaagtccaacccaggtgaaaggtgtagcagtcactcggcctacacccacagc

SEQ ID NO: 659153 - DNA, 80 bp, Homo sapiens
caaggatttcagcaacaatgcctctgttcaaactcccaggtgtcttataagactttgacacttcctgttttgtctgaaaa

SEQ ID NO: 659154 - DNA, 100 bp, Homo sapiens
gtgtgcacactggctatcattgatccagatgcctgtgaggagccaccaacatttgaagctatggagctcattggtaaaccaaaaccctactatgagattg

SEQ ID NO: 659155 - DNA, 83 bp, Homo sapiens
gaccaactcgcacgccatgggcagcttttccggggtggcaggcggcacagttggagacatccacgacagcgatggcagttcca

SEQ ID NO: 659156 - DNA, 75 bp, Homo sapiens
agagggtgaccgacatcccaactaggttgcacagtgaattaaaagatgctgttgaaaaaaaattggaggcctttc

SEQ ID NO: 659157 - DNA, 97 bp, Homo sapiens
ggaagatggcggatctggaggagcagttgtctgatgaagagaagcatggccgaaacagaagccctgtcgaagcttcgggaagacttcaggatgcaga

SEQ ID NO: 659158 - DNA, 100 bp, Homo sapiens
gatcagattatgtaccacctggacctgattgaaagcgactattttggtctgagatttatggattcagcacaagtagcaaaggacctgggttacctgcagc

SEQ ID NO: 659159 - DNA, 100 bp, Homo sapiens
ctggaacggaaagagaccagagcaggaaaccccatcgctcacattagcccccaccgcctactggcaaggtgattatcctgaaccatccaggccaaataag

SEQ ID NO: 659160 - DNA, 74 bp, Homo sapiens
tttttgggtgcgacttgcaggagcacctgcagcactcaggccaggaggtttggtcagatgaagactgggtggag

SEQ ID NO: 659161 - DNA, 75 bp, Homo sapiens
catctaccatggctcagccgggaactctgaacctcaataacgaggctggacgtaaagaaagaagtgatgcactca

SEQ ID NO: 659162 - DNA, 100 bp, Homo sapiens
gtaaagtgaccaattcccttggtcaaagaagtgaccaaaaagtcatctacatttcagaatgtaaaaagggcagctctctggcatgttcctgactgaggat

SEQ ID NO: 659163 - DNA, 100 bp, Homo sapiens
gtgagcaaggaagaaaaaccctcagtgagcaaagtggagatgcaggtgacggcaattgcctcatgcatgccacttctcagtacatgtggggcgttcagga

SEQ ID NO: 659164 - DNA, 75 bp, Homo sapiens
aatttccatcaaaaagtgattaagcagagaatggagaagaaggttgattccagttggtgttggtattaggagatc

SEQ ID NO: 659165 - DNA, 100 bp, Homo sapiens
gtttgactgtgtatactctacaatctaagaaggatttcagcaaatttggagcaggggccggtgcataaacttctcccgagttccatctcagtaaaaggga

SEQ ID NO: 659166 - DNA, 50 bp, Homo sapiens
tggtcacttgattttggagaagagcccaaatggcgcagtgggaaatgctg

SEQ ID NO: 659167 - DNA, 75 bp, Homo sapiens
agctctccattgaaccctctcacaaaaagacattttaaatcctaaggatgtgatcacaactcgctttgagaattc

SEQ ID NO: 659168 - DNA, 98 bp, Homo sapiens
ttcaccctgccgtcatgtctaagtcagaggggaaagctctggcaatttaaatgacccaaataaggaggcactggctaagacggaagtgtctctcaccc

SEQ ID NO: 659169 - DNA, 100 bp, Homo sapiens
ccgcgctctcttccaggacatcaaggccaggcacctcattgagaagtcagtgcgtaagatcgtctccttgctggcagcgtccgaggctgaggtggagcag

SEQ ID NO: 659170 - DNA, 90 bp, Homo sapiens
ggctgctctgtgtctcttccaaggtcttgttgcagtaggagaaagagcacaaaagaggtctgggaacttctctgctgcaatgaaagatct

SEQ ID NO: 659171 - DNA, 90 bp, Homo sapiens
aaaatattccctcttcattcacagatgtgtatcagtgaatgctccagccagccttgtcaaaatggtggtacatgtgtagaaggagtcaac

SEQ ID NO: 659172 - DNA, 100 bp, Homo sapiens
cctctcgaatgggcacacctgtgtagtcatgcggaggaatccctttggtgtggacatctgctgccggaaggggtcccgaagccccctgcaggaactctac

SEQ ID NO: 659173 - DNA, 100 bp, Homo sapiens
agattcgcagtggtcgcttcttctccttgcgatcattcttcggaacatagctccgcacactgtggtggattccatcatgacagcactgtctccttacgcg

SEQ ID NO: 659174 - DNA, 86 bp, Homo sapiens
gagagcctgcccatctacaaactgaaggagcaattggtccagggcagcccaatggatccaatggtgatgaagagacctcagttgta

SEQ ID NO: 659175 - DNA, 98 bp, Homo sapiens
agaatggagggccagttataacagtgcaggagcaggacatcgagactttacatggctctgttcacgtcacgctgtgtgggactcccaagggaaaccgg

SEQ ID NO: 659176 - DNA, 100 bp, Homo sapiens
aaacaagtgcaaaggccctttatgatggtaaacctatgctacgccagggagatacaggagactggattggaacatttttgggtcataaaggtgctgtttg

SEQ ID NO: 659177 - DNA, 90 bp, Homo sapiens
gggaaggaaatcatgtcaagcgaagccttgaaaaagctgccctgagacggtgtcccgccgaaaggaaaatcctgaatttgatttacactt

SEQ ID NO: 659178 - DNA, 87 bp, Homo sapiens
taaggattccaagtaactcttatttgtgggacttctcctcttgcatgcctgaatgcaatgcttcacacaaactccagaggtgaagag

SEQ ID NO: 659179 - DNA, 100 bp, Homo sapiens
tgtaaattcagagctgaacccttcaaccggaaatcgatcaagggctaccagtggctcaaggacaaagtgcagagtgaagatggcaagaagcaacaagcca

SEQ ID NO: 659180 - DNA, 101 bp, Homo sapiens
ttggaatcaagaaggtacagggtggagccctcgaggaatcccgttctgcttccagaagtggaagtgctcacggatcggggaaatctgcaaggcatacccct

SEQ ID NO: 659181 - DNA, 78 bp, Homo sapiens
cagcatttgccaaggagacatccctcttagaggagaggagacgccgtgagcgggacgaccagatgtaccgagagcggc

SEQ ID NO: 659182 - DNA, 90 bp, Homo sapiens
gaagcccagacaccaggaaaccctcagattggaggctggtgtcccggagcagtgcaaggttctttagtaatcgaggataaagagagccag

SEQ ID NO: 659183 - DNA, 134 bp, Homo sapiens
gatgcctgttaccagccaatcattaaagaaattttaaaaaattttccaaaagagagatgacaaatgctgtgcttcatgaagttaaaagagaggggctccccgtggaacaaaggaatgaaatcttgactgccatc

SEQ ID NO: 659184 - DNA, 83 bp, Homo sapiens
gtaccgggggtgacagctccgggaccggccgaaaggcgaggaaccggtgagaagccctaccactgcaactgggacggctgcgg

SEQ ID NO: 659185 - DNA, 100 bp, Homo sapiens
ccatgatcgacatcaatggcatcatcgtgtttggcacccggatcctggatgaggaggtgtttgagccatcccaggcctcaggacctgagttctccgacgc

SEQ ID NO: 659186 - DNA, 83 bp, Homo sapiens
gttttccttcttacagagatgtgactctgtttgagttatcaggaactgttgccgttattacatcagatgggagaatgattgtg

SEQ ID NO: 659187 - DNA, 50 bp, Homo sapiens
ctttgccgacttcagccagatgtccaagaagccttgaagaaccaatgtac

SEQ ID NO: 659188 - DNA, 75 bp, Homo sapiens
cctcaatttaagcctgatctaacccctagaaacaggcagaagtcaattcatctggaaagactatctctgagtcag

SEQ ID NO: 659189 - DNA, 100 bp, Homo sapiens
cgcaggagggcggtcttccccggctcgccaactcggctgctctgggggattcgtgcgcggtacatggactatatcgcacaacaggtgctagttttgagaa

SEQ ID NO: 659190 - DNA, 75 bp, Homo sapiens
ttcctgggctgcatgggctctatcaaggaaaacaagtgtctgcttatgtcggttggccgttgtccaatgtgttgc

SEQ ID NO: 659191 - DNA, 75 bp, Homo sapiens
tagctctttggtccacttacggtgcaatgattccaacacagctcaaagaatggctcaagaagtactgacacattt

SEQ ID NO: 659192 - DNA, 100 bp, Homo sapiens
gccggtctccgcggaaatgttgtccaaagttcttccagtcctcctaggcatcttattgatcctccagtcgagcgagaaccctctgcccacagtggagatt

SEQ ID NO: 659193 - DNA, 100 bp, Homo sapiens
acgaaagagaaacccggagggcgccggggtctcctctgagcctccggcctccataagacccaaaacagatgacacctcttcccagtcccccgcgccttcc

SEQ ID NO: 659194 - DNA, 87 bp, Homo sapiens
aagtcctacaacagtttggcgtgcaacatggggcttgagaaaggagctgccacgaaggccgctgcccgctcatgctgaccgaatgtc

SEQ ID NO: 659195 - DNA, 100 bp, Homo sapiens
cttcagtcactggacacaagctttctgggggcacggtggcgcacaagatcatgcagaagtacggcttccgggagggccagggtctggggaagcatgagca

SEQ ID NO: 659196 - DNA, 97 bp, Homo sapiens
cgtccgggaaacggaggaaaaaaagagttgcgggaggctgtcggctaataacggatgaagtgatcaaagtccgaacagataccaaattagacttcaa

SEQ ID NO: 659197 - DNA, 50 bp, Homo sapiens
cctccctgggagctccgcacgggtactccaaagattcaggtttactcacg

SEQ ID NO: 659198 - DNA, 100 bp, Homo sapiens
ccgaacgttctgctgcagaacctgtgctgcaggatcctgggcaggagcgaaggaatttatcatggcatccagcattgaccactacaagtaaaatgcgaat

SEQ ID NO: 659199 - DNA, 75 bp, Homo sapiens
ttattaccatgcttcaagagccattccttttggaacaatgatgagacctgccagagccaaatttgactttaaagc

SEQ ID NO: 659200 - DNA, 90 bp, Homo sapiens
tgacagattctgttgtcacgtctccttacagagtttgagcggtgctgaactgtcagcaccatctgtccgaccatcttgattcaaaacatc

SEQ ID NO: 659201 - DNA, 75 bp, Homo sapiens
ggacctgggacaccgcggaagtcgggaaatgatatctccggagcatttggataatgtgacagttggaatgcagtg

SEQ ID NO: 659202 - DNA, 74 bp, Homo sapiens
accctggggctcctcatggcccggctccttagcacctctccagtggaagatagatgataagcctgtaaaaattg

SEQ ID NO: 659203 - DNA, 75 bp, Homo sapiens
gagccggagcgcggagcccggctcccgcaccatggaggaggacgacagctacggatcttagaaatgaagttgaaa

SEQ ID NO: 659204 - DNA, 74 bp, Homo sapiens
gcagatttacaaactggccaagaagggccttactccttcacagatcgggcttggactgtggtcctgaaagcagc

SEQ ID NO: 659205 - DNA, 100 bp, Homo sapiens
accggttcgtcgcctccttgcccgtgaccgtcgctagaactcagttgtgcgttgcggccagtcgccactgctaatcggaagactttttgatggtacagag

SEQ ID NO: 659206 - DNA, 100 bp, Homo sapiens
ccgacatcaagagctgcgagatccaacaggtttctggcctatttaaagatgggactattggaagtgacataaacgtggttgtggtgagcctaattcttct

SEQ ID NO: 659207 - DNA, 90 bp, Homo sapiens
cgcagagaccgtgcttatcacccagcagagccacgaggagctgaagaaggttctagatgctaacaagacccagccgatgcccaatcctgt

SEQ ID NO: 659208 - DNA, 98 bp, Homo sapiens
tcccgcgcctcgctcagctccaacatgagattggaaaggtgtatgagcattgtgacatcgatgactgctggtgtctcggagagagaagccaatgatgc

SEQ ID NO: 659209 - DNA, 100 bp, Homo sapiens
ccaatgttgagcacattctgaaaattggatatctaaatgatagagatccaaggagctggttctgctggttggaccaaacctcgtgagccagccacccctg

SEQ ID NO: 659210 - DNA, 100 bp, Homo sapiens
catcgcaaccttggtggtggcccagctgctcctggtgcagtggaagcagaggcacccacgctcctacaatttgccaccttccagagaagaggtacgagat

SEQ ID NO: 659211 - DNA, 96 bp, Homo sapiens
cggcggagcggcgcctgcattagcaggtatatttgcgtgctctcgtgagaaatctttttaatgaaggaaatgacgtttatcgggaacatgattgga

SEQ ID NO: 659212 - DNA, 83 bp, Homo sapiens
cgtcgttgtcgccccctcctcgtcgggaagaatcgtttggtctcctgccgtgcccggctgatcccaaagaactaatcaagatg

SEQ ID NO: 659213 - DNA, 100 bp, Homo sapiens
ggacgcgcgcagcccgcccgcccggcgaccagcaagcttatcacacagactttcagccaccacaatcagctggcacagaagacccggcgggagaagagag

SEQ ID NO: 659214 - DNA, 98 bp, Homo sapiens
tttgtggctgcctttgttgctgctgcacattaggttgcagtatgtggccagttatttgcctcagtaaaagagtagcccagccatgacccataggaatc

SEQ ID NO: 659215 - DNA, 100 bp, Homo sapiens
ttgctgctgatgaagacgttatttaccatatccagtatgatgaatgaaagctcaagaagtggagctggctttggaagaagtagaaaaagctggagaagaa

SEQ ID NO: 659216 - DNA, 49 bp, Homo sapiens
cctgggccacccctcctttcaggtcaagtggacatcctcatcatggatg

SEQ ID NO: 659217 - DNA, 90 bp, Homo sapiens
tcaagatggaagatcgcctcaagctcgtcaacgcctctgtcgctttctacaaaacctcagagcagaatgagtccctggaacgccagatgc

SEQ ID NO: 659218 - DNA, 96 bp, Homo sapiens
tcccccaccatgggactctacctggggatatacatgcatgcaccaaaacgaggacagcttctgggctggctggctgagaaactacctactcttcgt

SEQ ID NO: 659219 - DNA, 75 bp, Homo sapiens
tcagggcagcctgaaggatgcagttcggactaaggatcaccgctttgaaagtgtcagtcaccttatcagctacca

SEQ ID NO: 659220 - DNA, 83 bp, Homo sapiens
caaattatgtcttgggcaacttccagacctgaggcatgcgaggctgccaagaaaacaaaagcagatgaccgaggaacagatga

SEQ ID NO: 659221 - DNA, 82 bp, Homo sapiens
ggtgaactctgtccagttttcaaaccacacagcacttctaccctagccgggcccagcccccgagcagtgcagcctcccgagt

SEQ ID NO: 659222 - DNA, 100 bp, Homo sapiens
agtaactgcaaagatgctgtccgtgcgcgttgctgcggccgtggtccgcgcccttcctcggcgggccggactgggtttgtgaaacaggatctgataatca

SEQ ID NO: 659223 - DNA, 74 bp, Homo sapiens
tgcactcttctccttcacagtaaagtggctggtcaaaatgcagatcttcgtgaaaacccttaccggcaagacca

SEQ ID NO: 659224 - DNA, 98 bp, Homo sapiens
cctgccaacctggattctgaggccaaggctgtaggttccatgaggacaggccttgagtctgtcctggtctctggaatcacggtgtctagtagaggcca

SEQ ID NO: 659225 - DNA, 50 bp, Homo sapiens
aaaacatcggatttacattttaagatcaggaagcaccatacctcctgcga

SEQ ID NO: 659226 - DNA, 75 bp, Homo sapiens
ggccgagcaggaggcgccatcatggacagagcgggatgccaccagcttgtccaaagggaagttccaggagctcct

SEQ ID NO: 659227 - DNA, 90 bp, Homo sapiens
agtgccatcaaggctgagaccaagaactcaggcttcaagcgttctcgaacccttgaggggaagttaaagtctattatcctcccagtccac

SEQ ID NO: 659228 - DNA, 83 bp, Homo sapiens
cttggactgagtcctgcaggacacagaggctgggaggcggcagaatgcagccagaggagggcacaggctggctgctggagctg

SEQ ID NO: 659229 - DNA, 101 bp, Homo sapiens
cgcgggacccggacggcgacgacgggggaatgtggcgctggatccggcagcagctgctgttttcactcattagctcctgaggtaaacaaattgaaaaaatg

SEQ ID NO: 659230 - DNA, 101 bp, Homo sapiens
ggccttcgcggtggcgatgctcttcttggaaaaccagatccagaaactggaggagtcccgctcgaagctagcgcttctctgaagtagctttggaaagtaga

SEQ ID NO: 659231 - DNA, 75 bp, Homo sapiens
gaggagctgaaggccttcagagtccttggggtgattgacaagaaacatgttccaaatcaagtatagatattgaga

SEQ ID NO: 659232 - DNA, 100 bp, Homo sapiens
ggaggggccgcgggagcccgaaagcgaggtggacacctgcgcaggtgtgtgccctccggcccctgaagcatggccagcagcggcatggctgacagcgcca

SEQ ID NO: 659233 - DNA, 100 bp, Homo sapiens
gtccccacaaaaagtgacgctttacctgcgaccagcacagacgcagtcttcagcaaggaagtgctgggaacgccctggagtgaacccaggaagatgcctg

SEQ ID NO: 659234 - DNA, 75 bp, Homo sapiens
catcttcgattagctaataaccaactgcaattcctacctccagtggctgcttcaacccccaactccactgctggt

SEQ ID NO: 659235 - DNA, 75 bp, Homo sapiens
tggcatttacagaaagagtcaacagcagtggcaacagatgaagactcttaagatgacagaaggtgatttttctgg

SEQ ID NO: 659236 - DNA, 75 bp, Homo sapiens
cagcttagtgcgcgaggcttctcggcagatcgtggccggtggttctgcagccattaacaggccagatatcacaga

SEQ ID NO: 659237 - DNA, 75 bp, Homo sapiens
gtgaagaacctgaaggacacactaggatacaatgtctctttgctatatgaccttgaaaatcttccggcatccaag

SEQ ID NO: 659238 - DNA, 103 bp, Homo sapiens
cttctttgtcttacttgtcatttgaaggtgcaactaaaagaaacagaccaaatgtgcaggagaagatggtataaactggtccatcagtgacaaagacattgag

SEQ ID NO: 659239 - DNA, 75 bp, Homo sapiens
ttttcaccagatggagaattttttgccactgctgggaagtggtccatgctgtggacggcaccgccgagaacggga

SEQ ID NO: 659240 - DNA, 87 bp, Homo sapiens
tcttcggctgcggaccctgccattccggaggaggaaacatggtagaatggtgcttacctcaagatattgaccttgaaggtgttgagt

SEQ ID NO: 659241 - DNA, 100 bp, Homo sapiens
cttcagcatggaagggatctcaaatgtcattcagaatggcctccgccacacctttggaaattcaggtggagagaaacagccaccagtggtaaaaacagag

SEQ ID NO: 659242 - DNA, 100 bp, Homo sapiens
taagcatcattaatgaatatctttcccagtcctaccagaaattcagctatatcgagaagtttactgactttcttcggctctttgtgagtgttcacctaag

SEQ ID NO: 659243 - DNA, 98 bp, Homo sapiens
gaagaaggtccgcgttaaatctggtgtcctcagataatccccaacccgagatggcccctccagtccatgagcctcgggcagaactggcgcctccagcc

SEQ ID NO: 659244 - DNA, 98 bp, Homo sapiens
ggtaatcctgacgaaattgaaattacctccgagggaaacaagaaaacatcaaagaggtctagcaaaggggtgctacaagttgaccactgcagcagtaa

SEQ ID NO: 659245 - DNA, 74 bp, Homo sapiens
caaatattgtggaggtggaggtgattctgaaaaatgctgtgcctttcaaaagtgtttcctgaggttataggcgg

SEQ ID NO: 659246 - DNA, 98 bp, Homo sapiens
ggccaaccacgacctgacggacaccacccgggcgggcttctccagggaaagtgaccgaggcagtgaaagaggccattgacgcagggtaccggcacttc

SEQ ID NO: 659247 - DNA, 90 bp, Homo sapiens
cccccattcactagaagcactgagagatgcggccccctcgcagggcaaccacacctccaaatcaaggaaggccagattctcctgtctatg

SEQ ID NO: 659248 - DNA, 74 bp, Homo sapiens
tcaggtcattgccagcggttcagaggactgcacggtcatgtttgcaatggattttggataaacaagatctgttg

SEQ ID NO: 659249 - DNA, 90 bp, Homo sapiens
gaaaaaaattctggggaccaggattcaagatctggacataatgaggaattgaatgatctggcacgggaccctccagcacagtgttcagca

SEQ ID NO: 659250 - DNA, 100 bp, Homo sapiens
ctacatctaccccgagcagttctcctacatgcgggagctcaaacgcacgctggacgccaaggtgattgtgtccaggggggggcgctttctggaagccccc

SEQ ID NO: 659251 - DNA, 100 bp, Homo sapiens
ggcgcgaagaggctggactcggattcgttgcctgaggtggcatggaatattcacatgggagagccgcatgaggccgcccaccacgcttcctgaaggatgc

SEQ ID NO: 659252 - DNA, 98 bp, Homo sapiens
tgaatgatctctacatctcagactactgtgtgtggattcagaaagtcaatcaggtcaattcagtgaagatatgatacccacagtgggcttcaacatga

SEQ ID NO: 659253 - DNA, 110 bp, Homo sapiens
gtgtggatcttacggaaaaaatcccactggccaacggacatctttggacatcagacagtgcaggagaagaatgtgatgcggcagaaggggctgaaaactaaatccataca

SEQ ID NO: 659254 - DNA, 75 bp, Homo sapiens
acaagcagcttctgcacgacgcactggcccaggacctgcacaaggaaaatggctttgtaaagaagtttgaaccta

SEQ ID NO: 659255 - DNA, 100 bp, Homo sapiens
tctggaatttctggcttgaattagggaaagatttatcttttctccactcatataaaatacagaaagaatttactttcaggttttcttacctaaagggagc

SEQ ID NO: 659256 - DNA, 98 bp, Homo sapiens
aatcaccaaccaaaagattcacctttggatttcatcgcttaggttgatgccggcccaggatggatcagacctgtgaactacccagaagaaattgtctg

SEQ ID NO: 659257 - DNA, 50 bp, Homo sapiens
tgctatgttcccagaaggatataaggttatggaaacaaaggacatgcttt

SEQ ID NO: 659258 - DNA, 82 bp, Homo sapiens
cctcctcctccacctccggcttttgggggatcactgtcctctctcggcagcaggctgaccccgcactacatctacccaccag

SEQ ID NO: 659259 - DNA, 100 bp, Homo sapiens
agaagaagaaacgggccgcgaaccgcagtatcatgctggccaagaagatcatcattaaggacggaggcacgattttaccaaatgttgcaagaactctgga

SEQ ID NO: 659260 - DNA, 87 bp, Homo sapiens
tatatcgcatcctatggctcaaagaaagatgattatcttcctgcctgacacagctcacttcaagaagtgcacaatgtcagaacgtgg

SEQ ID NO: 659261 - DNA, 82 bp, Homo sapiens
cccaactctacttccctctgctccttcccagaagatggcagtgaacgtatactcaacgtcagtgaccagtgataacctaagt

SEQ ID NO: 659262 - DNA, 100 bp, Homo sapiens
aaactggagagcttcatcaaaaatagtgatagctttgataagagttaaagttcctcgtaattttcgcttgttggaagaacttgaagaaggacaaaaagga

SEQ ID NO: 659263 - DNA, 83 bp, Homo sapiens
tttggattgaagccgcctctgtattacttaccagcacatgattaagtaccggtacatcccgttcacacatgggaagagaaggt

SEQ ID NO: 659264 - DNA, 75 bp, Homo sapiens
ggagcctcaaggcggcccggcgggcgactggacggccggacagttacagaatgtctgaaggggacagtgtgggag

SEQ ID NO: 659265 - DNA, 75 bp, Homo sapiens
acatttctgcagactgcctcaacagagtgataggattatgtatatcacgtagtgagtgcgatctgtgaatggaca

SEQ ID NO: 659266 - DNA, 83 bp, Homo sapiens
cagaaaacttcccttggaggggatgcaccagaagagccagaggtgacttaagagattaaaattaatttggttgctgttggttc

SEQ ID NO: 659267 - DNA, 75 bp, Homo sapiens
agggtgttcttgacgattaatcaacagaaacctgacactaattaagctagtgcaagaagaagaagaaaaagaaga

SEQ ID NO: 659268 - DNA, 98 bp, Homo sapiens
gagaccgtcttcattgtggagatctccctgacatgcaagaacagggtccaggcttgggcctggaacaggacaggcaggggcccgaagaaagtgatgaa

SEQ ID NO: 659269 - DNA, 100 bp, Homo sapiens
agcggtcggcggggtttcttcgttgcattgcctgagaggagcggagtctgccaggtggtgtccatcatgaaggacagaataacgggctcccagattcaca

SEQ ID NO: 659270 - DNA, 83 bp, Homo sapiens
gctgtgcgacgtgaccctcaagatggcgattttgctgacagctgccaagaaaatgcttcactcaacagtcctcatgtgcccag

SEQ ID NO: 659271 - DNA, 75 bp, Homo sapiens
ttccattggcaagctacaataatggggccagtttcagccatgccacagagctccggcagtcatgggcccgctata

SEQ ID NO: 659272 - DNA, 90 bp, Homo sapiens
gaaaaagagcaaagataagaagagaaaaagagaagatgaagaaacccagcttgatatgttgggtgtgctgatctgcaaaccctggacaca

SEQ ID NO: 659273 - DNA, 99 bp, Homo sapiens
ctcaagagaacacaagaagtgctttaagagttctggagagtcttggcttctgggaggaagtcagagggattatctcaggatcagagctgataacgggat

SEQ ID NO: 659274 - DNA, 75 bp, Homo sapiens
gctcgctccgctcgtcccgctcgtcatggcctacccgggatacggaggagggatcatccccaagccaagcgagcc

SEQ ID NO: 659275 - DNA, 100 bp, Homo sapiens
tgccaacgtgggcaaagagaaccgccagggctgggcagggtccccagccccaccccagccccaaaggaggctgttcgagagggacgtcctccggagccaa

SEQ ID NO: 659276 - DNA, 97 bp, Homo sapiens
caagatcctgatggacagccccgaagacgccgacctcttccactccgaggaaatcaagttcttggccaggctgactgagagatttgtgctgggagtg

SEQ ID NO: 659277 - DNA, 90 bp, Homo sapiens
cgcgcagctgggcgagaagctgctccggcctagcctggcggagctccacgacgagctggaaaaggttctggccactgcatttgacacgac

SEQ ID NO: 659278 - DNA, 75 bp, Homo sapiens
gacatcatctgtgtgttctcacagacacattcagctaacgtattttagcaggtggagtgaggttgaagattcctg

SEQ ID NO: 659279 - DNA, 100 bp, Homo sapiens
agaccatcaaagagctcatacggagcgtccttggccagaactacgacattacaatggaaatggaccacacatccccgacctacatgcttgctaacttaac

SEQ ID NO: 659280 - DNA, 75 bp, Homo sapiens
gataaagatgcgcctctgcgatttgcagaccaggacggtgacaagcagctctctgtgcccgagttcatctccctg

SEQ ID NO: 659281 - DNA, 82 bp, Homo sapiens
aaagcaagggattgctggctacagcttcagaagaccgaagcgttcgtatctggaaggttgtgaccgagattcccgacgagag

SEQ ID NO: 659282 - DNA, 75 bp, Homo sapiens
ctggcctgaagacatttcctctcctcccctctggatttctcagaggctccatggtccccttctcgatgcgcatct

SEQ ID NO: 659283 - DNA, 134 bp, Homo sapiens
ggaggatgtggtgctgcccgagaaggtggacgtgctggtgtctgagtggatggggacctgcctgctgaggccacaagaggaagctgaatgaagaggacgccgccagcgagtccagcagggagtccagcaacgag

SEQ ID NO: 659284 - DNA, 84 bp, Homo sapiens
caggagacacaagaagcggatccaggtatctcagcatgtgggaagtatgttctacaagaaaactctttcatttcctataagaca

SEQ ID NO: 659285 - DNA, 75 bp, Homo sapiens
accgggggcgccctggaggagtccctgaagatctatgctcctctgtacttggtgcatgtgagggaaccctggctt

SEQ ID NO: 659286 - DNA, 100 bp, Homo sapiens
cctggtcttgctcggccgatgaagtgcagaggtttttttctggtgagaccaaggaccaggtagctaactcagcctttgtggaacgtcttcggaaacatgg

SEQ ID NO: 659287 - DNA, 50 bp, Homo sapiens
gcggtactcagccttttaaagcttgagtagagacggggtttcatcgtgtt

SEQ ID NO: 659288 - DNA, 135 bp, Homo sapiens
cttgtccatagcctagatcgagctccctgtgtgcaccgcgcgctgcccgaggcgcgatcaactcactatcctgaaggtccattctcccaagaagaggggacagaaagacagatctatttgtaagaaaggcttggg

SEQ ID NO: 659289 - DNA, 50 bp, Homo sapiens
gagtcatcaatgccccccagaagggatcatcttgtgtcatatcttagaag

SEQ ID NO: 659290 - DNA, 74 bp, Homo sapiens
agtccaggagccccagccccccaggagctcggggctgccgacaagcatggttacattggcgaatttgaaatcat

SEQ ID NO: 659291 - DNA, 49 bp, Homo sapiens
tcggatgcactgctgtgatgagaagtggtacaccatccccaaaacgaac

SEQ ID NO: 659292 - DNA, 100 bp, Homo sapiens
ccggcagccgcacaccatcctgcgcgtcgtgtcttggggccaattcctgtccccccagcagcatggcatcgtgtgctgaaccctctgagccctctgcccc

SEQ ID NO: 659293 - DNA, 98 bp, Homo sapiens
cgggatcccagcctcaggcctgcacggacggtgttggttgggaaaaagcttgtggtgaaggggggcaaaaaaaagaagcaagttctgaagttcactct

SEQ ID NO: 659294 - DNA, 82 bp, Homo sapiens
cgagctgtcagagcccggggacggcgaggccctcatgtaccacacggctgtctgtccccagaccccagagcacgtccggcac

SEQ ID NO: 659295 - DNA, 100 bp, Homo sapiens
ggaacaccccctttctgctgacatcgccatggccacccgtgcagatgaggacggagacacttccctgagatgaatgaggtctgtcaagaggatgaaagga

SEQ ID NO: 659296 - DNA, 50 bp, Homo sapiens
agaggcagattggtatggccgaggctgagaccctgcatgtgatggatcag

SEQ ID NO: 659297 - DNA, 99 bp, Homo sapiens
ggctggaggtactgagaggatggaaatcagcgcggagttaccccagacccctcagcgtctggcatctgtactccaaagattcaggtttactcacgtcat

SEQ ID NO: 659298 - DNA, 97 bp, Homo sapiens
tgtcaaagatgccagatgtgggagacacgccaaagctcccaagtcctattttgtaacggattatgatccaaccattgaagattcttacacaaagcag

SEQ ID NO: 659299 - DNA, 89 bp, Homo sapiens
tctgggagaatatttaatggaaaatcgcttggttaaaacctgacacttttaacaggtaaataccagctgtcccctacagtgaatatgcc

SEQ ID NO: 659300 - DNA, 100 bp, Homo sapiens
aggaggaccacgcctgcatccccatcaagatgtggcaaaatctggcaaaggcagagaccaaacttcatacctcaaactctggggggcggcgggagctgag

SEQ ID NO: 659301 - DNA, 90 bp, Homo sapiens
cctggctatggtgacgctatcaactgcagagattggacttatcaaactggtttcaaagcacagagctcaagtaatttacaccagaaatac

SEQ ID NO: 659302 - DNA, 97 bp, Homo sapiens
ccccagttttctacaattgagtacgtgatacaggtgatgagaagctacaaggcgaccatccagcagaccttggacatcctgttcctccgggaaggct

SEQ ID NO: 659303 - DNA, 82 bp, Homo sapiens
aaagccacagtcttcaagagcccacggacaccacctcaacgtttggaaattttagcattcaggtgccaggaatgcagatggg

SEQ ID NO: 659304 - DNA, 100 bp, Homo sapiens
aaggaagccacgtgcagacatctacaaccttcgatctcctgacgatcaagtgcttctgctcctgatgtggatgacccagaggcattcccagctctggctt

SEQ ID NO: 659305 - DNA, 100 bp, Homo sapiens
gagaagagggtggctaatgattaaggtcatgatgatgggcagcgcccgagtggcggagctgctgctgctccacggcgcggagcccaactgcgccgacccc

SEQ ID NO: 659306 - DNA, 74 bp, Homo sapiens
tggaccaccacattttacagaaagcacagtgtttccaagatcttcctctgatggcgctgcctccatgccatgcc

SEQ ID NO: 659307 - DNA, 90 bp, Homo sapiens
acatagagctgacattaactgtcagtactatactggcaattgctggagaagattttgcaattgttgcttctgatactcgattgagtgaag

SEQ ID NO: 659308 - DNA, 110 bp, Homo sapiens
caccgatcctctcatatactgcaccaccagaagctgctggattagcagagcaaaggttggaaaggtactttgttgggtgttgctatggctacagtgaatgctatgatagc

SEQ ID NO: 659309 - DNA, 74 bp, Homo sapiens
cgtgggcgagctgggcgacggcgccttcggcaaggtttacaagggaactctctctctgatgctgatttgcactc

SEQ ID NO: 659310 - DNA, 100 bp, Homo sapiens
gctgattttggatctgcttcaatggcttctcctgccaactccttcgtgggcacaccttactgaaacattattccatcatttgtgttgatggatatccagg

SEQ ID NO: 659311 - DNA, 100 bp, Homo sapiens
agccgctggtcgtgttcgtcctcggcggccccggcgccggcaaggggacccagtgcgcccgcatcgtcgaggaaatttgtacatagattctaggcaaaat

SEQ ID NO: 659312 - DNA, 98 bp, Homo sapiens
ggacacccagcggtctgacatcgcgacgctgctcaaaacctcgctccggaaaggggacacctgtggacagaggactgcagaaaatcaacctatcctcc

SEQ ID NO: 659313 - DNA, 99 bp, Homo sapiens
ctcctggaggggatctctggccaaggagtgtacgagccacatgcagggttcagaatagctttcaacatgtttgacactgatggcaatgagatggtggat

SEQ ID NO: 659314 - DNA, 75 bp, Homo sapiens
gcaagtttaggaaatctatttggcgcagttgtgtagcagttgagtaatgctggttagctgttaaggtggcgtgtt

SEQ ID NO: 659315 - DNA, 100 bp, Homo sapiens
ctgcgttgctcttgcttttcctcgctggggtgtacgtgctgaacctgaccctggtggacctgcccggaatgaccaaggtcccggtgggggaccaacctcc

SEQ ID NO: 659316 - DNA, 100 bp, Homo sapiens
cacctgctctgctcttataaggatccgagtgcctgattattacaaaataattaaaaatccaatggatttgtcaaccatcaagaaaagactacaagaagat

SEQ ID NO: 659317 - DNA, 82 bp, Homo sapiens
ctggtcgccatcaagaaagtattgcaggacaagagatttaaggttcatgcatgggagatctcagaccagttgttacagatcc

SEQ ID NO: 659318 - DNA, 100 bp, Homo sapiens
gacgcccccctggcagtgcttagagccttcaaggttgggtgctgattgaccggagcggccgtcactttggtacaatcctcaattacctgcgggatgggtc

SEQ ID NO: 659319 - DNA, 75 bp, Homo sapiens
aggaattggaggtttcgatatgaactagcagatgacttctgacagctctctccatggaaggaggcggcggccgcg

SEQ ID NO: 659320 - DNA, 75 bp, Homo sapiens
gagaccctcacggagctgggcgacgagctgaccctgggagacatcgacggctagcttgtcactttctgcaaaggt

SEQ ID NO: 659321 - DNA, 103 bp, Homo sapiens
agaaattcgactatggcaacaagtacaagcggcgggtgccccgggttctctacttaaaagacaatgactactgatgaaggtgccaagaacaatgaagaaagcc

SEQ ID NO: 659322 - DNA, 82 bp, Homo sapiens
tttacgtctcttccatctgctgctcacctcagctgcctgggtccccgacgagagccagctattactataacaagcgcattct

SEQ ID NO: 659323 - DNA, 100 bp, Homo sapiens
ctgtgcagcatcaaagaggcaggagatttttcggaattaacactaaacggtagcctggaagaaaggatattctttactaacatggttacctgcagccagg

SEQ ID NO: 659324 - DNA, 75 bp, Homo sapiens
gaaggatcgagcaaaccaggagagcaaggatggagatcctaggaaaggccttcccttcttcttggtggtgttctt

SEQ ID NO: 659325 - DNA, 101 bp, Homo sapiens
aacagtcttccgcaggaaggagatgtggtacccggaaattaaagaggagctggaggagctggaccgcatcacagagcagacgctctttgacctgtacaaat

SEQ ID NO: 659326 - DNA, 98 bp, Homo sapiens
gaagacgacgggcagccccggactctgtatcgaaggatgatcgcagtgatgtggagagcagctcagaggaagaagatgtgaccacctgcacaaaaagt

SEQ ID NO: 659327 - DNA, 135 bp, Homo sapiens
ctccctgtatgcatggtgtggggttggtgtgattagcttcgcagtctggaaagctttaggagttcacagtgttttaaaaagacaaggctatgatgctgcttgtgatatatggagtcttggtgtcctactctatac

SEQ ID NO: 659328 - DNA, 100 bp, Homo sapiens
ttctgaaagacatctcacatatattcaaaagatcttcaggatggaggatagtgacaacctctggtgggacgcctttgccactgaattttttgaagatgac

SEQ ID NO: 659329 - DNA, 90 bp, Homo sapiens
ctggatttaagcactgctgcactttatgagccttggtcatctataatttcctgagcctgtgctatgagtacctaggaggagaaagttcca

SEQ ID NO: 659330 - DNA, 90 bp, Homo sapiens
cgccatcttcgaacttagacttccggaaggactttggcgagggggcatatgatattttcctgaatgcaaaagagcaaaacattgtgttta

SEQ ID NO: 659331 - DNA, 132 bp, Homo sapiens
ccaggacatgaaaaaaatgacagctgtgtttgagaagctgcagacttacatagctcttcttgccttgccaaggaaacactactatgaagtatcctgtcatgaccaagggttatgcagggtcgggtggtctac

SEQ ID NO: 659332 - DNA, 87 bp, Homo sapiens
ctgggtgggcaacttacccgagaacgtgcgggaagagaagatcatcgagcatttcaaacgggctcattgtcatccccaagccaggcc

SEQ ID NO: 659333 - DNA, 98 bp, Homo sapiens
cgcacacgccctggagctccgcaagggggagctgcgctcggcggacctgcccgcgatccaccacaccccactctggccggagcacgccaagcagctcc

SEQ ID NO: 659334 - DNA, 100 bp, Homo sapiens
cttggttgcacttgagaaaattaatgtggcaggtgctggagaatctggtaaaagcaccattgtgaagcagatgaggatcctgcatgttaatgggtttaat

SEQ ID NO: 659335 - DNA, 98 bp, Homo sapiens
ttaaacacagaaggaaatacccagactgttactacaacctcgggcgtctggtagcagaaggtcaagaaatttgtgtgattgaagccatgaaaatgcag

SEQ ID NO: 659336 - DNA, 90 bp, Homo sapiens
ccaggacaaactctacaaactgagatgtggaaggaaggaaacagaattcattttcaaaccaaggtccctccatacccagaagtgttccgg

SEQ ID NO: 659337 - DNA, 95 bp, Homo sapiens
cccagccagtccgtcgatccagctgccagcgcagccgccagcgccggttcctccgtgtcacaaagcagtacctgccccacgtggcgcgcctctgt

SEQ ID NO: 659338 - DNA, 98 bp, Homo sapiens
cggatcgccgcgctcagcgacaaacaagtgtcccgacccaggctaagcttgagcatggctgagcaggagcccacagccgagcagctggcccagattgc

SEQ ID NO: 659339 - DNA, 97 bp, Homo sapiens
aggtcttcttcaaaagagccgctgaagatcctaaatgcccaggagatgttgattttcataatagtgactgggacattaagacaatcaccagctcctt

SEQ ID NO: 659340 - DNA, 75 bp, Homo sapiens
ccggaaccgcgattcggcgtgtcaggtgtgaacccacatccctgcccccagggccacctgcaggacgccgacacc

SEQ ID NO: 659341 - DNA, 82 bp, Homo sapiens
cgcttccggatcgggggcaagcggaaggtgatgcccaagatggaccaggtttttagaacttcagccataaaaatgggcagaa

SEQ ID NO: 659342 - DNA, 100 bp, Homo sapiens
caatggttgcatctgcagatggtttagtttatgaaccagacagtgtgcagttaaaagacctgtggaaaaaaatctgccatcacagcagtggaatggagtt

SEQ ID NO: 659343 - DNA, 83 bp, Homo sapiens
gtttcgacagcgaacatgtcgcggcctgtcagcaattctgtggtgttcttggtcacacatttatggagtttctgaagggcagt

SEQ ID NO: 659344 - DNA, 74 bp, Homo sapiens
taaaagaaccttcagtacaagaggctacttctactagtctggatgtggatagtgaagctaagaaactattgggt

SEQ ID NO: 659345 - DNA, 87 bp, Homo sapiens
cgtacccacagtgcttcatgagaggctgatgtttcagacaccgcaggaaatgggcttaatagtgatcgcggcccggcagaccgaggg

SEQ ID NO: 659346 - DNA, 74 bp, Homo sapiens
ggcgctggaggagcgaggcagctgtactaggactgggaacggggatcgcttacacctgagacgaactacagaac

SEQ ID NO: 659347 - DNA, 100 bp, Homo sapiens
agtccctggatcaccgacagcacagacagaatccctgctaccagtccagaggtgtccttctaaagctggtagaggtttcacgagtcatcagggacccaga

SEQ ID NO: 659348 - DNA, 100 bp, Homo sapiens
ggaataagactgcatctgttcatatgagatggatctgtctgtagaaactctgttcagcttcatgcaggagcgccagaaaagatacgccaagtatgccgag

SEQ ID NO: 659349 - DNA, 98 bp, Homo sapiens
agtgttgtgataaggcagctgcaaaaagcggcaggcagcaattccatttccgtgagggcgtttctagatgaagatgacatgagcttggaagaaataaa

SEQ ID NO: 659350 - DNA, 98 bp, Homo sapiens
aacaagtcatttagcgctatggaagatgaccagaggactagacctgaagtttcaaagaattaaacaaccaccatgtcgagcaaaaaggcaaagaccaa

SEQ ID NO: 659351 - DNA, 88 bp, Homo sapiens
cgtgctgaggagccaggtgtacagccttgtgcctgacaggaccgtggccgaccggcagctggatagccgcttcccaaagatcctggag

SEQ ID NO: 659352 - DNA, 75 bp, Homo sapiens
cttgtccagcgagccccactgctcggggaggaggagccacggccggggacagctgctctgttaaaagcgaaaatg

SEQ ID NO: 659353 - DNA, 126 bp, Homo sapiens
gaaagaggaaatggattttcctcagttgatgaagatgcgctacttggaagtatcagagccacaggacattcgttccccatcaggaagtcctcgcagaagtgcaagtcctgaaagaatggactgaag

SEQ ID NO: 659354 - DNA, 82 bp, Homo sapiens
cgtgagcaagcccaggcacagccgacgccgcgggcggggatctgacgagcttttctctacttgtgtcactaacggaccgttt

SEQ ID NO: 659355 - DNA, 97 bp, Homo sapiens
ggtcagagcattttctctgtgccaccagagagtttcgtgtgcggtgtcatggagaaactccagctgggcccagagattctgcagcgggaaaatccaa

SEQ ID NO: 659356 - DNA, 75 bp, Homo sapiens
tgatgatcatgctgggagccatctgtgccatcatcgtggtagttattgtaagtgtggaccttgtcaccgcctgtg

SEQ ID NO: 659357 - DNA, 101 bp, Homo sapiens
tgaagatagtgcctttcagccctaccagcttagaccatgctcagcctccaagcagccttgtcatcgacaaagaatctgaagtttacaagatgcttcaggag

SEQ ID NO: 659358 - DNA, 98 bp, Homo sapiens
ttggatatcagcctatacaaggaagtgactgactccaggacagcacaggaagtggatccccctcagccacctcaattcttcaaaagaaagagacttca

SEQ ID NO: 659359 - DNA, 100 bp, Homo sapiens
cggaaaatgtagcttcccggttaagttgtcactcagcccagtccatcagtttctcagcccagtacttctcagagtgaagaaaaagctcctgaattgccca

SEQ ID NO: 659360 - DNA, 100 bp, Homo sapiens
agctgagtggttgtgtggtcgcgtctcggaaaccggtagcgcttgcagcatggcacttccgttccggcgcccctccggtcatcaacccgctgggcaccag

SEQ ID NO: 659361 - DNA, 80 bp, Homo sapiens
tcgtggcctgcctctgcgtgccaagagtgagccatggagctacgtgtggggaacaagtaccgcctgggacggaagatcgg

SEQ ID NO: 659362 - DNA, 90 bp, Homo sapiens
ccgacttccgcacggatgactcccagcccccaacgctgggccaggagatcctggaggatgcgtctgttactagagtggagagtctacctt

SEQ ID NO: 659363 - DNA, 74 bp, Homo sapiens
atctacctgacgggcctgcgagggttgaagattgtgaagcaatagcctaagatgactgtccaagtgcctccaaa

SEQ ID NO: 659364 - DNA, 74 bp, Homo sapiens
ttcaagaaggaagtgtatcttcatacatcaccacacctgaaagcagagatgaatgtgaaggtgctggactttga

SEQ ID NO: 659365 - DNA, 100 bp, Homo sapiens
gtggattccaagacatccctgctgagagagccaagatgcctgaaaacttcatgcctcctgttcccatcacatcaccaatcatgaacccgttgggtgaccc

SEQ ID NO: 659366 - DNA, 82 bp, Homo sapiens
gccgtcgcccaggagtcatcggacgccagaatctgcccgcggcgccatggctcacgtcggctcccgcaagcgctcgaggagt

SEQ ID NO: 659367 - DNA, 82 bp, Homo sapiens
tctgaattgtgctgccttggccaaaagaggagaactacgatgacccgcacaaaacccctgcctccccagttgtccacatcag

SEQ ID NO: 659368 - DNA, 50 bp, Homo sapiens
cagattcccagccccctggaaaggatggcaccatggagtgctatactgag

SEQ ID NO: 659369 - DNA, 100 bp, Homo sapiens
gagatggagaaactgtagagtttgatgtggttgaaggagagaaggaaagccgggttagtaaagcagttgaagtgatgattcagcacgtagaaaacttgaa

SEQ ID NO: 659370 - DNA, 76 bp, Homo sapiens
gccagggtccctgaagagggaagacacgcggaaacaggaattgaatgatctggcacgggaccctccagcacagtgt

SEQ ID NO: 659371 - DNA, 90 bp, Homo sapiens
aaggaggaggagcgctccatctcttatcctggataaagccctacaaaaacggcctactaccagtgtaagagacttaaatgaatatgactg

SEQ ID NO: 659372 - DNA, 101 bp, Homo sapiens
gcccccatcctcaacttcctgcgcaccaaagagttggatcccagacagcaccagttgcccttgaagcagaaaacagaggtgaaatgaaactagctctccag

SEQ ID NO: 659373 - DNA, 90 bp, Homo sapiens
atccactgcagagcacacctggccaatcatgacgagctcatctccaaggtttattttcttgaaaaggctccaggcttcggcttggaaaat

SEQ ID NO: 659374 - DNA, 80 bp, Homo sapiens
gtttgcctagaacctcacaattaaatgactcttctgaaatggatccctcaacacagaatatgatgcttcctggtgtgttt

SEQ ID NO: 659375 - DNA, 90 bp, Homo sapiens
ggaccaggttaccctaacagcaggaaggttgtgttgggatttgctgtgttcctgggcaggtgcctggtcaatcagtcctcgggatggcag

SEQ ID NO: 659376 - DNA, 90 bp, Homo sapiens
gccgcctccgcccagggccacctaaggagcggaccccgcatcttcgccgtctggaaaggattgtcagtggcttcgccccgaggagagctg

SEQ ID NO: 659377 - DNA, 91 bp, Homo sapiens
aagcactggaaccgcttccgagactgtggacgaatgtggaacctcgctctgtggctgtgttcccttggcactccttagtccccttcctggc

SEQ ID NO: 659378 - DNA, 100 bp, Homo sapiens
ctcgactcggcaccgctgtgcaccatggcccgggccctgtgccgcctcccgcggcgcggcctctggctgctcctggccctcctgtctgtacagcgctgcc

SEQ ID NO: 659379 - DNA, 100 bp, Homo sapiens
gacgcaaccaaccttaatatacagccagcctgtcatgagacctccaaacccctttggccctgtatcaggagcacagtgaaggtggtgtttttaaggctca

SEQ ID NO: 659380 - DNA, 51 bp, Homo sapiens
aggaaaggatgcagcagaggagagcaacttttagtgaatttgcagccaagc

SEQ ID NO: 659381 - DNA, 82 bp, Homo sapiens
taagaagtgccttttgcctcccaccgtgattctgaggcctccccaaccatgtgcaattgcgagaaccactgtctctgatcaa

SEQ ID NO: 659382 - DNA, 108 bp, Homo sapiens
tgagaaataaggacaaaagccaagaggaggacagttcgctacacagcaatgcatcgagttacatcatgctgatgacagcttcctggtcctcaccacagatggaattaa

SEQ ID NO: 659383 - DNA, 75 bp, Homo sapiens
cagccacacgccggcgggcagaagccgcccgctctccgggtcgaaaatttaaaaagttcaataaagtcagagttg

SEQ ID NO: 659384 - DNA, 95 bp, Homo sapiens
tgagagggacacgcagtgacgagcggccgaagcagctttgcgaagctccaccatgaggcgaggtggatggaggaagcgagctgaaaatgatggct

SEQ ID NO: 659385 - DNA, 82 bp, Homo sapiens
atttacagaaagagtcaacagcagtggcaacagcactgctcagcacgcaggcatgtgaggaagctgggcttaaaggagactc

SEQ ID NO: 659386 - DNA, 106 bp, Homo sapiens
gctgcggcgcggggaccgctgtgctctcggacagagcgggatgccaccagcttgtccaaagggaagttccaggagctcctggtgggcatcgttgtggagaatgacg

SEQ ID NO: 659387 - DNA, 100 bp, Homo sapiens
caggagcttgtgttggaggctgtggaccttctctgtgcactggtgaagtattacagacacttagcacctgatcacttgctgcaaatatgtcatcgactag

SEQ ID NO: 659388 - DNA, 74 bp, Homo sapiens
ctgttttggaactgtcaggtacctcaaagctcccatgaagctgaggtcttgaagcagctggctgagaaacgaga

SEQ ID NO: 659389 - DNA, 90 bp, Homo sapiens
tccacacgcgcttcaagcaggagggtgtcctgaacagcaaggtcagtaacatcaaccagcccctggagattacagccatctcgtccccgg

SEQ ID NO: 659390 - DNA, 100 bp, Homo sapiens
atggtaatccagctcctggcgataatgtgtgtctcctgtatttgttggagcccatttctgggtgatgaccagttaaatgtatttggagaggacactatgg

SEQ ID NO: 659391 - DNA, 75 bp, Homo sapiens
tttgagggacccccattcaagttcaagttcacaattggcggtggcccagttgaaatccttcccttcctctacctt

SEQ ID NO: 659392 - DNA, 109 bp, Homo sapiens
ggagagcccacccgcgccaggaggccgaacgcggactcgccacccggggtttgaacatcctcatccctgtgttagaccggatccgatatgtgcagagtctcaaggaaat

SEQ ID NO: 659393 - DNA, 75 bp, Homo sapiens
gaccagccgggcctgaggttgaactggggtgaaccgccttccacaacaaagcggaccttagatatcccttgtgac

SEQ ID NO: 659394 - DNA, 101 bp, Homo sapiens
gtttgtgccaagaccccaggctgcctcccaggtcctctgggacagcccctgccttctaccaggtactatcttggtcgtcggatgtttattgttatttctga

SEQ ID NO: 659395 - DNA, 97 bp, Homo sapiens
tgaataccagccactgcagatagagacatatggaccacatgttcctgagcttgagatgctaggaagacttggaacttttgagcatgctgttctagct

SEQ ID NO: 659396 - DNA, 75 bp, Homo sapiens
aagagtgacttgtttctggatgattctaagagtgcagtcattggagaaatcgatgaagaaacagattctgcgctt

SEQ ID NO: 659397 - DNA, 74 bp, Homo sapiens
gccatgaggccaaaggcagttgtattgagcagatcctgaagatagttaaggaggctggatttgatctgacacag

SEQ ID NO: 659398 - DNA, 53 bp, Homo sapiens
cgagcagggaaaccttaccagctccaggagttccctacttcagtttatgagag

SEQ ID NO: 659399 - DNA, 100 bp, Homo sapiens
gatgcaccgagtccagcccaggaaaatggagagatagcagaccccacgttagctgaaatgggaaaaaacttgaaggaggcagtgaagatgctggaggaca

SEQ ID NO: 659400 - DNA, 100 bp, Homo sapiens
ttgtctaagtgacttgagccttctgtccacagattctgaattgcgagaaaattccagtacgtgtgggccaaactgaaattgcagaaggcttcagaacgat

SEQ ID NO: 659401 - DNA, 101 bp, Homo sapiens
cgaatgggctacatggatccatgatttcctgaaggaaatataatgatctgttcatcgaagtagaagatattgttggccacgtgggatcgaagaccaaaaac

SEQ ID NO: 659402 - DNA, 97 bp, Homo sapiens
gctgccacaggccccagcatcaagatctggctggttggtggagaatttgaactggagatgaactctattatccaggatgctgagagtataatacgca

SEQ ID NO: 659403 - DNA, 100 bp, Homo sapiens
tgcccaacagagggaactacaaccaggcaactatcgtacccagatgtgggataagcagaaggaggtcttcctgccctcgacccctggcctgggcatgcac

SEQ ID NO: 659404 - DNA, 87 bp, Homo sapiens
actttctggagtttgtgtaaaacaaaaatattatggtctttgtgcacatttacatcaagatgacttgtttaaagttcacaagcttaa

SEQ ID NO: 659405 - DNA, 75 bp, Homo sapiens
aggaaacttgccttatcaccttcttgcttgcaggtcgcttatgatgaagctacagatgaatttgcttcttacttc

SEQ ID NO: 659406 - DNA, 97 bp, Homo sapiens
ggaactggtgctgcagcgagagcttaacaaacaacagttgcagttactgaaagaacggttccaggccttcctcaatggggaaacccaaattgtagct

SEQ ID NO: 659407 - DNA, 90 bp, Homo sapiens
gggaggtccagatgaaaaagaaaagactaccgcactgaaagctccgacagttagttaatatgtgcatcaacccagatccagagaagcgac

SEQ ID NO: 659408 - DNA, 82 bp, Homo sapiens
tcacctgaggtgaaccttcgaccttggacttctcagcctccagaatggatgataaggatgccttctatgtggcagacctggg

SEQ ID NO: 659409 - DNA, 100 bp, Homo sapiens
tgtacaccgcggccgtcgcggcttttgtgctgtacaagtgtttgcagaccaccctagtgccgctgttccggaactcgcgcctggtccagttccacttcac

SEQ ID NO: 659410 - DNA, 74 bp, Homo sapiens
aacttcctcgaatttcagcgtaaactgcagcatgatgttctgaagcttgagctgcttaacacagttgaagaaac

SEQ ID NO: 659411 - DNA, 96 bp, Homo sapiens
gaccatgtactgcgcatacacaatcccgggcatgggcggcaactctttgatgtactactataatgggaaagcggatcgaggccatcaagctacaga

SEQ ID NO: 659412 - DNA, 74 bp, Homo sapiens
agatacaaatttttggatgatgatggatccatttctcctattgaggagtcaacctcctacagaagaagggaaaa

SEQ ID NO: 659413 - DNA, 83 bp, Homo sapiens
gccgctttggcgccaaatcctgagggttcgaaaccgccaagtcttttgccctccatggtgcacatgtgatcttggcctgcagg

SEQ ID NO: 659414 - DNA, 100 bp, Homo sapiens
cccaggctcctgcaggacttgctgggccagtccgtggggttggcgggccatcccaacagtatctggcaccaattctgacccagtcatttgtgatccctgg

SEQ ID NO: 659415 - DNA, 51 bp, Homo sapiens
aggattccaagtaactcttatttgcgcaccctttgcatatctctacctact

SEQ ID NO: 659416 - DNA, 100 bp, Homo sapiens
ccacactggccagctccatggggaatctgggaccctccattttccatatccaggaaaatgtgatgcgccacaggtatcagcgtctggatcgccacttcac

SEQ ID NO: 659417 - DNA, 109 bp, Homo sapiens
ctgcgaaggccgggacccggttccccggcccacagtgggggtgtgcaaacccgagagaactgggtaccagcaactaaggtttcagagctgaaccctaatgcagaagtgt

SEQ ID NO: 659418 - DNA, 100 bp, Homo sapiens
aaggatcaggaccgcaagtcccgtcttatgggacttgaggccctcaaggaattgtagctatgcacattgagaccctagaagcagtacatcgagaaagcag

SEQ ID NO: 659419 - DNA, 75 bp, Homo sapiens
actcattcctgattggctttctcttacaattgaactgcttcagaaagcacagagctgaacgacaaaggaatgaag

SEQ ID NO: 659420 - DNA, 82 bp, Homo sapiens
gccgggcacctccgagcgcaaggacagcgcgaggtccgcgcagcccagcgcagccatgttgctgcttttgctcagaggacat

SEQ ID NO: 659421 - DNA, 51 bp, Homo sapiens
acgttcgagatctcgtgggtcgaaatcaagaaagactggtttgccaaaagg

SEQ ID NO: 659422 - DNA, 100 bp, Homo sapiens
gtcctggacggcaacctcattatccgctatgatgtggaccgggccatctccgggggctccattcaggccgccatggcatcagatgaaggcaaactttttg

SEQ ID NO: 659423 - DNA, 82 bp, Homo sapiens
ggaaccagaacccaggcccacggaggaagagccgggcagtccctggagcgggccagctcaccatggatgatgatatcgccgc

SEQ ID NO: 659424 - DNA, 75 bp, Homo sapiens
gaaaaaaaagtgaagaagaaatttgattggacatttgaacagacagtggaagtccttgaatgggcaagagggcac

SEQ ID NO: 659425 - DNA, 90 bp, Homo sapiens
acccgcaccagcgcagccggccctcggcgggacgtgacgcagcgcccggggcgcgggcacattgcaagcaacccgtgccttgatggtggt

SEQ ID NO: 659426 - DNA, 99 bp, Homo sapiens
acaactcggatcgagacaatgctgggagatgtggctgtagctgtgcaccccaaagataccagataccaggtgtgggcccatcgctggatggatctgtca

SEQ ID NO: 659427 - DNA, 50 bp, Homo sapiens
ctcgtcttgtatctctaattggaagcagaaagcttcctgtggagtcgatc

SEQ ID NO: 659428 - DNA, 100 bp, Homo sapiens
cgaggagcagggcctgactgcgcaggttaacacagaaatctgcctcctgggccatgccgcttctaaggcctgtttcttctcatgagccccagcacaagac

SEQ ID NO: 659429 - DNA, 76 bp, Homo sapiens
catgcactggcaactgcagcccgaggacaagcggctatgaagaagatgactttatgtgtaagaaggcggcctctaa

SEQ ID NO: 659430 - DNA, 89 bp, Homo sapiens
cgcaaggaggagatagaagcgcagatcaaggccaactatgacgtgctggaaagccctgagagaggccgattcctccacttccactctgt

SEQ ID NO: 659431 - DNA, 100 bp, Homo sapiens
gcaggggcagaagtggtgcacaggtactaccgaccggacctggcatcttttctgtcagatcagcctgagccctacctgcccttcctctcaagattcctgg

SEQ ID NO: 659432 - DNA, 98 bp, Homo sapiens
agtgactgggcggtgccggcgccggagacgatgccgttacccatcctcatgccaacaaactacccttgaaggattctttcacttacgaggactacagg

SEQ ID NO: 659433 - DNA, 95 bp, Homo sapiens
aaatttattgtgttctggttccagtcaagcaaaattattcagcaccagctgttagagaaacgctagcatccagaatagtgctgtttgggacctca

SEQ ID NO: 659434 - DNA, 75 bp, Homo sapiens
cgaatcgctgtcacgccggcaggcccgatgagagaaagggaaagttaaggatgctggagcagaacaatggatttc

SEQ ID NO: 659435 - DNA, 75 bp, Homo sapiens
aggagatggttcgggcctagcggagccgggactggagtgaacagagtatctgtcaggcaagagctgctgtgatgg

SEQ ID NO: 659436 - DNA, 75 bp, Homo sapiens
cccacttgcatcaagctgggcatccagggctcgtacttctgctcgcagctgttccatttcctccaagtcaccggc

SEQ ID NO: 659437 - DNA, 75 bp, Homo sapiens
cgccggcgtcgcgggccccgcagcgcatcccggcgtgtcggacaggtttttgattggtcaaggagcacatgtagg

SEQ ID NO: 659438 - DNA, 100 bp, Homo sapiens
agaatgaatacgggtccatcaatcacacgtaccacctggatgttgtggaagtgacagtgtgttcgtgttcttctgaggtgtcagcaaagtttgttctaca

SEQ ID NO: 659439 - DNA, 101 bp, Homo sapiens
caggctggagaatatggtgcagaggccctccacggagtatgccaaaatggtccaggtcttacatgcatactgtatcatttcagcaggcatccgtgtaagtt

SEQ ID NO: 659440 - DNA, 50 bp, Homo sapiens
atttcatccaccacattacttaggaggaggaagccaagaatctggtgagc

SEQ ID NO: 659441 - DNA, 87 bp, Homo sapiens
agttgcactgtaaaaaacccagctgaagaccactttagaaactcaattaaattcccagaagttgtgcatgagttcctgtgaggagag

SEQ ID NO: 659442 - DNA, 98 bp, Homo sapiens
gaagggccacgcgtcccccagtaggagaatgactccgattcgtgaccctcagcgccggtgcatgtcgatttgactatattgtggagtatgactatgat

SEQ ID NO: 659443 - DNA, 82 bp, Homo sapiens
taatgcaactactttagaagaaacgacaccattgtttttagagattatggagaagtctggcgaggaaggaatgcctgatctt

SEQ ID NO: 659444 - DNA, 74 bp, Homo sapiens
gagacggcggcggctgtagcggcgtgacagatcgccatggatcggatgaagaagatcaaacggcagctgtcaat

SEQ ID NO: 659445 - DNA, 75 bp, Homo sapiens
gctcctggtggctccagcagcaggttcgagaacttgtcttggacaattgcaaatcaaatgatggaaaaattgagg

SEQ ID NO: 659446 - DNA, 100 bp, Homo sapiens
gactggcctggcgtgcactccgcacctcggggacattattgcgcgtggaacggctgcttttggaaggttttgggatttgagattgacgcggtgaactctg

SEQ ID NO: 659447 - DNA, 75 bp, Homo sapiens
caactttggtctcctgggaccactcgttgctgacagtcagaaagatgaagatgagctggattcccacaccatggt

SEQ ID NO: 659448 - DNA, 83 bp, Homo sapiens
cgctctggctgtgctgcgcgacccccgcgcatgattcccaacttcttctggagcctggggatcggtcacactggtgcgtggtg

SEQ ID NO: 659449 - DNA, 100 bp, Homo sapiens
gccgcccgcgcccgggaccgacccctctgctcgcggccgcgcctttgaggctgctttgtaccgcctcagtggagactggaatcccttacacattgatcct

SEQ ID NO: 659450 - DNA, 100 bp, Homo sapiens
gttctgggggtcgtccgatcctgcagatatgttcctaaaacatccctgagttcaccaccttggccagaagttgttctgccagacccagttgaggagacca

SEQ ID NO: 659451 - DNA, 100 bp, Homo sapiens
atgtttttctgttttgcctgaatacatgatttaaacaagagatttccacagaagataagtactcctctcagtttggtggtggaagtcaatatgcttattt

SEQ ID NO: 659452 - DNA, 101 bp, Homo sapiens
ctactcttgatcctctccggctgcttggtctacggcacagaatttatccagttggcgaaggactttgaggatttccgtaaaaagtggcagaggactgacca

SEQ ID NO: 659453 - DNA, 71 bp, Homo sapiens
agtggaaaggctctcagtgaaaaagaaatggtggagtcaatgaagaaagtagcagggatggatgtggagct

SEQ ID NO: 659454 - DNA, 83 bp, Homo sapiens
gcccgggaggaaggaacgaggcaaggagctaaagcagcgtgcgttcagccctgggctgtcacgaccggaggggggactcgcag

SEQ ID NO: 659455 - DNA, 83 bp, Homo sapiens
gttaggagcgcagtggcggcgcaaccagccttctagggcggcggagggcgtctctggccgagcctctttttgtggaaaacgac

SEQ ID NO: 659456 - DNA, 90 bp, Homo sapiens
cgagaacggtgcttctatggcaggatatgactcaatgatgaggcacggcggctcattgctgatttggggagcacatctattactaatctt

SEQ ID NO: 659457 - DNA, 100 bp, Homo sapiens
cgcagccccgggatggggccggccccgctgccgctgctgctgggcctcttcctccccgcgctctggcgtagaggtgtcatggagaaactccagctgggcc

SEQ ID NO: 659458 - DNA, 82 bp, Homo sapiens
catgagtgatgtggaggaaaacaacttcgagggcagaatgccatggacaatattaccaggcagaaccaattctacgataccc

SEQ ID NO: 659459 - DNA, 95 bp, Homo sapiens
tggggttccctcctccgtttctgtatccccacgaggtctggaggcggctggtggaaatccaattccccgcggagcatggctggaaggagtcgttg

SEQ ID NO: 659460 - DNA, 90 bp, Homo sapiens
cacctgcagcagcccagctttctactgcaggcttatggctatgggccatacggtggtgcgtacccgccaggaactcaagttgtctacgct

SEQ ID NO: 659461 - DNA, 96 bp, Homo sapiens
ctggccagaagaaccaactccacattcaaccaggttgtgttgaagaggtgaatatgtttacaaaccaaggaacagtgatccactttaacaacccta

SEQ ID NO: 659462 - DNA, 52 bp, Homo sapiens
tttgagaccagcctgggcaacacgatggagtctcgctttgtcacccaggctg

SEQ ID NO: 659463 - DNA, 100 bp, Homo sapiens
ctcctgaagacacacctgcccctggctctgctcccccagactctgttggatcagaaggtcaagttcaacctggtgtgtgctgactcctggaagctggacc

SEQ ID NO: 659464 - DNA, 50 bp, Homo sapiens
ggagggagccatgaagcattacgagagatggtggccacacagcaggagat

SEQ ID NO: 659465 - DNA, 100 bp, Homo sapiens
ggccatcatttgcatttggtacttttctggtccaggaattaatcaagagcaagactcccaagcagctaaaatacctcacccttgaacactccacacacct

SEQ ID NO: 659466 - DNA, 100 bp, Homo sapiens
ataaagtctcccttaaaatgcaccctccttccacctggccaggaatcaggctggctgttgctccaggcccctcggtgggtgttcaaggaggaagacccta

SEQ ID NO: 659467 - DNA, 75 bp, Homo sapiens
aagagcaagatcaccgtgacatccgaggtgcctttctccaaaaggaacaagcacatcatgattgacttggggact

SEQ ID NO: 659468 - DNA, 83 bp, Homo sapiens
tcagtttctggaagaagaagaagagcatgatcggcatgtccaccaaggcagccgcttacaaacacgcagatggcaagaagatt

SEQ ID NO: 659469 - DNA, 100 bp, Homo sapiens
gacctggagaagatcggcatgggtcggcctgctgccactgcagagccccgccatggaagacacgccgttggtgatatcgaagcagaagacggaggtggtg

SEQ ID NO: 659470 - DNA, 100 bp, Homo sapiens
gtcagaaaagagtagcctgggctgtctggaaatctgagtatgccgagattttgctgtcctggaggaccacaccctggctcacagcctgcaggaacaagag

SEQ ID NO: 659471 - DNA, 100 bp, Homo sapiens
caggacccgcctggctgcgagatataatagttctgtcccaagaagaactctgaagatgattcagccttctgcatctggatctcttgttggaagagaaaat

SEQ ID NO: 659472 - DNA, 50 bp, Homo sapiens
tcaagatattacgctggaaattgcctcagaatattctgttgacaagtgaa

SEQ ID NO: 659473 - DNA, 110 bp, Homo sapiens
ccatggagcttcagacgcagcacaatcactttgccatgaactgtatgatccaaaaggtaattctggcacttggagactatatgggagccacttgtcatgcctgcattggt

SEQ ID NO: 659474 - DNA, 100 bp, Homo sapiens
tttacgcagagtgatctgaatggaaagactaacccagaagtaatgcttatcacacagactttcagccaccacaatcagctggcacagaagacccggcggg

SEQ ID NO: 659475 - DNA, 98 bp, Homo sapiens
gtcaggacgtaaatggaaccctgaactgttgtaattgggtctctagctcagaaccattagacacatcagtggagtccatgctacctgattgcccccgg

SEQ ID NO: 659476 - DNA, 75 bp, Homo sapiens
tgaggaccagcagatggccagtcacgagaacccagcagcgtccgtctccaagagagtatgaagagagtgcgtctg

SEQ ID NO: 659477 - DNA, 90 bp, Homo sapiens
ttcacgaaaaacgaggaatccgacattcaatgaaatgcatgtcggtgcctcaggccatggagtggctaattgaacacgcagaagacccga

SEQ ID NO: 659478 - DNA, 100 bp, Homo sapiens
tctgcgggccggggacctgcatgtgtgtgcgcgcgaaggagcggaagaatggcagtgctcaaactcaccgaccagagccgaacactgtcagctacagcca

SEQ ID NO: 659479 - DNA, 100 bp, Homo sapiens
ctgtagaggaacttcagtctataataaagagatgtaaaacatgctttaaactgccacagaatgaagcctgccttgtttaatgtgttgtgtgaaatcaaag

SEQ ID NO: 659480 - DNA, 75 bp, Homo sapiens
cccaagtccttggctgctgagtggtgacagtagcccagcccgccggccaggcttccagcatagagaacaagcagg

SEQ ID NO: 659481 - DNA, 99 bp, Homo sapiens
tggagacaaacctcatatgcagacttatgaagttgaccttaataagatcactactcttggaatcaaagataaatccaaatactgcatatcagaaacaac

SEQ ID NO: 659482 - DNA, 75 bp, Homo sapiens
tgtctgcctgtgtccctgaccatggctccctgcagtaccctttaacgcgagtaaccagctcataaatcacatcga

SEQ ID NO: 659483 - DNA, 100 bp, Homo sapiens
gaatatatggtattcttggacaggctgtgtgtcggccggcggggattcaggcttttggacaaactcttctgaaaggtgggcaacctagaaagccagttga

SEQ ID NO: 659484 - DNA, 80 bp, Homo sapiens
tgaacgtctctccctgtcctagctctgtaactgtttacaccatcactggtgcaagctatatttaacggagatcctgatga

SEQ ID NO: 659485 - DNA, 100 bp, Homo sapiens
tggcagcagcgtggcctccgccaccgtgcacatccgaatggaactattccctcctggacatgaggccaccaccaactgcgatgatcactttaaacaattc

SEQ ID NO: 659486 - DNA, 74 bp, Homo sapiens
cggagaggagatgcacacggcactcgagtgtgagaatgaagactattctcagcaatcagactgtcgacattcca

SEQ ID NO: 659487 - DNA, 100 bp, Homo sapiens
ggttttgggggttgttctcggtttgcaggaaccctgggtgcagattctgatgtagaaacaccatcaaactttggaaaatacctggaatcttttcttgctt

SEQ ID NO: 659488 - DNA, 75 bp, Homo sapiens
cagggccttgcctagtgggccttccttcccagacatgggaaagcggaaccaccaaaaggagtgatgatcaacgat

SEQ ID NO: 659489 - DNA, 99 bp, Homo sapiens
tacagattttataaacagcttggcagtgcaggtgagaggctatgacttcaaggctgacatgtggagttttggaataactgccattgaattagcaacagg

SEQ ID NO: 659490 - DNA, 111 bp, Homo sapiens
gctcatcgacttcggttcgggtgcgctgctcaaggacacggtctacaccgacttcgacgggggatatgagactttctactcggaatatcctgagtgttgcgtggatgtaaa

SEQ ID NO: 659491 - DNA, 75 bp, Homo sapiens
agtgcgcccgaggcgcagggggcaggtgatgggcagaggcttcagtgtccccttcgcctccgcaggagaggagag

SEQ ID NO: 659492 - DNA, 75 bp, Homo sapiens
caggtgacagtctgcatgtgcagttttcagcttggatttacactgggcaacgtggttggaatgtatctggctcag

SEQ ID NO: 659493 - DNA, 82 bp, Homo sapiens
gactgcccagagtccgcggccggggcgcgggaggccctgtttgtgctcttcgtcctggcctacatccacatcgtcttctccc

SEQ ID NO: 659494 - DNA, 100 bp, Homo sapiens
ccttcctcgtcatccccctggagcagccagatgacgtgtactactgtggaataaagtacatcaaagatgatgtcatcttaaatgagccctctgcagatgc

SEQ ID NO: 659495 - DNA, 100 bp, Homo sapiens
gaatttggatattcttcaaacagtccttccactcataggtcatacaggaatgactgtgataaatatgtttttcgtatgcaaaaatatcataaaagtaatg

SEQ ID NO: 659496 - DNA, 100 bp, Homo sapiens
gacgaggccttccagcgctatcgtgacctgcttttcggttccgggtcttggccccgtccttacctcacagcctgcaagcctcctggggaacggaacatac

SEQ ID NO: 659497 - DNA, 75 bp, Homo sapiens
cctactgtatcgtcagccacttgcaggcatccggagactctggcagcgggctcggggacgcccgggagcttctca

SEQ ID NO: 659498 - DNA, 113 bp, Homo sapiens
acttcgctgtggtgaagctggggcggcaccggatcaccaagacggagacttaattcagtgcacaaatgagatgaatgtgaacatcccacagttggcagacagtttatttgaaa

SEQ ID NO: 659499 - DNA, 79 bp, Homo sapiens
cgcgctgagggtctcggggcgggcgccgcgggacctctccgggccatggtgtactaatggtcacttgatgtgcgctggc

SEQ ID NO: 659500 - DNA, 100 bp, Homo sapiens
aagcctgcccagacggctcacctgtgcgggatggaacaaaagtgcactagtgaaattgatgaataagtcaatagaggggacagcagatgatgaagaggag

SEQ ID NO: 659501 - DNA, 82 bp, Homo sapiens
ctccactccgtcccccgcgggtctgctctgtgtgccatggacgggcgcgcctcaagttccccatcgactacccatactctcc

SEQ ID NO: 659502 - DNA, 82 bp, Homo sapiens
tgcctgactttcaggagactagacctcgtaattacattctctcggccagcgcctccgcgatgctgtgggccctgagggaaag

SEQ ID NO: 659503 - DNA, 75 bp, Homo sapiens
agagatggaaactactatgcatgtaaacaaatgaagcagcgctttgaaaggtctgtggctcaggacatccccaag

SEQ ID NO: 659504 - DNA, 115 bp, Homo sapiens
ggcggatcaggatcggaagcctgcgtaactttctcccttgatccgggagtctttccactggatacagatccacgggttttagaaaaacaagaattacagcagccaacctatgttg

SEQ ID NO: 659505 - DNA, 82 bp, Homo sapiens
gagagcgtcatgaacccgagctatagagaaaggagatgagccgccgccatgtctgcgcatctgcaatggatggtcgtgcgga

SEQ ID NO: 659506 - DNA, 50 bp, Homo sapiens
gggtcgcggcggccgaggctcggggcttcaacggaccacaccaaaatgcc

SEQ ID NO: 659507 - DNA, 125 bp, Homo sapiens
aggcacataggtgcccagagatccctggcttctgatcgcccggaagactaagaggtagaaaatctggtgtattaactgtgaaaattttagagctgcatgaggaatgtgccatgcaagttgccatg

SEQ ID NO: 659508 - DNA, 50 bp, Homo sapiens
aagacttgtaacctggagaagagcatcaacaaagagagcattgtggatgt

SEQ ID NO: 659509 - DNA, 76 bp, Homo sapiens
caggctttaggtatcaccactaaaatctccaggggcaccattgaaatcctgagccatgaggtttcctcccaaatcg

SEQ ID NO: 659510 - DNA, 82 bp, Homo sapiens
gcgaaccgcagtatcatgctggccaagaagatcatcattaaggacggaggcacgcaattggtgctgaaaattcagaaaaaat

SEQ ID NO: 659511 - DNA, 82 bp, Homo sapiens
ggggcgcgggcggcggcgccggcaggaagcttccccgggcgctgcctggacaggcctgcctgcgtgctgggacatgtctggc

SEQ ID NO: 659512 - DNA, 97 bp, Homo sapiens
gtgcgcagcagaaagcatttaaccagcatggctacttcatattttggaaagcagtttttaagacaaccacctggtttccatcgggcctatagttccc

SEQ ID NO: 659513 - DNA, 83 bp, Homo sapiens
cttactgttaatgtagtagcagtgattgttgcttttacgggcgcctgcattactcaaacaatatgcaaagtatcctacgcttc

SEQ ID NO: 659514 - DNA, 90 bp, Homo sapiens
atgtcactgcatcagtttttactagagccaatcacctgtcatgcctggaacagggatcgtactctaagtacaaggtggactgtgcatgcc

SEQ ID NO: 659515 - DNA, 83 bp, Homo sapiens
gcccggacgagttcgatgacttcgtcacctatgaggcatcagaacacaccatgatggctgtgacctaagaccctcaggaagcc

SEQ ID NO: 659516 - DNA, 100 bp, Homo sapiens
catgttcaggaagacagaggaaggagattgatgccagttttgcaggctttggaggtactcccagtagcaccaccacctgagccaagatcactgacagcag

SEQ ID NO: 659517 - DNA, 75 bp, Homo sapiens
tctcagcttcggagaatggagtcttccatcaatcatatctcacagaacagctttgctgagccatcaaggtctaat

SEQ ID NO: 659518 - DNA, 90 bp, Homo sapiens
gttcatatcattgtcttccacagatgtgtcaccaaaccagcgacttgtttaagtatcactgcaatgctgacactgggaaattgctatttc

SEQ ID NO: 659519 - DNA, 73 bp, Homo sapiens
ctttgatgcagccagtttcattggaggaattgtcctggtcttgggtggccggcattcacaagaaggtggcccg

SEQ ID NO: 659520 - DNA, 100 bp, Homo sapiens
ggtaacaaggcagacctggccagcaagagagccgtggaattccaggactacaaatccctccaggatatcattgccatcctgggtatggatgaactttctg

SEQ ID NO: 659521 - DNA, 90 bp, Homo sapiens
cacagagtacttaaaaacatcatggatcaatctcaaacaaaggtagcaaaagatatggcagcggcagcagttagatgcatcagaaaggag

SEQ ID NO: 659522 - DNA, 75 bp, Homo sapiens
aggacgtctacctgtccaccattgtgaccgagctgaaccttagccggccgatcgaggagcagggccccctggacg

SEQ ID NO: 659523 - DNA, 90 bp, Homo sapiens
tgctggagaagtccccttatgaccagattccagactccatcatttctcgtggtgttcaggtgctcccacgagacacagcctccctcagca

SEQ ID NO: 659524 - DNA, 100 bp, Homo sapiens
agatatatcccacagccactggagaaaaagaagaaaatgttaaaaagaacagatacaaggacatactgccataggatgttaagcaagtttttggacagac

SEQ ID NO: 659525 - DNA, 98 bp, Homo sapiens
ctaaatttcggtagccatggcacaagaatataatctctgacatctacattagtggagaatcaggggatatgtcagccaaggagaaactactcctgtgg

SEQ ID NO: 659526 - DNA, 50 bp, Homo sapiens
accgccctggccatctaccatgtgaatgttgtaccatctttgggtaggca

SEQ ID NO: 659527 - DNA, 89 bp, Homo sapiens
tgctactaccgcgactggctgctgcggcgcgaggtgtggccgacgacgatgccctcgctgaggagcgcatgcggagaggccagaacgcc

SEQ ID NO: 659528 - DNA, 100 bp, Homo sapiens
ccagggtggccgccccagcagacagtgctacagagccaactcctgacaggatctgaagaagctgaagaaaaacaggacagtgagaaaccacttttagaac

SEQ ID NO: 659529 - DNA, 95 bp, Homo sapiens
ttctcgatatcacttttacaccagaatatcccttcaagcctccaaaggcgcagttgtgtagcagttgagtaatgctggttagctgttaaggtggc

SEQ ID NO: 659530 - DNA, 98 bp, Homo sapiens
agagcagcggaaaatgatccagtcacaggaagctgaatatggtgggcatgatcagatagatttgtatgacgatgtcatatctccatctgcaaataatg

SEQ ID NO: 659531 - DNA, 95 bp, Homo sapiens
tcttcagctcttgggtttagcaaaagttcatctccttctgcatccttaactgagaatgaggtggcacaagatctctgtaaagtagcaggcatagc

SEQ ID NO: 659532 - DNA, 76 bp, Homo sapiens
ccaagctccgagaagaccggcggccaatcacagtccactttggacaggacatggatttgattgacatactttggag

SEQ ID NO: 659533 - DNA, 99 bp, Homo sapiens
tcaaaccactgaaatctcttttaggggattctgcaccaacactgcacttaaataagggcacacctagtcaggtcatgtaatgtttgcagaaataaaaat

SEQ ID NO: 659534 - DNA, 82 bp, Homo sapiens
tgaggacaaagtagatggcctccagaaacaaacgatgaggtggaaagtgagaaatggtacctgtctacagacttcccttcaa

SEQ ID NO: 659535 - DNA, 100 bp, Homo sapiens
aaaaatggtggtgatggcgcgactctcgcggcccgagcggccggaccttgtcttcatcgacgacatcgcggatggcgccgtgaagcccccacccaacaag

SEQ ID NO: 659536 - DNA, 89 bp, Homo sapiens
cgcagctggcggagctggagctggagctctcggaggttcttcgcacactcatgggacacaaagccaacatctgcagcctggatttccac

SEQ ID NO: 659537 - DNA, 95 bp, Homo sapiens
ctcccaggccacaagacatttcctgctcggaaccttgtttactaattggcgccctgcgtccggcagaggaggcgagcatcccgctcaggtgatga

SEQ ID NO: 659538 - DNA, 83 bp, Homo sapiens
gcctcgtgggagccccgcgggtcctgcccagggcgatgccagtccctccactccagaggagaacgaaaccacgacaaccagcg

SEQ ID NO: 659539 - DNA, 75 bp, Homo sapiens
cttagaatcttcccttttttactccattcaagagcagcattcataaatttccagagtcttgctgtgtcacccagg

SEQ ID NO: 659540 - DNA, 97 bp, Homo sapiens
cagctcaagctgaactccagcggctcctcagaagattcctttgttgaaattaggatggctgaacagatggagtcggataactgttcaggaggagatg

SEQ ID NO: 659541 - DNA, 75 bp, Homo sapiens
tgtgattaatgtattccaccacctccgccagttaagaggaaaaagtttagcagccactgctgcatcaggggcttt

SEQ ID NO: 659542 - DNA, 75 bp, Homo sapiens
cacacccagccccagcacaatgttgaatcccttgaaggtagtggacccagatcatcccctcgcagcacttgttcg

SEQ ID NO: 659543 - DNA, 74 bp, Homo sapiens
gcgtctctctgctgcggcgcggggaccgctgtgctctcggcgtctactagaaaaatctcagagggtagaagcca

SEQ ID NO: 659544 - DNA, 126 bp, Homo sapiens
ggggggcttggcggcttttctcctcagttttctggagtgctttggaggagaggagatctctttgctgccactttcctcattaagaatggggcctttgtcaacgctgctacactgggtgcccaggag

SEQ ID NO: 659545 - DNA, 120 bp, Homo sapiens
tctttgtgaaattccaccatggcgtaccgtggccagggtcagaaagtgcagaaggttatggtgcagcccatccaagaagaacggccaatccgacagattttgtacctcggggacctgctg

SEQ ID NO: 659546 - DNA, 100 bp, Homo sapiens
ttcatcagtcttcccgcgtccgccgattcctcctccttggtcgccgcgtccttggctggcgtgatgttcacgtcccagtatgcccactctgtaatacccc

SEQ ID NO: 659547 - DNA, 90 bp, Homo sapiens
tatgaagcttcttctggttggaaacttgtcaaatttcatcaggtagctaaaattggtgctttctgctgtggccttagtttatgtaaccag

SEQ ID NO: 659548 - DNA, 90 bp, Homo sapiens
caacctcaacagacagtttttgtttcaaaagaaacatgttggaagatcaaaggcacagtgggtgggaggacgctactcgctgtggtcggc

SEQ ID NO: 659549 - DNA, 100 bp, Homo sapiens
cctccctcagcttccgccccaaaaggtagagtacagagagatggatgaaagcttggccaacctctcagaagatgagtattattcagaagaagagagaaat

SEQ ID NO: 659550 - DNA, 51 bp, Homo sapiens
gctaccgaaacgctctgaaaatcgagccggctggagtgcagcagtgtgatc

SEQ ID NO: 659551 - DNA, 102 bp, Homo sapiens
ggtctggagaccatggagaccctcacggagctgggcgacgagctgaccctgggagacatcgacggtgcagagcattgtagaccaaggagccatggataggag

SEQ ID NO: 659552 - DNA, 100 bp, Homo sapiens
ataaaaatccacaccctgtcctacgatgtggaggaggaggaggagttccaggagctggagcactttttacctcgatggaaatgtgagcagctgatcagac

SEQ ID NO: 659553 - DNA, 118 bp, Homo sapiens
ctccatcaagggtcctgagctgctcaccatgtggtttggggagtctgaggccaatgtcagagaaatctttgacaagagtttactcgaactagaagtagatttggataatttggaatta

SEQ ID NO: 659554 - DNA, 75 bp, Homo sapiens
gactatcacatcgaagagggtgaagaggtggtgagccggctgggcctggactccctgtgccccttcagccctaag

SEQ ID NO: 659555 - DNA, 98 bp, Homo sapiens
gtacagatctttgagaggtctgtgtacagtgacagactcaccccacacagaccgcgtttctctccagtgtcgacctacacactcactgctcttaccag

SEQ ID NO: 659556 - DNA, 98 bp, Homo sapiens
ggatgttcaactgcagcagaaagatgaagctctacaggaagcagaatctggtaatataagtcaaaagtctgatgaagaagattttgtaaaagttgaag

SEQ ID NO: 659557 - DNA, 75 bp, Homo sapiens
ctgtcttgttccgaggcggccccagaggggaaaggccatacaaatgtcagacctgcgagcgaaccttcaccttga

SEQ ID NO: 659558 - DNA, 51 bp, Homo sapiens
ttcttcagaagctggtcgccgccggcagctttaatgaagcaccagttgaga

SEQ ID NO: 659559 - DNA, 83 bp, Homo sapiens
agagaagcagatgctgcattattttcagaactccacagaaaacttcattcacagcattgtcgtggaagttctccgaatcctgg

SEQ ID NO: 659560 - DNA, 88 bp, Homo sapiens
cacctgatcctgctggccctcatgacagtggtcatggccgtgtgctccctgcctctcacggaatcagagatcattgatttcttcctgg

SEQ ID NO: 659561 - DNA, 83 bp, Homo sapiens
tggggcttgtaatccccccacagaccctggaagaaagcccctctcacacaggacgactgggtttggattcagaagaggattat

SEQ ID NO: 659562 - DNA, 87 bp, Homo sapiens
ctcagttggaagcagccgatccagcctgcggagcctgtggggcaggctccccaggttcatcctgtgtcgtctcccccacctaccagt

SEQ ID NO: 659563 - DNA, 75 bp, Homo sapiens
caagcagtgcctgtctccgcacttacgaatatgtttcgacagcaacaaaagattcttcaacaatctagaattgtt

SEQ ID NO: 659564 - DNA, 83 bp, Homo sapiens
ctgagcttgccgcacaaaaagctagagagaaccaggaagacagcgcttccagcaacccgtttgcactccccaactctgtcact

SEQ ID NO: 659565 - DNA, 90 bp, Homo sapiens
ggccgaatcagccttttcacgctcaaggcagaaaacattgtgctgttagagctggacatgcccagccggaccaccagagactatgagggt

SEQ ID NO: 659566 - DNA, 100 bp, Homo sapiens
caaagtcagcccaggcagacctccagaattagacctttacgagaagcacagttttgtcttcagtttcctctccccccacccggaatggcctgagccgaag

SEQ ID NO: 659567 - DNA, 100 bp, Homo sapiens
catattgtgtcttccccggccggtccctcgcctcccggccgagctgacgctggccagctcagcgtccctggaagggaagggacaactgaagttcacctca

SEQ ID NO: 659568 - DNA, 90 bp, Homo sapiens
ccggtgccagcacctttcggcttctgagacggcggcagcagcggcattcagattgctggactcgctgaagagagactacgcaggaaagcc

SEQ ID NO: 659569 - DNA, 83 bp, Homo sapiens
tggccgcgatctatgggggtgtagaggggaatcaaagatcaactcccactgaggacaaatggacctgtaattccgggtgtgac

SEQ ID NO: 659570 - DNA, 130 bp, Homo sapiens
gaagatagcaatgattgcccaaggtgtggcaaccaagttcatgagacaaatccattagaaatgttgagtatttgactacagtcattccttatgagaaaaaaaacggaccaccgtctgttgaagatcttca

SEQ ID NO: 659571 - DNA, 50 bp, Homo sapiens
cacaagtcagttactgaaaaggatggtcagtaggacagaaggtaacattg

SEQ ID NO: 659572 - DNA, 75 bp, Homo sapiens
atcgggagaaagtggagtccgagctgagatccatctgcaccacggtgctgattcgcattctcaagtctccacaag

SEQ ID NO: 659573 - DNA, 75 bp, Homo sapiens
ttaatgccttccgctactacggatatgtcttctccgactactatgaagaagcctgaaaagccattgttcagctct

SEQ ID NO: 659574 - DNA, 75 bp, Homo sapiens
ccagcactggactcatggaggctgagcatttattcaggtggcgacatgtctaagaatgtgagccagtcacagatg

SEQ ID NO: 659575 - DNA, 83 bp, Homo sapiens
ggctgttagaagaattcatgctcatccggaattactttcctagtaagcaagatatcctgctggctaggaaagccaccaaggga

SEQ ID NO: 659576 - DNA, 100 bp, Homo sapiens
cttttcgctcctctttctgggcatgttcctctctggcatggtggctcaaattgatgctaactggaacttcctgggtctcgctctgttactcaggctggag

SEQ ID NO: 659577 - DNA, 49 bp, Homo sapiens
aactattggataaacttcagagtattaatcaagaagagctatgaccgga

SEQ ID NO: 659578 - DNA, 90 bp, Homo sapiens
acaggccgcttttgagaggacaagcccagattccaaaacttatgtcaagcatgaaagatggccagaagataacattccatggtgaaggag

SEQ ID NO: 659579 - DNA, 100 bp, Homo sapiens
ccagaacatacacttacatctctagataacagtctgcactttcacccgtttcaggtagtgggcagcagtcagtgacaggtgtaacctctgtggatgacag

SEQ ID NO: 659580 - DNA, 101 bp, Homo sapiens
agaaagtgagattaatgaaagaagtcatggaacactatgctgatcaagatgatctggttgtcatgtttactgaatgaccccatatcatgtgaacctcctcc

SEQ ID NO: 659581 - DNA, 87 bp, Homo sapiens
gcattgccgccggtcctgaccaccgtgaacggacagtcccccccaggtttggacatatttgactcttttccccccaggttgaattga

SEQ ID NO: 659582 - DNA, 89 bp, Homo sapiens
cctacatttggagcctggacacgcagtacagcaagggtttccaggcctgaggtgcccgccctggccccaggagaatgaaccagccgcag

SEQ ID NO: 659583 - DNA, 82 bp, Homo sapiens
gagtgcggcccggaggcggcggagggcaccccgggcgggcggcggctgctgtccgcgggagagctgtggggcttggtgagtg

SEQ ID NO: 659584 - DNA, 76 bp, Homo sapiens
caaggaataaacatgcaatgaacccaaaagggtggataattactgtaccttcctcatggaaaaagttttatttaaa

SEQ ID NO: 659585 - DNA, 98 bp, Homo sapiens
ccccacgtcccccaaagaagaagtatcagaaagcagggctgtattctgacgtttacaaaactacagatgcaaggatgatgctgaaaggaataacaagg

SEQ ID NO: 659586 - DNA, 75 bp, Homo sapiens
ctcccaccgtgattctgaggcctccccaaccatgtgcaatttccctggtacgtgagcccctttcccggcgccggc

SEQ ID NO: 659587 - DNA, 82 bp, Homo sapiens
cagagatcttctcagatgagaacaactactcattgagccgggagctgctcatcaagggtgcggaggcagcaaatgttacagg

SEQ ID NO: 659588 - DNA, 119 bp, Homo sapiens
ggatgcggccaactccaatgggcctttccagcccgtggtccttctccatattcgagggaggagtggatgcgggccatccagatggtcgccaacagcctcaagcagcgggccccaggcga

SEQ ID NO: 659589 - DNA, 80 bp, Homo sapiens
cattctcctgccacccccagacctcctcagctccagtgttctggacttggtgcctctttctgttatatgctttcctattt

SEQ ID NO: 659590 - DNA, 102 bp, Homo sapiens
cggcggcgggagcttccgggagggcggctcgcaggggagctggagaagcagcagggaacaaagacactctccttcaagccctgcggagcccagggggaccca

SEQ ID NO: 659591 - DNA, 100 bp, Homo sapiens
caaacattcgtctcggaaaccccgcctcttacagtcacgaggagccagcaccgctctttgaccttgccatgcttgccttagatagtccagagagtggctg

SEQ ID NO: 659592 - DNA, 74 bp, Homo sapiens
gcccaaaagcgtcaaactcaccaaaaacaacatctttccagaaagagagcttactcacatagcatattggtata

SEQ ID NO: 659593 - DNA, 100 bp, Homo sapiens
caacactcagtgagaagcttggtggggcagaggttgcagtgacctgcatggtgttccaaacacagcctgttggtctttgcaaaggttctctgactcgaac

SEQ ID NO: 659594 - DNA, 74 bp, Homo sapiens
caaggccaaaaggaaggtctacatgtactactggccagagacaaaatctggctctgtcacccaggctagagtgc

SEQ ID NO: 659595 - DNA, 114 bp, Homo sapiens
ccttcatcttcacatttggtttctagaccatctacctcatctagaaggagagcaattagtgagacaggatgctttcattggatttggaggaaatgtgatcaggcaacaagtcaa

SEQ ID NO: 659596 - DNA, 74 bp, Homo sapiens
acggggtcctcaggaagttggccaaagtatcccacatgacgagtggacgctgccaaggtctgcagagaattcac

SEQ ID NO: 659597 - DNA, 114 bp, Homo sapiens
ccgggccggcggcgaccaggacccgggcctcgtcgtcatccccttccagttcgcctggccgatcctgcgcagccgaggctgtgttagcgccaaggacttccagcagctgttagc

SEQ ID NO: 659598 - DNA, 76 bp, Homo sapiens
gaacacagcagggcggaggaaagtgcagtaggttcagctgcagcccggaaagaaatcataagaaacaaaattcgag

SEQ ID NO: 659599 - DNA, 100 bp, Homo sapiens
gcagatcctgacctctctgatgagatggatcggtatgctgccccacaaaaccaagcgaggccaggccgctctggaccgtctcaaggtgtttgacggcatc

SEQ ID NO: 659600 - DNA, 90 bp, Homo sapiens
actggaaagaagttcttcgtcggcgcctagcgacgcccaacacctgtccaaacaagaatgcagaatctattgatcttaaacagtttttcg

SEQ ID NO: 659601 - DNA, 100 bp, Homo sapiens
atgaagactacagatattatgaatacaaccatgatctcttccaaagaatgccacagaatcaggggaggcatgcttcagatcagccatgcagaagctgggg

SEQ ID NO: 659602 - DNA, 97 bp, Homo sapiens
ctgaaccgactctgagaaatttgagcatcccgagggccccgtcttcggacgaggagtgcttctttgacctgttgaccaagttccagagcagccgcat

SEQ ID NO: 659603 - DNA, 100 bp, Homo sapiens
aaaattctatctgtgtgggtttcaagagagactactacctaataaggggcactgcgtggacctgccagacacaggactctgcaaggagagcatcccgcgc

SEQ ID NO: 659604 - DNA, 82 bp, Homo sapiens
cagcttttcagaactgcagggaaacagccatcatgagatattaataaggcagcggaaagaagaaatatgaatacggctccat

SEQ ID NO: 659605 - DNA, 80 bp, Homo sapiens
cgacgtccctcaaaccttgcttctaggagataaaaaggagccttcacgtaaatgggtccagtcatgcctcccagtaagaa

SEQ ID NO: 659606 - DNA, 75 bp, Homo sapiens
gcagccatcaaagttatggatgtcactgagtccaaaccaggttgcagagaaggtggcctccagaatcgccgaggg

SEQ ID NO: 659607 - DNA, 74 bp, Homo sapiens
gatttttgttggaagagatgactgtgagctcatgttgcaggttgcagatatcaagaaagtcaacaacttcatca

SEQ ID NO: 659608 - DNA, 50 bp, Homo sapiens
cagtgacgggcgcccactagagaggcgcatgtagagcgcatgaagtacag

SEQ ID NO: 659609 - DNA, 83 bp, Homo sapiens
tgatccccgagctgctggagaactgaaggcggacagtctcctgcgaaaccaggcaatggcaaattgtggctactaatttgccc

SEQ ID NO: 659610 - DNA, 97 bp, Homo sapiens
ggcccgagatgcagctgctgtccttgtgtccaggagacgcaggtcagaatggaaatgggctgcagaccgggcagctattgtcagccgctggaactgg

SEQ ID NO: 659611 - DNA, 75 bp, Homo sapiens
gacactgccaagcagccttagccctagtgtagaggagagaacattgaaagtattctctaagctatttgaagagag

SEQ ID NO: 659612 - DNA, 50 bp, Homo sapiens
caactcgagccaggctgcaaaaagcttggagaccctctggaggctttccc

SEQ ID NO: 659613 - DNA, 101 bp, Homo sapiens
ctgggcgtcaagccctaccactgctcctactgtgataagtccttccggcagctctcccacctccagcagcacaccagacacgatgaggcgagtggtacgac

SEQ ID NO: 659614 - DNA, 100 bp, Homo sapiens
gcgaaggccgggacccggttccccggcccacagtgggggtgtgcaaacccgagagaactggcactttgtcagcgagcgtaaatatgacgaggagctcggg

SEQ ID NO: 659615 - DNA, 101 bp, Homo sapiens
tcgaaggagggctctcctgtctgccaccatcctgggttgacaattctacacaaggaggttttggaatcattttcaaataaaactccccctcacaccaccca

SEQ ID NO: 659616 - DNA, 90 bp, Homo sapiens
tgtgaaccaaggccaagtcttccagatgacctttagaagtctggcaagttgatgagcagatagatcactacaaggaaagccaagacaaac

SEQ ID NO: 659617 - DNA, 75 bp, Homo sapiens
actgcctctgggctcaacagaacacagggggattttatattggaagacatggatcttgctgccaacgagatcagc

SEQ ID NO: 659618 - DNA, 99 bp, Homo sapiens
gcatgtccccagcctgaagcagaggtcctcagacatggaggtgaagcagctggacaagcgggcctcaggccagagcttcgaggtcatcctcaagtcccc

SEQ ID NO: 659619 - DNA, 95 bp, Homo sapiens
gaatgtcttcaaagaatattaaaaaatctggagggactccaacttcaatggaccctttagatcctacaagatcagtgattgtgatccgctccctg

SEQ ID NO: 659620 - DNA, 90 bp, Homo sapiens
gcgcgctcgctccggcgccggcctcgcctcctcgcagcagcgccatggagggtgtgaagacagagaatgaccacatcaacctgaaggtgg

SEQ ID NO: 659621 - DNA, 100 bp, Homo sapiens
tgaaaatattggggccatttagtaacttctttgcaaggctcctgtaaccgccaggcagcggccccgccatgtcccagccccggaccccagagcaggcact

SEQ ID NO: 659622 - DNA, 100 bp, Homo sapiens
cttcctagtgagtcggcggctgatttagaaggaggttcaggctacggtgagccgaagctggtgcccctgggtgaactgaccaagcacagcacatcagcgg

SEQ ID NO: 659623 - DNA, 89 bp, Homo sapiens
ggaggagttgagaaaaaccaaggagcagttgaagacatctcttcatcgaggactaacccctacagttatgcaatgagtactgaagaagc

SEQ ID NO: 659624 - DNA, 100 bp, Homo sapiens
gcccctccttgggcctgcggctctctacgtccctgcggagcagccgggtaaaggcagcagtaatgctaacgctagcaagtaaactgaagcgtgacgatgg

SEQ ID NO: 659625 - DNA, 75 bp, Homo sapiens
tgcttttcaagtatgccaccaacagtgaagagagtgtgaacatggctacgcctcttcattcccgtccatgccgag

SEQ ID NO: 659626 - DNA, 100 bp, Homo sapiens
aagtgtggtgaaggtggacacagaagccgcagatatggctcgtggacagcagaaaattcagtctcagcagaaaaatgccaaaaagcaagctggacaaaag

SEQ ID NO: 659627 - DNA, 101 bp, Homo sapiens
ttgggctgagcagaggacgacatgttgcttttcgtggagggcgccctgcgtccggcagaggaggcgagcatcccgctcaggtgatgaggaacccctcgcgc

SEQ ID NO: 659628 - DNA, 100 bp, Homo sapiens
cgcaaacttcgtactttctatgagaagcgtatggccacagaagttgctgctgacgctctgggtgaagaatggaagacaagcctgaggagccgacggcaca

SEQ ID NO: 659629 - DNA, 99 bp, Homo sapiens
gctgtcttcccgcttgcgtcagggacctgcccgactcagtgggtaattaaaaccatggaggcgatcagcgaggttctccaggaccttaggtttgatgcg

SEQ ID NO: 659630 - DNA, 100 bp, Homo sapiens
ataaactagttgagaagcagaacccagctgaaggactgaaattgcaggtgctgcagtgtctgaaatttccgggcctttctcaacagaggatgtagccagc

SEQ ID NO: 659631 - DNA, 75 bp, Homo sapiens
ctggctcttcatctctataggggaggcaggcttttgcaagctcctcaagagttactgatctatgaaatggcagag

SEQ ID NO: 659632 - DNA, 75 bp, Homo sapiens
tagatgttgttcttaaacgtagaggttacttgggagaaacttcttttataaatgatccagatggtcttcatcaac

SEQ ID NO: 659633 - DNA, 100 bp, Homo sapiens
catcctctggaacaattgttcagagtcaagcaaagcattgtattcctgagaaaaatcacactctccaagcagactcttattctcctaatttaccaaaaag

SEQ ID NO: 659634 - DNA, 100 bp, Homo sapiens
agactccaaacacagttctctctactccattcaggatctgtgccagttcagaagcaggcgagcctcttccctgatgaaaaagaagataacttgctgggta

SEQ ID NO: 659635 - DNA, 50 bp, Homo sapiens
gcaaatacacagcagagcttcagggtctcattctgtctcccaggctggag

SEQ ID NO: 659636 - DNA, 100 bp, Homo sapiens
cttgtacatgagcaagctggagaagatgcagggttctcccatgggcaggtggtctctctggatgagctgcgccccttccaggacccagacctgagctccc

SEQ ID NO: 659637 - DNA, 90 bp, Homo sapiens
aatgcaaatggccaaggaatccagcagtttgttggggtttctccagacaaaaataggctgtccacccacaaatgaattatcaggagtgaa

SEQ ID NO: 659638 - DNA, 75 bp, Homo sapiens
gccgcggatctcaccgccgctcaggccctgaaggatggctgccatattgggagacaccatcatggtggctaaagg

SEQ ID NO: 659639 - DNA, 96 bp, Homo sapiens
tatgacatcagtcagttgtttgatttcatcgatgatctggcagacctcagctgcctggtcaataatgacgatgaggacctgacaccagagcagaag

SEQ ID NO: 659640 - DNA, 82 bp, Homo sapiens
ggcgcaggacgccgacatcgtgtgccgctgccagggggatatgagactttctactcggaatatcctgagtgttgcgtggatg

SEQ ID NO: 659641 - DNA, 100 bp, Homo sapiens
tccatctctatgagccaccatggttcccagttttccagacctgaagtgttttccaatcaaagcgaagagacgatctgtggatgttgaatatgcaaggagc

SEQ ID NO: 659642 - DNA, 98 bp, Homo sapiens
ttcaccatctaccactggtggcaggctgtggccatcttcaccgtgtacctgggctcgagcctgcacatgaagaatgccatcaagacaacacgtgcgaa

SEQ ID NO: 659643 - DNA, 73 bp, Homo sapiens
ccagtgaggcggccgccgcagcccaggcgcgggggcgacgacagagcagtcattatggcgaaccttggctgct

SEQ ID NO: 659644 - DNA, 98 bp, Homo sapiens
gacaaataaaaagaagtgttaagaattgcctttgggactctgaaggctgaagatgtctttggtggacttgggaaagaggttgctagaagcagcaagaa

SEQ ID NO: 659645 - DNA, 80 bp, Homo sapiens
ctaagacaccgggacctcctggaagccaaaaatgacttccatggagtcactgattcatcactttaagttgtatactgagg

SEQ ID NO: 659646 - DNA, 110 bp, Homo sapiens
ggcccctgtgctgctcctcgctggagtacagcatccgagtctactgtctggatgacacccaggatgccctgaaggaacttagtgatttggcccgtgaccctccagcacaa

SEQ ID NO: 659647 - DNA, 90 bp, Homo sapiens
cccgacggcagtccatgacggtgaagaagggagaggtggggaagctgaggcaggaagccctttagtcacttgccgaaggccacgctgtta

SEQ ID NO: 659648 - DNA, 82 bp, Homo sapiens
cgtcatcatgctgaccaccaatcagatccgtaagttcctccgtgtcacaaagcagtacctgccccacgtggcgcgcctctgt

SEQ ID NO: 659649 - DNA, 75 bp, Homo sapiens
aaggattccaagtaactcttatttgggtcaacatatttcactggcacctattcacaagcttgaagaagctctgta

SEQ ID NO: 659650 - DNA, 110 bp, Homo sapiens
tggtctcactgacttcaagaatgaagccacggacccttgcggggctttgttatgcacctaaagccatattggaagctccagaagaaagagcaccccccggaagtcagcag

SEQ ID NO: 659651 - DNA, 75 bp, Homo sapiens
ctgaggtgcggagtttcgtgagtttttactgactcgagatagcctgggctggaagctcttctacgtcacaggctg

SEQ ID NO: 659652 - DNA, 101 bp, Homo sapiens
acatcatccggacaaacctggaatttctccaagagcagtttaatagcattgctgcgcatgtgctgcattgcacagaatcactatcagtgacccctgaggag

SEQ ID NO: 659653 - DNA, 83 bp, Homo sapiens
cgcgggcgccgggagcgagctgggagggagccgcgcgcctttgtgcgcgcgccgaggactgtagaagcggccaggaagaaaac

SEQ ID NO: 659654 - DNA, 98 bp, Homo sapiens
gatagtggaaagaaaccatgtgctgaaatgtttgacgacactgatggtttggtgggtcttcaaacaactctatgataaaggccttgtttatagaggtg

SEQ ID NO: 659655 - DNA, 74 bp, Homo sapiens
ctaccacaagaagcggaagtatgagttggggcgcccagctgccaacaccaaggaattgaatgatctggcacggg

SEQ ID NO: 659656 - DNA, 80 bp, Homo sapiens
ctgaagacagcgccccagcatttgccatcttcaagtttgttcaggtgcaatggatgagcttcatagtctggatccaagaa

SEQ ID NO: 659657 - DNA, 75 bp, Homo sapiens
atacagcaagaaagaccatcaagtttaccaatcacaaacaacatcgacccagtgggaagaatccaaatgcgcacg

SEQ ID NO: 659658 - DNA, 76 bp, Homo sapiens
gtgagactttcacaataagagcagaggatggaacacttcagtgcattcaagtcagattctgaggaagatgaaccca

SEQ ID NO: 659659 - DNA, 75 bp, Homo sapiens
ctccaggtgaagcagccagcagaggtcagagagagacagctcacgttccggcaatggctgccatccggaagaaac

SEQ ID NO: 659660 - DNA, 100 bp, Homo sapiens
gcggttggcaccactgaagtgaccgaatgagaaatcgagctatagcagattatcttcgttcaaatggctatgaagaggcatattcagtttttaaaaagga

SEQ ID NO: 659661 - DNA, 90 bp, Homo sapiens
cccggtctcctttcccggccgcacaggagctaatgtcaaaccccgaaattccacaccacctagtttggcaagaaatcctgccccaggtgt

SEQ ID NO: 659662 - DNA, 74 bp, Homo sapiens
ctgaccatgtcattccacctggagatcactgctcggccagagaaacttgcccaggccaaagaagagaacgtggg

SEQ ID NO: 659663 - DNA, 100 bp, Homo sapiens
tctgttttgcctgaatacatgatttaaacaagagatttccacagaaggtgtatcaatattcagtttgaaagagattcagttgcaaaaggacccgggtttt

SEQ ID NO: 659664 - DNA, 122 bp, Homo sapiens
ggacaacgagaaactggacaaccaacggctcaagaatttcaagaacaaaggccgcgacttggaggaaggggatgattatgaagtcattcctaacagtaatttctatgtatccagaacggcct

SEQ ID NO: 659665 - DNA, 50 bp, Homo sapiens
gctgtccctgcggcttctgggggtctatgaaaattatcctacttatgatt

SEQ ID NO: 659666 - DNA, 85 bp, Homo sapiens
ctccatgaaccatttcttctgtatagaaatgcaagctttcttcaccaaaggacatggatgaaaatgaaagcaaccagtctctgat

SEQ ID NO: 659667 - DNA, 103 bp, Homo sapiens
ggcggatgccctgcagtacctgcagaaggtctctggagacatcttcagcaggtggaagttaaacgagctgagcctcgggacagcaagagccaagcgccgggac

SEQ ID NO: 659668 - DNA, 100 bp, Homo sapiens
atttccacgtgtctgtccttgtcaagcacacccctcgtgtccaggttcctcatgggcagtgctcggggtgacaaagaagctgatgtagcccagcagttcc

SEQ ID NO: 659669 - DNA, 75 bp, Homo sapiens
aaagaattcatagatttcagtgatacagcttccctctgtgtgttgcagtcctgtggcattatgcatgccccctcc

SEQ ID NO: 659670 - DNA, 60 bp, Homo sapiens
ggacacctgcactgcagcttacaggtgtggaagattcagagtggacaatgtttaaggaga

SEQ ID NO: 659671 - DNA, 49 bp, Homo sapiens
gggcccgtagctgggctctgcgaggacacattcagctaacgtattttag

SEQ ID NO: 659672 - DNA, 75 bp, Homo sapiens
ggaaaagccgttgagaggaccatcacaacctgagcagcacagaaatgcgtgtactgccggaagcggatgaagaag

SEQ ID NO: 659673 - DNA, 75 bp, Homo sapiens
gctgtgtgccccttctccacccagagagaacgccagatcaagtgtcccaagtgtgataagctgttcttgagaaca

SEQ ID NO: 659674 - DNA, 100 bp, Homo sapiens
agccgcctgccccggtgcgcagacagagctattccagcaccagcagaggcatccccacgctcatcatgctggacccgcagggcgaggtgatcacgcggca

SEQ ID NO: 659675 - DNA, 101 bp, Homo sapiens
ggaggccttccagctgtttgaccgaacaggccaggtcagagcagcccaccatgggatggggagggggtggaggctgcaccccgcgcccacccatccaccag

SEQ ID NO: 659676 - DNA, 100 bp, Homo sapiens
ctccgaagagctgccgcgacgcccggcccgcagggcaggtatactctgaaactaatgattgataaagcaagtttaggtccaatagaagactttagagaac

SEQ ID NO: 659677 - DNA, 83 bp, Homo sapiens
cgggtttggagcatatacccaacttttctctggaaatgagtccctggaacgccagatgcgtgaaatggaagagaactttgccg

SEQ ID NO: 659678 - DNA, 97 bp, Homo sapiens
ccttccagaacgtggtcttcaatgtcatttatcagagcgcggcggtcttcaagctctcattcaggcttcagagagcccctgacgcctgcaggaacat

SEQ ID NO: 659679 - DNA, 101 bp, Homo sapiens
catggcggcccccggcagcgcccggcgacccctgctgctgctactgctgttgctgctgctcggttcatgatcaagagggcccaaggacggaagcgctttgg

SEQ ID NO: 659680 - DNA, 75 bp, Homo sapiens
tggaggactagggcggtggcagtggccagcctctgcaggtgtgcgagcaggattgcttctgcaacaaaagcctcc

SEQ ID NO: 659681 - DNA, 75 bp, Homo sapiens
acacagcaatatctctgggctttcacaggactgctagacttggctacattttatagagaaaatcgtttgaaaaag

SEQ ID NO: 659682 - DNA, 74 bp, Homo sapiens
aagagccaaggaataaacatgcaatgaacccaaaaggacctgtcatttactccatcctttatagtgatgctaca

SEQ ID NO: 659683 - DNA, 100 bp, Homo sapiens
ggtgtctgccgggtccgcgcggacctcgcccagctcaggtatttctgggaaaagccagcttctgtttgcactggtcttcacaactcgttacctggatctt

SEQ ID NO: 659684 - DNA, 97 bp, Homo sapiens
tcacccaccaacaacaccacaataatccacagccaaggtctcagcatcagaggagcccaggaggaggaccctcccgatccccagctaatgagactgg

SEQ ID NO: 659685 - DNA, 101 bp, Homo sapiens
atcaaaaaatgcagtcccctcatgccaagatacagatcacttggattcagtcgagtttgctttgctccgtgggaactgcaccagagctggaggtgggaacg

SEQ ID NO: 659686 - DNA, 90 bp, Homo sapiens
cgtggcttgaattgggaggggggcagctggagcctcaggcggcagcgcttctagatggttggaatccattttcgtacccatacaaaaaac

SEQ ID NO: 659687 - DNA, 76 bp, Homo sapiens
ctggaattgctactgctgcctctgtcactcctggtgaccagcattcaaggagttattcctgatgaagctaaagctt

SEQ ID NO: 659688 - DNA, 48 bp, Homo sapiens
tggcgacttcgctcttccagttgggagctgagcacataacgacttaca

SEQ ID NO: 659689 - DNA, 121 bp, Homo sapiens
tgccccgcggagccgccggtatgagcgcccctcgccaccccgtgtcccaggcccggcctttctgacaagagagacgagttgtactgctgtcacaggaaatggacgctggattacaagcatg

SEQ ID NO: 659690 - DNA, 49 bp, Homo sapiens
gctggagatggtggagtccgtcactgtgttggagtagaagaacatcatg

SEQ ID NO: 659691 - DNA, 80 bp, Homo sapiens
tctgggtgggagccacctgtgtgatgatgcctgagttcagccctcagcaggcgggcgctaatattgacacctgctcagaa

SEQ ID NO: 659692 - DNA, 96 bp, Homo sapiens
ggccgaccctcgaggcctcctgcactccgcccggacccccggccccgccgtggactctggcctggttgtcccaagtatttcctatgagctgcataa

SEQ ID NO: 659693 - DNA, 100 bp, Homo sapiens
cgcggccgggccatgcagtgtcctcctcagggagggcaggagagcctgaggagtggcggggccgccaggcccgatgagagaaagggaaagttaaggatgc

SEQ ID NO: 659694 - DNA, 101 bp, Homo sapiens
cgtgaacgaagattcgaaaagccacttgaagaaaagggtgaaggaggcgaattttcagttgatagtgcttgacaacatgaagaaagctctcaagttgctga

SEQ ID NO: 659695 - DNA, 100 bp, Homo sapiens
gctgtccttctttgtggagagcaaggctgttagagaaacgctagcatccagaatagtgctgtttgggacctcagctctgattcctgaagtcttcacctac

SEQ ID NO: 659696 - DNA, 76 bp, Homo sapiens
gctccagccgaaggagaaggggggtgtccctggccagtgtccttccacctgtccacaagcatggggaacatcttcg

SEQ ID NO: 659697 - DNA, 98 bp, Homo sapiens
cgaatcagcagcatggagggagaggccaaacttccagatctgcaaccatttccttctccagatggtgatacagtgacccaacatgaggaactggtctg

SEQ ID NO: 659698 - DNA, 100 bp, Homo sapiens
cgacagtgaaaccctttgccatcgacatatttcctgtcaccaacaaagatttcagggcagctgcaatgactctccgcacggtattattgtcattgcaagc

SEQ ID NO: 659699 - DNA, 97 bp, Homo sapiens
cggcctggacaagcggaccccggcccaggcggccttcgagaaaatgcaggagaagcggtttgctgatggccgccaaagttggagttcgtatgttgat

SEQ ID NO: 659700 - DNA, 83 bp, Homo sapiens
ttgttgtcttcaattaaaaaatttattaaaggaagcacacctaaggagaagaaatcatagcctataagccacctggatttagt

SEQ ID NO: 659701 - DNA, 100 bp, Homo sapiens
caacgaagagaccacctgtccttcgagcaggctgcagagagactaagggcacttcctgaggttcattaccacctggggcagaaggacagggagacagcaa

SEQ ID NO: 659702 - DNA, 74 bp, Homo sapiens
agccggagtggggcgagccgcggaacccggccgggagccgcgcgaggcgggctagttgcacatagtgatttaga

SEQ ID NO: 659703 - DNA, 100 bp, Homo sapiens
gacccactggaagcctagaaatggaatgaatctgaagtctgctgcagtaaaacacagaaggctttaaaatgttttcttgcataaaattcaaaacttttaa

SEQ ID NO: 659704 - DNA, 100 bp, Homo sapiens
caggtgtacacacggcagagcatggccaagtccagatatatggagctctacacgtatcctcctgcctagcgcaggtagcagcagcagcagcagcagcagc

SEQ ID NO: 659705 - DNA, 82 bp, Homo sapiens
cccttgctaccagttccgagccagccgagacctgccgtgggaccccagagattcccaattgtgcttgagaacagtagtcgag

SEQ ID NO: 659706 - DNA, 98 bp, Homo sapiens
gaaggaccgtctggagcagctgaaggccggtgttttgaatgctgtatcaaatgcctggggggcattccctatgcctctctgattgccaccatcctgct

SEQ ID NO: 659707 - DNA, 75 bp, Homo sapiens
agccacctcccaccacacaaagatcgagatggtgatcatggagcgtagcaagctctcagagctggccgccagcac

SEQ ID NO: 659708 - DNA, 75 bp, Homo sapiens
agcgctggtcccgcagacgccgagatggagacaatgcagatcttcgtgaagactctgactggtaagaccatcacc

SEQ ID NO: 659709 - DNA, 76 bp, Homo sapiens
gaaaatcaagaagctgaatttccaggccttcgccgagctgtgcagggcagcgtggacattctcaggctgactctcc

SEQ ID NO: 659710 - DNA, 75 bp, Homo sapiens
ttggatgaaaatatggattacaggttgatgtgggagtacgtcatgtccattgacagcctccagctgggctatgcg

SEQ ID NO: 659711 - DNA, 73 bp, Homo sapiens
acaggcagtgtgcccatcccctggcagaacgagctggtggagttcttagaagctaatgaggtgcctcggcccg

SEQ ID NO: 659712 - DNA, 72 bp, Homo sapiens
ggagctgtacttctatatctacaagggggtccgcaaggtacctactgtcaacaacgggaagtggaggccatt

SEQ ID NO: 659713 - DNA, 100 bp, Homo sapiens
acacctgagcagaggctggggttgaaacaagcagaagaacgcttagaaagagatcacatctttcgacttgaaaaaggtacagctcgcagaaagaagaagg

SEQ ID NO: 659714 - DNA, 108 bp, Homo sapiens
tgcacctgcctgagcggcctgctgcggcaccgcggcggcctttctcctgggaagacgtgtactaatggtcacttgatgtgcgctggctgttttatccacctactagca

SEQ ID NO: 659715 - DNA, 74 bp, Homo sapiens
gatgacaactgtacagatgtcactggatggtgccatgacaatggtgtgaactacaagattggagagaagtggga

SEQ ID NO: 659716 - DNA, 92 bp, Homo sapiens
tcaacagctacagccaattttgctaactttgcacatttcaacagtcatgcagatgtgttcagagcaacattgttttgttgacacaagcattt

SEQ ID NO: 659717 - DNA, 98 bp, Homo sapiens
aattagtgaaggagatgaagtagagacagccgctcaggaagcaatcttgcatgcgtctggaaatggcacaaccaaggactactgcatgctttataacc

SEQ ID NO: 659718 - DNA, 50 bp, Homo sapiens
gttcccctgggacttttccagcttgatgatggcacatttcctagaggcag

SEQ ID NO: 659719 - DNA, 82 bp, Homo sapiens
acgagattcacaccgtcttcggtctcctggggtcggcgccgagtgggaggatggcggaagattgtcagtggcttcgccccga

SEQ ID NO: 659720 - DNA, 75 bp, Homo sapiens
tctaatccctgctctgtcactaacaagctgcgtgatcttcgtgaactttgaggcgctgatcatcaccatgtcggt

SEQ ID NO: 659721 - DNA, 100 bp, Homo sapiens
tcagcatccccaagcagggggagatgcctggaatgatgtcgtcagtaatgcctggaatgatgatgtctcatatgtctcaggcttccatgcagcctgcctt

SEQ ID NO: 659722 - DNA, 100 bp, Homo sapiens
tacgttggcgatttggctacagatgacccaccagacctcacagtcattgataagttggttgtttggactaaatgctcttccttcagaggattatccgggg

SEQ ID NO: 659723 - DNA, 75 bp, Homo sapiens
gatttacctgttttctgggagcttcgaagatagaaaatgctgctgaagaacctagagtcttatgtattatacaag

SEQ ID NO: 659724 - DNA, 80 bp, Homo sapiens
gcccgcgaccgtccgccagtcgtcccgaggttcaagaagacgtggaagctgcgggctctgaaggaaggcaagacaagcat

SEQ ID NO: 659725 - DNA, 82 bp, Homo sapiens
ggagcatcggctgcaggggtcagtgatggagctgcttcagaagaggatgtggagaactttgacgtgaccaacttgtctcaag

SEQ ID NO: 659726 - DNA, 97 bp, Homo sapiens
tagacccagctcctgcctcccagccttctctccaggccctgaacattctcatctgcgggccaggcatcgacatccgcaacgactatcagcagctgaa

SEQ ID NO: 659727 - DNA, 125 bp, Homo sapiens
tccagtttaggaggaagatgcaagcggtttgggaccttgaacaaggcaaatatggttttgacttaattcagtgcacaaatgagatgaatgtgaacatcccacagttggcagacagtttatttgaa

SEQ ID NO: 659728 - DNA, 75 bp, Homo sapiens
ccgacctcgacgtcttgcctgtgtcccacttgttcgcggcctatagacagagctgggaagaatttgaaaggagtt

SEQ ID NO: 659729 - DNA, 90 bp, Homo sapiens
cagcatcccgtcaggggttgcaggtgtgtgggagattttaggtgatgggcaagtcagaaagtcagatggatataactgatatcaacactc

SEQ ID NO: 659730 - DNA, 99 bp, Homo sapiens
atgtcaggcctgcggcccggcactcaagtggaccctgagattgagctttttgtaaagatcttagcaaagcaatgtctcaagatggtgcttctcagttcc

SEQ ID NO: 659731 - DNA, 82 bp, Homo sapiens
cgcactcgtaacctggatcccagaaggtcgcgaaggcagtaccgtttcctcagcggcggatccctcatccacctacatcagg

SEQ ID NO: 659732 - DNA, 100 bp, Homo sapiens
gctgtactccttgtctttgcaaacaaacagttggcccgccacaataaactgttgcagcagatgctcaaaccaggatcggatccagatgaaggagatgaag

SEQ ID NO: 659733 - DNA, 100 bp, Homo sapiens
cacgaaaatcaacatcacggagatgtacaagagcaacaactatttgggcatcccgggcccaaatcctagacaaagccacagaatatatccagtatatgcg

SEQ ID NO: 659734 - DNA, 90 bp, Homo sapiens
gccgcttgtcagtgtgatgaagattggcacccagggggggccctcagcctcttggccttgaacgggctgttcatcttgattcacaaacac

SEQ ID NO: 659735 - DNA, 49 bp, Homo sapiens
aaatactgcatatcagaaacaacaggtgatctgaaagtagagatgatgg

SEQ ID NO: 659736 - DNA, 105 bp, Homo sapiens
cggacggcggcgacggaggagagcagctcctcactgtcaagcacgagctgcggactggagccttcacgtaaatgggtccagtcatgcctcccagtaagaagccag

SEQ ID NO: 659737 - DNA, 75 bp, Homo sapiens
ggcaaaagggtcagaggaaggcagtatccttggggtgttgctgaagtgggcaggcttggctgaaatgagaactgc

SEQ ID NO: 659738 - DNA, 98 bp, Homo sapiens
cactaatggcttatatggaaaatacagcgaccaactgattgtcgacatgcctactgataatcctgcagaattacctgattctaggacaaaggaaattg

SEQ ID NO: 659739 - DNA, 83 bp, Homo sapiens
gtggtctacgagctgtttctcatctttatactcttccaggtcaacaacggttccagcctcagggatgagtgcatcacaaacct

SEQ ID NO: 659740 - DNA, 100 bp, Homo sapiens
aaaagaacagtggaataaagaggatttgcaaaggagattctcacaagatgataccaggtataaaggaccattgttagaagagcaagcccttacaaaggcg

SEQ ID NO: 659741 - DNA, 100 bp, Homo sapiens
gtgcattgttggtgggattctgctcgtgttccaaatcatcgcctttctggtgggaggcttgattgccttgaaaagatcttttgaggtcgaggaggtcgag

SEQ ID NO: 659742 - DNA, 95 bp, Homo sapiens
gcaagtccaccaacagtttctgtgtcccacttcatctttaataaggttttctgtgaagaccctgattgatcggtcttgctttgagacaattgatg

SEQ ID NO: 659743 - DNA, 83 bp, Homo sapiens
ttagtctccacatccacctccgtgaaagatgccagaagtgggtggagaactgtaggagagcagacttagaagataaaacacct

SEQ ID NO: 659744 - DNA, 75 bp, Homo sapiens
aatcttgaagaaagaatgcaaagtccccagaatcttcatggccagcaagatgatggagtgaaggtacctgagcgc

SEQ ID NO: 659745 - DNA, 100 bp, Homo sapiens
ctttctccagctgccctatcacctgccagctcatcacaaattgagcctaaggtgactgtgtatcctgcaaggacccagaccctgcagcaccacaacctcc

SEQ ID NO: 659746 - DNA, 110 bp, Homo sapiens
tggatctcttatccatcacatggggctgttgagctaatggaccgaactgaaatgccatgccaggcattagtgaggatgctagccaagaaacctggatggaaagaaactaa

SEQ ID NO: 659747 - DNA, 100 bp, Homo sapiens
ctgggatttttgggtggtgcaaagatacagatgaatatagacctcctgtttggaaatcttactgtaagtctacaaataattgtgtgggttatagtgcttt

SEQ ID NO: 659748 - DNA, 82 bp, Homo sapiens
cttttattttcctgtaatatatctgtatcatcggaggtgttaagtgtgatgcttccataatacatttggatgctgtcagcta

SEQ ID NO: 659749 - DNA, 98 bp, Homo sapiens
gtggaggggcgcgcagagggcaccgggcgccgggagcaggcggcgcagcaccaggggccaaaccagtgctcctgccacctctctggctgccccctaga

SEQ ID NO: 659750 - DNA, 105 bp, Homo sapiens
gtgctgaggaccgggggtggaggtggtgcctctggcagtgacgaggacgaagtgtccgagacctttccaaagtgaaactgatgagatttgatgatccactgttgg

SEQ ID NO: 659751 - DNA, 100 bp, Homo sapiens
cctttgacgacgttgaccgcacactggatgaatggaagccagtccaaggttgtgctcttggaagacctggcttcccaggtgggcctacgcactcaggtaa

SEQ ID NO: 659752 - DNA, 74 bp, Homo sapiens
accgacatcatgctccagttcctgatgctggccctggctctacttgatagaattgtctccgtggataaacagca

SEQ ID NO: 659753 - DNA, 89 bp, Homo sapiens
cggagtcctgaagccggcggacggttttcgtacgggcggccgtgcgcgaggcgagatatttggagttcttacaacatggcagacattga

SEQ ID NO: 659754 - DNA, 60 bp, Homo sapiens
gcagctccactgaacagataaggacatttttacaggaaggaatgcctacttctgcacgat

SEQ ID NO: 659755 - DNA, 96 bp, Homo sapiens
ggagccacctgtgacagcgacggcctgaatggcacgtgcatctgtgcacccgggtttacaggcgaggattaaatccaccacacagggtgaaatcta

SEQ ID NO: 659756 - DNA, 51 bp, Homo sapiens
gtgaacgtgctgtggaatatatggtcgagtttgagtggctgaggcagtttt

SEQ ID NO: 659757 - DNA, 75 bp, Homo sapiens
accaccggatcaacttcgacaaatatctgcgctcctcagaccaccggcaggtgaacagcctgatgcagaccgagg

SEQ ID NO: 659758 - DNA, 51 bp, Homo sapiens
ctgtaatccagagtatcatattcaaagatgcttgtttgctactgatgggtg

SEQ ID NO: 659759 - DNA, 75 bp, Homo sapiens
ggcggttccagcagcagcagtagctatggcagtggcagaagattttaattagggtttttaatgaccacaacaagc

SEQ ID NO: 659760 - DNA, 51 bp, Homo sapiens
cttgtgtgcggaactcctcggaaccatggtctcagctcgcgtacatggaca

SEQ ID NO: 659761 - DNA, 82 bp, Homo sapiens
tgaagcgcaggctgcggggcgcggagtcgggagatgcttcaggactgccccaaggcccgcagggaggtggagctgcactggc

SEQ ID NO: 659762 - DNA, 100 bp, Homo sapiens
ctcctgacagccgagaaaggcagacacaagagcaagcccgcacgtgtgaaggcatccactgttccctgtattgaacactgatatacaaggaatgaataga

SEQ ID NO: 659763 - DNA, 100 bp, Homo sapiens
aagcacccgtcgtatgctgcaactggttgaagaggtgtcagctgtgatgcatgtttaaaaggaaattttcgaggtcgcagatataagtgtttaatttgct

SEQ ID NO: 659764 - DNA, 75 bp, Homo sapiens
aaaagcgcactaaatcgtctccaagagcaccatttaccgtggagagatgtgcttttttgattctgaggatcctgc

SEQ ID NO: 659765 - DNA, 101 bp, Homo sapiens
tggcgcagctccgggaaaaggtgcaggaactgcaggcgcggcggttctccagcagaaccactctcggcatcgcggacaaggcaaaatctcagcaagttcgg

SEQ ID NO: 659766 - DNA, 99 bp, Homo sapiens
gtcagcattggaaggaatgaaggcttgtatgacctatttccctcgggcttgtggttctctcaaagatgctggaggtcagcagattggcttcttgctagg

SEQ ID NO: 659767 - DNA, 96 bp, Homo sapiens
ctctgaggaatcctatccatatgaggcaacagatatgctgcaggctgctagtcattatcgccaaaatagaaactctttgtatagaagagaagaatc

SEQ ID NO: 659768 - DNA, 100 bp, Homo sapiens
caggaacctgggcatccctctgggccaggacgccgaggagatcagtgtactgttacccggacatacctattccttcacaagttctggttcttcagtgctg

SEQ ID NO: 659769 - DNA, 76 bp, Homo sapiens
gacggtgtgcaccaacatctacaagatcctcctgctgcaggcgtacaggccattctggaggaaaacaaggagaagc

SEQ ID NO: 659770 - DNA, 100 bp, Homo sapiens
tttacatacaggaaaaactttccagccattgaaatcaagatgactaccagctggttcgaaaattaggccgaggtaaatacagtgaagtatttgaagccat

SEQ ID NO: 659771 - DNA, 75 bp, Homo sapiens
ttcattgttggactattgtggttggcttctgttacgctaggaatatggcaaacgactttgtgttttatgccccac

SEQ ID NO: 659772 - DNA, 74 bp, Homo sapiens
tattggaagcgctttgatttacagcagctgcaggtctcggaggaccccatcctagccctacctgtctcggcccg

SEQ ID NO: 659773 - DNA, 73 bp, Homo sapiens
agggcttcgcgtctgcttcggagaccgtaagggtggaaaaccatgaattccttgtaaaaccttcatttgatcc

SEQ ID NO: 659774 - DNA, 73 bp, Homo sapiens
tcggacccacggagccggcagcccagcactccggacacaactcagatgggaagttcatcgcccgggcacagcg

SEQ ID NO: 659775 - DNA, 83 bp, Homo sapiens
gattcatcagattttgcattggatattcgcatgcctggggttacacctaaacaggccctggccaacgtcaacattgggagcct

SEQ ID NO: 659776 - DNA, 90 bp, Homo sapiens
ccgagatccatgagtacaatcaggacctgatccgcaaggagagtgtgaaccggctgcacgcacagatgcaggccttcgtgtctgagagtc

SEQ ID NO: 659777 - DNA, 100 bp, Homo sapiens
gacgggtgaggtacaggctcagtctgcggccaagactccgtcctgcaagacctcgaagtagggggaaaactgcagtggaagatgaggacagcatggatgg

SEQ ID NO: 659778 - DNA, 76 bp, Homo sapiens
ctcattgcctccaccgccatcgtcctcacagtcaccgagacttggagccagaatctgagcctcagctggagtcaga

SEQ ID NO: 659779 - DNA, 83 bp, Homo sapiens
cccaccaacaacaccacaataatccacagccaaggcagcctgcttctgcaaagtggtacgatcgaagggactatgtcttcatt

SEQ ID NO: 659780 - DNA, 100 bp, Homo sapiens
agaagagtgaccagggcgttgagggtcctgggggaaccgggggtagcggcagcagcactgggtttgtagatgaaactgaagctgccaaagtggaacgtgt

SEQ ID NO: 659781 - DNA, 75 bp, Homo sapiens
gacatggactccatggtcaggctgatgagttttagttactatccagcagaaaacttgatagagtacaaatggcca

SEQ ID NO: 659782 - DNA, 88 bp, Homo sapiens
gaccctgagccagatgacaagaatcaagatgatgaacaacatgggtggtgatgaggatgtagatttaccagaagtagatggagcagat

SEQ ID NO: 659783 - DNA, 86 bp, Homo sapiens
aaaagaggaagatagtcttgggacccttgcatggtgtttcaaagggtggtgaagaactaagcccttagagatttgtttgattccat

SEQ ID NO: 659784 - DNA, 73 bp, Homo sapiens
cggggtgtgtggacgccgctttgttgcctgaggtagtagattccatggatgcattagataaagttgtccagga

SEQ ID NO: 659785 - DNA, 100 bp, Homo sapiens
ccatgatgagccatctccacttaatgactgtctcacattggccggcaacttgttccagatactaatggaccatactaccaaggaccagtccacctgaacc

SEQ ID NO: 659786 - DNA, 58 bp, Homo sapiens
acaccgagggcctgggagatgtagagaagggtgacaaccagaatgactcctggatctt

SEQ ID NO: 659787 - DNA, 75 bp, Homo sapiens
ttctgaagccgggagagggcctgtagggataagaaggctgactgcacaatcacaatggctgactcagacttcctg

SEQ ID NO: 659788 - DNA, 100 bp, Homo sapiens
aacattcaagtgaagcaaaagcctttcatgattatgtctctaattaacagaagatggcaaagcccagccacagcagctatgtccttcagcagctaaacaa

SEQ ID NO: 659789 - DNA, 74 bp, Homo sapiens
taataaacaacaagaactttgataaagtgacaggcagtagaagatggtgaaagaaacaacttactacgatgttt

SEQ ID NO: 659790 - DNA, 74 bp, Homo sapiens
ctggaagcctagaaatggtgagactgccaggtttgaagactgcttcattctgcctctagtaccagcggtttctc

SEQ ID NO: 659791 - DNA, 90 bp, Homo sapiens
gtgagagagaaatttcttcaagaagcctatgatggatgtctagaaaacacccctgacactgcagagttcagtcgagagttccagttgcac

SEQ ID NO: 659792 - DNA, 75 bp, Homo sapiens
ggacacacccaggaaaagactcaggacggacaagcacagtcttcggaaggtcctgctggtcaatctttgtgaagg

SEQ ID NO: 659793 - DNA, 87 bp, Homo sapiens
acagactctcctgcagaccttcccaggaagccagagccacacacaccatcatggtcctgctgagtcagtgctgattctctcaaatag

SEQ ID NO: 659794 - DNA, 89 bp, Homo sapiens
aattcagtcttatatccggggttggaagggccaggaaggaatactgggagaatcttcggatagcctcaggccggccatacaacccttca

SEQ ID NO: 659795 - DNA, 78 bp, Homo sapiens
gcctcctgagtagctgagactacaggtttcctatcctgggagcaggagagtgtgcctatttgaatgacaaaggtgcca

SEQ ID NO: 659796 - DNA, 101 bp, Homo sapiens
caactcacagcctgaaaatgaaaaggaagcttcaggtggagacagcccgaagactggtcgaattgacaaatcttaccctacagtatgtggccacacaggac

SEQ ID NO: 659797 - DNA, 99 bp, Homo sapiens
atttctcaatgtttatattcaaagtttctctctctttgctctcaggcagcccatcaggtgatttggattgtgaaacctgtaccataacacggagtggac

SEQ ID NO: 659798 - DNA, 95 bp, Homo sapiens
ctgaaatctcagggcagctcaaatgtggcacctggttgaaatcacaaagattagacacctttttagataggtgttcttcagcaccactgacaaca

SEQ ID NO: 659799 - DNA, 100 bp, Homo sapiens
cagatatatggagctctacacgtatcctcctgcctagcgcaggtaatgcaggtggtgaaggagcaggttatgagagcacttacaaccaagcctagctccc

SEQ ID NO: 659800 - DNA, 102 bp, Homo sapiens
tctggccagcacgctggactgcgagacggcccggctgcagcgagcgctggacggagaggaaagcggtaggtagccatccaagcttcctgaaggaggttcgag

SEQ ID NO: 659801 - DNA, 75 bp, Homo sapiens
ttagcccgtcagtccctgctctgtgcgcgcctccatctgggccatggatggtggtggtgaccgcggtggcttcaa

SEQ ID NO: 659802 - DNA, 83 bp, Homo sapiens
cggggacttcggcggcggcgcctcaggcacctcggcccgggtcatcatcagatttgaaatatttaaagtggatacaaaactat

SEQ ID NO: 659803 - DNA, 75 bp, Homo sapiens
gtcaaccgcattattactgaaaaggtttggaattcacccagttgcaggccgaatgcctggtcagcttaatgtgct

SEQ ID NO: 659804 - DNA, 97 bp, Homo sapiens
ttcgtcgcgctgcaacccccggctcgggtgatttggatattgaagatgacatgaaagcacagatgaattgcttttatttgaaagccttggatggttt

SEQ ID NO: 659805 - DNA, 100 bp, Homo sapiens
ggtctgatctggaccattattttgcatttccaggcattgggatcccgtggcagttgcagcactgaagtggagaaggagacccaggagaagatgaccatcc

SEQ ID NO: 659806 - DNA, 101 bp, Homo sapiens
tgggcgcgagtccccgccgccctcagatgacagtgatgggattccgtggtcagaagaacgggtggtacgtaaagtcctttatttgtctctgaaggagttca

SEQ ID NO: 659807 - DNA, 90 bp, Homo sapiens
gcaggtgcacgcgcgtggcccgcgagacgaggccactgcagaacaaattagacttgcacagatgatttcggaccataatgatgctgactt

SEQ ID NO: 659808 - DNA, 87 bp, Homo sapiens
ctgcttggacatactggaagactacctcattcaaagacgaaaccttccttccttccagttgtgtgtcagtagaattacagagtgtcc

SEQ ID NO: 659809 - DNA, 98 bp, Homo sapiens
aagaccggaagctgagtttttatccagtgaagagaatatctcagggatgacaagcttccgtgaagttctggagaaaatgctggtcattgttgtgctac

SEQ ID NO: 659810 - DNA, 75 bp, Homo sapiens
gcggatggaagggaggagactcctgaccctcagaatggttctcatcccaggccttgtggagggatctaccaaaag

SEQ ID NO: 659811 - DNA, 78 bp, Homo sapiens
tggacagtgaagggagagaagtggatttgggagacatttaggagaaggggaaactgaggcccaaggaaattgagtatc

SEQ ID NO: 659812 - DNA, 74 bp, Homo sapiens
gcagcctggattttctttgctaagggacttgaagttggacggaggaagacaatcaactggtgcagtgagtttga

SEQ ID NO: 659813 - DNA, 80 bp, Homo sapiens
tttaaacagatggattccagaagatatgcgagtaaccagctcataaatcacatcgaacagtttttggatactaatgaaac

SEQ ID NO: 659814 - DNA, 75 bp, Homo sapiens
tcgctctcctctggggactgcagagaagcaggacctcgggccatggacctggacaaacaccagactcagacgtac

SEQ ID NO: 659815 - DNA, 75 bp, Homo sapiens
ggctgcgggaaatcgggctgaagcgactgagtccgcgatggaggagatcccccgagacctcacgctggatgccct

SEQ ID NO: 659816 - DNA, 75 bp, Homo sapiens
ggagacaggtgctctcggttgcacaataaaccgacgtttagccagcctgtggacatctctacagcaatgagtgaa

SEQ ID NO: 659817 - DNA, 98 bp, Homo sapiens
cccgaagcacctcccggcgccgggacgcttcttctattcgtcactcatgctgctgcagatggcgggtgttggactgggttccctggctgttgtgatca

SEQ ID NO: 659818 - DNA, 74 bp, Homo sapiens
tttcttcagccgaggccgccgccgcctctccttgctgcagccatggagggaacgcccttttgcttgtgactggc

SEQ ID NO: 659819 - DNA, 75 bp, Homo sapiens
ctacccctttgccaggttcaataagaaactggcgatggaatatgagaggagccctctggaaagaaaaggacagac

SEQ ID NO: 659820 - DNA, 75 bp, Homo sapiens
gcggagcccgggacgcgcgtacgccctgctgcttctcctgaaacatatgaggattttgataccaggatacttgag

SEQ ID NO: 659821 - DNA, 99 bp, Homo sapiens
gccaaactccaggacattcacttacgccaccgccatcactttcatcacatggatcctcatccagtttgcatttaggccccttcacagatgtagtcacta

SEQ ID NO: 659822 - DNA, 100 bp, Homo sapiens
taatgaagtggtagtaggagctgaaagattacgagttttagttgatcactcctcatgccatccgtgtgcagacccctcctcggcacatccctggtgttgt

SEQ ID NO: 659823 - DNA, 100 bp, Homo sapiens
tcaactattacaatcgcttgtacaaaggagagtttaaacagccaaaacagttcattcatattcagcgtaagaatgattgatgttggctgatattggagtg

SEQ ID NO: 659824 - DNA, 90 bp, Homo sapiens
ctcggcgcggagcgtcctgtcaggcggcggccgagggcgtcgcggactctccccgcgatgatgccggctggaagtacaccttgttggagg

SEQ ID NO: 659825 - DNA, 92 bp, Homo sapiens
cccaacatagtttgtaaagcctgtgggctttcattttcagtctttagaaagaagacaactgggcggagttaatggaagtcaaccatgatgac

SEQ ID NO: 659826 - DNA, 100 bp, Homo sapiens
cggccagctcccgccctggtccttcgcccccaagactgcgactctaaacggactcatgtactttgtcaggccacggatcctggagatggacaaggaagag

SEQ ID NO: 659827 - DNA, 101 bp, Homo sapiens
ctcggcctgcaaggctgttgtttcaagaaatgaaaatgaagggcgccctggaataggttcgccgaagagagaggacacattcagctaacgtattttagcag

SEQ ID NO: 659828 - DNA, 75 bp, Homo sapiens
gatttccaaggaagaatttcctctgaagcaccggcaacatgagtgagaatgaggaagaggaaatttctcagcaag

SEQ ID NO: 659829 - DNA, 95 bp, Homo sapiens
tgtatttgggccaaattgctttcaaactcttgatgtttcagtgagctttaatggaggaaaatctgtcatttcaggatcattaattgtcacagcca

SEQ ID NO: 659830 - DNA, 100 bp, Homo sapiens
gtgcagctagaagtccatatcggtgtctactatgaaccatcctgtactcagaatgtgaatcatggtgtacttgtggttggctatggtgatcttaatggga

SEQ ID NO: 659831 - DNA, 100 bp, Homo sapiens
cttggatacaagacaagtgtacaccaaatgtgaaggtgatgaggttgaagatctctatgagcttttgaaacttgttaagctgggatctagcaattgggag

SEQ ID NO: 659832 - DNA, 83 bp, Homo sapiens
cttttttcaggcagaaaacaagtctcgtctggacggtgagaagccctaccactgcaactgggacggctgcggctggaagtttg

SEQ ID NO: 659833 - DNA, 100 bp, Homo sapiens
cgtgaggtccagggcttcgagtcggccaccttcctaggctacttcaagtctggcctgaagtacaagcttggatttacactgggcaacgtggttggaatgt

SEQ ID NO: 659834 - DNA, 75 bp, Homo sapiens
caccgccgctagggtcgccgttgcatcggtgcagggcaaggtgaacttcacggtagaccagatccgcgccatcat

SEQ ID NO: 659835 - DNA, 98 bp, Homo sapiens
caccctgaagatcgttctctgatggttgccatacaccaaaaaggaaaggagtgttcccaggatgaaagcacagctgctgccatcttcactgttcagat

SEQ ID NO: 659836 - DNA, 100 bp, Homo sapiens
gatgcagtggaggccatcaggggccttgataacacagagtttcaagtgggcacagtggctcagggaagacggaagccgccaaaaagatcatgcagttcct

SEQ ID NO: 659837 - DNA, 83 bp, Homo sapiens
cgcacttgtcttagcagttctcgctgaccgcgctagctgatttatggagagaattcttcttgtgcaggaagagcattgaggaa

SEQ ID NO: 659838 - DNA, 99 bp, Homo sapiens
caggatgtgactttttgagattggcttttttcgttgactatcctgcccctgagatccacccaagttgtgtccaaaccaggttgcagagaaggtggcctc

SEQ ID NO: 659839 - DNA, 58 bp, Homo sapiens
caagctggccagggacctcaaggaagcttatgacagggccatgaagcccccaggagga

SEQ ID NO: 659840 - DNA, 100 bp, Homo sapiens
cccggttgtcctcaggcgctgtcagggtttcatcaccttaaatggttttgaaccaatgaaggtgtattcccttaaaaagacggacagcccatcgtgtgaa

SEQ ID NO: 659841 - DNA, 51 bp, Homo sapiens
gtctgcggctggtgttggcgcatctctaggataagggagatcttgaaggca

SEQ ID NO: 659842 - DNA, 100 bp, Homo sapiens
tgccctggggcggggaatccccattctgtccctggactggctgcatcagcttaagatctccttcagcgagacagccctggagaccacgtaccaatacccc

SEQ ID NO: 659843 - DNA, 76 bp, Homo sapiens
attgtgaaagaaggttgggttcagaagagggaccactctggctcacatcatagccagcaacagcaagaaacatagc

SEQ ID NO: 659844 - DNA, 75 bp, Homo sapiens
ggaagatgcaagcggtttgggaccttgaacaaggcaaatatggttttggctgaagccgacgtagcttctctgaac

SEQ ID NO: 659845 - DNA, 100 bp, Homo sapiens
accaccttcatctccaccatcgttcacacaaaagatgttggacaatttctacaattttgcttcatcatttgctgtctctcaggcccagatgacaccaagc

SEQ ID NO: 659846 - DNA, 100 bp, Homo sapiens
aaatactatcggggaaacggaagtggccgtcggtggcaggtttgggggagaccggaagtgacggccccagcctccaggcccccaactccgcccagcctct

SEQ ID NO: 659847 - DNA, 83 bp, Homo sapiens
ttcgcagtggtcgcttcttctccttggccacggcgtatgcctccgaggacggggtcctgaccgaggccatgatggacacccgc

SEQ ID NO: 659848 - DNA, 100 bp, Homo sapiens
cgtctctctgctgcggcgcggggaccgctgtgctctcgtgtgaacgtggcatcactgacacaatcagaaattcgagacatcatcctgggtatggagatct

SEQ ID NO: 659849 - DNA, 100 bp, Homo sapiens
gaaaatcatggtgaggacatgaggaaaatgtccttccagcgctgcgcccggacagacaaggactccaagccccctgatccttgatcagaactacattaac

SEQ ID NO: 659850 - DNA, 100 bp, Homo sapiens
gagaagacaccaccagataaaaagcttgagcccatttcaaatgatgacctgctggttgttgaggtctatgttaacaatgaatgggcaaccagtgttgggg

SEQ ID NO: 659851 - DNA, 88 bp, Homo sapiens
gattggaaattaattgctatcaatgcgaatgatcctgaagcctcaaagtttcatggggctccgcgcgtggccgcctccctcttcctgg

SEQ ID NO: 659852 - DNA, 83 bp, Homo sapiens
gtcgcgtgtctaggtgagtcgcggtgggtcctcgcttgcagttcagcgaccacgcagcccctgtcaaagggaacaggaagcag

SEQ ID NO: 659853 - DNA, 80 bp, Homo sapiens
agatggctctgatgtcatttatcctgccaggatcagcctccgggagcactgccagtgaaagatgtagaagataaacctga

SEQ ID NO: 659854 - DNA, 127 bp, Homo sapiens
gccgtgtctcagtccacccaaggtctcctcggatcgcctggagaggcactcggacctggtctcggacagcccgggagacgagccctcggagtccccatacgaaagtgcagacgaaacacaaactgaa

SEQ ID NO: 659855 - DNA, 50 bp, Homo sapiens
ccgctggacttcttgactatagttaagaatgtctgaggggtcaggcggtg

SEQ ID NO: 659856 - DNA, 75 bp, Homo sapiens
ggtctacctgtacttcttgaaaaacgtatcgaagaccttcgtgtagaattacatgaatgacagtcttcgaaccaa

SEQ ID NO: 659857 - DNA, 100 bp, Homo sapiens
gattatgaagaaaatggaacagatttatccggggctggtgatccgttcttccaggttggaaagagaatatgctggagagctgtctcccacgtgcattttc

SEQ ID NO: 659858 - DNA, 75 bp, Homo sapiens
ggggtcgacggtccccactttcccctgagcctcagcacctgcttgtttggaagtgatcgaactgtgagaatttgg

SEQ ID NO: 659859 - DNA, 99 bp, Homo sapiens
gacacgataagcaagattcgtttaagacaacaactggaaatgtattccatttaaaagcagcatctgttatagcaaaatacccacacaaaataaagagtg

SEQ ID NO: 659860 - DNA, 75 bp, Homo sapiens
cacaagcaactctggatgggattgcaaaatgccacataaagaagatccctaatagtcatttctcaacaattatat

SEQ ID NO: 659861 - DNA, 99 bp, Homo sapiens
ctggagtttatgacttccattcctgagaggccagcccagctgcttcttctgcagttgaaatggatgcagtcagaactgaatgttgaagaagtggtaaat

SEQ ID NO: 659862 - DNA, 73 bp, Homo sapiens
tgaagactaacattttgtgaagttgtaaaacagaaccagacgtcctgggtcctctccagcatggcagccctct

SEQ ID NO: 659863 - DNA, 108 bp, Homo sapiens
ccctctctggccactatggaattctaatttgaaccatgtttggattgaagccgcctctgtattacttaccaggaacttgctactaccagcaccatgccctaccaatat

SEQ ID NO: 659864 - DNA, 101 bp, Homo sapiens
ctctgcctgctccacaagcggcgccgcgccctcggcctgcacggagctacagagacttctgaagtggagagtctgcgacctcctcggttcttcaatgaaga

SEQ ID NO: 659865 - DNA, 98 bp, Homo sapiens
tttttctgactccagtgcaaccttcctgctgaacgagattgtggtatctgaacgggaactatttggttctgttggtgtcattggtggtcattcttcct

SEQ ID NO: 659866 - DNA, 100 bp, Homo sapiens
ccacgatccgccagtggatggaatacttcaaagccagtatcaacactggtgctcaagaccgaatcggctgggcttttggcctaggattagaaaggctagc

SEQ ID NO: 659867 - DNA, 152 bp, Homo sapiens
cttgggctcagagcaaggatgcgtgaaattgtccatattcagattggccagtgtggcaaccagatcggagccaaggttcaagggcagcaggaaagacgagatcctgggcatcgccaacaaccgactgatccgcatcgacttggccgtgggcg

SEQ ID NO: 659868 - DNA, 82 bp, Homo sapiens
tctgatgctctctctccagtccttgctgaagagactttccgttacatgaaaagtgaaattcgttattctacatggaagaaag

SEQ ID NO: 659869 - DNA, 50 bp, Homo sapiens
agcagaaccaactcggatattgttgaggaatgggtaccacagaccatgtc

SEQ ID NO: 659870 - DNA, 74 bp, Homo sapiens
ggatgagctatgacttgctaaacaatctgttggttttgcactgattgcaaaaataaagtcctccgagcatacaa

SEQ ID NO: 659871 - DNA, 75 bp, Homo sapiens
gaatcatccacgcacctgcagctctgctgagagagtgcaagccgtgggatgtattgctgtccttgaatattagcc

SEQ ID NO: 659872 - DNA, 100 bp, Homo sapiens
caaaaagaaacctagcaacaaaaagaaagctgcgttaatgtttgcaaatgcagaggaagaatttttctatgagtggatgaggatcgcagtacggaacctg

SEQ ID NO: 659873 - DNA, 100 bp, Homo sapiens
tattttcatctgaagaagccaaagataaaaatttcaggatcaccattaacacttaaggagaaatgagtctctacttggactaataaaagtgaaatataag

SEQ ID NO: 659874 - DNA, 82 bp, Homo sapiens
agcctgcggagcctgtggggcagattgatatcagtaaatgccattatttagtggatttggacaccatgagagaaacaccccg

SEQ ID NO: 659875 - DNA, 74 bp, Homo sapiens
gctgcgctactgcgagaacaagtttaacgacaagcacatcaccactctgcaggacattggctccctggattatc

SEQ ID NO: 659876 - DNA, 100 bp, Homo sapiens
agcaaatgtaactcagcgaattgtaatggaaagcatatggacaggtctacgccacatcacttagatgtgttcagagcaacattgttttgttgacacaagc

SEQ ID NO: 659877 - DNA, 90 bp, Homo sapiens
tgatttaaacaagagatttccacagaaggtcaaggtgaagatgttcttaaagggtcccagattacgtatgttacaggtgtagaaggggac

SEQ ID NO: 659878 - DNA, 75 bp, Homo sapiens
cctgtcggcagactggtgacttcacttttgagtgcaactgccttccagatgtggacgagtgtgcaacagattccc

SEQ ID NO: 659879 - DNA, 74 bp, Homo sapiens
gtctctctgctgcggcgcggggaccgctgtgctctcgtttcagagcctgaggccggcactttggacccagccct

SEQ ID NO: 659880 - DNA, 74 bp, Homo sapiens
ggcagccatggccctccacagcccgcaggtatgggaggtatcgccagcatgccaccgcttacagctgttgctcc

SEQ ID NO: 659881 - DNA, 97 bp, Homo sapiens
tttcgtggttcacccgctgccgggcaccgaggaccagctcaatgacaggttttatgacttacctagtggagcctttatttacagaatgggccaggtt

SEQ ID NO: 659882 - DNA, 100 bp, Homo sapiens
gaagtgtgagtgcgcgaagatgcgaaaggtggttttgatcaccggggctagcaggtcatgaggtggttttggactgtggtttccagtctgacccaggagg

SEQ ID NO: 659883 - DNA, 75 bp, Homo sapiens
tggatgttggatctacactttctcaagcactgtgatcttcaaatagcagaaggagaaacgtgtgtggagtttaaa

SEQ ID NO: 659884 - DNA, 95 bp, Homo sapiens
atggtatcagtgtgagcctttcatcagaagaccaacatctgaaactcagttctccagagaatacaatagcaggcaggccagaaagcagacccagg

SEQ ID NO: 659885 - DNA, 83 bp, Homo sapiens
tttctgagaacagaataatcggagccatggccatattttttcaagatggcagtcagtcaaaattaggaggagagacagtggac

SEQ ID NO: 659886 - DNA, 100 bp, Homo sapiens
gacacgccggggcgcccgcgcgcggggaccccacggggaccaagaatcgccttcagccctgtctggtgcatccttggcagaaagtgaggaggaaaacacc

SEQ ID NO: 659887 - DNA, 82 bp, Homo sapiens
cgacgtcttgaagacttccgagtagatggaggtcttcaggaagttgctgatcagttggatttgcagaggattggaaggcagc

SEQ ID NO: 659888 - DNA, 74 bp, Homo sapiens
agtttgcccagcacgccaacgccttccaccagtggatccaagagaccaggagcttcctcagtcccccaggaccc

SEQ ID NO: 659889 - DNA, 113 bp, Homo sapiens
ccgtatcggggcctttatttctcgtcggcggcgccctgcaccgcgcctcgcaaagtgagaagccctaccactgcaactgggacggctgcggctggaagtttgcgcgctcagac

SEQ ID NO: 659890 - DNA, 90 bp, Homo sapiens
ggagaatcctgggtttagccattgagatttgatggtagagtggtggcaaagcttccttttacccctctttcttacatccaaggactgtct

SEQ ID NO: 659891 - DNA, 87 bp, Homo sapiens
ggctatgaacccagaggtcgtggaggtggccgtggaggcagaggtggcatggggataaaagaatcagagtgtctcaacccttgacaa

SEQ ID NO: 659892 - DNA, 82 bp, Homo sapiens
ctagaatcaactgagagagatgcttaaaaatcaccagttactttaatgaggcgtcttactactgcaggcactaacaagaagc

SEQ ID NO: 659893 - DNA, 99 bp, Homo sapiens
cccggacggcccctgtccccgctggcgggcttccctgtcgccgttcgctgcgctgccggggggatatgagactttctactcggaatatcctgagtgttg

SEQ ID NO: 659894 - DNA, 100 bp, Homo sapiens
cttcacacatggagagatgcaagaccagtccatttggggaaatccttcggatggtgaactcattagaagtgttgctctcttgccattcgtggatgagcga

SEQ ID NO: 659895 - DNA, 98 bp, Homo sapiens
ctcttcgccttcggagagcagagtcaacacggagagcagcccgacggccatggaggctgaagagacgatggaatgccttcaggagttccctgaacatc

SEQ ID NO: 659896 - DNA, 110 bp, Homo sapiens
ctggatcgcactgaacctaagccacaacccgagatgctgtgagagaagtaaggaaatattcctcagttcataccattgagaagagctccaccagcagacctgatgcctat

SEQ ID NO: 659897 - DNA, 74 bp, Homo sapiens
tggatgttccttttaaagtcaaggctggccaaattgtatacaattggaccgtggatgaggtggtacagtggctg

SEQ ID NO: 659898 - DNA, 75 bp, Homo sapiens
ggggtctgtgctgagaataatggcccggttggcccgggacgagtggaatgattggtgctgaagacatggacggct

SEQ ID NO: 659899 - DNA, 74 bp, Homo sapiens
ccaagagagaaagatgtttgagtttgtggagcctgagtggagtcaacatatcaatggagcaagtcacagtcgtc

SEQ ID NO: 659900 - DNA, 97 bp, Homo sapiens
acttgcacgaaagctttcctaggccaaaaagaggctttcatctgagtggcacagtaactgagctggccactgcctctgaaccagcagtgacttataa

SEQ ID NO: 659901 - DNA, 100 bp, Homo sapiens
tgacagcgaagcggagcaagagggaccccagaaactgatccgcaaagtgtctacctcggggcagatccggaccaaggatatgacagcgcgtgatctgcta

SEQ ID NO: 659902 - DNA, 83 bp, Homo sapiens
ttcagtggaccactctgcaatgaccatttattgctaaacatgggtgcatttttggataaacccaaaactgaaaaacataatgc

SEQ ID NO: 659903 - DNA, 100 bp, Homo sapiens
ctgagactcctgctcagtgtagcattaagactctgctaactggaatggcttattgtgcaagaaagtacacctggtcgggtcctggggctcatctctagca

SEQ ID NO: 659904 - DNA, 46 bp, Homo sapiens
attcatgagaatgaaactgccgctggagtgcagtggcgagatctcg

SEQ ID NO: 659905 - DNA, 75 bp, Homo sapiens
tctgaagagctatggtgaaacaccactgaagcattgccaagaacacagatatgtagaactcttcttgaattctac

SEQ ID NO: 659906 - DNA, 100 bp, Homo sapiens
tgtgcctccaggttatatctcacagatgccttcaattaagttgcagagttctgatggagagatatttgaagttgatgtggaaattgccaaacaatctgtg

SEQ ID NO: 659907 - DNA, 100 bp, Homo sapiens
gtcaggaccgcgacggcagcagagcagggcatggtctagtggcccagtcaggacgcggaaacactccctggaggttctgacccactccctctcagcctcc

SEQ ID NO: 659908 - DNA, 100 bp, Homo sapiens
caagcagcagctgccggagcccgagtggatcggggacggagagaacacgagcccatcagacacagcaggatgccaatgcctcttccctcttagacatcta

SEQ ID NO: 659909 - DNA, 100 bp, Homo sapiens
gcagaagtcgcgtgtctaggtgagtcgcggtgggtcctcgcttgcagttcagcgaccacgacagccgctcaggaagcaatcttgcatgcgtctggaaatg

SEQ ID NO: 659910 - DNA, 96 bp, Homo sapiens
ccggtgttggggtgtccgagttgccgccggagaggagtggcctcgcccgcttgacatatggcatccaggagaaagatgtcttgccccttctccaga

SEQ ID NO: 659911 - DNA, 98 bp, Homo sapiens
ggaaagcatgatgggagccacgaagggactgtgtattttaaatgcagatgagactgatcgtggggttgaccaacaagatggaaagaaccacgcaggat

SEQ ID NO: 659912 - DNA, 51 bp, Homo sapiens
cagcctgcggagcctgtggggcaggtgccagatgtgacatccagatgaccc

SEQ ID NO: 659913 - DNA, 83 bp, Homo sapiens
cccgaggcccggcgaggagaacggcaaagattagtgatgatgaaccaggttatgaccttgatttattttgcatacctaatcat

SEQ ID NO: 659914 - DNA, 98 bp, Homo sapiens
accgccccctgggatccgcaggttccctacacggtctcctgggtcaagctactgtgtgaagacattcacaggacacagagaatgggtacgtatggtac

SEQ ID NO: 659915 - DNA, 51 bp, Homo sapiens
ggaggaaaacaacttcgagggcagaccgttggacataccagatggtcgaag

SEQ ID NO: 659916 - DNA, 92 bp, Homo sapiens
gatcgggagcgcaaggtcgccctcaaggccatgatcaaaacgacctgaaggagaagaaggagaaggtggaggagaaggcaagccggaaagag

SEQ ID NO: 659917 - DNA, 106 bp, Homo sapiens
cagaaggccctgtaccgccggcttgccacagtccacatgtcccggaaccccaccaacaactgaacgctttggtcaggctgctacaatggaaggaattggggcaatt

SEQ ID NO: 659918 - DNA, 75 bp, Homo sapiens
atcagcggaagaccaaagaggatgagaaggacgacaagcccatccgaggcaggcaatccatggaccttgtggaac

SEQ ID NO: 659919 - DNA, 50 bp, Homo sapiens
tggtactctaccttctggccaatgccgcttacaaacacgcagatggcaag

SEQ ID NO: 659920 - DNA, 128 bp, Homo sapiens
aaggaacagtgccaagttagatgccgattacccacttcgagtcctttattgtggagaaaaatccagttacactcttaaaggaattgtcagtgataaagtctcgatatcaaactttgtatgcccgcttt

SEQ ID NO: 659921 - DNA, 116 bp, Homo sapiens
cagcgccagcggccgagcgggcggcttcctggcctgggcgctccggtggcggcggagggaatcccgctggctccgtggtgatggaacgcatccggatggacattcgcaaagtggac

SEQ ID NO: 659922 - DNA, 120 bp, Homo sapiens
atgttgcaggcccacagctgcctacagaaccgtcccaaaatatggcaaagaaacctattctgagggtaagaaggtggatggctctgtaaatgcctatgccataaatgtctctcagaagag

SEQ ID NO: 659923 - DNA, 100 bp, Homo sapiens
attacacatggtgtggatgtgacagcccaagatactaccggtgtcatggagaaactccagctgggcccagagattctgcagcgggaaaatccaaggctta

SEQ ID NO: 659924 - DNA, 82 bp, Homo sapiens
cttcggtggactccttcggcagtccacccaccgccgccgcctcccaggattttcaaaatggctgcagctcctcaagcaccgg

SEQ ID NO: 659925 - DNA, 100 bp, Homo sapiens
ccgtgattgcgttacaagctttgtctccttcgacttggagtctttgtccaggacgctgtccagaccaaaacgaagaagacgttagccaaacccaatataa

SEQ ID NO: 659926 - DNA, 89 bp, Homo sapiens
agcaaggagaggggccatggacattggaaggggaagccccacatcagagctgttcaggtcgagtctatgctgtcttgtcaaagagagaa

SEQ ID NO: 659927 - DNA, 50 bp, Homo sapiens
gcaacactggccaagaagaggaaaggtttgggccccatggtatccctgtg

SEQ ID NO: 659928 - DNA, 75 bp, Homo sapiens
ggagcccggaacgattccttcgcggaacaattgaggaagctgcggatctgtcctccctgaaaagcatgttggacc

SEQ ID NO: 659929 - DNA, 100 bp, Homo sapiens
agaagaactgaagataggcaacaagatgatgagggcgcggcagtatccttggggcactgtgcaggtgtttgtggagaaggtgctgcagagactttttcct

SEQ ID NO: 659930 - DNA, 74 bp, Homo sapiens
atcagaagtacagttttatctagccacatcttggagttatcaggaactgttgccgttattacatcagatgggag

SEQ ID NO: 659931 - DNA, 90 bp, Homo sapiens
gggagagcgcgcctagccggctcgcgaggtttggacagaggagccaaaggccaaatttccactttcagcagttttatttcagctgttagc

SEQ ID NO: 659932 - DNA, 80 bp, Homo sapiens
cgggctcctacctcctggacggcaagccgctcagcaagctccacatccccgtggttatggaaacaaaggacatgctttac

SEQ ID NO: 659933 - DNA, 100 bp, Homo sapiens
actagctcatctgtagagactgatttgcaacccttccgggaagccatagctctgcatggtactggtggagaatggaacaaaagctgggcacagccttctc

SEQ ID NO: 659934 - DNA, 98 bp, Homo sapiens
aagccattcagtcctcaatctccttttccttggctacccgtgaccaagaatatggcccaggtgaccaaagccctggacaaggccctgagcaccatgga

SEQ ID NO: 659935 - DNA, 100 bp, Homo sapiens
gcaagtgatgatggaatcttggccaaaatcgtgagaggagccttcaggggaagtagaggtggccgaggttggggcacacgaggaaatcgtagtcggggaa

SEQ ID NO: 659936 - DNA, 74 bp, Homo sapiens
ttgattggaatgttctccctgcagcagtcagcccaaaggaagtgtgccatgcggagctgaatgccatcatgaac

SEQ ID NO: 659937 - DNA, 101 bp, Homo sapiens
tgacatatttttggacctgaaacagaaattctggaacacctatatggtattgttgcagcatctggcagtgagactgaggatgaggacagcatggacattcc

SEQ ID NO: 659938 - DNA, 100 bp, Homo sapiens
gttgcagaatcatgtattccctctcttcagcagtgaactaggctacatgagagcaaggactattgcagatatcatccgaacatgtttgggacccaagtcc

SEQ ID NO: 659939 - DNA, 100 bp, Homo sapiens
cctctgtctgcctgtgtccctgaccatggctccctgcagtaccctttaacggtggtcgtcggttttctgagggtacttcagctgacagagagattcagag

SEQ ID NO: 659940 - DNA, 76 bp, Homo sapiens
tttgatttgtttattgagtgccagcccggttcccggacaggactcctcctattttgaggacttctccaacatctcc

SEQ ID NO: 659941 - DNA, 50 bp, Homo sapiens
ctggcacttatgtcctccctggcttccacagcgcggcacctgtacctccg

SEQ ID NO: 659942 - DNA, 83 bp, Homo sapiens
cgctgctcgagctgctgctggattgaactcagagaagccgggttttcggctttgtgagaaaccttaccatcaaacacgatggc

SEQ ID NO: 659943 - DNA, 51 bp, Homo sapiens
tggcaaggcccagcttgtgaaaatgtcaagtctctatttatgaggtggaca

SEQ ID NO: 659944 - DNA, 74 bp, Homo sapiens
cgtggtccatgccatggtgatcctgctgacgctgggcccgcctcgaggaggatttgatgaagatgttaaagcga

SEQ ID NO: 659945 - DNA, 82 bp, Homo sapiens
ctggtgcagccccgggccaggccgcggccggggcaggagcgcaggaagttggtgaaccatctaaagaagagaaggctgtggc

SEQ ID NO: 659946 - DNA, 74 bp, Homo sapiens
agaaaatgaaggaaagcgaggctgacagcgagataacttctttgtggatgattatgctagatttactatcttgg

SEQ ID NO: 659947 - DNA, 90 bp, Homo sapiens
cttcatagttcaaattcacattcttctaatccaagcaataacccaagcaaaacttcagatgcatgtaaggcaaacattggtgggcaccga

SEQ ID NO: 659948 - DNA, 80 bp, Homo sapiens
cggcgtgatgcgatcatgtcacactgcagtggagatggctttggaagattcagaacagaagcacaatcttttacattcaa

SEQ ID NO: 659949 - DNA, 75 bp, Homo sapiens
tgaggccgcggagcgccagctcaatgaaatcatgaaagcatcattgcttactgatgaagaagatgtagatatggc

SEQ ID NO: 659950 - DNA, 74 bp, Homo sapiens
atgatcctgaagcctcaaagtttcatgattattcagagctgggagagcttcccccacgatctcctttagaacca

SEQ ID NO: 659951 - DNA, 102 bp, Homo sapiens
ggtgccggccccgacaggacggtgaggtgtgatgaatgcagactctgctaccattttggctgtttggatcctcctttgaaaaagtctcctaaacagacaggc

SEQ ID NO: 659952 - DNA, 82 bp, Homo sapiens
cagtcctcatcctggatgaagccaccagcgctttggatgccgagagcgagtatctgggtgtccgcaatgttgccagtgtctg

SEQ ID NO: 659953 - DNA, 73 bp, Homo sapiens
cgtctccagccttggtctgagtggactgtcctgcaggcgcctgatgatagagaagattgctgcccatctcgcg

SEQ ID NO: 659954 - DNA, 82 bp, Homo sapiens
gagaccatggagaccctcacggagctgggcgacgagctgaccctgggagacatcgacgctgtttgcagacaaggtcccaaag

SEQ ID NO: 659955 - DNA, 75 bp, Homo sapiens
gaaaaatttcagaaccatcacaaactgggtattttactggatgaagcctcaggtgtaaacaagaatcaacagcct

SEQ ID NO: 659956 - DNA, 100 bp, Homo sapiens
ctggaccaccgggcgctggtctgctcccagccgaaattccaacagaatgggtttcctgaaacggatttgcaggaattcctgaaggaatgcagtagcaaag

SEQ ID NO: 659957 - DNA, 82 bp, Homo sapiens
tctgtcgtggcaatgttttgaaactggcaaaatcagtgacctagagtcccgcagggatgtgaagagagaagaaggagaggcc

SEQ ID NO: 659958 - DNA, 82 bp, Homo sapiens
caaattttacggatcagaaggaattcagtctccaggacattgaggtctcctctgagcctccggcctccataagacccaaaac

SEQ ID NO: 659959 - DNA, 80 bp, Homo sapiens
gttccaccaggccgggaagcccatcggagtttatgtggccgaggcagacaagtggaattaggccttgctgcaggggactt

SEQ ID NO: 659960 - DNA, 95 bp, Homo sapiens
aaagagggactgccataacattcccaaaggatgtaaatgaagaccctggagaagatgtggccctcctctctgttagttttgaggacactgaagcc

SEQ ID NO: 659961 - DNA, 80 bp, Homo sapiens
cgggacgttgagcacaacgtatctcctggctacaatttcagcatccggtgaaagacagagatcacatttcaactagattc

SEQ ID NO: 659962 - DNA, 50 bp, Homo sapiens
tttgtcagtcctgttcgaaaccaagcatctgcaaacatagagaattctgg

SEQ ID NO: 659963 - DNA, 102 bp, Homo sapiens
acattccaggccacagtcctgggaagtcagatgggattgaaagtggaatgcagtagccctctgggcctgggatattgtggttgataactgtgccatctgcag

SEQ ID NO: 659964 - DNA, 100 bp, Homo sapiens
cgcgaagtgaacacggaaggtacctgcaggatccaattgtgtccattgatctctcagagtggctgaggataataggacttatggagcaaggatgactgac

SEQ ID NO: 659965 - DNA, 50 bp, Homo sapiens
ccccgcgccgcgccggacccgagggggagtttgttgcttgtctcctgtcc

SEQ ID NO: 659966 - DNA, 100 bp, Homo sapiens
atcatctgcaacaacaagctccgagggcagccattctatgctgtggaaaagaaagcatactgcgagccctgctacattgactaccgaccagactcccgga

SEQ ID NO: 659967 - DNA, 83 bp, Homo sapiens
cgacaagccgctggcagccgcggatctcaccgccgctcaggtttgaaagatgatgacagtggggaccatgatcagaatgaaga

SEQ ID NO: 659968 - DNA, 75 bp, Homo sapiens
gaccagtggtcgagcatccataggatttctccccagtgtgaaaggttaatgactccagagagtaagatcagattc

SEQ ID NO: 659969 - DNA, 97 bp, Homo sapiens
caaaaatcagaggcaactaacactgcggcttcctgaggtttaacaatgcatgcatcaattcttgcatatatgtttaatttggttgaagaaggaaaaa

SEQ ID NO: 659970 - DNA, 74 bp, Homo sapiens
cctcttcaacacctggacaccttgttagatggaacctacaagcaggcctggttgcagtatgcctgaaatttggg

SEQ ID NO: 659971 - DNA, 100 bp, Homo sapiens
tgtgactccctggccaagatccccaaacgggtggtggagacactgccacttgctgtgccaaatggaacacggaggataaagtcagccatgtgagcactgg

SEQ ID NO: 659972 - DNA, 101 bp, Homo sapiens
ggaaggaggaagcgcagtgcgttcggctccgcgcccgccgcgccgggagcagcaccgcggggccagtgaggatgaggatgatgaccttcagtatgccgatc

SEQ ID NO: 659973 - DNA, 100 bp, Homo sapiens
tccagtgtgctgagttgagacatcagcaagtgctgggcctggaatgtcagaagcagcagcaagttgtcctcgaagaaggtacaattgcttttaaaaattg

SEQ ID NO: 659974 - DNA, 99 bp, Homo sapiens
ccagcacccactctctgggggcaggtgggcccggtgacagcccaccttgggacaccttgactccaagcccagcagtaagtccaacatgattcggggccg

SEQ ID NO: 659975 - DNA, 83 bp, Homo sapiens
gtgaaaaataccacgacaaaaccaccctatgctccatgtgcatccctcttgaagcttcgcactctgttgaagaggacactcat

SEQ ID NO: 659976 - DNA, 100 bp, Homo sapiens
gtggtactcagcaagctcgagttaaagttggatgtgctggaacagttttctgagtttaaccagtaatgccattcagttgccaatctcaagcaaagcaaac

SEQ ID NO: 659977 - DNA, 100 bp, Homo sapiens
ctagacctttcagccgctgccgaaatggagttaacagagcagtttcataaagttgaatctcaactgaataagctaaatcatctcctcactgatattcttg

SEQ ID NO: 659978 - DNA, 100 bp, Homo sapiens
aataggacctgagagtatattgggctaaggaggagaggtttcgacacagccccaactgctggtacctgagaaactggactatccacacctggattaggca

SEQ ID NO: 659979 - DNA, 98 bp, Homo sapiens
tcttgcctggtgctgggcaccgagaacaaggagctcctggtgcttgaccccgaggccttcaccattttagccaagtctcacaccattttgctggtaca

SEQ ID NO: 659980 - DNA, 75 bp, Homo sapiens
actggtgccacctgaccagcaggacaaagtccagtcttgtttcagtcccgatggagcccggctcctgaccacgga

SEQ ID NO: 659981 - DNA, 100 bp, Homo sapiens
ctggagaccacaagcttgatgaagtttccattagagcaatagtaaaattcagaagtactctccatctgaatctgcaaaagtatatgataaagcgataaac

SEQ ID NO: 659982 - DNA, 100 bp, Homo sapiens
ctgtgggcagtgaatgcgttgggaacaatatggaaaactgggagctgccttggaatctacagggccggccgggcccctcagatgagagctgcacccaggc

SEQ ID NO: 659983 - DNA, 51 bp, Homo sapiens
ggaaaatgcgctcgggctggaccagcaggaaatctgcatgctgccagctcc

SEQ ID NO: 659984 - DNA, 75 bp, Homo sapiens
tggctgcccaggctcgcctcgactccaaatggttgaaaacagatatacagggtgataaaagaaaatgtggctgaa

SEQ ID NO: 659985 - DNA, 50 bp, Homo sapiens
tgtcttccacagatgtgtcaccaaaccagtgcacagccagagaacaacac

SEQ ID NO: 659986 - DNA, 96 bp, Homo sapiens
ggcttcaaccccgctgatgtggaggctggaagcagacacctctcactcccgacaggacatgctggagtctggcctcggccaccagaaacgcttagc

SEQ ID NO: 659987 - DNA, 75 bp, Homo sapiens
gaggagagaactcagcgacactacctgggccatacagactgtgtgaaatgctacttggtgagttggaaaaagacc

SEQ ID NO: 659988 - DNA, 88 bp, Homo sapiens
attgggcacagatggcatgtcaccgatgtctggtgtatctgggggatttgtcctggcatcctcgctacaacctcattgttgtgggccg

SEQ ID NO: 659989 - DNA, 50 bp, Homo sapiens
agcagaggcagagcgcctcaaaaccgaagatggagtctcgctttgtcgcc

SEQ ID NO: 659990 - DNA, 75 bp, Homo sapiens
cagtgagaggcccaagtccctagattttggtatgacgcgagatatctatgagacagactattaccggaaaggagg

SEQ ID NO: 659991 - DNA, 123 bp, Homo sapiens
aagagggcagagccgtgcatggggctgctccccaggacctgagcaggaacctggagttttcaggtggtgcaggaggcaaaggtgtctggggtacacctggacaggtgtatgatgtggaggagg

SEQ ID NO: 659992 - DNA, 128 bp, Homo sapiens
attgaagctatgcagtatttctttggcatcactgcagctagtaatttgccttctggatttgaaagcaagttgaatacattggtgcagaagcttcatgacttccttgcacactcatcagaagaatctga

SEQ ID NO: 659993 - DNA, 76 bp, Homo sapiens
cttactttgtcttggtatactacatggcaaaatgggaaaggttccacttccaaacatgagttccaggccgagacaa

SEQ ID NO: 659994 - DNA, 98 bp, Homo sapiens
cccaagaagaccattcagatgggatctttccggatcaatccagatggcagccagtcagtggtggaggtatgtgaaacaagaagttctgggtcctttca

SEQ ID NO: 659995 - DNA, 75 bp, Homo sapiens
tgaatttcccatatgatgatatgatgaacaacatgggtggtgatgaggatgtagatttaccagaagtagatggag

SEQ ID NO: 659996 - DNA, 82 bp, Homo sapiens
accggatcctggagaacatctcgctgtcggtgaagaagcctcccgcgacgatgcccctcaacgttagcttcaccaacaggaa

SEQ ID NO: 659997 - DNA, 90 bp, Homo sapiens
gctgttccaccaactagtcccgttgcaggtgaaatgcaaagactgtgaggagaggtcacgagaagagaatgccttctagatgcaaaatca

SEQ ID NO: 659998 - DNA, 129 bp, Homo sapiens
caaatacgatgttccccatgacaagattgggaaaatattcaagaagtgtaaaaaggggttgcaaaagcttctcatttcagagagatgccaggatcctaagtgcctgccaaacttaccaattctaaggaa

SEQ ID NO: 659999 - DNA, 75 bp, Homo sapiens
accaaaagcaagttcatgggcatgtccgtgggggtctctatgataggggaaggatcacagaagaactgcagcttc

SEQ ID NO: 660000 - DNA, 100 bp, Homo sapiens
ttcaactgagaacttggagcttcggaagaaggtagaggttctagagaacactaatagggcaagttaaagtcttcagagccctgtatacgtttgaacccag

SEQ ID NO: 660001 - DNA, 100 bp, Homo sapiens
cccgagatcaccaagatgctgggcgccgagtggagcaagctgcagccaacggaaaagcagcttggaatgcactccctccacctccaaccagagctcccca

SEQ ID NO: 660002 - DNA, 100 bp, Homo sapiens
gattccaagtaactcttatttgatatttaacaccgtgcccgatatgcctctcaccaatgcccagctgcacctgtctcggaagaagagcagtgactccaag

SEQ ID NO: 660003 - DNA, 90 bp, Homo sapiens
cctcggagcgcagcacccggcggacaagcggcgggacgccaggacgcggcgagcaaggaattgtcttagaagaaagaaggcaagccacca

SEQ ID NO: 660004 - DNA, 100 bp, Homo sapiens
aagaaagacaagtcaggcatggctctcacccaggttatttgggatggacctgaataaaatgacccacagtaggttggcagcgcttcgagtaacaaaacct

SEQ ID NO: 660005 - DNA, 75 bp, Homo sapiens
tcaagttcaaggagtctcttgttaatgtcttgtccaataagcatgtggctcctgatcatcttttgcaaatctgcc

SEQ ID NO: 660006 - DNA, 96 bp, Homo sapiens
gcaggatttcaaaaccgacctgaggtttcagagcgcagccatcggtgcgctgcagggtggcattgtgtgtcccagagtgccggagcgagtcccaga

SEQ ID NO: 660007 - DNA, 90 bp, Homo sapiens
gcatctgcggccatggcggcgactactgccaaccccgatggaacagattaaacgtgcaaaccgcctttatactaatgactccatcttcct

SEQ ID NO: 660008 - DNA, 75 bp, Homo sapiens
aacagctacagccaattttgctaactttgcacatttcaacagtcatgcaggccctcgggaccaaggatcacgtca

SEQ ID NO: 660009 - DNA, 75 bp, Homo sapiens
cggccacagagagattggtgtttttgtgaggcagtgagacctaagaatggcaaacatcagcagatctcaggcaga

SEQ ID NO: 660010 - DNA, 51 bp, Homo sapiens
ttctggacccaactgtggaatatgtgaagccttagattgtaagcaaaagaa

SEQ ID NO: 660011 - DNA, 100 bp, Homo sapiens
caggactcagaggccgccatcaaccgccagatcaacctggagctctacgcctcctacgtttacctgtccatggcaacgcggtaaaaatattgcttcggtg

SEQ ID NO: 660012 - DNA, 101 bp, Homo sapiens
cccgaaggccgacacgctggccctgaggcaacggctcatcaggcagtacgccccgaggtgctccgtctgctctgagcccatcatgcctgagcctggccgag

SEQ ID NO: 660013 - DNA, 97 bp, Homo sapiens
cgggttattcgagtgaccgagaccgcggccgggaccgagggcctatgaaaggaggttccctacatgtcctttgattccgatgttcgtgggcagtgac

SEQ ID NO: 660014 - DNA, 98 bp, Homo sapiens
aagagatggatattgaaatggacagtggagatgaagcctaagaatatgatcagccgtgttgccgcccgctgtgctatgagcagtcagagcgccgtctc

SEQ ID NO: 660015 - DNA, 100 bp, Homo sapiens
aagaattgctcactggaaggatcataggtggcactcatgtctcactgccccactcaggagccaaaaacctgtatatcatctccgtgaaggggatcaaggg

SEQ ID NO: 660016 - DNA, 83 bp, Homo sapiens
tctctgtgctgaaatcagtcccactttctgattaaaaggagcccaagccccatctcatcctagcacaccctcctccactgtcc

SEQ ID NO: 660017 - DNA, 75 bp, Homo sapiens
cctctacctcctgcgaggcctcccgggctccgggaaaactacactggccagatggagtttcactcttgtcaccca

SEQ ID NO: 660018 - DNA, 100 bp, Homo sapiens
aatgggtacaggtcacattcttggagctcaaggtgacaggccagagcccaggtccccaggacagtgcagtgtaaacaggaacatcgataagtagtgtaaa

SEQ ID NO: 660019 - DNA, 82 bp, Homo sapiens
ctccgggggacccgcggtccccaccgtgcagcggggcatcatcaagatgccacgccgcaatgaagagcttcttacagtgaaa

SEQ ID NO: 660020 - DNA, 100 bp, Homo sapiens
tcgtcctcctgggcgcgacgaccctagtgctcgtcgccgtggcgccatgggtgttgtccgcagccgcagcctgtggacatctctacagcaatgagtgaac

SEQ ID NO: 660021 - DNA, 102 bp, Homo sapiens
atggaactgctgaaaaccctttcctggacaaccctgatgccttctactactttctgtcggaaaaggtaacagaagatggaactcgaaatcccaatgaaaaac

SEQ ID NO: 660022 - DNA, 100 bp, Homo sapiens
cagctgccgaacgacgtggtcctacagaggtgtctgcacttccatgtacaacaaacgctccgggaaatggaaagccagttggcagcccacatgtggttac

SEQ ID NO: 660023 - DNA, 151 bp, Homo sapiens
cacaaggtccccatgctggtcacctctgaggatgatgccgtcactgctgcccagcagtttgctcagtcacccaaaaatggctgcaagcaactgacctcactagagaagtgtaccagcatttagcccactatgtacccaaaatctactgcag

SEQ ID NO: 660024 - DNA, 75 bp, Homo sapiens
gtccagcctgtggttttacgatatccaaataaactgaatggctgttgatggtgggtgtggggacactggagactg

SEQ ID NO: 660025 - DNA, 90 bp, Homo sapiens
gctgggttcgttttattcagcggcagtggtgctttcccgaatctcagaatgccgtaagaatgattgatgttggctgatattggagtgctc

SEQ ID NO: 660026 - DNA, 75 bp, Homo sapiens
tgtgtgcctggaaaggaattgttttggcctaggatcatccaggaggtggacatctataccgtcaaggtggaagac

SEQ ID NO: 660027 - DNA, 74 bp, Homo sapiens
aatccctccactctcttcaactgcaactctggggtagtaaaaagaatcattcctgcagtagcttccacaaatgc

SEQ ID NO: 660028 - DNA, 74 bp, Homo sapiens
ctctgatgtcaatcttgagggctagccttatttagtgtctctgacaaaaccggccttgtggaatttgcaagaaa

SEQ ID NO: 660029 - DNA, 75 bp, Homo sapiens
aattatgggagcgcatttccccaggtgagaatttctaatttgatgcgagtattaggaacagaagctgttcaagac

SEQ ID NO: 660030 - DNA, 90 bp, Homo sapiens
ccgccgcgctgcgcaagctcgccaaacaggcggaggagcccagaggctcttgtcaggatggtgaagctgttcatcggaaacctgccccgg

SEQ ID NO: 660031 - DNA, 100 bp, Homo sapiens
gtcatgtgaggacgtgcttcctgcttcatagataagagctgataccccaatgtccttctttgactttgtggttgatcctcattctttcccccgtacagtg

SEQ ID NO: 660032 - DNA, 101 bp, Homo sapiens
ccggccggtgccagcacctttcggcttctgagacggcggcagcagcggcattcagacagggaagctgcagctttatgacttggcttcagggaatctgctgg

SEQ ID NO: 660033 - DNA, 90 bp, Homo sapiens
gctccttctcctggagacgcaactcaagatgcccgtgctgaagcagctgggccccgcgcagcccaagaagcggcctgatcgcggcgccct

SEQ ID NO: 660034 - DNA, 100 bp, Homo sapiens
gtcaggactaagagaagtcacaaaacagcagatttcccaagagcagcggaaaatgatccagtcacagggccagatgcagatggctggagatgggtgcaga

SEQ ID NO: 660035 - DNA, 80 bp, Homo sapiens
acccagagtgcagagccgcctttccagcatgcaggggctgctcagtgtattgaaaatgtgtcccgacagaattgtccaat

SEQ ID NO: 660036 - DNA, 82 bp, Homo sapiens
ctcctccctcttctcccgactatttggcaagaagcagatgcgcattttgatggggggatatgagactttctactcggaatat

SEQ ID NO: 660037 - DNA, 82 bp, Homo sapiens
gcaacagctctgccggctggaagatgtgacaagccgaggcggtgagccgggcaggaggaaggagcctccctcagggtttcgg

SEQ ID NO: 660038 - DNA, 75 bp, Homo sapiens
tgaaccaccaaaagtccattatgaaactggcaatgaatcgctccctggctaatgtgattcttggaggctatggca

SEQ ID NO: 660039 - DNA, 101 bp, Homo sapiens
tgctgtcacttccaagttcaatattcctgacttaaagatttatccacctatcaatgtgctgccctcactatcacggttaatgaagtctgctattggagaag

SEQ ID NO: 660040 - DNA, 83 bp, Homo sapiens
agaagatcttcgagttcaaagagaccctcggaacggtgcttcaaggatgaccgcatcgtcttctggacttggatgttctccac

SEQ ID NO: 660041 - DNA, 100 bp, Homo sapiens
agcccagaaccactgcctacaaaccaccctctcctgaccctgaagaactgtgacgcaaacatgcagatctttgtgaagaccctcactggcaaaaccatca

SEQ ID NO: 660042 - DNA, 83 bp, Homo sapiens
cagctcaggaccaggcaccttctgtggaagtattggatgaacgaatatacctcatccattggaattggagtttttcattcagg

SEQ ID NO: 660043 - DNA, 100 bp, Homo sapiens
atgatgtatttgatcctgattctacccaagtacatatgatttcagctgcaatggcaggaagcagtcaattatagatttcttcaaaccagcttcaaaacaa

SEQ ID NO: 660044 - DNA, 75 bp, Homo sapiens
cccagaaagcagttaacagtgccaccggtgttccaactgtttaaaacgtgccaccttgcttagcgcccgtcaagg

SEQ ID NO: 660045 - DNA, 75 bp, Homo sapiens
aacgaacactggacacaggactggggaagactggatttcagcttaggagaagaaagccatcactgcccaggtaga

SEQ ID NO: 660046 - DNA, 90 bp, Homo sapiens
gcttctctgaggcggcgagagatggtcaggtctggagctcgaccgggccaggcacagaccccacaggctcctcggacactgggtccatca

SEQ ID NO: 660047 - DNA, 100 bp, Homo sapiens
gcagtgacacctcctggcttggcaagagaagactggaaaattataagagcactctctgagagaatgctctcatcactcagtcaaggctaatgcttttgga

SEQ ID NO: 660048 - DNA, 100 bp, Homo sapiens
ctgacactcgattcagctattggaaagtttttttaatgtggttggaacaactgagagtgcaaacccactgttagacctcttggttctgacagagtcacag

SEQ ID NO: 660049 - DNA, 50 bp, Homo sapiens
cctggctaaggaaaccctattacctccagagactctacaggggcaggtaa

SEQ ID NO: 660050 - DNA, 100 bp, Homo sapiens
agtatctatccaagtgaaaaaagtctggtaaaactgcataaacagcacatgattaagtaccggtacatcccgttcacacatgggaagagaaggtacagag

SEQ ID NO: 660051 - DNA, 100 bp, Homo sapiens
ccaaaaatgctcaacagaagaagagcttgagtttggggccttctgcagctgaaatcaatcaagggatcactgagattctgatgaacagaccttctgcccg

SEQ ID NO: 660052 - DNA, 82 bp, Homo sapiens
gcgcccgaaggccgacacgctggccctgaggcaacggctcatcaggatacatcattcactctttggggacgtgaagaagctc

SEQ ID NO: 660053 - DNA, 100 bp, Homo sapiens
aacattgaccgtattacaaagctgctctttggcgtaaattgcaatcgattagggatcgtttctcagaatcaagttagaagtgagagttcagataagtgag

SEQ ID NO: 660054 - DNA, 100 bp, Homo sapiens
cagactacatggcatctaccatagggctgccgggccgcaagtacagccctgggtacaacaccgaggtgggagacaagtggatctggctgaagtgaacggg

SEQ ID NO: 660055 - DNA, 83 bp, Homo sapiens
ctggactccgtttcctgccttgctctttggaccacattgtcaattcacaccgagcagcccgacggccatggaggctgaagaga

SEQ ID NO: 660056 - DNA, 75 bp, Homo sapiens
ccagtgatgtgtcagccatcgaaaatccttcagccctgccagggacctgcctgacagcagcctgatccagggcgc

SEQ ID NO: 660057 - DNA, 100 bp, Homo sapiens
ctcgatgtgcaagtattccagacattatggaacaacttcagttcattggggttaaggagatctacagaccagtcactcgcagatatggccagtacactat

SEQ ID NO: 660058 - DNA, 130 bp, Homo sapiens
cttcgtcaaagtctacccctcctgtcggggaggcaaggtggttttggaccagacaggcgtgtctaattgcaaccagtgtggcagagagtctaagcttttgtcaaaattttatgagctggagttaaatatc

SEQ ID NO: 660059 - DNA, 100 bp, Homo sapiens
tacaccaaggtctcagcctatctcaactggatctacaatgtctggaaggactccaacctgtctgtgcacacagaaaacccggacctcactccctgcttcc

SEQ ID NO: 660060 - DNA, 95 bp, Homo sapiens
atggcttgaccctcagtgatctggatcgacacccagagcaactggatgatgctcgcaacaaagctgacaatcaagaaaaggcaatacttaatatt

SEQ ID NO: 660061 - DNA, 97 bp, Homo sapiens
cggaggcgccggcggagcccgaccacgacggccccagggaggatgacgaacccaacctggtgcccggcccgcaggctacagaagaagtttccaaaaa

SEQ ID NO: 660062 - DNA, 83 bp, Homo sapiens
ggctccggctggtctgtggtgaggtgtgggcccatcgctggatggatctgtcagaacacggctttgggctggccctgctcaac

SEQ ID NO: 660063 - DNA, 75 bp, Homo sapiens
gatctgaagacctattttactgataagaaaacacatctttacacactaaagcctggcagagagcaggtgtgtgat

SEQ ID NO: 660064 - DNA, 83 bp, Homo sapiens
tcggcggagggaccaaggtggagatcaaactttcctgctctacgaaacgcactcttttgccttgaagcggcattggacagtgg

SEQ ID NO: 660065 - DNA, 75 bp, Homo sapiens
accatgagtggttccatgatgggaagtgacatgaccccatatcatgtgaacctcctcctggctggctatgatgag

SEQ ID NO: 660066 - DNA, 100 bp, Homo sapiens
tctcctccacgccggctctgccaagaatatctggaaacgggcattgcctgcgaggctggccgagaaatcccgtgtcgtttatacgcaatgcagactggaa

SEQ ID NO: 660067 - DNA, 51 bp, Homo sapiens
gttcaaggttcggatgatggctgggatcccagatgcagtgactggttacta

SEQ ID NO: 660068 - DNA, 86 bp, Homo sapiens
gctcaccccgcggccgcaccttcccgccttctcagtgcctccggagccagcgtggtggccatagacaacaagatcgaacaggccat

SEQ ID NO: 660069 - DNA, 100 bp, Homo sapiens
ggcgcctgttctcgggctgtttggcggggtttggatccagctcgagtcaacgtccctgtcattggtggccatgctgggaagaccatcatccccctgatct

SEQ ID NO: 660070 - DNA, 83 bp, Homo sapiens
tgagcgacgtggctattgtgaaggagggttggctgcacaaacgaggcaatactgaacactgcgcagcttgcagaggtctcctg

SEQ ID NO: 660071 - DNA, 83 bp, Homo sapiens
tctggacatgcatagtggcgcccagtcaggacccatgcacgggctgaccccgcactacatctacccaccagccatcgtgcagc

SEQ ID NO: 660072 - DNA, 100 bp, Homo sapiens
agcagccattgccaaaactcattgacttctcagcccagaggcatttcatccttcatgaagccattcaggattttgaattgcatatgagtgcttggctctt

SEQ ID NO: 660073 - DNA, 82 bp, Homo sapiens
agagcaggagcccggcaccccccgccgacaaggaggatataacgcttgcatacatcagtgctttgagaggaggacaaaaggt

SEQ ID NO: 660074 - DNA, 74 bp, Homo sapiens
aagtgaacttttcgaggcatttgacttgtttgatgttcgtgactttggaaagggttttggccaaattgggcgag

SEQ ID NO: 660075 - DNA, 118 bp, Homo sapiens
gaagcgtctccgttgggtccggccgctctgcgggactctgaggaaaagctcgcaccaggtgtcgtgaaaactacccctaaaagccaaaatgggaaaggaaaagactcatatcaacatt

SEQ ID NO: 660076 - DNA, 100 bp, Homo sapiens
cgccgccctctcgtcccactttccaggctacaagaattagttgatcgagtgctggaacgttttcaggcatctggactaatagtgaaagagtggaatagtg

SEQ ID NO: 660077 - DNA, 82 bp, Homo sapiens
cgagtttccgatttaaagctgagctgcgaggaaaatggcggcgggaggtgcacattcaggttcccgagcacaaacatcaaga

SEQ ID NO: 660078 - DNA, 100 bp, Homo sapiens
tgtgtaagatctgcagtgagcaaagagaggagatggccacatgaacacagacacgcagggagaaggcagccgtgtgaaggagtcggagatcagagtgagg

SEQ ID NO: 660079 - DNA, 98 bp, Homo sapiens
tttgtcccggcactggctcttcagtcccttcaagagagaaaggccttgggaaaacaactgggaagaagttatgttataaaggttctacgttccatcgt

SEQ ID NO: 660080 - DNA, 50 bp, Homo sapiens
attggaccctcctcccaactgtaggaaacttggatttaactggccagaag

SEQ ID NO: 660081 - DNA, 100 bp, Homo sapiens
agagagcattttactactgagctgcaaaggaatagccaggccagaagaaggaaggcctgtggtgagtgggacaggaaatgacatcaccaccccaccgaac

SEQ ID NO: 660082 - DNA, 76 bp, Homo sapiens
ggcgcgggaggtgttcgagaacgaccccgagacgtgtggacgaatgtggaacctcgctctgtggctgtgttccctt

SEQ ID NO: 660083 - DNA, 100 bp, Homo sapiens
ggaagggcatgagccgagcttgaggaatccgtgctccaaactctacactcaagcttctccagcagcgccagcactgtgtccaccactgcacccagctctg

SEQ ID NO: 660084 - DNA, 75 bp, Homo sapiens
ctggctccctcgcttggaacaggagccacagctgccgcgtgggatgatgagaaacttgcccaggccaaagaagag

SEQ ID NO: 660085 - DNA, 98 bp, Homo sapiens
ctgcacagttgcaccactgagaaggacagtgacccaggaggctctcacgtggagtccccagaacagcatcaactcctcacgatgctcctgacggtggt

SEQ ID NO: 660086 - DNA, 74 bp, Homo sapiens
cgttggttcacagggaagtcgcctggaaaaaccaatagtgaagatctgctaccaggaagtgtcccagtgtttcg

SEQ ID NO: 660087 - DNA, 75 bp, Homo sapiens
cacttttggccaggggaccaagctggagatcaaacgcacagatagatcattatctaggacttgcaaataagaatg

SEQ ID NO: 660088 - DNA, 75 bp, Homo sapiens
tcctggtgtacggccaacgccaagtaggggattgcgttccctccagtcgcaggtctcctctgagcctccggcctc

SEQ ID NO: 660089 - DNA, 99 bp, Homo sapiens
gctctggacaagctggaatgcatccaagagaatccctcaacatgctgtacgaggatgtcgtccaggaaagattgtgcagatgactgaagcagaagttcg

SEQ ID NO: 660090 - DNA, 75 bp, Homo sapiens
cactggagtaccctgttcctggcagagtaacctggacaagctgtaccatggcctggaactcgccaagaagcagct

SEQ ID NO: 660091 - DNA, 51 bp, Homo sapiens
acatgacaaacgcaaagtggccaggaaacataccgatgtgttcaactggaa

SEQ ID NO: 660092 - DNA, 96 bp, Homo sapiens
agaagaatttgttcacataaacagattgtctgacagcaatgcaagcttcctccgtgctgccagagcaggcaacctggacaaagttgtggaatatct

SEQ ID NO: 660093 - DNA, 100 bp, Homo sapiens
ttggtgttggggattcctccttgaagcaaataatctccccaaagccatcgccgctgctcacacctttctactgaagcatcctgatgacgaaatgatgaag

SEQ ID NO: 660094 - DNA, 82 bp, Homo sapiens
aaacatgtatggaatgtttaagaaagtcaatgcacttttctgtagaaggtcagttggaattcagggcattgctatttattcc

SEQ ID NO: 660095 - DNA, 90 bp, Homo sapiens
gtgctctcctttgtgtctgccctggttgtctgctttccagaagcgcagcagctgcttgaaggttcaaaccttgtactactcagctgatca

SEQ ID NO: 660096 - DNA, 78 bp, Homo sapiens
tttccatcaaaaagtgattaagcagagaatggagaagaaggttgattccaggttctagtaaataccgcttgctgtgtt

SEQ ID NO: 660097 - DNA, 75 bp, Homo sapiens
ctccagatggcgtcttccgtgggcaacgtggccgacagcacaggtatggcctcacaagtcttggtctacccacca

SEQ ID NO: 660098 - DNA, 99 bp, Homo sapiens
aaaatgtgcaaatatgaagtaaatggggcaaaatcttaataagaagtgaatgtaggtcactcctggaagcaaggcggctctagctaatttatgtattgg

SEQ ID NO: 660099 - DNA, 102 bp, Homo sapiens
ccggcgctgagaggggctgcggccggagcgggcggctgagacaaaggcgacgatcatggaagggaagtggttgctgtgtatgttactggtgcttggaactgc

SEQ ID NO: 660100 - DNA, 96 bp, Homo sapiens
ctggacgctgactttgccctggaccctgacaaggaaagaccacagcaagattctttcattcgtctcctcctagcctgggggaccaggctcgaactg

SEQ ID NO: 660101 - DNA, 80 bp, Homo sapiens
gccgtcccgggcggcgtggacctcctcaccctgccgcagctgtgcttcccagctgtcggaaaaggtaacagaagatggaa

SEQ ID NO: 660102 - DNA, 50 bp, Homo sapiens
tgatgaattctttgatgccagagtgctgcatggctaaaggtgaaaactag

SEQ ID NO: 660103 - DNA, 75 bp, Homo sapiens
gcatcacctcctccaagaccgtgctggtctttctcaacctcatcttctggattatctttctcaaggaatagatct

SEQ ID NO: 660104 - DNA, 90 bp, Homo sapiens
gtggagggcctggtacaagggaatgtcacaagcacaagaccatgaaacgtatggtgcaatagccctacttttggtgggaaaaatatacag

SEQ ID NO: 660105 - DNA, 101 bp, Homo sapiens
gcagaaagttgatataggtggacttttttacagggttttctagtcttgaactactggctacgtggctaccaaatgcctaagggagttcgttcacagctgag

SEQ ID NO: 660106 - DNA, 82 bp, Homo sapiens
cagagtggagccatggctagaggctatgcccactggaagggccaagtgctgaattcagatgagctccaggagttgtacgaag

SEQ ID NO: 660107 - DNA, 75 bp, Homo sapiens
ttagggtcctttatatagaagggagactgctgaatgccatggtggcaaaactggggaaccgggaggacccactcc

SEQ ID NO: 660108 - DNA, 75 bp, Homo sapiens
ccgatccgccgcccgtccacacccgccgccagggctcttccgtgggcggcggcttcgcgggcttggagttcgcgc

SEQ ID NO: 660109 - DNA, 75 bp, Homo sapiens
caacctggagctctacgcctcctacgtttacctgtccatggtggtggaggtggatacagcagtcggagaacatct

SEQ ID NO: 660110 - DNA, 100 bp, Homo sapiens
agggagagagacagcgatcgagagagaccggagaggtggagagcgtggagattggtgaaagcgtgagaggggaagatgtctacatcatccagagcggctg

SEQ ID NO: 660111 - DNA, 74 bp, Homo sapiens
acgcgtcgaagcgcgggcggcagagagaagagagacccccaacccttagtgcttccttcagaacaatggctgaa

SEQ ID NO: 660112 - DNA, 75 bp, Homo sapiens
gcggaacatccccttccaggcccacagccgggagatccgagagctcttcagaaccacatgccctgggaagaacca

SEQ ID NO: 660113 - DNA, 98 bp, Homo sapiens
tagtgagggcctccataactgatccaggaagactccctgagaaccccaagatcccacatggagctggaaaggcagctcatcatgcagagtgaaatgag

SEQ ID NO: 660114 - DNA, 75 bp, Homo sapiens
ccaagcggagagagtcagcctctggttcagactgcagtaaccaggtgtccgcaatgttgccagtgtctgtctgca

SEQ ID NO: 660115 - DNA, 99 bp, Homo sapiens
ttggcttctttgagactgaaatggcagccctcgagcatgttccaaactcggttcgcttgtggaaagcagccgttgagctggaagaacctgaagatgcta

SEQ ID NO: 660116 - DNA, 74 bp, Homo sapiens
aaatgggggcctctccagggagtgctctgttcacggctccatcgctgttaggcaagtgtccagagaatggctgg

SEQ ID NO: 660117 - DNA, 82 bp, Homo sapiens
ccggcccggcggctgctgctgctgctgacgctgctgctgcccggcctcgggggggtgaagccagccagttttgacaaagtag

SEQ ID NO: 660118 - DNA, 100 bp, Homo sapiens
tgttctccaaataccagctcgacaaagatggggttgtcctctttaagaaggacgtagacaagtttggcaacgagatcacccagctggcccggcccctgcc

SEQ ID NO: 660119 - DNA, 90 bp, Homo sapiens
gcattcctgtgtatgtgggccgcaagattctgatagttggtggtggtgttgctgggcttgcttctgcaggcgcagcaaagtcgatgggtg

SEQ ID NO: 660120 - DNA, 75 bp, Homo sapiens
cgaagggagcttggggaggaaggacagagcagaatgggctgatatagatccggtgccgcagaatgatggccccaa

SEQ ID NO: 660121 - DNA, 75 bp, Homo sapiens
agccgatccagcctgcggagcctgtggggcagccacataaagaagatccctaatagtcatttctcaacaattata

SEQ ID NO: 660122 - DNA, 101 bp, Homo sapiens
gaaggaccacatagtagatgaaagagtagatgaaacttccggtgagatcggactggaactgttcggctgcgaccagaaatttattttcctgagtaaattgc

SEQ ID NO: 660123 - DNA, 74 bp, Homo sapiens
caggatcagaccgtagcccttccggaaacctccatggcagaagattttcgcaagctctggaaaactccacctcg

SEQ ID NO: 660124 - DNA, 83 bp, Homo sapiens
ggccgcccccgtggatctagagctgaagaaggaactgtggctgcaccatctgtcttcatcttcccgccatctgatgagcagtt

SEQ ID NO: 660125 - DNA, 105 bp, Homo sapiens
cagcgcccgcgccccgccgctgagccgtcgcggagccgcgcagccctcggagcacggatgaaacaggcgcctatttaatcgacagagaccccacctactttgggc

SEQ ID NO: 660126 - DNA, 100 bp, Homo sapiens
caatagctctacagtagcttcacaaagtgccaaccatacacatggcaccacctcacacagggaaacgtttaagtgctgtggggctgctaactacacagat

SEQ ID NO: 660127 - DNA, 75 bp, Homo sapiens
ggccaggaagcaattctggaagcgcagcaacagcaagctcccgggcagttacagaatgtctgaaggggacagtgt

SEQ ID NO: 660128 - DNA, 98 bp, Homo sapiens
cttccacctggtatagtcagtacaagcgggggtccctggttgactgcattcagccagtgccaaaagaggagcccagtcccgctaccaaattccagtcc

SEQ ID NO: 660129 - DNA, 75 bp, Homo sapiens
gtacatcagtcacagacctgcccaatgcctttgatggaccaattaccataaggttccccactgaaggacttggtc

SEQ ID NO: 660130 - DNA, 101 bp, Homo sapiens
gctgcgagggactaagagcagaggcgccaatgcttcggcattagagaaagagattggtccagaacagtttccggtcaatgagcactattttggattagtca

SEQ ID NO: 660131 - DNA, 100 bp, Homo sapiens
ctattactacctcaaccaatcggacacctaccaggtggacggcacggacgacagaagcgactttggtgagactctggcctgtagtggtggagacacgccc

SEQ ID NO: 660132 - DNA, 100 bp, Homo sapiens
cgtcacgagaaagcaaaatttctagtttgatggagaatccatatgctacactgaccatgactttggcacagaccaacttctgcaagaaacatggatttga

SEQ ID NO: 660133 - DNA, 109 bp, Homo sapiens
gaaactgaagtaccagttgtcgctagaacaggaaccattaaagagatcctggggactgcccagtcagtgggctgtaatgttgatggccgccatcctcatgacatcatcg

SEQ ID NO: 660134 - DNA, 98 bp, Homo sapiens
tctctatcaaggattcctcatcattgggtgtgcccccgagagcctgaagacacgcaccttctcccatgccagcgacacctggatgttcggggtgacac

SEQ ID NO: 660135 - DNA, 75 bp, Homo sapiens
ctactacgcctacgccatccagctgtgcatagcaaaatgatgcttcaacacccaggccaggtctctgcctcggaa

SEQ ID NO: 660136 - DNA, 75 bp, Homo sapiens
gaaaggagcacggcctgaagccggtggtgggcgaagtgtacgatcaagatcgagacatgtaagcagcatcatgga

SEQ ID NO: 660137 - DNA, 95 bp, Homo sapiens
ttacaagccccagttagatctcccatcactaggagttttgctcgagaaatcagcagaatctgccaaaataggaggaataattactgtgtttttga

SEQ ID NO: 660138 - DNA, 101 bp, Homo sapiens
tgatgtgcactttgagacccatgaggatgctgttgcagcgatgctcaaggatcggtcccacgttccaccgggtttacatcatacactgccttgtattccag

SEQ ID NO: 660139 - DNA, 80 bp, Homo sapiens
ctgcttgagtcagctgacaaattctatggtgtaaagttcagaaataaggttacacgggtagtattattgtgggtaaataa

SEQ ID NO: 660140 - DNA, 90 bp, Homo sapiens
cgggccctgcgcgcctgatgggtcgaggcggacgcgcggctgcgtcaggttttacgtaccctgggaagcaagtgtggtgactttcttcgc

SEQ ID NO: 660141 - DNA, 75 bp, Homo sapiens
tgggtctgatctggaccattattttgcatttccagaaggtgatttactacctctgcatcttattgaaagatccag

SEQ ID NO: 660142 - DNA, 75 bp, Homo sapiens
actacagctgagattgagaactgcttcataatcctcatgaagccatgtccctggagggagatgaatgggaactga

SEQ ID NO: 660143 - DNA, 74 bp, Homo sapiens
gcaaaggggaggttacgcagcaaaccatccagaagctggacccacaaaccgtggagaccaagaactggcacacg

SEQ ID NO: 660144 - DNA, 100 bp, Homo sapiens
taacactctagctattcttcgtcgtgagatgtttgttttcaaggctactggatcaaggtcagttcctatgccactgtcaaatatatcagtgccaaaatca

SEQ ID NO: 660145 - DNA, 101 bp, Homo sapiens
cgctgatctagtgcttctcgaaaaaaaccttcaggcggcccatggactactccagtggttttggcggcaagtatggcgtgcaggccgaccgagtagacaag

SEQ ID NO: 660146 - DNA, 75 bp, Homo sapiens
tgttgccatccgatggctgatgcttcatacagcagactcaggaatcccgttctgcttccagaagtggaagtgctc

SEQ ID NO: 660147 - DNA, 100 bp, Homo sapiens
gttgcagccatggtgcattgcagttgcgtgttgttcagaaaggagctatgaagacatgattggtgaggaggtgccatcggatcaatactactgggctcct

SEQ ID NO: 660148 - DNA, 73 bp, Homo sapiens
ttccttccatctctgctgctctctcatttgctggccatcggattggggctagtgaaaactttagtggctgaca

SEQ ID NO: 660149 - DNA, 75 bp, Homo sapiens
aaacattggaattctgcttatctaggtagaagtaaaatctggagaagaagatgaagaaattttgtttaaagagag

SEQ ID NO: 660150 - DNA, 98 bp, Homo sapiens
cttttcccaaacccaggaccaagggaacctacatcccctgatggcggagaacctgctgccccagtgctcagctgtgaagctgcaacacagactgaaag

SEQ ID NO: 660151 - DNA, 51 bp, Homo sapiens
agagacacatttcctgaggatatcgtgaagctcattcacacagaagaccca

SEQ ID NO: 660152 - DNA, 50 bp, Homo sapiens
caaaactgccttcagaagcaaaaggtctgaaagctaataacattgactac

SEQ ID NO: 660153 - DNA, 98 bp, Homo sapiens
gatcaagaagctggaggtcaacgaggccgagctgctgcggcgccgcaactttaaagtcatgatctaccagggagaagcagaatttgcccgcatcatga

SEQ ID NO: 660154 - DNA, 98 bp, Homo sapiens
ggatgggaggtggtggagtcggacctctatgccatgaacttcaatcccatcatttccagaaaggacatcacaggtcttcgatgccaagaacatgatgg

SEQ ID NO: 660155 - DNA, 95 bp, Homo sapiens
ccatcacaactggattgtagctgcatatgcccattttgctgtgtgttacagcagagagagatcatcattgcctgaatttagctttgtgactgcaa

SEQ ID NO: 660156 - DNA, 82 bp, Homo sapiens
ccgaggatctggaggcacagctgcagtctgacgagaggggagggtgtgaagacagagaatgaccacatcaacctgaaggtgg

SEQ ID NO: 660157 - DNA, 74 bp, Homo sapiens
ggagcctgttccagaactgctggaagctgagaaagccttgagccgggccatgcttctcacatcttacctgcctc

SEQ ID NO: 660158 - DNA, 88 bp, Homo sapiens
cgaggggctcaaacactctacgtgcccaattgtgaccatcgaggcttctaccggaagcggcagattgcaacacctgctcggtataccg

SEQ ID NO: 660159 - DNA, 98 bp, Homo sapiens
gagtaccaaacagtccagagactcatccccgccctgtgggagaagcacagtccacaggacggcggctccctggaccaggtgctgaaagaggccaagag

SEQ ID NO: 660160 - DNA, 75 bp, Homo sapiens
cttcgaagtggctgagaaatacctcgacatccccaagatgctggatgcagaggggaatagaacgtgtccgggctg

SEQ ID NO: 660161 - DNA, 75 bp, Homo sapiens
aaagcgcatattatgctacatgaaaaggaagaggtgtatgtggaatttgatgatcttgaatgggataaacgagag

SEQ ID NO: 660162 - DNA, 75 bp, Homo sapiens
acttcaaacattcgtctcggaaaccccgcctcttacagtcacgagctgctgctttgggaaatcttgtgtcagatc

SEQ ID NO: 660163 - DNA, 114 bp, Homo sapiens
caggcaactgcgatgtctgtggactgtcttgggcagcatgcagtgctttctgggttaaaaagatcaagtggcatgagcagccttttggggaaaattggtgccaagaagcagaaa

SEQ ID NO: 660164 - DNA, 100 bp, Homo sapiens
ccagctcagctcttactgcgggccgctccgacggcggtccatcctgctcctgggcaacgtgctggtctgtgtgctggcccatcactttggcaaagaattc

SEQ ID NO: 660165 - DNA, 100 bp, Homo sapiens
ctcatctataacctccttgaaaaactgggatacatggatctggcctcaagactggtgtctgtgaatttctggtacgtgctggtgatgaatgatgagcaca

SEQ ID NO: 660166 - DNA, 75 bp, Homo sapiens
gtgtgccccttctccacccagagcttggatttacactgggcaacgtggttggaatgtatctggctcagaactatg

SEQ ID NO: 660167 - DNA, 83 bp, Homo sapiens
gtccaatctgagcgtgctgcggacggcgctgcggtacatccaggtacaatgactcttcttgcttttcacctaagttgaataag

SEQ ID NO: 660168 - DNA, 100 bp, Homo sapiens
gtgagactgcagtcagtgcttttgagattgacaagatgtacacccccttgttcttcgccagagtacctagtagaactgggttgtatcaagccgctctgtg

SEQ ID NO: 660169 - DNA, 83 bp, Homo sapiens
cctcagggcatccccgttttcgataatgctaagtttgcaacagagagcacagaaacgtgcaagttacatcttgcgtcttgaag

SEQ ID NO: 660170 - DNA, 43 bp, Homo sapiens
tcacgcagagccggctttgcagataaacctctacttgaaaatg

SEQ ID NO: 660171 - DNA, 59 bp, Homo sapiens
gactggatgccaatgatcctacgtgtacagaagggccatgctgttattactcttacaca

SEQ ID NO: 660172 - DNA, 100 bp, Homo sapiens
gattaatcgaattacagctgctagccaggaacatggactgaagtatccagcgctcattgggaatttagttaaggtcaccttccgcaaccctgtcattgag

SEQ ID NO: 660173 - DNA, 50 bp, Homo sapiens
tgatgatggtggtgaggatgatgatgtgctggagaatctggtaaaagcac

SEQ ID NO: 660174 - DNA, 75 bp, Homo sapiens
cttggagaggccgagggtttgatgaaggtggaggcagcgcggctctcaggttgtggcagcactgcctgaaggtat

SEQ ID NO: 660175 - DNA, 99 bp, Homo sapiens
caaaccgtggctgctcgataaatcagacagaacagttaatcctcaatttaagcctgatctaacccctagaaacagttggccaagtgaaatttgatccac

SEQ ID NO: 660176 - DNA, 90 bp, Homo sapiens
ccacaacagacccagaaggtttttcttttcattagaaaccgcacactatatatctgtgaagaaaatagaagagctaatgaatatgatttc

SEQ ID NO: 660177 - DNA, 76 bp, Homo sapiens
cagaagttcttccttgaagaaatacagcttggtgaagagttactagctcaaggttctggaggacacgtgccggcgg

SEQ ID NO: 660178 - DNA, 82 bp, Homo sapiens
ttgcgcgccccggatgtggcgcggctgcgcgaggagcaggaaaaggtgtccctggccagtgtccttccacctgtccacaagc

SEQ ID NO: 660179 - DNA, 101 bp, Homo sapiens
agctgcgtgattcccgtgattgcgttacaagctttgtctccttcgacttggagtctttgtccaggacggttatcaatactctggctgaccatcatcatcgt

SEQ ID NO: 660180 - DNA, 90 bp, Homo sapiens
gcagtccagaaagcggcttatcgaacagagccgggagttcaagaagaacactccagagaatggccgaggcatcccgaaagaagaaagaaa

SEQ ID NO: 660181 - DNA, 107 bp, Homo sapiens
ctcctctgccaaaacccagggctggaagatgtggcagccggccacggagcgcctgcaggtagcacaggcggagtgcagcggaggcccctgccgctgccgtcatgccg

SEQ ID NO: 660182 - DNA, 100 bp, Homo sapiens
gtcctttatatagaagggagagtaggaatatgaagccatctacctagcaaaattaacaatacagatgatgtcaccactccagatagaaaggtcattatct

SEQ ID NO: 660183 - DNA, 98 bp, Homo sapiens
tcagtttcatgaaggagctcatgcagtggtacaaggaccagaagaaactgcaccggaaatgtgcctaccagagtaaccagagagcacagagaaatgct

SEQ ID NO: 660184 - DNA, 50 bp, Homo sapiens
gagacagctgccatccactgactcgtaaatttggaccagaaaatcccttt

SEQ ID NO: 660185 - DNA, 100 bp, Homo sapiens
gcacgctcccctcaaggcctgggtgcttctactgcagaaatatcagctagaaccatgcagtcaagttttttcccaagcagctcccaagggtgtgatgcat

SEQ ID NO: 660186 - DNA, 101 bp, Homo sapiens
atttggaaccctgaggaagcaggaggtggatttgcagcagctcatcagagactctgccgagaggtcgtccttggtggaaggaaccatgaactggcatctcc

SEQ ID NO: 660187 - DNA, 90 bp, Homo sapiens
cccgctgctcagcgtcctcatgtggggggtaaaccactcgagtgatcagcagctggactgtgccttggacctaatgaggcgcctgcctcc

SEQ ID NO: 660188 - DNA, 98 bp, Homo sapiens
ccaatgctgtcagtgtggtttcctcagtagattcagcccaagcctcagatatgggaggagaatcaccagataaaatttgatgctgggactctccttct

SEQ ID NO: 660189 - DNA, 119 bp, Homo sapiens
gctcctggcgctgctggctgcgctctgcccggcgagtcgggctctggaggaaaagaaaggaaagtcgagatggtcgtgtggacagctggcgaaacttccaagccaatacgaaggggaag

SEQ ID NO: 660190 - DNA, 83 bp, Homo sapiens
agcgcttcctggatgagaagagcggcagtttcgtgagcgacctcagcaggtgtttcccattaaacactaccaggacaaaatca

SEQ ID NO: 660191 - DNA, 74 bp, Homo sapiens
agttttctcaagcatcttcaaagccctcatgatgtattggctacacttctgaacaacctcaaagttcaagaaag

SEQ ID NO: 660192 - DNA, 98 bp, Homo sapiens
ccgctccctcccagcagagctacctatctatggagaaaatcattcaagtggccaagacctctgctgcacagctgccagagaaactacgcataggctgg

SEQ ID NO: 660193 - DNA, 100 bp, Homo sapiens
tctaaacttggcaccaagtatgggtgttttgaatgctgtatcaaatgcctggggggcattccctatgcctctctgattgccaccatcctgctctatgcgg

SEQ ID NO: 660194 - DNA, 90 bp, Homo sapiens
ggatgccgttccttcgcgcgtgaggctgcggctctgacggttaatttggagtggcccctggagtcagtttcctacaccatccgaggcccc

SEQ ID NO: 660195 - DNA, 78 bp, Homo sapiens
aagaatggcagtgctcaaactcaccgaccagccatgaagatggacctacagctaaaaaattaaagactgagcaagggg

SEQ ID NO: 660196 - DNA, 75 bp, Homo sapiens
ctcaaagaggccaagcacattgcggaagaggctgaccgcaaatacgaggagctttcagattgcatcttctctgtc

SEQ ID NO: 660197 - DNA, 101 bp, Homo sapiens
caccatccgcgaggcaggagagaggaggaggagtgcggcgcggcggccccgggaccaaggagggcgccatgttttggaagtttgacctgcacacaagctcg

SEQ ID NO: 660198 - DNA, 100 bp, Homo sapiens
agcacgagtgcagtttggagccaacaaagtgactctgacatcattagaagcatgccagaacagactggtgaaaagtaaaccttttcacctacaaaatttc

SEQ ID NO: 660199 - DNA, 100 bp, Homo sapiens
ctcggacgtggccatgaaagtactcaacagcatcgcctacaagtctcagaccagtatccttcaggggttctcttactctgatttgcggaaatttggcatc

SEQ ID NO: 660200 - DNA, 100 bp, Homo sapiens
ctcaaagagctcaggaacggacaggacatgctgagatctgtatctgtggacctgaatgttgatccctcgcttcagattgacatacctgatgcgctcagtg

SEQ ID NO: 660201 - DNA, 83 bp, Homo sapiens
gccgtagacaccagctccgaaatcaccaccaagctacgagttccagggagctctgtcctggtgaccgtgcccgggttatgacg

SEQ ID NO: 660202 - DNA, 90 bp, Homo sapiens
gtttctgagtccagccaacagcagaagagaaagccagttatccacggactggaagatcaaaagaggctgcggcttgatgagacccaggag

SEQ ID NO: 660203 - DNA, 75 bp, Homo sapiens
cttccctttggatgtagcaaggaagaaattgttcagttcttctcagtactcttgatgaaagaccgtgaaaccaac

SEQ ID NO: 660204 - DNA, 75 bp, Homo sapiens
actaaatccttctttgataatatttcttgtgatgacaatagggtgtacaactatgagcctttgacacagctcaag

SEQ ID NO: 660205 - DNA, 100 bp, Homo sapiens
cgatcccgacctggactcagacaaggttcttcccaggagactctgccggccttttccccaccagccccagcttggccatccctcacccgagtgtcggagg

SEQ ID NO: 660206 - DNA, 100 bp, Homo sapiens
caccatctccatcacccaccaacaacaccacaataatccacagccaagagaacactggatctaatgaacggaacatctatattgtggtgggtgtggtgtg

SEQ ID NO: 660207 - DNA, 75 bp, Homo sapiens
ccgggacgcacgctcagctgaggaggacccccaaagttttcggctttgtgagaaaccttaccatcaaacacgatg

SEQ ID NO: 660208 - DNA, 128 bp, Homo sapiens
tggaagcacaatataaagtttcatcaacttccataccgggagatggagcatttgagacaggccctggccaacgtcaacattgggagcctcatctgcaatgtaggggccggtggacctgctccagcagc

SEQ ID NO: 660209 - DNA, 100 bp, Homo sapiens
tgggagagaggtacctctccttttccctctccctttccctaagggacaagaatccttcaagaaacaggaaaaaactcctaaaacaccaaaaggacctagt

SEQ ID NO: 660210 - DNA, 88 bp, Homo sapiens
ccttgacaaccctggcgggggttcgctggctgcggccccggctccggcccccgcaggagcaggacatgatccacatcgcggacaccaa

SEQ ID NO: 660211 - DNA, 75 bp, Homo sapiens
tcctgacgcctcccagccgtgcttcctgttaagcctgtgaaactgaagccttggctcaagctttctggattgaca

SEQ ID NO: 660212 - DNA, 100 bp, Homo sapiens
gatgttcggccgtggctcccgccaccgcaaggaggtggactacagcgactcactgacggagaagcagtggctcaagagaacatcaccaccctgaagccag

SEQ ID NO: 660213 - DNA, 100 bp, Homo sapiens
catcgggggcaccaccctccatgcctttgcaggagtctactcttcatcttgtgttgagacttcgtggtggtgctaagaaaaggaagaagaagtcttacac

SEQ ID NO: 660214 - DNA, 71 bp, Homo sapiens
cattttgaaacttaaggatgggatacagcaagttggaattgacagaggtgatataccagacctttcacagg

SEQ ID NO: 660215 - DNA, 95 bp, Homo sapiens
cagaagcggccgcgggctagcaagctcccggagccggcggcgcaccaccatgacccagtcggtggtcgtacaggcttcagaaactcctgaccatg

SEQ ID NO: 660216 - DNA, 100 bp, Homo sapiens
atccgggtgtccctgtacctgcagctgctgcagctgctgcacagaaattaatgcgaacagacagacttgagccaaatttgtatcctactgtggggcttca

SEQ ID NO: 660217 - DNA, 75 bp, Homo sapiens
agaggcttgggccgccgagctggacccggaccggttttgggctctgtccagcagtgtaagctccagcaagctgtt

SEQ ID NO: 660218 - DNA, 82 bp, Homo sapiens
cagaacttcagcaccctggctgagaagctgccctgtcaaaccctgttcctgaccgatgaggagaagcgtctgctggggcagg

SEQ ID NO: 660219 - DNA, 90 bp, Homo sapiens
gcccctggctctgctcccccagactctgttggatcagaaggtcaaggtgagcatgggtttatgcgtcttaggcattattgtgatggcgag

SEQ ID NO: 660220 - DNA, 75 bp, Homo sapiens
cgaaatccaacttaccgcccaaggtaccgtagaactcccccactggaaaggattctgaaagaaatgaagtcagcc

SEQ ID NO: 660221 - DNA, 98 bp, Homo sapiens
tttgtgctcccctcccccatcaaaggaaaggggaaaatgtctcagtcgaaaggatattccccgagtccctccggtggctaatggccacccagcagttt

SEQ ID NO: 660222 - DNA, 74 bp, Homo sapiens
ccagcagctaaggatattttgtgcagtcatggcacagattgaaaaacaagagagatttgaacagtatactacct

SEQ ID NO: 660223 - DNA, 75 bp, Homo sapiens
tctggctacgcgagggagcacggacagtgtgcaggttggatggcaagcatgtggtgtttggcaaagtgaaagaag

SEQ ID NO: 660224 - DNA, 100 bp, Homo sapiens
cgaggctgggctgaggcgccgcggtaccatgaggcgccgatgaagatcagcttcgtgcaaagggttatgacaaaacaccagacttcattttacaagtacc

SEQ ID NO: 660225 - DNA, 102 bp, Homo sapiens
agccaacagcgaggctttcagttctttggaattccattcttttccttattcttctgatgtggatccaggatgacccctccggcgaaggtgtcctgccctcgg

SEQ ID NO: 660226 - DNA, 98 bp, Homo sapiens
taccttcgaggcaggagccctctcatggtgaacagcaactattatgtcatgactcatggagagatttctcatggatggcttgtatccttcaaggtttg

SEQ ID NO: 660227 - DNA, 100 bp, Homo sapiens
agtgtataatgactgtgcaaagaagattgttaaagatataattgaccctgcaatcctgcgcccgggccgcctggacaaaacactgtttgtgggtttaccg

SEQ ID NO: 660228 - DNA, 75 bp, Homo sapiens
aggtggacaacctgtcatcactgacttctgaaaagctagttttgtctgatgaggaagcaagctttgagagtgaac

SEQ ID NO: 660229 - DNA, 50 bp, Homo sapiens
atttcttcgagacactcatataaaggttacaacaacaatattcattgctt

SEQ ID NO: 660230 - DNA, 75 bp, Homo sapiens
agctgtcatatgctatttgttacagttctggcaatgtggccagtgggtggaagtggtgattgatgaccgcctacc

SEQ ID NO: 660231 - DNA, 74 bp, Homo sapiens
agctgccgccgaacgacaggacgttggggcggcctggctccctcagatgatgaaccaggtggaagggcagcaga

SEQ ID NO: 660232 - DNA, 101 bp, Homo sapiens
gaagtgcgcaaacttgacactcaccctgaccggtctaaatggaggctatcaagatgagttggtagatcatcgtttgacagaaagggaatgggctgatgaat

SEQ ID NO: 660233 - DNA, 75 bp, Homo sapiens
aactcgaagaacagctgtggaaagaagttgcaaaacactgggcagggcggctccagtgcagatttaagccgctgg

SEQ ID NO: 660234 - DNA, 74 bp, Homo sapiens
cccagtgtgctgcaatagctgaacgtttgatgcatttgacctctgaagaactgatttggaggccaatcactgcc

SEQ ID NO: 660235 - DNA, 83 bp, Homo sapiens
ttgaaatcgacacacaaagaatagagttgagcctgtgggacacttcgggaagttctactacatcaccctgctacgagaccccg

SEQ ID NO: 660236 - DNA, 100 bp, Homo sapiens
ttttctaccaagctgggacttccaaagctgggaatcctattttttattatgttgcacggaggagacgcaggtcagaatggaaatgggctgcagaccgggc

SEQ ID NO: 660237 - DNA, 100 bp, Homo sapiens
tttggttacctatgtacctgttaccactttcaaaagtgcaagttctctcctgttgccctgagtgcccactcccaggccctctgtatgagtgacacttcag

SEQ ID NO: 660238 - DNA, 101 bp, Homo sapiens
ctcctgcaagatactgagagattgaagcatgctctggaaatgttcccagaacattgcacgatgcctcctggccccttcacagatgtagtcactacaaatct

SEQ ID NO: 660239 - DNA, 101 bp, Homo sapiens
cgggccccgggacctgggctgggaacccgcggtggagcgggacacgaacgtgtgtccttgaatccgacccctactttgggtttgaagaagcaaagaggaag

SEQ ID NO: 660240 - DNA, 100 bp, Homo sapiens
attttagggtcctttatatagaagggagagtagcattcttcaggtcatctgaaccttctgagaaaacatggtcaacgtcttgaaaggagtgcttatagaa

SEQ ID NO: 660241 - DNA, 100 bp, Homo sapiens
tgggagaagttagacaataccctcaaactacctccaacagctactcagggcatggattccgtgaaggaacaacacctaaacccaagagggcagctgttgc

SEQ ID NO: 660242 - DNA, 82 bp, Homo sapiens
tggacatctcgctgaccaagctggacaaccactgtgagatgccatggacaatattaccaggcagaaccaattctacgatacc

SEQ ID NO: 660243 - DNA, 100 bp, Homo sapiens
caagaatggaatcaacagttctgggcaaaccagaatttgacttttagtaagctgctggaacccaatgtgaatattggactggcggagccttgggaagtga

SEQ ID NO: 660244 - DNA, 101 bp, Homo sapiens
tagtaaacggggctgctggtgggccgcgtcgaagacatggaccagggctacggagaggctgggaggcggcagaatgcagccagaggagggcacaggctggc

SEQ ID NO: 660245 - DNA, 80 bp, Homo sapiens
gcctcccccgtccggtccctctctccacggtaagggttttccaagagataacttcaccaagatgtccagtgataggcaaa

SEQ ID NO: 660246 - DNA, 100 bp, Homo sapiens
gaatgatatttccaaagtttgcagaaaagaatatgaggcttattgtgtaacagaacctggagcaggctctgatgtagctggtataaagaccaaagcagaa

SEQ ID NO: 660247 - DNA, 73 bp, Homo sapiens
tggagatctggggaggggagcagtatgaaatctccttcaagaattggcagagggggtcgatttgggaggaaag

SEQ ID NO: 660248 - DNA, 76 bp, Homo sapiens
gcaagatcatcgtgggcgacgccacagagaaaggtctaaatctcaaaacatcctcagcacagaggaggaacgaact

SEQ ID NO: 660249 - DNA, 90 bp, Homo sapiens
acattgcatcttcaagactgttaagactttgaccccgacgcaggcttcagtgattgccgcggatcagaagcctgagcactttggctcgag

SEQ ID NO: 660250 - DNA, 95 bp, Homo sapiens
ggctccctgctgggcgggaccctggtctccgcgtacgggataggatttttgggccttggtctcatgggaagtggaatcgtctccaacttgctaaa

SEQ ID NO: 660251 - DNA, 76 bp, Homo sapiens
gcacagcaagcccaggctcattatcagatgatatcatcaagttgaatcgaaaggaagggaagaagcagaattttcc

SEQ ID NO: 660252 - DNA, 74 bp, Homo sapiens
cggcggcggcgcccgcgggtggtataaaatggcggatttcgaagagttgaggtgaggaagggaaactgtctacc

SEQ ID NO: 660253 - DNA, 101 bp, Homo sapiens
tgtcttctccatgctctgctgcttctggcctctgggcatcgcagccttctacttgtcccatgagaacaccttccaccatgaccacctcagcaagttcccac

SEQ ID NO: 660254 - DNA, 83 bp, Homo sapiens
gaggaagggcatgagccgagcttgaggaatccgtgctccaaactctacactcaagttctgggaggtgatcagtgatgaacatg

SEQ ID NO: 660255 - DNA, 90 bp, Homo sapiens
ggagcagcaggaagaaatactaagggtgccttttaggagaaataaagaggaagatcccagtgtctgagtgaactaacagtcctgctttca

SEQ ID NO: 660256 - DNA, 85 bp, Homo sapiens
ccaggccacgcaccagaatctgacttcctacagccaagagccttcacgtaaatgggtccagtcatgcctcccagtaagaagccag

SEQ ID NO: 660257 - DNA, 75 bp, Homo sapiens
ttgaagcatgtctttcagagcccggcaccacccatcttgagtatctgaagacagacatcttcctgtgaagggctt

SEQ ID NO: 660258 - DNA, 98 bp, Homo sapiens
tgtggatgaatttgcttttctggaaggttgcagccccacccacgtcacggtgtacagcgagtatggcgtggacgtctttgatgtgcgcaccatggagt

SEQ ID NO: 660259 - DNA, 100 bp, Homo sapiens
ctgacttttcttatgctgggatgtgccttagaggattatgggtgaccattgtgaggtagatattttgttctaattttccagatgaggaagctgagaccct

SEQ ID NO: 660260 - DNA, 100 bp, Homo sapiens
tgcacatccaggctggtcagtgtggcaaccagatcggtgccaagttttccaagagataacttcaccaagatgtccagtgataggcaaaggtccgatgatg

SEQ ID NO: 660261 - DNA, 90 bp, Homo sapiens
ccattcctggatctccacaccctttttcctggtgcatgtccgttccgaggaatgggatttaatgacctttgatgccaacccatatgacag

SEQ ID NO: 660262 - DNA, 90 bp, Homo sapiens
gtacacctgtccccctgcttcagcatcccggcggcgcaggcgcagaggagagcgagctgcaggcctacatcgcacagtgccaggacagcc

SEQ ID NO: 660263 - DNA, 107 bp, Homo sapiens
gtggttggtgattggcaggatcctggtatccgctaacagtgaataccagggcctggtgaagcacacaggaggctgccactgtggagcagttcgttttgaagtttggg

SEQ ID NO: 660264 - DNA, 100 bp, Homo sapiens
acaggttccgaaagtggctctacaaacccaagctgagctgactgctgcccactttggaggaggcggtgggctccttcacaagaagactcaacaggaaggc

SEQ ID NO: 660265 - DNA, 90 bp, Homo sapiens
gcacatcgagagcaagctcctgggctccaattcctccaggatgtacttcacccaggcggcttcaatgatccatcctaaagaggtgccccc

SEQ ID NO: 660266 - DNA, 51 bp, Homo sapiens
gttggggccactgcgaggccgttttaggcctcgcctgtctccttggaacat

SEQ ID NO: 660267 - DNA, 100 bp, Homo sapiens
atgaagaccctcttcttgaatactgagcaactgctgggcccaggtcggctcatgaacccgctgcaggccggcggaggcccgcttcagcagcggctgcgtg

SEQ ID NO: 660268 - DNA, 75 bp, Homo sapiens
ccggtccgaaaagcgcaatattcgggtgggagtgacctgattttccagcattttgaaagcgaagcagaagccgta

SEQ ID NO: 660269 - DNA, 127 bp, Homo sapiens
agcgagctgagtggttgtgtggtcgcgtctcggaaaccggtagcgcttgcagcatggttgaaatcacaaagattagacacctttttagataggtgttcttcagcaccactgacaacacggttctgac

SEQ ID NO: 660270 - DNA, 76 bp, Homo sapiens
agtattcttaaattgatttcaagtttgaacaagttactccacaggatccgctgaacataggatgttgccacaaaat

SEQ ID NO: 660271 - DNA, 100 bp, Homo sapiens
ctcagggcccagggggggatgaggatgatgatgaggaggacacggacaagttgctgaactcagccagcggaagtgaccgtggtggcttcaataaatttgg

SEQ ID NO: 660272 - DNA, 76 bp, Homo sapiens
atcgagagcgtcatgaacccgagctatagagaaaggagatgaggtttacccaaggtccagcctagcccctaggcac

SEQ ID NO: 660273 - DNA, 98 bp, Homo sapiens
gccgctaccgctcaggtgctgcaggcacagcccgagaaaccgcagcactacacacatgctgctgctgaagaaacacacggaggacatcagcagcgtct

SEQ ID NO: 660274 - DNA, 100 bp, Homo sapiens
ctcagggagccccaaaggaggtacccccaaatctcaggtaagccaagatgggtgcatacaagtacatccaggagctatggagaaagaagcagtctgatgt

SEQ ID NO: 660275 - DNA, 100 bp, Homo sapiens
ttacagtgcagtcttatcgaaggatgtgcatgaaggacagcctcttctcaatgcactgaacctaccagatgtatttgggttggtcgtcctcccattggaa

SEQ ID NO: 660276 - DNA, 78 bp, Homo sapiens
cgggatcaactcttccaggaccaccaaaaataactttggctgggaaatttggtgagcggcctccacctaaacgactta

SEQ ID NO: 660277 - DNA, 100 bp, Homo sapiens
agccagggaatgcactcaagcgcttcctcacctcgcaggtacatgtgctccctgtcattgttccactattctgaatacttggtgacagcagtcaataatc

SEQ ID NO: 660278 - DNA, 75 bp, Homo sapiens
gtgctgcttccaaagctcattgacttttctgctcaggttttcaagctagaaatgcccttcttcagtcaaatcttt

SEQ ID NO: 660279 - DNA, 97 bp, Homo sapiens
tggccaccaaggccattgaggagtacctcaagctagtgggccagaagtacctgcaggacgccctagggctggttttccccatgtgtgaggagaggtg

SEQ ID NO: 660280 - DNA, 51 bp, Homo sapiens
tttgtcaccacaaaaaggacagcaatcttcctgagctcttttcgggtgcca

SEQ ID NO: 660281 - DNA, 96 bp, Homo sapiens
agaagagaaagccccccagcatcaaggcggctgcggcagcagacatggcttaccaccacatcagacctcccattggctattccattcccaagccca

SEQ ID NO: 660282 - DNA, 100 bp, Homo sapiens
ctcgttcccccgattggggccgcagtgagccatctttatggatttggactgatggacgcagaagccatggtgatggaggcagagaagtggaccaccgttc

SEQ ID NO: 660283 - DNA, 96 bp, Homo sapiens
tctgccccagctccgtctcggcggcggcggggccctcatctttgtgtcccatggagccggagagcacagtggccgctatgaagagctggctcggat

SEQ ID NO: 660284 - DNA, 113 bp, Homo sapiens
cacgggcgtgcggttcaaggctcagctgaaggacccgcagggccccgggccagatttctagaagctctcaatcactttgagaaagcaagaaccttgatttatcgtcttcctgg

SEQ ID NO: 660285 - DNA, 74 bp, Homo sapiens
gcggaggaagcggagcgccgctgggggccggttacttcacggaaaccaagggaagatgaaaaagatggccaggc

SEQ ID NO: 660286 - DNA, 74 bp, Homo sapiens
gccggcgcgctctgccgcgaggcgcgcgccgcgcaagtcttcttcctcaaaggacagcaagaccgagaccctcc

SEQ ID NO: 660287 - DNA, 99 bp, Homo sapiens
gtcgcgaggaagaggcggaaggcgccggaagggcagaccttttccgcccaacacccacctgggagggagggcgagacccgaggtcagacgtccctggag

SEQ ID NO: 660288 - DNA, 100 bp, Homo sapiens
gcacagtccgattaattgtccttgggtcgaggtgtctcgtcggaccctttggggctcagtggaggaggacatgaaccttaacgaagagaaaaaagctcct

SEQ ID NO: 660289 - DNA, 83 bp, Homo sapiens
gcagcaccaggctctgcagcggcaacccccagcggcttaagccatggcacttcccaagaaggacaacccgaggcgaggcttgt

SEQ ID NO: 660290 - DNA, 114 bp, Homo sapiens
tgaagatggctactctggagttgaggtgcgagttacaccaaccaggacagaaatcattatcttagccaccaggaggcaagtgaggcctatctggttggcctttttgaagacacc

SEQ ID NO: 660291 - DNA, 100 bp, Homo sapiens
cgctgctgcggaggttcaaagtgtccgacgagtaccaagagaagcagcggaagcgtgaggctgaggagcggcgccgcttccccctggagcagcgactaaa

SEQ ID NO: 660292 - DNA, 74 bp, Homo sapiens
gacccagcagccgccatggctctgctccgaggaatcctcaatctggcatctggagtggtggatttacttcagtt

SEQ ID NO: 660293 - DNA, 101 bp, Homo sapiens
tcctgtggacagcacattaggctttcttccctggcacatcagattgactgagattgtagatttccgcatattttgcaactggctcctcaatgacataccat

SEQ ID NO: 660294 - DNA, 80 bp, Homo sapiens
tgacccgggcttcggcccccaccagagactcggctgatcccaaagaactaatcaagatggtcaccaggcatgtgactcga

SEQ ID NO: 660295 - DNA, 83 bp, Homo sapiens
actggacacccatcccaaatcagtctgaaagtacctgctatgaagtggcgctcctgagagcagtcattatggcgaaccttggc

SEQ ID NO: 660296 - DNA, 98 bp, Homo sapiens
caggagatgaaatgacaacgtcaaccctccaggaacagtggaggccatgtgtcttttggcagtcagtccagatgggaattggctagctgcatcaggta

SEQ ID NO: 660297 - DNA, 80 bp, Homo sapiens
gaccacatagtagatgaaagagtagatgaaacttccggtcctcagaatggttggaatgaccctccagctttgaacagagt

SEQ ID NO: 660298 - DNA, 100 bp, Homo sapiens
gaggcaaggagctaaagcagcgtgcgttcagccctgggaagcccctgaatgtgacagtgatccgcaggggggaaaaacaccagcttagacttgttccaac

SEQ ID NO: 660299 - DNA, 83 bp, Homo sapiens
cgacaaggagggcatgatcaacctcgtcatgtcctacgcgacttcccaagtaagaagcggaagaggagccgctggaaccaaga

SEQ ID NO: 660300 - DNA, 75 bp, Homo sapiens
gttcttgctgctgaacgccaagcccctgtccctgccttacccagcaagcttcccacgtttggagccccggaacag

SEQ ID NO: 660301 - DNA, 50 bp, Homo sapiens
acacggcctacaacaccaagaggcgtccgacctccgatcatgaacgggcc

SEQ ID NO: 660302 - DNA, 100 bp, Homo sapiens
attcccgtccgacgaggatatcgtgtctggagcagtggagcccaaagacccctggagacatgacatggatgggtgcaaaaaagagctgccccgcttgcaa

SEQ ID NO: 660303 - DNA, 100 bp, Homo sapiens
cctaaggtttcacctgctttgcatcaggtctaatgcatgtgcacaataaacttgtggatccactattcagtatgaaagatggaaactgaaggagactgga

SEQ ID NO: 660304 - DNA, 50 bp, Homo sapiens
gacccaggacacccggaagccggaaatggaggtagattgggaagtggagc

SEQ ID NO: 660305 - DNA, 90 bp, Homo sapiens
gaggcgtggtgcttatggtggaggttattatcaacccttactttgctaagcaagaaactgaactgttacaagattacccttgaatgtcta

SEQ ID NO: 660306 - DNA, 82 bp, Homo sapiens
agaacagcgagcaggcgcgcagccacctggagaaggcgatgctgcatctaaggtcacggaacaggaatggcgggagaaggcc

SEQ ID NO: 660307 - DNA, 101 bp, Homo sapiens
ctccagaatctgaaccttcttgagcaccaacctgacacttaaaggaagtgctcattggaggagcccacccacctttgggttcctgttggacatcgatggag

SEQ ID NO: 660308 - DNA, 75 bp, Homo sapiens
cggtgacagcgtgagaggttcgcagagcatcattcttaacaaagaagttaaatattggtgggaaaagagtaaacc

SEQ ID NO: 660309 - DNA, 76 bp, Homo sapiens
cactgactatgacctatctgacaagagcatcaaccctctggaactggatgcatttcagccataccccattgaaatc

SEQ ID NO: 660310 - DNA, 83 bp, Homo sapiens
gcgtgcactccgcacctcggggacattattgcgcgtggaacggctgcttttggaagtctttcccagggaactccgatgaagtg

SEQ ID NO: 660311 - DNA, 100 bp, Homo sapiens
gatctgactcgaaggatgcgcagagatggggtcccactctgttgccgaagctggagtgcagtggcacgaacatgtctcactgcagcctcaacctcctggg

SEQ ID NO: 660312 - DNA, 90 bp, Homo sapiens
gaaagctaggccatctgaataactttactaagtactactgctaaagtgcagcagaggctgataggattcatgcgtcctgaaaacggaaat

SEQ ID NO: 660313 - DNA, 75 bp, Homo sapiens
tgatatgttccagttgcacatttcctgcaaggactccaaagtggtgagcaaaccagtccagctacgggggcccag

SEQ ID NO: 660314 - DNA, 49 bp, Homo sapiens
gacgctgccaacaacgggcactacaaggactccctggaggaaaagcgga

SEQ ID NO: 660315 - DNA, 100 bp, Homo sapiens
ccgggttctggccgtcatgcaggatctgatcagcgagcccagcaacatcgccggcgtctccagcacaggtcagaagagatcaattctacagaaatttcca

SEQ ID NO: 660316 - DNA, 98 bp, Homo sapiens
gggtctcgggggccgctctgggatcccggccaccagcaattgtccggtgtggacactgccagcggctgcagccgacttggaatgacctgggagacaaa

SEQ ID NO: 660317 - DNA, 87 bp, Homo sapiens
gggcctcccgtttctggctccgggctgagcttcctggagaagaggaaggtactccaaagattcaggtttactcacgtcatccagcag

SEQ ID NO: 660318 - DNA, 43 bp, Homo sapiens
ggcggacagtgcggaactaaagactactggtgcctggatgatc

SEQ ID NO: 660319 - DNA, 110 bp, Homo sapiens
gggacttgctcgggcttttgttcccagaaaaccttcacggcatggtgcaactcccacctgcggaaggcaggcacacagatcgagaacattgatgaggacttccgagacgg

SEQ ID NO: 660320 - DNA, 83 bp, Homo sapiens
ctaatattgagaagcatagaggagttaaagcataaaccaggcatgtccattggaaatgctaaaacaaccaggaatgataatag

SEQ ID NO: 660321 - DNA, 97 bp, Homo sapiens
aaatccaaaggtgaatcttttggttggtgattttgatgatagccacaaagcaagcagggacataccgagggattgcatatgttaaatggaaatttta

SEQ ID NO: 660322 - DNA, 75 bp, Homo sapiens
tcgtgaggctgctcttcgagcggacaccagcagtgaaaacactgtggttcctccagaaacatatgtgaaagtggc

SEQ ID NO: 660323 - DNA, 82 bp, Homo sapiens
aaaggctctccttgcagctgcttagacgctggatttttttcgggtagtggaaaaccagatggagttttaacattgaatgcgg

SEQ ID NO: 660324 - DNA, 100 bp, Homo sapiens
cgcttcagcgtcccggcgccgtcgcgccactcctccgagtgaaaggtgtagcagtcactcggcctacacccacagcatcgaccttgtgaacccagcgacc

SEQ ID NO: 660325 - DNA, 100 bp, Homo sapiens
cactcctcagagtccgactctcccacctgctaaggctatgcctttctgctgttccaagaggaaagctcagtacaagctttgatagatgcctgcctagaag

SEQ ID NO: 660326 - DNA, 98 bp, Homo sapiens
ggccaggatcctgcgctgagcacgagtcacccgttctacgacgtggccagacatggcattctgcaggtggcaggaccctgatgctcccataagacaga

SEQ ID NO: 660327 - DNA, 100 bp, Homo sapiens
gaaagagacttgtgagaagttgggctatcaatggaagaaaagttgtatgaatcaggtagtgtgccagtatttgaaaaatcccaatgtatctgattcactg

SEQ ID NO: 660328 - DNA, 50 bp, Homo sapiens
tttcaaatgaccaccatgttgcaaaaggttctcagaggcactgtgactga

SEQ ID NO: 660329 - DNA, 97 bp, Homo sapiens
aaaacctaaccatgaagacttgaacttaatacagcaagaaagaccatcaagtttaccattctttatagctccaagctctacagattcttcaaatata

SEQ ID NO: 660330 - DNA, 82 bp, Homo sapiens
tggagcttggtttcgggatctcggtgctgcagacggcgagacctcctgcacaggtctctaattaacagaagatggcaaagcc

SEQ ID NO: 660331 - DNA, 96 bp, Homo sapiens
gcgacgaagagtactacgccaaggaggtttacaaaatagacatgccgcccttcttcccctccgaaagtgagcacctgcggatctgtccccagggct

SEQ ID NO: 660332 - DNA, 82 bp, Homo sapiens
atgattctgaaaagaacggagcttgaagcaaagctgcaggttttaaaggaaatggaagttccagtattaccgaaaatctctc

SEQ ID NO: 660333 - DNA, 75 bp, Homo sapiens
ttcgcagtggtcgcttcttctccttggaagtgttttagatcacagtttggaaagcctcatccaccgccttcgtgg

SEQ ID NO: 660334 - DNA, 50 bp, Homo sapiens
cggtgcagttcaaggactgcgctgctggagaagggcctccctagtgtgca

SEQ ID NO: 660335 - DNA, 97 bp, Homo sapiens
aagtaaaagcacagctgccttgtctggagaagcagcctggcatgggagggcaggattgtggtggtgggatttgctggaggaaacattgcttctgaac

SEQ ID NO: 660336 - DNA, 100 bp, Homo sapiens
gcaagacctgcctcctgttccgcttctcagaggacgccttcaacaccaccttcatctccaccatcgcatgcagcagattggaataaatatgatgaccgat

SEQ ID NO: 660337 - DNA, 83 bp, Homo sapiens
cttctccgagccagcgagccagcgagccgccgacccgccgagcaaaatggcatgtcgggccccaggcctgtggtgctgagcgg

SEQ ID NO: 660338 - DNA, 107 bp, Homo sapiens
tgtaatgttccaggacacctgccatcatggagggttatccagcacctggaggatacctgctacctgacgattactgagagccaatcagattagtttcaactgggaca

SEQ ID NO: 660339 - DNA, 100 bp, Homo sapiens
ttccagtttccatgaatccagggcctaacatgggacagccgcaaccaggaatgacttctatctgttctctggggaggcagtaaggggccgtggagctggc

SEQ ID NO: 660340 - DNA, 89 bp, Homo sapiens
tacccctggaacaagttgccggccaacgtgagacaggcaactcgagatgtggtgctgagccgggtgccggagcaggaggaggaccggac

SEQ ID NO: 660341 - DNA, 75 bp, Homo sapiens
gtccagaactggattgaattacttagtgatgttttctggcaaaggccttcctgcatttatgaattctctctcaag

SEQ ID NO: 660342 - DNA, 100 bp, Homo sapiens
cgacaccttcagcgccctggtcaagacgctgcagcgggactgcctggccgccatggcatcagatgaaggcaaactttttgttggagggctgagttttgac

SEQ ID NO: 660343 - DNA, 100 bp, Homo sapiens
ctgatcggcagcggcatgccagggaagcccaagcacctgggcgtccccaacgggcgcatggaagaaatgttggctatttggcgatgagaggtggtgaaca

SEQ ID NO: 660344 - DNA, 98 bp, Homo sapiens
tgctgcccctgctgtcgctcctggtcggcgcgtggctcaagctagaaagggctaagaactctgtgtatagcatatagaaaatttacatcaaaagagta

SEQ ID NO: 660345 - DNA, 82 bp, Homo sapiens
tctgtccccagagcctcagtttgtgcaggacaccgacatggaacagggactcactggggaagtccattggaatattaagccc

SEQ ID NO: 660346 - DNA, 83 bp, Homo sapiens
agggccggcttcaggaggcccaagacaccacagaagccctccgagcccaggcctgagacctgggaggaagctggagaaaagat

SEQ ID NO: 660347 - DNA, 98 bp, Homo sapiens
tgaaacactacagcgcaggattgaagaagagcagttcctctgtgacgagggtgcaggtatctctggggactacatcgatcgcgtggacgagcccttgt

SEQ ID NO: 660348 - DNA, 98 bp, Homo sapiens
catcatcatctacttcacaggaattgccatttcatgtagagcgcatgaagtacaggacaataaagcttcctacacatatcaccaggaggatctctttg

SEQ ID NO: 660349 - DNA, 53 bp, Homo sapiens
gcctcctgagtagctgggactacagactgctttgccagcaacatgctcaattc

SEQ ID NO: 660350 - DNA, 100 bp, Homo sapiens
ctggtacgccacccacatcgagcgctggctcagtgcctatcacgccaaccaggattacaaggcagaggaagacccagcaaaatttaaatctatcaaaaca

SEQ ID NO: 660351 - DNA, 83 bp, Homo sapiens
cccgcgcccgccggtgccaccgtcgcccgcccagcctccgcccggtggcgggacaggcttcattgggacagccctaacccagc

SEQ ID NO: 660352 - DNA, 100 bp, Homo sapiens
gcttcaatgatgggaaggtggatcccgccgggaggtactttgctgttgcagagctattttgctgcatgtgaggatgagatccctgccatccggaaccatg

SEQ ID NO: 660353 - DNA, 75 bp, Homo sapiens
gcagcagccccagcctcaaggccaggttataaacaacttgtgaaatgagtgatttggaagatgatgagacacccc

SEQ ID NO: 660354 - DNA, 101 bp, Homo sapiens
gcacacctgaaacatgaatttgatgcagacttacaggttgaagccatccttgtcaatatatttggtggtatcgtcaactgtgccatcattgccaatgggat

SEQ ID NO: 660355 - DNA, 80 bp, Homo sapiens
agccgatccagcctgcggagcctgtggggcaggtacaagaaaattccccaggacacagagctggtttggagcctttcttt

SEQ ID NO: 660356 - DNA, 73 bp, Homo sapiens
tttggttacctatgtacctgttaccactttcaaaagtgctaactttgagtacatcatcgcagaaaaaagaggg

SEQ ID NO: 660357 - DNA, 75 bp, Homo sapiens
gatctttggcagcgccattggcctctttggggtcatcgtcgcaattcttcagacttgtctgaaagcagcaactgg

SEQ ID NO: 660358 - DNA, 98 bp, Homo sapiens
ttatgaagtattaattcttccactgatatctcaaaaggtgatctggacaaaggaacaggtatctcagctcttttggtacaccagaaggccagaatgga

SEQ ID NO: 660359 - DNA, 100 bp, Homo sapiens
gatttaccagaagtagatggagcagatgatggcaattgaaggaacagactaaaaatcgtgtcctggaaggaaactacaggtactaccagggattttcagt

SEQ ID NO: 660360 - DNA, 75 bp, Homo sapiens
ccttgggcattgctgaatatgaaaaggtctgctggagtttgctggaggtccactccagaccctgtttgcctgggt

SEQ ID NO: 660361 - DNA, 101 bp, Homo sapiens
tagagatgtgatgttggagaactacagaaacctggtctccctagagcactgcagtttcctcctgaaggctggctccggctctccctcaataatggcagcat

SEQ ID NO: 660362 - DNA, 75 bp, Homo sapiens
gagccaagtagcccccagcctgtcagccctaattggggaagcgcgtgtgaaggcaaagaagaatgctgctccatt

SEQ ID NO: 660363 - DNA, 100 bp, Homo sapiens
ctcggatgcagcagtcccctcaaccggtgaccaggtacccaagatattgtatttggagaagtagatcggtgagcaggggagcagcgtttgatcccccctg

SEQ ID NO: 660364 - DNA, 83 bp, Homo sapiens
gagactcgcaacaagatcccctatgagagtcccatcttcagcagagactgtgccctgtccacggtgcctcctgcatgtcctgc

SEQ ID NO: 660365 - DNA, 100 bp, Homo sapiens
gtcggatttcaccacaagaagggctgccagattacggtctttggtcaaacaattagagagaggggaagcttcagtggtagatcttaagaagaatttggaa

SEQ ID NO: 660366 - DNA, 100 bp, Homo sapiens
agacagccatgttttctgtctacgatggacatggaggccctggccaacgtcaacattgggagcctcatctgcaatgtaggggccggtggacctgctccag

SEQ ID NO: 660367 - DNA, 83 bp, Homo sapiens
caaaggaggaggatgatgcagcatccaaccactatcctgaggagcgacatgtggttgaacgccatggacgggacacaagcgga

SEQ ID NO: 660368 - DNA, 90 bp, Homo sapiens
atgtgatgccattccagcactggactcatggaggctgagcatttattcagctgctcctgctaaggccaagccggctgaagctcctgctgc

SEQ ID NO: 660369 - DNA, 85 bp, Homo sapiens
ctttcgccagcccgtgccgcgagcgcggcctgcaggaggaaggtgctcgggtcttcggggcactgggtcccatcggtccctcctc

SEQ ID NO: 660370 - DNA, 75 bp, Homo sapiens
gtcctatgagttcaccactctgacgtgtattcctggggtcattgaaggttgagttccagaataaattctacagcg

SEQ ID NO: 660371 - DNA, 101 bp, Homo sapiens
cagacatctaaccgttccgaaccctcaggggagatcaacatagacagcagtggtgaaacagttggatctggagcatggacaccacgttgctgaaaacatgc

SEQ ID NO: 660372 - DNA, 82 bp, Homo sapiens
aggcaggtgaaggacagctctgtgaagaggggctacttccagaagtctgtagatggacggcagatccgagtagaccaggcag

SEQ ID NO: 660373 - DNA, 82 bp, Homo sapiens
cgaccacgacggccccagggaggatgacgaacccaacctggtgcccggcccgcaggtgagaagccctaccactgcaactggg

SEQ ID NO: 660374 - DNA, 75 bp, Homo sapiens
taggagacatggacgaagccttcaaatccatcaagctcatcaaaaggtttctaagcatgaattgaggaacagaag

SEQ ID NO: 660375 - DNA, 100 bp, Homo sapiens
catgtttctgcattggctagtgggaatggtatatgtcttctactttgcctccttcattctactactgagagaggtatcctgaagaacttgcctggcacac

SEQ ID NO: 660376 - DNA, 79 bp, Homo sapiens
tggaaacataatggaacagaattttgagttctggaggccggcaagttcaggatcagggtgccagcagattcggtgtctg

SEQ ID NO: 660377 - DNA, 101 bp, Homo sapiens
agaaggtggaggatgtggtgctgcccgagaaggtggacgtgctggtgtctgagtggatggggacctgcctgctggctaaactgctcttttcagatggagaa

SEQ ID NO: 660378 - DNA, 74 bp, Homo sapiens
aagaaaccagccgaacttcagggtttccaccgttcgttcaagtgataaaaagttgattgcagaaggacctgggg

SEQ ID NO: 660379 - DNA, 117 bp, Homo sapiens
cgacgtgaaggagcagatttacaaactggccaagaagggccttactccttcacagatcggtcatacagcagatggaacaaaaaaaattacaacaaggaattcctccatcagggccag

SEQ ID NO: 660380 - DNA, 98 bp, Homo sapiens
gccccgggccccccagcatgaagaccccggcggacacaggacctgaaggagaagaaggagaaggtggaggagaaggcaagccggaaagagcgaaagaa

SEQ ID NO: 660381 - DNA, 101 bp, Homo sapiens
ccgggagcctagatcctgtgctttactctgaagactcacatcacttagtgctcttacccagctgatgaaaaagatgccccatttccgaaaacagattacta

SEQ ID NO: 660382 - DNA, 73 bp, Homo sapiens
acagatgtggaaagtgaatgtgcggaaaatgccttcaaatcagttataccgtttggaacgctatgatgaatgc

SEQ ID NO: 660383 - DNA, 88 bp, Homo sapiens
aaaagcagtctaaacctgtgaccacccctgaagaaattgcacaggccatcgaagacggcaatttggaggaaatggaagaggaagtacg

SEQ ID NO: 660384 - DNA, 50 bp, Homo sapiens
ccaccagcttcactctgaagagtttcaagatgatcggctgaatgtaacag

SEQ ID NO: 660385 - DNA, 82 bp, Homo sapiens
cagagcccaggtccccaggacagtgcaggctgaactcacgggaatcaaatggcgtaggtacaattttggagggcatggggac

SEQ ID NO: 660386 - DNA, 51 bp, Homo sapiens
attcgcagtggtcgcttcttctccttggtttctgcataaagaccaactcct

SEQ ID NO: 660387 - DNA, 87 bp, Homo sapiens
aaagaccaacccttgagggaagagaattatctctaaggtacaacaaataacactgtgactccaacctcacaacctgtgcgaaagtct

SEQ ID NO: 660388 - DNA, 82 bp, Homo sapiens
aactgctggagaccaagccggagtaccacagcctgctgcaggagctgggcgtggtgtcttccatgaagaaatgatgaagatg

SEQ ID NO: 660389 - DNA, 83 bp, Homo sapiens
tcagacgcagccgtagacaccagctccgaaatcaccaccaaggtggacgcggatctgtcaacatgggtaaaggagaccccaac

SEQ ID NO: 660390 - DNA, 75 bp, Homo sapiens
ttactcaccagcactttccttggcagccacatgttctcctgctgctttcaccaacaatcaccagtggtttacaca

SEQ ID NO: 660391 - DNA, 74 bp, Homo sapiens
ttgaaacagttacactgcttgtagctcttaagcactattcctgatcagagaactccagttgcttcaacacacag

SEQ ID NO: 660392 - DNA, 75 bp, Homo sapiens
gggctatgggatctcagacaccaccttagaagaggttattgaagcaaacctagatggagaattgaatttgaaaat

SEQ ID NO: 660393 - DNA, 100 bp, Homo sapiens
ggaacagcaggcccgagcccaccgcgccgggccccggacgccgcgcggaaaaggattggccatttgatgatggagctccaccccctaatcagatagtaga

SEQ ID NO: 660394 - DNA, 53 bp, Homo sapiens
tggtgaacatagatcaagacacttacagatggagtcttgctgtgtcacccagg

SEQ ID NO: 660395 - DNA, 98 bp, Homo sapiens
gaatccccccgaaaggaccccccagtgcatcatgcatcttgaagatagactacaggagatgtaccttaaaagtaaaatgctatctgaatatctccggg

SEQ ID NO: 660396 - DNA, 115 bp, Homo sapiens
tttgcaaaatggatggtcagcacaaccaatttgcattacaaattcaacacccaacagcttccttaatagcaaaggtagcaacagcccaggatgatataactggtgatggtacgac

SEQ ID NO: 660397 - DNA, 80 bp, Homo sapiens
agtttgaattgagatgtgctgctcctcacttggcttacttgagaacaggagtaaagataggtgagatgccactgactgac

SEQ ID NO: 660398 - DNA, 51 bp, Homo sapiens
tggtgaaggctatctctacagttcagccgctgtgctcgctgtggagaaaac

SEQ ID NO: 660399 - DNA, 97 bp, Homo sapiens
caactccgccgcccaccatggcttccgaggagctgtacgagctattcaggattatgaaactgctcaggaacacaatgaaaatgatcagcagattcga

SEQ ID NO: 660400 - DNA, 91 bp, Homo sapiens
gcttgtcctggctcttgccctcatcctggttctggaatcctcagttcaaggtgtcagctgtgatgcatgtttaaaaggaaattttcgaggt

SEQ ID NO: 660401 - DNA, 90 bp, Homo sapiens
cggagctgcgcgcggaaccgtgctgccccgccccgctccacccgtgagggtgtgctgggcatcaaggtgaagatcatgctgccctgggac

SEQ ID NO: 660402 - DNA, 90 bp, Homo sapiens
ctgaaatcagagatccttcggaagcggcagctggtggaggacaggaacctgctggtgacagcccacctgaggatattgaccataaggact

SEQ ID NO: 660403 - DNA, 100 bp, Homo sapiens
ccgatccagcctgcggagcctgtggggcaggtcagtatgggaatcctttaaataaatatatcagacattatgaaggattatcttacaatgtggattcatt

SEQ ID NO: 660404 - DNA, 100 bp, Homo sapiens
gcggcggagcgcgagagcttcgagcggactcaggtctcctctgagcctccggcctccataagacccaaaacagatgacacctcttcccagtcccccgcgc

SEQ ID NO: 660405 - DNA, 80 bp, Homo sapiens
cgctgctggacgaagagctctcctccttcttcctcaactatctcgctgacacgcaggcgtccgagctgggccacagcctg

SEQ ID NO: 660406 - DNA, 75 bp, Homo sapiens
gaatgggctaaatcaactggatatgatccagttaaactttttaccaagtgagaaagatcagtctaaagaaaagga

SEQ ID NO: 660407 - DNA, 50 bp, Homo sapiens
cagggactgaaggtcacaccacagcgcccggcccaggcctttgtggtgaa

SEQ ID NO: 660408 - DNA, 49 bp, Homo sapiens
gcgccgtccgcgccgcccgttctgcttccttcaaaatgtctactgttca

SEQ ID NO: 660409 - DNA, 82 bp, Homo sapiens
tgcttcggactgcttcgcaaggaagcggggcggctgcagcgagtaggcggcggcggagggatctagtttgaagcactaagaa

SEQ ID NO: 660410 - DNA, 83 bp, Homo sapiens
ttcagcctcctggcgcccatccgcagcaaggacgtccgcagcaggcttcttccccgggagctcgcagggctgcgacgccttcc

SEQ ID NO: 660411 - DNA, 100 bp, Homo sapiens
ccagcctacaggaggaaaggccagactcacagaaggcctgagacctgggaggaagctggagaaaagatgccctctgaatctttgtgtttggctgcccagg

SEQ ID NO: 660412 - DNA, 101 bp, Homo sapiens
gtcagcagctgcctctgcagagcctggacggctccctccacgtccccctggctttctccggaccccctgtttctggaacagaggagggtcagagaagcaaa

SEQ ID NO: 660413 - DNA, 75 bp, Homo sapiens
cgaagcttggaagttgcagaagtgctgcatttgatacagttcttgggataaatgttgcagtcaagaaactaagcc

SEQ ID NO: 660414 - DNA, 100 bp, Homo sapiens
gttgacttcaactatgctactaaagaattggcagagggggtcgatttgggaggaaaggtgtggctataaactttgttactgaagaagacaagaggattct

SEQ ID NO: 660415 - DNA, 100 bp, Homo sapiens
atgctgttccaggcgcacactagtctacaaggccagagctttctggaagggggcaacagaagccctgcagcagctgcagaaggactctgaggccatccgc

SEQ ID NO: 660416 - DNA, 74 bp, Homo sapiens
gactcttggtgagcgaggagctctccgagaagcaatgagcttgaaatccatggcccaaaatgactctaccagtg

SEQ ID NO: 660417 - DNA, 75 bp, Homo sapiens
cttgcttgggatcctttatcctggtcatcttctatttccaaacctcccgcgacgatgcccctcaacgttagcttc

SEQ ID NO: 660418 - DNA, 75 bp, Homo sapiens
ctagagcagggatcagcaaacttgctgtaaagagccagtctctagtgatccctgaaaagttccagcatattttgc

SEQ ID NO: 660419 - DNA, 88 bp, Homo sapiens
cagcgttggcgtggttgacaagaaagaggagacgcagccgcccgtggcgcttaagaaagaaggctgttggagagaaagtagtgagaga

SEQ ID NO: 660420 - DNA, 50 bp, Homo sapiens
cggaaaccccgcctcttacagtcacgagccacaagtatatggttatgatg

SEQ ID NO: 660421 - DNA, 97 bp, Homo sapiens
atttgacttggaagcaatgtttgaacaaactcgaagaacagctgtggaaagaagttgcaaaacactggattagcctgaggcctgctcagtcgttcct

SEQ ID NO: 660422 - DNA, 96 bp, Homo sapiens
gttcacgcacgggatccagagcgccgcgcacttcgtcatgttcttcgcgccctgggcagcgggtggcatgagacgtgggaacatgggccacctcac

SEQ ID NO: 660423 - DNA, 48 bp, Homo sapiens
aggattccaagtaactcttatttgaacccagcccttgctgacatctac

SEQ ID NO: 660424 - DNA, 51 bp, Homo sapiens
gaaaggggttgattttgaatcaagtgagggtccccttctgcttgttatagc

SEQ ID NO: 660425 - DNA, 100 bp, Homo sapiens
cttgactttaggacaatatatgcagccaacaaggcgtcaccttaagtcaatgcagaccctgcaggacttgctcactgatcttcatgcactccaggtcacc

SEQ ID NO: 660426 - DNA, 74 bp, Homo sapiens
gagcgcagcaaagagggctctatctggaaccaccaggttggtaacaaggaagatgctgagaaggaagtagctat

SEQ ID NO: 660427 - DNA, 83 bp, Homo sapiens
atgatcagctatggtggtgccgactacaagcgaattactgtgaaagtcaatgcaattctgtggtgttcttggtcacacattta

SEQ ID NO: 660428 - DNA, 100 bp, Homo sapiens
gtcgcagtcgcgatgtcggtggccgggctgaagaagcagttccacaaagccagccagctttagatccagctaaggatccatgcttaaagatgaaatgtag

SEQ ID NO: 660429 - DNA, 82 bp, Homo sapiens
cccagcccccgcccgcagcctggacgacatcgacctgtccgccctgcgggacctgaaggagaagaaggagaaggtggaggag

SEQ ID NO: 660430 - DNA, 90 bp, Homo sapiens
gtttagagaagggcacaagattattccaagcaacagaatggaagtgttcgccagttactacatgaaaagataagagatgcttatactcac

SEQ ID NO: 660431 - DNA, 75 bp, Homo sapiens
agaaagtggagtccgagctgagatccatctgcaccacggtgctggggatatcattttcaatgcccaatacccaga

SEQ ID NO: 660432 - DNA, 100 bp, Homo sapiens
tggtggtctggggcaacgcggaagtggactcccgaaaaattgaccaggaagggaaaatcccagatgaaactttggagaaattgaagagcctagggctttt

SEQ ID NO: 660433 - DNA, 100 bp, Homo sapiens
ctgagacgcacagtctccgtgccggtggaggggcggccccacggcgagcatggtgtcatggagaaactccagctgggcccagagattctgcagcgggaaa

SEQ ID NO: 660434 - DNA, 51 bp, Homo sapiens
accagaaagctgggagccctgcgtggagatggggaaactgaggctcggctc

SEQ ID NO: 660435 - DNA, 90 bp, Homo sapiens
aacctgatgaatgaattaaaacagaacttcagcaaaagctggcatgacatgcagactaccactgcatttgagttctgtgaacctgcattt

SEQ ID NO: 660436 - DNA, 100 bp, Homo sapiens
cctgaatgggggcggcgtgcccgccggggggctagtggccacgctgcagagcctcggtactctgtggatatccccttggacaaaactgtcgtcaataagg

SEQ ID NO: 660437 - DNA, 98 bp, Homo sapiens
tgatcccccgaagagcttctgtcgccgctctagggtggggagcattaagcgggaaatgaccttcacatttcagtcagaggacttaaaacgtgactgtg

SEQ ID NO: 660438 - DNA, 75 bp, Homo sapiens
tcgtttcccagatggccagatttggaaaccagacattcttctctataacagaaaatgacagatggcgagacctgg

SEQ ID NO: 660439 - DNA, 100 bp, Homo sapiens
attattttaacatttgggagaaacacagccagaaggtcccttcaccgatgttgtcaccaccaacctaaagcttggcaacccgacagaccgaaatgtgtgt

SEQ ID NO: 660440 - DNA, 83 bp, Homo sapiens
gagaaagtgcgtgtgtttgaagaagccacgcttgctctttgcagtgaatgggaagcctcattttggggaccaagaacctgtac

SEQ ID NO: 660441 - DNA, 98 bp, Homo sapiens
tgaaaaccttggccgaaagggttgtagacatggcggccatcaggagcttacaagaccctatgaaaaaattagttgagaaagaagagaagaagaaaatc

SEQ ID NO: 660442 - DNA, 87 bp, Homo sapiens
aggaaagtcccaggatgactactgtgtcaatgttctagaacagatcagacattttgtaatgatgcctgaaataaacactaaccacct

SEQ ID NO: 660443 - DNA, 75 bp, Homo sapiens
tggagggggtgaagaccgtgttggtgacgaccaacttggcccctcacggtgccggtggtggtgtgcacattgagc

SEQ ID NO: 660444 - DNA, 98 bp, Homo sapiens
ggatggcaaggtgctggcgaacccgcggcggacttacgtcacgcctcctggcacagggcaatttgcatatttctccaaagaaccatccagaacctgag

SEQ ID NO: 660445 - DNA, 75 bp, Homo sapiens
ggaaaaggtcttcatctgagagtacttcttcaacaggtaagaatgattgatgttggctgatattggagtgctcat

SEQ ID NO: 660446 - DNA, 100 bp, Homo sapiens
gagactcacgggacgcgacgcgccccgcctcccccgtccggtccctctctccacggtaagggacaatgaatgattttgactatttgaaactactaggtaa

SEQ ID NO: 660447 - DNA, 75 bp, Homo sapiens
ggggacgaatcctgagcttgccagagacgggcggcgcaagctccaagaagcccaagaaacatcccaaagtggccg

SEQ ID NO: 660448 - DNA, 75 bp, Homo sapiens
gtgaaatttgttctcaagcacaacagagagtgaggaagaagatgaaatggaagttgaagaccaggatagtaaaga

SEQ ID NO: 660449 - DNA, 105 bp, Homo sapiens
ttttgaaaggtgtactgcaaggaacaaaatgtttgtaaattctccttttaccaaggaacttcaagagcagctgaagatcaccacctttaaagatcttgtaatcag

SEQ ID NO: 660450 - DNA, 87 bp, Homo sapiens
ctggtcagttccaaccttcccaggaatcttctgtggccatgttcactccggttttacaggtgcctgactgacagaagttcttgcccc

SEQ ID NO: 660451 - DNA, 83 bp, Homo sapiens
gtaaggtgcgcggagggactgcaccttctccatcaggtgcagaagggttggctgttccagctccaaagagaaggaggaacctt

SEQ ID NO: 660452 - DNA, 122 bp, Homo sapiens
actgcgtctccatcaaccgggccgtgccccagatgcccaccgggatggagaaggaggaggaatcgccagagcctaagcctggagacctgattgagatttttcgccctttctacagacactgg

SEQ ID NO: 660453 - DNA, 71 bp, Homo sapiens
cttcataagggatccgcagctgctcccgctctccagtttgtgtgtgtggaaagcctggtgaccgccgtggt

SEQ ID NO: 660454 - DNA, 100 bp, Homo sapiens
ctactggaggcggcccgcttcctggaatggcaagcgcagcaacaacagagagcacgtgctcaccatggatgatgatatcgccgcgctcgtcgtcgacaac

SEQ ID NO: 660455 - DNA, 100 bp, Homo sapiens
ctttcatcacatggatcctcatccagtttgcatttagtgagtgatagttgcttcaggaatcttgcagaagaccgcagtgggataaatctcaaagatctcg

SEQ ID NO: 660456 - DNA, 50 bp, Homo sapiens
atgaaaccagcagacagaatttgtcagggaaaacaaagtgcatgatgaag

SEQ ID NO: 660457 - DNA, 100 bp, Homo sapiens
agaggacctggcagcaataagtttttggtgaaataacaaagaggtgcaatggatgagcttcatagtctggatccaagaaggcaagagttattggaagcta

SEQ ID NO: 660458 - DNA, 100 bp, Homo sapiens
cacctccggacgtgagaattacaggcttggatctcaaaccgccgcggttcgagaacttgtcttggacaattgcaaatcaaatgatggaaaaattgagggc

SEQ ID NO: 660459 - DNA, 98 bp, Homo sapiens
acttttgtgtccaggcataagaaatttgacgaattggagcgttattcagtatattaatgtcttattgataatggcagaacatccaccactactggata

SEQ ID NO: 660460 - DNA, 101 bp, Homo sapiens
cctgcacctgtatatagggccaagtcaattctggagacctgggtgtgggtcaagcaaccaggactcacaccacccggcaagaactgctcactacggctccc

SEQ ID NO: 660461 - DNA, 100 bp, Homo sapiens
ttttgaaccactggaaagtgaggaattttgaagtacaccgtggtgacattgtatcattggtggcacagtcgtagtgccaactctggactctgttttgtat

SEQ ID NO: 660462 - DNA, 75 bp, Homo sapiens
actgggtgctcctgcccgctggcccctcgcgcgtgaggatctatctcaggggccacctacagatgctcctgcagt

SEQ ID NO: 660463 - DNA, 100 bp, Homo sapiens
ctcaggaagctggcagagagggtggacgaccccgaactccaggacagcatccaggcctcattggacagcattcgagatgaagcccggggcaagaactgtg

SEQ ID NO: 660464 - DNA, 119 bp, Homo sapiens
ccttgcggaaaggatgttggcggtccctgtgacctgtggagacacggccagatctgccctccatgttgcctcagcttctcaaagtttctggtgtttatgaagatccataacagctggct

SEQ ID NO: 660465 - DNA, 90 bp, Homo sapiens
agcagctcgggcaaggatggtggaggcgagaacactgaggagaacctcaagaaggcatgaagccagcccctgcagtgccgtccacccgcc

SEQ ID NO: 660466 - DNA, 98 bp, Homo sapiens
ttctcttgaccatgtgacatctgatgctgtggaacttgcaaatcgaagttacagatttatggtaatggaaagactaggaatagatttacagaagatct

SEQ ID NO: 660467 - DNA, 75 bp, Homo sapiens
tcatttcacagctgattcctgggagcacatccatttcattggcaagataaagagttctatctgtcttctacgcgg

SEQ ID NO: 660468 - DNA, 75 bp, Homo sapiens
cagctgccggcacgaatacccgctaagctggatgaaagaggcggggtttcaccatgttgcccagactggtcttga

SEQ ID NO: 660469 - DNA, 83 bp, Homo sapiens
gtgggcacggaccaattcgggaacaaatactactacatcccgcagtacaagaactggagaggaatcaaacattttaagtccag

SEQ ID NO: 660470 - DNA, 75 bp, Homo sapiens
ctacacctcccaccctctccatcacctgctctgctcttataaggatccgagccggacatggtggctcacacctgg

SEQ ID NO: 660471 - DNA, 75 bp, Homo sapiens
gcggcgcagtacaccaacgcggtgcgcgaccgggagctggacctccgggcaattctgtggtgttcttggtcacac

SEQ ID NO: 660472 - DNA, 75 bp, Homo sapiens
taaaccttcaaggcaaactgtgttcattgagaccctgattgaagagagagtgatcagggccaaagcggtcagtga

SEQ ID NO: 660473 - DNA, 100 bp, Homo sapiens
ctgcttctggacgcctcagccaccagttggaatgccaaaaatggaaaaagtctacttacataatcctagttctgaagaaacgattactttagtatcaata

SEQ ID NO: 660474 - DNA, 100 bp, Homo sapiens
gatcccgggcgggggcaccgagggctaccacgttctgcggctgagcttcagtcattgtctattcctggaacttaccaagagaagatcacccacctgggac

SEQ ID NO: 660475 - DNA, 90 bp, Homo sapiens
atgggcggcggggactggccacggcgctgctaggtctcggcgcggaagatggccggcggcgtggacggccccatcgggatcccgttcccc

SEQ ID NO: 660476 - DNA, 82 bp, Homo sapiens
cggaggctgctggccaaggcgcggagcagtgcccccaccgcccgggtgtccagtgtgaagtgcagctggtggagtctggggg

SEQ ID NO: 660477 - DNA, 100 bp, Homo sapiens
ctatgagcacaggatctatctgcaacctggacggctggccaaacacttagagatccagaggctgcggcaggccctgcaggcatcccaggctgagcgggac

SEQ ID NO: 660478 - DNA, 100 bp, Homo sapiens
ttggagatggagttgaatgagcacaggccggtgccccgcgggtgagctggagacctcagacgtggtaactgtggtgctgggccaggacgcaaaactgccc

SEQ ID NO: 660479 - DNA, 75 bp, Homo sapiens
caaacttcactttaaaatctgaatgtcgtcattgaattttgagaagcattctgaaaactttgcatggacagagaa

SEQ ID NO: 660480 - DNA, 83 bp, Homo sapiens
gctttggaaacgacgtcatgtgttaggtgctgtcctggagccgagagctgccttgcgcttggcgcgccctgcacacctccccg

SEQ ID NO: 660481 - DNA, 100 bp, Homo sapiens
atgctgggcctgccacggaggagccaggtccctgtctgagccagaagcacaagcctatgcagacgacaacagtttgctgttcatggagacatcagcaaag

SEQ ID NO: 660482 - DNA, 101 bp, Homo sapiens
gggagtaggagactcagaatcgaatctcttctccctccccttcttggccaggtcagagcagcccaccatgggatggggagggggtggaggctgcaccccgc

SEQ ID NO: 660483 - DNA, 82 bp, Homo sapiens
gttgcgcttcaaacaatacctcaggaacccacccaaactggtcacccctcatgacaggacctgggctatcccttggagcttg

SEQ ID NO: 660484 - DNA, 90 bp, Homo sapiens
caggaagttcaagatggccgccgcggagacccagtcgctacgggagcagccagatactatactggcaattgctggagaagattttgcaat

SEQ ID NO: 660485 - DNA, 100 bp, Homo sapiens
gaaggatcctaatgctcccaaaaggccaccctcatttttgaaggtatccgaggtcctggaatagaaggtgacattgctattgatgatgtatcaattgcag

SEQ ID NO: 660486 - DNA, 100 bp, Homo sapiens
tgtttcagggacaagtgccatcctctttacaggcagcagggaatacagcagacagcccctcctcaacagacagtgcagtattcactttcacagacatcaa

SEQ ID NO: 660487 - DNA, 87 bp, Homo sapiens
atttgttaaggattccaagtaactcttatttgatggtcttgctgcattcagggcttttttaaagtcggaattctgtgaagaaaatat

SEQ ID NO: 660488 - DNA, 75 bp, Homo sapiens
ttggctgattttggaaagagtggaagaacccccttcacctttgaaggagaacgacctgctcagaatgagaagagg

SEQ ID NO: 660489 - DNA, 100 bp, Homo sapiens
agagaacagcctcctggaggagaccctacactttgaccatgctgtccggatgggtgccttcaaatctcttgacaaagatggcactggacaaatccaggtg

SEQ ID NO: 660490 - DNA, 100 bp, Homo sapiens
tgattggagccaccactcccagtacagccttcggtggcaagctgaagaacccactccaagttgtcctggtggccacccacgctgacatcatgaatgttcc

SEQ ID NO: 660491 - DNA, 82 bp, Homo sapiens
cttagctgtgctcgcgctactctctctttctggcctggaggctatccagcaagaagctcattcacacagaagacccatttaa

SEQ ID NO: 660492 - DNA, 83 bp, Homo sapiens
ggtggagaagcgccttcgctatctcatggacacagcaatggcaccagcatgatatcattgatcattcctcccaaagaccagat

SEQ ID NO: 660493 - DNA, 120 bp, Homo sapiens
gccgctctggaccgtctcaaggtgtttgacggcatcccaccgccctacgacaaggtgccaggaccattgacaccagaaatggaggcacggcaggctacacggaaaagggagcagaaggca

SEQ ID NO: 660494 - DNA, 78 bp, Homo sapiens
agatgtttgcagtgtatttgattccgatcattcgagcccttttcactcaaattgtcctgtgagttcctgagtgaccag

SEQ ID NO: 660495 - DNA, 80 bp, Homo sapiens
taatgaaatattgtcgcataaaacatgcatgggcaagaactattcacacttttcagaatgtgacagtgatgataacatgg

SEQ ID NO: 660496 - DNA, 90 bp, Homo sapiens
gccggacacgcttctcttggaggacttaaccaccaccatgtcgagcaaaagaacaaagaccaagaccaagaagcgccctcagcgtgcaac

SEQ ID NO: 660497 - DNA, 83 bp, Homo sapiens
cagcatcctggaggaccagtcagaccagcgcgtcatcatcaaggtccgcgggagagctgtggggcttggtgagtgtttcgtgg

SEQ ID NO: 660498 - DNA, 100 bp, Homo sapiens
cctggagtacctgtctggtacctggtacccggcacactgtgagttcctggacatcaagggctgatatttggagttcttacaacatggcagacattgacaa

SEQ ID NO: 660499 - DNA, 90 bp, Homo sapiens
gccgcgccacagccgctgcggatcatggccttcactattctgtgtgatattttgatgatcttcagccatcagattatgtcaggagggcgt

SEQ ID NO: 660500 - DNA, 90 bp, Homo sapiens
attgtctgtgacagtaacagtacttgggatcccccagttccaaagtgtcttaaaggttacaccggatgacatcaattgaaagagaagaaa

SEQ ID NO: 660501 - DNA, 83 bp, Homo sapiens
cttaccccttctcaccgaggaagagcgggagaaaggagctaaagttgcagacaagatccagctcatcaataatatgctggaca

SEQ ID NO: 660502 - DNA, 89 bp, Homo sapiens
cgatgctacgctaacctatcgggttctctctccgcgcgttcagtgctgggcctaaaggagataacatttatgaatggagatcaactata

SEQ ID NO: 660503 - DNA, 90 bp, Homo sapiens
gcatctaccagatgtacttgtgcttcctgctggccgtgctgctgcagagtgcagcagctgccccgagccccgtgcttggcaacattcccc

SEQ ID NO: 660504 - DNA, 75 bp, Homo sapiens
tttggaaatgtgctcacactcactgttgcaagaattcaattccgtcttcctgatggttcttcctttacaaatcag

SEQ ID NO: 660505 - DNA, 100 bp, Homo sapiens
gaggaggttttcaggaccaaaattgtggaaaagtcactctggttagagcagccagcgggtacagaatggattttggaagagggagtcaccactggacctc

SEQ ID NO: 660506 - DNA, 49 bp, Homo sapiens
atggcagctgctgatttgtcccatggcaagaaggggttaaaagtggaat

SEQ ID NO: 660507 - DNA, 100 bp, Homo sapiens
gctgtatcattggcaacatgatttcggtggggtggaagacaacccgtgagtattacaccttcatgtgggttactttgcccattgacctaaacaacaaatc

SEQ ID NO: 660508 - DNA, 78 bp, Homo sapiens
cggcgtgggcggcagagagcggggcggcggcaggtaatgattcattggtgtggcgcaagacaagtcaaagcaccagtg

SEQ ID NO: 660509 - DNA, 74 bp, Homo sapiens
cagacgatcccgaacggactggtgacccggccctgtagctacagcaagaagtcccactttgactttgaggagga

SEQ ID NO: 660510 - DNA, 82 bp, Homo sapiens
agaagacggtccctgccaacatccgtttgaaaagacccttgaaaatggaagaccctgtttgaaaagaagatttttcagatcc

SEQ ID NO: 660511 - DNA, 75 bp, Homo sapiens
agcaagctgaagacatcaagaagatcttcgagttcaaagagaccctcggaaccagccagacccggtccgtttgga

SEQ ID NO: 660512 - DNA, 90 bp, Homo sapiens
agccttcgtctcccagattgcagggtgaaaggttgagccatgcagtaggctgtgcttttgcagcctgtttagagcgcaagcagaagcggg

SEQ ID NO: 660513 - DNA, 98 bp, Homo sapiens
ccgtcatcaccatcaccttcaatccgctctactggaatgtggtctcggcgcggaagatggccggcggcgtggacggccccatcgggatcccgttcccc

SEQ ID NO: 660514 - DNA, 75 bp, Homo sapiens
acttgttccctccaagacaactgaatggcctcggcaagacgcgcaggaagaccagcgcgcgggatgcgtccccca

SEQ ID NO: 660515 - DNA, 82 bp, Homo sapiens
agaccgcggccgggaccgagggctgcagacgggctggtccgtgcacacctaccagacggagaagcagaggaggaagcagcac

SEQ ID NO: 660516 - DNA, 72 bp, Homo sapiens
cggggcctggggctgcctgccgggcggccgggcgcggcgagcccagctccacagcacctgttgccttcatta

SEQ ID NO: 660517 - DNA, 90 bp, Homo sapiens
ccaacctggtgcccggcccgcagcctgccacagtgactcaggtcactcaaggaactatccgaccagctgccaacttcgatgctataagag

SEQ ID NO: 660518 - DNA, 82 bp, Homo sapiens
tggattgtgtcatggtcagaaatgaaatcacaggacatacatacagacagaagatatgttgtgggatcatctataaaggccg

SEQ ID NO: 660519 - DNA, 100 bp, Homo sapiens
gcagctggccaaacaactggctggaatattgcaggtgcctttagaggttcgagaacttgtcttggacaattgcaaatcaaatgatggaaaaattgagggc

SEQ ID NO: 660520 - DNA, 75 bp, Homo sapiens
cttttggactccctattgtatttgccagagcacatctgctcaaattgaaattattccatgcaagatctgtggaga

SEQ ID NO: 660521 - DNA, 75 bp, Homo sapiens
accagaagctgcagggcaagccacagagccatgagctgcccgagaggaagtttggcgtggtggtggttggtgttg

SEQ ID NO: 660522 - DNA, 52 bp, Homo sapiens
atcctctgtacgcccgttcactgatgacagcacctggagtgttagctggtca

SEQ ID NO: 660523 - DNA, 98 bp, Homo sapiens
tcttacgctgacaaagattattgaagcaagactaaaggagtaaacatggaagtactaacttcattccagaacaatttttggatgacttcattgatctt

SEQ ID NO: 660524 - DNA, 100 bp, Homo sapiens
cgcgcagctgcccgccggggcggggtcatgttccttggggaactggaagaaatattggatgtgattgaaccttcacaatttgttaaaatccaagaacctt

SEQ ID NO: 660525 - DNA, 98 bp, Homo sapiens
ggagactgactactcatcagctgatgagaacatcctcaccaaagcaggcatgatgggcccacctcctggtatgagacctcctatgggtcccccaatgg

SEQ ID NO: 660526 - DNA, 75 bp, Homo sapiens
ttatgtacaatgtaacagaattaaattcagtcagccaagctggagaatgtatcacaggtatattgaaattgctat

SEQ ID NO: 660527 - DNA, 100 bp, Homo sapiens
aaactgatcagacgaactacgaacccctggacgggagagtctgccggcggagaatataagattgttctctggggccggactgagaaatgcctgaaggaga

SEQ ID NO: 660528 - DNA, 98 bp, Homo sapiens
ttaggaccacccaccatgcctatccaggatgaaaactttcggaagagaaagttgcctgtggtaagttcagttgttaaagtaaaaaaattcaatcatga

SEQ ID NO: 660529 - DNA, 75 bp, Homo sapiens
agtacctgcttcagagacatgagaagattcatactggctgcagccacaggtccgcacggaaaaccaggagctcca

SEQ ID NO: 660530 - DNA, 83 bp, Homo sapiens
ctgataaggaagagaaaaggccttgccaagacaatgcagatcttcgtgaagactctgactggtaagaccatcaccctcgaggt

SEQ ID NO: 660531 - DNA, 100 bp, Homo sapiens
ctgctgcaggaaacatggccaagtttgccctgaatcagaacctgcccgccagacgttcacatcggatgcggcgacaccaccaccaccaccaacaccacca

SEQ ID NO: 660532 - DNA, 50 bp, Homo sapiens
gtccttgatccagtatgcttatacagtaaaatgattaacctttcagttcc

SEQ ID NO: 660533 - DNA, 75 bp, Homo sapiens
gaaaaatctgttacttgatgaacttcagaagtgagacggtttaagcggaagcatcttactgccattgactgccag

SEQ ID NO: 660534 - DNA, 75 bp, Homo sapiens
ttcttaatggaaaggatcctgattcctcttcaaagaataactgaagtgaagtgatggactccgatttggagagta

SEQ ID NO: 660535 - DNA, 82 bp, Homo sapiens
agaaggtggaggaatcctgatactgagcgggagtgcatccgccccaacccttttccccctcgtctcctgtgagaattccccg

SEQ ID NO: 660536 - DNA, 100 bp, Homo sapiens
ctggaacatcgaaaggaccaagtaacacagctttcacaagaggtcatcatcaagaatatgggctggaatctcgttggtcctgttgttcgatgccttttgt

SEQ ID NO: 660537 - DNA, 98 bp, Homo sapiens
ggaaacaatggcatttacagaaagagtcaacagcagtggcaacaggttccatcataatgaatggatccaatatggcaaatacatcaccgagtgtaaaa

SEQ ID NO: 660538 - DNA, 76 bp, Homo sapiens
cccggttggcccgggacgagtggaatgacgtactctggcctcttctgcgtggtggtcaacccctataaacacctgc

SEQ ID NO: 660539 - DNA, 90 bp, Homo sapiens
gcctggaacgcaaggaccggagggcgtgggctgggacgcccctaccttggtctttcagggtggacgccctgcttcatctggcccgccaga

SEQ ID NO: 660540 - DNA, 101 bp, Homo sapiens
aagtattaattcttccactgatatctcaaaaggtgatctggacaaaggaacaggtatctcaggtgaaagaaaagatgttgtcccggttaagagtagtttcc

SEQ ID NO: 660541 - DNA, 100 bp, Homo sapiens
gcagtggacacacagcatggagaaatccttcgcaatgtcaccatcctacgaggaatggcggcgctagatagtaaggcatcagggaagatgggaatgcgag

SEQ ID NO: 660542 - DNA, 75 bp, Homo sapiens
ccgggcctgcgggaagcgatggagcccgggaagaaaagcaaactcaagttcctgcctcctcaggcggagcaagaa

SEQ ID NO: 660543 - DNA, 108 bp, Homo sapiens
tgttgactttaatttgatggatcctaaactcttggcttcaggttctgatgatgcaaaagtttgcagaaaaaacttcagcatgtgccaggaacacaacctcaccttgat

SEQ ID NO: 660544 - DNA, 75 bp, Homo sapiens
caaggtttgaaaagcagctggcctgcaaggagccagtgtcctgggctaaacacaagagtgctgattcccactgta

SEQ ID NO: 660545 - DNA, 83 bp, Homo sapiens
ccagagggttggaattgcagatgtgagtggttgatatcacagcaagtatcctttccgtgttggtatggttccctttaaggaat

SEQ ID NO: 660546 - DNA, 90 bp, Homo sapiens
gacagattcgcagtggtcgcttcttctccttggactttccttatcccagttgattgtgcagaatacactgcctgtcgcttgtcttctatt

SEQ ID NO: 660547 - DNA, 75 bp, Homo sapiens
ccctccgccacgcagccggccaccgccgagacccagcacatcgccgaccagcttaccctgaaagaagcagatccc

SEQ ID NO: 660548 - DNA, 74 bp, Homo sapiens
tggccggcctgacaacacagggcgtgggcactgcctccttacctgtgaggaatgcaaaataaagcatggattaa

SEQ ID NO: 660549 - DNA, 48 bp, Homo sapiens
ttcaacagcactttgaaaaaggtgaacttgaaaagctgaaattcctag

SEQ ID NO: 660550 - DNA, 82 bp, Homo sapiens
aacatggactgaagtatccagcgctcattgggaatttagttaagcatttggccctggttgatttctcttctgaatagtttcc

SEQ ID NO: 660551 - DNA, 93 bp, Homo sapiens
ttcaagtgttggcggatggaagggaggagactcctgaccctcagaatgtgaagcagccgacacgagtcgttgttcataaaacagcttttgaaa

SEQ ID NO: 660552 - DNA, 100 bp, Homo sapiens
ctcatctagcccagaggatcggaatgacagatttgacggactggacaaagcttctatagcaaactcagatggccccacagcaggttcccaaacacctccc

SEQ ID NO: 660553 - DNA, 75 bp, Homo sapiens
gccaagccagctgcgtcctaatccaaaaggaactagaggctgctatccagccagatactagcctggtgtcagtca

SEQ ID NO: 660554 - DNA, 89 bp, Homo sapiens
catggcaagggcgagtgaagcagtgtcacgcattttagaagaatgggattttgtgtggatgagggctcggctacagcaagaagtagagg

SEQ ID NO: 660555 - DNA, 50 bp, Homo sapiens
ttcatggccctgaagaatgatgagtccttgcctgcattaattgaacaagg

SEQ ID NO: 660556 - DNA, 90 bp, Homo sapiens
aaaacagtcgcctttcagctcagcgcacacaagctggatggttgctgatttctgctctgatgacattagagacggggtttcgccatgttg

SEQ ID NO: 660557 - DNA, 100 bp, Homo sapiens
ctgggcagcagctgctgtggaagggctccttcaagcccagcgagcatggtacaggtttgcagattccgccagcagcacagcaagctctacagatgagtgg

SEQ ID NO: 660558 - DNA, 101 bp, Homo sapiens
gcaccaccaagcgctttcccgagaccgtcctggcgcgatgcgtcaagtacactgaaattcatcctgagatgagaatgcaccgacagagaagtccaacacaa

SEQ ID NO: 660559 - DNA, 100 bp, Homo sapiens
gtgactttcacttccagccagctgtgaagaaggactgcctccgggcctgccaggagcagatcgaagccctgctggagtcaagcctgcgccaggcccagca

SEQ ID NO: 660560 - DNA, 100 bp, Homo sapiens
gatgagaatgctggcggaggacgagctccgggatgctgtactccttgtctttgcaaacaaacaggcgtctgtagaggcttctggtgaaatcgcattatgc

SEQ ID NO: 660561 - DNA, 75 bp, Homo sapiens
cctcagcctcccgagtatctgggattacaggtggattcaccaatgaacttgaagcatcctcatgacctagtcata

SEQ ID NO: 660562 - DNA, 50 bp, Homo sapiens
atggaggcagtttcttccaaactggatgttgaatttgttctctcagcacc

SEQ ID NO: 660563 - DNA, 75 bp, Homo sapiens
agttttgtgcagattgccagtctaaagattggagcctccctctttgctagtaacattggaagtggccactttgtg

SEQ ID NO: 660564 - DNA, 51 bp, Homo sapiens
cggtcgagcatgttcaccagggcccagggatccggtgtgattaaagctggt

SEQ ID NO: 660565 - DNA, 98 bp, Homo sapiens
gaggtcttcaccaccatggcctccgtctgccacacgctgatggtgcagcaccgcatgatggtacccaaagtcagttcgcctctacggaccaaacttca

SEQ ID NO: 660566 - DNA, 100 bp, Homo sapiens
ttcattggccacctacagaaacaaaatgtcaacaaattgatggcactggaagaagctgcaaaacgtttccaggaattgaaagcacaaagagaaagtaaag

SEQ ID NO: 660567 - DNA, 87 bp, Homo sapiens
caagaaagaaacagaagacagaacagttgggactaacaagggaccgtataatagacgctggccccaaaggaaactactctcgattta

SEQ ID NO: 660568 - DNA, 87 bp, Homo sapiens
tgttcaatacacctcccacctgtcctcaggcatatcaaagtgctgaggaatgtaaacaagtttgctgggccttgcgagacttcacca

SEQ ID NO: 660569 - DNA, 75 bp, Homo sapiens
ggaataggagctggggagcccttctgcgccacagatattgccaaatatcagatcataaaggacaggaattctgaa

SEQ ID NO: 660570 - DNA, 83 bp, Homo sapiens
cttttcaagacaccaagtgagaggccaaccaggtaatcattaccaaatgaggaggaaaggacgatgtcatcgaggctctgcag

SEQ ID NO: 660571 - DNA, 98 bp, Homo sapiens
aaaatctctaaatgcagattccagaaaaattacagcacatctcagtgaatttgcaagtggtcttgagagctgatgacaataacatgggcaatggctgc

SEQ ID NO: 660572 - DNA, 100 bp, Homo sapiens
ttctccagctccttcattccccagcagctccttgctcggattgaacgtatggaaaggcggatgcagctggtaaagaaggataacgagaaagaaaggcaca

SEQ ID NO: 660573 - DNA, 75 bp, Homo sapiens
tgcgggccgcacaacttctcctcccttcttccagaccagctggtcttgcttctggagcatctcttggagcagaag

SEQ ID NO: 660574 - DNA, 100 bp, Homo sapiens
gccatggccgagccggcttcgacatctgaatgggactccgagtgccttacatccctgcagccccttcctcttcctacacccccagcagcaaatgaggcac

SEQ ID NO: 660575 - DNA, 121 bp, Homo sapiens
agtggttattatgacttccttgtcgaagttgaaggtgacaaccggtatattgcaaataccgtagagcccaataggggcacaaaacgtccccgggatgatgaagaggaggagcagaagatgc

SEQ ID NO: 660576 - DNA, 82 bp, Homo sapiens
ctagaagaaatttggagtgtgcgtgcgcgccgagcgacctccttgaggcccgccgcccgcgggcccacgagtgcctgggtga

SEQ ID NO: 660577 - DNA, 100 bp, Homo sapiens
atcaggagccgccgccgccatatcagagaaacagcacccaggactatcttccaaagagttctggatatcctaaagaaatcttctcatgctgttgagcttg

SEQ ID NO: 660578 - DNA, 90 bp, Homo sapiens
ggagccatgaggcgccagcctgcgaaggtggcggcgctgctgctcgggctgctcttggaggtaaaaagaacgtattctcatggtacttac

SEQ ID NO: 660579 - DNA, 50 bp, Homo sapiens
ggtggagccactgaggaagcacagcagtgtgtccccgagaaagtgtcaga

SEQ ID NO: 660580 - DNA, 100 bp, Homo sapiens
tgcaaagaggtgaatgttgtggctctgcgtgcagacataaattcatggccaagcaaagaaaggaaaaggagcagaatgaggctgaagaaagaagctctag

SEQ ID NO: 660581 - DNA, 90 bp, Homo sapiens
agaatatttaatggaaaatcgcttggttaaaacctgacacttttaacagattagtgatgatgaaccaggttatgaccttgatttattttg

SEQ ID NO: 660582 - DNA, 100 bp, Homo sapiens
attgaggagccaacctcccctgatgacattctggggcacgccaccatttccaagtgtccatctatggaatttggttttatgataaggaagaatgccaaag

SEQ ID NO: 660583 - DNA, 82 bp, Homo sapiens
tgctcagggaccctgtggagagcggagctggagtttgttcagatcatcatcatcgtggtggtgatgatggtgatggtggtgg

SEQ ID NO: 660584 - DNA, 100 bp, Homo sapiens
gtgaagcaaaagcctttcatgattattgcttagatgagtacgaagatgatgaagcagggcagaaagagcggaaacgagaagatgcaattacacaacagaa

SEQ ID NO: 660585 - DNA, 100 bp, Homo sapiens
gaggagaaccgggagccattcagaaaaggcacaactacaagagcggaatgaccctcagcaactgctattagatgccaagcacatgtttcctgttttgttt

SEQ ID NO: 660586 - DNA, 88 bp, Homo sapiens
tcccggtggctttcatccttcacctttgtacatcctggccgtgtttgacatctttacggttacctgtcctgctgccgattcctggatg

SEQ ID NO: 660587 - DNA, 83 bp, Homo sapiens
cgtcggacctgcacgagctgtctgcagtggccggtgtccagctgcctactttctgcccggatctctggctcctcatctctccg

SEQ ID NO: 660588 - DNA, 96 bp, Homo sapiens
gtatctgcgcgtgtgaggtgctctgccgcaaccctatgcagagagcagctacattgtcacaggtgacattaaggggaacattaagttctatgatca

SEQ ID NO: 660589 - DNA, 54 bp, Homo sapiens
cttcctcacagagggatttagctgtaagggatttgaaactggacaacatccttc

SEQ ID NO: 660590 - DNA, 76 bp, Homo sapiens
ttgaacttaatacagcaagaaagaccatcaagtttaccagttggctcccatcatctgagactccacagaggcctgg

SEQ ID NO: 660591 - DNA, 76 bp, Homo sapiens
cgcggagcggagcgtcccgacccgccgtctcggcgcggaagatggccggcggcgtggacggccccatcgggatccc

SEQ ID NO: 660592 - DNA, 75 bp, Homo sapiens
ccagaagcgggcggcgcgggggagatggatggtgattgctcacaccaaagccttggacccctcccagcctgtgac

SEQ ID NO: 660593 - DNA, 100 bp, Homo sapiens
ctgctccagctgttcgaaggtgatccaggaagcggtttgacagggctgaagcagagtacattgcagcaaagctagatatacagcgcaagactgagataaa

SEQ ID NO: 660594 - DNA, 99 bp, Homo sapiens
cacaccttcctgtgagtgagaaccatagcagaaccttcaaagcacctctcaagtcgggttgccatcaagattatcgacaaaacccagctgaatcccagc

SEQ ID NO: 660595 - DNA, 100 bp, Homo sapiens
catccttttattcaccgcctccgaatttgcaaagaggaggaaggagggacttcttggcttctcccagcatagccccaggaaatgacctcattcttgatgg

SEQ ID NO: 660596 - DNA, 80 bp, Homo sapiens
aaccttagcaaagaggagctgatagcggagctgcagctggtaggtgagtgctgtcctcggctcactttcctcaagctctc

SEQ ID NO: 660597 - DNA, 122 bp, Homo sapiens
ggcaagggcaacttcgcggtggtcaagcgggccacgcacctcgtcaccaaggccaaggaagacagagatgtcaatgaccccatgcccaaccgaggcggcaatggactagctcctggggagga

SEQ ID NO: 660598 - DNA, 50 bp, Homo sapiens
cccaaggccaacctcctcttcaaagatgatgaaggagcaactcccattaa

SEQ ID NO: 660599 - DNA, 100 bp, Homo sapiens
ggctcccccgggatgatctacagagggtcctccgcggaagggcagctgaatggactccagagcagccttaaccctgcagcctttgtgcccatcaccagct

SEQ ID NO: 660600 - DNA, 83 bp, Homo sapiens
gccgcagtcggtcgtccgctggacaagcacgagggcgcgctcgagacgctcctgagccatcactggtgcaagctatatttaac

SEQ ID NO: 660601 - DNA, 117 bp, Homo sapiens
gagagagccactcccgcccacgtcccatttcgcccctcgcgtccggagtccccgtggccagcctcccttctgtctgccccaccatgccgggacatcgttatcgaaatggaagacacc

SEQ ID NO: 660602 - DNA, 90 bp, Homo sapiens
cagattcgcagtggtcgcttcttctccttgtttgccattttcagcagaagattccgcacacatacaggaccattacacgctcctggaacg

SEQ ID NO: 660603 - DNA, 98 bp, Homo sapiens
tgaaattagacctaatcacagtggaagcttttaagcctatactttctaccagaagcttgaagggtttggttaaggtgcccattcctgcacagaaccac

SEQ ID NO: 660604 - DNA, 49 bp, Homo sapiens
tgcagctgcctcagttcttagcgcaggtccaacgagcgctcctccaagc

SEQ ID NO: 660605 - DNA, 76 bp, Homo sapiens
cttcgacccactcctcaaccttgtgctggacggcaccattgagtacatgcgagagacggggtttcaccatgttagc

SEQ ID NO: 660606 - DNA, 82 bp, Homo sapiens
cctgtaccatcgcagccacggccagcgtggtcaaggagaagctggctggctccttcagtggtagatgtcccctgtatggtgt

SEQ ID NO: 660607 - DNA, 78 bp, Homo sapiens
aaaaacagtacgctcaacggtacagctttatttgaaggtagacgcatcgaatttgcagaacaaataaataaaatggag

SEQ ID NO: 660608 - DNA, 100 bp, Homo sapiens
ggaggcagcgcgggatcccagcctcaggcgtgcgcggacggtgtgcggagccgctcccgaggccccggcgcggcgcgagggcgcggggcgcggcgtccac

SEQ ID NO: 660609 - DNA, 89 bp, Homo sapiens
gcaagcggaagctgcccttcaccgcgggcgccaatggggagcagaaggactcggacacaggtctccataacccctcggacaaacgccgc

SEQ ID NO: 660610 - DNA, 95 bp, Homo sapiens
aatcaggaatagattctcttgaccatgtgacatctgatgctgtggaacttgcaaatcgaagacatatctgaagagatggattaagaatgctttgg

SEQ ID NO: 660611 - DNA, 110 bp, Homo sapiens
gacctcaaactttctgatcttttaaaatattacttaagagaatctcaagctgctaaggctgtcatggaagttcagactttgagaccatcttactggaagttccttttaag

SEQ ID NO: 660612 - DNA, 90 bp, Homo sapiens
agaggaaagtggcctccggggaagccagagctgactgaaggtactaaccaggcctgaccctacttagcttccaagatcagaggagaccgg

SEQ ID NO: 660613 - DNA, 100 bp, Homo sapiens
cttcgctgctgggcagttggctggaggggctgctgctgggaacacctggagtctccgcgggcagatgaggtttatataactttccaagacaaggaagttg

SEQ ID NO: 660614 - DNA, 100 bp, Homo sapiens
gctgcgaggagctcactgcggtcctaaccccgccgcagctcctcggacgcaggttggtcaaagaaaaagtgatgtatgaaaaagaggcaaaacaacaaga

SEQ ID NO: 660615 - DNA, 127 bp, Homo sapiens
ctgtttctggggcaaaaacattcaagaatgagagcgagaacacctgtcaagtcaatgcaaaatcatgctgccgtgttccgtgtgggaagcgtgttgcaagaaggttgtgggaaaatcagcaagctct

SEQ ID NO: 660616 - DNA, 75 bp, Homo sapiens
gcggggcggccgggagggggcagtcctcgccggcgagttcagcgagtgtgctggactttgactttgagaaactgt

SEQ ID NO: 660617 - DNA, 121 bp, Homo sapiens
atttccatcggtccttacagccgctcgtcagactccagcagccaagatggtgaagcagatcgagagcaagactgcctgcgctgctgacttaaggccccaacaccaaacacagaagcaacag

SEQ ID NO: 660618 - DNA, 90 bp, Homo sapiens
cagaggagtcagctgcaaatattctcttctgttctacagacctctctcctcttcctgctcatggaatactagttgatcagcaagtttgga

SEQ ID NO: 660619 - DNA, 75 bp, Homo sapiens
gctttctccttctggtgtggggcccgagaaaaatgtgagttcaagggttccctatctggcagtaatgcaggaatt

SEQ ID NO: 660620 - DNA, 51 bp, Homo sapiens
agaatttcttcaaaccctgagagaaggccctggccaacgtcaacattggga

SEQ ID NO: 660621 - DNA, 82 bp, Homo sapiens
ccggcagctcgagaaggagctgcagggccagagctacttcctcagccgagcccagagcctgtgtggccccgagcacagtgct

SEQ ID NO: 660622 - DNA, 83 bp, Homo sapiens
cccagagaaaaatcggcagatgttacagctgctcatgaaccacttggcaaatcatacagtttgtcaagaaagaaaatagtgca

SEQ ID NO: 660623 - DNA, 49 bp, Homo sapiens
ggggtgccagaaggaaagcatagcactgatcaggaggaggaagaggcgt

SEQ ID NO: 660624 - DNA, 83 bp, Homo sapiens
attcttcggaaataccaagtggtctctccactgtagtctgcagatcaaagctctggcgaaaatccatgcctttgttcaagaca

SEQ ID NO: 660625 - DNA, 100 bp, Homo sapiens
cctttgtccaaattggcaggtttttcctctcgtcaggctctattccgttcgctggttcgccacctcaggggaacgatggccatggagtccacagccactg

SEQ ID NO: 660626 - DNA, 103 bp, Homo sapiens
gtggttttgatcatgttgttaccctcggacgtagcccggcttgtattggacttaattcagtgcacaaatgagatgaatgtgaacatcccacagttggcagaca

SEQ ID NO: 660627 - DNA, 75 bp, Homo sapiens
tttcaagtgcatgcagctcactgatttcatcctcaagtttccgcacagatcttactgtgccgagatcgctcacaa

SEQ ID NO: 660628 - DNA, 49 bp, Homo sapiens
gttgcttgtcagtagcgggcaagacctgatggccaaaagaaaggaagaa

SEQ ID NO: 660629 - DNA, 60 bp, Homo sapiens
tctgcgtccgctgccgcaggttccaccgcgctccaggctggagcattggatttgctaaag

SEQ ID NO: 660630 - DNA, 100 bp, Homo sapiens
aaccatctggggaaaaggcaaaaatcccatctaccgcaactctcagttcgagagtaaaggacctgaaggagaagaaggagaaggtggaggagaaggcaag

SEQ ID NO: 660631 - DNA, 98 bp, Homo sapiens
gtcgtcttcggtcggtttttcatcctttgatcccgcggtcccttcctgtaccttgtcctcaggatgccggaccagatctctgtctcggagttcatcgc

SEQ ID NO: 660632 - DNA, 76 bp, Homo sapiens
cccacggctgccgtacaaagtgtggtccgtactgagaagaacagtttgaacaaccgattcttaccctggaatgaaa

SEQ ID NO: 660633 - DNA, 83 bp, Homo sapiens
gaccacctcctaaggccagccccagcacagctggagaaaccccctcaggaactgtggctgcaccatctgtcttcatcttcccg

SEQ ID NO: 660634 - DNA, 50 bp, Homo sapiens
tgctcgaaatcctggatactgcagggacaaataacattgctatggctttg

SEQ ID NO: 660635 - DNA, 82 bp, Homo sapiens
tttctttgaagccatatgttggtttgtagccaaaaacttgctggaaaccctgaaagcagatataccagattcatcattgtgg

SEQ ID NO: 660636 - DNA, 100 bp, Homo sapiens
aaaggtagaacatggaggatcgtcaggctctaaacaaaattctggtggcagagatgcatggcgagctgattgagttcaacgagcgcctgcacagggccct

SEQ ID NO: 660637 - DNA, 100 bp, Homo sapiens
tcttaaaaaggctcagaaagatggatttttgcatgagacgcttctggacaggagagtgggcgctccctttctcttcctggaagatcagtcccacccccca

SEQ ID NO: 660638 - DNA, 51 bp, Homo sapiens
aaaggaccgtgtgtgtcagaaaatagctggaagtcgagtgtgctactcaac

SEQ ID NO: 660639 - DNA, 75 bp, Homo sapiens
tggaacagggactcactggggacagtgaccaacaccttcaggacgaacaatatccagatccagagccgggaccag

SEQ ID NO: 660640 - DNA, 90 bp, Homo sapiens
ctcctataaccacccggtcctgggaatgtacgacgccaaagatgacttccctcttaggaaaacagactcactgccacaacgacattgtca

SEQ ID NO: 660641 - DNA, 59 bp, Homo sapiens
aagaaacctcaggacttgagtaacagcaacatggtcactttggaacttcttgggtgaag

SEQ ID NO: 660642 - DNA, 58 bp, Homo sapiens
gtgcctcagcaaaatggaaaatggcccactgcgtgaccttggttcagctgtccatttc

SEQ ID NO: 660643 - DNA, 98 bp, Homo sapiens
cttccacaccccctccgtgggtgtgtgaacatctgctcaaattaatgaccatgggggatatgaagaccccagactttgatgacctcctggcagcattt

SEQ ID NO: 660644 - DNA, 83 bp, Homo sapiens
tgcatcagcctcccgaatagctgcgattacaggaagtacatttgaagaacgcaagtagagggagtgcaggaaacaagaactac

SEQ ID NO: 660645 - DNA, 75 bp, Homo sapiens
gcctgcagagctgtggcttaccagaccctggcctatggggacatgaaccatgagtggattgggaatgaatggcta

SEQ ID NO: 660646 - DNA, 90 bp, Homo sapiens
ctggcggcttccctcatgagctcagagcttgcccgccatagcaagcgagtccgcattgcccccaaggaggagatgttaaagtaacccatc

SEQ ID NO: 660647 - DNA, 83 bp, Homo sapiens
gtccggcttcggagcgggagtgttcgttgtgccagcgactaaaaagagttgccattgccccaaatggagccttacagttggca

SEQ ID NO: 660648 - DNA, 96 bp, Homo sapiens
tagagagataacaaaagctgctcagagtctcaatgaacttggtgaatcaggtctaggaaaatcgactctcataaacagcctattcctaactgatct

SEQ ID NO: 660649 - DNA, 100 bp, Homo sapiens
agctgctcttctggggtatcgcgatccacttaaggatgaggcagacttggtgacaagctggtctgagcaggtggctgagatctgcgttgaaatggagctg

SEQ ID NO: 660650 - DNA, 75 bp, Homo sapiens
agaccctgagaccctgagcaattctcaaaagtctatggtcctgtgttcaccgtgtattttggcatgaatcccata

SEQ ID NO: 660651 - DNA, 75 bp, Homo sapiens
cctgccgccccctgcatcagctggctaccgactccaccttctccctggaatcgggcgcctgattgctgagtgtca

SEQ ID NO: 660652 - DNA, 100 bp, Homo sapiens
cggccgcctgtccgtcgatgcaccgaaaagatggaaatcctgtatgaatgtggaagccattagcagagtaattgctgtctgttaccatgacaaccagccg

SEQ ID NO: 660653 - DNA, 78 bp, Homo sapiens
aaggtggaagattcttccaaggaaccagtgcgaaggtaccgaaagcacagtaatcactggtgtcgatattgtcatgaa

SEQ ID NO: 660654 - DNA, 74 bp, Homo sapiens
cggcggccccggcgccggcaaggggacccagtgcgcccgcatcgtcgaggatccacctctgatgttcagtgaag

SEQ ID NO: 660655 - DNA, 100 bp, Homo sapiens
ccgaagctaccagaccaacacagcagacacaggcagagatctggctccacaaggaggcccagaaggagggctggagcaaagctgccaagctccaagggag

SEQ ID NO: 660656 - DNA, 80 bp, Homo sapiens
ggagcctcagttggaagcagccgatccagcctgcggagcctgtggggcagggtcggcactcttcaccctcccgagccctg

SEQ ID NO: 660657 - DNA, 100 bp, Homo sapiens
cgctgcctggctccgtgtccgacccctggaagctgatgctgctggacgccactttccggggtgcacagcaagtgatcctgaagatcttcgtggacaatct

SEQ ID NO: 660658 - DNA, 74 bp, Homo sapiens
aatttgtaacctgcagcaattgattacccagttatcgggtaaggtagccgaacgtggtacccaccatggtttgc

SEQ ID NO: 660659 - DNA, 83 bp, Homo sapiens
cccacttgttcgcggcctatagggatccaggtccggcacgatcaagacccaggctacatgcatcacaagtttgccatcgtgga

SEQ ID NO: 660660 - DNA, 97 bp, Homo sapiens
ccccaacacctccctgttcatcaggaacgtcgcggacgccaccaggtccggcctctttggcctacccccgttggctccgctgccccaggtcgatgag

SEQ ID NO: 660661 - DNA, 50 bp, Homo sapiens
cagaggtcaatctttatgtacaggtggacccccaaaagtacaagggcata

SEQ ID NO: 660662 - DNA, 100 bp, Homo sapiens
gccgatcccggcctgagcaagcggccgcgcactgaggaggcggcggccgacggtggcggcgggatgcagcaaactgactcgggaaagtggtaccgacttc

SEQ ID NO: 660663 - DNA, 98 bp, Homo sapiens
ggcttcggctttgtggacttcctcaccaagcaggatgcgaaggaagtgcttcgggagatccaggatgcagtggccagggcggggcaggtggtgcggga

SEQ ID NO: 660664 - DNA, 100 bp, Homo sapiens
gagtcaaccagaaagagattgggtacttaatgattgcgcagtctctttgtggagaggacttgatcattaaaggaatcagcgttcatatatccaatgccga

SEQ ID NO: 660665 - DNA, 50 bp, Homo sapiens
agcggcgagcagaactacggcgagcggctggtctgatcagcccctggaat

SEQ ID NO: 660666 - DNA, 75 bp, Homo sapiens
atgagatgcaccatccggctgctggacgactcggagatctcctgccacatccagatccaaggttttgccatcaag

SEQ ID NO: 660667 - DNA, 90 bp, Homo sapiens
agcatgaaagcagtaatcagatgtttgccatgaaagaaataaggcttcccaagaccatcaggtttaaatcctacttgctgagcatgggaa

SEQ ID NO: 660668 - DNA, 101 bp, Homo sapiens
cgccgccgccgccgccgccgccgcgcacgccatgggagccgtgactgacgagttgtggaaagtaaaaatgtagccctaccaaaaggaactattgtactggc

SEQ ID NO: 660669 - DNA, 82 bp, Homo sapiens
ttcagctggcatggtactggatatagtacaggacggagtaaccaagagcccagaaaagcgctcttctctcccaagaccttcc

SEQ ID NO: 660670 - DNA, 98 bp, Homo sapiens
ggctcgtctggtgctatcctgtcatacatcatgtgtgtggagtctactcttcatcttgtgttgagacttcgtggtggtgctaagaaaaggaagaagaa

SEQ ID NO: 660671 - DNA, 88 bp, Homo sapiens
ccatttctcctattgaggagtcaactaagcactatcctttgtactccctcaacgtggcctccatgtggttgaagctagggagactcta

SEQ ID NO: 660672 - DNA, 90 bp, Homo sapiens
ggagctgtggtccagcctgcgcggcgggaagcggcggcggcggctccagcgtcctaagagctttaccgatttgttacaactcaagcaagg

SEQ ID NO: 660673 - DNA, 72 bp, Homo sapiens
aacatccaagtgcaggaaaacttcaatatctctcggctgcagcaaaatccgctgccaaggtggctgccaaag

SEQ ID NO: 660674 - DNA, 97 bp, Homo sapiens
cctacatgtcctaatatgttgatggcattccagaatatctcagatgagcagatttccgttaatgctgaacaagtccgaatagaactggagccaccag

SEQ ID NO: 660675 - DNA, 83 bp, Homo sapiens
cgcaggggacgtcggtgggcgcaggacgagcaagaacccagtgacttgattgtaaaaatttacagagcggaatcatatgctgg

SEQ ID NO: 660676 - DNA, 51 bp, Homo sapiens
gatcctggacaggatgcaggcagatcggaacggggccgactacgctgttta

SEQ ID NO: 660677 - DNA, 98 bp, Homo sapiens
cagacacttcacatactgctggaattcctcctgatcagcagagactgatctttgctggcaagcagctggaagatggacgtactttgtctgactacaat

SEQ ID NO: 660678 - DNA, 51 bp, Homo sapiens
ttttgtgcctgaccctactgggagcttctggaagaggtgaagaaggaattg

SEQ ID NO: 660679 - DNA, 98 bp, Homo sapiens
ggagaatctgctgtcgcctgcagctgctcgcctgtctccgtcggaagggagcccaagctttgcagagcatctggttttgtagcctggatgtgtctgct

SEQ ID NO: 660680 - DNA, 83 bp, Homo sapiens
gaccagccagaccatggagctcgcccccaacttccagggtgaggcggaaccaaccctcctggccatgggaggggccgtggtgg

SEQ ID NO: 660681 - DNA, 50 bp, Homo sapiens
caacacagatgtccaagctgccaacttgtacctccttttaaacctcaagt

SEQ ID NO: 660682 - DNA, 100 bp, Homo sapiens
ggcggcggtagcggcagtggcggcgcgtaggaggcgtttgcctgagaatacagatcaacccacagaacaaagcggatttccaaggcatctccccagagcg

SEQ ID NO: 660683 - DNA, 51 bp, Homo sapiens
gtttgtagaagaggagcatctgctccagacgttatgaagaggacatgtact

SEQ ID NO: 660684 - DNA, 100 bp, Homo sapiens
ctacgaggacatcatcaaggtggaggtgcagcagcccatgctgaaggccgtgcacgagcagctggccgccctgtctcaggccccagtaaacaaaccaaag

SEQ ID NO: 660685 - DNA, 82 bp, Homo sapiens
tagaaacaatccaggaaggctttgggaagctatttgtgtgcgaggatcaaagtgttcaaaagaatgctgaaccgggagctga

SEQ ID NO: 660686 - DNA, 50 bp, Homo sapiens
cctcccaaagtgctaggattacaggactgtttctttttccaaaagaggag

SEQ ID NO: 660687 - DNA, 100 bp, Homo sapiens
cactttgaaagaaaaaggctacaaagctgctttcattggaataggaaggtgcaaggacactctctccacaatcacggggccgaccacccagaacacatat

SEQ ID NO: 660688 - DNA, 88 bp, Homo sapiens
cctgcagcacatcagcgaccgggagaacatagacgatcttaccaatatatttgagtccttcctgcctcagttattggcctatcctaac

SEQ ID NO: 660689 - DNA, 95 bp, Homo sapiens
tattctgtgggctctgattctccaatgggaataccaagggctgttgaatttgtgtgaggctgaagattcagctttaacaaagctgccctgttata

SEQ ID NO: 660690 - DNA, 100 bp, Homo sapiens
gataaagatgatgatatccttctcaaccttgtgggatgtgaaaactctgttactgaagtccaatatcagatggaaatgatgcggagccttcgccatgtaa

SEQ ID NO: 660691 - DNA, 98 bp, Homo sapiens
aggatcctccttacccttgggatccggctcagtgcagagcaggcccagcagctcatcaccatttgccgtgagtacattgtgggtttgtccgtggagac

SEQ ID NO: 660692 - DNA, 74 bp, Homo sapiens
ccttggggcaaaatgtggacaaggggcagctgcaatgactctccgcacggtattattgtcattgcaagcactat

SEQ ID NO: 660693 - DNA, 100 bp, Homo sapiens
agagtgctccggacctctctagctacaattttagatggaggagaagaaaaccttgaaaaaaatctccctgagtttgccggtggttctcttcccaaagtgg

SEQ ID NO: 660694 - DNA, 82 bp, Homo sapiens
ccatttggcccgtcctaccctaaagtcaccacctgctgcttttctggagcgcttaccaggaaagtgactattttaccccaca

SEQ ID NO: 660695 - DNA, 82 bp, Homo sapiens
ttgggacccaccgctgccctcagctccgagtccagggcgagcggaatcggacatgtccaaaccaccgtgttacgaagaggcg

SEQ ID NO: 660696 - DNA, 100 bp, Homo sapiens
accccaaacccaaattcttcgttctgtgcggcgacctcatccacgccatgccagatgatgctgtgtatctggacaatgagaaagaaagagaagagtatgt

SEQ ID NO: 660697 - DNA, 100 bp, Homo sapiens
tcgcctgctgccctcttgcgcgcgggaagcagcaccaagttcacggccaacgccttggcactagggaacaaccaggaagctatatgagaaaaagcttttg

SEQ ID NO: 660698 - DNA, 100 bp, Homo sapiens
actgacctaccccctggacctggtcagagcgcggatggccgtaaccccgaaggaaatggtctttggaattttgacagagaatgtaatgaaaaatacggag

SEQ ID NO: 660699 - DNA, 80 bp, Homo sapiens
gaggcctcgcgaccgccgagcctgcagcctgccccgcggccaacatgagcttcttgttaacaagttgaaatcatcgcaga

SEQ ID NO: 660700 - DNA, 82 bp, Homo sapiens
gagatgcctggcagccccgctctctgcagaattgaaagatgttggccatcgtgatcagatggctgcagctagaggaatcctg

SEQ ID NO: 660701 - DNA, 75 bp, Homo sapiens
caagtgtccgggattcagacctctctgcggccccaagtgttcgtggtcctcactttacttatcaatgcagcctac

SEQ ID NO: 660702 - DNA, 75 bp, Homo sapiens
tttgccagagaaaggacgagcagcaagtcagggagcttaaggagcccaggatgtgcgagttcaagtgctacccga

SEQ ID NO: 660703 - DNA, 74 bp, Homo sapiens
atgtccttctctgaatgatgaatacttttactactgtgacaacattaacggacacaactcagatgggaagttca

SEQ ID NO: 660704 - DNA, 90 bp, Homo sapiens
tcgctggtcgtgcgacccaagcccctgcattcctgtacgggtgggactcttccctggacactgtgttgagttaattaaccaaaaagttcc

SEQ ID NO: 660705 - DNA, 100 bp, Homo sapiens
gcttaagcaatgatttggatggatgtcgaccatgtgactgtgaccttgggggagccttaaacaacaggtatatcccagctgtggttgaccacacagcagg

SEQ ID NO: 660706 - DNA, 74 bp, Homo sapiens
cggtccctagagaggataccgggacgctcctgaagccgcgagatggatatgggccctcacattttccaaacctg

SEQ ID NO: 660707 - DNA, 100 bp, Homo sapiens
aggcactgacagacctgctgtgtacccctgaagtgagtcaggagctgtatgaccttaacgtggagctctccaagttccaggaggccatgaattctgggag

SEQ ID NO: 660708 - DNA, 75 bp, Homo sapiens
cggggctatgatgatcgggactactatagcagatcatacaggtgaaagacccctgacaaaagacaatcatcttct

SEQ ID NO: 660709 - DNA, 75 bp, Homo sapiens
aagaaagccatggtggagtatgagaaaatgatgcatcctgttgccagcagtaatccagctttctgtgggcctggc

SEQ ID NO: 660710 - DNA, 97 bp, Homo sapiens
gaagcggcggcgacacgacgcgcagcagctgcagcagctcaagcacctggagtccttgtggattggactctaaatattggagagcaagcccttgaca

SEQ ID NO: 660711 - DNA, 100 bp, Homo sapiens
tggaaacaccatggctgcggcggcccagctctctctgacacaggaatccggagatgatgagtatcaaggggaccagtcagacacagaggacgaagtggac

SEQ ID NO: 660712 - DNA, 100 bp, Homo sapiens
gagaccctcgaagtgcgcaaacttgacactcaccctgaccgagtaaaggtgctagtgctggaagagaatggactgaacaggagacccttctactcctgga

SEQ ID NO: 660713 - DNA, 100 bp, Homo sapiens
gggatttcctgcagaaagacttgaaggcgtatacaggaacaatattgatgatgtagtaagaaggactccatgaaagatgacagaagaagttattgtgata

SEQ ID NO: 660714 - DNA, 100 bp, Homo sapiens
ctctggccagctgactgcacttcttttttgagaaaggaaggaatatatcctgactgattaatgtaaaaagggcagctctctggcatgttcctgactgagg

SEQ ID NO: 660715 - DNA, 100 bp, Homo sapiens
cggcccgggcggaggccctacgacctggaccggttgagcttcagcgacagcgagagtgacaacagcgccgactcctccctgcccagccgtgagcccccac

SEQ ID NO: 660716 - DNA, 100 bp, Homo sapiens
gttcgtgaacggcgcttcccttggtgcacctgtggccgccatgtttgagcgagaggtgctgatactcaaagaaggtttaagttgtctgatctctctataa

SEQ ID NO: 660717 - DNA, 100 bp, Homo sapiens
ccaccggcagggcttctcctatgactacgtctttgactggaacatgctgaaattcatctggacatctgtcccttacttagcatcctacgtcagtcccgtg

SEQ ID NO: 660718 - DNA, 100 bp, Homo sapiens
aaaaatgttgtctatggctcctggtcatacagatagaggcttttaccaagatggcctcagctccggccagctatggcagcactaccactaaaccaatggg

SEQ ID NO: 660719 - DNA, 90 bp, Homo sapiens
atcatgaacaggaagaaattttcaaacttagactaggacatctcaaaaagattttgatggatcatcaaaatctgtcagaacatgtactct

SEQ ID NO: 660720 - DNA, 50 bp, Homo sapiens
gcccaatccacatgcttttccaggatgaatgctatcaagtaagacaagtg

SEQ ID NO: 660721 - DNA, 128 bp, Homo sapiens
ccttggcaccgcgtttgtcaagttttctactcttacaaaggaactgtccacactgctgaaaaatctgaccaagatcactccatggatgaaatgacagctgtggtgaaaattgaaaaaggagttggtgg

SEQ ID NO: 660722 - DNA, 98 bp, Homo sapiens
tcaaaactggatatggccaggatgctatagcattgtcagtgttaatgttcgtgaagaaattgaagagttttttccaagaatgtggaagataaatcaag

SEQ ID NO: 660723 - DNA, 50 bp, Homo sapiens
ccggcagaagctggtcagtcaaatgaatcggtgagtttcaaggatgtggc

SEQ ID NO: 660724 - DNA, 74 bp, Homo sapiens
aaccgtggcaccgagagcaagaaaatgaccccatatcatgtgaacctcctcctggctggctatgatgagcatga

SEQ ID NO: 660725 - DNA, 75 bp, Homo sapiens
gcgctactggccagcaagcagcattgggaccgtgacctgcaggacaaacgcccctgccctgccagaatccggccc

SEQ ID NO: 660726 - DNA, 75 bp, Homo sapiens
tgggactcctctctcaagagaagctgcaagagcaacatctttcctcaccccaagtgtttaactgctgaagagatc

SEQ ID NO: 660727 - DNA, 100 bp, Homo sapiens
catgggggacgtgctgtccacgcacctggacgacgcccggcgccagcacatcgcagaaaagaacaacttgtccttcatcgagacctcagccttggattcc

SEQ ID NO: 660728 - DNA, 100 bp, Homo sapiens
gcagctcagtaatgcccagctgcatagcctggctgccgtccagcaggtttttgaatctgaaaattcaagaaggtgaagctcacaacattttttgccctgc

SEQ ID NO: 660729 - DNA, 97 bp, Homo sapiens
ccaagcagacacagaccttcactacctattctgacaaccagcctggtgtgcttattcagggctctcaaagacttcagaccaggcctacattgagttt

SEQ ID NO: 660730 - DNA, 75 bp, Homo sapiens
ctgtctgggctctaggaaacattgcaggtgaacggctgggacatgaccatggtcacacacgaccaggcccgcaag

SEQ ID NO: 660731 - DNA, 55 bp, Homo sapiens
gtctgtggtgtgtttgctgttcccagaatgggctttagggatgaagcagctgggt

SEQ ID NO: 660732 - DNA, 100 bp, Homo sapiens
acgtaatgaggatgaagattcaccaaataagctatatactttggttacctatgtacctgttaccactttcaaaaaggatacaatggagattcaggaacga

SEQ ID NO: 660733 - DNA, 100 bp, Homo sapiens
cggagaccctatgggcgtcgaccacagtattccaaccctcctgtgcagggagaagtgatggagggtgctgacacctttacggcaaaagttaatattgaag

SEQ ID NO: 660734 - DNA, 75 bp, Homo sapiens
aattaaaaagggaaggataaccccatcacagagatcatgatgcagccgtccttttggatttctttttaataatgt

SEQ ID NO: 660735 - DNA, 96 bp, Homo sapiens
caccttcaatccgctctactggaatgtgggagtaccctgacttctaccggaagctctacggcctcttggacccctctgtctttcacgtcaagtacc

SEQ ID NO: 660736 - DNA, 88 bp, Homo sapiens
agacctaccagctctcacggtggactccgattatcaaggacatcatggagggctgagccggatcttgaagactcgtggggaaatggtg

SEQ ID NO: 660737 - DNA, 50 bp, Homo sapiens
gcgcgggatccctggctccgcgaggaaacttccattttagaagaatacag

SEQ ID NO: 660738 - DNA, 75 bp, Homo sapiens
ccaagtctgcaatcttaccagggaggccaagcgaccacccaaagaagaccattcctcaagaattttgtatccaag

SEQ ID NO: 660739 - DNA, 100 bp, Homo sapiens
aaggctataccaaagaccaagtagatggagttctcaggtatgcctggactgttgcccagtgtaagatctgtgcaagccatattggatggaagtttacggc

SEQ ID NO: 660740 - DNA, 90 bp, Homo sapiens
cgggagaggcaccaaatctggcctgggggcccgagaagcttcctctcagcatctctaacaaggagctctcggagctgatcgagcagctgc

SEQ ID NO: 660741 - DNA, 50 bp, Homo sapiens
tttgccctcgcatcctgttccaacgcgtttccaacatggctagatccatc

SEQ ID NO: 660742 - DNA, 98 bp, Homo sapiens
ttgttgaagaggtcataggggttccacagtcttttcagaaactcatatttaaggcaagtcaagccagagatctgttatcaaaaatgttagtgattgat

SEQ ID NO: 660743 - DNA, 75 bp, Homo sapiens
gcggggccccagggggcacaagaagtccggaaccatcccttcttccaggtcaatgagctgaaggagaaaggcaac

SEQ ID NO: 660744 - DNA, 100 bp, Homo sapiens
gcatactgtagaagatttgatgttcagactggttcttcttacatatactatgtttcgtctacagttggtcttggtcttgatgccaagtttgggaaaggag

SEQ ID NO: 660745 - DNA, 89 bp, Homo sapiens
gcatgagtgcttcgagagggtgttctgcgagctcaagtggagaaaagaggtcaccggattgaaactgtctcaggaccttgatgatcttg

SEQ ID NO: 660746 - DNA, 100 bp, Homo sapiens
ccgactatttggcaagaagcagatgcgcattttgatgggtttttcgttggaatatacgttgcacatttatggcgattctgagtgtgagggcagacttctg

SEQ ID NO: 660747 - DNA, 96 bp, Homo sapiens
actggacgctcatcagagggaagatctttttcctcaattgtcctggaatcaagatgtgagaccaagaaattatttctgaagaaagaaatttatgaa

SEQ ID NO: 660748 - DNA, 99 bp, Homo sapiens
caaaggaccggacaaagaggagctgtattttggggcgatattgccttagatgatgaagacttaaatatctttcaaatagataggacaattgaccttacg

SEQ ID NO: 660749 - DNA, 75 bp, Homo sapiens
ccaaaaagaagcctcatgcgagtgtttctgtgtccatctcatgtgctgcgtgtgtctgtaaagcctcattccgtg

SEQ ID NO: 660750 - DNA, 82 bp, Homo sapiens
ggccttcgtacccgtcttgattgaggttgttcctcaaagtcattcaagctgtactcgccgaaggagcccccgaacggcaacg

SEQ ID NO: 660751 - DNA, 101 bp, Homo sapiens
cagagacaccaggacagaaaagacagtgttctgctttcatggagttcacagaagagtcgaggaggaggagcatattatttaatatctagaagtctagggcc

SEQ ID NO: 660752 - DNA, 74 bp, Homo sapiens
gagaaaggagagacaattatgttcctgaggctacggaaacaggccgagaagaacgtggagaagaaaattgacaa

SEQ ID NO: 660753 - DNA, 75 bp, Homo sapiens
gcccaaccacaagacgactcaataggaggaagactgagaactatgagcagagaatacgtgaacaacaggaacagc

SEQ ID NO: 660754 - DNA, 82 bp, Homo sapiens
cctggagcagctgcgtaaaacatacaggccggagcttatcaaagcttgcaagtagaagtctcaggcaacagattaaaccagc

SEQ ID NO: 660755 - DNA, 74 bp, Homo sapiens
tttggagttcttacaacatggcagacattgacaagagttttgagagcaaaatgacaacacccagaaattcagta

SEQ ID NO: 660756 - DNA, 83 bp, Homo sapiens
cgagaacaacggaggcagaggagctgaagactccagtatgcaactgactacaaggaggtcgcgtggggcaggcagtggcgctg

SEQ ID NO: 660757 - DNA, 99 bp, Homo sapiens
gactgctcgctgccatatgctacggaatccaaagaatgcagtgcagtgctggagttcgtgggtgacgggatctataacaacaccatgggccacgtgcac

SEQ ID NO: 660758 - DNA, 75 bp, Homo sapiens
ctcccgaggagtgcaggcgcttcaccacagacgagtcgtccttgtctactccactaccaaatgttgaagttcttc

SEQ ID NO: 660759 - DNA, 82 bp, Homo sapiens
ccagcaaggtcggcagagcaaggggcttacgcagaaggacctggccacggtgaccctggcaaagatgagagtgcacatttcg

SEQ ID NO: 660760 - DNA, 100 bp, Homo sapiens
ggatcatccaaacatcacgggacttcgttaaatcagtgcttcggggcacttagcacagcgcctggcgcaagacgcccactattgcttggttctacttcct

SEQ ID NO: 660761 - DNA, 106 bp, Homo sapiens
gttagtgaacgtggacaaagctgttgtctcagggagcacagaaatcatggaagggaagtggttgctgtgtatgttactggtgcttggaactgctattgttgaggct

SEQ ID NO: 660762 - DNA, 75 bp, Homo sapiens
tccccatccgccgccgagaggaggcctatgagaatcaggtggttatcactaggctaaaactggacaaagaccgca

SEQ ID NO: 660763 - DNA, 100 bp, Homo sapiens
tcaggaagagtgatgtggttttggataaggcaatgaagggctattggcctgtcagctgctcccatccatcccctgcttactgcattgccgagttcatgca

SEQ ID NO: 660764 - DNA, 98 bp, Homo sapiens
gccaagctcatctctgagacccggaggaggttcgaagctgagtatgtgacaggataacaaagccattgacctttgccgattgtgttggggacgaactt

SEQ ID NO: 660765 - DNA, 88 bp, Homo sapiens
ttgtgacagacacttcacatactgctggtgttcctgatccaagcagaaccctgttatttgaagagcctgagaaatcttatcccgttta

SEQ ID NO: 660766 - DNA, 90 bp, Homo sapiens
ttcaagtacatcataatcggcgacacaggcaggtgacagcagggacatgtctcgggagatgcaggatgtagacctcgctgaggtgaagcc

SEQ ID NO: 660767 - DNA, 73 bp, Homo sapiens
caagtattgctgtgggtgctgggacttcccgtccgcggcgtggaggtccctcctcctatgtctccatcctcca

SEQ ID NO: 660768 - DNA, 75 bp, Homo sapiens
gccaagaaggagaagcagctgcggaaaatgctagaagagtgaagatagtccaagtcctaagagacagcgcctctc

SEQ ID NO: 660769 - DNA, 75 bp, Homo sapiens
aatcaagtcacctgacacatttgtgagaactatttatgcagggtgtccgcaatgttgccagtgtctgtctgcaga

SEQ ID NO: 660770 - DNA, 100 bp, Homo sapiens
tggggacgttccccgacggccagaagttcgactccagaatacagattctgttcatcttgctctgaaattaaataattctgaactcatggggagaaaactc

SEQ ID NO: 660771 - DNA, 119 bp, Homo sapiens
cggctgttgccatgtccgcaccgggacgatcatcctggggacctggtacatgcttttgcctaccaaaaagttttgggaacctgatgattcaacaaaagatggacaaaaaggcatatttc

SEQ ID NO: 660772 - DNA, 98 bp, Homo sapiens
ggaaggtggtggtgtgcgacaacggcaccgggttgacattttgctaaaggctgtgggagacactcctattatgaaaacaaagaagtgggcagtagagc

SEQ ID NO: 660773 - DNA, 96 bp, Homo sapiens
agctaagatgccaggaccccctgggaagcctagaaaaatggatccacctctgatgttcactgaagagtaccagaaaagtctgctagagcagtacca

SEQ ID NO: 660774 - DNA, 75 bp, Homo sapiens
gtttgagaaaaggcctaagaattttggcattggttcaggaacaagtgcatcccactctctcagctaatgaagagt

SEQ ID NO: 660775 - DNA, 75 bp, Homo sapiens
cagtttatattcattgccttaagactggacaagatcatccactggccctggcttataacaacgaacttgatgcaa

SEQ ID NO: 660776 - DNA, 75 bp, Homo sapiens
cgggcggcgagcagaggagctaacagaaatgatgatgcacgtgcaacagctgtctcttgcgtctttatgtgtgaa

SEQ ID NO: 660777 - DNA, 83 bp, Homo sapiens
aagtgacctcagcagggcatccaggttgtgaccgagattcccgacgagagagactgaggggaagagaggaaggaggggcgggc

SEQ ID NO: 660778 - DNA, 74 bp, Homo sapiens
ttggatcaacatgccaattgagtgaaaaatttatcaaagctctatcagttgagggatttgcagttgataaaatg

SEQ ID NO: 660779 - DNA, 98 bp, Homo sapiens
aacaaagtatgcctccgaaaaccacctcagccgcttcgtgtggttcttttctggcatcgtaggaggtggcctgctgtgaatggtagtgtctagaaagg

SEQ ID NO: 660780 - DNA, 75 bp, Homo sapiens
gtccacgtggcgcgaaagtaggagcactgcgacaacacatcctccccagccccgatggcccagctcccaggcaca

SEQ ID NO: 660781 - DNA, 87 bp, Homo sapiens
agcctcctgcgccggccttgcctcggccagagactgctgctactttgaaacgtacgatagaggccctgatggacagaggagcaatag

SEQ ID NO: 660782 - DNA, 73 bp, Homo sapiens
ggggttcgggtgtctcgtgtgtgaacatcacagagtggtggacatgacaacagagtcaactgcatacagtggc

SEQ ID NO: 660783 - DNA, 75 bp, Homo sapiens
atcaaatccgtgtcggagtccttacaggaggagatgaccgccgggttctgctatggcacatggaacaagccatcc

SEQ ID NO: 660784 - DNA, 100 bp, Homo sapiens
agaaaggccagtacacacacaagatctaccacctgcagaggtacgtacctgtgggcatcatgttccttgttggaagcaagatcgtggaaatgaaagacat

SEQ ID NO: 660785 - DNA, 73 bp, Homo sapiens
ccagtactctatatgaacaatccgtctggatcacggatgtaggaagtgagtggttcgcctccagcacacagag

SEQ ID NO: 660786 - DNA, 98 bp, Homo sapiens
cgaagtatgagtccactaacaaaagtccagaaactcgccagttaatagtattgtggacattctgagcatgtgagacctgaggactgcaaacagctata

SEQ ID NO: 660787 - DNA, 129 bp, Homo sapiens
caggacgagacatcactggctacacatttccagcaggctgcagatacgagtggacaaccacagcctggcagctctgatcaggaaagtgaggaacagcaacaattccggaacattttcaagcagatagca

SEQ ID NO: 660788 - DNA, 100 bp, Homo sapiens
ctggagacgggccggaacctcaagaaggaggtcagccgggtgctgtgcaagcggtgcgttttgagtatccgaggagcccaggaggaggaacccacagacc

SEQ ID NO: 660789 - DNA, 50 bp, Homo sapiens
ggggagagttgctaggaaaatgatgccattctaaatatggtgaatattgc

SEQ ID NO: 660790 - DNA, 83 bp, Homo sapiens
ctgaagtgtctttggtccaacgttgttccaggtcagaagagatcaattctacagaaatttccagtggttctgttgaggcttta

SEQ ID NO: 660791 - DNA, 82 bp, Homo sapiens
ccggcgatgtgccaccgaggctgaggatgatggtagattgccagatctggtggctggacccagagctgacctatggctgcgc

SEQ ID NO: 660792 - DNA, 87 bp, Homo sapiens
tcaagatcaagaccggcgtggtgaagcgtgttgctaacaaccacaagcagaatttgatgacggtggcaaaccttggtgtggtgtttg

SEQ ID NO: 660793 - DNA, 95 bp, Homo sapiens
tgcacaacagagggacaacaaaagcctcctacaagagtcctaccaaaactccagtgtgctgctctgctcgttacaacttagcaattttggccttt

SEQ ID NO: 660794 - DNA, 100 bp, Homo sapiens
ctctcatctcgctcggctgcgggaaatcgggctgaagcgactgagtccgcgatggaggtaattgctctagcagatgcagtggaggaaaaccaaggcaatc

SEQ ID NO: 660795 - DNA, 74 bp, Homo sapiens
cggcgccctggcgctgctcctgctgtccagcctctcccgctgctcagatgccccttggtgtggccactgcaagg

SEQ ID NO: 660796 - DNA, 100 bp, Homo sapiens
gagaaactgatgaagctgcagaaccaacgaggtggccgaatcttccttcaggatatcaaggtgctgacggtggatgctcgtaaccacggtgacagccccc

SEQ ID NO: 660797 - DNA, 74 bp, Homo sapiens
aaacatatactgcttacctcattgaaacaagggtgtcaaattgagaaccaggtagatccccaccacctacagta

SEQ ID NO: 660798 - DNA, 96 bp, Homo sapiens
gtgggaagtacatgtgtcgtatcatagttcattttatgtgggaggatgttcagcagcgcggcagagtcatggggtctgttgttagcctggatggag

SEQ ID NO: 660799 - DNA, 146 bp, Homo sapiens
ggtttgctgagctggttggccctgtgatccctcaagactggtccacggagtgtatgaccacaaacagccatcaaggtgaccaagaatatggcccaggtgaccaaagccctggacaaggccctgagcaccatggacctgcagaaggt

SEQ ID NO: 660800 - DNA, 75 bp, Homo sapiens
ttcaacgcctccaaaaagccaaactacagcgaactggacacacatacaggtcacagtgctgtcgatatcaccaag

SEQ ID NO: 660801 - DNA, 100 bp, Homo sapiens
cggggctgaagaagcagttctacaaggcgagccagggacttcatctgcagcatcctcaccattaaaaaaagaacagcccttatttactctacggcaggtt

SEQ ID NO: 660802 - DNA, 100 bp, Homo sapiens
ggatatcacattttcatcagattatccatttaagccaccaaaggtgaccaagaatatggcccaggtgaccaaagccctggacaaggccctgagcaccatg

SEQ ID NO: 660803 - DNA, 98 bp, Homo sapiens
ggacaatggggacccgggacgacgagtacgactacctattcaaagagccttcacgaagtcagtaaaagtgatctcggccggaaaatcaaggagggcgt

SEQ ID NO: 660804 - DNA, 96 bp, Homo sapiens
aaggtctccaagtcccagctcaagtttggaccagaaaatccctttaggacacagcaaatggctgcccctagaaatatgctttctggatatgccgaa

SEQ ID NO: 660805 - DNA, 83 bp, Homo sapiens
ctgggcgctccggtggcggcggagggacctcaggatggaaaccagcagcctgcaccgcccgagaaggtcggctgggtccggaa

SEQ ID NO: 660806 - DNA, 101 bp, Homo sapiens
atcactgtcctggctgtgctggccttagtgccccaggatcagggaggactggggctgaggaagctgccctcgaaaccctccagaagacatctgtcctgcag

SEQ ID NO: 660807 - DNA, 50 bp, Homo sapiens
accattttctactgtccctgcgcgaggttactcactataaacaatatcca

SEQ ID NO: 660808 - DNA, 50 bp, Homo sapiens
cccaggaattcccataccaaccacagagcctcttagcaatgcataccacg

SEQ ID NO: 660809 - DNA, 90 bp, Homo sapiens
gcctagaatgcatcagtgcccttgtggcgaatggggctcacgtcgagtgtgaagatgccttaagaaaaaataagagcttaattgggccgg

SEQ ID NO: 660810 - DNA, 96 bp, Homo sapiens
aaagttactgggagataacttcgaaggattttgcaacaaattcgagctgtccgactctgagaatgttctggacacagctgggcaggaggaattcag

SEQ ID NO: 660811 - DNA, 97 bp, Homo sapiens
gcccatcagtgacagcaagtccattcagaagtgtaccagctggacacagggcattacctctgcaggaacaagtactatggccgtgggctctccattg

SEQ ID NO: 660812 - DNA, 88 bp, Homo sapiens
cagtgtgatcccagctttaaaggagatgcaggagaaaatacggcattgctagggcacacgtgtttcacgttgacaggtttgcttggga

SEQ ID NO: 660813 - DNA, 80 bp, Homo sapiens
caaaaactaccattcgcctgatgaactctcagcttcctgcctgacacagctcacttcaagaagtgcacaatgtcagaacg

SEQ ID NO: 660814 - DNA, 98 bp, Homo sapiens
gacagaaacagcaggaaacagttcaggtgtttatggctttgggaaaatgaaagtgtatactcttgatgtaccagatgcattctattactgttatagtc

SEQ ID NO: 660815 - DNA, 82 bp, Homo sapiens
attcgggtcagcagtggcactcagaggaaaagaggctgggaggcggcagaatgcagccagaggagggcacaggctggctgct

SEQ ID NO: 660816 - DNA, 50 bp, Homo sapiens
aagccctctttcctgcctgtgttttgaagagaggatcattacagagacag

SEQ ID NO: 660817 - DNA, 51 bp, Homo sapiens
atgaatccaagacctgtcatgggtcttactctgttgcccaggctggagtgc

SEQ ID NO: 660818 - DNA, 100 bp, Homo sapiens
ccaaagtacacatcctgtatgtggggtccatgcctcttaagaactcttttcgaggaactatccgtgctgtcaaagggaaaaccccccaagtaggtgacag

SEQ ID NO: 660819 - DNA, 50 bp, Homo sapiens
actcattccctgttgtaatcaagattgttgccagcaaaggaggttttgaa

SEQ ID NO: 660820 - DNA, 83 bp, Homo sapiens
cctctgcccaaagaaagaaggaggtttcatcagagcaagaaaaagaacaagagactttaataagccagaaaagcatccctgag

SEQ ID NO: 660821 - DNA, 75 bp, Homo sapiens
ggtctggacctggactcacggctgcttggagcgtccgccatgaggagaaggtgagaagccctaccactgcaactg

SEQ ID NO: 660822 - DNA, 90 bp, Homo sapiens
cagatttgaaagtgtgaaccagagtttgttatttgatcaactagtaaatagtgaacagcagagaatttcaaaggaccttgctaatatctg

SEQ ID NO: 660823 - DNA, 100 bp, Homo sapiens
ggatggaatacatcctcactgacatacggaagggacacatgtgcaatgcaaagctcctgagaaacatgccagagatcctgaaggagctagacgagtgcta

SEQ ID NO: 660824 - DNA, 100 bp, Homo sapiens
gaaatttcatgggccatagaagatgctagtgaagcctttgctggactcacaagtctcactaaactatgctgggctcttgcactgtttggtggaaatggtg

SEQ ID NO: 660825 - DNA, 83 bp, Homo sapiens
ccgcccagccatggacggggaggagcagcagccaccgcacgaggccaacgtgcagcggctgaaggagtaccgctccaaactca

SEQ ID NO: 660826 - DNA, 75 bp, Homo sapiens
caagtatttcatacacctactgtggaaggaacctcaaaatttgcaaacctggacagcagtgtgaaagaaaaccag

SEQ ID NO: 660827 - DNA, 74 bp, Homo sapiens
tgcttcccaataaggaaacagtcataactccatgcaggaagctcatcttgtgtgctgataacagaaaagaaatg

SEQ ID NO: 660828 - DNA, 100 bp, Homo sapiens
tgacatcagctctcctgggaccctccaagagcactagtgtctagaaggcactaaggggcatctggcggatccccgtggacgagattgaccggccgggcag

SEQ ID NO: 660829 - DNA, 82 bp, Homo sapiens
ctggcaagattgggatatttgagagtccaactggcactttgatggtggcatcacccttgagaaggaaatctccaaagaagag

SEQ ID NO: 660830 - DNA, 98 bp, Homo sapiens
tggcggccatcgtcatcctgctgctgaagatctggaagacgcgctcctgcgccggattactacagcatcccatttcccacacccactactccgctgac

SEQ ID NO: 660831 - DNA, 90 bp, Homo sapiens
gcagaagagaagcagtgaaggagtgcagaggcatcacctgaaagcaacacgggattcccatcccggtcactcccaagaacccgtggagca

SEQ ID NO: 660832 - DNA, 80 bp, Homo sapiens
ccacccaccggcccaccctacatttagcgcatcatgtgatccgggttcattttccagacactgaaagagcagaatggcta

SEQ ID NO: 660833 - DNA, 99 bp, Homo sapiens
ccgagagcagccccagaaactaacccaacagcagaaagcggggcccagaatgtgttcagtatcttcaacaagaatacctgccctccttgcaagtagctc

SEQ ID NO: 660834 - DNA, 80 bp, Homo sapiens
agaccgtacaggttgagggatgggactggaaatcaaatgttacagagcccagcattacatcaacatgcccgtgcagttca

SEQ ID NO: 660835 - DNA, 100 bp, Homo sapiens
gatcaaggcgatcctaatcttcaacaaccacgggaagccgcggctctccaagttctaccagccctacaactggtcatgctgctggagtggtggtcctgca

SEQ ID NO: 660836 - DNA, 90 bp, Homo sapiens
gcctgatgatcacgcagctggctggcttcagtggaccacgggcagttgcaggagatgcctctgagtcagcactcttaaagtgcatagagc

SEQ ID NO: 660837 - DNA, 90 bp, Homo sapiens
tgcaggagctgaagcagcagaaccccaggctggtgtacgtcaccttcaggccattcagaggaggaaagagaggggaatatgaagtcagcc

SEQ ID NO: 660838 - DNA, 102 bp, Homo sapiens
cgagaacgtgcgggaagagaagatcatcgagcatttcaaacggtgtctggtggcctgacatgcaccgcctggctgaccgcatccacctggaggagctggccc

SEQ ID NO: 660839 - DNA, 75 bp, Homo sapiens
ctattccttgggctgcctttcctgcagggtttccggtcccccatggaaaagaagaccaagtgcacagatccatcc

SEQ ID NO: 660840 - DNA, 97 bp, Homo sapiens
tggccgaccagatgacaaagcaattgcagcagaacatcgagtgttggataacttctctgacatagtagaagggtgatttgaagatattaaagctaga

SEQ ID NO: 660841 - DNA, 97 bp, Homo sapiens
tgaaaactaagaagtaaatcaatgctaaatgaagaatctgtactttgttcgggcaaggatttatgaagtagaacaacagataaaacaaagaggccgt

SEQ ID NO: 660842 - DNA, 51 bp, Homo sapiens
attcttaattcccctgaccgtgcctgcaggatacagttgatatattagttg

SEQ ID NO: 660843 - DNA, 100 bp, Homo sapiens
ggcgaatcccgacctacccatcctaatccgcgaatgctccgatgtgcagcccaagctctgggcccgctacgggaaatcctcattgacgattcaatttgtt

SEQ ID NO: 660844 - DNA, 75 bp, Homo sapiens
aaagaactgggagaaatcagggagaggcgaattgaagaaatgttggctatttggcgatgagaggtggtgaacagt

SEQ ID NO: 660845 - DNA, 100 bp, Homo sapiens
cgtgtcccggggccgacccggcccgtagtgtggaagcagcttcagccatgggctccccaaaggaagtcattttctcagacatcactgaaaattcggctac

SEQ ID NO: 660846 - DNA, 89 bp, Homo sapiens
gcttgcacgtggactgaagctgaccttcgattcatccttctcacctaacactggaggcaaatttctggagatgtgcaatgatctcttag

SEQ ID NO: 660847 - DNA, 75 bp, Homo sapiens
tggaagccctctccctgtcttctctgagtgagaaggatgaagccacacaagttggtgagtttgtaagtgatgccc

SEQ ID NO: 660848 - DNA, 100 bp, Homo sapiens
ccgtcccgcaagaaagatgattccttcttggggaaactcggagggaccctggcccggaggaagaaagccaaggaggcacccaatcaatgtgagacgagac

SEQ ID NO: 660849 - DNA, 101 bp, Homo sapiens
cagaagacaaagtcaattccattccaagtggtaagaagttcagaagcaagcctcagttggcaaggtacctgggaaatactgttgatctcagcagttttgac

SEQ ID NO: 660850 - DNA, 100 bp, Homo sapiens
gtgccttgccctgtgggttctacttacaggagaacgagagggtccgacagtgctggaagtcttcaatacccttttgaaacatctgcgtctcagcgttgaa

SEQ ID NO: 660851 - DNA, 83 bp, Homo sapiens
cccgctccgcagccccgggcacggcggaggcagcggagccctgggccatcggtctcaccaacggctttgggggtgcgaggagc

SEQ ID NO: 660852 - DNA, 82 bp, Homo sapiens
aagaaattgagaaagaatgtgaagataccagtttgcgtcaggagacacagggcaagtgtccagagaatggctgggatgaaag

SEQ ID NO: 660853 - DNA, 82 bp, Homo sapiens
agaggtggacagatctgagagatactgagcccccgcctctcctggactcttttcaagaccagtctccatctccagcctcctt

SEQ ID NO: 660854 - DNA, 90 bp, Homo sapiens
cgcttccccacgtcgcttgggggccacggcgcggacgccatggatttaagaggggtgcagatcccggaatgcctgaaccaactgttttga

SEQ ID NO: 660855 - DNA, 101 bp, Homo sapiens
gtcgcgcgtcccctgcacagcacagaggggcagccggagagcctgggaaaggattttttatcaagcagaaatgcatcgaacaacgagaatcaagatcactg

SEQ ID NO: 660856 - DNA, 75 bp, Homo sapiens
gagggtctggaggagccttctcaagaacagaggatgaccagtgtcccagtgaaggaacgagtgaaggtgtctcag

SEQ ID NO: 660857 - DNA, 83 bp, Homo sapiens
ccccgggacaccctggaagccaggaaatgcatggcggacaccgacctgttcatggaatgtgaggaggaggagttggagccatg

SEQ ID NO: 660858 - DNA, 75 bp, Homo sapiens
agcagaaaagaaagttcaactagcctgcaaagagagagatgctgctaaaaagctttcggcagctggggtacccca

SEQ ID NO: 660859 - DNA, 100 bp, Homo sapiens
agaaatctggaagttttccacctaccatgctctcgatttctccacccaggtgaactcctccctcacctccccgacggggcgaggctccatggctgccccc

SEQ ID NO: 660860 - DNA, 74 bp, Homo sapiens
ggggacaggacggcggggcgagccagagttacactgttagaccttatgatagccaagataacgagtgatgagcc

SEQ ID NO: 660861 - DNA, 100 bp, Homo sapiens
tccttattatcggaccccgaggatcaggaaaaactatggtgtcagctgtgatgcatgtttaaaaggaaattttcgaggtcgcagatataagtgtttaatt

SEQ ID NO: 660862 - DNA, 100 bp, Homo sapiens
aattccggatttccttgggtcttccggtaggagctgtaatcaattgtgctgacaacacagaaatcatgaccaccccaggaaaagagaactttcgcctgaa

SEQ ID NO: 660863 - DNA, 83 bp, Homo sapiens
acagcatcatgggaaagattgcatgttacactgacagaatctattaggaccaaagcagtatccttacaataatctgtacctgg

SEQ ID NO: 660864 - DNA, 74 bp, Homo sapiens
caatatctactcttgacaaccgaaccatcgtcatcacctctcatccagagctggaagtcgagtgtgctactcaa

SEQ ID NO: 660865 - DNA, 75 bp, Homo sapiens
ccaaaattcaatccctgctttagctcaggctctcaaaattagagagatgtgtaattgtccaccactgtctaatcc

SEQ ID NO: 660866 - DNA, 97 bp, Homo sapiens
cccatccccgctccccgaggccggccgcctggtcatggcgcagccgggcccggcttcccagcctgacggtcatcatcagatttgaaatatttaaagt

SEQ ID NO: 660867 - DNA, 100 bp, Homo sapiens
aacctggtgttttagaggataccttggtcccagagtcatcatgaaggttccaatgattttggttggcaataaatgtgacctggaagatgagcgagtagtt

SEQ ID NO: 660868 - DNA, 75 bp, Homo sapiens
aaagattacgtgagcatcttcgtctgcagtgattggcagctcctgcgggccaccagcccctcgggttccaagatg

SEQ ID NO: 660869 - DNA, 98 bp, Homo sapiens
tacgaggtggacatcaagccggataagtgtccccgtagagtcaaccgtttacaagtccttccactttctctctgaggcagaaagagcaagggtttttc

SEQ ID NO: 660870 - DNA, 100 bp, Homo sapiens
gaccgagagcgtgaccgagagcgcgaatatcgtcatcgttagaagagacggtctcgccacattgcccagactggtctgaaagtcttgggctcaagagatc

SEQ ID NO: 660871 - DNA, 100 bp, Homo sapiens
aagcgatggcttcagacagcatatttgagtcatttccttcgtacccacagtgcttcatgagagatataccagtatattcagagtcgcttttatcggtctc

SEQ ID NO: 660872 - DNA, 82 bp, Homo sapiens
tcggtggactccttcggcagtccacccaccgccgccgcctcccaggtcgagtcccagacaccagaagtctgaatttggagaa

SEQ ID NO: 660873 - DNA, 83 bp, Homo sapiens
ggcatacctatggctttattgacctcgactcccatgcgttgctgatcttatctgaagcagcagatcagtgggatgagggagac

SEQ ID NO: 660874 - DNA, 75 bp, Homo sapiens
aggagccttcatttataatacgcttacagatttcatacgagtgacattccaagcctgcagtatatctgaggccag

SEQ ID NO: 660875 - DNA, 97 bp, Homo sapiens
ttattcagcgactagtaagcctatgtcatttcatccaccacattacttagggtgattctgggggtccacttgtctgtaatggtgtgcttcaaggtat

SEQ ID NO: 660876 - DNA, 98 bp, Homo sapiens
ccatgtggaggctgaaactgatgatgctgtggagggggtgctgagaactgaagtctttgaggagaaatggcaagatattcttaaggaagttaaatttt

SEQ ID NO: 660877 - DNA, 50 bp, Homo sapiens
gttcaagacaggtgtttaagcgttacgaagtgacagtgctggtgcgggac

SEQ ID NO: 660878 - DNA, 108 bp, Homo sapiens
gacagcacatctggtagtggtgaaggtggaaaaggctataccaaagaccaagtagatggagttctcagtttgcaatggattttggataaacaagatctgttgaaggag

SEQ ID NO: 660879 - DNA, 98 bp, Homo sapiens
ggtgaagcatctgatgcacgttccatccggcgctcagctgggcttgagagtgcgctagatgttggaccgagtatggaatccgccatttcccctgcccg

SEQ ID NO: 660880 - DNA, 82 bp, Homo sapiens
aacagcaggggtcagctgggccgcaggggcgcgcagcgcggggagctgccagctgaactccagagggagcctttgttggtga

SEQ ID NO: 660881 - DNA, 51 bp, Homo sapiens
gccgtggccccgagggcggatccgaggattcctacaggaagcaagtagtaa

SEQ ID NO: 660882 - DNA, 133 bp, Homo sapiens
caggaatgcatttgtcacgggcattgcaaggtacattgagcaggctacagtccactccagcatggagggacacatctggggctctatgaggaggacagctttcatcctgggctctggacttctctcatttgtg

SEQ ID NO: 660883 - DNA, 96 bp, Homo sapiens
acagccaagtgcgggagtccacggtttattttcttgaaaaggctccaggcttcggcttggaaaatcccaccgccaaaattgagcccagcagctgga

SEQ ID NO: 660884 - DNA, 75 bp, Homo sapiens
tttaataagcctgtcactcaacaggtacgacaagcgtattctcagctatgacacagtggtgcaaacaactggaga

SEQ ID NO: 660885 - DNA, 74 bp, Homo sapiens
ggagccaagcgtcctgcccggccaaatacaaacctggtcgatgtgatgatattttgaaatggaagcctcccagt

SEQ ID NO: 660886 - DNA, 75 bp, Homo sapiens
gccccaaacaggacgaaggcgtgctgaagggggggccctcagcctcttggccttgaacgggctgttcatcttgat

SEQ ID NO: 660887 - DNA, 75 bp, Homo sapiens
cagcttttcagaactgcagggaaacagccatcatgagacaggggcaagtgtccgagtggtgaatcagctacttac

SEQ ID NO: 660888 - DNA, 50 bp, Homo sapiens
agagaactccttagaggtggaaggatttcttacaatctccagctacaacc

SEQ ID NO: 660889 - DNA, 100 bp, Homo sapiens
ggcggcgactacgacggcgttgatatcggtggtaacgacggcctcagcaggcggggaagatgaaagggaagccccttggcatcacgcacctccctctggg

SEQ ID NO: 660890 - DNA, 83 bp, Homo sapiens
gtcaagatcagcaacactatttctgacctgcctagagctggaacgttacctccagagcgagccctgctatgtttcagcctcag

SEQ ID NO: 660891 - DNA, 83 bp, Homo sapiens
ccggccttcatcgacatcagtgaagaagatcagaccatggtgaatccgggcagcagctcgcagccgcccccggtgacggccgg

SEQ ID NO: 660892 - DNA, 100 bp, Homo sapiens
gatgactacaaacataggatgttttggcgagagatgtattcagtggaggaagctggtgctggagaatctggtaaaagcaccattgtgaagcagatgagga

SEQ ID NO: 660893 - DNA, 100 bp, Homo sapiens
ctggagcacaaaagagtctccgcggtggaggtctgcgttgctcttgcttttcctcgctggggtgtacgttctcaggggctctgtacatcgtaggagccat

SEQ ID NO: 660894 - DNA, 90 bp, Homo sapiens
aacatttcctgatgctgaagataaaggcagaggtggaggagacactgaagcgactgcagagccagaagggagtgcagggaatcatcgtcg

SEQ ID NO: 660895 - DNA, 73 bp, Homo sapiens
aaaaaagcaaagctgatgctggggtgggagcccgtggtcccagcatttgagggtgatgatggattctgtgtgt

SEQ ID NO: 660896 - DNA, 100 bp, Homo sapiens
aaggactacgagaggaaggttatcttggagaaggcagggttccccttctactttgaactgaagatcgccttcgtgatatggctgctgtccccttacacca

SEQ ID NO: 660897 - DNA, 97 bp, Homo sapiens
gtcacctatgggaaaattccctacccagagccagtcttggtgctctgtgttcacctggttcatctgaggagctgcatctaccctgcccatgccatag

SEQ ID NO: 660898 - DNA, 100 bp, Homo sapiens
acgggggtggtgccgcgctcctggccccgcgcgggcggacggcggaggcgcctcccaggaagagagagaaaatccttcaaaacggagtagaattgaacgt

SEQ ID NO: 660899 - DNA, 75 bp, Homo sapiens
ttagcatcagtgacctcctggtaccaaaagacttgggaacagaaagccaggtcctagccaatggtctggacaaca

SEQ ID NO: 660900 - DNA, 97 bp, Homo sapiens
gcctcagttggaagcagccgatccagcctgcggagcctgtggggcaggcctgccttgctctgccaggaaccatgagtgaggcccgcagggacagcac

SEQ ID NO: 660901 - DNA, 74 bp, Homo sapiens
catgattgtgaggcctccccagccatgtggaactgtctgccatcatggatgttctcgcagaagcaaatggcacc

SEQ ID NO: 660902 - DNA, 90 bp, Homo sapiens
tgcctggggttacacctaaacaggcagacatctggtccctgggcataacagctattgaacttgcaagaggggaaccacctcattccgagc

SEQ ID NO: 660903 - DNA, 90 bp, Homo sapiens
atttttgagaccaaattaatcagcacattgatttataagtgttctacgcagaaatagaagagctgaaactggtgtatccttatcacggcg

SEQ ID NO: 660904 - DNA, 75 bp, Homo sapiens
aaaggagcaagatggctagggagattatggagaagtctggcgaggaaggaatgcctgatcttgcccatgtcatgc

SEQ ID NO: 660905 - DNA, 75 bp, Homo sapiens
ctcggatctgctggacgaggtcttcttcaacagcgaggtggacgagaaagtgatgtgcactcccagcaacacccc

SEQ ID NO: 660906 - DNA, 100 bp, Homo sapiens
ttcacctttgtctcctcagcagacgcggaagtgagttccttcggggttactcctgcagtaggtggactatcatctgggacagttggggaagcctcgacag

SEQ ID NO: 660907 - DNA, 100 bp, Homo sapiens
ggctaaatcaactggatatgatccagttaaactttttaccaagtggtcatctccatcagaggcaactgaaagtttcttatcaaaagaaatttggttgcca

SEQ ID NO: 660908 - DNA, 126 bp, Homo sapiens
cccttatccaacatggttctaaccttcagtactaaagaagatgcagtttcctttgcagaaaaaaatgtgcagctgtctgcttcagaaagtgagggctccaggaatgaggagaatcttcaagaactt

SEQ ID NO: 660909 - DNA, 82 bp, Homo sapiens
cgaagtaggccgtctcgctctgggtctccaggcccgcgaccgtccgccagtcgtcccgaggactggagactgatgcatgagg

SEQ ID NO: 660910 - DNA, 100 bp, Homo sapiens
aatcaacatggcaacttctggtaatggtcagattcctcagttccttttagatgattgctttaaaaatggtatcccctgccgtatattttgtactcaacca

SEQ ID NO: 660911 - DNA, 87 bp, Homo sapiens
gcagccgagatgccgggggagcggggccttccacaccccctccgtgggtgtgtggaaattcgaaatgagtcccatgactatcctcat

SEQ ID NO: 660912 - DNA, 145 bp, Homo sapiens
ccaggcccgggagcgcgatgtggagcgcttctttaagggctacgggaagatcctggaggtggatctgaagaacggtgcaccaattccagctggacatcactgtgaaaatgggacgggataaagtccgagaaatgtttatgaagaa

SEQ ID NO: 660913 - DNA, 90 bp, Homo sapiens
agctggctgtcctgaaatattataaggtggagcccagtgacaccatcgaaaatgtgaaggccaagatccaagataaagaaggcatccccc

SEQ ID NO: 660914 - DNA, 75 bp, Homo sapiens
cgatgtgcgagaactgcgcagacctggtggaggtgttaaatgaaattgttgacctcctgtactggagagacatta

SEQ ID NO: 660915 - DNA, 75 bp, Homo sapiens
gacgctactatgggccgagtggcagggacgacgcccagaatttacatagtacatgacgaagttaaggataaagct

SEQ ID NO: 660916 - DNA, 80 bp, Homo sapiens
ggaacctggcgcatctggcctgaggctagatggtgatggtcttgaatagtttaggtattatcctgcttggtacagatcgc

SEQ ID NO: 660917 - DNA, 100 bp, Homo sapiens
cggacaatgagatgggccttagcttggagtttttatgatgatgtcacagtaccatcctccagcggttgtggggcacccaggatgtatcccaagacatcca

SEQ ID NO: 660918 - DNA, 74 bp, Homo sapiens
ccacagctactccaacccaaacaacaaccaagccagtttaatgaatgtatgacaacatgtccacaatggtgtac

SEQ ID NO: 660919 - DNA, 50 bp, Homo sapiens
cgagggccctgggcaaggcccgacaggtgttcatgaagtctgtgaagctg

SEQ ID NO: 660920 - DNA, 100 bp, Homo sapiens
tggcaaagacttcaatgacatacggcaagattttgtgaaaggtgtagcagtcactcggcctacacccacagcatcgaccttgtgaacccagcgacctgac

SEQ ID NO: 660921 - DNA, 74 bp, Homo sapiens
cttaggagataatgaagagaggaccagagtatctactgacaaaagacaggaactgtggctgcaccatctgtctt

SEQ ID NO: 660922 - DNA, 75 bp, Homo sapiens
agcggctgcgaagtctgtaaacctggtggccaaaatcctgcttatctgtgaaatgcagttaacacatcagctgga

SEQ ID NO: 660923 - DNA, 83 bp, Homo sapiens
aaattcgtgatccgcccagccactgccgccgactgcagtgacatactgcggctgatcaaggcgcattctacattctaaagggg

SEQ ID NO: 660924 - DNA, 100 bp, Homo sapiens
gagaagcccttccatttgaattaccacgtagatcacttggattcctccaatagtttttccgtgacaaatgcttgtgctcctgacctctgataaagctgca

SEQ ID NO: 660925 - DNA, 76 bp, Homo sapiens
cggggctccaatggcgctttctacaagttaccggtattgtaagaacaagccgtacccaaagtctcgcttctgccga

SEQ ID NO: 660926 - DNA, 74 bp, Homo sapiens
aaagatgatgatgacattgacctctttggatctgatgatgaggaggaagaagaatttggacttgatgaagaaga

SEQ ID NO: 660927 - DNA, 100 bp, Homo sapiens
tgcctgggtttggaggccgcacctgcagcgagtgccaggaactcttctggggagaccccgacgtggagtgccgaggaatagccaggccagaagaaggaag

SEQ ID NO: 660928 - DNA, 98 bp, Homo sapiens
cagattcctccgggcagcagggacatcaatgcaagcttgaataagaaaaacaaattcttcctcctaagccatggcatatcagttatacagaaatacta

SEQ ID NO: 660929 - DNA, 75 bp, Homo sapiens
tcctggccctggccctgatcatcctgctgggcttcgtccagatcgggaaggggccatgaagcccccaggaggaga

SEQ ID NO: 660930 - DNA, 90 bp, Homo sapiens
gagagagtttgaggtgtacggacctatcaaaagagtggccacgtcttttattagaacaatagagcttggagggaaaggatatgcaccacc

SEQ ID NO: 660931 - DNA, 100 bp, Homo sapiens
ggttgagagcttccagcagctgctcaatgctcggacacagaagctccaccatgaggcgaggtggatggaggaagcgagctgaaaatgatggctgggaaac

SEQ ID NO: 660932 - DNA, 75 bp, Homo sapiens
tctgatttctggagttcagcactagatctaccaaggattcctcctgctttacagtagttctcaacaatctccgtg

SEQ ID NO: 660933 - DNA, 100 bp, Homo sapiens
cttctccatgctgtgttgtttctggcccgttggcatcgctgccttctgtctagcccagaagctcctgtccaaatatgacccccagaaggaggcagagctc

SEQ ID NO: 660934 - DNA, 98 bp, Homo sapiens
gttcgctgcccggtccgcccgcggtgagagagctcaagcgcccagctctgcccgaggagcccaggctgccccgtgagtcccatagttgctgcaggagt

SEQ ID NO: 660935 - DNA, 50 bp, Homo sapiens
aagccaatcccaggaggaaaaacgagacaacaccaacatttttgtaatgg

SEQ ID NO: 660936 - DNA, 82 bp, Homo sapiens
cagaagagcggcggctggaccacttctctgtcgacggctatgacagttctgctgctgtgacttactcgaagcctcgattggc

SEQ ID NO: 660937 - DNA, 100 bp, Homo sapiens
atcggatcaccggcgtgccccaccatgtcagacgcagccgtagacaccagctccgaaatcaccaccaagatcatcagaaaagcccttactgaggaaaaac

SEQ ID NO: 660938 - DNA, 82 bp, Homo sapiens
cgcgctcctggccccgcgcgggcggacggcggaggcgcctcccagacatttatgcagtgtgtgattctttctaaaacaactc

SEQ ID NO: 660939 - DNA, 100 bp, Homo sapiens
tggttatgagtttgcagatgaccggcatacttgcatctgtgaagatggagctggaaaaacaagcttaataagaaaaattcagggaatagaggagtataag

SEQ ID NO: 660940 - DNA, 105 bp, Homo sapiens
ggcgtctggctgctgcggaccccgccgagtcctagcgcctggcctgcgcgccgctgcccgcgccacagatagaagaatttcgaaggctgaggacacatgttaagg

SEQ ID NO: 660941 - DNA, 49 bp, Homo sapiens
acaagcactatttatcaacaaagccctgccaaggtaaccctgctggggt

SEQ ID NO: 660942 - DNA, 83 bp, Homo sapiens
taaactacgaaatacaccttatcagagctctcgatgttctgaagtatgaggaagttgacatggattcattagccaaggctgtt

SEQ ID NO: 660943 - DNA, 82 bp, Homo sapiens
ctagcgctatgcctgcggcggagactgcatcaggctctcgggggatatgagactttctactcggaatatcctgagtgttgcg

SEQ ID NO: 660944 - DNA, 100 bp, Homo sapiens
aggtggagagttgccattccaaattctgcagtggactgctctggcctgcctgacccagtgagaggcaaagaatgcaaaataagcgggttttgaaaacaaa

SEQ ID NO: 660945 - DNA, 51 bp, Homo sapiens
ctattgcgcctgccctggttagcaagtctggctctttcatccaggatggag

SEQ ID NO: 660946 - DNA, 82 bp, Homo sapiens
cccgaccgttatccagtcggttcgtggagaggagagccacttctgccccaccaacgttgggccaaccaaaaggagtcagtgc

SEQ ID NO: 660947 - DNA, 75 bp, Homo sapiens
gcagcagcagctccagcaggcgctggctcctgctcagacccaagcaccagccgccgcttcacacctccctccccg

SEQ ID NO: 660948 - DNA, 83 bp, Homo sapiens
cctacccgggatacggaggagggatgatgatgtgcctgcagatatggttgcagaagaatcaggtcctggtgcacaaaatagtc

SEQ ID NO: 660949 - DNA, 100 bp, Homo sapiens
ggattccagatctgttcagggagaacttgggtggatagcaagccctctggaaggaggggactaatgtttcaagccagactccctctgccaaaagaagttt

SEQ ID NO: 660950 - DNA, 83 bp, Homo sapiens
aagactacctttttcagaaatgcgcagagcaaacatctttcaaagacaatgcagatcttcgtgaagactctgactggtaagac

SEQ ID NO: 660951 - DNA, 73 bp, Homo sapiens
gcaagaagttaattcctgaagtcgagtcctattttgtaacggattatgatccaaccattgaagattcttacac

SEQ ID NO: 660952 - DNA, 80 bp, Homo sapiens
aaccccaggactgcgcccccgggagcgggcgcccagaggcatttccggagagttcttttgaagtcacttcagaaggatct

SEQ ID NO: 660953 - DNA, 97 bp, Homo sapiens
ctcatcctgcagtatggcttgaccctcagtgatctggatcgacacccagagagtccagcctctgatgaagcaggagagaaagaagccaagtctgatt

SEQ ID NO: 660954 - DNA, 82 bp, Homo sapiens
cttctttctccaggaaagatcaaaacgatgcactgcaaggcagatgtaattgttaattctgtaaacccacatgatattacag

SEQ ID NO: 660955 - DNA, 98 bp, Homo sapiens
gcgcacgcggctgctgccgacccctggcacctggcgcccagcgcgcccgtggccgctgccgcctccgccccaggtagctacagcaagctgggtagcag

SEQ ID NO: 660956 - DNA, 98 bp, Homo sapiens
gctgggggcagctgtagtgggagtgttccaggattcgccttgttggctagagatttactacatccgtccttggaagaggaaaagaaaaaacataaaaa

SEQ ID NO: 660957 - DNA, 98 bp, Homo sapiens
tatggagaaaattgactcagttcctggctgaaagtacagaggaccagaataatgaaactcagcaattggtaattattcgaggtggaggacatatttta

SEQ ID NO: 660958 - DNA, 74 bp, Homo sapiens
ccaggcctcattggacagcattcgaggttgactatagtcaatggggccaatggagccaagtgtatggaaaccca

SEQ ID NO: 660959 - DNA, 101 bp, Homo sapiens
aaacggtgcctgcggtgcctgagctgagtgaggccgaggccgggaggccgtgcccggagatgactatgctcagctgtgtaacatccccgtgacgggacgcc

SEQ ID NO: 660960 - DNA, 99 bp, Homo sapiens
ctccttattgctggagaaggagaaaagtgcccaagatcctttcagtgtctgggagccagcttctgagtgttgtcaaggtagtcctggtggcttgagact

SEQ ID NO: 660961 - DNA, 90 bp, Homo sapiens
cctcccgagtggctgggattacagatgaggtctccaagggaccagatggagaacagatgcaaccacactgaagtcagaatcgcagcttgc

SEQ ID NO: 660962 - DNA, 100 bp, Homo sapiens
tatccaatcaagtgcccttggacaaagcctgaaaccagccaaatttgtatcctactgtggggcttcaaacaccaggagaagtggtcgatgccaattttgg

SEQ ID NO: 660963 - DNA, 50 bp, Homo sapiens
gagcacctgaagagatgccagcaggtatcacctcttctgggctcaagatg

SEQ ID NO: 660964 - DNA, 83 bp, Homo sapiens
gggagcgcggccgagtggggcgacgaggctgacggcggccagacaatgcagatcttcgtgaagactctgactggtaagaccat

SEQ ID NO: 660965 - DNA, 83 bp, Homo sapiens
cggcagtcacttgtacagcgccggtcaacatcgcggtcatcaagtacttgtctttggtgcaacactaacaaggcttgtctgga

SEQ ID NO: 660966 - DNA, 100 bp, Homo sapiens
ccacgctctcagtcagcctggggaatgagacccaaactgctcatacagaattacgcatttccacttctaatgatgcacttgctgcctgcaattaccttcc

SEQ ID NO: 660967 - DNA, 89 bp, Homo sapiens
aggaagcaaaggagactgtactgtactgaagcccacacttatggctgctgttccggactcatctgatgatgtgagaagagttcagagga

SEQ ID NO: 660968 - DNA, 75 bp, Homo sapiens
aaccctttactcgcgacctttcgcttcaccttcacagcagccctgcgagggcaagctgcctgtcctgctgcttgg

SEQ ID NO: 660969 - DNA, 75 bp, Homo sapiens
ttgcaacttttgttaccaaaggaatcaggaagtgagctcacaatgactcaagctgccacatagtgttgattgtga

SEQ ID NO: 660970 - DNA, 87 bp, Homo sapiens
ccaaagcaatgagaatagtagctcttctagtatctgcaaagacaatgcagtgtgaccgcaacaagggaaaacatggcttatactgtg

SEQ ID NO: 660971 - DNA, 75 bp, Homo sapiens
attgcactgctgcagtccaggctgaagacagagggctctgatctgtgcgacagaatgatgccatggagagcagca

SEQ ID NO: 660972 - DNA, 96 bp, Homo sapiens
atcagttccatccgaagagttcctctcccacctgaacttgttgagcagtttggacgatattgctgcatatcgagctaaaggaaagcctgatgcagc

SEQ ID NO: 660973 - DNA, 100 bp, Homo sapiens
gcagagcagctgaagcaagctgaggagctcagatcaccggggaacccttgatccgtcgatcagatgataatgaaaaggccttgaaaatccgcctgcaagc

SEQ ID NO: 660974 - DNA, 75 bp, Homo sapiens
gggagggtaatcttggcaggcgcctgctgcatggcgtagatttcctcgtcctgtgactgtggagcccatggacca

SEQ ID NO: 660975 - DNA, 100 bp, Homo sapiens
tgagggtcggaccccagtaccaggcggtggtgcccgacttcgaccccgcccccaggtttccctagatgacaaataaacattccttttcctgcgtgaagat

SEQ ID NO: 660976 - DNA, 99 bp, Homo sapiens
atagacttcgggccttgaaaagcagaagacaatccaaaacaaacgctattcctctcacgtcagtgagagggcatactgggaagccctctggagtgggaa

SEQ ID NO: 660977 - DNA, 51 bp, Homo sapiens
aatgagttgttcaccttaacccattacgctctgttcctttgtggataaact

SEQ ID NO: 660978 - DNA, 75 bp, Homo sapiens
cagcgacggagtctacgccatcgtggccacgcttctcatcctggacatctgggtagtagatggcattgaagacgg

SEQ ID NO: 660979 - DNA, 90 bp, Homo sapiens
gttgacttggggatccaaaggcacagtgaagctgtggtctaccaatctagacaactcagtggcaagcattgaggcaaaggctaatgtgtg

SEQ ID NO: 660980 - DNA, 90 bp, Homo sapiens
gctggaggcggagcttggcaacatgcagggaccgctgacaaaggagcctcagccaaccaggaaaaaggctaaatccacccttacccctcc

SEQ ID NO: 660981 - DNA, 83 bp, Homo sapiens
caaagggactcactcaaaatgagacaagccacccaggctactttgggaaagttggtatgaagcattaccacttaaagaggaac

SEQ ID NO: 660982 - DNA, 75 bp, Homo sapiens
gcggccactcttgccaggaggcgtaatgtactaatggtcacttgatgtgcgctggctgttttatccacctactag

SEQ ID NO: 660983 - DNA, 87 bp, Homo sapiens
ggccagggaaccctggtcaccgtctcctcaggctaccggctctctgaccagttccacgacatcctcattcgaaagtttgacaggcag

SEQ ID NO: 660984 - DNA, 50 bp, Homo sapiens
catgctcgtcgagttcttcgccccctggtactccaaagattcaggtttac

SEQ ID NO: 660985 - DNA, 100 bp, Homo sapiens
agggacttctgcagagagagtgcgcagaaggattccgggagcacagttccgccgaacaattgtggcaattaataaagacccagaagctccaattttccaa

SEQ ID NO: 660986 - DNA, 101 bp, Homo sapiens
caatggctgataaatgacactttgagacatctccatctcatctcaagtcactcccgccagcagatgaaggctgaagccgacgtagcttctctgaacagacg

SEQ ID NO: 660987 - DNA, 91 bp, Homo sapiens
agatccacctacgacctcaggtcctcagaccgaccagcccaagaaacatctcaccaatttcaaatctgagacgggatttcaccatgttggc

SEQ ID NO: 660988 - DNA, 75 bp, Homo sapiens
agacagggcacaccaaactccatctgagctccacgcaggagatcggtgaggagctgatcaacggagtcatctact

SEQ ID NO: 660989 - DNA, 74 bp, Homo sapiens
cgggcggacgccaccaacgtcaacaactggcactggaagagagaagggcacagttacctaagtatcaacgtaat

SEQ ID NO: 660990 - DNA, 98 bp, Homo sapiens
agtccaagtcaaacgcagaaggactgcctcactgagcaaccaagagttctccgtggaggagccagccaacgtcctttgaccccaaaccagaaccagca

SEQ ID NO: 660991 - DNA, 75 bp, Homo sapiens
gaagctgcagccgcacctggccaaggttgtggaagatatcaataagcgcagagagccgctccccagcctggaggc

SEQ ID NO: 660992 - DNA, 76 bp, Homo sapiens
gtctcctcttcctcctcctcttcctcttcgcttgcagatacccccgagatcggacttgatgacacgtaccttcgct

SEQ ID NO: 660993 - DNA, 75 bp, Homo sapiens
ctggtcagatgaacccatcaaagagtgcggttaacacagaaatctgcctcctgggccatgccgcttctaaggcct

SEQ ID NO: 660994 - DNA, 98 bp, Homo sapiens
aagatcatcaagcgcaagcacaccctaccgaattacaagatcagaaacatgagttctgctggcgctgatgggagaaaagcgatgagaagatgtgacgg

SEQ ID NO: 660995 - DNA, 82 bp, Homo sapiens
cgacgtcatcatgctgaccaccaatcagatccgtaagcaattctgtggtgttcttggtcacacatttatggagtttctgaag

SEQ ID NO: 660996 - DNA, 75 bp, Homo sapiens
taaacagccaaaacagttcattcatattcagcgctgacctggatatcaccgaaataaacaaactaacagcagaag

SEQ ID NO: 660997 - DNA, 100 bp, Homo sapiens
tctgaaaaaattcaaaactagtccttattttccaaccacagccctggagagtgaatttgtttcctgccagcttcaccaatggattgatctcatttttggc

SEQ ID NO: 660998 - DNA, 75 bp, Homo sapiens
gaggagagctctgggaacagccgctcacaatatggccatcaggttcaagatgttgttcctataactagttatgac

SEQ ID NO: 660999 - DNA, 100 bp, Homo sapiens
tcgtctcttacgtctgcggaagtgcagctgcctcagttcttagcgcagattatagcatttgatgagctgaagactgattacaagaatcctatagaccagt

SEQ ID NO: 661000 - DNA, 75 bp, Homo sapiens
ctgcgagggatggagggcgccgtgctgcccgtgtggagtgcgcacggggaagagatcctgaaggagctagacgag

SEQ ID NO: 661001 - DNA, 100 bp, Homo sapiens
tgctgaactgggtgctttatatagggtatgtcgagagtaccaacgtggcaattgcaaccgaggagaaaatgattgtcggtttgctcatcctgctgacagc

SEQ ID NO: 661002 - DNA, 100 bp, Homo sapiens
gacgtctgctcactggagatgacacgtgcgtggggtgttggcaacacgctagaagggtttatgaaattcttcgactactggtaactgacatgagtgatgc

SEQ ID NO: 661003 - DNA, 74 bp, Homo sapiens
ctcgtggtggatggcatggggcgctttggcagatggagtctcgctgtgtgacccagactggagtgcagtggcac

SEQ ID NO: 661004 - DNA, 105 bp, Homo sapiens
agcgcttgcagtttgcattttatgtggttgaacaaatgtggcaaaatctggcaaaggcagagaccaaacttcatacctcaaactctggggggcggcgggagctga

SEQ ID NO: 661005 - DNA, 99 bp, Homo sapiens
cgggggactgcggggccagcctcagacttaattcagtgcacaaatgagatgaatgtgaacatcccacagttggcagacagtttatttgaaagaactact

SEQ ID NO: 661006 - DNA, 91 bp, Homo sapiens
tgagcaagcccaggcacagccgacgccgcgggagaggaggttcagatgagcccctgctgacttgagagagacagagagaccacgccgattg

SEQ ID NO: 661007 - DNA, 98 bp, Homo sapiens
ggcggctgggactgaagagggacgggtcccgcggcgagcgagctcctgaggtgactgcttagaaaactgcacagcatctgatgaaattagcgaataag

SEQ ID NO: 661008 - DNA, 82 bp, Homo sapiens
cgagcagattctacaacacatggtggaatgtatccgggaggtcaacgaggtcatccagccctccagaatacccatcatatag

SEQ ID NO: 661009 - DNA, 100 bp, Homo sapiens
agaacacctgtgaaagaccgattttctgcagaagatgaagctttgagtaacattgccagagagatttctcacattggcaaactgagagattttcttctgg

SEQ ID NO: 661010 - DNA, 100 bp, Homo sapiens
gtacgcgttgctatacagaatctttggatatgtgcatcagtggtttatgccaaaaaataaacagagttgtctttgttggaaactttttacgtgtcaatac

SEQ ID NO: 661011 - DNA, 98 bp, Homo sapiens
tgcctctgggctcaacagaacacagggagtaatcaagtcagaggattatatgacttttatctgcctagagaagaactatggatctacaacatggagac

SEQ ID NO: 661012 - DNA, 100 bp, Homo sapiens
accactgcttctccgtgggcagcattggcgaccagcgcttcacggctcctgtgacgtttgatgacatcactgtgtacttactccaggaggaatgggtgct

SEQ ID NO: 661013 - DNA, 100 bp, Homo sapiens
tgtcatgagagacacgatgagaagtccttaaaggtgatgttctgcaccctgaacacccacaaagtggacatggacaagctcctggggggccagatcgggc

SEQ ID NO: 661014 - DNA, 83 bp, Homo sapiens
cagagttgtgacagccaatcggatgctgaagcagatgcttttcagatattaataaggcagcggaaagaagaaatatgaatacg

SEQ ID NO: 661015 - DNA, 71 bp, Homo sapiens
gacatatttttggacctgaaacagaaattctggaacacctatatggtgattacgtttttgaagaagaagga

SEQ ID NO: 661016 - DNA, 75 bp, Homo sapiens
cctggctcggagcagcagcctctgagatcttggaccgagtagctgatggcatggtgttcggtgccctccttccct

SEQ ID NO: 661017 - DNA, 50 bp, Homo sapiens
ccctttgggcagacagcccatggcacaggaccacagccgctttgtcaact

SEQ ID NO: 661018 - DNA, 98 bp, Homo sapiens
agtcagacaacaagtttggaaaatggcatcatcccaagaagaatcaaagaatcttcaggatggcagcaagtgtttacgagcccatatttggattggac

SEQ ID NO: 661019 - DNA, 75 bp, Homo sapiens
ctcaccctcccgagttgaaaaagtttcatgtggacaaactctcttcggctcatgtataccttcgattacataagg

SEQ ID NO: 661020 - DNA, 75 bp, Homo sapiens
ttgacctttttgaagcctttgcaaaaaaagagaatgcgaacttcctaaaatagatgtacacttagttcctgatcg

SEQ ID NO: 661021 - DNA, 98 bp, Homo sapiens
gtatatggatacggagtacaaaaacggcccttggatgatggaggtttctggcacagccctgagtgtgaatttgtccgccactgcatcgccaagtccca

SEQ ID NO: 661022 - DNA, 98 bp, Homo sapiens
gagaagatgttcaaaagaaaacattcacaaaatgggtaaatgcacaattttctaagctccgacagttagttaatatgtgcatcaacccagatccagag

SEQ ID NO: 661023 - DNA, 97 bp, Homo sapiens
aatcaccagtatgacccacgactctgtctggcccaggctgcaagcacaaaggaagtttgctcagtctcagccgaatagtcccagcacaactccagta

SEQ ID NO: 661024 - DNA, 100 bp, Homo sapiens
gacagtggagacactggcattggaacttcctgttctgatagcgtggaaggacatgatccacatcgcggacaccaaggtcgccaggcgttatggggatttc

SEQ ID NO: 661025 - DNA, 74 bp, Homo sapiens
tcagaaggagctggcggacatcactttagaccctccacctaattgcaggtcccagctgggaggaaccttatacc

SEQ ID NO: 661026 - DNA, 75 bp, Homo sapiens
ccggctgtaaggagccgcggcggggggaaaatggagcccttcaccaatgattgacgagatgcctgaggctgccgt

SEQ ID NO: 661027 - DNA, 100 bp, Homo sapiens
tgaataagtgttttaagaaagtggacaaagagaggagtcaggaccaagaatcgccttcagccctgtctggtgcatccttggcagaaagtgaggaggaaaa

SEQ ID NO: 661028 - DNA, 100 bp, Homo sapiens
gttgattccaagtttcctatagaagacacccctttggttccgatgccgaaagttcagtataaatcgaactgtaaaccatccacatttgcatatcctgccc

SEQ ID NO: 661029 - DNA, 75 bp, Homo sapiens
atttagaaggaggttcaggctacggtgagccgaagatctctcgcatggatccccacagatggtacggagggatat

SEQ ID NO: 661030 - DNA, 50 bp, Homo sapiens
cccgactgtggagatgtggtgcgactagttgaatggatcgcagcagttac

SEQ ID NO: 661031 - DNA, 76 bp, Homo sapiens
tgttggcagcctttgagtttgacatccatcaagtaatcaaagagtgcaggctcggcatggctgcccggggccacag

SEQ ID NO: 661032 - DNA, 75 bp, Homo sapiens
tgaggctgagtctcagtgttgccctgttcagtctgaggtgcagcggaactgctgcctgacgctctgcaacttcag

SEQ ID NO: 661033 - DNA, 90 bp, Homo sapiens
ggtgctctgcccattcaaagactccggctgcaagcacaggctggctgtccaaaagtatgaggagctgttcccagctttctctgattcccg

SEQ ID NO: 661034 - DNA, 100 bp, Homo sapiens
ttcctgatggaagctgacttgggcgtggaagtcccccatgaagccgctacctgtctgaggaacccgagccctacctggcagtctacctgcactcggagcc

SEQ ID NO: 661035 - DNA, 95 bp, Homo sapiens
tcctcagcagaagggcataccgatgctgtccttgacctttcatggaataagctaatcagccccaaactggataccacccacatgtccatcatcag

SEQ ID NO: 661036 - DNA, 96 bp, Homo sapiens
gggcccaggaaggcaagaagcagtataagatgatctgccatgtgttcgagtcggaggatgccctagactggagctggttacagacggaagaagaag

SEQ ID NO: 661037 - DNA, 97 bp, Homo sapiens
taaaaatgatgtagttggaacaacatatctacacctctctaaaattgctgcctctggtggggaagtggaagggaagaaggagaaagggccaacccct

SEQ ID NO: 661038 - DNA, 86 bp, Homo sapiens
agttcgagcagatcgacaagtccgggagctgggcggccatttaccaggtcagcccaaggccaaccccactgtcactctgttcccgc

SEQ ID NO: 661039 - DNA, 100 bp, Homo sapiens
cggcccgctccagagtcagcatgggcctgtcttcgctcctgcttccaagaccacatgatccgtaactgcaactgtggccactacctgtacccactgcccc

SEQ ID NO: 661040 - DNA, 88 bp, Homo sapiens
aagccttcaaaagccccttatcctctccccaacaaacacaggtcactcagctctatgtgccagcatccagacatgtgtggaggttccg

SEQ ID NO: 661041 - DNA, 75 bp, Homo sapiens
ctccaacccaaacaacaaccaagccagtttaatgcccaccttgggacaccttgactccaagcccagcagtaagtc

SEQ ID NO: 661042 - DNA, 100 bp, Homo sapiens
atcactgcaccttaaaaacaaaagattgagctgcactgtattcctctctctatcaatatcagctcacatcattgaaaagataattttgaagacatgtttt

SEQ ID NO: 661043 - DNA, 75 bp, Homo sapiens
gccaccgcagaagtgggttacaatagggacaggtattaccaccttgctcttgactggaaatgcaactgtggttac

SEQ ID NO: 661044 - DNA, 50 bp, Homo sapiens
agcggctgaagcgcgtgcgcatgtggtttgatgataagaacccaatttgg

SEQ ID NO: 661045 - DNA, 90 bp, Homo sapiens
gagcccgcagaacctccacagtcaagaggacggccatgggtgccttcttctccggcatcttttggagcagctttgtcggtgggggtgtct

SEQ ID NO: 661046 - DNA, 96 bp, Homo sapiens
gtcataaatctgttactttcctacagagatatccagctttaccgatttgttacaactcaagcaagggccagcagaaattctcttttgacagatata

SEQ ID NO: 661047 - DNA, 60 bp, Homo sapiens
ttgtgctcctaacaacctgtctcttgagaattcagcctcagcccccagatgaagatgggg

SEQ ID NO: 661048 - DNA, 100 bp, Homo sapiens
acccggccccagggtacgctgccggtgtgcacagggagcaaagcttgtattggcttgcaattcagcagctgcctacagaccctatagaagaacagtttcc

SEQ ID NO: 661049 - DNA, 49 bp, Homo sapiens
aggagcacccggcgtcccagacaacgcacgtaccgggtgccgaaggagg

SEQ ID NO: 661050 - DNA, 103 bp, Homo sapiens
cgttcccgctgcgctaggggaagcgggcagtgaacagagtatctgccaagcccgggcttccgtgatggtctacgatgacaccagtaagaaatgggtaccaatc

SEQ ID NO: 661051 - DNA, 90 bp, Homo sapiens
gcccagacggctcacctgtgcgggatggaacaaaaggcatgttttccacaaatcctgcgtggatccctggcttagtgaacattgtacctg

SEQ ID NO: 661052 - DNA, 76 bp, Homo sapiens
gctgcttatggctataaaattacaggaagctcttactcctcagaaatgtattcctcacatcatcgtccggggtctc

SEQ ID NO: 661053 - DNA, 59 bp, Homo sapiens
aaggaaaagacagtgtagtcctgcaaaacattttgagttggttgaaagactggaaaaga

SEQ ID NO: 661054 - DNA, 100 bp, Homo sapiens
agaaactgttgaattagacccgtttcctatagatgagaaaccatacaagctgtgtgaaagagtttctagccaaagccaaagaagactttttgaaaaaatg

SEQ ID NO: 661055 - DNA, 76 bp, Homo sapiens
tcaaggccgaggtgcagaatctcggcggggagcttgttgtctctggggttcgatacaagaggctgttttcctagcg

SEQ ID NO: 661056 - DNA, 75 bp, Homo sapiens
agcgtcaacttcctcaagtcgcccaaaggaccgccgggagagcctgcccacctccccaccctggacgccgggcgc

SEQ ID NO: 661057 - DNA, 129 bp, Homo sapiens
agacagctgcaagctgaaaagtgcctgcaatttgccatttatttgtaataagactgtcttctgaagattgatgtctatttccttgagctctttaattttgttgccaatttggataaacatggcacaaat

SEQ ID NO: 661058 - DNA, 75 bp, Homo sapiens
atgctatgaaggctgtggaaaatagtagacagagaaacggaggcacagagaaggaagcggcagttaaagctgcga

SEQ ID NO: 661059 - DNA, 90 bp, Homo sapiens
ggaagacatggccactccagtcggtgttgagcacggcgagcagtctcaggcctttagtgatgatgaagcaagtgctcagggaaatgaaga

SEQ ID NO: 661060 - DNA, 100 bp, Homo sapiens
gcgtgagccaccgtgcctggctgaaggtgacaaacagcatgtttggtgcttcaagaaagaagtttgtagagggggtcgacagtgactaccatgacgaaaa

SEQ ID NO: 661061 - DNA, 114 bp, Homo sapiens
tggaaaaagaaatggaacagaaacatagagaggaactggagcaattgaagctgactactaaggagaataaggtggacattgaagtggacctaattcggttttccttttaaaagc

SEQ ID NO: 661062 - DNA, 76 bp, Homo sapiens
ttaattttagggtcctttatatagaagggagatttggacccaattaaatcctttgaagctcctgcaaccatcaatt

SEQ ID NO: 661063 - DNA, 75 bp, Homo sapiens
cttttgatatctggggccaagggacaatggtcaccgtctcttcagaaagttcaggagccctggaaaggagaagga

SEQ ID NO: 661064 - DNA, 83 bp, Homo sapiens
atcttccgactgatccagctggtggtcctggtctacgtcatcgggttttttattggcacctcagtctcaacattttcttttcg

SEQ ID NO: 661065 - DNA, 82 bp, Homo sapiens
aaattcttggagacaagcgcaaaatccagtgcaaatgtagaagaggtttgaagtttgaggaaattcaaaaaagatttggtga

SEQ ID NO: 661066 - DNA, 96 bp, Homo sapiens
gctgcgggtggcggtggtgtgctcgagcaaccagaaccggagcatggaggcgcacaacatcctcaggtagagtacagagagatggatgaaagcttg

SEQ ID NO: 661067 - DNA, 98 bp, Homo sapiens
cgtggagggcctcgccatgtcctgctgcccggcgacgctctccgaaagcctcgcctccagaagcccatcacggggcacttggatgacttattcttcac

SEQ ID NO: 661068 - DNA, 90 bp, Homo sapiens
gactccagattatatcgccccagagcagggaacagtacactgggaagctccgagtgagatcacactccttgagtccaactcacagagaag

SEQ ID NO: 661069 - DNA, 99 bp, Homo sapiens
atttatttgctacatcacaaagtaaagaatttgatcctcttggtccattgccacctggatgggggagaaaactggttgtcctggatgtttgaaaagttg

SEQ ID NO: 661070 - DNA, 88 bp, Homo sapiens
gaagccacacggcgagagacacacatccttcgccaggtcgccggccacccccacatcaggacctccagattgagagcttgaagagaga

SEQ ID NO: 661071 - DNA, 75 bp, Homo sapiens
tggccctcgatgtgctctgcgtgttgctgggtttgagacgggccaactcagtccaggcctccagacctgccccag

SEQ ID NO: 661072 - DNA, 100 bp, Homo sapiens
cggggaagtgatgatcagctccctgggagacgtcaagggcaatggcaaagccctcatgccgggatggcagaagatgagcctgatgctaagagccccaaga

SEQ ID NO: 661073 - DNA, 98 bp, Homo sapiens
tttggtgttactgctactcctggggatcggtttgatgtggtggttttggcccctttgctgcaaagtggtagctacagcaagctgggtagcaggcagat

SEQ ID NO: 661074 - DNA, 101 bp, Homo sapiens
aagtggtcacagccgcatctttgaagatggagaacttaatgttctggatgatattttaactgaagtaccagaacaagatgatgaactgtataatccagaga

SEQ ID NO: 661075 - DNA, 82 bp, Homo sapiens
tggtcatcaatgttactcaggtagaggtgagccagccatgagagggtatcttgtggccatattcctgagtgctgtcttcctc

SEQ ID NO: 661076 - DNA, 75 bp, Homo sapiens
cactgtgatatgggctactccggcaaaaaaggaaaaactggctgtacaggccaggtgtggtgtcttacacctgta

SEQ ID NO: 661077 - DNA, 100 bp, Homo sapiens
atggaattacactgtgatacgactgactaaactatgtgaagcaacactctggattttgaaagacatcttttcatcatgggacagcaaatttcggatcaga

SEQ ID NO: 661078 - DNA, 82 bp, Homo sapiens
ccaaatgaaattaatcctcctccacatacaatggctattcctcagtatgctattccttgtcactccagctccaatgtggtgg

SEQ ID NO: 661079 - DNA, 75 bp, Homo sapiens
aaccacatcgtcttccctgtcccaatcgaacctgcagatgacagcagcttctcgctgtcccaggaggttctccgg

SEQ ID NO: 661080 - DNA, 80 bp, Homo sapiens
gaaaaggatgccaataaagagttttctacatatgcagatgctctctggtggggcacatcacagcccgttggagattgtga

SEQ ID NO: 661081 - DNA, 90 bp, Homo sapiens
gttttctactcttacaaaggaactgtccacactgctgaaaaatctggcgtcgccctcagtgtgctccccatgtaccttagtgagatctca

SEQ ID NO: 661082 - DNA, 100 bp, Homo sapiens
atggagacgatgtcatcatcatcggggtctttaagggggagagtgacccagcctaccagcaataccaggatgccgagtttcaagaagtttttaaccgaag

SEQ ID NO: 661083 - DNA, 88 bp, Homo sapiens
aagccgccatgcgacctctccatgcagtcagtggaagtggcggatttgaagcattcattaccatctggacttggtctctcagaaaccc

SEQ ID NO: 661084 - DNA, 73 bp, Homo sapiens
aaacatctccactctgaagaagacactggaggaatttgctgacacaatatcttccgcctggtgctgggcatat

SEQ ID NO: 661085 - DNA, 101 bp, Homo sapiens
atctagagtatctcctcgaggaagtacaactggaatgttccggagaatcacagcagctgccactaggctgttccgcagtgatggctgtggcggcagtttct

SEQ ID NO: 661086 - DNA, 76 bp, Homo sapiens
gctacacccacggaatgcacaccttggctttcatggctgcagagctgagccattatctggatattgtggaagtaaa

SEQ ID NO: 661087 - DNA, 74 bp, Homo sapiens
tgccagaaatttgaacaactttccgaatctgcaaaagaagttccaagatgagatgggattctccaacatggaag

SEQ ID NO: 661088 - DNA, 100 bp, Homo sapiens
ggtttaataatgatagaatgaagaccacaataaaagagacctctacttagctcagcaattcttaccttacctgatggccaaaagaaaggaagaaaatttt

SEQ ID NO: 661089 - DNA, 109 bp, Homo sapiens
gccctacttcaaggataagggcgacagcaacagctctgccggctggaagggggatatgagactttctactcggaatatcctgagtgttgcgtggatgtaaaacccattt

SEQ ID NO: 661090 - DNA, 82 bp, Homo sapiens
cctggtgtcgccatgggccgccgccccgcccgttgttggagagaggcgatttcctctcagaagagtggagggagcgaatcgc

SEQ ID NO: 661091 - DNA, 51 bp, Homo sapiens
gtataacatgctgtggcatgctggaaagtcgagtaatcctgcctgtgtctg

SEQ ID NO: 661092 - DNA, 100 bp, Homo sapiens
cctggaaggcctcaaaatcgccgcaaggaagcccatgaaacctttaatgagtggtttaagcatatgaattcagttccacaaaaacctgctttgatacctc

SEQ ID NO: 661093 - DNA, 82 bp, Homo sapiens
ggtagcgaaggccgccgaacctgcctggctagccggcgacttgagtgacgagtgattgaaaactcagcctcaaaacaaaaaa

SEQ ID NO: 661094 - DNA, 82 bp, Homo sapiens
aaagatccaaaacaagtggctgcggccgtcgcccaggagtcatcggacgccagaatctggtctcctccgggctggggctgag

SEQ ID NO: 661095 - DNA, 75 bp, Homo sapiens
cccgtttctggctccgggctgagcttcctggagaagaggaagggctgaagaagatgcagagcagcctgaagctgg

SEQ ID NO: 661096 - DNA, 74 bp, Homo sapiens
agatgactccaaggacctagctctttgcaggtaattttttctgcaggatgaattaagagaagagacacttgctc

SEQ ID NO: 661097 - DNA, 100 bp, Homo sapiens
gcctcaggaaagctttaccaattcaggcacccagtcagaaatctcctgcaaagaagctgagccatgcaattagtaaatctttggggtgtgtacccacgag

SEQ ID NO: 661098 - DNA, 110 bp, Homo sapiens
ggagagcggatctcaggcaacctggatgctcctgagggcggcttcgatgccatcctgcagacagctgtgtgcacgggcttggagaagatctctgcctacatgaagtccag

SEQ ID NO: 661099 - DNA, 99 bp, Homo sapiens
tctcccggcagcagcccgacgcaaaccaaggatctggggatcttcgcactatcccaagattccaggagggcttcgtgtatggacctcaagcgttggagg

SEQ ID NO: 661100 - DNA, 98 bp, Homo sapiens
atcgagagtcttctctacagaattgcctcatttttgcaactggaaatggatcagacaatggctgccaatgctcagaagaataaattcttgattgatgg

SEQ ID NO: 661101 - DNA, 75 bp, Homo sapiens
atgaagatgatgatgaattgggtagagagaccaaagatcttgatgagggaggaggtacaggagaactgtgtgcgg

SEQ ID NO: 661102 - DNA, 74 bp, Homo sapiens
gcagtggtcgcttcttctccttgtcaggatggctaaaggtgaccccaagaaaccaaagggcaagatgtccgctt

SEQ ID NO: 661103 - DNA, 141 bp, Homo sapiens
caggaagcagctgctacacaattaggactgaaggagatgccgagccactgcttggtccatctacacaagatgtggaccctccaaaggacacaattgtgaagaacattaccctgaactttgggccccaacacccagcagcgc

SEQ ID NO: 661104 - DNA, 100 bp, Homo sapiens
cgggctgcaggcgggggtgctgcagaggacacgaggcggcgggctggagacatggaccgcggcgagcaaggtttctagaccaactggggagattcccgtt

SEQ ID NO: 661105 - DNA, 100 bp, Homo sapiens
cctgcgagccctgaggaagccttagctgccaacttcaggaactttaccttcatccagctgaatggagaattttctcggggaaagggacttgatgttggag

SEQ ID NO: 661106 - DNA, 75 bp, Homo sapiens
cccgctgccgggcaccgaggaccagctcaatgacagattttcatcaccgtgaattgcttgagcacagatttctcc

SEQ ID NO: 661107 - DNA, 80 bp, Homo sapiens
gcagtctctccctgccaggctcttcatccaaggaagccattaatttgctagaaccaatgacaaacgaccccgtgaactac

SEQ ID NO: 661108 - DNA, 114 bp, Homo sapiens
cacagtcccctgttccgaggtcaggaggatgcaagtcctgacagattcagcaacactgctgtgaacaaccggtccatccaactccccaccaccgtgcgggacatcatgaaccgc

SEQ ID NO: 661109 - DNA, 82 bp, Homo sapiens
cccatcctgccgtccttctccactttcgccagcccgtgccgcgagcgcggcctgcaggagcaaacggggattcagcgtccga

SEQ ID NO: 661110 - DNA, 90 bp, Homo sapiens
ctttgggaaactggaatcctcaaaatgctgtggctcttcttccagagaatgacacaggtgaaaggtgccatcaatgagaaggccacacat

SEQ ID NO: 661111 - DNA, 83 bp, Homo sapiens
aagaagccacccgcttaacatcctacctccagtcccagttaaaaagatcttcagtttagatcttggaggcatatcaactgtgg

SEQ ID NO: 661112 - DNA, 100 bp, Homo sapiens
cagattcgcagtggtcgcttcttctccttggtggccacagggcagccccatgagggctccagctactcttcgaggaaggactgtcagatggctctgaagc

SEQ ID NO: 661113 - DNA, 100 bp, Homo sapiens
accgcgcgcagggcctgcagcgggagctggacggcgagcgcgagcggcgcgagaaagttctgcggggagtgtctccagccctgcctgcaggtgccatccc

SEQ ID NO: 661114 - DNA, 98 bp, Homo sapiens
gatgaaggccctcaatgataaatttgcctccctaattggcaaggaaagaccacagcaagattctttcattcgtctcctcctagcctgggggaccaggc

SEQ ID NO: 661115 - DNA, 101 bp, Homo sapiens
aaccagctaaagtttgctcgaagccttcagtccgttgcagaggtgtttgaagtggtggaacgtgtagaagagttaagaaggaagtggccagtagcgtgggg

SEQ ID NO: 661116 - DNA, 101 bp, Homo sapiens
tattcctcttcctatccaatccctgccttttgagtccaggtggtggtgttcccactgatgaagagcaggcgactgggttggagagggagatcatgctggct

SEQ ID NO: 661117 - DNA, 100 bp, Homo sapiens
caactcgagagatgatcgctcgttctgctgctaccctcatcacacatcccttccatgattgttcagagattttcaatgatgggtataagctcagtggatt

SEQ ID NO: 661118 - DNA, 82 bp, Homo sapiens
ggggcggcggcggcggcggctgcggcccaatatagatgattactgtgaatgcttccttgtttcctagttctgtgaccaactc

SEQ ID NO: 661119 - DNA, 101 bp, Homo sapiens
gccaggcccccgcttcagtcaagacctgcctagaaaaagtattcaagtcaaacaacgttgaaatggattgggtgttgaagcatactggtccaaatagtcct

SEQ ID NO: 661120 - DNA, 75 bp, Homo sapiens
ccgcccacagacctcaaattcaaaggttggtttgttggaccttgaactcaatcggctgacgaaagcgctattttt

SEQ ID NO: 661121 - DNA, 50 bp, Homo sapiens
gcggagagcaacagcgcgccgcctcgccgctcctgctatttgccaaccgc

SEQ ID NO: 661122 - DNA, 75 bp, Homo sapiens
gcgggagccgtccggaggacctgggacaccgcggaagtcgggaaatgtgcaatgtgccaccccaagccctcccac

SEQ ID NO: 661123 - DNA, 83 bp, Homo sapiens
cgccccgcgagcacagagcctcgcctttgccgatccgccgcccgtccacacccgccgccagatacagatcacttggattcagt

SEQ ID NO: 661124 - DNA, 75 bp, Homo sapiens
aaatcaactacctaatgttatacaggctctggaaaaacatgaaggtactccaaagattcaggtttactcacgtca

SEQ ID NO: 661125 - DNA, 88 bp, Homo sapiens
acggattcgccatcgtgagttccagacagcccacctgaggatattgaccataaggactcatatctcattacaagaagcatcatggccg

SEQ ID NO: 661126 - DNA, 75 bp, Homo sapiens
ttacagagaaactggcatcactgctaatgaaaaatgctggacttgggatgattaacaatttggacaagacagcaa

SEQ ID NO: 661127 - DNA, 75 bp, Homo sapiens
ggccgccagcaatattgtccagatgaaggacgtgccggtggtggtgtgcacattgagccccggtatagacagttc

SEQ ID NO: 661128 - DNA, 75 bp, Homo sapiens
ctccttttcctacaagcatctcagaaaggccgagggggacggcaagatgcacatcaccctctgtgacttcatcgt

SEQ ID NO: 661129 - DNA, 74 bp, Homo sapiens
ttattgcgcgtggaacggctgcttttggaagaatgtatgacaacatgtccacaatggtgtacataaaggaagac

SEQ ID NO: 661130 - DNA, 97 bp, Homo sapiens
ggagacccccgccctcaactgagcggagctggagtttgttcagatcatcatcatcgtggtggtgatgatggtgatggtggtggtgatcacgtgcctg

SEQ ID NO: 661131 - DNA, 75 bp, Homo sapiens
accagatgatgaccctgagcaaggaaaatctgaggtactgccaaatctgtcgaaagggagataatgaagaactgc

SEQ ID NO: 661132 - DNA, 107 bp, Homo sapiens
ggcgacgcagtgtgcaccggctggctcgttaagtcgccccccgagaggaagctacagcgctacgctaatgtaatgcttgaatatgatattgatgaagctcaggcatt

SEQ ID NO: 661133 - DNA, 100 bp, Homo sapiens
cggcgccgagaggccgtgcgggacgcgggcgccaggaccggccgaacgcagagaaactatgttccaacttcctgtcaacaatcttggcagtttaagaaaa

SEQ ID NO: 661134 - DNA, 50 bp, Homo sapiens
cgccgggagtctgagctcaggttcatagtggactgatgtactggcccttt

SEQ ID NO: 661135 - DNA, 99 bp, Homo sapiens
gcaactgcatcccaggaacttggttatggttgtctcaagttaaatgagggccacacattggacatggatcttgtttttctctttgacaacagtaaaatc

SEQ ID NO: 661136 - DNA, 87 bp, Homo sapiens
gcagggcctgccaggtggcgctcggagctggccaagaggactcccggcaagcacccagaccaccccgcggtccagagtgccctgcag

SEQ ID NO: 661137 - DNA, 74 bp, Homo sapiens
cagccggaaggttgcagccgcaggagccccggaggcccaggacacagggagcctcagggaacccagccagcaca

SEQ ID NO: 661138 - DNA, 101 bp, Homo sapiens
gaacaagatcggtcccctgtttgaggtgcaccctgagcgtgacgctggagcaagccatcattctggccagaagccacggactgccacctcgttacatcatg

SEQ ID NO: 661139 - DNA, 83 bp, Homo sapiens
agttggaagcagccgatccagcctgcggagcctgtggggcaggctgctgaatcaggaataataaaagttaaaacaattgctgc

SEQ ID NO: 661140 - DNA, 100 bp, Homo sapiens
cgcaaagcggggacccagaccctggagcctcagttggaagcagccgatccagcctgcggagcctgtggggcaggaagcaaaaggagggtaattttgatat

SEQ ID NO: 661141 - DNA, 78 bp, Homo sapiens
acttatggaactggccgggctgagctgtgctacagccatcgccaaggctcttgctgatgagaatgagtttgtgcgtga

SEQ ID NO: 661142 - DNA, 100 bp, Homo sapiens
agcttcaagcttaggaccacccaccatgcctatccagatttggatcatacagcagatgtccagtgagtatagcgggagttcattcctttgaaaccacgtc

SEQ ID NO: 661143 - DNA, 100 bp, Homo sapiens
aaagcttcagagttctctaaaaaaactggctgtgaataatatagctggtattgaagaggtcacccttgtggttggagcgtcccaggacatcatcccccag

SEQ ID NO: 661144 - DNA, 74 bp, Homo sapiens
agcaagcggaggtgctgggagcgagttggctggtgctgcagggtgcacagctgatcgccgtggcctcctcggac

SEQ ID NO: 661145 - DNA, 100 bp, Homo sapiens
tttcttctcaccatttctggccaaaactacaaacaagacttcgcagggcccagtgttcaccatcataccaggggccagaggcgatggcttgcctccatga

SEQ ID NO: 661146 - DNA, 100 bp, Homo sapiens
gtcagcgccctcgccgccacgctgtgcttctcgcttcagaacattttctccaaaaaggatatgggcactgtggtcctgggaaagctggaatcaggatcta

SEQ ID NO: 661147 - DNA, 100 bp, Homo sapiens
gcagcctggggactctgcctcgtgccgctgagcctggcgcagatcggtactagcaaaggccagacgtcttactcaacaacttccctgccaccacctccac

SEQ ID NO: 661148 - DNA, 100 bp, Homo sapiens
tgatctgcaggttctgggagacgcacagctaagatgccaggacatcctggaagctgggaaaagtataaccccgttttcacacgaatggccccttcacata

SEQ ID NO: 661149 - DNA, 50 bp, Homo sapiens
tccagggctcctgtctacgaccagcccccaaatacatcaagatgtttgta

SEQ ID NO: 661150 - DNA, 83 bp, Homo sapiens
gccggaccgagcgcctcgacctcggtctgagattaagatgttctacgaggagcatttgcacttggacgatgagatccgctaca

SEQ ID NO: 661151 - DNA, 100 bp, Homo sapiens
ctcccgcctgagcccagcccccagaaaggattgtgacatatcgttggacccagaattgagccatggcaatgacaggctcaacaccttgctcatccatgag

SEQ ID NO: 661152 - DNA, 98 bp, Homo sapiens
gttgaggcccttcttgtgtatctggagaaaatagagatatccctcctaaatgtacaatcaaggatttgctaccaaaagagaagagcagtacagaagca

SEQ ID NO: 661153 - DNA, 82 bp, Homo sapiens
ccagcccgtgcaggacacgaagctgcatgtgtttgacgcaagctctgctgaccgagatgatggaaaggtgtaagaaactagg

SEQ ID NO: 661154 - DNA, 136 bp, Homo sapiens
agagcagtggatccgggccaagtacgagcgacaggagttcatctacccggagaagcaggagccctactcggcagtggagacctttggcgacttggcctttggcgacatcttcctccacctgctcacgggcaacctt

SEQ ID NO: 661155 - DNA, 75 bp, Homo sapiens
aaaaaggagatgcctggcagccccgctctctgcaatattctctaagccgctttcatcatgggagaaatagagcag

SEQ ID NO: 661156 - DNA, 100 bp, Homo sapiens
cgcccaggcgcttccgcgaccacccggagtgattgcccggcagagcgcggcccagggcagcaaggacgggaagccaaagcagaaggtgatcatcgccgac

SEQ ID NO: 661157 - DNA, 98 bp, Homo sapiens
ggcagtgctttccccgcgtactcgggatggcggcggccgcgctgaggctcccggctcagggtgttactgtgttgcccaggctggtcttgaaatcctgg

SEQ ID NO: 661158 - DNA, 82 bp, Homo sapiens
gcgtggaacggctgcttttggaaggtttgtgagccgtatctccgtggtgccaactcagcccgggctgcttctgtcctcctct

SEQ ID NO: 661159 - DNA, 74 bp, Homo sapiens
ctgtgccacttagaggaagccaaaaggtttctatatatgctgtaccagaaaagattggtcaagttcattatgcc

SEQ ID NO: 661160 - DNA, 74 bp, Homo sapiens
tcacgataaccaaggacgaccgcgaaccaaggtcaaaatgcagatcttcgtgaaaacccttaccggcaagacca

SEQ ID NO: 661161 - DNA, 90 bp, Homo sapiens
aaacgctacgtgagctgggccctgggccagaggcagaaaacggacggaagaaaaggtctggccggctggcagtgatggtgaaagcatagg

SEQ ID NO: 661162 - DNA, 50 bp, Homo sapiens
gagaagtcaagattccgccaacgaaacctcgacctgtctcccagttggtt

SEQ ID NO: 661163 - DNA, 71 bp, Homo sapiens
tgatcttgcggccaaaggggacctcggcgcagtaatgtcaacatgacgccaggaaagcatgtgcagatgca

SEQ ID NO: 661164 - DNA, 101 bp, Homo sapiens
cggtggttccagggagcattgcattcagtttacctcaggagaagacagactgctgctttggacctgttggtaatgatggcctgagctaaacatctaactag

SEQ ID NO: 661165 - DNA, 100 bp, Homo sapiens
gcctccgaatttgcaaagaggaggaaggagggacttcttggcttctcccagcatagccccagaggagtatggaatgtcccatatatggctaatgtgtact

SEQ ID NO: 661166 - DNA, 75 bp, Homo sapiens
cagcaaactcacctgttgaagcaaggatcccattgaagataccacgctgcatgtgtccttagtagtcatgtctcc

SEQ ID NO: 661167 - DNA, 112 bp, Homo sapiens
agaagattaacctggagttaaggaacagatccccggaggagttctgggaggtgatcagtgatgaacatggcatcgaccccaccggcacctaccacggggacagcgacctgca

SEQ ID NO: 661168 - DNA, 116 bp, Homo sapiens
cagggaatgacgtctgctgatgatttcttccaaggaaccaaggcggccctggctgggggaaccactatgatcagtgctggagaatctggtaaaagcaccattgtgaagcagatgag

SEQ ID NO: 661169 - DNA, 100 bp, Homo sapiens
tgtacctcaacacccccgacaagatgggtctgggggtggtggcatctcccctaaaggaagtggtccctctgtggcaagtgatgaagtctccagctttgcc

SEQ ID NO: 661170 - DNA, 79 bp, Homo sapiens
gcctgctgctgcttggagagccccagacagtcgcttgaagaggttttcctcctccaccaggcgctccacctccatctct

SEQ ID NO: 661171 - DNA, 75 bp, Homo sapiens
gttaaggattccaagtaactcttatttgaattctaagagtgcccagggtctggctggtcttcgaaaccttgggaa

SEQ ID NO: 661172 - DNA, 95 bp, Homo sapiens
gcctggagtcaggtggcggtgcagaaggtcaacgccgcaggcacagaattactgggagatgtactcaaagatcggccccaggaagcagatggaat

SEQ ID NO: 661173 - DNA, 80 bp, Homo sapiens
ctctgagagctgactgttattaactgaatgagaggatgtcagcaaacagggaagcaggaattgaggaacagattctccag

SEQ ID NO: 661174 - DNA, 101 bp, Homo sapiens
cttaaactcttggcatttggctttgcctttctggacacagaagtatttgtgacaggggcataaggaaatggtggcaggcacttcctcctaacaagaaggaa

SEQ ID NO: 661175 - DNA, 75 bp, Homo sapiens
aagcctcagtgatcttggtgccatagagagtctccgggtccctggaaagacacgatgaggcgagtggtacgacag

SEQ ID NO: 661176 - DNA, 100 bp, Homo sapiens
ccaagccctggtgccaggtgtccatccccgtgctgagaccatagtcttgagtttacttatgaggtcaattggaaataagaacaccattttactgggtcta

SEQ ID NO: 661177 - DNA, 75 bp, Homo sapiens
gtccctgctcatccattctcctgccacccccagacctcctcagctccagccaatattcactggtggaagatgatg

SEQ ID NO: 661178 - DNA, 75 bp, Homo sapiens
gtgtcgtttgagtgcatcttctcaacaaccctaggagatggcttccggaaagtggtccacatcgagcagggcggc

SEQ ID NO: 661179 - DNA, 51 bp, Homo sapiens
agagacaacaccgagtatgagaagaaagcaatctcccgggcaggcctccag

SEQ ID NO: 661180 - DNA, 82 bp, Homo sapiens
ccacgcagtccgagcgggagccgagccgggcggggcgagggcagctccggttgctccgactgtgtgttccaggagtggtggc

SEQ ID NO: 661181 - DNA, 98 bp, Homo sapiens
gaatggctgctagttgatcattgaatctggatgtgggctcgggatgagtttgaaggcctcttcaagcagccagcagaaaatgtcaaccagtacctcac

SEQ ID NO: 661182 - DNA, 101 bp, Homo sapiens
ccagaagctcttagccagcactcgctatccacctccaggtggacaaactggatgccttggagagtctgcgcaagcaagaggagcatgtgacagagcctgcc

SEQ ID NO: 661183 - DNA, 75 bp, Homo sapiens
ggcgggcatcgccctctacagcccctctggacgagaccagccagatgagcgacctcccggtgaaggtgatccacg

SEQ ID NO: 661184 - DNA, 50 bp, Homo sapiens
ctctgatggagcagcagagacgccctcccaggcccaatacttcaaagcat

SEQ ID NO: 661185 - DNA, 50 bp, Homo sapiens
ccaccgggtgggatgccccatccaggtatcgcccagtcagtcgcctagga

SEQ ID NO: 661186 - DNA, 82 bp, Homo sapiens
agcagccagtgctccaagcccggtgtcatgtacagagtgaagacagtgtcctcctgtttgttattgcatggacgatcacgga

SEQ ID NO: 661187 - DNA, 75 bp, Homo sapiens
cttcgttccaacatggacatcctgaagccaatcctgggtctgacaatgaatcagatgaagaagttgctgggaaga

SEQ ID NO: 661188 - DNA, 90 bp, Homo sapiens
ggaataaacctcttttccatcatgtatactggagcaccgtaaatgcactcggtgatggaaagagagccactattctgaagaacacttggc

SEQ ID NO: 661189 - DNA, 100 bp, Homo sapiens
ggagccggagctgggcgcggattcgccgaggcaccgaggcactcagaggaggctcttgtcaggatggtgaagctgttcatcggaaacctgccccgggagg

SEQ ID NO: 661190 - DNA, 100 bp, Homo sapiens
cttttggatttctttttaataatgtgtgacccttcacctttgatcccctgacctgcattaccttgcttataatatgactcgatggaggaaaatttgataa

SEQ ID NO: 661191 - DNA, 100 bp, Homo sapiens
atggcgtcttccgtgggcaacgtggccgacagcacagggccgttgctccagggagaactgcaaatatcttcatccacccccacatttaaaaacgcagttg

SEQ ID NO: 661192 - DNA, 87 bp, Homo sapiens
agaaggaggtctgcatcaatccctaccactataagagagtagaaagccctggtggtgttatcaaggagaagaaattcctgccttgac

SEQ ID NO: 661193 - DNA, 87 bp, Homo sapiens
cagcatattacctatcaggagaggaggtggataagattgtggaccagctgcagcagttaatgcaggtgtatgacttggctgcccttc

SEQ ID NO: 661194 - DNA, 102 bp, Homo sapiens
gcctggagttcagcctcagaatccaggagttcattgaactcatccggcagaataagagactggacgctgtgagacagaagccctgggggatgcggaggaaga

SEQ ID NO: 661195 - DNA, 101 bp, Homo sapiens
ggagacgcaagactccactctccctacgagatcaccacagaccacctgtggatgaagagccagagtcctctgaggtcgatgctgctggtcggtggcctggt

SEQ ID NO: 661196 - DNA, 98 bp, Homo sapiens
aagcattgtggacaccgtatccattcaggtggatattttatccaacaatgttccttctgatgatgtgctcttgaatgtcgtctctcaactagccaaac

SEQ ID NO: 661197 - DNA, 100 bp, Homo sapiens
tcaatgacagtcgagctttggctaagttggagtcattcgttgcccagtttgcagccaagaatgtgcagagagacacatcatagataacttttttgtgaag

SEQ ID NO: 661198 - DNA, 98 bp, Homo sapiens
ccaacaaacttgctgtgatagcaagtcacattcaagaaagagtacatgtgatgcagaaaagtcttacgaagtattactgagctttgtgataagtgaac

SEQ ID NO: 661199 - DNA, 99 bp, Homo sapiens
gaaaagcagttgctcgaagaactcgagcgacagagacaagctgagcttgccgcacaaaaagctagagaggtcttcctatcactgggctctaatttcact

SEQ ID NO: 661200 - DNA, 107 bp, Homo sapiens
agctgcaaaatccggtgtaggcacagctctcctattgaaacttgcccagatgttctcagatatggtcttaaaaggtgctgttcaagtcagtagaagaaccatttctt

SEQ ID NO: 661201 - DNA, 100 bp, Homo sapiens
gaaaacttgaaactaatcctgatattaagccatcaaatgtggaacctatggaaaaggttatcagtgagctgaatggaaaaaacattgaagacgtcattgc

SEQ ID NO: 661202 - DNA, 90 bp, Homo sapiens
aagatgatgatctctacggccagtctgtagaggatgattattgtatttcgccgtcaacagaaaagagtctcatcgtggaaggcaagaggg

SEQ ID NO: 661203 - DNA, 100 bp, Homo sapiens
ggaagaccaggctctgggggctgctgtggatgctctttgtctcagtgctcctcgtcttcctttgcctgggggtcttccttctatggaagaactggcggct

SEQ ID NO: 661204 - DNA, 75 bp, Homo sapiens
ctggagcaggagatcgccacctacagccgcttgctagaggttgaggacgctcaactgtgccctgtccacggtgcc

SEQ ID NO: 661205 - DNA, 115 bp, Homo sapiens
gttagtattgacaactggtgccggagggacaaaaagcaatgcaagagtcgctttgttacacctttcaagtgtctcggaaattgcaagacctaacatggctgaaagagaaacagaa

SEQ ID NO: 661206 - DNA, 101 bp, Homo sapiens
cacaggttacgggccagacagcagaagcaggccaagctcacagaagtggtctggaactgaaagtgatgcgtatttctgagttatgcctgtatttaagaagc

SEQ ID NO: 661207 - DNA, 83 bp, Homo sapiens
gtgacgggtctggagtgcgtgggggaccggctgttggcggctctacgaactcgacggggaccccaagaggaaggaattcctgg

SEQ ID NO: 661208 - DNA, 100 bp, Homo sapiens
aaacctggatctttgctagaaagagagattatttgctctcaaataactacgtaaattctatcatcgttcataaatttgacttttctgatgaggagattat

SEQ ID NO: 661209 - DNA, 51 bp, Homo sapiens
ggcaggagagtccggccgcgacaggacgcattatgggtttgtgctgtaccg

SEQ ID NO: 661210 - DNA, 98 bp, Homo sapiens
gcgcgaatatcgtcatcgttagaagatactgcttttgcaaaaaataaagatgatggaaaatggtactattttgatgacagtagtgtctccactgcatc

SEQ ID NO: 661211 - DNA, 100 bp, Homo sapiens
ccgagcgcggtggtgccctcagccccgtcctcttgtcctcctcagcctcgtcttgaatccagataatagttttgaaatactggttgaccaatctgtggtg

SEQ ID NO: 661212 - DNA, 100 bp, Homo sapiens
tatcatactacaacatgaatcggatccgactacagtggtctcgaatatggcatgtgattggagatcacttcaataagaaactggcgatggaatatgagag

SEQ ID NO: 661213 - DNA, 80 bp, Homo sapiens
tgaagtagaggtgggacgtccaaggatgatgggcactggagccggtgaaacctgaagaaggcagagatatggcaaacagg

SEQ ID NO: 661214 - DNA, 75 bp, Homo sapiens
gcgcggcaggagcagggctggacgggcctgaaggagaccaggggccccaagcctggaattgtctcgccatttaaa

SEQ ID NO: 661215 - DNA, 98 bp, Homo sapiens
gatcttctgaagagcctttgggagttctggtaaatcccaacatgtaccagtcccctccccagacttccttgccgtccaggaagggatttcgacaccag

SEQ ID NO: 661216 - DNA, 100 bp, Homo sapiens
tccctctgccctatgaacagcttaagcacttttaccgaaaaccttctccccaggtggcttcccacacttctgactcggacgttccttccggtgtcactga

SEQ ID NO: 661217 - DNA, 75 bp, Homo sapiens
gggtacctgcggccaattcggtggaacgaggacgcggactgcgaaggcaggttgcacgatgggaacacaagaccc

SEQ ID NO: 661218 - DNA, 100 bp, Homo sapiens
gttttgagagattacctgaagttgcactcaaaagcaagatatactactaactttgaaatggaataagctgtccgcaggcttgtccaaaaggaaacatcgg

SEQ ID NO: 661219 - DNA, 100 bp, Homo sapiens
atccgctggagcggagccggccgtacgcggtgctgcgagggcagaacctgggaggcaagtgaggcctatctggttggcctttttgaagacaccaacctgt

SEQ ID NO: 661220 - DNA, 101 bp, Homo sapiens
agaactcctgactgattagcattcacaccagatcctattaggaatacaggaacttctaaatgaaccaaatatccaagacccagctcaagcagaggcctaca

SEQ ID NO: 661221 - DNA, 90 bp, Homo sapiens
ggacagaaaagacagtgttctgctttcatggagttcacagaagagtcgaggagttccatcaccgggacagcttcaacacagggtccacag

SEQ ID NO: 661222 - DNA, 75 bp, Homo sapiens
acctggcttgcctggtttgaaaggagatcaaggaccaccaggactccaggtgtcacgtcttgaaattttaaatgt

SEQ ID NO: 661223 - DNA, 100 bp, Homo sapiens
ctccacagccttgatgacttctacataggaaagtattttggaggagtgatacactgcctctaggactgggacagatagccactgagtacctgcttcaaat

SEQ ID NO: 661224 - DNA, 51 bp, Homo sapiens
cattgttcgatacagggtgtatgagtattccatctgcagtgaacctctaat

SEQ ID NO: 661225 - DNA, 51 bp, Homo sapiens
taaggaccagtacctgcccaggaaactggtatcctgatgtgcagactcgag

SEQ ID NO: 661226 - DNA, 90 bp, Homo sapiens
caacatcccgttcactgctaccatggaataccaaattgacatattttttgctcagacctggacagatagtcgccttcgattcaacagcac

SEQ ID NO: 661227 - DNA, 74 bp, Homo sapiens
caataccctgttcccaaccgagcaaatgccttcaattaagttgcagagttctgatggagagatatttgaagttg

SEQ ID NO: 661228 - DNA, 98 bp, Homo sapiens
ccctcctttaaacagcttctccgggtctcagcatgacgagctcatctgcgcctttgtttagaacgcttaaaagttctgattccactaggaccagactg

SEQ ID NO: 661229 - DNA, 89 bp, Homo sapiens
tcatccctctgctgctcagtagcctcaacgacgaggtgcctgaggtcagctccttgctcggattgaacgtatggaaaggcggatgcagc

SEQ ID NO: 661230 - DNA, 100 bp, Homo sapiens
aaccggcagcagcgctgccgccgcgtcctcagccaccgctccctcttcccacggaaaaccagtagattcccagacatcgcgaagtgaatctgaaattgtg

SEQ ID NO: 661231 - DNA, 88 bp, Homo sapiens
aggactcattattttaacatttgggagaaacacagccagaaggcagacctgttatcctaaactaggtgagtcagcttttggtacatgt

SEQ ID NO: 661232 - DNA, 90 bp, Homo sapiens
atttgccgaagattaggaagaatccactgatagaaatcatttccatcaataccgggttgcagatatcaagaaagtcaacaacttcatcag

SEQ ID NO: 661233 - DNA, 98 bp, Homo sapiens
cagagactgctgagcccgtccgtccgccgccaccacccactccggacacagattgacgagatgcctgaggctgccgtgaaatcaacagccaacaaata

SEQ ID NO: 661234 - DNA, 51 bp, Homo sapiens
cggaggtcgataagctggaactgatgtgatgctacaggacgaagaggaatg

SEQ ID NO: 661235 - DNA, 90 bp, Homo sapiens
gtttatgtggtaccctgggagaaaaaaatttaccctactgtcaactgtcaaccactgggaatgctctcaaaggtctatggccctgtgttc

SEQ ID NO: 661236 - DNA, 96 bp, Homo sapiens
tccaaccaggggctgagcttctgcgctgtggagaagccaggtgactgtaatcaatgagagactgaagacagatcaacatacatcttacccatgctc

SEQ ID NO: 661237 - DNA, 95 bp, Homo sapiens
ttcattcccttcctgcctcacgcgtggaaatacattgcctacgtgaaatccctcactttaaggaggttatcatcatggctaccaactgcgagaac

SEQ ID NO: 661238 - DNA, 98 bp, Homo sapiens
ttacagaaggcttttgcttcaagagtagataaatccacacagactgaactactatgctatgatcgatggagaccaaaggctaccacagtctccctgaa

SEQ ID NO: 661239 - DNA, 100 bp, Homo sapiens
caagggcgggctgcttgccgctatggctggcagtcaggacatattcgatgccatcgtgatggcggatgagaggaggtgtcattaacttgtcagtacctat

SEQ ID NO: 661240 - DNA, 101 bp, Homo sapiens
ctgctattccggcgcctccactccgtcccccgcgggtctgctctgtgtgccatggacggcccacagcccccatcccgtagcccttcctggatctggagaga

SEQ ID NO: 661241 - DNA, 100 bp, Homo sapiens
agaacatcgtgtctgctgcccggaaggctcacggcacatacctgtgtgccccagccccacgccctcaggccagcagcccaggggcctcctttcactccag

SEQ ID NO: 661242 - DNA, 83 bp, Homo sapiens
attttcttctgcacttctgtctggagaggaggaagacaatgtgtgggacactggactacttgccgccagaaatgattgagggg

SEQ ID NO: 661243 - DNA, 76 bp, Homo sapiens
ggcaagaagacactctggacaccactatggacaggtgctggagaatctggtaaaagcaccattgtgaagcagatga

SEQ ID NO: 661244 - DNA, 87 bp, Homo sapiens
cggtagttgctccaaaacctaagtacaacccatacaaacaacctggaggtgagggtggcctttttgaagatgtaactattagagctg

SEQ ID NO: 661245 - DNA, 74 bp, Homo sapiens
agagaggaacattgatgcgtgtgaaatgttggcagaacctcaagaaggcatgaagccagcccctgcagtgccgt

SEQ ID NO: 661246 - DNA, 82 bp, Homo sapiens
cgaagagttggatactcagcgtcgctggcagccgctgtacttggtgtccctggccagtgtccttccacctgtccacaagcat

SEQ ID NO: 661247 - DNA, 95 bp, Homo sapiens
attcgggaccgactgacggccggccggcttcccggaactggaagctaaagctccatggaatagagattcctgaaaggacagattatgaaatggac

SEQ ID NO: 661248 - DNA, 100 bp, Homo sapiens
gggaaggaagatccggcgcggggcacaggatccggagctggagcccccagatcacagacaacctgacgaagaaggagattcagatagagaagatccattt

SEQ ID NO: 661249 - DNA, 94 bp, Homo sapiens
gcggcagctgcagtgacatgtccagcatgaatcccgaataaatccagcaactatcacaagaatactccttagccacttcaattgggataaagag

SEQ ID NO: 661250 - DNA, 100 bp, Homo sapiens
gctgctgtgcaagaaacgggccaaggtgggtcatgataactgggtacgtggagttctgttccattctggggggaagtttattttgagttgtgctgatgac

SEQ ID NO: 661251 - DNA, 75 bp, Homo sapiens
cctcccagtgggaaatatagcagcaatttgggcaactttaattatggatactcatccagatcatcaggatattct

SEQ ID NO: 661252 - DNA, 100 bp, Homo sapiens
ggactcaagctgggctaccttatcccagggcagcccctcctatggctccccagaggacacaggtatgtctgattgacccgggctgcttccgagaaattga

SEQ ID NO: 661253 - DNA, 100 bp, Homo sapiens
aaactggctaaagatgctgtgtcgacatgtagctaacaccatttgtaaagcagatgctcatgaagaggaaccacctcagaatatgaaaccacaatcagga

SEQ ID NO: 661254 - DNA, 96 bp, Homo sapiens
cgatctggacctggcctggcggttgttgacctcctgtactggagagacattaagaagactggagtggtgtttggtgccagcctattcctgctgctt

SEQ ID NO: 661255 - DNA, 49 bp, Homo sapiens
ctcaacatctctcagagacgaaagattttcgacaatgaagccaaagacg

SEQ ID NO: 661256 - DNA, 76 bp, Homo sapiens
gtctgcagcgacttcctcaaaggctactgccccctgggtgcaaagagctcaggccccggggcctccagcggcacca

SEQ ID NO: 661257 - DNA, 100 bp, Homo sapiens
tagctctacaatcaacccatgtgagctgaactagagaaacatggttataagatggagacttcatagcatccagaagaagtgttgaagtaacctaaacttg

SEQ ID NO: 661258 - DNA, 75 bp, Homo sapiens
gtggcagctcggggtctggatattcctaaagtccagcatgtcatccattaccagctgaaccttagccggccgatc

SEQ ID NO: 661259 - DNA, 100 bp, Homo sapiens
ctgactttctgaccaaggaggtgatggtggatgacaggctagtcacaatgcagctgacattatctctacggtagaattcaaccacacgggagaattacta

SEQ ID NO: 661260 - DNA, 75 bp, Homo sapiens
gcgtttgcagaatctgtcacagagggagatgtcaggtgggagaaaggattggcctaatgaagaagttcaacctgg

SEQ ID NO: 661261 - DNA, 99 bp, Homo sapiens
ctccttttcctccacctaccttcccgagtgtggacactgcaagaaacttgcccccgagtatgagaaggccgccaaggagctcagcaagcgttctcctcc

SEQ ID NO: 661262 - DNA, 101 bp, Homo sapiens
tcagtatgaagaaaaatttcagaaccatcacaaactgggtcgacaagaagatgctgaggaatacttaggcttcattctaaatggacttcatgaggaaatgt

SEQ ID NO: 661263 - DNA, 82 bp, Homo sapiens
aagagtcaaccagaaagagattgggtacttaatggttgctggaggagccagtatgagtcagatttcagaagcactgagccga

SEQ ID NO: 661264 - DNA, 100 bp, Homo sapiens
aggtccggggcttgccctggtcttgctcggccgatgaagtgcagaggtttttttctgtatacctgaggtgcaccggaggtgaagtcggtgccacttctgc

SEQ ID NO: 661265 - DNA, 90 bp, Homo sapiens
agcatctgcgatgtgaggaaaggcacctccaccagattgcagcaaaaattggaggtgatgcagggacatcactgaattcaaatgactatg

SEQ ID NO: 661266 - DNA, 83 bp, Homo sapiens
gcggaagatcgtcgccacctggatgctggaggatttttagactctgaggagcagttggagctaatccacattatggaaatgga

SEQ ID NO: 661267 - DNA, 75 bp, Homo sapiens
ctggcatggtcatattacatcggatatctgcggctgatcctgccagaaagtttcctacactactgaggtttaggg

SEQ ID NO: 661268 - DNA, 82 bp, Homo sapiens
tgtgtcgcagcttggtctcagaggagcatcgctgggcatgggaatcattgtgctggagctgtactggaagcatgctccaaag

SEQ ID NO: 661269 - DNA, 75 bp, Homo sapiens
cgcggagggagccgcgggatggaccgcaggcccccgatttctacgttgagatgaagtgggagttcaccagctggg

SEQ ID NO: 661270 - DNA, 100 bp, Homo sapiens
aaacgggactaaactggcgggctccgtggaagcgtggccggcagcgtcccggacgaggaggttatgcctccgcctcgttgccctgaaagccgcagcgaca

SEQ ID NO: 661271 - DNA, 98 bp, Homo sapiens
ccacctccgccagttaagaggaaaaaggtctggctctgggagaggagtggacagcagctggttgagatacatccccatctggagacaggactgccact

SEQ ID NO: 661272 - DNA, 75 bp, Homo sapiens
ccagactcggtgctgtacccgccgctcttgtcaggatggtgaagctgttcatcggaaacctgccccgggaggcta

SEQ ID NO: 661273 - DNA, 83 bp, Homo sapiens
ccgcgcgcctttgtgcgcgcgccgagtaagactttgaccccgacgcaggcttcagtgattgccgcggatcagaagcctgagca

SEQ ID NO: 661274 - DNA, 75 bp, Homo sapiens
cgggagagtgagagctccccaggggagttctctgtgtctgtgaagagtgcgctacagccagcagggaaacaatga

SEQ ID NO: 661275 - DNA, 74 bp, Homo sapiens
tgcttcaatgtccgcatcgcaaccaccgccctggccatctaccatgtggaatcttgtcgattggcctggctgct

SEQ ID NO: 661276 - DNA, 90 bp, Homo sapiens
cagattcaagtaaaactggctaatccttttcgaataggacaggcacatacagtgaggcacggggtcactctggtgcccattgaggagttc

SEQ ID NO: 661277 - DNA, 90 bp, Homo sapiens
aagagaaacagaaagaacacatccatattggggagatgaagcagtttgggcttcctgtagacacccttttcctgcgcaacagagctgggc

SEQ ID NO: 661278 - DNA, 75 bp, Homo sapiens
ggggacccttccgtatctgcctaggcattttgctgtctcctcctaatacggcaccacactgtaactcgaggcatc

SEQ ID NO: 661279 - DNA, 82 bp, Homo sapiens
ctcggcctggaaaagacagccagcatttccatcgcagggtttccaggcctgaggtgcccgccctggccccaggagaatgaac

SEQ ID NO: 661280 - DNA, 75 bp, Homo sapiens
cacagttgtctgcaccctgttgtggctctataagcagacagaccccgtgcggctgacacagctgtatgagcaggc

SEQ ID NO: 661281 - DNA, 98 bp, Homo sapiens
cgacagtgccctgagggccttcgagagctaccgcgccagacagagaactattgtcgagtgatgcgatgaaagaatataacagggctcgagtctacctg

SEQ ID NO: 661282 - DNA, 98 bp, Homo sapiens
gtgttttagaggataccttggtcccagagtcatcatgaagtaaagatgacggcgccttgaggtaagctacaggcaacaccacttccgcgtttctcttg

SEQ ID NO: 661283 - DNA, 98 bp, Homo sapiens
catctatctctatgaagaaggattggctagtcccacccgctgtacctgtgcaatgccagtgatgacgacaatctggagcctggattcatcagcatcgt

SEQ ID NO: 661284 - DNA, 100 bp, Homo sapiens
gagcaagagctggatctcgtctttctcctgactggctcatggagaaagcctacctaagaatgaagccgggacccggcagaatggctcctgtgaagaaggg

SEQ ID NO: 661285 - DNA, 75 bp, Homo sapiens
aagaagactctgctgaagctgtctgggggagatgatgaaccctgtgtgagcagcttcggaaggagaacgaggctc

SEQ ID NO: 661286 - DNA, 100 bp, Homo sapiens
aaccactttaaccccaaaattgagtcctacgctgctgtgaatcacatatcccaactgtcagaggagcaggtatctcagcgtttgagtcagccaggagtag

SEQ ID NO: 661287 - DNA, 83 bp, Homo sapiens
gggcgcctcggccgccatggtcttcagcggtgatgtgtccaatctagatcccaacttctcatttgaaggcaccaaactggatg

SEQ ID NO: 661288 - DNA, 87 bp, Homo sapiens
tactactacatggacgtctggggcaaagggaccacggtcaccgtctcctcagtgaaaatgcctcgtgtaaaagcagctcaagctgga

SEQ ID NO: 661289 - DNA, 83 bp, Homo sapiens
ctcatccagctgatgcccttcttcgtgttcgagaacttgtcttggacaattgcaaatcaaatgatggaaaaattgagggctta

SEQ ID NO: 661290 - DNA, 83 bp, Homo sapiens
cttgatcaggtggaacagattcagaaggagcaggattaccaaagggctgacaaacgggctcatcataatgcactggaacgaaa

SEQ ID NO: 661291 - DNA, 81 bp, Homo sapiens
aggctgtgcaacgcggagcgtgagaggaagacaatgcagatcttcgtgaagactctgactggtaagaccatcaccctcgag

SEQ ID NO: 661292 - DNA, 97 bp, Homo sapiens
ggaagctgtttcctatattgaaaggtcccacaccggcgagcgccccttcctctgctccgagtgcgggaagagcttctcccgctcatcctcgctcacg

SEQ ID NO: 661293 - DNA, 97 bp, Homo sapiens
ggccctgctggaacccctggagcaggaggaagcggtgattctccaggccttggagcacaagcgggagatttacgaccgctatggccgggaagggctg

SEQ ID NO: 661294 - DNA, 75 bp, Homo sapiens
gtggggcccccggttgccgccccctcggggttcacagagagtttcggagctgccaacatctcccaggcagcacgg

SEQ ID NO: 661295 - DNA, 75 bp, Homo sapiens
ggactggcgcactcacagctttccaggcaacagcattattgagaaaagcccttacagaagagtgtggccgtaggt

SEQ ID NO: 661296 - DNA, 74 bp, Homo sapiens
gccgccgccgttttcgcctgcagctgctcaccgccctggaagaaagcgggacttttcccctgttccttggagtc

SEQ ID NO: 661297 - DNA, 90 bp, Homo sapiens
tttctggcaatttctacagaaacaagtgaacgtctggtcctaaccagtgagcactggttagtactggtccccttctgggcaacatggccc

SEQ ID NO: 661298 - DNA, 83 bp, Homo sapiens
ctttggggaccgggaccgggatcgtgaccgtggagggaacgtcaaggtcgtgggaaataaaaggcagttctacacagactgca

SEQ ID NO: 661299 - DNA, 75 bp, Homo sapiens
gtgccgagcaattgtgatgagatattctgctgagtggaaggtgacagagctgaatgaacctctctccaatgaaga

SEQ ID NO: 661300 - DNA, 98 bp, Homo sapiens
cacaagcaaaggagttgcagggaccagccacttccggatccggggcctccttcccctccaaggcatgctggttggggcaaacacaatggataatcctt

SEQ ID NO: 661301 - DNA, 48 bp, Homo sapiens
aaaatcatattatagatggagtaaagttgcacgtgcattatttaatca

SEQ ID NO: 661302 - DNA, 90 bp, Homo sapiens
ggagatggcggctcagaagataaacgaggggctggaacacctcgccaaagcagagaaataaagcctccccagctttctgaggatgatatc

SEQ ID NO: 661303 - DNA, 75 bp, Homo sapiens
cagattctgaaacttcttgacaatttgcttgcgcttataagatatgagatcctgactccaaactccattcccaag

SEQ ID NO: 661304 - DNA, 90 bp, Homo sapiens
gtctgcgtgagaatagagaccaccgagagtctgtagaagaggcgacaccagggcttccaaatgaacaaccgaaaggaagatatggaaatc

SEQ ID NO: 661305 - DNA, 82 bp, Homo sapiens
cgtggacggtgtggggcggtcccggccccgcagtaaggtacctgccgtgggcagatctgagctttcttcttggacaccccat

SEQ ID NO: 661306 - DNA, 75 bp, Homo sapiens
taagaggaaaagtcaggggagtgttgaagactctgcctcctacaaatatacagagtgttgctcagttacccaggc

SEQ ID NO: 661307 - DNA, 115 bp, Homo sapiens
tccggaatctaaaaagccctcagtaccagagacagaagcagatggattcgtccttttagaggtaccgaaatgctacatttggctgtgttacattctagaaaactttgtgtctact

SEQ ID NO: 661308 - DNA, 96 bp, Homo sapiens
tgtttccttcttggtcatcacaaaatgccttgatgttcctgacccttttgtgcctgaccctactggctcaaaagccaaaagtctctgagaacgact

SEQ ID NO: 661309 - DNA, 75 bp, Homo sapiens
ggactgactggggttctgagactccctgtcccggaccgcagacaaaaagtaaccttcctgaagaggacatgtgat

SEQ ID NO: 661310 - DNA, 83 bp, Homo sapiens
gaaagatggatttttgcatgagacgcttctggacaggtgcacattcaggttcccgagcacaaacatcaagataacgttcactg

SEQ ID NO: 661311 - DNA, 75 bp, Homo sapiens
tcatggtgctgcatgcagagatgctgtggttcggggggtgctcgtacctgttggatcagactgatgtgttggtgg

SEQ ID NO: 661312 - DNA, 100 bp, Homo sapiens
acttgcgcggtggaggtgttcgggctcctggaggacgagggggacttgatctcatcttcatgccaggccttgggtttgacaaacatggcaaccgactggg

SEQ ID NO: 661313 - DNA, 97 bp, Homo sapiens
gtacaaagagaggatacggaatgcagttttaaccgtgattggagataccacaaagaagaacgagtatggattaccagggcaccaggcatggagccaa

SEQ ID NO: 661314 - DNA, 83 bp, Homo sapiens
gtgctgctgagcttggcctcggcgtcctcggtggcagaaatctgaagctatcatggaacaattgaagtcttttcaaataattg

SEQ ID NO: 661315 - DNA, 89 bp, Homo sapiens
ttcgaggtggagagagcccagtgggaggtggagcgggcggagctgcaggtgaatgaaaactttgccattgatttgatagcagagcagcc

SEQ ID NO: 661316 - DNA, 90 bp, Homo sapiens
cagaggccggcttggtcactatggaggagataggcatcttggtggagaaggctcaggtacaagactgtcatgtcttaaaatatacgtcaa

SEQ ID NO: 661317 - DNA, 90 bp, Homo sapiens
ccccaatggacagtctcccattgcccttgcttcaggacagagacaccaactctacaacattacctgtcatatactgaagaatctcttctt

SEQ ID NO: 661318 - DNA, 73 bp, Homo sapiens
tatgtatcggggatatagaccacgattccgcaggctcgtttctggcgctggagacatcaaacttactaaagac

SEQ ID NO: 661319 - DNA, 75 bp, Homo sapiens
agctgatgctgcccgagaaattgaggccgttgtacaaccatccagcagacaatacaatggtgggtgaagagaaga

SEQ ID NO: 661320 - DNA, 98 bp, Homo sapiens
accaagtccagccccagcatggcacctacacctgtgaagccaaactatgctctaaagttcacccttgctggccacaccaaagcagtgtcctccgtgaa

SEQ ID NO: 661321 - DNA, 75 bp, Homo sapiens
atggccaaggaccgcttacaacttctagggcttttttccagacttcaagctcccattccaacagtaagagcttct

SEQ ID NO: 661322 - DNA, 82 bp, Homo sapiens
ggatggaacacttcagtgcattcaagcaattctgtggtgttcttggtcacacatttatggagtttctgaagggcagtggaga

SEQ ID NO: 661323 - DNA, 75 bp, Homo sapiens
tctgtcttggaggacatcagaagggtgataagatcgacagacgggtatgtatcacttgattaagcttaggcattt

SEQ ID NO: 661324 - DNA, 75 bp, Homo sapiens
ccaaaaactacaatcataaagaaatccaacttaccttgtcagtgcccctgggcgctgggattgctctagcctgta

SEQ ID NO: 661325 - DNA, 101 bp, Homo sapiens
cagcttacgtttctgcaacaactggtgccgtagcaacagctctaggactcaatgcattgaccaagtatgaatccaagagtcgcatgtcagcagaggctgcc

SEQ ID NO: 661326 - DNA, 90 bp, Homo sapiens
gtgaagatggcggcagccgaggccgcgaactgcatcatggaggtggagccgccaccaaaatgcagattttcgtgaaaacccttacgggga

SEQ ID NO: 661327 - DNA, 119 bp, Homo sapiens
atgaggggagcatgggtgccaaggagtcacggatcggattcctcagctacgaggaggcgctgaggagaggtgccatggataacagaggctttcagcaggggagttttagtagcttccag

SEQ ID NO: 661328 - DNA, 75 bp, Homo sapiens
ctctcccaggccacaagacatttcctgctcggaaccttgtttactaatttcgggaacatgccctgtgtgccgccg

SEQ ID NO: 661329 - DNA, 88 bp, Homo sapiens
gggagacgccgtgacaactttcgtttccctctgagggaattgggaggtcggcggccccaaaagctggagtgcagtggcgtgatctcgg

SEQ ID NO: 661330 - DNA, 51 bp, Homo sapiens
ttatagcctgcttatgggggaagtgccaccatggcaactgcaccatacaac

SEQ ID NO: 661331 - DNA, 100 bp, Homo sapiens
caggacctgaagaagtattttgacagttgcaatggtgacctcgatcctgagattgtaaagagctttcacctggccctgctgcggcagcccggcatctaca

SEQ ID NO: 661332 - DNA, 90 bp, Homo sapiens
tgagatctggcatcgacggcatgactactggctgctagccggcattataaaccgctgtgtccagatgttggaatggtttgagcatcatgg

SEQ ID NO: 661333 - DNA, 100 bp, Homo sapiens
ggtctggagggctgagcagtcaactcaaatgcaagtccaagaggaggaggaggcggaggtccaagcggaaagggaaacagaagtacctgtgcgccagcag

SEQ ID NO: 661334 - DNA, 96 bp, Homo sapiens
ctttggtacaagccatcgagagataccttgtagttagagggtggagagattcaaccagttagcgtgaaagttggagataaagttcttctcccagaa

SEQ ID NO: 661335 - DNA, 82 bp, Homo sapiens
agctggtggggctctactgcgacaaggcaggtaaagtgaggaaacatgcaactgaacaggaaaaaactgaagagggattagg

SEQ ID NO: 661336 - DNA, 100 bp, Homo sapiens
tcagaaatactctataataaccacaagtttactaacgcaagtaaaattattaaaacagattttgggagtatatttgcgtgctctcgtgagaaatcttttt

SEQ ID NO: 661337 - DNA, 100 bp, Homo sapiens
gccttcaggatcctccgctcccgagttctttccaaatggcaatgcatttgccactggctcagacgacgccacctgcaggctgtttgaccttcgtgctgac

SEQ ID NO: 661338 - DNA, 100 bp, Homo sapiens
ttgcctatactttgccgacacattccttcgagatggtcccctctgagccctctcaccttgtcctgtggaagaagcacaggctcctgtcctcagatcccgg

SEQ ID NO: 661339 - DNA, 100 bp, Homo sapiens
caatctcagctccaggctacagggagaccgggaggatcacagagccagcatggtgatctgtgaaaatggttcgctattcacttgacccggagaaccccac

SEQ ID NO: 661340 - DNA, 100 bp, Homo sapiens
gagccctgcccagtcggcttcttctccaatgtgtcatctgctttcgaaaaatgtcacccttggacaaggaactgtggctgcaccatctgtcttcatcttc

SEQ ID NO: 661341 - DNA, 92 bp, Homo sapiens
cccctcagcggtggctcccaagaagtccgagacacgcggaattctcacactcaagaaagcaaatgaacttcttctgagcacaggcatgcccg

SEQ ID NO: 661342 - DNA, 75 bp, Homo sapiens
agacaaatgggatactgtttgtggcaagtctgtggagcgtgctacctgggcgatgccttccgctgtgccagctgc

SEQ ID NO: 661343 - DNA, 75 bp, Homo sapiens
actgccctgatgattcagacgagtctttagatacctgtgttagaggagtccaaatgcctcgtgcggagcttcctg

SEQ ID NO: 661344 - DNA, 97 bp, Homo sapiens
agcaaattgaaggcacaggaatatccatgtcggcttgtagagagattgcagctgagggtaaaaagctgggattggtaggctgggtccagaacactga

SEQ ID NO: 661345 - DNA, 80 bp, Homo sapiens
acgcacgggatccagagcgccgcgcacttcgtcatgttcttcgcgccctggaaggtgctcgggtcttcggggcactgggt

SEQ ID NO: 661346 - DNA, 100 bp, Homo sapiens
gccacgcgggcgagcggctgtgtggatgtcggcgaagccgcgggcgagaagctgctaacctgtgccaaacctccacggctgctacgacacctgtgactct

SEQ ID NO: 661347 - DNA, 75 bp, Homo sapiens
gagaagggatggaaatacttcaacaagggtgtgtccgcagccggccaggtggtatccctgaaggtgtggctgatt

SEQ ID NO: 661348 - DNA, 87 bp, Homo sapiens
tgatggtggcagcaacaaggagggaaaaaagagcaggtggaaaaggaaagtttggaccattttcagaaaaatgtgatattactacag

SEQ ID NO: 661349 - DNA, 98 bp, Homo sapiens
gcccgagcgctcgagaaagtcctctcgggagaagcagcgcctgttcccggggcagatccaggttcaggcctgatcacttgaacggacatatcaagcag

SEQ ID NO: 661350 - DNA, 82 bp, Homo sapiens
cgggcgccaatggggagcagaaggactcggacacaggtgtggacactgccagcggctgcagccgacttggaatgacctggga

SEQ ID NO: 661351 - DNA, 133 bp, Homo sapiens
cggcgacctcaagaagcagctccacgaaaggcagccgcggatcgccgcgctcagcgacaaacaataagactttgaccccgacgcaggcttcagtgattgccgcggatcagaagcctgagcactttggctcgag

SEQ ID NO: 661352 - DNA, 90 bp, Homo sapiens
caagtacttggcagatcactctcttagcaggtctgctgagaacagacccagtccctgaggaaggagaagatgttgctgccacgatcagtg

SEQ ID NO: 661353 - DNA, 50 bp, Homo sapiens
agcctcccaggtagctgggattacagagatatggtttcaccatgttgccc

SEQ ID NO: 661354 - DNA, 90 bp, Homo sapiens
ccattcagcccaatacaactggcaaacaactttttgaccagattgatatcagtaaatgccattatttagtggatttggacaccatgagag

SEQ ID NO: 661355 - DNA, 100 bp, Homo sapiens
ctatggctaaattacatattccagtaatggtggatgaagttgttcattgtttgtcaccacaaaaaggacagccctagatccttgttctgcttacatcagc

SEQ ID NO: 661356 - DNA, 144 bp, Homo sapiens
gtgtgggccggctagaggaagaggcgttgcggcgaaaggaacggctgaaggccctacgggagaaaaccgggcgcaagcaactgaacgaggaagggatgctgttggcttcagagatcaaacacctgccccgaagactcctaatag

SEQ ID NO: 661357 - DNA, 121 bp, Homo sapiens
ggaagggagatgcagcatcccagtttttggtcttctgtcaaaaacacagggatgaggattccggagtttgaatccacctttgacaattgtccgaaagacgtttgaatcaacagaaaaccca

SEQ ID NO: 661358 - DNA, 74 bp, Homo sapiens
gccgccatccgggaggcccagggaagagagaactcgatgccaccgcaacggtattggcgaaccggcaggatgaa

SEQ ID NO: 661359 - DNA, 100 bp, Homo sapiens
tgcggccagtcgccactgctcctagaacattccatattctgcttcacacacggtgactcactcactactgctttgtaccagtgtgcccactcgagtgcct

SEQ ID NO: 661360 - DNA, 100 bp, Homo sapiens
gaagccccctgcaggaactctacaacccaatccagtctcaaaccatgaattatgtgggacagctggctgggcaggtgattgtcactgtgaaggaactcta

SEQ ID NO: 661361 - DNA, 116 bp, Homo sapiens
caaagggaaggtggtggacctgctggcgcaggacgccgacatcgtgtgccgctgccagagccaaatctcctcagccacctgttgaagaagaagatgaacacttcgatgacacagtg

SEQ ID NO: 661362 - DNA, 101 bp, Homo sapiens
gttgcagtcggccagcccccttctccacggtgctggagaatctggtaaaagcaccattgtgaagcagatgaggatcctgcatgttaatgggtttaatggag

SEQ ID NO: 661363 - DNA, 75 bp, Homo sapiens
tttagggtcctttatatagaagggagagtagccacctcctaagctgcccaacggtgtgttcacccccgacttcca

SEQ ID NO: 661364 - DNA, 100 bp, Homo sapiens
cgggctaggacgccgagcggtgactccccgccgctcccgggggccgtgacgttccatggaaaatgggagaccacctgatcctgcagactgggccgtgatg

SEQ ID NO: 661365 - DNA, 75 bp, Homo sapiens
tacacggaaggcggagaaccctgcccagctgatgaggtggcgggacaggcttcattgggacagccctaacccagc

SEQ ID NO: 661366 - DNA, 100 bp, Homo sapiens
acttcctctcgaatatcaagaaatgcagtaaccagcatgtcaataaggggtcataggtggaaaagacatgcactgtgacttctgccgtgttcaccgtggg

SEQ ID NO: 661367 - DNA, 100 bp, Homo sapiens
aacaaatacaatgaatggcagcaagtcacctgttatctccaggatgtccatgaggagccccatctctgcccagctggccctggatggcgttggcaccatg

SEQ ID NO: 661368 - DNA, 100 bp, Homo sapiens
gagcagtttgaaggcgattgttgctgagtcactgaacaataccagcatcaaaggcttttattcaagtaaaaatgcatttgcaaagggagaaaatgaaggc

SEQ ID NO: 661369 - DNA, 88 bp, Homo sapiens
gatgttccgccggagcttgaatcgttttgacatccaggcagaaattgatgcccacaatgacatatttaaaagcattgacggaaacagg

SEQ ID NO: 661370 - DNA, 100 bp, Homo sapiens
ggactgtcaacgaaacctggcacggctcttgcttccgggaggtggtacaagcaaactgtgttcgctggagaaagaagttctcatttatgtgcaaaatgag

SEQ ID NO: 661371 - DNA, 100 bp, Homo sapiens
gcagcacagtcgggggtgtaggttatgggggagatacaactcgtcaacgaatcaaattcagtgatgacagagtatgcaagagtcaccttctcaactgttg

SEQ ID NO: 661372 - DNA, 112 bp, Homo sapiens
tgaagagcaagcccctaggaatctgcctgataatcgattgcattggcaatgagacagacatggcccatgaacatggacatgagcatggacatcataaaatggaacttccaga

SEQ ID NO: 661373 - DNA, 75 bp, Homo sapiens
tggccggggacacccagtggtccagctggcccgagataacttcttccgctgtggtgtgctgtatgaggactccct

SEQ ID NO: 661374 - DNA, 90 bp, Homo sapiens
gccgtacgcggtgctgcgagggcagaacctggcgctttaattgattgtctgataaacccacttcaagaacagatggaagaatggaagaaa

SEQ ID NO: 661375 - DNA, 90 bp, Homo sapiens
tcccgcataaacagcacggaagcgcggacggcgcacgacgagtactggcatgcgcacgtggacaagacccccgccagcaactggccacca

SEQ ID NO: 661376 - DNA, 90 bp, Homo sapiens
ttttcggactcctgatggcatgcctgtaaagaacttgcagttgaaggagtataacacagaaacaagtcaccaagctctccagaacatgcc

SEQ ID NO: 661377 - DNA, 75 bp, Homo sapiens
ctgggattgttgcggtgcgctggagccgatgctgtgtgctgtggacccacctggggttcatggagtgggccacgg

SEQ ID NO: 661378 - DNA, 75 bp, Homo sapiens
aagcctggaatgatatcaaaaaggtgctacctggtcattctgtacctttatttaaagaggccacacatctttttt

SEQ ID NO: 661379 - DNA, 100 bp, Homo sapiens
aactattacaatcgcttgtacaaaggagagtttaaacagccaaaacagttcattcatattcagcgacacattcagctaacgtattttagcaggtggagtg

SEQ ID NO: 661380 - DNA, 73 bp, Homo sapiens
cgagttacatgttgagccatttcaggaagagaaacgtctcagagaaaaggaagagcaaaagaaacttttggaa

SEQ ID NO: 661381 - DNA, 97 bp, Homo sapiens
gcctactttaagagataccaagtgaaatttagaagacgacgagagggctacatgaccagccgcacggtccgggaggcctcgggcctgctctccctca

SEQ ID NO: 661382 - DNA, 100 bp, Homo sapiens
ctcggagccaccaagagatccatggtgttcaaggacgtgctgctcctagacaacctcctgcaccagcagatgctgcagtcggagatccaggccatgaaga

SEQ ID NO: 661383 - DNA, 100 bp, Homo sapiens
ggtgctcctgcccgctggcccctcgcgcgtgaggatctatctcaggactcgggtcaagctggaaagcctggaagacgcctacattctgcggggagatgat

SEQ ID NO: 661384 - DNA, 100 bp, Homo sapiens
aactcctccagcagatccggcttgcccagaaagagaagacagccatggaaggtggcctgtgagtacggcatggtgcacgtggtctcccaggccgggggcc

SEQ ID NO: 661385 - DNA, 100 bp, Homo sapiens
actaggcaagcatggagttggcaccccaaaagaaaggaccctaataggagtattcataccagcagcagcagcagcagcagcagtagcagcagcagcagca

SEQ ID NO: 661386 - DNA, 50 bp, Homo sapiens
tgtgaaagaaggttgggttcagaagagggatgtccggtctgtgctacgac

SEQ ID NO: 661387 - DNA, 75 bp, Homo sapiens
agggcatggtgaagctgctggatgaattgtcccccaacacaggttctgactcagaagatcttttggaagaattgc

SEQ ID NO: 661388 - DNA, 99 bp, Homo sapiens
ggtaacccagatcgctactaccccgcagttcccggacatgatcctctccgcctctcgagctccatcggcagtgtccatcatgcatcaggtgagccgcac

SEQ ID NO: 661389 - DNA, 123 bp, Homo sapiens
ttacaggtgtgaaccacaacacctggctctctttgttcctaattgaaattgccaaaggtaatgaaagcatgggatgctcatgtgacagcagtttgctcccaagatgccagtgaacttgtaagg

SEQ ID NO: 661390 - DNA, 90 bp, Homo sapiens
aagcggggacccagaccctggagcctcagttggaagcagccgatccagcctgcggagcctgtggggcagatattaataaggcagcggaaa

SEQ ID NO: 661391 - DNA, 96 bp, Homo sapiens
cacatcgctactgttattatgctatttgttagcaccattgccaatggagtagaaaatgtatatacacagcatcaacctttcctacatgaaaccctg

SEQ ID NO: 661392 - DNA, 101 bp, Homo sapiens
actcagcgatgcaaatctgcaaacactaacagaatatttaaagaaaacacttgatcctgatcctgccatccgacgtccagacaccaactctacaacattac

SEQ ID NO: 661393 - DNA, 75 bp, Homo sapiens
gattcatcagattttgcattggatattcgcatgcctggggttacacctaaacagtgttatccaagataaattctg

SEQ ID NO: 661394 - DNA, 51 bp, Homo sapiens
cggggcgaggtctgcagggtgtgccaggtcctggacccaagccagaagcct

SEQ ID NO: 661395 - DNA, 82 bp, Homo sapiens
ggcgcggaggcgaccgccatggcgttcctcaaactccgtgaccaggattttgacacttcatgacatgtcattatttagagca

SEQ ID NO: 661396 - DNA, 100 bp, Homo sapiens
ccacactcaccactccatggccacacaggtgtacgccccaagttgggacgccggcatagtatggaaaatatggaacttatgaagttaacaccagaaaagg

SEQ ID NO: 661397 - DNA, 98 bp, Homo sapiens
cgggccgggacgcgacgggacgcgctgggaccggcgtcgggggtcgcggggaccatgcagcggagattcatgttacatgtaaagctgtcctcatttgt

SEQ ID NO: 661398 - DNA, 100 bp, Homo sapiens
aagagtcatacctggagcagcaggaaataatgcaaaaggtgtcccaaggctcctgaccagtgaacaaagatttgagaaagacagccaagctcatgttttc

SEQ ID NO: 661399 - DNA, 101 bp, Homo sapiens
tgatgggtcctctccagggagaccctctgtggttcatggcctcccacgggaacgacgccgcgagagccaggtttgagtccaaagtaccctccttctactac

SEQ ID NO: 661400 - DNA, 100 bp, Homo sapiens
aacaacacccccatgtgcgtgtgccaggaccccaccagctgcccagcccccattggcgagtttgagaaggtgcgctcccctggggccccagggcccctga

SEQ ID NO: 661401 - DNA, 75 bp, Homo sapiens
ggactcaacttcaaagacgttctcaaggagaaggcagacctggatacaagttatgctggctatccagattctgtg

SEQ ID NO: 661402 - DNA, 98 bp, Homo sapiens
gaggaaagaggaggaaaacaaaagctgctacttatggaagatacaaaggccaaactggcaagacgcagtcaagaacgggacaatcttggcatgttggt

SEQ ID NO: 661403 - DNA, 50 bp, Homo sapiens
ggcatctctggctgacattaaggtacaagaaaattccccaggacacagag

SEQ ID NO: 661404 - DNA, 112 bp, Homo sapiens
ccgatcaccatgtcggctttcgacaccaaccccttcgcggacccagtggatgtaaaccccttccagataacagcaaagccgatggccagctggtctcgagtgaaaagaaggc

SEQ ID NO: 661405 - DNA, 100 bp, Homo sapiens
accgaagttggaagtgtctcttagcagcgcgcggagaagaacggggagccagatcctgaggaggatgaaggggctggccctggaggccgagagtgagctg

SEQ ID NO: 661406 - DNA, 51 bp, Homo sapiens
agtcatacgggaagagagagtaagaggaaatgctgtctatgatttcttcat

SEQ ID NO: 661407 - DNA, 82 bp, Homo sapiens
ctgtgagagctgtgtcctgcaccgctcatgctcgcccggctttggggtcaagcagattgtgaccgcgtacagccccgaggac

SEQ ID NO: 661408 - DNA, 78 bp, Homo sapiens
tcctcggagcgcggtccctgtattggtctcctgctcctagagtgttctcaggcgctgtggtctcaccttccactgggg

SEQ ID NO: 661409 - DNA, 100 bp, Homo sapiens
ctaaggcggtgtgtgaatttgaaggcggccatctcgcaacttacaagcagctagaggcagccagaaaaattgttttcggctttgtgagaaaccttaccat

SEQ ID NO: 661410 - DNA, 50 bp, Homo sapiens
ttggaccctcctcccaactgtagatgaaattatgcagcaggaagtcagac

SEQ ID NO: 661411 - DNA, 90 bp, Homo sapiens
cccggtgcctggccctctagccccgctaccggactacatgtcggaggagaagctgcaggagaaaggtatatgaatgacctaaaggtacaa

SEQ ID NO: 661412 - DNA, 90 bp, Homo sapiens
aagaaaatgatatggaaatggaaattaaatgggttccagctcagcaaaacccagcagctcagattcctgccaggcagcgggagattgaaa

SEQ ID NO: 661413 - DNA, 96 bp, Homo sapiens
gcggcctgattgggaagaaactcttagcgcaatgattaacgtgacagtgtcaggtggacccacagccatcccacctccccctctggggagtgctga

SEQ ID NO: 661414 - DNA, 90 bp, Homo sapiens
gagcacctttatttctacgcccagcaagacactaagggcgactaccagaaagcgctgctgtacctgtgtggtggagatgactgaagcccg

SEQ ID NO: 661415 - DNA, 95 bp, Homo sapiens
gcaagcccttcagatgctcaaatactggaagggaaaacacctagttttaaagagacagaaaatggacccaagtggggtcaaagtgctggaaacag

SEQ ID NO: 661416 - DNA, 83 bp, Homo sapiens
cgttgcgtgccctacttcaaggataagggcgacagcaacagctctgccggctggaagggatccatatggctttggagacagtc

SEQ ID NO: 661417 - DNA, 97 bp, Homo sapiens
aaacagctatatgggaacaacatacagtgacgcttcacagggttaaaaatctgtaagagcctgattttagaattcaccagctcctcagaagtttggc

SEQ ID NO: 661418 - DNA, 116 bp, Homo sapiens
tttgaaatgctaagattcttggataccacagtatcataaaattcctctaaatgcatctctggaatctgttctgcgccacccggcagataatcgcacccagattcgagagcttggcc

SEQ ID NO: 661419 - DNA, 87 bp, Homo sapiens
ccacgccgcacctgcgcaacctcgccgtggccatgtgcagccgctacacaatgcagatcttcgtgaagactctgactggtaagacca

SEQ ID NO: 661420 - DNA, 90 bp, Homo sapiens
ggcctccgtctggatttccaaggaagaatttcctctgaagcaccgttgtcgccgtgatcctgaaggcgctgacctacgacgagaagcggg

SEQ ID NO: 661421 - DNA, 96 bp, Homo sapiens
catgaaggatgtttggtcaccccgccagagcttctcaggaatgggggacaagttgtccacatgacttccttggtgcctacaaactacagcatgact

SEQ ID NO: 661422 - DNA, 75 bp, Homo sapiens
gggcttctctgaggcggcgagagatggtcaggtctggagctcgaccgggccagactctggatgggcacatggtgg

SEQ ID NO: 661423 - DNA, 80 bp, Homo sapiens
cccactggagccgagcggtgaggaataaccggaccgacccccgacggtgcgtgtaaatacctgggcacaggacttcaaag

SEQ ID NO: 661424 - DNA, 83 bp, Homo sapiens
cgtgtcctgattgggaaaggagaggtgtccagtgtggccgagcaacacagtcactcctggcggcaaaccaaacaaaaccagag

SEQ ID NO: 661425 - DNA, 100 bp, Homo sapiens
aaaaatttgagaaggaggctgctgagatggtagagaagaccgtggatcacctggggacagaggtgaaaggcctgctgggcctgctggaggagctggcctg

SEQ ID NO: 661426 - DNA, 75 bp, Homo sapiens
ccggtcttggggggatggttccatcatggcgtcaatgcaggtcacatatcctggagcaggaaaacttccacacat

SEQ ID NO: 661427 - DNA, 82 bp, Homo sapiens
catgatcctggccagcctgctcatcgcctactgcagtgaccagaagtcagcagcttcccagaagccccgaagccggggcatc

SEQ ID NO: 661428 - DNA, 98 bp, Homo sapiens
gagaatcttcaagaacttcctcgcactgtgacatgtctgatcccttgctcccatccctgcagcatgaacaagacttttgtatgaaaacacagaaaaag

SEQ ID NO: 661429 - DNA, 75 bp, Homo sapiens
caatgttctcgatgccaatctctgcttgaaaggagaagacttggattctcagcaaaccagtccagctacgggggc

SEQ ID NO: 661430 - DNA, 82 bp, Homo sapiens
gcgggcagaaacgggactggcagtgcccacacgtgtgcgttctccccgtccgcccgaagggttgtgagtcccggcccagccc

SEQ ID NO: 661431 - DNA, 142 bp, Homo sapiens
ctggaggctgtgcagcgcacgcgggaggccgaggagaagctggaggagcggctgaagcgcgtgcgcatggactcagcccaggagagtgttattactcgagatattcatcgtacatttcccgcacatgattactttaaagata

SEQ ID NO: 661432 - DNA, 75 bp, Homo sapiens
cgtggacaagatcatgggcaaaggacagatccagcaaattgtggctactaatttgccccctgaagatcaagatgg

SEQ ID NO: 661433 - DNA, 100 bp, Homo sapiens
gccgccagtggtcgcacttggagggtctcgccgccagtggaaggagccaccgcccccgcccgaccatggccgaggggcgacataccttctgttgaatacc

SEQ ID NO: 661434 - DNA, 100 bp, Homo sapiens
caagtatccgccagtcaataggaagtacgagtgaatgtatcctgtcaggtataatgtcagtgaatggcaagaaagttcttcatatggatcgaaaccctta

SEQ ID NO: 661435 - DNA, 72 bp, Homo sapiens
cttagccaagagtctgggtctccgggccaacctgaggtgatgactatgactccaagaaacgcaaacagcggg

SEQ ID NO: 661436 - DNA, 98 bp, Homo sapiens
aggacggctcaggagcatgacaagcgagaccctgtggtggcttattactaattatggcctcgaaactgataacatgaagaacttggttctgaaactga

SEQ ID NO: 661437 - DNA, 75 bp, Homo sapiens
gttcaacttcccggatccctactccaaagatctcgaggacctggaagaagcagaggagccagacatggaggaaga

SEQ ID NO: 661438 - DNA, 74 bp, Homo sapiens
tgtgctcgcgctactctctctttctggcctggaggctatccagcttcctccgtgtcacaaagcagtacctgccc

SEQ ID NO: 661439 - DNA, 100 bp, Homo sapiens
tggatacgaacatgttatatgttcctgacacagctctccctgaggagcagccacattccagctcccagtgcgcccctctccactgtctctccaagcctcc

SEQ ID NO: 661440 - DNA, 82 bp, Homo sapiens
ccttcggcagtccacccaccgccgccgcctcccagggtttgccttcccggattgggcctacaagccagagtcgtcccctggc

SEQ ID NO: 661441 - DNA, 98 bp, Homo sapiens
aggcgggcgttttcttggatgaattgcttgctttggagtattaaaggtggaagaaggtccatatctttttctgtgggtgcttcaagtgttgttggaag

SEQ ID NO: 661442 - DNA, 100 bp, Homo sapiens
aggacttcaagaaccacgtgatcaagtaccttgagacactcctttactcacagcagcagggcgccatgttttggaagtttgacctgcacacaagctcgca

SEQ ID NO: 661443 - DNA, 82 bp, Homo sapiens
agaagatgaaggcccttatgatgatccacttccactttatgaattgtcagaatggcggcagcggagcatcgtcattcttcag

SEQ ID NO: 661444 - DNA, 75 bp, Homo sapiens
gaaacgaacaacgctgctattataagatgaaaacaccgttcttcatctttaacctggcagaaactgctcacatgc

SEQ ID NO: 661445 - DNA, 82 bp, Homo sapiens
tctctccaccaagttgttggtaccttccctgatgaagttttatacagtgcctacaccaactaatgttacaattgaatcctat

SEQ ID NO: 661446 - DNA, 146 bp, Homo sapiens
gcgacagctgctaaagtggcatcctgggattttgttgaagccacacaaagaacaaattgcagttgtttgaggtcagggattaggaatcatgttgcatgacgcaagggacaggcagaagttcttcagcgatgttcagtatctgcggg

SEQ ID NO: 661447 - DNA, 97 bp, Homo sapiens
aaagcgaggctgatggagcgaagccaggaagaggatgcggagacgcggggtgtcatggagaaactccagctgggcccagagattctgcagcgggaaa

SEQ ID NO: 661448 - DNA, 83 bp, Homo sapiens
agagaatgagcctcagctctgttctgtgggctgcactgagtttctcggtgtgagctggagccgaggtgctcggtggagtcatg

SEQ ID NO: 661449 - DNA, 83 bp, Homo sapiens
gagccccttgccaggagtgttcaagatgctctctctggaccgatcccactggcgtgatggtgggcatgggtcagaaggattcc

SEQ ID NO: 661450 - DNA, 98 bp, Homo sapiens
aaatcgggctgaagcgactgagtccgcgatggaggcttgtccagccggaagccctgagggcagctgttcccactggctctgctgaccttgtgccttgg

SEQ ID NO: 661451 - DNA, 100 bp, Homo sapiens
tgacctctcccgctaaggtccctcagccactctgccccaagatgggccgtgggagtccctggcctatctcacagctgctacccatggcttagatgaagaa

SEQ ID NO: 661452 - DNA, 73 bp, Homo sapiens
tgtcaagcacgagctgcggactggtacattttgaccaatttaaagaagcattaatactcatcttgtccagaac

SEQ ID NO: 661453 - DNA, 90 bp, Homo sapiens
gcccgaagaggagagagcgcgggcctctaggaaggtgcatgctattatgatgctaatcagtctatgtatgtgtttggaggctgtacccag

SEQ ID NO: 661454 - DNA, 51 bp, Homo sapiens
cagaaatggaaagtgttttggcccagtgtgctggaattgatgttcgtctgt

SEQ ID NO: 661455 - DNA, 110 bp, Homo sapiens
ggatcactactcttggaatcaaagataaatccaaatactgcatatcagaaacaacagggtcatcttctatggcatctgcatgtggcggaagtttagcattaatggattca

SEQ ID NO: 661456 - DNA, 98 bp, Homo sapiens
tctcctggaatcccaatgaaccttgggtgatttgttctgtatcagaagacaatatcatgcaagtgtggcaaatgactattgcagatatcatccgaaca

SEQ ID NO: 661457 - DNA, 90 bp, Homo sapiens
tgaggaccagcttcctctggactatgccaagggccctgcaagaagcccaggaaatcttcggtgtggactttgactatgatgaatttgaga

SEQ ID NO: 661458 - DNA, 50 bp, Homo sapiens
gcgctccaggaggcactcacagctcgggttcatgacgctctcgatattcc

SEQ ID NO: 661459 - DNA, 98 bp, Homo sapiens
gaacctcgagaccaacgtggaggagctgtgggtggaagatggactcaccctgtcacccaggttggactgcactggcctcaacctcctgagttcaagtg

SEQ ID NO: 661460 - DNA, 73 bp, Homo sapiens
gagcgtgaccgagagcgcgaatatcgtcatcgttagaagtccctgtcagctggatcccatgaagtttgataat

SEQ ID NO: 661461 - DNA, 97 bp, Homo sapiens
ccaggcagagctgcacccgctgccccagctcaaaggaatagccaggccagaagaaggaaggcctgtggtgagtgggacaggaaatgacatcaccacc

SEQ ID NO: 661462 - DNA, 100 bp, Homo sapiens
aatttcgatctccgccctggggtcattgtcagtctgcgctcctcagaccaccggcaggtgaacagcctgatgcagaccgaggagtgcccacctatgctag

SEQ ID NO: 661463 - DNA, 83 bp, Homo sapiens
gagcgagcagaggcttaaggtcttcagcggggcgctccaggaggcactcacaggtgatcagaggactgctgaaattttggcca

SEQ ID NO: 661464 - DNA, 51 bp, Homo sapiens
ggggccgtcccagttcgcaatgagaaaggtcttcaataaactcatcaggag

SEQ ID NO: 661465 - DNA, 78 bp, Homo sapiens
tgcctcttgatctccgccaccgtcttcaggccaggtaataaatctcctaatggaataagtgactatccaaagatcaga

SEQ ID NO: 661466 - DNA, 50 bp, Homo sapiens
ctccgaggagccgggagctgcaagacgttacatccaagaggaaataatcc

SEQ ID NO: 661467 - DNA, 98 bp, Homo sapiens
ggaggttgagccgggcacagaaacacagcagcgggagcagcaacaccagcactgccaacaggagcagtgaggagaatgaataccttccaagaccagag

SEQ ID NO: 661468 - DNA, 98 bp, Homo sapiens
tatgccttaacctttggagtacgacagtatttcctggacttagctttgtcatgcaaagctgtcatttgctgtcgtgtgttcagtcaagctgtccagaa

SEQ ID NO: 661469 - DNA, 98 bp, Homo sapiens
agcattctaagacgaagagggctccagacggcagaatgcctccaaaggtgacttcagagctgcttcggcagctgagacaagccatgaggaactctgag

SEQ ID NO: 661470 - DNA, 98 bp, Homo sapiens
aaagaaccattgaagcttgagagaaaagcccccaaaagcagctattcaggctgaacaactttttaaagcaacaatgagttacctccttggagggggca

SEQ ID NO: 661471 - DNA, 101 bp, Homo sapiens
ctggcctccaaagtcaccaggctcaaatcgctgaagacgcagctggagtggacagaagccatcctggaggatgagcagacacagcggcagaagctcacggc

SEQ ID NO: 661472 - DNA, 50 bp, Homo sapiens
cgtcagatccacaaatttgaggagcattcttttatacagcaaaatgcaag

SEQ ID NO: 661473 - DNA, 100 bp, Homo sapiens
acattccatgggaagatttgcgagacaacagagacttaaatgtttttttcagctgggatccaaaagacagctcctcggtgggtggtacttctacgttcag

SEQ ID NO: 661474 - DNA, 83 bp, Homo sapiens
cccaagcccagggctgtgaacgtggctttcctcgtttgctgatggccgccaaagttggagttcgtatgttgatgacatctgat

SEQ ID NO: 661475 - DNA, 100 bp, Homo sapiens
ggaatgtgttagtgtctggagccatgaaggccttgtgctgaccaagctgctcacctcggacaggcgacactaacaggtgaagatctcgggagaccatgac

SEQ ID NO: 661476 - DNA, 75 bp, Homo sapiens
gtacaagtggaccaactatctgagcgtggtttgagtccagccaatgacactggagccaaaaagaagaaaaagaaa

SEQ ID NO: 661477 - DNA, 75 bp, Homo sapiens
agcgagacaacaaagagatccggacctacaactgcagaggcggggtttcaccatgttgcccagactggtcttgaa

SEQ ID NO: 661478 - DNA, 100 bp, Homo sapiens
cctgtacgtgaacatgactagcggcccgggtgggccggcggcggccgcgggcggcaggaaggagaaccaccaggtgccagatgtgacatccagatgaccc

SEQ ID NO: 661479 - DNA, 100 bp, Homo sapiens
ggaagtctggacctcagtatattctgcagtacctgtttggtgaaaggtgtagcagtcactcggcctacacccacagcatcgaccttgtgaacccagcgac

SEQ ID NO: 661480 - DNA, 100 bp, Homo sapiens
agccacctcacagagaacctgcccaaagctgcatcagagctggggcaacaacccatgactgacatgggatgtagagctggaaagatctgcagaatcctgg

SEQ ID NO: 661481 - DNA, 98 bp, Homo sapiens
atgaacatgaacacaaaagcaaacaggaagaagttggtacgggcactcttcatagttcctagacaaagggaccagttactctccacaagaaaattcac

SEQ ID NO: 661482 - DNA, 100 bp, Homo sapiens
gttctccgtaaccagaaacaggttcattcattgcaggagcgagaacccgagcagcgccatgagcaacactaccgtcgtccccagcactgcaggtccgggc

SEQ ID NO: 661483 - DNA, 88 bp, Homo sapiens
catctcagctccagagcccgccctctcttcctgcagcctgggaacttcagccggctggaggagatctattgggaaactgattataacc

SEQ ID NO: 661484 - DNA, 76 bp, Homo sapiens
atcaaggacaaacccaccttcatcaaagggcgtgtccggagcggtgactggaaggggtacacaggcaagaccatca

SEQ ID NO: 661485 - DNA, 99 bp, Homo sapiens
attgtcttttccgcccgcttcgatcgcctcgcgccggctgctctttccgggtgtcgtgaaaactacccctaaaagccaaaatgggaaaggaaaagactc

SEQ ID NO: 661486 - DNA, 50 bp, Homo sapiens
gtcgcccttgcctgcagaggagcaggagcgtctgcagcaggagcgtcctc

SEQ ID NO: 661487 - DNA, 98 bp, Homo sapiens
ccaggcccagcctctcgaatgggcacacctgtgtagatactctctaagtggtggaggaacttcatcccactgaaattcctttggcatttggggttttg

SEQ ID NO: 661488 - DNA, 75 bp, Homo sapiens
tacaccaggcagcccccaaatcccggcccagatctgaacagaattaagacgaacgagctttcacaattgcagcag

SEQ ID NO: 661489 - DNA, 102 bp, Homo sapiens
ccttgtgccgcgtaagacagtgtcttctggggcgtggtgatggtggatgaggcacacgaaaggaccctacacacagacattctctttggattgatcaaggat

SEQ ID NO: 661490 - DNA, 98 bp, Homo sapiens
ggaagccggttggggtgtgagaggttttctcgctctagtgcgaagtgccagagggtggactggtccccaaatctctgtaccggactgcagaggagctg

SEQ ID NO: 661491 - DNA, 100 bp, Homo sapiens
cgcggcgttagtattggccgtgtacccgaaaaactgattgactgggctggcgttaactgtgcggaggcaggcgcagtaacagtatctccaagtcccctgg

SEQ ID NO: 661492 - DNA, 75 bp, Homo sapiens
gctggcaacgtgctgatgaccctcgagggagacatcaggctgggtgatggcatcagctgagaagggaaggaagcc

SEQ ID NO: 661493 - DNA, 116 bp, Homo sapiens
ttaaaaatgacatcagtttctggaagaagaagaagagcatgatcggcatgtccaccaaggtaactaggatttctacctcaaccgcgagacctatgcaaggacggtgtggaccaact

SEQ ID NO: 661494 - DNA, 100 bp, Homo sapiens
tggagatgattaaaacggaatttacactgacagaagcagtggtcgaatccagtagaaaactggtcaaggaagctatgtgtcttgctgaatcagggctctc

SEQ ID NO: 661495 - DNA, 75 bp, Homo sapiens
gcccaacagcggaatcatcgatgcaggggcctcaattaatgtatctggtcgaagaattccatccactgacgccaa

SEQ ID NO: 661496 - DNA, 100 bp, Homo sapiens
tgcactcactctacgtggagttgggccctgcaggaaggacggacttcaggggcagagtcatcctttttgaacttccatgactcagactgcgaacccaagg

SEQ ID NO: 661497 - DNA, 100 bp, Homo sapiens
aagatgaggacagcatggatgggctggagacaacagaaacagaaacgattgtggaaacagatttaatttacccacacccaaatgcttctgcagaaaaagc

SEQ ID NO: 661498 - DNA, 83 bp, Homo sapiens
ccggcccgcttcacagtcgaggagagaaagatgagcgggatcgtgtgcagaagaaaaccttcaccaagtgggtcaacaagcac

SEQ ID NO: 661499 - DNA, 75 bp, Homo sapiens
gaagaagggcaggacctgggcggaggccgccaagacgtatccatatattcctgcacatattacaaagcctaagga

SEQ ID NO: 661500 - DNA, 100 bp, Homo sapiens
atgcagggtgtgagcagggctgagatgggcaccgcggatctggggccgtcctcaggtgtgcaactgaggaacatggctcaagaaactaatcacagccaag

SEQ ID NO: 661501 - DNA, 75 bp, Homo sapiens
caagtgtcacagcctggttggaaaacccaagatatttatcattcaggctggagtgcagtggcgcgatctcggctc

SEQ ID NO: 661502 - DNA, 90 bp, Homo sapiens
gccgaggcctgtggttctgcagggcatgcaggtgcgccgggtgcccctggagatcccggaggtacctctgctgtgacacacagatggagc

SEQ ID NO: 661503 - DNA, 82 bp, Homo sapiens
gggtgaaggcccttttggaggagttccctgacaaaggcttcttctttgcctttggagctgagtttcactcctgttgcccagg

SEQ ID NO: 661504 - DNA, 80 bp, Homo sapiens
gagctgtgcgggcgggcggtgagcgcccatatgggggttctggagagcggggtgtggggagctctgtgtgtcgtctgagc

SEQ ID NO: 661505 - DNA, 83 bp, Homo sapiens
taccgaagtctgcttctgcttccaaaggagaaccgcagtgaaagaattcaattcgtcataatctgtccctacacagcaagttc

SEQ ID NO: 661506 - DNA, 74 bp, Homo sapiens
gctccctcctcccagggccaggcgccgctcagaacggcatcctctggtatcacgattccaaaacccccaaagcc

SEQ ID NO: 661507 - DNA, 74 bp, Homo sapiens
attcgatggacatggacatgagccccctgaggccccagaactatcttttcggtgtctgctttttcaacgtggga

SEQ ID NO: 661508 - DNA, 90 bp, Homo sapiens
aaaggaatagacaggctacgcctggacaaatactatatggtgatgttctgcaccctgaacacccacaaagtggacatggacaagctcctg

SEQ ID NO: 661509 - DNA, 100 bp, Homo sapiens
gctaggaatgcatgggatgcttatggaatgtgcgagaacacggaggagaaggcagagcccccccaggctatgaatgccctgatgcggttgaaccagctga

SEQ ID NO: 661510 - DNA, 51 bp, Homo sapiens
tccagtgtcccaagaaatcaccctcacgctggagtgcaatggcgcgatctc

SEQ ID NO: 661511 - DNA, 75 bp, Homo sapiens
tggtctatgaaacatcagttcttgatcctgatgagatggtggatgcttccaaaagcatcgaagctgtccatgagg

SEQ ID NO: 661512 - DNA, 88 bp, Homo sapiens
tgtcattcacaaccccctgaaagcgtctcctctgagcctccggcctccataagacccaaaacagatgacacctcttcccagtcccccg

SEQ ID NO: 661513 - DNA, 83 bp, Homo sapiens
acacatgtagagacctttgtatgtggaacggccgccttctccattctccatggccccacaagcttcccttcccccggtgccac

SEQ ID NO: 661514 - DNA, 100 bp, Homo sapiens
cctgcccaagaacaacccacccaccatcgtgcatgacaaagtgctcaacctcatccagatatgagatcctgactccaaactccattcccaagggtttcat

SEQ ID NO: 661515 - DNA, 100 bp, Homo sapiens
atttttgttatcaagcatctaagttttttgaagcacaaattcccaaaactccagtatgggttcgagaagaagagagattgagatgctaccagatgggctg

SEQ ID NO: 661516 - DNA, 100 bp, Homo sapiens
cgccaacgcggtcatctcgcagaacgccatcaaccagctggccgttgctccagggagaactgcaaatatcttcatccacccccacatttaaaaacgcagt

SEQ ID NO: 661517 - DNA, 98 bp, Homo sapiens
cctgctgcgcaggataaaaggcaaactcttcacctgaaagatgtgtcatggcaatgctgagaaggaggatcagggatgagaagaccaacgttaggaag

SEQ ID NO: 661518 - DNA, 100 bp, Homo sapiens
cgggcggctagagccggagtggggcgagccgcggaacccggccgggagccgcgcgaggcgcatgcttttcacttccactgcatctctcgctggctcaaaa

SEQ ID NO: 661519 - DNA, 83 bp, Homo sapiens
agcggaggtgctgggagcgagttggctggtacactgaggaggggacggctccgtcttcacattgtgcacagatctgaggatgg

SEQ ID NO: 661520 - DNA, 96 bp, Homo sapiens
cccagccttgcgcgtcgtcgctacctcctcggacaggaaacctgtaggaagtgtcagggactctggaaagaacataatggcctcacctgtgaagag

SEQ ID NO: 661521 - DNA, 101 bp, Homo sapiens
gtgaaacagaaggagtattcgtgattactttcaaggtgaaagaacttgtcctggacaacagtcggtcgaatgaaggcaaactcgaaggcctcacagatgaa

SEQ ID NO: 661522 - DNA, 89 bp, Homo sapiens
gcccggagccggcgcccccggcgcggggaggggctggagacaggtctgaggaggaggcgtcatccacggagaaaccaaccaaagccttg

SEQ ID NO: 661523 - DNA, 82 bp, Homo sapiens
gcggcgaatcacttataaatggcgccgaagcaggacccgaagcctaaattccaggagggctgaaggtgatgtggccgccctc

SEQ ID NO: 661524 - DNA, 74 bp, Homo sapiens
agggtctcggggcgggcgccgcgggacctctccgggccatggctggggccccccacattgcccacttcacggag

SEQ ID NO: 661525 - DNA, 51 bp, Homo sapiens
ttttcagtcagccatgagcatagaattgaatgatctggcacgggaccctcc

SEQ ID NO: 661526 - DNA, 100 bp, Homo sapiens
ccttgttgcatgccagataaatgatcagacagggtcttactttgtcacccaagctggagtgcagtggcgtgatcccattacactgcaacctatgtcttcc

SEQ ID NO: 661527 - DNA, 100 bp, Homo sapiens
cagctgggtcagctctacggctgcgagcctacttctgcttcctcctggccgctctgggtgtgacagctggtgcccatcgcttgtggagccacaggtccta

SEQ ID NO: 661528 - DNA, 82 bp, Homo sapiens
tggactctgaccgcaaacaaggagagcctactgagcagcctgagtggatcaccgaagtggccttggagtacaacaactgtca

SEQ ID NO: 661529 - DNA, 110 bp, Homo sapiens
agaagctggagctgagactgaagtcgcccgtgggggctgagcccgccgtctacccgtggccgctgccggtctacttccagggtctccctccactgctgtagtaacccggg

SEQ ID NO: 661530 - DNA, 73 bp, Homo sapiens
ttttgaaagctgcctgcggcaaaggtttggaaagcagagtggagaacaaagagttgattccaatgcaacaaat

SEQ ID NO: 661531 - DNA, 75 bp, Homo sapiens
ggcggcggctgccgcaggacctgcagcatcccagagaccagcatctcagacatgtcgaaaaagatgttttgatcc

SEQ ID NO: 661532 - DNA, 51 bp, Homo sapiens
cagccttagactatttttcaaacagttaaatggaaaccacccttgggaact

SEQ ID NO: 661533 - DNA, 100 bp, Homo sapiens
gaaaaagagcaaagataagaagagaaaaagagaagatgaagaaacccagcttgatatgttggtggaagatggatgcctgaagtgtagactgctgctagct

SEQ ID NO: 661534 - DNA, 100 bp, Homo sapiens
gccctcttcaccatctatgtcctctggacgctgaactggaagaagttcgggaactcagagtttgacccccccggacccaatgtggccaccaccactgtca

SEQ ID NO: 661535 - DNA, 75 bp, Homo sapiens
ttcgtgccaagtccagagcctccaggctgagacagaatccttacgtgccctggtgctggagaatctggtaaaagc

SEQ ID NO: 661536 - DNA, 100 bp, Homo sapiens
ccccagcagcccccgaaggccctatcaggacatggagtatgaaagacgatggagtgaaggtacctgagcgcaggaaccatggtcttcattgctgcctcag

SEQ ID NO: 661537 - DNA, 80 bp, Homo sapiens
cagatccgtagggaggacaccgtgacttcccggacgctgggaaatggccctgggaggagcggggacactgaggacctctc

SEQ ID NO: 661538 - DNA, 80 bp, Homo sapiens
agcctcagttggaagcagccgatccagcctgcggagcctgtggggcagtgccagaaatcacatccaaagtcagttccagt

SEQ ID NO: 661539 - DNA, 101 bp, Homo sapiens
accccagatgtctgacagccctgtgtgacaccaagataagtaacgatattggtgctggaaaaggcaaatactatgctgtcaattttccaatgagagatggt

SEQ ID NO: 661540 - DNA, 100 bp, Homo sapiens
ccggtccgggcggttgcgtccaccccgctgagctggtcgccacctggcgacccttcccctccagtcacctgggtgtcttcaaaaacaaacatatttaaaa

SEQ ID NO: 661541 - DNA, 101 bp, Homo sapiens
cgccgagacatccgctccttgcccgagaacatccagtttgatgtttactacaaggactcacaccacccggcaagaactgctcactacggctccctgcccca

SEQ ID NO: 661542 - DNA, 100 bp, Homo sapiens
ttgtcttagatgctcagatggtagtggataggcctgtgacgaaggtgctaccatcgtgagagtaagcagaaaaatatggctcaggagactaaccagaccc

SEQ ID NO: 661543 - DNA, 75 bp, Homo sapiens
agaaacaattcctcctgattatagattagaagaggtcaaggaggttgtgcccagacatttccttcttccagaggg

SEQ ID NO: 661544 - DNA, 73 bp, Homo sapiens
cgtgttgacttctcgctccgggatccggacaggctgaggcccgcaggtctaagaccaaggaagcacgcaagcg

SEQ ID NO: 661545 - DNA, 90 bp, Homo sapiens
tatcaactctggtatggacacagcttctagtgttgctttggatcttgtggaaagtcagaaaaaattggaagctccaccacccaccccagg

SEQ ID NO: 661546 - DNA, 96 bp, Homo sapiens
ggaagaggaatgggatccagaatataccccaaagagcaagaagtacttcttgctcttttggtacaccagaaggccagaatggaacgacttcaaaga

SEQ ID NO: 661547 - DNA, 98 bp, Homo sapiens
gggaccccggaatcccgcgcgctgcccacgattcgcttctgagtcaccttcaggccattcagaggaggaaagagaggggaatatgaagtcagccaagc

SEQ ID NO: 661548 - DNA, 82 bp, Homo sapiens
ggcccacccgccagccagccagcgccttcatcctggggctgcgatgggaagatcagttttcctgccatccaggctgctccct

SEQ ID NO: 661549 - DNA, 100 bp, Homo sapiens
tctacgaggacatcgctcagggcaccaagtgcaccctggagttccagcaatggcaccagcatgatatcattgatcattcctcccaaagaccagatttcac

SEQ ID NO: 661550 - DNA, 75 bp, Homo sapiens
gcggggcaaccactgcgagtactgcttcaccagatgttcagcctgttgcctatgaagagcctaaacattggtgtt

SEQ ID NO: 661551 - DNA, 98 bp, Homo sapiens
aattgtgtttctgcttccgtttcaggtcaccaaccagtacatggactggacctgcctggagcccagcccagagcatctcctcagtgctcatctctatc

SEQ ID NO: 661552 - DNA, 51 bp, Homo sapiens
aggaccccaggactggcagcagtaagtttgccctggggccccagcctggcc

SEQ ID NO: 661553 - DNA, 90 bp, Homo sapiens
tgcgttagggaagctctgagagaatggctgtggaagcaatcatttggggaagaatctacagttgctgatggacagagtggatgaaatgag

SEQ ID NO: 661554 - DNA, 98 bp, Homo sapiens
ctgggcctgagcatcgttgggaaacgctgaagagacttgctttgacaagtacactgggaacacttaccgagtgggtgacacttatgagcgtcctaaag

SEQ ID NO: 661555 - DNA, 82 bp, Homo sapiens
aagaattctttgatgccgtcacagatgccgacaaaaggatcaaggtggcgaagcccgtggtggagatggatggtgatgagat

SEQ ID NO: 661556 - DNA, 106 bp, Homo sapiens
aaccctttggacatgtcatttccacaagaatactaagagacgctaatggagtcagcagaggtgttggctttgccaggatgctccaggatgaaacgccataggcctg

SEQ ID NO: 661557 - DNA, 95 bp, Homo sapiens
cgccggcgggtcgggccgggcaatgcctcgcgggcgcaatgaatccgcggcaggattgatttccagagacttatgttacttgaggaagacaccaa

SEQ ID NO: 661558 - DNA, 75 bp, Homo sapiens
gtccgaggtgccaccgtggaaggacagaatggcaaatcctgatcctaactgttgtcttggagtatttgggctgag

SEQ ID NO: 661559 - DNA, 82 bp, Homo sapiens
cagaagtcgcgtgtctaggtgagtcgcggtgggtcctcgcttgcagttcagcgaccacgctgtttgcagacaaggtcccaaa

SEQ ID NO: 661560 - DNA, 74 bp, Homo sapiens
caaggatgtggggcagatgctgatgggcaaactagaattcaaagaagctttttcactatttgacaaagatggtg

SEQ ID NO: 661561 - DNA, 90 bp, Homo sapiens
cgtgaagcgtgatctgctcttccaagccctgggccgcacctacatgaatggtagtgtctagaaagggtatgtcccttcaagagagaggtg

SEQ ID NO: 661562 - DNA, 83 bp, Homo sapiens
tatgacgccgagaagcagaggccccgagacctgcctagagctggaacgttacctccagagcgagccctgctatgtttcagcct

SEQ ID NO: 661563 - DNA, 83 bp, Homo sapiens
ataattcagatggagaatatatggctggacagctagctgcttatggctataaaattacagtactatactggcaattgctggag

SEQ ID NO: 661564 - DNA, 90 bp, Homo sapiens
tgaagaacgggatcctctgctgcatagtttcggtcatctaaaggaggttttaaacagtataacagtcatccgtccttggctcaggatttg

SEQ ID NO: 661565 - DNA, 99 bp, Homo sapiens
tgtggacccgtgagcaagcataagctgccaaaccaaggtgatggaggacgaggagaaggcagtggagatcttgggcaacacggaagctgctcatcctcc

SEQ ID NO: 661566 - DNA, 98 bp, Homo sapiens
aggaatgaaattggaagctatagacccattaaatctttctacaatatgtgtcgcaaccattagaaagttggctgctaatcttatgaacagtggtgtga

SEQ ID NO: 661567 - DNA, 90 bp, Homo sapiens
ctgacatatggaaatgtcagtccaatacagacctcagcttccccattatttcgaggaaggaatgttttagagcactttgctgcaagggac

SEQ ID NO: 661568 - DNA, 100 bp, Homo sapiens
ctactttaaggatatcccagagcttccaaaagaccacagagtttgatacaaattcaacggatatagatccagctccaggtcccacaggggctcttcttcc

SEQ ID NO: 661569 - DNA, 100 bp, Homo sapiens
ctactacacgtggaaaaagatcatgcggctggggcggaaacaccggacacgcctggcagaaatcatcgacgattgtgtgcaatctgcacatcgtgctgcc

SEQ ID NO: 661570 - DNA, 82 bp, Homo sapiens
tgaattccggagttgccatgaaatatggaaacgactcctcggccgagctgagtgagaaacctgtttccctccaatcttgtgg

SEQ ID NO: 661571 - DNA, 78 bp, Homo sapiens
ttccgtcaatttcgcggaattctccaagaagtgttcggagagatggaagtttaattcccgtaaaccaattacacctga

SEQ ID NO: 661572 - DNA, 82 bp, Homo sapiens
gaagagcgacaagccgctggcagccgcggatctcaccgccgctcaggagcccaaatcttgtgacaaaactcacacatgccca

SEQ ID NO: 661573 - DNA, 83 bp, Homo sapiens
cttttcaagacaccaagtgagaggccaaccagatacaccctccgtggacttggaaatgatcgatgtgcacgttttggctgacg

SEQ ID NO: 661574 - DNA, 100 bp, Homo sapiens
cccacttccacatccccgctgttgcccgtcagccccctccccaccctcaccttggactcgctttctcagattaagcctgatcaagatgacaacctcccaa

SEQ ID NO: 661575 - DNA, 101 bp, Homo sapiens
ccgaagcctcctcctgctgctctcaggggccctggccctgaccgatacttgggcggttccagggtctccctccactgctgtagtaacccgggtccggggcc

SEQ ID NO: 661576 - DNA, 99 bp, Homo sapiens
gtgaaggggaggtgccagcccgcgaatccggccggagtatggcatgcagctgtaccagaattatatgcatccatatcaaggtagaagtggctgcagttc

SEQ ID NO: 661577 - DNA, 109 bp, Homo sapiens
aactgtgctgaacaggatggatctggttggtggatgaacaagtgtcacgctggccatctcaatggagtttattaccaagaatgtgaggaaattatcaggaaaggaggtg

SEQ ID NO: 661578 - DNA, 100 bp, Homo sapiens
tatgaagcggttggcaccactgaagtgaccgaatgagagaaagagatgacttgatgtctgcactagtttccgtaaggagcagcttggcagatacgcagca

SEQ ID NO: 661579 - DNA, 83 bp, Homo sapiens
tccatctcttcagagatgaaccagcaaaatgatgcttcaacacccaggccaggtctctgcctcggaagtgagtgcttctgcca

SEQ ID NO: 661580 - DNA, 100 bp, Homo sapiens
ctggctggtgtacgtgcactactcgtcctactcggagcgctgtcgcggccatgtctgccaggtggtcattgtccggcctctttggcctacccccgttggc

SEQ ID NO: 661581 - DNA, 100 bp, Homo sapiens
catggatggatctcatagacacaaagattagtgatgatgaaccaggttatgaccttgatttattttgcatacctaatcattatgctgaggatttggaaag

SEQ ID NO: 661582 - DNA, 88 bp, Homo sapiens
atttgacagtataagtagtgttaaatttaacccaattgaggtgcttgtgaatgacttcttcttggtggcttgtcttgaggatttcatt

SEQ ID NO: 661583 - DNA, 76 bp, Homo sapiens
ctggcttctagtccaatgccaagtgtgtgacctgtggtatttatgagcctccatttcttatactactgcagtgaac

SEQ ID NO: 661584 - DNA, 100 bp, Homo sapiens
tctcttgaaaaaccgaaacaaaaaaagaatcgctgtttcatgtgcaggaagaaagtgggacttactgtgaggtcctttggcactgaagaccgtcccacag

SEQ ID NO: 661585 - DNA, 74 bp, Homo sapiens
gagattgataaatatcgtgtagaaacgtgctgtgtaattggaaaattgcctaagaattatgacccaaaagttac

SEQ ID NO: 661586 - DNA, 51 bp, Homo sapiens
gcgaagtgcctcacttccttctcccggattcttacagaagcagagattgat

SEQ ID NO: 661587 - DNA, 100 bp, Homo sapiens
aacgccttgttgcccagttccccagttctggcagattctggaaactgtacattgaagcagagggaagaactgctaaagctttgaggtcattacaatttac

SEQ ID NO: 661588 - DNA, 83 bp, Homo sapiens
ggccgcttggttctgacccagctgagacaatgcagatcttcgtgaagactctgactggtaagaccatcaccctcgaggttgag

SEQ ID NO: 661589 - DNA, 95 bp, Homo sapiens
tttgttgaggcggcagtatgaccgggtttctttgatgcgacctcaggaaggagatgaggaaaacagttcctcctgaggatttcagagaagagctg

SEQ ID NO: 661590 - DNA, 95 bp, Homo sapiens
acattcaaggaaccgtctttttcgctggtcctggttccacaaggataaaacacatctgcagtgcaaatagaagtctgaggaacaggtgtcttatc

SEQ ID NO: 661591 - DNA, 115 bp, Homo sapiens
cgtggaggagctgtgcagccgcgaggaggcgcgggaggtgttcgagaacgaccccgagacgcaaattgtggctactaatttgccccctgaagatcaagatggctctggggatgac

SEQ ID NO: 661592 - DNA, 51 bp, Homo sapiens
ttgacgcacacggcaccaaactgaatgctgtctctgcaatttgagaggagg

SEQ ID NO: 661593 - DNA, 100 bp, Homo sapiens
tcccttgaaccccctatggctgctgcttttggtgctgttccagaattcaaagaagagaaactgcagctgcaaccaaaaccacgttctggagctgtggaag

SEQ ID NO: 661594 - DNA, 82 bp, Homo sapiens
cacccggcaactcagaaacatcaggtccaaggaactgtggctgcaccatctgtcttcatcttcccgccatctgatgagcagt

SEQ ID NO: 661595 - DNA, 50 bp, Homo sapiens
agctgaaggaggaccagatcaagaagatcatatctgaagatattagtgag

SEQ ID NO: 661596 - DNA, 100 bp, Homo sapiens
ctcgctggccttggcggcggctcctcaggagagctggggcgcccacgagaggatccctcacccgggccaattcctgtccccccagcagcatggcatcgtg

SEQ ID NO: 661597 - DNA, 75 bp, Homo sapiens
caaaccctgaatttataactgactccaagaggccttcgggtgggagccattcacccagctctttgctgagtacca

SEQ ID NO: 661598 - DNA, 74 bp, Homo sapiens
cctgaggtgaccctgcagctctacaactcagaaaatgctgaaccagatctggacgacaatgaggatgaggagga

SEQ ID NO: 661599 - DNA, 100 bp, Homo sapiens
gatccttcaatcatacactgcaaattgaagaaaacagccttaaacatgatataccctgccattccaaaagtagaaggtctgtcagtttgtcgtctctgtc

SEQ ID NO: 661600 - DNA, 96 bp, Homo sapiens
caactctgccggagaaactctctgtttgttattttacaaattcagggtcctggacccaagccagaagcctctgcaaagcttccttccagacctgca

SEQ ID NO: 661601 - DNA, 75 bp, Homo sapiens
caaagcctgaacaggcagggccagacccaggagccggcatcatggattccttcaaagtagtgctggaggggccag

SEQ ID NO: 661602 - DNA, 96 bp, Homo sapiens
gaaaagactcatatcaacattgtcgtcattggacacgtagattcgggcatggattccgtgaaggaacaacacctaaacccaagagggcagctgttg

SEQ ID NO: 661603 - DNA, 101 bp, Homo sapiens
gcctttccagcccgtggtccttctccatattcgaggttggactccatgaaagaattgcacaaaacaaatcgacagcagcatgagaaacatctgcaaagccg

SEQ ID NO: 661604 - DNA, 82 bp, Homo sapiens
gctggaaaagaaggacgtggtgggaagagcaagaggagagggagccggcatcagaaaacaacactgggagctggggactgac

SEQ ID NO: 661605 - DNA, 75 bp, Homo sapiens
gccagtcatcactggtagcaaaggtattagaaaactactcggatgctccaatgacaccaaaacagattctgcagg

SEQ ID NO: 661606 - DNA, 75 bp, Homo sapiens
tgagatgccagctcagagacgatgataccaagtgacagctggatctgcaagtctgtcctttctgaaggccaccag

SEQ ID NO: 661607 - DNA, 97 bp, Homo sapiens
aatcgcaaactgggcgtctgttccggcgccggacccctatttgcaaaggctcctctgctgaacagcccctgggcgggagactcaggaagctgagcct

SEQ ID NO: 661608 - DNA, 83 bp, Homo sapiens
acatcagtttctggaagaagaagaagagcatgatcggcatgtccaccaaggattttttatcaagcagaaatgcatcgaacaac

SEQ ID NO: 661609 - DNA, 100 bp, Homo sapiens
gatgatgaagaggtttcagggagcagcaagacaatcactgcagagataccaggcttacgagaggccccagaaacattcaactctccattatgacacgggc

SEQ ID NO: 661610 - DNA, 83 bp, Homo sapiens
gctgcgggggggagagccactgacgccgggaccgggaccgccgccgccgccgccaccatggaaagctccaaccatggccatgg

SEQ ID NO: 661611 - DNA, 100 bp, Homo sapiens
ctcctgaggagctgggactacagaaatctcccagcaaaaccagctgaagaagctcagaagcacagacagcagtatgaagaaatggtggttcaggccaaaa

SEQ ID NO: 661612 - DNA, 97 bp, Homo sapiens
gcagctggacctcattgagaaggactatgctgaccgagaggcacgagaactctggtcccggctacagcccctctgaaatcaaagagatcttgcatct

SEQ ID NO: 661613 - DNA, 74 bp, Homo sapiens
ggactacgacgtccctcaaaccttgcttctaggagataaaaagaaaatggcctacacgatccacgagatcccgg

SEQ ID NO: 661614 - DNA, 100 bp, Homo sapiens
agaaaatcgtcttatagttgagaatttatcctcaagagtcagctggcagatgccttcacctgaatgacatctacctccatcaggaccccagatgtctgac

SEQ ID NO: 661615 - DNA, 83 bp, Homo sapiens
caaaaacaaggtcgtcggctggcggagcggcgtgtcagtttaggggctggtgcaaaggatgagttgcacattgttgaagcaga

SEQ ID NO: 661616 - DNA, 100 bp, Homo sapiens
ggcaggggttgttttgagtcccaccatcttccatccctgatgcttggagaagctgaggacacacagggaatttgcaggtgaagacacttctgatttgttt

SEQ ID NO: 661617 - DNA, 82 bp, Homo sapiens
aagagggaggtgaccaaggaggagtacaaggacatcctgcgcaaggccgtgcagaaggtcttgaggaccggcccagctcagg

SEQ ID NO: 661618 - DNA, 124 bp, Homo sapiens
gcgtccccacggccctggaggccggcagctggcgctggggatccctgctcttcgctctcttcctggctgcgtccctagaattcaactagagggcagccttgtggatggccccgaagcaagcctg

SEQ ID NO: 661619 - DNA, 83 bp, Homo sapiens
ccttcttagaaacaattctagagtagagcgcctgtaccatgatattgcccagcaaggaacgtcaaggtcgtgggaaataaaag

SEQ ID NO: 661620 - DNA, 82 bp, Homo sapiens
tcggcactgctactgcgaagacagctggcagctgagtcagtgctgattctctcaaatagagcttgaaggataaatcttcatt

SEQ ID NO: 661621 - DNA, 100 bp, Homo sapiens
atccttttattcaccgcctccgaatttgcaaagaggaggaaggagggacttcttggcttctcccagcatagccccagttttcggctttgtgagaaacctt

SEQ ID NO: 661622 - DNA, 90 bp, Homo sapiens
cagaactcaacaaatgctgtggcctttgtgtctgcccatgtaatagactgcctctgtcaccgggtccctccacccttgtctcctgtgcgg

SEQ ID NO: 661623 - DNA, 100 bp, Homo sapiens
cgctgcccgcactcctggtcctgctcggggctctgttcccagaaaaggtggacaagtcctattttcaagagaagatgacttttaacagttttgaaggatc

SEQ ID NO: 661624 - DNA, 75 bp, Homo sapiens
agcaagctgaatggaggccagatagtaccatgatagctgtatcagtatgctatacctccggagcatggaaaacga

SEQ ID NO: 661625 - DNA, 75 bp, Homo sapiens
gttacagttattgaaagagaggatgggttagatggagaaacaatttacatagtacatgacgaagttaaggataaa

SEQ ID NO: 661626 - DNA, 100 bp, Homo sapiens
gaaatcacacggcgacctgtcgtctagaagaagtgatgggtatccggtcttagaatacattccagaaaatgtatcaagggaaattatcgtttcatgaaac

SEQ ID NO: 661627 - DNA, 82 bp, Homo sapiens
cggatatcagccctcaacattgtgggagacctactgcggaaagtcgggtttccccctttctagggtgaggatggttctacac

SEQ ID NO: 661628 - DNA, 74 bp, Homo sapiens
gccaggcgccatcatcggcatagcccgggagatgcagccagtttacagaggactactgagcccagccaggctgt

SEQ ID NO: 661629 - DNA, 58 bp, Homo sapiens
ggttgctgtactttgccaacaaggtttgcaactgtgcgatatgatcaaggagccaaga

SEQ ID NO: 661630 - DNA, 97 bp, Homo sapiens
tctcagcgttcccctctggcgcctttgctgctcctctctctgcacgagtgtgaacatggctacgcctcttcattcccgtccatgccgagcccccgac

SEQ ID NO: 661631 - DNA, 82 bp, Homo sapiens
ggaccgcgacggcagcagagcagttcctaaatatttgtcacagcaatgggctaaagcctctggaagaggtgaagttgggaaa

SEQ ID NO: 661632 - DNA, 82 bp, Homo sapiens
tctgtgatcactgcggggagatgctcttcggcctagtgcgccagggcctcaagtgcgatggaggatacgaagcgttttcggc

SEQ ID NO: 661633 - DNA, 100 bp, Homo sapiens
gtgggctcgctcgcggctcttcggccatgatgccatggacaatattaccaggcagaaccaattctacgatacccaagtcatcaaacaagaaaacgagtca

SEQ ID NO: 661634 - DNA, 74 bp, Homo sapiens
aaaatacaaatcacacgcataatggatgaaaggaaccgacagactctttctgattttgagagtgggttaaaata

SEQ ID NO: 661635 - DNA, 97 bp, Homo sapiens
ttcgcccgtccccctgccccgttcacaatggcagagcggcttgggtaaatccaccttaatcaacaccctcttcaaatccaaaatcagccggaagtcg

SEQ ID NO: 661636 - DNA, 83 bp, Homo sapiens
tgtgggcacagacaaggagctcagtgacctcctggacttcagcatgggtgttgaaagcagcaggggcctagaagacattaaac

SEQ ID NO: 661637 - DNA, 90 bp, Homo sapiens
gacaagtgaaggacatgaaaagatgtcttctaacgcagaaaagaaggtacatctaccctttagattccttgacctggattgaatactggc

SEQ ID NO: 661638 - DNA, 75 bp, Homo sapiens
cggaaggcggtgccacagagcttggagctgatcccaaaatggctgggcgaaaacttgctctaaaaaccattgact

SEQ ID NO: 661639 - DNA, 114 bp, Homo sapiens
gagccactcccgcccacgtcccatttcgcccctcgcgtccggagtccccgtggccagggggatatgagactttctactcggaatatcctgagtgttgcgtggatgtaaaaccca

SEQ ID NO: 661640 - DNA, 89 bp, Homo sapiens
gcgcgcggagaagaacggggagccagaagcaaccgtgacaagtggtgcccgaccagggacctgaacgaggaaggtctgccagagcagag

SEQ ID NO: 661641 - DNA, 75 bp, Homo sapiens
taatatttaagaaagaagatgttaactttcagttgctgattgttggaggttcttttggtcttcgtgagttttctc

SEQ ID NO: 661642 - DNA, 83 bp, Homo sapiens
cttttcgtttccggaaacatggtggctttttctcaagtatattttccagtctgtttggaactcgggaaatgagaattttaatt

SEQ ID NO: 661643 - DNA, 76 bp, Homo sapiens
atggacgtactttgtctgactacaatattcaaaagaatgtctacacaaggaagtacaggatttggcttttctagat

SEQ ID NO: 661644 - DNA, 97 bp, Homo sapiens
ttccgcggggcgctgggccgccagcctcggcaccgtcctttcctttctccctcgcgttaggagccttcacgtaaatgggtccagtcatgcctcccag

SEQ ID NO: 661645 - DNA, 97 bp, Homo sapiens
agcgcctactagagcagggtttggagactcaggtagagtacagagagatggatgaaagcttggccaacctctcagaagatgagtattattcagaaga

SEQ ID NO: 661646 - DNA, 82 bp, Homo sapiens
cctgagcccgcccttgatcttcgctgtggcatggcggacgaggggaagtcgtacagcgtactgtaagattgatgttaaaggc

SEQ ID NO: 661647 - DNA, 98 bp, Homo sapiens
ccgaaccagcatccccaccatcaacatggagaacaagaccacgtggggcttccgagtggacctgccaatcaagtcggcccgctaccgtggccagtaca

SEQ ID NO: 661648 - DNA, 75 bp, Homo sapiens
ttctgacttgagcctgcagtgtgctgtgagagatctaccactagctccagggcccacaacggcagtgtcctacat

SEQ ID NO: 661649 - DNA, 100 bp, Homo sapiens
catgggtggccagggattctgcaccttgcagagtgaagtcaagcccatcctagagaagctgacccaggaccaggatgtggacgtcaaatactttgcccag

SEQ ID NO: 661650 - DNA, 87 bp, Homo sapiens
atggagacaccctctgggggtcctctctgagtcaaatccagtggatatgacagcgcgtgatctgctacagcagagatacacccttcc

SEQ ID NO: 661651 - DNA, 74 bp, Homo sapiens
gcctgacatatctgagggagaagcacaagatcatgcacagagtgaataaccctataccttccaatttgaaatca

SEQ ID NO: 661652 - DNA, 100 bp, Homo sapiens
atctcctgccccgccgaggcttgacccgcattgagatgttccacaagagcctggagagggccgaggccggagataacctcggggccctggtccgaggctt

SEQ ID NO: 661653 - DNA, 82 bp, Homo sapiens
gacgccatgtcgggttattcgagtgaccgagaccgcggccgggaccgaggtttcactgttacatgccttgaagtgatgagga

SEQ ID NO: 661654 - DNA, 89 bp, Homo sapiens
ccatcctgcaccgggacctcaagtccagcaacagtccatctcccatttgcagtggttggcagcaccgaagaggtgaagattggcaacaa

SEQ ID NO: 661655 - DNA, 95 bp, Homo sapiens
gaatccactgttgctactgaaagggttatatttcacactatgtgctgactgtatctacagaagatatttaaaaaaaaaaaagataaacttttttt

SEQ ID NO: 661656 - DNA, 100 bp, Homo sapiens
tgcttgtaccgtgatgtgatgctagagaacctggctctcatatcctcgctggaaaaactgcttaaggttgaaaagagaaatttaagaaattgctgacgga

SEQ ID NO: 661657 - DNA, 50 bp, Homo sapiens
gcgggagaggcgccggggccgcacaggggtggcactgaatcaacaagaca

SEQ ID NO: 661658 - DNA, 83 bp, Homo sapiens
aaacgagattccttcatcggcacgccttactggtgctgctacatcctcatcctcctcttcaccttcatccagttccataacag

SEQ ID NO: 661659 - DNA, 83 bp, Homo sapiens
tgcgcgtggaacggctgcttttggaaggtcagcccaaggccaaccccactgtcactctgttcccgccctcctctgaggagctc

SEQ ID NO: 661660 - DNA, 97 bp, Homo sapiens
cggagagtggacggtgtgagggggaccgggagaggcaccaaatctggcctgggggcccgagaagcttcctctcagattctggctacattggagattg

SEQ ID NO: 661661 - DNA, 90 bp, Homo sapiens
cacgaggcggcgggctggagacatggaccgcggcgagcaaggtctcctctgagcctccggcctccataagacccaaaacagatgacacct

SEQ ID NO: 661662 - DNA, 75 bp, Homo sapiens
tgatcctttgcagaaatgactacattagaactgcatgaacttgcccccagacaaggtccagctgctgagccagta

SEQ ID NO: 661663 - DNA, 74 bp, Homo sapiens
caggacttccgggaggaccaggatgctgccttcttcaaggagccagcaccgctctttgaccttgccatgcttgc

SEQ ID NO: 661664 - DNA, 100 bp, Homo sapiens
tgaagttggctaacaaattgaaagatatcatcaaacgacatcagggctgacaggacaactggatcagtttcattaaaaaggtatgtatgcattagaaaag

SEQ ID NO: 661665 - DNA, 75 bp, Homo sapiens
ctttgtccgtgttcggtgaccgcagcactggggaaacgatccgctcccaaaacgctacaaagagccatccaggag

SEQ ID NO: 661666 - DNA, 82 bp, Homo sapiens
gtagtcgctggagtccgcgcctccctggggcttaccacccaaaagatgggaggcagaagatacccacctgagttgcccagag

SEQ ID NO: 661667 - DNA, 88 bp, Homo sapiens
tccattccgaagaataagactaaagaaaacattttggaagaattcagtaaagtcacagataccagcgggcaagcagaaaacaagaggc

SEQ ID NO: 661668 - DNA, 101 bp, Homo sapiens
tgacactgtgagctttgctatggaagtgagtccttggagttgtcttcagaagcaagcagcatgggggcggtcactcagcagctcccagaatacggtgtgct

SEQ ID NO: 661669 - DNA, 82 bp, Homo sapiens
ccggagtgagaagcaagaaggccctggacacagcaatatctctgggctttcacagtcagtactgctccccagcctaaaccag

SEQ ID NO: 661670 - DNA, 83 bp, Homo sapiens
cacccgtggaaagtacaggtcctgacagctggagcctcctcaacaagcccaagagtgagatgaccccagaggagctgcagaag

SEQ ID NO: 661671 - DNA, 98 bp, Homo sapiens
gaaaatcgtcttatagttgagaatttatcctcaagagtcagctggcaggacagtagtttaactgatacccgggaaacttcagaagagatgcaaaagac

SEQ ID NO: 661672 - DNA, 83 bp, Homo sapiens
atgagcagaacttcttccagcgggccgccaagcctctgcaagcttgtgctgtgagtgtggtgttccgataagtccaaatcctg

SEQ ID NO: 661673 - DNA, 100 bp, Homo sapiens
gccagcccggcctctcccagccggagctgtcccagaacacagaatgttcttggtgagaagggccggcggattcgggaactgactgctgtagttcagaaga

SEQ ID NO: 661674 - DNA, 74 bp, Homo sapiens
gccctggtcttgctcggccgatgaagtgcagaggtttttttctgggagaaactgcctacatccgggttaaagtt

SEQ ID NO: 661675 - DNA, 75 bp, Homo sapiens
gctggggcctatgatgcttgaggttgaatgagaaccctacttgcctaaatgaggaatgtctttcctaccatctaa

SEQ ID NO: 661676 - DNA, 100 bp, Homo sapiens
gcaggatctcacagctgcagtctaatagtaacacagagtgctatgctggaaaatgagaagaagaagcgtgaaatggcagagaaggagaaagagaagattg

SEQ ID NO: 661677 - DNA, 111 bp, Homo sapiens
gccaaggctctaggaagtgggatttctggaaataatgcaaagagagctggaccattcatccttggaggctgtaggagtgcaattggaacctgagcgcttggtcaagatcct

SEQ ID NO: 661678 - DNA, 75 bp, Homo sapiens
gcaggaatccgtatctgggaacaggtggcagtagagaagagcatcacagaagttgctcaggagctgacagagctg

SEQ ID NO: 661679 - DNA, 100 bp, Homo sapiens
aacgacatgaagatgaggagtttttccccaaccatggttatcaagttatacccaaccagcagcaaaactaccaaggaatagttggagttcagcaacccca

SEQ ID NO: 661680 - DNA, 74 bp, Homo sapiens
agtcaagctgttactttcctatggagcctccagaaatgctgtgtttttggattcaaagcataaaaaccattaca

SEQ ID NO: 661681 - DNA, 90 bp, Homo sapiens
atttcactttggacacgtgagtcagaggctggagcattggatttgctaaaggagcttaagaatattcctatgaccctggaattactgcag

SEQ ID NO: 661682 - DNA, 113 bp, Homo sapiens
gtgcctgccaaggtcctcctagtgttccggaagctggtggaaaatgcagttagaacctgtcacctctcagcccactttccttgtggaactgtccagagtgctggcaaatccag

SEQ ID NO: 661683 - DNA, 75 bp, Homo sapiens
gcagctggagctgagcaaagtgcgtgaggagtttaaggagctgaaagcgcggaggaagaggtggtggacaagatg

SEQ ID NO: 661684 - DNA, 75 bp, Homo sapiens
ccctgaggagtccccgctgcttggtaaaaatgttgtacatcagctctcagtaaccctagaagacttatataatgg

SEQ ID NO: 661685 - DNA, 98 bp, Homo sapiens
agtcattggtgtgcgtgtgtgtggcatgcaggatgccaggccaaggtggagcaagcggtggagacagagccggagcccgagctgcgccagcagaccga

SEQ ID NO: 661686 - DNA, 100 bp, Homo sapiens
tctgccgcagagtcggcacctgaaggacatggagacacccatcatactgactccaagccccttgctctccagtatccacttctggagtactctcagtcct

SEQ ID NO: 661687 - DNA, 82 bp, Homo sapiens
agcctgcacagccgcggcggcagcagcagtgagagggagagctggtgacggcctccaaggccatcattgaaaaggagtacca

SEQ ID NO: 661688 - DNA, 50 bp, Homo sapiens
agttgacagcacttttcaaaaacctggcaaatctgagtagcctccaagag

SEQ ID NO: 661689 - DNA, 100 bp, Homo sapiens
cctgagtctttgggggcagcctgcagaggctgcgtctggccttaccaaggcagtgaaggagagtacaattacattgcagcaggcagagtatgaatttctg

SEQ ID NO: 661690 - DNA, 75 bp, Homo sapiens
gcttcaagcttaggaccacccaccatgcctatccaggattactacagcatcccatttcccacacccactactccg

SEQ ID NO: 661691 - DNA, 90 bp, Homo sapiens
cgaggagtcagaaactcagccactggttgccttggtaggcaataaaagcacgtggaggagttcagccccagagctgtctacaccagtggt

SEQ ID NO: 661692 - DNA, 75 bp, Homo sapiens
gggaggacatgctggccatctcaacacccgtcttgaccagtctgattcttggtgccaccattgagaactccagga

SEQ ID NO: 661693 - DNA, 82 bp, Homo sapiens
tcggcctcggcgtgctgcgcctccgcggctgccctgcgccaggtgtcccgacccaggctaagcttgagcatggctgagcagg

SEQ ID NO: 661694 - DNA, 51 bp, Homo sapiens
cctgaacctggaagttgtgctttttaaggttctggagacagcctgtatttc

SEQ ID NO: 661695 - DNA, 82 bp, Homo sapiens
taagaactcctacatcaaactctccttcaaagaacatggccagattgaggtgtcagtaattaacactgtggatacctcccat

SEQ ID NO: 661696 - DNA, 100 bp, Homo sapiens
tttaaagaactacctgttaatgcacaaaactatgttcgatttattgaagatgagcttcaaattccaggggcttataaaattctacagaagtcccagaaac

SEQ ID NO: 661697 - DNA, 75 bp, Homo sapiens
tgggccacatgcagtttctctcaggttagagcagccagcgggtacagaatggattttggaagagggagtcaccac

SEQ ID NO: 661698 - DNA, 82 bp, Homo sapiens
gccgatccagcctgcggagcctgtggggcagctgccttcctatttcaaggaaagacgccaaggtaattttgacccagaggag

SEQ ID NO: 661699 - DNA, 75 bp, Homo sapiens
ggcggagtgaggcgcagtcgttcgcccaggctttggcccggcttccggagagagtacacactagatgtgtacaga

SEQ ID NO: 661700 - DNA, 75 bp, Homo sapiens
gggctgaacggtcaaagacattcacaacatggatgcccattgcagatgcaaaggctcctgagaagcgggcctcac

SEQ ID NO: 661701 - DNA, 83 bp, Homo sapiens
gctgtctctgatccgcaagcatgctcagaccttcattgctctgtgtgccaccgtatgacgccgtgcccatccagtccagcgtg

SEQ ID NO: 661702 - DNA, 100 bp, Homo sapiens
caacagcgtctcggccatgaagctctctccgtattacaaggtggttgtgtcaaaccgattggtgacatctccatgctgtattgtcacaagcacatatggc

SEQ ID NO: 661703 - DNA, 82 bp, Homo sapiens
ggagcttgacgcgctggagcttgagagccctggtccagcgcctccctctctcagcatggacgaggagagcctggagtcggcc

SEQ ID NO: 661704 - DNA, 100 bp, Homo sapiens
gcagatccaagtcgccggacccggtgtggagagcggtgctgaggctacgcgggctggagactcagggtacttgtcttgggccttagacacaaatcaggaa

SEQ ID NO: 661705 - DNA, 80 bp, Homo sapiens
gagactgatttgcaacccttccgggaagccatagctctgcatggaacgtcaaggtcgtgggaaataaaaggcagttctac

SEQ ID NO: 661706 - DNA, 98 bp, Homo sapiens
cggaaaagccaggattcggtgctggaccctgcagagcgtgctgtggtcagagtcgctggtaagattggggaagatgccaggtgatagaatccaccctg

SEQ ID NO: 661707 - DNA, 100 bp, Homo sapiens
ggaacttctacccgacacttacatgccatggccttctacgttgtgaaaatggaggctgagaaaatgttagaaattgggggagacaagtttcccttagaga

SEQ ID NO: 661708 - DNA, 100 bp, Homo sapiens
gttcctggccagcacccggcctctctgcacctcatagacactgcaaatccttactcagtgacttcagggatacaggaagcagtcaattatagatttcttc

SEQ ID NO: 661709 - DNA, 82 bp, Homo sapiens
cggaatggacctgtgccacccagactttccatttcaacacggttgaagaggttcattcaagattccagagtctgaatgctga

SEQ ID NO: 661710 - DNA, 90 bp, Homo sapiens
cttccaggcaatagctgaagaagaagaggaagtagccaaagagcaactaactgatgctgacaccaaagcctcatctagttgaatctgaag

SEQ ID NO: 661711 - DNA, 96 bp, Homo sapiens
cgtaattgcaacagcccttgccaagatcccacaaaaggtctccaccagctcctggccgggttcgaggacaagtcagcctatgcgctctgcacgttt

SEQ ID NO: 661712 - DNA, 82 bp, Homo sapiens
gccctcaagtacctgtcccggaaccacatgcacggcgccatgtcagaaccggctggggatgtccgtcagaacccatgcggca

SEQ ID NO: 661713 - DNA, 75 bp, Homo sapiens
gaaaaatcctggatctgtatgctttgagcaagctccgggattgtggagggctgcgggaggtggaggtgactgcct

SEQ ID NO: 661714 - DNA, 97 bp, Homo sapiens
gggctgcggacgctcggtcccgcgctgcgcatccccgcggacgccacagcgctgccaccctccagggcccactaaaaaagcgctgaagcagcgattc

SEQ ID NO: 661715 - DNA, 74 bp, Homo sapiens
ggccgccgtccccgggaaaacgttcgtcaacatcacgatgtggacgagtgcagctccgggcagcatcagtgtga

SEQ ID NO: 661716 - DNA, 98 bp, Homo sapiens
taaatgttgagcctttttggcctggcttgtttgcaaaggaacagtggaggccatgtgtcttttggcagtcagtccagatgggaattggctagctgcat

SEQ ID NO: 661717 - DNA, 98 bp, Homo sapiens
gagttgggagtttcgctgatccagatgacctgccggggctggcacactttttggagcacagtatttgaaatatctcaccaaaaaatatttgaagaaga

SEQ ID NO: 661718 - DNA, 50 bp, Homo sapiens
gttgaagtggatgtgagatgagatgggggatgtatggcattgagaatgaa

SEQ ID NO: 661719 - DNA, 96 bp, Homo sapiens
gtgaagtctggagcaggacttctgaggctttctatcctccatgctgctcactagaaaaggggctgtgaactgtctgcagccaccccagctcatacc

SEQ ID NO: 661720 - DNA, 100 bp, Homo sapiens
ggcccgtactgcacatcgtggtggtcggatttcaccacaagaagggctgccagtgccggtggtggtgtgcacattgagccccggtatagacagttccccc

SEQ ID NO: 661721 - DNA, 73 bp, Homo sapiens
ataaggacaaaagccaagaggaggacagttcgctacacagcaatgcatcgagtacatcgggtgattcttctcg

SEQ ID NO: 661722 - DNA, 50 bp, Homo sapiens
aattcttcgacatactctccagcttcaaaatgacagcccatatcaaggcg

SEQ ID NO: 661723 - DNA, 89 bp, Homo sapiens
gataagtctagattcaccaatgtcaaacagtttattgcaccagcctgtggtggtgtgttcaatttctcttctggaatcatcacaagtcc

SEQ ID NO: 661724 - DNA, 98 bp, Homo sapiens
gagactgacccgaccccggcactacctcgaggctccgcccccacctgctggaccccagggtgtcgtgaaaactacccctaaaagccaaaatgggaaag

SEQ ID NO: 661725 - DNA, 100 bp, Homo sapiens
gtttataaacctggacggtatctctctcctcacgcagatggtggagagcggcactgagagatgagtatgatgtatgtgccatttgtttggatgagtatga

SEQ ID NO: 661726 - DNA, 100 bp, Homo sapiens
ccccaaaggagctggagagatgttagaagatggtcagtaggacagaaggtaacattgatgactcgctcattggtggaaatgcctccgctgaaggccccga

SEQ ID NO: 661727 - DNA, 100 bp, Homo sapiens
cagaatttccaattacagacgacaaagtagcactggcgttggagaccagggccagccctggccacaccccaggctgtgtcaccttcgtcctgaatgacca

SEQ ID NO: 661728 - DNA, 118 bp, Homo sapiens
tcgccgatcctccaggcatgccccgctacgagctggctttaatcctgaaagccatgcagcggatagactgggagctccatgaggtccgagacaacctgaagacgcccagctcagcaga

SEQ ID NO: 661729 - DNA, 100 bp, Homo sapiens
ggctgccggcttgttcttactggccctgagtctttgggggcagcctgcagaggctgcggatgattgtcttttgaaagtgtggtatcctatgactggttgg

SEQ ID NO: 661730 - DNA, 90 bp, Homo sapiens
caaacctgccaacgtccagccttattacctctatggatccaaggttggtgttcgaggaagagacattgttgttcttggtgtggagaagaa

SEQ ID NO: 661731 - DNA, 76 bp, Homo sapiens
aagctggatggcaggaaacggggtggagagattcaaccagttagcgtgaaagttggagataaagttcttctcccag

SEQ ID NO: 661732 - DNA, 80 bp, Homo sapiens
cttcgggaagcagggattccagtgccaaggtcaaaatgcagatcttcgtgaaaacccttaccggcaagaccatcaccctt

SEQ ID NO: 661733 - DNA, 75 bp, Homo sapiens
gagctgaggaaccagatatcttgaaaagctgccagaaagatagcagaccccacgttagctgaaatgggaaaaaac

SEQ ID NO: 661734 - DNA, 100 bp, Homo sapiens
cacaacccggtggtactttatagtaaccaacgagtagacctttacaagtggaaagacggcagtggggaagttggcacaaccttacaaggccacactcgtg

SEQ ID NO: 661735 - DNA, 101 bp, Homo sapiens
cagagacccatggatgaactgtgtttctagatttttcctccagctttcctgagagagttgcgggagcttcaggacgagaaggcagagctgcagaagatctg

SEQ ID NO: 661736 - DNA, 75 bp, Homo sapiens
ggggagagggacctcatctttcacaaaggccttcacaacgcggcttacagggagaacacagttggcctccaccgt

SEQ ID NO: 661737 - DNA, 51 bp, Homo sapiens
ctcaaggccatgatcaaaacaatgatctctgcctttcacaaagaccacctt

SEQ ID NO: 661738 - DNA, 82 bp, Homo sapiens
gccagcggcgtcgagaggaccatcctgggtgctggccctgtgctggagcatcatcatggacacagccattatgcctctgagt

SEQ ID NO: 661739 - DNA, 82 bp, Homo sapiens
ctggggtcagggaccggaaaggcgacaaaccctggaaggagtcagtactatgagatgtcctatggcttgaacattgaaatgc

SEQ ID NO: 661740 - DNA, 100 bp, Homo sapiens
gccaccatcttcgacttgagcgaagttttatgcaagtactatactggcaattgctggagaagattttgcaattgttgcttctgatactcgattgagtgaa

SEQ ID NO: 661741 - DNA, 75 bp, Homo sapiens
gaggtcttcgggaattccagcgagggtgatgtacagttcattgattatgaatattctggatacaactacctggca

SEQ ID NO: 661742 - DNA, 75 bp, Homo sapiens
cagacggcgagacctcctgcacagggctcattgtcatccccaagccaggccagttctccaggtggaactgtagtg

SEQ ID NO: 661743 - DNA, 100 bp, Homo sapiens
tttgaaatctgataagaaagtacggaccataataatcaggagtgaagtcccagggatattctgtgctgggcggcgactggcggcgcgatggacctgaccg

SEQ ID NO: 661744 - DNA, 101 bp, Homo sapiens
cctttattgtggtggagtccaccccgctgtgaaatggtggagtcaatgaagaaagtagcagggatggatgtggagctgacagttgaagaaagaaacctcct

SEQ ID NO: 661745 - DNA, 84 bp, Homo sapiens
gcttcccctttccagagagccagaaagaatgccggtggtggtgtgcacattgagccccggtatagacagttcccccagctgacc

SEQ ID NO: 661746 - DNA, 100 bp, Homo sapiens
gaggtccgagtgacagccagtgagaagaatgagtataaaggatgggttttaactacagacccagtctctgccaatgtggacaacagtgagtatatgcgga

SEQ ID NO: 661747 - DNA, 76 bp, Homo sapiens
caccagggtttggagataaaacatttgttgttcaggtatggctatcctgatccttcttacctgaaacgtgtcaaag

SEQ ID NO: 661748 - DNA, 74 bp, Homo sapiens
tcttcatagaccagaaccttagtcccgggaaaggttgcacagagcattgaggatcaccatcaggaagtgattgg

SEQ ID NO: 661749 - DNA, 100 bp, Homo sapiens
accacaataatccacagccaaggtgaatctggattgggaaagtcgacattaatcaactcattattcctcacagatttgtattctccagagtatccaggtc

SEQ ID NO: 661750 - DNA, 96 bp, Homo sapiens
ccaggtcctcaactttgaagagatcgactacaaggagatcgaggtggaagagagtatctgcacaaccaccactgcatttttgcactttttcttcct

SEQ ID NO: 661751 - DNA, 75 bp, Homo sapiens
cgaaggaggcgggagcggagacctcgctgcgctcatggcgtcgcccgggtatgtaggaaaccttcccagaatatt

SEQ ID NO: 661752 - DNA, 100 bp, Homo sapiens
cctgggcccacgctaccgggagctggtcaagaactgccccgtgacccccagcacaccagggagcccgccagtgagtcctgggcctttgtcaccagggggg

SEQ ID NO: 661753 - DNA, 75 bp, Homo sapiens
ccagcccctctccagctcgaaatcgataagtctacttttcttccacgtaacaaccacaggatagatgacattcat

SEQ ID NO: 661754 - DNA, 131 bp, Homo sapiens
ttttcgtaaacatctgggtgtatatcaaacggcaagatgtccagtaatgtcccggcggatatggtctctgaaagaagatgaatttggctgagatttgtgataatgcaaagaaaggaagagaatatgccctt

SEQ ID NO: 661755 - DNA, 75 bp, Homo sapiens
agccggagctgggcgcggattcgccgaggcaccgaggcactcagaggagactgcaaaattcaaaatggggctcaa

SEQ ID NO: 661756 - DNA, 83 bp, Homo sapiens
actgactggcacaggtgttgggctctagccggcccggtccttggactgaaagaatgcaccaggggctcggcagtgtggtgcca

SEQ ID NO: 661757 - DNA, 75 bp, Homo sapiens
tgcccaacgacatcgatggcctggagaagcaacagcatttgatcgagctgatccgccagcgggagacagaggcgg

SEQ ID NO: 661758 - DNA, 74 bp, Homo sapiens
gggccagagatgaccctgctttcttggtcctgttaagtatctggctctgtgctaatgttctctatgggccactc

SEQ ID NO: 661759 - DNA, 100 bp, Homo sapiens
ggtggagatgatggtgtttctccaaaagatgttggacacaatatctatattctggcccatcaggtgaatgacatgaactttgagaacatgagcaacgatg

SEQ ID NO: 661760 - DNA, 83 bp, Homo sapiens
atcccggccaccagcaattgtccggtatcttggctctcaaaagagtgggcaaagagggcagctctgccttcccatgtggtcac

SEQ ID NO: 661761 - DNA, 83 bp, Homo sapiens
gctctatcaaggggctggtgtactccagcaacttccagttgagaagctgatgtctcctcgacttccaactggaaccttgaacc

SEQ ID NO: 661762 - DNA, 96 bp, Homo sapiens
gcaaagacttcaggatgtcatctatgaccgagactcactccagagacagctcaattcagccctgccacaggttctgcacttttaaaagaaaagcaa

SEQ ID NO: 661763 - DNA, 75 bp, Homo sapiens
ataaatccaaatactgcatatcagaaacaacagtgtcttctacaaatgcttctgggaactggaggacccagttaa

SEQ ID NO: 661764 - DNA, 83 bp, Homo sapiens
ccaggattgtagaatatgagaaagagctgaaggtgcctgcagaggagcccgccaatgagctgcccatgaatgagattgaggcg

SEQ ID NO: 661765 - DNA, 82 bp, Homo sapiens
tgggcttcatagcattcgcctactccgtgaagcttgatcctctcccagaaaaggttttacagcaaagacccaatgcaaacgc

SEQ ID NO: 661766 - DNA, 75 bp, Homo sapiens
ggctgcaggagaagatggcggtctccacagcatgttggcagataaattgaacatgactccagaagaagctgaaag

SEQ ID NO: 661767 - DNA, 100 bp, Homo sapiens
cctttgcacagcagtgccaagacttggttaaagtcattgaggactttccagcaaagcaggcttatggctatgggccatacggtggtgcgtacccgccagg

SEQ ID NO: 661768 - DNA, 82 bp, Homo sapiens
ggccttagctgtgctcgcgctactctctctttctggcctggaggctatccagcggcaaaataacatggcagccagacgaatt

SEQ ID NO: 661769 - DNA, 100 bp, Homo sapiens
gaatcattttggaaactaaatcgttccccagacagcaccagttgcccttgaagcagaaaacagaggtgaaatgaaactagctctccagtatgtcccagag

SEQ ID NO: 661770 - DNA, 50 bp, Homo sapiens
cagctgcgatctctgtggtaggcccaggctgccctgaggatctgtgtttg

SEQ ID NO: 661771 - DNA, 100 bp, Homo sapiens
tgagatcaaatggcacttcattggccacctacagaaacaaaatgtcaacaaattgatggggtttggtgcaattctccattaatgaagataacatttgaat

SEQ ID NO: 661772 - DNA, 48 bp, Homo sapiens
cgttctctagctgaagattttgcaggggccttcagcctcctgagggag

SEQ ID NO: 661773 - DNA, 90 bp, Homo sapiens
gaaacaccactgaagcattgccaagaacccttaggagaaatcttgagagtggacagcaattgtgaagatcgccagagagttctgtgtttc

SEQ ID NO: 661774 - DNA, 83 bp, Homo sapiens
cgggcctgaggttgaactggggtgaaccgcaagagtgagccatggagctacgtgtggggaacaagtaccgcctgggacggaag

SEQ ID NO: 661775 - DNA, 75 bp, Homo sapiens
taagaatgtcctggcagcattcagccagtattttagggacagcatcgtggccgagctggaccgagagatgagcag

SEQ ID NO: 661776 - DNA, 75 bp, Homo sapiens
ctcctcatcaactggggatgattacagttcttcctaaaaaagatgcctggaatgatgtcgtcagtaatgcctgga

SEQ ID NO: 661777 - DNA, 88 bp, Homo sapiens
gcctcaacccagaggaatcgttactctttcaggtggagccgccaccaaaatgcagattttcgtgaaaacccttacggggaagaccatc

SEQ ID NO: 661778 - DNA, 75 bp, Homo sapiens
agcacctcttcctgtacgcctcctgccaacgggacagacagtataatggctccatcaagtatgatggtgaaggat

SEQ ID NO: 661779 - DNA, 75 bp, Homo sapiens
agtttcatctctctataaagttatccaggagccacaaagtgagttggcccagcgcttcgggccggtgttcacgct

SEQ ID NO: 661780 - DNA, 50 bp, Homo sapiens
ttggtgacatacaaaggaagggaggtccagcagtttaagcaggatccacg

SEQ ID NO: 661781 - DNA, 101 bp, Homo sapiens
cctcctttgacagggacatcagtggagccttctcagacccacaggtcttggtatggtgactcctgtgaacgatcttagaggatctgattctattgcgtatg

SEQ ID NO: 661782 - DNA, 97 bp, Homo sapiens
gagctcatctcagatctggagcatcggctgcaggggtcagtgatggagctgcttcagtaatctatgccagcaattatgacaatgttagcagaccatg

SEQ ID NO: 661783 - DNA, 127 bp, Homo sapiens
cataaagtcaggcagagatggcagtgggggctcccgtggcaaaagagaaggaagtgctagcggtgaatctcctacgacccggcgaggtaccccaggtacctgcctgaagcctactgcctgtgccggg

SEQ ID NO: 661784 - DNA, 100 bp, Homo sapiens
tgaacatcgaatcatggaatcccttgcatggctctcaaattctgcttggtcagaatcgtgatggcattgtgttcagcactgatgactattttcaccatca

SEQ ID NO: 661785 - DNA, 74 bp, Homo sapiens
gcggagactgcgggcccgtagctgggctctgcgagacaaactctctttgctagtgcggatacagcttatgtttt

SEQ ID NO: 661786 - DNA, 100 bp, Homo sapiens
gagcacataacggggttcgggtgtctcgtgtgtgaacatcacagcaattctgtggtgttcttggtcacacatttatggagtttctgaagggcagtggaga

SEQ ID NO: 661787 - DNA, 100 bp, Homo sapiens
ctgtctggccggccccttggcactcgcctcggatttgggggcttcctcactcgtggctttccgaaggctgctgattgaaaaggaagatcaggccaacccc

SEQ ID NO: 661788 - DNA, 50 bp, Homo sapiens
gtctattgtcagagcactatgctgtgtctgctgcacagagctttacatcc

SEQ ID NO: 661789 - DNA, 126 bp, Homo sapiens
gtgcggggacggccacatgaaagttttcagcctcatccagcaggcggtgacccgctaccggaaggccatcgccaagatttcaacactacacttgcacaatgtctttgaaaccaagagtagtagatt

SEQ ID NO: 661790 - DNA, 75 bp, Homo sapiens
cttccggcagcggcagctcaagtggccaaggcaagatgcctaaattatacagatctgtgattgaagatgtcatta

SEQ ID NO: 661791 - DNA, 83 bp, Homo sapiens
gacaagcatatctaagaggctgaacatgaatccacagatcagcaaaatgatgcttcaacacccaggccaggtctctgcctcgg

SEQ ID NO: 661792 - DNA, 100 bp, Homo sapiens
gttacaaagccaaaatggagtatgcaaagttgatgtctattctcctggagacaaccaagcccaggactggaaaatggctggagtgcaatggcgtgatctc

SEQ ID NO: 661793 - DNA, 100 bp, Homo sapiens
gagaagatggaggagctggtggtggaagtgcggggctccaatggcgctttctacaaggttgttggaagaggagcctttggagttgtttgcaaagctaagt

SEQ ID NO: 661794 - DNA, 83 bp, Homo sapiens
gttgagcctgtgggacacttcgggttggagcaaaacgtcccactcactggaggcacctgaggacgacgggggctggtcaagtg

SEQ ID NO: 661795 - DNA, 100 bp, Homo sapiens
cctgacagtgggcacctgtatgctatgaaggtgctgaagaaggcaacgctgaaaggtccaggtgcaggtacagcagtctccgcaacaggtctcggctcag

SEQ ID NO: 661796 - DNA, 101 bp, Homo sapiens
ctcttctccttcagagtaaagtggttgcacgcactcctggctttaaagtttatacttgcatttgccatacctgataagccacggcatatccagatgaaact

SEQ ID NO: 661797 - DNA, 100 bp, Homo sapiens
cgcgtccgccgattcctcctccttggtcgccgcgtccttggctggcgtccacccctttgctgtgaagttgcttgcgctctgtaagaaagaaatcaagaat

SEQ ID NO: 661798 - DNA, 100 bp, Homo sapiens
cggacaccattttctgccgctggacgcaaggtgaatgattccaattgtgaccaagaacttctttccctgctcctggatgccaagctgctggtgaagtgtg

SEQ ID NO: 661799 - DNA, 75 bp, Homo sapiens
ggaaaacacacgttcctccgaaaccggtttgcaagtccttgtagaggcagaatccagagaccacatttgaagtat

SEQ ID NO: 661800 - DNA, 75 bp, Homo sapiens
tatccctcttggtctgtggaggtagttgctgagtggcactgggtaaaagcgaaacctaaccaaactgtccctcat

SEQ ID NO: 661801 - DNA, 50 bp, Homo sapiens
ttacaagccagcctctgggaccgaggcccttctgcgatgttttacctggc

SEQ ID NO: 661802 - DNA, 99 bp, Homo sapiens
gactgtgtgtggagcaactggaaaagtcaggagttgctggaattgtggccgtaaagcgagtgaaacctgcagtggctgtaacacagcccgatactgtgg

SEQ ID NO: 661803 - DNA, 100 bp, Homo sapiens
cagaattttttgcaggggaaaacatccagtgtggtggaaatgattcgcttcaagctcagcttatcaatatgggtgttattcctaccttagtgaaattact

SEQ ID NO: 661804 - DNA, 75 bp, Homo sapiens
cacaaaacagcagatttcccaagagcagcggaaaatgatccagtcacagattaagcctgatcaagatgacaacct

SEQ ID NO: 661805 - DNA, 49 bp, Homo sapiens
gtcagctcagtgctgtgcgggccaggaatcacccttcggtcatcgtgca

SEQ ID NO: 661806 - DNA, 100 bp, Homo sapiens
agataaaatgacgacgtccttctggaagaggcgaaactgagactaaggtgtcagtatgttcttcaagctgctctgctcctgggcccaagctattctcctg

SEQ ID NO: 661807 - DNA, 89 bp, Homo sapiens
ggcggagcgggagcggccggaggagccatggactgcagcctcgtgcggacgctcgtgcacagatacgtcataagatagtgctacccatg

SEQ ID NO: 661808 - DNA, 80 bp, Homo sapiens
gagagatggaacccgaagaagaaaggattcgttacagccagagattggcctcagcaactgttgccattcccaaagaacac

SEQ ID NO: 661809 - DNA, 98 bp, Homo sapiens
ccgccaaagtccttgaggagtatggagctggagtgtgcagtactcggcaggaaattggagaaggaagccaacatccttttggagccatgaatattgtc

SEQ ID NO: 661810 - DNA, 90 bp, Homo sapiens
ggcggccaatgaggagatggaggcgctgcggcagatgccatggacaatattaccaggcagaaccaattctacgatacccaagtcatcaaa

SEQ ID NO: 661811 - DNA, 75 bp, Homo sapiens
gaatcaaatttttggaacactggactctctaattcctctacatgaaggaaacgtaaatattttcaccacgatcga

SEQ ID NO: 661812 - DNA, 98 bp, Homo sapiens
atgctgtggtccactgtacaggatacatcaaggcctggccaccagcagattctgctcctaagtgtaggagagaacttggtgcctcttccactctggag

SEQ ID NO: 661813 - DNA, 124 bp, Homo sapiens
agccctgtacaagtcactgtcggtgccggcagccagcacggccaaaccccctcctctgcctcgctccaacacagaaaccaaggtgtatgttggtaacctgggaactggcgctggcaaaggagag

SEQ ID NO: 661814 - DNA, 80 bp, Homo sapiens
accggacagtcatcaccatgggccgggatcacattctgattgtaaagaggatgaatatccaaagaagcccttggggcagc

SEQ ID NO: 661815 - DNA, 108 bp, Homo sapiens
gtttcctccaggacagcacctagtcgtggccggaggagtctcagagctgtcagaaaggttcgatacaagaggctgttttcctagcgtggcttgctgcctttggtaaga

SEQ ID NO: 661816 - DNA, 78 bp, Homo sapiens
atatgttcaagatggctaaaaattggagtggtcccccccaaagacccaaactgaatctaaagcctcggagtactccta

SEQ ID NO: 661817 - DNA, 100 bp, Homo sapiens
ccggagggcgcgggaatggagctcggaggcggcgaggagcgcctgcctgaggagagcagctcctggatctcccaggtatcattgaaggtgccaaggatgg

SEQ ID NO: 661818 - DNA, 75 bp, Homo sapiens
ctgaaaacatttttgaaaagacaagccatcaaaactgccttcagaagcaaaaggtggtgaagcagtattttccaa

SEQ ID NO: 661819 - DNA, 100 bp, Homo sapiens
atcggaggcggctgcgagagtggcagaggagctggcggagagcggcctgcgggcgatcgggccgaggctcaggtggccttccttcagggagagaggaaag

SEQ ID NO: 661820 - DNA, 50 bp, Homo sapiens
ctaggaccgcttcccccgagccagcagctgtaatggtggctatcctgctg

SEQ ID NO: 661821 - DNA, 100 bp, Homo sapiens
ccggggaaacgcgccggcggcgaaggagccgagccccgtacaactccaaaaggagacattggagaagaaccaagctgggtctataaggaattgcacatga

SEQ ID NO: 661822 - DNA, 90 bp, Homo sapiens
tgcctacctccgagacagtctttctcatcttgttcctgccttgagggagggccctcctggacccgggagcggaccctggtggcggtgaag

SEQ ID NO: 661823 - DNA, 83 bp, Homo sapiens
tgatacgctgggactcgtacgagaacctcagtgcagatggagaagcgggctgacgcacgaggcacacaggaaggaggtggagc

SEQ ID NO: 661824 - DNA, 100 bp, Homo sapiens
tgcttccaatgacgcaggctcagccaggtgtgaggagcaggagatggaagtctatgttcggttactgcttaataatgacaatcttctcagggaaggagca

SEQ ID NO: 661825 - DNA, 100 bp, Homo sapiens
cttttccttggagagtcataacatatcactgactgatcagggagcagagaaacatgaaggcacaggtcagtcctctgggatcactgatcaagagaaggag

SEQ ID NO: 661826 - DNA, 89 bp, Homo sapiens
tacggcaaaggcaagagtaacagcagcgccgtcccgtccgacagccaggcccgggagaagttctgcgttagacctgcatcttagcaatg

SEQ ID NO: 661827 - DNA, 76 bp, Homo sapiens
aggtgaatttaaaggagcagccctggtgtcacctatcagtaaaagggaacctcttactgattgtttaaaggatgtt

SEQ ID NO: 661828 - DNA, 89 bp, Homo sapiens
tcaaggcccccgcgtggttcagacagacgccgcagccaggatggttgagatatctctaccacaggacctcttggcatgggaagcactac

SEQ ID NO: 661829 - DNA, 100 bp, Homo sapiens
tggtcagtggctagactgtagcagccgagaacctcggcatcaccagtggcttcgtgaagcccaagctggaggagaccttgcctattttgatggacttagt

SEQ ID NO: 661830 - DNA, 100 bp, Homo sapiens
ggagagaagaaggcaaagaggatccagagaaggctgcgcatggagtacctctccctgatgcatgctatagtccgcaccacaccctacctgcagcaccgcc

SEQ ID NO: 661831 - DNA, 97 bp, Homo sapiens
ctctgggtggcccagatgctactggtgagcgtcaccctggacccacagtcggccagtgggtacctgcagctgtcagaggactggaagtgcgtgacct

SEQ ID NO: 661832 - DNA, 83 bp, Homo sapiens
tcaggtgaccacggattcgccatcgatgacgtagctttgccaaagacttagaagctaagcagaaaatgagcttaacatcctgg

SEQ ID NO: 661833 - DNA, 82 bp, Homo sapiens
gatatagcacaccatccccagccagtttctctggaaacccccctggtaagtgtggaggaggcgggacactctgacccaagac

SEQ ID NO: 661834 - DNA, 104 bp, Homo sapiens
gtttaaacagccaaaacagttcattcatattcagctgaagaatgcaaattgcacatcagattttgaggaatactttgccaaaagaaaactggaggaacgcgatg

SEQ ID NO: 661835 - DNA, 82 bp, Homo sapiens
aggaatcgtcacccggcggcctctcattctgcagctcatcttctcaaaaacagatcattgagaagcagccaggccacattcg

SEQ ID NO: 661836 - DNA, 97 bp, Homo sapiens
aaaattatgcatgcgttagggaagctctgagagaatggctgtggaaggctggcgcccatgcggctctacacgctctccaagcgccactttgtcctcg

SEQ ID NO: 661837 - DNA, 74 bp, Homo sapiens
ttcatctgggcggtatctggaacttgtactatggactacaaattttggaaaatgtgataaaaacaaggtggaag

SEQ ID NO: 661838 - DNA, 75 bp, Homo sapiens
cgggagagcgcgcctagccggctcgcgagtttattcttcagtccaaggaagcaattcacagtcagctgttagaga

SEQ ID NO: 661839 - DNA, 99 bp, Homo sapiens
gtgctgggtgtcttctccctcgccagctggattggagctggagtgagccttccaggaattttggctgccaaatgtggtgcagaagtaatactgtcagac

SEQ ID NO: 661840 - DNA, 104 bp, Homo sapiens
tttgtggaattcgtgaaacttgtccgtgccaaatttcctgaacacaccattatgaagaaaaagtcagcactttttgaagtgtctgaggttataccagtcatgac

SEQ ID NO: 661841 - DNA, 75 bp, Homo sapiens
gaacgtcatcgttatcaccattaactaccgtctgggaatactaggtggctgcctctttgatgagccgtatagcac

SEQ ID NO: 661842 - DNA, 100 bp, Homo sapiens
tttgatgtgcatctcaatgctttttatccactcctggtcattttgcattttatccagctttttttcatcaaccaggttttgtcagctatgattagtgtgc

SEQ ID NO: 661843 - DNA, 100 bp, Homo sapiens
aaacatctcaccaatttcaaatccggtggcttgctttggtgaaggtattcatacagccttcctaaaggcaatgctttccacaggatttaagataccccag

SEQ ID NO: 661844 - DNA, 75 bp, Homo sapiens
tctatcctggggaattcagctgcctcccagggtgaatacaggaggagatgttaaagtaacccatcttgcaggacg

SEQ ID NO: 661845 - DNA, 51 bp, Homo sapiens
ggaagagcgctcccaggagaaacaagctcatcagattcaagagatgtttcc

SEQ ID NO: 661846 - DNA, 98 bp, Homo sapiens
aggaccagcagatggccagtcacgagaacccagactcggggtctaaatgtgagaccaagaagttacctccaaatcaatgcaacaaatctgggcaaagc

SEQ ID NO: 661847 - DNA, 90 bp, Homo sapiens
tgctcatcaactgccgcaacaataagaaactcctgggccgcgtgaaggccttcgataggcactggtgtggttacaagtgttccttccgac

SEQ ID NO: 661848 - DNA, 78 bp, Homo sapiens
aaccctgggattgtgagaaataatcagttcagacttggttccttcaacctagagaaagttgaaaacccagctgaagtc

SEQ ID NO: 661849 - DNA, 90 bp, Homo sapiens
gtaacaataagatctgtggttggaattatgaatgtccaaagtttgaagaggttcatgggacggctccagacattgcaggcaaggacatgg

SEQ ID NO: 661850 - DNA, 98 bp, Homo sapiens
aaaaaaagatggagccctgcatatgattggctctttagctgaaatacttctgaaggcagctggtcttcatccaactgctgagcagattgaaatgtttg

SEQ ID NO: 661851 - DNA, 72 bp, Homo sapiens
aatcaccccttcctcactcagttgttctgctgctttcagacccccgctgaccccgcactacatctacccacc

SEQ ID NO: 661852 - DNA, 101 bp, Homo sapiens
aacgatgaggacaaacagaagattctggacaagtgtaatgaaattatcaactggcttgataagaatcagactgctgtggatgtttttcgaaggataatttt

SEQ ID NO: 661853 - DNA, 75 bp, Homo sapiens
ctcccacctggtccctgaagatgggaccctcacctgcagtgatcctggcatctacggagttttgctcttgttgcc

SEQ ID NO: 661854 - DNA, 82 bp, Homo sapiens
gacgttcggccaccggaggagcgggagccaagcaggatccaccttgatgttcagtgaagagtaccagaaaagtctgctagag

SEQ ID NO: 661855 - DNA, 74 bp, Homo sapiens
tgtgaagatcggccgcccgggctacaaaggagagaagatgactgaggaggaggtggagaccgttctggcaggac

SEQ ID NO: 661856 - DNA, 75 bp, Homo sapiens
ccttcaagcagttcgcactacagcgggagcaggagctggaggttccttgcattgactccatggagagtatatcac

SEQ ID NO: 661857 - DNA, 82 bp, Homo sapiens
ggccaacctttgcccagagactgctgaggagtccaaggctctaatcccaagatgataccacgagtcaacccaaaagttgctg

SEQ ID NO: 661858 - DNA, 78 bp, Homo sapiens
aggagcagatggagaatgagccccagttcagtgccatcatgcaggtgaaaaatgtcgcagcttcattgacctggcccc

SEQ ID NO: 661859 - DNA, 87 bp, Homo sapiens
catgcagattatatcgcatcctatggctcaaagaaagatgattatgcaccacactgtaactcgaggcatcaccaaaggcgtgaagga

SEQ ID NO: 661860 - DNA, 82 bp, Homo sapiens
ttttcacttgttcttggactgggccaaggtgacttcatctgcagagagaaagagacgattacctgtgtggtttgccaaagga

SEQ ID NO: 661861 - DNA, 83 bp, Homo sapiens
cagaagtgcaaggacaagcaggctgctgctaagtaccccctgtaccggctgggtggcccacaacttcgggtgttccgaaccaa

SEQ ID NO: 661862 - DNA, 76 bp, Homo sapiens
gactacgtctttgactggaacatgctgaaattcaaaatacaagattttggagggcagaaatgaatcagcattaaaa

SEQ ID NO: 661863 - DNA, 74 bp, Homo sapiens
atatggcggaggcggaaggggaaagcctggagtcctggctcaagacggactcttgctatgttgcccaggctggt

SEQ ID NO: 661864 - DNA, 98 bp, Homo sapiens
cggtttttgtcttttgatttcaagagttaggagctcgagaaccgtttggcaatatgtacgacgcggatgagggtgtttgacctggtgatgcttttcat

SEQ ID NO: 661865 - DNA, 83 bp, Homo sapiens
ctccataaaaacaagtgtgtgcatctggctgttagaagaattcatgctcatccggaaatcatgagtggaggatctcaagtcca

SEQ ID NO: 661866 - DNA, 82 bp, Homo sapiens
tggggccagggaaccctggtcaccgtctcctcagggtggcccagttgaaatccttcccttcctctaccttggaagtgcctac

SEQ ID NO: 661867 - DNA, 88 bp, Homo sapiens
acctgcgggagctgtaccttagccacaatggcatcgaggtcatcgagggcctggagaacaatattgatgagtgtgaaaagaaaaagag

SEQ ID NO: 661868 - DNA, 100 bp, Homo sapiens
gggtcctgagaagttcccgcttgtggagcaaacatttttccccaaccataagccaatgtctcaaatatctatcagtgtagaagagtgggaagacaccaaa

SEQ ID NO: 661869 - DNA, 74 bp, Homo sapiens
aaaagtggatggctgttaagtgtgtacaccgaacacagcagaaagctacatccatattggaattttaccgggaa

SEQ ID NO: 661870 - DNA, 90 bp, Homo sapiens
ctctccatcccttccgaggcccgacttcggtgaaaggtgtagcagtcactcggcctacacccacagcatcgaccttgtgaacccagcgac

SEQ ID NO: 661871 - DNA, 97 bp, Homo sapiens
ctacaagcaagctgaatggaggccagatagtaccatgatagctgtatcaaaatgcatcttctgcagacaccgggttaagagggtctctggagcctgc

SEQ ID NO: 661872 - DNA, 96 bp, Homo sapiens
ctgcacagaagatgtggatgaatgtgccatgggtcgaatgagtgatttgagtgtaattggtcatccaatagattcagaatctaaagaagatgaacc

SEQ ID NO: 661873 - DNA, 75 bp, Homo sapiens
gcagcgcatcccggcgtgtcggacagattgcaagactggaggaagataaagaagaactacgtaaccagctgctta

SEQ ID NO: 661874 - DNA, 114 bp, Homo sapiens
ccgcgcgcagggcctgcagcgggagctggacggcgagcgcgagcggcgcgagaaagcctccggtgtggctgtctctgatggtgtcatcaaggtgttcaacgacatgaaggtgcg

SEQ ID NO: 661875 - DNA, 90 bp, Homo sapiens
tagacattgaccccgaggagacggcccagatagctaataaccgaacacctggaagatggacccagcggtactattcagccaacaaaaaca

SEQ ID NO: 661876 - DNA, 82 bp, Homo sapiens
tctagttctcgatcaagatcaagatctcattctagaaagaagcgatacagatttgctttgtcagctatggacatggaacagc

SEQ ID NO: 661877 - DNA, 78 bp, Homo sapiens
atggcccggttggcccgggacgagtggaatggttggacacgagttgccgctggttgtccaaatcaacaaccaggtcgt

SEQ ID NO: 661878 - DNA, 76 bp, Homo sapiens
gccagttatttgcctcagtaaaagagaatatgcactttctggttggaatttgaataacatgcctgtcctggaacag

SEQ ID NO: 661879 - DNA, 100 bp, Homo sapiens
cgacgtgatcgtgctgggcaccggcctgacgtaacggcacagccaacaagatgaacggagctttggatcactcagaccaaccagacccagatgccattaa

SEQ ID NO: 661880 - DNA, 100 bp, Homo sapiens
gcggctgtttggtcgctactatcgtgtggcattttatgggcaggttctaaggcccagcagctactacaaggattgcaagccagtgatgaaagtcaacagc

SEQ ID NO: 661881 - DNA, 74 bp, Homo sapiens
gaagtgaaagagatggcctggtggaaagcctgggagaataaaggcagccccgttgatgactgaaaatgacaaag

SEQ ID NO: 661882 - DNA, 50 bp, Homo sapiens
ggacctgcacgacatgctggcctcgctggtcataccctaatgatcccagc

SEQ ID NO: 661883 - DNA, 99 bp, Homo sapiens
cctgttctggaatcgagagaagactcctcaacaagttgctgcaatgtctgtgtctaatctatcatgcatccatttttaaaattagccaagcctctctcc

SEQ ID NO: 661884 - DNA, 83 bp, Homo sapiens
ggatggctcctcccgctgccgctgccgctccaggagacagacaatgcagatcttcgtgaagactctgactggtaagaccatca

SEQ ID NO: 661885 - DNA, 105 bp, Homo sapiens
ttgatctgtaatgttcaggccatggaagaaatgatgatggaaatgaagtataataccaagaaagccccacttggacgactgggtttggattcagaagaggattat

SEQ ID NO: 661886 - DNA, 100 bp, Homo sapiens
ggcgtccactcggtggtgaagggccggctgcacctgactttggccaacgtggggagtgcatccgccccaacccttttccccctcgtctcctgtgagaatt

SEQ ID NO: 661887 - DNA, 50 bp, Homo sapiens
ggaccagatcgaggagctgaaggccgaggctctcggtgcccgccggcttc

SEQ ID NO: 661888 - DNA, 82 bp, Homo sapiens
gccgcggcgggtggatgagagttggccccgatatccgctcaggttcctccgtgtcacaaagcagtacctgccccacgtggcg

SEQ ID NO: 661889 - DNA, 104 bp, Homo sapiens
gaccatcatcctgctcctgggtgccgtggcatgtcgatttgtccttcactacagacaatgcagatcttcgtgaagactctgactggtaagaccatcaccctcga

SEQ ID NO: 661890 - DNA, 75 bp, Homo sapiens
cagacgctgccagcatcgccgccgccaggttatcctgaatacatgtctaacaattttccttgcaacgttagctgt

SEQ ID NO: 661891 - DNA, 90 bp, Homo sapiens
ctgcgatgaagccatctatcaggtggacccaagagccatatcagtgctagcaaaatggcagaattcatatagcatcaaagttgtcctgca

SEQ ID NO: 661892 - DNA, 82 bp, Homo sapiens
caaaatcgacaacactgtagagatcacccccacctccaacggaacaaggtgctcatctactctgtgcaaccgtacacgaagg

SEQ ID NO: 661893 - DNA, 82 bp, Homo sapiens
gagacatcaatttgattatggagaatttgtgagtgccagagttacctttaggccagaaaaggggaggagagcaaggacaaaa

SEQ ID NO: 661894 - DNA, 75 bp, Homo sapiens
aaggattccaagtaactcttatttggggagctgttccggtggaatgtttcggacctaggtggcctgggctgtggc

SEQ ID NO: 661895 - DNA, 96 bp, Homo sapiens
cagcaagatacattccctcaagtgtccagaatttccaattacagacgacaaagtagcactgccagcagaaaactgagcttccggtcacagagaacg

SEQ ID NO: 661896 - DNA, 83 bp, Homo sapiens
cgtagcgaacacggtgctactcaaggcccgggaagtttgacaagtatgcgcccaagctggacagcccctacttccgacattcc

SEQ ID NO: 661897 - DNA, 100 bp, Homo sapiens
ctttgcattgactggaaacaatggcatttacagaaagagtcaacagcagtggcaacagaattaaacaaccaccatgtcgagcaaaaaggcaaagaccaag

SEQ ID NO: 661898 - DNA, 100 bp, Homo sapiens
aaggacaaaactattcaacatgtggaagtattttgttatgccagcacaacttgcagctactgaatgatatggctggccggctctaccatttcagtgaggt

SEQ ID NO: 661899 - DNA, 76 bp, Homo sapiens
gccgccgcgggatccgagtgcgggcgcgggcgcgggcgctcccggcgagccacgaaccttctgaggaaaggaggcc

SEQ ID NO: 661900 - DNA, 75 bp, Homo sapiens
ggagatgatcctggcggattttcagattacatgaagcagatgacatttgaagcccaagcctttttagaagctgtg

SEQ ID NO: 661901 - DNA, 95 bp, Homo sapiens
atattgtgagtgcatctgaaagtgggttacattgattacccacctagtacaacatcttacgggaagagcatagtatttcctagaggaatatgaac

SEQ ID NO: 661902 - DNA, 129 bp, Homo sapiens
cgatcaaagtctttaccatcacctcatccagttcgctattttgataactcaagtttaggcctttgtccaggcttttgcaagagaaggtgccaaagtcatagccacagacattaatgagtccaaacttca

SEQ ID NO: 661903 - DNA, 50 bp, Homo sapiens
gtcaacttcctcttcagtcatcagtggaggtggggaagacagggctccag

SEQ ID NO: 661904 - DNA, 102 bp, Homo sapiens
ggattgcggtcatggacaaggaaggcaatgtcctgggtcattccagaattgctgggacaaaggttcctcatgccatgcacctgctgtcacccagcatgcacc

SEQ ID NO: 661905 - DNA, 82 bp, Homo sapiens
agaggatctgggtaaaagtagagaaggatcaaggacggatgatgaagtagtacagagccacataaagaagatccctaatagt

SEQ ID NO: 661906 - DNA, 82 bp, Homo sapiens
gaaaaattacagcacatctcagtgaatttgcaagtggaaagatcgtcctacttggagtaccaaaaagtaatgagagaaatag

SEQ ID NO: 661907 - DNA, 100 bp, Homo sapiens
ctcaaggtattcccggatgcaatggaaccaagggttatacaattccattagacaaacgtctggctgctgatggaagaggactacagacagtacacataaa

SEQ ID NO: 661908 - DNA, 100 bp, Homo sapiens
atccttacccgacctcagatgctcccttctgctcctggtgtgagcgccactttgaagggcatccaacccgcggctatccatgtggaatcgctttcagtcc

SEQ ID NO: 661909 - DNA, 75 bp, Homo sapiens
agattccagaaaaattacagcacatctcagtgaatttgcaagtgtggcctattctgggccagcttttcttttcct

SEQ ID NO: 661910 - DNA, 80 bp, Homo sapiens
ttccgcaggactacttccccgaggagaggcagatgcgaaccagaacaatgggacctcctctcaggacacagcggtgactg

SEQ ID NO: 661911 - DNA, 98 bp, Homo sapiens
attgagcttgggtcaggacaattccatttggggaccagagatggacggtcactcagcctatggagagagttaattgttaaatccagtatggccacagg

SEQ ID NO: 661912 - DNA, 100 bp, Homo sapiens
aacaaacgcgccgactacagaggctggacgtaagcttagcggtggcgcgcgtgcgcagcgccggcccgaggttatcctaccttgcggatagagaagaacg

SEQ ID NO: 661913 - DNA, 95 bp, Homo sapiens
tcctgtctctggaggtgcgaaaacgtagacgacggagtagcagattgagggcaatgaggccaaaatacccaggaagtgggaaaactcttgccttt

SEQ ID NO: 661914 - DNA, 100 bp, Homo sapiens
caacagaggactcaacatatttgcagtagaagtgggacccaaatctacaatggacaggcgacactaacaggtgaagatctcgggagaccatgactaagaa

SEQ ID NO: 661915 - DNA, 74 bp, Homo sapiens
gaatcttgtaccagactccagactccctggtctactggaccatcgcctgtgtctgctcccagttttcgagagga

SEQ ID NO: 661916 - DNA, 75 bp, Homo sapiens
gtcttgctcggccgatgaagtgcagaggtttttttctggtgtgatccctcacatccacaaatctctgattggaaa

SEQ ID NO: 661917 - DNA, 99 bp, Homo sapiens
ctcggagaaacaggcgccgcgggctccgcgcccggccggacccgggcccgagaataccctctaccatctgctttggtcagggtgccgctcgaggattta

SEQ ID NO: 661918 - DNA, 83 bp, Homo sapiens
ctctgttcgtcaggaacgtggccgacgacaccagggtcagcgccaaactggaggggaatgaaacactaaaagttgtagaactc

SEQ ID NO: 661919 - DNA, 82 bp, Homo sapiens
gggagagtttcgagaagcagccgcgctgcgccttccacactgtgcgctaacttgggaatcagtgaaacgtacaaccaggaaa

SEQ ID NO: 661920 - DNA, 100 bp, Homo sapiens
cggctctcgtcagcctcccgccggccgtctccttaacaccgaacaccagctggagataagatgggtagactgctacttcccttttacacatccttccttt

SEQ ID NO: 661921 - DNA, 99 bp, Homo sapiens
acttgtgaagtaacagaattaaccagagaaggtgaaacgatcatcgagctaaaatatcgtgttgatggagatcttataacaatttttgatagttctgac

SEQ ID NO: 661922 - DNA, 99 bp, Homo sapiens
atcatggatcccaacattgttggcagtgagcattacgatgttgcccgtggggtgcaaaagatcctgcaggttcaagcgattctcctgcttcagcctccg

SEQ ID NO: 661923 - DNA, 100 bp, Homo sapiens
gcatcattggtgtctgtgggctctttgctgggcagtggatcaatcttcctgtcctacaactgacaaaggatcccctaaagacccctggaaggctggacca

SEQ ID NO: 661924 - DNA, 75 bp, Homo sapiens
ccacagtgggggtgtgcaaacccgagagaactgggcatctctcgggacaactggcacaagcgccgcaaaaccggg

SEQ ID NO: 661925 - DNA, 50 bp, Homo sapiens
cacagagagatggagagagacctagttagtgggttgtcttctggcctcag

SEQ ID NO: 661926 - DNA, 83 bp, Homo sapiens
cggcactgccgacctccgggagcagcgcaggaatactcccccagttgcaagaggcgcaggaccgtggaagacttcaacaaatt

SEQ ID NO: 661927 - DNA, 100 bp, Homo sapiens
caggagtcctgtgcctctgtgtctctgttttacctcaatcatatatccacacaagtgcttctcttgacatttctcgaaaatgggagaagaagaataaaat

SEQ ID NO: 661928 - DNA, 83 bp, Homo sapiens
tgggccgccagcctcggcaccgtcctttcctttctccctcgcgttaggctcttgtcaggatggtgaagctgttcatcggaaac

SEQ ID NO: 661929 - DNA, 75 bp, Homo sapiens
ccctgaagaagtgtgagcatgacccccatgtgctcctggccgtggccaaaaaccgaccagagggcaaagtgttgg

SEQ ID NO: 661930 - DNA, 125 bp, Homo sapiens
gtagctcacgcgatagaaacgtgttcgctgcccagaagaagggaaggcgcgagtgaggaaaggaggtactgtaggctttgttgggccaggagatggttttgcagcagcagaagactatgaactgg

SEQ ID NO: 661931 - DNA, 82 bp, Homo sapiens
gaggagctgtgcagccgcgaggaggcgcgggaggtgttcgagaacgaccccgagacggtcactatcatatgacaaaggcttt

SEQ ID NO: 661932 - DNA, 101 bp, Homo sapiens
cacataagaggaaaggatcgccatgtgacacactggcatcaagaaaaagttggtgattcaaggaaagcacattgcaatgcattatagcaatcccagaccta

SEQ ID NO: 661933 - DNA, 98 bp, Homo sapiens
tctctaggaatttcactactctaggtggaagcagggaaaggcctggagatgaggaagctggttctctcggggttcttggccagcgaagagatctacat

SEQ ID NO: 661934 - DNA, 74 bp, Homo sapiens
agccacatactatccgtttgttcaggaaccaccagtgacagacggggatctgatgagcttctttcttctggcat

SEQ ID NO: 661935 - DNA, 100 bp, Homo sapiens
tgcggtgagcaaggcctgcggaaacatgttcggcctcatgcacgggacctgcccggagacttcagatttacccggacgaaagccattactttaccagctc

SEQ ID NO: 661936 - DNA, 75 bp, Homo sapiens
gtcagtcttaagtttcagcaacaccagcaaacagtggatagaatatgtaacggtgactccagagggattccggta

SEQ ID NO: 661937 - DNA, 100 bp, Homo sapiens
atcattctcttcactcgagagatgaggacactgaaattcagagaggggaagtgatttgcctcagcttgtacttatgactatgaatatgatgaaaatggtg

SEQ ID NO: 661938 - DNA, 82 bp, Homo sapiens
caggaagcccttccgcggaccgaaagtttttcagaagaagtgaagtcaagatgaagaaccatttgcttttctggggagtcct

SEQ ID NO: 661939 - DNA, 100 bp, Homo sapiens
cagaaaccatgtgaaaaggcaccttgggatgagggaatacaagtgtcatgtctgtgggcagacatctggtccctgggcataacagctattgaacttgcaa

SEQ ID NO: 661940 - DNA, 100 bp, Homo sapiens
acgtgcatgaaccaaacccacttcgttcaagacaggtgtttaagcttgcaaagcctcattccttttgttcagctgccccctagtgactccgtgtgtgaag

SEQ ID NO: 661941 - DNA, 75 bp, Homo sapiens
ggacaccgtgacttcccggacgctgggaaatggcctgtttaaagaagaaaacccgtatgctagatttgaaaacaa

SEQ ID NO: 661942 - DNA, 100 bp, Homo sapiens
ggcatatccaggcatgctgtgctctaactggcgaggggtaaccaaggagcagtgaacagcagctactacagtagtggaagccgtgcatctatgggcgtga

SEQ ID NO: 661943 - DNA, 90 bp, Homo sapiens
gtcccgggctcgcgcaggacgcagaagggcagtggagccaggatctctctaggagctgacactcgaaccttcacgacccattcggatttt

SEQ ID NO: 661944 - DNA, 74 bp, Homo sapiens
ctgaagttgccaggcttcccaacattcttgtctgtggcctactctgtgtatgatgaagacattgggtactgtca

SEQ ID NO: 661945 - DNA, 100 bp, Homo sapiens
aggcatcagtgaggtgctggctcggaggcacatgaaagtggctttttttggccgtgctcctgcgggaagaagtgtcgcggctccaggaggaagttcacct

SEQ ID NO: 661946 - DNA, 100 bp, Homo sapiens
ggcatggaggcttcgcgctgccggctcagtcccagcggcgacagacaatgcagatcttcgtgaagactctgactggtaagaccatcaccctcgaggttga

SEQ ID NO: 661947 - DNA, 75 bp, Homo sapiens
taaagcagcctagcactagaaggtatgtctccctgcaacacagctgttgtacctcaggggtggtctgtggaagcc

SEQ ID NO: 661948 - DNA, 88 bp, Homo sapiens
taccagtcccttccccacctccacgcccctccgcagattacaggcccaaaaactgcgactggcatacacaaggagctctcattatggt

SEQ ID NO: 661949 - DNA, 100 bp, Homo sapiens
gcacagcgccgcgtccgccgccgcggtggcagtcagcagccggcagcagcagcgggaagtcctggctgagcaaggttggaagccctagttctcgcattga

SEQ ID NO: 661950 - DNA, 98 bp, Homo sapiens
gggcgcgtttaagagctgcgggccgggtgcggacggcggaggcggcgggactggtccctggctaactatatgtcagaaagcatcagcttttctcgatg

SEQ ID NO: 661951 - DNA, 50 bp, Homo sapiens
atatggacagggatatgcagactacagtgatgcggaaaacgccatgcggt

SEQ ID NO: 661952 - DNA, 75 bp, Homo sapiens
agccgatccagcctgcggagcctgtggggcaggtaaatctcacctggctatcgtgcagcgggtaaacaatgaggg

SEQ ID NO: 661953 - DNA, 82 bp, Homo sapiens
agatgagaagaggttgttgttggagaagcaggctggcggaaacccttgggggatatgagactttctactcggaatatcctga

SEQ ID NO: 661954 - DNA, 100 bp, Homo sapiens
cagccatgcttcagtgcgcaggaagtggggcagctgcgggcgctgcgtgccgtgttccggagccagcagcagattggaaacctggaagattactaccatt

SEQ ID NO: 661955 - DNA, 100 bp, Homo sapiens
cagcggcatacagaatgcctatgaccggcgtcgagaatttcaactggcaacgtgttggaccttccggagcttctcagaagacagagggttttcttttgag

SEQ ID NO: 661956 - DNA, 100 bp, Homo sapiens
caaactggaacaagcccaaaatgaactgagtgcctggaagtttacgcctgatagctaatttcttgagatagaggacagagaagatgactcgttcccatag

SEQ ID NO: 661957 - DNA, 60 bp, Homo sapiens
ccggggctaatgttgacaacaggctcgaggacatgtattcctctgagaaaccttggacag

SEQ ID NO: 661958 - DNA, 83 bp, Homo sapiens
caagtggctgcggccgtcgcccaggagtcatcggacgccagaatctggttaaataggattgcgaatcaggtggccattcagcg

SEQ ID NO: 661959 - DNA, 75 bp, Homo sapiens
aggccgcggcatgggcggcgctggccgaggtctggtgaagctgggggttcactgcgtcacctgccagaaggtggc

SEQ ID NO: 661960 - DNA, 90 bp, Homo sapiens
ggggacgctctcagctctcggcgcacggcccagtgtgccggtccaacaaaagcccttgggtctgtttgacttgttcaagtgtccactgtg

SEQ ID NO: 661961 - DNA, 100 bp, Homo sapiens
gcacggaccaattcgggaacaaatactactacatcccgcagtacaagaactggagaggtgctcctgatccaacagcaggtgctagtatagatgatgaaaa

SEQ ID NO: 661962 - DNA, 100 bp, Homo sapiens
gaaagatttgtcaggagttcagaaggtcgtactgcggaagggcgtacgcgatcgcgcggggacagcgctactacggctttggtcgcacagtgtacccgga

SEQ ID NO: 661963 - DNA, 99 bp, Homo sapiens
tttcaaccacattgccaagttatgcagccttaaacgacttgttctctatcgaacaaaagtagaggtggagtaactaatacggcacaatatcagaacagg

SEQ ID NO: 661964 - DNA, 83 bp, Homo sapiens
ggacttggcttccctcaagtctatccgagagtttgcagcaaagatcattgaagcattggagaaaccaatgtagaaagaaaggc

SEQ ID NO: 661965 - DNA, 100 bp, Homo sapiens
ctcatagacaagtttgtacatccaaaatacctcaccaccaaggagcagtttcaccaattcctggaagccaaagggcaggagaagacttgccgggaaaccg

SEQ ID NO: 661966 - DNA, 82 bp, Homo sapiens
ctcatttggacccagactccagatcgggagacaatgcagatcttcgtgaagactctgactggtaagaccatcaccctcgagg

SEQ ID NO: 661967 - DNA, 73 bp, Homo sapiens
ggatacctatgagtgcacctgtcaagtcgggtttacaggtctggcggcttctctgttgacaactcagctggtt

SEQ ID NO: 661968 - DNA, 100 bp, Homo sapiens
cctgctgcacccacgaatctgcccacccctcctgtaacccagcctgtttcacttcttgccgctcctgacatcactggccataaacggagtgagaacaaga

SEQ ID NO: 661969 - DNA, 90 bp, Homo sapiens
aactgactttgcagccacggagaggtcccgtggctgtcatcagtggtgaggaggactcagccagcccactgcaccacatcaaccacggca

SEQ ID NO: 661970 - DNA, 83 bp, Homo sapiens
atttcatctgtctgtgggaattgtaagcaaggaattcttttagttggacccccagggactggaaagacacttcttgcccgagc

SEQ ID NO: 661971 - DNA, 75 bp, Homo sapiens
agcaggactctgggtggctccactgtctaagacaacagcccggagacgcgggctaaagtgaagtttgtccaggac

SEQ ID NO: 661972 - DNA, 101 bp, Homo sapiens
cacaaataacaggacctccagaccgatgtcaacatgctgcagaaattattacagaccttcttcgaagtgttcaggtctatgttaacaatgaatgggcaacc

SEQ ID NO: 661973 - DNA, 75 bp, Homo sapiens
gacgaagatggggagaaggaagcgagactcatacgcaacctcaatggctgctccagttacagcaccacccggccg

SEQ ID NO: 661974 - DNA, 119 bp, Homo sapiens
ccgagtctcaatatctgtcttcggtggactccttcggcagtccacccaccgccgccgcctcccaggtcgcctgcgaggccgctggccaggcctgagcctctgccaccatggccattgtg

SEQ ID NO: 661975 - DNA, 100 bp, Homo sapiens
ctcaggcctttagtgatgatgagttttgcggcctccaggtggtggatccaatttttcattaggttttgatgaaccaacagaacaacctgtgaggaagaac

SEQ ID NO: 661976 - DNA, 50 bp, Homo sapiens
gggaaccctggtcaccgtctcctcagatggcaggatggtggctggcaaag

SEQ ID NO: 661977 - DNA, 95 bp, Homo sapiens
cctagaagccgtgacccagggccatggcgcttacctgatgagtcaggatgctccggtatctttcagatgaaggcattgaagcttgcacaagctct

SEQ ID NO: 661978 - DNA, 83 bp, Homo sapiens
gcagctgcctcagttcttagcgcagggcgccatgttttggaagtttgacctgcacacaagctcgcacctggacacgctgctgg

SEQ ID NO: 661979 - DNA, 76 bp, Homo sapiens
cagatcccaaacaactggcagaatttgctagatctcacattcttgaaggtggcattgaagagcactaagatcggaa

SEQ ID NO: 661980 - DNA, 100 bp, Homo sapiens
ctccagagctcaaagtcttctaccagtcagacatccccacggggaggccgggccccacgtgcttccagggcttcctcagccgccgcctcaagggctccat

SEQ ID NO: 661981 - DNA, 90 bp, Homo sapiens
aagaaaatggaccagtttgttcgttacgagcattttctgcattagcaaatatcgacctggctttagaacaaggagatgcactggccttgt

SEQ ID NO: 661982 - DNA, 75 bp, Homo sapiens
tgtaaatgtcagtggaaaggagagctaccatcactaaggggctttgttatgcacctaaagccatattggaagctc

SEQ ID NO: 661983 - DNA, 98 bp, Homo sapiens
agacagcggtgacaggagcagcggccgggagcccttagggaggcaggccaccgaggtccgtatctgccctgtggaattcaaccccaacttcgtggcgc

SEQ ID NO: 661984 - DNA, 75 bp, Homo sapiens
gtgtggtccaatgtagtgatgaagaatggcttctcggccggcactgagtacatggacctgcagaatgacctaggc

SEQ ID NO: 661985 - DNA, 50 bp, Homo sapiens
agtctcccacgtagctgggattacaggctggagtgctatggcatgatctt

SEQ ID NO: 661986 - DNA, 75 bp, Homo sapiens
cgggaactgctgacgcttgatgagaaggacccacggcgtctgttcgaagagtccaccctgcacctggtgttgcgc

SEQ ID NO: 661987 - DNA, 92 bp, Homo sapiens
cgtcaagtacaccatgcacaaggtcttccagtttctgaacctagacaatgcagatcttcgtgaagactctgactggtaagaccatcaccctc

SEQ ID NO: 661988 - DNA, 82 bp, Homo sapiens
atcagaggcaccccagacacaattgtcactgctgttccaagggcacacgcagagggatttggaattcctggagagttgcctt

SEQ ID NO: 661989 - DNA, 80 bp, Homo sapiens
gaaacagcgtatcactgagaccgagtcgccttatcaggaatcattgcaatttagagatgtggctgtagaattctctctgg

SEQ ID NO: 661990 - DNA, 51 bp, Homo sapiens
atgggatccagctgttagtcggagatcatgatgcagccgtccttttggatt

SEQ ID NO: 661991 - DNA, 75 bp, Homo sapiens
attctgtctatccagctgcttcaggatgatggggaacatgacttcgcatatcatttaagtggatggttcgagctt

SEQ ID NO: 661992 - DNA, 83 bp, Homo sapiens
cagctctcagccggcattgcacatcctgaccaccttgcaagagccacatgacaaggcatcacgttgggtggtttccatttaga

SEQ ID NO: 661993 - DNA, 75 bp, Homo sapiens
tagaactcagttgtgcgttgcggccagtcgccactgctgtttataaaagtgccagcaagcgcaaagcccacattc

SEQ ID NO: 661994 - DNA, 80 bp, Homo sapiens
atttattattatccgtcatgccacagcttgaattcaaactaaagggcttccgttacaagatgaggtctgtgtatgctcac

SEQ ID NO: 661995 - DNA, 100 bp, Homo sapiens
gctcacctggcggtgcccgaggagtagtcgctggagtccgcgcctccctggaggcggccttagcaacatgctgttccagtgctccctacctgacaccaca

SEQ ID NO: 661996 - DNA, 83 bp, Homo sapiens
cgaggccgtcggccgccgtcagcgagggcgccgagcaacttcgatcccggcctgtgattaatattcagaaaaccatcacagta

SEQ ID NO: 661997 - DNA, 82 bp, Homo sapiens
gcaaggacagcgcgaggtccgcgcagcccagcgcagccatgtgcaatggatgagcttcatagtctggatccaagaaggcaag

SEQ ID NO: 661998 - DNA, 100 bp, Homo sapiens
ggaaattgatgatattgtgagagccagtgaatttctgagttttgcagatatcctcagtggtgactggaatgtagtcaaaccacacactccattaataagg

SEQ ID NO: 661999 - DNA, 100 bp, Homo sapiens
ggggcaatgaggttgggaaaacctactggaataggatcttcatacaaggaagatgatccctatgatcttgaagatgtttctgcacagaaatgagggaaat

SEQ ID NO: 662000 - DNA, 101 bp, Homo sapiens
ggcagacccacggttcattggattttgcattcagaaaggagcagactgtggagcaaagctatatgccgctatcctctgggcatgtcaggaggccagattcc

SEQ ID NO: 662001 - DNA, 74 bp, Homo sapiens
cggatcattctagagctttaacaactattggatgattatccgaaatgtttcattgtgggagcagacaatgtggg

SEQ ID NO: 662002 - DNA, 100 bp, Homo sapiens
gaatgtttgagcgaattcctgatatagttttatggccaattttctggatatgccgcagaaggatccgtgccagaagcaagcctgtgagatacagaaatgt

SEQ ID NO: 662003 - DNA, 100 bp, Homo sapiens
cgaagaggttcagtgcgaaggcaacagcttccataaatcctgcttcctgtgcactgccccagagcacatcagctatgtgccccagctctcaaacgacacc

SEQ ID NO: 662004 - DNA, 75 bp, Homo sapiens
gaaatactaagggtgccttttaggagaaataaagaggagtctactcttcatcttgtgttgagacttcgtggtggt

SEQ ID NO: 662005 - DNA, 90 bp, Homo sapiens
cggagccggcgctgagaggggctgcggccggagcgggcggctgagacaaaggcgacggataactgggatgacgatgatgatgaaaaaaaa

SEQ ID NO: 662006 - DNA, 51 bp, Homo sapiens
ttgtggatcgctgtgatcgtcacttgtgagaaggcaaccaaagtgcaggac

SEQ ID NO: 662007 - DNA, 100 bp, Homo sapiens
ccgggcgggagcccctcggccagcgggacctggacttcaccatcgacctggacttcaagggccagctgtgcgagctgtcctgctccaccgactaccggat

SEQ ID NO: 662008 - DNA, 83 bp, Homo sapiens
ggagcgcggtccctgtattggtctcctgctcctagaggtatggcctcacaagtcttggtctacccaccatatgtttatcaaac

SEQ ID NO: 662009 - DNA, 88 bp, Homo sapiens
acacagaagttctcagggggctggcgcatgcgtgtctccctggccaggttggatggcaagcatgtggtgtttggcaaagtgaaagaag

SEQ ID NO: 662010 - DNA, 83 bp, Homo sapiens
cgctgactggcccggctgggcaggacaatgcagatcttcgtgaagactctgactggtaagaccatcaccctcgaggttgagcc

SEQ ID NO: 662011 - DNA, 100 bp, Homo sapiens
ggatcagaaacaggccatggagggacaggatccggaggcgccagctcaaccttgatattcactgatggactccaaagaatcattaactcctggtagagaa

SEQ ID NO: 662012 - DNA, 100 bp, Homo sapiens
gctgtattcacctttgtttatgacacgatacaactcaccatcacctttgaagagtcagttggttcacagcagatgaggctcgggacctgattcaacgtta

SEQ ID NO: 662013 - DNA, 50 bp, Homo sapiens
ctcggagatctcctgccacatccaggtcatcccgctcttcctatgtggat

SEQ ID NO: 662014 - DNA, 90 bp, Homo sapiens
gtcggggacggtaaccgggacccggtgtctgctcctgtcgccttcgcctcctaatccctagccactatgaggctgaggggatctggcggt

SEQ ID NO: 662015 - DNA, 82 bp, Homo sapiens
agaggattgtgtctgcttggtgtggagccatgaagaagtcccgggcccagagcccggccagcaggagcagttggtcttcggc

SEQ ID NO: 662016 - DNA, 100 bp, Homo sapiens
cagaggatgaggcgctgatgcttcgggatggacgagttgagtccacgctccatgagaatgctgaacaccatccaaagcagcaaattgagattccttgatt

SEQ ID NO: 662017 - DNA, 100 bp, Homo sapiens
gcaagcactgctatgaagactgagaattgtgtggccaaaacatcgctattgcggttccgaggcagtgggaagagatgcggcccctggacatcgtcgagct

SEQ ID NO: 662018 - DNA, 50 bp, Homo sapiens
ctttccaacacagatgtccaagctgccaaatgcttcctgaaacttggaga

SEQ ID NO: 662019 - DNA, 71 bp, Homo sapiens
gggagaggccacagcccggactccatcgactcccccggctcttagactagctggagtgcagtggcgcagtc

SEQ ID NO: 662020 - DNA, 82 bp, Homo sapiens
ggggcgctgccggcctcgtggaagtccattggaatattaagcccaggagttgctttggggatggctggaagtgcaatgtctt

SEQ ID NO: 662021 - DNA, 96 bp, Homo sapiens
cccataggaagacccacgtccacacctactcctcctcagtacatcgtggcgtttgcagccaaggtgttgacaggccaggtgcacgagctgaaggac

SEQ ID NO: 662022 - DNA, 75 bp, Homo sapiens
acagtgttgctgcaacatagagctgacattaactgtcagaacagctttgctgagccatcaaggtctaatggaagc

SEQ ID NO: 662023 - DNA, 75 bp, Homo sapiens
tcactggggattctgagctttggctactccagtttcccacgacacgaacatggcgctgctctgggggctcctggt

SEQ ID NO: 662024 - DNA, 80 bp, Homo sapiens
tatcaggggtcacagacatttcatggggctccactaacaggctgaagggtatgtgattggcagctgtattaaacacattc

SEQ ID NO: 662025 - DNA, 96 bp, Homo sapiens
gtcctgtttctcagatcgctcacccctgttctcggaaaccatccacgaccctagcatacctggatgtccaggcaagactgggcgaagtttctgagt

SEQ ID NO: 662026 - DNA, 80 bp, Homo sapiens
tcgtgaggcttcatgaagatggcgccagaacgaagaccctactaggcaaggattttttatcaagcagaaatgcatcgaac

SEQ ID NO: 662027 - DNA, 96 bp, Homo sapiens
ctggaagtgcaaggcagggagaccagactggttttggaggtggcccagcatttgggaatagggtttggtggtctggaagcaatgaatagcatggga

SEQ ID NO: 662028 - DNA, 98 bp, Homo sapiens
cgcgcatggcatccccgacctggcccaaaagctccatttctatgaccgctgggctccggactacgaccagagccacctgagctgaagattcccttgag

SEQ ID NO: 662029 - DNA, 82 bp, Homo sapiens
gctttgcgcggcggccccagaccctgctccgggtcgcgtcctgggttgaaaaagatcatctagcaaagccttttttcccagc

SEQ ID NO: 662030 - DNA, 100 bp, Homo sapiens
cccgccgagtcctagcgcctggcctgcgcgccgctgcccgcgccacaggttcagggagcaagtttccgaggttggaaagaagtgacttcactgtttaaca

SEQ ID NO: 662031 - DNA, 90 bp, Homo sapiens
aaagatggaaaaccagttattgaatatcaagaggaggagttgttgcttatggaagtgacagggaaaaatcaggatgaatgcatagtggcc

SEQ ID NO: 662032 - DNA, 144 bp, Homo sapiens
ccgcgagtccagcgtcgccgcagccccccaatgcggccgcgagaagcagcgggggggcaggcgatcgaagtgccggtggtggtgtgcacattgagccccggtatagacagttcccccagctgaccagatcccaggtgttccaga

SEQ ID NO: 662033 - DNA, 80 bp, Homo sapiens
cttgctgccagtggtagcgctcgtctggcggagctggatgctgcagttggagaagaaacttgaacgtgaacttgaggatg

SEQ ID NO: 662034 - DNA, 89 bp, Homo sapiens
ttaacacagtagcagctggaaccatgacaggcatgttgtataaatgtacagactatgaaaatgatgttagacaaaaagcaaattcgagc

SEQ ID NO: 662035 - DNA, 82 bp, Homo sapiens
cgacgcctcagccgcttggggcccgcacggaccctctacttcagtggacatcgagcagctggatccccgcggccggactccc

SEQ ID NO: 662036 - DNA, 75 bp, Homo sapiens
agccgatccagcctgcggagcctgtggggcagtagccggatcgagctgggagatgtgacaccacacaatattaaa

SEQ ID NO: 662037 - DNA, 91 bp, Homo sapiens
agccattgcttttgaagttattaaagtctgttggtgcacaaaaagacacttatactatgaaagagagtctcactctgttgcccaggctgga

SEQ ID NO: 662038 - DNA, 100 bp, Homo sapiens
atggcaagctcaaactgagtctcttccagccgggacagtcaccaaggaatgtcacagcaggtgaacagggatattgtgtcaggcctgaaatacgttcagc

SEQ ID NO: 662039 - DNA, 75 bp, Homo sapiens
gcggctgacagaggggatgcgaggtttggtgcacctcgatttggaggaagtagggcagggcccttatctggaaag

SEQ ID NO: 662040 - DNA, 83 bp, Homo sapiens
ccgcgctgcccgggccgcgaggacgaggcggcgccgccgggctgtggaggaagctcttcgtgggcggtcttgactggagcacg

SEQ ID NO: 662041 - DNA, 83 bp, Homo sapiens
accatgtggtttggggagtctgaggccaatgtcagagaaatctttgacaaggaccctgatgctcccataagacagaaaatgcc

SEQ ID NO: 662042 - DNA, 100 bp, Homo sapiens
gagaggacgtttccaactcaaaatatggtgtaagatacttcttcaagattggacagctggggaccttcttctgattaaccttaaaccaacttgtagccat

SEQ ID NO: 662043 - DNA, 100 bp, Homo sapiens
aagatcctagccgacaaggaggtgaagcggccccagcactcccagctgcgcagggcctgccaggtggcgctcgcttggctgaagaggaaataaaaacaga

SEQ ID NO: 662044 - DNA, 90 bp, Homo sapiens
gcatgccgcaatggacatctccagtcagccgaatctgtgacctctctgccatcccaaaacaatggaactaccagccctgacccctttgag

SEQ ID NO: 662045 - DNA, 98 bp, Homo sapiens
taccattgctgcattcttgggggaaatgaagactgacctgaacttattattggagtgtctaaagtatcaaatggacaatgctttttcacaaaaggaag

SEQ ID NO: 662046 - DNA, 100 bp, Homo sapiens
aagatcaaaagaattcgaagggagttggtaaacgctggatcaggagaaggtctggggaaaataatccagagatttccacagaaggactgggatgatacac

SEQ ID NO: 662047 - DNA, 95 bp, Homo sapiens
tgtgactgcagatctcactgctgaaccagaaatgagtggataattactgtaccttcctcatggaaaaagttttatttaaagtgttatttctcatt

SEQ ID NO: 662048 - DNA, 105 bp, Homo sapiens
gcgccgacccgcagcgcgagaagctcaagcaggagcttttcgccttcaacaaggctataactactcctgccatggcggtcagtcatatcatgttggaatcatata

SEQ ID NO: 662049 - DNA, 75 bp, Homo sapiens
tcatctaaaggaggttttaaacagtataacaggtgaagtggatcctaaagagaggatagcacgccaacgaaaatt

SEQ ID NO: 662050 - DNA, 100 bp, Homo sapiens
aagaaaaatgcccagtctgggatggctcaggaaatgttatcagcaaattgatagaagatacctactggagcaggatttcccaggcatgaggattggtccg

SEQ ID NO: 662051 - DNA, 90 bp, Homo sapiens
gtgcgacggtgagagggactgcccagacggatctgacgaggcccctgagatttgccgtcagtgcccagataccagagtccggaaggccgc

SEQ ID NO: 662052 - DNA, 75 bp, Homo sapiens
aacaggagccgctcttaggcgacacacctggaagcaggaggctgatccgatagagtaatacctaattatatcacc

SEQ ID NO: 662053 - DNA, 87 bp, Homo sapiens
tcctggtagacctcggtccaaacagaaggccaatgatgaggccaatcagagtgatacaagtgtctccttgtcagaacccaagagcaa

SEQ ID NO: 662054 - DNA, 100 bp, Homo sapiens
cgattccacaactacatcctcccgcacctgcggggcgaggaccgcgtctgccactgcaactgtggccggtcgcgtctccttcttcacctcggggtccgag

SEQ ID NO: 662055 - DNA, 100 bp, Homo sapiens
ggatttcctccagggagaatgtgacctaatttatgacaaatacgtagagctcagccattgccgaaatctaaaaaaacttgtagcaaaggcagtaaaaagg

SEQ ID NO: 662056 - DNA, 88 bp, Homo sapiens
agcagaggggccactgctgggccctgaggctgcaccaagtggcgaaggagccggctccaaggtcaccaggcagcagggattggaaacc

SEQ ID NO: 662057 - DNA, 79 bp, Homo sapiens
gaacccaggggccgaagcccacccagggagttgatgtggagacctttggcgacttggcctttggcgacatcttcctcca

SEQ ID NO: 662058 - DNA, 100 bp, Homo sapiens
attggagcaagggaaagaaccctggctggggaaaagggaagtgaaaagagatctgttttcaggacactgcccatctctaagataagaacctggaaagggg

SEQ ID NO: 662059 - DNA, 90 bp, Homo sapiens
gtcgcccaggagtcatcggacgccagaatctgttagtgattggcaactttggcctcagctggaatcagcaagtaactcagatggccctct

SEQ ID NO: 662060 - DNA, 100 bp, Homo sapiens
tcgacggcgagcccttgggccgcgtctcctttgagatggtggccctattgacgggcaagttcagcaacatcgtggataagtttgtgattgtagactgcag

SEQ ID NO: 662061 - DNA, 101 bp, Homo sapiens
aaattaccaactgctttcctttccctcagcacacagaggatgatgctgactttgatgaagacttaattcagtgcacaaatgagatgaatgtgaacatccca

SEQ ID NO: 662062 - DNA, 97 bp, Homo sapiens
acacctacagccccgacgaacatttctgggtgacactcaacaggattcccgcaatggactcttgtggctgacttcactcaccatgctcacactgcct

SEQ ID NO: 662063 - DNA, 75 bp, Homo sapiens
cgtggtcacgagcatcactgccagcacccacctcaccgtcatcggtcccaggtgtgacaccttcagcaggtctca

SEQ ID NO: 662064 - DNA, 100 bp, Homo sapiens
gtccacccacatgacagcaggagcgatggccgggatcctggagcactcggtcatgtacccggtggactcggtgaagttcgagggggatgtcattgacctc

SEQ ID NO: 662065 - DNA, 100 bp, Homo sapiens
gagacgtgaagcccgtggtgtccagcacgcctttggtggacttcttgatgcagctggaagattacacgcctacggtttctctgtttaaaaaacaaaagta

SEQ ID NO: 662066 - DNA, 83 bp, Homo sapiens
gggcgcttcgccccgggccccccagcatgaagaccccggcggacacagctctccctgtccagccgcctgcagctgaccctgta

SEQ ID NO: 662067 - DNA, 50 bp, Homo sapiens
gggaaaacacttcaaatgctgaggttcctgattatgtcactgtaataaag

SEQ ID NO: 662068 - DNA, 100 bp, Homo sapiens
ccctggctgcgtgcacagcgccttgttccagcagggcctgatccagtttgtacaatgacgacagaaacctgcttcgaattagagagaaggaaagacgcaa

SEQ ID NO: 662069 - DNA, 101 bp, Homo sapiens
aagagagaacagtggaagaaactgcggagggaaagctgggaacgagagcatgcagcagattggaataaatatgatgaccgattgatgaaagcagcagaaag

SEQ ID NO: 662070 - DNA, 100 bp, Homo sapiens
ctaacagctggagagaacagttcattgaagctatcactgtcagtgctgaacattgagctcaaggtggaagtagaaagtctgaagcgggaactccaggaga

SEQ ID NO: 662071 - DNA, 83 bp, Homo sapiens
cagacagcggcatacagaatgcctatgaccggcgtcgagaatttcaactgacaatgcagatcttcgtgaagactctgactggt

SEQ ID NO: 662072 - DNA, 75 bp, Homo sapiens
gaagctgccaaagccttagacaaggtggcatggagaaatcgttgtcaaaacagagatgtccgtcagtatgttcaa

SEQ ID NO: 662073 - DNA, 96 bp, Homo sapiens
cggcttaaatgatgtattttgtgatcgcagcgatgaaagttcctccgtgtcacaaagcagtacctgccccacgtggcgcgcctctgtctgatcagc

SEQ ID NO: 662074 - DNA, 98 bp, Homo sapiens
cgaccggctacgcgccgtggacacagacggggtggagcccatggaatcggtcctggaggacagcgcatttgtagccatgaagtgccatcttgcccaat

SEQ ID NO: 662075 - DNA, 100 bp, Homo sapiens
tccggcgagagactttgtcagctcccgcacagtaacttcttggcacagctgaagatcatggactacagcctgctggtgggcatccacgacgtggaccggg

SEQ ID NO: 662076 - DNA, 87 bp, Homo sapiens
cctcccactgcaagtccaggatactcgatgggaaggccattgtgactatgtggtgattacagttgtcttactactgagtttcctact

SEQ ID NO: 662077 - DNA, 98 bp, Homo sapiens
ggtttcccaacagtgatgtcacaagattgaccacattgatcacagaggaagctggcccagttgcaggtggcctatcaccagctcttccaagaatacga

SEQ ID NO: 662078 - DNA, 100 bp, Homo sapiens
cagctgcacgatgaagacttcctcactagtctggtggccatcagcaagcccaggtctatgtattctaccttgtaaatactgttatttgtatatactgtaa

SEQ ID NO: 662079 - DNA, 101 bp, Homo sapiens
gtgatgagcatgacgcacacaggagagccaggattcatgctctacatccccatagaggctggaccctgtcctgtaccgcaagtgccagggagacgcttctc

SEQ ID NO: 662080 - DNA, 76 bp, Homo sapiens
tttatgaaattattttttgggaaaacacttcaaatgctgaggtcccccccgcctccagccagcctgtgcagacttg

SEQ ID NO: 662081 - DNA, 83 bp, Homo sapiens
tgcttcagagagaggaagccgaaaacaccctgcaatctttcagacagggacccgagtgtatagccctccagagtggatccgct

SEQ ID NO: 662082 - DNA, 80 bp, Homo sapiens
agccggttgctgagccgggagcgctgactggcccggctgggcaggaggctgggaggcggcagaatgcagccagaggaggg

SEQ ID NO: 662083 - DNA, 49 bp, Homo sapiens
tagttttcaaatatatgttctacagggtgtgggccgaagatatgctcat

SEQ ID NO: 662084 - DNA, 98 bp, Homo sapiens
aacactgccaacatcaggaatatttgtgttttggctcatgttgaccatgctacgagtcctcggcggaaatcctgcctcataccccgaggctcacccac

SEQ ID NO: 662085 - DNA, 98 bp, Homo sapiens
aaacacacccacgagaagccattcaagtgttccatgtgcgattacgccagtgtagaagtatatttgaaggctcccatgattctgaatggagtctgtgt

SEQ ID NO: 662086 - DNA, 106 bp, Homo sapiens
ggcggccaagcagccaaccatgctcaacttcggtgcctctctccagcagactgcggtgtcgtgaaaactacccctaaaagccaaaatgggaaaggaaaagactcat

SEQ ID NO: 662087 - DNA, 58 bp, Homo sapiens
gcagctactgctgcatcagaagaaatgatttggacacctcccacactgagtccccaac

SEQ ID NO: 662088 - DNA, 50 bp, Homo sapiens
atgaaggatgtacaaacatccacaccagttcctctgtgacgagggtgcag

SEQ ID NO: 662089 - DNA, 75 bp, Homo sapiens
gtattcaggtgggagtgacacgattttccaggccccaggcagtccttgaaagagaagcttgaaaagtcaagtttg

SEQ ID NO: 662090 - DNA, 100 bp, Homo sapiens
caggcttccctatgaactgcagaaaatgcctaatggaagtgcaggagttaagtttcctgcctgcgatggttcacataataaacacaatgaattgacagga

SEQ ID NO: 662091 - DNA, 100 bp, Homo sapiens
agttgacacacctcatggtatatttgcagccagtactctatatgaacaatccgtctggatcacggatgtaggaagtggccatcatctctcagcaaggtga

SEQ ID NO: 662092 - DNA, 51 bp, Homo sapiens
gaaacctgctggagtgaggcctggcaattgaaggaacagactaaaaatcgt

SEQ ID NO: 662093 - DNA, 100 bp, Homo sapiens
tacttcctctgtatagagcaactgttgaactcagctgcctgtaggtaaaaagatggcctatcagaaggtccatgcagatcaaagagctccaggacactca

SEQ ID NO: 662094 - DNA, 80 bp, Homo sapiens
gttcgctacacagcaatgcatcgagcttaaagcttttcaagccaggccaagaagctgtgaagtaccagggtcctcgggac

SEQ ID NO: 662095 - DNA, 83 bp, Homo sapiens
gcctgcagcgggagctggacggcgagcgcgagcggcgcgagaaagtggccatggtggaggtgcagctggagagtgaccacgag

SEQ ID NO: 662096 - DNA, 100 bp, Homo sapiens
cttttatgaccaaaactgtgccttgtggaaatgaacttcacaagttcctcatctgggacactgctggtcaggaacgggaaggagctcattgccaagttag

SEQ ID NO: 662097 - DNA, 90 bp, Homo sapiens
cggcacgcacgcggtgcagggtaacatggcggatgcggaaggagatggtaacctgcacctcaatgtgacggcggaggccttcagcccctc

SEQ ID NO: 662098 - DNA, 83 bp, Homo sapiens
ctatacccctgggaagaaggaggacctctacctgaagccaatccagagattaagcctgatcaagatgacaacctcccaaaagc

SEQ ID NO: 662099 - DNA, 82 bp, Homo sapiens
agaagcagcctggcctcatctacaggcatttttgcgagcccttgtggactataccagtgacagtgctgaaaagcgcaggcta

SEQ ID NO: 662100 - DNA, 74 bp, Homo sapiens
ctcttcctcctcctcccgcgacgggcattccagaaagatgaggatatttgctgtctttatattcatgacctact

SEQ ID NO: 662101 - DNA, 100 bp, Homo sapiens
ggagaattggagatggggaccgccctggacatcaagattaaaagagcgaataaagtttatcacgccgggacgcaaacatgcagatctttgtgaagaccct

SEQ ID NO: 662102 - DNA, 100 bp, Homo sapiens
acttttttatccgtggagagcgactcagggacaaaatgggacaggccttcagtatttggcatcacctttacatggagcacaaagatgatgatgatgatga

SEQ ID NO: 662103 - DNA, 51 bp, Homo sapiens
tgctaacagaactggaccttttcgggcattttgtcagtgatgctgatcttt

SEQ ID NO: 662104 - DNA, 90 bp, Homo sapiens
ctggagcagtggagcccaaagacccctggagacatgctctagccggcccggtccttggactgaaagaatgcaccaggggctcggcagtgt

SEQ ID NO: 662105 - DNA, 126 bp, Homo sapiens
ccgggagctggctgtggccttggcacagaagaatgtcaagctctcaacagagcagttcaccaaccgctgcctgctcaagtggctgaagttgtgggacctggtggtgtttggccacgagaggccttc

SEQ ID NO: 662106 - DNA, 100 bp, Homo sapiens
tgctgtacttacagataccacctctcttaatcaggactgactgcattgcacagatgatggatatttacgtatgtttgaaacgaccatcctggatggtgga

SEQ ID NO: 662107 - DNA, 75 bp, Homo sapiens
tctcagcctcgacagtcgccaagtggaccatcgatgaggccacaccatgaggccccagccccaccagaggccccg

SEQ ID NO: 662108 - DNA, 90 bp, Homo sapiens
cctggatgaatgtagagagaaagtacttcaaggaggagatcgggcagttggtgaagcagatgctggatgactttggaccacatcgctaca

SEQ ID NO: 662109 - DNA, 125 bp, Homo sapiens
tgaatcaagaggaatgcacatctgtgaagatgctgtaaaaagattgaaagctgggctatttttggagcattacaagatatacttgggagccgttctgtttcaaaggaatattataatcagacggg

SEQ ID NO: 662110 - DNA, 75 bp, Homo sapiens
aaaggattttgcacttgtgcagaccgggcgagcagagtaagaagcagatggctctgagagattcctctgcgaatc

SEQ ID NO: 662111 - DNA, 87 bp, Homo sapiens
cacggcagctatgagactgctgcgctccccagacgaggaaacctggtctcccggagccagagccaaggagcaataactgaacgttta

SEQ ID NO: 662112 - DNA, 82 bp, Homo sapiens
ctcggcggcgccaccatgtactcgggagccggccccggagatacaactcgtcaacgaatcaaattcagtgatgacagagtat

SEQ ID NO: 662113 - DNA, 80 bp, Homo sapiens
ggactgcagtggtgtgctttggacctgtgtacccacccaaggctaaaggcagagccagtattggtaaaggttttcaaggt

SEQ ID NO: 662114 - DNA, 96 bp, Homo sapiens
ggaagatcctggaggtggatctgaagaacgggctggcagtgatggtgaaagcataggaaactgccccttttcccagaggctcttcatgattctttg

SEQ ID NO: 662115 - DNA, 75 bp, Homo sapiens
ccacagctctattcccatggacccaggagcgatctctctttgagtcggcatggaagaaggagaaggacatcgttt

SEQ ID NO: 662116 - DNA, 75 bp, Homo sapiens
caaaaactctttgagtttcggagaggagtaaagaggcctccggtgtggctgtctctgatggtgtcatcaaggtgt

SEQ ID NO: 662117 - DNA, 83 bp, Homo sapiens
ggacagaccaacctgtcagtgctgcaaggctcagctttcaccccaaaagaccttggatcctgactagtttacataatggggtc

SEQ ID NO: 662118 - DNA, 98 bp, Homo sapiens
aattcctcagtgacagcacagcctgctcaaacttcatatttaaggacgtggtgggtcctctggtgcgaaattccggatttccttgggtcttccggtag

SEQ ID NO: 662119 - DNA, 50 bp, Homo sapiens
cctccccagccatgcagaactctctactgagatgaagaaagaaaaagaat

SEQ ID NO: 662120 - DNA, 75 bp, Homo sapiens
gtccaggacagtatgtggatgtcacagccaaaacgttcatccacataaaacttatttcacagtagctgaaaaagg

SEQ ID NO: 662121 - DNA, 75 bp, Homo sapiens
attgaatgaaagacccagtgcaaagacatcaccatgaacactagcagaagcaattttggaggtggtggaagctac

SEQ ID NO: 662122 - DNA, 99 bp, Homo sapiens
cgcagaggctactgggggaacaagatcggcaagccccacactgtcccttgcaaggctataatagatgaatttgagcagaagcttcgggcctgtcatacc

SEQ ID NO: 662123 - DNA, 75 bp, Homo sapiens
ggcgcgtctcccctccgccatggttactataacaacagtaccaaggtggctgtgaaaaccctgaagccaggaact

SEQ ID NO: 662124 - DNA, 99 bp, Homo sapiens
gcttgctccctacgatgagaactggttctacacgcgagctgtggatgcctggactttggccttttctcctgattcccagtatctggccacaggaactca

SEQ ID NO: 662125 - DNA, 74 bp, Homo sapiens
gaagtggagcaccgatgatgtgcagatcaatgacatttccctgcaggaacttgtaatagctggcatcgttgaga

SEQ ID NO: 662126 - DNA, 75 bp, Homo sapiens
gattcagaggaggtcgtgggggccgggagtttgcggattttgaatataggtggaatgcagtagccctctgggcct

SEQ ID NO: 662127 - DNA, 100 bp, Homo sapiens
gggaggcagcgcgggatcccagcctcaggcgtgcgcggacggtgtgcgggatctcatctggccaccgcgttctggaagaggcgagagggagagcgtgcgc

SEQ ID NO: 662128 - DNA, 73 bp, Homo sapiens
ggccatctgcgttcctgcaggcttcatctggccctatggtcccctgctcggagcccaagatcctcttctccta

SEQ ID NO: 662129 - DNA, 101 bp, Homo sapiens
ggcctcccgggctccgggaaaactacactggccaggcgcatgtttcctttcttgagcttcaacataaacggactcaatcccactgcccactacaatgtgtt

SEQ ID NO: 662130 - DNA, 100 bp, Homo sapiens
acatcgagggcacgctgggcaagggcaacttcgctgtggtgaagctggggcggcaccggatcaccaagacggaggactcacaccacccggcaagaactgc

SEQ ID NO: 662131 - DNA, 96 bp, Homo sapiens
gcagaatcatgcctggcacacggcactggcagagacgcagaagggaaagtgtccagcgatgagagagccccccaagatgaacccagtggtggagcc

SEQ ID NO: 662132 - DNA, 100 bp, Homo sapiens
aatgggtgaaaaataggaaagatgaaagtcgtgcttttcatgagtgggatgaagatgctgacattgatgaatctgacatgtagactgccaaagtgtatgg

SEQ ID NO: 662133 - DNA, 87 bp, Homo sapiens
tggtcgccgcgtccttggctggcgtatgatgatgtgcctgcagatatggttgcagaagaatcaggtcctggtgcacaaaatagtcca

SEQ ID NO: 662134 - DNA, 100 bp, Homo sapiens
ggaggaagcctgcagccttaagaaataatagtgtaatccttgctgatgaaatgggcctaggaaagaccatccagaccatatcattcctctcctacctgtt

SEQ ID NO: 662135 - DNA, 75 bp, Homo sapiens
tttaccaacagttagtggccagcatcctcctgctgcagctgtaagagctcattttggaggaataatggatgaacc

SEQ ID NO: 662136 - DNA, 83 bp, Homo sapiens
aaataccaggctaccatggtctacaagactctcttcgctctttgcatcttaactgcaggctctgaagggctccaagaagctgg

SEQ ID NO: 662137 - DNA, 112 bp, Homo sapiens
gtttttctccgtgctataaatcagtttgctgaagttctcacaagattcttcatggatcaggcaagctttgaacttcaggatgactacgacaaccatactggaattgatttgg

SEQ ID NO: 662138 - DNA, 98 bp, Homo sapiens
gcgaatttctcgtcggctgtcacagtatcctaatgaaaatcttcacagtgctgttactaaagcctgcctttccaggagttgtggagtgtatggcagct

SEQ ID NO: 662139 - DNA, 96 bp, Homo sapiens
attcgattcaacggggttccggaccgcgctgcgctatggagcaggggcctcacgggagctggatgctcggagcagcaaggcggccctgggggcccc

SEQ ID NO: 662140 - DNA, 97 bp, Homo sapiens
acatcaccaggatacctacagacaggtacgagtgcttccatatccatttacccaccattggcaatttgaaaggaccatccagacccccataggatcc

SEQ ID NO: 662141 - DNA, 75 bp, Homo sapiens
actggagacccttttggctaaactcatccaaacctgtcaacatgttgaagtgacctctgagaaggatgtgcaaac

SEQ ID NO: 662142 - DNA, 75 bp, Homo sapiens
cgggcctacagcagcttcggcggcggcagaggatcagaccaaacattgtctggcttgcactgtaaaactagttag

SEQ ID NO: 662143 - DNA, 75 bp, Homo sapiens
ccatgaagatcctcgacaaacagaaggtggtgaacatcccgtccttcattgtccgcctggattcccagaagcaca

SEQ ID NO: 662144 - DNA, 87 bp, Homo sapiens
ctgcagagctcggaggggcgctgtgtgtacatcacccccatggaggccctggcagagcaggttcaaaatcaaaggaagcccagaagg

SEQ ID NO: 662145 - DNA, 98 bp, Homo sapiens
gaaccccaacaagcggctggagcaccagggcatcaagatcgagttcatcgggcagatcgtcttggccaccatcaacttgcagtcaacacacgagctgc

SEQ ID NO: 662146 - DNA, 75 bp, Homo sapiens
cgcgggaggaggcggcggcggcggtgattgcccacagtgagtatcaaaagtccaaaagaatttccatctttctga

SEQ ID NO: 662147 - DNA, 97 bp, Homo sapiens
tggtgcttcttttcagtgccagtccatccatcacgaccacatttgtcatgatgacagtgacaagaccaaacctggaccacccaaaaagccgaagacc

SEQ ID NO: 662148 - DNA, 100 bp, Homo sapiens
ggccccgcggggcccgagggcaaggagcagagtaagagggaccatctcctcatgaacgtcaaatggtactaccgtcaatctgaggttccagattctgtgt

SEQ ID NO: 662149 - DNA, 83 bp, Homo sapiens
caagcgctcggcgcttggcgctggcgctggccaaggcgattctcattcagattgtggatgcctcgtcagtcatcacttgggat

SEQ ID NO: 662150 - DNA, 75 bp, Homo sapiens
ctgaaacccatgggcaaagtcgtcacctatgctggcagagaggctgatgacatcgtgaactggctgaagaagcgc

SEQ ID NO: 662151 - DNA, 90 bp, Homo sapiens
aacatgtgcttggtgtcgtttttccttgagctgaacgtcttgcaacagtggccgcacgcatagttaaaaggctggccacagagaacctgc

SEQ ID NO: 662152 - DNA, 100 bp, Homo sapiens
acagatctgtctgcctgcaatctacaagtgtcttctacaaatgcttctgggaactggaggacccagttaaccatagggctgtcggattacgagactccag

SEQ ID NO: 662153 - DNA, 121 bp, Homo sapiens
ccgcgcgaccgtctggatccccgcccaggaagcccctctgaagcctcctcgccgccgtttctgagaaggtcctcagccagcagagccacgttccttatgagcaccgtgggtttatttcatt

SEQ ID NO: 662154 - DNA, 50 bp, Homo sapiens
gctgttctagaaacagaggtactaagtggtaagcatccgtggcattcaag

SEQ ID NO: 662155 - DNA, 89 bp, Homo sapiens
gccgaccttgaggctgccgccgcgagtctgccatcgtccaaggaggtggcagctgagatctgtatctgtggacctgaatgttgatccct

SEQ ID NO: 662156 - DNA, 111 bp, Homo sapiens
accagagataattgataacaccctgtaacagctgagactgagcagggggaggaacatttaagctgatggaagtggaagtggaagttgctgtacattggcagcaaggcctcc

SEQ ID NO: 662157 - DNA, 75 bp, Homo sapiens
cttcacttggcaaactcaacaaggcacagagaagttgcccatgactctgtgatccgttttgtccaatgaaccatg

SEQ ID NO: 662158 - DNA, 50 bp, Homo sapiens
cgagctgccctgccctggaagtaatcttagttgtggaaagtaaaaatgta

SEQ ID NO: 662159 - DNA, 75 bp, Homo sapiens
caaatgtcaggccatgaagaagactcccaagacagctgggctgcgaccaatggaaacaaaggacattccagtagt

SEQ ID NO: 662160 - DNA, 101 bp, Homo sapiens
gaagaaggtggggaggaagaggaggaggaagaagaaggtgatgaagaggcaagcctcgaaccaaaggcagctgtgcagaaggagctgtcggacatggatta

SEQ ID NO: 662161 - DNA, 82 bp, Homo sapiens
acgccccgctgccgggggacgtcgggctgggcctggccagtcccccagagcttgggagatccagtccttctgtggaacttct

SEQ ID NO: 662162 - DNA, 100 bp, Homo sapiens
tgaccgagagcgtgaccgagagcgcgaatatcgtcatcgttagaaggacatggatttgattgacatactttggaggcaagatatagatcttggagtaagt

SEQ ID NO: 662163 - DNA, 83 bp, Homo sapiens
aaaaagcggcggccgttggaggtggctgcggcagctgcgccaaatcttaaaggcagaccacgcaaaaagaaaccatgcccaca

SEQ ID NO: 662164 - DNA, 51 bp, Homo sapiens
gacaagttccatcccacctttgagtcaggcccgatgagagaaagggaaagt

SEQ ID NO: 662165 - DNA, 50 bp, Homo sapiens
cggaggtggcagccatctccttctcgggcaccctgcagaagttcgtggat

SEQ ID NO: 662166 - DNA, 75 bp, Homo sapiens
caggatcccagtttcctacaagcgaacaggattctttggaaaatctctctcagccttgtctgcttatcacactgg

SEQ ID NO: 662167 - DNA, 98 bp, Homo sapiens
tgtgtggatcagcagacccccaccatccctaaccggctggctgcagacccgggatcactgagattctgatgaacagaccttctgcccgcaatgccttg

SEQ ID NO: 662168 - DNA, 82 bp, Homo sapiens
caaccattgacgccatgtcgggttattcgagtgaccgagaccgcggccgggaccgagggctcttttccacaatggcccccct

SEQ ID NO: 662169 - DNA, 51 bp, Homo sapiens
cccagaccgaaaaccccagagatcttcagggacatcgcggtggaggaagat

SEQ ID NO: 662170 - DNA, 98 bp, Homo sapiens
ccgggctgcggcgtgtgcgcgcccgccagctgctccggagatacggtgacctcaaagcagaagctctgaattcacctctcatctgacgactgacagct

SEQ ID NO: 662171 - DNA, 82 bp, Homo sapiens
aaggatcatgtctgcgagccaggattcccgggaaatcctcattgacgattcaatttgttgaaggccaatttgtggactccta

SEQ ID NO: 662172 - DNA, 98 bp, Homo sapiens
tgaacttggacttccatgagaagtataatgatttatataagttccagcaggatgatgccaataatgacccacagtggtctgaggaacagctgattgct

SEQ ID NO: 662173 - DNA, 100 bp, Homo sapiens
gagaggatgcagagctgcagttggatgaagaccaggccccgtccccatgcctcggggtgcagtgtgcatttggggcgacgtgtgctgtgaagaacgggca

SEQ ID NO: 662174 - DNA, 100 bp, Homo sapiens
tttagagtccaccagatcatccatgtgagtgaccatgcagcaaaagaaggagggtcctctcagtgattaagctttccagttctcagggaacaatagaaac

SEQ ID NO: 662175 - DNA, 100 bp, Homo sapiens
tgcctctggctcaagcccaggctttggtcaccagtgagctggagaagttccagatacgtcggtaacctttccagagatgtgacagaagctctaattctgc

SEQ ID NO: 662176 - DNA, 74 bp, Homo sapiens
gagacaggaagatggtgcccaggtaaaagtttcatttgatctgaatagtattaaaataaaatacctggatgagg

SEQ ID NO: 662177 - DNA, 50 bp, Homo sapiens
gtttcttttccggccctgggatgtcacggaatggaagttggatacacttt

SEQ ID NO: 662178 - DNA, 88 bp, Homo sapiens
gaggtcgataagctggaactgatggccaggctaccaacgtctttgtgaacatggaggaggacttcatgaagccagtcattagcattgt

SEQ ID NO: 662179 - DNA, 75 bp, Homo sapiens
agccgtgaagcaagtgcagatagatggccttgtgtgatgaatgcagactctgctaccattttggctgtttggatc

SEQ ID NO: 662180 - DNA, 75 bp, Homo sapiens
cagataacattaatggatgttccagtatttaaagctattcaaccagatgaatcacatgcagcccaactacagatt

SEQ ID NO: 662181 - DNA, 100 bp, Homo sapiens
ccagtgggctggggactcacggccgggacactcagggcaggtacatgtcccagagcaagcacacggaggcccgggagctcatgtactcgggagccctgct

SEQ ID NO: 662182 - DNA, 100 bp, Homo sapiens
agcgcgggagcctgggcggcgagccgggtgtgagctgcctgaaaatgcactcggatgccgccgctgtcaagcagccatcagcagggaccctttctacgaa

SEQ ID NO: 662183 - DNA, 75 bp, Homo sapiens
ggaggccgtcaccttcaaggccgtcagacaagacagcccacctgaggatattgaccataaggactcatatctcat

SEQ ID NO: 662184 - DNA, 100 bp, Homo sapiens
aggaatgacaccaaggaagatgtatttgtacaccagatatgggacacagcaggacaggaacggttccagtctctcggtgtggccttctacagaggtgcag

SEQ ID NO: 662185 - DNA, 75 bp, Homo sapiens
gccgcccgggcggcgggatccactgtccggcagaggagaatacttatctctggcgcacatcactatatttggctg

SEQ ID NO: 662186 - DNA, 90 bp, Homo sapiens
ggaattggagtcagcagaactgaaataggtgctggagaatctggtaaaagcaccattgtgaagcagatgaggatcctgcatgttaatggg

SEQ ID NO: 662187 - DNA, 50 bp, Homo sapiens
ctttgaaaacggcgttagaatggctcaggcaaagcaacgagctggcagag

SEQ ID NO: 662188 - DNA, 75 bp, Homo sapiens
tatgagttggggcgcccagctgccaacaccaaggaagccttggctcaagctttctggattgacatcaagcgcatg

SEQ ID NO: 662189 - DNA, 99 bp, Homo sapiens
ccgggacggggcgcgaagccggaggctccgggacgtggatacagtttggtgccctggttgtcagatgttggaaagcagtaggacggaacatactcttcg

SEQ ID NO: 662190 - DNA, 100 bp, Homo sapiens
acctgcatgtgaagtctacagaacccaaagccgcccctcagcccgcatctccttggaaacaatgccatctttgaatgtgagagataaacctagtttcagc

SEQ ID NO: 662191 - DNA, 75 bp, Homo sapiens
gcatcatgtttggcagctgagtattggagccaggagcctgccatgagaaatcgtgagatcctggaaaatgtgtta

SEQ ID NO: 662192 - DNA, 100 bp, Homo sapiens
aagcttttgatcaccattggctgggaaggaaaaacagaatcagctgttccctgcgaaaggtaaaataccatgaagattttgaaaaaacaaaggggagagg

SEQ ID NO: 662193 - DNA, 75 bp, Homo sapiens
agatgccccttttaaactccctcttcaaaactcatctcctgggtgactggctatggaaagggcaaatggaatgga

SEQ ID NO: 662194 - DNA, 100 bp, Homo sapiens
caagcagttcagaagagccaaggaataaacatgcaatgaacccaaaaggctggcaaaactcaaggctcagaaactgcagggcccccaaaaaagaaaagga

SEQ ID NO: 662195 - DNA, 74 bp, Homo sapiens
caagcccgaccgagcccaccactgcagggttcccagttttccagacctgaagtgttttccaatcaaagcgaaga

SEQ ID NO: 662196 - DNA, 90 bp, Homo sapiens
ccaaggtgttcggtccttccgaggaagctaaggccgcgttggggtgagaccctcacttcatccgtcagattctgaggaagatgaacccac

SEQ ID NO: 662197 - DNA, 82 bp, Homo sapiens
gaaagttccagccggttcgagagctaggaccatgaatggcacctacaacacctgtggctccagcgacctcacctggccccca

SEQ ID NO: 662198 - DNA, 74 bp, Homo sapiens
agaatggctgtagaggaacttcagtctataataaagagatgtgttcatggagcctgcggttattgtttgcctgg

SEQ ID NO: 662199 - DNA, 80 bp, Homo sapiens
cactgcggcgccgaggcgcggcggcaggacgggaaccacgcgagctgcagccagggctgaaatctctttaatgatggagg

SEQ ID NO: 662200 - DNA, 90 bp, Homo sapiens
aagctgatggaggccatgaggagctgccctgacaaggcccaggcgaccatggccttgctgggtaagcgctgtgacgtccccaccaacggc

SEQ ID NO: 662201 - DNA, 75 bp, Homo sapiens
caacaggaaaatcatattatagatggagtaaagtttgggagtctggatcaaaaattagccctggctactcgtatt

SEQ ID NO: 662202 - DNA, 80 bp, Homo sapiens
cggccaggacacagttccggaaagcacagccaggcccagagccatggctatctcctcttcctcctgcgaactgcccctgg

SEQ ID NO: 662203 - DNA, 83 bp, Homo sapiens
cctgtaaacttcatggttcggctttttgtggtgattgtgatgtttgcctggtctatagttgacagggtctcactctgtcaccc

SEQ ID NO: 662204 - DNA, 80 bp, Homo sapiens
tctgcgagaacagagaagggagctctatagtcggagtggagaactgcaagatattgatgatgttaagaagttcaaaccgg

SEQ ID NO: 662205 - DNA, 50 bp, Homo sapiens
tcccaaagtgctggtattacagacatctccagttacagcccgaacactgg

SEQ ID NO: 662206 - DNA, 100 bp, Homo sapiens
accatctccatcacccaccaacaacaccacaataatccacagccaagagggaagcatacgcacctcggatattctttgaggcttccagacctccatggtt

SEQ ID NO: 662207 - DNA, 100 bp, Homo sapiens
gccccgcgcagggtcgcgatgctgcccggtttggcactgctcctgctggccgcctggacggctcgggcgctggaggcatgagccatgagcccaagtcccc

SEQ ID NO: 662208 - DNA, 90 bp, Homo sapiens
gagaattctcgcgggagcagggttacgtcctcgtgggattcgttggcggtggctgagggaaatcctcattgacgattcaatttgttgaag

SEQ ID NO: 662209 - DNA, 100 bp, Homo sapiens
ctgccgccgacgccgcgcacgagttcaccgtgtaccgcatgcagcagtacgacctgcagggccagccctacggtggccaggagccccctgaaggagttcg

SEQ ID NO: 662210 - DNA, 101 bp, Homo sapiens
tcccccgcttctatgtcctgtacacaatcttcatgaaaggttggatggcaagcatgtggtgtttggcaaagtgaaagaaggcatgaatattgtggaggcca

SEQ ID NO: 662211 - DNA, 95 bp, Homo sapiens
ttgatgaacaatattgaacgctatcttaagagatgctaagatctcatccagtgagcatatgagaatcggggggagtgaagagatggcttggctgc

SEQ ID NO: 662212 - DNA, 100 bp, Homo sapiens
ccttcatcgacatcagtgaagaagatcagggagaagagaagtttacctttattgagaaatgtaacaaccctcgttctgtcacattattgatcaaaggacc

SEQ ID NO: 662213 - DNA, 75 bp, Homo sapiens
cagttgtgggcaccttgtatgcgaatgtttctccatcccagagagatgaagtaattcaatggctggccaaactca

SEQ ID NO: 662214 - DNA, 58 bp, Homo sapiens
cagagagggcctgggagcttgctgcagcttcagagtccagatgcctgtccagcctcca

SEQ ID NO: 662215 - DNA, 82 bp, Homo sapiens
aaattatttatccaacagctcctcccagcaggaacgaatgcaggaatttgggaactgagctgtgcaagtgctgaagaaggag

SEQ ID NO: 662216 - DNA, 76 bp, Homo sapiens
gtgcagcgttataagatgctcatcccgcagctgaaggagagtctacagctaagcctggattcaaggtaagagatat

SEQ ID NO: 662217 - DNA, 82 bp, Homo sapiens
gcggagcttcgcggggatcctgctggactgcacgaaaaactacccgtacagtgaggacgcccgccagggtgagcagtacatg

SEQ ID NO: 662218 - DNA, 75 bp, Homo sapiens
ttttgagtgagatggtcccagaggcctggaggagcggactgtatgctcaggcttcagaagaggctcgcctctagt

SEQ ID NO: 662219 - DNA, 97 bp, Homo sapiens
cgccgtgcccgtgggcgccagcgttccgccgcggcccctgctcccgctgcagcccggcatggtgccccaggcctcaagggcgagcagggagacacag

SEQ ID NO: 662220 - DNA, 100 bp, Homo sapiens
gccacgtgcatgaaccaaacccacttcgttcaagacaggtgtttaagcgcagcggaggaggagaaagagatggacctcccggactcggcctcgagggtct

SEQ ID NO: 662221 - DNA, 49 bp, Homo sapiens
cccctttgaattaattatggctggggcagtacccaaaggaaacgctacg

SEQ ID NO: 662222 - DNA, 100 bp, Homo sapiens
gcgggccctggccgctcacccgtggaaagtacaggtcctgacagctggaggaacgatgatgaatgtcgggcatttgtgaagagagtcataatgagccgtt

SEQ ID NO: 662223 - DNA, 71 bp, Homo sapiens
aaacctttccaacacagatgtccaagctgccaaactgtggcgtcctggagttgatgggagctgcagcacca

SEQ ID NO: 662224 - DNA, 78 bp, Homo sapiens
caacaccaacatcgatgggcggcggaaaatagcctttgccatcactgccattaaggactacaaagctgatgaagaccc

SEQ ID NO: 662225 - DNA, 75 bp, Homo sapiens
gaggcccaacagcggaatcatcgatgcaggggcctcaattaatgtatctggttcgatacaagaggctgttttcct

SEQ ID NO: 662226 - DNA, 100 bp, Homo sapiens
acggagccagcggctgaggaggggccccagcagcccccgaaggccctatcaggacatggagtatgaaagacggtaaaacttccttttcctgtagatcaaa

SEQ ID NO: 662227 - DNA, 50 bp, Homo sapiens
cgccgcccggcagcctcggcagttgatttggagcatatgcgaacaataaa

SEQ ID NO: 662228 - DNA, 73 bp, Homo sapiens
attcttctgaattgtgctgccttggccaaaagagcagtgttgtactgctacttctataaacggacagccgtaa

SEQ ID NO: 662229 - DNA, 71 bp, Homo sapiens
atgtgttaccaagctgtttcctaccaggtcacacactgttgcagcgcaggcgtccgagctgggccacagcc

SEQ ID NO: 662230 - DNA, 83 bp, Homo sapiens
gtgtaatacatcatgaactgcaggacagagtttcactcctgttacccaggctggaggacaatgatgtgatctcgggtcaccac

SEQ ID NO: 662231 - DNA, 75 bp, Homo sapiens
gaacggtttcagcctccagtactggggatttgccaaaagacagagtctcgttctgtcacccagcctggtgtgcag

SEQ ID NO: 662232 - DNA, 90 bp, Homo sapiens
attttatacaagaaaagctgcacttgaggcccagaatgcactgcacaatattaaaactttacctgggatgtgaaagcatggagctggaca

SEQ ID NO: 662233 - DNA, 85 bp, Homo sapiens
ccagagaacagccctccatcttgcagcccagaagatccccttgaaattagacacgcaaggacttcttcaaccagaaaaacccatt

SEQ ID NO: 662234 - DNA, 101 bp, Homo sapiens
gctcacaagataatagccagctccccagaaatgaacctgcccacggtgtccgcgctcaggggcagctgcaatgactctccgcacggtattattgtcattgc

SEQ ID NO: 662235 - DNA, 89 bp, Homo sapiens
ccattgttcctgagcataagaagcaaccatgtccttatggtatcactggacaggccatggctccacggtcccggcgacgaaggcacaag

SEQ ID NO: 662236 - DNA, 100 bp, Homo sapiens
ggggtccccaacccctgagccatggagccgcaaggagccacacagcaggagcatatcgacaaagtcttcaaacacaaggacctacaacagcagctggtgg

SEQ ID NO: 662237 - DNA, 100 bp, Homo sapiens
cctggatctgcgatctgtttgtgatgagttttgatcatcctgagaaaaatgggccttggcctgcagacccaataaaccttccctcccatggataatagtg

SEQ ID NO: 662238 - DNA, 50 bp, Homo sapiens
ggcacaccttattacatgtctcctgaaggatttgatgccctggatccctt

SEQ ID NO: 662239 - DNA, 101 bp, Homo sapiens
caaggtctttgtgtcccgacactctgccaccttctccagcattgtgaaagctctttcgacgtgtagcagcagctttgccgggaatggaaagcacacaggac

SEQ ID NO: 662240 - DNA, 74 bp, Homo sapiens
actgttctctgggacaatgcttttgcagagcctcaagggggccaggccaaccaccccacagcagccgtggtgac

SEQ ID NO: 662241 - DNA, 100 bp, Homo sapiens
gagctgctgctagactcccaggccgaggtgcagggtttggaggccgaaataagaaggctccgccaggagaacctgtcccgggggctggtgaacgtggccg

SEQ ID NO: 662242 - DNA, 75 bp, Homo sapiens
cgcacttcgtcatgttcttcgcgccctgatctctggaaacatggctacagaacatgttaatggaaatggtactga

SEQ ID NO: 662243 - DNA, 100 bp, Homo sapiens
aatcccagctactccggaggctgaggcaggagaatcgcttgaacctgggaggcggaggttgtggtgagccaaggccctagactggagctggttacagacg

SEQ ID NO: 662244 - DNA, 51 bp, Homo sapiens
cctcttgtcctcctcagcctcgtccgggaccatgtctggagaactaccacc

SEQ ID NO: 662245 - DNA, 90 bp, Homo sapiens
catggcctcagaggaagtaaagcaagatttctaccgcaaagagatcgaagtggactcttccccctccgtgctggaaattctggacaccgc

SEQ ID NO: 662246 - DNA, 101 bp, Homo sapiens
aaaaggacatctttggagccagactggcacacaaccttttaaccgtgcgatgcttttcaatgtgggcttcaaagaggccatgaaagacagtgtctgggact

SEQ ID NO: 662247 - DNA, 75 bp, Homo sapiens
cctaccgccggcccatcaccactgtgggcaccccctgtaatggcctatcctgctactacaccaacaggcatgata

SEQ ID NO: 662248 - DNA, 98 bp, Homo sapiens
gctcttctgggacaacgcgtacgagttcaacctcagcgctctgaagagtgtttctcaggagctatcagaaactatcctcaccatggtagccaattgca

SEQ ID NO: 662249 - DNA, 96 bp, Homo sapiens
ggatatcaagagtataatgtctatggtgaagtcttttgtacagtggttagagaatatgaaactggtgtcaaaatgacatccagatttgggaaaaca

SEQ ID NO: 662250 - DNA, 107 bp, Homo sapiens
aaaaatcttcaggtccctggaataaaacagctccagtacaagcacctcctgctccagtaattggtttcctgctgatcttggcactgaccgaagcgctggcatttgcc

SEQ ID NO: 662251 - DNA, 50 bp, Homo sapiens
catgtactacctctggatgtgcgacccgttccagaatgacccctttgcag

SEQ ID NO: 662252 - DNA, 83 bp, Homo sapiens
ttgagaacagagtgctgttttagagctggcagcagcatctcagcccaagagaagacattcactactttcactgcctaagaatc

SEQ ID NO: 662253 - DNA, 100 bp, Homo sapiens
tatctttgggagaccttcctagcacagcggcagtttaattggttggggtcagataagaagaggagtgacaatcaagccaacagtagatgatgactgaaga

SEQ ID NO: 662254 - DNA, 75 bp, Homo sapiens
cgagtagccacagcggcagctccagcccggcccggcagcgacatggaagatggagttttaacattgaatgcggag

SEQ ID NO: 662255 - DNA, 98 bp, Homo sapiens
ggaggagcaggtgcagagcactgcgctgtcagcgatagcccagtggatggccattccaggagtcagtggatcggtggggaaaatgctgcttaccctgg

SEQ ID NO: 662256 - DNA, 74 bp, Homo sapiens
actcatttctgtctccaaacatacattggtggatccttcccaattgtcaggcccagactgatcttgcttccttg

SEQ ID NO: 662257 - DNA, 76 bp, Homo sapiens
actaccctgactacagctggagcgcccagaggcgagccctggtggaggaagagattcgggaactggagcctctcct

SEQ ID NO: 662258 - DNA, 75 bp, Homo sapiens
cctttgactgtggggagaagccatcatttgacaggcttactagaaagcagcacccgcctgaaacctcacgaagcc

SEQ ID NO: 662259 - DNA, 75 bp, Homo sapiens
gacactgtggaaagtctggaccgagctcttggatgttcttggacttgacgactctaaaatagagctcaagcttga

SEQ ID NO: 662260 - DNA, 50 bp, Homo sapiens
cacttttactcatctttcacaaggttactcaaatgagtcgtccagacttg

SEQ ID NO: 662261 - DNA, 75 bp, Homo sapiens
ccccatcgcaccaacgaagcaactgctgagcaggagccccagtggcaccagtgacgggcagaggggacttgccat

SEQ ID NO: 662262 - DNA, 100 bp, Homo sapiens
aaagccaatgggaatcacctggttcaagaggtcctgggcctatgtcaagaagtgcaaaaacaacatgtgtccaaatcggggattggtgagccagctgctg

SEQ ID NO: 662263 - DNA, 97 bp, Homo sapiens
acacgacgtgcgctatgggtcaggtctcagccttagatccaaggacagtccaaggaagtcctaagaccatggagttggtgatctgggatctgggttt

SEQ ID NO: 662264 - DNA, 83 bp, Homo sapiens
gggcggcctggcgcggcgctccgggagtgcatccgccccaacccttttccccctcgtctcctgtgagaattccccgtcggata

SEQ ID NO: 662265 - DNA, 75 bp, Homo sapiens
ccagatgacctatcttccttccagctctgagtcacttcccattgatgctgtgtgacatggctagaatatcggagc

SEQ ID NO: 662266 - DNA, 78 bp, Homo sapiens
ggaaactgattggaaactctttgggaaagccactcgaaaaggctgggatatgaagaacaacagcctgaggttccaatt

SEQ ID NO: 662267 - DNA, 100 bp, Homo sapiens
accgtacccgccaagctgtcatcacaaaagagttgattgaaattatctctggtgctgcagctctgtattttgaaggtggcgtctcatctgtctacctctg

SEQ ID NO: 662268 - DNA, 90 bp, Homo sapiens
cggcgtgccccaccatgtcagacgcagccgtagacaccagctccgaaatcaccaccaagtttcactgttacatgccttgaagtgatgagg

SEQ ID NO: 662269 - DNA, 49 bp, Homo sapiens
ccgcaccccagcccgcagctcgggcaagtgtccagagaatggctgggat

SEQ ID NO: 662270 - DNA, 90 bp, Homo sapiens
gaagagtgagagatggaacccgaagaagaaaggattcgttacagccagagattgattttgtacagcagcaatttcttactctctctgcaa

SEQ ID NO: 662271 - DNA, 73 bp, Homo sapiens
acgatgctttggatgttgccaacaaagacacattcagctaacgtattttagcaggtggagtgaggttgaagat

SEQ ID NO: 662272 - DNA, 75 bp, Homo sapiens
gtctggcagtctcattcagaatggacattcccctgactggctcatggagaaagcctacctaagaatgaagccggg

SEQ ID NO: 662273 - DNA, 98 bp, Homo sapiens
cctcaagatgtggatttaccttatcccctcaacaacttttcagtggcaagttggctggctcctctggctgatggcatgttgaggtacatgggccagcg

SEQ ID NO: 662274 - DNA, 100 bp, Homo sapiens
tgtacttccagggagacaccgattataagaagagaaactcagcgctggggaagaaggtgtttgatcagtatgtaaagaccagggcagaggaagaacgcag

SEQ ID NO: 662275 - DNA, 75 bp, Homo sapiens
ggaatggagacacggcttcccccaaggaatatacagccatccgggtgacctgcataggttcctgcggggtctcca

SEQ ID NO: 662276 - DNA, 78 bp, Homo sapiens
gacaagaaggaaaattagagaagatccagaccaaggcagaggaagaagaggtggataagatgatggaacagaagatga

SEQ ID NO: 662277 - DNA, 113 bp, Homo sapiens
ctgaacactctgtgcagcgagttacatgttgagccatttcaggtctctgttctaggatgtcccgacccagtggtgcatgagatcgcctatcagtacggaaaaaatgtaggaat

SEQ ID NO: 662278 - DNA, 100 bp, Homo sapiens
aggaaatcatgtcaagcgaagccttgaaaaagctgccctgagacggtgtcccgccgaaaggaatccgcaggcggggatcttcagtctcctttaacaccgg

SEQ ID NO: 662279 - DNA, 99 bp, Homo sapiens
aacattcaagttgagcagatgacaaaacttcaagccaaacatcaagcagaatgtgatttgcttgaagatatgagcaactctgctgatgaaacaggcctg

SEQ ID NO: 662280 - DNA, 100 bp, Homo sapiens
cttagttcccaacttcaccttcaacttgggcttctcgggcaagttctatcatactgactcctcagacccctgcacaattgagagaaaagcccgaagaatt

SEQ ID NO: 662281 - DNA, 90 bp, Homo sapiens
cggaaatctggaaccgggatggcgacgtctacactgagtcggaggcgaagatgagcagcaccagcagtaagagggctccgaccacggcaa

SEQ ID NO: 662282 - DNA, 123 bp, Homo sapiens
agcctcgttgcggccatcgccctgccggaccgcgcctcaggctcccccaggcatctttcccggcaaacctgcagctcgtcctcgtgcttcgcccgacgggttttttccaaaggactctctccg

SEQ ID NO: 662283 - DNA, 98 bp, Homo sapiens
agagagggagagagggagagtgacagcagcgctcgaggagcaggagcggcttcgcttggagcaggagcgagagcaggaacagaagaaggccaatagcc

SEQ ID NO: 662284 - DNA, 75 bp, Homo sapiens
aacccttttgatcaagatgcggtgaacatgcgccatcatgaccgggtcctataacaacttcttcaggatgtttga

SEQ ID NO: 662285 - DNA, 90 bp, Homo sapiens
aagaaaaggatcccagaaagtttcagccatgggctccccaaaggaagtcattttctcagacatcactgaaaattcggctactgtcagctg

SEQ ID NO: 662286 - DNA, 102 bp, Homo sapiens
tgggcctttgtgttggcttctgcagctcccacgaaggaagatcccaccaaatattttggttgtgagctgggagcacagacccagtttgatgttaagaatgac

SEQ ID NO: 662287 - DNA, 100 bp, Homo sapiens
ccggactcagccaagttccccaacggctccccgtcgtcctggtgctgcagcggacccagatgatgtggtaccagttggccaaagaagagcctggtgttgg

SEQ ID NO: 662288 - DNA, 100 bp, Homo sapiens
gacgaacccccaatgctgaccaaggaggagcctgttccagaactgctggaagctgaggagcactcactgtgggcctcgtgcgacagtgtcaaacaatcca

SEQ ID NO: 662289 - DNA, 100 bp, Homo sapiens
ctgcgcgaagctggccaaagcctgcccagacggctcacctgtgcgggatggaacaaaagacgggcacactgcggttctgtgggaccacggagtttgccag

SEQ ID NO: 662290 - DNA, 100 bp, Homo sapiens
gcaccacaacccggaggagcaggttgaaaagatccgatggcagcaccacttcgaccagcttcatcctcagacaggttctccttactatgacaatgtccgc

SEQ ID NO: 662291 - DNA, 75 bp, Homo sapiens
actatgtggcagatatcgaggtggatggaaagcaggatgaagatttgataaagtggaaggcactgtttgaggaag

SEQ ID NO: 662292 - DNA, 100 bp, Homo sapiens
agcagatggaagccaggccccctcctgaaagaggctccttgaagagtttccaggatggcttctgcatcaacttctaaatataattcacactccttggaga

SEQ ID NO: 662293 - DNA, 110 bp, Homo sapiens
tgacaatgtagaggatgacttctctaatcagttacggaaatacaactggagcacgcaaagcaagcctttgtgcaacgggacaatgctaggactgggagagtcacagccat

SEQ ID NO: 662294 - DNA, 75 bp, Homo sapiens
ctgctggtcgacgtgggtcagaggctgcgccgtgggcagcgggtggcatgagacgtgggaacatgggccacctca

SEQ ID NO: 662295 - DNA, 75 bp, Homo sapiens
aagtgcagctgcctcagttcttagcgcagagtacccaaaggcaagtggaacagctctaatggggttgaagaaaag

SEQ ID NO: 662296 - DNA, 75 bp, Homo sapiens
cacctcggagacccagacaatcacagatgctggtctggaagtaaaagtaaaagacccaccaaaagggatgatacc

SEQ ID NO: 662297 - DNA, 90 bp, Homo sapiens
tgactttgctaaggaaaatataatggatgatgatgaggatgacgatgtcgataccaagaagcagaagaccgacgaggatgactagacagc

SEQ ID NO: 662298 - DNA, 100 bp, Homo sapiens
ctattggacagagaatttgaccttctaagatcaagaccgtataatagacgctggccccaaaggaaactactctcgatttatgaatcacagctgccagccc

SEQ ID NO: 662299 - DNA, 75 bp, Homo sapiens
ggagaatgactccgattcgtgaccctcagcgccggtgcatgtcgattattaattttaaagacccacagtttgctg

SEQ ID NO: 662300 - DNA, 100 bp, Homo sapiens
aaaagttagcagaccagtttttagaggaacaaaaggtgtttggagaagagggattgaccctgaatcttgaagacgttcagcctcatgacttaggaaaagt

SEQ ID NO: 662301 - DNA, 100 bp, Homo sapiens
atacaagattgatataggcgcagtatattctcacagaaacaccttccaccatgaccacctcagcaagttcccacttaaataaaggcatcaagcaggtgta

SEQ ID NO: 662302 - DNA, 75 bp, Homo sapiens
gggaagtttggatcctggttccgtccgctaggagtctgcgtgcgagtttcaagtgtcgtcagatgtatcacgcac

SEQ ID NO: 662303 - DNA, 75 bp, Homo sapiens
agggatataagaaagaaataagcaaactttatcaggacatgcagagaaaagttcactgagacttttttgacggag

SEQ ID NO: 662304 - DNA, 100 bp, Homo sapiens
aattatcacaattactgatgggagcaagttgactaccaccagtggagtccaggatgagtttggttgccacaaaggaaacagacagtgcaagatctcgaag

SEQ ID NO: 662305 - DNA, 100 bp, Homo sapiens
ggaaaatcagcaagagctttctggaagaaaggaaatgttaggatcactttattctgcttccagagcagttgtagcgcagcatgttgctccacctccagga

SEQ ID NO: 662306 - DNA, 83 bp, Homo sapiens
aaatatgtcaccctgtgtgacaatggcgtgctgacctatcatcccagtttacatttctgccggaggcctctccagattgtgat

SEQ ID NO: 662307 - DNA, 75 bp, Homo sapiens
ggagatgccccgcggcagccgcgctcggggctctaagagagaagaagaaggaggttcctgctgtgccagaaaccc

SEQ ID NO: 662308 - DNA, 82 bp, Homo sapiens
gtcccctgcaccatgagctggggcaccgagctctggccttgccaacattccactaacccccgagactcagcgggaccaggag

SEQ ID NO: 662309 - DNA, 50 bp, Homo sapiens
cgagcccgagcgccccagcccgggttggatttggtctagggagtcccaga

SEQ ID NO: 662310 - DNA, 100 bp, Homo sapiens
caggagcaggagaagcgcagccccctgggcagtgtcagtccaaaccaggttgcagagaaggtggcctccagaatcgccgagggcttcagcgacactgcgc

SEQ ID NO: 662311 - DNA, 78 bp, Homo sapiens
ggggaaatccttcggatggtgaactcattagaagtctgtctgacacttactgccaaacgcatggcaaggaaaaactgc

SEQ ID NO: 662312 - DNA, 75 bp, Homo sapiens
cttcccaaacatggctgccaaggtgaatgggaacccccacagcacccctgtgagctcaaaagccaaaagtctctg

SEQ ID NO: 662313 - DNA, 83 bp, Homo sapiens
gaaagcgacaagtggaggcgccgctctagcggccgggactctgaactatggcggctgaccggttccctgatgtgttacctgct

SEQ ID NO: 662314 - DNA, 145 bp, Homo sapiens
attccacacttgattctcttatacgctacttttactcagagtttgaaggttgtgaccaaaagaggctccggtgtatgtggaatttgatgatcttgaatgggataaacgagagtgggttaaagtttatgaagatttttcaactttc

SEQ ID NO: 662315 - DNA, 75 bp, Homo sapiens
ctacagcgacaacagcctggaccccggtggtcttcgagggatagcacgaggtggtctgacaggactaacacttac

SEQ ID NO: 662316 - DNA, 88 bp, Homo sapiens
taccagggcggcgcgtggtctacgccgagtgacagagacgctcaggctgtgttctcaggatgggacgtggagaagggaaatgctggag

SEQ ID NO: 662317 - DNA, 82 bp, Homo sapiens
taattcaaggtcacacaatgtcggggatggacctccagatttccttactgggaggaataagtttttttcatctgtaatttgg

SEQ ID NO: 662318 - DNA, 98 bp, Homo sapiens
ctaatgtgtgtgcctgcccacaaggcttcactggacccagctgtgaaacggattttccatctttgaccagaaatttgccaagccaagagttaccccag

SEQ ID NO: 662319 - DNA, 85 bp, Homo sapiens
cgatgcttgtgaccctgcagctcctcaaagtcggtgcccactttctggaggcagtggtgaggaagttcgatgccatctataaata

SEQ ID NO: 662320 - DNA, 74 bp, Homo sapiens
cctaaacaggagcacctgctggcgctaaaagcaactcaagcatcccaaccttgttaacctcctggaagtcttca

SEQ ID NO: 662321 - DNA, 100 bp, Homo sapiens
agggcaccggcggccgcggcccggactccgcggtgggcgagcgccctgtgagggatctgcaaagacttggagaacttcaatctgaattggcaggagtagc

SEQ ID NO: 662322 - DNA, 87 bp, Homo sapiens
agaaagccctaccacaagaagcggaagtatgagttggggcgcccagctgccaacaccaagcttgataactatggacagcaagaactt

SEQ ID NO: 662323 - DNA, 100 bp, Homo sapiens
cggagcttgagatacgccgctctgaatcttgccgccctgcactgccgcttcggtcactaccggagcggttgcagggcacacattactcggtgcagtcgga

SEQ ID NO: 662324 - DNA, 98 bp, Homo sapiens
gagtcacacacggtcctaagagctgggcaccaggaagcgaaggctggtcccctcttgctgttggctgcacatcaggaaggctgtgatgggaatgaagg

SEQ ID NO: 662325 - DNA, 74 bp, Homo sapiens
ccagatccatttacactttacatgcaagagaagcctgagccagtgccgctggagagccgctcctgcgtcctcat

SEQ ID NO: 662326 - DNA, 100 bp, Homo sapiens
ctctgcagttagcactggatcttgtctcttctagaaatgttgaagaggtggtgggcgccaaggttgtgacaaatgcccggagtcctggagctcgctgtta

SEQ ID NO: 662327 - DNA, 105 bp, Homo sapiens
ctcagacccttccccgtgctcagacagtgcaccgctgtcccatctaaagaaacctgtcaggaatacgagcttctgggacaatgaaggccaaacagctctacatta

SEQ ID NO: 662328 - DNA, 96 bp, Homo sapiens
agtcgtccgagcaatcagtgccgcaactccattcaagggaagcacctcatcacggatgaactcgaaaccccagtatatcgattctcgttggctgat

SEQ ID NO: 662329 - DNA, 96 bp, Homo sapiens
atttgactgaagaacagaaggcgatcaaggccaagtatccgccagtcaataggaagtacgagtccaacttctctttgcctgaaaaatgcgactata

SEQ ID NO: 662330 - DNA, 80 bp, Homo sapiens
ctgcctcagtatctgaacacaaggttggattagcttttcaaaacagaaattcttggaaagaattaaatgacattgcatcg

SEQ ID NO: 662331 - DNA, 100 bp, Homo sapiens
ggagtgatggtcagctaggactcatgactactgaggattctgtggcagtgcccagatgtctgtgatcatgatctgcatgtttctggtggcatggtcccct

SEQ ID NO: 662332 - DNA, 98 bp, Homo sapiens
gggagttctgttacgccatggaaaccgctctggtcacaccaatactgttgcagattggcagtagcagaatcccatggtagccaggtgggtgaagggga

SEQ ID NO: 662333 - DNA, 82 bp, Homo sapiens
gaggcggggtcggcgggagccagcgagccacgggagcgagccaggctgaaggtgatgtggccgccctcaaccgacgcatcca

SEQ ID NO: 662334 - DNA, 76 bp, Homo sapiens
gaatcattagtatcggacacagaaacacagaggaccccagtaagtgcagtcctcggttttgggaggagctctttct

SEQ ID NO: 662335 - DNA, 100 bp, Homo sapiens
ccttgagcgaggaggagctggacaatgaagactattactcgttgctgaacgtgcgcagggagacctgcctagagctggaacgttacctccagagcgagcc

SEQ ID NO: 662336 - DNA, 100 bp, Homo sapiens
tggaggacctcttcaacttctgctccaggaaattcagcctcaaaaccgtcctgctgcttgctgaccaaatggcagcgtctatcccagactaccggggccc

SEQ ID NO: 662337 - DNA, 83 bp, Homo sapiens
agaggaatcagaaacctgaagttagaaaggctcaacgagaacaagctatcagaacccacaatacattatatgcaccagaaatg

SEQ ID NO: 662338 - DNA, 97 bp, Homo sapiens
tatcgcatcctatggctcaaagaaagatgattatgcattgccacctggggtatcgttgtcatggcagaccccaaagggaaggcctaccgcgttgttt

SEQ ID NO: 662339 - DNA, 101 bp, Homo sapiens
gagatggtgacaagctcaaggcctgcgagctttagcgtcacctccctcactgggcagcatgggggagaagtcagagaactgtggggttccagaggatctgt

SEQ ID NO: 662340 - DNA, 100 bp, Homo sapiens
agcttgagagaaaagcccccaaaagcagctattcagtgtctcctcccaaagacctcgttgtgacagaagtgacggaagagacggtcaacctggcctggga

SEQ ID NO: 662341 - DNA, 96 bp, Homo sapiens
atcaaggctgtcacacatcaagttaaatttggtcaacaaaatccacgtcaggaactgcaagcacatgttgaccagataactgaaatggcagcagta

SEQ ID NO: 662342 - DNA, 100 bp, Homo sapiens
ccctggccctgtctaatgcaacaggcacaacccgatctcccagagaaggagaagtgcctggcgtggactataactttctgactgtgaaggagttcttgga

SEQ ID NO: 662343 - DNA, 83 bp, Homo sapiens
caaatcttatctgtcagtgctgtgtgacagcatcgcaacgggatctgcagaacctgaactcgaaagcgtggatacccatcaac

SEQ ID NO: 662344 - DNA, 100 bp, Homo sapiens
aagaaactgaggcctggaatttgattaactcattcaaggttacccagttggagccatgaccctctgcattacaaacccattatgggtaacaaaaactcgc

SEQ ID NO: 662345 - DNA, 100 bp, Homo sapiens
aggcctcattggacagcattcgagggcaagtgtccagagaatggctgggatgaaagtacacttgaactctttttacatgaacttgcaatcatggacagca

SEQ ID NO: 662346 - DNA, 75 bp, Homo sapiens
aagcccctctgaagcctcctcgccgccgtttctgagaaggccccgcagggtggagcccgtctgctcagggttgca

SEQ ID NO: 662347 - DNA, 133 bp, Homo sapiens
cggcagtgaagctcaagttgctactcgggacgctgcacctcccgcgccgcacggtggacgaggtcctgaacgaggctgtgggggccctgatgtaccacaccatcactctcaccagggaggacctggagaagtt

SEQ ID NO: 662348 - DNA, 89 bp, Homo sapiens
cattgcactggttcatcttccttctcaacttacctgttgccacttggaatatatatcgacagggtcttggtggcgcatacctgtcttgg

SEQ ID NO: 662349 - DNA, 50 bp, Homo sapiens
aaaacccaccccttcaagtgatataatcaggaaacccaggcccaacggca

SEQ ID NO: 662350 - DNA, 100 bp, Homo sapiens
ccagagagcgccctgagagaacagggtggccgcttggtccaggtagttgatgtcacttggcgatattcctgcaaacatgaagaggtgattgccagaagaa

SEQ ID NO: 662351 - DNA, 74 bp, Homo sapiens
ggtcattgcctggggcctctccctggagcgagttcgaaatttgagcaacccagccaagaagttcaagattgaag

SEQ ID NO: 662352 - DNA, 75 bp, Homo sapiens
attccggccagcttcacgaagtcagagagctgtgtattcttattacaaccaaggcattttaccagagcaaggcat

SEQ ID NO: 662353 - DNA, 101 bp, Homo sapiens
taccgattgtaccccaggcaccagctgctcagccactacagattcagtcaggagttctcacgcagggagagtcccgtattctcagagtaaaagttgtttct

SEQ ID NO: 662354 - DNA, 100 bp, Homo sapiens
tcaccatcaaaatggaatgtaaccctagccaggtgaatggctcaagatctgactgcagccatgagcagcaatgagtgcttcaagtgtggacgatctggcc

SEQ ID NO: 662355 - DNA, 88 bp, Homo sapiens
cgcgacctgggctggctccgggggtggcgggcgcagctgctgtgacagaaagcataacccctactgtagaactaaatgcactgtgcat

SEQ ID NO: 662356 - DNA, 82 bp, Homo sapiens
gccaaagcctgcccagacggctcacctgtgcgggatggaacaaaagagcaaatttttcagaacataaaacaagaatatagtc

SEQ ID NO: 662357 - DNA, 100 bp, Homo sapiens
ggacagcaccgtgtcgctggtggtgcaggcgctgcgccgcaacgccgagcgcaccgacatctgcctgctcaaagatggggcgcctacccttcttcagcaa

SEQ ID NO: 662358 - DNA, 99 bp, Homo sapiens
tcaaggcaagaccgaattcagaaggatatcgacgtcgtgatccagaagtccagagctgaggactgcctgtttgcagcgatgaaatctacattgctcctt

SEQ ID NO: 662359 - DNA, 100 bp, Homo sapiens
tctctctccttcggcatccagccccttcagacatggccaacgaaagaccctgaactagagtcccaggtcaacctatcctgaggtgcagaggcaattcccg

SEQ ID NO: 662360 - DNA, 100 bp, Homo sapiens
ctcggctgcctcaagtacttcatcaacttcttcttctacaaattcgggctggaggtgagccaccagctgggcagcatcatggacctcttcaccaccagcc

SEQ ID NO: 662361 - DNA, 75 bp, Homo sapiens
aagatgctttgaatgaaaattctcaacttcaggaaagccagaaacaggtgtgcctaccgcatgttgccgctgctg

SEQ ID NO: 662362 - DNA, 50 bp, Homo sapiens
ctcccacctcagcagctgggactacagttgacattttgctaaaggctgtg

SEQ ID NO: 662363 - DNA, 78 bp, Homo sapiens
caagcaaagaagagttgagcacaatcagcctgggttactaggtgtctttcagaagctgattgcatccaaagcaaatga

SEQ ID NO: 662364 - DNA, 100 bp, Homo sapiens
cttcgcagctggacaaagcgtccatcatccgcctcaccacgagctacctgaagatgcgcgccgtcttccccgaaggacctgaaggagaagaaggagaagg

SEQ ID NO: 662365 - DNA, 89 bp, Homo sapiens
tgaaagctttgtatgaacaaaaccagtctgatgtggctcagaaacacttatgggattttctaagcacggagggttcacttccttaacat

SEQ ID NO: 662366 - DNA, 100 bp, Homo sapiens
gaacgaggcaaggagctaaagcagcgtgcgttcagccctgggcccgtgatgctgatgagcgagagaagtggatccatgccttagaagaaacaattcttcg

SEQ ID NO: 662367 - DNA, 89 bp, Homo sapiens
cctgtccttccttctacagaccatgctggacttcttgtcggatcaggactatcaagatctccacttagggaagtgggaatcttatttgc

SEQ ID NO: 662368 - DNA, 83 bp, Homo sapiens
cctgctaccccatgccatcaacctgcgtgaggtcaacctgcgcccccagatgtcccaggttcgtgctggccgtgggcagcgcc

SEQ ID NO: 662369 - DNA, 100 bp, Homo sapiens
agccgccttcattatctcctacgtggtcgccgtgctctccgggcacgtcaaccccttcctcccgtatatcaggcgggtgccacgtctatgtgggcttcgt

SEQ ID NO: 662370 - DNA, 75 bp, Homo sapiens
ggatggggtgaactaccttcacacaaagaaaattgctcactttgatctcaagaaggccaatgatgaggccaatca

SEQ ID NO: 662371 - DNA, 100 bp, Homo sapiens
gacaggaggcagtgccgcttcggccgaaggcccgagcgcccgaggcgtctgggatggtgtgggaccgggagtgagctgagtcgacagaaacttcataccc

SEQ ID NO: 662372 - DNA, 100 bp, Homo sapiens
aaattatcgaagtgtgcctggcgctgaagcatcggaatggagggtgtccgcaatgttgccagtgtctgtctgcagattggctacccaactgttgcatcag

SEQ ID NO: 662373 - DNA, 97 bp, Homo sapiens
tgcaagagtcgctttgttacacctttcaagtgtctcggtgtcctgatggcaaatttcaagggccacgcgcttccagggagtttcttcctgatcattg

SEQ ID NO: 662374 - DNA, 98 bp, Homo sapiens
gtgtggataaatgaaactagcccatgatgaacctgttttctccgtgaccacaatattaaccaggatgaatggcgacaggggaaaaacttttagaactg

SEQ ID NO: 662375 - DNA, 89 bp, Homo sapiens
cctcgcctttgccgatccgccgcccgtccacacccgccgccagtatggtttgaagtggtgaacatggatttttctcggcttcacatgta

SEQ ID NO: 662376 - DNA, 82 bp, Homo sapiens
gctaaagagagcagtaccctgatggagtcccttgcagcgtccgtctccaagagagtatgaagagagtgcgtctgtagggcag

SEQ ID NO: 662377 - DNA, 73 bp, Homo sapiens
gggaagatggcggcgccgctcatccccctctcccagcagggcagctgtgcggagggtagtggcagccatgaac

SEQ ID NO: 662378 - DNA, 100 bp, Homo sapiens
tggattcacgggtagagattggcttcgggctgagctagcagtgagcaccttttggcccaatgaatatcaggctcgggttatgtatgattttgctgctgaa

SEQ ID NO: 662379 - DNA, 50 bp, Homo sapiens
gccagtgccattttgatatcagatacaatcttgcttgaccgtttgggaca

SEQ ID NO: 662380 - DNA, 98 bp, Homo sapiens
tcttgcgttgtaaatgccaccaccattgtccagaagactcagtcaacaatatttgcagtaccttccactggaagaatctcaaacagcgctacttactc

SEQ ID NO: 662381 - DNA, 75 bp, Homo sapiens
ggaaggaaaaacctgtatgtggaaccacctccacccacacagaatatgcctatgggtcctggagggatgaatcag

SEQ ID NO: 662382 - DNA, 74 bp, Homo sapiens
aaaaagagccctccaggacatgatgaccaactctgggtgctggtcccacaaagacgtctaactggctccttacc

SEQ ID NO: 662383 - DNA, 90 bp, Homo sapiens
ggctcatgtgtattgtgaaggaaatgatgtctatgatgtcatgctaaatcaggattcttacagaagcagagattgatgctcaccttgttg

SEQ ID NO: 662384 - DNA, 75 bp, Homo sapiens
gaaagtcctctcgggagaagcagcgcctgttcccggggcagatccaggttcagggaacccgagcgtcatgttagg

SEQ ID NO: 662385 - DNA, 100 bp, Homo sapiens
ggcatttcaggagtttcctgtctgtcaggtggcgacctgcacatgacccagtttttccgaggcaatctggctggcttaactctccgttccgggaaactcg

SEQ ID NO: 662386 - DNA, 100 bp, Homo sapiens
atgaagagacacagtatggtagccacacccccagtttctccacagacactacccaaagcagtccttcactacagtggcagacagacctgaaaattttcat

SEQ ID NO: 662387 - DNA, 83 bp, Homo sapiens
tggtggtcctggtctacgtcatcgggtgtggacactgccagcggctgcagccgacttggaatgacctgggagacaaatacaac

SEQ ID NO: 662388 - DNA, 75 bp, Homo sapiens
gcagacgatattgatattgaagcaatgcttgaggctccttacaagaagattatgcggatcaaacctcaccaaggc

SEQ ID NO: 662389 - DNA, 100 bp, Homo sapiens
tcggcccccatgcctgcccgaccgcgctgccggagccccaggtcaatgagctgaaggagaaaggcaacaaggccctgagcgtgggtaacatcgatgatgc

SEQ ID NO: 662390 - DNA, 100 bp, Homo sapiens
agtctctggacaagatgaccacactccaggaatgccagtgcatcttttgcacagctgtttcaggcacagaactgtatatccaataatagtgaaatggatc

SEQ ID NO: 662391 - DNA, 50 bp, Homo sapiens
gctctgggactacagcaaggggaagacttcacagagaatgcagttgtctt

SEQ ID NO: 662392 - DNA, 83 bp, Homo sapiens
ccagtcggtgctccggggaggtcacctgacgaggagatgccagaggaacaagcattctgtgttttggtgaaaatcatgtacga

SEQ ID NO: 662393 - DNA, 74 bp, Homo sapiens
actttgaaagattaagcaaatttcaagatggagctaatggcagcattagccgctgttgggcctcctaatcctcg

SEQ ID NO: 662394 - DNA, 82 bp, Homo sapiens
aggcccacggaggaagagccgggcagtccctggagcgggccaggccacggcgtatgcctccgaggacggggtcctgaccgag

SEQ ID NO: 662395 - DNA, 100 bp, Homo sapiens
ccgcaacagccccttcgtcccaagatatcagcattgcttatggggagcacctgatgcaggagcacatgtatgagccagcggggctcatgtttgcccgttg

SEQ ID NO: 662396 - DNA, 75 bp, Homo sapiens
aagccttcactggcgagggtcagaaactgggcagcatttaaatcaaacggtattgagatggattgggttatgaaa

SEQ ID NO: 662397 - DNA, 83 bp, Homo sapiens
cccgcgccggaagagccacgccgcaaaatgatgcttcaacacccaggccaggtctctgcctcggaagtgagtgcttctgccat

SEQ ID NO: 662398 - DNA, 82 bp, Homo sapiens
gttcccccaaatgtctgactctgactctcggactgagaaacgcaagggaacggcaggagcagctgatgggatatcggaagag

SEQ ID NO: 662399 - DNA, 75 bp, Homo sapiens
aagagaactgtctcctggtgaccgagcacccgcctccgggcatcttcaactgttgtgggcatttttgcaggattt

SEQ ID NO: 662400 - DNA, 118 bp, Homo sapiens
ccgttctttcctggataaactttcagattactactatcatgcagatttcctatctgagactacctgtcacaatatgggtacctacagaagcctctagaaggatctaataacttcaagc

SEQ ID NO: 662401 - DNA, 75 bp, Homo sapiens
gggaggacggcggaacatctggaggctgggaaatggttcaaatggttgtcctgatcctgatttagtattgaagtt

SEQ ID NO: 662402 - DNA, 75 bp, Homo sapiens
ggcgctgtcgccggagagggagggcaccgctgtcgtcggtgtgtggaggtcattgcaaaggaaggacaaaacctg

SEQ ID NO: 662403 - DNA, 106 bp, Homo sapiens
agaaaagattttgctgtcaaagttgtgtcagtgaatacaaacagcttgataaagatgacatggtatacatggaagcatatgataaattgttggagtcctggttaac

SEQ ID NO: 662404 - DNA, 100 bp, Homo sapiens
agcaacaccctagatggatgtacagccatcaagaggatcttaaagtgtggtctttagtggaaaaaaaggggcaacaccctccactaaagagtcaagccag

SEQ ID NO: 662405 - DNA, 101 bp, Homo sapiens
actgccatagaacttgcagagcttcagcctcctatgtttgacttacacccaatgagggagagtcccgtattctcagagtaaaagttgtttctggaattgat

SEQ ID NO: 662406 - DNA, 90 bp, Homo sapiens
tgatggaactgtttgacacaactgtagagcagctgtatagcatcttcactgtaaaggagcaatggcagattgtccttctagcatacagct

SEQ ID NO: 662407 - DNA, 75 bp, Homo sapiens
ctcaaggcacaggtggcccgatcccagcaggacattgaaaggcccaggcgagagcgggaagagcaccttcatcaa

SEQ ID NO: 662408 - DNA, 75 bp, Homo sapiens
ctctgtcgctcttgtgccctagcaccccgagaaccgtcagtttgagccagatgattgaccctcttgctggaatga

SEQ ID NO: 662409 - DNA, 82 bp, Homo sapiens
accctggagcctcagttggaagcagccgatccagcctgcggagcctgtggggcaggtgactctcctattccatctgtttctt

SEQ ID NO: 662410 - DNA, 96 bp, Homo sapiens
taactaaaattgtaatggaagactgcaatttgcttgaagaacttaaaactcaaagttgtatggattgtatagagatccacttcctcatgatactgt

SEQ ID NO: 662411 - DNA, 50 bp, Homo sapiens
gggatttgcctcagatggagttacaggctgattcaccccaagagtggccg

SEQ ID NO: 662412 - DNA, 75 bp, Homo sapiens
atgctgcagaatttttgaagcaacataattcaatttgtccaatatgtgcagcgttacctggaggcgatcctaatc

SEQ ID NO: 662413 - DNA, 100 bp, Homo sapiens
aagtgctggccagtgagcccatcccgttctctgatttgcagcaggacaaaggccatgatggggtcaaggagctggacagcctaaacagtgaccgattgag

SEQ ID NO: 662414 - DNA, 76 bp, Homo sapiens
atgatcctattgatgtttgcgaaataggctcaaaggtggaaaacgaagctcattcccaacgtgcaaagccaaggca

SEQ ID NO: 662415 - DNA, 136 bp, Homo sapiens
gggagagcaacaagccccggccctcagagctcagccggatgagcgcagcccagagacagcagcttctatccagcacacggaagacatggagaacgagatcgacgagctgctgcaggagttcgaggagaagagtggc

SEQ ID NO: 662416 - DNA, 50 bp, Homo sapiens
gggcaccttgcgcttcttgcagtcgctgcatcttcctcccgtgaggctgg

SEQ ID NO: 662417 - DNA, 83 bp, Homo sapiens
catgccgctcctaagcctgcacagccgcggcggcagcagcagtgagagaatccacattcatctcaatggaaggatcctgcctt

SEQ ID NO: 662418 - DNA, 75 bp, Homo sapiens
tttgttcggtccacgggggcagaacctggtctggccagagacctgctggaagaagatgcttataagatcaggatc

SEQ ID NO: 662419 - DNA, 75 bp, Homo sapiens
gtggaagcggccaccgactactgtcagcagctgtgccaggaatgctgtctctgcaatttgagaggaggtgctctt

SEQ ID NO: 662420 - DNA, 75 bp, Homo sapiens
cgatggtgcccggcgaggagaaccaactggtcccgaaagagattacgtggagaaccaccctttttggcaagctca

SEQ ID NO: 662421 - DNA, 88 bp, Homo sapiens
atttcttgacaagaggcattgctaaaataattagtgcacacatccatccagtgtgttctttatgatacttcgttgaaagttgccaccc

SEQ ID NO: 662422 - DNA, 97 bp, Homo sapiens
tcaatatcctgaaggccagcaaggtcgttccaggggtagaggaggcatgaaggatgaccgtcgggacagatactctgcgggcaaaaggggtggattt

SEQ ID NO: 662423 - DNA, 100 bp, Homo sapiens
gtcgggtgcgcattgcgggcggtgaacgagcgcgtgcagcaggctgtggcgcggcggccgcggcctaaatgcgatggccaggtattactgacacaagtgt

SEQ ID NO: 662424 - DNA, 108 bp, Homo sapiens
gcaaatactggaagaacctcacctttgtctccccgatctacggggctgacatcagcggctctttgtatgatgacgttcccaacaaggctacgcagaagaacccccttg

SEQ ID NO: 662425 - DNA, 100 bp, Homo sapiens
gtgaacttggcattttagatctaattcaatgtaaacaggaacatcgataagtagtgtaaaaacttgcacaatgaaatccgaagccaaggatggagaggag

SEQ ID NO: 662426 - DNA, 100 bp, Homo sapiens
cgatgatcgtgtgtcggatgaggagaaggttggacgtgataagtatgagcctgcagctgtttcagaacaaggtgataaaaagggcaaaaagggcaaaaaa

SEQ ID NO: 662427 - DNA, 74 bp, Homo sapiens
cgagggacctcacatcaacttctaccagctggtgggtgtttctctatgagaagggctaccagacctcgagcggc

SEQ ID NO: 662428 - DNA, 74 bp, Homo sapiens
gacaatctggtgaatggatacaggtgtacttgcaagaagggctttaaaggaccctatgtactcggaactgggct

SEQ ID NO: 662429 - DNA, 75 bp, Homo sapiens
tttatggaccatcccaaccctccagtcgtccactccgctttgcttgaaacacagcagtggagagcaagacaccag

SEQ ID NO: 662430 - DNA, 75 bp, Homo sapiens
cttagctgtgctcgcgctactctctctttctggcctggaggctatccagcgcagaatccagagaccacatttgaa

SEQ ID NO: 662431 - DNA, 50 bp, Homo sapiens
cgcgtacgtggtggagctctgcgtgtccactgaggcggctcccagctgcg

SEQ ID NO: 662432 - DNA, 100 bp, Homo sapiens
gaggccgagccgggatctcaggtcctcgggggcggcggccacgccaaggacggttggattggatgctgctggcaagacaaccattctgtataaactgaag

SEQ ID NO: 662433 - DNA, 100 bp, Homo sapiens
cggagctgcgttctcctctgcacagacttcggggctattgcgaaggcggagcagagttcttctcagatcgatgaggtcctgagacaggaagacaaagctg

SEQ ID NO: 662434 - DNA, 100 bp, Homo sapiens
gggatttctacgacccggagcacccgacccctgagtgtggtatctgtgcgctttgaagaagatgaagacaggaacttgtgtctaatagcatatccattga

SEQ ID NO: 662435 - DNA, 100 bp, Homo sapiens
tgttgttagatattgccttgaagctcttcaagactggtttgatgctattaacttcgtagacgagcatgttcaaaagaaagctgcagaatggaaaatcaag

SEQ ID NO: 662436 - DNA, 73 bp, Homo sapiens
tcaaggcccgcggaacagcggaggacgaagagcgggacccgagccctggattggcagcagtagcactgattaa

SEQ ID NO: 662437 - DNA, 100 bp, Homo sapiens
tggttctcaaatataggcattctgatgggaacttgtgtgttaaagtaacagatgatttagttacactggcttcatgtcctattgaccgtaaaccttttca

SEQ ID NO: 662438 - DNA, 75 bp, Homo sapiens
aagggcactcgtctccgtgggtgtggcggagcgcgcggtgcatgaaactggcgatggaatatgagaggagccctc

SEQ ID NO: 662439 - DNA, 100 bp, Homo sapiens
cgcgaagacggtaacccgtgtgactttgactggaacattaaccaggtggtatttgttggaaatttcttgagaattaatacgatcgccatgcggcttttgg

SEQ ID NO: 662440 - DNA, 98 bp, Homo sapiens
gacagccgacgcgcagatagcagagccatccttggggagatctataaggacaggcagaaattctcagaacaggttttcaaagtggcctcctcagacct

SEQ ID NO: 662441 - DNA, 82 bp, Homo sapiens
gcgtgtcctcggagcgcggtccctgtattggtctcctgctcctagaggtgaggctccaggttgggctctatgctgtgtacct

SEQ ID NO: 662442 - DNA, 48 bp, Homo sapiens
agccttagcagccttgatctgaagaagaaaaccacattgagtcttacg

SEQ ID NO: 662443 - DNA, 73 bp, Homo sapiens
aacccctccctggagagaagaatcccaatgctactggtgcggaatctgaactcggatgatcaggctgttgtgc

SEQ ID NO: 662444 - DNA, 82 bp, Homo sapiens
aagaaactcttcgactacttcaaccaggaggttttccgagacaacaacggcaccgcgggtggcccagttgaaatccttccct

SEQ ID NO: 662445 - DNA, 83 bp, Homo sapiens
gcagagagtccactttgggttccacaagctgcagattctggaagaaaaaaataagaatttacaagaggctttgatagatacag

SEQ ID NO: 662446 - DNA, 74 bp, Homo sapiens
cataatcctggagagccccggtttaagatctccaggtgaagtagatttttattccccacaggaagccccaagtc

SEQ ID NO: 662447 - DNA, 83 bp, Homo sapiens
agtaacagcagcgccgtcccgtccgacagccaggcccgggagaattaacccagtatccactccagttgcacttcccacaccag

SEQ ID NO: 662448 - DNA, 75 bp, Homo sapiens
gatcttccaggacgagacgggcaagaaccggtgtgaaaatcacaaatgtcaaatgatggaagatccaggaatcgg

SEQ ID NO: 662449 - DNA, 76 bp, Homo sapiens
ggagctctacgcctcctacgtttacctgtccatggtcttattagtaggtaagaaacagctgctcctccacctccac

SEQ ID NO: 662450 - DNA, 75 bp, Homo sapiens
ggttttttgtggcttccttcgttattggagccaggcctacaccccaggttatgatgtgattgctcaagcccaatc

SEQ ID NO: 662451 - DNA, 48 bp, Homo sapiens
cgagaccagcctggctaacatgtaatgtgtgtggctggtattggactt

SEQ ID NO: 662452 - DNA, 101 bp, Homo sapiens
ctggcacgggaccctccagcacagtgttcagcaggtcctgttggagatgatagtcaagagcaatctgaatccaaatgcaaaggagtttgttcctggggtga

SEQ ID NO: 662453 - DNA, 50 bp, Homo sapiens
gattcatctcgacactgaaattacaggtcagcccttcataaacccagatg

SEQ ID NO: 662454 - DNA, 100 bp, Homo sapiens
tggaagcaggactgcgccgcgtcttcctcaagcctcggagaagtcaatgtgcccatcgctggacgaagcccagcccttccccctgcctttcaaaccgtac

SEQ ID NO: 662455 - DNA, 75 bp, Homo sapiens
cgtggactccctttaatccagtgactgtcaggtcgatcatatcgagacggtcatctgttccagccgggccactgt

SEQ ID NO: 662456 - DNA, 75 bp, Homo sapiens
agacaactctgcttttccagaaactgtgccaggatcacgccacaccaggagaggagtgtgccatctgcttctatc

SEQ ID NO: 662457 - DNA, 75 bp, Homo sapiens
actccgggtgaggccggccacgccccgcacgttatttctcaaactctgaggctgcggagttcacacattgaaatc

SEQ ID NO: 662458 - DNA, 82 bp, Homo sapiens
gggagtggcagagagtatgcattaaaggtggtcattgggactcccacacttaaacaaagaaaggaaattctgcaagtgatta

SEQ ID NO: 662459 - DNA, 100 bp, Homo sapiens
catggcccaggaggacgactgggaccgggacctgctgctggacccggcctgggagaagcagcagcgcaaggttcgtgctggccgtgggcagcgccgtctt

SEQ ID NO: 662460 - DNA, 74 bp, Homo sapiens
ctagcgtcctggaattacttcaatcaaatatcaatgatgtcaaacggctgaaacctggctacttagaagctact

SEQ ID NO: 662461 - DNA, 98 bp, Homo sapiens
ggagagtgttcagcaagactaaggtgaccatgctttgggattttcatagtttgagtaattcctatgggctctaccacccagcgagttaaagaagacaa

SEQ ID NO: 662462 - DNA, 74 bp, Homo sapiens
tcctaatgctcccaaaaggccaccttttaaccgtgattggagataccacaaagaagaacgagtatggattacca

SEQ ID NO: 662463 - DNA, 100 bp, Homo sapiens
cagtgtttcttctgcttcaaggagctggaaggctgggagccagatgacgaccccatagacgagttgtactgctgtcacaggaaatggacgctggattaca

SEQ ID NO: 662464 - DNA, 100 bp, Homo sapiens
ccacatcgtggtggaggcggcctctctggcagcagacatcagccacgcatctgaccttgttgaccaagctgtacaccctgcctgcaagccacgccacgcg

SEQ ID NO: 662465 - DNA, 80 bp, Homo sapiens
aaagtggcatcctgggattttgttgaagccacacaaagaacaaattgcagttgtttgagtactatactggcaattgctgg

SEQ ID NO: 662466 - DNA, 50 bp, Homo sapiens
agaagaagcagctgctcagatgaagggctaaactgcacggtcaagaatag

SEQ ID NO: 662467 - DNA, 50 bp, Homo sapiens
tgttgctctagcaacaggagagatcttcttggaaacagaattgttctaca

SEQ ID NO: 662468 - DNA, 100 bp, Homo sapiens
cggggagctgaacgtggacagcctcatcacccggctgctggagggaggcaggtggaagtcatcataaagtttctgtttcacccgtcgtccatgttcgagg

SEQ ID NO: 662469 - DNA, 100 bp, Homo sapiens
aacatgcagattatatcgcatcctatggctcaaagaaagatgattatatttattgctaaacatgggtgcatttttggataaacccaaaactgaaaaacat

SEQ ID NO: 662470 - DNA, 80 bp, Homo sapiens
cctcagttggaagcagccgatccagcctgcggagcctgtggggcagatcaggatcctcatgaccagccaaagagaagaag

SEQ ID NO: 662471 - DNA, 73 bp, Homo sapiens
ttgccaaagattttatgacttatttgtctgcacctaatgcttctgttgctacatccagaagatcaagtcggga

SEQ ID NO: 662472 - DNA, 95 bp, Homo sapiens
gaagagcagtttatacttactttgctgcaggtggagaaattttcagcctgtgtttacctgagttggctgaaatggtttctgaaaatgatgttatc

SEQ ID NO: 662473 - DNA, 74 bp, Homo sapiens
tccgagcagggaaaccttaccagctccagtcactattccaggtcctcaggatatagccgtgacctaaacacaga

SEQ ID NO: 662474 - DNA, 75 bp, Homo sapiens
ccgggtcactggccagcaccccgaggatattagaaatggctactccccagtcaattttcatctttgcaatctgca

SEQ ID NO: 662475 - DNA, 76 bp, Homo sapiens
gaaaccctctgagatatcaaccccctaggcatggtgaaaaggtcagtctgagctctaagtgtgcagaaattgaccg

SEQ ID NO: 662476 - DNA, 76 bp, Homo sapiens
ggagctgctccgtggccacgaggacgtcaccatgacatatggcatccaggagaaagatgtcttgccccttctccag

SEQ ID NO: 662477 - DNA, 100 bp, Homo sapiens
tacatcctgggcgtcttcccaggctgtcatataactcctgagaatagtggttcttaactctgagcccagcagccggggccgccctattacaccgacccag

SEQ ID NO: 662478 - DNA, 90 bp, Homo sapiens
gatggcatgcctgtaaagaacttgcagttgaaggagtataacacaggaatggtctgccgaaaaccgaccgacccggttgattggccacca

SEQ ID NO: 662479 - DNA, 100 bp, Homo sapiens
acagcaacgatattgccctggtccacctctccagtcccctgcccctcacagagagcccactccagttctacgtgaactaccccaacagtggaagtgtttc

SEQ ID NO: 662480 - DNA, 88 bp, Homo sapiens
caggacatcctggaacctgggaaagggagagccggacagggcagcggccggcactaccgcgctgcgatttgcgcagagctgaagaagc

SEQ ID NO: 662481 - DNA, 75 bp, Homo sapiens
ggcaggttccggaattcagtactgtggaactgcaagcacatgttgaccagataactgaaatggcagcagtaatga

SEQ ID NO: 662482 - DNA, 75 bp, Homo sapiens
gactccaggatttctgaagactattgtggaagaagcatccattaagggaggtggggaagacagggctccagctac

SEQ ID NO: 662483 - DNA, 82 bp, Homo sapiens
ctggcggagcaggaggatgggcggaactgaccaacactggatgaatttgaccatttcttaggagactggaatgttaagtttc

SEQ ID NO: 662484 - DNA, 80 bp, Homo sapiens
actggatgctgcagacactgaacgaggagccagtggcatccattctggacttgcactcaggggccctgtctgtcgggaag

SEQ ID NO: 662485 - DNA, 90 bp, Homo sapiens
gaaaatagattttcatttgcatgtcctacggagaaaaggagaacatcgtatgaggctgttgaaaatcctacagctacagagattcaagat

SEQ ID NO: 662486 - DNA, 101 bp, Homo sapiens
tggctctgcgtgagtgtggtctacgagctgtttctcatctttatactcttccagcagttgaccaagctccaccagttggccatgcagcaaaccccctttcc

SEQ ID NO: 662487 - DNA, 100 bp, Homo sapiens
tgggctacggactatgggcgaatagctctgaccacccggcgaagctataaggaagaccagatggatgagaaactaatggaacctctgaaatatgctgaac

SEQ ID NO: 662488 - DNA, 50 bp, Homo sapiens
gcgcttcgcgggccctgtcggtcccgccaggcgggcaccacggcaggggc

SEQ ID NO: 662489 - DNA, 82 bp, Homo sapiens
caagctctcctagaaatgttgaagaagctgcacaggccacaggtggaattaagaaatctggcaaaaagtaagctgttccttg

SEQ ID NO: 662490 - DNA, 90 bp, Homo sapiens
ggcggcggaccgtcccgcgcggggcacgatgttgaacatgtggaaggtgcgcgagctggtggacaaagcaccttattgcaatatgcaagc

SEQ ID NO: 662491 - DNA, 137 bp, Homo sapiens
ctccagccccatatgctccccagggatggggaaatgcatatccacactggcagcagcaggctcctcctgatccagtggcttttcatggcctgccactgaaaatcaagaaagaaccccacagtccatgttcagaaatc

SEQ ID NO: 662492 - DNA, 100 bp, Homo sapiens
ggtggcggcggcgtgatgttctcggcaggagcggagagtttgctccaccaggccagcaccgacagtaaatggttcacggccgacatcatgtccatagggg

SEQ ID NO: 662493 - DNA, 75 bp, Homo sapiens
ttgagggctaaaaaggtcctgtaagaagcggcatagcacccgtggtgcatggcttctccagggaaagtgaccgag

SEQ ID NO: 662494 - DNA, 82 bp, Homo sapiens
ctagagcggggcccggtatggaggtgggctagaggccgacgccagccagagagcggtactccaaagattcaggtttactcac

SEQ ID NO: 662495 - DNA, 100 bp, Homo sapiens
cttatttcggctgtgaaggacctgtttggggaggcatccgtgtcattctggaccttactcccaactaccggggtgagaactcgtggttctccactcaggt

SEQ ID NO: 662496 - DNA, 100 bp, Homo sapiens
gcattggggtccagccgtccccagaacgcagatcagaggtagtcggacctttcccgctggcgcgcagcctcagctagcaaaattctgtggcatctctgga

SEQ ID NO: 662497 - DNA, 100 bp, Homo sapiens
ggaattccctggatgaaggccgtcaccttaccttaaaccttttaagcaaggaaattgaactaagaaatggagaggaggatgaaggagaagatgactaaat

SEQ ID NO: 662498 - DNA, 50 bp, Homo sapiens
cggcggcgcagttgcgagtgcagagtctcactgtcgcccaggctgcagtg

SEQ ID NO: 662499 - DNA, 108 bp, Homo sapiens
ccgtccttctccactttcgccagcccgtgccgcgagcgcggcctgcaggagatttggtcgtattgggcgcctggtcaccagggctgcttttaactctggtaaagtgga

SEQ ID NO: 662500 - DNA, 102 bp, Homo sapiens
gaaagcacgtcctccccaaattgctgagttcaccgtcagcatcacggagggtgtcaccgagaggtttaagatgtgtggagttggctgttacgacatccctgt

SEQ ID NO: 662501 - DNA, 98 bp, Homo sapiens
cggcaatgaagatctggagctcggagcacgtgtttggagttgtggaaagtaaaaatgtagccctaccaaaaggaactattgtactggcttctccaggc

SEQ ID NO: 662502 - DNA, 50 bp, Homo sapiens
tggtggtctggggcaacgcggaagggaaatgaggcaagttatcctttgga

SEQ ID NO: 662503 - DNA, 100 bp, Homo sapiens
tggtagtagtcaatcagcagggaaaaccaattctgtgtcctcggaggaccacagcccagttgggccccaggcgaaacccagcctggagcttgcaggcagg

SEQ ID NO: 662504 - DNA, 75 bp, Homo sapiens
gccagctgccgcgactgggaggagcgccggaacgccgaggcccaggttgtgccatgagtgggctaattgctgatg

SEQ ID NO: 662505 - DNA, 82 bp, Homo sapiens
cgccggcccgcgggtctacttcctcaaagggtgcatctgagaaagacatcgtgcactctggcttggcatacacaatggagcg

SEQ ID NO: 662506 - DNA, 98 bp, Homo sapiens
cgaatgctgggagagtccgacgagcgctgcactaacgcaggatccggctgccgaaggtcctcgccaggtgatcatggaggaagcactttactcccacc

SEQ ID NO: 662507 - DNA, 113 bp, Homo sapiens
ccacaatgtgactactttgactactggggccagggaaccctggtcaccgtctcctcagatataaaggtaaatgctatctaagccacagtaaccttgagatactgtgggcctgg

SEQ ID NO: 662508 - DNA, 95 bp, Homo sapiens
agaaggagctagctgaaataacccttgatcctcctcctaattgcagaaacttgtggtggagaatgttgatgtgttaacacaaatgaggaccagct

SEQ ID NO: 662509 - DNA, 100 bp, Homo sapiens
gatcagcgaggagcagcagcagctccagcaggcgctggctcctgctcagctacttcccatattcatgcaacttggatcacgggagctgatgatgttctat

SEQ ID NO: 662510 - DNA, 83 bp, Homo sapiens
ccgtgctcctgcagggacactctgtctacggacccttgtgctcccttgcctcagctcctatgatagctactgcagcaatcaag

SEQ ID NO: 662511 - DNA, 90 bp, Homo sapiens
cagattcgcagtggtcgcttcttctccttgacagagaaagagctggacccagatgggctgaagaaggagtcagagcgggatcgggcaatg

SEQ ID NO: 662512 - DNA, 88 bp, Homo sapiens
ggaagacgtgcggctacaggagcgcacgagcggaccctgtcacactcactgaaaatggcggaccagaacctggagaaactgaagacgg

SEQ ID NO: 662513 - DNA, 101 bp, Homo sapiens
gctgcaggctctcggctgcagcgctggacggaggacatccgcttggagccagatctatacgaagcctgcaagagtgacatcaaaaacttctgttccgctgt

SEQ ID NO: 662514 - DNA, 82 bp, Homo sapiens
gactggaaacaatggcatttacagaaagagtcaacagcagtggcaacagtgctactgtaaacaaccttcaggcaaaagtaga

SEQ ID NO: 662515 - DNA, 83 bp, Homo sapiens
attacgcggcagacacacactcaaactcgcgcggggcagccaagagacgagaattatgttagagttgtggaggtttggtggga

SEQ ID NO: 662516 - DNA, 95 bp, Homo sapiens
aaaggcgcaagtcgagaggaaactgttgtgcctcttcatattggcgatcctgttgtacacgttggtcgtcattgcctccgagcccactttagccc

SEQ ID NO: 662517 - DNA, 90 bp, Homo sapiens
cgagtcgccgctgcagccctagtgactgcggcctgcatcccggtggagccgccaccaaaatgcagattttcgtgaaaacccttacgggga

SEQ ID NO: 662518 - DNA, 75 bp, Homo sapiens
atggagggaggtttggcagatggagaacctgatcgaacttcggttatcttatgatgaggcttttgctatggctaa

SEQ ID NO: 662519 - DNA, 118 bp, Homo sapiens
ccctcccgggcggcgaccggggcctgggtccacgccgagggcaggacgaacttcaccagggggatatgagactttctactcggaatatcctgagtgttgcgtggatgtaaaacccatt

SEQ ID NO: 662520 - DNA, 100 bp, Homo sapiens
agaaaatgcaaaaaaactaatggaattagcctgcaacatgaagataacaacgaacttgatgcaagtgataggtttgccaaggtcagacctctcatcatcc

SEQ ID NO: 662521 - DNA, 88 bp, Homo sapiens
gcggaacgcaggagacacaagaagcggatccagcatatgagctatttgcattcatcagtcacatgggaacatccacaatgagtggtca

SEQ ID NO: 662522 - DNA, 101 bp, Homo sapiens
gatgacgcgctcactgttcaagggaaacttttggtggaatgcagtagccctctgggcctgggatattgtggttgataactgtgccatctgcaggaaccaca

SEQ ID NO: 662523 - DNA, 82 bp, Homo sapiens
gagcttggtttcgggatctcggtgctgcagacggcgagacctcctgcacagaaaatgtggtgacctggaagaagaactcaag

SEQ ID NO: 662524 - DNA, 75 bp, Homo sapiens
atcaaataacacagttggaatccttgccgtgctggtatagaggactctaagaagtggggcatgctgtttctggtg

SEQ ID NO: 662525 - DNA, 100 bp, Homo sapiens
cgtgagattgtaccccacgagctgccacacggcctgcactctgcgctttgagctactgggctgtgagctgaacggcccatggacagaccttcacgttccc

SEQ ID NO: 662526 - DNA, 100 bp, Homo sapiens
catcctgccccggcgccagctgcctcctggacttgagtccttgaacgtctctgtggctgcaggtgtcatggagaaactccagctgggcccagagattctg

SEQ ID NO: 662527 - DNA, 51 bp, Homo sapiens
agggcccgatgagccagagaagcttgtgtcagaacctccatgactccgagc

SEQ ID NO: 662528 - DNA, 96 bp, Homo sapiens
tctattctggacatgataagcttaatgaggaaatatcaagaacatgaagatgttcctatttgtattcattgcagatcccaagcaggtctgttccag

SEQ ID NO: 662529 - DNA, 99 bp, Homo sapiens
ggtcagttcttcacctgcaagtgttaggagaaaaaatcctaaaagacaaacttcagatggccaagtacatcaccaagtctccagagaatacagagggca

SEQ ID NO: 662530 - DNA, 90 bp, Homo sapiens
tttgagaagaatgtggaaataacggagcaacttgctaatggcaggcattttacaagcctcaagtactacagccttccagcagccttccca

SEQ ID NO: 662531 - DNA, 50 bp, Homo sapiens
atttgacatctttacccgactctttcagggaaatgtgtccttctcatgtc

SEQ ID NO: 662532 - DNA, 98 bp, Homo sapiens
ctgctgtcgcccagcgccgccccgtcgtcgtctgccttcgcttcacggcgccgagccgcggtccgagttatcaatactctggctgaccatcatcatcg

SEQ ID NO: 662533 - DNA, 93 bp, Homo sapiens
ccaccgccgccccctccggcgtgttcatgcccccgggacctgcctagagctggaacgttacctccagagcgagccctgctatgtttcagcctc

SEQ ID NO: 662534 - DNA, 50 bp, Homo sapiens
gacttcgtgtgcacattcgtgtacaaggtgaaagaaaatggcccgaacca

SEQ ID NO: 662535 - DNA, 74 bp, Homo sapiens
cccccgtggcgcacaagcatgtaggtgccagaactcaccgccagagcctgtgctccaatgaggctgtattggtg

SEQ ID NO: 662536 - DNA, 98 bp, Homo sapiens
cgacggggtggacggcgtgaagaatggcagtaaagctgaggcgaagcaaatggcatatgtggactagaatggagggtgcaggggcccaagccaggagg

SEQ ID NO: 662537 - DNA, 87 bp, Homo sapiens
attggactcatggtgctgcatgcagagatgctgtggttcggggggtgctcgatggtctgtcttctgctgatcccaactctgattgga

SEQ ID NO: 662538 - DNA, 73 bp, Homo sapiens
atctacggtggtgctcctaagggaccacaaatacgtgatttggagagaggtggtatgcagatcttcgtgaaga

SEQ ID NO: 662539 - DNA, 90 bp, Homo sapiens
gttttccttcttacagagatgtgactctgtttgaggaatccagatcttacataagatggaagtctctcacactagatactgaacattaaa

SEQ ID NO: 662540 - DNA, 90 bp, Homo sapiens
ccctgaccccgcggccggacgacccaagcccgctgagcaggatgaggatcttggcatatacagaagggctgcatggaaaatggctgttca

SEQ ID NO: 662541 - DNA, 75 bp, Homo sapiens
ccccagcagcccccgaaggccctatcaggacatggagtatgaaagacggtacaactccaaaaggagacattggag

SEQ ID NO: 662542 - DNA, 83 bp, Homo sapiens
ctacagaggcacatgctcacacacactgataacgaaggaggcccaacttcattcaataaggagcctgacggatttatcccaga

SEQ ID NO: 662543 - DNA, 101 bp, Homo sapiens
acactctacggaagtacgcaagcccacggggagcagagcagcaactcacccagcacacaaaatggatctcttacggagtggaagctggacacactatgtga

SEQ ID NO: 662544 - DNA, 100 bp, Homo sapiens
ggcagccatcctcagcagcagtcagcaggaactgatcatcaaagagctaaagttgcagacaagatccagctcatcaataatatgctggacaaagtcaatg

SEQ ID NO: 662545 - DNA, 99 bp, Homo sapiens
tacctggatctcatcaaaaaggacaccagcaagctgttcaatgaggaggtcagccatgtcatctgagcctcccccaccaccacagccccccacccatca

SEQ ID NO: 662546 - DNA, 100 bp, Homo sapiens
tgtcaaagccaagacataaactcaaccccttctcttccaaaagagtgaattactggaactgaaacggcagcagcaagagcaagaaagagccaaaatccac

SEQ ID NO: 662547 - DNA, 90 bp, Homo sapiens
cgccgctgcgcccgacgctccctgtctgggaccttctccctgcctggacccctactattgcaacaaggacaactacacctttgcccaacc

SEQ ID NO: 662548 - DNA, 75 bp, Homo sapiens
acccgggagccagatcttggaccctgaactgcacctctgtcaagtccacaggtcctggctaccctgggaagagac

SEQ ID NO: 662549 - DNA, 90 bp, Homo sapiens
cgccactacagttcatcaacatcaactacgtccctctgaagaagcgtaaaagatgtgttgttttcaatcaaggtgaattggatgctatgg

SEQ ID NO: 662550 - DNA, 114 bp, Homo sapiens
cctcattatccgctatgatgtggaccgggccatctccgggggctccattcaggtggtgaaggcatttgtggtcctggcctcgcagttcctgtcccatgacccagaacagctcac

SEQ ID NO: 662551 - DNA, 82 bp, Homo sapiens
acaggcgccgcgggctccgcgcccggccggacccgggcccgaggctccataaaaatacagactcaccagttcctgctttgat

SEQ ID NO: 662552 - DNA, 75 bp, Homo sapiens
gccgtgcggctcttctccaagcatgagactatctgttatagtccctgggtcaagacaacaatttttataccttcg

SEQ ID NO: 662553 - DNA, 96 bp, Homo sapiens
catggcattctgcaggtggcaggtgtcatggagaaactccagctgggcccagagattctgcagcgggaaaatccaaggcttatttatgccaggctg

SEQ ID NO: 662554 - DNA, 100 bp, Homo sapiens
tgtggataccccgagcggcaccaacagcggcgcgggcaagaagcgctttgaagtgaaaaagttgctggagacagtgccccagaacaatgagaacccttct

SEQ ID NO: 662555 - DNA, 75 bp, Homo sapiens
gcggccgcagctgccacaaaccagagctgacttttttgaagatgaggcgattgaacagattttgaagtataatcc

SEQ ID NO: 662556 - DNA, 95 bp, Homo sapiens
ctgagaagcctggtcaatatccgaaaggacacactgaggctcgtcaagatgaagcctgctgggagcgtgaatgacatggccctggatgccttcga

SEQ ID NO: 662557 - DNA, 51 bp, Homo sapiens
gccgaggactccagcacaccgaggacatatctgaagagatggattaagaat

SEQ ID NO: 662558 - DNA, 90 bp, Homo sapiens
ggagcttggtttcgggatctcggtgctgcagacggcgagacctcctgcacagttttcggctttgtgagaaaccttaccatcaaacacgat

SEQ ID NO: 662559 - DNA, 100 bp, Homo sapiens
ggtcaccgacaaagtcctgaattctatcatttcttcccttgatctactgccgtctttatcagtaccatatgcttatcagtgctgtgcattttggggttgt

SEQ ID NO: 662560 - DNA, 100 bp, Homo sapiens
aaaaagagatgtggggggattctcgacctgctaacagaactggaccttttcgcgagaattagaactgcagcgtcagcgtgacttgcataagatcaagcag

SEQ ID NO: 662561 - DNA, 126 bp, Homo sapiens
aggaagtgttcagtcaagaatgggattctgaccatctcacatgccacagttccagcaacagatagaaatgctttaagttcactctggggaaagctggcctctgaaatcttaatgcagaattgggat

SEQ ID NO: 662562 - DNA, 83 bp, Homo sapiens
ataaggattgtcctctttctacaaaagaaatatggctacacacacctttctgcaggagagctgcttcgtgatgaaaggaagaa

SEQ ID NO: 662563 - DNA, 100 bp, Homo sapiens
ctgccgtctacttcaaggagcagtttctggacggaggtctgctgctaccatcttccgttgatgcaagtggagctgcccatcagccttctcacacgcctgg

SEQ ID NO: 662564 - DNA, 100 bp, Homo sapiens
aacactggcaatttgaacttctgaattatacaccagcagattatgctgctggtgtccacccgaggagacaacgagaaggtccagcgggagctgagccacc

SEQ ID NO: 662565 - DNA, 100 bp, Homo sapiens
tgatgaagtgttagacatcgagatcaatgaacctttagatgaatttacagatttgcatgcagccactgttaacccggaccccagtttaaaagagtttgaa

SEQ ID NO: 662566 - DNA, 51 bp, Homo sapiens
gaatctgtcttggaggacatcagaagaaactcctagaagctcatgaagaac

SEQ ID NO: 662567 - DNA, 90 bp, Homo sapiens
ggaagatggcggcgggggcgagggagccacataacaagtaacacacatctctccatgtcttcagaacgttgagggcatgttctcaaccac

SEQ ID NO: 662568 - DNA, 75 bp, Homo sapiens
ctatagcatccgcagcatcggggagaggcctgtcctcaaaggtctgccatcatggatgttctcgcagaagcaaat

SEQ ID NO: 662569 - DNA, 75 bp, Homo sapiens
agatgtgtctccagatgtttgtgtgggggaccttaggcttgcattgcagcgtacagaacaagcggctgccagaaa

SEQ ID NO: 662570 - DNA, 95 bp, Homo sapiens
gcacccagggggcagccgcctcatcggccaccacggcgctgaggacgccacggagctatgaagacatgattggtgaggaggtgccatcggatcaa

SEQ ID NO: 662571 - DNA, 100 bp, Homo sapiens
cttggccctgcttgacaaacccccgttcttgacgcagctgcactcctgcttccagacagtgtgtcacaccatgtctgaccggaaggcagtgatcaagaac

SEQ ID NO: 662572 - DNA, 101 bp, Homo sapiens
cggggtcctcttctgcaaggtccggctgctggatggaggggattttgtcagcttgtcgtcaagggctgccggtcacttgctgcagggcacccgggatatat

SEQ ID NO: 662573 - DNA, 101 bp, Homo sapiens
ttcagtgggactcccccagcagatacattctcaatatattcgactttatgggagaaaatttagcaaagaagatcatgttctttttattaagttattgtatg

SEQ ID NO: 662574 - DNA, 100 bp, Homo sapiens
gcggacctggtacctcttttgtgaagcggcagctgaggagactccggcgctcgccatggccgacgaaaagcccaaggaggcacgcggacctccagtggcc

SEQ ID NO: 662575 - DNA, 74 bp, Homo sapiens
gttcttccgcagcatagactgggacttggttgacatcatggacatatgtgagtccatcctggagaggaagcggc

SEQ ID NO: 662576 - DNA, 75 bp, Homo sapiens
ctgctccacctctgattccaccaccggaaaatatttacaccagcagctccagttcataccaataaagaagatcct

SEQ ID NO: 662577 - DNA, 109 bp, Homo sapiens
atcgacgtcgtgatccagaagtccagagctgaggactgcctgtttgcaggtcaaaatgcagatcttcgtgaaaacccttaccggcaagaccatcacccttgaggtggag

SEQ ID NO: 662578 - DNA, 100 bp, Homo sapiens
agtctgccgtacatgtgaaaatggtttctgctgatgtactccacggttctgtgcagctattacaattcagccctgacgacagcagtggttggagccatca

SEQ ID NO: 662579 - DNA, 98 bp, Homo sapiens
tccgccttctctgtcagctctttccccgtcagcatcccagccgtgctcacggctgcctgctgtttcccggggagatcatgaaacgaggtcgccttccc

SEQ ID NO: 662580 - DNA, 101 bp, Homo sapiens
agaagcggggaccatgttccgacgcaagttgacggctctcgactaccacaaccccgccggcttcaactgcaaagactatatgtcggaaaccaaagacctcc

SEQ ID NO: 662581 - DNA, 83 bp, Homo sapiens
tctgctgcaccgacctcgacgtcttgcctgtgtcccacttgttcgcggcctataggtgagcgagtgctgtgctttcatgggcc

SEQ ID NO: 662582 - DNA, 98 bp, Homo sapiens
acccagcgcagaaggctgctgccgccggacgcctccattgtttgaccacaacaagggccggattctcacccagataagagtgttgctgttgatcatct

SEQ ID NO: 662583 - DNA, 75 bp, Homo sapiens
aaggattccaagtaactcttatttggccagcaaggtgcctttctgcaagttccacctgggtgaccgacccatccc

SEQ ID NO: 662584 - DNA, 83 bp, Homo sapiens
cgggaatatatccgaagcctgaagatggttccaagtattccctatctagctctatcgcctgacactagtgtttcagtctttac

SEQ ID NO: 662585 - DNA, 100 bp, Homo sapiens
cggcgagaggaggccgtccagcagatggcggatgccctgcagtacctgcagaaggtctctggagacatcttcagcaggacgcacagacattcgggtgctt

SEQ ID NO: 662586 - DNA, 100 bp, Homo sapiens
ccaactgttacaatcaaggtctatgaaggccttagcagtaggaggactaggctccattataagagttcttacagcaagaaagactgtttaaaaaaaataa

SEQ ID NO: 662587 - DNA, 110 bp, Homo sapiens
ccggcacgcgccttccccgccgccacgatgcccaagaggaaggtctttgagagctggatgcaccattggctcctgtttgaaatgagcaggcactccttggagcaaaagcc

SEQ ID NO: 662588 - DNA, 100 bp, Homo sapiens
atatcactgggtcacaatcactctggacttaagacagggccgttcctggccggttctccggagttacgatgactttcgttccctggatgcccacctccac

SEQ ID NO: 662589 - DNA, 100 bp, Homo sapiens
acaggatttctttgcaccgagatcttggaccagacactcgacctcctgagcctactgaacttgacgcactggtatttggccatctatacaccattcttac

SEQ ID NO: 662590 - DNA, 73 bp, Homo sapiens
ctggctagtggcttattacttgtgactggagtgtgctgaaaaacaaggccaaattgaacgagtcattaaggaa

SEQ ID NO: 662591 - DNA, 75 bp, Homo sapiens
ccagaggagctacaggaaaatgaggcagaggggcaggcttggggaacaatgatggtgcacaaaggcttagatttg

SEQ ID NO: 662592 - DNA, 100 bp, Homo sapiens
cgctggagtccgcgcctccctggaccctctttcccagctgcccgctcctcagcacccgaagattcgcctgtacaacgcagagcaggtcctgagttgggag

SEQ ID NO: 662593 - DNA, 83 bp, Homo sapiens
ggccatcgaggtgtggacgcatccggcgaaaccacctacaagaagattcccaggactccggctctctctgcttctgtttccgg

SEQ ID NO: 662594 - DNA, 74 bp, Homo sapiens
tttcatgtgcgatgatgaggaggactacgacctgttattcaagcggagaaatgttgctacagcagaagaagaaa

SEQ ID NO: 662595 - DNA, 75 bp, Homo sapiens
gctggcgctgaccttcatcacagacaacagcctggtggcagcgagaatggatcttggagaatgtctgaaagtcca

SEQ ID NO: 662596 - DNA, 75 bp, Homo sapiens
tgcggcgcggggaccgctgtgctctcgatgtggacgagtgctcactagcagaaaaaacctgtgtgaggaaaaacg

SEQ ID NO: 662597 - DNA, 83 bp, Homo sapiens
cttagctgtgctcgcgctactctctctttctggcctggaggctatccagccccagaaaattcatctgaacagccttcctacag

SEQ ID NO: 662598 - DNA, 100 bp, Homo sapiens
atgagtgtattcttctcttctccgatttaccagaattctgcttggtcagaatcgtgatggcattgtgttcagcactgatgactattttcaccatcaagat

SEQ ID NO: 662599 - DNA, 100 bp, Homo sapiens
gatggccatggcataaggaactctatcccaggaatacagctttgcattagggatgtccgtcgcttggtagtggccatgtctagagccagacttggacttt

SEQ ID NO: 662600 - DNA, 75 bp, Homo sapiens
ccggctctcgtcagcctcccgccggccgtctccttaacaccgaacaccctatgctaagaaggaatctgatcttaa

SEQ ID NO: 662601 - DNA, 90 bp, Homo sapiens
ctgcaacattctggcttgggttccatccttatatgaaccagttcctgatgatgatgaggtttccacttgagcggcacagtgacagaacct

SEQ ID NO: 662602 - DNA, 74 bp, Homo sapiens
agcatctctctgtggatcattgctgcctggaccgtccgtgtctgtgaaaggattttccctcctggtgagtcaaa

SEQ ID NO: 662603 - DNA, 75 bp, Homo sapiens
tgggtcgatttggatctgggatgaacatgggcaggataaatgagccaacacagatctatagatttcttcgaactc

SEQ ID NO: 662604 - DNA, 100 bp, Homo sapiens
tgccggccggcttcgctgcgggtttgcactgcccgggagctgacatggacccaaatcctcgggccgccctggagcgccagcagctccgccttcgggagcg

SEQ ID NO: 662605 - DNA, 82 bp, Homo sapiens
agctaagatgccaggacatcctggaagctgggaaaagccatggaattccatgaacacttgcacagcataggcaccaaggaag

SEQ ID NO: 662606 - DNA, 75 bp, Homo sapiens
aggctcgcgagatccgcatgaaggagctggagcggcagcagaaggaggtagacatagctgacattgagaatgaag

SEQ ID NO: 662607 - DNA, 90 bp, Homo sapiens
ggttgacgttgcctctcggcggcgcggcggcggtggacgagtacctggagtaccggaggtatatcaggattggagataaagaatgtgaat

SEQ ID NO: 662608 - DNA, 100 bp, Homo sapiens
ggagcctggagggcaaagcgtggtgcgagcaggtttaaaagcaagttcatgaattcgcgtgccgtgtgcacggagagaggccgtagttcctggggctgga

SEQ ID NO: 662609 - DNA, 83 bp, Homo sapiens
gaatcgcccgcctctccaagaccatccctggctgctggggttgtagaaggtgatttagctgccatagaagcatacaagtcatc

SEQ ID NO: 662610 - DNA, 95 bp, Homo sapiens
aaaaatagtgatagctttgataacatgaagaaagcagtgtcactgataaatgcaatagatacaggaagatttccacggttgctcactcggattct

SEQ ID NO: 662611 - DNA, 87 bp, Homo sapiens
tcggctccgggtccacaagaccttcaagtttgtcgtcgtcggggtcctgctgcagatgaggtttatataactttccaagacaaggaa

SEQ ID NO: 662612 - DNA, 75 bp, Homo sapiens
cccaaatgtctgactctgactctcggactgagaaacgcaagattttgcaagaacgaggctcaaggatgtgaggga

SEQ ID NO: 662613 - DNA, 98 bp, Homo sapiens
ccttaaaccttttaagcaaggaaattgaactaagaaatggagagtgtgtttcctgtaacaaatcgttcaagaaactctggtcccttcatgaacatatc

SEQ ID NO: 662614 - DNA, 76 bp, Homo sapiens
caggtggagaaggtggtagacaagttcatcaagcaaagggactaccaccagcaggaggaggtgcgccagtctgtaa

SEQ ID NO: 662615 - DNA, 82 bp, Homo sapiens
gcggcggcggcgggcccggcggcgggccgaggagccgggcgcaatggagcggaagaggggaacgcccttttgcttgtgactg

SEQ ID NO: 662616 - DNA, 87 bp, Homo sapiens
ggcggccgaggtagaggcagtggcgcttgagttggtcgggggcagcggcagctatcatggtgaacttacttcagattgtgcgggacc

SEQ ID NO: 662617 - DNA, 82 bp, Homo sapiens
gtcatgagcgacagcggcgagcagaactacggcgagcgggatgaatttcatcctttcatcgaagcacttctgccccacgtcc

SEQ ID NO: 662618 - DNA, 82 bp, Homo sapiens
aaattcccggaaccgcgattcggcgtgtcagaattcagaaggagctggcggacatcactttagaccctccacctaattgcag

SEQ ID NO: 662619 - DNA, 115 bp, Homo sapiens
ttcccttggtgcacctgtggccgccatgtttgagcgaggtactccaaagattcaggtttactcacgtcatccagcagagaatggaaagtcaaatttcctgaattgctatgtgtct

SEQ ID NO: 662620 - DNA, 100 bp, Homo sapiens
ggcggcgctcggcgatggtaggcgtccctggagcggccgccttccagcaagattccggcagcgatgaagatttcctaatggaagatgatgacgatagtga

SEQ ID NO: 662621 - DNA, 90 bp, Homo sapiens
taagaagacagcttgaacctagggcttggcaccccctccctgactctccaggcccacagctgtggtatcaacagcctgcacaccttgccc

SEQ ID NO: 662622 - DNA, 88 bp, Homo sapiens
agcgcccccaggccgctcccggggctcacgggccttggtgtaccttgttgtagtgtttgaaaacatctgaggctgcatccatctccag

SEQ ID NO: 662623 - DNA, 83 bp, Homo sapiens
cttggactgagtcctgcaggacacaggtcaatgagctgaaggagaaaggcaacaaggccctgagcgtgggtaacatcgatgat

SEQ ID NO: 662624 - DNA, 101 bp, Homo sapiens
gccaacaatatagtttggtgtttcggaagccaagctcctgtcttcgttcctggctagaacaagacacctcctgtccaacatgcagaatgtctcttaatatt

SEQ ID NO: 662625 - DNA, 100 bp, Homo sapiens
cctgggcgccgcgccgcacgagcaccagcctagagccagacatgcggcgggatgtgcaggagatcttccgcctgacaccacacgagaagcagtgcatgat

SEQ ID NO: 662626 - DNA, 78 bp, Homo sapiens
aaagtttgatttgatctggaaccgggctcagtcctgtccaacagcaagaaaattggatgtatattttgaatatgaaga

SEQ ID NO: 662627 - DNA, 90 bp, Homo sapiens
gtgtagctgccgtggttgccaggagagctgcgccggcgagaagcggccgagccagcagcagaatctgaattatccagaacagaaagttgt

SEQ ID NO: 662628 - DNA, 50 bp, Homo sapiens
aaagagaacagagagtcctggggacagcttttatgaaatgtggaagtgag

SEQ ID NO: 662629 - DNA, 88 bp, Homo sapiens
caacacataaaaattatttatccaacagctcctcccagctgagctttcagcacaagatcgggatcctttattgcaaagcaggccagag

SEQ ID NO: 662630 - DNA, 90 bp, Homo sapiens
ctgtcatataactcctgagaatagtggttcttaactctgagccagatgaccaggatgccccagatgagcatgagccctctccatcagaag

SEQ ID NO: 662631 - DNA, 75 bp, Homo sapiens
ctttgagccgccccgaactaagcagggcggtcggggtttggctgtagcagcaattcctgaaggtctccccattgt

SEQ ID NO: 662632 - DNA, 96 bp, Homo sapiens
aaaaaaggcgaatgacttcagattccatggcaggtcaaaatcagaactggtaagatttctgcatatctgcatgttggcagataaattgaacatgac

SEQ ID NO: 662633 - DNA, 82 bp, Homo sapiens
aaaagactgggcttgtccttgctggtgcatgcgtcgtcggcctctgggcagcagactctgaacaggaagtgcctcctggaac

SEQ ID NO: 662634 - DNA, 100 bp, Homo sapiens
tgtgaccacccctgaagaaattgcacaggtatccaaaccttgaaacctttgctctagatgtcaggcttgtttttgacaactgtgaaacatttaatgaaga

SEQ ID NO: 662635 - DNA, 48 bp, Homo sapiens
cgacccgtactgggcctactctggagcctagtaataaacgggtcaaac

SEQ ID NO: 662636 - DNA, 100 bp, Homo sapiens
ccccaaagaagaaacaagttatttcttgtaatgtctgtcagcttcgctttaactcagatctgtctgcttttctgtggagactgcgggttgcagacaccag

SEQ ID NO: 662637 - DNA, 75 bp, Homo sapiens
aagagctgaagagacctggagccgacagacgtttttggctttcacccccaaccagtgaccaaagacttgaccact

SEQ ID NO: 662638 - DNA, 75 bp, Homo sapiens
caccgagcccgcccgacccgggctcccacctgctcctccagcgcaccaggtgctggagaatctggtaaaagcacc

SEQ ID NO: 662639 - DNA, 100 bp, Homo sapiens
cagcagatcgagtcctaccccacggacagcatcctggaggaccagtcagaccagcgcgtcatcatcaagatttggagcaagaggtggtggtggccttccc

SEQ ID NO: 662640 - DNA, 80 bp, Homo sapiens
atccagaagtccagagctgaggactgcctgtttgcaggtacctgcaccagtcaggggccctgaccatggaggccctggag

SEQ ID NO: 662641 - DNA, 88 bp, Homo sapiens
gctggtgttgtccctcccgtggcaggttgtttacattcagagctctatcaataagaggaatacatattacagtgaattcgacaaccgc

SEQ ID NO: 662642 - DNA, 82 bp, Homo sapiens
caggcatccggtcctggtccctgctggttggatgacactcctgtccaggacactaaaatgtgaagaacagctcattgtgccc

SEQ ID NO: 662643 - DNA, 100 bp, Homo sapiens
caccaaccagacctgtatcctgtgggatgagacggatgtgtcctgcacacccatgaagcgactgacccagctggtctgaagcaccccacgaggaggtaat

SEQ ID NO: 662644 - DNA, 98 bp, Homo sapiens
cgcaaacaagccaatcccaggaggaaaaacggttatgaagacagtatggagtttccagaccatagtagacatttgctacagtgtctgagcgagcagag

SEQ ID NO: 662645 - DNA, 75 bp, Homo sapiens
gttggctgcatatttgcagaaatgtttcgtagaaagtcaagagcaatctgaatccaaatgcaaaggagtttgttc

SEQ ID NO: 662646 - DNA, 98 bp, Homo sapiens
cgaagccatgatttaaatatcggcgttaaggtacctgaaagaattccgcacagagcagtgcccactctttgtgcaacacaaatgcacgcagcatcggc

SEQ ID NO: 662647 - DNA, 87 bp, Homo sapiens
ggctacacatttccagcaggctgcagatacgagtggacaagcctgggcagtttttaaagggaagtttaaagaaggggacaaagctga

SEQ ID NO: 662648 - DNA, 105 bp, Homo sapiens
cctggccgatgaggaagtactgagcctgttggaggaactggcccggaaacaggaggacgatgatcggctgaatgtaacagaggaactaacgtccaacgacaagac

SEQ ID NO: 662649 - DNA, 83 bp, Homo sapiens
aatatgccaaggaaaaactggagagcttcatcaaaaatagtgatagctttgataacctttttcacatagctcttggctgtagg

SEQ ID NO: 662650 - DNA, 82 bp, Homo sapiens
ggggcaggagcttctgggagccaccgtctgaagggcgtgatggtgggcatgggtcagaaggattcctatgtgggcgacgagg

SEQ ID NO: 662651 - DNA, 89 bp, Homo sapiens
ttaaaggagtggacattgctagcaatgagctcccaaagccatccaggagctacagggagctggccgactgcacctggcacatggcggag

SEQ ID NO: 662652 - DNA, 94 bp, Homo sapiens
gctgtgcgcgctggcgctgagcctgcagccggccctgccggtgctggagaatctggtaaaagcaccattgtgaagcagatgaggatcctgcatg

SEQ ID NO: 662653 - DNA, 100 bp, Homo sapiens
ggcgctgaccttctttgtcgcagcgttccatgtgtcctgcctgaaggagctggtggcccgagtgctgcagaggctgtgcgagcgcggcgcgaagaacgtg

SEQ ID NO: 662654 - DNA, 90 bp, Homo sapiens
ctccgcggcgctccgggcccgggcggctggcctcaccgcccactgggcaactcagcatatctgccaccaaaaatgtaaagaggaaaaatg

SEQ ID NO: 662655 - DNA, 100 bp, Homo sapiens
atgaatagttctactccttctacaggtgtgtatgttggttgaatctggcgatgtggaacccatggatatggagggctgactatatacaccatgttttttc

SEQ ID NO: 662656 - DNA, 100 bp, Homo sapiens
ctccttttccctctccctttccctaagggaggtggggaagacagggctccagctaccacaggacgggctctgggtatagccgttccagtcagggacagcc

SEQ ID NO: 662657 - DNA, 98 bp, Homo sapiens
cgcgcggttgtaactcggccctagttacctggccagggtacgcgacaattggcggagagcaaatttttcagaacataaaacaagaatatagtcgttat

SEQ ID NO: 662658 - DNA, 105 bp, Homo sapiens
gttgcctggctccacgccctgctgggtcctacctgtcagagccccaaggtgaactgcgccaggccactgtggccatgatgaacaggaaggatgagctggaggagg

SEQ ID NO: 662659 - DNA, 100 bp, Homo sapiens
ctgtacttctgggtaaactggagaagagcttcaactctgttcacctgcttgcagatgatgctggagggtcttgaaatctttacagtaaaacctgcaactt

SEQ ID NO: 662660 - DNA, 97 bp, Homo sapiens
agagttagctaaagaactccctcaagtttcatttgtgaagatgagtggaggctttcttccagtgctgatgccaatggaaatgcccagccctcttcac

SEQ ID NO: 662661 - DNA, 96 bp, Homo sapiens
cagaagcgactttggtgagactctggactcaaagccacccgtcatctcgttacaaaagctcatcgtgagggaagtggccaacgaggagaaagcgat

SEQ ID NO: 662662 - DNA, 75 bp, Homo sapiens
cgtcgtcggcctctgggcagcaggtcttgggcgtctttggtactggcttttttaggggtctgcctggggattacc

SEQ ID NO: 662663 - DNA, 98 bp, Homo sapiens
acccacatacaggagacaccaaagaagagaaagacaaggatgaccaggaatgggaaagccccaggtggctgatggccaagagtctacaccaccaacac

SEQ ID NO: 662664 - DNA, 75 bp, Homo sapiens
gggatactcaacttgattccatcaaccaggctcccacatcaggacgagaaggagccctcgagttaccgtgggagc

SEQ ID NO: 662665 - DNA, 82 bp, Homo sapiens
tggcaattttggagaattacgattagaattgcagaatttacctcaagaactctttgctgttgacccaactaccgtttcacaa

SEQ ID NO: 662666 - DNA, 100 bp, Homo sapiens
cacaagtgcccctcccgtccagatctccaccgtacagcaaacggggattcagcgtccgatcctttggaacagggactcacgtgaagcttccaggaccagc

SEQ ID NO: 662667 - DNA, 98 bp, Homo sapiens
cttggcccaaatgttacactcacaaccactgcgccaggaaagtgtcgggccaaccactggtctgcgatcatcggaggatcccactccaagaattatgt

SEQ ID NO: 662668 - DNA, 100 bp, Homo sapiens
acgtcagggctcgttcccaagtctctttccagaggccaggctttatgggagcatgggttaccagcgacgcaccctgcatccgtgtcattctggaccttac

SEQ ID NO: 662669 - DNA, 98 bp, Homo sapiens
tcaacttctaccagttcctcggggtgcagcaggagaaccagcagaaatccaccaatgtagtctatcaggcccaccatgtgagcaggaataagagaggg

SEQ ID NO: 662670 - DNA, 75 bp, Homo sapiens
cgctcacacccgccgcctttgcacccaaggcctcgcgcgaccagcagaagcagcagtccgcggcgtgcggcaggc

SEQ ID NO: 662671 - DNA, 101 bp, Homo sapiens
atcacgaggccacccagtcccacttcaaacattcgtctcggaaaccccgcctcttacagtcacgaggaatcgacaaggagaacgttgaactctcccctacc

SEQ ID NO: 662672 - DNA, 100 bp, Homo sapiens
atcttcccaccaccttaaaccactgccattacagcagcagatcatcagactccaccaagagcttgggagacagaagtctctgtgggctgatgttcatgga

SEQ ID NO: 662673 - DNA, 75 bp, Homo sapiens
ccaccaaaagtccattatgaaactggaactgtggctgcaccatctgtcttcatcttcccgccatctgatgagcag

SEQ ID NO: 662674 - DNA, 84 bp, Homo sapiens
gaacgaggcaaggagctaaagcagcgtgcgttcagccctggggagctgacatggacccaaatcctcgggccgccctggagcgcc

SEQ ID NO: 662675 - DNA, 100 bp, Homo sapiens
tgccccatcacgacagacaaagcgtccctcaaggcccccgcgtggttcagacagacgccgcagccaggatggttgagggtttccaggcctgaggtgcccg

SEQ ID NO: 662676 - DNA, 74 bp, Homo sapiens
caggattccatggtagctgggatgttagggctcagatctgttacctaaagcaataaaaaatggccagaggatca

SEQ ID NO: 662677 - DNA, 100 bp, Homo sapiens
aatacaaagaagtattccctgaaaatgggtggaagctatatgaccctcttttagagtatagaaggcagctccagggttccttgaaaagaaaacaggtagt

SEQ ID NO: 662678 - DNA, 100 bp, Homo sapiens
aagtacatatgatttcagctgcaatggcagatatgattctataacagactcttccagaaatgatatgaagaggaaatttgccctgacaatggaatttgtt

SEQ ID NO: 662679 - DNA, 90 bp, Homo sapiens
ccccgtcgccgccgccgccgccgccgcagcttgggaggtgctgccaccacagttctgggattaccgccagcctcggaaatacctcaatat

SEQ ID NO: 662680 - DNA, 100 bp, Homo sapiens
gtggaggttcgcggctctaacggggctttctacaaggtggcatggaatattcacatgggagagccgcatgaggccgcccaccacgcttcctgaaggatgc

SEQ ID NO: 662681 - DNA, 100 bp, Homo sapiens
gctgctgacgtcacatggagcacagaaatcaatgttagcagatagccagcccatacaagatcgtgttttgcgtgtgaagctgtgtggaaatgtgaaatac

SEQ ID NO: 662682 - DNA, 82 bp, Homo sapiens
atgattgtgaggcctccccagccatgtggaactgaagaagtccccaaggagacttcgccataggagttcacaggaaatattg

SEQ ID NO: 662683 - DNA, 75 bp, Homo sapiens
tcttcttttaatggtggaagacgagatgagattcgagattacggtgagccctttcaggaagcaatgtggttggac

SEQ ID NO: 662684 - DNA, 140 bp, Homo sapiens
tgaagctggaagattctggtgtccacgtgatcattggggggcacgattctccctctcctagaggcgctactgtttcagctcattattgactacttagctgagttcaattccacaccagctgtctttacaatgataactga

SEQ ID NO: 662685 - DNA, 50 bp, Homo sapiens
cctgtgcttgcttaaaaattttcttgagatccccgtcgaggtcaagatca

SEQ ID NO: 662686 - DNA, 100 bp, Homo sapiens
gccaccaactctccaccctagacgaagcctttgaagaattaagaaaagatgatgcacaatcagtagaaactctgggaaagccaaaagcgaaacgaatcag

SEQ ID NO: 662687 - DNA, 82 bp, Homo sapiens
gttggaagcagccgatccagcctgcggagcctgtggggcagcgggagatacagatgacccaccaagaattactcagaaccct

SEQ ID NO: 662688 - DNA, 100 bp, Homo sapiens
atgaggccaaaggcagttgtattggattctcatcgctttggaaggcacctgaaagaagcaatgactgacatcatcactttgtttggtctcagttctaatt

SEQ ID NO: 662689 - DNA, 50 bp, Homo sapiens
gactacaaggtcgcctacgtgcagctgcctgggctggaagctcttctacg

SEQ ID NO: 662690 - DNA, 75 bp, Homo sapiens
tatctgaggatggagaactcagcactggattccaatggggaattactaatccgaaatgcgcagctgaaacatgct

SEQ ID NO: 662691 - DNA, 85 bp, Homo sapiens
tgtgttctctgcagattctaagggatgtacgtatttttgcatgcagtgaaaggaacacctttcgaaactcctgaccagggtaaag

SEQ ID NO: 662692 - DNA, 100 bp, Homo sapiens
ttagagaagttagtagatactgcttggttggagatcatgaccaaatatgctgtgggagaagagtgtgacttcgagtcatgttgtcataggaacaactgga

SEQ ID NO: 662693 - DNA, 83 bp, Homo sapiens
tggtttttcggatcatgtctggtggctccgcggattataacagtcgagcaaaagatgtgataataccagcaaagccacctgtc

SEQ ID NO: 662694 - DNA, 100 bp, Homo sapiens
cagggagcagcaagacaatcactgcagagataccagtttggaagaactgaagtaattgataatactttaaatcctgattttgtaagaaagtttattctgg

SEQ ID NO: 662695 - DNA, 88 bp, Homo sapiens
gggacgctcccagccctgaagagaaactgcaccttatcacccggaacctgcagctgaagaaatcaggggagaaacccctgcttggtgg

SEQ ID NO: 662696 - DNA, 83 bp, Homo sapiens
cccgattgcacatcactggcagagaactgaggtccaaggaaatcctcattgacgattcaatttgttgaaggccaatttgtgga

SEQ ID NO: 662697 - DNA, 51 bp, Homo sapiens
catcatgaaggacgtgcccgactggaaggaagttattccaacttttgacat

SEQ ID NO: 662698 - DNA, 75 bp, Homo sapiens
tggagcctcagttggaagcagccgatccagcctgcggagcctgtggggcagccacgaaggaagacaggaggtccg

SEQ ID NO: 662699 - DNA, 82 bp, Homo sapiens
cctgcgtgtccgcgaggatgcgtgttcgcgggtgtcgtgaaaactacccctaaaagccaaaatgggaaaggaaaagactcat

SEQ ID NO: 662700 - DNA, 116 bp, Homo sapiens
gttccgctaatcagatgggagtatctgccaaacgtagaccaaaggctcagcccacaactcttgtcctaccacctcagcgaggcaaacctctctacatttgtaaggaaagatacaaa

SEQ ID NO: 662701 - DNA, 100 bp, Homo sapiens
gaaaattcctactggacaagaatatgctgccaaaattatcaacaccaaaaagctttctgctaggggatagagggaggaatcagcagcttggaaattcaag

SEQ ID NO: 662702 - DNA, 75 bp, Homo sapiens
gtgatttgctttctcggagcaaaagttcgtgagatggagaataaagaaactctcaaagggttgcacaagatggat

SEQ ID NO: 662703 - DNA, 80 bp, Homo sapiens
gggagctggacggcgagcgcgagcggcgcgagaaacctcggagaagtcaatgtgcccatcgctggacgaagcccagccct

SEQ ID NO: 662704 - DNA, 100 bp, Homo sapiens
acctcaggacttgagtaacagcaacatgaacaatgtgtattctggaggtagcatggcaagaaggaatacatatgtctgtgaaaggaccacagatcgatac

SEQ ID NO: 662705 - DNA, 83 bp, Homo sapiens
ccaccgcctgccgcatcccagggggccacacgccccccctccttcacgccacacacacgttcgagaacttgtcttggacaatt

SEQ ID NO: 662706 - DNA, 74 bp, Homo sapiens
agaagagggcggagcggagacgggagtattatgaaaagatcggggaagtccagccaagcagacgacctgggaag

SEQ ID NO: 662707 - DNA, 74 bp, Homo sapiens
cagaagaaactgcaccggaaatgtgcctaccaggagcttctggaagaggtgaagaaggaattgcagaaagtgaa

SEQ ID NO: 662708 - DNA, 75 bp, Homo sapiens
aaggacatctgcaaatctttcaccaattcaagctgtattagtcgacaggaccatttacatttcaggacagatagg

SEQ ID NO: 662709 - DNA, 100 bp, Homo sapiens
gtttactacaaatgcttgctctactagtggaaattctaatctttcacagacacagggcccaggagacaccagcgggggctgccgctgcagggtaaatggg

SEQ ID NO: 662710 - DNA, 100 bp, Homo sapiens
ccaatagtttaaatcgaatgaatggtgttatgtttcctggaaattcaccaagctatactgagagatacttggttcactgtcttcaatcagaacttaataa

SEQ ID NO: 662711 - DNA, 84 bp, Homo sapiens
agcagttgagcgagcccgaggacatggagatggaaggtcagccatgtcatctgagcctcccccaccaccacagccccccaccca

SEQ ID NO: 662712 - DNA, 83 bp, Homo sapiens
caatgatgaccttgcagatgctgggctagaaaaactccatcttaggtttactcctggcttgggggcattaggaagcactggag

SEQ ID NO: 662713 - DNA, 50 bp, Homo sapiens
accagctcatgggcacggctcgggacggtactccaaagattcaggtttac

SEQ ID NO: 662714 - DNA, 80 bp, Homo sapiens
cgccgtgcgcgtcccgagcccgcggggcagctaccgctcggtactccaaagattcaggtttactcacgtcatccagcaga

SEQ ID NO: 662715 - DNA, 82 bp, Homo sapiens
aggaagcaagcagttcagaagagccaaggaataaacatgcaatgaacccaaaagggtgatcttattcctgataatgttggtt

SEQ ID NO: 662716 - DNA, 100 bp, Homo sapiens
tgcgaagttttgctcctggatgaatccaagttaacccttaccacccagcagcagggcatcaaggtcgtggttcaattccagaattctttcatattatgaa

SEQ ID NO: 662717 - DNA, 100 bp, Homo sapiens
tctccacctggctgaaactcaataagaagtgtattctggaggtcgaatggtcacatatgaacatctccgagaggttgtgtttggcaaaagtgaagatgag

SEQ ID NO: 662718 - DNA, 100 bp, Homo sapiens
cgactactcagaggacgagggcgacagcagcgtgtccagggcggctgtggaggtgttcgggaagctgaagggactttgaacatgtcggggatcgccctca

SEQ ID NO: 662719 - DNA, 128 bp, Homo sapiens
tgcgggaagacgtcgctgctgatggtcttcgccgatggggccttccccgagattcttttcctgggcccactgatgcagctctctatggattgcccttgtgacctggcagatgggctgaaggttgtcct

SEQ ID NO: 662720 - DNA, 87 bp, Homo sapiens
gcctcgacatcctagaagattacctcatccagagaagggtgagaaggactggcagaaatacgagactgctcggcggctgaaaaaatg

SEQ ID NO: 662721 - DNA, 75 bp, Homo sapiens
ccaagacacgctgattagagcgaagagagagaaagcccaggaaatccaggagctgcaggctcagattcaggaaca

SEQ ID NO: 662722 - DNA, 100 bp, Homo sapiens
cctgcaaagatcctgggagaccaaggcgttcggatgggcagcctggggctgttcctgcagtgcgccatctccctggtcttctctctggtcatggaccggc

SEQ ID NO: 662723 - DNA, 100 bp, Homo sapiens
agtgggactggatgctacaaactgtttgaggataactgacttaaaatctggtatcgtcgtcctccccgcagtcaggctgcccatcacccaccattccagc

SEQ ID NO: 662724 - DNA, 96 bp, Homo sapiens
atcctccccatacatacattcaaaagctcaaaggctatctggatccagctgtaaccaggaagctggtggacttgaagctgacagtggatgggctgg

SEQ ID NO: 662725 - DNA, 50 bp, Homo sapiens
attctggaaactgtacattgaagcagaggaaattgagagtcagattgaca

SEQ ID NO: 662726 - DNA, 100 bp, Homo sapiens
tgatcacttgcgagatgtccttagggtacaagaacaggaattgaagtctgaatttgagcagatgacttcctgctgtacctggaccctcactactgccagc

SEQ ID NO: 662727 - DNA, 96 bp, Homo sapiens
atcaagaagtaccgccagctgaccgcccatctacagctaatagctcgatttgaagaagaaacaagttccgtgggacgagaacaagtaaataaggcc

SEQ ID NO: 662728 - DNA, 90 bp, Homo sapiens
ttgcctaaatgaggaatgtctttcctaccatctaaaatacgaaggtttctggctggtttagaaatcagtccccagaatgtggatgttaat

SEQ ID NO: 662729 - DNA, 83 bp, Homo sapiens
agccgatccagcctgcggagcctgtggggcaggtatgtgaggagcagcgctgtgaggaggaagtcttccccctggccatgaac

SEQ ID NO: 662730 - DNA, 74 bp, Homo sapiens
gaagattggcaatccagtgccctataatgaagaatttcacaaacttgtttggacagccactagtctgcttgctt

SEQ ID NO: 662731 - DNA, 90 bp, Homo sapiens
ctccggccactgggacggcggcgcggagaaggcagggtcgataaagacaggagtggagtgatatcagacaccgagcttcagcaagctctc

SEQ ID NO: 662732 - DNA, 99 bp, Homo sapiens
gtaagcaccgagaagtctgttccttatcacgtgtgtaaggggaaaaaggcagaagaagagttcaacatagagaaaggtcggcttgtgcaaacccaaaga

SEQ ID NO: 662733 - DNA, 49 bp, Homo sapiens
accatgggggaggccagtgtggaggttggaaagaaccatgactgtattc

SEQ ID NO: 662734 - DNA, 100 bp, Homo sapiens
cactgtttctgagagcagcttttgtggcatcttacagggcagatttctgaccatcatcaaagaggggatgctgaccaaacagaacaattcattccagcga

SEQ ID NO: 662735 - DNA, 75 bp, Homo sapiens
gaaacatgcagattatatcgcatcctatggctcaaagaaagatgattatgttgcaaaattaaatgatgctgaaag

SEQ ID NO: 662736 - DNA, 100 bp, Homo sapiens
tctaaagagaacgtctctgaaatcaagtccggatgaaggagaaaatgctgagaagcttctgcagttcaagcgttggttctggtcaatagtagagaagatg

SEQ ID NO: 662737 - DNA, 74 bp, Homo sapiens
cggggatgtatttggaacattatctggacagctggtgagattggagagatgaaggatggagtcccagagggagc

SEQ ID NO: 662738 - DNA, 96 bp, Homo sapiens
tctgaaaggaaatccggaattatcacagagtgcaggccctagcaggtgcaggtggagtagacaatctccatgtactggactttcagaagtataaag

SEQ ID NO: 662739 - DNA, 100 bp, Homo sapiens
cttcagccactgtgggccctgcctctgcctgttcttctggaatgtcttgggggttttgatcctgtcactgtgtccacagcctctgacatgcgatttgaag

SEQ ID NO: 662740 - DNA, 90 bp, Homo sapiens
agaaaagaagggctaaaagatgaggaagatttctttggtggtgacttcacacgccataatggcactggtggcaagtccatctatggggag

SEQ ID NO: 662741 - DNA, 98 bp, Homo sapiens
tacctgctgtacaccctcaacaaacaccagcgctttgggttgaaatcacaaagattagacacctttttagataggtgttcttcagcaccactgacaac

SEQ ID NO: 662742 - DNA, 97 bp, Homo sapiens
cgagaagagcagagcggagggagccccagacacggtgatggtaatgcccgaaggagcagacacggtgtccaggcccagtcccgactaccccatgtta

SEQ ID NO: 662743 - DNA, 74 bp, Homo sapiens
agacgcggtggagccgccggagtctgagaaggctgtgggtgagcgtggaggatgctcagatgcacaccgtcacc

SEQ ID NO: 662744 - DNA, 99 bp, Homo sapiens
tgatgttcgtccgcaacgattgcaagttttacatgtggcacccataaaagatgaggctgagaacacggaaagcttctcagcagtcaaatcaaatccaaa

SEQ ID NO: 662745 - DNA, 101 bp, Homo sapiens
ggcttctcccctacgcgctacacaagtggagctccttttcctccacctaccttcccgattaaagaagagtgtaagagtcctaaagctgagtgttggtccca

SEQ ID NO: 662746 - DNA, 82 bp, Homo sapiens
gggttggtgtgattagcttcgcagtctggaaagctttaggagttcacagtacacccccaaaggatggatttgtaatcgctga

SEQ ID NO: 662747 - DNA, 98 bp, Homo sapiens
cgcggccgggcagggaggagaccggcacccagacaggtggcgacggcagaggaaggctaagaatattgtacacaaagattcttgatgttcttgaggaa

SEQ ID NO: 662748 - DNA, 100 bp, Homo sapiens
cccaactcgcccagccactcggccgtgtccgccgcctccatcccggccgtgcacatcaaccagctggtggtcttcgaactggaaaacttccagggccgtc

SEQ ID NO: 662749 - DNA, 51 bp, Homo sapiens
attctgaactcaggacttggcaaatgttcaagacagagttccttcatattc

SEQ ID NO: 662750 - DNA, 80 bp, Homo sapiens
gtgccacgtgtggtctgtaagtagtggccacagatgtctttaattccaaaaacctggccgttcaggcacaaaagaagatc

SEQ ID NO: 662751 - DNA, 75 bp, Homo sapiens
ttggatctacactttctcaagcactgtgatcttcaaattctcttgtccttctgcctgctgttgtgggatgatgtg

SEQ ID NO: 662752 - DNA, 95 bp, Homo sapiens
tggagtgcagctttgtagttttgcgtgtgttgaaagtacaattctattgcacatcaatgatatcatcccagcctacaacacagcagtcccctcag

SEQ ID NO: 662753 - DNA, 117 bp, Homo sapiens
ccgggatcgtgaccgagaccgtgaccgagagcgtgaccgagagcgcgaatatcgtcatcgttagaaggaggagacatcacagctttcccagatcgggaggaaaaatatggaatgtgt

SEQ ID NO: 662754 - DNA, 90 bp, Homo sapiens
atgctaacctactatgagggtcgagcagagctagtatgttcaacacaccaggaatgcagagcttgttgcaacaaataactgaaaacccac

SEQ ID NO: 662755 - DNA, 75 bp, Homo sapiens
cagacctcgaaatgatagacgatcatccctcagaggtgccagagaagctcatccaggaccggttccggaagctgg

SEQ ID NO: 662756 - DNA, 83 bp, Homo sapiens
gtttttccatcgacagccctgatagtttagagtattgggaaagggtcgttgtggtgcatagacccagagtatagacaaaatct

SEQ ID NO: 662757 - DNA, 100 bp, Homo sapiens
agaggagagacctcccagggacgtgcactcagaaagtgttctaagaacggaagcatctgggctggatggaatttagcatcaagcagagtcccctttctgt

SEQ ID NO: 662758 - DNA, 100 bp, Homo sapiens
agcgacccaccatggagacccgctacaacctgaagagtccgggatggatgtggacagtttccatatgatgcaaacatccagatacactgggtatcatttc

SEQ ID NO: 662759 - DNA, 75 bp, Homo sapiens
ttgaaagtgcgattgtggaagctgctcgggtatcgaaggatgatcgcagtgatgtggagagcagctcagaggaag

SEQ ID NO: 662760 - DNA, 113 bp, Homo sapiens
cccacatgcccgctcacctgcgctgtgatgcctgcagagctgtggcttaccaggtctcagacttgatccgcagtggaaaacccatcaagcctgtcaaggatttgctaaagaag

SEQ ID NO: 662761 - DNA, 100 bp, Homo sapiens
tgccatcttcacctggatataactcctgtgatgaacacatggagcttgtgtctgctgttgcaaaaagaagaaaacattctctgcctgagttttaattttt

SEQ ID NO: 662762 - DNA, 82 bp, Homo sapiens
tggccgtgccctggggctgagccctcaggtcctgaacgaggctgtgggggccctgatgtaccacaccatcactctcaccagg

SEQ ID NO: 662763 - DNA, 90 bp, Homo sapiens
gggatggccacattaagctcacggactttgggttcgccaagaagctggtagacagggtctcactctgctcactctgtctcccaagctgga

SEQ ID NO: 662764 - DNA, 90 bp, Homo sapiens
ctctaagtgaacccacgctgagccagcatactcatgggctgcaagtggaattcatcaaccccatcttcgagttctccagggccatgaatg

SEQ ID NO: 662765 - DNA, 80 bp, Homo sapiens
cggggcgctccaggaggcactcacaggctccagcccccttttggacatcgttggcggccggaaggcgaggccccgccagt

SEQ ID NO: 662766 - DNA, 98 bp, Homo sapiens
tcatcctttacgagcacggcctcttgcgctacgccctggatgagatgactctcagcgttctcatctctcttccttcaccatgaagctgatggacaaat

SEQ ID NO: 662767 - DNA, 100 bp, Homo sapiens
ggcgtctacaactgctgggagttcccgtccatgctggccctctctgaaatgactgctgtccatgcaggcaacataaacttcaagtgggatcctaaaagtc

SEQ ID NO: 662768 - DNA, 85 bp, Homo sapiens
aaggccttgagtcaaccaccctggcagacaaggatggcgagatttactgcaaagcttcgttgttccctctggcttgtgggggcac

SEQ ID NO: 662769 - DNA, 90 bp, Homo sapiens
ctgggttggaagtcagagctgcacaaagggaaaggttttcggctttgtgagaaaccttaccatcaaacacgatggccagcaacgttacca

SEQ ID NO: 662770 - DNA, 100 bp, Homo sapiens
tgaagatctggacttcggagcacgtctttgaacaatgcagatcttcgtgaagactctgactggtaagaccatcaccctcgaggttgagcccagtgacacc

SEQ ID NO: 662771 - DNA, 100 bp, Homo sapiens
ctcgccgctgctgccgccgccgccgcccagagactgctgagcccgtccgtccgccgccaccacccactccggacacaggctgtctgtccccagaccccag

SEQ ID NO: 662772 - DNA, 85 bp, Homo sapiens
ggaagctgtgcacctccctcactttgtggctctccaaggacagagcgggatgccaccagcttgtccaaagggaagttccaggagc

SEQ ID NO: 662773 - DNA, 82 bp, Homo sapiens
cccgaggaggcagccaagctcgtggcctgcctctgcgtgcctgagcgggctttggacaccatgaactttgatgtgattaagg

SEQ ID NO: 662774 - DNA, 101 bp, Homo sapiens
tggccttcaggaaaagcatcccggaggaggaagaagaagtgttatatgtcctaaagtaaggtttcagctgctgatgaagaagcatttgaagataattctga

SEQ ID NO: 662775 - DNA, 75 bp, Homo sapiens
agaatgcacagatgtctgaggacaaccacctgagcaatactcaaacgggccccatcagtgccaccctggtgatga

SEQ ID NO: 662776 - DNA, 98 bp, Homo sapiens
ctggcaacggcggtggcgcccggagcccgagcccaagaagatgaaaggattgttcttgttgacaacaaatgtaagtgtgcccggattacttccaggat

SEQ ID NO: 662777 - DNA, 90 bp, Homo sapiens
aatgaagattaccctaaggaaaatgattcatcatcgaaggatcagaatgttctctctccagtcaactgctggaatctcctcttaaaccag

SEQ ID NO: 662778 - DNA, 75 bp, Homo sapiens
cgtttgttcaggaaccaccagtgacagagcaaatcctgatcctaactgttgtcttggagtatttgggctgagctt

SEQ ID NO: 662779 - DNA, 100 bp, Homo sapiens
ccagctggggttcccatgccccaggctcctgcaggacttgctgggccagtccgtggggttggcgggccatcccaacagccaagaagtatgatgcgttttt

SEQ ID NO: 662780 - DNA, 100 bp, Homo sapiens
tttgaccgccacattaccattttttcacccgagggtcggctctaccaagtagctttcccatggtttggcatggacattgggggaactctagtaaagctct

SEQ ID NO: 662781 - DNA, 80 bp, Homo sapiens
gccctggccctgatcatcctgctgggcttcgtccagatcgggaagggtttgatcactatgatcatctcacccacagacag

SEQ ID NO: 662782 - DNA, 74 bp, Homo sapiens
gctgtacttgtcacctcgaattgagcacaaatgcagccctgaggatttggctactgcatataacaacagggggc

SEQ ID NO: 662783 - DNA, 129 bp, Homo sapiens
attgccctagtacccacccacctatcagggttatgcaatggaacatcctcgcccaagaacagtgcaaccctgaaactcgtcctgttgagaaaaaaataagatcagctcttcctaccaaaaccgtaaagc

SEQ ID NO: 662784 - DNA, 88 bp, Homo sapiens
caccccgcctccctccccaatgtcctcggccatcgaaaggaagagcctggacccttcagagttgactatagtcaatggggccaatgga

SEQ ID NO: 662785 - DNA, 100 bp, Homo sapiens
ggaaaagaaaacagcaacacagttacatagtaaaaggaggcctaatcccatgaagctgaggtcttgaagcagctggctgagaaacgagagcacgagaaag

SEQ ID NO: 662786 - DNA, 101 bp, Homo sapiens
ccccgctctgagggccccggcccctggatgcacagccccggcgctggtgaacctgccgctgctcaccctgagccagcccctgctgttgggcatcgcccgaa

SEQ ID NO: 662787 - DNA, 73 bp, Homo sapiens
ctcactgatctattattttcaatagaaacagatatacagatgtggagaagaagcagatagcaaggtaattttt

SEQ ID NO: 662788 - DNA, 100 bp, Homo sapiens
cagagttcaaggaggccttccagctgtttgaccgaacagggaaagaatatggcaaagctgatgcaagatgggtttattttgatccaaccattgtgtctgt

SEQ ID NO: 662789 - DNA, 101 bp, Homo sapiens
gcagctcagaagttcagcctggcccactccatgttggccatcagtggtcacctagacagcgacgatgatagcgtggtgatggtggatgaggcacacgaaag

SEQ ID NO: 662790 - DNA, 98 bp, Homo sapiens
aaatttcgtactcaattttacattgactggtgcaaaatttcattggttcctgccatctccctggcttatgagcaggctgagagtgacatcatgaagag

SEQ ID NO: 662791 - DNA, 100 bp, Homo sapiens
gccggaaggggtcccgaagccccctgcaggaactctacaacccaatccagagtaaacatcagtctccaaagataactacatcccttcttcccatcaacaa

SEQ ID NO: 662792 - DNA, 97 bp, Homo sapiens
cgccagagagagctgctggaacagcactatgcccagtatgatgccgacgatgacgagggatccagaaggcttacgagtattttattatcttgtccag

SEQ ID NO: 662793 - DNA, 75 bp, Homo sapiens
aaccaaacaacctatcctgtgatctaccagaagagagtgatcctgcagcatatcctgacatggagtctgatatac

SEQ ID NO: 662794 - DNA, 74 bp, Homo sapiens
gccaggaccatcctggaagagaacatccaggaccaaggttgtccttctattcaggccactcttcgttttccatg

SEQ ID NO: 662795 - DNA, 100 bp, Homo sapiens
agaacacaaagaagtgtgatgaggaagtggcttttaggaagaagaggctgtgcattaaatttattccacgggattcaacggaagctgcgatttgtgacat

SEQ ID NO: 662796 - DNA, 75 bp, Homo sapiens
tcagccagtggtcacagctggatgtttgcgacatcccagagagcttccagactggatgaaaaagaaagtcggcgt

SEQ ID NO: 662797 - DNA, 89 bp, Homo sapiens
ctgcgcgtgagaagcgtgatgtgcagcctcctgcctctcagcatgagggagggaaatgatgtcactctgaaactcaggctggaatacac

SEQ ID NO: 662798 - DNA, 96 bp, Homo sapiens
caaaaacagcaagcgcagagccaaacagccaggcagagaacacgtagcgactccgaagatcagccccaatgaacatgtcagtgttgactttacaag

SEQ ID NO: 662799 - DNA, 100 bp, Homo sapiens
gaagatgtgcacctagggggcggctaccccgtgggattttgaagacattttggctacaatatattttttgatgcacaagaatcccaaggtccaattgtgg

SEQ ID NO: 662800 - DNA, 100 bp, Homo sapiens
tgggctcctactgttcttagagatgtacctttctcaggttgactatagtcaatggggccaatggagccaagtgtatggaaacccacaacagtatggacag

SEQ ID NO: 662801 - DNA, 100 bp, Homo sapiens
taaaattgcaactgaagcaaactcagacaggatagagtaatgataaaccgcttagacaacatctgtgaagcagtgttgaaaggcaaatggccagtaaata

SEQ ID NO: 662802 - DNA, 80 bp, Homo sapiens
cagcctcaaaaccgtcctgctgcttgctgaccaaatggtggccagcatcgaaatgttcagccttttagtgatgaagatgc

SEQ ID NO: 662803 - DNA, 96 bp, Homo sapiens
caacttcacgctggcgcgagccccgtcctccttcgccgccgcgcacaaccgcacgtgcagcccacagaattcttccagtccctgggtggggacgga

SEQ ID NO: 662804 - DNA, 100 bp, Homo sapiens
caacagatctgtctgcctgcaatctacaagggtatgtctctgtgccagactgtcgtcgtgggctctgtagtcattcttctgtactcttccagagcttgtt

SEQ ID NO: 662805 - DNA, 75 bp, Homo sapiens
caactatactgtttgtaaaaggagaagcaaagtggaagatgctttctacaaaggtgaactcaggctgaatgagga

SEQ ID NO: 662806 - DNA, 100 bp, Homo sapiens
tcgaaaggagcaagagcaagatcaccgtgacatccgaggtgcctttctccaaaaggactccatccccgtgtctacctccctccttggagacacttccgac

SEQ ID NO: 662807 - DNA, 96 bp, Homo sapiens
gaaaactcaaatctttggcaaccaagcttttgaacttctcagatagaggaaccccagtgaagactgatcagttcttacaattctcaaagcatggcc

SEQ ID NO: 662808 - DNA, 75 bp, Homo sapiens
gcctgcacagccgcggcggcagcagcagtgagagggtgtcttttatgaataatcaaaagcagcaaaagccaacgc

SEQ ID NO: 662809 - DNA, 50 bp, Homo sapiens
ccccaagctccccgtcctcggaaacagatgattatgctgagattatagat

SEQ ID NO: 662810 - DNA, 88 bp, Homo sapiens
caaaggcggtttcccgctcgcagagagccggcttgcagatggaatgaaaccttccaaaaagaggtaatcggcagccgcctagagacca

SEQ ID NO: 662811 - DNA, 75 bp, Homo sapiens
gctgcctgcctgcctggcatctctctctcccgaacgagcctctgactccaggttatcatggattcccagcgcggg

SEQ ID NO: 662812 - DNA, 100 bp, Homo sapiens
cgccgcgcccgggatgtattcgtccccgctctgcctcacccagagaggtggagaagagcgagtacttgagaaagaagaggaagaagatgatgatgaagat

SEQ ID NO: 662813 - DNA, 82 bp, Homo sapiens
aggagctggcggacatcactttagaccctccacctaattgcaggattttttatcaagcagaaatgcatcgaacaacgagaat

SEQ ID NO: 662814 - DNA, 100 bp, Homo sapiens
atcccagctacctgatgtgacaggctgaccccagcccacagcaggaaggccctgcggaattcccgcatcgtcagccagaaggacgacgtccacgtctgta

SEQ ID NO: 662815 - DNA, 99 bp, Homo sapiens
ggtgctaatagtagctggccatcacaactggattgtagctgcatatgcccattttgctgtgtgttacaggaggagatgttaaagtaacccatcttgcag

SEQ ID NO: 662816 - DNA, 73 bp, Homo sapiens
cgaatatcgtcatcgttagaaggaattgactttaaaattaggaccatagagctcgatggcaagagaattaaac

SEQ ID NO: 662817 - DNA, 82 bp, Homo sapiens
gctgttcgcggtgacggtggcgccgcccggggcgaggcagggccagcagcaggcgggaggttggacgtgataagtatgagcc

SEQ ID NO: 662818 - DNA, 98 bp, Homo sapiens
tgttgaccaagaacatttttcaataactgactatactactggcagagttggagcacctcttatttgctgtgaaattaagctaaaagactggcaagaag

SEQ ID NO: 662819 - DNA, 82 bp, Homo sapiens
atagagataggcaatggtctggtcacttttcagctgcggggacttgaattcagagactggctatgtggatgctggaagatgg

SEQ ID NO: 662820 - DNA, 90 bp, Homo sapiens
ccccaggcaataaagaccagtcacttggctgctcttctgaagaaccaaggcccctcacaatctcctcaactgtttcatgatgacacccat

SEQ ID NO: 662821 - DNA, 100 bp, Homo sapiens
tgagtttacttctcctccttctttgttcaagactgggcttccaccgagcaggattatacactcaccatgtatttccagcagtcttggaaagacaaaaggc

SEQ ID NO: 662822 - DNA, 90 bp, Homo sapiens
tggaggaacatttgtgccatgtccatggagcggcgcatgaagcgagtgttgtgtataaaggaagttgaaatcctgggccttatgtgtgta

SEQ ID NO: 662823 - DNA, 100 bp, Homo sapiens
tgtgagcctgcaagagctgctggaaaggtgtgatccctcacatccacaaatctctgattggaaagaagggacagcagaaaactgcttagagggatgcttt

SEQ ID NO: 662824 - DNA, 85 bp, Homo sapiens
cgccccgctcttccctggctgggctggcggaggccttgctgatgaacctgactgaggaggatgttgtctcttacacccaggttat

SEQ ID NO: 662825 - DNA, 113 bp, Homo sapiens
aagtaaccccttccgggagcctagatcctgtgctttactctgaagactcgtggcaaaaaagttggcattaatcctaaaattaataatttaatgccaggatatgaagttgcaaa

SEQ ID NO: 662826 - DNA, 50 bp, Homo sapiens
atgagatggtagccaacccctcaggtcttttctcctggcaccctgtattc

SEQ ID NO: 662827 - DNA, 96 bp, Homo sapiens
ggagctggaggacatgctggagagtgggaaccccgccatctttgcctctggggagtctcaggagcaggggctgcggcagaggctgctggacgagca

SEQ ID NO: 662828 - DNA, 50 bp, Homo sapiens
gttgggacccgctccaaccctcgttacagcaattggaacttgcacagata

SEQ ID NO: 662829 - DNA, 50 bp, Homo sapiens
caacaactaagtctacagtaaataaatggctgtgcaaccatattgcttct

SEQ ID NO: 662830 - DNA, 74 bp, Homo sapiens
gggtgccaacaagacggtggagccgagagctggtgaatgactggcaggaggactgggtcgtgttctatgcccgg

SEQ ID NO: 662831 - DNA, 75 bp, Homo sapiens
tcaataaagaacggcagtttgaatcggtgctgaacaggtaattcatttgcacacctgttagcaagaaacagaagt

SEQ ID NO: 662832 - DNA, 101 bp, Homo sapiens
gcccggcgctgatctacaagaaaatccacaagaacgcactttcctcccagcttttgcagggcccccagatcctctgcacgggaacagcttgtaccagaagg

SEQ ID NO: 662833 - DNA, 100 bp, Homo sapiens
tcaaacagtgaaatacaggcctggctttcagacttggttcagccgtctgtatatctccccagatacctgaaactgaccacctgagtacgttttcccattg

SEQ ID NO: 662834 - DNA, 82 bp, Homo sapiens
tggaatatgccaaggaaaaactggagagcttcatcaaaaatagtgatagctttgataaatttttcgaaagaaagcagtggaa

SEQ ID NO: 662835 - DNA, 87 bp, Homo sapiens
ccgagggtggccctaggggcagcgagcaagacagcaagcagtgaggccgtctgggagaacatggcgcgcatgtgcgtgaagacccag

SEQ ID NO: 662836 - DNA, 98 bp, Homo sapiens
aaccgtggaaagccagctttataccaacccagggcggcgactggcggcgcgatggacctgaccgggctcctgctggacgaagaaggcaccttctccct

SEQ ID NO: 662837 - DNA, 77 bp, Homo sapiens
gttaaggattccaagtaactcttatttggtatgaaaatgaaagtcttcagaatggaaggaagtcaactgaatttcca

SEQ ID NO: 662838 - DNA, 90 bp, Homo sapiens
gcggccggggcctggggctgcctgccgggcggccgggcgcggcgagcccagagcaaatttttcagaacataaaacaagaatatagtcgtt

SEQ ID NO: 662839 - DNA, 83 bp, Homo sapiens
cggctctggaaaatccgcaagaccatcatgcaggttcgtgctggccgtgggcagcgccgtctttgatgccatgttcaacgggg

SEQ ID NO: 662840 - DNA, 95 bp, Homo sapiens
atctctccagtttccatatgttgagattctacttattcatcagtttgttgtgcttgtcaagatcaggaaacctctgtgctatcctcagagagctg

SEQ ID NO: 662841 - DNA, 100 bp, Homo sapiens
tgtccaggaactgtcggaacagaaccaaaggctattggatcagctcagcagggactccctggaggaaaagcggaagcggcagcggtctgaacgcctggaa

SEQ ID NO: 662842 - DNA, 100 bp, Homo sapiens
tggagtttatctggagtgaggtggccggttcttggtgggatctgagcaggtgagaagccctaccactgcaactgggacggctgcggctggaagtttgcgc

SEQ ID NO: 662843 - DNA, 101 bp, Homo sapiens
aaggaatttacaaacaagaaaaaaaagaagtttggaatcggattcacaggatctgggcttggaaatgcctcaggtactaggttttgacaagcttgcatcat

SEQ ID NO: 662844 - DNA, 75 bp, Homo sapiens
cagatcctttgctgctctgtctgccggttcttgaggctcacagaacatttcctgcctgttgctcacactctgttg

SEQ ID NO: 662845 - DNA, 111 bp, Homo sapiens
atgcctgggtcccgccgggtctgaagcctgaacagacgaagttatacggaagcgtctcctcattgatggagatggtgctggagatgatcggagaattaatctgctagtgaa

SEQ ID NO: 662846 - DNA, 83 bp, Homo sapiens
tctgctttgttgggagtgatggatggacagacagggcctcactctattgcccaggctagagtgccgtggcaggatctcagctc

SEQ ID NO: 662847 - DNA, 97 bp, Homo sapiens
cggcggcgccgaagaggcgactgaggccggacggggcggacggcgacgcagcccgcggcagaagatctgagtgggacatacttttgaaggatgtgca

SEQ ID NO: 662848 - DNA, 75 bp, Homo sapiens
ccctagaccagctccagtatctagaaagactgctcactgggctgagtgttgttacagatcttataacagtcggtt

SEQ ID NO: 662849 - DNA, 100 bp, Homo sapiens
ttctgttgatgaccctcttccaggttacatacagcttacatcttgcatcctcaagcggcattgagatgttccacaagagcctggagagggccgaggccgg

SEQ ID NO: 662850 - DNA, 95 bp, Homo sapiens
ggcctattgctgatcctgcctgctgtagaaatctccagctgtccaatatttggaagaaaactgtcccttcaccgatgttgtcaccaccaacctaa

SEQ ID NO: 662851 - DNA, 100 bp, Homo sapiens
cggctctttgaatccatcaacaatctgatgaaaagtcaatacaaaactaccatccttttgcagatttatgtggtccagggcatatatggctatcatcatt

SEQ ID NO: 662852 - DNA, 97 bp, Homo sapiens
accggcgtccccggcgcgaagaggctggactcggattcgttgcctgagagagaagaagaaggaggttcctgctgtgccagaaacccttaagaaaaag

SEQ ID NO: 662853 - DNA, 100 bp, Homo sapiens
gagaattcctggggcgcaccgccaagagctgggattttctggcatccttaaatcttgtgtcaaggattggttataatataaccagaaaccatgacggcgg

SEQ ID NO: 662854 - DNA, 76 bp, Homo sapiens
tccaaaagtgtattgggtagaagaaagcacagctcggaaaggcagagtgcctccatatctgggacctggatgtgcg

SEQ ID NO: 662855 - DNA, 98 bp, Homo sapiens
gagaaggagatcgctcggacacagaagaacaaggggtgaaacccaaggcgctctagaggagatgaattatggatccgccctcccggaatcctggctcg

SEQ ID NO: 662856 - DNA, 99 bp, Homo sapiens
ccaaaggctagggcgggtgcttcgagctaaaaaagttcctggtccagaactttacacagaaaaggtgctcaaaggatatttgtttaatgaatgtggtat

SEQ ID NO: 662857 - DNA, 100 bp, Homo sapiens
caccagggaggagcccatttacatcatcaccgagtacatggccaagggagtgggaatagctttgcgaaaaatgggcgcaatggccaagccagattgtatc

SEQ ID NO: 662858 - DNA, 90 bp, Homo sapiens
ctgctctctcaatatgaaaatggtagctccacagtaggaactaagcgtcttgtagaaggaactattaatccaggagaaacctgtttaatc

SEQ ID NO: 662859 - DNA, 100 bp, Homo sapiens
cggagcataggaggaaaattcatcatctgggatgccattattacttgcaatcctgaggaattcatagttgaggcgctgcagcttcccaacttccagcaga

SEQ ID NO: 662860 - DNA, 74 bp, Homo sapiens
agtgggctctggaacaacacggtgttcatcttttctacagtctattcttattctgagaaggaacttatatgcca

SEQ ID NO: 662861 - DNA, 100 bp, Homo sapiens
agtccagaatgtcacaggtccagggcagaggaccaacatgggcattttgtttatgagcaaggtggctcgtaagttggtgatcattgaaggagacttggaa

SEQ ID NO: 662862 - DNA, 100 bp, Homo sapiens
gccagctcactttaaataccacctcaagactcatcgaatgtttctccatcccagagagatgaagtaattcaatggctggccaaactcaagtaccaattca

SEQ ID NO: 662863 - DNA, 50 bp, Homo sapiens
caggcaaggaggtggtgctggaggtggttctatagatggtaataaccaac

SEQ ID NO: 662864 - DNA, 75 bp, Homo sapiens
tggctgtgggtaactgtaccctcaacttgctatcaaaaggtgtgatgttagctgttgatgctgtaattgctgaac

SEQ ID NO: 662865 - DNA, 75 bp, Homo sapiens
gcctttatttctcgtcggcggcgccctgcaccgcgcctcgcaaagaacttagtgatttggcccgtgaccctccag

SEQ ID NO: 662866 - DNA, 83 bp, Homo sapiens
gtctccaggatacctacaatttggatacagataccatctcaaagggtaatcttccagggtcactcagctgccgcaaggagcaa

SEQ ID NO: 662867 - DNA, 136 bp, Homo sapiens
gtggctacatcggaagagtcttcggcatcgggcgacagcaggtcacagtggacgaggtgttggcggaaggaccgcctggcccggtgcaccatgcattgcaacgacaaagccaaagattcaatagatgctgggagta

SEQ ID NO: 662868 - DNA, 82 bp, Homo sapiens
aaggagagacgtcgctgaggggcttgcctgaagcgagggaaaccaaggtgtatgttggtaacctgggaactggcgctggcaa

SEQ ID NO: 662869 - DNA, 100 bp, Homo sapiens
ctcatcagctatgatcgatacctgtcagtctcaaatgctgaactatccaagatcacgatgccagttatatttaatgagcctctgagcttcctacagcgcc

SEQ ID NO: 662870 - DNA, 74 bp, Homo sapiens
caacatcctgctcctgctcatggacgacgtgctgcagggtgcacagctgatcgccgtggcctcctcggaccccg

SEQ ID NO: 662871 - DNA, 78 bp, Homo sapiens
caaccacacggcttcctgctgggtcccagaacctctaaaatgcagacctccagctctagatctgtgcacctgagtgaa

SEQ ID NO: 662872 - DNA, 101 bp, Homo sapiens
gagcagaggacattctagagaaagtgactgtggctgactatatctcacgagcagagtctcagagccgccagaggccacccctggaacgcactaaaccctca

SEQ ID NO: 662873 - DNA, 98 bp, Homo sapiens
agaaagctttaaaagaaaaagaaaacagattattattgcaacaaagctgaccacagtggccgagaagtcgcgcgtgctgcagctggaggaggagctca

SEQ ID NO: 662874 - DNA, 141 bp, Homo sapiens
cgcagcccgacgaccccgagtcgcagatggcctgccacgttttccgcgccacagaccccagccagcttcttaatgaagaggataactcagaatcatcggctatagagcagccacctacttcaaacccagcaccgcagattg

SEQ ID NO: 662875 - DNA, 100 bp, Homo sapiens
gaatgccaaagtaaccagatctaacatgaggccagaagcctgtcttagatgttcatgcagaactagacagaattacacgaaaaccagttacagtttctcc

SEQ ID NO: 662876 - DNA, 101 bp, Homo sapiens
gttcgacaagaatctgcaggacttggtccgcggcatccgtaaccacaaggaggacgagactgtccaggacggccggcagtttctaaagtatgttgacccca

SEQ ID NO: 662877 - DNA, 75 bp, Homo sapiens
gctcaggaccaggcaccttctgtggaagtttgacggtgagaacatgtatatgagcatgacagagccgagccagga

SEQ ID NO: 662878 - DNA, 83 bp, Homo sapiens
ctagggactgaggagtcgccgccgccccgagtcccggcctccggtgtggctgtctctgatggtgtcatcaaggtgttcaacga

SEQ ID NO: 662879 - DNA, 100 bp, Homo sapiens
ctagccttccagctgccagggggcttaatgaactgcaaaggtacctgtttcccaggcaactactgatcaggcatttctggaccccaaaacaacaaactga

SEQ ID NO: 662880 - DNA, 100 bp, Homo sapiens
gaaactcgatcctccggatattacctgtggagaccctcctgagacgttctgtgcaatggttgacatgatgaaagaagcattagaaaaacttcagctcaat

SEQ ID NO: 662881 - DNA, 96 bp, Homo sapiens
acccaggacctgcacacaagagtggtgctgaggattggcagtgcccactcctatgccatcatgctggcgctacgtacatctttgggaaaagtggtg

SEQ ID NO: 662882 - DNA, 75 bp, Homo sapiens
ctgcagcggagcccacgagaggcagcgccatggcggagcagacctactcgtggtcgtctacttcacagccacttt

SEQ ID NO: 662883 - DNA, 100 bp, Homo sapiens
ctgagctgggaggaggctgcccggcgcctggaggtggccatgtaccccttcaagaagctgggaaaacggcaatggattaataacaagaaattaatggtga

SEQ ID NO: 662884 - DNA, 75 bp, Homo sapiens
ccatgaaacagattggcaatgtggcagccctgcctggaattgttcatatcttgtagaaaatttcagctgtagccc

SEQ ID NO: 662885 - DNA, 75 bp, Homo sapiens
ggctgttcagaggacctcaaagactgtggccattccagcaacaacaatgtccttgacagcaagaaaaagagcgtg

SEQ ID NO: 662886 - DNA, 75 bp, Homo sapiens
ttaggaactcaggattctacagatatatgcaatttctatgtgctctgccaagaagggaaggttatgagttttttg

SEQ ID NO: 662887 - DNA, 84 bp, Homo sapiens
cagggaccaggcggaggcgtcgcgggagcctttggggcaccacagagatgcggggggatatgagactttctactcggaatatcc

SEQ ID NO: 662888 - DNA, 46 bp, Homo sapiens
gtcctttatatagaagggagagtagttagttgaatccatggacatg

SEQ ID NO: 662889 - DNA, 75 bp, Homo sapiens
tcagtgaggccacccgtgggactgatgaattacatagcccaagtagtcccaggtgaaaggtgtagcagtcactcg

SEQ ID NO: 662890 - DNA, 75 bp, Homo sapiens
gacgatcattctgcaagcaggcaacctgaatacaggtgtaaagatttctctctgtgttactggaatccctattgg

SEQ ID NO: 662891 - DNA, 89 bp, Homo sapiens
cgctacgagggcatcctctacaccatcgacaccgaaaactccaccgtagcccttgccaaaggatcttctgcaggacaactggtccttat

SEQ ID NO: 662892 - DNA, 75 bp, Homo sapiens
atgtttatgtcagccaactggggaaagtggaattgaaatcccataaaggtgctggagaatctggtaaaagcacca

SEQ ID NO: 662893 - DNA, 75 bp, Homo sapiens
tggaggcagaggtggcatgggcatgacagtgatatatcagcatatacttacgagcgcactttgatgatggaacaa

SEQ ID NO: 662894 - DNA, 83 bp, Homo sapiens
ctgcacctggccaggctgcggctggaggttattctggtacaagttaacccaggagaagcatttacaataagaagagaagatgg

SEQ ID NO: 662895 - DNA, 90 bp, Homo sapiens
cgggaggccgccggttttctccccgcttgccggggtggtcctcttccctttgtcggtcccagcatttgagggtgatgatggattctgtgt

SEQ ID NO: 662896 - DNA, 50 bp, Homo sapiens
tatcgggactcggcgaggacggtgtgatcccctgggcccgtttgttgtcg

SEQ ID NO: 662897 - DNA, 74 bp, Homo sapiens
cgtgaggggggccttagagggcctccccaggccgcctccgcccgtgaaggtaacacaagtggcaagacagccgg

SEQ ID NO: 662898 - DNA, 75 bp, Homo sapiens
gaggcaagcgttggttctgtgcgcctcagatggaggtgacacgagcagtgatgaggataaagaagaacatgaaac

SEQ ID NO: 662899 - DNA, 100 bp, Homo sapiens
cctggagggggatctaccatctcggactcccgacccgccgccggctccggccgcgtttcccgggtaaaggggctaaaagagatgctaagagaatgcctgc

SEQ ID NO: 662900 - DNA, 88 bp, Homo sapiens
tttatgtcatcaagaagaatgacgatgaacctgcacttgttgccaagtcttccatcttactagatgtgaaaccttgggatgatgagac

SEQ ID NO: 662901 - DNA, 100 bp, Homo sapiens
aaaactcagtgagacacaatttatcattgaataagtgttttaagaaagtggacaaagagaggagtcaggcctttttgcaaatgtgtaacttgcctatcaa

SEQ ID NO: 662902 - DNA, 82 bp, Homo sapiens
ctgcgccgcaacgccgagcgcaccgacatctgcctgctcaaaggatgatcggctgaatgtaacagaggaactaacgtccaac

SEQ ID NO: 662903 - DNA, 85 bp, Homo sapiens
catttgctacagcatcccacattaagtcaacgcgcgttccttcacctcgggcagaataactttgcagaagcccacaggttcttca

SEQ ID NO: 662904 - DNA, 75 bp, Homo sapiens
gccctcgaagtgtgggcgtcatctccccgtaccggaaacagggaacacagccgcacccgggtctgtgccagctgt

SEQ ID NO: 662905 - DNA, 75 bp, Homo sapiens
atgaagaaagacgtgcggatcctgctggtgggagaacgtgtctgacaacaaagcatccctgccgcccaagccggg

SEQ ID NO: 662906 - DNA, 107 bp, Homo sapiens
gtcttcggtggactccttcggcagtccacccaccgccgccgcctcccaggtacaatgactcttcttgcttttcacctaagttgaataagcaccctgtgcactttaat

SEQ ID NO: 662907 - DNA, 97 bp, Homo sapiens
gagcatgaagctgagatggacctgggaactccaacatatgatgaaaaccccatgaagtatgtgggtgccccggtggcttatgtccagcagatatttg

SEQ ID NO: 662908 - DNA, 88 bp, Homo sapiens
tgctcaactacctggacaggtacaccgtggcagggggggccctcagcctcttggccttgaacgggctgttcatcttgattcacaaaca

SEQ ID NO: 662909 - DNA, 100 bp, Homo sapiens
ccagaagcagggacagggagctggttggggaggaccagaaatcagattgatgtggacatcttcgagccccaggggatcagcaagctggatgcccaggcct

SEQ ID NO: 662910 - DNA, 100 bp, Homo sapiens
tgtattgaaaatttcaaagtaaaggatattattagaattctgccatgcaacttggatcctagcatgactatacattgtgacatggtcattacatatggat

SEQ ID NO: 662911 - DNA, 90 bp, Homo sapiens
aatttatatagagatgtgatgttggagaactacagaaacctcgtctccctgggaaactgtttactacagcgggcagctggagcaggaaac

SEQ ID NO: 662912 - DNA, 100 bp, Homo sapiens
cctcatccctgtacgggtgcctggcctcgcttctgtcccaatggccctctacctgacccaagtatgatccgtggcagtgtgccaaaccagatgatgcctc

SEQ ID NO: 662913 - DNA, 75 bp, Homo sapiens
gtctgtgggaattgtaagcaagattaacttcatctaccttgccaagagcacaaaaaaaaccatgctaactttaac

SEQ ID NO: 662914 - DNA, 102 bp, Homo sapiens
ttggtagatgagactaacatgtatgaaggtgtaggaagaatgccctcgattgattaaatggtgcccagccacgctggatgaggcctgatcttccttactcaa

SEQ ID NO: 662915 - DNA, 83 bp, Homo sapiens
ctacgaagaagtgcttcagcgggccaggaagcgcatccaggagatagtcgtgcaagcactgcagtgttcccattattcgattc

SEQ ID NO: 662916 - DNA, 90 bp, Homo sapiens
cttggagtgtgtggctgagtaccacaaagcaagagatgaattgccattcttgcatgaggctggagtgcagtggcgggatctcggctcact

SEQ ID NO: 662917 - DNA, 129 bp, Homo sapiens
ctgcgccccacccgcaccccatctggaccgcatcgctgaatgtgcccggacctgcgccttctggatgtttcagaaagaacaagtggatcctcttcagatgaaattgcagcaggtgaatggacttggcca

SEQ ID NO: 662918 - DNA, 83 bp, Homo sapiens
attttaccagatcgaatctgggccaaatagaaagttggttgaatctggcgatgtggaacccatggatatggagggctgactat

SEQ ID NO: 662919 - DNA, 100 bp, Homo sapiens
gaagttggatttctcgcaaaccagtgcttgaggaatccaaagccctcgtgcgctgcaacatgaagatggagctggagcaggccaacgagagggagtgtga

SEQ ID NO: 662920 - DNA, 82 bp, Homo sapiens
cttcccggaggagtacgtgcccaccgtcttcgaccactacgcagtgtgtggaccagttgacaaagatccaaactgaattaca

SEQ ID NO: 662921 - DNA, 82 bp, Homo sapiens
gtttctctccctctgcccccccttccccacgcaaccccagatccatttacactttacagtggatcagtacaagggaaagcgg

SEQ ID NO: 662922 - DNA, 97 bp, Homo sapiens
gaacccagagatggtgaccgcgtggcaggggctctcggacatgctgccaacgacgcgagcattccacgcctacgggaaggcaggcaagatgctggtg

SEQ ID NO: 662923 - DNA, 86 bp, Homo sapiens
actcaaaaaggacacttctgattaagacggttgaaactagagatggacaggatagcagtgagattcacttcaaagtgaaaatgaca

SEQ ID NO: 662924 - DNA, 76 bp, Homo sapiens
ggaggaagtcaagaaatttctagtaccgtggctgacaagattttgaaaaagaaagaataccctctttatataaatc

SEQ ID NO: 662925 - DNA, 80 bp, Homo sapiens
cagcctggaaggtgcgtgtggggctgggtctcggagtgggagacgtggagtgcaggcctctccatattgctgtggtgcag

SEQ ID NO: 662926 - DNA, 95 bp, Homo sapiens
gagcgagccagcgcccggagcaagcggagctcccccaagagccggaaagacaaatttacatgtattggagaccagaccagaagcccttctgaatt

SEQ ID NO: 662927 - DNA, 88 bp, Homo sapiens
gagaccttctacgagcagcccccactggccaaatacctcaccaagaaaacccaggcagccagcgtggaggctgttaagatgctggatg

SEQ ID NO: 662928 - DNA, 97 bp, Homo sapiens
ccagaggaggcgtgagtttaaggaccgtcactttttaacggcaccaatttgatcttctactactttgcagacatctcttctgcaaacaccagacaaa

SEQ ID NO: 662929 - DNA, 100 bp, Homo sapiens
tagcttggacagccagctgatgagggacacatcgaatcaagatacatgacatggttgattcttcaccacactgaaaccattaggaaaaatccttgtggtt

SEQ ID NO: 662930 - DNA, 98 bp, Homo sapiens
tgtgcagaggggattcaacttcaatttttctgcagtggctctgggtccagccccttacttaaaggacagacccacgaagtcaagcatgcggagtgcag

SEQ ID NO: 662931 - DNA, 90 bp, Homo sapiens
gatattggggataacattacgtcagcgtgatgctgaggtgactcgactaagagaattaaccaggttaatgttgaagaaggaaaatgcgga

SEQ ID NO: 662932 - DNA, 100 bp, Homo sapiens
atggaaacagcgaaggatacagcctgtgcacatcctgacttctgtgagctcattgcgcgggactagggaggccgccttgaccattcaggacagccacatt

SEQ ID NO: 662933 - DNA, 75 bp, Homo sapiens
gcgatgtggaggaagaaaagctcagaaacgtatgtcaaacgaggatacagtgtctggaactattggttctaagat

SEQ ID NO: 662934 - DNA, 90 bp, Homo sapiens
gcaatggcttgggacagggtggacattgccaagaaacatatcctaatttatgaacaacactggaagactctgagatttgcccacctgatg

SEQ ID NO: 662935 - DNA, 96 bp, Homo sapiens
ttctgccgtgattgtcagtttcttgagggctccccagccatgcttcctgtacagcctgcaaaactctgaagaaaaggtgactggtctcatgagccc

SEQ ID NO: 662936 - DNA, 51 bp, Homo sapiens
tcgctggaatgtgtgtctcacgaggtttggacatatttgactcttttcccc

SEQ ID NO: 662937 - DNA, 74 bp, Homo sapiens
gaggccaagcacattgcggaagaggctgaccgcaaatacgaggaggactcagaattcatgattgaagaaatgca

SEQ ID NO: 662938 - DNA, 98 bp, Homo sapiens
cggaaccagcctgcacgcgctggctccgggtgacagccgcgcgcctcggccaggcctccggtgtggctgtctctgatggtgtcatcaaggtgttcaac

SEQ ID NO: 662939 - DNA, 96 bp, Homo sapiens
ttttaagaatgcgcttgctgctcaggagaaaaaatatggacctcttaaaattgtgaaagacagcacactggatgctgctgaagaaatcatcaaggc

SEQ ID NO: 662940 - DNA, 73 bp, Homo sapiens
atggccatggcataaggaactctatcccaggaatacagctttgcattagccgagtcgtccggaaatccattgc

SEQ ID NO: 662941 - DNA, 100 bp, Homo sapiens
aaatgaccaccatgttgcaaaaggtctatgctccatcagcaagcactgccgactacaatagggactcgccaggctatccttcctccaaaccagcaaccag

SEQ ID NO: 662942 - DNA, 100 bp, Homo sapiens
gagtcctcttcccaggtgctgccctccagctcacaggtgctgggcctcgtgcgggtcccgctgtacacccagaaggaccgagtcggaggcttccccaact

SEQ ID NO: 662943 - DNA, 83 bp, Homo sapiens
ctggctcgctgtcccgcagcctgggcggggacccgcgacccgtcaaacccaggtgtccctggccagtgtccttccacctgtcc

SEQ ID NO: 662944 - DNA, 83 bp, Homo sapiens
tggcccggcatcggaatgttcgaggctataactacgatgaaggtttctgagtcccttcaacatgatcctgggaggaatcgtgg

SEQ ID NO: 662945 - DNA, 128 bp, Homo sapiens
aggtaaagtggaattgcatgggaaaatcatggaagttgattactcagtctctaaaaagctaaggtgattttcttccacccccacctccacctctagatgattccagtgcccttccatctatctctgga

SEQ ID NO: 662946 - DNA, 100 bp, Homo sapiens
ttctccacgagcgacgtctccaagctcctcccgtccctggccaaggctcagggtatcagctctgtgataacagcgtgggggtgctcttcaatgactcaac

SEQ ID NO: 662947 - DNA, 136 bp, Homo sapiens
gttttgtgaatatttcttcaattgccccatcattgaagtttatgggaggacttacccagttcaagggaagatggaagagttgagtcaggccctggctagtagcttttctgtgtctcaagatctgaacagcacagct

SEQ ID NO: 662948 - DNA, 100 bp, Homo sapiens
caggtgtcagcattctagccgtgtactccaaggacaactataaaagagttacagggaccaggtactaacatgggatgtgggaaaaattactccacaaaag

SEQ ID NO: 662949 - DNA, 100 bp, Homo sapiens
aggtggtggccatagaggacgtggaggattcaatatgcgtggtggaaatttcagaggaggagtggaagtatgcgagacttaagagctcaagtgactagtg

SEQ ID NO: 662950 - DNA, 100 bp, Homo sapiens
ccgagaccggagcgccgctcgccgcagacttacttccccggctcagcagggaaaggaaatatgagctgtacagcatggactgggacctgaaggaggaact

SEQ ID NO: 662951 - DNA, 75 bp, Homo sapiens
ggccacttgcttgggatcctttatcctggtcatcttctatttccaaagtgcagctaaatcaagtccagcagctaa

SEQ ID NO: 662952 - DNA, 83 bp, Homo sapiens
tgatgaggggacagaggttgcttttccccttctaggagccttcacgtaaatgggtccagtcatgcctcccagtaagaagccag

SEQ ID NO: 662953 - DNA, 89 bp, Homo sapiens
tttgaagacttgctagttaggattttattactggcagcatgtatatcttttctgtggtcgccaggacccccccagagccaagaccttct

SEQ ID NO: 662954 - DNA, 74 bp, Homo sapiens
tttccatccggataggtagagctgggcttctttcagttctgtgccttcccctgcagccacagcagccatcccag

SEQ ID NO: 662955 - DNA, 78 bp, Homo sapiens
aagtctccttatttcctgtgcaaagtgctgcgtacgggttcatgcaaatacccagaaagcggtactctagaaatgaat

SEQ ID NO: 662956 - DNA, 51 bp, Homo sapiens
ggatcaagatggccatgtggcaggattcactggatgaaagaaagataaaag

SEQ ID NO: 662957 - DNA, 74 bp, Homo sapiens
cagcattagggacaggaatggaacacacttggatgcagcaatgaagcttggagatacatgggtggctttgcaaa

SEQ ID NO: 662958 - DNA, 100 bp, Homo sapiens
ctcacctctacagcatctatcctcatggatcaactgataagttgccttatgtcaccatgggtcctaggcctacttacaagcctccagtctcaaattatcc

SEQ ID NO: 662959 - DNA, 51 bp, Homo sapiens
agtagcctgtataccagcacggccagactgaaactgttgaggagcccatgg

SEQ ID NO: 662960 - DNA, 100 bp, Homo sapiens
catgcccagccagggcagggtggagagctgcagctgcaggccacagagatgctggttcacaatgcccagaacctcatgcagtctgtgaaggagactgtgc

SEQ ID NO: 662961 - DNA, 51 bp, Homo sapiens
aaggaggcagaggcacttatgcttgtcaggatctagtgaaaagccatttga

SEQ ID NO: 662962 - DNA, 98 bp, Homo sapiens
cgacctcgacgtcttgcctgtgtcccacttgttcgcggcctataggtccgcgggagagctgtggggcttggtgagtgtttcgtggcctctcgggttgg

SEQ ID NO: 662963 - DNA, 83 bp, Homo sapiens
ccgcttaccccggggtctatggaagtaatggaaggacccctcaacctggtgattgaattactcagatatgaagatcatcatct

SEQ ID NO: 662964 - DNA, 96 bp, Homo sapiens
tgtatctgggaatagtgctgagacaggactgaaagatatcctaagaaatccggtaaccaataagaagcattacagattgtatgtgatttataaagt

SEQ ID NO: 662965 - DNA, 100 bp, Homo sapiens
ggcgcgggatgctcctggcgcggcaagtggttcttcctcagctctctcctgcaggattttgcaggatcgtggtctttccaaatatcctaatctgttaaat

SEQ ID NO: 662966 - DNA, 75 bp, Homo sapiens
ggagcgcgcctctttttggcttggggagctgcagcgttcgatcatatctgaagatattagtgagctacaaaagaa

SEQ ID NO: 662967 - DNA, 82 bp, Homo sapiens
cctgggattcagcttcttcttcaacatgctcttcgtaaactcatcactgctatatatgcagattatgcccggagtttgaaga

SEQ ID NO: 662968 - DNA, 98 bp, Homo sapiens
cttgggaagagaaagaaaatgccgaaggcactcagacaggttatgaagacagtatggagtttccagaccatagtagacatttgctacagtgtctgagc

SEQ ID NO: 662969 - DNA, 75 bp, Homo sapiens
caaagcgcctggaagaggaggaggcagcggcagagaaggaggaccgcggcctagttccccgagagcgttcagaca

SEQ ID NO: 662970 - DNA, 75 bp, Homo sapiens
acatttgacattgatccgatggtggttactgggggcgacgatggccttctgaggggctgggacaccagggtaccc

SEQ ID NO: 662971 - DNA, 100 bp, Homo sapiens
atgggcggaatcacgtggggaatttctgccagggcctggagcatgggtgtcctgggccttgggggcactgtcatctggagggcctggcactcagctccct

SEQ ID NO: 662972 - DNA, 142 bp, Homo sapiens
gggagctggtctttcagccaccattgctaggagtgagcatgagatttctgaaattattgatgggctctctgagcaggagcgatctagggcagccctgcagaggtacctgttctactgtaatcgctatatgaaccacatgcag

SEQ ID NO: 662973 - DNA, 75 bp, Homo sapiens
cccctcacatctatgccatcacagacaccgcctacaggagtatgatgcaagacaagttggatggcttgaggactg

SEQ ID NO: 662974 - DNA, 98 bp, Homo sapiens
gcggcgcggcgggaccatggagctcagagcgcagccccggcgccggcggcgggaccgcggaccgtactatactggcaattgctggagaagattttgca

SEQ ID NO: 662975 - DNA, 82 bp, Homo sapiens
gcgaagaggctggactcggattcgttgcctgaggttggaagtactccatgacacacactcggagaaagtcccttcccatgct

SEQ ID NO: 662976 - DNA, 127 bp, Homo sapiens
gcgagctgcccgataatggcggcctgcagagcccatgagagggagaagcggcagcgtctaccctgagatggagtctgcacgcaaagcatgggagaattctccaaatgtaagggaaaaggggtctcca

SEQ ID NO: 662977 - DNA, 100 bp, Homo sapiens
tgcacggcaggagctacggcccagcgccgggcgctggccacgtgcaggtcaaaggccctttcagaagcaactccatttcattggataacttaaaaccctc

SEQ ID NO: 662978 - DNA, 75 bp, Homo sapiens
aggctgaggatgatggtagattgccagagacacctatggctgccgatgaaggctcagcagagaaacaggcaggag

SEQ ID NO: 662979 - DNA, 100 bp, Homo sapiens
accccgacattctccacctcctgggaggccagccattcccaaatgccccaaggatgaagaacggagacgaaccgggctgtgggtcggcccaaggggaagc

SEQ ID NO: 662980 - DNA, 95 bp, Homo sapiens
ctggaacagtatcctaccaggccgcacattgcagaattacctccgagttgcatttcaggaggtcaacagtggttgcacaggaaagaccctccttg

SEQ ID NO: 662981 - DNA, 75 bp, Homo sapiens
cagaagttccccaagctccgggtgccgaatacaggagtttccagaaaatataaaaaattgtaaagttttgacaat

SEQ ID NO: 662982 - DNA, 98 bp, Homo sapiens
ccgatggaatcccagaggaaactgacggagacgcagatgtggacttgaaagaagctgcagcggaggaaggcgaggattacggggcgctgaaagacatc

SEQ ID NO: 662983 - DNA, 88 bp, Homo sapiens
attgtggtgctggaaggggccagtctggagacagtcaagggcatgaccattcggcccctggtagacctgttggctgtgaagaaaaagc

SEQ ID NO: 662984 - DNA, 100 bp, Homo sapiens
aaagagttatggatattctggtggggagatgaacccaacctagtgggtgtaatacatcatgaactgcaggttttgtttggctatgccaccacagtcatcc

SEQ ID NO: 662985 - DNA, 90 bp, Homo sapiens
tgctcgcgccctgcgaggcccgagaaatcatgccaccctcaaagcctcatccacctgtcgtgggcaaagtgactcatcacagcattgaat

SEQ ID NO: 662986 - DNA, 75 bp, Homo sapiens
cagcatgcccgggctgccactgttgggcattgatctggtagccttgctccagaagcctgttcctcacagtcaagc

SEQ ID NO: 662987 - DNA, 100 bp, Homo sapiens
caggtgctgccggaccccctggacccaaaggccctcccggagatgatggtcccaaaggcagccctgaagccatcctcatctccctggccgccctgcagcc

SEQ ID NO: 662988 - DNA, 76 bp, Homo sapiens
ctataagagagtagaaagccctgcaacttgagttggtggaaccaagtggctggattcatgttcccttaactgacaa

SEQ ID NO: 662989 - DNA, 98 bp, Homo sapiens
ttcagtaatgcagagtcctcttgttggagttacatctactcctggaacaggtcatattgaacattccagatacctatcattactcgatgctgttgata

SEQ ID NO: 662990 - DNA, 82 bp, Homo sapiens
atttttgaaatgggctgggaaaagccatctcctattcagaacgtgctggccaaagcgctctatgacaatgtggccgagtccc

SEQ ID NO: 662991 - DNA, 83 bp, Homo sapiens
attccaacaacaattccgatggcaaagccgttgccaaggttatcaatactctggctgaccatcatcatcgtgggactgacttt

SEQ ID NO: 662992 - DNA, 82 bp, Homo sapiens
ctcctaaacctgctggtgacacgactcagacagaagattgacgtgagtgaattcagatataactcaagcttgttagagggct

SEQ ID NO: 662993 - DNA, 75 bp, Homo sapiens
ggctgaggcagcgcggccgcagcagccctgttccatcttagcccacatccagaagcaaaagcacttcaatgagcg

SEQ ID NO: 662994 - DNA, 83 bp, Homo sapiens
aggactgcctcactgagcaaccaagaatcatggaagggaagtggttgctgtgtatgttactggtgcttggaactgctattgtt

SEQ ID NO: 662995 - DNA, 49 bp, Homo sapiens
tccagttttttaagaagggacaaaagtaagactttgaccccgacgcagg

SEQ ID NO: 662996 - DNA, 75 bp, Homo sapiens
agccaagctcgtagcctgccactccgtgcttctacatgctggattcaaggtctacagacagagtgttacagtggg

SEQ ID NO: 662997 - DNA, 90 bp, Homo sapiens
tgcctcactgccagaagctctttgtgtatgaccttcacgcagtcaagaacgacttccaggtctacttccccagcaggacagcatcattct

SEQ ID NO: 662998 - DNA, 100 bp, Homo sapiens
gcactcagtgcaaataacaatagcaactcccccagcagatgtcaagccctccaacatcctagtcaactcccgtggggagatcaagctctgtgactttggg

SEQ ID NO: 662999 - DNA, 101 bp, Homo sapiens
cagcctcaagggcttcagcaccgcgcccatggcagagccagaccggtgaggacgcttgagcggaagttagaagcaaaaatgatcaaggaggaaagcgacta

SEQ ID NO: 663000 - DNA, 86 bp, Homo sapiens
tggacggcgagcgcgagcggcgcgagaaaacagccctcagcgcctttttccaggagaccaacatcccctacagccaccatcaccac

SEQ ID NO: 663001 - DNA, 75 bp, Homo sapiens
aaacagagggagctactctcaggctgcaggtgaccaagaatatggcccaggtgaccaaagccctggacaaggccc

SEQ ID NO: 663002 - DNA, 122 bp, Homo sapiens
tttccaccgaggaaaaggaatcgtatcgtatgtccgctatccagaacctccactctttcgacaatgcagatcttcgtgaagactctgactggtaagaccatcaccctcgaggttgagcccag

SEQ ID NO: 663003 - DNA, 90 bp, Homo sapiens
gctccgttgactaccgtggagagatcataatttggggttcaagattccagagccccacagtcttcgttacaacctcatggtgctgtccca

SEQ ID NO: 663004 - DNA, 76 bp, Homo sapiens
attttgtggaatattcattgtactgaatattacccttgtgcttgccggtttatggctacaaatgatttgatgacgg

SEQ ID NO: 663005 - DNA, 100 bp, Homo sapiens
ctgcagagagagtgcgcagaaggattccgggagcacagttccgccgaggatcagtgtccttcagggatgtggctatcgatttcagcagagaggaatggcg

SEQ ID NO: 663006 - DNA, 100 bp, Homo sapiens
ccaaggtggtgctgctcaaagccgcatacgatgtgtcttccttcagctttttccagagatccaggtttcaggctctgtataactatactcccaggaatga

SEQ ID NO: 663007 - DNA, 76 bp, Homo sapiens
gcgggagcttccgggagggcggctcgcagcaggcgtaacccaacacctatctcagctttaagaatccaatattacc

SEQ ID NO: 663008 - DNA, 51 bp, Homo sapiens
ataattaagaagaccaagtagcatccaagtagagacggggtttcgccatgt

SEQ ID NO: 663009 - DNA, 98 bp, Homo sapiens
ctcgaggcgacagcggccccgccgcaccagagcagctatgaagtcttacactccatatttcattctcctgtggagtgctgttgggatagcgaaggctg

SEQ ID NO: 663010 - DNA, 100 bp, Homo sapiens
gtggacttgtgaaaaaaattttggagacgaagaaagattatgagaaattgcagcagtcacccaaacctggggagaagaatccacattcatctcaatggaa

SEQ ID NO: 663011 - DNA, 82 bp, Homo sapiens
cagaacgtgtagccgcgtcccctccagtccgctccgggcagctgcttccagctgccatggtgatgccaccccagcccgtggt

SEQ ID NO: 663012 - DNA, 51 bp, Homo sapiens
cgccatctcccaccccagagaacgagcaaatacctgatgtgtcaccaacag

SEQ ID NO: 663013 - DNA, 100 bp, Homo sapiens
cagaggcagaaaggcagaagtggaagcaacttctatttagtgatcatggaggctaataatgaaggggccgggaaggaggccagtgctaccagggttatct

SEQ ID NO: 663014 - DNA, 82 bp, Homo sapiens
ggtctgtcagtgagatggcttctaacaagaacattactactggatggaaatccattccgagttcctcgagcagccatattaa

SEQ ID NO: 663015 - DNA, 50 bp, Homo sapiens
aagaaagacgcagagttaaaggcggaactctaatgaatcattgattgacc

SEQ ID NO: 663016 - DNA, 75 bp, Homo sapiens
tcctccgcctcttccaaagcggtctttaagtggacaggagataatatgttttttatcaaaggagacatggattca

SEQ ID NO: 663017 - DNA, 75 bp, Homo sapiens
tgtgggatagtcttggagaggagcaaaaacagagacctcatccttcaacagctgaatcaaaggctccaacaccaa

SEQ ID NO: 663018 - DNA, 80 bp, Homo sapiens
tgacctcttcgatgtgcgagactttggaaagttggaatcgaagcctcttaaaatggcagatgacttggacttcgagacag

SEQ ID NO: 663019 - DNA, 75 bp, Homo sapiens
tactcctcctctaacatgtcagcgttattgtaatgcaagaactagaagatcttctgccatctagaccggaagttc

SEQ ID NO: 663020 - DNA, 51 bp, Homo sapiens
agaccactttagaaactcaattaatgatcattcaggatatgttcgtccagt

SEQ ID NO: 663021 - DNA, 98 bp, Homo sapiens
ggaatttaaacctgagccactatctgaagtgccggtggtggtgtgcacattgagccccggtatagacagttcccccagctgaccagatcccaggtgtt

SEQ ID NO: 663022 - DNA, 90 bp, Homo sapiens
tgcgctctttgatcttgaatattatgtccatcaggaattgaatgatctggcacgggaccctccagcacagtgttcagcaggtcctgttgg

SEQ ID NO: 663023 - DNA, 100 bp, Homo sapiens
ctagaatccgggagttcgtgccgccttttgggatcaaaggtcaagaatcgagagctccagatcatgagaaagctagatcactgtaacatagtccgattgc

SEQ ID NO: 663024 - DNA, 75 bp, Homo sapiens
tgagatcccaggaggatggccacatccccccgggctacatctcacagggatagctgggagtatggccaccctgct

SEQ ID NO: 663025 - DNA, 83 bp, Homo sapiens
ctaacaggatattcctcatgacattgctgtctgtttttcagaagaagtgaagtcaagatgaagaaccatttgcttttctgggg

SEQ ID NO: 663026 - DNA, 74 bp, Homo sapiens
attaaagatgcagtacgccacggggccgctgctcaagttccagatttggaaccgcggggaaaggcgaatgggtg

SEQ ID NO: 663027 - DNA, 75 bp, Homo sapiens
attccaagtaactcttatttgaaggcagacggtaacaagtactccttgctggattgaacttcatctgaatggacc

SEQ ID NO: 663028 - DNA, 73 bp, Homo sapiens
catccagtttgatgtttactacaaggtttttgattggtcaaggagcacatgtaggggctgtcaacagtgaagg

SEQ ID NO: 663029 - DNA, 58 bp, Homo sapiens
aaggaaactagctcggaccgtgcaggctgctgcagagaagttggtgcaagccttaatg

SEQ ID NO: 663030 - DNA, 100 bp, Homo sapiens
gcggtcgcgccggcaagagcagcgggagcggcgcggggaagggggcggtgtccgcagagcaggagccatgtgttcacatgtcatgtggaccagtatttaa

SEQ ID NO: 663031 - DNA, 83 bp, Homo sapiens
ctgggcatcatcgacagtgccttcggccagagcggcaagttcaagatccacatcccagacaatgcagatcttcgtgaagactc

SEQ ID NO: 663032 - DNA, 75 bp, Homo sapiens
caacagtttggcgtgcaacatggggcttgagaaaggccttctccactcgtctgtttgctgtcctgagatttgaaa

SEQ ID NO: 663033 - DNA, 76 bp, Homo sapiens
cagacgtgagctgagggcgcagaggcaggcagaaggacaggtggagggaagcgccccagacaaggaagctggcaac

SEQ ID NO: 663034 - DNA, 98 bp, Homo sapiens
gaagttcttcttccagaccgagctgcaggcaccgatgaagacgccattattagcgtccttgcctaccgcaacaccgcccagcgccaggagatcaggac

SEQ ID NO: 663035 - DNA, 75 bp, Homo sapiens
cgactatattgagaaggaggtaaaggcaaccttcaaaagatcctgtcccatgatcatcctccagagtattcagct

SEQ ID NO: 663036 - DNA, 74 bp, Homo sapiens
gtgggcttcaacatgaggaaggtaactaaaggaaaactaggtgtctgtgttcactccaggctgaagttacaggt

SEQ ID NO: 663037 - DNA, 100 bp, Homo sapiens
ccgagcttcgggtaactctcacagtggagggcggaagcccggctcgctgcaaaacgggcggcccgcgcggaggctcgcgagatccgcatgaaggagctgg

SEQ ID NO: 663038 - DNA, 75 bp, Homo sapiens
tggagaagctgcaggcgcgcctggccgcgaacccggaccctaagaaggctgcctgctgtttcccggggagatcat

SEQ ID NO: 663039 - DNA, 98 bp, Homo sapiens
gaaggttgcagccgcaggagccccggaggcccaggacacaggtgtgagcgccttgtgagtcttctcctgaacccagcggtgctgtccacggcgtcctt

SEQ ID NO: 663040 - DNA, 75 bp, Homo sapiens
cacacctcagcctcccgagtagccgcgatcacaagtggaggatgcgctatcttatcttgaccaggtgaagctgca

SEQ ID NO: 663041 - DNA, 50 bp, Homo sapiens
agctgcagtctttgtgggacaagaagatgactcaagaccggcctctgctt

SEQ ID NO: 663042 - DNA, 50 bp, Homo sapiens
atgagtatgatgcacctgcagtagagagctgtagtacacatggatgaacg

SEQ ID NO: 663043 - DNA, 80 bp, Homo sapiens
cagccccgcgccgcgccggacccgaggacatggatttgattgacatactttggaggcaagatatagatcttggagtaagt

SEQ ID NO: 663044 - DNA, 100 bp, Homo sapiens
ggccagaaggagaaggacgaagcgctggaggagaagctgaggaacttaactttccggaagcaggtctcgtacaggaccagtcctgcctctgttgtagaag

SEQ ID NO: 663045 - DNA, 100 bp, Homo sapiens
gcggaacagccacagcagcctcccaaggagtctgcaagttggatagagggaggaatcagcagcttggaaattcaagcacgtgatctggcgggatgggcgt

SEQ ID NO: 663046 - DNA, 100 bp, Homo sapiens
agctcacaatgtaattgattatattgatacaatatggaaaatactcaagccaggtggaatttggataaatctaggtatgcaaccactcatgtattcggtt

SEQ ID NO: 663047 - DNA, 50 bp, Homo sapiens
gagaacaccggaagttggagaaggcgaggattaaatccaccacacagggt

SEQ ID NO: 663048 - DNA, 100 bp, Homo sapiens
caacccccaggacccgctcaaagatcttgtctcgctggcctgcgacccagccagccagcaacctggaccggcaaaatacatatctcagtgcattgatgag

SEQ ID NO: 663049 - DNA, 50 bp, Homo sapiens
tacatgatgagaggtttgagaaggacccactgatctcagcatgaagagac

SEQ ID NO: 663050 - DNA, 50 bp, Homo sapiens
ataaggttctgggaacacataaagacccaacatgagtgaagtttcctgca

SEQ ID NO: 663051 - DNA, 100 bp, Homo sapiens
ccaggtggttggcgtgcttaagattcaggcgaagtccgcctcgtcagtttgcacatccaggctctggtggacgctggtgttccagcccgtgacattgctg

SEQ ID NO: 663052 - DNA, 83 bp, Homo sapiens
gttttgacagtaattcttttgggccgatattgcggtggtggagatgagcgatgccttccggcagccgtccttgttttaccacc

SEQ ID NO: 663053 - DNA, 101 bp, Homo sapiens
ctctcctgtctgccaccatcctgggttgacaattctacacaaggagaaccagcctttcaaacagtttccagagatggattatcctactttacttttggctc

SEQ ID NO: 663054 - DNA, 74 bp, Homo sapiens
ttgaccgcttttgtggcctcatggaaaaatgttcgttggtggcctgagctgggatactagcaaaaaagatttaa

SEQ ID NO: 663055 - DNA, 100 bp, Homo sapiens
gaataaagccaagctcatctctgagacccggaggaggttcgaagctgagtatgtgacagaaatacctcagggactttttcagcgtgatgctccagtccgc

SEQ ID NO: 663056 - DNA, 75 bp, Homo sapiens
atggtcaagatagacctgaaaaccaagtcttgtagtggagtgggcagatgattctggaccagatgaagcctgagg

SEQ ID NO: 663057 - DNA, 96 bp, Homo sapiens
gtgcggctgggctgtgtgtagaccagggtgattctgggggtccacttgtctgtaatggtgtgcttcaaggtatcacatcatggggccctgagccat

SEQ ID NO: 663058 - DNA, 97 bp, Homo sapiens
gctgcaaaccacccaagtctgcaatcttaccagggaggccaagcgaccacccaaagaaggttatttcacagttgaggattttgggcagatccataac

SEQ ID NO: 663059 - DNA, 75 bp, Homo sapiens
aaacagcccgcccgaccccgtcccgaccctggccgccccgagcggagcctggagtggaagtatgcgagacttaag

SEQ ID NO: 663060 - DNA, 93 bp, Homo sapiens
cagcctcccgagtggctgggattacagcctgtgcacgtcgggcgtagttcggcttcacatcaacagctggctggaggtgagcttctgcctgcc

SEQ ID NO: 663061 - DNA, 75 bp, Homo sapiens
gcggagtcttcagcacccccacaagcatgcagactggtcgaattgacaaatcttaccctacagtatgtggccaca

SEQ ID NO: 663062 - DNA, 100 bp, Homo sapiens
agaaggaacttgcagaaatcacattggaccctcctcccaactgtaggtggtatcacggaaaacttgacagaacgatagcagaagaacgcctcaggcaggc

SEQ ID NO: 663063 - DNA, 100 bp, Homo sapiens
tcatcagagagatcatactcccaagaacaggctttgacccttctttaaaagaccatcattgaatgtctaaaatatatttgtactggagatttccctcctg

SEQ ID NO: 663064 - DNA, 115 bp, Homo sapiens
cgccgctgtcccgcgaggctcggccggcgggggggcagttcattcatccaccagcccttccgcggggctggccaggctatttagcagacatgacccacaagcagaagaagcatta

SEQ ID NO: 663065 - DNA, 73 bp, Homo sapiens
acaagaaactagagcaaataaccgttttgaaattgctctgaacaagaaggaacacagagggtgcgacagccca

SEQ ID NO: 663066 - DNA, 100 bp, Homo sapiens
atgaatcacctgaagctggtaaaatgcttgaagatgaactcgtcgacttctcagaagatcaggataaccaggatgaagtgaagctgccggccaaactgag

SEQ ID NO: 663067 - DNA, 133 bp, Homo sapiens
ggacagtctggcaaaagcctctgctctgcctccggggacaagaaactagagcaaataaccgttttgaaattcattgtcgtggaagttctccgaatcctggttttgattggtcagattcttttttcactagcgg

SEQ ID NO: 663068 - DNA, 101 bp, Homo sapiens
tggcaaccactatttgagtttctgcctctacaaatttgactattctaggtacttcataacatgggcctggaattgatatattcacacctggtaaacctgga

SEQ ID NO: 663069 - DNA, 50 bp, Homo sapiens
cgcgaatatcgtcatcgttagaaggtgcaaagcaacagtgaggaggagca

SEQ ID NO: 663070 - DNA, 100 bp, Homo sapiens
tgaactcagacctattgcaaggaaaggacactcccctaacatatttgaaactgccaagttttggaccttatctggaacagcgcaagaaaatcatagcaga

SEQ ID NO: 663071 - DNA, 82 bp, Homo sapiens
gtccggcgctgccaggatccgcggggagaccttgggcatcatcggacttgggagtgcatccgccccaacccttttccccctc

SEQ ID NO: 663072 - DNA, 83 bp, Homo sapiens
atctcaagatattaaagttactgctgttaaaaagagagaagaagaaggaggttcctgctgtgccagaaacccttaagaaaaag

SEQ ID NO: 663073 - DNA, 51 bp, Homo sapiens
ggaattcctcaagacaccattccaggtgctggagaatctggtaaaagcacc

SEQ ID NO: 663074 - DNA, 100 bp, Homo sapiens
cctcctcagtctcatccatctaccagtagcagttcatctgatgggcttcgtgataatgtaccttgtttaaaccacaatatgagaacacttcactccagac

SEQ ID NO: 663075 - DNA, 99 bp, Homo sapiens
gctctacaactgctggcagcgccggctgcccaagctcaagcacgtgacgaagggaacgtcatcgtttggaaagcgtcgcaataagacgcacacgttgtg

SEQ ID NO: 663076 - DNA, 75 bp, Homo sapiens
caaaacaaggttccggctgaggaccttacattgacattcaggtactagcaaaggccagacgtcttactcaacaac

SEQ ID NO: 663077 - DNA, 75 bp, Homo sapiens
gaatagtacttcaattaagtacaatttagaagaactctaccagaaatgcttcggttacccacagtctttcgccag

SEQ ID NO: 663078 - DNA, 100 bp, Homo sapiens
gcttggtgtaccagaattcggccatgagccgctacatactcatcatggggctcctgtacaagaggcagaagaggcctggaccttggcgcacacagaccca

SEQ ID NO: 663079 - DNA, 74 bp, Homo sapiens
attcttaaattgatttcaagtttgaacaagacaatgcagatcttcgtgaagactctgactggtaagaccatcac

SEQ ID NO: 663080 - DNA, 101 bp, Homo sapiens
ggtggcggcggcaccaaggcccccaagccctccttcgtgtcgtacgtacgccctgagtggccaacagtgttgcaaacaggaacccgaggttttcacttcac

SEQ ID NO: 663081 - DNA, 96 bp, Homo sapiens
cttaggatgaggtgggcgcaccgggcatagtggttggagtttctgtagatggaaaagaagtctggtcagaagggttttctccagggatttaagggc

SEQ ID NO: 663082 - DNA, 100 bp, Homo sapiens
gcagccgggtgggaaggctcaagatggcgtgcttgttggagaccccaatccgcatgagcgtcctttcgattacaggagcttattaatcataagaaggctg

SEQ ID NO: 663083 - DNA, 76 bp, Homo sapiens
gtgccgccctgacttgtgcagcaaagtggcccaaatccatggcatttgccggtggtggtgtgcacattgagccccg

SEQ ID NO: 663084 - DNA, 50 bp, Homo sapiens
cttcaacaccaccttcatctccaccatcgaatgggagctgactgatatgg

SEQ ID NO: 663085 - DNA, 100 bp, Homo sapiens
acagcgaaggatacagcctgtgcacatcctgacttctagctccttaataagcatttatagtcagtttttggcagcaatagaatcactaaaggcattctgg

SEQ ID NO: 663086 - DNA, 100 bp, Homo sapiens
caaagttgtcccactgaccaggctgtaaactttggaactgataagtgagagagataaggtccctaatattaaggagctttgtggatgatactatgcatct

SEQ ID NO: 663087 - DNA, 75 bp, Homo sapiens
cgaggagaacagtccgaaatggcggggactgttggtctcggccctgcggaagtttgcctgagaatacagatcaac

SEQ ID NO: 663088 - DNA, 101 bp, Homo sapiens
ctcctgagtagctgggactgcagttggaactgataatgggagagaagcaattgaaagtggggctgcatttctcttcatgacatttcacttgaaggactctg

SEQ ID NO: 663089 - DNA, 98 bp, Homo sapiens
gagagggaaggttcacttttcagaaggagaatgacatcttcctgggctgggaaaaaggagcttataagaaatggggaaagagtaagaaaaaatgttca

SEQ ID NO: 663090 - DNA, 87 bp, Homo sapiens
gcacggagggacttctgcagagagagtgcgcagaaggattccgggagcacagttccgccgaggatttcagtcataatcggttgtcta

SEQ ID NO: 663091 - DNA, 82 bp, Homo sapiens
gccagctgacggagatggtgcagaagatggaggagaatcatcggactcaggtacatctgtgagtgagaacaggtgtcacctt

SEQ ID NO: 663092 - DNA, 80 bp, Homo sapiens
ccagtgggcctggagcagctgcggcggctcggggtgctctactggaaggtttggtgcacctcgatttggaggaagtaggg

SEQ ID NO: 663093 - DNA, 100 bp, Homo sapiens
gtcttttcccaaaagacaggctcttcacctgaaggtgacttaagagattaaaattaatttggttgctgttggttctgaacaaataatgagttcttttatt

SEQ ID NO: 663094 - DNA, 101 bp, Homo sapiens
gttctgggacttaggagggcaggaagagctgcagtctttgtgggacaagatatcaacctgaattctcctaacaaaggtctgctgtctgactccatgacgga

SEQ ID NO: 663095 - DNA, 121 bp, Homo sapiens
aaaccacttctctacatcccatctcaatcagaattactagattttctctcaaactacgaggtgtgaccaattcagtgaaaggaacgaatgcgattctctggacctgtttgggactgagctt

SEQ ID NO: 663096 - DNA, 51 bp, Homo sapiens
ggagtgctatgtcacagaaattgaccaagataagtatgctgttcgcttcat

SEQ ID NO: 663097 - DNA, 75 bp, Homo sapiens
ggagattatagctctgtatgagaaggacaacacctacttaggtctacatgttcaagtgcgtgtggcggtgctaca

SEQ ID NO: 663098 - DNA, 51 bp, Homo sapiens
gacccttcccctccagtcacctgggttatgaagacagtatggagtttccag

SEQ ID NO: 663099 - DNA, 100 bp, Homo sapiens
aactgccccgccaccgtcatcaacgggcagtttgtcgaacgatgttggactcatagtcactgccagaaagacccgggaaaaggagaagatgaaggaagcc

SEQ ID NO: 663100 - DNA, 100 bp, Homo sapiens
aagatggggtatcctatcctggtcagaggaagtgtgagggtctgaagattggggacacgatggactcaccctgtcacccaggttggactgcactggcctc

SEQ ID NO: 663101 - DNA, 75 bp, Homo sapiens
gtgggagcggagagcgcaggcgtgtctctagtgatccctgaaaagttccagcatattttgcgagtactcaacacc

SEQ ID NO: 663102 - DNA, 87 bp, Homo sapiens
aattctcctgccaccgcgtggtgcttgccgcagccagcaactatttcagtactaaggctcgtacgtctgcatcgattatcttacgtg

SEQ ID NO: 663103 - DNA, 82 bp, Homo sapiens
tggcggcgctggagagggggcgctgagctgttgggttataatcgctggttatgtcaagcaagatctgaggatctgtctgata

SEQ ID NO: 663104 - DNA, 82 bp, Homo sapiens
ttcagagaccttggcgataaaggtgatcaactgggagaacacgctccacattccagcccaggtgaagctgagccctgaggcc

SEQ ID NO: 663105 - DNA, 99 bp, Homo sapiens
atgctgtacatggaaatcatgtgaaatgtgtaaagatgctcttaggatcactactcttggaatcaaagataaatccaaatactgcatatcagaaacaac

SEQ ID NO: 663106 - DNA, 100 bp, Homo sapiens
ggcaacaagtacaagcggcgggtgccccgggtgaaatgacaatggatgctctgttggctcgattgaaacttctgaatccagatgaccttagagaagaaat

SEQ ID NO: 663107 - DNA, 50 bp, Homo sapiens
gtcggctcccacgcttagccagctcccgacaatgcagatcttcgtgaaga

SEQ ID NO: 663108 - DNA, 50 bp, Homo sapiens
ctgcattgtgttgctgcagattgccaaattcaatcaggctgtcacccaca

SEQ ID NO: 663109 - DNA, 50 bp, Homo sapiens
cgggaggaggccatcctgcagatggagcaaagagagcaggatgaatggac

SEQ ID NO: 663110 - DNA, 100 bp, Homo sapiens
gcaggacagtggaacagcttgttcagatttaagcatcttgcaactggaaactatttagctgcagaggaccgtatccttgatgagcttgacaaagacgata

SEQ ID NO: 663111 - DNA, 98 bp, Homo sapiens
tggccacctacagaaacaaaatgtcaacaaattgatggatgttggagtccggggtgacctggtctcagtgaagaaatctttaggccggaatcgactcc

SEQ ID NO: 663112 - DNA, 100 bp, Homo sapiens
caggtaatgagaatcttcgccttgcggagcaggccgggctctcgccatgggtcactgtcgcctctgccacgggaagttttcctcgagaagcctgcgcagc

SEQ ID NO: 663113 - DNA, 75 bp, Homo sapiens
ctgccgctggattgtgataggaagcagagtgttcgtgtgaatacctcctctgaaaaatggcagaagcagttttcc

SEQ ID NO: 663114 - DNA, 100 bp, Homo sapiens
ctgacagcttgcattgctgactttgggttggccttaaaatttgaggctggcaagtctgcaggcgatacccatggacagctgtcagtggtagctataggaa

SEQ ID NO: 663115 - DNA, 98 bp, Homo sapiens
cttccagaaggctgtagaccagagtatcgagaaggatttggagtggatcagttacgagatgacaatctagaaacttattggcaatcagatggttccca

SEQ ID NO: 663116 - DNA, 90 bp, Homo sapiens
gaggaacctttgacaatgcagaaaccaagaaagagtttggaccagtagttatagattatggcaagtacaaggtgaatatcttaaccagac

SEQ ID NO: 663117 - DNA, 100 bp, Homo sapiens
ctttttcagaaatgcgcagagcaaacatctttcaaaggttgttcttgcagaacatgccagcagaagcattcaccaactgacatgtgccctgaaagaaggc

SEQ ID NO: 663118 - DNA, 75 bp, Homo sapiens
ccttgtcctccctctgcacaagtccgagaaatgtggtttgtggtaggaaggaatggtggcctactccatgagcag

SEQ ID NO: 663119 - DNA, 99 bp, Homo sapiens
cattgcagccatcagcgctcgttttgtgcagcttcagcacaatgacattgacaaacggagcaactggaatgagattgttgataactttgatgatatgaa

SEQ ID NO: 663120 - DNA, 50 bp, Homo sapiens
ctacaacttcccctactgcgaaggacttcactgaggatgtcaactgtgct

SEQ ID NO: 663121 - DNA, 83 bp, Homo sapiens
cagcgccagcggccgagcgggcggcttcctggcctgggcgctccggtggcggcggaggccctgtttgtgctcttcgtcctggc

SEQ ID NO: 663122 - DNA, 101 bp, Homo sapiens
gcagaagtacccccaccacgcctctgcaatcatgggtcaccaagagaggctgagagaccagatcttggccctgattgcattcatctgcatagagaccatca

SEQ ID NO: 663123 - DNA, 96 bp, Homo sapiens
ctaacaagcctagaaaccacgtcagaaatggaagcaggaagtcctgagggcagataaaacttgcagactttggacttgctcgattgtatagctcag

SEQ ID NO: 663124 - DNA, 101 bp, Homo sapiens
cgaacagtggcagcgcgacctggccagctgccgcgactgggaggagcgccggaacgccgaggcccagattgcctcggatgatggcctgcgactgacagtct

SEQ ID NO: 663125 - DNA, 76 bp, Homo sapiens
ccctgtgtactttccatttgccttcctggtggtgtcaatatcaaaatgccagtcaactccagtggacctgattggg

SEQ ID NO: 663126 - DNA, 100 bp, Homo sapiens
tactgggacgttggggagggggctgtgccgggcggagagaactcagcgaggattctgaggcacggatgggcagaagcctttgcaggtatcagaagttcac

SEQ ID NO: 663127 - DNA, 83 bp, Homo sapiens
gccagcccaaaggcgactcgacaccgtcccagctgaagagagcgggagatacagatgacccaccaagaattactcagaaccct

SEQ ID NO: 663128 - DNA, 87 bp, Homo sapiens
gaatttgaaggtggaaaatcaacagtgaattgtaggacaaccctccatatgataagggagccttcagaatcgaaatcaactttccag

SEQ ID NO: 663129 - DNA, 75 bp, Homo sapiens
cgaacttagacttccggaaggactttggcgaggaatagcctaacatggcagaccagagacagcgctcactgtcta

SEQ ID NO: 663130 - DNA, 80 bp, Homo sapiens
agccgtagacaccagctccgaaatcaccaccaagattaacgtcttcaaggacccagttgctgatcccaacaaaaggtcca

SEQ ID NO: 663131 - DNA, 100 bp, Homo sapiens
cgtctggagcaaagacaggagccctggaatgtgaagagacatgagaccatagccaaacccccaggccagtgaagaagcaaaggaagacatgaaaattgac

SEQ ID NO: 663132 - DNA, 101 bp, Homo sapiens
cgggactgcactcgagtgtccagacctgctcgatgaaatatggctacacacacctttctgcaggagagctgcttcgtgatgaaaggaagaacccagattca

SEQ ID NO: 663133 - DNA, 83 bp, Homo sapiens
ctggctgttagaagaattcatgctcatccggtgagacggtttaagcggaagcatcttactgccattgactgccagcatttggc

SEQ ID NO: 663134 - DNA, 51 bp, Homo sapiens
ccatggcctgctcagcctcagcgatgtgtggtttttaacaacagaggagtg

SEQ ID NO: 663135 - DNA, 75 bp, Homo sapiens
caagacggaaaaagtcgatctggagcttttcccctccccggactcgctctttactgagcgtgtttgaagaagatg

SEQ ID NO: 663136 - DNA, 83 bp, Homo sapiens
gaagcttaacttcttatccatcccatctcttggacagatgatgccagttaattactttgaatcttaaagcttttcaagccagg

SEQ ID NO: 663137 - DNA, 76 bp, Homo sapiens
ggcattctcttcaatcatgagagtcccagaagagtgctacagttgaaactccagcagcgccggacccgggaagaac

SEQ ID NO: 663138 - DNA, 50 bp, Homo sapiens
ctcattaagcccaagcgaaggctgtctgatgccaatgcaagttacttaag

SEQ ID NO: 663139 - DNA, 100 bp, Homo sapiens
atttcctgttctggaatcgagagaagactcctcaacaagttgctgcaatgtctgtgtctaatctatcatgttttgatgtggacaatggcacatctgcggg

SEQ ID NO: 663140 - DNA, 83 bp, Homo sapiens
agagaagtccccagagcccaggaggcaacatctattcactttataggaacagcttcagcttcagtgatgaaaaactgaattct

SEQ ID NO: 663141 - DNA, 100 bp, Homo sapiens
aggtcctggaaggaagaccatttaaggtttcctatcctgggagcaggagagtgtgcctatttgaatgacaaaggtgccagtagtgccaggcactacacag

SEQ ID NO: 663142 - DNA, 82 bp, Homo sapiens
ggggagccgttggctgggaccgtgcgcgtgcgcctgggggcaccgctgccgttccgaggattatatctgtccaagatgcgag

SEQ ID NO: 663143 - DNA, 50 bp, Homo sapiens
tttaaaaattaaacttcaacacaatgagacaactgacatatatccacaag

SEQ ID NO: 663144 - DNA, 75 bp, Homo sapiens
ctctggatgctgacagaaacaaggcggctgccggaaacaacatggaggacatctttggggagcttttgctacagc

SEQ ID NO: 663145 - DNA, 98 bp, Homo sapiens
ctggactcatggaggctgagcatttattcaggctttgtccagggatctgaaaccactttgcagtcgacatactcggataccagcgctcagcccacctg

SEQ ID NO: 663146 - DNA, 100 bp, Homo sapiens
cgggaaggtacacccaggcatgacaatagcttctctcctcacagaaatttaactggtctctaactggtttggcaacaaaagaatccggtataaaaagaac

SEQ ID NO: 663147 - DNA, 74 bp, Homo sapiens
gggctgcctgctccagatctcccgaagccacacagaagtgaagtactgagatgatgaggaacgtggagctggcc

SEQ ID NO: 663148 - DNA, 75 bp, Homo sapiens
aaacctttgaccatgaagagaaatgagatgatagccaaaccctcaggactatttaagaaacaactgaggcatcag

SEQ ID NO: 663149 - DNA, 100 bp, Homo sapiens
gcctcagcacctgcagttgaagaccaggtacctgaagctgcaaaccgtggggaactgtgggtcagagactctccagcatccttggaagtggcctcttcac

SEQ ID NO: 663150 - DNA, 158 bp, Homo sapiens
tccttctagcaccggtgtaaggaaaggctggcacgaacatgtcactcaggacctgcggagccatctagtgcataaactgaaaaccaattctgtgtcctcggaggaccacagcccagttgggccccaggcgaaacccagcctggagcttgcaggcagga

SEQ ID NO: 663151 - DNA, 100 bp, Homo sapiens
aaaagttgtttctggaattgatctcgccaaaaaggacatctttggagccaggtacaccaggggttggaaaaaccacactaggcaaagaacttgcgtcaaa

SEQ ID NO: 663152 - DNA, 76 bp, Homo sapiens
ttcctgccttccacccctcctgttcacactgaggccaacttctctgcaagtaaaaggcccaggcattgggcttttg

SEQ ID NO: 663153 - DNA, 95 bp, Homo sapiens
ttctttggacgtgtggtcgtcaggagcacagcagtcccgagtgcaggtttggaagactgaggatgtgaagatgtctgttcctggacggccagcag

SEQ ID NO: 663154 - DNA, 131 bp, Homo sapiens
ggctgctcgataaatcagacagaacagttaatcctcaatttaagcctgatctaacccctagaaacagaatgtttggaatggttttggaaaaaattattattcctgaaattcagaaggtatctggaaatgta

SEQ ID NO: 663155 - DNA, 83 bp, Homo sapiens
agaagctgggattggagattccacccaaacttgctggtcactgggagctattcctctacacagccgactagttatgatcagag

SEQ ID NO: 663156 - DNA, 100 bp, Homo sapiens
aaggagcgggaccccgagcaccgggccctctgcgacctggggccctgggtgaagtgctccgtcgcccttgcctccagagacggggtttcgccatgttggc

SEQ ID NO: 663157 - DNA, 75 bp, Homo sapiens
ctccgcgcccggccggacccgggcccgaggtcagtaacatcaaccagcccctggagattacagccatctcgtccc

SEQ ID NO: 663158 - DNA, 100 bp, Homo sapiens
ttccacacggtgacgtgctgcggcttcatcccgcaggaagatcccagtgtctgagtgaactaacagtcctgctttcagccaccatttgcacaagacaccc

SEQ ID NO: 663159 - DNA, 90 bp, Homo sapiens
ctggcaaaagaaaactatcagtttttgcagacggacaaaaaagaacaggagaagtctgaacacatccctaaagaagtggctgacatcttt

SEQ ID NO: 663160 - DNA, 95 bp, Homo sapiens
tttccaaagagctgagacagaagtacaacgtgcgatccatgcccatccgaaaggatgatgaagttcagatacagaaggtggtcatggcactagga

SEQ ID NO: 663161 - DNA, 100 bp, Homo sapiens
ccctggtctgggccatgtctggctgtgatgctcgggagggagactgttgttcccggagatgcggcgcgcaggagaccaagacacattccaccccagtggg

SEQ ID NO: 663162 - DNA, 80 bp, Homo sapiens
cgtggagccggtgccgagccggggcgaagctggatcccctaggagctatgaagacatgattggtgaggaggtgccatcgg

SEQ ID NO: 663163 - DNA, 75 bp, Homo sapiens
acaaggtgtcaacaatgtgccggtggccagcatcgaaatgttcagccttttagtgatgaagatgcatcaattgaa

SEQ ID NO: 663164 - DNA, 125 bp, Homo sapiens
cgtagtggcagacacgcccgagctccagagaatcaagaagacccaggaccagatcagtaacgacgtagacaagtttggcaacgagatcacccagctggcccggcccctgcctgtggagtatctca

SEQ ID NO: 663165 - DNA, 100 bp, Homo sapiens
gtggctgacctcgtgttcccgtggtgtacgaagccatcgacagcagagatggagcatcttgtgcagagttggtgtcttttaaacatcctcatgttgcaaa

SEQ ID NO: 663166 - DNA, 100 bp, Homo sapiens
tttgacccagctccaccaggcagcagaaaggtttaagtttttgaaactgaagtaggcctacacagtaggaactcatgtcatttcttgtaagtaaaccaga

SEQ ID NO: 663167 - DNA, 74 bp, Homo sapiens
taatgaaccttgacccacaccaaggtgctgtaaatgcattgatggaaaaaaagtgggtaaagaacttacagaaa

SEQ ID NO: 663168 - DNA, 100 bp, Homo sapiens
ttttctggacacggttcatcccttcttgttgctctgccctgaaaataacctggctagtcaccctttcaaggaatacaaacaagtgatcctaatgctgtgg

SEQ ID NO: 663169 - DNA, 98 bp, Homo sapiens
tcgagcaaaactttgggcctgtaatttctgttttcaaagaaatcaggtcggtgagctggtaaaggttacgaagattaatgtgagtggtcagtgggaag

SEQ ID NO: 663170 - DNA, 82 bp, Homo sapiens
cgcagggggacggggaccagcagctgtcgccgccgctctcaggctgtacatccttttgaaatcccagagatcttcagtctcc

SEQ ID NO: 663171 - DNA, 100 bp, Homo sapiens
tctgaagagctatggtgaaacaccactgaagcattgccaaggtaagcggaagggtacagccaatgcccgaatgccagagaaggtcacatggatgaggaga

SEQ ID NO: 663172 - DNA, 101 bp, Homo sapiens
agttgcataaagggggagaggacaaagctcgccaagttgcagcagaacacggctttggagtccgaaaggtgctgccacgggacctggagaaggaggatgcc

SEQ ID NO: 663173 - DNA, 90 bp, Homo sapiens
agaagaggaaagacttgtctcaggaggatataaatgctatagaaatggaagaagacaaaagagacctgatatctcgagagatcagcaaat

SEQ ID NO: 663174 - DNA, 50 bp, Homo sapiens
attcattaagcagtgcagaaacacagcaacggcagcctttaacagttgag

SEQ ID NO: 663175 - DNA, 82 bp, Homo sapiens
tggtgaatggagatgcagctcagcaggatgaaacgaggaggaagagatagtgaccgtaattcatcagaagaaggaactgcag

SEQ ID NO: 663176 - DNA, 75 bp, Homo sapiens
tcaatgagaaagaagatgatgaatggattcttgttgacttcatagacctgcctagagctggaacgttacctccag

SEQ ID NO: 663177 - DNA, 100 bp, Homo sapiens
gcattttggcattgacatttaattttagggtcctttatatagaagggagagtaggactgaagcttcaagatggctgaccaggaccctgcgggcatcagcc

SEQ ID NO: 663178 - DNA, 74 bp, Homo sapiens
gacagggcacaccaaactccatctgatataacacgtgggaaccggaggagaacatcctggaccccaggctgctg

SEQ ID NO: 663179 - DNA, 82 bp, Homo sapiens
ctctttgcaacatttcaggaaaacagagaaagaagtgataggagggctctgtaggtgtctgtgacctttgaggatgtggctg

SEQ ID NO: 663180 - DNA, 100 bp, Homo sapiens
caaactgtcggcttcaaagagaaaaggcaacatcctgtcacaggccatgctctggcaaaaacgctactcaaaaagagattgagaaacagaaggtgcacct

SEQ ID NO: 663181 - DNA, 100 bp, Homo sapiens
tgccaattctgcgcttctcagtaactacgagctttctctcctttgaaaacactaagaataatgtcactgcatcagtttttactagagccaatcacctgtc

SEQ ID NO: 663182 - DNA, 100 bp, Homo sapiens
tgcaactttctctccttcgccgttgcttcctgcgtgtttgtgcgttatattctctgctgcaagtgtcatggagaaactccagctgggcccagagattctg

SEQ ID NO: 663183 - DNA, 75 bp, Homo sapiens
gacgaagaaaaaaagagcgacgagtgcaagggctccatggagaacgagcctgtagcccttgaggaaactcagaag

SEQ ID NO: 663184 - DNA, 98 bp, Homo sapiens
ctggacgtgctcgcgcccctggtcctgctgctcggggtccgcgcggcctccgcggagccaggtcacccgtgtgaacagaaagtgagaggttgtagcac

SEQ ID NO: 663185 - DNA, 96 bp, Homo sapiens
cagaaccttggatagaagttaaaaaaagacatcagccagccccagtgaaattgaggggctcaagcacctcttactgcctcctcactctggaaccaa

SEQ ID NO: 663186 - DNA, 75 bp, Homo sapiens
gaaactagagcaaataaccgttttgaaattgcgccaagcccatctttgtgtgcttgcatccaactgtgatgagcc

SEQ ID NO: 663187 - DNA, 100 bp, Homo sapiens
agatgtcagaagctaaggacaatggcagtagagatgaggaagccattaatttgctagaaccaatgacaaacgaccccgtgaactacgtgaggcaaggggc

SEQ ID NO: 663188 - DNA, 75 bp, Homo sapiens
ctgccatcctcgcctcagtcaaagaacaggtgccagcgagatttcagattcctgtaaacctctaaagaaaaggag

SEQ ID NO: 663189 - DNA, 78 bp, Homo sapiens
aacgaacgcccttcggccggatcgaagatggtgaatgtgtaccacgtacatcagcattcctgcttcctgtaccttggc

SEQ ID NO: 663190 - DNA, 90 bp, Homo sapiens
caaagccgtggccaacgggaaggtgggagaaatgttttagaggcaagagaggctgctaaacatcctacaatataaaggaaacatccccac

SEQ ID NO: 663191 - DNA, 99 bp, Homo sapiens
cagtgaagccgtgacatcctgggatattctttgttgagagagtgttgcggagataggaacatgggagagaaacaatctgggtaacatgaaagtgatgct

SEQ ID NO: 663192 - DNA, 74 bp, Homo sapiens
aacctggagctctacgcctcctacgtttacctgtccatgatatttgcaaatatggatccatccctcctgatgtg

SEQ ID NO: 663193 - DNA, 98 bp, Homo sapiens
ttgttccaaaaattggaaaatgaccagattgaaagtttaaggcagcgctttggagggggccaggtgtcaactctgcccgctcagttcctccttcctac

SEQ ID NO: 663194 - DNA, 75 bp, Homo sapiens
cccgaagaagaaaggattcgttacagccagagattggctgctgagcttcgtgcttatctgaaatctaaaggagct

SEQ ID NO: 663195 - DNA, 133 bp, Homo sapiens
ggagaaaggagcaagcctaaacgtcagaaatccagtactaaactttctgagcttcatgacaatcaggacggtcttgtgttctccaaagcttcgtaccttggccagaggcttgtctcctgcgtacctgaggttt

SEQ ID NO: 663196 - DNA, 100 bp, Homo sapiens
aggttctaaatggcttctaagaagttgggtgcagattttcatggcccgatgagagaaagggaaagttaaggatgctggagcagaacaatggatttctctt

SEQ ID NO: 663197 - DNA, 90 bp, Homo sapiens
gtcagagggcttttactcctacctgtgtaccgagccagagaattttctctacatgtgcacccatttaaaggactcggcttcaagggaagc

SEQ ID NO: 663198 - DNA, 73 bp, Homo sapiens
aactgctcattttcagtgtcccgattgtctatgagaagtacaaggcttcttctcatatcggtaattccactca

SEQ ID NO: 663199 - DNA, 100 bp, Homo sapiens
ttggtcgaagagttgaagttaatggagaacatgcaacagtacgttttgctggtgttgtccctcccgtggcaggtaaagagaaatgtgtatgaccttacaa

SEQ ID NO: 663200 - DNA, 101 bp, Homo sapiens
catgatgacctaccaggtgccctccaggctcttcagaagagtaatggtgtacttcctgaattatttcagtgtcatggtactgcagatgagttagttcttca

SEQ ID NO: 663201 - DNA, 80 bp, Homo sapiens
ttgtctcctttttcaacaaatggacgtagctgggtgcgaagaatcaaattggaaattatggaatttgtgaatttcctgaa

SEQ ID NO: 663202 - DNA, 100 bp, Homo sapiens
ccctccatggatcagctggctgaaatgcttcctggagtccttcaacagtttgggccacgtgctgtacgccgacatcaagatggagaatgggaagtccaag

SEQ ID NO: 663203 - DNA, 83 bp, Homo sapiens
gattaccaagaaatattcatgtcccagagttatcactgaaaagtctctttgaggtgaacacacagtgttcatcccctcaggag

SEQ ID NO: 663204 - DNA, 100 bp, Homo sapiens
ttcggcctctacccaaagtgaaaagactgctgtcagatagcacttgccttccccatattattcagaatgtactcaagactgatcttctaagttcactgga

SEQ ID NO: 663205 - DNA, 100 bp, Homo sapiens
ttgctgtcaaagttgtgtcagtgaatacaaacagctgatcactggagattccatcgttagtgctgaggcagtatgggatcacgtcaccatggccaaccgg

SEQ ID NO: 663206 - DNA, 97 bp, Homo sapiens
accttctggatatttaacagatggcccaattaactataaatataaaactaaatgtacttggctcattgaaggctagctattactcgtggaggagccc

SEQ ID NO: 663207 - DNA, 98 bp, Homo sapiens
tatatcattaccttagaggaagaagcactccagagacgactaaatggtgctggagaatctggtaaaagcaccattgtgaagcagatgaggatcctgca

SEQ ID NO: 663208 - DNA, 50 bp, Homo sapiens
cgctgcgcaagcacgctgaggaggttatgaagacagtatggagtttccag

SEQ ID NO: 663209 - DNA, 51 bp, Homo sapiens
agattgtgagatgcccactttagcagaaagatgaaggtcttagaatcattg

SEQ ID NO: 663210 - DNA, 75 bp, Homo sapiens
agctctgcagccacatactatccgtttgttcaggaaccaccagtgacagactggaggaaagcaggaatgttcaga

SEQ ID NO: 663211 - DNA, 100 bp, Homo sapiens
caagattttagtcatcttgaccacaggtgtctgacttccagcaactgctggcctgtgccagggtgcaagctgagcactggagtggagttttcctgtggag

SEQ ID NO: 663212 - DNA, 100 bp, Homo sapiens
tccatcctcctgactccataaactattggattcataacctgctccatgcttgaaaacatggggattggaattcgagggcacatctgctcgataacacaga

SEQ ID NO: 663213 - DNA, 83 bp, Homo sapiens
gggcgggccggtcccgctgatcacgtgacacgatttttgaaaggtcgggaaagaggttaaagaagacacgcaagtatgatatc

SEQ ID NO: 663214 - DNA, 50 bp, Homo sapiens
gagaattacaggaatcttctctcattggccttatgtttgatcatcggcca

SEQ ID NO: 663215 - DNA, 117 bp, Homo sapiens
ctgccccgtctgagaagtgaggagcctctccgcccggcagccaccccatctgggaagatgacatgaccttgtggtagatcccagaactgaggccccaggatgacagaacaggagacc

SEQ ID NO: 663216 - DNA, 100 bp, Homo sapiens
gtgagcgagggggacctgctgaaggaccagagagggagccctgcctacatcagtcccgacgtgctcagcgtggagaacatgcagctgaccctgaacctgc

SEQ ID NO: 663217 - DNA, 50 bp, Homo sapiens
cgagtcaacaaccgcttcgagctgtgtggacgaatgtggaacctcgctct

SEQ ID NO: 663218 - DNA, 74 bp, Homo sapiens
tgacctggcctatcagcttcaggcatccgtgtcattctggaccttactcccaactaccggggtgagaactcgtg

SEQ ID NO: 663219 - DNA, 101 bp, Homo sapiens
gccggaactggcggactgcggcgcacttccgtagaggtggacatggcgtgcggctttcgccgcgctattgcttgccaggctggagtgcaatggcacaatct

SEQ ID NO: 663220 - DNA, 83 bp, Homo sapiens
ctgcgacagaccttcagcttcctctcgggcatgaccggaaaggccaagccctgggcgctgcctatggcacagccaagagcggt

SEQ ID NO: 663221 - DNA, 75 bp, Homo sapiens
gcttaaggtcctaaccatgccggagacctgtagataccagcctttcaaaccaaaggatcttgtcgctgcatttga

SEQ ID NO: 663222 - DNA, 83 bp, Homo sapiens
cggggagagaccccgagacccccggggcacgaagtccagagcgagcggcggttggattgcagccctgtctacactggataatc

SEQ ID NO: 663223 - DNA, 100 bp, Homo sapiens
cttgaactggaccgtggggaaactaaaaacgcatctatctaacgtttaccctagcaaaccactccagcggcgccatgagcaaatgaaaaagaatttggaa

SEQ ID NO: 663224 - DNA, 95 bp, Homo sapiens
tcttcagttctctggagccccagattcaacccgtgtacgtgcctgtgcctaaaatattgatgatgttaagaagttcaaaccgggttacctggaag

SEQ ID NO: 663225 - DNA, 100 bp, Homo sapiens
ggaccatctggccctccaggaccagagtctgaacaggaattaagaataactcaaagtgaatttgatcgtcaagcagagattaccagacttctgctagagg

SEQ ID NO: 663226 - DNA, 50 bp, Homo sapiens
ggaagaggagggcaagaagggcaagaaggaccgtataatagacgctggcc

SEQ ID NO: 663227 - DNA, 76 bp, Homo sapiens
gaaggacctagagtcaaggatggatctggaattgaagactgggatagtttccaagctattttggatcatacctaca

SEQ ID NO: 663228 - DNA, 50 bp, Homo sapiens
ccgcccacccgcctgaaggagagagagtgcagaggcaatacatggagatg

SEQ ID NO: 663229 - DNA, 101 bp, Homo sapiens
acggcatgtacttctgcatgaacatctccagccagggctctgctgaaaatgaagaaaagtcagaagttcaagcaatcatcgaatctactcctgagctggat

SEQ ID NO: 663230 - DNA, 100 bp, Homo sapiens
ccccacctgcccggtgcccgaggaggcagccaagctcgtggcctgcctctgcgtgcgtgaggcggaaccaaccctcctggccatgggaggggccgtggtg

SEQ ID NO: 663231 - DNA, 98 bp, Homo sapiens
ccctcctgagccgcacggtcagaactcagatactgaccggcaaggttaaagccgagccagccaaaatagaagctttccgagcttcactttccaagcta

SEQ ID NO: 663232 - DNA, 90 bp, Homo sapiens
catacaccccatgatgcagcatttttcctgtctaggccaatgtatgcccatcatatttcggagagccggatctatgctgtggccacatcg

SEQ ID NO: 663233 - DNA, 100 bp, Homo sapiens
tctcctcctactcttgttcgtctgagaaaactgaagtttgccataaaagttgatggagattacctttggtctgcagatctccaggggagcccaccagcct

SEQ ID NO: 663234 - DNA, 50 bp, Homo sapiens
gaacagatgagaaacccggcaatgaaaatggagtcttgctctgtcgccca

SEQ ID NO: 663235 - DNA, 101 bp, Homo sapiens
gcaggacgaggtgtcggcgcgggagcagcacttccacagccaagtgcgggagtccacggtcaaaaggtgtcctccatccaagaagagaactcagtccatac

SEQ ID NO: 663236 - DNA, 96 bp, Homo sapiens
ctcagcaccgcagcactggagctgtcctgaaggtactctcgcaggaaatgggaattctacttgtgtgggggctatctgatgggttagagtgccttt

SEQ ID NO: 663237 - DNA, 96 bp, Homo sapiens
attcgagcggctctcataaagatctggctggcaactgtccctttccccccaacacatcgcttgacatctgaagaagtatttgatttggatgggata

SEQ ID NO: 663238 - DNA, 100 bp, Homo sapiens
cctgcatattgcgggcaaccccacctactacgttccgggacaagaataccatgctgcctgccttgtgcttggctgtatgattttccctgatggctgggac

SEQ ID NO: 663239 - DNA, 75 bp, Homo sapiens
cttctacacagacagcaatggccgggagatcctggagaggaggaatggaagttggatacactttgtgacttgtac

SEQ ID NO: 663240 - DNA, 82 bp, Homo sapiens
tgtccttgctggtgcatgcgtcgtcggcctctgggcagcagggttgaaaggaggagcaggaggtactgatggacaaggaggt

SEQ ID NO: 663241 - DNA, 100 bp, Homo sapiens
ttcattgaacctgtacagtggatggaatctgctttgttgggagtgatggatggacagatgagccccgctagggccgccccgcgctgagagcccagccccg

SEQ ID NO: 663242 - DNA, 106 bp, Homo sapiens
ctgagaacagaagtgagacagctgaagcgtgttggggaaggagctgtaaagagagaatttaaactttgggataatgagctgcagtatgtggaccaacttctgaaag

SEQ ID NO: 663243 - DNA, 99 bp, Homo sapiens
aagcatatagactactctttccaaatgagtgaggaatcttctgcggcttgtccatagtgtgaataaaaactaaatcacatctataattctactgaactg

SEQ ID NO: 663244 - DNA, 87 bp, Homo sapiens
ggtatctttccaaggtcctagaactcaggaagagtgatgtggttttggataagaggctgacccgcggctgattgagtccctctccca

SEQ ID NO: 663245 - DNA, 100 bp, Homo sapiens
accggaggcccaggtctccgtgcagcccaacttccagcaggacaaggatctcaaagatttcatgagacaagctggggaagtaacgtttgcggatgcacac

SEQ ID NO: 663246 - DNA, 88 bp, Homo sapiens
aaggactcacagtggctgcaagaaactgccagaggcatgcagcattggtgatggaaagccctttgtcatgaatctgcaggatctgtat

SEQ ID NO: 663247 - DNA, 100 bp, Homo sapiens
gccactttcagaagcaagtaaccagcagcccctctctggtggtgaaggaaaaccagtagattcccagacatcgcgaagtgaatctgaaattgtgccaaaa

SEQ ID NO: 663248 - DNA, 90 bp, Homo sapiens
cgcagaacagccggcagctgagcctggtggcctccgttctcttggcccaggcccccgatttctacgttgagatgaagtgggagttcacca

SEQ ID NO: 663249 - DNA, 88 bp, Homo sapiens
caaattccttatgaggtcactctctggatacttctagcatcccttgcaaaaatagatgagagtccggagtgttgtcatgtgaagcctg

SEQ ID NO: 663250 - DNA, 100 bp, Homo sapiens
aggagaccaagaatgctgccaatgcctctgcatccaagtcggccaagaccgccactgcagggttctgaagtaacggaagctaccttgtataaagacctca

SEQ ID NO: 663251 - DNA, 75 bp, Homo sapiens
caaccaccagcgctttccctctatcagtgaagaaaacttgccttgcgccatggactggcagccagacgagcaggg

SEQ ID NO: 663252 - DNA, 95 bp, Homo sapiens
acatattccacgcatgcggttgtcatgtatgctcgaggaactgactatagcatcttggaggtcaatgtgacggtggactacattagaccagccag

SEQ ID NO: 663253 - DNA, 101 bp, Homo sapiens
gcctggagcaacgaaaagagccctggaatgtgaagagacaggaggcagcagacggacatccaggtacctgcaccagtcaggggccctgaccatggaggccc

SEQ ID NO: 663254 - DNA, 100 bp, Homo sapiens
ttccaagctatgggtgccatgaagggcaactccaacaacattgccaccgtggacatctccgcaggcttcgtgggcttagacacctacgtggaaatcccag

SEQ ID NO: 663255 - DNA, 108 bp, Homo sapiens
ggcaggcagaagaaggggaactcctgctgcccactcaggcagcagtgaggatgccagagttcatgggtttctagaagacaagttttcaactgcagatacaaacatcag

SEQ ID NO: 663256 - DNA, 100 bp, Homo sapiens
gctgggcttcgtccagatcgggaagggctgcctgctgtttcccggggagatcatgaaacgaggtcgccttcccagcagcagtgaggattctgacgacaat

SEQ ID NO: 663257 - DNA, 98 bp, Homo sapiens
ccccaaagagcaactgaagattcatacgcagctggcagatattatcatagttgctgcaggtaaattcaactggaagggaactattaaagcaattctga

SEQ ID NO: 663258 - DNA, 100 bp, Homo sapiens
cccctggcttgcacatgagaaaaggtgtaagcattgctgtgagcacagatgttaaaaagtgctctgggtgatcggattaaagaaaagactgaccataaag

SEQ ID NO: 663259 - DNA, 75 bp, Homo sapiens
tctcaaggcggattaattagcccaagaaacattatattcatggctttgttcgcgggggtcacagctctcatggct

SEQ ID NO: 663260 - DNA, 74 bp, Homo sapiens
gaggtaccgggggtgacagctccgggaccggccgaaaggcgaggaaccgacaaatttacatgtattggagacca

SEQ ID NO: 663261 - DNA, 82 bp, Homo sapiens
ctggccctcaggccttgcccaaacctgcaagccccaagaagccaccccctggcgagcggagtggttgaagttgacatctgac

SEQ ID NO: 663262 - DNA, 51 bp, Homo sapiens
actgacaagccttcaaggagcccaggggtgtggtgaaactggtcatgtagc

SEQ ID NO: 663263 - DNA, 88 bp, Homo sapiens
cttgcttttgcttcagcgttctgtggttgtcaacagaacacgatgatgaacgcgttaatttccctcaaagaaagaagaaaggccgggg

SEQ ID NO: 663264 - DNA, 111 bp, Homo sapiens
ctgtcagtcgcgagcgaacgaccaagagggtgttcgactgctagagccgagcgaagcagggtcaccatgaagttcaatcccttcgttacctcggaccgcagtaaaaaccgc

SEQ ID NO: 663265 - DNA, 75 bp, Homo sapiens
ttttgtccagggcagcatctctggtgcatgctgatgacgaaaaacccacaatggtgcgcatgaatgtcctggcag

SEQ ID NO: 663266 - DNA, 100 bp, Homo sapiens
cgacggcaccatgtcagacaaggaaattactcatgatgtcaaagggaaacccccatcagcacctccccctgactcacaaagcatcccgtcaacatcacag

SEQ ID NO: 663267 - DNA, 76 bp, Homo sapiens
caggacctggaaaaattacatgtgactgcttagaaaactgcacagcatctgatgaaattagcgaataagaacatca

SEQ ID NO: 663268 - DNA, 51 bp, Homo sapiens
agaagcgcgttaaggagctggctcagacagccctcagcgcctttttccagg

SEQ ID NO: 663269 - DNA, 101 bp, Homo sapiens
gaagtatctcaaaaagtcgctcccgtctctgctggatgaaccgaatcctaacagtccagccaatagccaggcagcacagctttatcaggaaaacaaacgag

SEQ ID NO: 663270 - DNA, 100 bp, Homo sapiens
aaacaagggaatactatgaaaagcagtttccagaaattcgaaaacaaagagaacagcaagaaagatttcagcgtctacaggtgtatccagcagctccaaa

SEQ ID NO: 663271 - DNA, 100 bp, Homo sapiens
ccagggtggcggcgcctgcggccgagcgccgggagcaggaaccctaaggactctgcaatatgaataattccctagagaacaccatctcctttgaagagta

SEQ ID NO: 663272 - DNA, 97 bp, Homo sapiens
ccttggagtccggagtaacttggccaggctggccccgagcggaactggagaaagctgagggaatatatgcagaacatgtcctgcggcccaagaatct

SEQ ID NO: 663273 - DNA, 80 bp, Homo sapiens
actgcgccgcccggacggcctgcagagcgctgccatcatgaggttcagcttgttggtttagatgaggagagttcagagtt

SEQ ID NO: 663274 - DNA, 74 bp, Homo sapiens
ggcggaggcttcgagtgacccgggtgccgaggagcgggaagagttgctgggatctctgttgaggagctggcgcg

SEQ ID NO: 663275 - DNA, 47 bp, Homo sapiens
aagccattgctgaaagcctgaatgagttattcctgatgaagctaaag

SEQ ID NO: 663276 - DNA, 99 bp, Homo sapiens
atgagcctgcagagcgcgcagtacctccggaaatgaaggccgaatttataaaggaagcccagccagggaaaaagcagctcctgctcagcgcagcactgt

SEQ ID NO: 663277 - DNA, 82 bp, Homo sapiens
ttggacgctgccagtttgcacagcagcagtgttgcattgatgaatcatagctgttgccccaatgtcattgtgacctacaaag

SEQ ID NO: 663278 - DNA, 100 bp, Homo sapiens
aagagttggctgtcgcgcagcgtaacttcattcttcagatgatgaggacagtgattaccaccaggaggcctacaaggagtcctacaaagaccggcggcgg

SEQ ID NO: 663279 - DNA, 97 bp, Homo sapiens
gaacctccaccctgccgtcagttccacaccagtgcctcagaggtccatggcagtatcccagccaaatctcgatcacaaaatttgtccaggatagaca

SEQ ID NO: 663280 - DNA, 82 bp, Homo sapiens
aagttctgtgctcgttgtggaggtcgagtgtcattacgctcaaacaagacaattggtgtgacctttgcagccatggttggag

SEQ ID NO: 663281 - DNA, 90 bp, Homo sapiens
aacatgctggagccaagtgctaacgcattatccaattggtttgctatttgatcttcttgcatcaagttcagctcttccttggaacatcac

SEQ ID NO: 663282 - DNA, 90 bp, Homo sapiens
cgcttggtggccactggcggccgaggtagaggcagtggcgcttgagttggtcgggggcagcggcagaacctgggccctttcctggcattg

SEQ ID NO: 663283 - DNA, 75 bp, Homo sapiens
ccatggtctacaagactctcttcgctctttgcatcttaactgcaggcctggtctccaagtcctctcctaagaagc

SEQ ID NO: 663284 - DNA, 83 bp, Homo sapiens
cctcaggctccttcctactgtccgagggccaccaggccgccgggggcctgctgcgcccggattcctataggcaatggaaactg

SEQ ID NO: 663285 - DNA, 100 bp, Homo sapiens
tattcaccatcaacaaagaagaccacacactgggaaacatcattaaatcattgactcttttcgccgacaccttgtatttcgtctggcaaccttactcacc

SEQ ID NO: 663286 - DNA, 90 bp, Homo sapiens
ctggcatgtttctacacaacaaaacattcatggagggggaagtgggttgcctatgaaaaagaacattttaaaggccagcagtttctgctt

SEQ ID NO: 663287 - DNA, 97 bp, Homo sapiens
ccgcacgtgctcggcgcggtcctgtactggctgctgctgccctgcgcgctgctggctgacgtactctggcctcttctgcgtggtggtcaacccctat

SEQ ID NO: 663288 - DNA, 74 bp, Homo sapiens
agaaagaccatcaagtttaccaatcaatggtggagagaagcggcctgcctctgatatggggaaaaaaccaaaaa

SEQ ID NO: 663289 - DNA, 100 bp, Homo sapiens
agtcccagtgccagctcatcgacagctccgaggacctgggtatgatcagtatccagggcccagccagggattatcttgaacacataacctccattggccc

SEQ ID NO: 663290 - DNA, 96 bp, Homo sapiens
cggcgcaggcccagatgcgcgcgatgctggaccagttgatgggcacctcccgggacgaaatgtctccacctgtgaggtgtcctcctctcaggccat

SEQ ID NO: 663291 - DNA, 100 bp, Homo sapiens
caagaagccagtcaagcggccagagcctgagcccttgtgaagccggcaatgacaagtctgtatggtcgccatgccgagaaaaccactgacatgccaaaac

SEQ ID NO: 663292 - DNA, 75 bp, Homo sapiens
tccacgaactgctggacgacctcggcgaggtgcccaccatcgagtccctgatagtatttctctgaacagccattg

SEQ ID NO: 663293 - DNA, 100 bp, Homo sapiens
aagagaaagacgataaggaagagaagaaagacgcagctgagttcccagacgttatgatgataagcggaataatattttattggaactcatacaatatgac

SEQ ID NO: 663294 - DNA, 82 bp, Homo sapiens
tttgtgttcatggtaggataagactttgattcaaccagtacttctggagtgtatggcggctgagccagaggccaactgcaga

SEQ ID NO: 663295 - DNA, 102 bp, Homo sapiens
gcctgcaccatgagcgtcccggccttcatcgacatcagtgaagaagatcagacaatgcagatcttcgtgaagactctgactggtaagaccatcaccctcgag

SEQ ID NO: 663296 - DNA, 98 bp, Homo sapiens
cgccgccgccatggccaccacggtgacctgcacccgcttcaccgacgagtaccagctctacgaggatattgtaagactttgaccccgacgcaggcttc

SEQ ID NO: 663297 - DNA, 100 bp, Homo sapiens
ctctctcggtcgtggtcacaggcaaaggcactgtactccagaaagccaaggattcactccttctccagttgcacagccacacccttcagctggccttaat

SEQ ID NO: 663298 - DNA, 100 bp, Homo sapiens
gtctacttcagcacctgtggcttcagggacacagcaggtcaggagagattcaacagcattacctcagcttattacagaagtgccaaggggatcatattag

SEQ ID NO: 663299 - DNA, 100 bp, Homo sapiens
ggagctacatcgaaaggtctccagcctcatcgaattcttgaagcagaagtgggcgctccatgaggtgcgagttccctgaaaagcaaaggcctcatctcca

SEQ ID NO: 663300 - DNA, 98 bp, Homo sapiens
aatctatacaaagaagtgatgctggagaattacaggaatcttctctcattgggttaacacagaaatctgcctcctgggccatgccgcttctaaggcct

SEQ ID NO: 663301 - DNA, 90 bp, Homo sapiens
gaagatatcaacttcattttgaatgaagtgcgtaattacctgagttgtgatgttgaagtgctgggcctaaaggagataacatttatgaat

SEQ ID NO: 663302 - DNA, 75 bp, Homo sapiens
ttggatgtgaaaattgccttttgtcaggagcagcatttctttctattactactatctatgctgagactggttcag

SEQ ID NO: 663303 - DNA, 101 bp, Homo sapiens
gccgaggtcccagccagcatcccggtcaacacgcggtacctgaacctgcaagagaacggcatccagatgaagatctccttcaacgacaaaagcctgcagac

SEQ ID NO: 663304 - DNA, 82 bp, Homo sapiens
acttggcctccatggtgtcagagcaaggagaagctgttgtgtctccagaacgctatagctatggcacctccagctcttcaaa

SEQ ID NO: 663305 - DNA, 83 bp, Homo sapiens
ccccgcgcagcccccggccgcagcgcaggcagcccagcagacacgatgaggcgagtggtacgacagagcaagtttcggcatgt

SEQ ID NO: 663306 - DNA, 74 bp, Homo sapiens
ggatatcgggtggcggctcgggacggaggacgcgctagtaactggcatcaaatactcacaacatagctcaggat

SEQ ID NO: 663307 - DNA, 83 bp, Homo sapiens
cagaccctggagcctcagttggaagcagccgatccagcctgcggagcctgtggggcagttctaatacccgatttacaattaca

SEQ ID NO: 663308 - DNA, 100 bp, Homo sapiens
ggcctccgaacccgggaaaagaggaactaaggcggaggaactgagacgtttcgaattccaggtgctcagagccagaccctggtttgaggagccccccaag

SEQ ID NO: 663309 - DNA, 74 bp, Homo sapiens
tggctgagctggagctggagctgtcggaaggttgacaatggtctccaggatggtctctaccatgctatctggcc

SEQ ID NO: 663310 - DNA, 73 bp, Homo sapiens
gaactcattctcaccaataatagtctcgtggaactggaatcctgcaatatggcgaacataagagaatattatg

SEQ ID NO: 663311 - DNA, 75 bp, Homo sapiens
cgaaagcctggtccacgccgtggccggagccgtggttctgagatgcagtaaaatcgctggtgtgaaagtagcaga

SEQ ID NO: 663312 - DNA, 100 bp, Homo sapiens
ccgttgattggagatatgcccttagttggagctttgtctatcttcttccttaggaaaccagtcttaacttgcagagtcagtttaatctggaaaatgtcac

SEQ ID NO: 663313 - DNA, 75 bp, Homo sapiens
tcatagtcaactgcgtggaagagaagggaaaagcttcactctgaccatcactgtcttcacaaacccaccgcaagt

SEQ ID NO: 663314 - DNA, 100 bp, Homo sapiens
cgctggggtcccttttgcctcagatactattttgaagagctccttaataagcatttatagtcagtttttggcagcaatagaatcactaaaggcattctgg

SEQ ID NO: 663315 - DNA, 100 bp, Homo sapiens
ccgctgtgcccgggcctgcaccatgagcgtcccggccttcatcgacatcagtgaagaagatcaggtctctaattaacagaagatggcaaagcccagccac

SEQ ID NO: 663316 - DNA, 100 bp, Homo sapiens
tacaaagcctgaagaccccggagcccctttagccatgtggatacctacggagcacgagaaatacggcgtgggcatctggtgtcgaaggctcagatattcc

SEQ ID NO: 663317 - DNA, 78 bp, Homo sapiens
tctgactcctgcttcccgggtgttgctcgtgctctgtgtgctccgggatggagcaggtgtgcagagggtgagaaccca

SEQ ID NO: 663318 - DNA, 75 bp, Homo sapiens
cactgatgaagatatcgatggtattttggaaagaggtgcaaagaagactgctggcataggagcatctgctcactt

SEQ ID NO: 663319 - DNA, 74 bp, Homo sapiens
cgggtcccgcggcgagcgagctcctgaggatgacgtagctttgccaaagacttagaagctaagcagaaaatgag

SEQ ID NO: 663320 - DNA, 82 bp, Homo sapiens
gtcacattatttgaggtggtgaaactggggaaaagtgcaatgcaggaattacatgaatgacagtcttcgaaccaatgtgttt

SEQ ID NO: 663321 - DNA, 75 bp, Homo sapiens
tttggaaccttcgggcaaacaggattccacagtgtcctctggaaaatgcagtcttatagctggatcagctaccaa

SEQ ID NO: 663322 - DNA, 98 bp, Homo sapiens
ccacctgcgggagatcatcatctgcacctaccgccaggtaatgctggaggatggaagaagcaaagggtttggcttcgtctgcttctcatctcctgaag

SEQ ID NO: 663323 - DNA, 50 bp, Homo sapiens
atgacatcaataccagtgataaggttttcaaatggaacattttgatgcat

SEQ ID NO: 663324 - DNA, 88 bp, Homo sapiens
tccaaattctttggtttctttttttgatgcatctctacctggaactttgccgagacgagttgtactgctgtcacaggaaatggacgct

SEQ ID NO: 663325 - DNA, 74 bp, Homo sapiens
attcctggaagcagagtaaataaagctcatggcccaccagctagaaagcggaagatccatccaaaagctatgtg

SEQ ID NO: 663326 - DNA, 88 bp, Homo sapiens
ggacgcggagcccgacgcgggcgaggccacgattctgaaaaagagttccacgtcctcccttatcgagtctttgttccccttcctggat

SEQ ID NO: 663327 - DNA, 82 bp, Homo sapiens
ccgacctgcaggctctgtcccgggtggagcgagctggcgcctgtaacacggaatccccatctctaatgtaagcttggagatc

SEQ ID NO: 663328 - DNA, 90 bp, Homo sapiens
ccagcagcgctttgtggacggcgcacttcgtttggatcagggaagcaaaggtgtctaccagtaccactggcaaagccacaatgtcaagca

SEQ ID NO: 663329 - DNA, 75 bp, Homo sapiens
ggcgcagctggcggagctggagctggagctctcggaggaaaatatttacaccagcagctccagttcataccaata

SEQ ID NO: 663330 - DNA, 100 bp, Homo sapiens
cataaggaactagtcacagtgttgctgcaacatagagctgacattaactgtcaggttcaaaccttgtactactcagctgatcacaagctgcttgatggga

SEQ ID NO: 663331 - DNA, 100 bp, Homo sapiens
atcttacaagaagagtaccacttaaacccagagacaataacaattctctttgtgaaaaccagagcacttgtggacatacctctaacctatttggaaacag

SEQ ID NO: 663332 - DNA, 74 bp, Homo sapiens
ggcggcctacgagcagctgaagctggggcagtgcccaaaggaaatgccactaaagaattcatcgagagtttaca

SEQ ID NO: 663333 - DNA, 50 bp, Homo sapiens
accaaactctccatcacccagggtgtctggggaagccaatgaaactcaga

SEQ ID NO: 663334 - DNA, 100 bp, Homo sapiens
cacacaggtgaatttaaaggagcagccctggtgtcacctatcagtaaaagtgtctcctttcctcttgggccgggcactttgggctgccagtcggttcact

SEQ ID NO: 663335 - DNA, 74 bp, Homo sapiens
ggcaacatggtgcggtcggggaataagagccccccaagatgaacccagtggtggagccactgtcctggatgctg

SEQ ID NO: 663336 - DNA, 106 bp, Homo sapiens
gggctgaagcgactgagtccgcgatggagccaaaattgcctggaaaagagcagtgagaggagtccgggagatgtgtgatgcatgtgaagcaacattgtttaacatt

SEQ ID NO: 663337 - DNA, 128 bp, Homo sapiens
cacagttgctgatatagaaagtgaaccagtggtagaaagcacagaaactgaggggacataatcatcactcagtaggaaacccagcgtttgctggcagaaccagttcctggcatcaaagccgaaccaga

SEQ ID NO: 663338 - DNA, 89 bp, Homo sapiens
tttatgatttgtatttgactgagagaaacccactgaagacgtctgcgtgagaatagagaccaccgagacttaattcagtgcacaaatga

SEQ ID NO: 663339 - DNA, 90 bp, Homo sapiens
ggataacgggaggtgaatttccatgtcaacatagtcctgtgtggacaacagtgagtatatgcggaatggagacttcttacccaccaggct

SEQ ID NO: 663340 - DNA, 87 bp, Homo sapiens
ggctttcaatcaacccaaggtgatgcttttgctacgacctcattttctgctggaactgggcagagcggcttgggtaaatccacctta

SEQ ID NO: 663341 - DNA, 89 bp, Homo sapiens
gcagatgcaggaaaatttcgatattgaagtgtcaaaatccatagatggaaaagatgagtccagcctctgatgaagcaggagagaaagaa

SEQ ID NO: 663342 - DNA, 74 bp, Homo sapiens
tccgtacgacctcgaggatgccatggtgttctggatcaacaagatatggtgtaagatacttcttcaagattgga

SEQ ID NO: 663343 - DNA, 87 bp, Homo sapiens
ggcgctcggcgatggtaggcgtccctggagcggccgccttccagcctttggggccatttggatcacacgatgttttttcaagatttt

SEQ ID NO: 663344 - DNA, 100 bp, Homo sapiens
gcagtgagctagatttgaagaactacgtgacagaaaccactcagattgaggatcctcgagtacaatggcggcgggagcaggaacatatgctgaaggatta

SEQ ID NO: 663345 - DNA, 96 bp, Homo sapiens
gcagcgcctggtgaagaagcctgtgcccaagctcatcgagaagtgctggaccgaggacgaagtggtcctactgctctgttggctcatgaaataggt

SEQ ID NO: 663346 - DNA, 100 bp, Homo sapiens
ctataataatagcaaacatcgatggcctactggggataacattcatgcagaacatcagggaaccagccgtccctcacattaccaggtcttgtgggatgac

SEQ ID NO: 663347 - DNA, 90 bp, Homo sapiens
gtaaacttccttttactattagcccatcaagaaatgaagaacgagattcagacacagataaggctcaattacttgaaatagccaaagcta

SEQ ID NO: 663348 - DNA, 100 bp, Homo sapiens
cagtggtgaggctgtaagcgaaactcttcagtttaaagctcaagagcggcactgcagaggtggagctgaagaagggagccactctcaaaatcacgctgga

SEQ ID NO: 663349 - DNA, 87 bp, Homo sapiens
cctgccccgccggagcagcatcatcaagacaaatcttcctattttcaagctgaaagaatctactgttagaagaagatacagtgactt

SEQ ID NO: 663350 - DNA, 98 bp, Homo sapiens
gggcgcacgtcggctcccacgcttagccagctcccgggttacacatcattttggaatgactgtatatcatctggattacgtggctgtatgttaattga

SEQ ID NO: 663351 - DNA, 80 bp, Homo sapiens
atacagttggcactagaaatggtagcattctttgtgatcaggctaaaataaatgaagctgtagaatgcttactgtccctg

SEQ ID NO: 663352 - DNA, 83 bp, Homo sapiens
ccagaacccggccctcaccgccctcaccacccctatccagacggctgcccttcaagtaccaaaaactttagaaactgttcctt

SEQ ID NO: 663353 - DNA, 100 bp, Homo sapiens
ctggttccccaacatgcctcaccctcatctatatcctttggcagctcacagacaaatttacatgtattggagaccagaccagaagcccttctgaattaag

SEQ ID NO: 663354 - DNA, 90 bp, Homo sapiens
gggtctgcagggcctgggccgccgctgctacctgcagcgccgtgtggcacgacacaaaaatcaggaggagataagcaaggacctcagagc

SEQ ID NO: 663355 - DNA, 83 bp, Homo sapiens
ctctcgcgggcgggagaacggaaaactcccaacttcctgcagcctcccgcgacgatgcccctcaacgttagcttcaccaacag

SEQ ID NO: 663356 - DNA, 100 bp, Homo sapiens
aaggccggggccggccagaagcgggcggcgcgggggagatggtgtcatggagaaactccagctgggcccagagattctgcagcgggaaaatccaaggctt

SEQ ID NO: 663357 - DNA, 100 bp, Homo sapiens
caacgggcagctgggctgcagtgaccccgctttcctcacgcccagatttgatggtcctcgaagatttgaggatttagggtcaaggtgtgaaggaccgaga

SEQ ID NO: 663358 - DNA, 82 bp, Homo sapiens
cggctgtatgattaggccacaatcttcaatgagtaaacatattcctgtggaacacctgcagcaggagactgctgctctgaaa

SEQ ID NO: 663359 - DNA, 82 bp, Homo sapiens
accagtggtaaatgtcagctacaggccagcttatgaccaggtgaaatgacaatggatgctctgttggctcgattgaaacttc

SEQ ID NO: 663360 - DNA, 100 bp, Homo sapiens
cgttgtgattttacgacagaaggagaatgcagaccctcgacctccagtgcagttcccaatgcgtcagcatttatcccgtttgccaaccattgatccgaat

SEQ ID NO: 663361 - DNA, 71 bp, Homo sapiens
accccgtacgtcactaccactgtctctgctcacagtgccaagacgaggagaagaccttttcatgtgtatgg

SEQ ID NO: 663362 - DNA, 75 bp, Homo sapiens
attgagcctcaaaatgaagatggcacatggcccaggcagaccttgcagtcaaaaggtctgcggggtttccgagag

SEQ ID NO: 663363 - DNA, 84 bp, Homo sapiens
ggctgctgtaaaacaggaaatgagacatgggaaagcggaaccaccaaaaggagtgatgatcaacgatctcatgataaatctgga

SEQ ID NO: 663364 - DNA, 75 bp, Homo sapiens
gctgagcggcgcgggctccagactcgccgtggtcaagttcaccatgagaggcaaccatgtccaagggacctgcag

SEQ ID NO: 663365 - DNA, 74 bp, Homo sapiens
tttctgctgaccgcgggccctgccctgggctggaacgaccctggggtgctttctctgtggtccgcaggtgtgtg

SEQ ID NO: 663366 - DNA, 50 bp, Homo sapiens
gaaaggaacagatcggggctgccaagagtaaatattatcagtgtcactaa

SEQ ID NO: 663367 - DNA, 75 bp, Homo sapiens
gaaattccacccgcgaagtccccttttggagatgcccttttcctttcagaacacgatgatgaacgcgttaatttc

SEQ ID NO: 663368 - DNA, 76 bp, Homo sapiens
gccaaagcagcagtaagaaaggctacgcagtctccagttaccttccaaaaagtactactgctaaagtgcagcagag

SEQ ID NO: 663369 - DNA, 82 bp, Homo sapiens
gagcttatactcctcccagtgacgggtctggagtgcgtgggggaccggctgttggcggagatccgagaggccttcaaggtgt

SEQ ID NO: 663370 - DNA, 96 bp, Homo sapiens
tagaaggggaggggttacagactgtggtgcctacccccatcactgcttccctcagccataacaggaacatcattcatggcagtgattcagtaaaaa

SEQ ID NO: 663371 - DNA, 50 bp, Homo sapiens
cggcccacgccctccgactgccaggttggggtgctggaggactgcttcac

SEQ ID NO: 663372 - DNA, 78 bp, Homo sapiens
gggcatcatgaattcgtttgtgaacgacattttcgagcgcatcgcagcattgatctggtagccttgctccagaagcct

SEQ ID NO: 663373 - DNA, 74 bp, Homo sapiens
gagctcttcagaaccgcctacttctgcagagaaacattgaatgaggaggataaagcaaagattgctaaaagcaa

SEQ ID NO: 663374 - DNA, 75 bp, Homo sapiens
caaatgcaagtccaagaggaggaggaggcggaggtccaagcggaaagaatgaaactagtgatcgagaagatggcc

SEQ ID NO: 663375 - DNA, 119 bp, Homo sapiens
gtgaactttctaaagtgcagatttctgagctttcatttcctgcctgtaacacggctggagtgcagtggttcaatcacggatcactgcagcctccacctcccagttcaagaaattctcat

SEQ ID NO: 663376 - DNA, 82 bp, Homo sapiens
gccgaggagcgggaagagttgctggggaacccaagacagaccaggatgaggagcattgccggaaagtcaacgagtatctgaa

SEQ ID NO: 663377 - DNA, 75 bp, Homo sapiens
ttgattacctgtaccgaaatgctgtccagcagctccagcggaacatcttggcctcgaacccccgggtgacccgct

SEQ ID NO: 663378 - DNA, 100 bp, Homo sapiens
catggacggacagaggatgcacttgtccaatcctcaatcctgataatctgatagtggaggaagcagtgcaggagctgaactctttcctcgcacaggagaa

SEQ ID NO: 663379 - DNA, 50 bp, Homo sapiens
agaactaagtaacgatctggatgcccaggcattagtatcatttgaagacg

SEQ ID NO: 663380 - DNA, 90 bp, Homo sapiens
cccgcccgctgcctgcctgcctggcatctctctctcccggttattaatgctgcactggctttagcagcaaaaccacagagtaaactggcc

SEQ ID NO: 663381 - DNA, 100 bp, Homo sapiens
actgcctgtgcacgggattggcagtaattggaggaagaatgatagcacagaaaatctctgtcagaactgggcaccaatgcctctgctctggaaaaagaca

SEQ ID NO: 663382 - DNA, 100 bp, Homo sapiens
aatcattttggaaactaaatcgttccccagatatggaatatatgaacgctgtcgagaattggtggaagcaggttatgatgtacggcaaccggacaaagaa

SEQ ID NO: 663383 - DNA, 98 bp, Homo sapiens
tctgtgacattcctcagtgttcagaaggtagtgggcagcagtcagtgacaggtgtaacctctgtggatgacagcaacagttactggaggatacggggg

SEQ ID NO: 663384 - DNA, 82 bp, Homo sapiens
ccacttccctgcactctcatcgctctcggcctcggcctcggcctccgacacgtcaccttcaggccattcagaggaggaaaga

SEQ ID NO: 663385 - DNA, 82 bp, Homo sapiens
gactgctagagccgagcgaagcccctgcagctcccgctggccaacgatgggggcagccgctcgccatcctcagagagctccc

SEQ ID NO: 663386 - DNA, 100 bp, Homo sapiens
atagtgatgacagctccagaaatttatttgtgaaggatttaccgctttgcttcacctctgggtcatgattgttctgttgacttacacaccagaaatgcac

SEQ ID NO: 663387 - DNA, 80 bp, Homo sapiens
ctttgccgccgttaacgtgtggcggaagaacctgcagcacatgattaagtaccggtacatcccgttcacacatgggaaga

SEQ ID NO: 663388 - DNA, 90 bp, Homo sapiens
agtggctgtagggagcatagctgctacactgaagatgaagcaaggcccaatgacccaggcgaactgataaatttcaaacggaagagagtg

SEQ ID NO: 663389 - DNA, 90 bp, Homo sapiens
ctccaatggcgctttctacaagatcagtgtgcgtgtgaccaccatggatgcagagctggagtttgccatccagcccaacaccaccgggaa

SEQ ID NO: 663390 - DNA, 100 bp, Homo sapiens
ctctaacgtgaacgcggaccaggagggtcctaaaaaggtggggacgctgtggcgagaagccgggcttagctggaaggaatttctacctgaaggccaggac

SEQ ID NO: 663391 - DNA, 99 bp, Homo sapiens
cggtggccgcgctcggacccgagcattctgctaagtgatgaatccagcgaggctgattctcagagtgaagacgatgatgaagaagaactcaatctcagc

SEQ ID NO: 663392 - DNA, 75 bp, Homo sapiens
gtgttcctgtggtctctgcacctcctttctgagccctctggcacaaatggaagaagaaagaagggagcaagtagc

SEQ ID NO: 663393 - DNA, 73 bp, Homo sapiens
tgacttgcacgacacaccaggccggatgcaggagaagggtgttattagcgatgaattgatccatgagttaaag

SEQ ID NO: 663394 - DNA, 83 bp, Homo sapiens
cacctccattggatttaaaagacagtcctcgtcagcactgactttcagctatggaatcgatgcctgaggaaacccagacccaa

SEQ ID NO: 663395 - DNA, 90 bp, Homo sapiens
ggtttccggctgcagggcggtaaggatttcaacatgcctctgacaatctctagtgtgaatgaaaactttgccattgatttgatagcagag

SEQ ID NO: 663396 - DNA, 112 bp, Homo sapiens
gatatcgacgtcgtgatccagaagtccagagctgaggactgcctgtttgcagttcaaatctgaacatcaatgatgtactagggaactactcattgactcttgttgatgcatt

SEQ ID NO: 663397 - DNA, 49 bp, Homo sapiens
ccgctggatgcacactgctgcgtggagaatacagctacctacccaggca

SEQ ID NO: 663398 - DNA, 73 bp, Homo sapiens
tgtgtggatggaactccttgcaccaggcttcttttcagtgggacacagcaggccaggaaagatttcgaacaat

SEQ ID NO: 663399 - DNA, 100 bp, Homo sapiens
tcctcatcgtggcagctctgggaacttctgggtcaaccagttcagagacctgcttcttccaatcttctgagtggccttatggggagcttggagcctacaa

SEQ ID NO: 663400 - DNA, 75 bp, Homo sapiens
ctaagaggcgcagagcgaggagtcgggatttggtcgcgagcggcgacgccttcacctgcatccaagttcatccag

SEQ ID NO: 663401 - DNA, 100 bp, Homo sapiens
gcggccccgcgcagcccccggccgcagcgcaggcagcccagcaggaagccgagatcccccgcgaggtgatcgagaggctggcccgcagtcagatccacag

SEQ ID NO: 663402 - DNA, 96 bp, Homo sapiens
cgtcatcatgctgaccaccaatcagatccgtaagctgggattctgtccctgaccgtcttcacagtccaggtgatcttgactactgctttacagaga

SEQ ID NO: 663403 - DNA, 98 bp, Homo sapiens
tccgtgaatccatcgagagtgagattaggcgagaacgagagaggcagacaaacccatcagccatggaagcagaggaagaggatgaaaaatgtgccagt

SEQ ID NO: 663404 - DNA, 100 bp, Homo sapiens
aaaagatgagtccttgggatatggagcttatacctaataatgggaagctatgcgaaattatttaaaagagcgaggggatcaaacagtacttattcttcat

SEQ ID NO: 663405 - DNA, 93 bp, Homo sapiens
ttggaagaggcgagtccggtctcaaaatggaggacatggatttgattgacatactttggaggcaagatatagatcttggagtaagtcgagaag

SEQ ID NO: 663406 - DNA, 149 bp, Homo sapiens
gtccaaggccgaggaggccaagaagctggcgggccgcgcggctgtggagaaccacgtgaggggtccaaattccaagcctgtagtgtccttcattgctggtttaactgctcctcctgggagaagaatgggtcatgccggggcaattattg

SEQ ID NO: 663407 - DNA, 100 bp, Homo sapiens
cgccgccgccgccgcggtttgtcgccagaaggaagatggcggatctggaggagcagttgtctgatgaagagaaggtatctcagatgaagacatcatcaac

SEQ ID NO: 663408 - DNA, 100 bp, Homo sapiens
aggaagctcggacttctcctggggatatgttaagtgggcagaccaacatccacctcagcaaaaacttcttcctgacgaatcgcgccagggagcgctcaga

SEQ ID NO: 663409 - DNA, 100 bp, Homo sapiens
cttttcacgtcacctggagagatgcacaggatgtacagttacccagcacgtgtacctcctcctcctcctattgctcgggctgtagtgccctcgaaacgtc

SEQ ID NO: 663410 - DNA, 100 bp, Homo sapiens
gttgttcagaatcctccaaaaccagtcatgaccactagacccacagctgttaaagcaacagatcagcctggatcccccaatcaagcaaggccaaactcgc

SEQ ID NO: 663411 - DNA, 75 bp, Homo sapiens
ggagcgtctgtcaggctaggaggagggggaggagagctggatccaaactactggatacaggtgcatcgcttggaa

SEQ ID NO: 663412 - DNA, 74 bp, Homo sapiens
gatgattcttcagataacttctgtgaagctgatggtacgggaaaaacactcttggcacgagccgttgctagcca

SEQ ID NO: 663413 - DNA, 100 bp, Homo sapiens
cctctcttcgcctcgcctcgggacccgcggtccccgctcttgctgacacgatgaggcgagtggtacgacagagcaagtttcggcatgtatttgggcaagc

SEQ ID NO: 663414 - DNA, 100 bp, Homo sapiens
gcgacctggtgcgctctcgtgaggtctcggtggatgcacatggattaattgatgtatgttgagtttatggagctgccttttggtggcttgctttatctgc

SEQ ID NO: 663415 - DNA, 83 bp, Homo sapiens
ctgtcggggtgtacgaagcggccaagctgctcaacgtcctggtccgacccccagtggcactaacgtgggatcctcagggcgct

SEQ ID NO: 663416 - DNA, 85 bp, Homo sapiens
cctaccactttggcatcgtcggcctcaacatgaatggctactttcacgttaccatcccaccatttcatgaccctttgaaaaaagc

SEQ ID NO: 663417 - DNA, 80 bp, Homo sapiens
gagagctctgcatcaatgcgccggccatagaccgaatccgggataccttgatccatgaaatgtgccatgctgcctcctgg

SEQ ID NO: 663418 - DNA, 75 bp, Homo sapiens
taggggattgcgttccctccagtcgcagaactttgaccagaataagctggaagaagaaatgagaaagcgaaaaga

SEQ ID NO: 663419 - DNA, 97 bp, Homo sapiens
taatgagcagccaactcataaattgttcagccgtctgtatatctccccagatacctgaaactgaccacctgagtacgttttcccattgctgagctgt

SEQ ID NO: 663420 - DNA, 75 bp, Homo sapiens
caccaacgaggacagatcctgggtgttcgacagctacagcctgacagggaaagtttcctacactactgaggttta

SEQ ID NO: 663421 - DNA, 98 bp, Homo sapiens
actcggagaagccctcgagcatccccacagggccgttgctccagggagaactgcaaatatcttcatccacccccacatttaaaaacgcagttggagat

SEQ ID NO: 663422 - DNA, 98 bp, Homo sapiens
gaacaagtgtgacctggaggacgaacgtgttgtgcctgctgaggatggccggaggctcgccgacgaccttgaaccacaccttcatcaagcggtccgag

SEQ ID NO: 663423 - DNA, 75 bp, Homo sapiens
ccgcgctacacgcagttgcagtacatcggcgagggcgcgtacggcatggtcagggtccccagccccaccccagcc

SEQ ID NO: 663424 - DNA, 82 bp, Homo sapiens
aacaaagccacccagccaatgaagtctattatcctcccagtccacaacgctgaaccgtggctggacgaatgtttgaggtctg

SEQ ID NO: 663425 - DNA, 75 bp, Homo sapiens
aacagatgtgcacctttgagaatgatcattgagaagtctcgctctatcaccagtctggagtccagtggcatgatc

SEQ ID NO: 663426 - DNA, 83 bp, Homo sapiens
cttttagagatgcaaatccttctctactcacaagatctgcaggagcatgtacagctgcagcattcctgaaagaattcgtaact

SEQ ID NO: 663427 - DNA, 90 bp, Homo sapiens
ctgaaacagaaattctggaacacctatatggtactgaagatttaccccccaaaaaaaattgtcaatgagaaataaagctaactgatatca

SEQ ID NO: 663428 - DNA, 100 bp, Homo sapiens
acgaatttaggagacataagaccgttggttctgacgaggcacagcgtttcttgcaagaatgggagttgtcacaggtagtactgatggaattggaaaatca

SEQ ID NO: 663429 - DNA, 100 bp, Homo sapiens
ttctgtagtcagcacaaatctgaagatggtgtcaaagagaaattctggtcaccagtgaaaagttgtgcagagcccaacatgagcttcatttccaagctgc

SEQ ID NO: 663430 - DNA, 75 bp, Homo sapiens
gtgcgggcggctgcgtcgggctgcaggagaagatggcggtctccacaggctggagcattggatttgctaaaggag

SEQ ID NO: 663431 - DNA, 100 bp, Homo sapiens
gtggtggtcatatcaatcatagcattttctggacaaacctcagccctaacggtggtggagaacccaaaggcattcccatcaagagcaccatggacaaccc

SEQ ID NO: 663432 - DNA, 71 bp, Homo sapiens
cgaggaatccttcaatgcagtgcaggactggtgcccgcctggctgggtgggtgagcggtgtcagctggagg

SEQ ID NO: 663433 - DNA, 90 bp, Homo sapiens
tgaaaaccaaatcattcacagagatgtcaaagctcgggtgaagagaaccgatctggacaaagcgaggacttttgttggcacctgcctgga

SEQ ID NO: 663434 - DNA, 75 bp, Homo sapiens
tcatcctgctcctgggtgccgtggcatgtcgatttgtccttcactacagtcatggctccgatcttcatcttgaag

SEQ ID NO: 663435 - DNA, 100 bp, Homo sapiens
aaaccccagaggtcatcagattgtttgcaaagaaacaaccaggtcagcttcggacaaggttagcagagggagcagatagcagggacttacagatgaacca

SEQ ID NO: 663436 - DNA, 75 bp, Homo sapiens
gtgaatcccctgtttgagaaaaggcctaagaattttggcattgatgccatggacaatattaccaggcagaaccaa

SEQ ID NO: 663437 - DNA, 75 bp, Homo sapiens
ccttgtcaacatcttcgagcatcggcagctccggaggccggggtaactggcaggaatgtctgatcacagatacgg

SEQ ID NO: 663438 - DNA, 83 bp, Homo sapiens
ccgagggcggggaccggcggcgctggaggagcgaggcagctgtactaggactgggaacggcaattctgtggtgttcttggtca

SEQ ID NO: 663439 - DNA, 99 bp, Homo sapiens
cccagcctcgttgcggccatcgccctgccggaccgcgcctcaggctcccccaggttgggggccgtcccgctcctaaggcaggaagatggtggccgcaaa

SEQ ID NO: 663440 - DNA, 90 bp, Homo sapiens
acctgcttttttctgcaaatcgctgggaacaagtggtgaagtaccatgcaagcatttcttaaaggtacatccatcagtactaaacccccg

SEQ ID NO: 663441 - DNA, 74 bp, Homo sapiens
atccacgcacctgcagctctgctgagagagtgcaagccgtgggagtgatttcttctgacttgagcctgcagtgt

SEQ ID NO: 663442 - DNA, 80 bp, Homo sapiens
cctgggcaacagaatattggtcaagttgctgaccttgaattatagctgaggtggtaccagtttaagaagtgagaacttct

SEQ ID NO: 663443 - DNA, 95 bp, Homo sapiens
ggctcatccacaaatgccttgagacagctacaaggatttccattttatggtaaaccaatgatactatttctctggctagtgctcaagaagattat

SEQ ID NO: 663444 - DNA, 100 bp, Homo sapiens
cattggtgagccgatgagcatggaccatagaagggctcaatgtagaaggtgtcagacctgacccaggcagccaacaagaacaacgacgccctgcgccagg

SEQ ID NO: 663445 - DNA, 98 bp, Homo sapiens
gaaggctttcaccaaacctgaagaagcctgcagcttcattttgagatggcggacttccaccacaaatggagggattttgactgtatctattgacaatc

SEQ ID NO: 663446 - DNA, 100 bp, Homo sapiens
gaccattttctactgtccctgcgcgagtggttcagcactgagtcatgcttgcttctgctacgcactgatttgttctattccagttttcacgtacatcgtt

SEQ ID NO: 663447 - DNA, 100 bp, Homo sapiens
gccgatccagcctgcggagcctgtggggcagaggagaaggcagagcccccccaggctatgaatgccctgatgcggttgaaccagctgaagccagggctgc

SEQ ID NO: 663448 - DNA, 100 bp, Homo sapiens
gtcctttccggctagtgcctaatgtcagaatccacatggatggggccatcgaagacggcaatttggaggaaatggaagaggaagtacggcttaagaagcg

SEQ ID NO: 663449 - DNA, 100 bp, Homo sapiens
tcaagattgatggacttactagcggattccagggaagttatacgtaatgatgtggtaggcagctccctcctcttcgtgcacgaccacaccggcctggcca

SEQ ID NO: 663450 - DNA, 82 bp, Homo sapiens
ccgatttaaagctgagctgcgaggaaaatggcggcgggaggttgaaatcacaaagattagacacctttttagataggtgttc

SEQ ID NO: 663451 - DNA, 96 bp, Homo sapiens
cataaggaactctatcccaggaatacagctttgcattagggagcaagccatcagtgatgaggatgaagaggaaagtttttcctggctggaagagat

SEQ ID NO: 663452 - DNA, 80 bp, Homo sapiens
aacagctgtggtgtcctctacaccatctgtggtcatgtcaacagtagcacaagcctcttccatgagtggggagcccgctg

SEQ ID NO: 663453 - DNA, 74 bp, Homo sapiens
ctggctgcggccgccctgggccgggccccaccggacggactttccttatcccagttgattgtgcagaatacact

SEQ ID NO: 663454 - DNA, 83 bp, Homo sapiens
gtggaagcaggactgcgccgcgtcttcctcaagagtcattcaggagagcaggaaagaaaaggccatccctgtggatgtcgcgc

SEQ ID NO: 663455 - DNA, 80 bp, Homo sapiens
gagaaaagtgcccaagatcctttcaggtgattggagttgtgcttcaaaaatttcagaaattcagcagtattttatctgcc

SEQ ID NO: 663456 - DNA, 74 bp, Homo sapiens
aaaaagaaaaagacaaggatagtaagcttgaaaaagccctaaaggttattgataaggaaactatagatttattg

SEQ ID NO: 663457 - DNA, 75 bp, Homo sapiens
ttcaatgtgtcctacaccaggcagcccccaaatcccggcccagggcggctacttccctgagaatgtcaaggccat

SEQ ID NO: 663458 - DNA, 100 bp, Homo sapiens
atcgatgtgcggcgtccgctgtataaggagtggaaacaaaatgtcagtcagtgtgcatgagaaccgcaagtccagggccagcagcggctccattaacatc

SEQ ID NO: 663459 - DNA, 80 bp, Homo sapiens
cagctggggaagtggtttggacatgcacaccaaaccctgggttagagcaaggctggagtgcagtggcgtgatctcggctc

SEQ ID NO: 663460 - DNA, 100 bp, Homo sapiens
cctcccctgtccacggtgtgttgaaagtacacggagccccgaggacggggacagagcagaatgggctgatatagatccggtgccgcagaatgatggcccc

SEQ ID NO: 663461 - DNA, 75 bp, Homo sapiens
gtactacgtgtacttcggcaccgtccgcgactgctatgaggggtcttactttgtcacccaagctggagtgcagtg

SEQ ID NO: 663462 - DNA, 82 bp, Homo sapiens
ctcattctgcagctcatcttctcaaaaacagccctgggcgctgcctatggcacagccaagagcggtaccggcattgcggcca

SEQ ID NO: 663463 - DNA, 75 bp, Homo sapiens
gggagttcccgtccatgctggccctctctggaaatgtgactggaaacagtaactccacgttcatctccagcgggc

SEQ ID NO: 663464 - DNA, 100 bp, Homo sapiens
aagggaccagagccccaggtcactatcggctactctggagaggactatatccagttctggaacagccggcagtccctggagggcctgtccgtgcgctccg

SEQ ID NO: 663465 - DNA, 98 bp, Homo sapiens
ggcgagctcgcgatgagtggtctcggcaggctcttcgggaagggatttaaatgtggatgaatttgaggaaatattcaagacaaaagcccaaggacctg

SEQ ID NO: 663466 - DNA, 82 bp, Homo sapiens
gctgtcagcctcagagaacttgaggaagagaacacgagcttgaaggaatactcccccagttgcaagaggcgcaggaccgtgg

SEQ ID NO: 663467 - DNA, 50 bp, Homo sapiens
tcaaaaatagtgatagctttgataagccaccaccacctatcatgacagat

SEQ ID NO: 663468 - DNA, 112 bp, Homo sapiens
ttgtggcgaggcagatcctgccccgtggccgcggccgtctcgtaggtgctgcagggtgcacagctgatcgccgtggcctcctcggaccccgcggcggcgggcgtggatgggt

SEQ ID NO: 663469 - DNA, 100 bp, Homo sapiens
ctgtgtatgttcttcaggaattataaagaagctgaagctaaacttctggagtttcagaagagccttgaaacggtactccaaagattcaggtttactcacg

SEQ ID NO: 663470 - DNA, 100 bp, Homo sapiens
gcatctggtgtgcaatgtgaagagtccttcaaaaatgccagaaatcaacgccaagaatccaagcaaaaatccctggattgaagcgcaaagctgaatgaaa

SEQ ID NO: 663471 - DNA, 73 bp, Homo sapiens
aggaagatgctgaggccccaggcatcagagatcatgagagttgtgacttctcaccaggagatttggtttgggc

SEQ ID NO: 663472 - DNA, 98 bp, Homo sapiens
ctcttccatatcttggtcacaccgctgttcctgctgtccagtgtggtccgatctaccgtcaaagctctagtgagttatagggatggcccaggtaatcc

SEQ ID NO: 663473 - DNA, 83 bp, Homo sapiens
gatccgccgcccgtccacacccgccgccaggtgtcctgtggccaggcggaaagcagtgagaagcccaacgctgaggacatgac

SEQ ID NO: 663474 - DNA, 82 bp, Homo sapiens
cttagcctgcgccgcgaggtctgcggcctcggttctccccatgacaccacctgaacgtctcttcctcccaagggtgtgtggc

SEQ ID NO: 663475 - DNA, 100 bp, Homo sapiens
atttctcagaggatagcctttcacttattcatctgtccagcatgactcatccccgggagtgttgataaaggcatgacttcctggcaccacagggaaaatc

SEQ ID NO: 663476 - DNA, 90 bp, Homo sapiens
ccaaaatgaggaagtcaaagaggaaacacttgttgaagcatcagtcctctgtgacctgcctgctgcctccctcaacgaccagttgcccca

SEQ ID NO: 663477 - DNA, 75 bp, Homo sapiens
cggcttcctcctcctggctggaagggacctccactcagtacctggtcatggagtattacgtgggcggggacctgc

SEQ ID NO: 663478 - DNA, 74 bp, Homo sapiens
ggccggcggcgaccacgaaaccgagagcaccagcgacaaaaattagaagtgcgtctcaccaaccagccaagatg

SEQ ID NO: 663479 - DNA, 127 bp, Homo sapiens
acttcgcggcaacctccgggactctgacggtgaccaacttattagaaaaggttacgatatcagaagtgcttggtagccaggccgccttctcagaaagttcgaccacctccaccgccagcagattcag

SEQ ID NO: 663480 - DNA, 100 bp, Homo sapiens
acggagccaggggcccgagggcggggaccggcggcgctggaggagcgaggcagctgtactaggactgggaacggggtggactccattatgctggtggaag

SEQ ID NO: 663481 - DNA, 100 bp, Homo sapiens
ctgctctccatggagagagtaactctgtccttattatcggaccccgaggatcaggaaaaactatgggtcttactgaagtaacacaaagcttaaaaatgga

SEQ ID NO: 663482 - DNA, 83 bp, Homo sapiens
tgtgagaggaaaacagcctacccgataaacctgaaaattgggatgtatggtatgaaagcaagtttgatgactgtgataaggag

SEQ ID NO: 663483 - DNA, 75 bp, Homo sapiens
tttggccaggggaccaagctggagatcaaacctcctgcccctcctaaagctgaagccaaagcgaaggctttaaag

SEQ ID NO: 663484 - DNA, 100 bp, Homo sapiens
aacccaaagagaaaattcccatcattttctttatagctccaagctctacagattcttcaaatatattgagaatagggatgttgcaaaaacagtgttaaag

SEQ ID NO: 663485 - DNA, 75 bp, Homo sapiens
ctggaatatgaagagacacagtatggtagccacacccccaggttgctccttgagggcaggacagttcttatggct

SEQ ID NO: 663486 - DNA, 90 bp, Homo sapiens
ccgccgtcgccccgccgcgccgcgctccaaccgcctcctcctcctcagtaacgcggactcaccccacacagaccgcgtttctctccagtg

SEQ ID NO: 663487 - DNA, 83 bp, Homo sapiens
aagaggctggactcggattcgttgcctgaggttcacctccatttctcaatgtgaaagctttacatcattaagatgagttgaat

SEQ ID NO: 663488 - DNA, 90 bp, Homo sapiens
gagtggaatggcttgaagatgagaagatggcgaattagaagatggtgaaatagacgatgcaggatttgaagaaatacaagaaaaagaagc

SEQ ID NO: 663489 - DNA, 100 bp, Homo sapiens
gcttctgcaagtatctacagcggtgtgatccctcacatccacaaatctctgattggaaagaagggacagcagaaaactgcttagagggatgctttaacca

SEQ ID NO: 663490 - DNA, 75 bp, Homo sapiens
cgctggctgcagggacccggtgacagcgtgagaggttcgcagagtgagctggagtgcaatggcatgatctcggct

SEQ ID NO: 663491 - DNA, 90 bp, Homo sapiens
attttctgtacaccaatggaaagtgcgtcatcctaaggaacatcgacgaagcacactttgctggccaataatgggtttgcaatttctgct

SEQ ID NO: 663492 - DNA, 82 bp, Homo sapiens
gtgaatgactccaacgaattaggtggtctgactaccagtggctctgcagagctttggaggaattttttacatcacttgtgaa

SEQ ID NO: 663493 - DNA, 48 bp, Homo sapiens
cttgcgctacgccctggatgagatggaaagaccacagcaagattcttt

SEQ ID NO: 663494 - DNA, 98 bp, Homo sapiens
agcacaatcgggcggaggtggcgctgccccttcagatatgaagcaacagcatgtcatagaaaccttgattggcaaaaagcaacagatatctcttgcaa

SEQ ID NO: 663495 - DNA, 75 bp, Homo sapiens
cgagggaaacaagaaaacatcaaagaggtctagcaaaggtttcaaagagcagatttacgatgtatacaggtacct

SEQ ID NO: 663496 - DNA, 75 bp, Homo sapiens
accgtgtgggagcgggagctgcggaaaggatgaaggtttaaggctcagaaaggtagcacattcggataaacctgg

SEQ ID NO: 663497 - DNA, 89 bp, Homo sapiens
ttttggagagcaccccttttaccactgcctggttgcagaagtgccgaaagagcactggactccggaagagtccatgttgtacttagatg

SEQ ID NO: 663498 - DNA, 120 bp, Homo sapiens
agttcttccagttcgcagtcaagatctcgttccagttccagagaacgttcgagatctcgtgggtcgaaatcaaggttttgcacactagggaccaagaagccctcggggacactgctgaga

SEQ ID NO: 663499 - DNA, 100 bp, Homo sapiens
catagctgctatcagtgcccgctttgttcagctgcagcatggagagatagataaacggttagatgagatcatgtgactggatccctcatgatgagatgag

SEQ ID NO: 663500 - DNA, 85 bp, Homo sapiens
ccagcagatggcggatgccctgcagtacctgcagaaggtctctggagacatcttcagcaggtaactaggatttctacctcaaccg

SEQ ID NO: 663501 - DNA, 100 bp, Homo sapiens
cgcctcgtcgacatgagtgatgtggaggaaaacaacttcgagggcagatctctgaaagccactcggaatttctccatctcagattggagcaagaactttg

SEQ ID NO: 663502 - DNA, 83 bp, Homo sapiens
gggaggaaggaacgaggcaaggagctaaagcagcgtgcgttcagccctggggattttcagtcaatgcatcatcggagcgactc

SEQ ID NO: 663503 - DNA, 73 bp, Homo sapiens
ttttagggtcctttatatagaagggagagtaggtcacacatcccgggtcctgagtctgaccatgagcccagat

SEQ ID NO: 663504 - DNA, 78 bp, Homo sapiens
cgtggcttcggaggcaagtttggtgtccagatggacagagttgatcaggttctgacagggagacaacagcaaatacaa

SEQ ID NO: 663505 - DNA, 83 bp, Homo sapiens
agagagaatccagtatgcaatggatgtcgcacacaagagagagagacgcagcaattctgtggtgttcttggtcacacatttat

SEQ ID NO: 663506 - DNA, 90 bp, Homo sapiens
accttatcatctaacctcactggtggcatgaagcccaacacgttggtcctaggtttctacgatgacgctccaccgcaggaccatttcctg

SEQ ID NO: 663507 - DNA, 80 bp, Homo sapiens
cccacgagtagcagccgcaactggacggaggacatggaaggaggaatactcccccagttgcaagaggcgcaggaccgtgg

SEQ ID NO: 663508 - DNA, 98 bp, Homo sapiens
tactttggttacctatgtacctgttaccactttcaaaagtgacttcatggtcatgacgattttcttcaatgtgagcaggcggtttggctatgttgcct

SEQ ID NO: 663509 - DNA, 74 bp, Homo sapiens
cgaccgcgtcctgcagcagctgccagtggagccgcctaataccctctaccatctgctttggtcagggtgccgct

SEQ ID NO: 663510 - DNA, 100 bp, Homo sapiens
ggaagtatccatgaagacttcagcttgacctcagaatgtatcctgtcaggtataatgtcagtgaatggcaagaaagttcttcatatggatcgaaaccctt

SEQ ID NO: 663511 - DNA, 90 bp, Homo sapiens
ttcctgcacacagccaaagtctgcaaagagtcaacacagactgtccaagctctgcagtattcaactgttgatggtccactaacagcaagc

SEQ ID NO: 663512 - DNA, 75 bp, Homo sapiens
gagtccgcctgccatggactcggaatattacagcggcgaccagtcaggctcctgtgacgtttgatgacatcactg

SEQ ID NO: 663513 - DNA, 74 bp, Homo sapiens
ggggcgccagctctgcaggagaggcctctgagaaggaacccttgaaacaggtcagcgggactatgatctcctgg

SEQ ID NO: 663514 - DNA, 93 bp, Homo sapiens
atctttgaaatgctaagattcttggataccacagtatcataaaattcctctaaatgcaagctccactggttcaacagcctctcctccagtttc

SEQ ID NO: 663515 - DNA, 74 bp, Homo sapiens
gaggaggcagctgcggtggcagctgctgagttctcggtgaagcaaccatgtccaagggacctgcagttggtatt

SEQ ID NO: 663516 - DNA, 98 bp, Homo sapiens
aaattaaaaggagagagattcgaggttttgaacgaagaatgtgatcagaactggtacaaggcagagcttaatggaaaagacggcttcattcccaagaa

SEQ ID NO: 663517 - DNA, 82 bp, Homo sapiens
caaagttggaagcaataccaaacagtggcatggaccacacccagcggaaaacatccatgatagcagtcttctgtaaatcgaa

SEQ ID NO: 663518 - DNA, 75 bp, Homo sapiens
ggactacagtatgcacttaatgtccctatgacttcaaacctgcttctattgacacttcttctgaaggataccttg

SEQ ID NO: 663519 - DNA, 75 bp, Homo sapiens
tggggtcccacagtcacctgagtgccctcggctagcatgacccgcctgatgcggtcccgcacagcctctggttcc

SEQ ID NO: 663520 - DNA, 50 bp, Homo sapiens
gttggggcggcctggctccctcaggagctgacatggacccaaatcctcgg

SEQ ID NO: 663521 - DNA, 73 bp, Homo sapiens
tttgctcgaagccttcagtccgttgcagaggagctattcatcactaatgaaagttgaaaatatgtcttcaaat

SEQ ID NO: 663522 - DNA, 75 bp, Homo sapiens
ggtgaatttcagtcagcctcagaggttgacttctacattgataaggaaggccaggagaatgtcgagatcctcccc

SEQ ID NO: 663523 - DNA, 100 bp, Homo sapiens
gctggccaaggatatgggagcaaccaccatggaccagaagtctctctgggcagatctgtgacttcctccgcggagccacagtccatagaatcctcggcca

SEQ ID NO: 663524 - DNA, 98 bp, Homo sapiens
tgacacgggctgggcgcccccagaagcccgggaacaaactttttctttaacatcagcactgatgaccaagaaggcctttacagtctttattttcataa

SEQ ID NO: 663525 - DNA, 100 bp, Homo sapiens
aaccgcggcccccggtggtgggctcagccggtcgagctgcgcgggaggaagccagttgagggaagttctccatgaatgtacgtcacaatgatgatgaccg

SEQ ID NO: 663526 - DNA, 90 bp, Homo sapiens
tggcaactttaagaaaagtgactacttcatgcctttctcagcaggtgcactttacaggtccccgatgaaccaagagaaccctccaccata

SEQ ID NO: 663527 - DNA, 97 bp, Homo sapiens
aagagaagatggacagtttcagtgcattacagatataccttagatgaatttggaacagccagaagaagtacagttgttcgtggatttattgatgcgc

SEQ ID NO: 663528 - DNA, 50 bp, Homo sapiens
agccctttgatgaccgcagcaggtgagaagccatacaaatgtgaattgtg

SEQ ID NO: 663529 - DNA, 100 bp, Homo sapiens
aaggagctaaagcagcgtgcgttcagccctggggtgacagagctgaatgaacctctctccaatgaagatcgaaatctcctctctgtggcctacaagaatg

SEQ ID NO: 663530 - DNA, 100 bp, Homo sapiens
agcatgccctgaaaaagtatcgtcgagaagcctatcatcggtccagtggtttacgtcttggatcttgcagatagactgatctcaaaagcctgtccatttg

SEQ ID NO: 663531 - DNA, 74 bp, Homo sapiens
ctgcctccccagcaaatcgagaaaaacctcagcgacctgatcgacctgaatggcctgtccagaagacagccaaa

SEQ ID NO: 663532 - DNA, 83 bp, Homo sapiens
agacgctttacccgactctttgggccgttatctcacgctcttctcaaccatctgtgagtccaggggaaccgtctccaccatcc

SEQ ID NO: 663533 - DNA, 100 bp, Homo sapiens
ccgggcatggtggtctggggcaacgcggaaggtgctggagaatctggtaaaagcaccattgtgaagcagatgaggatcctgcatgttaatgggtttaatg

SEQ ID NO: 663534 - DNA, 98 bp, Homo sapiens
ggtctctttcctgtggccagcccagagctgagctcaatgtgcagcaatggatgacgacagcctggatgagcttgtggcccggagcccagggccggatg

SEQ ID NO: 663535 - DNA, 76 bp, Homo sapiens
cagatgctgccagggtccctgaagagggaagacacgcggaaacagatctatgggagtcgtcagattatactggaga

SEQ ID NO: 663536 - DNA, 100 bp, Homo sapiens
cctggaccctgcccagcagaatttgtatagagatgtgatgttggagaactacagaaacctggtctccctaggcgtggagattgatcctgcgagagaaggg

SEQ ID NO: 663537 - DNA, 83 bp, Homo sapiens
gggaaatcgggctgaagcgactgagtccgcgatggagtatggtttgaagtggtgaacatggatttttctcggcttcacatgta

SEQ ID NO: 663538 - DNA, 75 bp, Homo sapiens
ccacacacaggtgaatttaaaggagcagccctggtgtcacctatcagtaaaagtgggcctttggagtgacgctgt

SEQ ID NO: 663539 - DNA, 82 bp, Homo sapiens
tatttttcattatccttttctgggtgctatgggtgatcattccaagaaatcctgatgtccatccaacagaagcaactccctc

SEQ ID NO: 663540 - DNA, 100 bp, Homo sapiens
aaaaaagcaagtagttatactcaggaagaacttcaagacacttacgggtttcttctgtttgatactgaaaagcagtgtgttccatgggaaccggtacaag

SEQ ID NO: 663541 - DNA, 83 bp, Homo sapiens
tatcagccgaggtggagctgcggggccctggcatgaaaggttgaaatcacaaagattagacacctttttagataggtgttctt

SEQ ID NO: 663542 - DNA, 50 bp, Homo sapiens
cagaaattctggaacacctatatggatttccacttctcaaacctgctgtg

SEQ ID NO: 663543 - DNA, 90 bp, Homo sapiens
ccctgagagccttcgcagggcccctgagtccagccaagggtgtccgcaatgttgccagtgtctgtctgcagattggctacccaactgttg

SEQ ID NO: 663544 - DNA, 82 bp, Homo sapiens
gatgaagcttctgaaccatccacacatcataaagctttaccagactgcaaaattcaaaatggggctcaaggtattcgtttca

SEQ ID NO: 663545 - DNA, 75 bp, Homo sapiens
cgagcggtggtttggacgccggcggagacgcgggcgagaatgcttcagacatgcctgaaacaatcaccagccggg

SEQ ID NO: 663546 - DNA, 100 bp, Homo sapiens
ttctcggtttatgtgctcttccagtcatccgtccttggctcaggatttggagagcttgcaccaccaaaaatggcaaacatcaccagctcccagattttgg

SEQ ID NO: 663547 - DNA, 117 bp, Homo sapiens
gcgcagtacaccaacgcggtgcgcgaccgggagctggacctccggggaagggatgagaccatgcagcctgcgaaaccatcctttcttgaatattttgaacaaaaagaaaaggaaaac

SEQ ID NO: 663548 - DNA, 96 bp, Homo sapiens
gggagacggacgttgagagaacgaggaggaaggagagaaaatggcgtccacgggtgtcatggagaaactccagctgggcccagagattctgcagcg

SEQ ID NO: 663549 - DNA, 131 bp, Homo sapiens
tattcccacaagtttacggtagtggtgttacgtgccaccaaagtgacaaagggggcctttggtgacatgcacgctctgctgttgcccgtattcaggagttcttcagacggagaaaagaaaggaaagaaatg

SEQ ID NO: 663550 - DNA, 89 bp, Homo sapiens
tgctgctgctgctgcccgcgtccgaggctcgcgggcggcgggcccgggaagacagagatgtcaatgaccccatgcccaaccgaggcggc

SEQ ID NO: 663551 - DNA, 75 bp, Homo sapiens
gacggaggagcttgtaccaccgctgaaaatactccttgatcaagttgaagaagcagtggcagattttgatgaatg

SEQ ID NO: 663552 - DNA, 50 bp, Homo sapiens
cggcaaactccccatccagctccaggacgtgatgcctgggccacggcagg

SEQ ID NO: 663553 - DNA, 51 bp, Homo sapiens
caggaatgggacctcgagtcactgtgttgttgccgaagagattggactggg

SEQ ID NO: 663554 - DNA, 100 bp, Homo sapiens
attaactcttacctgaagcccatgttgcagcgggactttattaccgctttaccagaggagttgaagccaaacagccaaattctgccattaggaagtgtgt

SEQ ID NO: 663555 - DNA, 97 bp, Homo sapiens
caaggaaaaactggagagcttcatcaaaaatagtgatagctttgataagtgctggagaatctggtaaaagcaccattgtgaagcagatgaggatcct

SEQ ID NO: 663556 - DNA, 50 bp, Homo sapiens
tagttgatgatttagttgattctctgaagacagaagcattaaaatgcgtg

SEQ ID NO: 663557 - DNA, 74 bp, Homo sapiens
tcgcgtcggacccttgccagaactgaagctggagaagcttcgagagaaggagcgtaagaaggaagccaagcgga

SEQ ID NO: 663558 - DNA, 100 bp, Homo sapiens
acagcacagttcctgggaaggtggagccaccagcctctccttggaatgaatctgaagtctgctgcagtaaaacacagaaggctttaaaatgttttcttgc

SEQ ID NO: 663559 - DNA, 98 bp, Homo sapiens
tatccttacccgacctcagatgctcccttctgctcctggaacttgctactaccagcaccatgccctaccaatatccagcactgaccccggagcagaag

SEQ ID NO: 663560 - DNA, 82 bp, Homo sapiens
tccaggtgagactttcacaataagagcagaggatggaacacttcagtgcattcaagagatccgtgctcagctcacagagcag

SEQ ID NO: 663561 - DNA, 83 bp, Homo sapiens
gcgacaacctggccgaggacatcatgcgcctccgggagaagtacactgaggaggggacggctccgtcttcacattgtgcacag

SEQ ID NO: 663562 - DNA, 75 bp, Homo sapiens
aagacaaaggaggacttattcctttacataatgcagcatcttacggggcctgctgatgaagtttttagatgtgtg

SEQ ID NO: 663563 - DNA, 100 bp, Homo sapiens
ggggaagctgctaacccgacccggattggcgctgaggtggcccgtggggcaggaactgtggaaggtgcatcagtgaagaaatggaccaatgtgtataatc

SEQ ID NO: 663564 - DNA, 82 bp, Homo sapiens
ggggccacggcaggggcggcggccttacgggtggctattatcatggaaaactaatttttcccagagaatttcctttcaaacc

SEQ ID NO: 663565 - DNA, 82 bp, Homo sapiens
ccacgggctgcgggctgcctaggaactgtggctgcaccatctgtcttcatcttcccgccatctgatgagcagttgaaatctg

SEQ ID NO: 663566 - DNA, 100 bp, Homo sapiens
ctgccatttcgccaaaggatgcttttgaaactcggcaggacttaaatgagcagggagaaggttttaaggtgaaaacgaagaaagaaatccggcatgtgga

SEQ ID NO: 663567 - DNA, 74 bp, Homo sapiens
ggagcgcggagcccggctcccgcaccatggaggaggacgacagctacggacacaactcagatgggaagttcatc

SEQ ID NO: 663568 - DNA, 95 bp, Homo sapiens
gtggccgtggaggcagaggtggcatgggtgaatattacttcagtgtagaaaatttggaacgagacttctttcttcggggaaagatggatgaacaa

SEQ ID NO: 663569 - DNA, 75 bp, Homo sapiens
ctgtgcagccgcgaggaggcgcgggaggtgttcgagaacgaccccgagacgtcttcccacacaggttgagagagg

SEQ ID NO: 663570 - DNA, 93 bp, Homo sapiens
tggccttagctgtgctcgcgctactctctctttctggcctggaggctatccagccaaacggggattcagcgtccgatcctttggaacagggac

SEQ ID NO: 663571 - DNA, 82 bp, Homo sapiens
cgaagacatgacacttacaagatggacagggatgataattgggcctccaagatgaacacctacctcttcatgatgcaagccc

SEQ ID NO: 663572 - DNA, 90 bp, Homo sapiens
ggtcaaaacagacaaaatccactataggagtcatggtaacagcgtcccacaatcctgaggaagacgctgccctttaccgacacctgggga

SEQ ID NO: 663573 - DNA, 73 bp, Homo sapiens
tcaatgactgccctctaaaggaagagtgtaaacaggaacatcgataagtagtgtaaaaacttgcacaatgaaa

SEQ ID NO: 663574 - DNA, 101 bp, Homo sapiens
ccgtggccgccgtgcaggcggccgtcagcaacctcgtccgggtgctttactccatgaactgtctaatgacggtgctcataagcagtttgatcactacctcg

SEQ ID NO: 663575 - DNA, 98 bp, Homo sapiens
tgctgcagaccctcgtccacctcctgcagctcggccaggtctggaggatacttttgtggaactctatgggaacaatgcagcagccgagagccgaaagg

SEQ ID NO: 663576 - DNA, 71 bp, Homo sapiens
gggccggagcagccgcgggcgcccgaggggccgagcgaggttctcccatgggcaggtggtctctctggatg

SEQ ID NO: 663577 - DNA, 88 bp, Homo sapiens
aagaggagggggctgcggtggccaccgcggcggagcccgagcctccagggtcgtatagacctccccctcctatgggcaaaccaccagg

SEQ ID NO: 663578 - DNA, 75 bp, Homo sapiens
gaggcccagtgtgaggtcatgcaggaaattgtggaccaggtcctggagggtctcacaccctgcagtggatgcatg

SEQ ID NO: 663579 - DNA, 75 bp, Homo sapiens
cctaaagctggagtattttgagattggagaattaagtgctccagctgaggctgcaacaaaggaggacgagagaac

SEQ ID NO: 663580 - DNA, 98 bp, Homo sapiens
aaaacaacaacaaatacttttattaattcggggagcctggtcaccaactggatgctcagtggatatgctgctgatgaaatcactcactgcatacggcc

SEQ ID NO: 663581 - DNA, 82 bp, Homo sapiens
atagaaccccagtttcaacgagacttcatttcattgctccctaaagaggtccagcccagaatcaaatgcaggttccatctgg

SEQ ID NO: 663582 - DNA, 99 bp, Homo sapiens
cgcagtggtcgcttcttctccttgacacttcgtgtatgatcatgtgttcgctgagaagatcacttccttgcaaggtcagccaagccctgatgaagagga

SEQ ID NO: 663583 - DNA, 101 bp, Homo sapiens
ccagcccagcgattctcagtcagggaaaagtccggcatttacagaaggcttttgcttcaagagtagataaatccacacagactgaactactatgctatgat

SEQ ID NO: 663584 - DNA, 83 bp, Homo sapiens
gcggaataatctaaatatgggtgttggggtggaagatgtctatggatgtgacattcctggggacgggtgcagcatacccatct

SEQ ID NO: 663585 - DNA, 98 bp, Homo sapiens
gcttcatcaaaaatagtgatagctttgataaagccctgcgctgggttacgcctcagatgctgtgtgtccctgttaatgaagacatcccagaagtgtct

SEQ ID NO: 663586 - DNA, 74 bp, Homo sapiens
gtgacagaatatgccaaaaatggagaaatttttgatttgctgctgcttccaggagaagtggagcaggatgtaag

SEQ ID NO: 663587 - DNA, 74 bp, Homo sapiens
ctcactctgttaaagctggtctgttctaactgagatatttcacagttcttgccgagtgcttcactttttcacta

SEQ ID NO: 663588 - DNA, 75 bp, Homo sapiens
cgcgggccccgcagaggaaggaagccggcgggcgggacaattgcagcatgactttcccagggccctgattttcag

SEQ ID NO: 663589 - DNA, 98 bp, Homo sapiens
gcgaagggagccgaccgggccctgggctggaggtaaaaccccacgtgcccatgacgcttccggagacaaccctggaaacactgaagcataaaatcaac

SEQ ID NO: 663590 - DNA, 97 bp, Homo sapiens
actcctatttgaagtatttgacgaaaatagactgttgttataccacatttgcataagttagccttggtgaacaacttacagattgtggattctaaaa

SEQ ID NO: 663591 - DNA, 106 bp, Homo sapiens
attttaaaatgcttaaaacatcttaacccattgcactggttccaattaaagaagggaccaggaccagggtgaggcaaacaaggtccctacgggcacagaatttaag

SEQ ID NO: 663592 - DNA, 83 bp, Homo sapiens
ctccctgcaactaactccattcttaattgggtctgcggaagagggagctgctgaaggagctgctaccagtcatcgggcagaac

SEQ ID NO: 663593 - DNA, 74 bp, Homo sapiens
gtgaaaaggcaccttgggatgagggaatacaagtgtcatgtctgtggaggcgtagatcccccaccatgtgacgc

SEQ ID NO: 663594 - DNA, 100 bp, Homo sapiens
ttagcgtgagtgatcactctcaatcccgggtctctgaagcaaaactgagggcagatgaggcaaaacaaagtgctgaagacattctgttgaagacaaatgc

SEQ ID NO: 663595 - DNA, 97 bp, Homo sapiens
tgggtgaagcgcttccgggtcgccgccggcagcagcctcccggcgcggttcagctgtttcagtccacaccttgttcacagtaagatattcaattcaa

SEQ ID NO: 663596 - DNA, 100 bp, Homo sapiens
ccacaggccactgtgcaggatctccactcggccctgacacagtattggtaaaggttttcaaggtgtcatgaaaagatggggatttaaaggccagcctgct

SEQ ID NO: 663597 - DNA, 100 bp, Homo sapiens
cccgagaccgccgtcgctcggacgctcctgctcggctgggtcttcgcccaggtggccggcgcttcagaactgataaatttcaaacggaagagagtggcag

SEQ ID NO: 663598 - DNA, 75 bp, Homo sapiens
tgccgatccgccgcccgtccacacccgccgccagccgctgccatggcccagacactgcagatggagatcccgaac

SEQ ID NO: 663599 - DNA, 48 bp, Homo sapiens
atggcttctggggacctttacgaggaaggaatcgtgtctcctagtgac

SEQ ID NO: 663600 - DNA, 75 bp, Homo sapiens
tcgcagtggtcgcttcttctccttgagctggacagaggcctcacggagccccagatacaggtggtttgccgccag

SEQ ID NO: 663601 - DNA, 100 bp, Homo sapiens
ccccccatcgagtcgctgatccctgaagaccaaatagcaagccagggctgagcaggaagaagaattcattagtaacactttattcaagaaaattcaggct

SEQ ID NO: 663602 - DNA, 82 bp, Homo sapiens
aacccaccaattctggacacattgggattaaagggtcctgcagttctgagcttgggttccctttgcctggacaccaaccaag

SEQ ID NO: 663603 - DNA, 95 bp, Homo sapiens
caggcgcaggcgaggggctgggtggcggttgagacagcggcggtactgggaggcgtagattctccagtacaagaagaggtgctcggagctggagc

SEQ ID NO: 663604 - DNA, 113 bp, Homo sapiens
tttatattgctgttggaatatctggagccatccaacatttagctgggatgaaagacagcaagagaccagatgaagaagctgtggtggatcagggtgggaccagtacaattctc

SEQ ID NO: 663605 - DNA, 100 bp, Homo sapiens
tgggagccagcgagcctctctccctgatcttacgtgctcaagatggagaacatcattgcaacagtaagagattccaacctcaagctgacccttgctttcg

SEQ ID NO: 663606 - DNA, 60 bp, Homo sapiens
aaggggtgaaagagactcggtgacagatacagcatcaacaacagcaacttgtgattggcg

SEQ ID NO: 663607 - DNA, 89 bp, Homo sapiens
caaaaacgtcaacaacagttttacggcctcatgcattgtgcgtcagcagcaatgtttatggtgaaaaatggcaacgggaccgcgtgcat

SEQ ID NO: 663608 - DNA, 100 bp, Homo sapiens
gacaagcagcagcggcagcacctaagggggccatgaagcccccaggaggagaatcgagcaatctttttggaagtccagaagaagctactccttccagcag

SEQ ID NO: 663609 - DNA, 74 bp, Homo sapiens
ttaccagttaccagcattatgttcagatgatcttcagtttagatcttggaggcatatcaactgtggttctaaat

SEQ ID NO: 663610 - DNA, 75 bp, Homo sapiens
catcaagggagttttccggggccctctcagcaagaacgggaacaaaactctgggttctgagcaaggttcaaccag

SEQ ID NO: 663611 - DNA, 74 bp, Homo sapiens
ccttccgctagtgatcctttgcaccctgcttggagacggacttgcttccgagcccttctgcctggcaaactatc

SEQ ID NO: 663612 - DNA, 100 bp, Homo sapiens
aaattctaccagttggagagactaatgcagggtcatgtaggtacaacagcaaccaagaagatcgatgtctacctccctctgcactcgagccaggacagac

SEQ ID NO: 663613 - DNA, 50 bp, Homo sapiens
ctccaccgtcatggggggcggagacctggctttccttaaagtttcccatg

SEQ ID NO: 663614 - DNA, 96 bp, Homo sapiens
ctcatactattttgacctgcagctcctcgtcttcatgtttccagaccagcatctcagacatgtcgaaaaagatgttttgatccctaaaataatgag

SEQ ID NO: 663615 - DNA, 100 bp, Homo sapiens
ccgcggttcccgagttgctgcagcagcaggaggaggaccgcagcaagtggctgacaagattttgaaaaagaaagaataccctctttatataaatcaaacc

SEQ ID NO: 663616 - DNA, 75 bp, Homo sapiens
cttcgttgcttgcttgcctgtgcgcgcgtgcgcggacatggcctcaaacggtgaccagaagtcagcagcttccca

SEQ ID NO: 663617 - DNA, 75 bp, Homo sapiens
gtccctgaagagggaagacacgcggaaacagatgaagactcttaagatgacagaaggtgatttttctggtgatcg

SEQ ID NO: 663618 - DNA, 100 bp, Homo sapiens
gtttatcaaggctgtcacacatcaagttaaatttggtcaacaaaatccacgtcaggttacttcttgctgcagattctgcgcaggatcggagctgtgggcc

SEQ ID NO: 663619 - DNA, 75 bp, Homo sapiens
tacaccctcatgagggtctgcaagcagatgataaaggctcaggaagaggccaaagaagcagaaatgagcagaaag

SEQ ID NO: 663620 - DNA, 75 bp, Homo sapiens
aatcaagctatccaaatgcgattagttgatgtggcctgcaagagatgggatttcaccatgctactcaggcttgtc

SEQ ID NO: 663621 - DNA, 98 bp, Homo sapiens
gaaatagtaaccctgccaaatacatcagcttgtaggagacagagtgtttctgaaagatctatccagcactccgatggccagcaacaacaccgccagca

SEQ ID NO: 663622 - DNA, 100 bp, Homo sapiens
cttccccctctatgcagccaaagaagatgcagatggacgacggaatcagtccccaatgcctggaaattcctcattggattactgtgttttaaacagaatt

SEQ ID NO: 663623 - DNA, 75 bp, Homo sapiens
ccaaagggagaggcaggtgtcattggagagagaggagacatttttcttgtccgtggtgggatgcgtgctgtggag

SEQ ID NO: 663624 - DNA, 75 bp, Homo sapiens
gatgaaagacgtgctgggcatggcgcaggacgagatggcccagcctcctcggtctcctgtctcgttgctgcttct

SEQ ID NO: 663625 - DNA, 113 bp, Homo sapiens
tccgagtcagattggagcatttgtgttgatgaagatgaaagagactgcaggtggacagcgccatgtccctgatccaggcagccaagaacttgatgaatgctgtggtgcagaca

SEQ ID NO: 663626 - DNA, 50 bp, Homo sapiens
ctggattccagggcatgcctttttcaaaccagaagaactacgacaggcac

SEQ ID NO: 663627 - DNA, 90 bp, Homo sapiens
accgagagcgtgaccgagagcgcgaatatcgtcatcgttagaaggagaataaaggcagccccgttgatgactgaaaatgacaaagcatcc

SEQ ID NO: 663628 - DNA, 100 bp, Homo sapiens
cagatgaagatccattggtaaattgatcaggatttttggcctaccctccaaagaaaaggtaagaatgattgatgttggctgatattggagtgctcattca

SEQ ID NO: 663629 - DNA, 88 bp, Homo sapiens
cagaaggggtgaaagagactcggtgacagatacaggtacggtggcgccccccaggccctcaccctgaagctcccagtgaccatcaaca

SEQ ID NO: 663630 - DNA, 100 bp, Homo sapiens
cctctgaatctttgtgtttggctgcccaggctcgcctcgactccaaatggttgaaaacagatatacagtttggaaattttagcattcaggtgccaggaat

SEQ ID NO: 663631 - DNA, 100 bp, Homo sapiens
cgggagtaggagactcagaatcgaatctcttctccctccccttcttggagtgtaacatgactgccgccccatgtgtgtgagaggcgtcctctgggagagc

SEQ ID NO: 663632 - DNA, 100 bp, Homo sapiens
ctggagtgcgtgggggaccggctgttggcgggaggatttgatgaagatgttaaagcgaaagtggagaaccttctcgggatttccagcctggaaaaaacgg

SEQ ID NO: 663633 - DNA, 100 bp, Homo sapiens
tggggatcgctacggaccttaaaatacccgcaacagccccttcgtcccaagcttatcaggagggcagacttcaaaagctactaaaaatgaacggccctga

SEQ ID NO: 663634 - DNA, 75 bp, Homo sapiens
tatcgtgatgctaacagaactggaggagagaggccagatggaagaactggtgggtgagaggcatcctgactttgg

SEQ ID NO: 663635 - DNA, 99 bp, Homo sapiens
ttaataacaaagtcattttactgaaaaaggagccaccaaaagagaagccagaaagcataacccctactgtagaactaaatgcactgtgcatgaaacttg

SEQ ID NO: 663636 - DNA, 80 bp, Homo sapiens
aagtgcagcctccagctagcactggacagtaaccctccactgagtgaagaaatgttgcctcctggagagtggatgtgtca

SEQ ID NO: 663637 - DNA, 100 bp, Homo sapiens
gacagatcctgggtgttcgacagctacagcctgacagggctattactataacaagcgcattctgcacaagaccaaggggaaacggttcacctacaagttc

SEQ ID NO: 663638 - DNA, 132 bp, Homo sapiens
agcagcagatgggcaaagagtaccgtgagaagatagaggcagaactgcaggacatctgcaatgatgttctgatttccacaagacggcaccctatgtcgtcactggcagcgtagatcaaacagtaaaagtgtg

SEQ ID NO: 663639 - DNA, 130 bp, Homo sapiens
aagtactcgactctcagcctgtttgataagtataaaggaaaatcagtagacgcgattagatcctcaggtaaatcgggtccttcctcgctccaacatggtctacaatctctatgagtattcagtgccagag

SEQ ID NO: 663640 - DNA, 75 bp, Homo sapiens
tccatcaacagggacgattacgagctgcaggaggtgatcgggcatacggagtggtgtccatgtgcatcgggactg

SEQ ID NO: 663641 - DNA, 51 bp, Homo sapiens
cttcctgatttctgcagctctgtgtgaaggcaatccagcatccagcagatg

SEQ ID NO: 663642 - DNA, 100 bp, Homo sapiens
agaacagatgcgacagagtttgctgactgcaatccgttcgggagaggctgctgccaaattgaaaagggatgctcgacatgcagcagaaggagaaatatat

SEQ ID NO: 663643 - DNA, 73 bp, Homo sapiens
aggatcaaggacggatgatgaagtagtacagagggtggttctcttcccaaagtggaagccaaattcatcaatt

SEQ ID NO: 663644 - DNA, 87 bp, Homo sapiens
ccggcttccagatcaacctcaacccgctcaaggagccactcggcttcatcaaggtcctcgagtgggatgggactgaggaagacccac

SEQ ID NO: 663645 - DNA, 100 bp, Homo sapiens
ttcggccggcgtgacgcagccggatcggcgccagacggaaacctagcggtggccacaaagcgggcacaggcctggtgctacagcaaaaacaacattccct

SEQ ID NO: 663646 - DNA, 100 bp, Homo sapiens
agactggaagccagaagcaggcctttctccaccaaggaaaaaacgagaagaccccaaaaccaggctctgattgtactttctccacaagcttcagcatggc

SEQ ID NO: 663647 - DNA, 90 bp, Homo sapiens
ggggatccgacttgccggcagaacttacgctgcgggaccccgggcactgttgctgctgcgggagtgactgtgaagtgctgaccacactca

SEQ ID NO: 663648 - DNA, 75 bp, Homo sapiens
gctgaatcctggctgtgtgaccccaagtttttagaacttcagccataaaaatgggcagaattttccttgatcata

SEQ ID NO: 663649 - DNA, 83 bp, Homo sapiens
ctcccccctcctaggcgggagggggggtggtgcgcacgcccccgaggacgcaggttttaaaatcaaagatgggaaaatcggag

SEQ ID NO: 663650 - DNA, 75 bp, Homo sapiens
ccccggtgcaagaggcgcaaacaagccaatcccaggaggaaaaacgttatagctgaggtggtaccagtttaagaa

SEQ ID NO: 663651 - DNA, 50 bp, Homo sapiens
ctgcgctcccatccacacgctcgagttgatctctctaatgtattagatct

SEQ ID NO: 663652 - DNA, 75 bp, Homo sapiens
ggcaagttatcctttggaaatgtgctcacactcaagagcctcctgatctagcagccaagactccccctgaccttt

SEQ ID NO: 663653 - DNA, 100 bp, Homo sapiens
ccgaggaggatgaagagctggagagcgccgaggacgacgagcgcagctgtcggggccgcgagtcggacgaaggtgccagctgacgaggtatgcgggtgcc

SEQ ID NO: 663654 - DNA, 100 bp, Homo sapiens
aaagaagggcaggcccccaagcagcagcaggactcagaggcgagagtggccccagccgggccagaagcagctgccgggccgcaagtacagccctgggtac

SEQ ID NO: 663655 - DNA, 82 bp, Homo sapiens
ccggcgcaggtgaccggcgcgcgggagcgctacggccccaacgaatggcgccattttgcggtacggaagctacacagcaaca

SEQ ID NO: 663656 - DNA, 83 bp, Homo sapiens
gtgcatctctcccgaggccatcgttactgcggacggagctgatggcaggatggtggctggcaaagtgttgatggcaaagcaag

SEQ ID NO: 663657 - DNA, 98 bp, Homo sapiens
aaaggggccgttcgagaaatccgcaaggacaatcagttcctggcgaggatgcaactctcagaaatcatggaacgtgaccctgactgcgaagggcaccg

SEQ ID NO: 663658 - DNA, 100 bp, Homo sapiens
caagagcaagcccgcacgtgtgaaggcatccactggtaaacgccctgcagaagatatggaagaggaacaagcatttaaaagatctagaaacactgatgag

SEQ ID NO: 663659 - DNA, 96 bp, Homo sapiens
ccgggatcgtgaccgagaccgtgaccgagagcgtgaccgagagcgcgaatatcgtcatcgttagaaggaacaggagtacagctgtgtagtaaagat

SEQ ID NO: 663660 - DNA, 75 bp, Homo sapiens
caaaaagtgaatatcaatggaggagctgtttctctgggacatccaattggggtcttgctctgtcacccaggctgg

SEQ ID NO: 663661 - DNA, 96 bp, Homo sapiens
tcagccttcccagtagctggaactacaggaataggatgagtgataatccacccagaatggaagtgtgtccttactgtaagaagccatttaaacgat

SEQ ID NO: 663662 - DNA, 100 bp, Homo sapiens
gttctcttcgtcatgatcaacaaatatggtcgacggtccaaatttggaatgaaggcctccctccttgaggatgagcagggcattgtcccgagggccatgg

SEQ ID NO: 663663 - DNA, 96 bp, Homo sapiens
aaccaactacagaatgtactcttatgtcacagaggagaggctgtgacaacactgaaaacagtattggatcagcagcagaccccttctaggttagca

SEQ ID NO: 663664 - DNA, 98 bp, Homo sapiens
ggtacatgaggaagaaacccggaaggggaagaggaaagcaaaggcgtcaggaatggttcttcctcaggctgaccaactgactgaagagcagattgcag

SEQ ID NO: 663665 - DNA, 75 bp, Homo sapiens
caccgaggcatccatcagggaaatcaagggtaaaggcagcagtaatgctaacgctagcaagtaaactgaagcgtg

SEQ ID NO: 663666 - DNA, 50 bp, Homo sapiens
ctacatgtttgagtacccggagtatcagcatgcagcagattggaataaat

SEQ ID NO: 663667 - DNA, 100 bp, Homo sapiens
gcgcctgtagctcgcgggcctcgcagatttggagcaagaggtggtggtggccttcccccgaagaaatttggtaatcctggggagcgtttgcgtaaaaaaa

SEQ ID NO: 663668 - DNA, 83 bp, Homo sapiens
ccaaggaccacgcatccatccagatgaacgtggccgagacaatgcagatcttcgtgaagactctgactggtaagaccatcacc

SEQ ID NO: 663669 - DNA, 98 bp, Homo sapiens
ttcgttggatggctcttgaaagtctggttaataacgagttctctagcgctagtgatgtgatgtgtatatctcatgattgatatggagaaactagtcat

SEQ ID NO: 663670 - DNA, 83 bp, Homo sapiens
ccgggaggaaggaacgaggcaaggagctaaagcagcgtgcgttcagccctgggtaatagctcttcaagtctgcaataaaaaat

SEQ ID NO: 663671 - DNA, 83 bp, Homo sapiens
ccgagtcaagccgccgcctcgacccagggcccgcgggccaggagagcgctcggcgggtgaaatgacaatggatgctctgttgg

SEQ ID NO: 663672 - DNA, 98 bp, Homo sapiens
cctttcctcaggagtcatttctgttccgcacaggcctgctgaactgggtgctttatatagggctttccttaaagtttcccatgtctcaatggactcct

SEQ ID NO: 663673 - DNA, 100 bp, Homo sapiens
gttctccaaacatgatcgtttactgcaaaggaaagaatcatgtgatgtacagctttatataaagagacaatctgaacactccatcttagcaggagatccc

SEQ ID NO: 663674 - DNA, 95 bp, Homo sapiens
acatggcggagagagaggtggagtccggcccccgaaagaggttggggaatggcggtcaatgtgtattctacctcgataacccaagagactatgag

SEQ ID NO: 663675 - DNA, 88 bp, Homo sapiens
aagaaagtaacgcatttttgtttttggaaggagaaggatagacttggctttgaggtaaacactacacgtgaagagtggtgaaagggaa

SEQ ID NO: 663676 - DNA, 88 bp, Homo sapiens
tctcttacgtctgcggaagtgcagctgcctcagttcttagcgcagaacgaggtcaatgccatcaaatgggatccttctggaatgttgc

SEQ ID NO: 663677 - DNA, 82 bp, Homo sapiens
ccccacagaccagcccagcattcagaaatgagccgtcagactgctacagcattacctaccggtacctcgaagtgtccaccat

SEQ ID NO: 663678 - DNA, 90 bp, Homo sapiens
acgggaggtgaatttccatgtcaacatagtcctgcctcctgacaaggtgatccgggcgggccccgcaggaattttatcccctcaccggcc

SEQ ID NO: 663679 - DNA, 50 bp, Homo sapiens
atctcctcgaggaagtacaactggtgaaaggtgtagcagtcactcggcct

SEQ ID NO: 663680 - DNA, 100 bp, Homo sapiens
tgcatgccgctcaccgtagacgagattggattatggaagtgggaagtgaagaagaaaaatgggagaagctggatgcagaatttgatcactttgtggttga

SEQ ID NO: 663681 - DNA, 75 bp, Homo sapiens
ctgcataccccacggagaacttcgctagccaggtggaagttaaacgagctgagcctcgggacagcaagagccaag

SEQ ID NO: 663682 - DNA, 99 bp, Homo sapiens
cactgggcaagatggagttgaggactattttacactgtatgcagatgtgaatttggagaagtctgtagtgggcgtttgaagacaccagggaaaagagag

SEQ ID NO: 663683 - DNA, 80 bp, Homo sapiens
ctccagcgctgcctggaggagaatcaagagctccgaggtgaccctggcaaagatgagagtgcacatttcgtcctgcctga

SEQ ID NO: 663684 - DNA, 75 bp, Homo sapiens
aacaagatggtgagcatgatggagggtgtcatccaggtcattcccaaaagcaagttcgtcttggtgaagttcgac

SEQ ID NO: 663685 - DNA, 101 bp, Homo sapiens
caagcctggtggagagccaaagatcaaaattgagaaactggatgcccgagggatccagcttgctgccctcttcatgagtggagtcgacacagctctgtttg

SEQ ID NO: 663686 - DNA, 99 bp, Homo sapiens
ctgagcgtgtgccagaagatccagctttgttgaaaagcgaagccgttagtcccttaatacaaagggctgagggtaaaaagctgggattggtaggctggg

SEQ ID NO: 663687 - DNA, 100 bp, Homo sapiens
cctaaagccgggcggactgcggaaatgggtcctgatgaatatgaagagatggaagaagaggaggaggaggaagaggaggaagacgaggatgatgattcag

SEQ ID NO: 663688 - DNA, 75 bp, Homo sapiens
aaagaggccaaagatctgacagaactggttcagcggagaataacatatcttcagagccctgaggatgatgacagg

SEQ ID NO: 663689 - DNA, 78 bp, Homo sapiens
tccctgctgggcgggaccctggtctccgcgtacggattcttcgctgctgctgccttaccgccgagaaccaccacccgc

SEQ ID NO: 663690 - DNA, 100 bp, Homo sapiens
cacagccttaacctatgcttgtgaaaatggacatacggatgttgcagatgttttacttcaagcaggggctgatttaaatctttagaacacgatgttcttg

SEQ ID NO: 663691 - DNA, 82 bp, Homo sapiens
gcggtggcggtggcgcgcagccagattacaatactgtgatgagactgttcctgtaacttttgatccacacacagaatttctt

SEQ ID NO: 663692 - DNA, 132 bp, Homo sapiens
agcaagctctgctctctctatgagaacgactgcatctttgacaagtttgagtgttgctggaacggttcggataggtcagcaaagtggaacgcgagaagaaccaggagctgcggcaggtgcgcgagcatgagc

SEQ ID NO: 663693 - DNA, 83 bp, Homo sapiens
gcaaccccagatccatttacactttacattgatattcactgatggactccaaagaatcattaactcctggtagagaagaaaac

SEQ ID NO: 663694 - DNA, 87 bp, Homo sapiens
aggtcctcatgctgctgtggtcattgctggtcatctttggtctcatctgagtagcagcttcctgccctccttcttggagataagtcg

SEQ ID NO: 663695 - DNA, 82 bp, Homo sapiens
gaggaaaacaacttcgagggcagaggctccacgtgttccccacgtttgtggcgtacgagctcacggtgctggtgttcctcac

SEQ ID NO: 663696 - DNA, 90 bp, Homo sapiens
ctgcttttgagtgagatggtcccagaggcctggaggagcggactgctcttctgttagaaatagtatctttgttttcctttgctgttcctc

SEQ ID NO: 663697 - DNA, 82 bp, Homo sapiens
gctggacgcccgtgcactgggccgcgcatttcggcaagacaatgcagatcttcgtgaagactctgactggtaagaccatcac

SEQ ID NO: 663698 - DNA, 59 bp, Homo sapiens
gctgtcgctgctgctcgttcgagtcgcaggttagcatacgtatcaaggacagtaactac

SEQ ID NO: 663699 - DNA, 83 bp, Homo sapiens
ctgaaacatcacagaagcttctgagtggttctgaagattcaagagagtaaatattatcagtgtcactaacaagggactactgc

SEQ ID NO: 663700 - DNA, 75 bp, Homo sapiens
gactttgttaaacagacctctgaagagaagcccaaagacagtgaagaactcgagaaatgtatcttctgtaagaag

SEQ ID NO: 663701 - DNA, 98 bp, Homo sapiens
gtctaccagatcaacgtcctccgggaccggagtcagaaccctccgcagagtaaagcccatctacagcaagcagtcggtgttcttcgtctgggaactca

SEQ ID NO: 663702 - DNA, 75 bp, Homo sapiens
cgaggaggcagccaagctcgtagcctgccactccgtgctcagcttacccgctggccgcctcctgacaagcgggag

SEQ ID NO: 663703 - DNA, 75 bp, Homo sapiens
gccagccaccggcaccaagaccggccacatcccagcactgcccacctctgttgtcgccgtgatcctgaaggcgct

SEQ ID NO: 663704 - DNA, 96 bp, Homo sapiens
atttgatgtttcgtcagagttactagagattgcgcagtctctttgtggagaggacttgatcattaaaggaatcagcgttcatatatccaatgccga

SEQ ID NO: 663705 - DNA, 76 bp, Homo sapiens
tggtacaaggcctgtaaagtagacagcccccaaagcaggttacagccaaggtgcaactcagtatactcaagcccag

SEQ ID NO: 663706 - DNA, 100 bp, Homo sapiens
tttaagcagctatagtcttgtattgatggttttgcactatttacaaatgtatgctgatggtagcatatgtttagatatccttcagaatcgatggagtcca

SEQ ID NO: 663707 - DNA, 96 bp, Homo sapiens
ctcaaggcctgagtagccggtaacaaacgagggttcccgggattggaccgacgcagccatgccaaactatgaattactggaaaaagaagtagaaaa

SEQ ID NO: 663708 - DNA, 100 bp, Homo sapiens
ctaaaaacggccacatcgacatcatcagagcgtcacggggttcggacgtcagatgatcgagaaaaccaagcagctggtggagtctaagtacacagtggag

SEQ ID NO: 663709 - DNA, 89 bp, Homo sapiens
ccaagctacttggagtagggacaaaatatcttggctcacgtatttaagagcctgaatattccagatatgagaccttggtggggacaatt

SEQ ID NO: 663710 - DNA, 74 bp, Homo sapiens
aaaagacctgtggctattaagataggtgatctgtgaaaatggttcgctattcacttgacccggagaaccccacg

SEQ ID NO: 663711 - DNA, 98 bp, Homo sapiens
gacgggcatggttggcgagctcatcaaccgggctgaaactgccgccaaccggatctgtaaggtgctggctgtcaaccaagagaacgagcacctgatgg

SEQ ID NO: 663712 - DNA, 82 bp, Homo sapiens
ggcgacctgggcaccagcaggacccgaggccaggagccaggggcccagaaggccctgggaggagcggggacactgaggacct

SEQ ID NO: 663713 - DNA, 74 bp, Homo sapiens
gtcgtatcctatatcatgcagagaaaagagatggaaacttacttgaagaagatgagacaaaaggacccagtgaa

SEQ ID NO: 663714 - DNA, 100 bp, Homo sapiens
cagaactcaagtaggtagtgaataccgggagtcctggccccctaactcaagcacgacccctgacccgctacctgccaatccggaaggaggactttgacct

SEQ ID NO: 663715 - DNA, 100 bp, Homo sapiens
cttcgtgaaaggaacggtgggccgaatcacaggtagattgtttgaagcagaagtcagttctcctggagctcacggcagccctcactgaaggtgtggtcaa

SEQ ID NO: 663716 - DNA, 80 bp, Homo sapiens
ctgccacaccctggggcctgtgcatcctcctgacccacaggatggcatagttcttggagcagatacaagagcaactgaag

SEQ ID NO: 663717 - DNA, 75 bp, Homo sapiens
ccgagcctttgatttgagtgggtgaaatgacaatggatgctctgttggctcgattgaaacttctgaatccagatg

SEQ ID NO: 663718 - DNA, 100 bp, Homo sapiens
agaatctcgtgctcaccggtttctcccacatcgacctgctcatgatggagcagtccaagaagtcctccctcatggtggcccgcagtattctcaacaacaa

SEQ ID NO: 663719 - DNA, 101 bp, Homo sapiens
ccctgcgtctctggcctcgccggtcttggggggatggttccatcatggcgtcaatgcagggttttgactctgggaggagggctgccttatttggagcacct

SEQ ID NO: 663720 - DNA, 75 bp, Homo sapiens
cttctgccgacaacttttctcctgatttgaggtcacatcgatcagacaacaacatggcaggaccccaggaaggcc

SEQ ID NO: 663721 - DNA, 100 bp, Homo sapiens
gtgacgtttcgccggcgcgggcgccatcccggaagcgcgagcaaggccgccagatgtgcagggtgaagcctggagaccctcttgccctggcctagctgca

SEQ ID NO: 663722 - DNA, 123 bp, Homo sapiens
ggctgaggaaccatgtctccatccccgaccgccctcttctgtcttgggtgataaaagaaaatgtggctgaagttacccgaagttcagcttgcagtgtaattcagaagagttaagaccagaagt

SEQ ID NO: 663723 - DNA, 75 bp, Homo sapiens
cagagacacctgattcttctgcttcaaaagtcctcaaaagagatgaggagcgggaaggcctcctgcaccctggag

SEQ ID NO: 663724 - DNA, 90 bp, Homo sapiens
cagcagcagcagcggctccggcagcggtagcacgagtgcgggcagcagcagccccggggcccggagagggaaatcctcattgacgattca

SEQ ID NO: 663725 - DNA, 98 bp, Homo sapiens
aacagttagcgcaagacacaggacttacaattctccaagtaaacaactgtggtgctgattactatgattacggacatggactcagtgaggagacttat

SEQ ID NO: 663726 - DNA, 100 bp, Homo sapiens
ggctcaaagaaagatgattataggaaagattatacagcattaacaaaattcttgcctccaaaacacgaatatgtgttagctgtgagaatgacttctattc

SEQ ID NO: 663727 - DNA, 98 bp, Homo sapiens
ctaaaagcaaccctgacttcttgaagaaagacagatcctgtgtcacccggcaactcagaaacatcaggtccaaggacctggcctgggccgtcagctac

SEQ ID NO: 663728 - DNA, 90 bp, Homo sapiens
cctgatctaacccctagaaacagattactgattttgggcactccaagattttgggagagacctctctcatgagaaccttatgtggaaccc

SEQ ID NO: 663729 - DNA, 90 bp, Homo sapiens
gacggtctacaaaggtctggacactgaaaccaccgtggaagtcgcctggtgtgaactgcaggtctcagtcagtctctccacctccagttc

SEQ ID NO: 663730 - DNA, 100 bp, Homo sapiens
caggcgtggaggaagaggcattgaggactttccttacctgtttttccagctcacccactgccagcagaggtggggtggaagacaacccgtgagtattaca

SEQ ID NO: 663731 - DNA, 75 bp, Homo sapiens
ggagcatcccaggaaggggttcccagaagtcagaatccaagatgattaaagagcaccttgctaaggggcagcgaa

SEQ ID NO: 663732 - DNA, 100 bp, Homo sapiens
ccggagaggagtggcctcgcccgcttgtgccctgaaactctaatctcattgcctggccagaaaaggaagtaatccctagtgtcagcagattcagcggtac

SEQ ID NO: 663733 - DNA, 105 bp, Homo sapiens
gcaccatttcagattatccgaatattgcaagaagcaggcgcagacatctccaaaacagtcatgtcacacctggatagcctctacggcagacacatgcaggccaac

SEQ ID NO: 663734 - DNA, 100 bp, Homo sapiens
tttgattctgagcgtcaaacttgttatgcagcatataacaggttatcctttacggttctccacactctttcaggagcagcagaaaatgaacatatctcag

SEQ ID NO: 663735 - DNA, 100 bp, Homo sapiens
agagcagctcatgaccttggcctatgataatggcatcaacctcttcgatacagcagaagtctacgcagccggcaactttgaaaagtccagccgcatttca

SEQ ID NO: 663736 - DNA, 100 bp, Homo sapiens
acggcgagcgcgagcggcgcgagaaagtctacgaccccttccgctttgacccagagaacagcaaggggaggtcacctctggcttttattcctttctccgc

SEQ ID NO: 663737 - DNA, 50 bp, Homo sapiens
aattactgtctcaagtgatacgcagaagaaggaggaggagtcggcgggcg

SEQ ID NO: 663738 - DNA, 100 bp, Homo sapiens
aaaggatggctttggctttgcagacagcacagtcttacaggacctgaaggagaagaaggagaaggtggaggagaaggcaagccggaaagagcgaaagaaa

SEQ ID NO: 663739 - DNA, 50 bp, Homo sapiens
atgggcgggtgcccctacctcacattcccatctggtggctggacccagag

SEQ ID NO: 663740 - DNA, 100 bp, Homo sapiens
catgttcccctcacaacacacaactttgacttttcccatgctaaacagctctttgctgcttgtttggagttggtaacagagttctcaccgaagcttcgtc

SEQ ID NO: 663741 - DNA, 100 bp, Homo sapiens
cacgaattccagagcaagcagcaggcggtacatcaggaacgtctctatcaagaatacaatttcagcaaggctgagggccatctgaaacagatggagaaga

SEQ ID NO: 663742 - DNA, 100 bp, Homo sapiens
tatcagcaaacttaatgaacattttagtcgatttggaaccttggttaacttacagcgtcctcgcccaccaggtccccaacgccaagaagctcaggcggaa

SEQ ID NO: 663743 - DNA, 98 bp, Homo sapiens
ttgtgacagaatatgccaaaaatggagaaatttttggtggaagtccaagaatccgagtggaggctcaccgaggcgaaggggccaaccatgggaaagga

SEQ ID NO: 663744 - DNA, 75 bp, Homo sapiens
gcggcgctggaggagcgaggcagctgtactaggactgggaacgggaatactttcaagtcatcccaaatatggttc

SEQ ID NO: 663745 - DNA, 98 bp, Homo sapiens
gagcattccgatcatctgaggaacagcagatcatggaagggaagtggttgctgtgtatgttactggtgcttggaactgctattgttgaggctcatgat

SEQ ID NO: 663746 - DNA, 98 bp, Homo sapiens
gcagccccaaagcgagcgaagctagggtcgccgccactgccgcaggaggcgtgaggttgcacactgggccacagaggatccagcaaggatgaagaaat

SEQ ID NO: 663747 - DNA, 100 bp, Homo sapiens
atatgaacaatccgtctggatcacggatgtaggaagtggagtacttgattcttcagaaaacctccaaagtagatgtggactcaagtggaaagaaatgcaa

SEQ ID NO: 663748 - DNA, 74 bp, Homo sapiens
gagctcccccaagagccggaaagaattttgagactgaagaagtagaactttccttctccaagaatggagaagac

SEQ ID NO: 663749 - DNA, 100 bp, Homo sapiens
caagggggggcaccctggggcttcacccttaaggggggtctggaacactgtgagccgctcacagtgtctaaggatgataatgaagataattcaaatgatg

SEQ ID NO: 663750 - DNA, 75 bp, Homo sapiens
gcgggtccccggcaaactccttccacttcaaggttatcaatactctggctgaccatcatcatcgtgggactgact

SEQ ID NO: 663751 - DNA, 89 bp, Homo sapiens
atgaacgaggagtacgagacgaggttcctgtgcaactcttcacagacagattacatcaatgccagtttcatggatggctacaagcagaa

SEQ ID NO: 663752 - DNA, 97 bp, Homo sapiens
aggccagagatgccttgagagtgaaagtcgccatgtctgtgaccttactttcaggaatcattcagatcgggaagacaggtgcctacctgcagttcct

SEQ ID NO: 663753 - DNA, 73 bp, Homo sapiens
ctcagccttggcggagaggactcacagatgctgacctgacctttgaccagacggcgtggggggacagtggtgt

SEQ ID NO: 663754 - DNA, 96 bp, Homo sapiens
tggagttcttacaacatggcagacattgacaagaatacaaacagaagcttgcacgagtaacccaggtccgcaaggaactgaaatcccatattcaga

SEQ ID NO: 663755 - DNA, 100 bp, Homo sapiens
cattcatatggtttggaaggtggaaagcaatttcttgaaaagagattacagtcgttccccatcaggaagtcctcgcagaagtgcaagtcctgaaagaatg

SEQ ID NO: 663756 - DNA, 100 bp, Homo sapiens
ctcgcctcactatggcagcagcacggcacagcacgctcgacttcatgctcggcgccaaagcatcaacaacagcaacttgtgattggcggtgaccggatat

SEQ ID NO: 663757 - DNA, 51 bp, Homo sapiens
ttcccgcgctttatcaagattatcgagctatcaagcccagagagagacgtg

SEQ ID NO: 663758 - DNA, 100 bp, Homo sapiens
gcaagtatcaatcccattgctggacatcacatccaacacccgtctccaattagtggagtcatcctttttgaacttccatgactcagactgcgaacccaag

SEQ ID NO: 663759 - DNA, 74 bp, Homo sapiens
gctgctattgaaagagagtatgcacagagagtcccacgaactggctgggtatacagaaatgtccagaggccgga

SEQ ID NO: 663760 - DNA, 75 bp, Homo sapiens
cacagttgaagcctgattgcagcatttctgctgtgcagtggctctgtaatgctaacaagaagtctgaaaaccctg

SEQ ID NO: 663761 - DNA, 100 bp, Homo sapiens
taactacagaaaaaaattccttcaaaagaatggacgatgaggataaacagactgtttgtctgtgggatataaacgcaggaccaaaagaaggcaaaattgt

SEQ ID NO: 663762 - DNA, 100 bp, Homo sapiens
gctcacggatatagtgctctcctggcaaatgttctgaaaaagactctgcatgggaatggcctgccttacgatgacagaaatggagggaacatccacctct

SEQ ID NO: 663763 - DNA, 98 bp, Homo sapiens
ccttggcccaatgtgtaaacacttgctgaggtaaaactctgctggcacaaaccctagctaaatgccttgatgtcccttttgctatctgtgactgtaca

SEQ ID NO: 663764 - DNA, 100 bp, Homo sapiens
atggcggcggcgctggggcccccagaagtgatcgctcagctggagaacgcggctaaagttctgatggtgtgggccatgtttgaggattgccccagcattc

SEQ ID NO: 663765 - DNA, 50 bp, Homo sapiens
gtgatcgtgctgggcaccggcctgacggcagctgacacacaagagttcag

SEQ ID NO: 663766 - DNA, 100 bp, Homo sapiens
cttcatggtgcggctcatcttcgagaggtacccactgatggtaatgctggcctgctggctgaaccccagattgccatgttctgtggcagactgaacatgc

SEQ ID NO: 663767 - DNA, 82 bp, Homo sapiens
gtttccgttaagctggacaacagagcctcagctcaaaggcatcgtcaccaaactgttctgccgccagggtttctacctccag

SEQ ID NO: 663768 - DNA, 121 bp, Homo sapiens
tgtgaaattccaccatggcgtaccgtggccagggtcagaaagtgcagaaggttatggtgcagcccatcctatacacagaatgggattttacatatgctggacagaaataagagaatcaagc

SEQ ID NO: 663769 - DNA, 83 bp, Homo sapiens
gtcggaggagccgcgggcggcgcggcccagctcgttccaggagtgcgccggtctcggggaaatgcccggttccttcgtgccca

SEQ ID NO: 663770 - DNA, 100 bp, Homo sapiens
ctctgacactgggtctctgtcacctccatgggaccaggaccgtaggatgatgtttcctccgccaggcgatggtcgaggtgatgcctgcaaagatgatttt

SEQ ID NO: 663771 - DNA, 100 bp, Homo sapiens
caagggcctccgtctggatttccaaggaagaatttcctctgaagcaccgatcgcaccccctccctccctggcggagcccctgaaggagctgttcaggcag

SEQ ID NO: 663772 - DNA, 83 bp, Homo sapiens
aaaaaactttgctgccaatactctgggagggaaaacccctgatcctaaaatgaatgctaggacttacatggatgtaatgcgag

SEQ ID NO: 663773 - DNA, 83 bp, Homo sapiens
ccacgttcgacaccatgggcctgcgggaggacctgctgcggggcatctacgcttacggccttagattttagtgatgatgaaaa

SEQ ID NO: 663774 - DNA, 89 bp, Homo sapiens
gatgcaagctgcttgttggatgtcttaagaatgtacagatggcagatctcatcatttgaagaacagaaagaaggggatcaacctgaaag

SEQ ID NO: 663775 - DNA, 80 bp, Homo sapiens
atgttcttggtgaagtcggccagcctgagcaagcggaggacctacgccggcctgggtcgcaatggaagaagagatcgccg

SEQ ID NO: 663776 - DNA, 83 bp, Homo sapiens
ccccggaaatcagggagctcttaacccagtttgaaacgtaactggttccctgaccaggcgtcacaatgtagcagggaccccag

SEQ ID NO: 663777 - DNA, 51 bp, Homo sapiens
tttgggggcagcctgcagaggctgcggctcgtggtcccaagaagcatctga

SEQ ID NO: 663778 - DNA, 88 bp, Homo sapiens
gaattcgccgtgcccgagaatagctccgtccagcaggaaattgaacttagctcattaagggaagctttgtctttcgtgtcattaattg

SEQ ID NO: 663779 - DNA, 76 bp, Homo sapiens
aaaaattgtataccgcagattcagaatttgccattttcagtggaaaacaagtggtcgttactagctaagatgtgtt

SEQ ID NO: 663780 - DNA, 75 bp, Homo sapiens
ggaggctggcagcgaagaagatcgaaaattaaacctcagggcccagatattacactgtcaaaactttacaagtta

SEQ ID NO: 663781 - DNA, 75 bp, Homo sapiens
gactccccggctcgaagcctggatgaaatagatctctcggctctgagggctggaaacgtgtcctgcatctctcct

SEQ ID NO: 663782 - DNA, 100 bp, Homo sapiens
gagcggcactgatttgtccctggggcggcagcgcggacccgcccggagatgaggtgtgggccatgtttgaggattgccccagcattcagttctatgagta

SEQ ID NO: 663783 - DNA, 90 bp, Homo sapiens
aaaccggttgtaagcagtgaagccaagctggatccagaacgaagtttatttgaccaaggagtaaaaacagatggaactgtacagcttagt

SEQ ID NO: 663784 - DNA, 146 bp, Homo sapiens
caatttgaacaactgtgtgcttcccttttggccagggttgaaccacctttaaaagcagtaatggaacaagctagacccagccttgatgcccacttgggaggcagaaagcaccggcacctggtagaactacgagctgcgagaaaggc

SEQ ID NO: 663785 - DNA, 75 bp, Homo sapiens
gagacatcacactcgattattttgtgctgataggacagaaaggatttgtgacattatttccaaatgggaacaggc

SEQ ID NO: 663786 - DNA, 74 bp, Homo sapiens
gaccctgggtctgatctggaccattattttgcatttccaggacttgcaaaaacttacgtcacatcaaagtcaga

SEQ ID NO: 663787 - DNA, 75 bp, Homo sapiens
aaatggtctccgagtcaagtagtggactggatgaaagatagctgatcagcttccttgggttttgctgatgacaca

SEQ ID NO: 663788 - DNA, 101 bp, Homo sapiens
ggcacctgacggcgtgaccgacccgagccggtactaaatcaaacttctcgacttgagatacagctgctggagaattcattatccacctacaagctagagaa

SEQ ID NO: 663789 - DNA, 100 bp, Homo sapiens
atccctgatatccctgaccacttcctgtgtctgtgggagcactgtgaggaacaggcctttgagagcagccagaagtacaaagaggggaagtacatcattg

SEQ ID NO: 663790 - DNA, 96 bp, Homo sapiens
ggagcatcccaggaaggggttcccagaagtcagaatccaagatggacacatgacggaagtgtgtatttttgggccactccacggcaggtccctagc

SEQ ID NO: 663791 - DNA, 48 bp, Homo sapiens
gactacaagcatcactggcaaggtcattacacctactctgagaatcgt

SEQ ID NO: 663792 - DNA, 82 bp, Homo sapiens
ttcctcccttcgctcgcaccatggggctttgttatgcacctaaagccatattggaagctccagaagaaagagcaccccccgg

SEQ ID NO: 663793 - DNA, 97 bp, Homo sapiens
gccgcgcggcgctggactggagcagaaccccaggactgcgcccccgggagcgggcgcccagaggtgctggagaatctggtaaaagcaccattgtgaa

SEQ ID NO: 663794 - DNA, 83 bp, Homo sapiens
tgagcaagcccaggcacagccgacgccgcggggcttcttccccgggagctcgcagggctgcgacgccttcctgcggcataaga

SEQ ID NO: 663795 - DNA, 74 bp, Homo sapiens
ccgggtcgtctttcgtgtggccgcgaggctgtccagtgaatacagagccatctggcccaacctgtgagaagaaa

SEQ ID NO: 663796 - DNA, 83 bp, Homo sapiens
cagaaagccgcctcttggtttgcgtcctgcactgaaaggaaatgacggattttattcagaatggacagtttagaagaacctca

SEQ ID NO: 663797 - DNA, 100 bp, Homo sapiens
catgaactacaagaagtatagcattgctcaaataacctgtgacttatgaaaatatgcatcagtttaatactgtcttggaattcatgagatggaagcatag

SEQ ID NO: 663798 - DNA, 100 bp, Homo sapiens
agggagttgaaggctgcagtgagccctgtttttgccaccacactccagcctggataccccacctggtggcccgtcctcacttgggaaccagtcaacatgc

SEQ ID NO: 663799 - DNA, 82 bp, Homo sapiens
ccccccgcgcctctcttcgcctcgcctcgggacccgcggtccccgctcttgctgcaagagtgagccatggagctacgtgtgg

SEQ ID NO: 663800 - DNA, 75 bp, Homo sapiens
atgacctgatgcctgtgtactgtggcaatgaggtgactccaaccgagggtgtccgcaatgttgccagtgtctgtc

SEQ ID NO: 663801 - DNA, 112 bp, Homo sapiens
cctttttgcgagctttccgagtgccaggcgccggccggctgcgaagacgcggtgggccgcccctccggctacagatgcacatgttgaatggagctcttctggcattgctgtt

SEQ ID NO: 663802 - DNA, 97 bp, Homo sapiens
tggagctggccaacgtgcaggagggcacctcaacacctttgcttcgaatagcctgggctcgaatcatattggatgaagctcacaatgttaagaatcc

SEQ ID NO: 663803 - DNA, 82 bp, Homo sapiens
cagctgccgaggcgttcggtcctgctgttgcggccgctgccccagggctgcggggacgcaaacggggattcagcgtccgatc

SEQ ID NO: 663804 - DNA, 100 bp, Homo sapiens
gtcctacagagttatcaggttccagaccctgccttctcttctgaaaggtaaagtgttgagagaggagaaccagtgcattgctcctgtggtttccagccgc

SEQ ID NO: 663805 - DNA, 98 bp, Homo sapiens
tcgaccccccactgatcgcgctggataaagatgcgcctctgcgatttgcaggtgccgtggccagcacagaagtgaagatgaagttacaagaatttgtc

SEQ ID NO: 663806 - DNA, 50 bp, Homo sapiens
tttgcacataagtggaacaagaactggtatgctctggcatcccatttctt

SEQ ID NO: 663807 - DNA, 100 bp, Homo sapiens
gaaggcgatcaaggccaagtatccgccagtcaataggaagtacgagtggtgaggtggctttgaccccgggttgcccggccagcacgaccgaggaggtggc

SEQ ID NO: 663808 - DNA, 100 bp, Homo sapiens
ctgacccctcgggcacataccatgcctggaaggttcatgggacggctccagacattgcaggcaaggacatggcgaatcccacagccctcctgctcagtgc

SEQ ID NO: 663809 - DNA, 80 bp, Homo sapiens
tccttacagccgctcgtcagactccagcagccaagatggtgaagcagatcgagagcaagtgttttaaccaaacagttgtg

SEQ ID NO: 663810 - DNA, 100 bp, Homo sapiens
gcatatttgagtcatttccttcgtacccacagtgcttcatgagagtgatcctggtggagggattgaaatgtctgagttcatccgagaggccacaccccca

SEQ ID NO: 663811 - DNA, 83 bp, Homo sapiens
cagaatttgagtggcctaagaatatgatgccgtctagttttgccatgaagctccttgaggagaatgaccagctgatccgctgt

SEQ ID NO: 663812 - DNA, 98 bp, Homo sapiens
ggaaatcacagcacctgattcccaaggcaagacagggtctaaaattcccaggactccacagctttgcaccagataagcctggaggaatactaatgatg

SEQ ID NO: 663813 - DNA, 74 bp, Homo sapiens
gcagatgttgtcaaggtggcctaccaggaggccaggggtgtcgccatgggctacaccaagtccattgatatttg

SEQ ID NO: 663814 - DNA, 74 bp, Homo sapiens
ctatacggaaaacattacgcctctggatggatgatgttaatgagcaactgaaccacaatctctacgaggtgatg

SEQ ID NO: 663815 - DNA, 100 bp, Homo sapiens
cttcaccaatgtcgtcttgtgccttttcttgttcctactgtaaaggagatgggttagatgttgtgaaaacagctactattgccactgaaaggaatgggaa

SEQ ID NO: 663816 - DNA, 83 bp, Homo sapiens
ttctcagatgttggatatttgcttggaaaaacgtgtgggtacgaccttggtttgtttctgcgtcacatgatcttggcctacag

SEQ ID NO: 663817 - DNA, 97 bp, Homo sapiens
tttgatgcaaatatcgaagaacagaaagaagaaaagaaagatgcagaggaagaggaaagcgaactggttaatccctatatcctgaagaagaacatga

SEQ ID NO: 663818 - DNA, 87 bp, Homo sapiens
caagtccccctgggtggagtccgaatacctggattacctttttgaaggtcccaggtgtgacaccttcagcaggtctcagggaagatg

SEQ ID NO: 663819 - DNA, 90 bp, Homo sapiens
gtgagccccatgtgtgcctggtgctctgatgagattctgctcagcaatcctcagatgtggtggttaaatgattccaatcctgaaaccgac

SEQ ID NO: 663820 - DNA, 90 bp, Homo sapiens
ctgtgaactgtgaacagaagcaagctggccaactcagccaatccgcacatttagctctccaactaccatacaacgtgcttggtttaggtc

SEQ ID NO: 663821 - DNA, 100 bp, Homo sapiens
ctacaacaggcctgcgccggcggcagagaggatatcttgggcgggggatgtgagcgctgagcccttggcaggctgccaggatatcgcagatgaattcaga

SEQ ID NO: 663822 - DNA, 100 bp, Homo sapiens
cagaagtacgctgaacgagatctactttggaaaaacaaaggatatcgtcaatgggctgagggcgctgatggacgagaccatgaaggagttgaaggcctac

SEQ ID NO: 663823 - DNA, 83 bp, Homo sapiens
cgtaaagtggttggttgcagttgtgtagtagttaagaacactcgtgaaactgctcaggccatcaagggtatgcatatacgaaa

SEQ ID NO: 663824 - DNA, 100 bp, Homo sapiens
gctccttgcccgagaacatccagtttgatgtttactacaagtgagaagcgccaccttcaagtgaacgtcaccaacccagtacagtgcagcctgcacggga

SEQ ID NO: 663825 - DNA, 50 bp, Homo sapiens
gtcggcgctcaccatccagttcatccagggcgcaccctacgacgcgcaca

SEQ ID NO: 663826 - DNA, 50 bp, Homo sapiens
cattgattctgaaaaggacatgcgttctgccctaggtccaaatgttacca

SEQ ID NO: 663827 - DNA, 100 bp, Homo sapiens
acatggtgcttggggagcagtttctcatagcaacatggccaacgccctggccagcgccacttgcgagcgctgcaagggcggctttgcgcccgctgagaag

SEQ ID NO: 663828 - DNA, 100 bp, Homo sapiens
cttgaatcagaagatgaagtcaaattggccctgaaaaaagacagagaaactatgggacacagatatgttgaaggttatcaatactctggctgaccatcat

SEQ ID NO: 663829 - DNA, 82 bp, Homo sapiens
cctcgcgagccatccagaacgagatcagctccctcaaaggaggaggacggttccacctgcctccaccacgcagccaaaatcg

SEQ ID NO: 663830 - DNA, 50 bp, Homo sapiens
tgcgaagccgtccctccccggaacatccagtcatggataaaaatgagctg

SEQ ID NO: 663831 - DNA, 75 bp, Homo sapiens
cttacctcctctctctggctcgggagctggaagctccaccatgaggcgaggtggatggaggaagcgagctgaaaa

SEQ ID NO: 663832 - DNA, 100 bp, Homo sapiens
gggcagcgggcccacggactcactgcagggcatcatcctgaccggctggcagaggttttttggaacgaagtggatgatgttcctcgctgtgggcatctac

SEQ ID NO: 663833 - DNA, 100 bp, Homo sapiens
ctctcgcgcgggtgtcgctgggctgtcggcctggaccttgcagccgcaatggggcacaagttgaccagtctgtcttcgaggagctcatcaagggtcatct

SEQ ID NO: 663834 - DNA, 82 bp, Homo sapiens
catttatcctgccaggatcagcctccgggaggtttggtgcacctcgatttggaggaagtagggcagggcccttatctggaaa

SEQ ID NO: 663835 - DNA, 74 bp, Homo sapiens
aagaacgccgccatccagccaccattccaaggtatgagcagcagcgggacaatcttgcccaacagtcattcaac

SEQ ID NO: 663836 - DNA, 82 bp, Homo sapiens
cacttgagccacgtgcatgaaccaaacccacttcgttcaagacaggtgtttaagcattcccagttctcaatcttccttcctc

SEQ ID NO: 663837 - DNA, 75 bp, Homo sapiens
gagaacttgaggaacgcagacagcagatatgaaagctttcaaaatccaaagaggagaaaaaatcaaagtggaaca

SEQ ID NO: 663838 - DNA, 74 bp, Homo sapiens
gtggatgctgcctgggagccatccaaaaacacggtgtcagttgtacccgaggcgttctcagcagcagcaagtac

SEQ ID NO: 663839 - DNA, 100 bp, Homo sapiens
atcgaaagcgttggagaggtgttaccggaacggcggcgacaagggtgttcccgaactagagtgggcgtacaaatccatttggagaatctggaggaagtac

SEQ ID NO: 663840 - DNA, 75 bp, Homo sapiens
agacttcgacgttcagacctgggttcccgtccagttccattccttgcacaggagatgccatcttttctgaaaacg

SEQ ID NO: 663841 - DNA, 83 bp, Homo sapiens
tatggcgcactggagtaccctgttcctggcaaggctgggaggcggcagaatgcagccagaggagggcacaggctggctgctgg

SEQ ID NO: 663842 - DNA, 100 bp, Homo sapiens
cttgaattacaagctgcttctccccccacccccacattggaacaggctcattaagcccagtgtgccatcataatgtttgatgtaacatcgagagttactt

SEQ ID NO: 663843 - DNA, 50 bp, Homo sapiens
gagcgtcaacagcagcaccatggagatcctgcatattttgatgaaaattg

SEQ ID NO: 663844 - DNA, 75 bp, Homo sapiens
gtcctttatatagaagggagagcgatcattatttcgaagttctagtattctggatcaccgtgaaggaagtggacc

SEQ ID NO: 663845 - DNA, 100 bp, Homo sapiens
gtgaaagtcctctttttctttgtaccacttactgaggccgccatggcatcagatgaaggcaaactttttgttggagggctgagttttgacaccaatgagc

SEQ ID NO: 663846 - DNA, 75 bp, Homo sapiens
cttggcgaagcgctgcgctcgcgcccggatccctcagcaatggctgccatccggaagaaactggtgattgttggt

SEQ ID NO: 663847 - DNA, 82 bp, Homo sapiens
tcgtgaaggagtatgctgcgtttgtgctgggcgctgccttttccaggagaacccatacgtcatgcgccggcccaacttccag

SEQ ID NO: 663848 - DNA, 100 bp, Homo sapiens
accactttgcagtcgacatactcggataccagcgctcagcccacctgtgattatgcgagtaaccagctcataaatcacatcgaacagtttttggatacta

SEQ ID NO: 663849 - DNA, 139 bp, Homo sapiens
caagaacctggcttttagctgaactaaggagaaagtcctacaacagtttggcgtgcaacatggggcttgagaaagggtctgagaaagaaccccagtttaagtttatctacttcaaccacatgaatctcgccgagaagag

SEQ ID NO: 663850 - DNA, 95 bp, Homo sapiens
ggggaagtttgtctggattttcctgtagaactgagggcaggctaaactgtgaaaatgcagtcctcaaagagaatttgaaagtgaaaacagaagaa

SEQ ID NO: 663851 - DNA, 75 bp, Homo sapiens
caaacgggcgctgacctcaaccagcaggaaccagcacctatgacagaagatctgctagaagagcagtctgaagtt

SEQ ID NO: 663852 - DNA, 97 bp, Homo sapiens
ctcaccagcgtcctgaagcttttgatcaccattggctgggaaggaaaaacagaatcagctgttccctgcgaaagtcactcagcctctgaagaagctt

SEQ ID NO: 663853 - DNA, 80 bp, Homo sapiens
actaagctggaaaacatggggtttcgagtgggacaaggattgatagaaagaggacaagaattttgggcagatttgaatgc

SEQ ID NO: 663854 - DNA, 95 bp, Homo sapiens
cgcgctgggtcggaagtgagcaggacctgggtgcagccgcaggctccaagcgccccacctgtgtgataatggtcaagccccatgaggagtaccag

SEQ ID NO: 663855 - DNA, 82 bp, Homo sapiens
cttggagaggccgagggtttgatgaaggtggaggcagcgcggctctcagctacccgtacagtgaggacgcccgccagggtga

SEQ ID NO: 663856 - DNA, 100 bp, Homo sapiens
agtgttgatggtggtggtgctggtcatcaatgttactcaggtagagctggagaatgctggaggagaccttaaggatggccaccaccactatgaaggagct

SEQ ID NO: 663857 - DNA, 99 bp, Homo sapiens
gtccagggacagttgagagttcttgggcaagaggggaatctgctgctgcatcggtcttgggcgtctttggtactggcttttttaggggtctgcctgggg

SEQ ID NO: 663858 - DNA, 100 bp, Homo sapiens
ctggcacttttcctgcaactcggcggcgccacgcggcccgccggccacgcgccctgggacaaccacgtctccggccacgtattccatgtctgtcctcgtt

SEQ ID NO: 663859 - DNA, 74 bp, Homo sapiens
cagcatcggggcagacaccgccctgaacactatcaccgacgtgtgatccctcacatccacaaatctctgattgg

SEQ ID NO: 663860 - DNA, 100 bp, Homo sapiens
tggtacaaattggataagcgtggttcccacaaagagtataagcgagggaagtcgtgcacgaacaccaaggtggtgctggctagagtgtatacgtttggac

SEQ ID NO: 663861 - DNA, 90 bp, Homo sapiens
ggcgggaccgcggggaccatggcggagccgcctcggatacatcgagatatttccaagcagaaggaatgaagttcgaacacatgtcggttc

SEQ ID NO: 663862 - DNA, 74 bp, Homo sapiens
ctggactgtgggctggtgtgtggaactgatactgaaacaagaatggcccaaacattggccaacttttatcagtg

SEQ ID NO: 663863 - DNA, 89 bp, Homo sapiens
caggcccagtggctgcgtggtgtctcccctcagtcctgctctgaagatcctgccctgccctgggccaaggcagaggcttcctcaggaga

SEQ ID NO: 663864 - DNA, 95 bp, Homo sapiens
gcagggggacggggaccagcagctgtcgccgccgctctcagctgggatctagcaattgggaggcagcagacttgggtaatgaagagagaaaacaa

SEQ ID NO: 663865 - DNA, 88 bp, Homo sapiens
gcggagagcggcagacggcagcctaggcctcgtgggctgtgcggctatcctggagacagatgacagctctcccttggatggctttgct

SEQ ID NO: 663866 - DNA, 50 bp, Homo sapiens
ttcagtcaagaccctccagcttgcctaatcatgtcaaccctgccatggac

SEQ ID NO: 663867 - DNA, 75 bp, Homo sapiens
gtagcatcacatccagaaaccagggaacactgactatgccaaatggagactacattgaaggttattttagtggag

SEQ ID NO: 663868 - DNA, 75 bp, Homo sapiens
ttcgagaccaagagcgcgcgggtcaaaggccatgtcaaaggacgccctgaatctggcgcagatgcaggagcagac

SEQ ID NO: 663869 - DNA, 80 bp, Homo sapiens
gtgggacggtcatgaggagctgaaggccatcgtatgggaggcagacaggcggatcctgcaggccctcctcgagaaggagg

SEQ ID NO: 663870 - DNA, 100 bp, Homo sapiens
caaaatgaagacctgtgttgatacctataccaaccgtttaaggcctatgaaaggaggttccctacatgtcctttgattccgatgttcgtgggcagtgaca

SEQ ID NO: 663871 - DNA, 83 bp, Homo sapiens
ctttcccctgccgctcctgccggcagctccaaccatgggaggccgcgtctttctcgccttttccccacgactctgaaagagga

SEQ ID NO: 663872 - DNA, 82 bp, Homo sapiens
cgccaccacgtcacgcacacgctcggcgctgcgatccgcgcatataacggccccagggagcgccatggcccgcgcacgccag

SEQ ID NO: 663873 - DNA, 75 bp, Homo sapiens
cggggatgtatttggaacattatctggacaatatggaggtaccacatggttctcagagcagcgaaagttttcagt

SEQ ID NO: 663874 - DNA, 73 bp, Homo sapiens
gcggggccatgtgcaggaccctaacgacaggcgcctccggcccatttacgatctgaagacagcatgtacacag

SEQ ID NO: 663875 - DNA, 100 bp, Homo sapiens
ctttggctggacccactaatgccatcttcaaagcctttgctatgatcattgacaaactggaagaggacactcatgaggaccatgatacttccactgagaa

SEQ ID NO: 663876 - DNA, 98 bp, Homo sapiens
ggatcagcggacctccacctacaacggggacatcagggagaccaggacagaccaagagaataaggaccctgatgcggaagggagagctgtttgactat

SEQ ID NO: 663877 - DNA, 103 bp, Homo sapiens
gtctgaagttcacgactactagaaggggaggggagtggaaaggctctcagtgaaaaagtcaccattactttaagtactgcaaaatctcagcattggctctgct

SEQ ID NO: 663878 - DNA, 90 bp, Homo sapiens
cacctgtcagccttctaccccatgagaaagaccaggtttgatgaacttgtgaaaaaattcaaagtcgaatatcatgctggtggctctacc

SEQ ID NO: 663879 - DNA, 87 bp, Homo sapiens
ggctcaagtactcccagagtgacctagaacagaccaagacacgacatctagccctgaatctgcagatggttcagaattttcaagatg

SEQ ID NO: 663880 - DNA, 82 bp, Homo sapiens
cacctcatcccctggatgggggaccacaagatcctcatcgacaggaactgtggctgcaccatctgtcttcatcttcccgcca

SEQ ID NO: 663881 - DNA, 82 bp, Homo sapiens
gttcttccaattctgaattcagatgaacccaagacagctcatattgatttttctggatatgccgcagaaggatccgtgccag

SEQ ID NO: 663882 - DNA, 100 bp, Homo sapiens
gattagagtatgttctgcacttcactgcactgaatgggaagatttactttcgaagctataagtgccttgaatggcttctaaacaatttgatgactcacca

SEQ ID NO: 663883 - DNA, 98 bp, Homo sapiens
tttttccttggaacagcagcctgcctttaccagggtgctggagatctagaagacccatggtagccttaaaaaccttctaaaatgcttttgattctgaa

SEQ ID NO: 663884 - DNA, 89 bp, Homo sapiens
tttggttgtcatgaaggatcttagtcagaattttcctaccaaagccaggtttaccgacaagactgtgaaactttcgggatggtggtgaa

SEQ ID NO: 663885 - DNA, 50 bp, Homo sapiens
ctttggatctgatgatgaggaggtcttgtggatgagcagcagaaagttcg

SEQ ID NO: 663886 - DNA, 100 bp, Homo sapiens
tacgaagtctgtgacattcctcagtgttcagaagctggagtcacatcagaagccgcgcagactatcaccacggctcctgatgcctcagggcctgaagcaa

SEQ ID NO: 663887 - DNA, 75 bp, Homo sapiens
ccttgtctcagctgctgaagctgacatttctcttgggaagttgtgcatctgacaggaatatagtactgtacgata

SEQ ID NO: 663888 - DNA, 90 bp, Homo sapiens
gtattcttaaattgatttcaagtttgaacaagccaatcgactttgaaacaaataggatgtttgtccttactgttgctgcagaaaatcaag

SEQ ID NO: 663889 - DNA, 106 bp, Homo sapiens
gaagtagcaaaggcaagaaggcaacgacgttccatctgtggaaggacctaccaaccagggggatatgagactttctactcggaatatcctgagtgttgcgtggatg

SEQ ID NO: 663890 - DNA, 75 bp, Homo sapiens
gcacagtcaaggaagaagtgggctgaagaatttaatgatgaaactaatgtgaggattcctccttggtcacttttc

SEQ ID NO: 663891 - DNA, 83 bp, Homo sapiens
ctcactatctcctccctcttctcccgactatttggcaagaagcagatgcgcattttgatgggctgtctgtccccagaccccag

SEQ ID NO: 663892 - DNA, 83 bp, Homo sapiens
cagaacttgaggactccttctccaaacaggaactgtggctgcaccatctgtcttcatcttcccgccatctgatgagcagttga

SEQ ID NO: 663893 - DNA, 134 bp, Homo sapiens
agcagattggtgctaatgcccacggtgctgggagcagaagccttgccctggcccccgcaggcacatccccaggaagcccagaaatgtctaccactctcaaaatcatgagctccaaggaacccagcatcagccca

SEQ ID NO: 663894 - DNA, 91 bp, Homo sapiens
cagactgaagatgcagagcccatttcagaacctgagaaagtagagactggacttatcaaactggtttcaaagcacagagctcaagtaattt

SEQ ID NO: 663895 - DNA, 100 bp, Homo sapiens
gatcaagatggaagtggcacagtagaacatcatgagttgcgtcaagccattggtcttatgggatttaggttgagtccccaggctgtgaattcaattgcaa

SEQ ID NO: 663896 - DNA, 75 bp, Homo sapiens
ctcttctaagctgaataaagctgttttggaactgtcaggtacctcaaagcattgttcactgttggcatatagaaa

SEQ ID NO: 663897 - DNA, 98 bp, Homo sapiens
caaccagtcccagcgctgtcgtgctcctctactcggacagctcctctggcaatgtatctgaaggggaaagccctcctgacagccaggaggactctttc

SEQ ID NO: 663898 - DNA, 97 bp, Homo sapiens
gaaaagctgccaagttgaaaatggacgagtaatcgcctgctttgattcattgaaagaagggaaaaggccgaggcatcagcgtgtgaagaccgcaaag

SEQ ID NO: 663899 - DNA, 117 bp, Homo sapiens
ggaggacaaccagatggtggagatcagtgcctggttccaggaggccataggcttcattgcggagctggagtttgttcagatcatcatcatcgtggtggtgatgatggtgatggtggt

SEQ ID NO: 663900 - DNA, 99 bp, Homo sapiens
ggaaatgtcaaaggttataacgacatttttaccagcatccataccccagtttaccaattcccccacaatggtgatcatggtgggtttaccagctcgagg

SEQ ID NO: 663901 - DNA, 100 bp, Homo sapiens
attgaaactccttaaaagatgcaatatcctacatgcagatatcaagccagacaatatcctgggctcaatcaagacatcacagatgtgtgtttttcccctg

SEQ ID NO: 663902 - DNA, 83 bp, Homo sapiens
cactgactttcagctatggaatcgtatagatgctgttgtttccattttcagaagactgtgcagtctttgtaactgatgaagag

SEQ ID NO: 663903 - DNA, 100 bp, Homo sapiens
cccagatattacactgtcaaaactttacaagttaattgaagagtcttgtccacagctggcaaattcagtgcagatcaggaggacgaatccatgaaccaac

SEQ ID NO: 663904 - DNA, 100 bp, Homo sapiens
tttagtctaaatgatgggcagtcatggtcccagaaacgtcactatcaagaagaagctttgcatcgtccctatggttgtgatgttgaaccccaggcactaa

SEQ ID NO: 663905 - DNA, 75 bp, Homo sapiens
catactctccggtgacacgcccatagcaccaaccccggaacagcctcttctgtaggagtactgtcaccccagaag

SEQ ID NO: 663906 - DNA, 87 bp, Homo sapiens
gcgttggaggccaccgtttccaggctccctgactggcagtcctcacctttccgagctgtctgtgaactcgcaggggggagtggcccc

SEQ ID NO: 663907 - DNA, 83 bp, Homo sapiens
tactgcaaagacaaggctaaggacttcatgcccgccagcaaaggcttcctgtgtccagtaccggttagtggtccgggatgtga

SEQ ID NO: 663908 - DNA, 98 bp, Homo sapiens
ccgcatgctggaagccaggaagctcagcgaagcgcagctcaggcagttcacactcgccttgggcaccacccaggatgagaatggaaaaaagcaactcc

SEQ ID NO: 663909 - DNA, 100 bp, Homo sapiens
aacatttagttcagaatccagtcagactctggcaacttttagagtatctgactgtcttctctcagatgattgcatttcatgatccagagctgagtaatca

SEQ ID NO: 663910 - DNA, 90 bp, Homo sapiens
tgccaagattaatgccatgctcatggcaaaagggaagctgaaaccaactcagaatgcttctgagaagatgtgggacctaggaaaaggcct

SEQ ID NO: 663911 - DNA, 75 bp, Homo sapiens
agattcgcagtggtcgcttcttctccttgctctttacacgctgtcttacaccgcttgtaccagaagaccttagaa

SEQ ID NO: 663912 - DNA, 75 bp, Homo sapiens
gagcacctcctcgaagtcatcccagtttcaactttgtggggaaacttttgggtccacgtggcaattctctgaagc

SEQ ID NO: 663913 - DNA, 76 bp, Homo sapiens
tttccttacctgtttttccagctcacccactgccagcagagccacctcctaagctgcccaacggtgtgttcacccc

SEQ ID NO: 663914 - DNA, 88 bp, Homo sapiens
tggagcaccttattcccaaaggttcatcaatggtgctaaggaaatttgctatgctcttcgagctgagggttattgggctgactttatt

SEQ ID NO: 663915 - DNA, 90 bp, Homo sapiens
cacacttatagatcttctgcactgtttacaggcacaggtatctcacatgatgctattgctcaagagtctaaacgatattggcagaatttg

SEQ ID NO: 663916 - DNA, 100 bp, Homo sapiens
agatgagtgaaatgcttcagctctgctcctatgtccgcttcaaggtgccccagcaggcatttatgtttgaatcatctttaagtctggcggtcacaaagtg

SEQ ID NO: 663917 - DNA, 83 bp, Homo sapiens
cgggcactgctttccactcggctcctgtcgtccgttctctcaggctcccgttcaggtgtggacactgccagcggctgcagccg

SEQ ID NO: 663918 - DNA, 82 bp, Homo sapiens
gaactgaccataagtcctgcatatttattatgggatctgagcgccatcagccaggtggatatggttatagaagaagtggccg

SEQ ID NO: 663919 - DNA, 97 bp, Homo sapiens
aaaggaacgcaagaacagaatgaagaaagtcagggggactgcaaaggccaatgttggtgctggcaaaaaggattaacctccatttcagctaatcatg

SEQ ID NO: 663920 - DNA, 101 bp, Homo sapiens
agcccgtatcggggcctttatttctcgtcggcggcgccctgcaccgcgcctcgcaaagaattgaatgatctggcacgggaccctccagcacagtgttcagc

SEQ ID NO: 663921 - DNA, 75 bp, Homo sapiens
tgaacgagctaagccttatcatctgtcaacatcatcagtttttcgattaggttgtttcacgaagaaatccagagg

SEQ ID NO: 663922 - DNA, 117 bp, Homo sapiens
ttggaacttcgttgcttgcttgcctgtgcgcgcgtgcgcggacatggcctcaaacggttttaaaatcaaagatgggaaaatcggagaaaattgcccttccccatggccagcttgttc

SEQ ID NO: 663923 - DNA, 90 bp, Homo sapiens
ttgaatggagaggagagggagagtcccgggacggtttaatacagcagtgtggtgagacaatgaaggaaacagttaatgtgaaaactgtat

SEQ ID NO: 663924 - DNA, 75 bp, Homo sapiens
cccatctcaatcagaattactagattttctctcaaactacgaggtatctcaggagattacatttcagcttgaaaa

SEQ ID NO: 663925 - DNA, 75 bp, Homo sapiens
tccacagaaggagcaaatacttcttcatcatcattagttattcctgctggtagaactcttccaagttttaccaca

SEQ ID NO: 663926 - DNA, 50 bp, Homo sapiens
agtcaactatcgacttggagtactcgaatggaggctccagagtgaaatta

SEQ ID NO: 663927 - DNA, 75 bp, Homo sapiens
ctcctcagtagctgagactacaggcttagcgcagatatgaatgctgatgtggtatgtcacactctggagttttgt

SEQ ID NO: 663928 - DNA, 100 bp, Homo sapiens
ccccagtgaagctgccagtgaagaaagtaacagtgagatagagcagcttctcaataggtttggcatggacaagatctatgaaggccaagtggaggtgact

SEQ ID NO: 663929 - DNA, 98 bp, Homo sapiens
tctgcggctccaggagggcgcaggagcgggactgagagcgcctggaggctcgagcggagggtgtcatggagaaactccagctgggcccagagattctg

SEQ ID NO: 663930 - DNA, 98 bp, Homo sapiens
ctgagtgtctgtccccagagcctcagtttgtgcaggacaccgacatggaacagggactcactgggggtctctaattaacagaagatggcaaagcccag

SEQ ID NO: 663931 - DNA, 50 bp, Homo sapiens
atatctttagattttggcagcaacgggtgatcagcccatgacctaaacct

SEQ ID NO: 663932 - DNA, 50 bp, Homo sapiens
ctttctggaaatggaccaatgccaggcgcagataaagtgagcccggaaag

SEQ ID NO: 663933 - DNA, 82 bp, Homo sapiens
ctccccagccatgtggaactgtccttttggaataaatcatgggattgagcttcattcagatgtggtggaatatgccaaggaa

SEQ ID NO: 663934 - DNA, 90 bp, Homo sapiens
caggtacaggtccacgccacccacacacagccctgtgcacacagaccggacacaggcgtccacagttcgtgccctcgtgaggctggcatg

SEQ ID NO: 663935 - DNA, 124 bp, Homo sapiens
caagatgaacttaatgaaatcaatcagttcttgggacccgtggaaaaattcttcactgaagagggtgtggtgaaactggtcatgtagccatcaactgcagcaagacaagtgaagtcaactgtta

SEQ ID NO: 663936 - DNA, 50 bp, Homo sapiens
aagaaaggggcccggaaatccaagttgacatgaagacaatggagactgca

SEQ ID NO: 663937 - DNA, 75 bp, Homo sapiens
cggcctgaagagctggtgtcctgcgcagactgtggacgctctgcacccaccaaggctccggatgtgttccccatc

SEQ ID NO: 663938 - DNA, 82 bp, Homo sapiens
tcatccgttcttccgaagatcctaatgaggacattgtggagagaaacatccgaattatagacgaggtttcatcatgttggcc

SEQ ID NO: 663939 - DNA, 100 bp, Homo sapiens
agttcctgctgatataaggttaacttccatcaaatctaccacactaagagttgaccagtcaattctcacagcctctgcaatcccagataatggaagaagg

SEQ ID NO: 663940 - DNA, 83 bp, Homo sapiens
catttctgtggaagggtggagtttcactttgaagccatcactggtgcaagctatatttaacggagatcctgatgaagttcgag

SEQ ID NO: 663941 - DNA, 101 bp, Homo sapiens
ggcccacatacagcaacttagcgaagctgccggtgaagatgaataactgaagtgaagtgatggactccgatttggagagtagtaagacgtgaaaggaatac

SEQ ID NO: 663942 - DNA, 88 bp, Homo sapiens
cggcggaggacgcgcccggcgcccctgagccggccgagcggcgacggaccgcgagaggacgtcggtgatgaaggagaagaagaaaaag

SEQ ID NO: 663943 - DNA, 101 bp, Homo sapiens
gcccggccccgctgagcgatcccaccgaagcagcgtgtcctccgtgggagcccgaggttacctgggcttgtatgtgttctatgtggtcactgtgattctct

SEQ ID NO: 663944 - DNA, 83 bp, Homo sapiens
ctcaattacacttcgactctcaaagcaataccaggatagctgttgtttcagagaaagatcactgtgtccactactatgatctt

SEQ ID NO: 663945 - DNA, 76 bp, Homo sapiens
ctgcacacctggatccaggataacggaggctgggtacgcatagctgctaaattcatcactcatgcacccccagggg

SEQ ID NO: 663946 - DNA, 100 bp, Homo sapiens
ggcgcgaaatcggctcattgcagcctcgacgtccaggactcgagcgatcctcccgcctcagcctctcgagaaggtgccgtgagcgatgtggagatgcagg

SEQ ID NO: 663947 - DNA, 75 bp, Homo sapiens
aagcatctaatatcataacagaatgatttaatccagagactgacttcactatagaacccacagttgtatcaatgg

SEQ ID NO: 663948 - DNA, 73 bp, Homo sapiens
ctcttggagcagctggggatcatggaagcctcagttttggagaggaagagccaggctttagcctcccatctca

SEQ ID NO: 663949 - DNA, 75 bp, Homo sapiens
ggcttagtgctgccaaatcttctccaatgatggaaacaatcaacatgaaagaatcttcaagagggagacataggg

SEQ ID NO: 663950 - DNA, 100 bp, Homo sapiens
acaaagagcttgctccctacgatgagaactggttctacacgcgagctgcttctcagatgaccaagatggtgctgcagatggtgctgaggatggagaaccc

SEQ ID NO: 663951 - DNA, 100 bp, Homo sapiens
ccaggacttgtaaacaaatcttgttatgaagatgattgtggacaagaacaaccgctataagtccatagatggctcagacgagaccaaagccaactggatg

SEQ ID NO: 663952 - DNA, 100 bp, Homo sapiens
gctggtgaggtccccaaatattgaccaactggcatcccacagcctcctcttccagaatgcctttgcgcagatgaattcacctttgaagaatacaatgccc

SEQ ID NO: 663953 - DNA, 100 bp, Homo sapiens
agaggaggaaaaccttgagaccctgagactttcagaaacttattcacagttaccaaagctggtaccagatccccaggggctgcagggctcaccagcagag

SEQ ID NO: 663954 - DNA, 139 bp, Homo sapiens
gtccgctgttcgcctctcctcccgggagtcttctgcctactcccagaagaggagggaagcacagggccaattcctgtccccccagcagcatggcatcgtgtgctgaaccctctgagccctctgccccactgcccgccgg

SEQ ID NO: 663955 - DNA, 98 bp, Homo sapiens
tcacctctcctatcgtctccacccacctggacactcgtaatgtggcctttgagaggcgcattggagtgactgtctggcatcaccaagatgacactcca

SEQ ID NO: 663956 - DNA, 50 bp, Homo sapiens
gcctcctgagtagctggggctacaggttggggtgactcagtgggaacgcc

SEQ ID NO: 663957 - DNA, 83 bp, Homo sapiens
ctgagatgggcaccgcggatctggggccgtcctcaggtattcctgcaacacatggtaaacccaccagttattcaataagggta

SEQ ID NO: 663958 - DNA, 101 bp, Homo sapiens
cgaccgcaccatcggcaagggcaacttcgcggtggtcaagcgggccacgcacctcgtcaccaaggccaagtggatccaaacttctacagcaaaaacttact

SEQ ID NO: 663959 - DNA, 87 bp, Homo sapiens
ctgcccacagcctagcagtcgggaccgtactgaggtatttataacagcaatgatgtagcagtatcgtttccaaatgtagtatctggc

SEQ ID NO: 663960 - DNA, 99 bp, Homo sapiens
taggttctgggaagatggcgaaggtctcagagctttacgatgtcacttgggaaggtgactattatatggttaaaaagattttggaggaaaacagttcag

SEQ ID NO: 663961 - DNA, 111 bp, Homo sapiens
tgctccgcatcacttgaaatgcctatgtggcatccatacaagatccgagagactgaggtcatcgacccccaggacctcctagaaggccgatacttctccggagccctacca

SEQ ID NO: 663962 - DNA, 100 bp, Homo sapiens
catcctcacctgtacgcttggctatgtgacgctgctggaggaaacacctcaggacacggcctacaacaccaagagctttgaactctcagcaagttcccac

SEQ ID NO: 663963 - DNA, 75 bp, Homo sapiens
ccccgaacgggttgcttcccccgctgcgaggggaggtcatcaaggcttgggacattgccatagccaccatgaagg

SEQ ID NO: 663964 - DNA, 100 bp, Homo sapiens
tgttgcccgccaccatgagctacacagaattatatccagatcgagagacagaagattctgaaagggttcaatgaaatgagagtcatcttggacaatgagg

SEQ ID NO: 663965 - DNA, 100 bp, Homo sapiens
gagtgctacttctactccaagttcggttcgaacctctgacatgggtggctatgctacttgccatgacttcactgaggctgtcattgctgccttgccccac

SEQ ID NO: 663966 - DNA, 101 bp, Homo sapiens
cttatacgaggtgaagttgagcagttggattcaagagcacttcccctttgccttcatcaggactgaccactgagcagatgctgagaaaagaccagaagact

SEQ ID NO: 663967 - DNA, 75 bp, Homo sapiens
gaagcagctagcaaggtgacccatgcattggttaatatcagatacgtaggtaacctttccagagatgtgacagaa

SEQ ID NO: 663968 - DNA, 95 bp, Homo sapiens
gaaaaggaggataagcaagtcgaatttttgtcttacggtcccctcttgctgttggctgcacatcaggaaggctgtgatgggaatgaaggtgaaaa

SEQ ID NO: 663969 - DNA, 98 bp, Homo sapiens
gtttcttctgatggcaaatcatgatgattatactaatcagaccatgccagatgatgtccaaggcactgttgcaaccatttatacaagcagtgaacagc

SEQ ID NO: 663970 - DNA, 75 bp, Homo sapiens
acttcttgcaaaccacatacacagcacaaagaatgtcagacagcttcacagttgactgcaggcattcagctttct

SEQ ID NO: 663971 - DNA, 74 bp, Homo sapiens
agccggcggcggagcggccggtccacggaggagagctattctcaagctggaataactgagactgaatggacaag

SEQ ID NO: 663972 - DNA, 100 bp, Homo sapiens
catggcttcatcacccccgagaacgggtccgaggacatcttcgtacatgtgtctgatgagcagtagccaacatgtcagggtgggagtcatattacaaaac

SEQ ID NO: 663973 - DNA, 100 bp, Homo sapiens
cggcgggcggcaaaggagcagccatgagggccgggcccagtcaccgaccgaaaagctcctcccaacctccctcctggggtcccgccgttgttgcctaatc

SEQ ID NO: 663974 - DNA, 74 bp, Homo sapiens
agtgccgaggagcggctacgccagtcccgcgtactgagccagaagctcaccagcgactggaaccagcaactctg

SEQ ID NO: 663975 - DNA, 76 bp, Homo sapiens
cttgcagatatgagagatagcacagatggaccaaaggttatgcacagagctccgtatccctatctgatagatcttt

SEQ ID NO: 663976 - DNA, 75 bp, Homo sapiens
gaacgaggcaaggagctaaagcagcgtgcgttcagccctggggtctggggtcctgaggctgctggcagactatgg

SEQ ID NO: 663977 - DNA, 83 bp, Homo sapiens
ttcaccacagtacttcacatcgtcgttcacatggggtcatgcatttagaagattttaatgaaggtgcttcattttcaaatttg

SEQ ID NO: 663978 - DNA, 82 bp, Homo sapiens
gttcttgtttgtggatcgctgtgatcgtcacttggagcttactccacgggaacagcctctagataatctgagttgttgaaaa

SEQ ID NO: 663979 - DNA, 100 bp, Homo sapiens
ggagagattggactgggagactcagcagctttgatgaccatgacccagctgtgatccatgagaacgcatctcagcccgaggtgctggtccccatccggct

SEQ ID NO: 663980 - DNA, 88 bp, Homo sapiens
gatatggaagaggagggcaagaagggcaagaagctacctgaaaacttttgttcctatgcataaagatgtctttggtggacttgggaaa

SEQ ID NO: 663981 - DNA, 96 bp, Homo sapiens
cgctgctcgcacgggagccagctgggtgagtaaacatcagtctccaaagataactacatcccttcttcccatcaacaatggctccaaagaaaatgg

SEQ ID NO: 663982 - DNA, 100 bp, Homo sapiens
cgcggctgcgcttccgacggggcggccgggggctcagagatccaagtgcgcgccctggcgggtccggaccaaggagaactgcgacacatcaccaagctga

SEQ ID NO: 663983 - DNA, 74 bp, Homo sapiens
gccgggagctagaactcaaggtgcccctggtggtccggcttgaagcccagggccttgctgccgccatgactgag

SEQ ID NO: 663984 - DNA, 98 bp, Homo sapiens
gtgaagagtcctggatggcagatggggggaccccggtacggacctgtgcaggtgaggacaggccaggctaatggaggttggcaggatgctactacccc

SEQ ID NO: 663985 - DNA, 50 bp, Homo sapiens
ctggtggacaaggagcatgacaggcgtgacgcctgcttcacatctctaat

SEQ ID NO: 663986 - DNA, 74 bp, Homo sapiens
gctgcagtggaactattggaaaggccttcactgcacagcaacatttaggaccagtacatcgtgaaaaagccgag

SEQ ID NO: 663987 - DNA, 98 bp, Homo sapiens
atggagctggaaaacatcgtggccaacacggtcttgctgaaagccagggaaggatatggacaagcagcgagtgtggagggtgcctaccgactctgaag

SEQ ID NO: 663988 - DNA, 83 bp, Homo sapiens
gcgacccaccatggagacccgctacaacctgaagagtccgggtaacatctgccggcacctgctgccccgggtccagtgccccg

SEQ ID NO: 663989 - DNA, 98 bp, Homo sapiens
cgagcggtgacctggaccacggcgcagacgcgggcgagctgcggctcggacgccagcggacacgcgggcgaggtgccgtgagcgatgtggagatgcag

SEQ ID NO: 663990 - DNA, 98 bp, Homo sapiens
ttggctgcgggcggcttgggcagcccgcgggcgcctcaggtgctggagaatctggtaaaagcaccattgtgaagcagatgaggatcctgcatgttaat

SEQ ID NO: 663991 - DNA, 100 bp, Homo sapiens
atcctcttccaaaaccacaaacttgcctacgtcagtaacagccaccaaggattccaaaagaggatttggaattgcagtgtccggaggcagagacaacccc

SEQ ID NO: 663992 - DNA, 75 bp, Homo sapiens
tgtgcggggccgtggcggccgcggcgatgactcggacccaggaatcagagatcattgatttcttcctgggggcct

SEQ ID NO: 663993 - DNA, 100 bp, Homo sapiens
cccaggtggggaaggatggtgtcctccgggacggagatggagccgtggtccttcccaatgaggctctgattgtactttctccacaagcttcagcatggca

SEQ ID NO: 663994 - DNA, 98 bp, Homo sapiens
ttcccatgactgcagcttccagaagagcagagctttggtatcctactcacagcgccaaaactgcaggggccaagtcaccaccaagtaagcgaagaaaa

SEQ ID NO: 663995 - DNA, 90 bp, Homo sapiens
aggcagagcccggagaaaagccacatggttcaaaccttgtactactcagctgatcacaagctgcttgatgggaacctactagatggacag

SEQ ID NO: 663996 - DNA, 100 bp, Homo sapiens
gcggccggcaagagcggcggtagcgcaggggagattacttttctggaagtcataccctaatgatcccagcaagataatgtcctgtcttctaagatgtgca

SEQ ID NO: 663997 - DNA, 83 bp, Homo sapiens
tagagagccgtctcccctctctggagccgagagaggccggtttcccccaccgtacgtacctgtgggcatcatgttccttgttg

SEQ ID NO: 663998 - DNA, 75 bp, Homo sapiens
catgtctggcatgcctatgggtcctgatcagttccaaagaggtgtttgaaagctcgagaacattttggtacagta

SEQ ID NO: 663999 - DNA, 88 bp, Homo sapiens
aggccatcctgcacctcgtagtggcagaggaattaaggaatttgcaagagcaaatgaaggccttacaagagcagctaaaagtaacaac

SEQ ID NO: 664000 - DNA, 80 bp, Homo sapiens
gttcacacaaactggtcagcgtttccctggagaggaagaggcaaggtgcaagttcttcagtctgactgagacaccagagg

SEQ ID NO: 664001 - DNA, 100 bp, Homo sapiens
cacagttacttgccaagacgattgaaaaatttgcctgtaatggtactgtgattgaacatcctgaatacggagaggttattcagcttcaaggtgaccaaag

SEQ ID NO: 664002 - DNA, 75 bp, Homo sapiens
tttacttactgcggccgcccggctcttgggaaccaagacaaagtctcccgttgagagtactaccgaaccaccagc

SEQ ID NO: 664003 - DNA, 75 bp, Homo sapiens
gtcgggggacacgcaggatgagccccgcgaccactggcacattcttgctgacagttcctcagcactttgtttgcc

SEQ ID NO: 664004 - DNA, 76 bp, Homo sapiens
cagaagatggctgtggagagcccgtccgacagcgctgaggactgatcctttgaaatactccagccatgactaaaag

SEQ ID NO: 664005 - DNA, 100 bp, Homo sapiens
ccaggatctcgggctcggaacgagactgcacggcatggaagaggagatggttcgtgttacgcagtggccgtttaactggagatccagatgttttggaata

SEQ ID NO: 664006 - DNA, 95 bp, Homo sapiens
acaaaccctatcctgtccgagcaaagattacctattaccagaacacactgacaacctgcctagagctggaacgttacctccagagcgagccctgc

SEQ ID NO: 664007 - DNA, 50 bp, Homo sapiens
ccgagctccagccgaaggagaagggggataagaccatcatcatgtggaaa

SEQ ID NO: 664008 - DNA, 100 bp, Homo sapiens
ttccagtgccttccagccctcgcgggcggcgcaggcaatactgaacactgcgcagcttgcagaggtctcctggcagccctcattaggaattctgtctggc

SEQ ID NO: 664009 - DNA, 100 bp, Homo sapiens
ctacaacatccacagccggaccgtcacccgctatcctgccaactctatcgtggtcgtaggaggctgtcctgtctgcagaccctgtacacgtatcctgaaa

SEQ ID NO: 664010 - DNA, 74 bp, Homo sapiens
ttaattgaatcaagctgcaaagtaactagttcattcggctcctaaagaagtagcagtgtccaaggaacaagaag

SEQ ID NO: 664011 - DNA, 100 bp, Homo sapiens
cgactcggtcctgtttcgacagcgaacatgtcgcggcctgtcaggattttttatcaagcagaaatgcatcgaacaacgagaatcaagatcactgagctaa

SEQ ID NO: 664012 - DNA, 75 bp, Homo sapiens
cctgcgccaagaagcaagtaaccttcagacacagaataactgaagtgaagtgatggactccgatttggagagtag

SEQ ID NO: 664013 - DNA, 98 bp, Homo sapiens
gagagccagtttccccaaaattgacagcgcaaagatgagctggaacagagaatgtctgctctccaggagagccggagagagctaatggtccagttgga

SEQ ID NO: 664014 - DNA, 80 bp, Homo sapiens
ccaccaatgagtgcaatagaaccgaaagtcccttacacaccacttttgtctcagccagctcaccaaagctcatcgacaag

SEQ ID NO: 664015 - DNA, 99 bp, Homo sapiens
gctacatcgagaaggttcgcttcctggaacagcaaaacaaggccaccgtgaacgcccggccgcagcgcgtcctggacacctcctccctcacgcagtcgg

SEQ ID NO: 664016 - DNA, 90 bp, Homo sapiens
cccggctgccgccgccgccgcctcggccgaccagggacctgcccgcctgcggctgctccgggaattgaatgatctggcacgggaccctcc

SEQ ID NO: 664017 - DNA, 90 bp, Homo sapiens
aggagattctggggcagtatcaacggagtctccggggtggagtctcactcttgttgcccaggctggagtgcaatggcgcggtctcggctc

SEQ ID NO: 664018 - DNA, 75 bp, Homo sapiens
tctttttgaaccaaattatgctgcaaatctcctcttttgacttggactatgactttcaacgggactattatgata

SEQ ID NO: 664019 - DNA, 100 bp, Homo sapiens
ttggctcactgcagcctcaacttcttgtcctcaagtgatcctcccaccttagcctcctaagtagctgggaccacagacaaggcgaccagccagctcctgt

SEQ ID NO: 664020 - DNA, 90 bp, Homo sapiens
ctcagaactccaggctacatatcgtcttcttcgtgggaaagttcgaggggaagacatcgtttggaatgtcagtgttcaacctcagcaacg

SEQ ID NO: 664021 - DNA, 50 bp, Homo sapiens
ctgcagctggcgcctctgcagtggggagggagccatggatttgctgcggg

SEQ ID NO: 664022 - DNA, 75 bp, Homo sapiens
ctctaccacccccaatcgaaagaaactggcgatggaatatgagaggagccctctggaaagaaaaggacagaccct

SEQ ID NO: 664023 - DNA, 71 bp, Homo sapiens
caagtttacttgctgtcatcttctgcaagggatgtgtttggccaaatgggagagtggttacaacacacgag

SEQ ID NO: 664024 - DNA, 100 bp, Homo sapiens
tgtgtctggggaagagacttacagaagtggagttgctgagtcaaagcttttgaaatgacattaacagaaggaagtaagttggagaagaaactcttttatt

SEQ ID NO: 664025 - DNA, 100 bp, Homo sapiens
ctcctaacatgtatcctggagcgaatcctaccttccaaacagttgttgacctcctgtactggagagacattaagaagactggagtggtgtttggtgccag

SEQ ID NO: 664026 - DNA, 100 bp, Homo sapiens
ttatcgactttttcattgcattggcaatttgcaacacagtagtggtttctgctcctaaccaaccccgacaaaaggctttggaatcaggatgatgctggcc

SEQ ID NO: 664027 - DNA, 99 bp, Homo sapiens
tgtatgtgatcagaagctgcgtcccaacatccccaactggtggcagagttatgagcctccccttccgtgccctctcccccccttgcagaacaagaccgc

SEQ ID NO: 664028 - DNA, 75 bp, Homo sapiens
cagctttgttgaaaagcgaagccgttagtcccttaatacaaaggcagcgctggagagcgaggtggcttcaataag

SEQ ID NO: 664029 - DNA, 82 bp, Homo sapiens
cgacaagccgctggcagccgcggatctcaccgccgctcaggggctgcagactcctgttccagaggtcattgttgatgtggaa

SEQ ID NO: 664030 - DNA, 75 bp, Homo sapiens
ccgctattcagcagagagctattattccctgtattaaagggtgtcaaattgagaaccaggtagatccccaccacc

SEQ ID NO: 664031 - DNA, 75 bp, Homo sapiens
acccttcctggccatcctgggcggcagcagtgttgtactgctacttctataaacggacagccgtaagactaggcg

SEQ ID NO: 664032 - DNA, 101 bp, Homo sapiens
tgtgaccgaaagtccactatggttgctcagtcacaagtaggtgccactatgcacgtgaagaagtacctgctgaagggcctgcatcggctgcagaagggccc

SEQ ID NO: 664033 - DNA, 50 bp, Homo sapiens
cagctatggcattagcccacaggccaagtgtttcaatgcatcaaagctac

SEQ ID NO: 664034 - DNA, 75 bp, Homo sapiens
gaagttggagatgctgaaaatgttgcttcatatgagttgtgggctgcacactgcagaaagatacagctgaaaaag

SEQ ID NO: 664035 - DNA, 116 bp, Homo sapiens
agggtggaaaaagcagggaggttatgaggcttaataaagaagcttcgatgtttttgaagcaggcatttgaaggagaataccctaaattattacgtctttataatgacttatggaag

SEQ ID NO: 664036 - DNA, 75 bp, Homo sapiens
agccaaaatgaagacctgtgttgatacctataccaaccgtttaagttttcagcattgcaaataacaatctcagct

SEQ ID NO: 664037 - DNA, 75 bp, Homo sapiens
gtgcgtgtggggctgggtctcggagtgggagacgtggagtgcaggacagagcgggatgccaccagcttgtccaaa

SEQ ID NO: 664038 - DNA, 100 bp, Homo sapiens
gcggcggcgagggtggtggcggtcaaaatgcagatcttcgtgaaaacccttaccggcaagaccatcacccttgaggtggagcccagtgacaccatcgaaa

SEQ ID NO: 664039 - DNA, 100 bp, Homo sapiens
tgctgctcccgggcagtgctttccccaagtagtccgatggctgcggctgcgccgaggcgccctactcagatagaagagcgagcagaatttttgaataagt

SEQ ID NO: 664040 - DNA, 71 bp, Homo sapiens
ttgctccaaaccgccttaagatttggtggcaatctgaaaatgtcatcagtgagttctgcctcagtcagctc

SEQ ID NO: 664041 - DNA, 83 bp, Homo sapiens
cgacatcctgggcaggttcatcaacgccgagtacacagaggaggcctatgaagttggaatcgaagcctcttaaaatggcagat

SEQ ID NO: 664042 - DNA, 100 bp, Homo sapiens
tcgacgtcgtgatccagaagtccagagctgaggactgcctgtttgcagggtgaggtggctttgaccccgggttgcccggccagcacgaccgaggaggtgg

SEQ ID NO: 664043 - DNA, 100 bp, Homo sapiens
ggattggatattctcaaggaaccacacatgtattaagatttggttagcactctacgtatatgaatatctgctccatgtaggagctcagaaatcagctcaa

SEQ ID NO: 664044 - DNA, 75 bp, Homo sapiens
tcggccttgcccgcatctatagtttccagatggctctaacctcagtgggtaagcttgatgattaccaggaacgaa

SEQ ID NO: 664045 - DNA, 80 bp, Homo sapiens
gccgggagcgagctgggagggagccgcgcgcctttgtgcgcgcgccgagctatggcattgctggttctaccaacgtgaca

SEQ ID NO: 664046 - DNA, 88 bp, Homo sapiens
cgactctgtgcctcgctgaggattttctggcatccttaaatcttgtgtcaaggattggttataatataaccagaaaccatgacggcgg

SEQ ID NO: 664047 - DNA, 100 bp, Homo sapiens
gtggaaggtgtcagctctgctcttcgttttgggaagcgcgtcgctctgggtcctggcagaaggagatatggaagaaagtagcagtgttgccatgttggtg

SEQ ID NO: 664048 - DNA, 82 bp, Homo sapiens
agatcttccgcaacctggagaacgccaagcgcttcgccatcgacatagacctcctgccccccgaggtctgcagtctcctgaa

SEQ ID NO: 664049 - DNA, 110 bp, Homo sapiens
ctcatgagcagcctgcccaacttctgcgggatcttcaaccacctcgagcggctgctggacgaaggtagaaattgagaagctggattaccatcattatctgcctctgtttt

SEQ ID NO: 664050 - DNA, 100 bp, Homo sapiens
gaaaaagggccgttctgccatcaacgaagtggtaacccgagaatacaccatcaacattcacaagcgcatccatggagtgatttttacctcctataactcc

SEQ ID NO: 664051 - DNA, 82 bp, Homo sapiens
cggcaagaagatcggctgcggcaacttcggggagctccgcctaggaattctgtggccacactgcgaggagatcggttctggg

SEQ ID NO: 664052 - DNA, 100 bp, Homo sapiens
cgacaaaagaacccattagccaggctgcaagaaagcgtaagattgccattcgaaaagcccaggggaaaaatgtggaggccattcgggagctgaatgagta

SEQ ID NO: 664053 - DNA, 90 bp, Homo sapiens
agcgagttctaaaattgcagcaagttatgcagaatgctaacagaccctcgacctctcaagcagctagagtagaaattcaagaaagaaatg

SEQ ID NO: 664054 - DNA, 75 bp, Homo sapiens
actgactctgcagccaggacgaagtccaggaaggccagcattatgcagttgctcggcgcatttccttcacctagt

SEQ ID NO: 664055 - DNA, 75 bp, Homo sapiens
gctggcggcggcctcggcggcctcgggcgccgcgaggtcgtgttcccgaacagccccgtgtgaccccagagggtg

SEQ ID NO: 664056 - DNA, 98 bp, Homo sapiens
gcagcactagcactctggagaaggtctgccgctgtctgcactttcctgacctgcaggctgggacaatgaaaagaaaatagctattttacatgaaaatt

SEQ ID NO: 664057 - DNA, 100 bp, Homo sapiens
tgcgctgccgccgctctgaggagttaaaggtcaccagtgaaaagttgtgcagagcccaacatgagcttcatttccaagctgccacctatctctgcctcct

SEQ ID NO: 664058 - DNA, 100 bp, Homo sapiens
gcttggtgtcgtttttccttgagctgaacgtcttgcaacagtggccgcacgcatagaatgtcgtactctcaggaggctccaccatgttcagggatttcgg

SEQ ID NO: 664059 - DNA, 116 bp, Homo sapiens
gcggcggtggcatctgcggccatggcggcgactactgccaaccccgaatcctcactatggatgggctcattgaggacattaagcatcggcggtattatgagaagccatgccgccgg

SEQ ID NO: 664060 - DNA, 139 bp, Homo sapiens
gggtctttaggatttgcagctccaggaagcgagatgtcgaagccgccacccaaaccagtcaaaccaggtatccgttacagcactgatgtgagtgtagatgaagtaaaagctttggcttctctgatgacatacaagtgtg

SEQ ID NO: 664061 - DNA, 103 bp, Homo sapiens
gctgggcgagttttgtggcactcctttgctcttcacaaaagctgatgaagcattgaaagccaaagaaagaaatgaggaagaagcaaagagaagaaaggaggaa

SEQ ID NO: 664062 - DNA, 75 bp, Homo sapiens
agtggatctgcgccaaggcctacggccgagcgtccagcctgcatgccgtgcggactgcacccaccagcaaggtga

SEQ ID NO: 664063 - DNA, 98 bp, Homo sapiens
ctgaataaatccagtccagcgtgcgacgacttactggcttcatgggggatatgagactttctactcggaatatcctgagtgttgcgtggatgtaaaac

SEQ ID NO: 664064 - DNA, 96 bp, Homo sapiens
gcagtgcgttcggctccgcgcccgccgcgccgggagcagcaccgcggggccagtccaatatcagatggaaatgatgcggagccttcgccatgtaaa

SEQ ID NO: 664065 - DNA, 118 bp, Homo sapiens
gcctgctgctcctgctactaacccacctccccctggctctggggagtcccatgacccagacagttactcttggaggcatcttccagttgggaaactggagtgaactaaacaatatcca

SEQ ID NO: 664066 - DNA, 73 bp, Homo sapiens
caggacaccattatttgaccagatcattgatatgctgagagtggaacagcactcacctttgccctgggtactc

SEQ ID NO: 664067 - DNA, 83 bp, Homo sapiens
tgaagaacgagattcagacacagaaatgatggaagaattgcatagcctggacccacgacggcaggaattattggaggccaggt

SEQ ID NO: 664068 - DNA, 159 bp, Homo sapiens
gtagtgaagggcagggagctggacctggaggcgccgccgcgacagcagcagccatggaggacgagatgcccaagactctaatttggagttgtctgcttaatattttctgcaacactagcttatttcccaccccgacctcctcttcctcccagtgttgct

SEQ ID NO: 664069 - DNA, 100 bp, Homo sapiens
ctggacagccagtggcgccagatagaaaacggcgagagtgggcgagaacgtccactgcgggccggcgaaagctgggcgtgatggtgggcatgggtcagaa

SEQ ID NO: 664070 - DNA, 100 bp, Homo sapiens
ctcaccgcaacattccttatccaatcccttaccgtggcaaaaatagaatgtttgaagtcattggagagaccctggagcacgatttcccaagctggatggc

SEQ ID NO: 664071 - DNA, 75 bp, Homo sapiens
gaattgcctcacctgctcaccgaaagggttgcaaaagcttctcatttcagagagatgccaggatcctaagtgcct

SEQ ID NO: 664072 - DNA, 75 bp, Homo sapiens
atgaactgtatccatccccatcatgatgtacagaaccaagtctcttcactagctcacgacttatttagatgtaca

SEQ ID NO: 664073 - DNA, 95 bp, Homo sapiens
gagcactgacacggcctgcatcgggcccacgctcagggcctgctttcttccccgggcgatgtgcagagatctttgccaggggtcaaagcgtcggg

SEQ ID NO: 664074 - DNA, 100 bp, Homo sapiens
gataaaactaccaacaggcacagaggttgaccccctgtttacagtgccagcgccaccaccgccgatttccagcagtctcacgcctcagattctaccctcc

SEQ ID NO: 664075 - DNA, 51 bp, Homo sapiens
caagatggaggcgctgattttggatatccaggaggtgcagggctacgtgct

SEQ ID NO: 664076 - DNA, 75 bp, Homo sapiens
cccagctcggcccgcgggggagccccgggagccgcacggccaaatttgagtccctctttaggacgtatgacaagg

SEQ ID NO: 664077 - DNA, 101 bp, Homo sapiens
tccttgcggcgaataggagtctggtcaggcgtcaggctagtccgacgaagagtgggtctcagcttgactatgaagttcccagggaaaaggccttccaaaag

SEQ ID NO: 664078 - DNA, 100 bp, Homo sapiens
atgtacctgttaccactttcaaaacctcaatcctggtcctctggatgctccaaggctcccaggcagctctctacatccagaagattccagagcagcctca

SEQ ID NO: 664079 - DNA, 50 bp, Homo sapiens
cgagcgtctgggcgggtggtaggttttcctttggaatatggataaataca

SEQ ID NO: 664080 - DNA, 74 bp, Homo sapiens
ccgcctggcaggccctgcgcaccaggtgaattatgtaacctcattacgctggatgtagctcacaatcaacttga

SEQ ID NO: 664081 - DNA, 89 bp, Homo sapiens
aacactcatcttcaaaagactgggaagaatcccactgatgcataccttgatgccatgatgaatgaggccccagggcccatcaatttcac

SEQ ID NO: 664082 - DNA, 100 bp, Homo sapiens
ggatgggtgtggtggagtgcgccaaacatgaactgctgcaaccatttaatgttctctatgagaaggaggggacgtccagatcggtgacatcgtcacagtg

SEQ ID NO: 664083 - DNA, 51 bp, Homo sapiens
ccaccgccctggccatctaccatgtggtatctaggctgccatgatgccagg

SEQ ID NO: 664084 - DNA, 50 bp, Homo sapiens
cacgtccaggccacctacatctcggatgcggaggtggtggagaagccggc

SEQ ID NO: 664085 - DNA, 107 bp, Homo sapiens
ggggcacgcagctgaagctcatcatgaccttccagaattacgggcaagcgctgttcaaacccatgaaagctgaagaagcaggtggagagtgccgagctgaagaacca

SEQ ID NO: 664086 - DNA, 100 bp, Homo sapiens
ggactttcttccagcttctgctgtccttctttgtggagagcaagagacggggttttgctatgttgccccggctggtcttgaactcctgagctcaagagat

SEQ ID NO: 664087 - DNA, 83 bp, Homo sapiens
ggcggacttcgacacctacgacgatcgggcctacagcagcttcggcggcggcagaggatcaccgaagtggccttggagtacaa

SEQ ID NO: 664088 - DNA, 96 bp, Homo sapiens
agagaggataccgggacgctcctgaagccgcgagatgaaagaacggctcctgtcgaatgggtgggaaacagcatcggccgtcgacatgatggagtt

SEQ ID NO: 664089 - DNA, 106 bp, Homo sapiens
gccagaaggagtgcttctaccagcccatgcccctgaaggcctcgctggagatcgagtaccaaatcctgtttgaccaaactcagagatcaattaaggcacagcttca

SEQ ID NO: 664090 - DNA, 88 bp, Homo sapiens
gaaattgcatgtgaacacgaacactctaattgcctcctgatagcacacagaaaggttatcaatactctggctgaccatcatcatcgtg

SEQ ID NO: 664091 - DNA, 100 bp, Homo sapiens
tgatggagaattgtatggatcacagtccctgaatagaagatctggcagggaggaagtgcttgaaacctcgtcagcaccacagaaaactgcagctccctgc

SEQ ID NO: 664092 - DNA, 87 bp, Homo sapiens
tgaaaatgatgcaagaagttagtgaaaattttgagggataggatgggatctgcactgatgattgaaacagcaagaaaccccacatgt

SEQ ID NO: 664093 - DNA, 51 bp, Homo sapiens
gtggaggaaaacaacttcgagggcagaactgtgccctgtccacggtgcctc

SEQ ID NO: 664094 - DNA, 100 bp, Homo sapiens
gtctctactcctgggctcaagcagtcctcctgcctcagtctcccaaagtgctggaattacagggtagctgcttgtctcctactatacctgtctgacacaa

SEQ ID NO: 664095 - DNA, 100 bp, Homo sapiens
gtctggtggggcggagcagacacagactatgcagatgggaggtcagccaagatgggaagtcgctccttgacaagctccagcggcccttgactcccggcag

SEQ ID NO: 664096 - DNA, 124 bp, Homo sapiens
cacgccagccgcaccatgccgctcctaagcctgcacagccgcggcggcagcagcagtgagagtttttggctttcacccccaaccagtgaccaaagacttgaccactcaaagtccagctccccag

SEQ ID NO: 664097 - DNA, 87 bp, Homo sapiens
ggtgctggcatccgaacaccgggtggctggtgcagccgaggtcttcgggaattccagcgagggaatcaaacattttaagtccagtgc

SEQ ID NO: 664098 - DNA, 98 bp, Homo sapiens
gcagctttacaggagcgacttgacaatgtccctcacaccccttccagctacatcgaaacgttgcagaggcagtgttaacatcccaactgaaagcacat

SEQ ID NO: 664099 - DNA, 82 bp, Homo sapiens
ccggaagcgccaggacaatggggacccgggacgacgagtacgactacctattcaaaggcagcagcccagacgcggcacagag

SEQ ID NO: 664100 - DNA, 80 bp, Homo sapiens
gttcttggtgggatctgagcagacatgcaagaaagcacttcagccaagcagaagggagccagctggacgaggtgcgccag

SEQ ID NO: 664101 - DNA, 113 bp, Homo sapiens
ccgcgcgcagggcctgcagcgggagctggacggcgagcgcgagcggcgcgagaaagctgttactgaggcggagacacgggtgatgattggctttctggggagagaggaagtcc

SEQ ID NO: 664102 - DNA, 57 bp, Homo sapiens
gctaatttgcaatacggaaattttaataggacttgcaccttcgagatcccctgtgtt

SEQ ID NO: 664103 - DNA, 75 bp, Homo sapiens
gcggaagcggcctggcaggggaaggatcgaggcgaccatggccttgctgggtaagcgctgtgacgtccccaccaa

SEQ ID NO: 664104 - DNA, 75 bp, Homo sapiens
agaagtgcttaaggaagagtgatgaagaatcatcggactcaggtacatctgtgagtgagaacaggtgtcaccttg

SEQ ID NO: 664105 - DNA, 75 bp, Homo sapiens
cttctccagggagagtcgctgcagaaatatgagattacggagcagcgcaagattgatcagaaagctgtggactca

SEQ ID NO: 664106 - DNA, 82 bp, Homo sapiens
cgctcaccaccaatcagatgtctgtctgccggctctggtagctgaagaacatctcacagtggacgccagggtctattcctac

SEQ ID NO: 664107 - DNA, 75 bp, Homo sapiens
ctcggagcgcggtccctgtattggtctcctgctcctagaggagcagtgaggagaatgaataccttccaagaccag

SEQ ID NO: 664108 - DNA, 74 bp, Homo sapiens
aggggctgctgaaggcggagatcgcccgccgaggttgaaaatcgatgactttaatgatgaactcaataagctgc

SEQ ID NO: 664109 - DNA, 83 bp, Homo sapiens
ccatcttccaagatccatctgccttctgcataggccaaacagagattcgtcagcgaactgcagctcaaagaaacctttctcca

SEQ ID NO: 664110 - DNA, 100 bp, Homo sapiens
gtggagtccggggtcctggtcggggtggtctgtctgctcctggcatgccctgccacagccactgggtctccgtctctccaccgggggcttcatccttcca

SEQ ID NO: 664111 - DNA, 74 bp, Homo sapiens
gaagaagaaagaagacgccacagacagcagcgcagtaccaccttccagagataactggttagtactgcagaaaa

SEQ ID NO: 664112 - DNA, 82 bp, Homo sapiens
ggtccgcggcatccgtaaccacaaggaggacgaggtaaatggtcttaaaatggttgatgagccaatggaagagggagaagca

SEQ ID NO: 664113 - DNA, 99 bp, Homo sapiens
cgaccccctgaactacttcctcggtggctgcgccggaggcctgactctgggagcacgcatgatccccccaggggtgcccgatgcccaccccagggaagg

SEQ ID NO: 664114 - DNA, 74 bp, Homo sapiens
gcgtttccagtcaccgcttctttggacccaatgctgaaataaggtgggcaatgccgtgccaccgcccctggcca

SEQ ID NO: 664115 - DNA, 71 bp, Homo sapiens
cacgagctgatgctgtgtgcgccagatgaccaggagctcctcaaggatcttaccaacagtatcattacagc

SEQ ID NO: 664116 - DNA, 90 bp, Homo sapiens
gctggcaagtctgaaggtcaaagtgtgaacatggctacgcctcttcattcccgtccatgccgagcccccgactgcagcattcaaagcccc

SEQ ID NO: 664117 - DNA, 127 bp, Homo sapiens
cacaattacaatgcagtaaagccagaaaagactgctgctccctcgccgtcactgttgtataaatagcacctgtcaaagcctaaagtcaccatgggtctgcagagcaataagaatggcacctgtgtga

SEQ ID NO: 664118 - DNA, 75 bp, Homo sapiens
aaactgaacttataatcgtcactggattggtcgcggagcctcgccggccgccatgtggagctgcagctggttcaa

SEQ ID NO: 664119 - DNA, 95 bp, Homo sapiens
aaggagatccgaaagcttcagaagagcacacacctcttgataaggaagctgcccttcagccgcctggtgagatcggactggaactgttcggctgc

SEQ ID NO: 664120 - DNA, 75 bp, Homo sapiens
gtccgcttcacactccgccgccatcatggtgaagctcgcgaagggggatatgagactttctactcggaatatcct

SEQ ID NO: 664121 - DNA, 85 bp, Homo sapiens
aaggaatcgtatcgtatgtccgctatccagaacctccactctttcgggcgtgatggtgggcatgggtcagaaggattcctatgtg

SEQ ID NO: 664122 - DNA, 101 bp, Homo sapiens
caaacagcagcttaaagatcagtatttcatgcaaagacatcagctacttaagcgccacgagaaggtatgcccaagaggacagagaacgaatgcacagaaat

SEQ ID NO: 664123 - DNA, 82 bp, Homo sapiens
atcgatctaagatggcgactgtcgaaccggtttacccaaggtccagcctagcccctaggcaccatgtcggacagtgatctag

SEQ ID NO: 664124 - DNA, 100 bp, Homo sapiens
gtctctcgccacagcggcctcggcctccccttggattcagacgccgattcgcccaggttatttcttatgagggtcatggatatcccctatctaaacttgg

SEQ ID NO: 664125 - DNA, 74 bp, Homo sapiens
ggcgaagggctaaatggaatgcacagaacctgctgtggaaggctactgcagcactggggtgtcagttgttggtc

SEQ ID NO: 664126 - DNA, 82 bp, Homo sapiens
tccagaatgtcagcatggaggctgctgggcaggtcatgagtcaccatgcgggagaggacctgctggccccaccgcacgacac

SEQ ID NO: 664127 - DNA, 100 bp, Homo sapiens
gcatgatcgaccaggcacatcatcctggtggggaagaagttttaagggaacaagctggaggtgacgctactgagaactttgaggatgtcgggcactctac

SEQ ID NO: 664128 - DNA, 140 bp, Homo sapiens
cttaatccgaacaattgctgccatccgttccttcccacatgataatgtagaggacctcatcagagggactataatgtaactgcaaactccaagctggtcattatcacggctggggcacgtcagcaagagggagaaagccg

SEQ ID NO: 664129 - DNA, 77 bp, Homo sapiens
ccagcgtcccagggcccaggccgagcaggctacagcatgctggccatagggattggaaccctgatctacgggcactg

SEQ ID NO: 664130 - DNA, 82 bp, Homo sapiens
ttttcttcctgcccctcgttgatgagagcattcgaagtgacctcagcagggcatccaggacatgtctcaggaaggctatgga

SEQ ID NO: 664131 - DNA, 117 bp, Homo sapiens
ggcaagagcccgcaggctaccttccccgggcaggggcgctcaacccaaccggctccagggcactgtgctggtcccaaaggcgataacatctatgaatggagatcaaccattctaggg

SEQ ID NO: 664132 - DNA, 100 bp, Homo sapiens
caccacgctctcagtcagcctggggaatgagacccaaactgctcatacagaattacgcatttccacttctaatggtgtggtgcagatagtggaggtggtc

SEQ ID NO: 664133 - DNA, 75 bp, Homo sapiens
tcgcttcaaaaagtgtctgtctgttggaatgtcaagagatgctctggtagctgaagaacatctcacagtggacgc

SEQ ID NO: 664134 - DNA, 75 bp, Homo sapiens
cacaggagacggacacctcagcctagatcccttggtgctctccacgctgttcagatcatgtttgagaccttcaac

SEQ ID NO: 664135 - DNA, 83 bp, Homo sapiens
tctccagagtgatcaagtgtgacccggttcttaccgcccctcctatgaagagatgctgcgattctacagttactacaagcagg

SEQ ID NO: 664136 - DNA, 123 bp, Homo sapiens
ttcctgtctatagtccactgtcagctgaggtggatcttccagagaaaggaccagggtgcctatggtcctgagcactgggtcacgtctagtgtcagctgtgggggccgtcaccagtctcctatt

SEQ ID NO: 664137 - DNA, 83 bp, Homo sapiens
cttcggtggactccttcggcagtccacccaccgccgccgcctcccaggccagctgcgggccgtccagcggctgtgccacttct

SEQ ID NO: 664138 - DNA, 90 bp, Homo sapiens
ctttttttgcctgttacctgtgacgtccttgatatgagatcctgactccaaactccattcccaagggtttcatggacgggaagcaggcgt

SEQ ID NO: 664139 - DNA, 109 bp, Homo sapiens
aggagctgtgcagccgcgaggaggcgcgggaggtgttcgagaacgaccccgagacgggagtgcatccgccccaacccttttccccctcgtctcctgtgagaattccccg

SEQ ID NO: 664140 - DNA, 100 bp, Homo sapiens
ttcggagcggccggtactgttgaaagcgacaagtggaggcgccgctctagcggccgggactctgaactatggcggtcctcagaatggttggaatgaccct

SEQ ID NO: 664141 - DNA, 82 bp, Homo sapiens
agcgggtagcacaggcctttcgggagggagagaatacccagagaaaagaaaccttgtttattccctgtgaaaatgagaagat

SEQ ID NO: 664142 - DNA, 80 bp, Homo sapiens
cccgggcgctgtgcatccacactggacgcgagctgcgctgcaagccgcttacaaacacgcagatggcaagaagattgatg

SEQ ID NO: 664143 - DNA, 80 bp, Homo sapiens
acgtttgtcacacttccgctgtgaattgctgaggctgtgggtgagcgtggaggatgctcagatgcacaccgtcaccatct

SEQ ID NO: 664144 - DNA, 75 bp, Homo sapiens
cctgcgcggcgcgctcggccgcctcaaggtcgcccaagtgtgcctgaaacagtatgttgagctcttgatcaaaga

SEQ ID NO: 664145 - DNA, 50 bp, Homo sapiens
taacgatgcaccatgctctcttacaggttatcaatactctggctgaccat

SEQ ID NO: 664146 - DNA, 100 bp, Homo sapiens
cactaagtagggcttgccaccaacagaataaaataaaagatcttcaaaaggagcagaaaactttacaggttcttggtgagattcaggaaattgtgaaaac

SEQ ID NO: 664147 - DNA, 51 bp, Homo sapiens
ggaaaacctggcgaccctaagtcagaatctaggtcaacctattaagatacg

SEQ ID NO: 664148 - DNA, 74 bp, Homo sapiens
ggaacttgccctgtctcctcgcagatgaggccctgacaagccaattgacagatgaagagctagcccaagggaga

SEQ ID NO: 664149 - DNA, 82 bp, Homo sapiens
cccgcgcctgtcgggctgaactgagatccggaacatggtggcggtgctggaagtcatctccagcctggagaaataccctatt

SEQ ID NO: 664150 - DNA, 100 bp, Homo sapiens
ccgtctcacccccacaggaggccaggttggaaagaaaacctggaatcagattactttggcaagcttgaatctaaattatcagtcataagaaatttgaatg

SEQ ID NO: 664151 - DNA, 91 bp, Homo sapiens
aactatcgcctgacagggtatctgaagtaaaaggggcactgaacctaccagatgtatttgggttggtcgtcctcccattggaactgaaact

SEQ ID NO: 664152 - DNA, 82 bp, Homo sapiens
tgataagaagcacctggatgagacatttgctacagcatcccacattaagtcaacggtgctgcggtgtgtcgcggggtgccca

SEQ ID NO: 664153 - DNA, 100 bp, Homo sapiens
aatattcaagtgggatgtgtagactgttcaatgcaacaaggcaaggtgtcatggagaaactccagctgggcccagagattctgcagcgggaaaatccaag

SEQ ID NO: 664154 - DNA, 90 bp, Homo sapiens
tgccaggaactcttctggggagaccccgacgtggagtgccgagatgggcttaggtcacgagcaaggatttggagccccttgtttaaaatg

SEQ ID NO: 664155 - DNA, 75 bp, Homo sapiens
gcaatccaagccgactgatgactggagaggatggctactatttcaccaatctgctatcagttgagggatttgcag

SEQ ID NO: 664156 - DNA, 112 bp, Homo sapiens
gcctaatgatgtccgagttggagaacaggcgtggccagcactggctccttgatgaaatctccaacctgctggtggctactaagaaagcccaggagtggcagcccgtctaccc

SEQ ID NO: 664157 - DNA, 49 bp, Homo sapiens
cagtgcagccgcagtcctggcagggtagaaattgagaagctggattacc

SEQ ID NO: 664158 - DNA, 90 bp, Homo sapiens
aggaaccttcaaaggcacttcgtggggtcacaggtcttgctatcacagatgaaattttgctgagtaaggcagagtggtccaaactttttg

SEQ ID NO: 664159 - DNA, 74 bp, Homo sapiens
gttcagaagagccaaggaataaacatgcaatgaacccaaaagggatccacctcagaaaaagatggaatgcacca

SEQ ID NO: 664160 - DNA, 75 bp, Homo sapiens
tacctgcactttggggagcctaagtcctgactccatcaagaatgctggaggaagggtgtttgtccactgccaggc

SEQ ID NO: 664161 - DNA, 75 bp, Homo sapiens
ggcgtttctgtacatggattatctgcctaccgtatgtgaacgggagctgtgtgtgtttgcttttcaaaccctggg

SEQ ID NO: 664162 - DNA, 100 bp, Homo sapiens
cagcacttcagtcggaaagttggaacctctgacaagaccaagtactaccttcaaggtgattttgttctaccctcaggaccttggccatggccacctgaag

SEQ ID NO: 664163 - DNA, 100 bp, Homo sapiens
tgtccctccgggtacacgatgaattccagcaatttttccagaaaggaggagtcaaggaagcccttagtgaacgagaactcttcaatgctgtttcaggctt

SEQ ID NO: 664164 - DNA, 100 bp, Homo sapiens
taagtactccggttcccagcttctgcaaaagtcatgcctctgctgctgctgttaccagtccaaaagtctgatgacctcggtccccatgaacggaacaagc

SEQ ID NO: 664165 - DNA, 82 bp, Homo sapiens
aaattttaagacttgcccaggaaaatgaagtcacagagttgtcaagtgaaactcaaagaggtgagactataaagatgactat

SEQ ID NO: 664166 - DNA, 82 bp, Homo sapiens
aactacatgttccctcaacagccaaggactgaggatggtggaagttaagccatatgtcttggatgatcagctgtgtgatgaa

SEQ ID NO: 664167 - DNA, 100 bp, Homo sapiens
cgcccagcggtagccctccttgcgcctccgattcccaggtgtctgacttccagcaactgctggcctgtgccagggtgcaagctgagcactggagtggagt

SEQ ID NO: 664168 - DNA, 109 bp, Homo sapiens
ctgaagagcgacaagccgctggcagccgcggatctcaccgccgctcagggtttggtgcacctcgatttggaggaagtagggcagggcccttatctggaaagaagtttgg

SEQ ID NO: 664169 - DNA, 75 bp, Homo sapiens
cccggctcgaagcctggatgaaatagatctctcggctctgagggttcgagaacttgtcttggacaattgcaaatc

SEQ ID NO: 664170 - DNA, 82 bp, Homo sapiens
ctggctgcggccgccctgggccgggccccaccggacgcacttctccaccgacccagtggccgcctccatcatgaagatctac

SEQ ID NO: 664171 - DNA, 83 bp, Homo sapiens
cttcggtggactccttcggcagtccacccaccgccgccgcctcccagaatcctcactatggatgggctcattgaggacattaa

SEQ ID NO: 664172 - DNA, 100 bp, Homo sapiens
tggccgacttcgatgatcgtgtgtcggatgaggagaagcttagaccatgctcagcctccaagcagccttgtcatcgacaaagaatctgaagtttacaaga

SEQ ID NO: 664173 - DNA, 50 bp, Homo sapiens
acataagaagttacctttttcagttcctgaatgttccaatgtttcgaaat

SEQ ID NO: 664174 - DNA, 101 bp, Homo sapiens
tttcacatagccagccaaaaaaactttaaggctaaaaacaaagcaaaaccagttaccactaatcttaagaagaccctggccggctcctgtgggaagtttgc

SEQ ID NO: 664175 - DNA, 75 bp, Homo sapiens
gctgatgtcaacagtgaaaacattgatgtggacatcttcgagccccaggggatcagcaagctggatgcccaggcc

SEQ ID NO: 664176 - DNA, 82 bp, Homo sapiens
tgttttgccggaggagcccctcaggccttctaatacccgatttacaattacattgaactacaaggatcccctcactggagat

SEQ ID NO: 664177 - DNA, 100 bp, Homo sapiens
ccgagagcgtgaccgagagcgcgaatatcgtcatcgttagaagtgaccaaaatctttctaggctacagtgctgtcatcccgcatctatacaagaaacctg

SEQ ID NO: 664178 - DNA, 100 bp, Homo sapiens
tggacgtgcacgcagcccggcgggaggataaagaccaccacgacttatccccccgctgaaccagctggagctgctgaggaacctcaagagtaaatctgga

SEQ ID NO: 664179 - DNA, 75 bp, Homo sapiens
tgtcgccgacgccaaaggggacagcgagtcggaggaggacgaggacttggaaggaaagaccacagcaagattctt

SEQ ID NO: 664180 - DNA, 101 bp, Homo sapiens
aaacacctcaggacacggcctacaacaccaagagtactgccaaatctgtcgaaagggagataatgaagaactgcttcttctttgtgatggctgtgacaaag

SEQ ID NO: 664181 - DNA, 73 bp, Homo sapiens
catcatcccgtcagagctgaggtacttcgtgaagaacctcaagaaggcatgaagccagcccctgcagtgccgt

SEQ ID NO: 664182 - DNA, 100 bp, Homo sapiens
ggaatttttcccagcatttcaggcatttactaatgatctacttgaaatcttaggtcaaaatgcagatcttcgtgaaaacccttaccggcaagaccatcac

SEQ ID NO: 664183 - DNA, 98 bp, Homo sapiens
ccctatcctatccgcaaacactgcaagcctccagagaagcaggagcagcagctctgagaaacgtggcccagagattatttgaaaactaccaaacgcaa

SEQ ID NO: 664184 - DNA, 140 bp, Homo sapiens
tctgcacttcgcattttggcattgacatttaattttagggtcctttatatagaagggagagtaggggttgctgtggcactgaagcaagctatgactctggaatttaaagtttatcaacaccaggtggtggccaactgcag

SEQ ID NO: 664185 - DNA, 76 bp, Homo sapiens
tggagagactctatatgaaaaggaactccctgacatccttgagacagggaagaacgattggcagcactcacagctg

SEQ ID NO: 664186 - DNA, 50 bp, Homo sapiens
catgaatttgacgattttaggtgcctcacccatgcccatagccatgccca

SEQ ID NO: 664187 - DNA, 101 bp, Homo sapiens
tggatgtcctagaagtcagtctcagatgacgccaaattccagcgaaacagctgatgccagccagcttgaagacccctgccacagaagaagggaatcagcat

SEQ ID NO: 664188 - DNA, 90 bp, Homo sapiens
aaaccattgccaaaggatggatatgacttagtgcagtcaaatctacctgatgacatctttgaaaatggaaaggcagccgaggagaaaatg

SEQ ID NO: 664189 - DNA, 99 bp, Homo sapiens
tgaactgcaacaccagctggaagatcaacctgtttatgcagtttcgggaccacctggaggaggtgttgaaaggggtcctgcatctccagtatggaatgt

SEQ ID NO: 664190 - DNA, 97 bp, Homo sapiens
aagaggaactaggacacctagattctttgggaccattgacatttacagatgtggccatagaattctctctggaggagtggcagtgcctggacacagc

SEQ ID NO: 664191 - DNA, 108 bp, Homo sapiens
atcgagacctgttcttgaatacatcgatctggtctgtggtgatgatgaaaaccctagcgcctattatagtgatctatctgctctatgcaagcacttagacaacctatg

SEQ ID NO: 664192 - DNA, 75 bp, Homo sapiens
tagaagccatgtttcgaagacctgtattacagatttggtgcttccagatgtgagttatcaggtggaatccagtga

SEQ ID NO: 664193 - DNA, 121 bp, Homo sapiens
ctaccatgacgaaaacatgtactacagccagtcttctatgtttccacatcggtcagaaaaagatatgagagtccctacactaaatccgccagccagacaaagccgcctgatggagcgttgg

SEQ ID NO: 664194 - DNA, 74 bp, Homo sapiens
ttttgattaccactgacctgctgagcatagaagactttatttcttgtctggattctgcagcagaagcttgtgat

SEQ ID NO: 664195 - DNA, 99 bp, Homo sapiens
gagagctcatctggaattttgccgatttcatgactaaccagtgtaaatggccaagacctaaagaacctgctgcaccaggatgctgtagacctctttcgt

SEQ ID NO: 664196 - DNA, 100 bp, Homo sapiens
tgtcatctttgccaggactgatgcagatgcccctcctccaccagaggactgggaggagcatgtcaacagagctcttccagtgttagtggattcagatgag

SEQ ID NO: 664197 - DNA, 98 bp, Homo sapiens
gcctggctaagcaaaaccctgcagaacggctgcctaatttacagcaaccatgagggatgaggagaatttctgtgccactgtgcccaaggatggacgtt

SEQ ID NO: 664198 - DNA, 97 bp, Homo sapiens
ttgtggctggagacatgagcaagaaaagcctctgggagcagaagggaggctccaagacctcatcaacaattaaggggatgtggagacgctggtagcg

SEQ ID NO: 664199 - DNA, 100 bp, Homo sapiens
agatctaaagtcacccggcggccaaaggccagtgactaccaacgtttggaccagaaggtatcttgcaatatattcagaactctccctcctagtgacagca

SEQ ID NO: 664200 - DNA, 100 bp, Homo sapiens
gggctgctcacaatttatatggccaacttggtgttcttccagagagcaaagccctgaggactggatttccctgtgcctacttcatgatcatgaattccag

SEQ ID NO: 664201 - DNA, 75 bp, Homo sapiens
tcaggcctgcacggacggtgttggttgggcctcaaaataaattcgctgctctggacaatgaagaggaggataaag

SEQ ID NO: 664202 - DNA, 107 bp, Homo sapiens
tcgggaaccagtacagggtcttggatgagaacatgacttttggcatcattcagagccaggattatgatgttgatgaagaggacatgatgaatcaggtgttgcagcgc

SEQ ID NO: 664203 - DNA, 100 bp, Homo sapiens
gccattaacgagctggcgaagatgggcgacccggatctcctggaagtgttggcggaggaagtgtccgagctgcaggaggagggaatgaacgccatcaacc

SEQ ID NO: 664204 - DNA, 83 bp, Homo sapiens
aaagagctcattaaggacgggaagaacctcatcgctgcgacgaaaagtcagaatggcggcagcggagcatcgtcattcttcag

SEQ ID NO: 664205 - DNA, 83 bp, Homo sapiens
gaagcagagtggctatggtgggcaaactaagccgattttccggaaaaagtgctcagagcatgaaaattttctgctgtctttgg

SEQ ID NO: 664206 - DNA, 85 bp, Homo sapiens
ctgggcgacttgcgaggatgagagcgacgaagccaactgtccaggatccacctctgatgttcagtgaagactaccagaaaagtct

SEQ ID NO: 664207 - DNA, 108 bp, Homo sapiens
cggatcgggtggagtgtaggtcatatcgccgcggtatctctcctaaatgtgtgatcaaggaattaccaccaacagagaacagtaatacaggagaaaggttccaaacag

SEQ ID NO: 664208 - DNA, 75 bp, Homo sapiens
agccattggagggcgcggggactgcaaccctaatcagtactacgacatttctgccaaaagtaactacaactttga

SEQ ID NO: 664209 - DNA, 100 bp, Homo sapiens
tgccatctgactgtcctgctggctgtgtgtcccggcatggatatccggaacaacctcactaggttgcatgagctggagaattgctctgtcatcgaaggac

SEQ ID NO: 664210 - DNA, 98 bp, Homo sapiens
ccagagtctggccttcggctcctggctgccatctgcttattttgcagatggcgtgtacctggttctgctcatgggccttctggaagactactttgttc

SEQ ID NO: 664211 - DNA, 74 bp, Homo sapiens
tcggggtggcagttcccgttaaccttagccacaaagtcaaagtaattcgccaaaatgacgaacacaaagggaaa

SEQ ID NO: 664212 - DNA, 96 bp, Homo sapiens
ctgatgggtcgaggcggacgcgcggctgcgtcagagaaattaatggacttacgaaatgaatacctgcaagcggatgaggctaataaaagacttttg

SEQ ID NO: 664213 - DNA, 83 bp, Homo sapiens
tttggatcttcatgccctgggttctgcccgcacggacccccataggagccccatggctgcttctctctggccgagcgcccctc

SEQ ID NO: 664214 - DNA, 75 bp, Homo sapiens
gagtgctgttttagagctggcagcagcatctcagcccaagagaaggtcctagcagaagatgtgactcagactgcc

SEQ ID NO: 664215 - DNA, 83 bp, Homo sapiens
ccgacgccagcgtttccagtcaccgcttctttggacccaatgctgaaataagactgtgccctgtccacggtgcctcctgcatg

SEQ ID NO: 664216 - DNA, 74 bp, Homo sapiens
caaggagcagaagtacgaccggcagctgaggtatttgtaggcaaaataccaagggatttatatgaggatgagtt

SEQ ID NO: 664217 - DNA, 82 bp, Homo sapiens
ggttgcaacggagataaattcccggaaccgcgattcggcgtgtcaggtgtacaacccgagaataagagcaaactcgctcgtc

SEQ ID NO: 664218 - DNA, 100 bp, Homo sapiens
ttcccagctgccgtctgcaccagccatggactgctacacggcgaactggaacccactcggggactctgccttttaccgatggtcagtaggacagaaggta

SEQ ID NO: 664219 - DNA, 82 bp, Homo sapiens
cttcggcagccggctgtacgcacacaccatcgcaggtccgcgggagagctgtggggcttggtgagtgtttcgtggcctctcg

SEQ ID NO: 664220 - DNA, 74 bp, Homo sapiens
catatttcagagcaacctctttcaggctttaatagacttgtgcaccatggacaattttgctgagggagatttca

SEQ ID NO: 664221 - DNA, 100 bp, Homo sapiens
ctgcctggccgaatcagccttttcacgctcaaggcatttgatgaagcaattgctgaattggatacgctgaatgaagagtcttataaagacagcactctga

SEQ ID NO: 664222 - DNA, 90 bp, Homo sapiens
gcttgtggtcaccatgggcttcacggggttcggggttcggcagtaacgtgatgagatctattcatggcgtgggagagctgatgacccagg

SEQ ID NO: 664223 - DNA, 51 bp, Homo sapiens
gaaccgtcagtttgagccagatgggtctcgactctgaagacagagttcctg

SEQ ID NO: 664224 - DNA, 80 bp, Homo sapiens
acatttctcttctaagagaagtagtaaaaccagctgcagtgttatcaaagctatcattgttaattatgcaagtaaaatgt

SEQ ID NO: 664225 - DNA, 100 bp, Homo sapiens
ctctacctctgcacatcgcacccaggtggttcagctcgcatagtgatgcctctttgacaaggccacttcatcatcaagcttctgcctgcccgcattctca

SEQ ID NO: 664226 - DNA, 100 bp, Homo sapiens
agctgttggagcagtgtggggaatttcccaccaggatgagtatgattggctgtgattttagatcaaaggtccatcatcaaaacaccaaagactcaagaca

SEQ ID NO: 664227 - DNA, 100 bp, Homo sapiens
attgatttcattcttatttcaatgcagccattccaccctatggtgaatctggattgttctcgggatttccggccttttctttgtgcactctacgctccta

SEQ ID NO: 664228 - DNA, 96 bp, Homo sapiens
ctcccaggctcaagcaatcctaccatgtcagccttcccagtagctggaactacagcttgcttggctcaggaacaacagaagagaataaagaaaatg

SEQ ID NO: 664229 - DNA, 83 bp, Homo sapiens
cagaggcttcggctttgtggacttcctcaccaagcaggatgcgaagacaatgcagatcttcgtgaagactctgactggtaaga

SEQ ID NO: 664230 - DNA, 51 bp, Homo sapiens
caggagctggagcagctcaaagagggagatcttgtgcgaaaactcaaagaa

SEQ ID NO: 664231 - DNA, 100 bp, Homo sapiens
cccaactgctactatgacaaatccaagtcgttcttcgacaacatctcttctgaactcaagaccagtactgtaagattgatgttaaaggcatggtgttcac

SEQ ID NO: 664232 - DNA, 83 bp, Homo sapiens
agcgcctgaggaccggcaacatggtgcggtcggggaataaggacgagattgaggagctgcgggccgagatgctggagatgcgg

SEQ ID NO: 664233 - DNA, 100 bp, Homo sapiens
gaagcaccgaaggaagaaaagcactagcaacttcaaagccgacggcctgtccggcactgctgaagcgggaatgcatatcagtccacgtgggccaagcggg

SEQ ID NO: 664234 - DNA, 50 bp, Homo sapiens
ccggcccggctcgacgccaatgggcatccttctttaaaagagaaatccac

SEQ ID NO: 664235 - DNA, 80 bp, Homo sapiens
cttcaggtgctggaaaggaatgaggagttacagagggccgagaaggacaggatcagggagcatttcctgaagacgtagtc

SEQ ID NO: 664236 - DNA, 122 bp, Homo sapiens
tgagtcggcccatgccagagcccaaggccaccggtgcccaagacttctccgactgttgtggctccccactgcacaaacagtcatctggaccctcctcctccccggccgcagctgctgccccc

SEQ ID NO: 664237 - DNA, 75 bp, Homo sapiens
tggcaggagattatagctctgtatgagaaggacaacacctacttagcttctggtccatcggaggatccgagtgtg

SEQ ID NO: 664238 - DNA, 90 bp, Homo sapiens
gtccggatagggctgacgctgctgctgtgtgcggtgctgctgagcttggcctcggcgtcctcggtgttcctggaaaacaatggaaaggac

SEQ ID NO: 664239 - DNA, 75 bp, Homo sapiens
cgcacttccaggacaacttacattcggtcaaccgggacctcaaaactcagcctcctcccaagctccctgtgggtc

SEQ ID NO: 664240 - DNA, 75 bp, Homo sapiens
ttatcccggagagctgacaatgatgaatctcagtctgcgcaggcatggcactaagtgtcccatggcacatttggc

SEQ ID NO: 664241 - DNA, 75 bp, Homo sapiens
aaggcaacgacgttccatctgtggaaggacctaccaaccagatgatgtctttctacctaaagatattgacctaga

SEQ ID NO: 664242 - DNA, 133 bp, Homo sapiens
gccgggtattcctgctgatcctgctcggaccttagcttccctgacctctccctgcccggggagccaagagaaattgggtgatatctgcttctcccttcgctacgtacctactgctggtaagctgactgttgtc

SEQ ID NO: 664243 - DNA, 100 bp, Homo sapiens
gtggatcctagtgccagcaatggacgcatcaaacagctgcgatcaggtgtcatggagaaactccagctgggcccagagattctgcagcgggaaaatccaa

SEQ ID NO: 664244 - DNA, 100 bp, Homo sapiens
cccaggcccctgtcaagaaggtgccggtggtgcgagtcttcggagcgaccccggcaggtcccgtcaggaagcccaagtatgtggaaagccccagagtgcc

SEQ ID NO: 664245 - DNA, 75 bp, Homo sapiens
ccgggaccattctgatcatcctcactggacgccacaggggcaagtttctgccctcactgggacaccgtgctcccg

SEQ ID NO: 664246 - DNA, 98 bp, Homo sapiens
ctttggttacctatgtacctgttaccactttcaaaagttttggctacgggcctccacctccaccgccagatcagtttgcccctccgggggttcctcct

SEQ ID NO: 664247 - DNA, 73 bp, Homo sapiens
cgaggggcggcccaggactcgaggttacagattatgccattgccaggcgcatagtagatttgcattcaagaat

SEQ ID NO: 664248 - DNA, 87 bp, Homo sapiens
aaggaacacgctgcattactgcgtggctttgagcataagatcacagtccaggcctctccaactctggataagcggaaaggatccgat

SEQ ID NO: 664249 - DNA, 74 bp, Homo sapiens
ctttcaggaaggagccattatttatgtcatcaagaagaatgacgatggtattttggcctctccccagtctgctc

SEQ ID NO: 664250 - DNA, 115 bp, Homo sapiens
cacataacggggttcgggtgtctcgtgtgtgaacatcacaggtccttcaagggttagattacttacacagtaagtgcaagatcattcatactgacataaagccggaaaatatctt

SEQ ID NO: 664251 - DNA, 90 bp, Homo sapiens
aatgagaagcaggcagaagattgcatcacacgtcatgatgctatggactcctactacgactacatatgggatgttaccattttggaatac

SEQ ID NO: 664252 - DNA, 80 bp, Homo sapiens
tcaaagtgattccccggaatcgtgtgctgggctggtcccccttgaccctaaaaagtctgccagtcgccctgggagtcggg

SEQ ID NO: 664253 - DNA, 88 bp, Homo sapiens
aaagattctggaggaaaggtttacaagcaggccacgattgaatctctgaagatacgaccatatgtgggatgtttggtacaatatttgc

SEQ ID NO: 664254 - DNA, 75 bp, Homo sapiens
gactccagccggcgggcgagcagggccgcctgggttccacttccagcaacagctcctgcagcagtaccgagtgcc

SEQ ID NO: 664255 - DNA, 100 bp, Homo sapiens
gcacaaactgggctgctgtgtggtagagaaaccccagccgaagattaagattgcggccctgcgcatgtatactagctgtgtggagaaaactgacttcgag

SEQ ID NO: 664256 - DNA, 76 bp, Homo sapiens
ccaaccttgactttcacaaaactggagatggggaagatgtggatgaatatgttaaactcggccacgaagagcagca

SEQ ID NO: 664257 - DNA, 75 bp, Homo sapiens
agaaaggagactcacttatgtgcacaatgggttctctataaaggtgtcttaaaaaggttgattttgttatatgag

SEQ ID NO: 664258 - DNA, 82 bp, Homo sapiens
caggagttcgtctcttacgtctgcggaagtgcagctgcctcagttcttagcgcagacaagcagaatgatgtggagatcccat

SEQ ID NO: 664259 - DNA, 74 bp, Homo sapiens
aattaagaagatgtcctatagtgggaagcagacccatgagtgacaaccatgagtggaaaaaactaattatggtt

SEQ ID NO: 664260 - DNA, 50 bp, Homo sapiens
agggaatacaagtgtcatgtctgtggcagatataatttctacagtagaat

SEQ ID NO: 664261 - DNA, 75 bp, Homo sapiens
ctgcatcattccttggggcaaaatgtggacaagggttcacccacccatccttgatgctaggttctggtgtacctg

SEQ ID NO: 664262 - DNA, 100 bp, Homo sapiens
cagggcggagaggagcggccggagtcagcgatggtgcccggcgaggagaaccaactggtcccgaaagagggccctcatctttgtgtcccatggagccgga

SEQ ID NO: 664263 - DNA, 100 bp, Homo sapiens
ataatgggtatggaggaggacctggagcaaatggttatgagccttagagtttctgaactccaagtactgttgggctacgccgggagaaacaagcacggac

SEQ ID NO: 664264 - DNA, 76 bp, Homo sapiens
gaaaatacaaatcacacgcataatggatgaaaggaaccgacaggtcgctgcggtgagcaccacgggtctgagtgcc

SEQ ID NO: 664265 - DNA, 50 bp, Homo sapiens
gggggttctggagagcggggtgtgggggctgaagaagatgcagagcagcc

SEQ ID NO: 664266 - DNA, 100 bp, Homo sapiens
cacaatggaagtagtagttgttgagcagagggaaagggataggagaaggatgtggactgcagtgctgcagtgccagatcccactgaaattagacaatcta

SEQ ID NO: 664267 - DNA, 75 bp, Homo sapiens
caattgcttctatagttgattgaatgctcttaacacggagaggtaactataactacccaatattgcagccatgga

SEQ ID NO: 664268 - DNA, 83 bp, Homo sapiens
gtcgtgctctcgccccaacccgcgcgccagttgcagagtgggcaggatcttaagacccgataggtgcagaacccatctggaca

SEQ ID NO: 664269 - DNA, 98 bp, Homo sapiens
caggagaagatgaagttgaaggactaaaacgcttaatgacagaggactttgcctcccgggccaaactggcagttcaaaaactagtacagaaagttgga

SEQ ID NO: 664270 - DNA, 73 bp, Homo sapiens
tgttgcagccatggtgcattgcagttgcgtgttgttcagaaaggcaaaagtcaacaactctagcttaattgga

SEQ ID NO: 664271 - DNA, 99 bp, Homo sapiens
tgctgggcgagctagttcctaggttgtgtgaactgatcagaagtggtgtaggtcttggaactaagatggaaattcctgctgctaaccttgtgaacaagt

SEQ ID NO: 664272 - DNA, 97 bp, Homo sapiens
aaccatcctataaacgggaaagattgactagtttcacaggtctaccagccacagtctctgcacgtttccaagagcagcagaaaatgaacacattgca

SEQ ID NO: 664273 - DNA, 75 bp, Homo sapiens
agaaagtcctcgctcgtcaccagcaagcttgcgggacctcgaagtagggggaaaactgcagtggaagatgaggac

SEQ ID NO: 664274 - DNA, 75 bp, Homo sapiens
gcccgggccccgagcgcccgaacaggttgggggccgtcccgctcctaaggcaggaagatggtggccgcaaagaag

SEQ ID NO: 664275 - DNA, 100 bp, Homo sapiens
gatgagatttacctgtgagatgtttcatcccaacaagatagaatctcactatgttgaccaggctggtcttgaactcttggcacccaagcgatccttttgc

SEQ ID NO: 664276 - DNA, 75 bp, Homo sapiens
ttgagacaacatctggatggttggggagaacgctgatcactggagattccatcgttagtgctgaggcagtatggg

SEQ ID NO: 664277 - DNA, 101 bp, Homo sapiens
catggaacagggactcactgggggctgaagggtatgtgattggcagctgtattaaacacattccaatcgcaggacgagatataacatattttattcagcaa

SEQ ID NO: 664278 - DNA, 50 bp, Homo sapiens
agaaatgtttgggaggcactgtccaggactcagtgacctttgaagatgtg

SEQ ID NO: 664279 - DNA, 100 bp, Homo sapiens
atagtctccagcgggcctggactgtgggctggtgtgtggaactggcagaggtggaggagacactgaagcgactgcagagccagaagggagtgcagggaat

SEQ ID NO: 664280 - DNA, 80 bp, Homo sapiens
taggaagacgtttgaggattacctgcacaacgtggttttcgtccccaggatctagtttgaagcactaagaagaataagac

SEQ ID NO: 664281 - DNA, 82 bp, Homo sapiens
cagcctcaggcgtgcgcggacggtgtgcggtaaatggggagcaggagaaccgagtgcagaagggaaatggatattttcaagt

SEQ ID NO: 664282 - DNA, 76 bp, Homo sapiens
gggctcactttgcaaacacggccaggaagctgtgatgcagatccatccgccctagcaaaatatgttctggctttgg

SEQ ID NO: 664283 - DNA, 101 bp, Homo sapiens
cagaaagagaagactttaaccactgtgatgcctgagaatccaagaggagctctaaattgggaagtaatgcaggaaacaagccttgtaaaaatcaacttgga

SEQ ID NO: 664284 - DNA, 96 bp, Homo sapiens
tcggccgggccgtcccggcctgcgcagcctgaggattatatgcgtcaggcaggagaagtgacttatgcagatgctcacaagggacgcaaaaatgaa

SEQ ID NO: 664285 - DNA, 82 bp, Homo sapiens
ctcgcaacaagatcccctatgagagtcccatcttcagcagagacccaacatgagtgaagtttcctgcaagaaacgggacgac

SEQ ID NO: 664286 - DNA, 82 bp, Homo sapiens
aggaacgctccgtctggaacggcgcaggttaaaaatctgtaagagcctgattttagaattcaccagctcctcagaagtttgg

SEQ ID NO: 664287 - DNA, 75 bp, Homo sapiens
gatgtacagccatcaagaggatcttaaagtgtggtctttagtggaaaaaaagttcacagccatgaatgaaccaca

SEQ ID NO: 664288 - DNA, 82 bp, Homo sapiens
tcgcgcttcgacatgatcttcatcgtcaaggatgagcacaatgaggagagggatgtggtaaccaaggagcagtgaacagcag

SEQ ID NO: 664289 - DNA, 100 bp, Homo sapiens
atcatggcggatggccccaggtgtaagcgcagaaagcaggcgaacccgcggcgcaataacgagtcttcctgcgagcaattaatcagtatgcagatatgct

SEQ ID NO: 664290 - DNA, 100 bp, Homo sapiens
gtcctgccgcctcccgggagtgccgtgcgccgcagcccgggcccaggccccggcagcgcctgggacaagaaaatggccttacagcctgggacaaaccgaa

SEQ ID NO: 664291 - DNA, 100 bp, Homo sapiens
gcaagcagtatccatggcatttttgcaatcctatattgatgtggcagttaaactgaaaggccagaaatgtacacacaggagagctggctgcagtaaaaat

SEQ ID NO: 664292 - DNA, 83 bp, Homo sapiens
ctccagtcaccctcgtcttgcattttcccgcgtgcgtgtgtgagtgggtaccctgcagtccagccctgcgaccacgactccat

SEQ ID NO: 664293 - DNA, 50 bp, Homo sapiens
ggcgcgctcgagacgctcctgaggtgggcagacccagcaacatagggcag

SEQ ID NO: 664294 - DNA, 100 bp, Homo sapiens
tggtcgccgccgcggccgcctggaattgtgggagttgtgtctgccactcggctgccggaggccgaagctagagaccgttggatggcagcttaaccttcag

SEQ ID NO: 664295 - DNA, 82 bp, Homo sapiens
acaagagcgaggagaagcgagaaaagatgaaacggaccctgtgcgagacaagaagcttctcaatgacctgaatggagccgtg

SEQ ID NO: 664296 - DNA, 91 bp, Homo sapiens
ggatgggaagttcaagtttactgcgaagtccacccagcgttccggagacaatgcagatcttcgtgaagactctgactggtaagaccatcac

SEQ ID NO: 664297 - DNA, 90 bp, Homo sapiens
aaggaaatttccatccacacagattagcagttgaaaatggtgggaggccaccccatggaccgcgtgctcctcctcgtgtggggggggcat

SEQ ID NO: 664298 - DNA, 96 bp, Homo sapiens
attcctgaaatacatccaggaaagacatggagattctcttaaaaagctatgtggtggtaatgcctaaaaagagacaagcactggtggagtttgaag

SEQ ID NO: 664299 - DNA, 101 bp, Homo sapiens
cagacgagcaggacaaggagacggtcagagtccaaggtccgggtatcttaccaggtttggttgggatgttccagtaattctgagaaattcagaagagaccc

SEQ ID NO: 664300 - DNA, 74 bp, Homo sapiens
attatttgaacttgatccactcacaggagaatggcattacaagtttgcagaacgccatcgtagtagaagcaggg

SEQ ID NO: 664301 - DNA, 75 bp, Homo sapiens
cggagattgctttctggggaagaagactgtgcagtctttgtaactgatgaagagcaaggctttgtctctaattct

SEQ ID NO: 664302 - DNA, 50 bp, Homo sapiens
acatccgagtgcagaacctgcaaggccatggcgagtgtcactgcggggaa

SEQ ID NO: 664303 - DNA, 100 bp, Homo sapiens
agcaagcccgcacgtgtgaaggcatccactgatcttaagaagcatacagctgatgaaaatccagacaaaagcactttagaaaaagctattggatcactga

SEQ ID NO: 664304 - DNA, 75 bp, Homo sapiens
gaagaggagagagcgcgggcctctaggaaggttgacatcatggacatatgtgagtccatcctggagaggaagcgg

SEQ ID NO: 664305 - DNA, 80 bp, Homo sapiens
agcttcatcaaaaatagtgatagctttgataaaaccaaaaacttttgctagaaaatcagcttttacgagagaaaactcat

SEQ ID NO: 664306 - DNA, 98 bp, Homo sapiens
cgagcaacggccgcatcaagcagctgcgttcaggtgtcatggagaaactccagctgggcccagagattctgcagcgggaaaatccaaggcttatttat

SEQ ID NO: 664307 - DNA, 71 bp, Homo sapiens
gatggcccaggttcttcaaaagataataactgaagtgaagtgatggactccgatttggagagtagtaagac

SEQ ID NO: 664308 - DNA, 83 bp, Homo sapiens
gtttagaccagctagagaccatacagacctaccggtctgtcagtgagatggcttctaacaagaacacaccacagccatcagca

SEQ ID NO: 664309 - DNA, 82 bp, Homo sapiens
ccgagagtgggtgtggaggaggaagactggatgccaatgatcctaacgtgctggccaaagcgctctatgacaatgtggccga

SEQ ID NO: 664310 - DNA, 75 bp, Homo sapiens
ttgatgtactgctttaaacttaaagacctctttggacccgaaattgtaagaactttcacgatggccgtaaagcac

SEQ ID NO: 664311 - DNA, 115 bp, Homo sapiens
gctactgtgcgctcgatccagcaccatggggaagcgggacaatcgggtggagctgcatgctgtttcccttgaacaacatcttctagatcaaattcgaatagtttttccaaaagcc

SEQ ID NO: 664312 - DNA, 99 bp, Homo sapiens
tttgggcggggcggagccgagagccacactttcaagtaaaccagatgtgaagttcatttccaatccgccctccatggtggcagcggggagcgtggtggc

SEQ ID NO: 664313 - DNA, 88 bp, Homo sapiens
gaaaacaggaagaagagaaacctggggaggagaagacaatcttacatggtacctggaatggaaacacaaaagtagccataaagactct

SEQ ID NO: 664314 - DNA, 98 bp, Homo sapiens
ctgaggaagaaacaaagataactgataaaggcaaagaagataaggagaacagggatcagagtgcacagacctcctgccccccgaggtctgcagtctcc

SEQ ID NO: 664315 - DNA, 80 bp, Homo sapiens
ccgcaattcgagaatcaaagggccgggagcgatgacttcccaagtaagaagcggaagaggagccgctggaaccaagacac

SEQ ID NO: 664316 - DNA, 90 bp, Homo sapiens
attcaacagaatcctctgaaacttccacagcactatgttggccatggaaatgctatcaatgagctgaaattccatccaagagatccaaat

SEQ ID NO: 664317 - DNA, 75 bp, Homo sapiens
ccagcatccactggagctacaagagaaagaccacagcaagattctttcattcgtctcctcctagcctgggggacc

SEQ ID NO: 664318 - DNA, 100 bp, Homo sapiens
gcccagtgagagccttggatgtgaacattttccagacatgcttacatagaatatatttacggggaagaaatgaagagcaaggcattcctcttgaatattt

SEQ ID NO: 664319 - DNA, 88 bp, Homo sapiens
ctcttgaggatcgaatcttcactcccgctgtctcagcagtctacagcacggtagagtacagagagatggatgaaagcttggccaacct

SEQ ID NO: 664320 - DNA, 100 bp, Homo sapiens
gcgctggccgggggcgcgggcggcggcgccggcaggaagatcaacaagttggagaaagctgttgctgcagcacacaccttcttcgtgggcaatcctgagc

SEQ ID NO: 664321 - DNA, 75 bp, Homo sapiens
cggccaccgactactgtcagcagctgtgccaggtacatgatgttgattgatggcacaaatgaagtttttatgatt

SEQ ID NO: 664322 - DNA, 100 bp, Homo sapiens
catcagcaggccctagaagcctcactcttgcccctccctttaatatctcaaaggcacattgcaagcaacccgtgccttgatggtggttggcatcctcctg

SEQ ID NO: 664323 - DNA, 90 bp, Homo sapiens
ggaaagttccagccggttcgagagctagcaccacacactggaagcagacgctgttcatgatggacgacccagtccctgtccatacaggag

SEQ ID NO: 664324 - DNA, 50 bp, Homo sapiens
ttggcaagtggacattttactggctcaaaatgattgaagatagtgggaaa

SEQ ID NO: 664325 - DNA, 83 bp, Homo sapiens
ggccgtgccctggggctgagccctcaggtggccaaggtggaatacgtcaggaagaagccaaaattaaaagaagtccaggtgag

SEQ ID NO: 664326 - DNA, 88 bp, Homo sapiens
gtggagaagtgtccggggtagccccgttacaggtggtcgtaatggttatggtgcaaaactttgtaatattttcagtacaaagtttaca

SEQ ID NO: 664327 - DNA, 80 bp, Homo sapiens
gcctgcacaccaagggcgcccttcccctggatacggtcactttctacaaggttggtgttcgaggaagagacattgttgtt

SEQ ID NO: 664328 - DNA, 100 bp, Homo sapiens
cgccaaggcagacgcgcagctcgccaggctggccgccctgcagcacctcagcaaggccaacaggaataccccctcagggctgaaggagccctggcccaac

SEQ ID NO: 664329 - DNA, 75 bp, Homo sapiens
ctttcaaccttcatgaaaccattactaagatcttcataaacaatgaatggcatgattcagtgagtggcaagaaat

SEQ ID NO: 664330 - DNA, 49 bp, Homo sapiens
gaaatgaggacatatcagtatcgttgtatcacggactgattcaccgagc

SEQ ID NO: 664331 - DNA, 76 bp, Homo sapiens
ttgtccacatgagaggattacctttccaagccaatgcccaagacattataaacgccttcccttcttcttggtggtg

SEQ ID NO: 664332 - DNA, 51 bp, Homo sapiens
cctgctcacgagagaaaaaggagatttggaacatgcgttgaaatgtcttca

SEQ ID NO: 664333 - DNA, 83 bp, Homo sapiens
aaaatcatttttgaggatgaccggtcattatttagaagcaaggtccttgaatgagcgagattatcgggaccggagatacgttg

SEQ ID NO: 664334 - DNA, 107 bp, Homo sapiens
ggtttgtcgccagaaggaagatggcggatctggaggagcagttgtctgatgaagagaagaaaaatatgtcgtaactgcaagtgtggccaagaagagcatgatgtcct

SEQ ID NO: 664335 - DNA, 75 bp, Homo sapiens
tccgccgctcaccccgcggccgcaccttcccgccttctcaggttgtgaccgagattcccgacgagagagactgag

SEQ ID NO: 664336 - DNA, 100 bp, Homo sapiens
agcagctagccggatgggtgactttgaagagatcaattggactgaggaaaaggagtatgagttttttaggtggtggcggcagtcggatagacaataccac

SEQ ID NO: 664337 - DNA, 50 bp, Homo sapiens
caagtgtctctacctcatttcccgatggagttttaacattgaatgcggag

SEQ ID NO: 664338 - DNA, 51 bp, Homo sapiens
gcttctttggagaatgatatcaaaccagctgaagtgcagtgttgtgatctc

SEQ ID NO: 664339 - DNA, 97 bp, Homo sapiens
caggggtcgctgtcgcctgctgctggctcctcactggaaggatatggagtaatagtactaaatcccaatgaaaactatattgaagtagaaaagccga

SEQ ID NO: 664340 - DNA, 103 bp, Homo sapiens
gtgtaccgcatgcagcagtacgacctgcagggccagccctacggtctcggcgcggaagatggccggcggcgtggacggccccatcgggatcccgttccccgac

SEQ ID NO: 664341 - DNA, 73 bp, Homo sapiens
cagagggcacctgagcggctggagagcctgttggagaaacacaaagagctcctgaagaaggacttgtgtaata

SEQ ID NO: 664342 - DNA, 75 bp, Homo sapiens
ccgtgctggtctttctcaacctcatcttctggagcgatcaggacgccacggctccgcctgaagcgatggcccagc

SEQ ID NO: 664343 - DNA, 90 bp, Homo sapiens
agacaaggctggagacaaacctcatatgcagacttatgaagttgaccttaataagcatcagggatttggggtactctcagtaatattggc

SEQ ID NO: 664344 - DNA, 95 bp, Homo sapiens
agtgagagagagctattagagattgtgaagaagaatttcgatctccgccctggggtcattgtcagaggtaccaatcttgggaaaaagaagcaaca

SEQ ID NO: 664345 - DNA, 74 bp, Homo sapiens
ctttgaccgagaggctgctggagctcgtgtttggacgcgtatgttgagtcgatgggatgatagccagagatttt

SEQ ID NO: 664346 - DNA, 75 bp, Homo sapiens
ccggaccgaagtgcgcagactcggaggcatactccctttggctatcatggtgaacttacttcagattgtgcggga

SEQ ID NO: 664347 - DNA, 75 bp, Homo sapiens
cgccacagcggcctcggcctccccttggattcagacgccgattcgcccaggtcgttgaggacttccacatggaga

SEQ ID NO: 664348 - DNA, 100 bp, Homo sapiens
cagagaacagccctccatcttgcagcccagaaggagtctccccaggacagtgctatcacccgggatattaaccgaacattcccagcccatgactacttta

SEQ ID NO: 664349 - DNA, 98 bp, Homo sapiens
aatgcacaaaaataataaattggcattaccagacaagaaaagagctcttcaggtctaaatcatatcttagcagctcttactatcttcctcaagacttt

SEQ ID NO: 664350 - DNA, 75 bp, Homo sapiens
ggcggtaggaagccggagacagcagggtgacagctaaagcttgctttcactctggaccacgagaccggattgcct

SEQ ID NO: 664351 - DNA, 83 bp, Homo sapiens
ctttccagaagcgcagcagctgcttgaagcccatgctagacccagtcattcttactacaatccaggatgtacggagtgtagaa

SEQ ID NO: 664352 - DNA, 101 bp, Homo sapiens
taaaatacgaaggtttctggctggaagccatttggaaatagcatcagcagatataatggggagcctgagcatattgagagaaatgacgcacctcataaaaa

SEQ ID NO: 664353 - DNA, 90 bp, Homo sapiens
ggccagctgactgctcaggaagtaaaatcgacaacgactgaaagacctttcattcagaagctgtttcgtcctgtggctgcagatggacag

SEQ ID NO: 664354 - DNA, 75 bp, Homo sapiens
aaagaaccacaaacttgaagatggatatcagctacagactttcctgagtcagccatcactggtgcaagctatatt

SEQ ID NO: 664355 - DNA, 86 bp, Homo sapiens
ggaagagtggctggaggaattcagtttcttgggggtttcagcgttaaaaacaatggccagtcagggaggccccaagtatactctct

SEQ ID NO: 664356 - DNA, 75 bp, Homo sapiens
tgatagatacatcagtgtgggaagccaagcagatacaagaaggcactgatcctgaaactgaagaccccaaccacc

SEQ ID NO: 664357 - DNA, 96 bp, Homo sapiens
gaacagtctggccacctctgtattcagcatagctattcctgttgatggtgatgaagacaggtacaatgttagctgttctaaaaaatttgcacttag

SEQ ID NO: 664358 - DNA, 100 bp, Homo sapiens
gctcatcatgatggacttggagctgccgccgccgggactcccgtcccagcaggtattgttgcagcatctggcagtgagactgaggatgaggacagcatgg

SEQ ID NO: 664359 - DNA, 50 bp, Homo sapiens
cgtgctcttggctgcctttgaaaagctatcagttgagggatttgcagttg

SEQ ID NO: 664360 - DNA, 90 bp, Homo sapiens
gccatatccgtggtccacgttattcgggacatcacagaataccctctaccatctgctttggtcagggtgccgctcgaggatttaaaagca

SEQ ID NO: 664361 - DNA, 75 bp, Homo sapiens
gcagagtggaccacggggagccccacgaggtctgtccacgttctctgtgggttcattgccggacttgagtctgag

SEQ ID NO: 664362 - DNA, 75 bp, Homo sapiens
ccaagaaggtctttgtccccgacgagcagaagatccgagcagttggcagactaaaaagagagcggtctatgagtg

SEQ ID NO: 664363 - DNA, 100 bp, Homo sapiens
cttgggagcagcattgactccctttaaccctttagctggcctaaggattgcaggaccctttggtcggtgagctggtaaaggttacgaagattaatgtgag

SEQ ID NO: 664364 - DNA, 74 bp, Homo sapiens
ccagcctgcggagcctgtggggcagtgccgtggaggtcccagcccccgctgcggttctcggaggtccggagccc

SEQ ID NO: 664365 - DNA, 96 bp, Homo sapiens
ccagaggtcgtggaggtggccgtggaggcagaggtggcatggggatattgctgcatatcgagctaaaggaaagcctgatgcagcaaaaaagggagt

SEQ ID NO: 664366 - DNA, 50 bp, Homo sapiens
agagccaccccatccctcattctctgtggtaatctactgggacggaacag

SEQ ID NO: 664367 - DNA, 90 bp, Homo sapiens
cggagcccctttagccatgtggatacctacggagcacgagaaatacggcgtgggacatgtcctcatagagatttcaagtacccacaagaa

SEQ ID NO: 664368 - DNA, 100 bp, Homo sapiens
tctgccctgggtcttctcggctccatatcatggcagcgttacagtgtttctgccacctctgtacaaaagacaattttacttgtgtgacagatgggctctg

SEQ ID NO: 664369 - DNA, 82 bp, Homo sapiens
gaactgctggccacgagtacggggtgtggccatgaatcagagcccacacgatgaagacccccaggcagtgacgtatgccaag

SEQ ID NO: 664370 - DNA, 83 bp, Homo sapiens
ctgtcttcggtggactccttcggcagtccacccaccgccgccgcctcccaggtgatccgcaggggctggctgaccatcaacaa

SEQ ID NO: 664371 - DNA, 100 bp, Homo sapiens
atttttgtcattgatagtagtgatagattaagaatggttgtggccaaagaagaactcgatactcttctgaatcatccagaagctgccagtaactcagatt

SEQ ID NO: 664372 - DNA, 74 bp, Homo sapiens
ggggacgcgaggacccgggctgggctttcctcacccggactggaatcagccattttaccaagaaagttgggttt

SEQ ID NO: 664373 - DNA, 98 bp, Homo sapiens
atctcggataccatcatctctggcaccttccaccagtggagagagggcaccaccaaaagtgaggtcttctacccagtctgcgctcctcagaccaccgg

SEQ ID NO: 664374 - DNA, 88 bp, Homo sapiens
cagagaacttgccggtgccagctgagatgcagacaatctctttgaacatgaattgggggctctcaatatggctgcattactacgaaaa

SEQ ID NO: 664375 - DNA, 75 bp, Homo sapiens
ggccttctctagaccttgccaagatggcacagtctggctcttgctgattgaattcctttggtgcagtttagcatg

SEQ ID NO: 664376 - DNA, 101 bp, Homo sapiens
tggtctgagtggactgtcctgcagtcattgaaattatgagactatcattcaaatggaagcattatagttcttcggaaccattatgatctcaaaacgaaagg

SEQ ID NO: 664377 - DNA, 75 bp, Homo sapiens
ccctgaagatgattctaattcaacaaatcataacttggatgacccctccggcgaaggtgtcctgccctcggcccg

SEQ ID NO: 664378 - DNA, 74 bp, Homo sapiens
aacatcatgatttccccaacattcctggaaaaagtcttccactggtgaggaagaggatggagatgaagatgagg

SEQ ID NO: 664379 - DNA, 100 bp, Homo sapiens
taattaacactacccaggatgggtttcccaaaccactccttatgatccagtgaatattcaagagagctacatttgaagcctgtacaaaagcttatccctg

SEQ ID NO: 664380 - DNA, 83 bp, Homo sapiens
cccgctggccgcctcgatgcaggaggacgaacagatcgtcagtatttaaacagatcacatcatgcgtgagtacaagctagtgg

SEQ ID NO: 664381 - DNA, 100 bp, Homo sapiens
cacttgaagaaaagggtgaaggaggcgaattttcagttgatagagctgaagttgtaataaacggctcctcatcaccagctgttgttgacagaagtaatga

SEQ ID NO: 664382 - DNA, 49 bp, Homo sapiens
ggagcatgcctttgtggcctcagaattccaagaaaggtggtgtatgacc

SEQ ID NO: 664383 - DNA, 83 bp, Homo sapiens
cgagccgcccgcagagcaagcgcggggaaccaaggagacgctcctggcactgcagttggaatcgaagcctcttaaaatggcag

SEQ ID NO: 664384 - DNA, 100 bp, Homo sapiens
gtggccatcttgagtctactctgtcgctcttgtgccctagcaccccgagaaccgtcagtttgagccagatgcttatgttcctgaggaagaattgaaggca

SEQ ID NO: 664385 - DNA, 83 bp, Homo sapiens
cttcgctgtgctccggagagatatattaacctggctgcagagccaaaagtgaaccgaggaaaagcaggtgtgaaacgatctgc

SEQ ID NO: 664386 - DNA, 100 bp, Homo sapiens
gtggagttggactgaatgctgcacagttcaaacagctgcttatttcggctgtgaaggacctgtttggggagaaaacatactctcctcaggccagatttca

SEQ ID NO: 664387 - DNA, 89 bp, Homo sapiens
tctcttgattggacgtcaggatctttccaagcaggcctgcgaaggaaacttacccaaagggaagtcttggcctgacaatgaactactgc

SEQ ID NO: 664388 - DNA, 75 bp, Homo sapiens
ccggaagcggggtcggcccccaaaggatgagaaggatgatgatgctgaagctatccttgctgcagacttcgaaat

SEQ ID NO: 664389 - DNA, 82 bp, Homo sapiens
acctgcgctgtgatgcctgcagagctgtggcttaccaggcttaagtccactccccgccctaagttctctgtgtgtgtcctgg

SEQ ID NO: 664390 - DNA, 100 bp, Homo sapiens
ttaacagacaagacacttttcagaaagacaggtggaatatgtgatcaagtgtgacatgtcagctctgcagaagattctgtatcgccatatgcaagccaag

SEQ ID NO: 664391 - DNA, 96 bp, Homo sapiens
ttgaacatgtggaaggtgcgcgagctggtggacaaagcgtgtggcaggtgtttccagtgccatggaccacaccttctcaacaacatcaaaagatgg

SEQ ID NO: 664392 - DNA, 50 bp, Homo sapiens
cgcttccagacattctcagctgtcaggaattgaatgatctggcacgggac

SEQ ID NO: 664393 - DNA, 83 bp, Homo sapiens
ccaaccatgctcaacttcggtgcctctctccagcagactgcgccgactgcaagtacaagtttgagaactggggtgcgtgtgat

SEQ ID NO: 664394 - DNA, 75 bp, Homo sapiens
ctgaagaaaagggaaaacttgctgcggttgctcaagatcagaccccaacaccaacaagattcttgaaaaactgtg

SEQ ID NO: 664395 - DNA, 75 bp, Homo sapiens
gaagattcttacctctttgatctcgacaataagcctcaaggaataggttctcctagtgtctatcatgcagttatc

SEQ ID NO: 664396 - DNA, 100 bp, Homo sapiens
gagcgggaagaacgggaaaacaacctgcccgaagacagtctggagcccggcactgtggtcataacagagcaggcagtggatacctgcttcaaggcagagt

SEQ ID NO: 664397 - DNA, 101 bp, Homo sapiens
cccggctccccacagaagctcatccgcaaggtgtccacgtcgggtcagatccgacagaagagcattggggagtcagcaatgtccgttgtgttaaatcagct

SEQ ID NO: 664398 - DNA, 75 bp, Homo sapiens
catcctggaagctgggaaatgatccataatgagatggcatcaacatcagataaaggtgcccaaggaagaaatgac

SEQ ID NO: 664399 - DNA, 50 bp, Homo sapiens
ctgaggagtccaacatcaccatgcaggtcctgatgacattcgagaacctg

SEQ ID NO: 664400 - DNA, 100 bp, Homo sapiens
cagtgcgttgcagtatatgaacttcatgaatgtcatctttgcagcacagaaacagtccctgatcaaactctgggagtctatgtccactcaagcatttctt

SEQ ID NO: 664401 - DNA, 82 bp, Homo sapiens
ccgcgcgcccgcgccctccgcgcgacgccagggttgtgagtcccggcccagcccctccacccccctgcccccccgatgcgac

SEQ ID NO: 664402 - DNA, 100 bp, Homo sapiens
ttcaaggatctactctgaagatccctgtggtagagagaaaaatcctggatctgtatgctttgagcaaggtatcatctttatcagaaagtgaggagtccca

SEQ ID NO: 664403 - DNA, 115 bp, Homo sapiens
gttacacaaattgatgcacaaaataagctggaaaaatctgaggtatacccgaaatcttgtggatcaaggaaatggaaaatttaatctgatgattctctgttggggtgaaggacat

SEQ ID NO: 664404 - DNA, 90 bp, Homo sapiens
cttttccaaaattctggaaatggaactctaatgatccaggacaaagaagttaccctggagtatgtatcaagcctggatttttggtactgc

SEQ ID NO: 664405 - DNA, 100 bp, Homo sapiens
atgagatcgtggacaagatcatgggcaaaggacagatccaggggatcttctctggatcaagcaatggtggtgaaaaatgtttcgcaagggcaaaaaacga

SEQ ID NO: 664406 - DNA, 75 bp, Homo sapiens
acctggagctctacgcctcctacgtttacctgtccatgggtttcgtggctgtcccaacaaaaaatcccgatggca

SEQ ID NO: 664407 - DNA, 95 bp, Homo sapiens
cgagggccatggggccctctccatttctcctctcagcagaagtccaggttcccatgcagactcttagcacaacctaacaaacggtttaaaatctg

SEQ ID NO: 664408 - DNA, 100 bp, Homo sapiens
ggcattttacttcagcaagctgaaggaggaccagatcaagaagtctattatcctcccagtccacaacgctgaaccgtggctggacgaatgtttgaggtct

SEQ ID NO: 664409 - DNA, 100 bp, Homo sapiens
tgcgcacccccgccccgctcaccttagccccgcgcccgaggccaagaataaggagacgggtgctttggctgcggccaaagtcattgaaaccaagagtgag

SEQ ID NO: 664410 - DNA, 95 bp, Homo sapiens
gaagagtctttgcagttcaacctggaaagtgggtttggaggatttgggacaacatctacaactgcaggttctgcattcagcttttctgccccaac

SEQ ID NO: 664411 - DNA, 90 bp, Homo sapiens
cggaattgcacaaggaaaggctgcaagccatagcaggccacaacacacagtgatcttgttctaagagcaacaaagctgggaattccttat

SEQ ID NO: 664412 - DNA, 99 bp, Homo sapiens
aatgaacaaaaggaggaaattaaagaacaaaagacgacgctcattacgcaaagggcgttgtgaatacagctgtgtctgcagcagtccaagctgttcggg

SEQ ID NO: 664413 - DNA, 100 bp, Homo sapiens
tggactgatatagttaagcagtctgtacactgaggaggggacggctccgtcttcacattgtgcacagatctgaggatgggattagcgaagctgtggagac

SEQ ID NO: 664414 - DNA, 96 bp, Homo sapiens
tacctgagaagcaattattaaatgaaagaattaaaaacatgcagttcagtaacacacctgggcagtagaggagaattaggaccagtgggatcccca

SEQ ID NO: 664415 - DNA, 74 bp, Homo sapiens
aacaactagagaagattggacagcaggtcgacactgctgtgacttactcgaagcctcgattggccacattttgg

SEQ ID NO: 664416 - DNA, 100 bp, Homo sapiens
ttcccttgaggagcacaaggagcgctgccgtacatttcttcagagcactgacccaggggacactgatatttggagttcttacaacatggcagacattgac

SEQ ID NO: 664417 - DNA, 96 bp, Homo sapiens
cgggagcctagatcctgtgctttactctgaagactcgtggacgtctgatttatgaagctccccatccacctatctgagtacctgacttctcaggac

SEQ ID NO: 664418 - DNA, 98 bp, Homo sapiens
atccccaaactgaagctgactgcatcaacaacatcaatgacttcctgaaaggatgtgcaaccctccaagtggaagttaacgtccctaaaacccgccgg

SEQ ID NO: 664419 - DNA, 82 bp, Homo sapiens
gacggcgccgggccggccatgctggctacgggcactccctgaagaggaaggagaaggaatatgagcatgaaatggagcggct

SEQ ID NO: 664420 - DNA, 98 bp, Homo sapiens
tccctcacgggcggcggcggggccgagcgcggccctgcaggcgatgtcgccgaaaccgggctgcaggcggatgcttcaggactgccccaaggcccgca

SEQ ID NO: 664421 - DNA, 50 bp, Homo sapiens
agtgaagcaaaagccttccatgattacaaaaatgttatggaattcctggc

SEQ ID NO: 664422 - DNA, 100 bp, Homo sapiens
cttcttaattatgtctgagaaaagacaacatctggggaagatgtacgagacttcacaaaggtacttaagaacaagttcaggtcgaagaagtactttgcca

SEQ ID NO: 664423 - DNA, 80 bp, Homo sapiens
aggaaaacaaaagctgctacttatggaagatacaaaggacttcaccataagggaaagaagagagccttgttggacactga

SEQ ID NO: 664424 - DNA, 100 bp, Homo sapiens
cccaggcgcagatgcgggccctgctggaccagctcatgggcacggctcgggacgatttttgattgtccccggctgaagttttctgagattccccagcgcc

SEQ ID NO: 664425 - DNA, 75 bp, Homo sapiens
aagattaaacagtgggatgcagacaaatttgaacacatacagactctggagctgtcgccattcccctttgacctc

SEQ ID NO: 664426 - DNA, 100 bp, Homo sapiens
atgcctgcggcggagactgcatcaggctctcggctctgacgcccgctctgcggcttcggtgtttgaacaggccacagtccaggagcgcttacattcagga

SEQ ID NO: 664427 - DNA, 75 bp, Homo sapiens
cttctgctctccagcgctctcagcaccaatgcaggccaaggccccctgcccatggaggtgtgctgcagacagcag

SEQ ID NO: 664428 - DNA, 100 bp, Homo sapiens
tcgatgacatcctggaggatcaggtggagcctgatgttcaacgtggacaaggaagcaggggagaggcagatctaccaccgatactgcatggaaagggcgg

SEQ ID NO: 664429 - DNA, 95 bp, Homo sapiens
cttcgcgtctgcccggccaagaggcaaaggggaggttacgcagcaaaccatccagaagtgtcaacagcatctccaccctggagcctgtgagccgg

SEQ ID NO: 664430 - DNA, 90 bp, Homo sapiens
gacaatgtgaatgccctgaaagatcgagcagaggcctatttgatagaggaaatgtatgatgaaggtgaattatgtaacctcattacgctg

SEQ ID NO: 664431 - DNA, 98 bp, Homo sapiens
atggtgttgtgagagatttctgcagtgaagattgctgtaaaaaatttcaggattggtactacaagttctggacatggcaagacatgtgccactctatc

SEQ ID NO: 664432 - DNA, 50 bp, Homo sapiens
ctgaaatcgacgagctgatcaaggaggctgaccccgcactacatctaccc

SEQ ID NO: 664433 - DNA, 82 bp, Homo sapiens
cggcaaccagatcggcgccaagcggagctggagtttgttcagatcatcatcatcgtggtggtgatgatggtgatggtggtgg

SEQ ID NO: 664434 - DNA, 82 bp, Homo sapiens
agagcctcgcctttgccgatccgccgcccgtccacacccgccgccaggtaagtaaggaggtctctgtaccatggctcgtaca

SEQ ID NO: 664435 - DNA, 51 bp, Homo sapiens
cgtcaacatgaacagacttcctggtgtagacggggcactgccttcagagca

SEQ ID NO: 664436 - DNA, 96 bp, Homo sapiens
ccgggatcgtgaccgagaccgtgaccgagagcgtgaccgagagcgcgaatatcgtcatcgttagaagagtgtaggtcttcctgaaactctcaagcc

SEQ ID NO: 664437 - DNA, 100 bp, Homo sapiens
gacatctctcagggtgccggcaccatgaagatctggacttcggagcacgtctttgagacgtcttcctcatctgcttctccctcgtcagcccagcctctta

SEQ ID NO: 664438 - DNA, 100 bp, Homo sapiens
tgcagtggtacaaggaccagaagaaactgcaccggaaatgtgcctaccaggtctattccttggactctgctgactctttccaaagcttctacagtcccca

SEQ ID NO: 664439 - DNA, 82 bp, Homo sapiens
ctggctgcggctgcgctccccgccgcccgcctgcgcctccggggccggccctgcagtgagacggtttaagcggaagcatctt

SEQ ID NO: 664440 - DNA, 80 bp, Homo sapiens
ggaggaccgggaggctcccgggcttgcgtggggcgaactttctgaccaagtatacaactacccagagggcctaggagaag

SEQ ID NO: 664441 - DNA, 75 bp, Homo sapiens
cttactaaccacgaccatcaaatccgtgtcggagtccttacaggtatttctgggaaaagccagcttctgtttgca

SEQ ID NO: 664442 - DNA, 74 bp, Homo sapiens
ttttatagaagtgaagtgattaagaattccttgaggtcctgtaataaagagggatccgaacaagctcagaaaga

SEQ ID NO: 664443 - DNA, 75 bp, Homo sapiens
aggacacacccaggaaaagactcaggacggacaagcacagtcttcggaaggatgaaactgattccaagacagcct

SEQ ID NO: 664444 - DNA, 75 bp, Homo sapiens
gtgatccaggcacatgatgtgcagaacccactccatttcggtgagatgaagcaatgcatgagagctggaagtgga

SEQ ID NO: 664445 - DNA, 51 bp, Homo sapiens
cacggaggtctgttttgatgattctgggagattatagcatttgatgagctg

SEQ ID NO: 664446 - DNA, 100 bp, Homo sapiens
ggcggcgggagcggcgccgagaggccgtgcgggacgcgggcgccaggaccggccgaacgcagaggtgtctgagggttctgtggtccagttttcatcagca

SEQ ID NO: 664447 - DNA, 99 bp, Homo sapiens
tgcagtggcgcctaaagtctgagagagggaagtcgcctctgtgctcgtgagtgcatggggtataaggacctgctgaagctcacacccgtggaccaccca

SEQ ID NO: 664448 - DNA, 101 bp, Homo sapiens
atcgttacagccggcgaagaagaagcaggtttcggtctaagtaccacccagatgaggtggggaagcgtcggcaggaggcccggggggccctgcaaaaccga

SEQ ID NO: 664449 - DNA, 82 bp, Homo sapiens
gtcttcggtggactccttcggcagtccacccaccgccgccgcctcccagctgtccccgccctactccggaccgccccaaaga

SEQ ID NO: 664450 - DNA, 50 bp, Homo sapiens
atatttcagaggtcatgtcaaaagagttaccaccaccctgtgaatctgcc

SEQ ID NO: 664451 - DNA, 100 bp, Homo sapiens
ttttgtatccgtcgaggctacagtagaggtactccaaagattcaggtttactcacgtcatccagcagagaatggaaagtcaaatttcctgaattgctatg

SEQ ID NO: 664452 - DNA, 50 bp, Homo sapiens
attggttaaatatttgctggcttctgctttagcgtcacctccctcactgg

SEQ ID NO: 664453 - DNA, 75 bp, Homo sapiens
gagtctttgaggacacagcctcgctggaggcagtttctggtggagccatcgaagcccccacccacaggctgacag

SEQ ID NO: 664454 - DNA, 83 bp, Homo sapiens
cccagctctgcagccacatactatccgtttgttcaggaaccaccagtgacagaatgagtgaccgaggaggtggcgttcctttg

SEQ ID NO: 664455 - DNA, 50 bp, Homo sapiens
cacgtcttagtccactagagctggaacttggcattagaattcctcgacca

SEQ ID NO: 664456 - DNA, 98 bp, Homo sapiens
cgcccgaatgcaggaagaccgtgatgggagctgcagcacagtcgggggtgtaggttatggggattgtagaaggcatgaaacaaaaaatgtggagtatt

SEQ ID NO: 664457 - DNA, 100 bp, Homo sapiens
gcggccatggagaagcttagctccatcaaatctcaaacaatttatgagattattgataattctcaaggattctacgtaaaagaggcacagttagatgaag

SEQ ID NO: 664458 - DNA, 100 bp, Homo sapiens
tcattgctcagcgcggacctagacctggaatcgcccaagtccctctactcgcgaggtgatgatgaacagtctacacagatggctgcaagttgggaagatg

SEQ ID NO: 664459 - DNA, 100 bp, Homo sapiens
cgctgctgtacttcgtctatgtggcgcccggcatagggctctcacctttgtgtatccttttggtgccacattgagtgtcatgaaaccagcagtggcggtt

SEQ ID NO: 664460 - DNA, 83 bp, Homo sapiens
ttgagagaatagatgactcaaaggagcctactcagtgtgaagacaaccaggatgaagacctttataatgatccacttccactt

SEQ ID NO: 664461 - DNA, 151 bp, Homo sapiens
agcgtcggaagatgccggccgtgtccaagggggacgggatgcggggcctggcggtcttcatctcggatatccgcaactcttcacaggataatgcagctggctgtggttgtatcagaagtacttgagaatggttcctcagttttggtctgtt

SEQ ID NO: 664462 - DNA, 101 bp, Homo sapiens
aggctggtctcgaactcccaacctcagagttgcacggtcaattggcccgtgaaggggacgcctactttcaaacaaggcagacaggacacgacaggacggcg

SEQ ID NO: 664463 - DNA, 120 bp, Homo sapiens
ggcgcgtcccccaggagccatcctgcccgcggggatcccgtcagccggtttccctatttggatccacctaatgagagacttattttagaagctcttaaacagctttaccagtgtgatgct

SEQ ID NO: 664464 - DNA, 100 bp, Homo sapiens
aaaaagagcacctgctttcctcaaactcccattgaatgaagattgtgcatatccagacatttaatgtggatgcaccatgccagaccgtggaagatttaac

SEQ ID NO: 664465 - DNA, 50 bp, Homo sapiens
tgaagaggatgatgtttttggtgaaggtacgcatagctgctaaattcatc

SEQ ID NO: 664466 - DNA, 101 bp, Homo sapiens
gaaaaacgccacctatgtccccagcttgtgaggacacagcagccccatttgtacaggtttgcagattccgccagcagcacagcaagctctacagatgagtg

SEQ ID NO: 664467 - DNA, 100 bp, Homo sapiens
ataaaagagaaagatagatgccctctctcttcatcttcacttgaaataccggatgattttggagatgatcatgacgcagtcctgaggtttaatggggcac

SEQ ID NO: 664468 - DNA, 83 bp, Homo sapiens
tgacgcaggtgcaggtgtctcttctcgccctggcggggaaggtttggtgcacctcgatttggaggaagtagggcagggccctt

SEQ ID NO: 664469 - DNA, 100 bp, Homo sapiens
aagaatattattagcacaagagcaccatactttgaggggagagataatgcatgtgagaaaacttcatatatgtttctacgaaaggaacttcctgtgcggc

SEQ ID NO: 664470 - DNA, 99 bp, Homo sapiens
tacaacgtgggactgtgaccagggcaagcactctgacagtgtgccagcgagatttcagattcctgtaaacctctaaagaaaaggagtcgcgcctcaact

SEQ ID NO: 664471 - DNA, 75 bp, Homo sapiens
ggctgcagatttgtggtgcgttctgagccgtctgtcctgcgccaagaactgataaatttcaaacggaagagagtg

SEQ ID NO: 664472 - DNA, 96 bp, Homo sapiens
tttctccgttggcccaaccagtcccagcgctgtcgtgctcctctactcgattctgaaaaagagttccacgtcctcccttatcgagtctttgttccc

SEQ ID NO: 664473 - DNA, 95 bp, Homo sapiens
gactcaaggactcccatgcccacctgagccctgacagcaccaaggatgaaacgaggaggaagagatagtgaccgtaattcatcagaagaaggaac

SEQ ID NO: 664474 - DNA, 75 bp, Homo sapiens
ctcgctctgagctgcgcctggacctggttctgccttctggacaatctttccggtatccaaaatgttgaaagatta

SEQ ID NO: 664475 - DNA, 100 bp, Homo sapiens
attttggtacagcagggacaggtggtgaagctgatggagccacacagaccagaacggcaggatttagaagaattctgctttaagttttgcatcaatcatt

SEQ ID NO: 664476 - DNA, 100 bp, Homo sapiens
ccgggacaccctggaagccaggaaatgaaatcttcccaaggctgcagacaccgacggatttgctttgggagccagagtagctgccgccaccagagtccgg

SEQ ID NO: 664477 - DNA, 95 bp, Homo sapiens
cagaagatgctgaagccacacagaacacctccggccccggtgactgaagagatgctacagcggagaccgagcggcttctgacccccaaccccggg

SEQ ID NO: 664478 - DNA, 100 bp, Homo sapiens
cgactcggtcacaaggaaaatggattcagtttgcatctctccctcctttaaacagcttctccgggtctcagcatggtgctggagaatctggtaaaagcac

SEQ ID NO: 664479 - DNA, 83 bp, Homo sapiens
aaaggaaaatatcccaaggactaatctgatcgggtcttccttcatcaattctgtggtgttcttggtcacacatttatggagtt

SEQ ID NO: 664480 - DNA, 75 bp, Homo sapiens
cactacagttcatcaacatcaactacgtccctctgaaggtcaggcagttcctgctccgactggggctcctccagg

SEQ ID NO: 664481 - DNA, 75 bp, Homo sapiens
accgagaagtccttcccactgcactccccaggccgttaattaaggaaaagttgagccagggcgtgaccctcgtcg

SEQ ID NO: 664482 - DNA, 75 bp, Homo sapiens
tcgggggccgaactggccctggactacctctgcagggcaccgcgtccgtgctgcagcgccggtcccccaatgagg

SEQ ID NO: 664483 - DNA, 50 bp, Homo sapiens
ccagcatcaagatgatttatggtaataagccagaagtcattggatctgtg

SEQ ID NO: 664484 - DNA, 100 bp, Homo sapiens
taggaaggttcctggagttaccgccattgagctagatgaagatactggaacattcagaatctacggagagcaaatcgcagtcttctccaggctgacaagg

SEQ ID NO: 664485 - DNA, 82 bp, Homo sapiens
tccagcttcggaacaagagaccctgattgctatgctatgccttgtatgactaagacctcttaccaagaatacgtgtcagacc

SEQ ID NO: 664486 - DNA, 75 bp, Homo sapiens
gccgctgatgccgcccgcggcgaggtggcccggaccgcagtgccccaagagagggaaagcaggcaggatgggaga

SEQ ID NO: 664487 - DNA, 90 bp, Homo sapiens
tgcttttccagaaactgtgccaggatcacgaccaactgaagaagaagctgagcaattactgcagttgatgacgagccgtcctcctgctac

SEQ ID NO: 664488 - DNA, 100 bp, Homo sapiens
ctggaagatgtggcagccggccacggagcgcctgcagctctcaaaggtctatggccctgtgttcactctgtattttggcctgaaacccatagtggtgctg

SEQ ID NO: 664489 - DNA, 98 bp, Homo sapiens
gtaaagttggaacacagcagagggtgtgtaataaaatacaggtaaaataccatgaagattttgaaaaaacaaaggggagaggctttactcccgtcgtg

SEQ ID NO: 664490 - DNA, 100 bp, Homo sapiens
ggaggagggagcggccgccgcggccaccgaagccaccgcggccacggagaagggcgagaagaagaaggaggtcctccatgtgaatcaatcccatgatgca

SEQ ID NO: 664491 - DNA, 83 bp, Homo sapiens
gtcctggctcttgccctcatcctggttctggaatcctcagttcaagtctgatcatcggatatcatggagtctggcaagacggc

SEQ ID NO: 664492 - DNA, 90 bp, Homo sapiens
cccccagacaagatggacaccgcggaggaaggtcatcatcagatttgaaatatttaaagtggatacaaaactatttcagcaatgcagaca

SEQ ID NO: 664493 - DNA, 82 bp, Homo sapiens
ggggccagggaaccctggtcaccgtctcctcaggcattgaagttgatatcgatgtggagcacggagggaaaagaagccgcct

SEQ ID NO: 664494 - DNA, 74 bp, Homo sapiens
ttttgctgtctcctcctaatacgtggcaagatgtattagatattatttcaaaagctcttactgacaacaacatg

SEQ ID NO: 664495 - DNA, 98 bp, Homo sapiens
gccttcgtctccgagtttgcgactcgcggaccggcgtccccggcgcgaagaggctggactcggattcgttgcctgagactatggaaatgatgttagac

SEQ ID NO: 664496 - DNA, 83 bp, Homo sapiens
cattcaattgatgggagagtagttgagccaaaacgtgctgtagcaagagagaaactaatctggattcactccctctggttgat

SEQ ID NO: 664497 - DNA, 115 bp, Homo sapiens
caaaaggtgatttattagggaacttacggacagaagcatggtcttggacagcagcaagacaggaggccttacatcgggaacaaatgttggaacagaagttagccacgcttcagcg

SEQ ID NO: 664498 - DNA, 97 bp, Homo sapiens
ggtgtaccaggcgaagctggccgagcaggctgagcgatacgacggtccctggtgctgaaccgcctgcgtccagttgccagcgggggtgggaaagccc

SEQ ID NO: 664499 - DNA, 75 bp, Homo sapiens
cagccggccgcccatcttccacaccatgtcggacggcgagggcccctccgccgctgcatatctatgtgagactga

SEQ ID NO: 664500 - DNA, 95 bp, Homo sapiens
caaagaaggacacagctactactacatctgggccaacaaatatgatgaggcagccagctacatccagagtaagtttgaggacctgaataagcgca

SEQ ID NO: 664501 - DNA, 98 bp, Homo sapiens
aaggcaaagaacaagagaagacctcagatgtgaagtccattaaagagtgtgaacatggctacgcctcttcattcccgtccatgccgagcccccgactg

SEQ ID NO: 664502 - DNA, 75 bp, Homo sapiens
cagttttgatcccctggcatcatttattctccgtactgatcactacatcatgtcagccataatggcaggtgaaga

SEQ ID NO: 664503 - DNA, 100 bp, Homo sapiens
atcgccattatccccagcaaaaagctccgcaacaagatagcagggatcagcggcaaactgaagccatccagttgctacaggcacagctgaccaacatgac

SEQ ID NO: 664504 - DNA, 51 bp, Homo sapiens
ttggaaatggctgcaggttcagaggcaaaagagttggtagtggtgcacaaa

SEQ ID NO: 664505 - DNA, 80 bp, Homo sapiens
gctgtcagagcccggggacggcgaggccctcatgtaccacacggaacaggagtacagctgtgtagtaaagatgccttctg

SEQ ID NO: 664506 - DNA, 100 bp, Homo sapiens
gaatatccagtttgagccatcggatctaagatccaaaagaaatatccgcgcaagatgttgacgttgcagacttggctagtgcaagccttgtttattttcc

SEQ ID NO: 664507 - DNA, 100 bp, Homo sapiens
gctcagcccagccgtgtcactgtccccccggcttccagggaccccgctgtcagtatgaccaggccccgtccccatgcctcggggtgcagtgtgcatttgg

SEQ ID NO: 664508 - DNA, 82 bp, Homo sapiens
ttctcttactcgtgttccctgccactgtcttgttccgaggcggccccagagcaaattgtggctactaatttgccccctgaag

SEQ ID NO: 664509 - DNA, 82 bp, Homo sapiens
cgaggacgaggaggcagccacggggcccctggaataccgtagcagtaggcaggacagttccaattcaacaaaaacctcttta

SEQ ID NO: 664510 - DNA, 82 bp, Homo sapiens
caaagagctcattaaggacgggaagaacctcatcgctgcgacgaaaaacaatgcagatcttcgtgaagactctgactggtaa

SEQ ID NO: 664511 - DNA, 100 bp, Homo sapiens
cccacttccacaaggactggcagcggcgcgtggccacgtggttcaaccagccggcccgtaagatccgcaggtcacggtctagatcacattctcgatccag

SEQ ID NO: 664512 - DNA, 78 bp, Homo sapiens
acggccctggcctgctgggagtggctgctggctggcaaggatggagtggaagtgccgcaataccaagtttccaggccc

SEQ ID NO: 664513 - DNA, 75 bp, Homo sapiens
gttggaaattgcagagtaatgcctcaggaaataatgcaaaaggtgtcccaaggctcctgaccagtgaacaaagat

SEQ ID NO: 664514 - DNA, 100 bp, Homo sapiens
atccttactaaccacgaccatcaaatccgtgtcggagtccttacaggggttgtagaaggtgatttagctgccatagaagcatacaagtcatcaggaggag

SEQ ID NO: 664515 - DNA, 90 bp, Homo sapiens
ccactggaaagctgaaatccttcgcccggaaattcatcaagtatgagaatgaactggccctgcgccagggcgtagaggccgacatcaatg

SEQ ID NO: 664516 - DNA, 50 bp, Homo sapiens
gacggaagaaaaggtctggccggtgttcatgaagtctgtgaagctggagt

SEQ ID NO: 664517 - DNA, 100 bp, Homo sapiens
atggagcagtagaggatggtgcaaccatgacttttttcaagttgtcccttggtgtgggattgcttccagtacctctgtgtgtaacaaaagctgcaccatt

SEQ ID NO: 664518 - DNA, 82 bp, Homo sapiens
aattgccttctcatgaactcagtcactgtggaggaaggagaaacttgcccaggccaaagaagagaacgtgggcttacatcag

SEQ ID NO: 664519 - DNA, 101 bp, Homo sapiens
cagcttaggaccagaagcctttcgcggagaaaaggctgacatgcccgtcctatatgacaggtagtgggcagcagtcagtgacaggtgtaacctctgtggat

SEQ ID NO: 664520 - DNA, 82 bp, Homo sapiens
gcgcagtccgcgcagccctcatcgcaactgggcccgcgcgcaggtggatcagtacaagggaaagcgggatttggagtcactg

SEQ ID NO: 664521 - DNA, 99 bp, Homo sapiens
cgctgcgcggcgcggcggccgggccctcgagacggggacggagccaaaaacctgtatatcatctccgtgaaggggatcaagggacggctgaacagactt

SEQ ID NO: 664522 - DNA, 50 bp, Homo sapiens
gacaagaccatcgagctcatggtgtgactgaagaaatatcaaatgtttcc

SEQ ID NO: 664523 - DNA, 80 bp, Homo sapiens
cgcgggcatcttcttcacccgggcggtgcagctgtttttggaaggaagaaagatggaaagcggtgcagttctgctggaat

SEQ ID NO: 664524 - DNA, 117 bp, Homo sapiens
caccacagccatctcacatttccaagtacattctcaggtggagacctctggaggaaagcaggaatgttcagaggcaaatgaagattctgcagaataagcaagctcagattgtcaaag

SEQ ID NO: 664525 - DNA, 75 bp, Homo sapiens
atttgatgaaagtacttcagggagtcaacggtgaggttacagagaagatcccagtaaggcatttatatacaaaag

SEQ ID NO: 664526 - DNA, 100 bp, Homo sapiens
ggaacatgtacacctcatccctgtacgggtgcctggcctcgcttctgtcccaagatggggctggcaactccttcgacctctcgtccctgtcaaggtacag

SEQ ID NO: 664527 - DNA, 89 bp, Homo sapiens
ccgcccggggcgaggcagggccagcagcaggcgggagatgaggacggggacttggttgccttttccagtgacgaggaattgacaatggc

SEQ ID NO: 664528 - DNA, 74 bp, Homo sapiens
ctactacctggtgcagggcctgattgaggactgccagctggcgctgcagatatggatcagaaactttcgaagtt

SEQ ID NO: 664529 - DNA, 100 bp, Homo sapiens
ggacgcctgggcgccccgaggcgccgggatgtggagcggtacggcaagaagaagctgaaatacctgccctacaatcaccagcacgaatacttcttcctga

SEQ ID NO: 664530 - DNA, 139 bp, Homo sapiens
gttccagggagctgccgagtgccgggtcgtcgctgaccgcaggctgcaagagcggttgatctgacaaatccgaccgccctgtctgccgacattttgccaaaaagggccactgtcgatatgaggacctctgtgccttcta

SEQ ID NO: 664531 - DNA, 87 bp, Homo sapiens
ttcaatactacctttatttccaccatagcttcagtatcagacacagcacagcagccatctgaagagcaaagcaagtctcttgaaaaa

SEQ ID NO: 664532 - DNA, 98 bp, Homo sapiens
cggttaaaaaggtgatgggtatctttaagagcagcttattccaagctttgctaggttcgatacaagaggctgttttcctagcgtggcttgctgccttt

SEQ ID NO: 664533 - DNA, 75 bp, Homo sapiens
taaacttcgccaactccgctgcctttgccgccaccatgcccaaaacgggccccttggcctcagaaggcccccatg

SEQ ID NO: 664534 - DNA, 100 bp, Homo sapiens
tcatcgtaaatatggaacagacttgagccggccatgtgatcattctgggtgacctgaatacagcccaccgccccattgaccactgggatgcagtcaacct

SEQ ID NO: 664535 - DNA, 75 bp, Homo sapiens
ctctgccctgttgctgtcgcgccgctgctggttgctgtccctgctttggtgtcatccccagcactcctctggcca

SEQ ID NO: 664536 - DNA, 73 bp, Homo sapiens
catgcgccggaacaccattcttcgccaggccaggaatgctccttctcctgaaaaagccgaggaggagagtgag

SEQ ID NO: 664537 - DNA, 82 bp, Homo sapiens
ctggcattctgttagacagtgaatgtggaaaggagattgacagtcacaattttgtaataagttctctacagaaagaaccaat

SEQ ID NO: 664538 - DNA, 90 bp, Homo sapiens
attgcagagagaagctgccgctcccaatatgtgtcacaaagatgtctacacggaactgccagggaatggactcagtgatcaaacccctgg

SEQ ID NO: 664539 - DNA, 75 bp, Homo sapiens
ggaaaagccatcgtgaaggagctcctggagctggaagagaagctgaatttggacgacagccagtgggaggacatc

SEQ ID NO: 664540 - DNA, 75 bp, Homo sapiens
gtgtgccctgcacctgcctcttcccccattctcagtaagaatgattgatgttggctgatattggagtgctcattc

SEQ ID NO: 664541 - DNA, 100 bp, Homo sapiens
tcagaagaacttgtacagagatgtgatgttggagaactatagcaatctggttttcttggcttttaacctggagacttgccggcttatggtttcaatgctg

SEQ ID NO: 664542 - DNA, 50 bp, Homo sapiens
cgccatcttggttccgcgttccctgcacaagagtgactcagacatctcct

SEQ ID NO: 664543 - DNA, 90 bp, Homo sapiens
ccgggatcgtgaccgagaccgtgaccgagagcgtgaccgagagcgcgaatatcgtcatcgttagaagccccaaggaggcccgcctgacga

SEQ ID NO: 664544 - DNA, 90 bp, Homo sapiens
aggaggaccacaaagtggaagagtcctgtgccattaaaaacaacaaggaagctttcagtgatgaagctggaggcagattcgtcgctttct

SEQ ID NO: 664545 - DNA, 100 bp, Homo sapiens
gaggagcgggaggattgtaagatactgtgcctttgctccagggcatttgtggagaagttattccaacttttgacatggctgtcaatgaaatcttctttga

SEQ ID NO: 664546 - DNA, 98 bp, Homo sapiens
catctactgtctttttcttcaatgggcagcatatgaaagtggattatggagccctaatttgtttagaactgtaatatgcacagttaaaacaacttgtc

SEQ ID NO: 664547 - DNA, 82 bp, Homo sapiens
atttggagtgtgcgtgcgcgccgagcgggaacggcaggagcagctgatgggatatcggaagagagggccgaagcccaaaccg

SEQ ID NO: 664548 - DNA, 90 bp, Homo sapiens
gaaaaagaaaaggcgacgtattaaggttcaagaagattcatccagtgaaaacaagggtaaggtagccgaacgtggtacccaccatggttt

SEQ ID NO: 664549 - DNA, 101 bp, Homo sapiens
ggatgcttagatcaactttagctcagcaagcccaataggggcacaaaacgtccccgggatgatgaagaggaggagcagaagatgcgtcggaaacaaactgg

SEQ ID NO: 664550 - DNA, 83 bp, Homo sapiens
gaacgaggcaaggagctaaagcagcgtgcgttcagccctgggcgcccggcagaatggcgggaaggtgaggcacaagcggcagg

SEQ ID NO: 664551 - DNA, 97 bp, Homo sapiens
ccaaggagaaccaggacatccggctgctgcaggcccagctgcagctccctctcactggcagcaccttccatgaccagatagccatgctgagccaccg

SEQ ID NO: 664552 - DNA, 95 bp, Homo sapiens
caggcctttcccaatattcatccacctcagataccagcaactcccccatcgtatgaatctgtgttcctgatccaagcagaaccctgttatttgaa

SEQ ID NO: 664553 - DNA, 100 bp, Homo sapiens
gaataaccagcgatggattttttcagctggaagaattgcccgggacacagcattgttggttttgccatgtactattttacctatgacccgtggattggca

SEQ ID NO: 664554 - DNA, 98 bp, Homo sapiens
aagaatctcgtgctcaccggtttctcccacatcgacctggggttcaactagatatagcttcacaatctctggatcaagaaattttattaaaagttaaa

SEQ ID NO: 664555 - DNA, 100 bp, Homo sapiens
cgggcacgcggtgagcctggagcagcacaaagccgtgcactcgcaggtcattaacgggctgaagcagaggatcctgaagctggaacagcagtgcaaggag

SEQ ID NO: 664556 - DNA, 82 bp, Homo sapiens
ggcgcggcggccactgggcgcagcacccagggggggccctcagcctcttggccttgaacgggctgttcatcttgattcacaa

SEQ ID NO: 664557 - DNA, 82 bp, Homo sapiens
gtttggaaagacccaggagaagccgcccaaagaactgcaaaagactgttgaagtagagagcattttgcccagctcactcgga

SEQ ID NO: 664558 - DNA, 98 bp, Homo sapiens
gccaagcagactaagcaggacaaggagaagatcgctgatgtggtgttgctgcagaagctgcagtctctgctggatgaaccgaatcctaacagtccagc

SEQ ID NO: 664559 - DNA, 100 bp, Homo sapiens
ctagattagaccatgaacgagccaagggttatgtggtccgaatcagtggtgggaacgacaaacaaggtttccccatgaagcagggtgtcttgacccatgg

SEQ ID NO: 664560 - DNA, 100 bp, Homo sapiens
ctgtgaccacccctgaagaaattgcacaggttcgttccaccagtcataaaccagatgaaatctatggcatgattgaaagactatctcctggcactcgcaa

SEQ ID NO: 664561 - DNA, 100 bp, Homo sapiens
gctacgttcttctcggcccgccgagatggcgctcgaccccgcagttgtcatggatgcactggtagaagatgatatctgtattctgaatcatgaaaaagcc

SEQ ID NO: 664562 - DNA, 106 bp, Homo sapiens
gccgctttgccattggctcccaggtgtctgagcacagcatcatcaaggacttcaccaagcaggattacggggcgctgaaagacatcgtgatcaacgcaaacccggc

SEQ ID NO: 664563 - DNA, 50 bp, Homo sapiens
atgaacgccctgcgctacgatgccatgctttccagagtgttgaatcttcc

SEQ ID NO: 664564 - DNA, 90 bp, Homo sapiens
tgaagacctattttactgataagaaaacacatctttacacactaaatggagaggagaaaacctatggtggctgtgaaggacctgatgcca

SEQ ID NO: 664565 - DNA, 75 bp, Homo sapiens
atcccgggcatgggcggcaactctttgatgtactactataatgggaaagcgacaatccatggacacaagggacca

SEQ ID NO: 664566 - DNA, 75 bp, Homo sapiens
ggaaattcctgacgttcattgatctgaaggccaatgatgaggccaatcagagtgatacaagtgtctccttgtcag

SEQ ID NO: 664567 - DNA, 76 bp, Homo sapiens
cactaggatgctcttctgggcatgctctacaaacaaacctgagggatacagggacctcctgccccccgaggtctgc

SEQ ID NO: 664568 - DNA, 100 bp, Homo sapiens
tctgctcattggggcgttgaggaccatgaaccagagaatcagtcagagtgctccagtgaaacagccaccacccctggctccccagagcccacagggaggc

SEQ ID NO: 664569 - DNA, 83 bp, Homo sapiens
aatgggcacccgcgacgacgagtacgactacctctttaaagcatccacccgttttgtcaagtgtgaaaagtgtcatcattttt

SEQ ID NO: 664570 - DNA, 97 bp, Homo sapiens
acagccccgacgaacatttctgggtgacactcaacaggattcccggtgtcatggagaaactccagctgggcccagagattctgcagcgggaaaatcc

SEQ ID NO: 664571 - DNA, 100 bp, Homo sapiens
cagcagcctttttggtatagatatgcctcttccttggttgtgccactactgagttctccagttctctttcagcgattgttcagcatacttctttcattga

SEQ ID NO: 664572 - DNA, 126 bp, Homo sapiens
tggaattctaatttgaaccatgtttggattgaagccgcctctgtattacttaccagaacgtgctggccaaagcgctctatgacaatgtggccgagtccccggatgagctctccttccgcaagggtg

SEQ ID NO: 664573 - DNA, 100 bp, Homo sapiens
tgccgctatggatgatcgagaggatctggtgtaccaggcgaagctggccgagcaggctgagcgatacgacggtctcctctgagcctccggcctccataag

SEQ ID NO: 664574 - DNA, 51 bp, Homo sapiens
tcgtggccctgtacgacttccaggaaggcttcaccaatgaccagtaccagg

SEQ ID NO: 664575 - DNA, 90 bp, Homo sapiens
gccggacgctctatgacgtcatcttgtacggccatcccaggcctcaggacctgagttctccgacgcccacatgacatggctgaactttgt

SEQ ID NO: 664576 - DNA, 100 bp, Homo sapiens
ttttccgaaagaagtatggtgtgcagtttctcctagatacacttaggatttattatggaacactatgtggctgccgtgtaagagtggaactgtcgaatgg

SEQ ID NO: 664577 - DNA, 98 bp, Homo sapiens
tctggtgtgggtttcccaagcaaggttccttggaagaagatgtctgcagaggaactagtcagccggaagctgagtttggttcctggtgcagaagaagt

SEQ ID NO: 664578 - DNA, 75 bp, Homo sapiens
tgcaagatgtggcagaagaacaagaagttgagaccgagaatgtggaaacagggctacaccaagtccattgatatt

SEQ ID NO: 664579 - DNA, 100 bp, Homo sapiens
tgctgctgctgctcctggaaaccgatcaggaagcaccatacctcctgcgaaacctcagtgatcacacagtggccatcagcagttccaccactttagactg

SEQ ID NO: 664580 - DNA, 132 bp, Homo sapiens
gtctgcccattgatagaggccagattgtcttggaagttccaaagttgcaacgatttctgtaccagatcatcagtcaattaagttaagtaatctaggtgagaataaacactatgaggttgcaaagaaatgcgt

SEQ ID NO: 664581 - DNA, 74 bp, Homo sapiens
ggaaagcctacgattgcatgcttcaagggtactcctgccatgcgtcgctcccttgtcccccagctacggagtgg

SEQ ID NO: 664582 - DNA, 96 bp, Homo sapiens
ggacattgaccaatgctcaagtgatggctggttttcaggaactcataaatgccacctcaacaattcagaggatggaagagtgtagaaagtgtccca

SEQ ID NO: 664583 - DNA, 88 bp, Homo sapiens
tgaaaaattcagatggaagttatcgaatattcagcaagggtgcatctgagataattctgaaaaatcgcaatgtatctgctgagcaaaa

SEQ ID NO: 664584 - DNA, 101 bp, Homo sapiens
gaaatccaccctgttaacaatgtgaaggttctaaaggctgtggatagctatatttgggttcagataggagcatgctgctatgtggaatgttcagctttaac

SEQ ID NO: 664585 - DNA, 100 bp, Homo sapiens
cccagctgccggtcttggcatcttcgaagtaaggagaggttctccaagccagcacccatgttcctggatgactcctttcgcaagtgggctagaatccggg

SEQ ID NO: 664586 - DNA, 50 bp, Homo sapiens
atggagaaggaagaggagtcggacatctggaggacctgttgatgctagtt

SEQ ID NO: 664587 - DNA, 50 bp, Homo sapiens
cgacgaccgacagggtggtgaaaggtcagcccaaggccaaccccactgtc

SEQ ID NO: 664588 - DNA, 82 bp, Homo sapiens
gctgatgacctcacatggtgtggtgaattcaacacttccaatattgatgatgttaagaagttcaaaccgggttacctggaag

SEQ ID NO: 664589 - DNA, 75 bp, Homo sapiens
ccagagggctcccgggctgggcaggtgactgaaaactcctgaggcatttcctggactagaatgggtagtgaagac

SEQ ID NO: 664590 - DNA, 101 bp, Homo sapiens
ggacaaagagcccctcatcgagctcttcgtcaagttttaacttctagtcatggcgaatgatcgcaggagagcacagactggaccctgctacgatctctctt

SEQ ID NO: 664591 - DNA, 100 bp, Homo sapiens
agcgagctgaccacactgacgagccagtacatcaagttcatcagcgagactctgcggcgcatggaggaggaggagggacacctggtcgccatcacatgga

SEQ ID NO: 664592 - DNA, 102 bp, Homo sapiens
gctgggaaggagccaggggggagcagggctcactccagttacatggacacagaacagtatgaagaagcagtacgagactatgaaaaagtataccagacagag

SEQ ID NO: 664593 - DNA, 100 bp, Homo sapiens
cagaaggcctctctcctgatacagcaggcgctcaccatgttccctggaggtttttcgttggaatatacgttgcacatttatggcgattctgagtgtgagg

SEQ ID NO: 664594 - DNA, 75 bp, Homo sapiens
cgcgcttgctgctggtaacagggccttgcctagtgggccttccttcccagaaatgggacgtcggtcatcagatac

SEQ ID NO: 664595 - DNA, 75 bp, Homo sapiens
gggggcactgcccgcccgggctctggtgaatggctatgtggtgaaccttttctgggcatttgacacccacaagca

SEQ ID NO: 664596 - DNA, 100 bp, Homo sapiens
gtttgctggaagcgttcggaaatggcaacttgcgcggtggaggtgttcgggctcctggaggacgagtgttggagaaatcagcatgttaaaacaactgttg

SEQ ID NO: 664597 - DNA, 100 bp, Homo sapiens
ggaagcaggaggtggatttgcagcagctcatcagagactctgccgagagcatcgagagtaaacatgaggttacgatcctgggaggacttaatgaatttgt

SEQ ID NO: 664598 - DNA, 98 bp, Homo sapiens
tctccttcgccttctgtctttctgcgtcctactagcaggaaaaccagtagattcccagacatcgcgaagtgaatctgaaattgtgccaaaagttgcta

SEQ ID NO: 664599 - DNA, 50 bp, Homo sapiens
atttagattggattctgaatatcagtttttcccaggtcatgagtctcggg

SEQ ID NO: 664600 - DNA, 131 bp, Homo sapiens
caggaggctaagaaagtggtgaatcccctgtttgagaaaaggcctaagaattttggcattggggtcaccagtcgttggcacaccaagaagctgccccgcaagacccaccgaggcctgcgcaaggtggcctg

SEQ ID NO: 664601 - DNA, 100 bp, Homo sapiens
ggagaaaacctggaccaggcacgggaagatgcccaggtctcctctgagcctccggcctccataagacccaaaacagatgacacctcttcccagtcccccg

SEQ ID NO: 664602 - DNA, 51 bp, Homo sapiens
tcagaactctctttatctctcctacaggttaatttcacctaccagtttttg

SEQ ID NO: 664603 - DNA, 75 bp, Homo sapiens
actgggagggcaacgagcacaacaggagctacgaggagttgatgtccagggtgctgcagaaggacgcggagcagg

SEQ ID NO: 664604 - DNA, 82 bp, Homo sapiens
ctgatttcctgcttctccttttcatgagtgttcctgtggtctctgcacctcctttctgtggtgatgatgtccagcaactctg

SEQ ID NO: 664605 - DNA, 82 bp, Homo sapiens
gcgatgtgccaccgaggctgaggatgatggtagattgccaggtgacttaagagattaaaattaatttggttgctgttggttc

SEQ ID NO: 664606 - DNA, 100 bp, Homo sapiens
attccaacagaggaagaaaggagagtcttcgcagaatgcaatgatgaaagcttctggttcagattggccataaaatgcagtaaaaacaaatccagttccc

SEQ ID NO: 664607 - DNA, 76 bp, Homo sapiens
tggaagctttggagcagtgtattttgtcacaccgacaaatctgaagcgggtttgccaggggagtgtacccgtctcc

SEQ ID NO: 664608 - DNA, 98 bp, Homo sapiens
agatggccctggatgtggagattgccacctaccggaagctgctggagggagaggagagccgcatcctaatgtcctatgatcacgtggaactcacattc

SEQ ID NO: 664609 - DNA, 101 bp, Homo sapiens
ttttgcctcagatactattttgaagtttgcattgagactccttgcattccgccagatacacaaagttctaggcatggatccattaccgcaaatgagccaac

SEQ ID NO: 664610 - DNA, 100 bp, Homo sapiens
gtgacaagaaaagctgtggcaaccgaaatgagactccctcagatccagtgataattgacaggttgaactcccaccacctgatcttggaccaagttctgca

SEQ ID NO: 664611 - DNA, 101 bp, Homo sapiens
cccaggtcagcaagggcacctgcgagcaagatgtctttggtggacttgggaaagaggttgctagaagcagcaagaaaaggccaagatgatgaagtgagaac

SEQ ID NO: 664612 - DNA, 100 bp, Homo sapiens
gcacgcgaggctgcccggagtccggataagccgggcgggagcccctcggccaggcctgacctctgtgagtatggggacgcctgcaccaaggcacactcag

SEQ ID NO: 664613 - DNA, 100 bp, Homo sapiens
ggacctgcatgtgtgtgcgcgcgaaggagcggaagaatggcagtgctcaaactcaccgaccagcggagattctggagctggctggcaatgcagcgagaga

SEQ ID NO: 664614 - DNA, 100 bp, Homo sapiens
gcctaattcaacacgcaaaataaaagacacttgtattcagtcaccaagcaaagaggttctcagaggcactgtgactgacttccctggatttgatgagcgg

SEQ ID NO: 664615 - DNA, 75 bp, Homo sapiens
cggcggcagagaacttgccggtgccagctgaggactgttatgaacactatccaacaattaatgatgattttaaat

SEQ ID NO: 664616 - DNA, 50 bp, Homo sapiens
gttctcggtcaccatgtggtcctcaggtttggtgcacctcgatttggagg

SEQ ID NO: 664617 - DNA, 110 bp, Homo sapiens
gaagccgctggcggcagtcacttgtacagcgccggtcaacatcgcggtcatcaagtactggggggccctcagcctcttggccttgaacgggctgttcatcttgattcaca

SEQ ID NO: 664618 - DNA, 75 bp, Homo sapiens
gccgaggccccatgaatcaatgtctggtagccaccggcactcacggcttcagggatgacttcttagggggcaggg

SEQ ID NO: 664619 - DNA, 100 bp, Homo sapiens
atttggctttgcctttctggacacagaagtatttgtgacagaatcttcctcggtcacccaggatggagtgtagtggcgcgatctccactcactgcaacct

SEQ ID NO: 664620 - DNA, 75 bp, Homo sapiens
tgagactcctgctcagtgtagcattaagatcatcagaaaagcccttactgaggaaaaacgtgtctcaacaaaaac

SEQ ID NO: 664621 - DNA, 75 bp, Homo sapiens
gaaggggcagtacaagcttacgtctctgctcttcagtacaatcctcataccctcggggaagtctgggtacagaag

SEQ ID NO: 664622 - DNA, 100 bp, Homo sapiens
tggaaacggacctgctcagcagcctgagagaagatgactgaggaggaggtggagaccgttctggcaggacacgaggacagcaacggctgcatcaactacg

SEQ ID NO: 664623 - DNA, 100 bp, Homo sapiens
gttcccagaacccagcgcgctctacaaggacgagggtgaccaccccaacaacagcttcagcccctgtagcgcccatgaccgcaggtgcctgcagaagcac

SEQ ID NO: 664624 - DNA, 83 bp, Homo sapiens
ctgggtgttgcacagagatttggacatggatttgattgacatactttggaggcaagatatagatcttggagtaagtcgagaag

SEQ ID NO: 664625 - DNA, 100 bp, Homo sapiens
tgggtgtcgcgggccggccccgcggggagcgcccccggcgcgatgcccttcaggaaagcttagaccatgctcagcctccaagcagccttgtcatcgacaa

SEQ ID NO: 664626 - DNA, 97 bp, Homo sapiens
tttattccagcaatctacagtcctggcctgaggaagccccggaaagccagcgccacatgcagttcggccacagcagcagcctccagtggcctggagg

SEQ ID NO: 664627 - DNA, 75 bp, Homo sapiens
ttgaacattccgaaactgtcaagattggcaaggctcttgatggaaatgtgtatgatcatctcaaggattatttaa

SEQ ID NO: 664628 - DNA, 90 bp, Homo sapiens
tctgactcagatgggccctccttgatggcactcccagcagcacagccttagcactgctggtgctcaagaccgaatcggctgggcttttgg

SEQ ID NO: 664629 - DNA, 50 bp, Homo sapiens
acgacgatgaggtgacagtcacgaaaatggactgactccaaagaaaaaaa

SEQ ID NO: 664630 - DNA, 83 bp, Homo sapiens
gcggtgacagagtggagccatggctagagggtatctcctctgagggtgatgctgacccagatggcgggctcgacctggaggaa

SEQ ID NO: 664631 - DNA, 73 bp, Homo sapiens
acgtgatgctggagaattataggaacctggtctccctgggccagcgatctgtacatgagacccaggaattatt

SEQ ID NO: 664632 - DNA, 107 bp, Homo sapiens
tgttgaaaaaactcaatcacaaaaatattgtcaaattatttgctattgaagaggaggtacatcaggaacgtctctatcaagaatacaatttcagcaaggctgagggc

SEQ ID NO: 664633 - DNA, 75 bp, Homo sapiens
tacatctgcacccaacagaatattttgttcatgttattgaaaggggtgtgctggaccggttttctcaaattcagc

SEQ ID NO: 664634 - DNA, 100 bp, Homo sapiens
cagatttattcagcaccaaccaaggtccaagcagctcagtctgaggctaaggttgtatctcagtatcatgagctggtggtccaagctcgggatgacttta

SEQ ID NO: 664635 - DNA, 100 bp, Homo sapiens
atcgctctcggcctccgacacggaagtggagagactgattttggacctcagctcaagaacctcaataagaagctcttcacggtggtcgcctgggatcctc

SEQ ID NO: 664636 - DNA, 82 bp, Homo sapiens
taccatggcgaggagtctctgtccgggggcctggctaaggaaaccctattacctccagaatccacattcatctcaatggaag

SEQ ID NO: 664637 - DNA, 100 bp, Homo sapiens
gaaggcgttcgcaccggaaaatgtagcttcccggttaaggatgactcactggttgtgtggaaggaagtcgatttgacccggctgtctgagaaggaacgtc

SEQ ID NO: 664638 - DNA, 90 bp, Homo sapiens
cgggccgtgaacgaaagcagtgacggaggagcttgtaccaccgcaaattgtggctactaatttgccccctgaagatcaagatggctctgg

SEQ ID NO: 664639 - DNA, 96 bp, Homo sapiens
ctactgtggggccgcggccggaccgagcgcctcgacctcggtctgagagactccaagcaccccaagtactgcatcgagctgagcgcccagcctgtg

SEQ ID NO: 664640 - DNA, 75 bp, Homo sapiens
gcagatcccccagccggctgagacaggaaagaccacagcaagattctttcattcgtctcctcctagcctggggga

SEQ ID NO: 664641 - DNA, 96 bp, Homo sapiens
gcgccgagaggccgtgcgggacgcgggcgccaggaccggccgaacgcagaggagctacagggagctggccgactgcacctggcacatggcggagaa

SEQ ID NO: 664642 - DNA, 125 bp, Homo sapiens
ccgaggcgtcctcatgtatggcccacctggctgtgggaagaccatgttggcaaaggcggtggcacatcacacaacagagtccaccctgcacctggtgttgcgcctgcgaggtggcattattgagc

SEQ ID NO: 664643 - DNA, 75 bp, Homo sapiens
gaaaggaaggaatatatcctgactgattaggagctctacggtgactttgaagacttggaaacaggggacgtgcac

SEQ ID NO: 664644 - DNA, 100 bp, Homo sapiens
aaaggaaacttgccttatcaccttcttgcttgcaggtgctggagaatctggtaaaagcaccattgtgaagcagatgaggatcctgcatgttaatgggttt

SEQ ID NO: 664645 - DNA, 50 bp, Homo sapiens
tctaagtacactcgtcttgaatagtgagccccatgcccgtttctacgcgg

SEQ ID NO: 664646 - DNA, 101 bp, Homo sapiens
cggcaactggaccctgatgagaagataacatacggggatgtgatgttggagaactacagccatctagtttccttgggttgtaaagaagaaagttctaccct

SEQ ID NO: 664647 - DNA, 103 bp, Homo sapiens
agaccgcgcgcagggcctgcagcgggagctggacggcgagcgcgagcggcgcgagaaagaacccaagacagaccaggatgaggagcattgccggaaagtcaac

SEQ ID NO: 664648 - DNA, 51 bp, Homo sapiens
gacgggccgagcctgccactgtgatgcagaagatggggaagaatatgatga

SEQ ID NO: 664649 - DNA, 50 bp, Homo sapiens
gaaaatgccaacgccgtgtctgaagggccagatgcagatggctggagatg

SEQ ID NO: 664650 - DNA, 98 bp, Homo sapiens
ggcaccagcagtaacaacagcgaggaagaagaggacgacgacgacgaggaagaggaggtttctgaggactctgtctactagtgacgatgtcgaagaca

SEQ ID NO: 664651 - DNA, 75 bp, Homo sapiens
ccatttctatggtcctcctcacctatggccgctggcagggacagagcagaatgggctgatatagatccggtgccg

SEQ ID NO: 664652 - DNA, 73 bp, Homo sapiens
gggggctttgccattgtgtattacctcattcaaaggcggcgactggcggcgcgatggacctgaccgggctcct

SEQ ID NO: 664653 - DNA, 110 bp, Homo sapiens
accatgtttgttatgcagcctgcagaaccctccatctccagtcaccaatgtgaaaaaagggaaaattgcaaaaaacagcatctctttgtcttggcaagaaccagatcgtc

SEQ ID NO: 664654 - DNA, 90 bp, Homo sapiens
gaccaggggcttgagagctgggttctattttccctcctcaaactgactttgcagccacggagagccaacatcccatgcaccatcgtggag

SEQ ID NO: 664655 - DNA, 98 bp, Homo sapiens
aggagccggcgcggtcgcagtctccacggcgcaggcccacggtagcgcagccgctctgaggccacagacctccaccagcacgaagtggacatcgttgt

SEQ ID NO: 664656 - DNA, 75 bp, Homo sapiens
tctggataaattctcttcttatcatgtgaaaactgccttctttcacagacggggtgtcgccgtgttgcccaggca

SEQ ID NO: 664657 - DNA, 75 bp, Homo sapiens
ggaagagatacttaatttgaagatatgagatcctgactccaaactccattcccaagggtttcatggacgggaagc

SEQ ID NO: 664658 - DNA, 90 bp, Homo sapiens
gtggcgggcgcaggagcccggccccggagccaccggtggaatgaatcttacttgttgaatatcttctggttactagttggattcatttgt

SEQ ID NO: 664659 - DNA, 100 bp, Homo sapiens
cctctgctcccaggagagcttcactgaaggacttcatattatcatctgtggaagacagatcatctgtagttacttgtctcaaagcatagaactaaaagtc

SEQ ID NO: 664660 - DNA, 75 bp, Homo sapiens
ttcgggtgtctcgtgtgtgaacatcacagaaccaatttagaacttgaattgattcatcgaggaggcaatttgtgt

SEQ ID NO: 664661 - DNA, 100 bp, Homo sapiens
tggtactaaaccaattgatcggtataacgtcaaaaatcctgtttgtcaggcgagtgttgtgtataaaggaagttgaaatcctgggccttatgtgtgtaga

SEQ ID NO: 664662 - DNA, 90 bp, Homo sapiens
gcttgattgtgacctctagcacatcacctacactaccacggccacactcaccactccatggccacacagccctcccaggcccaatacttc

SEQ ID NO: 664663 - DNA, 90 bp, Homo sapiens
attcatttcaggctccttctaaatggccaagtgagtccatgacagaagaaaccctgaaaagggcaaaggagattgggttctcagataagc

SEQ ID NO: 664664 - DNA, 83 bp, Homo sapiens
agcaggaggagctgctggcgcccgcagatgacaatgcagatcttcgtgaagactctgactggtaagaccatcaccctcgaggt

SEQ ID NO: 664665 - DNA, 100 bp, Homo sapiens
actgctttccactcggctcctgtcgtccgttctctcaggctcccgttcaggtgactccccggacagctcaacaccaaagctttcgcgggcacagcggccg

SEQ ID NO: 664666 - DNA, 100 bp, Homo sapiens
atttccttcaccaatgtcgtcttgtgccttttcttgttcctactgtaaaggagatgggttagatgttcacttttccagccattaactccaggctctcgag

SEQ ID NO: 664667 - DNA, 87 bp, Homo sapiens
gaaaacaaggctggcagcttcatcactggaattgatgtcacctccaagatcactgtcgtcttcctgaaagatgagaagtaccattct

SEQ ID NO: 664668 - DNA, 100 bp, Homo sapiens
gtagactcttcgggaaacctctccggagcgtagcctccaccccccactcgcagtccccaaggtgctggagaatctggtaaaagcaccattgtgaagcaga

SEQ ID NO: 664669 - DNA, 75 bp, Homo sapiens
ggaccagatgaaactctgaggattaaagctgagtatgaaggggttataatgagaagaaactaacagacaatattc

SEQ ID NO: 664670 - DNA, 100 bp, Homo sapiens
aaaaggagaggcgcttcttccagctacagatgtgcgaggtcaactttgtagtgtgccaactctttgccttgctagcagccatttggtttcgaacttatct

SEQ ID NO: 664671 - DNA, 50 bp, Homo sapiens
tcctggagtctcccttaatacagattttaggtgatgggcaagtcagaaag

SEQ ID NO: 664672 - DNA, 100 bp, Homo sapiens
agctcgatccgctgctcgcacgggagccagctgggtggcaaatgtttgcagactacggctgaccgtacctcctgagagtccagttcctgagcaatgtgaa

SEQ ID NO: 664673 - DNA, 100 bp, Homo sapiens
gtccgactcttcacgtcatttacaacagacaagttggatggcttgaggactggtactaaaaggaaacgtgactgggaggccattgccagcagaatggagg

SEQ ID NO: 664674 - DNA, 100 bp, Homo sapiens
agctgagctgcgaggaaaatggcggcgggagctgatgaatgcagtgaacacactggacagggatgtcctcaaccagctacacgtacagctcatggagctg

SEQ ID NO: 664675 - DNA, 50 bp, Homo sapiens
aaaccccaaaagtgtacataagagtctccaaaaagcctagggaaatgaaa

SEQ ID NO: 664676 - DNA, 100 bp, Homo sapiens
tatggaatgcaaagatttggaaccacagctgtccctacgtatcaggttggaaggtggagccgccaccaaaatgcagattttcgtgaaaacccttacgggg

SEQ ID NO: 664677 - DNA, 101 bp, Homo sapiens
gctgatcttcgatgagctctcggattccttatgcagagtggccgacttgcacttttctgtagaaggtcagttggaattcagggcattgctatttattcctc

SEQ ID NO: 664678 - DNA, 83 bp, Homo sapiens
atgtgatgctggaaaactttaggaacctgaattcattgcgtaaaggtttgatatcgacagctgcacttactacttcagctggg

SEQ ID NO: 664679 - DNA, 75 bp, Homo sapiens
caccttcgtggtcgtctggtcctactacgcgtacgtggtggagctctgcgtgtgatggttcacatttgagtaaag

SEQ ID NO: 664680 - DNA, 76 bp, Homo sapiens
tcgcccctcgggccgacgccatgaagatcaaagatgccaagaaacccttattgcggaatgctgcagcactccttac

SEQ ID NO: 664681 - DNA, 101 bp, Homo sapiens
caaagactatggtttaatgaaaatagatgaaccaagcactccttaccataggcactggctcaggcgatcagggaagccagagagcagcaccctgacatgtc

SEQ ID NO: 664682 - DNA, 82 bp, Homo sapiens
aagactacggagcataggaggaaaattcatcatctggtactggtgtggcatactcggacagagaagcccaagatgaagcagg

SEQ ID NO: 664683 - DNA, 100 bp, Homo sapiens
cacgtacacagcaggactgagtgaagaagaacagctcgagagagcattacaagccagcctctgggaccgagttgttgacctcctgtactggagagacatt

SEQ ID NO: 664684 - DNA, 82 bp, Homo sapiens
caaagcatgtctgcaacccagccattttcagacagtctagcagtgcttccttggagaccctgttagcacttcttcaggcaga

SEQ ID NO: 664685 - DNA, 90 bp, Homo sapiens
ggttcagctttccaagacaaaggagtccatagaggccactgtattctattgaagaacatgtctaacagtaacactactcaagagaccctg

SEQ ID NO: 664686 - DNA, 100 bp, Homo sapiens
tttgatcactgttcctgattgtgacattgtgcaagtgttaaattgtgtgccttttgttcctgaagaaagagctacaagacattcttaccaaaatgtattc

SEQ ID NO: 664687 - DNA, 100 bp, Homo sapiens
atggctgtgtttgtgttggactgctctagatgtgcacagccagaggacaacacatcacacacaagaaacagttgtgctcatgtgatgggggcctcagcac

SEQ ID NO: 664688 - DNA, 75 bp, Homo sapiens
gtccacccccatcgaagtgttgtgtaaaggctacccttccactggacggatgtccaggtgaaggggacgtcgctg

SEQ ID NO: 664689 - DNA, 50 bp, Homo sapiens
ctcggagggagcccggcggcttcggccgagaaggtgagctccctggggaa

SEQ ID NO: 664690 - DNA, 50 bp, Homo sapiens
gagatatctgcaatgatgtactgaaaactttagaaactgttcctttggag

SEQ ID NO: 664691 - DNA, 100 bp, Homo sapiens
atatgagacagatactggaagctctacgctactgccatgataataacataattcacagggatgtgaagatggcagatgatcagggctgtattgaagagca

SEQ ID NO: 664692 - DNA, 50 bp, Homo sapiens
aaggtcccactgcagccctccaagcagccctgggcgctgcctatggcaca

SEQ ID NO: 664693 - DNA, 100 bp, Homo sapiens
tcctgggttcacgccattctcctgcctcagcctcctgagtagctgggattacaggcacccgccaccacgcccagacttcacagagaatgcagttgtcttg

SEQ ID NO: 664694 - DNA, 75 bp, Homo sapiens
cccggcgcaccgactggaccgggaaggagcatcccaggacctaccagaatctgcatttacagccgaacaatacca

SEQ ID NO: 664695 - DNA, 83 bp, Homo sapiens
cttagctgtgctcgcgctactctctctttctggcctggaggctatccagccctactcaatttgaagacattgaggatgaagac

SEQ ID NO: 664696 - DNA, 83 bp, Homo sapiens
cttggtgtcatccagccttagcaaaccagaggatggtattgagcctatgtgggaagatgagaaaaacaaacggggaggacgat

SEQ ID NO: 664697 - DNA, 50 bp, Homo sapiens
catctacttcacaggaattgccatttacagctcagcagctcctcctccta

SEQ ID NO: 664698 - DNA, 100 bp, Homo sapiens
gctgcagatcattctggaagacttacagagacagaacgaagagctggaactttaccgatttgttacaactcaagcaagggccagcagaaattctcttttg

SEQ ID NO: 664699 - DNA, 98 bp, Homo sapiens
ttgtctttccctagtactctgcaaacagtggcctgaagcacgaggacaaacgtggaggtagcggatctcacaactggggaactgtcaaagacgaatta

SEQ ID NO: 664700 - DNA, 100 bp, Homo sapiens
gagttaaagttggatgtgctggaacagccccccgaatccaagcccaacttcacccctctcgccatcttggcccatgttctcggcgccatccagccctatg

SEQ ID NO: 664701 - DNA, 82 bp, Homo sapiens
ggatccatttctcctattgaggagtcaacgccccagaggtgatccgaatgcaggataacaacccattcagtttccagtcgga

SEQ ID NO: 664702 - DNA, 94 bp, Homo sapiens
cttgggcctcgcgccggctatggccgtgccctggggctgagccctcagatgagcagcaccagcagtaagagggctccgaccacggcaacccaga

SEQ ID NO: 664703 - DNA, 95 bp, Homo sapiens
tcctgtcgtccgttctctcaggctcccgttcaggggacggcaaaacagaacagaaaggcggagataaaaagaggggtgttaaaagaccacgagaa

SEQ ID NO: 664704 - DNA, 147 bp, Homo sapiens
tctttctcagcaccttggcgaagccttgggtttctttcttaaaggactgatttttagaactccacatttgaggtgtcatggagaaactccagctgggcccagagattctgcagcgggaaaatccaaggcttatttatgccaggctga

SEQ ID NO: 664705 - DNA, 96 bp, Homo sapiens
agaagctgttccgcaggaggagaaatgatcgaagcaaaccagtccagctacgggggcccagccagccagcagctgagtgggggttacggaggcggc

SEQ ID NO: 664706 - DNA, 96 bp, Homo sapiens
gccgattcccgcattgcagaacttctcacagagctccatcagctgatcaaacaaacccagcgccgggtttatttccgcctctggaatgcagcactg

SEQ ID NO: 664707 - DNA, 82 bp, Homo sapiens
cccagctctgcagccacatactatccgtttgttcaggaaccaccagtgacagaggctgaaaacacagttaaatcactttcaa

SEQ ID NO: 664708 - DNA, 82 bp, Homo sapiens
cggtgtgtggcgcgcccagagccccgcgtttcagccctagggaagagcaccataacatggtgtgggaagtgaagacaaatca

SEQ ID NO: 664709 - DNA, 90 bp, Homo sapiens
ggagtaacttggccaggctggccccgagcggaactggagaaagctgagggtctacgacgttcctccatcggtgagcaaggatgtgcccga

SEQ ID NO: 664710 - DNA, 75 bp, Homo sapiens
agatttaacattccaacacataaaaattatttatccaacagctcctcccagtattgaatttgaccgggattgtga

SEQ ID NO: 664711 - DNA, 100 bp, Homo sapiens
tttcacttatctcgaaagcctatcagcatagttaaggtgaagcatatatgcgtttaagcaaactccccgaagcagagcattggtatatggaatcactgag

SEQ ID NO: 664712 - DNA, 49 bp, Homo sapiens
tcggagatccgctcgcgcgccgaaggtttacccagggttgatgataacc

SEQ ID NO: 664713 - DNA, 100 bp, Homo sapiens
ccaccggtccccaacgcatcatgccagggagccaagcgtcctgcccggccggctgaaatctctttaatgatggagggaagcaggcagacgcgagtgtctc

SEQ ID NO: 664714 - DNA, 50 bp, Homo sapiens
gtttgatgctattaacttcgtagacgaggagcgctatagttatgtctgcc

SEQ ID NO: 664715 - DNA, 100 bp, Homo sapiens
cagcgggggcagcgcgatgaggcgggtgaccctgttcctgaacggcagccccaagaacggaaagggcgtctctggccgagcctctttttgtggaaaacga

SEQ ID NO: 664716 - DNA, 75 bp, Homo sapiens
catccctgcaatgaagagaacccagggaagttcctttttgaagtagttccaggtgctggagaatctggtaaaagc

SEQ ID NO: 664717 - DNA, 74 bp, Homo sapiens
cccggtctatgccaggcgcatctcagctgcctgctgaagatgaagtcttactacagaaattaagagaggaatca

SEQ ID NO: 664718 - DNA, 75 bp, Homo sapiens
gggacccttgcatggtgtttcaaagggtggtgaagaactaagtactaacattctgagagagcctgtgtgtttagg

SEQ ID NO: 664719 - DNA, 90 bp, Homo sapiens
agaaagttcatggccccgcgatgaagtcgagatctcaaatactggctgccgccaaccaggagagcagccatgtgcagcagcaggcccttg

SEQ ID NO: 664720 - DNA, 98 bp, Homo sapiens
aatgagatagccgtcctgagaaaccccgtgctgatcccattccaatatgtagcttctgtttggggactaaagaatcaaatcgtgaaaagaaaccagaa

SEQ ID NO: 664721 - DNA, 100 bp, Homo sapiens
aaccttgaggagcggagagctgctgaacatgatcgtggctgttattgactctgcacaggcctataatgcaaagagcaaaagctttgaagatcctcccaac

SEQ ID NO: 664722 - DNA, 49 bp, Homo sapiens
ctttggcttgcagccaacaatggggaccctgatgcttggtgtgacctga

SEQ ID NO: 664723 - DNA, 100 bp, Homo sapiens
ccagccagcgcagcgacggggcgctgcctggcccaggcgcacacggaagtgtatgaagtgtaacagaacagactttaccacctgaaactgctgcttcaag

SEQ ID NO: 664724 - DNA, 100 bp, Homo sapiens
ctaacccagctggaggaggcgcgccgacgtctggaggaggaagaaaagagagccagccgagcaccctccaagcagagtgtcaacagcatctccaccctgg

SEQ ID NO: 664725 - DNA, 75 bp, Homo sapiens
caagctgataggctgcgctaccggaatgtcatccagcgagtgattagataaaccacataatcctatggtaaatgc

SEQ ID NO: 664726 - DNA, 96 bp, Homo sapiens
tggaaagagagcaaggggaaggatcgggagtacacagacatcatccggttcgtgctggccgtgggcagcgccgtctttgatgccatgttcaacggg

SEQ ID NO: 664727 - DNA, 82 bp, Homo sapiens
cgtagtcgagaggccggcatcactggagtggtggcgcagctgtttcctccggatgatccagattccagtaccagtacattag

SEQ ID NO: 664728 - DNA, 90 bp, Homo sapiens
acacactattttcttgtgggagatctcctttgggcaaagtcactattccaggtcctcaggatatagccgtgacctaaacacagaaatcta

SEQ ID NO: 664729 - DNA, 100 bp, Homo sapiens
gcagaatctgtttcacacaacaactgctatttgaagctatatgttctcctttcagccaagacctttcaccagtgcaggggatagaagattcattccacaa

SEQ ID NO: 664730 - DNA, 75 bp, Homo sapiens
gtgtgtcttggcttcggagcattcagcaggtgttacagaaagaagatgctgatatgctacaacacggatgaacct

SEQ ID NO: 664731 - DNA, 90 bp, Homo sapiens
tgaagatcagtacaaaaattcttcaagaaatctaaggggatgatgctcagttcgagatggacatctgactctcctgcaaggattagaaga

SEQ ID NO: 664732 - DNA, 101 bp, Homo sapiens
tggacactactctaggaccggctggcaaacttccccagactctgcgaggaaacggaaaggattgttgctaaccacattcgtgagcgagaagggaagacaaa

SEQ ID NO: 664733 - DNA, 82 bp, Homo sapiens
gagtcgccgctgcagccctagtgactgcggcctgcatcccgaatccaaaggactgcatgacacaccataggatatagtcaag

SEQ ID NO: 664734 - DNA, 101 bp, Homo sapiens
aacctctacaacgaaggtgaagccacggaagataagttttcggctttgtgagaaaccttaccatcaaacacgatggccagcaacgttaccaacaagacaga

SEQ ID NO: 664735 - DNA, 76 bp, Homo sapiens
aggaccggcgacgcctagaacagctgccactgcagagccccgccatggaagacacgccgttggtgatatcgaagca

SEQ ID NO: 664736 - DNA, 75 bp, Homo sapiens
tcctcagatgccaccaacaactccatccagcagtttcttcaccaaggtctctcggccagaacacgtggatgccca

SEQ ID NO: 664737 - DNA, 100 bp, Homo sapiens
cctgcgcggctgcggggcttccctgcggctggagatatggaatgtgcagatgtcccactattaactccaagcagcaaagaaatgatgtctcaagcattaa

SEQ ID NO: 664738 - DNA, 50 bp, Homo sapiens
tttgagtgttgctggaacggttcggatagcttcgagagctgtgcccagga

SEQ ID NO: 664739 - DNA, 100 bp, Homo sapiens
cctgcccagacaccagctatgcccccgtggccaccgcctccagcttgccaccaaagacctgcgactttgctcagccggcacagtcttcactaccgtagaa

SEQ ID NO: 664740 - DNA, 76 bp, Homo sapiens
tggatgttccttttaaagtcaaggctggccaaattggcaatttgaatcaacccatagaagtgacagcgctgtattc

SEQ ID NO: 664741 - DNA, 50 bp, Homo sapiens
agaagagggtggctaatgattaagataaaccgagaaaactggtgtacaat

SEQ ID NO: 664742 - DNA, 96 bp, Homo sapiens
gacacggcttcccccaaggaatatacaggacccacgcagccacccagcctcagcactcatctgcgcagccatggaggccctgggacctgggggcga

SEQ ID NO: 664743 - DNA, 75 bp, Homo sapiens
cgcgtgtctaggtgagtcgcggtgggtcctcgcttgcagttcagcgaccacgttctaatacccgatttacaatta

SEQ ID NO: 664744 - DNA, 96 bp, Homo sapiens
caaggccattgaagtctacaagaaagcagtggaaccgagacatgggtgcccggcaccgcgcccgagcccactccattcagatcatgaaggtggagg

SEQ ID NO: 664745 - DNA, 80 bp, Homo sapiens
aaacagaacgttgcaaactctggaaaaaaacttggaaaacactttcctggataaaaaagaaaacattccagatgcatgat

SEQ ID NO: 664746 - DNA, 108 bp, Homo sapiens
gggtggaacgcgggcgcctgaaggagttgttgtctcggcagcgcccgcggagacgtgaagagacaatgcagatcttcgtgaagactctgactggtaagaccatcaccc

SEQ ID NO: 664747 - DNA, 75 bp, Homo sapiens
gtcgggaccatcgccggagcctgaggacacttctctgtcgtcacagttagcttccttcaaaatgtctactgttca

SEQ ID NO: 664748 - DNA, 100 bp, Homo sapiens
gcatggcactctggcgggcataccagcgggccctggccgctcacccgtggaaagtacaggtcctgacagctgttgctgaacctgtttgcatgagttgctc

SEQ ID NO: 664749 - DNA, 75 bp, Homo sapiens
gttgatcgcactgggtgccctgcaaccgccccagaaagcagaaagctatcatggtgaacttacttcagattgtgc

SEQ ID NO: 664750 - DNA, 98 bp, Homo sapiens
ggacatgcaggctccccgcgcagccctagtcttcgccctggtgatcgcgctcgttcccgtcggccggggttgaagcactggacaatgccacatacttt

SEQ ID NO: 664751 - DNA, 100 bp, Homo sapiens
attaaaaagtgaacttttctctggacttccccagaagaagattgtggttgaattcaggttgcactgctgtgatccatcctcatctcctaaagatgcatcc

SEQ ID NO: 664752 - DNA, 127 bp, Homo sapiens
gtgggagaacaaagctgaggtccagatgaaagagaagtttctggtcactccccaggattatgcgcgggaaatcctcattgacgattcaatttgttgaaggccaatttgtggactcctacgatccaac

SEQ ID NO: 664753 - DNA, 75 bp, Homo sapiens
agcgcttctttaagggctacgggaagatcctggaggtggatctgaagaacgggataaggagccccgtggaatcat

SEQ ID NO: 664754 - DNA, 97 bp, Homo sapiens
acttgcagagaatgaaatcactttgtgtcaaaaagaaataactcagctgaagcatcagaaatgggacgtcggtcatcagatactgaagaagaaagca

SEQ ID NO: 664755 - DNA, 50 bp, Homo sapiens
gcttcaggcaaatatgggtgcaaagtgtaccacatgaaggaagatggttg

SEQ ID NO: 664756 - DNA, 98 bp, Homo sapiens
caaggacaacattggctagagaaaaaagatgttgtggggagagccaggggccagcagccagcttcgggtgtagcctattctcatccaactacagttgc

SEQ ID NO: 664757 - DNA, 100 bp, Homo sapiens
aactcttccaggaccaccaaaaataactttggctgggttgatgaaaagcccagaaccttgatgacagattgtctggttataaagcattttttacgtaaaa

SEQ ID NO: 664758 - DNA, 75 bp, Homo sapiens
tagttcagcacttggtctctaccagtgggactttgccagttatgatattctcagcaccagtatgcatgagcgggt

SEQ ID NO: 664759 - DNA, 75 bp, Homo sapiens
tgtgctgaccacaggaattggatctactagtgcaggtgcaaagttccccatcaagtggacggcccccgaggcagc

SEQ ID NO: 664760 - DNA, 82 bp, Homo sapiens
ctggcgtgcactccgcacctcggggacattattgcgcgtggaacggctgcttttggaagactgaggctgatgtgaatccaaa

SEQ ID NO: 664761 - DNA, 75 bp, Homo sapiens
gcggcttttgtgctgtacaagtgtttgcaggaacaggagtacagctgtgtagtaaagatgccttctggtgaattt

SEQ ID NO: 664762 - DNA, 98 bp, Homo sapiens
gaagttgattactcagtctctaaaaagctaagatattcgggacagtgggggtcccaaaccagtgatggtgtatatccatggtggctcatatatggaag

SEQ ID NO: 664763 - DNA, 50 bp, Homo sapiens
ggaagacttgggtccttgggtcgcaggtcgacaaagatgctgaattagtg

SEQ ID NO: 664764 - DNA, 74 bp, Homo sapiens
aatctgcaaaacttattcgggataaagtagcaggaaggaaaatcacctcggcagtgtttgaaggaaggatactg

SEQ ID NO: 664765 - DNA, 51 bp, Homo sapiens
ggctgcggagggccagtggactcagagactctccaacatgtgccttctgac

SEQ ID NO: 664766 - DNA, 82 bp, Homo sapiens
agcaaattcgtcagatcaaagaacaaggcagctaaggattataactggtgagtggttttttgaagaaaaggcaaaacgtttc

SEQ ID NO: 664767 - DNA, 101 bp, Homo sapiens
gcctcacagacccagccatcgttaaggtgcggattgatgagtacgattactccaagcccatccaggggcaacagaagaagccctttgaggagcactggagg

SEQ ID NO: 664768 - DNA, 82 bp, Homo sapiens
tttgatgctgcctggactggtgatgccccctgctggtctgcctcagggaactctaatgatccaggacaaagaagttaccctg

SEQ ID NO: 664769 - DNA, 100 bp, Homo sapiens
cgcccggcagctgccccgtctgagaagtgaggagcctctccgcccggcagccaccccatctgggaaactgtgtacagtgccctgggcctgagggatgcct

SEQ ID NO: 664770 - DNA, 82 bp, Homo sapiens
tgcaggcttgccgaagaagggagtgcctggagaagttccctgtgatccagcacttcaagttcgggagcctgctgcccatcca

SEQ ID NO: 664771 - DNA, 75 bp, Homo sapiens
tggggctgctgtttctcttcgccgacggctctgtgtgctccgggatggagcaggtgtgcagagggtgagaaccca

SEQ ID NO: 664772 - DNA, 100 bp, Homo sapiens
ccgctgttttgccggaggagcccctcaggccgacctctttgtttttagacatgaattggccataatgagactagcagcctttatgggcattactatgtta

SEQ ID NO: 664773 - DNA, 100 bp, Homo sapiens
tggggacctaatgatgcacattcatactgatgtcttttctgaaccaagagctgtgtggaacacctacataatttcattttgtttcggttttcaatgggct

SEQ ID NO: 664774 - DNA, 96 bp, Homo sapiens
accgccagagaccctcagccttgactgggttttgatacaaccaagtcggatgggcagtttaagaagacagccagtaacagcaagctgaggacctac

SEQ ID NO: 664775 - DNA, 100 bp, Homo sapiens
tccagggcgccattccggccgccatcgcgacggccaaaaggagcggcgcggtcttcgtggtgttcgtggcagcacaacaagccgctctactcctttgaag

SEQ ID NO: 664776 - DNA, 100 bp, Homo sapiens
cacgggatcctcatgttcactacccttcatgcatgaaagacaaagctactcagctgacttccaaaaatatccagtgtatgaggactttacttaacttggc

SEQ ID NO: 664777 - DNA, 100 bp, Homo sapiens
cgtcagtgatcctgcctgaggacctgcctgtgggcctcctgatcacttgccacgtggcacgcatccctctgccagccggatacagagaagagattgtgcg

SEQ ID NO: 664778 - DNA, 90 bp, Homo sapiens
ccagtggcatctgtgacaacttgcttttcaaccttcacttgactggagacatccacgccatcaccgctgccaataacttgctggctgccg

SEQ ID NO: 664779 - DNA, 74 bp, Homo sapiens
ttgacctccttccatgaatcacaaatgttcttaatggcatctagaatgtacctgtttgaaaatggtagaataga

SEQ ID NO: 664780 - DNA, 82 bp, Homo sapiens
aatagaacagtggctatggtcaatattcctaggaatgggaacattactctggggccaggccatactggagatgttactattc

SEQ ID NO: 664781 - DNA, 98 bp, Homo sapiens
ggcccagctcaagaacggcagccttgactccccagggaagcaggtgtcacgtcttgaaattttaaatgtcctcagtgactctctacctctggcagatg

SEQ ID NO: 664782 - DNA, 74 bp, Homo sapiens
cagctatttactctaaaggaggtattccttgcagggcaagtgtccagagaatggctgggatgaaagtacacttg

SEQ ID NO: 664783 - DNA, 98 bp, Homo sapiens
cgcgcggagccgagccggaactgcggcagtctctccctgccaggctcttcatccaaggccagatcagaaaagggagctcaggtaccttccagagagtg

SEQ ID NO: 664784 - DNA, 75 bp, Homo sapiens
ctaacttcctcggccgagccgggccgcgccgccgctgccgccgccgcgcgcggcattcgttcagtcagagagcat

SEQ ID NO: 664785 - DNA, 115 bp, Homo sapiens
gcaaatgtaactcagcgaattgtaatggaaagcatatggacaggtctacgccacatcacttaggtgctggagaatctggtaaaagcaccattgtgaagcagatgaggatcctgca

SEQ ID NO: 664786 - DNA, 100 bp, Homo sapiens
gagccgcagtgggaggcacgtcgtcttctacccaaccctgaagacctgaccctgcagctgctggctgtgcggaggaagagcagactgcgggaccccggcc

SEQ ID NO: 664787 - DNA, 142 bp, Homo sapiens
atcttcaggctgcaacaaggagaagagccatggaaacaggaggaagaattcccaagccaaagctttccagggtgaaaatcctatttataagagtgccgtaacaactgtggtcaatccgaagtatgagggaaaatgagtactg

SEQ ID NO: 664788 - DNA, 75 bp, Homo sapiens
gcctcaatttgctggatttaagcactgctgcactttatgagttgcttccaagatccggtacttgcaggaatatca

SEQ ID NO: 664789 - DNA, 80 bp, Homo sapiens
aaaggaattagcagaagacattatgtcagaaatacagtccatactgcccggaatctctgcaaagctgacttggacttcag

SEQ ID NO: 664790 - DNA, 100 bp, Homo sapiens
ggaggaccgggagcggctggtggccatgatgctgtgggccctgagggaaaggatcacagaggcgctgagccgggatggctacgtgtacaagtacgacctc

SEQ ID NO: 664791 - DNA, 99 bp, Homo sapiens
gttctggtgccgcgcagctttccccgcttcagctttagctgcagctgcctctgttcagccacttgcaacacaatgtttccaactctctaacatgtttaa

SEQ ID NO: 664792 - DNA, 90 bp, Homo sapiens
cttgggttttttgtggcttccttcgttattggagccaggcctacaccccagagagaagaagaaggaggttcctgctgtgccagaaaccct

SEQ ID NO: 664793 - DNA, 100 bp, Homo sapiens
ggggagtggcagagagtatgcattaaagctacgagttccagggagctctgtcctggtgaccgtgcccgggttatgacgactaatcccaaaccgaataagg

SEQ ID NO: 664794 - DNA, 90 bp, Homo sapiens
gagtgtctgacatttcttttgtgcaagatgagcctcaagtgcttctgcattacatgtactaatggtcacttgatgtgcgctggctgtttt

SEQ ID NO: 664795 - DNA, 100 bp, Homo sapiens
aaggcgacgaaccttggagagaggagaacgaacatcttctggacctttgtccaggggcccagtgttggctgtggctatgggcagcaacagtgaatactgc

SEQ ID NO: 664796 - DNA, 100 bp, Homo sapiens
agtacaaagagagaagatgtgtctgtggagcacggatgccattagcaaggatgtttttaataaggaattgaatgatctggcacgggaccctccagcacag

SEQ ID NO: 664797 - DNA, 51 bp, Homo sapiens
gcgtgtggcatctccacctcaaggagggaatctggaaaaattgcaatcaaa

SEQ ID NO: 664798 - DNA, 98 bp, Homo sapiens
tttgatctgctgttggagacgagaaagcctgatcaggttttccaatcttataaacctggaggaggtatctttaaaatagcttcctgggcagatctagt

SEQ ID NO: 664799 - DNA, 88 bp, Homo sapiens
gaactgaccagagctgatcccgagcagcgtcatgtacccctctcccgattctcctgaaggggacgtccgatgatgatgtcccgtgtcc

SEQ ID NO: 664800 - DNA, 100 bp, Homo sapiens
gcagtcattaccactcacactgtacttccagggagacaccgattataagaagagaaactcagcgctggggaagaagatgtcatttgtcagagtgaaccgc

SEQ ID NO: 664801 - DNA, 96 bp, Homo sapiens
gaaggaacgaggcaaggagctaaagcagcgtgcgttcagccctggggggccaaaccagtgctcctgccacctctctggctgccccctagagcctgc

SEQ ID NO: 664802 - DNA, 74 bp, Homo sapiens
aggcagggggacgacaaggagggcatgatcaacctcgtcatgtcctacgcggtcacagaagatgtgaattcaag

SEQ ID NO: 664803 - DNA, 83 bp, Homo sapiens
gcgaggcctcccgggctccgggaaaactacactggccaggtgtggacactgccagcggctgcagccgacttggaatgacctgg

SEQ ID NO: 664804 - DNA, 58 bp, Homo sapiens
aaaagatgatcacaattgaggaagcacttgctaggacacattcctgaaggcgctaaaa

SEQ ID NO: 664805 - DNA, 98 bp, Homo sapiens
ctggagaagctgggattggagattccacccaaacttgctggtcactgggagcggaaggagagttttacatggaagtggcttacagaaacttggcgctg

SEQ ID NO: 664806 - DNA, 83 bp, Homo sapiens
atcagccccaaacaggacgaaggcgtgctgaagttggaatcgaagcctcttaaaatggcagatgacttggacttcgagacagg

SEQ ID NO: 664807 - DNA, 75 bp, Homo sapiens
ctgcgcgagaggagccgggacacgcctagcgcgggctccagtgacaaccatgagtggaaaaaactaattatggtt

SEQ ID NO: 664808 - DNA, 90 bp, Homo sapiens
gccgggagagtagcagtgccttggaccccaggtagttttgctgtcagccacaatgccttctgatgtgcttgaggtgaccaagaagttcat

SEQ ID NO: 664809 - DNA, 75 bp, Homo sapiens
ggaagcgaagccgaaaaaggcagcagcgaaggtacctggcaaagaattctgcaactttgttcagtgccagcgatt

SEQ ID NO: 664810 - DNA, 75 bp, Homo sapiens
tgcccgctcagggcctgttacagtctacccctacatgcatgttttgtttggctatgccaccacagtcatccccag

SEQ ID NO: 664811 - DNA, 100 bp, Homo sapiens
ctcggccgcaggccgcctccagcgccgcgggatgtagcgcgggggaccgcggcccccagcagagcccgcctgcccggctatacccattgacaacatgacc

SEQ ID NO: 664812 - DNA, 90 bp, Homo sapiens
gatggcgctgttgctggaacaaggtatgttgagtctaaaaaggacagagtcacagtagtcttcagcacagtgtttaaggatgacgacgat

SEQ ID NO: 664813 - DNA, 99 bp, Homo sapiens
atgtccgccagagctgcggccgccaaggatgcatctctcatggttgaagaagtggtggaggatggcatgggaaagagtgcctgaggatccttgcctgga

SEQ ID NO: 664814 - DNA, 50 bp, Homo sapiens
cccagccgcgtctgggccaggagaaaaggatccttcatctgtacctaatg

SEQ ID NO: 664815 - DNA, 50 bp, Homo sapiens
ctgcctgcctgcctgcctgctacgaagcatgcaacagttactggattatc

SEQ ID NO: 664816 - DNA, 100 bp, Homo sapiens
ccaaaacaaacgctattcctctcacgtgaagtatgctgtccagatgaacagcacaatcgggtttctgttggcattggtgattcctgctgtggcagaatgc

SEQ ID NO: 664817 - DNA, 75 bp, Homo sapiens
gtctgagcgcggctgcccaggttgacctttctgcgggagaatctttggctgctcctgacctcagcaaaccaagag

SEQ ID NO: 664818 - DNA, 98 bp, Homo sapiens
tggcatgaattcagctctgactttaaagacttctggaagaaagagaacaaacttcttctacaagagagcacccagaaatactctccacaccatgctgc

SEQ ID NO: 664819 - DNA, 50 bp, Homo sapiens
aaagaatttaccaagctagaggaggtgggatgcagatcttcgtgaagacc

SEQ ID NO: 664820 - DNA, 83 bp, Homo sapiens
gctcgctggcaccccgaacgggttgcttcccccgctgcgagaattaaacaaccaccatgtcgagcaaaaaggcaaagaccaag

SEQ ID NO: 664821 - DNA, 120 bp, Homo sapiens
ccgcaaccattgacgccatgtcgggttattcgagtgaccgagaccgcggccgggaccgaggactcggtgaaatacctggagtgctcagctctcacccagagaggcctgaaaaccgtgttc

SEQ ID NO: 664822 - DNA, 100 bp, Homo sapiens
cggaaccgtgctgccccgccccgctccacccgtgagggtaaactcgggggccaggactcttttgaaagcatagagagctacgatagttgtgatcgcctca

SEQ ID NO: 664823 - DNA, 75 bp, Homo sapiens
ccagcccatgcccctgaaggcctcgctggagatcgagtaccaacctgcaatgtgactatccacaaccgctgtaaa

SEQ ID NO: 664824 - DNA, 75 bp, Homo sapiens
gcccaggcgcacacggaagtgcagaaaaagtcctacctggagcgaagcgttaaggaagctgaggacaacatccgg

SEQ ID NO: 664825 - DNA, 90 bp, Homo sapiens
tgttcttcttcgagtatttgtagaagggaaaccactgattgcttgtgtggagaaacagctattaggagaacatttaacagcaattctgca

SEQ ID NO: 664826 - DNA, 80 bp, Homo sapiens
ggatgacaccggagtttgacgaagaggtggtttttgagatcacccggaagttcaggctgaattctgaaggcaaacttgag

SEQ ID NO: 664827 - DNA, 90 bp, Homo sapiens
tccttgcggaaaggatgttggcggtccctgtgacctgtggagacacggccagatctgccctccagaaaccacccctactcctaatccccc

SEQ ID NO: 664828 - DNA, 50 bp, Homo sapiens
tgggaggaaggtcctcctacagatgaacaagtgcttcctcacaacttgaa

SEQ ID NO: 664829 - DNA, 88 bp, Homo sapiens
gcttctggagggcaccacatagaagggattaaagcctgtggtttccacagaagcaccacctatcatatttgccacaccaactaaactg

SEQ ID NO: 664830 - DNA, 75 bp, Homo sapiens
tggaggcagcacgggcgaccccccggcgcagcagcatcatcaaggctgaccaactgactgaagagcagattgcag

SEQ ID NO: 664831 - DNA, 100 bp, Homo sapiens
ataattaccgtatgcagtcccccaggatacagggtcaaaggagagcacaaccatcgcagttggaagcccatggggcagaacgactacggtcagaagatgg

SEQ ID NO: 664832 - DNA, 83 bp, Homo sapiens
tatacacaggaagtctccacttccaagatctaggaagacggctacaaatgatgagaagagcatctttctcgtggcccacagga

SEQ ID NO: 664833 - DNA, 75 bp, Homo sapiens
taagaaatgggactttacagctttgatcgatttctgggataagctctctgacacagctggctattctagtcccag

SEQ ID NO: 664834 - DNA, 100 bp, Homo sapiens
aaaaaaaggaagacgatgacttcaggcctgaggagcgatgcgacaggcatgatggaggtcgagtcctcctactcggacttcatctcctgtgaccggacag

SEQ ID NO: 664835 - DNA, 74 bp, Homo sapiens
aaagatctcgtacaagatccttctttaatgccgggtctaagttgtagattttatcaacacaaatttcctgaggt

SEQ ID NO: 664836 - DNA, 83 bp, Homo sapiens
caggagttcgtctcttacgtctgcggaagtgcagctgcctcagttcttagcgcaggtctcctagtaggacaaggaaagcccag

SEQ ID NO: 664837 - DNA, 75 bp, Homo sapiens
tgcatgccaacattccagttttttaagaagggacaaaaggtggatggtggagctgagtgccttgtagaaatccgt

SEQ ID NO: 664838 - DNA, 101 bp, Homo sapiens
cgccacctcatgcacctggaattggacatctcggactccaaaatcagatgcctgaggaagtgcaccatggagaggaggaggtggagacttttgcctttcag

SEQ ID NO: 664839 - DNA, 75 bp, Homo sapiens
aacttgtgagggaatttgagcccatgctacaagtgaaggctcagcttgtcaatcggaaacagaaattagagtctg

SEQ ID NO: 664840 - DNA, 90 bp, Homo sapiens
gtgtgggacgggtttagcggcagcctcttcgcaacgaaaaatctgtctgatgcatgtaaaccactgaagaagcgaaatcgggcttccacg

SEQ ID NO: 664841 - DNA, 83 bp, Homo sapiens
cttaaatgatgtattttgtgatcgcagcgatgaaagcattttgaaagcgaagcagaagccgtagaatcagcggcgagcctgtt

SEQ ID NO: 664842 - DNA, 50 bp, Homo sapiens
cagaaacaaaatgtcaacaaattgatggggcgatgctggatcttttcttg

SEQ ID NO: 664843 - DNA, 91 bp, Homo sapiens
ggcaggtcgagcgcgagagtatcagccgcctcatgcagaactatgaaaagatgaaactgagtatgagtacagtgggagtgaggaagaagag

SEQ ID NO: 664844 - DNA, 99 bp, Homo sapiens
ctcctgactactccttctccaagagctgatgcttttttcaaagccgctataagccttgttccggaagttccaaagatgattaatattgatgggaagatg

SEQ ID NO: 664845 - DNA, 76 bp, Homo sapiens
ggactgcctcactgagcaaccaagacgatggcaagccggcaggtggatattgcaactcagggctggttcattggtc

SEQ ID NO: 664846 - DNA, 100 bp, Homo sapiens
ccgcaggtcgaggacggtcggactcccgcggcgggaggagcctgttcccctgagagcagtcattatggcgaaccttggctgctggatgctggttctcttt

SEQ ID NO: 664847 - DNA, 75 bp, Homo sapiens
aagagcagttgaaattcttaaggatgctttcaaatcaaatgactcacagcagacagcgtttgtttgaaaatttgc

SEQ ID NO: 664848 - DNA, 80 bp, Homo sapiens
gcttcttggagaacactggacagctgaataaatgcaggcttactcaattccagatatggccgaggatgggttgatcacag

SEQ ID NO: 664849 - DNA, 82 bp, Homo sapiens
aactgaccacagtgctcaccacccaccaccactgggaaatttggatatgtgcagtgcatctcctcgaagatgctgatggtgg

SEQ ID NO: 664850 - DNA, 103 bp, Homo sapiens
cccactgctggggtggtggttccaatgagacagggcacaccaaactccatctggtgctggagaatctggtaaaagcaccattgtgaagcagatgaggatcctg

SEQ ID NO: 664851 - DNA, 83 bp, Homo sapiens
aatgtcatcagcttctgaggaatctgtgctttctgtcccagaactccaggtggatgatgactttacagcccaagattacaggc

SEQ ID NO: 664852 - DNA, 88 bp, Homo sapiens
ccgctgctgtggccgctgctgctgctgctgctcctggaaaccgttacatcttccggcccagctgtactcgcctggggcagtgggccat

SEQ ID NO: 664853 - DNA, 75 bp, Homo sapiens
cctaccatctaaaatacgaaggtttctggctgggacagtactgcttttaaagagacagtgttagggatcttggaa

SEQ ID NO: 664854 - DNA, 75 bp, Homo sapiens
gaatccctcacgcgggcgcggatcgaccggagcagagagctggcgagcaagcttcaagaatccagaggctttagg

SEQ ID NO: 664855 - DNA, 75 bp, Homo sapiens
gtgtgcacagtggtgaaaagccttaccagtgtgaacggtgtcatcaggtaatagcctgcagctggtgttttgaga

SEQ ID NO: 664856 - DNA, 83 bp, Homo sapiens
ctcaaggccatgatcaaaacaagtttgcctgcaatggtactgtaattgagcatccggaatatggagaagtaattcagctacag

SEQ ID NO: 664857 - DNA, 82 bp, Homo sapiens
atatttttggacctgaaacagaaattctggaacacctatatggctttatcctgtggataaacgcagagtgaacgagtttggg

SEQ ID NO: 664858 - DNA, 98 bp, Homo sapiens
ggtgcagcccacctcagaggagcgcatccccaagaccatcgagatcaagtccatcacgcacggaagtccaacccagagatccaggactttatgaggaa

SEQ ID NO: 664859 - DNA, 75 bp, Homo sapiens
gtcctcatgatcttcctgttgctgttgggccagattcgccacttgagagagagaggcctggagttcttatctgtt

SEQ ID NO: 664860 - DNA, 124 bp, Homo sapiens
tggtattgctgtggagacggtgacagattctagccgctactttgtaatccggatccaggatggtactgatgccgtgcgcgaaattcggaagtatgatgatgtgacggaaaaggtgaacctccag

SEQ ID NO: 664861 - DNA, 92 bp, Homo sapiens
gggattcgcgctgctgggcacccacggagcctccggggctgactgtgccctgtccacggtgcctcctgcatgtcctgctgccctgagctgtc

SEQ ID NO: 664862 - DNA, 90 bp, Homo sapiens
ggggagcgaaggctgaggtggcagcggcaggagagtccggccgcgacaggacgttggtagctggcagtgttgtgatggcttttgaagaag

SEQ ID NO: 664863 - DNA, 75 bp, Homo sapiens
agcccggcttcgtttcatgaaacaacaaaagcatgaaccaggtgcagtggctcacgtctgtaatcccagcatttt

SEQ ID NO: 664864 - DNA, 100 bp, Homo sapiens
cacccacgaaaggcatctgtcccaagcaggagaacattgcagaaattccgggtagatatgcctggctcaggcagtgcattcatccccaccatcaacgcca

SEQ ID NO: 664865 - DNA, 90 bp, Homo sapiens
tcattggagcaagggaaggagccctggatggttgtgagggaagagacaggaagatggtgcccaggtataccaagcttggctacgcaggca

SEQ ID NO: 664866 - DNA, 95 bp, Homo sapiens
ctcagcctccggagtagctgggattacagaaaagaagagtcggggacctcctagccagttacattccagaggatgaggcgctgatgcttcgggat

SEQ ID NO: 664867 - DNA, 80 bp, Homo sapiens
gtgtctggctctggaattgctactgctgcctctgtcactcctggtgaccagcattcaagagtattgggaaagggtcgttg

SEQ ID NO: 664868 - DNA, 51 bp, Homo sapiens
gcaacatggtgcggtcggggaataagagagagactcccgtgagcacgagga

SEQ ID NO: 664869 - DNA, 100 bp, Homo sapiens
atcggaccggccctgccgcccggcttcaaggcccgcggaacagcggaggacgaagagcgggacccgagccctgtgttgtgaagagcgaagacttttcgct

SEQ ID NO: 664870 - DNA, 75 bp, Homo sapiens
aaagcccttcctagccttaaagagctggacaggtgcctggtgctgctcttcctaaccctctcaacatgctggggc

SEQ ID NO: 664871 - DNA, 100 bp, Homo sapiens
gacgatctgcacttcgcattttggcattgacatttaattttagggtcctttatatagaagggagagtaggtctacatgttcaagtgcgtgtggcggtgct

SEQ ID NO: 664872 - DNA, 50 bp, Homo sapiens
ggagtttgcggattttgaatatagggctctggctccgctactgcatcgtg

SEQ ID NO: 664873 - DNA, 100 bp, Homo sapiens
ccagtactctgccgagtgcggcgtggttctcaccattcaggaagcccttcagctcactgttcaaaaagtagtgggtctctggattcatccaaagtctaca

SEQ ID NO: 664874 - DNA, 95 bp, Homo sapiens
cacaacttgccaggaggttgtcatagccttagctcaagcaatagatatgattctataacagactcttccagaaatgatatgaagaggaaatttgc

SEQ ID NO: 664875 - DNA, 74 bp, Homo sapiens
atccaagtcaccaagaaattactgtctcaagtgatacggttgatgataattagaagcatgctttccactgaact

SEQ ID NO: 664876 - DNA, 82 bp, Homo sapiens
cagacgtcaacgtcaaggacttcgcagatataaagatgaagcgcagctgtataaagaagagcacctgaggaatcggcagcac

SEQ ID NO: 664877 - DNA, 82 bp, Homo sapiens
gcctcggaggcgttcagctgcttcaagatgaaggaaaatgtttataggaggccttagctgggacactacaaagaaagatctg

SEQ ID NO: 664878 - DNA, 51 bp, Homo sapiens
ctccaggaccctctggaagcctagaaatgataatcaatatgcatttccaag

SEQ ID NO: 664879 - DNA, 75 bp, Homo sapiens
ttcctaaacaaatagagagaaaaacctgtgaccctaagttgctctcaccagaagatttagtgaatgcgtgcaaga

SEQ ID NO: 664880 - DNA, 97 bp, Homo sapiens
ttttggttggtgattttgatgatagccacaaagcaagcaggagttaaagttctcatcagactactgaaggacttgaggattcgttttcctggctttg

SEQ ID NO: 664881 - DNA, 50 bp, Homo sapiens
ggtcggttgcggtcggccccggcaggccttcctggatgctctgcagaacc

SEQ ID NO: 664882 - DNA, 100 bp, Homo sapiens
caatgacgtgtttgaaggaagacgagacttcacagagaatgcagttgtcttgacttcaggtctgtctgttctgttggcaagtaaatgcagtactgttctg

SEQ ID NO: 664883 - DNA, 101 bp, Homo sapiens
ggaagtttgagagaagtttaagagaagaaatggacatgattgcctaaatcagccaaacacaggaacaatccatttcacagatgaagaaacagactcagtga

SEQ ID NO: 664884 - DNA, 100 bp, Homo sapiens
caccgttcacagagctagccggacgtcctccgactcaagaagaatcctgcaaaaatgtctctctatccatctctcgaagacttgaaggtagacaaagtaa

SEQ ID NO: 664885 - DNA, 96 bp, Homo sapiens
agaaaaaaaagtatttccaagatcttctcgacgtcagcaaattaaaacgtcacattcgctctcatactggagagcgtccgtttcagtgcagtttgt

SEQ ID NO: 664886 - DNA, 101 bp, Homo sapiens
ctccggagcccggcgaccgcggtaccgcgcgccactaacaggatagagggaggaatcagcagcttggaaattcaagcacgtgatctggcgggatgggcgtt

SEQ ID NO: 664887 - DNA, 96 bp, Homo sapiens
atttccatgtcaacatagtcctgagataattgacgaccttgccaacctagtggagaacacagatgaaaaacttcgcaatgaaaccaggcgggtaaa

SEQ ID NO: 664888 - DNA, 100 bp, Homo sapiens
catgagcaagctgatgaagatctgctctctcaatatgaaaatggtagctccacagtaggaatttgcaggtgaagacacttctgatttgtttttggaagag

SEQ ID NO: 664889 - DNA, 74 bp, Homo sapiens
gtctctctgctgcggcgcggggaccgctgtgctctcggcatagaatgtcaagctaaccaggcgtccgctacttc

SEQ ID NO: 664890 - DNA, 100 bp, Homo sapiens
gtctcttacgtctgcggaagtgcagctgcctcagttcttagcgcagggtgttactgtgttgcccaggctggtcttgaaatcctgggttgaaacaattctc

SEQ ID NO: 664891 - DNA, 90 bp, Homo sapiens
atttccctgcaggcagatgagcattgacaagggcaattgaaggaacagactaaaaatcgtgtcctggaaggaaactacaggtactaccag

SEQ ID NO: 664892 - DNA, 82 bp, Homo sapiens
ccttgtcgaagttgaaggtgacaaccggtatattgcaaataccgtagaggtggagagacttatccaagaacgtggctgggag

SEQ ID NO: 664893 - DNA, 100 bp, Homo sapiens
tcataagccaggtcttagaggctcccggagtgtatgtctttggagaacttctggagctggccaacgtgcaggagggaatagcatttcaaggttcagtgga

SEQ ID NO: 664894 - DNA, 82 bp, Homo sapiens
ccgacttcggcatctcctatgtcatggtcaggctttgccacaaatgtcagtgcagaactctggctggccccaccaagaagac

SEQ ID NO: 664895 - DNA, 75 bp, Homo sapiens
tttcatgcagtgacatgttgataaaaaatgatgcgtcgagggcgaggcccccagcagtgagactggcacatccct

SEQ ID NO: 664896 - DNA, 90 bp, Homo sapiens
ccacaggaatcctcattcatctggccaagttttatggttatgacaatgttaaggaatatctggagaggtgcagtggctcacacctgtaat

SEQ ID NO: 664897 - DNA, 75 bp, Homo sapiens
tgatcgactgtgtaaacaactagagaagattggacagcaggtcgacagtgctaaaatgatgtattttctggacaa

SEQ ID NO: 664898 - DNA, 75 bp, Homo sapiens
gaaaagactaaaatgcttccgatgtggagcagacaagtttgggagcgctgacccagctgatccagctctatcatc

SEQ ID NO: 664899 - DNA, 100 bp, Homo sapiens
cccggacggactacgagtaccagcactccaatttgtatgccatatcagcctctgcgcttagataccttcatgaaaacagaatcatccatcgggatctaaa

SEQ ID NO: 664900 - DNA, 98 bp, Homo sapiens
ttatcatggattcccagcgcgggacagccagcctgaactgacatcaactcccaatttcgtggttgaagttataaagaatgatgatggcaagaaggccc

SEQ ID NO: 664901 - DNA, 75 bp, Homo sapiens
gtttcatttgacaaagattccaccgtccaagtctttgaggccacgataaggcccggaggctgtttgatgtcctgc

SEQ ID NO: 664902 - DNA, 100 bp, Homo sapiens
gccatccgggaggcccagggaaggctggaggctctcaggtcatttttaccaacccattggagatagtgaagattcgtctgcaagtagctggagagatcac

SEQ ID NO: 664903 - DNA, 75 bp, Homo sapiens
gggggcccagggcaggcgcggagccgggccggcagcttatctcctggtcgaggaaaagactttaaatctcggaag

SEQ ID NO: 664904 - DNA, 75 bp, Homo sapiens
tgtgcgttcccctctgctgaggcagagctccagtgaacagtgcagctgtgatgcagatccatccgccctagcaaa

SEQ ID NO: 664905 - DNA, 90 bp, Homo sapiens
gcaggatggctgcgttgacacgtcttatttaatccacatcatagacaagactacttttgcttaaaaatctgttatgtaaacaaggaagtc

SEQ ID NO: 664906 - DNA, 75 bp, Homo sapiens
cccacgaatctgcccacccctcctgtaacccagcctgtttcacttcttgtgttcactcatcttaaacatcctcag

SEQ ID NO: 664907 - DNA, 100 bp, Homo sapiens
gcaagtttaagaaggataattaattacacaaacccttcacagactgctctggggaacgcccttttgcttgtgactggcagggctgcgacaagaagttcgc

SEQ ID NO: 664908 - DNA, 98 bp, Homo sapiens
tcaggacttgagtaacagcaacatgcttctggctagcaaggaggacgaggacacgatcaaaattggggaggatgacgagattaatttcctgagtgacc

SEQ ID NO: 664909 - DNA, 87 bp, Homo sapiens
ttttcaaatgctttatcttcattgaatgttcttcgtccaggaagtgtttggattgtgagctatttcagaactgttctcaggactcat

SEQ ID NO: 664910 - DNA, 100 bp, Homo sapiens
atgtccatccagttgggagctatgagtcctctgaaatgaacagcatagattgttcaagtttagaagaatacaacattgccgcagcattactccctttgac

SEQ ID NO: 664911 - DNA, 82 bp, Homo sapiens
gtgactgggcggtgccggcgccggagacgatgccgttgttttaaaatcaaagatgggaaaatcggagaaaattgcccttccc

SEQ ID NO: 664912 - DNA, 50 bp, Homo sapiens
ctctggggcttcctgctccagctggtttcagccatgccacagagctccgg

SEQ ID NO: 664913 - DNA, 75 bp, Homo sapiens
gaggatgtgctggagcggtacaaaggtcaccatggagtaacaagtatgaccctcccttggaggatggggccatgc

SEQ ID NO: 664914 - DNA, 76 bp, Homo sapiens
cccttctcggtgaacgttcagctgctgcaggaccacggggaaattgccaagaacgcccactattgcttggttctac

SEQ ID NO: 664915 - DNA, 82 bp, Homo sapiens
cttcttgcagactgtaatgaagcattcattaagataaagatggcttttcggccagaatttacatagtacatgacgaagttaa

SEQ ID NO: 664916 - DNA, 100 bp, Homo sapiens
aattgaggcgcaatgatgagaggatgtggtggtctactctgatgtcaatcttgagggctagctacccagaatggaatcctgacaatgatacaggacacac

SEQ ID NO: 664917 - DNA, 100 bp, Homo sapiens
atgatgacctgcacagctccagccaccactacagccaccctggagggggtggggagcagctggctatcaatgaggtgcagcagtgatcaatggctctcag

SEQ ID NO: 664918 - DNA, 99 bp, Homo sapiens
gttaactatggtagcccacccagcattgggaatttgaagtactgccttgtaattcttaatcagcctttggacaactattttcgtcatctttggaacaaa

SEQ ID NO: 664919 - DNA, 99 bp, Homo sapiens
atcggctggccctactgcaatctactgcactcgagtctgcgggccaggcatcgacatccgcaacgactatcagcagctgaagcgcctggagaactgcac

SEQ ID NO: 664920 - DNA, 97 bp, Homo sapiens
gatgatgcagttcaaataactaaggtgagaagccatttaaatgtgatcagtgcagttatgtggcctctaatcaacatgaagtaacccgccatgcaag

SEQ ID NO: 664921 - DNA, 75 bp, Homo sapiens
tacctgtaaagggttcttcaatatttatcatccggtgacagtatgttgactgctgtctctgtggccagagattgt

SEQ ID NO: 664922 - DNA, 75 bp, Homo sapiens
cgtcaagaagtcggacccggaaagaggctttgagagagtgggaagggtttctccaaagaaattaaaatacctaaa

SEQ ID NO: 664923 - DNA, 97 bp, Homo sapiens
gcgcgtgcgcctgggggcaccgctgccgttccgagatccgcaaggatgctctccgggcgctcaactttgcgtacacggtgagcacacagcgatctac

SEQ ID NO: 664924 - DNA, 100 bp, Homo sapiens
gggatttaaccatctgacccttggaaatttaatggagccaccatttcagaaccaaaagaaatttggaacaaacttcacaaagctggaaaagaaaactatc

SEQ ID NO: 664925 - DNA, 83 bp, Homo sapiens
gccagttttgaaatcgacacacaaagaatagagttgagcctgtgggacacttcggcggctggctgtcggcaattggattcttc

SEQ ID NO: 664926 - DNA, 100 bp, Homo sapiens
ttctgtctacaggttctgtctgcttcccacttaacagacccattttggctttctatcactcaaaggcattccatgaagaatactccaggctctatcagct

SEQ ID NO: 664927 - DNA, 96 bp, Homo sapiens
tgaaaaaaaagacctgctttgccctgggaaatagtaaccctgccaaatacatcagcttgtaggagacagaggtgttggaaatcaatagctcttcta

SEQ ID NO: 664928 - DNA, 75 bp, Homo sapiens
ggggtttcttgcaaaacgcttctccggctgcaccctgaccgatgggaccctgcacaacagatttgttttggactg

SEQ ID NO: 664929 - DNA, 50 bp, Homo sapiens
gcggaacaggacgccctctgatgagaacgtatttaccgggcagtcaaaga

SEQ ID NO: 664930 - DNA, 100 bp, Homo sapiens
ttatacctgtgaattaaaatatggaggctttgttgtgagaagaactactgaattaactgttacaggatgttggttcctgcaaacaagaactgaccctatc

SEQ ID NO: 664931 - DNA, 83 bp, Homo sapiens
cgcggtggagcgggacacgaacgtgaccttcacggcatggtgcaactcccacctgcggaaggcaggcacacagatcgagaaca

SEQ ID NO: 664932 - DNA, 75 bp, Homo sapiens
taaaattgagtcttctgtccaactgcaagctcatttagaggcgagttttgaggaggtagagaacaacctgctgca

SEQ ID NO: 664933 - DNA, 75 bp, Homo sapiens
ctgctgacgctgctgctgcccggcctcgggatatctcccggggccaattcagcatctctacctggccatcctaac

SEQ ID NO: 664934 - DNA, 100 bp, Homo sapiens
ttgactgcacatggaacattgaggtgacgttcaccaagcggaagttcgggctgatgaagaaggcctatgagctgagcgtgctctgtgactgtgagatagc

SEQ ID NO: 664935 - DNA, 95 bp, Homo sapiens
gagtgtgctcacagggaaagtggaaaaggttctttcaaagcagcacaggtgaccatctacctggggaacagagactacatagaccatgtcagcca

SEQ ID NO: 664936 - DNA, 75 bp, Homo sapiens
gacaaaaaagacctttagaagatggaggttaccacattctcatctggagccaggaggaagccaggacacggaagt

SEQ ID NO: 664937 - DNA, 75 bp, Homo sapiens
gtgtaagcgcagaaagcaggcgaacccgcggcgcaataacggctgaccccgcactacatctacccaccagccatc

SEQ ID NO: 664938 - DNA, 100 bp, Homo sapiens
aagagggttatgtccccacttcatatgtcgaagtctgtttggacaaaaatgccaaaggctacattattggaattttgaagtcatgaaaacatcagatgaa

SEQ ID NO: 664939 - DNA, 80 bp, Homo sapiens
tgcaagtatgacttcataatggagaccaagctcaaacccctccggaagtacaatgccagtgtttcagtcccagacagcag

SEQ ID NO: 664940 - DNA, 74 bp, Homo sapiens
tgcgagtgggacgcgcactggtcggtgccggctcaggagccgggctgctctgttaaaagcgaaaatgaaacaat

SEQ ID NO: 664941 - DNA, 110 bp, Homo sapiens
gcctgtccagccagcatggaaccaaagcggatcagagagggctaccttgtgaagaaggaactgtggctgcaccatctgtcttcatcttcccgccatctgatgagcagttg

SEQ ID NO: 664942 - DNA, 85 bp, Homo sapiens
gaaaaagcggccaaagaagtgaagctgctgctactcggtagatttcgggcagacaacttgaacaagctgaagaacctatgcagca

SEQ ID NO: 664943 - DNA, 100 bp, Homo sapiens
tgagaggcgccggcgtcgcgggccccgcagcgcatcccggcgtgtcggacagattggattatggaagtgggaagtgaagaagaaaaatgggagaagctgg

SEQ ID NO: 664944 - DNA, 100 bp, Homo sapiens
ccgccactgccgcaggaggcgtgagggccagatattcgaagcttacaacatggcagctttgtggaaattaccttgtattttcatctgtgagaataatcgc

SEQ ID NO: 664945 - DNA, 90 bp, Homo sapiens
gtcagacaaggaaattactcatgatgtcaaaggtgtggatgaggtcaccattgtcaacattttgaccaaccgcagcaatgcacagagaca

SEQ ID NO: 664946 - DNA, 90 bp, Homo sapiens
ttccctgatccccacacctacatcaaaactccgattcgacctcacattactactttgcgcaaatacacatacgggaagcatatactggcc

SEQ ID NO: 664947 - DNA, 87 bp, Homo sapiens
atttttgctcaagctaattcatatactttcaactgaaaggagtcagtggatcggtggggaaaatgctgcttaccctgggccctgggc

SEQ ID NO: 664948 - DNA, 100 bp, Homo sapiens
tgggagtgatttgcgccatcatcctcatcatcatcatagggaaaggaaaacctcttcagcgcaaggtgaaaccacctaagaagcaagaggaaaaggagaa

SEQ ID NO: 664949 - DNA, 75 bp, Homo sapiens
agattttactaccaagccctgtcagtagctcctcagattggttggatggcaagcatgtggtgtttggcaaagtga

SEQ ID NO: 664950 - DNA, 96 bp, Homo sapiens
cgggcttcggcccccaccagagactcggcttacctagaaatggaatttaaagaggcaattactgcaattatgaagtacattgaaacaacacctctt

SEQ ID NO: 664951 - DNA, 100 bp, Homo sapiens
tgctgggcgacctgcaggcagcaccggaggcccaggtctccgtgcagcccaacttccagcaggacaaggtgtggcccctaccagaccccgcagacccggg

SEQ ID NO: 664952 - DNA, 82 bp, Homo sapiens
aggttcggagcgcggccgggcgcgcggcgccgccacaagttgcgctgctcgcgacgagggaaagttctatctggtcatcgag

SEQ ID NO: 664953 - DNA, 96 bp, Homo sapiens
caaatcaaccgccttgaggatctttctgcccgcctgagtgatcttgaaatgaatagagttgcatgctgagaatttgaaaaatgaagatgatgtaga

SEQ ID NO: 664954 - DNA, 75 bp, Homo sapiens
agaggcatggttgaaattgaattccctaccacttatgtcttggatgaagatgaacctcgattccttgaagaagtt

SEQ ID NO: 664955 - DNA, 75 bp, Homo sapiens
gcagattccagaaaaattacagcacatctcagtgaatttgcaagtgcttttggaaaagaagaagagagtccaact

SEQ ID NO: 664956 - DNA, 75 bp, Homo sapiens
ttcaagaaggaagtgtatcttcatacatcaccacacctgaaagcagtggtctggagccgaaccggcaatatctct

SEQ ID NO: 664957 - DNA, 100 bp, Homo sapiens
gatcctgaagtggcggccctgtattttcccaaaaaccgtactctgacagctgtgcacgatgccatccttgaggacttggtcttcccaagcgaaattgtgg

SEQ ID NO: 664958 - DNA, 83 bp, Homo sapiens
cgaaggtgaagagttgtcccagctcggcccgcgggggagccccgggagccgcacgactctttttgatcagaacaatgctgcaa

SEQ ID NO: 664959 - DNA, 75 bp, Homo sapiens
agatccacagctaagacgccaggacccactggaagcctagaaatgacctgcgaccgcatcaagcagtccgccagc

SEQ ID NO: 664960 - DNA, 96 bp, Homo sapiens
tgaggcccagagacctgagcagctctgcaaggttctaacagattgcttccaagtatgatcatcaggcagaagaagatcttcgcaattggatagaag

SEQ ID NO: 664961 - DNA, 75 bp, Homo sapiens
acttctacccgacacttacatgccatggccttctacgttgtgaaaatgattgggactttaaccaggacatctgac

SEQ ID NO: 664962 - DNA, 99 bp, Homo sapiens
gccaaatggacgggactattaaggaaaacacagatcctggtgccgaacatgaggacagggcaggccgaaggagaaagtggaaggaggggagcttctctc

SEQ ID NO: 664963 - DNA, 83 bp, Homo sapiens
tcgaagccattcagtcctcaatctccttttccttggctacccgatttccatttaaacagggttaatttggaagaatcttcagg

SEQ ID NO: 664964 - DNA, 98 bp, Homo sapiens
cggccgcggcgaccaccccggacggcccctgtccccgctggcgggcttccctgtcgccgttcgctgcgctgccggctctgaacagcaacatggggtgc

SEQ ID NO: 664965 - DNA, 75 bp, Homo sapiens
cagcatggtgtaccagctttggctagatgatgctcaggtgtcttctgcggaggtgcgcatcgggcccatgagact

SEQ ID NO: 664966 - DNA, 100 bp, Homo sapiens
cgcacctccgtagctgactcgaacatccagtcatggataaaaatgagctggttcagaaggccaaactggccgagcaggctgagcgatatgatgacatggc

SEQ ID NO: 664967 - DNA, 75 bp, Homo sapiens
gatttggcacctatgcgcctgcagagatcgtcagtatttaaacagatcacatcatgcgtgagtacaagctagtgg

SEQ ID NO: 664968 - DNA, 90 bp, Homo sapiens
gtgcgctttctgcacgagaccgggctggccatgatctatggtgacagagctgaatgaacctctctccaatgaagatcgaaatctcctctc

SEQ ID NO: 664969 - DNA, 100 bp, Homo sapiens
ggaccaccatcctgaatggtttaacgtgtacaacaaggtggtctgtttttctggggggccaccaacacctcccgtgaatctaccatgtacccaaaagcag

SEQ ID NO: 664970 - DNA, 51 bp, Homo sapiens
cgcttcctgagggagtgggtggagagtcccagtcggtacctccttttccac

SEQ ID NO: 664971 - DNA, 100 bp, Homo sapiens
gctggcacccaggtgcccatgagtacttctttgattccagagtattaacagatggagaactggctcccaatgatagatgttgccgtgtgtgtggaaaaat

SEQ ID NO: 664972 - DNA, 75 bp, Homo sapiens
cgaccaatagctcagatcctttccttaacagctccgggaagcagtttgttcgctatataaacatgttgataaacg

SEQ ID NO: 664973 - DNA, 100 bp, Homo sapiens
gagaagcggctgtttggtcgctactatcgtgtggcattttatgggcaggtcaccatcgtggtccttggcaacaagtgtgacttacaggagcagcggcgtg

SEQ ID NO: 664974 - DNA, 100 bp, Homo sapiens
gcctcccgagtagctggggctacagggtaaagcatcaagtcgaatatttgggtctgaaagagaacattcgagtgagaagagctggctatgcctatcggcg

SEQ ID NO: 664975 - DNA, 98 bp, Homo sapiens
cggaacctgaaaaattcaagaagttgaaaaacgcttttcacgtcacctggagagatgcacagaaggtgggtgcggctgctatttggacgagagttccc

SEQ ID NO: 664976 - DNA, 100 bp, Homo sapiens
agggttcctggggcatcgacgatctccatatttcattgcaagatggcagaaacggtggacacaagcgaaatggtcaacggcgctacagaacaaaggacga

SEQ ID NO: 664977 - DNA, 98 bp, Homo sapiens
acctgtggcttatctacgctttttagaattgcacttggaggacaaggaaatggagcagactagaagtgcagttgatgaggaccggaaaatgtatctcc

SEQ ID NO: 664978 - DNA, 50 bp, Homo sapiens
atgctgaggggggatttcagatttcatgtgtttgctgactagcactttgg

SEQ ID NO: 664979 - DNA, 100 bp, Homo sapiens
ctagctattgccttattttttctcatggatgttcttcttcgagtatttgtagaaggaaaccagcctggacaccaagtctgtgtcagaaggccacctcaag

SEQ ID NO: 664980 - DNA, 82 bp, Homo sapiens
acctgccaatttaccagagataattgataacaccctgtaacagctgaaccatatttgaagatgttagtggttttggtgcctg

SEQ ID NO: 664981 - DNA, 75 bp, Homo sapiens
ttcctctccaaggacgaattcttcaccatgatgcggctcatggaatccaggtccttctataccgcttacctgcag

SEQ ID NO: 664982 - DNA, 50 bp, Homo sapiens
gtcaatgacttacgccaagaagagttccatcaggcttgttcatccccagc

SEQ ID NO: 664983 - DNA, 83 bp, Homo sapiens
gagaagatcgtgggctcagaaatagacagtacgggaaaattcgcttttcctggattgctgtggaaactgcagcgacagcgagg

SEQ ID NO: 664984 - DNA, 84 bp, Homo sapiens
tggagatatggcgcaactgcggcgcccatgccagtgacggtaacccgcaccaccatcacaaccaccacgacgtcatcttcgggc

SEQ ID NO: 664985 - DNA, 100 bp, Homo sapiens
cagtattatgatatgctgattgaaagaatattgttacctggctgagcagtgctggaatggcggctttatctacctgatcatgctgcgtcgctttaagcac

SEQ ID NO: 664986 - DNA, 119 bp, Homo sapiens
tcagaggacgaagaggaggctttaccttgcacagactgggagaactaacaaatggatgacaatcttcgccaaagccctcagcttcctcctcggaaactgccaacacttaaattgactcc

SEQ ID NO: 664987 - DNA, 74 bp, Homo sapiens
gaaacacccctgtccatccaggcacaccctaacaaggttgcaacaaggacagtgtcagagcaggctgtaaaaaa

SEQ ID NO: 664988 - DNA, 100 bp, Homo sapiens
ttttgagccttacggagccgtctaccagatcaacgtcctccgggaccggagtcagaaccctccgcagagtaaagccccccgaatccaagcccaacttcac

SEQ ID NO: 664989 - DNA, 98 bp, Homo sapiens
ttttgattgtgtattatggataccaaggaagagaagaaggaacggaaacaaagttattttgctcggctgaagaaaatcttggtatggtgatgattttt

SEQ ID NO: 664990 - DNA, 82 bp, Homo sapiens
agtggactttgttctgaattactccaaagcgcaaccggtgaccaaaaacactttcaggcagtatcgagtgctaggaaaaggg

SEQ ID NO: 664991 - DNA, 50 bp, Homo sapiens
gaactacagaaacctggccttcctgggatctcatagatcagaatatactg

SEQ ID NO: 664992 - DNA, 108 bp, Homo sapiens
gacgtgcacgggatccacttccgcaaggaccctttggaaggccgggtgggccgaggtggacccaagtggagagattgtggaactggcgaaaggtgcatgtccctggaa

SEQ ID NO: 664993 - DNA, 100 bp, Homo sapiens
acctttgagctgcggaccccgagtccagcgggcggcgggagggtggacagaggcccagtgaggactgtgactaagcgggtgcagccctgctccctggacc

SEQ ID NO: 664994 - DNA, 89 bp, Homo sapiens
agcaagcagttcagaagagccaaggaataaacatgcaatgaacccaaaagggtaaaagatacctgctttcttcagcctatgtagacagc

SEQ ID NO: 664995 - DNA, 97 bp, Homo sapiens
tcaccctccttgctaactttgccacccttgtcagcacctacgccaaaggaaaaaagggttgctcattttgggtatcactggagtctgatggaaagag

SEQ ID NO: 664996 - DNA, 74 bp, Homo sapiens
ggctatttatcctttgcattgtctcatgatcagtggatgcttctgcagaaagccgtcattacacctgattttga

SEQ ID NO: 664997 - DNA, 100 bp, Homo sapiens
gacgggttcagttcgtcatggggctgtttggaaagacccaggagaagccgcccaaagaactgatcctgcagctcctgaaaggcaagctggtggtgggtca

SEQ ID NO: 664998 - DNA, 81 bp, Homo sapiens
ccacgcggctgcacaactgcaggaacaccgtcacgctgctggaggaggcgaagctggtccgttacatttgtaagcagaggc

SEQ ID NO: 664999 - DNA, 98 bp, Homo sapiens
tgaacatcatgaattcccaagaaggagatttctctatgaatcatcatcaagaactctgggagaacttttgaattcataaccaagccaacatctccaga

SEQ ID NO: 665000 - DNA, 75 bp, Homo sapiens
tggaggatgatttcatgtgcgatgatgaggaggactacgacctgatacctgcactcaaataacatagttgtggtt

SEQ ID NO: 665001 - DNA, 96 bp, Homo sapiens
cgcgtcaggccacaccggtggtctgggctgtggcgcgcgggtcggggcccgaggcgggcggccaggaagttccagggtctccctccactgctgtag

SEQ ID NO: 665002 - DNA, 90 bp, Homo sapiens
aagaagtgcattgttttggtgactgaacttatgacgtctggaacacttaaaacgtggaggagttactgatggccatggagaaggtaaagc

SEQ ID NO: 665003 - DNA, 75 bp, Homo sapiens
cgctcctaagcctgcacagccgcggcggcagcagcagtgagaggtgtgggcaagagcagtttactgttgcgtttt

SEQ ID NO: 665004 - DNA, 75 bp, Homo sapiens
ccaccaaccgtggcatcacgcgtgattacagtggcgagatcttgaacaactgctgcgtcatggagtaccaccaag

SEQ ID NO: 665005 - DNA, 90 bp, Homo sapiens
agggccgcaaccaaggcgcccgagggcaacggagcggccgagcgccggaaccggagcaggaagtgctcctgtcctctcagctgtggccac

SEQ ID NO: 665006 - DNA, 82 bp, Homo sapiens
tgaaatgacatcaagagacctatcaagacctgtatccaggaaaagatgaacagtgctttgagacaaatgtcatatggtggaa

SEQ ID NO: 665007 - DNA, 73 bp, Homo sapiens
tgcaggcttgtggcgggaacagcctgggcctcatggcggtccgagcttcgttcgagaacaactgtgagatcgg

SEQ ID NO: 665008 - DNA, 90 bp, Homo sapiens
ctttcattagccacgaggagaaaagagttttgcactgattgcaaaaataaagtcctccgagcatacaatatccttattggtgaacttgac

SEQ ID NO: 665009 - DNA, 91 bp, Homo sapiens
caccaccctcgtgtctgccaccatcttcgacttgagcgaagttttatgcaaggtttggtgcacctcgatttggaggaagtagggcagggcc

SEQ ID NO: 665010 - DNA, 90 bp, Homo sapiens
tgaagccaacagagtcctggcgggagactcttctggacagcagagttatggagcttttcttcacaattggaaaggaattcctaagaagcc

SEQ ID NO: 665011 - DNA, 100 bp, Homo sapiens
atggttcaatgtaaggaacggatatggtttcatcaacaggctgatgaattcatccgagcaaatgccaccaacaagctgacagtcatagctgagcaaatcc

SEQ ID NO: 665012 - DNA, 100 bp, Homo sapiens
gatttgtgtggagcacacattgaatgggccaaggaaaaatcgagcagaaagaatgtctttcagttctctctttccagacgtagtgaactgtatgcagact

SEQ ID NO: 665013 - DNA, 83 bp, Homo sapiens
ccgcctcttggtttgcgtcctgcactgaaaggaaatgacggattttggaattggctcgggaaaaggtaatgcgagaagttaaa

SEQ ID NO: 665014 - DNA, 90 bp, Homo sapiens
gtgagagttcaaagattctttgtagcagacactgcaaatgaagctctcgaggctgctaagagactaacacttttccagccattaactcca

SEQ ID NO: 665015 - DNA, 73 bp, Homo sapiens
cttttcaatgctgcgaaagctgccaaaagtgacatgcaggcctcctttgggagcacacgaggctaccatggct

SEQ ID NO: 665016 - DNA, 89 bp, Homo sapiens
caggtggtctgtgaagccacacagtgtccagatacgagggcctttccacagaagaaaacctgtctgcctccatcaccaaacaacctatt

SEQ ID NO: 665017 - DNA, 50 bp, Homo sapiens
aatgaccgtggttcccactgaggatttctctgcctcttccaaacttttcc

SEQ ID NO: 665018 - DNA, 74 bp, Homo sapiens
ctgcagtcggcactgctactgcgaagacagctggcaggaaagccatcaccaagtcgggcctccagcacctggcc

SEQ ID NO: 665019 - DNA, 75 bp, Homo sapiens
caaaactgatttcagaaatgcatagttttatccagacctattccatctgggctagcagttgtaaaaacaaagcag

SEQ ID NO: 665020 - DNA, 90 bp, Homo sapiens
tacaggtcggagaggtcagcaacagggacatcgtggagacggtgctcaacctgatccagaatataagaagtttttagaaacctactgtgt

SEQ ID NO: 665021 - DNA, 126 bp, Homo sapiens
gagggagcctcgccgcccgtccccggcacacgcgcagccccggcctctcggcctctgccggagaaacagattgtaaaccatggctgtgtggatacaagctcagcagctccaaggagaagcccttca

SEQ ID NO: 665022 - DNA, 100 bp, Homo sapiens
tcttgctctctgcctcgtcccaatccccggctcttaccaaatgcagattaaaagaccttactttcatgtgaaacctttggaaaaggcacaactaaaaaac

SEQ ID NO: 665023 - DNA, 80 bp, Homo sapiens
gcctgtcccaagccctggtgccaggtgtccatccccgtgctgaggtacctagtcgatagtcgctggttcaaacagtggaa

SEQ ID NO: 665024 - DNA, 90 bp, Homo sapiens
tatggactaacagttccctcaaccagaacatgacaaatggaacacgttgtggacctgtcatttactccatcctttatagtgatgctacag

SEQ ID NO: 665025 - DNA, 100 bp, Homo sapiens
gcgtcttccgagggatccctgtccccagatactagacattgtacccatcctgacgtcaactgtgattgagtgtcacagggcaggcctgaagaactctgct

SEQ ID NO: 665026 - DNA, 76 bp, Homo sapiens
acggaagcgcagggagaaggaagaggtgtttgaaaaggctgaagggtatgtgattggcagctgtattaaacacatt

SEQ ID NO: 665027 - DNA, 101 bp, Homo sapiens
gctcgaggttgcaggactctttctgttcaggccagaccctctgggagcttctcagccattttccacagatcagtgtactaatggtcacttgatgtgcgctg

SEQ ID NO: 665028 - DNA, 78 bp, Homo sapiens
tattgccctgtcttcatcaacatttaatcatatgaatctgatgaacaagaaaagagtgcctatcaagagtatgacagt

SEQ ID NO: 665029 - DNA, 97 bp, Homo sapiens
tcctggtcatcttctatttccaaaaacctaaaggcagacccagaagagctttttacaaaactagagaaaattgggaagggctcctttggagaggtgt

SEQ ID NO: 665030 - DNA, 90 bp, Homo sapiens
tttgagaacagagtgctgttttagagctggcagcagcatctcagcccaagagaaggtgcaggcggagctgaggcggaagtggcggcgctg

SEQ ID NO: 665031 - DNA, 87 bp, Homo sapiens
cgtctgcggctctccgccgtccccagccctgcctctccctgggctctgacaggggcaagtgtccgagtggtgaatcagctacttaca

SEQ ID NO: 665032 - DNA, 75 bp, Homo sapiens
ccccatcccgctcggtttggacacccgcaaggccggcatcggtatcagtgcttcaaatcggcctggatgtttgag

SEQ ID NO: 665033 - DNA, 100 bp, Homo sapiens
aagacatcaagaagatcttcgagttcaaagagaccctcggaaccaacgaagtggtgaatctgttaaagtgcaccaactagatgttgccattcctttgcat

SEQ ID NO: 665034 - DNA, 100 bp, Homo sapiens
aatgcagaaaaaagatcacaagcaactctggatgggattgcaaaatggttattggagtgatgagtaaagaatacataccaaagggcacacgttttggacc

SEQ ID NO: 665035 - DNA, 75 bp, Homo sapiens
ccgttcctttaggctgccgccgctgcctgccgccatgccggcccaggcctttgtggtgaagcggggcgtccacgt

SEQ ID NO: 665036 - DNA, 100 bp, Homo sapiens
gtcttgggcagcatgcagtgctttctggcacaatgttagaggtgttgtatctatggctaataatggcccgaacaccaatggatctcagttcttcatcacc

SEQ ID NO: 665037 - DNA, 97 bp, Homo sapiens
gtggatgagccctatgacagacgcttcgtcaagtggatgatcaagaacaaggagcttcggaggaagatcctggtgaaggggaagaagttaacacttg

SEQ ID NO: 665038 - DNA, 74 bp, Homo sapiens
gagcagagccgccgaggatgataaacacccaggacaggaagattgttgatcgaatcgacaatgatggggatggc

SEQ ID NO: 665039 - DNA, 100 bp, Homo sapiens
cagaacgtgtcccagctatcctgatgtccagcatgtgcattttgctagatcacctggatggagaagccacaattgctgccagtcggcaggccagctcccc

SEQ ID NO: 665040 - DNA, 87 bp, Homo sapiens
cgcggagcagtagccgccgtgggagggagccatgaagcattacgagaccttcacggcatggtgcaactcccacctgcggaaggcagg

SEQ ID NO: 665041 - DNA, 74 bp, Homo sapiens
tgctgaagcgggtgctcgtccggtactccaaagattcaggtttactcacgtcatccagcagagaatggaaagtc

SEQ ID NO: 665042 - DNA, 100 bp, Homo sapiens
caacactgataagattgaatgccaagcagaaaattacctaaatgcactctttcgaaagaaaggtggtccgagacattctgctgattggacatagacaggc

SEQ ID NO: 665043 - DNA, 82 bp, Homo sapiens
gtcgttctgcaccagcgccttgatcgagtacttgagagatgccctgtatccaagcccaatatgggacaccagcaccgagtcc

SEQ ID NO: 665044 - DNA, 100 bp, Homo sapiens
ctttcttaactcagaaagaaacttccaacacagtttcccaaagaaaaatgggcaccaagggcaaaatgaatgagaacagccacatcatcctgtgtggtca

SEQ ID NO: 665045 - DNA, 100 bp, Homo sapiens
gggcggtcttccccggctcgccaactcggctgctctgggggattcgtgcgcgctgagatctgtatctgtggacctgaatgttgatccctcgcttcagatt

SEQ ID NO: 665046 - DNA, 100 bp, Homo sapiens
cgtggagtcagcctggctgccggcttgttcttactggccctgagtctttgggggcagcctgcagaggctgcgaccaagcggagcagccagctggcagtag

SEQ ID NO: 665047 - DNA, 100 bp, Homo sapiens
ccggaagcagctgagggaccagtactgctttgaatgtgactgtttccgttgccaaacccaggacaagaaactaatggcagatcccggaaatccagacttg

SEQ ID NO: 665048 - DNA, 101 bp, Homo sapiens
atatcaaggtggaaggcagctgaaggtatgttgagtctaaaaaggacagagtcacagtagtcttcagcacagtgtttaaggatgacgacgatgtggtcatt

SEQ ID NO: 665049 - DNA, 75 bp, Homo sapiens
caaggccagagataagaacaccaaccaaattgtcgccattaagaaagaatgtatcctgtcaggtataatgtcagt

SEQ ID NO: 665050 - DNA, 83 bp, Homo sapiens
gcccgccacgccgcccagcccggccccgcccgcgccggaagagccacgccgaaaaatggctacaaacttcctagcacatgaga

SEQ ID NO: 665051 - DNA, 76 bp, Homo sapiens
ctcagcctcctgagcagctgggattacaggacaacagccgccgggtagacaatgtgctaaagctgtggatcataga

SEQ ID NO: 665052 - DNA, 90 bp, Homo sapiens
aaaggaagcaagcagttcagaagagccaaggaataaacatgcaatgaacccaaaaggggaggagatatcaccaaacatgatggaacaggc

SEQ ID NO: 665053 - DNA, 89 bp, Homo sapiens
gcaacctttccaagggagtggttgtgtgatcgccatcttagggatattgaccacatcacactgctagagggtgtgattgtgttagaaga

SEQ ID NO: 665054 - DNA, 74 bp, Homo sapiens
cgaaaaagccctggtggagctgaaggttgcaggttcatctcagaagaagttgttggcacctgatatgtttacag

SEQ ID NO: 665055 - DNA, 100 bp, Homo sapiens
caaaaatcccatctaccgcaactctcagttcgagagtaaagcatatatagcagtgacgaggatgatgaggactttgagatgtgtgaccatgactatgatg

SEQ ID NO: 665056 - DNA, 90 bp, Homo sapiens
cggaggtcatactgcatcagaaccatgaagaaggagacagctgttgcaatcccttaagcatgggtgctattaaaaaaatggtggagaaga

SEQ ID NO: 665057 - DNA, 80 bp, Homo sapiens
tggtccccaagccagaagaaatcaacctgctcaccggggagtctgatacacaggcctatgaaaggaggttccctacatgt

SEQ ID NO: 665058 - DNA, 90 bp, Homo sapiens
cggggcttgccctggtcttgctcggccgatgaagtgcagaggtttttttctggatcttctgcaggacaactggtccttatcacagccagg

SEQ ID NO: 665059 - DNA, 83 bp, Homo sapiens
aagctccagatggcgtcttccgtgggcaacgtggccgacagcacagtggaatgcagtagccctctgggcctgggatattgtgg

SEQ ID NO: 665060 - DNA, 74 bp, Homo sapiens
gagccaaggaataaacatgcaatgaacccaaaaggaaagtgactgagaccgaagatgatagtgatagtgacagc

SEQ ID NO: 665061 - DNA, 83 bp, Homo sapiens
tttcttccaaggaaccaaggcggccctggctgggggaaccactatgatcagaggaggacttcatccaacccagcagccgagaa

SEQ ID NO: 665062 - DNA, 96 bp, Homo sapiens
tgtgtgtgcgcgcgaaggagcggaagaatggcagtgctcaaactcaccgaccaggaagttctactacatcaccctgctacgagaccccgtgtcccg

SEQ ID NO: 665063 - DNA, 90 bp, Homo sapiens
cgaccacgcaggcactttcccggtccccagcacaatcctggaggaagagaaggctcagcaagaagagcgcatgaggatggagtccagaag

SEQ ID NO: 665064 - DNA, 100 bp, Homo sapiens
gggaaccaacgatggcacgaacattgatttgaggaggatgcttcgcagtttacgaaaagcctaaagaaactgttccaactcttgctccaaaaactctttc

SEQ ID NO: 665065 - DNA, 51 bp, Homo sapiens
agaaacatctcaccaatttcaaatctgattaaggtcaccgttgcaggcctg

SEQ ID NO: 665066 - DNA, 103 bp, Homo sapiens
tgaaggaaagaatactgaaaattgtcactggatttaatggggccgttgctccagggagaactgcaaatatcttcatccacccccacatttaaaaacgcagttg

SEQ ID NO: 665067 - DNA, 98 bp, Homo sapiens
tcggggccactgcactgggtgattcacgtgtgcccaggccctgaggtgggccggacctgggagtggcaggacttgggaccctggaggactgacgctgc

SEQ ID NO: 665068 - DNA, 100 bp, Homo sapiens
cccaggctcaagcagtcctaccatgtcagccttcccagtagctgggaccacagattgagaggatccagaatccagatctctggaatagctaccaggcaaa

SEQ ID NO: 665069 - DNA, 80 bp, Homo sapiens
cctgaccaagtccagccccagcatggcagtaccgaggagaaggcattgtatatgggacactagaggaggtgtgggactgt

SEQ ID NO: 665070 - DNA, 100 bp, Homo sapiens
gaagtgaagattgtcagcaaaggaagagatggattcccactggattcttctctctgctgacagtgagggctttatcccgttaaccttcacagccacacag

SEQ ID NO: 665071 - DNA, 100 bp, Homo sapiens
caaggattctcgctgtgacagagacaacaccgagtatgagaatttgagattacgggaaatgatgagacgttcgttgagagcagctggtttgggtagacat

SEQ ID NO: 665072 - DNA, 74 bp, Homo sapiens
cccatatctaagcaaaggaactggaatatattattcgagtgcaaagaggaatttctgtggaaaacagctggcag

SEQ ID NO: 665073 - DNA, 95 bp, Homo sapiens
cggggcccgacccctctctcgaccgcatgctcagcagcagctcctcggtgtccagccttaactcctccacggagaagatggagttccggacggca

SEQ ID NO: 665074 - DNA, 75 bp, Homo sapiens
agagtgcccagaggccaagcggctaaaggggccaaaccagtgctcctgccacctctctggctgccccctagagcc

SEQ ID NO: 665075 - DNA, 88 bp, Homo sapiens
gatattgaagaaggcatcaaaaaggaacaagctctccagggagcactcaacatcagtgatagaaccatacctcagccccccattcttc

SEQ ID NO: 665076 - DNA, 98 bp, Homo sapiens
tcttgggactgggctcgatttgagtggaatcccccaaagaaggtaaagggagcaagccttccccactgtctgtgaagaacaccaagaggaggctggag

SEQ ID NO: 665077 - DNA, 98 bp, Homo sapiens
tggacttcatttcaaactcccccaaagcacagatccattacgcacatttaaagataccatctaccttactcaggctacatgattccctgaaagataag

SEQ ID NO: 665078 - DNA, 75 bp, Homo sapiens
agcagatttcccaagagcagcggaaaatgatccagtcacaggttttcactaatgataagatggaagaatgtgtga

SEQ ID NO: 665079 - DNA, 95 bp, Homo sapiens
ggaattcataaccaacctgaatgggctgagggatggcgggaacttccccaaggagctgctgaaggccgccatggcatcagatgaaggcaaacttt

SEQ ID NO: 665080 - DNA, 100 bp, Homo sapiens
gagggacacagcgactacattaatggcaacttcatccgggtttctaagcatgaattgaggaacagaagaagcagagcagatgatcggagcagcatttgtt

SEQ ID NO: 665081 - DNA, 76 bp, Homo sapiens
cagggcccaagagctgcgtcatcacctacctggcccaggtggaccccaaaggggtattattgaagctcgttttgtt

SEQ ID NO: 665082 - DNA, 75 bp, Homo sapiens
ctgaagcccatccagactgtttgatgctgaacttcaccgttaagaagttcagttctgcaagcaagtatgctgctc

SEQ ID NO: 665083 - DNA, 100 bp, Homo sapiens
attgaaggaatttccccgtaccgcagcccccgggcacgacctctcggacacggtgcaggcagatgccatggacaatattaccaggcagaaccaattctac

SEQ ID NO: 665084 - DNA, 100 bp, Homo sapiens
tccctttgcctcatcccaggttgccttggaaaatgccaacgccgtgtctgaagattttaaagaatgtggagtcttccagaactgttcagccacatttcct

SEQ ID NO: 665085 - DNA, 100 bp, Homo sapiens
cgtcggagcggccgccggagcagcgccggagatggggctgctctttggcgtaaattgcaatcgattagggatcgtttctcagaatcaagttagaagtgag

SEQ ID NO: 665086 - DNA, 89 bp, Homo sapiens
cgggggcggcggccacgccaaggacggcgtttgctgccaattgatggggcaaatgatctcttttttcagccacctccactgactcctac

SEQ ID NO: 665087 - DNA, 100 bp, Homo sapiens
gccaggctaatcttgttaaggagctccaagatgcctttgactgtggggagaagccatcatttgacaggaggagatgttaaagtaacccatcttgcaggac

SEQ ID NO: 665088 - DNA, 98 bp, Homo sapiens
cccagtgcgcccgcatcgtcgagtctcacagaaagttctccgctcccagacatgggtccctcggcttcctgcctcggaagcgcagcagcaggcatcgt

SEQ ID NO: 665089 - DNA, 75 bp, Homo sapiens
caaggtgctggcgaacccgcggcggacttacgtcacgcctcctggcacaggtcccccccaaagacccaaactgaa

SEQ ID NO: 665090 - DNA, 100 bp, Homo sapiens
caatctacctgaacctgcggcacccctctgatgacccatttggattctctgatttcactgccaagattctcaagtgactcctctttcttcccagagtgtg

SEQ ID NO: 665091 - DNA, 100 bp, Homo sapiens
gtgtcaacgaatcatccacgcacctgcagctctgctgagagagtgcaagccgtggggtgcattggatcgttgtgtgatggggataacagcagttgagatt

SEQ ID NO: 665092 - DNA, 75 bp, Homo sapiens
tcttcgagtatttgtagaagggtttctggtcctcataccgtgtggttgagtgaaatcaaaacttccacgatagca

SEQ ID NO: 665093 - DNA, 75 bp, Homo sapiens
tttcaggacccgccatatccggatgcagactcagagctgatgttcctggagaccagcgctctcacaggcgagaac

SEQ ID NO: 665094 - DNA, 74 bp, Homo sapiens
ttcattgaaggaatcattgctcgtgggaacgcttattcaacggcaaaagggaaagaatatggcaaagctgatgc

SEQ ID NO: 665095 - DNA, 89 bp, Homo sapiens
atgatacctcaaacttcgatgagtttccagaatctgatattcttaagccaacaggtatcgaaggatgatcgcagtgatgtggagagcag

SEQ ID NO: 665096 - DNA, 100 bp, Homo sapiens
tttcgagagtcaaaatgtggatttccgaggcaagaaggtgtgggctaagctggtggccccggctttagactggaccccacaatgtttgcagagatgttca

SEQ ID NO: 665097 - DNA, 75 bp, Homo sapiens
gggaactcctgctgcccactcaggttctcaacaggaggtgtgtagaagcggcggtgatgacaggcctggctctga

SEQ ID NO: 665098 - DNA, 76 bp, Homo sapiens
caatcatcattttgagctcaaaggctcccagaaccctggccgaagctcacctccccctggctatgttcctgagcgg

SEQ ID NO: 665099 - DNA, 90 bp, Homo sapiens
cccgagaccccgtcggacccatggtttccagtgcagcgcggagtgggcgatgccagcgtgccaggaggctgagtgcccctagagggcagg

SEQ ID NO: 665100 - DNA, 83 bp, Homo sapiens
tacaatttggatacagataccatctcaaagggtaatcttccaggaagcatctgtagctcctttgctggcatggcagacagtga

SEQ ID NO: 665101 - DNA, 100 bp, Homo sapiens
ggccatcttggctcctccacaagaaatacaactggagcacgcaaagcaagcctttgtgcaacgggacaatgctaggactgggagagtcacagccatcgac

SEQ ID NO: 665102 - DNA, 100 bp, Homo sapiens
gggtgaatgctgctaaaaacaagactggggctgctcccatcattgatgtggtgcgatcggtacgacatttggaggccccagcgagaaacgtcaccgggag

SEQ ID NO: 665103 - DNA, 89 bp, Homo sapiens
gcgcttagtgaatatgatcaagttctcgtggagtcagacaatgagtaacagtgtatcatgtatgccactgattccaggggacactcccc

SEQ ID NO: 665104 - DNA, 99 bp, Homo sapiens
tgaggagccagacgacaagcacacactatggcgctgaaacggattaataagataaccacctgcctcaaagataatctgctcaaaagacttccatttcat

SEQ ID NO: 665105 - DNA, 98 bp, Homo sapiens
agagaggtgatgcaagcaacagccactagtgggtttgccagtggaaggagtggtacgggtatcactttccggagctggtgaagatcatcaacgacaat

SEQ ID NO: 665106 - DNA, 75 bp, Homo sapiens
gccaaacaatcagtttatgatgggaggccggtattataacaggttgtgggctgcacactgcagaaagatacagct

SEQ ID NO: 665107 - DNA, 82 bp, Homo sapiens
atggcactttccaaagtggatgcctccggggaggtgagaagccctaccactgcaactgggacggctgcggctggaagtttgc

SEQ ID NO: 665108 - DNA, 50 bp, Homo sapiens
gtagcggcagtggcggcgcgtaggaggcgattacgtctattttgagaact

SEQ ID NO: 665109 - DNA, 75 bp, Homo sapiens
caggcgaagctggccgagcaggctgagcgatacgacggtgtttccaagccaggaccctctagatcgagcagattt

SEQ ID NO: 665110 - DNA, 98 bp, Homo sapiens
tctgcggctccaggagggcgcaggagcgggactgagagcgcctggaggctcgagcggaggaatgcatgaactgcacccggctcagtgacatgagtgag

SEQ ID NO: 665111 - DNA, 73 bp, Homo sapiens
tacgctgtgcacgagggtctcggcctcgcggtgcaggtttgaagtcctgagttttctcatgctgtgttataat

SEQ ID NO: 665112 - DNA, 100 bp, Homo sapiens
agccaataggacatgatccaggaagagcagtaagggactgagctgctgggtatagaacttgaccagttagacttacgaagagatattgcctacaacttgt

SEQ ID NO: 665113 - DNA, 100 bp, Homo sapiens
gtgtgacagtaactgaacattggtctaaagtctttccaaaaggtcaaggttcacaaggacatgctctggagtcagaagacagcgaaaagagaagcagaag

SEQ ID NO: 665114 - DNA, 99 bp, Homo sapiens
gatcactcctcaggtgtccagcctgctcagcacaggttggagctgaaggagtgcccaggctgcggatggaggaaggacgtgctcgggagaaggtgaaga

SEQ ID NO: 665115 - DNA, 100 bp, Homo sapiens
cccgttcttgcctcaggccagtcgcctccaggccaagagggatccttcacccgtgtctggtggtggtgctcaccaacacccccctggaggaccagctgcg

SEQ ID NO: 665116 - DNA, 100 bp, Homo sapiens
cgcggccgagtccccgtacggccacccggcgggagtggaagctggacacactatgtgacttgtatgaaaccctgaccatcacccaggcagtcatcttcat

SEQ ID NO: 665117 - DNA, 96 bp, Homo sapiens
tgtgatgccattccagcactggactcatggaggctgagcatttattcagggacctcccgaattccctggtaacagtgttcattctcttcaccttgg

SEQ ID NO: 665118 - DNA, 100 bp, Homo sapiens
gcaggattcagggaacagcaatgggaacgccagtatcaacatcacggacatctcaaggaatatcacttccatatcactttgggaagcagtgacatccaac

SEQ ID NO: 665119 - DNA, 100 bp, Homo sapiens
cccagcaccacagtccttctgcagtccctcgtccagccacccccaggtcccaggtgtgacaccttcagcaggtctcagggaagatggcagccctagggga

SEQ ID NO: 665120 - DNA, 89 bp, Homo sapiens
tcaatatctgtcttcggtggactccttcggcagtccacccaccgccgccgcctcccagaatagcctaacatggcagaccagagacagcg

SEQ ID NO: 665121 - DNA, 83 bp, Homo sapiens
tggtgcgggagctggaggagctgcgctcggagaacgactatctcaagggactggtgattgcagctggaagtgcccatgaccga

SEQ ID NO: 665122 - DNA, 75 bp, Homo sapiens
atggccccaggtgtaagcgcagaaagcaggcgaacccgcggcgcaataacgtctattgcgtctgcagacatggat

SEQ ID NO: 665123 - DNA, 100 bp, Homo sapiens
agagctggcagcagcatctcagcccaagagaaggcgtggtgaccaagatgaagatgcagaggaccattgtcatccgccgagactatctgcactacatccg

SEQ ID NO: 665124 - DNA, 101 bp, Homo sapiens
accagcagctgtcgccgccgctctcagattccccgccactgtatgtctgaagatagcaaatatgttttaatacaaatgttatgggacaatatgaagttaca

SEQ ID NO: 665125 - DNA, 75 bp, Homo sapiens
tggaagtctctccttctgcagagcagcttgtccagccacataaagaagatccctaatagtcatttctcaacaatt

SEQ ID NO: 665126 - DNA, 98 bp, Homo sapiens
acgccgggagctggtacacagcctcaggttgggccatgcaggctgctgcctatatcttcattcataggaaatggaaggatgacaagagccatttcgaa

SEQ ID NO: 665127 - DNA, 75 bp, Homo sapiens
tttaacccagcagcctttggagaggatgttgcttcagagtgtgaagtcaaatgcatgccaacattccagtttttt

SEQ ID NO: 665128 - DNA, 75 bp, Homo sapiens
ttcacccacagtggttttcaactcaggattagcagcaatatgttaaggatacctgtaagaaaggccttagtaggc

SEQ ID NO: 665129 - DNA, 83 bp, Homo sapiens
ccatcaagatccttaagaaggggcaggctgtagactacgagggctccagaacccaggaaggaactgtggctgcaccatctgtc

SEQ ID NO: 665130 - DNA, 100 bp, Homo sapiens
cctgacccgaagtaccgacccgagttatgcccaccctccaactttgcgacggaaatgtgtcatcgaaagccaggacatggatttgattgacatactttgg

SEQ ID NO: 665131 - DNA, 74 bp, Homo sapiens
aggaggaaaatgttttgccacgtggatgtgaagatttcctctaaaagggaatgacagaggaagaggaagacaaa

SEQ ID NO: 665132 - DNA, 137 bp, Homo sapiens
agctgaaatggactggcccccttgagcctgtcccaagccctggtgccaggtgtccatccccgtgctgaggtgttgcagcatccctggaagtgtcagagagccctgggagtatccaggtggcccggggtcagccagca

SEQ ID NO: 665133 - DNA, 75 bp, Homo sapiens
tgcctgcagagctgtggcttaccagacaccagagccggaagtggaaccgcccagtgcccccgagctcaagcaagg

SEQ ID NO: 665134 - DNA, 98 bp, Homo sapiens
tgacatggaggatgatttcatgtgcgatgatgaggaggactacgacctggtggagctcatgaaggacttcagcatttgggtccttttggcaacatccc

SEQ ID NO: 665135 - DNA, 74 bp, Homo sapiens
agtatcatgctggccaagaagatcatcattaaggacggaggcacggatttttagactctgaggagcagttggag

SEQ ID NO: 665136 - DNA, 100 bp, Homo sapiens
gccagatcaacctggagctctacgcctcctacgtttacctgtccatgacccaacatgagtgaagtttcctgcaagaaacgggacgactatttggaatggc

SEQ ID NO: 665137 - DNA, 75 bp, Homo sapiens
acagcgccgcggggcccaggccgggagccgaccggcacagcaggttcgatacaagaggctgttttcctagcgtgg

SEQ ID NO: 665138 - DNA, 80 bp, Homo sapiens
agtctgccgttactgccctgtggggcaaggtgaacgtggatgaagttggtggtgagccctattcccagaggcaggtggtg

SEQ ID NO: 665139 - DNA, 128 bp, Homo sapiens
agggaccgagggcgagacacgcctgggcccaggtgtggcgtctctgtccccatctggttttagcataagctgtggccatgactactgaagtaggctctgtgtctgaagtgaagaaggactctagccag

SEQ ID NO: 665140 - DNA, 90 bp, Homo sapiens
gaaccgtgatggcttcattgacaaggaggacctgcacgacatgctggcctcgctggggttttcagagaaagatgctgatgaggtgaaagg

SEQ ID NO: 665141 - DNA, 83 bp, Homo sapiens
ctcctcacagccagtgaccttgcagccagtgacctcaaaggatttcagccacaggccattccccgatttaaccagaaaggaga

SEQ ID NO: 665142 - DNA, 106 bp, Homo sapiens
ccccgagccatggctctcgccgtccgagtcgtttattgcaattaccagctctggctgggtcgccacaacttgtttgacgacgaaaacacagcccagtttgttcatg

SEQ ID NO: 665143 - DNA, 83 bp, Homo sapiens
cgaagaaacagacattcaacatgattgcatttgaaacatgaagagtatttctggagaagaatcatcccatggagtgattatga

SEQ ID NO: 665144 - DNA, 75 bp, Homo sapiens
aatcctaatgacagtctccaaattcgcctccatctgtaccatgggctggctgctggcgggatggacaccctggag

SEQ ID NO: 665145 - DNA, 75 bp, Homo sapiens
gactgggttcgcctgcccagcaaatgcgaaggtggcgacatgtctaagaatgtgagccagtcacagatggcaaaa

SEQ ID NO: 665146 - DNA, 100 bp, Homo sapiens
ccaaggctgaaggggatcgtctaaaagagggaatctgagaattgctctcacacaccaacccagcaacatccgtggagaaaactctcaccagcaactcctt

SEQ ID NO: 665147 - DNA, 100 bp, Homo sapiens
gcggaatgtcaactattcaacatggaggcggaggtcgataagctggaactgatgaatgattgaagatagtgggaaaagaggaaataccatggcagaaaga

SEQ ID NO: 665148 - DNA, 82 bp, Homo sapiens
tcttcagttaatggcaagacttgcagagggttgttgccatggagctgaggatgaggaggcacctttagagccaggtgtttct

SEQ ID NO: 665149 - DNA, 50 bp, Homo sapiens
tgaggatcctcttcctcctgggtgtaatctagctcctgtggtggagtttg

SEQ ID NO: 665150 - DNA, 75 bp, Homo sapiens
gaggaattctgatttataagaacagggtacgaatgaatacctttccatgtttgtagaagactatgaacctaccaa

SEQ ID NO: 665151 - DNA, 96 bp, Homo sapiens
cagtgccaagttagatgccgattacccacttcgagtcctttattgtggagagacgagttgtactgctgtcacaggaaatggacgctggattacaag

SEQ ID NO: 665152 - DNA, 88 bp, Homo sapiens
ccggctactgccgcttcagttctcccggtgtggccacgagtcgggtgaaatggcatttcaatatcaaccaaaaaagattttccaaggc

SEQ ID NO: 665153 - DNA, 89 bp, Homo sapiens
ggcccaagaaaaagcacctggactaattatatccagatcgagagacagaagattctgaaagggttcaatgaaatgagagtcatcttgga

SEQ ID NO: 665154 - DNA, 100 bp, Homo sapiens
cagctgcttagtatcttgggctttctgtattctgaagacagcgccccagcatttgccatcttcaagtttgttcagggtctcactttgttgcccaggctgg

SEQ ID NO: 665155 - DNA, 98 bp, Homo sapiens
gatgaaccatctgcatatttggattctgagcaaagactgatggcagctcgagttgtcaaacgatttgttcccgacaaggagttttctggttcagaccg

SEQ ID NO: 665156 - DNA, 50 bp, Homo sapiens
gaaaagatctgcaaaattttctcaaggttccggggctactgtgaaagggc

SEQ ID NO: 665157 - DNA, 51 bp, Homo sapiens
aactgcttttatcggtctcgggcgagcatgacctgggggaggacatctacg

SEQ ID NO: 665158 - DNA, 101 bp, Homo sapiens
tgggtctgcatcgagaccccgagctctggagctggaaaaacccgggtaacttgggtttttactcctgtaacaactgaaataacaagtcttgatacagagaa

SEQ ID NO: 665159 - DNA, 82 bp, Homo sapiens
gttttttgtggcttccttcgttattggagccaggcctacaccccaggtttccaatacttatctacaggaatcgccatgaccc

SEQ ID NO: 665160 - DNA, 130 bp, Homo sapiens
cgcatttgctgcatcgagcagttggtttagtatcagccaaacttgcagctgttcagaccgcgctccgccgaggtactccaaagattcaggtttactcacgtcatccagcagagaatggaaagtcaaattt

SEQ ID NO: 665161 - DNA, 98 bp, Homo sapiens
ctggcggaaggggcaggggacgtggcttttgtgaagcacagcacggtactggagaacacggatggacagtttattctgcgttgtagcagcatttggct

SEQ ID NO: 665162 - DNA, 82 bp, Homo sapiens
aactgcccagcgtgaccagtggccacctctgcagtgtcttccacaacctggagacagagtctcactcggtcaccaggctgga

SEQ ID NO: 665163 - DNA, 74 bp, Homo sapiens
gaagtacttaaaaaaacattggaattctgcttatctaggtgctggagaatctggtaaaagcaccattgtgaagc

SEQ ID NO: 665164 - DNA, 75 bp, Homo sapiens
ctttcatgcagtgacatgttgataaaaaatgatgatcatggaagggaagtggttgctgtgtatgttactggtgct

SEQ ID NO: 665165 - DNA, 90 bp, Homo sapiens
aaaaaattcaagaaactgactaaagctatatgtggactgggctctacttgtcatcaatgccgtcagaagactattgataccaaaacaaac

SEQ ID NO: 665166 - DNA, 97 bp, Homo sapiens
atggacgtactttgtctgactacaatattcaaaaggatgaagatttgataaagtggaaggcactgtttgaggaagtccctgagttactcactgaggc

SEQ ID NO: 665167 - DNA, 139 bp, Homo sapiens
ctcccggcccggattatagtctctcgccacagcggcctcggcctccccttggattcagacgccgattcgcccaggcctctgtgtcctttgtcccaatagtaacaactccctcctggcctttccgggcacgcacacgggc

SEQ ID NO: 665168 - DNA, 100 bp, Homo sapiens
ttgatatgtggtccctcgggtgtattttggttgaaatgcacactggagaacctctgttcagtggtgccaatgagctggggagaaaactggggaaacaaag

SEQ ID NO: 665169 - DNA, 98 bp, Homo sapiens
gaagcccgtgaagttccagctggaggacgacggcgagttctacatgatcggctccgagggcgccctgcgtccggcagaggaggcgagcatcccgctca

SEQ ID NO: 665170 - DNA, 100 bp, Homo sapiens
tgctattctgtctactgcaaaaagatccatgcccagtggcagaaaggagacttggacacagttgcagggctggaaaaagaactgagtaatgccaaagagg

SEQ ID NO: 665171 - DNA, 100 bp, Homo sapiens
acagctgcggcacttttaatgacaggtcttgttcagcgttgcgtaatcatccagaaagatgacaatggatttgggctgacggtcagtggagacaatccag

SEQ ID NO: 665172 - DNA, 100 bp, Homo sapiens
tgatagcagtgggcttttcacagtgggctttactgtgttgagcaaactttgggggctcaaatgcaaggtggttttggatgtggcaaccagttgccaaaaa

SEQ ID NO: 665173 - DNA, 82 bp, Homo sapiens
ctgggtttgaacggaatgctggagtcagtggaagacggagctggtcggcccgaagtgatcagggccaaagcggtcagtgaga

SEQ ID NO: 665174 - DNA, 100 bp, Homo sapiens
gagcttccgcggtgtcattctgacctcgcaaacggggattcagcgtccgatcctttggaacagggactcacgtgaagcttccaggaccagctcccgacaa

SEQ ID NO: 665175 - DNA, 50 bp, Homo sapiens
gaatactggaaagttgctatgttttgcaggtgcttctaaggaaggaggtg

SEQ ID NO: 665176 - DNA, 82 bp, Homo sapiens
cgggccgtgctgcttatggcggcgctggagagggggcgctgagctgttggggtcaaaatgcagatcttcgtgaaaaccctta

SEQ ID NO: 665177 - DNA, 99 bp, Homo sapiens
cagtgccaagttagatgccgattacccacttcgagtcctttattgtggagccactgaggcggctcccagctgcgttggcgacatggccgacacccccag

SEQ ID NO: 665178 - DNA, 100 bp, Homo sapiens
cagggagaccagtcaggagctgattgcagtatcagggtcagtgtgctggtgggagcacccaaggctaataccagccagccaggagtgctgcagggtggtg

SEQ ID NO: 665179 - DNA, 51 bp, Homo sapiens
ccgcgctccgcccgtagtcgggccggtgctggagaatctggtaaaagcacc

SEQ ID NO: 665180 - DNA, 82 bp, Homo sapiens
ctgaatccgcccgggctacgctcctccatcacgtgatgagacaaaaggacccagtgaaaggaatgacagcagatgactaaag

SEQ ID NO: 665181 - DNA, 75 bp, Homo sapiens
ggtggagaaggtggtagacaagttcatcaagcaaagggactaccaccagcaggccctggccaacgtcaacattgg

SEQ ID NO: 665182 - DNA, 75 bp, Homo sapiens
tttcagctacttgaagatagccatcagccgctacgtgactcttttctccaggttcaccggaacagcacaatccgc

SEQ ID NO: 665183 - DNA, 100 bp, Homo sapiens
tttatctcaaggcctgagtagccggtaacaaacgagggttcccgggattggaccgacgcagccatggaaactctgatgaggaagaaagtgcttcagaatc

SEQ ID NO: 665184 - DNA, 82 bp, Homo sapiens
ggaagccgcccgccccccaccgccgccccctccggcgtgttcatgcccccgggacaccattcgcttttcacccaagatgatt

SEQ ID NO: 665185 - DNA, 96 bp, Homo sapiens
ctatattccctttccagaagatgattccaacgccaccaattccaacctggtgacagagctgaatgaacctctctccaatgaagatcgaaatctcct

SEQ ID NO: 665186 - DNA, 98 bp, Homo sapiens
cggtgatgaagaatccccccgaaaggaccccccaggaggaagagttcatcgattggtggagcaaattctttgcctccataggggagagggaaaagtgc

SEQ ID NO: 665187 - DNA, 96 bp, Homo sapiens
gggcttctcagcgggtcaagtgcagtacctggatctcatcaaaaaggacaccagcaagctgttcaatgaggagtgccggtggtggtgtgcacattg

SEQ ID NO: 665188 - DNA, 90 bp, Homo sapiens
ggacggctgcgtcgcccgaggcgaggaggagcgctggcgtgtgggaattttgctgtcctcgtggatcttcatatcttgccacaaggttca

SEQ ID NO: 665189 - DNA, 100 bp, Homo sapiens
tgagttcggccggtccgagtcactgtgcgtcgcctgggcccgttcctggtcttctcccccagatgagctttgatccaaaccttctccacaacaatggaca

SEQ ID NO: 665190 - DNA, 82 bp, Homo sapiens
tcttgtctacctctggttcctgtgcaggatttaagcgagagcctcactggttcccaggacatcaacctgaactggatcctcc

SEQ ID NO: 665191 - DNA, 82 bp, Homo sapiens
gctaccagctcgtcccagacactcagtgggagcagctgcagacagagaatagctgcaatctccatggcctctaagataacag

SEQ ID NO: 665192 - DNA, 80 bp, Homo sapiens
acctcgagaccaacgtggaggagctgtgggtggaaggcgtccgagctgggccacagcctgaacgagaacgtcctcaagcc

SEQ ID NO: 665193 - DNA, 96 bp, Homo sapiens
agcagcgacggtagcagcagcatggccgcgatctatgggggtgtagagggtgccctctggtggtcagaagatgctgtgctgtctcgttaggatgaa

SEQ ID NO: 665194 - DNA, 82 bp, Homo sapiens
ttcaggaatgtctggaagaaaaagaaaagctagcatatctttgactgatgacgaaggcacgtgtggttctcaaatataggca

SEQ ID NO: 665195 - DNA, 100 bp, Homo sapiens
ggatcgtgtgcattacaggagtcctccacttgccactggaacctcaaccagaaccctcggactttgctgcctaaattctatggactgtactgtgtgcagg

SEQ ID NO: 665196 - DNA, 100 bp, Homo sapiens
gtactatgtgactatcattgatgccccaggacacagagactttatcaaaaacatgattacagggacatctcaggtgccagatgtgacatccagatgaccc

SEQ ID NO: 665197 - DNA, 51 bp, Homo sapiens
cctttcctctgctgccgctcggtcacgcttgaatggcttcctttgggtgga

SEQ ID NO: 665198 - DNA, 101 bp, Homo sapiens
cagagtcattgcaggaagtggatgagttccacctcattttagagtatcaagcagttaaacacagtgggaatatcacttttgatgagattgtcaacattgct

SEQ ID NO: 665199 - DNA, 100 bp, Homo sapiens
cttctgagacggcggcagcagcggcattcagatcctatagcaatggaactcagcgatgcaaatctgcaaacactaacagaatatttaaagaaaacacttg

SEQ ID NO: 665200 - DNA, 90 bp, Homo sapiens
gcgtccgtcctgcgcatcgcaaacatgacctttgacctgccatcagatgccacagtggtgctcaaccgcagctcctgtggaaaagagaac

SEQ ID NO: 665201 - DNA, 102 bp, Homo sapiens
aaggtgctcactcggttaaagcacattgtagaattgcaaataatcctggaaaagtacttggcagggaagaaggagaaagggccaacccctgaagaagcaata

SEQ ID NO: 665202 - DNA, 51 bp, Homo sapiens
acccaccaactagcacaacctgttgtagtctcacactgtcacccaggctgg

SEQ ID NO: 665203 - DNA, 96 bp, Homo sapiens
ctgccacgagtgcacattctgaaaacaggttatgaagacagtatggagtttccagaccatagtagacatttgctacagtgtctgagcgagcagaga

SEQ ID NO: 665204 - DNA, 83 bp, Homo sapiens
cttctctcctgcaatcataccgtattggatccagatctgcgaatggaagggtagatgtctacccaaatggaatattgagtatc

SEQ ID NO: 665205 - DNA, 90 bp, Homo sapiens
tccacagctaagacaccgggacctcctggaagccaaaaatgctttcctaataggatggttctaggaagaacacacataaaagatgtagca

SEQ ID NO: 665206 - DNA, 100 bp, Homo sapiens
gctacacccagggaacaggtggtgatgaggatgacgatgtcgataccaagaagcagaagaccgacgaggatgactagacagcaaaaaaggaaaagttaaa

SEQ ID NO: 665207 - DNA, 90 bp, Homo sapiens
cgcgccgtggctccggatctcttcgtctttgcagcgtagcccgagtcggtcagcgccggagcggagctggagtttgttcagatcatcatc

SEQ ID NO: 665208 - DNA, 98 bp, Homo sapiens
cttggggcggcaggcggcggcggcccggggctcgagcccggaggcaggagcagccgccatggccgagagcatcgtggggaagctgaggcaggaagccc

SEQ ID NO: 665209 - DNA, 100 bp, Homo sapiens
ctccagcctcttgcgaccacagccagagcctcagcaggagcctgttctcatcaccatggcaacaggatctcagaccgtggtggaggaatcgctcacaaag

SEQ ID NO: 665210 - DNA, 100 bp, Homo sapiens
tgaagctgcaaatgaagcattacttactaaagctcaagttggtgacccaagcctattgtaaacaagtgattatctcaaagggagatgccaatggagtaac

SEQ ID NO: 665211 - DNA, 90 bp, Homo sapiens
cagcagcccccggcccgcgctgcccgcactcctggtcctgctcggggctctgttcccagagatgaccaagcgagacgtgcctggcttcgc

SEQ ID NO: 665212 - DNA, 97 bp, Homo sapiens
aactcaaatatctcttcttaacacctacctgattctggcatacagtcttatatccagatggccaggctcagatgattcaccccaagcctgcagactt

SEQ ID NO: 665213 - DNA, 75 bp, Homo sapiens
gagcccaaagacccctggagacatgaacaacctccctcctagcatgatgacccgcagaaacacctacgtttgcac

SEQ ID NO: 665214 - DNA, 100 bp, Homo sapiens
gaagacttgacccagacccttcaggacagtggccgaatacatcaagcaatggtaacatctttaaatgaagataatgaaagtgtaactgttgaatggatag

SEQ ID NO: 665215 - DNA, 98 bp, Homo sapiens
cttcacagtcgaggagagaaagcattttgaaagcgaagcagaagccgtagaatcagcggcgagcctgttgaaagaacccacaggtgcatttcacagca

SEQ ID NO: 665216 - DNA, 78 bp, Homo sapiens
gaagaatttcctctgaagcaccggctgctctttggcgtaaattgcaatcgattagggatcgtttctcagaatcaagtt

SEQ ID NO: 665217 - DNA, 83 bp, Homo sapiens
aaaaagagaagacgctttacccgactctttgggccgttatctcacgtcaccgacgatgagggcgcacctgctgtcctggagct

SEQ ID NO: 665218 - DNA, 50 bp, Homo sapiens
atggcatttaacggatgctgccctgactcaacaaggctttttgcatttgg

SEQ ID NO: 665219 - DNA, 90 bp, Homo sapiens
agccagaagatatcaccgaggctctgaggtttgatgccttctatggggagaggagtactcagcaggacatctatgcaggttcagtgcagc

SEQ ID NO: 665220 - DNA, 90 bp, Homo sapiens
tgcttctgggccctacgcgcggcttgcgcgtagtaaacctattgatggcaattttgctgactgtggaagtgactcatccaaactccatgc

SEQ ID NO: 665221 - DNA, 100 bp, Homo sapiens
ctcagaaggtgccctctttgcaacatttcaggaaaacagagaaagaagtgataggagggctctgtaggaagatgttaccgagtacttcagtgaattcctt

SEQ ID NO: 665222 - DNA, 80 bp, Homo sapiens
aagaagaaatcccagcaaataggaaaattaagtttagtagtgctcctattaagattcgaattgctgcagaaggaatcaat

SEQ ID NO: 665223 - DNA, 117 bp, Homo sapiens
taaccatgaacttcgaaacgtgataagaagcacctggatgagacatttgctacagcatcccacattaagtcaacgtttcagatacaccacctccaccgccacctgtggaagaaccag

SEQ ID NO: 665224 - DNA, 100 bp, Homo sapiens
agaagaactcttaggagcagcttggcctaaaggcaattgggagcagtagtttcagcccacgaccaactcaccagttctctccaccacagatttacccttc

SEQ ID NO: 665225 - DNA, 98 bp, Homo sapiens
tcactggccccggcctttgccccaatcttgtgtgggcactgaagggggactacagtcctattttgtaacggattatgatccaaccattgaagattctt

SEQ ID NO: 665226 - DNA, 100 bp, Homo sapiens
ctggctcctggctcctggctccctactcttctaaggatcgctgtcctgacagaagaggaaaacggacgatgtattactaagctggaaaacatggggtttc

SEQ ID NO: 665227 - DNA, 90 bp, Homo sapiens
gcacttccaggtgcgcagcgcgggagccgccacggtgcttgaggtcatttcttcagatagctccccagctgtggaaaatgagcatcctca

SEQ ID NO: 665228 - DNA, 75 bp, Homo sapiens
cggctccgcaagaagtaccgagaaggtcccccggcagagggcagtagagatggccggcccaaggcctcggtggcg

SEQ ID NO: 665229 - DNA, 90 bp, Homo sapiens
aaaaagaagaatttattcactcaagactaaaaactaaaggcctgggcctgagaactgaatcagggaccggcagcaatgcctgctacatgg

SEQ ID NO: 665230 - DNA, 50 bp, Homo sapiens
ccatgaggaaagaattctccgagggaatggatttgtaaactcaagagctt

SEQ ID NO: 665231 - DNA, 100 bp, Homo sapiens
agatgatggaagcccagatggaacaagggatgttgctgaacagttggagaagatctatgggtcagacagaatttgacaaagcataaatcatggacaccag

SEQ ID NO: 665232 - DNA, 78 bp, Homo sapiens
gacgaactccgcaatgaggacgttcaggcgttggagaccagggccagccctggccacaccccaggctgtgtcaccttc

SEQ ID NO: 665233 - DNA, 96 bp, Homo sapiens
tatgacccaggcttggagatctggggaggggagcagtatgaaatctccttcaaggtgcctgtcctgagacccatggacctgatggtggaggccacc

SEQ ID NO: 665234 - DNA, 75 bp, Homo sapiens
cccaggagcaggggagacatggacctcagcagccatgtcgaagccccatagtgaagccgggactgccttcattca

SEQ ID NO: 665235 - DNA, 90 bp, Homo sapiens
cggaagttaaagaagtgggtgacccagccactccttaaattaagtgccggtggtggtgtgcacattgagccccggtatagacagttcccc

SEQ ID NO: 665236 - DNA, 80 bp, Homo sapiens
ctcttctaagctgaataaagctgttttggaactgtcaggtacctcaaagcacaagaagctccgccacgcccgcagtgggg

SEQ ID NO: 665237 - DNA, 80 bp, Homo sapiens
cttccaaagtgctgggattacagccgttccctcagcacaggagcccttggtcaatggaatacaagtactcatggagaact

SEQ ID NO: 665238 - DNA, 100 bp, Homo sapiens
atctcctttctgtttaaagatggaaacttatttaaggatggctgacttaccgtatcaggcggagtacgtccagcttgttactgaacttcgaatgacaaga

SEQ ID NO: 665239 - DNA, 109 bp, Homo sapiens
gtgccccgacgtacagcgggccgggaaaagtggcactgaggctctggaacttctgcccagctctccttggcttttacactctgatcgagatcctattccagatgttcct

SEQ ID NO: 665240 - DNA, 100 bp, Homo sapiens
gtcttggccccgtccttacctcacaggttgttcggaatcctataattgaaaaacagtaaagatggaaaaccagttattgaatatcaagaggaggagttgt

SEQ ID NO: 665241 - DNA, 74 bp, Homo sapiens
gaagatactgcagagatattctactccatctcattcattgtacagggcagctgcaatgactctccgcacggtat

SEQ ID NO: 665242 - DNA, 100 bp, Homo sapiens
tggagccccactctgaagacgcagcctttctccaggttctgtctctcccattctgattcttgacaccagatgcaggagtgggaatagctttgcgaaaaat

SEQ ID NO: 665243 - DNA, 50 bp, Homo sapiens
aggcattcggtatcgaaccataatgctatcttctttgagaagtcaaattg

SEQ ID NO: 665244 - DNA, 90 bp, Homo sapiens
ctgggacttcgcctctgctctcttcttcgccagcacgctgatcaccaccgtggctgctggagccagttctgcttctcggcaaggagcgat

SEQ ID NO: 665245 - DNA, 98 bp, Homo sapiens
cagctgccgaggcgttcggtcctgctgttgcggccgctgccccagggctgcggggacggacttcaaacaagtgtgaagaggctgtgtggcgagattgt

SEQ ID NO: 665246 - DNA, 82 bp, Homo sapiens
gaaaacaagaggccccagagggaaaagaagcccaaagttttaaagggaaaatggagctgatagtatcctggatcttggatta

SEQ ID NO: 665247 - DNA, 100 bp, Homo sapiens
cagccgcatcttcttttgcgtcgccagccacagcctggcagctctgatcaggaaagtgaggaacagcaacaattccggaacattttcaagcagatagcag

SEQ ID NO: 665248 - DNA, 90 bp, Homo sapiens
tcggggaggcaaggtggttttggaccagacaggcgtgtctaacgtctgcttctacgctttgcctgggagaggccctggtggcctcgttcc

SEQ ID NO: 665249 - DNA, 100 bp, Homo sapiens
cacgtttccaaagctgtgtgctcaacctacttacagtcacgttactacaggaggctgaggatggcattattgcttatgatgactgtggggtgaaactgac

SEQ ID NO: 665250 - DNA, 75 bp, Homo sapiens
cagatgtctgacagccctgtgtgacaccaagataagtaacctctggattaatcgaattacagctgctagccagga

SEQ ID NO: 665251 - DNA, 101 bp, Homo sapiens
aatacagaactgccccatcgatgtgcggcgcccgctgtataaggtgaaggaggccatgcagcggattcacgaccgagggaacattggcaagttaattctgg

SEQ ID NO: 665252 - DNA, 75 bp, Homo sapiens
cgtcactccttccttaaggctctttattaccaaggctttcatgagaaggacaagaagccatattgccgaaaggat

SEQ ID NO: 665253 - DNA, 99 bp, Homo sapiens
accctgtctttcgcagcacggtggatgctgtgcagatacagaaggtggtcatggcactaggagactacatgggcgcctcctgtcacgcctgtatcgggg

SEQ ID NO: 665254 - DNA, 100 bp, Homo sapiens
acaaataagcattggcctggaaaatccacatcccaacaggctaaacaaggcagtacatagtggaatgtcatgggatcacccttcttccccagttcttggg

SEQ ID NO: 665255 - DNA, 100 bp, Homo sapiens
agcgcttcctgcagaaggccgagaagctctacccactgccctcggcccgcgagtcactcaagggaaaggattaatgccagatggtaccagcagatttact

SEQ ID NO: 665256 - DNA, 90 bp, Homo sapiens
gaacaaattgcagttgtttgagctccagaacctgggtatcaacccagcaaacattggcttcagtaccctgactatggagtctgacaaatt

SEQ ID NO: 665257 - DNA, 100 bp, Homo sapiens
cagttaatcctcaatttaagcctgatctaacccctagaaacaggtgaatcttggaagcaaccagtaccttttctctgtcatagtggatcctaaagaaatg

SEQ ID NO: 665258 - DNA, 95 bp, Homo sapiens
ctgcagtgtcaggaagaagagctcacgcagatggtgtccacgatgtccgacggctggaaattcgaacagcatgcagcagattggaataaatatga

SEQ ID NO: 665259 - DNA, 83 bp, Homo sapiens
cggtggactccttcggcagtccacccaccgccgccgcctcccagcggaatcggacatgtccaaaccaccgtgttacgaagagg

SEQ ID NO: 665260 - DNA, 96 bp, Homo sapiens
aggttggggacagtgccggaggggcctcctctgctgcagacatctgcaagagtgagccatggagctacgtgtggggaacaagtaccgcctgggacg

SEQ ID NO: 665261 - DNA, 98 bp, Homo sapiens
aacagtattatgactctcgaaacgaggaacatcaccaggatacctacagacagacatcttactgggtgatgaataatcctctaagaaaccctctgagc

SEQ ID NO: 665262 - DNA, 100 bp, Homo sapiens
ggagcagaggaaccacacgctgatcatgatcatggaagggaagtggttgctgtgtatgttactggtgcttggaactgctattgttgaggctcatgatgga

SEQ ID NO: 665263 - DNA, 100 bp, Homo sapiens
caatgatggggcagcaagtggccaacctgatctagttgaatctgaagatgtggacctgctgatgaagagggctgactgtatctaacttagggtcttgcat

SEQ ID NO: 665264 - DNA, 58 bp, Homo sapiens
cagctcaacacggcacttccacagagatgctgttcagttaaatgtgattgcaacgcga

SEQ ID NO: 665265 - DNA, 99 bp, Homo sapiens
ggacgttggtcaggtgatgcctggaggcatctctgacacgctgtgggccatcgagatgtgggaccctgcggcccaggcgttccggctgaacaaccccgg

SEQ ID NO: 665266 - DNA, 100 bp, Homo sapiens
cgccgccccgcgggggagggcggagctggcgcggcccctagctttctccttctggtgtggggcccgaggctgagaagaaagccaaggtcattgcaggaat

SEQ ID NO: 665267 - DNA, 82 bp, Homo sapiens
cccaaccagcctggaggcaagaggctcctgcagacccctggcttcctagaaaggagccgaaaggcgaggccagctcttccaa

SEQ ID NO: 665268 - DNA, 100 bp, Homo sapiens
gcggctccaccccttccacgtcatccgcatcaacaagatgttgtcctgtgctggggctgacagaggctacatggtaatgggagattctttcaacacttct

SEQ ID NO: 665269 - DNA, 100 bp, Homo sapiens
cggctggcctcaccgcccactgggcctccccatggccacccatggaccagtcggcattcacttcctcccttctgcggcccataaaagccctgggttcagg

SEQ ID NO: 665270 - DNA, 50 bp, Homo sapiens
ctcatggacggttggatcagggccgaagctcacggatgattgatatccag

SEQ ID NO: 665271 - DNA, 75 bp, Homo sapiens
gccgaactcgggttctgacaagatggccgggctgccccgcaggatcatcaagttcaaacgatatgtcaataaact

SEQ ID NO: 665272 - DNA, 75 bp, Homo sapiens
gaaatgcatctttatgtcagaaacacaaagcagcccaaccaaaggggtgataaaagaaaatgtggctgaagttac

SEQ ID NO: 665273 - DNA, 75 bp, Homo sapiens
cgggacgctgcacctcccgcgccgcacggtggacgaggattttacagtttttggaggcagtctgtcaggagcaca

SEQ ID NO: 665274 - DNA, 73 bp, Homo sapiens
agatgcaggagaaaatacggcattgctaggatctgaccgcactggccaaagagcttcgagcagtggaagatgt

SEQ ID NO: 665275 - DNA, 75 bp, Homo sapiens
tagcatcgagtctctgcgaacattccttttaacctatgtcttacaaaggcccaatacctaggtgctgatatggaa

SEQ ID NO: 665276 - DNA, 75 bp, Homo sapiens
aggagaattatgggagcgcatttccccagggctttgcacttctgggaggacatccttgttttcttaccacacaag

SEQ ID NO: 665277 - DNA, 75 bp, Homo sapiens
tcaacaaggtgaaggacaccccggggctgggcaaggcttttgatattatgagagtgacacatggcagagaacaca

SEQ ID NO: 665278 - DNA, 75 bp, Homo sapiens
ctgccctggagcagttcgtgaacagtgtccgacagctctcagctcaagtgttctaagaacggaagcatctgggct

SEQ ID NO: 665279 - DNA, 101 bp, Homo sapiens
aattcatgaagcagcttatcacaactctgtagaatgtttgcaaatgttaattaatgcagatttctctatgaatcatcatcaagaactctgggagaactttt

SEQ ID NO: 665280 - DNA, 100 bp, Homo sapiens
ttccgggtggggatctctgaaattactcaggtctattattagcagaagatttttctgcatagttggcacgctgtacctgtatcggtgtattacaatgtat

SEQ ID NO: 665281 - DNA, 75 bp, Homo sapiens
gccccgcgctgacaggggggcctggccgcgcagccggtttggtgcacctcgatttggaggaagtagggcagggcc

SEQ ID NO: 665282 - DNA, 100 bp, Homo sapiens
attaatgggagcatatatgatgaggactcacaccacccggcaagaactgctcactacggctccctgccccagaagtcacacggccggacccaagatgaaa

SEQ ID NO: 665283 - DNA, 83 bp, Homo sapiens
catgaatggagcaaaatggcggatcatgtgcagcagcctcccgcgacgatgcccctcaacgttagcttcaccaacaggaacta

SEQ ID NO: 665284 - DNA, 133 bp, Homo sapiens
aatgtgtggtggatgtggatgcaaacaaggttattcttaatcctgtaaatacgaatctttccaaaggagatgcccgtgggaatgtaagacggacttagatattgcatacaaatttggaaaaactgtggtgagc

SEQ ID NO: 665285 - DNA, 75 bp, Homo sapiens
tacagaacctagcctatcagctggggctggatgagtgagagcgaagacctggagaaacagaacgcggctctacgc

SEQ ID NO: 665286 - DNA, 95 bp, Homo sapiens
cccggtactgtgcactattctttcccaggaaccattggataaggataaagggttttcgaaagaggagttgacttggcttcagagccttcgaggag

SEQ ID NO: 665287 - DNA, 104 bp, Homo sapiens
cagctcgatctaggttctgcggcacgggatggcggaggcgcctcctgtctcagagctccaaacgagaatggaagccgctggaggaccgtagctgcacagacata

SEQ ID NO: 665288 - DNA, 74 bp, Homo sapiens
cggcacagtgacggcttcagaggacctgacaagtttcttcagtgtgtgaaaaatcctgaggattcatcttgcac

SEQ ID NO: 665289 - DNA, 50 bp, Homo sapiens
cactcagagtcgcccgagaaacggagtctcgcactgtcacccgattggag

SEQ ID NO: 665290 - DNA, 83 bp, Homo sapiens
ctgctttggacgtgggagtcacctgaaagccaggaaatggaggctactcacagtcgaactacaactccccggggtccggccag

SEQ ID NO: 665291 - DNA, 120 bp, Homo sapiens
gctgcccagaagaagggaaggcgcgagtgaggaaaggaggtactgtagtccagttacaacacagggatcacaacaaacacaaccgccacagaagcactatggcattacttctcctatcag

SEQ ID NO: 665292 - DNA, 82 bp, Homo sapiens
aaagctgcttccagtgggaatccacattaagaagtacaatagcattcgcggtggaatgaatcttacttgttgaatatcttct

SEQ ID NO: 665293 - DNA, 71 bp, Homo sapiens
gcttggtggagcagctgcctgggagaatgttgactctactgcagcacttttccagccattaactccaggct

SEQ ID NO: 665294 - DNA, 50 bp, Homo sapiens
gaacttttctccaacttctgcgactccttttcctccgcaaccatgtctga

SEQ ID NO: 665295 - DNA, 100 bp, Homo sapiens
aggcgcatcgtgattatctcgagcaaattaagcactgatggagagcaatacatcatcatctttggagaatttagcgacggcgcctgtgaaccagatccaa

SEQ ID NO: 665296 - DNA, 75 bp, Homo sapiens
gatcattgggcgatacggtctcactgggaaacaacaggagtgtgggctgctgctctcctctgagggcgagtgtca

SEQ ID NO: 665297 - DNA, 75 bp, Homo sapiens
atccagatcagtaggattgaaacatccaatgtcatctgggtggctggacgtaaagaaagaagtgatgcactcaat

SEQ ID NO: 665298 - DNA, 79 bp, Homo sapiens
cccgtccccctgccccgttcacaatgaacttgctactaccagcaccatgccctaccaatatccagcactgaccccggag

SEQ ID NO: 665299 - DNA, 100 bp, Homo sapiens
ggaccggcaacatggtgcggtcggggaataaggctgatcccaaagaactaatcaagatggtcaccaggcatgtgactcgacatgagcacgaagcctggcc

SEQ ID NO: 665300 - DNA, 76 bp, Homo sapiens
cggacaacctcagaggacaacgaagtgttcgctaaaagatggcggcaaggcagcccaggcaaatgtaagaataggc

SEQ ID NO: 665301 - DNA, 100 bp, Homo sapiens
gtgggtttatctcaaggcctgagtagccggtaacaaacgagggttcccgggattggaccgacgcagccatgggctttgcaatttgctgatgtaattgtgt

SEQ ID NO: 665302 - DNA, 75 bp, Homo sapiens
cgtccctgcgaccgccgcggcgaagatgcccatggaccaagcttctctcaaaaacagcgatgttcttgttctgac

SEQ ID NO: 665303 - DNA, 100 bp, Homo sapiens
ggggctgcgcaagcggttgtcccagcgcctcaaagtgcccaaggagcgcctggctcttctccacaaagacacggccctcctccccagttcagaatgcagc

SEQ ID NO: 665304 - DNA, 75 bp, Homo sapiens
ctgggccccactcccaccgcctctactacctggggactggtgattgcagctggaagtgcccatgaccgagctggc

SEQ ID NO: 665305 - DNA, 75 bp, Homo sapiens
aatgaggaggatgaggaggaaagtgacaaccaggttccattggccccactggtgcccggctcaccttggtgctcg

SEQ ID NO: 665306 - DNA, 83 bp, Homo sapiens
gaagaatccgccatgggctactcagtttacagccactgcagtatcacagccaggtcgggaaagaggttaaagaagacacgcaa

SEQ ID NO: 665307 - DNA, 101 bp, Homo sapiens
gccgttttctatgctgcagagctgtgttgcggcttggaagatttacagagggaaagaattgtatacaggctgccatgtgttacatccatattgctgctctc

SEQ ID NO: 665308 - DNA, 100 bp, Homo sapiens
caatcccattattcagagcgcgtatggagtggaaacgcttgtagggtttcaccagattggtttatcttggaagctaaagggcattgctcatcctgaagat

SEQ ID NO: 665309 - DNA, 75 bp, Homo sapiens
ttggaatagtagcaggcggcggcggcggaacgccaggcagagaccaagaagcgggacgttcaccatgggaagaaa

SEQ ID NO: 665310 - DNA, 50 bp, Homo sapiens
cagagattgtggagcagatgggtaccatgaaagcagtcagatgagttctt

SEQ ID NO: 665311 - DNA, 75 bp, Homo sapiens
tggttggaaggacatgttcaatgagctcgaggccatgagcagatataccagcccagtgaacccagctgtcttccc

SEQ ID NO: 665312 - DNA, 90 bp, Homo sapiens
gtccatcaaacatcttccaccacagcttagaggtatcgggttgaatatgaagctttgtgtaaagtagaagcagaacaaaatgaatttatt

SEQ ID NO: 665313 - DNA, 89 bp, Homo sapiens
cgggaccatcgccggagcctgaggacacttctctgtcgtcacagttagcttttgtctggtcctctgagccccagtgagagtttcctgag

SEQ ID NO: 665314 - DNA, 100 bp, Homo sapiens
ccatccgtccgcgggtccgtggagctggagcagatcccccagccggctgagacaggcatttgttgctatcggggactacaatggccacgtcggtctgggt

SEQ ID NO: 665315 - DNA, 83 bp, Homo sapiens
cagaggtgtgctgacgacctgctacaacagaaacagaatgttgctgcgggatgtaaaagctcttaccctccactatgaccgct

SEQ ID NO: 665316 - DNA, 100 bp, Homo sapiens
ggtcatcaaaggtgtgctgtttagagaattttctctacatgtgcacccatttaaaggactcggcttcaagggaagcagcttccaccgcattatcccccag

SEQ ID NO: 665317 - DNA, 100 bp, Homo sapiens
gggctaggacgccgagcggtgactccccgccgctcccgggggccgtgacggttttagatggagcaggattagatattgatttccatcttgcctctccaga

SEQ ID NO: 665318 - DNA, 100 bp, Homo sapiens
tgcaggtggtcagacatgtcatcaactcagctggtcctgcacacccatgaagcgactgacccagctggtctgaagcaccccacgaggaggtaatgtgcca

SEQ ID NO: 665319 - DNA, 82 bp, Homo sapiens
caggtgtggcgtctctgtccccatctggttttaggaagatgatccctatgatcttgaagatgtttctgcacagaaatgaggg

SEQ ID NO: 665320 - DNA, 82 bp, Homo sapiens
gaatgcttccttctgggcttagctggcatgagcagattccagagtgtttgagggatagttatcccagacctgatcagccctg

SEQ ID NO: 665321 - DNA, 74 bp, Homo sapiens
gtggggggcaagcagtacctcctaggactctatgacacggccggacaggtgatggccggtacggcagcaatgac

SEQ ID NO: 665322 - DNA, 75 bp, Homo sapiens
aggagataggaggtccaaaagaagaacttattccagagaaactggccaaggtattctctactgccgctgatggtc

SEQ ID NO: 665323 - DNA, 75 bp, Homo sapiens
aacatcctctccgtgcagccctacagccaagaatgggagctgggtggttgagtttgcctcttatggtgacttaaa

SEQ ID NO: 665324 - DNA, 75 bp, Homo sapiens
tcaccggatgatggagaggtcaatgagctctttgacctcatctaccgcgaggagacgctgttcaacgtcatcaag

SEQ ID NO: 665325 - DNA, 83 bp, Homo sapiens
gatctgtggagcagatccgatggagaggctgagctgctccaggacttggggaggagatgttaaagtaacccatcttgcaggac

SEQ ID NO: 665326 - DNA, 74 bp, Homo sapiens
cagacaccgccctgaacactatcaccgactgaaaaatgtactctgacctgaatcctgaattttccttgatggtc

SEQ ID NO: 665327 - DNA, 100 bp, Homo sapiens
atgacccttgtctgggtacgtttggtggaccagtgttcccgtggcttgtgttgggaggctatgatggactgcaagaactgatcccctttgtgaagcctgc

SEQ ID NO: 665328 - DNA, 128 bp, Homo sapiens
ccgaccagactcatggaggccagattttctccaattaaccagatcttgccctggtgcagacaagacttagaggtgaacacagaaaagctgacagcctttgtaaacacgttgaatggcaaagatggaac

SEQ ID NO: 665329 - DNA, 80 bp, Homo sapiens
acattaggttgcagtatgtggccagttatttgcctcagtaaaagaggttttggccaaattgggcgagggcacaaaataac

SEQ ID NO: 665330 - DNA, 88 bp, Homo sapiens
caggacttggtgacttcctccagcttcacataaatggagctggtttgtcaaaatccaaaggaagccgaattggatttgatagcacaca

SEQ ID NO: 665331 - DNA, 100 bp, Homo sapiens
cgccctcatgtccaactttgagcagctgctccgaggggtctggaagccagagaccaacgagatcctgcacatgtctttggttgcctgattctgagtgatg

SEQ ID NO: 665332 - DNA, 50 bp, Homo sapiens
cttcacggcgccgagccgcggtccgagttttgacacaagggcgcatatct

SEQ ID NO: 665333 - DNA, 80 bp, Homo sapiens
gattctgatgaagatgatgatgaattgggtagagagaccaaagatcttgatgagccacaagctttggaattgccctgcca

SEQ ID NO: 665334 - DNA, 90 bp, Homo sapiens
gagtcctcgagtgaatgggcggatctcatatcttcacttggcaaactcaacaagattagaagcccaggacccaggaaggagacacaggaa

SEQ ID NO: 665335 - DNA, 75 bp, Homo sapiens
cggcgaggatggagggcctggcagtgcggttgctgcgcggcagcaggctggtggtgaaggcatttgtgatcctgg

SEQ ID NO: 665336 - DNA, 100 bp, Homo sapiens
agtgatgaatcagcccatggcttacgctgcacttccatcccacggtcaggtggtttgtgatgaaaatggttccaagggctatggatttgtacactttgag

SEQ ID NO: 665337 - DNA, 76 bp, Homo sapiens
cgctgctgctcgttcgagtcgcagctgactgagttgaataccttcttcttgaagcatatctttgtgttccaagcca

SEQ ID NO: 665338 - DNA, 74 bp, Homo sapiens
ccgaaactttcaccgcgagcggggaaatcctcattgacgattcaatttgttgaaggccaatttgtggactccta

SEQ ID NO: 665339 - DNA, 82 bp, Homo sapiens
ggcgagcgcgagcggcgcgagaaatgttatagttttgccgctggactcttccctcccttcccccaccccatcaggatgatat

SEQ ID NO: 665340 - DNA, 50 bp, Homo sapiens
cggaaaaggacgcaaagttctccggcgagcatctacaaatctgaaggaca

SEQ ID NO: 665341 - DNA, 51 bp, Homo sapiens
tggaacatacgggcaagtttataagaaaacctcggatcaattctcagctgg

SEQ ID NO: 665342 - DNA, 83 bp, Homo sapiens
ggacgagacctgaccttgcagtacaacatctacaatgttggctcaagcaataccaagaaggagggtgacctgatagctgctca

SEQ ID NO: 665343 - DNA, 82 bp, Homo sapiens
ggaaaatgcgctcgggctggaccagcagggttcagccgactcctacaccagccgcccatctctggactcagacgtctccctg

SEQ ID NO: 665344 - DNA, 131 bp, Homo sapiens
gaccatggagaccctcacggagctgggcgacgagctgaccctgggagacatcgacggtgtcccgacccaggctaagcttgagcatggctgagcaggagcccacagccgagcagctggcccagattgcagcg

SEQ ID NO: 665345 - DNA, 101 bp, Homo sapiens
attttcctgagacctcagagcccgtttggatactgggtagaaaatacagcattttcacaggggaaggagaagttcctgggcatcctgaacaaatacatgga

SEQ ID NO: 665346 - DNA, 75 bp, Homo sapiens
tactggatttggtgctgttggttcgtgctcaggagctgtcccaggaaatcaaggcttttctgactggcgtagacc

SEQ ID NO: 665347 - DNA, 90 bp, Homo sapiens
cagccgtgaagcaagtgcagatagatggccttgatggagagcaatacatcatcatctttggagaatttagcgacggcgcctgtgaaccag

SEQ ID NO: 665348 - DNA, 100 bp, Homo sapiens
agataaagaagacaatgctgaggacaaagtagatggcctccagaaacaaacgaagcctggagagttgatgacctgatagagagaatccaagaaaacgaag

SEQ ID NO: 665349 - DNA, 97 bp, Homo sapiens
tggaggagggggtcgcgcgaagtgccagatgcaggcggggaaggtggtgagccggctgggcctggactccctgtgccccttcagccctaaggagcgg

SEQ ID NO: 665350 - DNA, 98 bp, Homo sapiens
acaaggcagctcgctctgggagcctagaatgcatcagtgcccttgtggcgaatggggctcacgtcgaataaacaacttgatgcagatgtttcccccaa

SEQ ID NO: 665351 - DNA, 74 bp, Homo sapiens
tgcaaggactggttccacggcagaccaagatcactccatggatgaaatgacagctgtggtgaaaattgaaaaag

SEQ ID NO: 665352 - DNA, 100 bp, Homo sapiens
gggctctatcaaggaaaacaagtgtctgcttatgtcggcaatgaatcgctccctggctaatgtgattcttggaggctatggcaccacttcaacagctggt

SEQ ID NO: 665353 - DNA, 100 bp, Homo sapiens
cttatctccaacaatgagcaactgcccatgctgggccggcgccctggggccccggagagaaaccaaggtgtatgttggtaacctgggaactggcgctggc

SEQ ID NO: 665354 - DNA, 73 bp, Homo sapiens
tgccttggccagagaagagaacaggtgagtcctgcaaatgttaagtgatttgctcaaggtgcccatttcgcag

SEQ ID NO: 665355 - DNA, 95 bp, Homo sapiens
gggaccgatacttgtcatcagggatcgccacctcacacagtgccaagcccccgacgcacaaatatgtccggaggaagagcaagcaggccctgagg

SEQ ID NO: 665356 - DNA, 100 bp, Homo sapiens
tcttggcctgtccctcacatccgatgcaccctttttgtcagattatcaggatgagggtgattttcttccacccccacctccacctctagatgattccagt

SEQ ID NO: 665357 - DNA, 60 bp, Homo sapiens
gttccctgacaactttgtaagattttatcttcaagacactaaaagtagtaatggtacttt

SEQ ID NO: 665358 - DNA, 50 bp, Homo sapiens
tcatcacatcattcatgattttcagaattggcagagggggtcgatttggg

SEQ ID NO: 665359 - DNA, 74 bp, Homo sapiens
acctcgaattagcaaaggaaacttttggaactgcaagcacatgttgaccagataactgaaatggcagcagtaat

SEQ ID NO: 665360 - DNA, 98 bp, Homo sapiens
ccgcgcagttaggcagcagcagccgcggagcagtagccgccgtgggagggagccatgaagcattacgaggtcatgaacaacactgaagaaacgtcaaa

SEQ ID NO: 665361 - DNA, 75 bp, Homo sapiens
aataaagctcctgggcaaggggacgtctgcagctgaaatcatccagaaccgcatcctgctcgtcatcctagggat

SEQ ID NO: 665362 - DNA, 82 bp, Homo sapiens
gacgctaagttgctgatcgtggcgaacactctgctccagccaaggtggtgagggcagctgttcctaaacagcgcaaaggcag

SEQ ID NO: 665363 - DNA, 100 bp, Homo sapiens
cggcgccagggaggagatcccctcagttctgcgctgctcccgttccccctccccagagcaagggaagacatgtaaggaatttgcataagacagttatgca

SEQ ID NO: 665364 - DNA, 75 bp, Homo sapiens
tcctctctcacctgatgtgcctatgatggatggagcaccttcagaatcagagaagctttactcattttatgatct

SEQ ID NO: 665365 - DNA, 83 bp, Homo sapiens
caatggggacccgggacgacgagtacgactacctattcaaagcttgccttgcgccatggactggcagccagacgagcagggcc

SEQ ID NO: 665366 - DNA, 83 bp, Homo sapiens
cgccgctctccagcccgcttgaacggcttctcacggcattcagcagcagcgttgctgtaaccgacaaagacaccttcgaatta

SEQ ID NO: 665367 - DNA, 90 bp, Homo sapiens
tactggggcgtagcctcctttctccagaaaggaaatgatgaacaacatgggtggtgatgaggatgtagatttaccagaagtagatggagc

SEQ ID NO: 665368 - DNA, 100 bp, Homo sapiens
cttgttcttactggccctgagtctttgggggcagcctgcagaggctgcgataacagacgagtacctttggaaaggtcacgctctcgccacaatggagcta

SEQ ID NO: 665369 - DNA, 75 bp, Homo sapiens
caacctcagaccagttccacgacgtagacaagtttggcaacgagatcacccagctggcccggcccctgcctgtgg

SEQ ID NO: 665370 - DNA, 87 bp, Homo sapiens
cccattttcttttttggaactcatgagacgagtcacatgccataggaaaaaagcctgaaaattcagcagacatgattgaagaagggg

SEQ ID NO: 665371 - DNA, 95 bp, Homo sapiens
cgcggcaggaccaagcaacaacgagccaaactcaggctgtaccttgagcagctcaagcaactggtgcccctgggccccgacagcacccgccacac

SEQ ID NO: 665372 - DNA, 101 bp, Homo sapiens
gccgccgccgcggtttgtcgccagaaggaagatggcggatctggaggagcagttgtctgatgaagagaagaaatacactttcgggaaatggcctctaaatc

SEQ ID NO: 665373 - DNA, 100 bp, Homo sapiens
agtcacctttgactctgatgtggagacggagagttaatcttggtctatctggtgtgaatatattgtggatctttggcgagtagcaagtcatatatttaat

SEQ ID NO: 665374 - DNA, 85 bp, Homo sapiens
ccaaggcttgaaggccggcaggagcatccagggggaagcttggcttcagggaggacctagcagaccggaatacacctggcgtcta

SEQ ID NO: 665375 - DNA, 90 bp, Homo sapiens
cttttactctacgcaactgttgctttttcatggatcaggtcatccagctgatgaacgcgatcttcagcaagaagaactttgagtccctct

SEQ ID NO: 665376 - DNA, 97 bp, Homo sapiens
ttctgagtgaattggcaccaagccttcccagttatcataaccttgaatggcgactagatgtacaggaagcagtcaattatagatttcttcaaaccag

SEQ ID NO: 665377 - DNA, 83 bp, Homo sapiens
gcggaagtgcagctgcctcagttcttagcgcagatatgccctgcgtccaagcccaatatagcccttcccctccaggttccagt

SEQ ID NO: 665378 - DNA, 75 bp, Homo sapiens
agtaacaatgtggagaaagacattacaccatctgaattgcctgcaaacccaggcaaagccaaagctaattgagcc

SEQ ID NO: 665379 - DNA, 97 bp, Homo sapiens
ggagaggtgctcggattctcgtagctgtgccggatatgcacccaatgtccagggagcgtgcaaaatttgtcaaaagtggccttttattgtaaaacga

SEQ ID NO: 665380 - DNA, 83 bp, Homo sapiens
caagtacctgccagagaacgacctgaagcattagtgaccagaaggatcccaaggatcgaatggttcaggttgtgaaatggtac

SEQ ID NO: 665381 - DNA, 107 bp, Homo sapiens
tctgtcttcggtggactccttcggcagtccacccaccgccgccgcctcccagagaggtggagaagagcgagtacttgagaaagaagaggaagaagatgatgatgaag

SEQ ID NO: 665382 - DNA, 100 bp, Homo sapiens
ctccattgattatgatagcagtgggcttttcacagtgggctttactgtgttgaggaacagatgttgttattgtaaagaatggaagaagaatatgtggaac

SEQ ID NO: 665383 - DNA, 90 bp, Homo sapiens
tcatgctgtcccttcattgaattttagaaagcgatagatctggctagcaaagcagcgcaagaagacaaggctgggaactacgaagaagcc

SEQ ID NO: 665384 - DNA, 80 bp, Homo sapiens
gtaagattgtcttggaaatactaagttggctccgggaagcagtttgttcgctatataaacatgttgataaacgacacgac

SEQ ID NO: 665385 - DNA, 99 bp, Homo sapiens
ggcgacgaaccttggagagaggagaacgaacatcttctggacctttgtccagtatggtttgaagtggtgaacatggatttttctcggcttcacatgtac

SEQ ID NO: 665386 - DNA, 98 bp, Homo sapiens
agaaaagcctctgggagcagaagggaggctccaagacctcatcaacaattaagggaagtcgagacaacatgagtgtgattttgatctgttttccaaat

SEQ ID NO: 665387 - DNA, 100 bp, Homo sapiens
aaagtggttggttgcagttgtgtagtagttaagatccagatgtaccagctctcgaggttgcttcatgattaccacagagacctctacaatcacctggagg

SEQ ID NO: 665388 - DNA, 98 bp, Homo sapiens
ccaacaggttactttttctcgcggcacagatgggatcttgctgcctttgacaaatcccatgatcaagctgtccgaacctaccaagagcacaaagcaag

SEQ ID NO: 665389 - DNA, 89 bp, Homo sapiens
gtggacaagagaaagcagcggtcagttttcagagatgtcctgagggcagtggaggtcctgtgggaatggccgctgctgctgctgtggca

SEQ ID NO: 665390 - DNA, 83 bp, Homo sapiens
ctgagagcaccacgccgaggccacgagaatccacattcatctcaatggaaggatcctgccttaagtcaacttatttgtttttg

SEQ ID NO: 665391 - DNA, 100 bp, Homo sapiens
ctcgggggagaaggcgcccgaggggaggcgccggacagatcgcgtttcggaggcggcgcaggtacgacatttggaggccccagcgagaaacgtcaccggg

SEQ ID NO: 665392 - DNA, 100 bp, Homo sapiens
gccgccgccatgtcggcgcaggcccagatgcgcgcgatgctggaccagttgatgggcacctcccgggacggaacattttagtggacaaaccaaatgacca

SEQ ID NO: 665393 - DNA, 102 bp, Homo sapiens
tgacgttcctgacgaagcaggagatcctcctggttaaagcacgaattgggagctctcagcgacatcaccagtcagcagccaaagacctaactcagtcccctg

SEQ ID NO: 665394 - DNA, 75 bp, Homo sapiens
cggatgatttatctggtgacagaatatgctagtggaggggaaatatttggtgacctgagcatctctgcagaccgc

SEQ ID NO: 665395 - DNA, 89 bp, Homo sapiens
gcagcccgagagctccgctcttgccttctccacctcacactggtgaggctggtgccaagttcattgaggtatctaaagaggcccggaag

SEQ ID NO: 665396 - DNA, 75 bp, Homo sapiens
ccttgctggcctacgtcgcctatataagcttaccaaagtcagcaacaatatgctacacagctgctttgctcaaag

SEQ ID NO: 665397 - DNA, 100 bp, Homo sapiens
aacaccaagaatcaatggacatgaacaaccctcaggactttattgattgcttcctgatgaaaatggagaagctctcaaaaatctatggccctgtgttcac

SEQ ID NO: 665398 - DNA, 88 bp, Homo sapiens
ggatttgttaaggattccaagtaactcttatttgttgcaagaatgtagtaactctgatcagctacaaggaaaggaggaaagagtaaat

SEQ ID NO: 665399 - DNA, 96 bp, Homo sapiens
agaacagcgagcaggcgcgcagccacctggagaaggcggcatctccttcttgatgtcaaagtccccaggaggcatcgttaactatcgtaacgttac

SEQ ID NO: 665400 - DNA, 95 bp, Homo sapiens
gccgcgccgcacgagcaccagcctagagccaggcagagttccgggattatcctccagtgctgagacaggccgtctccctggcccggcgcatccag

SEQ ID NO: 665401 - DNA, 90 bp, Homo sapiens
ctaaaaccatgtgtctgaactgaagaagcttgggctcacttccacaaatcaatgcagcaagtcttggaaaaccttacggagctgccctcg

SEQ ID NO: 665402 - DNA, 97 bp, Homo sapiens
ttcggtgccacacccccccgagctggtcctgtactcgctggtctttgtcctcttctgtgatgaagtgagacagggtctaggtgctggagtgcgcacg

SEQ ID NO: 665403 - DNA, 100 bp, Homo sapiens
gacccacaaaattctcgcccatattcaggctaccacatactgttgattgtgatgaaatgccagttgaagcacctgtcctgcgagcttaggggtgctacaa

SEQ ID NO: 665404 - DNA, 75 bp, Homo sapiens
gaagaagtatttgatgtcttagagaaacttggagaaggggtggtgatgaagagtaaatcaaagagtttagcagaa

SEQ ID NO: 665405 - DNA, 75 bp, Homo sapiens
ccaacagttagtggccagcatcctcctgctgcagaaggtgatgctctcttacacaaccttcattctcgccctcaa

SEQ ID NO: 665406 - DNA, 82 bp, Homo sapiens
agccaggacacagacgcggatgatggggccttgcagtaagcaggtgctttgaagaagagtctcacagccaagcaggtccagg

SEQ ID NO: 665407 - DNA, 89 bp, Homo sapiens
acagttcctaccttatgagctcggttttcttatgcttataagagtggaacagatcatgagcgtcttgttgttcatcgagcactcagtag

SEQ ID NO: 665408 - DNA, 50 bp, Homo sapiens
gaaacatctcaccaatttcaaatctgatggagtttcactcttgttgccca

SEQ ID NO: 665409 - DNA, 50 bp, Homo sapiens
cgctggcgctggccaaggctacataggaagaatcgtgagacagccagtga

SEQ ID NO: 665410 - DNA, 87 bp, Homo sapiens
ggctctgtgcaacggagactccaagcactttcatttggacccgtggatacccattgaacagatgcttgaaacctgcaagtaatcttc

SEQ ID NO: 665411 - DNA, 99 bp, Homo sapiens
aatggaccaaaatgaacacagtcactgggatgaagactggcccatttgcagagcactccaaccagctgtggaacatcagcgccgtcccttcctggtcca

SEQ ID NO: 665412 - DNA, 83 bp, Homo sapiens
gcggacggttttcgtacgggcggccgtgcgcgaggcgagacttcccaagtaagaagcggaagaggagccgctggaaccaagac

SEQ ID NO: 665413 - DNA, 50 bp, Homo sapiens
ggcggcggcggctgcggcccaatataggaaatattaggaagctgtgattt

SEQ ID NO: 665414 - DNA, 75 bp, Homo sapiens
tgaccaggcggcttgtgaacagtcaggcttctccagggaaagtgaccgaggcagtgaaagaggccattgacgcag

SEQ ID NO: 665415 - DNA, 74 bp, Homo sapiens
ccgagagcgcgaatatcgtcatcgttagaagggagcgaagaatggtcaagaaagtggactcgaaattggaactg

SEQ ID NO: 665416 - DNA, 101 bp, Homo sapiens
ggcccctcgtacgggctgtcggccgaggtcaagaaccggcattacccagaacgccatggaggaccagagcgccacggccgggactcccgcgatggctgggg

SEQ ID NO: 665417 - DNA, 75 bp, Homo sapiens
cgatgggcggcggaaaatagcctttgccatcactgccattaagggtgtggacgaatcaggagccagtagattcac

SEQ ID NO: 665418 - DNA, 121 bp, Homo sapiens
ggcggcgatgcactaggcctcgctcagggcggctgccccgggacccgcagccctccagaatacccatcatatagcccctgaggtggcatggtgatgtctccatgagggaaccccttcccac

SEQ ID NO: 665419 - DNA, 80 bp, Homo sapiens
cagcagggcggaggaaagtgcagatggcagttgaattcctgcatgaactgaatgttccatttttcaaagttggatctgga

SEQ ID NO: 665420 - DNA, 101 bp, Homo sapiens
ctactgcacagcagaagctctgaatcgtgttcctgaatgaaagaagtcagggttatgtaccgaaggactctaccgtgtcagcgggaataaaactgaccaag

SEQ ID NO: 665421 - DNA, 100 bp, Homo sapiens
gccggccgtggacatcggggcagctgacctcgcccacgcccagcagcagcagcaacaggagacaaggacggcagcaaggtgacaacagtggtggcaactc

SEQ ID NO: 665422 - DNA, 75 bp, Homo sapiens
cgagacgcgcgtgtgtgagcgcgccggaccaagcgggcccagaagcggataactgcgacctccacttcaaggtgg

SEQ ID NO: 665423 - DNA, 83 bp, Homo sapiens
tgaaaatgcagaaactcagtttagacaagcgacctgggagacccagccagtaccgcccagacggacttcggagtggtgatggg

SEQ ID NO: 665424 - DNA, 97 bp, Homo sapiens
tcgccgcccagctcacgccgcgcccgcgctcccaggctccgggtgacgatgcctggggagcctgtggacgtggcatgtggcgtggaccacatggtga

SEQ ID NO: 665425 - DNA, 50 bp, Homo sapiens
gcacggagcggccgggcgggacagaaaaatggctactggacaggatcgag

SEQ ID NO: 665426 - DNA, 100 bp, Homo sapiens
ctggttttaccaaagcagctttgagagtccacagaatcttaatcagaggatggatgttttttatttgcaaccagaatgctctagttctacagatagccct

SEQ ID NO: 665427 - DNA, 83 bp, Homo sapiens
aagagattcagtatcactcgctcccttgatgatcttgaggattttttatcaagcagaaatgcatcgaacaacgagaatcaaga

SEQ ID NO: 665428 - DNA, 98 bp, Homo sapiens
ggggctggtggtgcttccaactgcgggacaggaagtggccgtagcggcttgttggataagctcattgctatggacagtgctatcaccctgtggcagtt

SEQ ID NO: 665429 - DNA, 88 bp, Homo sapiens
gaaaacctggctggcctcaagtacagggtcatcaagggcactatcagaagtggaaacagaaacagaaaattgatgatcgtgactcgga

SEQ ID NO: 665430 - DNA, 73 bp, Homo sapiens
ccgccctagtttctaaggatcatgtctgcgagccaggattcccgagtgcctggtgaagaatgtgatgggatca

SEQ ID NO: 665431 - DNA, 100 bp, Homo sapiens
gcctttgtgaacagatggaagcatcctgccagcatgctgacgtcgccagggccatgctttctgaaaagattcaagttcagctgtgcttcaagacgtgttc

SEQ ID NO: 665432 - DNA, 82 bp, Homo sapiens
cgatccagcctgcggagcctgtggggcagcaaccatgaagttgaaggacacaaaatcaaggccaaagcagtcaagctgtggc

SEQ ID NO: 665433 - DNA, 83 bp, Homo sapiens
gcacgttggaaccgaagagagctctgttgttgcaaattctgagtagcttgagtcttagaaaactgatgctgggacacaatcat

SEQ ID NO: 665434 - DNA, 92 bp, Homo sapiens
atccacacagctcagaacagttggatcttgctcagtctctgtcagaggaagatcccttgtccaacttggtggcaaggacagagggcctggac

SEQ ID NO: 665435 - DNA, 98 bp, Homo sapiens
ctcccggggcgggccgggcgggccgcgggagccgcacgcggcgatatggaagaggagggcaagaagggcaagaagacctctgtgagtgaaagccttca

SEQ ID NO: 665436 - DNA, 97 bp, Homo sapiens
gggatgatacaccttttccacagggaattgagttggtgtcccgacccaggctaagcttgagcatggctgagcaggagcccacagccgagcagctggc

SEQ ID NO: 665437 - DNA, 82 bp, Homo sapiens
cggaaggggaaagcctggagtcctggctcagcctgacctctcgggacacacccagccctgtggacccagacaccgtggaggt

SEQ ID NO: 665438 - DNA, 118 bp, Homo sapiens
gcaaacatgctccgccagatcatcggtcaggccaagaagcatccgagcgactcacaccacccggcaagaactgctcactacggctccctgccccagaagtcacacggccggacccaag

SEQ ID NO: 665439 - DNA, 82 bp, Homo sapiens
caggtgtgcaggtttcggcacatggagattgatgtttacccaaggtccagcctagcccctaggcaccatgtcggacagtgat

SEQ ID NO: 665440 - DNA, 100 bp, Homo sapiens
cactctgggactcgtggggctgcagcaccggctgtattcatcaccaaagaaaaaacttacaccaatgcagaaatcggttagtccattagtttggtgcagg

SEQ ID NO: 665441 - DNA, 51 bp, Homo sapiens
tttgagatgagttacatcttggagattagcctgaggcctgctcagtcgttc

SEQ ID NO: 665442 - DNA, 142 bp, Homo sapiens
tatacttgccaagtcagcaattctgtgagcagcaagaatggcacggtctgcctcagtccaccctgtaccctgggaaacaaattccatcacagtctatgctagtgtgacacttccagagagctgacaccagagaccaacaaag

SEQ ID NO: 665443 - DNA, 50 bp, Homo sapiens
gaggaaggactgctctgcacgcacctgtctccagaaatgctttgggttca

SEQ ID NO: 665444 - DNA, 110 bp, Homo sapiens
cgagccccgagcccggctggacgccgctgcctcagatgggacaccaggtccaataccacctccaagccgagtcacttggtggatgcgcacactgccgaagtcaactgcct

SEQ ID NO: 665445 - DNA, 99 bp, Homo sapiens
tggctgcctcatccgcttctatgcagactatgtcttcagcagtggtgcagttatatgcagcagatcggaactgtatgtggtcaaagaagtgcagtggtg

SEQ ID NO: 665446 - DNA, 90 bp, Homo sapiens
atatgagcctgtttctggggcaaaaacattcaagaatgagagcgagaacacctgtcaagatcctgcccctgagctttcatgagctgttga

SEQ ID NO: 665447 - DNA, 75 bp, Homo sapiens
cagcagctaaggatattttgtgcaggccaggagtggtggctcacacctgtaatcccagctctgggaggccaaggc

SEQ ID NO: 665448 - DNA, 100 bp, Homo sapiens
agcccccagccctggagaagctcaaaggcaaaggccgcagcctgggattccccagggacccccccggagccgccgcgtctcccatggacttgcccgggga

SEQ ID NO: 665449 - DNA, 97 bp, Homo sapiens
tcgcttcctgctcgacctgcggcagtacttggatgcagagcaaagcggcagtccccggacagggatgggctctgaccaggaggacagcaagcccatc

SEQ ID NO: 665450 - DNA, 75 bp, Homo sapiens
caagcacacactatggcgctgaaacggattaataagatggctgggaagaatggtaccagaacaatcaagatgagc

SEQ ID NO: 665451 - DNA, 75 bp, Homo sapiens
cacaccaggccggcaggctgagaaaagcgagaccgcgtgcgaggaccgtacatcgacgccatcagcaacaagcag

SEQ ID NO: 665452 - DNA, 82 bp, Homo sapiens
gaaaaactggagagcttcatcaaaaatagtgatagctttgataacccagggccttgctgccgccatgactgaggaatcagag

SEQ ID NO: 665453 - DNA, 74 bp, Homo sapiens
cagagagagaggtggacagatctgagagatactgaggtccagtgcacgtgccaacattacactgtcagggaaga

SEQ ID NO: 665454 - DNA, 100 bp, Homo sapiens
aagagatggcctggtggaaagcctggctcattcttggaatcccagaacaggccttaagtcttctccacatggccatcgagcccatcttggctgacggggc

SEQ ID NO: 665455 - DNA, 90 bp, Homo sapiens
caaagattctttgtagcagacactgcaaatgaagctctcgaggctgctaagagactaagccctcgggaccaaggatcacgtcatgactcc

SEQ ID NO: 665456 - DNA, 75 bp, Homo sapiens
catggccgccgcctgtgcgcctctgctgagtcgcgcagatcaggcctctataaccgccaggaatcacattcagct

SEQ ID NO: 665457 - DNA, 82 bp, Homo sapiens
cgcccgccaccctgcgctgccgccgctctgaggagttaaagttccagggtctccctccactgctgtagtaacccgggtccgg

SEQ ID NO: 665458 - DNA, 50 bp, Homo sapiens
aaaaatctgggaggttgaacttattaatttaaaggcattaggatttcctg

SEQ ID NO: 665459 - DNA, 100 bp, Homo sapiens
tcctagagttgttcagaatcctccaaaaccagtcatgaccactagacccacagctgttaaagcaacaggccctcgggaccaaggatcacgtcatgactcc

SEQ ID NO: 665460 - DNA, 78 bp, Homo sapiens
tgatgttggagaactatagcaatctggttttcttgggtggaaaaggattattcatacctgaaggagatatgtgatcac

SEQ ID NO: 665461 - DNA, 98 bp, Homo sapiens
atctgggaagatagaaatgtatacccagaagaaatgattgtggcattgagagaagctttgattttgagtatccgaggagcccaggaggaggaacccac

SEQ ID NO: 665462 - DNA, 83 bp, Homo sapiens
ctggaagccgtggctgcgctctcttccctctgctgggcgtcctgttcttccagggtcccagaacagttttcttctgggctcca

SEQ ID NO: 665463 - DNA, 133 bp, Homo sapiens
gagtctccgcgtcccgctcgctgggagagaggtacctctccttttccctctccctttccctaaggtgtcatggagaaactccagctgggcccagagattctgcagcgggaaaatccaaggcttatttatgcca

SEQ ID NO: 665464 - DNA, 101 bp, Homo sapiens
caggatccttctgaggagaagaaatacagacctgcagagttccactggaagttgaatcaggaaatgttctgtgaaggtcaagtgtgcaaacagacattcca

SEQ ID NO: 665465 - DNA, 90 bp, Homo sapiens
cagggcttctcctatgactacgtctttgactggaacatgctgaaattctacaagccagctgccatgttgtgagcacataccacatagctc

SEQ ID NO: 665466 - DNA, 82 bp, Homo sapiens
aggagctgtgcagccgcgaggaggcgcgggaggtgttcgagaacgaccccgagacgcattttgaaagcgaagcagaagccgt

SEQ ID NO: 665467 - DNA, 75 bp, Homo sapiens
gaaacttgcagcaaagccattcgggttggagtaattggttccaatatcatttgtggatcgtgtttatggtgaatc

SEQ ID NO: 665468 - DNA, 100 bp, Homo sapiens
cgagcgctggacggagaggaaagcggccacggactctgactacgaggacgcgctgcccaagcactccttcgtgaaccactacatgagcgaccccacctac

SEQ ID NO: 665469 - DNA, 100 bp, Homo sapiens
tcagctacatcacagccctgttaaaggatggctttggctttgcagacagcacagtcttacagaccaaatacacgctgatcgatgagcaggacatcccgct

SEQ ID NO: 665470 - DNA, 50 bp, Homo sapiens
ctgccctgggctggaacgaccctgcaattctgtggtgttcttggtcacac

SEQ ID NO: 665471 - DNA, 50 bp, Homo sapiens
gcttttcctccaggcctttgagagaaggtgggagtcaatcattttgacaa

SEQ ID NO: 665472 - DNA, 74 bp, Homo sapiens
gaaaattgaaatcagccagcacgccaagtacacttgctctttctgtggcaaaggtgcaacaccggaggatttca

SEQ ID NO: 665473 - DNA, 88 bp, Homo sapiens
ccggtgaggacgcggcgggcgagcgagaggccgagggaatacggttggacagaatgaactgaagattacaagtgatcaagtgataaat

SEQ ID NO: 665474 - DNA, 71 bp, Homo sapiens
ctgatagactgattaaaccacagcccgtggtggggggaagatgtccccctacaccaactgctatgcccagc

SEQ ID NO: 665475 - DNA, 90 bp, Homo sapiens
attttttctcatggatgttcttcttcgagtatttgtagaagggcttccaagaacaaaacacttgttaaatgtcatcaatgaaaactttgg

SEQ ID NO: 665476 - DNA, 90 bp, Homo sapiens
gggaggtcctgactttgcccactgtctgctgatcttcaaagctgctgcgggcattctatgtccccttcctgtcagatcagtatacagtgt

SEQ ID NO: 665477 - DNA, 73 bp, Homo sapiens
caagttgatatggatcatgtcatgaaggccccgagcattcctctgattcagaatacactctctcagagccgga

SEQ ID NO: 665478 - DNA, 100 bp, Homo sapiens
aagcaatgaacagtcttttctggatgattttattgcctgtgtcccaggatcaagtggtggaaggcttgcaaggtggctggctttgatctggacgggacgc

SEQ ID NO: 665479 - DNA, 75 bp, Homo sapiens
tgacaacccaccacgtttcccccagaggagactgcattgcttattgatccaaaaaattcctgttcttcatcccgc

SEQ ID NO: 665480 - DNA, 74 bp, Homo sapiens
ggccgttgaaaaatggcgactgtggcagagttgaaggctgattgacttgatgcacaacatcacaaaggcgattt

SEQ ID NO: 665481 - DNA, 75 bp, Homo sapiens
tgcaggctgacaacatgagcaacacagccttgtcccgggagcttaagaaaaactgcttaaggttgaaaagagaaa

SEQ ID NO: 665482 - DNA, 50 bp, Homo sapiens
gttttgccagcgataatacgcctcaggttttgctgttactgctcagtgta

SEQ ID NO: 665483 - DNA, 100 bp, Homo sapiens
gtcagagtggaggctgcagactgtggagccgggagccggcaggcaaaatacatatctcagtgcattgatgagatcaagcaggagctgaagcaggacaaca

SEQ ID NO: 665484 - DNA, 50 bp, Homo sapiens
aagaaattactgtctcaagtgatacggctttggaatcaggatgatgctgg

SEQ ID NO: 665485 - DNA, 76 bp, Homo sapiens
ggagctgtccagatgctgaaaagagaaggtcaaacagctgaaggtgtacgtggttgggaatgaacctttaacagtt

SEQ ID NO: 665486 - DNA, 100 bp, Homo sapiens
cttctgtgaggcaaagattaagactgtgaaaaggctggtgaaagttaagatattgaagatttgcccccaacagtccaagaaaaattatttgatgaggtgc

SEQ ID NO: 665487 - DNA, 75 bp, Homo sapiens
tgggcttgctgctcccgcccatctaattggctttggtctagaatctgatcatgatacaacaaagagatccagtgt

SEQ ID NO: 665488 - DNA, 82 bp, Homo sapiens
agtttatactatcagaccttattttcctaaggatgagtacgtagagaaatcgacactcttaatgaacgtttagctgctgaag

SEQ ID NO: 665489 - DNA, 83 bp, Homo sapiens
gtggaaaatgcgctcgggctggaccagcagatggaaatcatattatgtagaatacttgggtgacatctgcctgagagatctcc

SEQ ID NO: 665490 - DNA, 80 bp, Homo sapiens
gagcgcgtatggagtggaaacgcttgtagggtttcaccagctcattgctatggacagtgctatcaccctgtggcagttcc

SEQ ID NO: 665491 - DNA, 98 bp, Homo sapiens
atgctcctcattctgacagccgtgggcctgccaacagaggacatcagcctgctggtggctgtggactggctgctcttccaatcagaagactatacaac

SEQ ID NO: 665492 - DNA, 49 bp, Homo sapiens
ctggattccatgtagagacccctggaggctttatgaaggcaaagaacag

SEQ ID NO: 665493 - DNA, 100 bp, Homo sapiens
agaaccctgctcctcaccccacaggtcgaaacttcagagaaatgaaaatcgggatatcagtgaagttattgctctcggtgttcctaatcctcggacttcc

SEQ ID NO: 665494 - DNA, 127 bp, Homo sapiens
ttggttacaaaggcatatgctgacacacagtggagacaaacctttcaagtctctggctgatgaacttgctcttgtggatgttttggaagataagcttaaaggagaaatgatggatctgcagcatggg

SEQ ID NO: 665495 - DNA, 74 bp, Homo sapiens
ctaccagagctgcttcatcttgaaggtagtgaaaatggacacatccattcaacctctttgcaacacataaaaac

SEQ ID NO: 665496 - DNA, 100 bp, Homo sapiens
gtgcactttgcccaagtggtgaaggaatgccgggcagtggtcattgcggggggtaccatgcagccgaccctgaagatgtagagagggggaacgaccacgg

SEQ ID NO: 665497 - DNA, 50 bp, Homo sapiens
ccccatcttcccttcacacctgagccacctgagctgaagattcccttgag

SEQ ID NO: 665498 - DNA, 100 bp, Homo sapiens
ggtggcctgccgggcgattggcatcctcagccgcttttctgccttcaggatcctccgctcccgagttgttgacctcctgtactggagagacattaagaag

SEQ ID NO: 665499 - DNA, 100 bp, Homo sapiens
ctttgtaatcgtttggttgtagttgaacttaacaacaggactagcagagacttagccgaacagtgtgtaaagataggttcccatatcaaacaccgggtac

SEQ ID NO: 665500 - DNA, 100 bp, Homo sapiens
aaaaaacattggtgttgacaatccagcagctaaagttttagttggcctgttacatgaacagaatatggcaaaaatgagactacttacttttatgggaatg

SEQ ID NO: 665501 - DNA, 80 bp, Homo sapiens
caagaacgtcaactctgtcattgtgctggctgaagatgcaatcaaggccgccctggctgattacaaattgaaacaagaac

SEQ ID NO: 665502 - DNA, 100 bp, Homo sapiens
tgagaaagaaggaggagtgggggaggcgaacagtctcgttgctgcctctgtgtacgctgaggggggaggcaccttggaagttgttttcaaccatatccag

SEQ ID NO: 665503 - DNA, 100 bp, Homo sapiens
agcaatctcattaaattactgatgtcagaagattattttacacaagcaatggaagtgaaagcattgtgtgtcagcagcctgagtgtgggaaatgtaaagc

SEQ ID NO: 665504 - DNA, 75 bp, Homo sapiens
gggacctggcgccaccttgcagaatgctatagttatccatgaagtctatgaagaaggggcagcagccagagatgg

SEQ ID NO: 665505 - DNA, 83 bp, Homo sapiens
taatgcaactaccattacactaaggctgaccccgcactacatctacccaccagccatcgtgcagcccagcgtggtgatcccag

SEQ ID NO: 665506 - DNA, 82 bp, Homo sapiens
ggggcctcccgggaggagaacggggaggtgaagccgctgccccgagacaatgcagatcttcgtgaagactctgactggtaag

SEQ ID NO: 665507 - DNA, 75 bp, Homo sapiens
tcagaaattcataacactgtgaaggttgctgctgactcagccattctagaagttcttcagtccaacattcagcat

SEQ ID NO: 665508 - DNA, 50 bp, Homo sapiens
caggtggagtacacggcagactcgccatcatgaccgggtcctataacaac

SEQ ID NO: 665509 - DNA, 100 bp, Homo sapiens
gaattctaagaccatccgttccaatagcagtggcttatccattggaactgtgaaagccctgtgtaaggaatgtgtagtagaacgttgtcgcatattgcgt

SEQ ID NO: 665510 - DNA, 74 bp, Homo sapiens
ccgcacctggcacaagatcaccaagtacatcgactttgatcatgagctcccagctcctccagcagccgacagga

SEQ ID NO: 665511 - DNA, 74 bp, Homo sapiens
gcttcctcctccgatacttcccgcagtcggtccgtgcaaagttgcgggagatcgagcagcagatcaaggagcgg

SEQ ID NO: 665512 - DNA, 75 bp, Homo sapiens
cttaggcatccagggacgcaggattcacaagtttgccttcagggacgacatgccactggtgcggctggaggtggc

SEQ ID NO: 665513 - DNA, 83 bp, Homo sapiens
tttgacacggctttggaaacgacgtcatgtgttaggtgtgaagcttacactctctgctctggtagatgggaagagcattaatg

SEQ ID NO: 665514 - DNA, 83 bp, Homo sapiens
gccttcttcaggttcccgcgggaccctgccaggttgtgaactaaaggccgacaaagattatcactttaaggtggataatgatg

SEQ ID NO: 665515 - DNA, 75 bp, Homo sapiens
ttcgatgatcgtgtgtcggatgaggagaagatgggaaatttggaattaagccttcccagaggagaatttctggga

SEQ ID NO: 665516 - DNA, 100 bp, Homo sapiens
taagatgggttctgaaaatcttaatgaacaactggaagaatttttagctaatattggaacaagcgttcagaatgaaccgtcctcaaatgaaacccagtgg

SEQ ID NO: 665517 - DNA, 95 bp, Homo sapiens
tagctctgtatgagaaggacaacacctacttagttgcactggaagggtactacaaggacaagctctttgaccagcgggagctccgctttgagatt

SEQ ID NO: 665518 - DNA, 101 bp, Homo sapiens
acaatgttcagcacactcaggttctttgaaggattttgcctggctggaatcattctcaccttgtatgctttacgatgtgatcttcgtggtggaaagctaaa

SEQ ID NO: 665519 - DNA, 100 bp, Homo sapiens
ctacctgaacgtctatgtgccgacggaggatggcaaggcacacctgaagcgtgccatcctggggcaggaggaggcgctgcggctgcacgccctgtgccgc

SEQ ID NO: 665520 - DNA, 83 bp, Homo sapiens
cttgatctcagaatttcctgacaaatttggatcctgtgttcctcattactgacagccctgtcctaggagcacaacgtccgaga

SEQ ID NO: 665521 - DNA, 100 bp, Homo sapiens
gtagttgttgagcagagggaaagggataggagaaggatgtggactgcagtgctgcagtgccaggttgaaaggattgttgacaaaaggaaaaataaaaaag

SEQ ID NO: 665522 - DNA, 74 bp, Homo sapiens
ttgcggttcagccctttgatgaccgcagcagtgacctgaaaaaaatgtctggatttctagagggcttgagatgc

SEQ ID NO: 665523 - DNA, 74 bp, Homo sapiens
cgaagcagaggaaataggagctagtgtccgggatctacctggtctgaagaacctggaggagaagcggctcactt

SEQ ID NO: 665524 - DNA, 74 bp, Homo sapiens
tacctgcagaaggtctctggagacatcttcagcagcttccccgggcgctgcctggacaggcctgcctgcgtgct

SEQ ID NO: 665525 - DNA, 74 bp, Homo sapiens
gggcagagcaggaggccccccgaggctcggcatggctgcccggggccacagctggccctgcctgcagcagacgc

SEQ ID NO: 665526 - DNA, 98 bp, Homo sapiens
ccgggcgccggcagggctgcggcgcagggcgaggcggaggcgcccaccctctatctgtggaagactggatgcctccattgcacacagattccacatca

SEQ ID NO: 665527 - DNA, 100 bp, Homo sapiens
gagctcacccagcagctggcgcaggccaccggcaagcccccccagtcagtccggaggctgcggctgcagaagtaccgcctgcggagtaactgcaaagatg

SEQ ID NO: 665528 - DNA, 100 bp, Homo sapiens
gcgctccttgctcgcaaggcgggggaggcggcggcccagccacgatggtttccacttgagcggcacagtgacagaacctgcaatacaatcggagccagaa

SEQ ID NO: 665529 - DNA, 75 bp, Homo sapiens
tggaaatggagaggtgacatttgcgagtaaccagctcataaatcacatcgaacagtttttggatactaatgaaac

SEQ ID NO: 665530 - DNA, 126 bp, Homo sapiens
agtacctgaaccggcacctgcacacctggatccaggataacggaggctggagaaagatgctggtttcgagttttggagatccttgttttttatggaacacagttctgtaaaattttcataagattc

SEQ ID NO: 665531 - DNA, 50 bp, Homo sapiens
ccgcgcgcggggaccccacgggattttcgacaatgaagccaaagacgtgg

SEQ ID NO: 665532 - DNA, 100 bp, Homo sapiens
caggccttcgtcagcctgcccagagaaggggagcagaacttcagtgcagaggagttctctgacatctctgaccgtggctgagcatggagctgtccccccg

SEQ ID NO: 665533 - DNA, 100 bp, Homo sapiens
accagaaaaaatgagggagctggaacggaagtcggtaatcgtgtgttgcatcgatgcgtttgtggtcaccacgaagatgaggaccaacttgaaaagattc

SEQ ID NO: 665534 - DNA, 75 bp, Homo sapiens
ctaccccccaagcagcggcagctgcttctcagatgaccaagatggtgctgcagatggtgctgaggatggagaacc

SEQ ID NO: 665535 - DNA, 75 bp, Homo sapiens
cccctgttgtgttgctgcggagaggcagagattgtcaagaggctgaatgctatctgtgcacaagtcattcctttc

SEQ ID NO: 665536 - DNA, 82 bp, Homo sapiens
ctgcagaaggtctctggagacatcttcagcagaggtggtttgtgctccccctactgcctatatcgacttcgcccggcagaag

SEQ ID NO: 665537 - DNA, 50 bp, Homo sapiens
ggctgctggaggagctggccaggaacggagaaatgctgcgcaagaaacga

SEQ ID NO: 665538 - DNA, 106 bp, Homo sapiens
tgctcaagcatttcaacgtgcgtgtcacccacgcagacatcttcagccgctgccaggtgagaagccctaccactgcaactgggacggctgcggctggaagtttgcg

SEQ ID NO: 665539 - DNA, 51 bp, Homo sapiens
caagaagctggtgtgcggagatgaagaatgctcttttcagttgcattagca

SEQ ID NO: 665540 - DNA, 50 bp, Homo sapiens
aaaagttcctccaggtttgccatcttcaatcatggagctttgtggtgcaa

SEQ ID NO: 665541 - DNA, 51 bp, Homo sapiens
cgtgatttggagtattaagtctttcccggtggattctgaagagccagtctt

SEQ ID NO: 665542 - DNA, 74 bp, Homo sapiens
tttcggcctggaggagttgtacggcctggcactgcgcttcttcaaaggtgagcgagtgctgtgctttcatgggc

SEQ ID NO: 665543 - DNA, 82 bp, Homo sapiens
ctaggtcgatggtcggcggcgcccggatgggcagctgaggttttgcgtgtgaagctgtgtggaaatgtgaaatactaccagt

SEQ ID NO: 665544 - DNA, 82 bp, Homo sapiens
cagcgagcccttcaccctggtggagcgagacgttcatagccctgatgaagcaagttactctgctctcctaataaatgcaaga

SEQ ID NO: 665545 - DNA, 90 bp, Homo sapiens
cgtggcgctcgagttcctggaccgtgagagcatcaagctcgtgtccatcggtgatcagcttgaaattcagctaaccgagcagctacggtc

SEQ ID NO: 665546 - DNA, 74 bp, Homo sapiens
ttgttcctggacatccacccgaatcagatggagcctgagagatgcaggatccagacagagtttaatcagctgcg

SEQ ID NO: 665547 - DNA, 75 bp, Homo sapiens
ctgaggtggtgcgcggctccgtgctcctgtgaagaatgcaaattgcacatcagattttgaggaatactttgccaa

SEQ ID NO: 665548 - DNA, 90 bp, Homo sapiens
cgtttgttggtggaggaggtggcaggcctcggcgtatgtctatgggctttctggttgaagaaagtgaaccagtagtttggagaggcctta

SEQ ID NO: 665549 - DNA, 100 bp, Homo sapiens
cagctggtcagcgatggcctgctagactctgtccccggcgtgaagaggaggcggctgatccccgagaaataggaaggttgttgattactcacagtttcag

SEQ ID NO: 665550 - DNA, 100 bp, Homo sapiens
gaggaggccccggctcagagccatgccagggtggcgctccaaccccctttgaccggaactatgggaccaagctgggggtgaaggccatgctgtggttgtc

SEQ ID NO: 665551 - DNA, 75 bp, Homo sapiens
caggaatatcgagagcgtcatgaacccgagctatagagaaaggagatgaggtcatcatcagatttgaaatattta

SEQ ID NO: 665552 - DNA, 50 bp, Homo sapiens
ccacgctcacctgcaactgtggagggatttgaaactggacaacatccttc

SEQ ID NO: 665553 - DNA, 82 bp, Homo sapiens
ccgcctccccggcgccgccgtggctcgacggagaccagctaggatcaatgtccgagttaccaccatggatgcagagctggag

SEQ ID NO: 665554 - DNA, 100 bp, Homo sapiens
agctttagagcctggctactcacagttgaagcctgattgcagtgaccaaaatctttctaggctacagtgctgtcatcccgcatctatacaagaaacctgg

SEQ ID NO: 665555 - DNA, 96 bp, Homo sapiens
gaagttggaagtgtctcttagcagcgcgcggagaagaacggggagccagggccgagaactactggtggcgtggccagaacacacggacgctgtgtg

SEQ ID NO: 665556 - DNA, 100 bp, Homo sapiens
agactttctgcctgatcatcccattgtactgcaaaaaccagccttgaaccggggcattgctgctgtcaaggaggatgcagtcgagatgctggccagctac

SEQ ID NO: 665557 - DNA, 75 bp, Homo sapiens
ggcagatgttacagctgctcatgaaccacttggcaaacgaagaaagctaccgtgaatttactgggtgaagaaaag

SEQ ID NO: 665558 - DNA, 50 bp, Homo sapiens
cgaccgttctcccaaggaatttccacgatgaacgggaccgggttcagaag

SEQ ID NO: 665559 - DNA, 120 bp, Homo sapiens
ccatcttgagtctactctgtcgctcttgtgccctagcaccccgagaaccgtcagtttgagccagatgccactgaggcggctcccagctgcgttggcgacatggccgacacccccagagat

SEQ ID NO: 665560 - DNA, 51 bp, Homo sapiens
gccggggagggcccagcgcatccgacaggggaacgcccttttgcttgtgac

SEQ ID NO: 665561 - DNA, 96 bp, Homo sapiens
tgaaggatgtgattggcgccgggttgcagcagttactgttcataattggacccttgaagacactcttcagtggttgatagagtttgttgaactacc

SEQ ID NO: 665562 - DNA, 129 bp, Homo sapiens
cgcgcgcagggcctgcagcgggagctggacggcgagcgcgagcggcgcgagaaagtgtcccgacccaggctaagcttgagcatggctgagcaggagcccacagccgagcagctggcccagattgcagcg

SEQ ID NO: 665563 - DNA, 96 bp, Homo sapiens
ggggccctgtgcacccatccaggctgcccagaccaggagagcacaggtcagccggacacatgatgatatttctccctcgagtggctgggaaacttg

SEQ ID NO: 665564 - DNA, 90 bp, Homo sapiens
ccaggttaggccgagctttgcgggaaagcagcggtccagggtggcgcgtggctgctgagcccccgcctgtgcgacgccctcatggccatg

SEQ ID NO: 665565 - DNA, 83 bp, Homo sapiens
cttcgagacaaggctgtcagcccctagggggatatgagactttctactcggaatatcctgagtgttgcgtggatgtaaaaccc

SEQ ID NO: 665566 - DNA, 98 bp, Homo sapiens
tggctgaaggtctgacatgtttgatcaaggtgggagctgaggctgatcagaactatcagaactacatcttaaggggcatttcttttgaagaagctcct

SEQ ID NO: 665567 - DNA, 101 bp, Homo sapiens
cacagacctgcgctgcttcctacacagcctcctgtcgtggatccaaggagctggttctgctggttggaccaaacctcgtgagccagccacccctgacccaa

SEQ ID NO: 665568 - DNA, 100 bp, Homo sapiens
gaaccggcacctgcacacctggatccaggataacggaggctggtagctgctgctggtggtgacaatgtcaaataacggcctagacattcaagacaaaccc

SEQ ID NO: 665569 - DNA, 83 bp, Homo sapiens
ctcgagaatacagagagaaaattgagacggagctaagagatatctgcaatgatgtactgggtggctttgtccactatggtgaa

SEQ ID NO: 665570 - DNA, 75 bp, Homo sapiens
ggcgaccggcaggcgaggaggcccgcgggcagcagggtctcccttgatctgagaatggctacctctcgatatgag

SEQ ID NO: 665571 - DNA, 74 bp, Homo sapiens
gcagcccaaacagattaagacatgggaggtgatccatgctctagggcaatcatggcatcctgagcattttgtct

SEQ ID NO: 665572 - DNA, 78 bp, Homo sapiens
ctccagggccggcttcaggaggcccaagacaccacagaagccctccgagcccaggatttggggtggaaggcaggcatg

SEQ ID NO: 665573 - DNA, 91 bp, Homo sapiens
ttgttcaggaaccaccagtgacagaaatgtcaaaactggaccaatggggccaggctgaagtattgaactttctgctacgctaccaaccccg

SEQ ID NO: 665574 - DNA, 75 bp, Homo sapiens
caaaatgtcaacaaattgatgggcttgctatcagaggaagtggagaatgtgccttcctgaatgacaatggagtca

SEQ ID NO: 665575 - DNA, 75 bp, Homo sapiens
ccaaggaagatgctgaggccccaggcatcagagatcatgagaggtatgaaaatgaaagtcttcagaatggaagga

SEQ ID NO: 665576 - DNA, 87 bp, Homo sapiens
aacgcactcattcagtttgctactaggataaaagaatcagagtgtctcaacccttgacaagaggaccaagtgcctttattccagaga

SEQ ID NO: 665577 - DNA, 73 bp, Homo sapiens
ctagagaaacagccggcagccggcccgcagcgcgttctcccgggagaggtgaagcgacttccagtcatttgga

SEQ ID NO: 665578 - DNA, 100 bp, Homo sapiens
gccattcatgggccggttttatgagtgggaaccatttgcagaagattacgtgtgaaaatgaacttgtgcaaacccaaccccatgctgataatccatctaa

SEQ ID NO: 665579 - DNA, 100 bp, Homo sapiens
gcaggctcggcgccggtaggaagagtcagaggggtgaccagagagcccaacgcctggtgctcaagactttctccgaggtgctggagaatctggtaaaagc

SEQ ID NO: 665580 - DNA, 74 bp, Homo sapiens
gggacatccgccatgctccaaacaacttggcctcaggtgtgatccctcacatccacaaatctctgattggaaag

SEQ ID NO: 665581 - DNA, 98 bp, Homo sapiens
taatttcaaacgaaaatgtcaagatccttgccggtgtcctgggattacaaggtgttgccacatctgcaaacttcctgggagagtaatggggattcgag

SEQ ID NO: 665582 - DNA, 51 bp, Homo sapiens
agacttggaatggatcttactaagtcaagctcaaagttaaagctagttcgg

SEQ ID NO: 665583 - DNA, 100 bp, Homo sapiens
cacaaagaagacacattcgatgtgttccgacagaggatgatgcagatgtacagacacaagcgggccaacaaatagagaagcacctgaggcaggagccagg

SEQ ID NO: 665584 - DNA, 93 bp, Homo sapiens
ccagttcgagatcaccttcgagtgcatcgaggacctgtctgaaggttttaaaatcaaagatgggaaaatcggagaaaattgcccttccccatg

SEQ ID NO: 665585 - DNA, 75 bp, Homo sapiens
tggatcccctgtaataatcgtaacaggttcatcctaagttccactataaacaggctcatgactcgggcacagaca

SEQ ID NO: 665586 - DNA, 50 bp, Homo sapiens
tttatcccttcatctgtggatagacagatccttgccagaatggaggttcc

SEQ ID NO: 665587 - DNA, 83 bp, Homo sapiens
tgttcgacaagaatctgcaggacttggtccgcggcatccgtaaccacaaggaggacgagatgccggtggccgtgggtccctac

SEQ ID NO: 665588 - DNA, 50 bp, Homo sapiens
cctgtacagcctgcaaaactgctatgaccagggccagagcactcagatct

SEQ ID NO: 665589 - DNA, 100 bp, Homo sapiens
tcaccagctcttcagatcaatatggcacagttggtggatctgaaatctgaactgacagaaacccaagcagagaaagttgttttggagaaagaagtacatg

SEQ ID NO: 665590 - DNA, 83 bp, Homo sapiens
ctctcccttcggggagagaacaaccgttgtttaatggaagatttcgatcagttagggttgattcctgtgttagtgaatggcat

SEQ ID NO: 665591 - DNA, 98 bp, Homo sapiens
gtggggcccacagactgacgctgctctgcttcctggattcagccctcttcctaaggtttgcagaaaaaacttcagcatgtgccaggaacacaacctca

SEQ ID NO: 665592 - DNA, 82 bp, Homo sapiens
acagttcctaccttatgagctcggttttcttatgcttataagagtggaacagctatctcacgtgagagggcagtggaactcc

SEQ ID NO: 665593 - DNA, 75 bp, Homo sapiens
cttcaagcttaggaccacccaccatgcctatccagtgtgtagcccacaatgccctggagtgtgcacgagccatct

SEQ ID NO: 665594 - DNA, 75 bp, Homo sapiens
cagcctgcggagcctgtggggcagggtctttttggagttcctgagctgagtgccccagaaggatttcatattgca

SEQ ID NO: 665595 - DNA, 95 bp, Homo sapiens
gtgacctgtggagacacggccagatctgccctccagtcagcccaaggctgccccctcggtcactctgttcccgccctcctctgaggagcttcaag

SEQ ID NO: 665596 - DNA, 83 bp, Homo sapiens
atggcggacttctacaaggaatttttaagtaaaaattttcagaagcacatgtattataacagacctggaatggccaaatatca

SEQ ID NO: 665597 - DNA, 101 bp, Homo sapiens
tgaaaagggaggaacggcgacatcctgacctagagcccatcctaaggcaattaagttggaatatgcaaggttggttaagttggcccaagaagacaccccac

SEQ ID NO: 665598 - DNA, 107 bp, Homo sapiens
cgctggaagaggtgtatggctctgtagccaaggtggctgactactggctggacgtgctgtacagcaagggcagcaggatgggtgtggaagcagtgatggcacttttg

SEQ ID NO: 665599 - DNA, 100 bp, Homo sapiens
cttttctggtgggcgaacgagtgacattggctgacatcacagttgtctgcaccctgttgtggctctataagcagaacttcgatatgacctgccagcatca

SEQ ID NO: 665600 - DNA, 75 bp, Homo sapiens
gccatcaacccgagtgcagtttcgatggaaaatgaaggtgctggagaatctggtaaaagcaccattgtgaagcag

SEQ ID NO: 665601 - DNA, 98 bp, Homo sapiens
cagctgaccctacatgatgagaggtttgagaagggtcctgtagcatccacagtatcagcgttttctgtcctctcctctgggcctggccttcctccacc

SEQ ID NO: 665602 - DNA, 88 bp, Homo sapiens
ggctgtggcgcggcggccgcgaggcctggcagctgcgattcagccacctcgtggggtatggtgctagatattactcttacctcatgtc

SEQ ID NO: 665603 - DNA, 100 bp, Homo sapiens
atagaagctgtggatgaatttgcttttctggaaggttttcaaatggaacattttgatgcatcacttagtacctatttcaaggcattgctaggccctcgag

SEQ ID NO: 665604 - DNA, 100 bp, Homo sapiens
gacagattcgcagtggtcgcttcttctccttggcagaagattttcgcaagctctggaaaactccacctcgagagaaagcaggcttccttcaccacgtcaa

SEQ ID NO: 665605 - DNA, 95 bp, Homo sapiens
aagccaagtgccatcttcaaaatttcaggtcttaaatctggtgtgttttatggcccagaacatggtctgtcttggtgaatgttccatgtgagctt

SEQ ID NO: 665606 - DNA, 83 bp, Homo sapiens
cctaaagatgcatcttcctccacattccctacactgaccagtgcccaccagaagtatgtccgacaagcctggcagaaggcaga

SEQ ID NO: 665607 - DNA, 50 bp, Homo sapiens
gtgcgccgctctccagcccgcttgaacgtatgacgaggaagcgatggtgg

SEQ ID NO: 665608 - DNA, 99 bp, Homo sapiens
cttcatcatcatcctctgctgcattcctgccatcttggtggttttggtcagctacagacaaaatgcactcggtgatggaaagagagccactattctgaa

SEQ ID NO: 665609 - DNA, 100 bp, Homo sapiens
gaccccttgtccagttactctaacaagtctggagatcattatgtagaagttctggaatgcaaaatacagtgtgaagagaacctcaccccagttataggag

SEQ ID NO: 665610 - DNA, 75 bp, Homo sapiens
ctgcgaggaaaatggcggcgggaggtttaatagactacaacttccactgtttccgaaaagctattcatgaggttt

SEQ ID NO: 665611 - DNA, 88 bp, Homo sapiens
ccgagaccgtgaccgagagcgtgaccgagagcgcgaatatcgtcatcgttagaagctcagggagccaatggtactctggagaacccag

SEQ ID NO: 665612 - DNA, 98 bp, Homo sapiens
aagagatcaatcttaccagagggccctcagacattcacggcatggtgtaactcccacctccggaaggcggggacacagatcgagaacatcgaagagga

SEQ ID NO: 665613 - DNA, 98 bp, Homo sapiens
tgctccgccagatcatcggtcaggccaagaagcatccgagcgtgtgcaactgaggaacatggctcaagaaactaatcacagccaagtgcctatgcttt

SEQ ID NO: 665614 - DNA, 98 bp, Homo sapiens
accagacttgttcagctggacagtgctatcagcatggaattgtggcaggttgctgatcagctctgtgccaagtatagcaaggaatatggcaagctatg

SEQ ID NO: 665615 - DNA, 100 bp, Homo sapiens
ctcggcggcgggcggcagcatgtcggtggcggggctgaagaagcagttctacaaggcgagccaggatgagcacaagcctgggagatggcagtgatggaaa

SEQ ID NO: 665616 - DNA, 100 bp, Homo sapiens
gtctgccttcgcttcacggcgccgagccgcggtccgaaaattgaagccaaggaagcttgtgattggctacgggcaactggtttcccccagtatgcacagc

SEQ ID NO: 665617 - DNA, 100 bp, Homo sapiens
tccgaaccactgcctctgggctcaacagaacacagggaatttatccagttggcgaaggactttgaggatttccgtaaaaagtggcagaggactgaccatg

SEQ ID NO: 665618 - DNA, 108 bp, Homo sapiens
atttgcttttctggggagtcctggcggtttttattaaggctgttcatgtgaaaggatattcagtcggagctggtcattttcggagccagcatactaccgaagtagtcg

SEQ ID NO: 665619 - DNA, 50 bp, Homo sapiens
ctccaacatgctggatgtcaacggcctctaaagctgtatacctgcacaag

SEQ ID NO: 665620 - DNA, 75 bp, Homo sapiens
cctcgaaatctcctgacagtgttaatggaagtgaaccaagcattcctcaggttcgttccaccagtcataaaccag

SEQ ID NO: 665621 - DNA, 100 bp, Homo sapiens
aatcgacagcctgaagccctctggaagcccaagactgctggaggttgaaatcacaaagattagacacctttttagataggtgttcttcagcaccactgac

SEQ ID NO: 665622 - DNA, 99 bp, Homo sapiens
agctgggggagtgtctctgtcaaaaatgtgaaagatgttgcagaagtgttccagaagtggctgaagatagaaggaaaaaagtgccactgcctatcagaa

SEQ ID NO: 665623 - DNA, 90 bp, Homo sapiens
agatgaaatactacttctaccatggcctttcctggccccaggagcaagatcttgtgcaaaccctgagttgtttgtctatgataatcacac

SEQ ID NO: 665624 - DNA, 80 bp, Homo sapiens
tttagaaggaggttcaggctacggtgagccgaagccgcttacaaacacgcagatggcaagaagattgatggcaggagggt

SEQ ID NO: 665625 - DNA, 82 bp, Homo sapiens
cccagaccctggagcctcagttggaagcagccgatccagcctgcggagcctgtggggcaggcaagttgctttggcagatgcc

SEQ ID NO: 665626 - DNA, 75 bp, Homo sapiens
acatgcaatgaacccaaaaggacaaatggtggcccggagtttgctcgataccttgagggaagtctgcgatgatga

SEQ ID NO: 665627 - DNA, 90 bp, Homo sapiens
cccacatggaaacggacctgctcagcagcctgttgacatcatggacatatgtgagtccatcctggagaggaagcggcatgacagcgaaag

SEQ ID NO: 665628 - DNA, 83 bp, Homo sapiens
cacgtgtttgcggttcagccctttgatgaccgcagcaggtcacggtctagatcacattctcgatccagaggaaggcgatactc

SEQ ID NO: 665629 - DNA, 50 bp, Homo sapiens
cgtcaatcagagcgtcctgtgcggtacatgtcccagagcaagcacacgga

SEQ ID NO: 665630 - DNA, 82 bp, Homo sapiens
cgggcgtccaggttcaccagctgctcgccgggagcggcggcgcccggacgccgaaattcaaagaagctttttcactatttga

SEQ ID NO: 665631 - DNA, 74 bp, Homo sapiens
gcaggtggacttcttgcaacaggttaacgtgtatggcgtgtgcgtgccagcatccctctctacctgccaacatc

SEQ ID NO: 665632 - DNA, 96 bp, Homo sapiens
ggctcccgccgccacccccgccctcgccttcgcctccgcctccgctccttcgagaactcatagaacggaagaccagctccttggatcccaacgatc

SEQ ID NO: 665633 - DNA, 78 bp, Homo sapiens
ccgacctcagatgctcccttctgctcctgcctctgaagagccaatccattcaggatgggaaaccacgcaggcaaacga

SEQ ID NO: 665634 - DNA, 99 bp, Homo sapiens
gaccgctgcagccgctggctgacttagaccatgctcagcctccaagcagccttgtcatcgacaaagaatctgaagtttacaagatgcttcaggagaaac

SEQ ID NO: 665635 - DNA, 100 bp, Homo sapiens
gcctcatcccaggttgccttggaaaatgccaacgccgtgtctgaagattagcctgaggcctgctcagtcgttcctaatgaataaaaatcaagtgccaaag

SEQ ID NO: 665636 - DNA, 78 bp, Homo sapiens
aaaagttgatgatcttccccctggtcgaatgagtgatttgagtgtaattggtcatccaatagattcagaatctaaaga

SEQ ID NO: 665637 - DNA, 75 bp, Homo sapiens
ttccggcgcatcctccacaccgacaccatctggaggaggcgttgccgtgaggactgcaaaattcaaaatggggct

SEQ ID NO: 665638 - DNA, 100 bp, Homo sapiens
acgtgctcaaccaggtggaccacttcagccccacagagcaggtgttgccaatgctgcggttcgtgcagaagcggggaaactcaacggtgtacgagtggag

SEQ ID NO: 665639 - DNA, 50 bp, Homo sapiens
aacgacaggcgcctccggcccatttacgatgcttttactgactctgctat

SEQ ID NO: 665640 - DNA, 98 bp, Homo sapiens
cttcctgcaggggaacgtcgattcttgccagggtgacagtggtgggcccctgatgtaccaatctgaccagtggcatgtggtgggcatcgttagttggg

SEQ ID NO: 665641 - DNA, 113 bp, Homo sapiens
ctggcaggagaaaagcagacggaagtggctccagcttcctatgatgacagttaccttgggctccagtggtccagaatcttttactgtctaccactacaatggattgaagcagt

SEQ ID NO: 665642 - DNA, 50 bp, Homo sapiens
gacaagaccatcgagctcatgtggccacagatgtctttaattccaaaaac

SEQ ID NO: 665643 - DNA, 75 bp, Homo sapiens
gtcgcccatgatctgatccggaagatgtcacctggccacaggagaatggtatgctgctcggcatggagtgaagac

SEQ ID NO: 665644 - DNA, 75 bp, Homo sapiens
agacaactgctgcatcttagatgaaagattcgcattagatgaatttgcaaccaagctaattcagaacaaccacta

SEQ ID NO: 665645 - DNA, 97 bp, Homo sapiens
attccttacatgtttgaggcccgggaatttcttcgaaaaaagcttattgggaagaaggttggaagctttcttagaatctatagccttcataccaaac

SEQ ID NO: 665646 - DNA, 100 bp, Homo sapiens
gcgggctgagcggcgagtttccgatttaaagctgagctgcgaggaaaatggcggcgggaggtgaaatgacaatggatgctctgttggctcgattgaaact

SEQ ID NO: 665647 - DNA, 90 bp, Homo sapiens
cggagtctctccaccgcagacatgacgaaggaccctgtacccctgttcaagatctatgtggcggagctgatccagcagctgcagcagcag

SEQ ID NO: 665648 - DNA, 100 bp, Homo sapiens
ggagcccccagcgcagcggccgcggcaggcagtggttaaaggttcccttccacatccttttgccttgacgttatttgaggacatattgtactggactgac

SEQ ID NO: 665649 - DNA, 96 bp, Homo sapiens
cactgaccttcgagatggacggatgctcatcaagctgctggaggtcctctctggagagaggctgccctcttggaacagagatcatgatgacacggc

SEQ ID NO: 665650 - DNA, 52 bp, Homo sapiens
cagcagaggccttatggatatgaccaggtactgtgactgctttgccagtggg

SEQ ID NO: 665651 - DNA, 73 bp, Homo sapiens
ctggaccggcaaattaaagcaattatgaaagaagtcattccttttttgaagctgtcccctttcctccaaccca

SEQ ID NO: 665652 - DNA, 83 bp, Homo sapiens
ctgcctccggggacaagaaactagagcaaataaccgttttgaaattgttgtatctcccacttcacccttctagaccatcccag

SEQ ID NO: 665653 - DNA, 83 bp, Homo sapiens
ctatcaaggggctggtgtactccagcaacttccaggctcttgtcaggatggtgaagctgttcatcggaaacctgccccgggag

SEQ ID NO: 665654 - DNA, 75 bp, Homo sapiens
caggtgccttacaactacaaccagctggaaggcagattcaagcagctgcaaggattctgctatgtagaattcgat

SEQ ID NO: 665655 - DNA, 75 bp, Homo sapiens
agcaacttgatgaaggtacacccaatagagaggttttctcaaacaatgatgaaggccttattaacaaaaagttac

SEQ ID NO: 665656 - DNA, 82 bp, Homo sapiens
gttatacttgaaaccataatgctacaaactctagatgatggatttggacatgcttctatgaagaaatgccacatggtccgag

SEQ ID NO: 665657 - DNA, 82 bp, Homo sapiens
ccggcacctgcacacctggatccaggataacggaggctggcctttggaatgagtacacatccaggagtgaagaagacaagct

SEQ ID NO: 665658 - DNA, 75 bp, Homo sapiens
tggcgcttgagttggtcgggggcagcggcaggtggttgtgtcaaaccgattggtgacatctccatgctgtattgt

SEQ ID NO: 665659 - DNA, 90 bp, Homo sapiens
agggatcaaaactcattcgaaaagctaaagaggcaccattcgtacccgttgtgaatggtagtgtctagaaagggtatgtcccttcaagag

SEQ ID NO: 665660 - DNA, 116 bp, Homo sapiens
aaaaaaccaacaccttcctgtgcagtcctgttggaatttgccccttcacagatgtagtcactacaaatcttaaattgcgaaatccatcggatagaaaagtgtgtttcaaagtgaag

SEQ ID NO: 665661 - DNA, 74 bp, Homo sapiens
gagatggagcaatgggtggatgctcaagttcaggagctcttccaggttgtggcagcactgcctgaaggtatgag

SEQ ID NO: 665662 - DNA, 80 bp, Homo sapiens
gaagcgcaggcacaggaagctggtgacggcgatgaacgcagcaagcgggaagaaacaggcagccaagtcgaaagaggagc

SEQ ID NO: 665663 - DNA, 75 bp, Homo sapiens
tgttgtctgtttccctttggcctgcactgtactggaatgcctattaaggcatccttctttaaaagagaaatccac

SEQ ID NO: 665664 - DNA, 75 bp, Homo sapiens
ttttatatcacaacaattgaagttccagattcttccattttgaaaaaggcagactgccagattcacttacagccc

SEQ ID NO: 665665 - DNA, 100 bp, Homo sapiens
gtggtgccccacagccacatggacgtgggctgggtctacactgtgcaggtattaccagagaaacggagtctgaaactcttgaagagccacaatctcaatg

SEQ ID NO: 665666 - DNA, 75 bp, Homo sapiens
gaaactttaaatcttgagaaaagaagattgtctatcatgaaggagacatgcgtcgggatgtccaggaaatttttc

SEQ ID NO: 665667 - DNA, 83 bp, Homo sapiens
tccactctcctttccaaacctttgcagctgccctttgttaaaggtatcatgatattagctggtttgacatcaagtcatttgtg

SEQ ID NO: 665668 - DNA, 100 bp, Homo sapiens
taaacttatattagttaatttccactggcaagtttcagagatattggacaggaacaagcacatcatgattgacttggggactggcaacaacaacaagatt

SEQ ID NO: 665669 - DNA, 100 bp, Homo sapiens
atggcggctgccgcacaatcccgggttgtccgggtcctgtcaatgtcacaaagggaggttgaactgcgatcccacatttgagcttgaagagatgattcta

SEQ ID NO: 665670 - DNA, 88 bp, Homo sapiens
cgggagccggcgtgggcggcggcaacggggcactgacctgggtgaataacatagctgatccagaagaactgttcacaaaattagagcg

SEQ ID NO: 665671 - DNA, 82 bp, Homo sapiens
cgcaaacccaaagatccccgttcctggagattctgattgaggactgatcctttgaaatactccagccatgactaaaagagaa

SEQ ID NO: 665672 - DNA, 50 bp, Homo sapiens
cccaccgcacgttcagaagtcggttggtgtggatgactacagctcagagt

SEQ ID NO: 665673 - DNA, 82 bp, Homo sapiens
cctggcagccccgctctctgcaggttaccgcagaagtgaagcacaacccaaccaacaccattgtttgtaaagcccatgggga

SEQ ID NO: 665674 - DNA, 98 bp, Homo sapiens
agcacatcaggtccacccatctggccgggcagtaccttcttcaagagaaatggagcccttctccaagacgttccatcctcagagcagcctgaactgtt

SEQ ID NO: 665675 - DNA, 82 bp, Homo sapiens
ctaacgcctcccggctctcgtcagcctcccgccggccgtctccttaacaccgaacaccgtgcaggctgccccatggatgcca

SEQ ID NO: 665676 - DNA, 75 bp, Homo sapiens
tatagcctgcacaaggagaggaccggcagcaatcgatttgccaaggactcggtggcttttgaggatgtagatgtg

SEQ ID NO: 665677 - DNA, 96 bp, Homo sapiens
ccttcgcgtctgcccggccaagaggcaaaggggaggttacgcagcaaaccatccagaaggtccagccctgctgggagttttctgccacacagattt

SEQ ID NO: 665678 - DNA, 101 bp, Homo sapiens
gaggaacctcagaacatgggtccgtggtcgtttgtttctccaaggtttgaaaagcagctggcctgcaaggctagagtaccgtggcacaatctcagctcatt

SEQ ID NO: 665679 - DNA, 100 bp, Homo sapiens
atgtggcagtggaaaatgcgctcgggctggaccagcagattttatcatgtgggcaacctgctgcaactggttctgcctggatggacagcctgaggaggtc

SEQ ID NO: 665680 - DNA, 97 bp, Homo sapiens
gagcaggtcgagcaggaggccagtgagtgagatcattggccgagacctgagtggcttccctgcacctcctggagaagagcctcctgcctgaaccacg

SEQ ID NO: 665681 - DNA, 83 bp, Homo sapiens
ctcgacctgctaacagaactggaccttttcggtctcggcgcggaagatggccggcggcgtggacggccccatcgggatcccgt

SEQ ID NO: 665682 - DNA, 83 bp, Homo sapiens
ttcatcctgagttgccaatcattatcacaggttcagaagatggaaatctgagaatgaagatgacagcgagtgggaagatgtgg

SEQ ID NO: 665683 - DNA, 143 bp, Homo sapiens
cagagatccgtgaggaggaggtacagacggtggaggatggggtgtttgacatccacttgtaatagatggcatccctccctgctcttctgtcggagcccgcggcgggggaggggcgccgccgccgccgcctgagggaagccggc

SEQ ID NO: 665684 - DNA, 100 bp, Homo sapiens
gagcttgaagaaacagaggtcaaaggaaaaagaaaaaggggtcgtcctggccggcctccaatgtagtggaaccaaaggagaggggcaagctcctagccac

SEQ ID NO: 665685 - DNA, 98 bp, Homo sapiens
ggtggaggccctgactaccctggaagtagcaggccgcatgcttggagctctggcaggctgccctgagcacgctcaaccccaaccccacggacagctgt

SEQ ID NO: 665686 - DNA, 51 bp, Homo sapiens
aggccaaaggcagttgtattggatgcttggatattaattcatctgtgaaag

SEQ ID NO: 665687 - DNA, 100 bp, Homo sapiens
caacaggatcgtctcgtccaagcttgacgtgctttttggaaatttaacggaaatggtagagtttcaagtagaattccttaaaactctagaagatggagtg

SEQ ID NO: 665688 - DNA, 76 bp, Homo sapiens
ctgcaggtggtcagacatgtcatcaactcagctgtgtctgctgttgcaaaaagaagaaaacattctctgcctgagt

SEQ ID NO: 665689 - DNA, 100 bp, Homo sapiens
ccggacatctactgggtcagcttcatcctcggcggcggtggccgctagctccaaggaaggagccagatgaccaagatgctccagatgaacatgagtcgcc

SEQ ID NO: 665690 - DNA, 75 bp, Homo sapiens
cagaaagccgcctcttggtttgcgtcctgcactgaaaggaaatgacggattttgagataatctgaatgctggctg

SEQ ID NO: 665691 - DNA, 75 bp, Homo sapiens
tcaaaggtgttcctggatttgaaatgcactcggtgatggaaagagagccactattctgaagaacacttggccaaa

SEQ ID NO: 665692 - DNA, 80 bp, Homo sapiens
gcttctgcctggtgctctgcgtcctcatcgggcttatgttcgaggtggttgtgggaagagaagtttgcagaactgaaatg

SEQ ID NO: 665693 - DNA, 90 bp, Homo sapiens
ccagccctgcgtgaggccgcggagcgccagctcaatgaatagctgctgctggtggtgacaatgtcaaataacggcctagacattcaagac

SEQ ID NO: 665694 - DNA, 83 bp, Homo sapiens
tgtcccggctccctggctgtctgtcaaactgctgagactgctgcagtgctacccacccccagcgtcgagggcgaggcccccag

SEQ ID NO: 665695 - DNA, 100 bp, Homo sapiens
gaagatgatgtagacactggactattagccagagactgctgctactttgaaacgtacgatagaggccctgatggacagaggagcaatagtgagggacttg

SEQ ID NO: 665696 - DNA, 75 bp, Homo sapiens
catattttggggaaaaggaaattgaaatgtaccaaggagcgggtgaccatcgggatgaggaggaagagacccaca

SEQ ID NO: 665697 - DNA, 101 bp, Homo sapiens
aaatgaactataaaggtcgatacgagatcacagcggaagattctcaagagaaagtggctgatgaaatttcattcagtctgaccagtgcacaggacttcagg

SEQ ID NO: 665698 - DNA, 83 bp, Homo sapiens
gccggcgcctcctcggagtccttggggacggagcagcgcgtcgtggggcgagcggcagacctcctgccccccgaggtctgcag

SEQ ID NO: 665699 - DNA, 99 bp, Homo sapiens
agcacagtcaacaaatggcacgcatgcgtcctatggacccttctacctggaatactctcttcttgcagaattgttgagagcaccattggatgcttactt

SEQ ID NO: 665700 - DNA, 88 bp, Homo sapiens
cggccccgccagcagcactgtggaggccgtcctcgctgggagtgtccactcgccttccaccagcatggcaacgtcttcacagtaccgc

SEQ ID NO: 665701 - DNA, 82 bp, Homo sapiens
ttggactgagtcctgcaggacacagtatgaagtgtaacagaacagactttaccacctgaaactgctgcttcaagttcagatc

SEQ ID NO: 665702 - DNA, 115 bp, Homo sapiens
gccccgggtcccgccctggggccggcgatgtgccaccgaggctgaggatgatggtagattgccagcctcgaagcggaggatccctgtgtcccagccgggcatggccgacccccac

SEQ ID NO: 665703 - DNA, 74 bp, Homo sapiens
ccggaggtccagagatcctgagagcccgagcgcccagcgccgcgccgggaggatcagttcgacagcttagacaa

SEQ ID NO: 665704 - DNA, 98 bp, Homo sapiens
gcagtcagttgaacaagacaacttatttgatatggacaatctaaaatatgtaaatcagttgaagaaggaaaatgaacgtgcccaggggaaaatgaagt

SEQ ID NO: 665705 - DNA, 88 bp, Homo sapiens
gtcatcaccttattctggtcccgggtccagcctgatgagtgaagaggctaagcgaggagcacccaacccttggctctttgaggagcca

SEQ ID NO: 665706 - DNA, 50 bp, Homo sapiens
cgcaagaacatctggatcaagagagattatggcttgttaacaacacccca

SEQ ID NO: 665707 - DNA, 50 bp, Homo sapiens
ctcctgagcagctgggattacagacatctccagttacagcccgaacactg

SEQ ID NO: 665708 - DNA, 136 bp, Homo sapiens
cggtccccggcccgcctgccggagccgtggtggcagccccgggaggagcactggcgtctgtttccttcgacacctagctcccctgtttgacaaccctaagttggataaggagctgcgggcaatgctgagagagaag

SEQ ID NO: 665709 - DNA, 75 bp, Homo sapiens
ccactgccatcctgtccactggcattggcaggcttctcgtcagtgcctcgcaggatggtaaacttatcatctggg

SEQ ID NO: 665710 - DNA, 82 bp, Homo sapiens
gcagcccaagcgccttccctcacgctgaccccgcactacatctacccaccagccatcgtgcagcccagcgtggtgatcccag

SEQ ID NO: 665711 - DNA, 97 bp, Homo sapiens
ctacgaacccctggacgggagagtctgccggcggagaatataaggcagagaagaggcgatggcggcgatggcatctctcggcgccctggcgctgctc

SEQ ID NO: 665712 - DNA, 126 bp, Homo sapiens
gctttggatgatcaagatgatggccgcaggaaaccgggtataggaggaagagtgaaagatgtcatgtatatctgcccatttatgggagcagtgagtggaaccctgacagtgacggactttaagctg

SEQ ID NO: 665713 - DNA, 75 bp, Homo sapiens
agtgatggccgtcggactgtgggacatgatccacatcgcggacaccaaggtcgccaggcgttatggggatttctt

SEQ ID NO: 665714 - DNA, 83 bp, Homo sapiens
ttgcttgggatcctttatcctggtcatcttctatttccaaagtatgttgcacccaggtgacttaagagattaaaattaatttg

SEQ ID NO: 665715 - DNA, 75 bp, Homo sapiens
cgctgttgctgccgccatacgcgctctccctgtttaggcagggaccattgaggagaagatcttccagcgtcagag

SEQ ID NO: 665716 - DNA, 50 bp, Homo sapiens
acaagcgcgggacccgctatgaggacatggatttgattgacatactttgg

SEQ ID NO: 665717 - DNA, 100 bp, Homo sapiens
gaggactcttctaggagacgagagagcgaacgccagggaccctgtgcaggcctgctcctccgtttgcaaggataaaagaatcagagtgtctcaacccttg

SEQ ID NO: 665718 - DNA, 48 bp, Homo sapiens
agcatggagagatagataaacgggtcaccatccttgtcagcctggccc

SEQ ID NO: 665719 - DNA, 83 bp, Homo sapiens
cgccggaccaagcgggcccagaagcggaacatccagtcatggataaaaatgagctggttcagaaggccaaactggccgagcag

SEQ ID NO: 665720 - DNA, 83 bp, Homo sapiens
gcgcacagatagcacgggctctgctgtctccacggacgactcagagcaagacaatgcagatcttcgtgaagactctgactggt

SEQ ID NO: 665721 - DNA, 100 bp, Homo sapiens
ggaccacctggctaggattgctggctctcctgacaccttctcgtggcatccatgtggtttatccagttttctgaaaactggaggagagcaggagtgttca

SEQ ID NO: 665722 - DNA, 100 bp, Homo sapiens
tgtggtgctgcccgagaaggtggacgtgctggtgtctgagtggatggggacctgcctgctggtgaaaggtgtagcagtcactcggcctacacccacagca

SEQ ID NO: 665723 - DNA, 94 bp, Homo sapiens
cggcagaggatccagtgttcaccatcctggccccggaagagacgagttgtactgctgtcacaggaaatggacgctggattacaagcatggcagc

SEQ ID NO: 665724 - DNA, 100 bp, Homo sapiens
cgcatcgaatcacatgggacagatgtaaaaggcttttaaaagcagtgcatcttcaaggccatgaaggacctgtttatgcggtgcatgctgtttaccagag

SEQ ID NO: 665725 - DNA, 90 bp, Homo sapiens
cctctgctgcgtcctgctgaccttcgagtgcacaagggaagaagatgccaagcaaaaccagcttaaaggaggatgaagacaaatccgggc

SEQ ID NO: 665726 - DNA, 75 bp, Homo sapiens
aacacatcataaaacctcccaggacataaaggtgtgttccagagaacaagccttcagacatttgctatattgacg

SEQ ID NO: 665727 - DNA, 83 bp, Homo sapiens
gtgctggaccgcttttacaatgcaggatggatagaatgacagaagatgctcttcgcttgaatctgttgaagcggagcttggac

SEQ ID NO: 665728 - DNA, 74 bp, Homo sapiens
caggactgtgcaggggactctgtcacagcaacctccaagtcccagatcatgtctctgtggggtctggtctccaa

SEQ ID NO: 665729 - DNA, 101 bp, Homo sapiens
tgcatgttcaatgatgacatccaaggagtctccccaggacagtgctatcacccgggatattaaccgaacattcccagcccatgactactttaaggacacag

SEQ ID NO: 665730 - DNA, 99 bp, Homo sapiens
aggccacgataggggtggatttccgagaacgagcggtggagattgatggggagcgcatcaaggaatggaagttggatacactttgtgacttgtacgaga

SEQ ID NO: 665731 - DNA, 124 bp, Homo sapiens
ctgaggccgggccggccgcccagacgctgcccgcgggcccggccacggcggagccaagggtgagaactctgtctcagtcgacgggaagtgcagtgactccacgctactgagcaacttgttagaa

SEQ ID NO: 665732 - DNA, 100 bp, Homo sapiens
ggctgtatttgaagataagtttaggccagacatggaggaggaggaagagcgagacgagagtggctgtgaggaggaggaagggcgcgaggatgaagatgag

SEQ ID NO: 665733 - DNA, 100 bp, Homo sapiens
cagccatgtcatcttatctacgaaatgattcaggaaggcggagcgtgaagtaaaagcattggcaaaacttgatcatgtaaatattgttcactacaatggc

SEQ ID NO: 665734 - DNA, 75 bp, Homo sapiens
atcctgaatgaatttagagccaaactgtccaaggctttggcagtttctggcatttgaagtcaaagagtattcagc

SEQ ID NO: 665735 - DNA, 100 bp, Homo sapiens
cctggttcaacgaggccattgacttcatagcccaattgcagaggttacacatcgatactgagaatctccgggaggagaaggacagtgaaatcacaagtac

SEQ ID NO: 665736 - DNA, 98 bp, Homo sapiens
cgacgacccccacacttctaacttcagaatcaaaactatgaccctagggagtgaggaggagagtgaaaaatgcgtgttcaggtacagcacttccctag

SEQ ID NO: 665737 - DNA, 100 bp, Homo sapiens
ctggatttgattttccatgtagacaagaaaggaagctgttgaagttattgaagtacctgttgctatattctaagaaattaaaatgtccagaaatctgcct

SEQ ID NO: 665738 - DNA, 83 bp, Homo sapiens
gaaattcttcttcgttatggacagcatccaaacattatcactctaaaggatggtcagcgccaaactggaggggaatgaaacac

SEQ ID NO: 665739 - DNA, 75 bp, Homo sapiens
tgagaagcactatgctcctttcctcttgaaaccaaaagccaagattgatcagggaccatgaaaagaaacttgtgc

SEQ ID NO: 665740 - DNA, 100 bp, Homo sapiens
tgccactccaagaaaagatggtcccaaacgttctgtactgtccaagtcagttcctgggtacaagacctgagtcagaactccatcacaggggaacacagcc

SEQ ID NO: 665741 - DNA, 118 bp, Homo sapiens
ggctttcttcgccgtgctggccgcggcccgcctcagcatctggtacagccgattggaaaatggatataccttatttgattatgatgttggactgaatgatataattcagctgctagtt

SEQ ID NO: 665742 - DNA, 100 bp, Homo sapiens
tggcgctgccgcccaccttgtggccctgggctttaccatctttgtggctgtgcttgccaggcctggctccaatgtattagacacagaaatgattggggag

SEQ ID NO: 665743 - DNA, 75 bp, Homo sapiens
tcggcactaggcagcggaggagcccgaccgacccgttgtatcacggactgattcaccgagcccaaccgtactcaa

SEQ ID NO: 665744 - DNA, 96 bp, Homo sapiens
acattggaccctcctcccaactgtaggagctgacatggacccaaatcctcgggccgccctggagcgccagcagctccgccttcgggagcggcaaaa

SEQ ID NO: 665745 - DNA, 98 bp, Homo sapiens
gatcactaatccatcttcagcttcaattacaactctagaggacaaaatcccagtccttggcacaaactcaggaaatggaagccggagtctgttttttg

SEQ ID NO: 665746 - DNA, 90 bp, Homo sapiens
ttctgcacaacctcatctcctacatgctgctgatgaagttgccaccttccagagaagaggtacgagatgacaagacaaccataaagtgtg

SEQ ID NO: 665747 - DNA, 87 bp, Homo sapiens
gacggggaatcaagagacccggtttctaatccctgctctgtcactaacaagctgcgtgatcttcgaacattcctgatgtagatgaag

SEQ ID NO: 665748 - DNA, 100 bp, Homo sapiens
tgacaatgtagaggatgacttctctaatcagttacggtcgagatttaatttgcatccagtctatggatgggatgctgatggtatttgagcaggagagcta

SEQ ID NO: 665749 - DNA, 80 bp, Homo sapiens
gggggtcgctggctctgctgctgccgccggcgaaggaggaggcgttgccgggtcgacttatcaaaggatctccctcactg

SEQ ID NO: 665750 - DNA, 50 bp, Homo sapiens
tttgacctttttgaagcctttgcaaaaatttgaggcttaagcaacttctt

SEQ ID NO: 665751 - DNA, 98 bp, Homo sapiens
tgcaaccagtaagttgatccatccagatgaggatatatccctgaatttctacaagtgtgaaagaattagaaaacttcaggaacttgttacagaatatt

SEQ ID NO: 665752 - DNA, 96 bp, Homo sapiens
ccgccgctcgcgccggcagccgctggcaggggcatggtgaggaggaagtacttcctcctgtgctggttccaagacacagcgaatataatcctcagc

SEQ ID NO: 665753 - DNA, 97 bp, Homo sapiens
ggactcattgacttcatcaaaaagtttcttaaacttgtggcctcagaacagttggtcaatccaaactggagctcaactttcagaagagaaagacgcc

SEQ ID NO: 665754 - DNA, 100 bp, Homo sapiens
cttcgaccccaacttcagcctggagtcacggaacattggccgccccatcgagatgtccagcaaagtacagagctccgtggatggccgcgtgagacgctat

SEQ ID NO: 665755 - DNA, 90 bp, Homo sapiens
gtgatccggggccccggaacccgagctggagctgaagcgcaggctgcggggcgcggagtcgggaggcagaagtcaattcatctggaaaga

SEQ ID NO: 665756 - DNA, 100 bp, Homo sapiens
ggctgaactacgacaacacattgctgagcttgaaatccaggttaatttggagtggcccctggagtcagtttcctacaccatccgaggccccacccagcac

SEQ ID NO: 665757 - DNA, 100 bp, Homo sapiens
gaggaatggcggcggctgccgcaggacctgcagcatcccagaggcatgttatgttacccagagaactttccaaacaagtacctaaaactcatctgatgtc

SEQ ID NO: 665758 - DNA, 74 bp, Homo sapiens
ccgcccgcaggcccgtcgcagctccattaatgcaactaccattacactaaggaagttcttctaaatcaggaatg

SEQ ID NO: 665759 - DNA, 100 bp, Homo sapiens
aagaaggctctgtgcaatcctcacattcaagctgataggctgcgctaccggaatgtcatccagcgagtgattaggtgggtgcgggaatttctgaatgatg

SEQ ID NO: 665760 - DNA, 76 bp, Homo sapiens
cgatggtcggcggcgcccggatgggcagctgaggctccaaccaggaatggagacgccattggatgttttgtccagg

SEQ ID NO: 665761 - DNA, 100 bp, Homo sapiens
ctctgatccgcaagcatgctcagaccttcattgctctgtgtgccaccggacaaggagtagatgaacctctttcagaaactggatttaaacaagcagcagc

SEQ ID NO: 665762 - DNA, 90 bp, Homo sapiens
cagtggaatgtgtgaaagatcaggaacaagatcttgatatttggcctctttgaagagacagccctggctgctttcctttcctactgccct

SEQ ID NO: 665763 - DNA, 82 bp, Homo sapiens
gcctgttggaggaactggcccggaaacaggaggacggcgaagctgtgctcaggcccgggctggacgcagagccagagctgtc

SEQ ID NO: 665764 - DNA, 100 bp, Homo sapiens
cgtggatctgatcagctgaggcctgagacacaggaccaggtgattgcccacagtgagtatcaaaagtccaaaagaatttccatctttctgagcatgcaag

SEQ ID NO: 665765 - DNA, 83 bp, Homo sapiens
cgatccgggcgctcgagacttaccagagccacaaggcgtccgacctccgatcatgaacgggcccctgcacccgcggcccctgg

SEQ ID NO: 665766 - DNA, 83 bp, Homo sapiens
tgacagaccgacttaagttcggattcggcttccaccgcttcttagtgggaggaggtacaggagaactgtgtgcggtggcgaaa

SEQ ID NO: 665767 - DNA, 80 bp, Homo sapiens
gctgaagaggaggcggaagccaaggaaatctggcattttttaaagtttgcgccccacaaagaggaaatattccaaaggta

SEQ ID NO: 665768 - DNA, 100 bp, Homo sapiens
cgggcacccctacgtcgtgtggaaatccgagatcctgaggtgatatcagacttggtatttttgaaacagccttctcccttagtcagagtcattggtcagg

SEQ ID NO: 665769 - DNA, 83 bp, Homo sapiens
gcggaggtgcctctgtttccagaggcgtttttgtacgaagggacctgcctagagctggaacgttacctccagagcgagccctg

SEQ ID NO: 665770 - DNA, 87 bp, Homo sapiens
gggagtgatgtctgtggggccgccggcggcccggcttcaggtgagaagccctaccactgcaactgggacggctgcggctggaagttt

SEQ ID NO: 665771 - DNA, 75 bp, Homo sapiens
cccaggtgacgtgtcttcaagaagaggctgagctgcggtgcttgtaaggtgaggcttcgagctctgaggaagagc

SEQ ID NO: 665772 - DNA, 98 bp, Homo sapiens
gctgtggcagtggttgtggatcccattcagagtgtaaaaggaaagaaacacagtgctctgtgcctatacagtgtacggataaaacagataaacaagaa

SEQ ID NO: 665773 - DNA, 82 bp, Homo sapiens
actcaccaactacctgcagccgcagctggactggcaggcccgagggcgagcaggattcctggttttcaagcctgagctgatc

SEQ ID NO: 665774 - DNA, 100 bp, Homo sapiens
cacctgcccactttgtgatcagagccgtgttcggggagtctttcaggcgcagacggggaagcggagccaacatgccagtggcccggagctgggtttgtcg

SEQ ID NO: 665775 - DNA, 75 bp, Homo sapiens
tcaggaacagagtcaatttcaggggcccactgatgatggtgaagaagagatggaagaagacacagtcacaaacgg

SEQ ID NO: 665776 - DNA, 87 bp, Homo sapiens
gagctggccaagcacgccgtgtccgagggcaccaaggcggtcaccaagtacaccagctcgaactcctgacatcaagtgctgttcaca

SEQ ID NO: 665777 - DNA, 100 bp, Homo sapiens
ctttaatctgccaggcggagggggctttgctggtctttcttggactattccagagagccggaagtcggtgcagcccacctcagaggagcgcatccccaag

SEQ ID NO: 665778 - DNA, 101 bp, Homo sapiens
caaagagagcagagcagttaaaaaaaagcatcttaaagcaggctgcagatcttacacagggtgaaaatgggatggaggattgtgtcatggccctagaaacc

SEQ ID NO: 665779 - DNA, 75 bp, Homo sapiens
cggcgcgggagccggcgtgggcggcggcaacggggcactgacctgggtgataacagtcttcactcctatgctgat

SEQ ID NO: 665780 - DNA, 83 bp, Homo sapiens
aaatgattcgggaatatcggcaaatgaatccagcaactatcacaagaatactccttagccacttcaattgggataaagagaag

SEQ ID NO: 665781 - DNA, 100 bp, Homo sapiens
gactggaccgagctcaccagctgtgtgccctccgtggtggacggcaagcgcgacgccaggctgagaccgtccagcttaaagcttttcaagccaggccaag

SEQ ID NO: 665782 - DNA, 100 bp, Homo sapiens
agaccttcaagcagcgccgcaccttcggttttataggatcacattgacaaaagtaccatggagttttatgagtcagcatattttattgttcttattcctt

SEQ ID NO: 665783 - DNA, 75 bp, Homo sapiens
cttggtcttcagcctaatcattgcatcctatgatgccaacaagaaaggaagctgaagagggaactacccttttca

SEQ ID NO: 665784 - DNA, 75 bp, Homo sapiens
cagagagcgcccctcccggacagtattgcctaagtgtaatcttgaacatgggcggtgctgtgagtgctggtgaag

SEQ ID NO: 665785 - DNA, 100 bp, Homo sapiens
ccagataaccctcccgactaccagaagtactaccgccagatgcgcaagtttcagtcattcagtcagtaccgctgtaagactgccaagaagtcagaggagg

SEQ ID NO: 665786 - DNA, 100 bp, Homo sapiens
gtcagactaatgttatgggacactgcaggtcaggaggaatttgatgcaattacaaaggcctactatcgagctttgccgggaagtaaagctttggaggaaa

SEQ ID NO: 665787 - DNA, 100 bp, Homo sapiens
gattcgcagtggtcgcttcttctccttgctgtccagaccaaaacgaagaagacgttagccaaacccaatataaggaatgttgtggtggtggatggtgttc

SEQ ID NO: 665788 - DNA, 75 bp, Homo sapiens
gagaaaaacctcagcgacctgatcgacctgcacacgtcacatggagatgggcgtcaagaagttacctctcgtacc

SEQ ID NO: 665789 - DNA, 100 bp, Homo sapiens
agaattttcagatgactggactcttagtggaaaggggtatagaacaggctatgcttacaggcatcctctcattcgagagaagcctaggcacaagagtgat

SEQ ID NO: 665790 - DNA, 83 bp, Homo sapiens
gctctgcgagcagcgctactgcgccgtgtgccgcgaggagctgcgccagacaatgcagatcttcgtgaagactctgactggta

SEQ ID NO: 665791 - DNA, 100 bp, Homo sapiens
ctggtcgatgaagaggatgatgtttttggtgaagtgtaaacaggaacatcgataagtagtgtaaaaacttgcacaatgaaatccgaagccaaggatggag

SEQ ID NO: 665792 - DNA, 100 bp, Homo sapiens
gcgtggtgggggaactgctggggaaggcgattggcatcgatctctccatcccttccgaggcccgacttcggggagcttttggaagagtcccagatggaag

SEQ ID NO: 665793 - DNA, 100 bp, Homo sapiens
ccggctacgcgccgtggacacagacggggtggagcccatggaatcggtcctggaggacagggcacagtcttttgctgagcgcctgcgcctgggaattgca

SEQ ID NO: 665794 - DNA, 74 bp, Homo sapiens
actgtcagtcctatgtggaaatgcagagatgcttcggcaagatccccctggcaaccactaatctgctttctatc

SEQ ID NO: 665795 - DNA, 80 bp, Homo sapiens
cactgtgagagctgtcggcactgtaactctggtgctggagaatctggtaaaagcaccattgtgaagcagatgaggatcct

SEQ ID NO: 665796 - DNA, 101 bp, Homo sapiens
ccggacgccgtaggtggaaaggcgaaccctgagtggaggatgttcccgctgcctaaagaatgattgactggtcttgctacgtacgttgcccaggttggaat

SEQ ID NO: 665797 - DNA, 98 bp, Homo sapiens
gagccgcctttccagcatgcaggggctgctcaggtgtgtggaggtcattgcaaaggaaggacaaaacctgaaagagctatatttggtgtcctgtaaaa

SEQ ID NO: 665798 - DNA, 83 bp, Homo sapiens
gctgcggagccgcagccgcccagaccgcgcagcgcgggaggcaggttccgcacggattctgtttcactgaggccatctatccg

SEQ ID NO: 665799 - DNA, 100 bp, Homo sapiens
accaccctccatgcctttgcagaacctcaagaaggcatgaagccagcccctgcagtgccgtccacccgcccctctgggcctgcctgtggctctgttgccc

SEQ ID NO: 665800 - DNA, 90 bp, Homo sapiens
actcaagcaattcttctgcctcaacctgccaagtagttgggactacacatgtgccatcacactcagatgcgacctaaagtcatgtggcac

SEQ ID NO: 665801 - DNA, 90 bp, Homo sapiens
caacatcacggacatctcaaggaatatcacttccatgaccccgagacagacaagcacacagaggaccagagtccttcgacacccttgccc

SEQ ID NO: 665802 - DNA, 82 bp, Homo sapiens
gactggggctgggagattctgcagagcttcagccgattcacacggtgtcaacagcatctccaccctggagcctgtgagccgg

SEQ ID NO: 665803 - DNA, 108 bp, Homo sapiens
ttgatcaccatttcctagaaggatctagggaggcctattgtttagatggaatgtggactacaccaccattgtgtttagacacttcctgtgtgaatccgcccacagtac

SEQ ID NO: 665804 - DNA, 143 bp, Homo sapiens
gtcgagccaatggaaaccccaaacccactgtccagtggatggtgaatggggaacctttgcaatgtgcatcacctggatcatgaggtcacccctctgctggctcctcccacttctcatcttggcctcagtggcccaaggccagc

SEQ ID NO: 665805 - DNA, 99 bp, Homo sapiens
agtgcttaatgctgtcttaactagtgtaggaaaacggctcaacccaccgctgccgaaatgaagtataagaatctggaggtgcagctgagctctgcgagg

SEQ ID NO: 665806 - DNA, 100 bp, Homo sapiens
gaagacatgacacttacaagatggacagggatgataattgggcctccaagatattgctgacagacagaacgccttggaggctgagtggaggacggtgcag

SEQ ID NO: 665807 - DNA, 83 bp, Homo sapiens
ctcagttggaagcagccgatccagcctgcggagcctgtggggcagggctgaaatctctttaatgatggagggaagcaggcaga

SEQ ID NO: 665808 - DNA, 75 bp, Homo sapiens
cgtctgagaagtgaggagaccctctgcctggcaaccaccccgtctgagaattacttcctccactgaagtcttgaa

SEQ ID NO: 665809 - DNA, 49 bp, Homo sapiens
tcgctgtggagatcatggactatgaagaactgttgggaatcaaagagct

SEQ ID NO: 665810 - DNA, 75 bp, Homo sapiens
gcaagaaagccaagaacaagcagctgggccatgaggaagggaaatgtttcaacgtgcgcaagcgttgcggcggcg

SEQ ID NO: 665811 - DNA, 90 bp, Homo sapiens
gtaaattcttcagctgctcggacagatgaagctccccaaggagctgcaggactatggactacgtggcttcttccaaggtggcatcccccg

SEQ ID NO: 665812 - DNA, 100 bp, Homo sapiens
agtaaaataccttcaagcgaatgggccctattgtgctcacacattcagaacctgttacccaaggaattccctaaaggtaaagtgaacagagttatctgtg

SEQ ID NO: 665813 - DNA, 50 bp, Homo sapiens
tggaaagctttaggagttcacagtccctggtacctgacagtgtaaagaag

SEQ ID NO: 665814 - DNA, 90 bp, Homo sapiens
ggtaaaagagatcaccgacaagatcaccacggacgagatgatcaaacgcctgaaggttgaagatgaaatccactgaggagggaagtccag

SEQ ID NO: 665815 - DNA, 96 bp, Homo sapiens
ctgcagctccgcctcctccgccgcgcaggtgtcatggagaaactccagctgggcccagagattctgcagcgggaaaatccaaggcttatttatgcc

SEQ ID NO: 665816 - DNA, 75 bp, Homo sapiens
tgttcgaggatgtgtacgagctgtgcgaggtgatcggaaaaatgtctacacaaggaagtacaggatttggctttt

SEQ ID NO: 665817 - DNA, 75 bp, Homo sapiens
caccgtggtgacattgtatcattggttggatcgcagctccaagaggaggcaggtgaagcctttggcagcttctct

SEQ ID NO: 665818 - DNA, 75 bp, Homo sapiens
gtttaaccataggatagagaaaccagtgaatatcacctctgccaggcaattaaccggctgtagtcgctttggtca

SEQ ID NO: 665819 - DNA, 100 bp, Homo sapiens
aagggaccttgttatagaagccttaaagataacaacgaacttgatgcaagtgataggtttgccaaggtcagacctctcatcatccggatgaactgcaatt

SEQ ID NO: 665820 - DNA, 75 bp, Homo sapiens
gccggcggcagatgagagcatccaacggcaccaccttccatggtcaataatgaacaacgccagcatgcagagcac

SEQ ID NO: 665821 - DNA, 75 bp, Homo sapiens
tctgcgtctgccgtggacagcgaagctgctgcggttcctgagccggagatgacgacaacccccccgtgtcttttg

SEQ ID NO: 665822 - DNA, 83 bp, Homo sapiens
ctcccggtaacccccaacttgccggagatacataaataacggttggcatttgggaggcctcaaccattcctgaggtactggtg

SEQ ID NO: 665823 - DNA, 75 bp, Homo sapiens
caaagtctagttcagaggagagtagatccgagatatatggtcagtaaaattgtgtcaaatgttcctcagttggag

SEQ ID NO: 665824 - DNA, 100 bp, Homo sapiens
gaaaggcccacctgtgtcctggttgagggtctccagggttctttggggcccgaggtcgagtctatgctgtcttgtcaaagagagaaggtcgggtacttca

SEQ ID NO: 665825 - DNA, 82 bp, Homo sapiens
tcgtgatggggctgatcttcgccaaactgtggagcctcttctgtaaccaaggtgtccctggccagtgtccttccacctgtcc

SEQ ID NO: 665826 - DNA, 76 bp, Homo sapiens
gacctggccagcgctgctggcgggcgttagggcaagaagctaccggatgtttcacgacgacagcatgaagtctttc

SEQ ID NO: 665827 - DNA, 100 bp, Homo sapiens
caagaccgaattcagaaggatatcgacgtcgtgatccagaagtccagagctgaggactgcctgtttgcagcaccagcagacgtttttgaatcaactgaga

SEQ ID NO: 665828 - DNA, 90 bp, Homo sapiens
cttctctctcctcgattgttgcgcgctcatcttcctctcggtctacttctcctggatgcactaatcgtgagcatggatgtgattcaacat

SEQ ID NO: 665829 - DNA, 100 bp, Homo sapiens
gacccagaagagcagctgctacttcatcctgcagcggcgccgcgggcacggcgaggggggcggccgcctcaccgacctgtcgcgaaatcgcctttcagaa

SEQ ID NO: 665830 - DNA, 83 bp, Homo sapiens
aacgagacttttctcagatgttggatatttgcttggaaaaacgtgtgggtacgaccttggtgaggtccagagatatatccaga

SEQ ID NO: 665831 - DNA, 75 bp, Homo sapiens
tggggctgctcccatcattgatgtggtgcgatcggaacttaatgagctgagagagacagaagggggtactgttct

SEQ ID NO: 665832 - DNA, 100 bp, Homo sapiens
aagacggcaggaggaagagagagagagggtacatggccacctctggcctagaccaccagctgaagatctttgacttgcgagggacgtaccagcctctgag

SEQ ID NO: 665833 - DNA, 74 bp, Homo sapiens
ggaataaacatccaggggctgtctgcagaagctttgctctggtgagtgacaagctgtaccagcggaaagagcct

SEQ ID NO: 665834 - DNA, 75 bp, Homo sapiens
tctcctcctcttgcccgcgcaggcacccctctggctgctcagtcctgcctcagaaatgcactcggtgatggaaag

SEQ ID NO: 665835 - DNA, 83 bp, Homo sapiens
aagacaccacagaagccctccgagcccagcaaccatgtccaagggacctgcagttggtattgatcttggcaccacctactctt

SEQ ID NO: 665836 - DNA, 98 bp, Homo sapiens
tggatttctgaggagccgttcgaactgtctcaccacttccctgcagctccccatgtgcagtctttgccaacaaaaaaaattaccaagaaacctattcc

SEQ ID NO: 665837 - DNA, 75 bp, Homo sapiens
gagttctctctggagtctcgagcccgggaagtgcgttttgggggaaatttgcagtggtgagaaaatgtataaaga

SEQ ID NO: 665838 - DNA, 98 bp, Homo sapiens
cgatctctccatcccttccgaggcccgacttcgtaatctatgccagcaattatgacaatgttagcagaccatgcagctcgtcagctgcttgatttcag

SEQ ID NO: 665839 - DNA, 75 bp, Homo sapiens
acttgtaccagccctctataaagttattcaagattcaaataatgaggagccaggtgagaatttcaaggattatcg

SEQ ID NO: 665840 - DNA, 75 bp, Homo sapiens
cttggcgctggccggctacatcgagacagtgatgtgtgttctgaaattgtgaaccatgagtctagtacttaatga

SEQ ID NO: 665841 - DNA, 100 bp, Homo sapiens
gagccagcgcccggagcaagcggagctcccccaagagccggaaagctcacaggtgcagtgcggtcttcagcgcgcttgaaagcacgaagttgttcggcag

SEQ ID NO: 665842 - DNA, 75 bp, Homo sapiens
ggcccagatgcgcgcgatgctggaccagttgatgggcacctcccgggacggcgtcgggtttggagttcaagtcgg

SEQ ID NO: 665843 - DNA, 100 bp, Homo sapiens
caggccctgaactgcggtgggactgcctcgactggcagcgcgggaaacgtcaaactcgagagagatgccaaaggccagtacctgtttgaccttctttgcc

SEQ ID NO: 665844 - DNA, 96 bp, Homo sapiens
agcctcgcacgttcggcagccccggcctggccccggcccctcctgcccatggcggtggccgagctgtacacgcagtttgccagggtttggatacct

SEQ ID NO: 665845 - DNA, 74 bp, Homo sapiens
caccccgagaaccgtcagtttgagccagatgattctctaaccatggcacaggtagagaaacgtggaggtttgct

SEQ ID NO: 665846 - DNA, 101 bp, Homo sapiens
ctacagaaacaaaatgtcaacaaattgatgggccagctgcgggccgtccagcggctgtgccacttctacagcgccgtcatgcccagcgaggcccagtgtgt

SEQ ID NO: 665847 - DNA, 88 bp, Homo sapiens
aaacagaaattctggaacacctatatggagctagaaaagctaggccttggcgacagcgtggacctgcatgtgtacgagattccggttg

SEQ ID NO: 665848 - DNA, 50 bp, Homo sapiens
ctggattccatgtagagacccctggagtgaaggagaacgacctgctcaga

SEQ ID NO: 665849 - DNA, 98 bp, Homo sapiens
ttgaaggcaggtgcctgatccaaaatgcatttagtcaggactgaacacaagctgcctggatagttcctttggttagtctgctgctaattggaattgct

SEQ ID NO: 665850 - DNA, 50 bp, Homo sapiens
agaggctgttagctatggctggtcctaggcctacttacaagcctccagtc

SEQ ID NO: 665851 - DNA, 101 bp, Homo sapiens
ggaagatttaacgaatggggttgtgatggcccaggttcttcaaaagatctgacattatctctacggtagaattcaaccacacgggagaattactagcgaca

SEQ ID NO: 665852 - DNA, 73 bp, Homo sapiens
cccaagattccagatgttcctgtggaccccagtccaggcactactgcagtcttcagttaagcaacaagtagaa

SEQ ID NO: 665853 - DNA, 102 bp, Homo sapiens
gcacagagcctcgcctttgccgatccgccgcccgtccacacccgccgccagaattcagaaggagctggcggacatcactttagaccctccacctaattgcag

SEQ ID NO: 665854 - DNA, 100 bp, Homo sapiens
gccggtgccatcggaaaccggagtgaccagaggagggacacgactatgtcttcagcagtggtgcagttatatgcagcagatcggaactgtatgtggtcaa

SEQ ID NO: 665855 - DNA, 101 bp, Homo sapiens
agggattcgtggtgaaggtccggggcttgccctggtcttgctcggccgatgaagtgcagaggtttttttctgaaggagcttaattccgtcgcttctgagct

SEQ ID NO: 665856 - DNA, 101 bp, Homo sapiens
ctggaacttgtgattgagcagtttgaagacttgctagttaggattttattactggcagcatgtatatcttttgaattgaaagatgttggccatcgtgatca

SEQ ID NO: 665857 - DNA, 50 bp, Homo sapiens
attccaagtaactcttatttgattttctaccctagcaaggatggtacgaa

SEQ ID NO: 665858 - DNA, 75 bp, Homo sapiens
cctgctccaggaatgggacctcgagtcactgtgcaattctgtggtgttcttggtcacacatttatggagtttctg

SEQ ID NO: 665859 - DNA, 99 bp, Homo sapiens
gtggtcattgcggggggtaccatgcagccggccagacttctcgcttcctttctgctgggcctctgaggggtcatggggccatgacgccgtggccttggt

SEQ ID NO: 665860 - DNA, 100 bp, Homo sapiens
acgcaggagtacgcagcaaaaatcatcaataccaagaagttgtctgcccgggaattcaaggaagccttctccctatttgataaagatggcgatggcacca

SEQ ID NO: 665861 - DNA, 83 bp, Homo sapiens
ctactacatcccgcagtacaagaactggagagcggtggagacacagagcaccagctcagaggagatggtgcccagctcgccct

SEQ ID NO: 665862 - DNA, 90 bp, Homo sapiens
ctacgaaatgcttgctcaggctcagagggacctcacccctgagcagcccagtggcacccgactcgctctcctctccctcaccgacgcccc

SEQ ID NO: 665863 - DNA, 101 bp, Homo sapiens
cgcagggatgaacctcgagttgctggcatcccagccatcactcttccacctgctccttagagaagggaagatgagtgagtcgagctcgaagtccagccagc

SEQ ID NO: 665864 - DNA, 73 bp, Homo sapiens
tcgtcagctcaggagagggcaaggccaaggctgcaggtgatgatgaggccatgttcatagatgaaaacttctg

SEQ ID NO: 665865 - DNA, 75 bp, Homo sapiens
gtgttggaccttccggagcttctcagaagacagagggttttcttttgagttagcaaaaggtgtgacaagcaacct

SEQ ID NO: 665866 - DNA, 75 bp, Homo sapiens
ggttaacagcctatgggtgaaatttggctttcattcatgaatgaggaaactctgctcttaaagacaaagaagatc

SEQ ID NO: 665867 - DNA, 75 bp, Homo sapiens
acaacctggcggtgctcgagtgcctgcaggatgtgagggaggcataaaggcaacacaagtggtcaggctcagcta

SEQ ID NO: 665868 - DNA, 75 bp, Homo sapiens
cctaggtgtcattacagtgatcatcataggcttatgtcttgctgcagtgtcgatatatagtatctggttttatga

SEQ ID NO: 665869 - DNA, 51 bp, Homo sapiens
ctactcacagttgaagcctgattgcagcttcgcaaaggctgaaaaatttgc

SEQ ID NO: 665870 - DNA, 97 bp, Homo sapiens
cctaccttatgagctcggttttcttatgcttataagagtggaacaggttaattatagaaaatgccaagtaggaaatttgccgatggtgaagtggtaa

SEQ ID NO: 665871 - DNA, 74 bp, Homo sapiens
ttggtatctaagagagatgaaaatgtttgtaatttcctagaaggaggattgtgtgtggaggtcattgcaaagga

SEQ ID NO: 665872 - DNA, 98 bp, Homo sapiens
gtggaacacccctggcacaacaacgagattctacaagcctctgtagatggtccagaggcctctctgactaaccacacagaaaccatcaccgtggagga

SEQ ID NO: 665873 - DNA, 134 bp, Homo sapiens
ggcgttcttctcccctcggttcacttatcaccggcaataatcaacgtttcagagatcaccccggggagaatgttaatttggagtggcccctggagtcagtttcctacaccatccgaggccccacccagcacgag

SEQ ID NO: 665874 - DNA, 82 bp, Homo sapiens
gaaggattcaaatgctagcagacacggtggctactctgcctcggggacgaaagcagggcagtcagggcgacagcaagaatgc

SEQ ID NO: 665875 - DNA, 98 bp, Homo sapiens
gaaggattgtggtcccgcctcacctggggtatggagaggaaggaagaggatttcatgatgtgctgggcaatgaaagaccttctgcttacatgagggag

SEQ ID NO: 665876 - DNA, 100 bp, Homo sapiens
ccaggtgctggaggacttcccaacgtggactcccgaaaaattgaccaggaagggaaaatcccagatgaaactttggagaaattgaagagcctagggcttt

SEQ ID NO: 665877 - DNA, 100 bp, Homo sapiens
aggctgctggcaaaggggacgtcccaacgaagagaccacctgtccttcgagcaggacttggacgaggacgactttgacgtggggaagccgaagaagcagc

SEQ ID NO: 665878 - DNA, 95 bp, Homo sapiens
gggtccatacggcgttgttctggagacccactgctaaggagttattgaagcacaagtttatactacgcaatgcaaagaaaacttcctacttgacc

SEQ ID NO: 665879 - DNA, 89 bp, Homo sapiens
ctcatacaatatttaatccagaagtatttcaaccacagatggcactgccaacagtttgtggggacattcatggacaattctttgatttg

SEQ ID NO: 665880 - DNA, 76 bp, Homo sapiens
gacatgtctgagactcctgctcagtgtagcattaaggcaattaagttggaatatgcaaggttggttaagttggccc

SEQ ID NO: 665881 - DNA, 75 bp, Homo sapiens
actgcttttgagtgagatggtcccagaggcctggaggagcggactggaggatgaagaaggttataacgatggaga

SEQ ID NO: 665882 - DNA, 75 bp, Homo sapiens
gtccccccgttccctggaggtcctgtggaatgcaatggtgaactagacccctggtcaggaggtggagtaactaag

SEQ ID NO: 665883 - DNA, 100 bp, Homo sapiens
tttatcaaatgtgtggaacagaaggtgttcactgttggcagaatttgtgccagccgtaccagaatttatcataaactgaaacattttaaattcaaactat

SEQ ID NO: 665884 - DNA, 82 bp, Homo sapiens
ctagcagcgatgctatgcaaaaggcgctgatactggaaggcttgaacaccgtacttaagagattatggcatcagaaacccac

SEQ ID NO: 665885 - DNA, 100 bp, Homo sapiens
taccaaggaaggcatcctgcagtattgccaagaagattactacagcatcccatttcccacacccactactccgctgactgggagggatggtagcctggcc

SEQ ID NO: 665886 - DNA, 100 bp, Homo sapiens
gcggtcctcgctctcgggcggggcggcggcgacgcggacctgcggactagcgaacccggagaaggccaatgatgaggccaatcagagtgatacaagtgtc

SEQ ID NO: 665887 - DNA, 75 bp, Homo sapiens
gggccccagccccacagaccagcccagcattcagacggccgaagccctgcagcccacgctacagccggagatgca

SEQ ID NO: 665888 - DNA, 97 bp, Homo sapiens
ggcaaaggcggctcgggagattcagccgtgaagcaagtgcagatagatggccttacaggtgatttggcttctgcacagttaggaggagcaccaaacc

SEQ ID NO: 665889 - DNA, 90 bp, Homo sapiens
actgtattctggacaaagactacctgagatcactaaataagcttccacgccagctgcattaatactacattgtcaaagacaaagacgaac

SEQ ID NO: 665890 - DNA, 88 bp, Homo sapiens
caggcatcgcgctctacgacaaggcgctaggctacgggcagcaggattctcccagcaacaagctgctgtacgccaaggagatctccac

SEQ ID NO: 665891 - DNA, 83 bp, Homo sapiens
ccggcccgaggacaccgactaccagcagaagttccacctggtgccaagcatcaacaccatgagtggcagtcaggagctgcagt

SEQ ID NO: 665892 - DNA, 75 bp, Homo sapiens
aagtggagcgtgtcctgaaggagttccaccaggccgggaagcccatcggccaaaagaatgcaatggtgtaaagat

SEQ ID NO: 665893 - DNA, 51 bp, Homo sapiens
tcgggttctctctccgcgcgttcagccctgactgccgccgcaggaagaggg

SEQ ID NO: 665894 - DNA, 98 bp, Homo sapiens
tgcaaatcattcagtgaatcccaactgttatgccaaaggtacaggtttgcagattccgccagcagcacagcaagctctacagatgagtggctctttgg

SEQ ID NO: 665895 - DNA, 98 bp, Homo sapiens
ggatgaggaaactgaggcctggagaggttaaagagacccgttcagagtcctacagtggcagagttggatgcactaggtgatgagcttctggctgatga

SEQ ID NO: 665896 - DNA, 74 bp, Homo sapiens
acctgggtgaactttcacggacaacctcagaggacaacgaagtgttcggtcaaactgtgctgaaaatatccgca

SEQ ID NO: 665897 - DNA, 75 bp, Homo sapiens
gcggaggcagaggtggaggcgctttgaaaggtacatgtcccagagcaagcacacggaggcccgggagctcatgta

SEQ ID NO: 665898 - DNA, 100 bp, Homo sapiens
ctgtagaccggagctgttcctattcggccatctttgctcctccctgcaactaactccattcttaattggagggaacctgtatgacaaaatccttcgtcag

SEQ ID NO: 665899 - DNA, 90 bp, Homo sapiens
cacatattctgtctgtccacgatagtgccaggcctatgttggaggtcaatgtgacggtggactacattagaccagccagcccagccacag

SEQ ID NO: 665900 - DNA, 101 bp, Homo sapiens
cgctactctctctttctggcctggaggctatccagcgaatgaatctgaagtctgctgcagtaaaacacagaaggctttaaaatgttttcttgcataaaatt

SEQ ID NO: 665901 - DNA, 97 bp, Homo sapiens
acctgtaagaacagaaaatcgtcttatagttgagaatttatcctcaagagtcagctggcagggttcaccagtaaagccagtagccattagggagttt

SEQ ID NO: 665902 - DNA, 100 bp, Homo sapiens
ggcgtccgcctcaggggccatggcgaagcacgagcagatcctggtcctcgatccgcccacagacctcaaattcaaagaagtggaggagtgtcaacagtca

SEQ ID NO: 665903 - DNA, 100 bp, Homo sapiens
atcaaatccaactatcaaggcctcccagtacgttgtgtgaagagtatcattcgacagacagcacaacagaatggtgacactccagaagcccaaggattag

SEQ ID NO: 665904 - DNA, 75 bp, Homo sapiens
aaacttccatgtgttctatcagctgctctctggtgcctctgaagagctcctcaacgaagcttcacaaaagatgtc

SEQ ID NO: 665905 - DNA, 100 bp, Homo sapiens
gcgggggattgtgggagtctccgcgtcccgctcgctgggagagaggtacctctccttttccctctccctttccctaaggacttcattgacttaactagag

SEQ ID NO: 665906 - DNA, 117 bp, Homo sapiens
aaatatccaagacccagctcaagcagaggcctacacgatttactgattttgcaagaacgaggctcaaggatgtgagggacacagtattgacagctgaagaaatgatttacgttttcc

SEQ ID NO: 665907 - DNA, 83 bp, Homo sapiens
tccagcccggcccggcagcgacatggaagcaatcatcctcttccagtggtagcgtgtttgggtctggaaacactggaagaggg

SEQ ID NO: 665908 - DNA, 97 bp, Homo sapiens
aagcacgaatgtccataatggaccgtattctccaaatagcagaggtacggacattgctgcaggagaagaggttgccatcaagcttgaatgtgtcaaa

SEQ ID NO: 665909 - DNA, 100 bp, Homo sapiens
cgccagacggccagaaagttccgccatgagctggggcacggagctgtggatgatcatgggaacagcaatagtagtcatgtaaaaatctttttaccgaaaa

SEQ ID NO: 665910 - DNA, 100 bp, Homo sapiens
ccttcctcggagaacaagactgcccacctccacaagggcttcctggccctctaccaaaccgtggcaaaagctggcaggctgacagaggcggcctcaggac

SEQ ID NO: 665911 - DNA, 100 bp, Homo sapiens
gttttccttgcggcggccgtggaaggcgacccggcggctgtggaggccacgctcagctcgccaggcggcgcaggattcattccacttaaaacctgaaaac

SEQ ID NO: 665912 - DNA, 73 bp, Homo sapiens
gaatatttagaatgcaggatggagaggtgtgatgaatgcagactctgctaccattttggctgtttggatcctc

SEQ ID NO: 665913 - DNA, 80 bp, Homo sapiens
ccatcgtgtgcctgatgatcacgcagctggctggcttcagtggaccaacctgtgaccgcatcaagcagtcagcagctggc

SEQ ID NO: 665914 - DNA, 48 bp, Homo sapiens
gcgcaggagcctcccggagctgatcacccggaagttcaggctgaattc

SEQ ID NO: 665915 - DNA, 100 bp, Homo sapiens
ctgagaatgcagccgtgtgacagtaactgaacattggtctaaagtctttccaaaaggtcaaggttcacaaggtgctggagaatctggtaaaagcaccatt

SEQ ID NO: 665916 - DNA, 100 bp, Homo sapiens
ggggcagtgattggaaaaggaggcaagaatattaaggctctccgtacagacgtatcatgaactgatcactaaatatgggaagttggagcctttggcagaa

SEQ ID NO: 665917 - DNA, 75 bp, Homo sapiens
cctcagcctcccgagtggctgggactacaggcgcttaaattcctagcgaagtgccgtaagaaaaagaaactattt

SEQ ID NO: 665918 - DNA, 82 bp, Homo sapiens
cagctgctcccttcgccttcgccctttccacctcgcggcagttcgggtgttcctgaaaagccccatagtgattgagtcttca

SEQ ID NO: 665919 - DNA, 100 bp, Homo sapiens
aatgttcctggcttcttacctacaaatgacttaagtcagcccacgggatttttagcccagcccatgaaggaaacacttcaagttgaagaagatgatcgac

SEQ ID NO: 665920 - DNA, 100 bp, Homo sapiens
acgagacccaaacccctgaagccgccatgcgacctctccatgcagtcagtggaagtggcgagaagcctgtgtctcccaaatcaggaacactgaagagccc

SEQ ID NO: 665921 - DNA, 98 bp, Homo sapiens
gtgcctctggcagtgacgaggacgaagtgtccgagatgaaggcattttcaaagctggagcagagaggtctgaaacacggggggcagcagaagtccaag

SEQ ID NO: 665922 - DNA, 82 bp, Homo sapiens
gaaggcatggaagtcatcagaaggtttgatgacaaatacaccttgaagctgaccttcatcagtgggagaacaaagcagcagc

SEQ ID NO: 665923 - DNA, 74 bp, Homo sapiens
ctcccctcagtcctgctctgaagatcctgccctgccctgggtcattgattacaacggggaacgcacgctggatg

SEQ ID NO: 665924 - DNA, 83 bp, Homo sapiens
atggcatttcagtcactggtttgcagagtccaggcccgccaagctgccccctgtgtgctattctttgatgagctggattcgat

SEQ ID NO: 665925 - DNA, 82 bp, Homo sapiens
ggagcctggcgggcgtgggaacccaggccccgccgaggcggccagaacccagcgggtgccgcttctccacccgaggcttcca

SEQ ID NO: 665926 - DNA, 73 bp, Homo sapiens
acggattcatttagagctgcggaacaggacgccctctgatgttggtgttcgaggaagagacattgttgttctt

SEQ ID NO: 665927 - DNA, 50 bp, Homo sapiens
acagcagccgtcctatcaatgtgattaagagttttgcatcccttgctttg

SEQ ID NO: 665928 - DNA, 100 bp, Homo sapiens
agtacttcgtgcagggcatgggatacattacagctgggaagagtcactcgtgttcaaaagcaccggaagatcctgagggctgcaagagatttggctttgg

SEQ ID NO: 665929 - DNA, 90 bp, Homo sapiens
ttgggcttggtggcctgcgtgtcggcggagtcggttccttgtagcttggaatactgggatgaactccagaaggtttttgttgcatttaga

SEQ ID NO: 665930 - DNA, 100 bp, Homo sapiens
cccttttaccactgcctggttgcagaagtgccgaaagagcactggactccggaagaccaagttttacaggaaaactccagtgattttcaatcaaacattg

SEQ ID NO: 665931 - DNA, 75 bp, Homo sapiens
aagaggaggaaaacaaaagctgctacttatggaagatacaaagggcataatcaccagcaacacccgggacaataa

SEQ ID NO: 665932 - DNA, 100 bp, Homo sapiens
gccaagatgagccccaaggacctgtttgggcccgggcatcctcctctctgaagacgactccctgtatgagggcaccttcaccagggacctgaccctcatg

SEQ ID NO: 665933 - DNA, 100 bp, Homo sapiens
aagaaaccgaccctgattacgaggatgtatctgtggcccttccaaataagcggcataaagcaattgagaattcagaaacaactggaagattacttgacaa

SEQ ID NO: 665934 - DNA, 75 bp, Homo sapiens
ccagaagtgatcgctcagctggagaacgcggctaaagttctgatggcttgagtttgaagaaacagaagaacctga

SEQ ID NO: 665935 - DNA, 74 bp, Homo sapiens
aatcattcttgcacattggaaaaaccattgtgtgcttttctgctttgggccaagtagcaaaagctcgattcctg

SEQ ID NO: 665936 - DNA, 100 bp, Homo sapiens
ggtcccaggagccaccagaaactacagcccccaccattgctccctgatggaaaaggaagttctactacatcaccctgctacgagaccccgtgtcccgcta

SEQ ID NO: 665937 - DNA, 75 bp, Homo sapiens
atgtcctgaccaacttggacccagaatgacagcccatatcaaggcggtgtattctttttgacaattcattttcct

SEQ ID NO: 665938 - DNA, 100 bp, Homo sapiens
tcaacgtcttgaaaggagtgcttatagaatgaagttgcatgctccaggcagattccgaaaagctgcgccaggcatggattaaggctgttcagaccagtat

SEQ ID NO: 665939 - DNA, 90 bp, Homo sapiens
cgacaccatggtggaggagcagtacggccagatgtacatcaaggcctccggcagctatgcagtgtgctcatgggagcttagaagatccca

SEQ ID NO: 665940 - DNA, 98 bp, Homo sapiens
actatatccaacaactcagatatggcagaagtgaagtcaatgttccgggaagttcttccaaagcaagtacataccgagcatcaaatattaaggcaccc

SEQ ID NO: 665941 - DNA, 98 bp, Homo sapiens
gatgaccccaatgaggaccatctgtacatgggatgagctttctgatgttagccaaggcggatctaaagctaccactccagcatcaacagctaattcag

SEQ ID NO: 665942 - DNA, 90 bp, Homo sapiens
cgcttccacctctccaccaccgaccgcgtcatcaaagatttggtgcttccagatgtgagttatcaggtggaatccagtgaggaggatcag

SEQ ID NO: 665943 - DNA, 120 bp, Homo sapiens
tggaaatggcgccactaaatgaagaggatgatgaagatgaggactccacagtattcgacatcaaatacagtgagatggaagattttcgaggtatagcagaagaatcatttccaagctttc

SEQ ID NO: 665944 - DNA, 100 bp, Homo sapiens
gcggaggctgaggagaaggaggagcgggccgtggaggcttcgccgcctagcgtgcctgccagtgtagagccggtggagcagctgggctcggcgctgaggt

SEQ ID NO: 665945 - DNA, 100 bp, Homo sapiens
ccggcgttcttccgctggctcagccgcaagtacccgtccatcatagtcaactgcgtggaagagaagtttcagtctgatggaagcaaacaagaagataaag

SEQ ID NO: 665946 - DNA, 90 bp, Homo sapiens
gtgatacttacctcacctctaattagggacgaattggagaagaaggatggaggagtatgcgaccagtggttggaacctgaatgtgatgcc

SEQ ID NO: 665947 - DNA, 100 bp, Homo sapiens
gaccggcctcgcggagcccgcgcgccgagccccacgtcaaaatgcagatcttcgtgaaaacccttaccggcaagaccatcacccttgaggtggagcccag

SEQ ID NO: 665948 - DNA, 50 bp, Homo sapiens
cctacatcaggaatttcatggcaaggaaacattgctgaggctcttgtcag

SEQ ID NO: 665949 - DNA, 83 bp, Homo sapiens
ccctgtgggtgctgggcctctgctgcgtcctgctgaccttcgatgttcccgctgcctgtcaccaacgggaagggccggcccgc

SEQ ID NO: 665950 - DNA, 76 bp, Homo sapiens
gatccaaccgaagagaaaggggtgctccaccactccctcccatcccgagatacgaccctatattttaaaatgctta

SEQ ID NO: 665951 - DNA, 74 bp, Homo sapiens
ggagctggagctggagctctcggagggaagctactctttgtccgtgcgagactacgaccctcggcagggagata

SEQ ID NO: 665952 - DNA, 99 bp, Homo sapiens
tgtttattttcctcaccactgaatctacaggaacgcactccaggacgagaagcgccgcctggaggcccggatcgcccagctggaggaggagctggagga

SEQ ID NO: 665953 - DNA, 75 bp, Homo sapiens
ccggattggggatgagtatgcggaggacagctctgatgaggagccttttccccacgactctgaaagaggacagcg

SEQ ID NO: 665954 - DNA, 90 bp, Homo sapiens
gggaacgtcaacatcgaggaggccgagaagctcttgaagccctacctgaaccggtaccctaaggcagactgccagattcacttacagccc

SEQ ID NO: 665955 - DNA, 51 bp, Homo sapiens
gcccaacagagggaactacaaccagaatgaagagttgagtatcttatatcc

SEQ ID NO: 665956 - DNA, 75 bp, Homo sapiens
cacagatggaccaaaggttatgcacagtgtctctggagaatggttcgactgttgcctgataccatcaatagcatt

SEQ ID NO: 665957 - DNA, 87 bp, Homo sapiens
gagcatggcatggccccgcaggtcttcacccaggccctggagtgcatgcgcagatttcaacactacacttgcacaatgtctttgaaa

SEQ ID NO: 665958 - DNA, 75 bp, Homo sapiens
agcgacagtacaaagaagactcttgtcacactaattgccaacaacaatgatgggaactgaagcagaaagtaccca

SEQ ID NO: 665959 - DNA, 80 bp, Homo sapiens
cgagctgtgaggggattcacttgtgtgcggaactcctcggaaccatgctcattgctatggacagtgctatcaccctgtgg

SEQ ID NO: 665960 - DNA, 101 bp, Homo sapiens
tgtacttccagggagacaccgattataagaagagaaactcagcgctggggaagaagatgcaacgccaggagcagcatcagccacgctgtaaacaaggggga

SEQ ID NO: 665961 - DNA, 75 bp, Homo sapiens
caggggtgctactgaactctatcgcacagataaacctctcataatgaaggcccccgctgtgcttgcacctggcat

SEQ ID NO: 665962 - DNA, 100 bp, Homo sapiens
actctctatgtttgccagtggtttattttacaggttagtccgttcattgatgacaacaccagaaggaagttcctcatttatgcaggaaatgactaccagg

SEQ ID NO: 665963 - DNA, 75 bp, Homo sapiens
ccaccggtccccaacgcatcatgccagggagccaagcgtcctgcccggcccttgtcagctcatttgcagcttaca

SEQ ID NO: 665964 - DNA, 100 bp, Homo sapiens
ccgggctccctctctctgcggccctagagttaatcccatcagccgagcattatggatccaagcctgttgagagaaagggagctgttcaaaaaacgagctc

SEQ ID NO: 665965 - DNA, 90 bp, Homo sapiens
tggggcagaatacagagatatggaatcagcactgctcagcacgcaggcatgtgaggaagctgggcttaaaggagactccagcaaatggag

SEQ ID NO: 665966 - DNA, 82 bp, Homo sapiens
ctgggattcgcgctgctgggcacccacggagcctccggggctggccagaagaatgtttgaaggtgagatggcaagtttaact

SEQ ID NO: 665967 - DNA, 50 bp, Homo sapiens
atttattaaaggaagcacacctaaggtgcaatatcagctacttagaagaa

SEQ ID NO: 665968 - DNA, 76 bp, Homo sapiens
attagacctgataaattatatagacgttgcccagaggaaggaacagagccacagagaaaaatgacttgctcacaac

SEQ ID NO: 665969 - DNA, 100 bp, Homo sapiens
actccacggccagagcctgggatctgctgtggaagaacgtccgggagaggcggctggcagggatgcctctttaatggcaatgagacggcgtatcaatggc

SEQ ID NO: 665970 - DNA, 83 bp, Homo sapiens
cccgagtcggtcagcgccggaggggaggtcatcaaggcttgggacattgccatagccaccatgaaggtgggggaggtgtgcca

SEQ ID NO: 665971 - DNA, 101 bp, Homo sapiens
gcctgacccatttggcagcagcctcgtgtgtggtggtctggtgtggacggtggaagcgtgattctgctgagtgtcagctgcggcatgaagctgaacctgga

SEQ ID NO: 665972 - DNA, 88 bp, Homo sapiens
ggttttgtagtaccaagtgcttctgccaaagcaggtgtggaagccatgagcaagttggaagtgtatcctcccttcttattttttctag

SEQ ID NO: 665973 - DNA, 75 bp, Homo sapiens
aaacaatggcatttacagaaagagtcaacagcagtggcaacaggtaaacaaagctaactgtcgactaccagaaaa

SEQ ID NO: 665974 - DNA, 82 bp, Homo sapiens
gtcccggggacttggggccgcagggagttccagggtctccctccactgctgtagtaacccgggtccggggcctcggtggtgc

SEQ ID NO: 665975 - DNA, 101 bp, Homo sapiens
tccaaatctgggaccagtctcggcaaatattacacttctctccttaaatgcactcggtgatggaaagagagccactattctgaagaacacttggccaaagg

SEQ ID NO: 665976 - DNA, 100 bp, Homo sapiens
cccaggctcaagcagtcctaccatgtcagccttcccagtagctgggaccacagcttgcttggctcaggaacaacagaagagaataaagaaaatgacctca

SEQ ID NO: 665977 - DNA, 82 bp, Homo sapiens
cggtcggtgtccccggctgaggcagcgcggccgcagcagccctcaaattgtggctactaatttgccccctgaagatcaagat

SEQ ID NO: 665978 - DNA, 83 bp, Homo sapiens
gctgtgacctgctccggagtcataaagaggacgccgggacaccaagaagcagggaaatgcttccatgaggcaggctgaacctg

SEQ ID NO: 665979 - DNA, 96 bp, Homo sapiens
ccgagccagccgctgttttgccggaggagcccctcaggccatgccttcgtgaacagccaggaatggacgctgagtcgatctgtcccggagctcaaa

SEQ ID NO: 665980 - DNA, 75 bp, Homo sapiens
accgacgcgctcatctgctggagcccgggaagagcatggaggaaatcaagaaggtgctgctgctggtgctgggct

SEQ ID NO: 665981 - DNA, 50 bp, Homo sapiens
ggtgacagtctgcatgtgcagttttcaggataccaagggttcgagttttg

SEQ ID NO: 665982 - DNA, 100 bp, Homo sapiens
agaacagagcagaaatcaaattgaagagagcagttgaagaagtgaagaaattattggtacctgcaattgattataccggaacagagccttccagtccctg

SEQ ID NO: 665983 - DNA, 100 bp, Homo sapiens
cagcagttggcacacatggttaaggaacaggaggaaaccattcagaggagtgtgaggaagaggctgtctgtgtcattatgtgtgcgtcggtcaagtataa

SEQ ID NO: 665984 - DNA, 100 bp, Homo sapiens
ttctgtgtcatcctgccggaaattcagaagccagagaggaagcttatgaaatgttatctgatccagtgaaaagacgagcatttaacagtgtagatcctac

SEQ ID NO: 665985 - DNA, 82 bp, Homo sapiens
tgcaggataatatgctccaacgttacaacattaaagatgccacttcaaatgaacaacaagagcttttctgtcagaagttgca

SEQ ID NO: 665986 - DNA, 100 bp, Homo sapiens
ggttgccccgactcccaccgggactcctaccagcagcaacctcatcattgtggccgaggcaggtgtctgcttttggggcagagttttcatcggaggcatg

SEQ ID NO: 665987 - DNA, 139 bp, Homo sapiens
gacaaaataatgagttccatagatgttggaatcaacaacgaacttaaagagatgaatggtgagaccacaagttttaatgtcaaccacctggacattgccccacgctatgccagcattctcatggggatctcaaacggag

SEQ ID NO: 665988 - DNA, 134 bp, Homo sapiens
gacaaccaccatccagagtctctttccaaatctccaggttttccctgcgctgggtaatcatgactattggccacagggtcgtcatgtcaaaacgggccagcttgcagccatcaaggttatggatgtcacagggg

SEQ ID NO: 665989 - DNA, 100 bp, Homo sapiens
gtcccaacgaagagaccacctgtccttcgagcaggtcagacccagctgcttttgagtcccgcctggagaaacgcagtgaatttcggaagcagccagtggg

SEQ ID NO: 665990 - DNA, 75 bp, Homo sapiens
caacacgagaagtatatgtccctcacactgtgtacaggctcccacatcaggacgagaaggagccctcgagttacc

SEQ ID NO: 665991 - DNA, 85 bp, Homo sapiens
cttttccgcccgcttcgatcgcctcgcgccggctgctctttccggacatgtgcaagccagccagcgcgccatagccttaattgca

SEQ ID NO: 665992 - DNA, 75 bp, Homo sapiens
ctgcacccagccacccagcagagcccgttcatggttgatctccacgagcaggctcgcgatgcctctacacaagta

SEQ ID NO: 665993 - DNA, 100 bp, Homo sapiens
gaaacattaagaacttggatcccattcacctgaggcacccgaagaagagaccatccatatttccagatttgttgacaagaataggagaagcaaccaagcc

SEQ ID NO: 665994 - DNA, 75 bp, Homo sapiens
ttaaacatgctcttgattttatacatcatttcaatgaagggattgtcaatgaggcagatcagattccgatttgac

SEQ ID NO: 665995 - DNA, 100 bp, Homo sapiens
tcagcagaagaaacacttcctataaatctcgcccaaacaggaaaggaagaatcctgtaagtacaatcccaagtattctgttgctaatgacaccggctttg

SEQ ID NO: 665996 - DNA, 100 bp, Homo sapiens
caaaagataggttatgccgaaggggtcttgctacgtacgttgcccaggttggaatgcagtggcgtgatcatggctcactgtagcctcgacctcctgggct

SEQ ID NO: 665997 - DNA, 100 bp, Homo sapiens
cgaaaacttgttagctttacattgtcagtcaactgaaccatcttcttggagtactcatgaagatggaagtctacatggagaatacaggatgaatccactc

SEQ ID NO: 665998 - DNA, 75 bp, Homo sapiens
tgcagtacctgcagaaggtctctggagacatcttcagcagatggcttgttcaatcagtatatcagtcaacaggaa

SEQ ID NO: 665999 - DNA, 111 bp, Homo sapiens
catcctccggctgcaggaggccaagccgcagaggtccgcgaggtccgcgatgagactgaggggacatcacgagtggttgcttggacctgaggtggacattctccccttttt

SEQ ID NO: 666000 - DNA, 100 bp, Homo sapiens
ggccgctgtgccacaggaatcctcattcatctggccaagttttatggttatgacaatgttaaggaatatctggagaggtgcggtggctcacgcctgtaat

SEQ ID NO: 666001 - DNA, 74 bp, Homo sapiens
ggcaactccagttactactggccaggtgaaggcggttacttcgcctgagatcttctttgatgttgtcagcctct

SEQ ID NO: 666002 - DNA, 100 bp, Homo sapiens
cgggacctcaccgactgcctgctcgtggaaatggagaagcaaagccaaagagctgaaggaccggcaccgggacttcccagacgtgatctcaggagcgtat

SEQ ID NO: 666003 - DNA, 51 bp, Homo sapiens
cctccctcagcttccgccccaaaaggacattggctccctggattatcaaga

SEQ ID NO: 666004 - DNA, 76 bp, Homo sapiens
gagagatgaggccggagcccaccaagttctgggaaacttatccccccgctgaaccagctggagctgctgaggaacc

SEQ ID NO: 666005 - DNA, 100 bp, Homo sapiens
taaagatcctaggattgctgcaggtcagcagtctccactggaaaaaaagatcttggtctggaagctccgagtttatcttgggaactcaagaggagaggat

SEQ ID NO: 666006 - DNA, 76 bp, Homo sapiens
gaaggctctcccaagggacagactgcagttttatacaatgacagatctgttctggaaaatcatcatgctgcgtcag

SEQ ID NO: 666007 - DNA, 96 bp, Homo sapiens
ccatgggcctccttgtggtcctgctcgttggaggctgtgcagcagaaggctctgtatgtggatgtgatccgtgtgaacagctactactcttggtat

SEQ ID NO: 666008 - DNA, 73 bp, Homo sapiens
cgagctggacccggaccggttttggggtgtcaaattgagaaccaggtagatccccaccacctacagtaaaaag

SEQ ID NO: 666009 - DNA, 98 bp, Homo sapiens
gccaagagcgacgccgccgtgtgcccaacggtcggtgtccccggctgaggcagcgcggccgcagcagccctgcacttcaggtggcaagacagctcctt

SEQ ID NO: 666010 - DNA, 82 bp, Homo sapiens
agactccaggacacccctgaagccgagaaatgcaattctgtggtgttcttggtcacacatttatggagtttctgaagggcag

SEQ ID NO: 666011 - DNA, 100 bp, Homo sapiens
gggatgactgattctcctccgccagccgagcccaggaagtgcgtcccctccgtggtcgtgggcgtcgtgggcatgggccacgtgcctggcatcgagaaga

SEQ ID NO: 666012 - DNA, 83 bp, Homo sapiens
acatcactttagaccctccacctaattgcagagaaaagaaaccttgtttattccctgtgaaaatgagaagatttctaaacagc

SEQ ID NO: 666013 - DNA, 101 bp, Homo sapiens
ggctaataacacaacaagtttagggagtccatggccagaaaacttttggggatgtttcgtctgaactcactttctgctttggcagaactggctgtgggttc

SEQ ID NO: 666014 - DNA, 74 bp, Homo sapiens
gagatgattgccaaacccccagctgtcaataccagcaaatatgcagaaagctatcggatccaaacctatgctga

SEQ ID NO: 666015 - DNA, 50 bp, Homo sapiens
gcagaagcctatggatctggagtctatacgagatactccagccaaaaatg

SEQ ID NO: 666016 - DNA, 82 bp, Homo sapiens
atacatgatttaaacaagagatttccacagaagagcttcttcgagacaccttcacttccctgggctatgaagtccagaaatt

SEQ ID NO: 666017 - DNA, 96 bp, Homo sapiens
ggcttcctagtgagtcggcggctgatttagaaggaggttcaggctacgataaagccaccaatccttccaaccgccaggaggactgggaatacataa

SEQ ID NO: 666018 - DNA, 100 bp, Homo sapiens
gccccatcctcatcctcaaggagactcggcggctgccctgggccactggctacgcagaaggagatgccctacctgaaatgccctcttcacaccgtcctga

SEQ ID NO: 666019 - DNA, 100 bp, Homo sapiens
aactcccaggctcaagcaatcctaccatgtcagccttcccagtagctggaactacaggttctcgggaccggaagtcaggtgggagactgggctccccgaa

SEQ ID NO: 666020 - DNA, 98 bp, Homo sapiens
cggaggatggcgtctaatgagcgcagttgattcgagcatgtcctggaattggaagccaaaatggaccagctgcgaacaatggtggaagctgctgacag

SEQ ID NO: 666021 - DNA, 74 bp, Homo sapiens
caggagcgatggcagcgaccgatatagctcgccaggtggtgaaaggtgtagcagtcactcggcctacacccaca

SEQ ID NO: 666022 - DNA, 100 bp, Homo sapiens
gtacagcaccggcaagaccaccttcatcagacctgcctagagctggaacgttacctccagagcgagccctgctatgtttcagcctcagaaatcaaatttg

SEQ ID NO: 666023 - DNA, 90 bp, Homo sapiens
tgactggaaacaatggcatttacagaaagagtcaacagcagtggcaacagtgaaagtaatttttctcccaagtttaacgaaaaggatggg

SEQ ID NO: 666024 - DNA, 83 bp, Homo sapiens
cgctaaagcaagaatgaaggtttctttgaggaacgcagcctgaatgtttgaaattggcacaatggaagaagctggaatttgtg

SEQ ID NO: 666025 - DNA, 98 bp, Homo sapiens
ctgctgcctccaccagacaccaaaccaggtctgcggtgccgctcagactccgaggatgagtgcagcacgcaggaggccgacggccagaagatctcctg

SEQ ID NO: 666026 - DNA, 100 bp, Homo sapiens
cccagaccacacccttgagcctgagcccgacattattcctgagctgaacagatgggtaaggatggcaggggttatgtcccagctaccatcaagatgaccg

SEQ ID NO: 666027 - DNA, 98 bp, Homo sapiens
ggcggcccacgcgcagcgacagggagaggcacattcaggaccccgcgagccagcggctgacgtggaacaagtccccaaagagcgtccttgtcatcaag

SEQ ID NO: 666028 - DNA, 50 bp, Homo sapiens
gactcggatttctctatctgatagagctcggcttattccaggggtgtgtt

SEQ ID NO: 666029 - DNA, 95 bp, Homo sapiens
aatatggaaacaggaacaggactgactccagtgatgacgcaggccttaaggagaaagtttcaggttgtttacattcagagctctatcaataagag

SEQ ID NO: 666030 - DNA, 82 bp, Homo sapiens
cctgtggcatgaggaagctgggggcatcttctccccagagcacctgttccttcaggccttctggcagaccatgaatcgcgag

SEQ ID NO: 666031 - DNA, 83 bp, Homo sapiens
ctgtgacgaaggtgctaccatcgtgagagtaagcaaaagctggcaggctgacagaggcggcctcaggacggaccttctggcta

SEQ ID NO: 666032 - DNA, 78 bp, Homo sapiens
aacaacctgcttggcaagtttgaactcacaggcagaggcagaggtgaatgtggtttctaccaaagaagttttgatgaa

SEQ ID NO: 666033 - DNA, 75 bp, Homo sapiens
gcgccgcagtcccgggaacggagtgtaaccagatccaccatggccttcgctctggcattgtcgtccttggcaatg

SEQ ID NO: 666034 - DNA, 83 bp, Homo sapiens
tgtaaggacttaagaatggtgcctggcagatatttggcaatgaggagcagcagctggcgtgggccaagcgggagagcgagaag

SEQ ID NO: 666035 - DNA, 100 bp, Homo sapiens
ccgggaggtgcttctgcggctgtacggagccatcttgcagcctgccacagtgactcaggtcactcaaggaactatccgaccagctgccaacttcgatgct

SEQ ID NO: 666036 - DNA, 100 bp, Homo sapiens
ctcagatactttcgaatcttcatcgccctgtggaacatcttcatgatgttctgcatgattgtggtcgagctgtgcagttttagcgggtacaagatctacc

SEQ ID NO: 666037 - DNA, 100 bp, Homo sapiens
ctcagaaaggagctctatgaactttgggaaacgcaaacatgcagatctttgtgaagaccctcactggcaaaaccatcacccttgaggtcgagcccagtga

SEQ ID NO: 666038 - DNA, 82 bp, Homo sapiens
tcacacgcttcctctccagagtgatcaagtgtgacccgggcaacaggtttgtctatgctggctctaactcgggcgtggtcca

SEQ ID NO: 666039 - DNA, 83 bp, Homo sapiens
gcagaagatctgggtgcccgtggaccacaggccctcgttgcccagatttccaaagaactactggttcagattttagctcttcc

SEQ ID NO: 666040 - DNA, 75 bp, Homo sapiens
ccatcctgggctacaagacgctggccgcgggctccatcagcatggctgagggatcaagcatgaattgcaagcaaa

SEQ ID NO: 666041 - DNA, 97 bp, Homo sapiens
tcacgcaaggcgaagaccagtactatctgcgggtcaccacgatttcaggtatgctgctgaaagtgggaatcctctacattggtgggcagctggtgac

SEQ ID NO: 666042 - DNA, 75 bp, Homo sapiens
ctctgcgggactctgaggaaaagctcgcaccagttggaatcgaagcctcttaaaatggcagatgacttggacttc

SEQ ID NO: 666043 - DNA, 76 bp, Homo sapiens
gacaggcacctggataaccttttgctaacaaaaacagattttggaaccagtactagcagtggaggactctttggaa

SEQ ID NO: 666044 - DNA, 100 bp, Homo sapiens
caggaggcaccttggataagctggagtctattcctggattcaatgtcatccagagcccagagcaggtggtcttttggtgccttaatgaagagtcggattt

SEQ ID NO: 666045 - DNA, 82 bp, Homo sapiens
ccgaagccccctgcaggaactctacaacccaatccaggttaatttggagtggcccctggagtcagtttcctacaccatccga

SEQ ID NO: 666046 - DNA, 75 bp, Homo sapiens
cagaatggcaccctcacctcccagcccaacaacaggttggtgacatcgtgaaagtcacaaggatgaatataaatg

SEQ ID NO: 666047 - DNA, 100 bp, Homo sapiens
tattcaagaatcactatggaaccaaatcctcacacttaattcagtgcacaaatgagatgaatgtgaacatcccacagttggcagacagtttatttgaaag

SEQ ID NO: 666048 - DNA, 78 bp, Homo sapiens
attttgctcagcgactgtttgatgacgtcccgcaggtgctggagagtcatgcctgtgagccctgggcacctcctgatg

SEQ ID NO: 666049 - DNA, 96 bp, Homo sapiens
gaagcctttaaatgcagcatctgcgatgtgaggaaaggcacctccaccaggtaagaatgattgatgttggctgatattggagtgctcattcacatg

SEQ ID NO: 666050 - DNA, 98 bp, Homo sapiens
tttgtttgtcagcagccaaggtgtttccaggaagttcagagagaacaggaagcgttgttgacgaccatggacatcatccacgatggatttggattcat

SEQ ID NO: 666051 - DNA, 75 bp, Homo sapiens
tccagggctatgccgccaagaccgtctttgagcactatggagatgaccgccatggccacggaggacccccagagc

SEQ ID NO: 666052 - DNA, 98 bp, Homo sapiens
gcgggtacagaccgtcgatgctgtgcattgaggaccccctgctgccaggatgcttatagaattttatgagtcaccagatccagaaagaagaaaaagat

SEQ ID NO: 666053 - DNA, 100 bp, Homo sapiens
caggaatgtgtttcactgtgaggcacacagaattctctacatttgtgaaagtcagtttctgaggaatttcatcaggtccttccacttcctttacttctgg

SEQ ID NO: 666054 - DNA, 74 bp, Homo sapiens
atgttggagaactatagcaatctggttttcttgggtgtggccgacgacgatgccctcgctgaggagcgcatgcg

SEQ ID NO: 666055 - DNA, 51 bp, Homo sapiens
atcctcaagagtcagctggcaggccataaaattttgagtagaaaaatccag

SEQ ID NO: 666056 - DNA, 50 bp, Homo sapiens
ccatggccttctacgttgtgaaaatggaccttaaagaagccaacttcgac

SEQ ID NO: 666057 - DNA, 80 bp, Homo sapiens
aggctccagcaggccgcatgcctagcgctcaaacacctcaagaactctgtttaaggagagcagacgaggccatgggcacc

SEQ ID NO: 666058 - DNA, 73 bp, Homo sapiens
ggcgccctagacatcttctccctcccttgcctcagaaactatggaggagtatatgttggcctaccatctgaag

SEQ ID NO: 666059 - DNA, 100 bp, Homo sapiens
aggcaacactggccaagaagaggaaagttccaaaagctgagacaagatcttgaaatggtactgtccactaaggagtcaaagaatgaaaagttaaaggaag

SEQ ID NO: 666060 - DNA, 90 bp, Homo sapiens
cgcggcaccggcttcgacgccctctgcccgctccagaagcaggtgagaagccctaccactgcaactgggacggctgcggctggaagtttg

SEQ ID NO: 666061 - DNA, 99 bp, Homo sapiens
ctggctgccatctaccacctgggggctgcgggagccaccaaagggagtgcctgcagggcaccatccgcaacagccaggaggcggaggtctcctgcccct

SEQ ID NO: 666062 - DNA, 98 bp, Homo sapiens
gggattggagattccacccaaacttgctggtcactgggaggctcatgcacaattagttcgagaagttgatgtggagaaggtgtctgcttttgagaatc

SEQ ID NO: 666063 - DNA, 51 bp, Homo sapiens
cttctggccgcgggaaggagaggtcgcaatggaagaagagatcgccgcgct

SEQ ID NO: 666064 - DNA, 75 bp, Homo sapiens
ccggaagtgtccgatcggaatcagccctgtccgagagcaatggctgccatccggaagaaactggtgattgttggt

SEQ ID NO: 666065 - DNA, 87 bp, Homo sapiens
gatgcctttatggaccaaggatggtcaaaagcatgtggtcacattacttcagtgtaaacaggaacatcgataagtagtgtaaaaact

SEQ ID NO: 666066 - DNA, 82 bp, Homo sapiens
ccagcagctcctggcctccccgcagctgaccccggtgccacatcatctcacagttcaaccaaggcttctacgactgtgtcat

SEQ ID NO: 666067 - DNA, 75 bp, Homo sapiens
ttcaccatggacaagctggtgcagaacattgcgcggcagttcaaatctgaacatcaatgatgtactagggaacta

SEQ ID NO: 666068 - DNA, 75 bp, Homo sapiens
tacatctcacagcagaagacgggcgtgggagaggagaaggcagagcccccccaggctatgaatgccctgatgcgg

SEQ ID NO: 666069 - DNA, 98 bp, Homo sapiens
ggccacctcaactggggtcagaaggacctctaccgagatgtgatgttggagaactacaggaacatggtcttgctggacactgaccactactttctgcg

SEQ ID NO: 666070 - DNA, 100 bp, Homo sapiens
ttagaagacttgctgagcttttcttaccaggtggcaaagggcatggctttcctcgcctccaagaatgtctgtctgacacttactgccaaacgcatggcaa

SEQ ID NO: 666071 - DNA, 100 bp, Homo sapiens
cagcaatggcggaaggagaagatgtgccgccgctgccaacgtcgagcggcgacggctgcttcctgtgcttcccagaattccatcatctgactgccatcct

SEQ ID NO: 666072 - DNA, 74 bp, Homo sapiens
cacaagacgactcaataggaggaaggcagcacagcattctcagaagcagtctactgagctcttccagtgcatgt

SEQ ID NO: 666073 - DNA, 90 bp, Homo sapiens
caggtcgggaaccatccttggaaatcctgccgcggacttctctgcacagcatccctgtgacaggggtcaccagtcgttggcacaccaaga

SEQ ID NO: 666074 - DNA, 100 bp, Homo sapiens
tggagttatgccaaaaggacgtcctcctagtgctagcagcttagatgccatttctcctgttcagggttatgtggtccgaatcagtggtgggaacgacaaa

SEQ ID NO: 666075 - DNA, 75 bp, Homo sapiens
ggctggaacacctcgccaaagcagagaaataagacaaagcatggaggacacaagaatgggaggaaaggcggactc

SEQ ID NO: 666076 - DNA, 94 bp, Homo sapiens
gtaaaatctactgaggcaaatgtactacctccatcatctacagagggataaattggaagaaatcttgcggggattaactccaaggaaaaatgat

SEQ ID NO: 666077 - DNA, 75 bp, Homo sapiens
tccagatccgccggaagctgcgcatcgagaagcgccagcagtgtactaatggtcacttgatgtgcgctggctgtt

SEQ ID NO: 666078 - DNA, 83 bp, Homo sapiens
cgcaaccctccctcccggctcctcggagcggccgccgggcagcggccgagcaggagctccgcgtggcccagacagagtttgac

SEQ ID NO: 666079 - DNA, 109 bp, Homo sapiens
tgagccacgtgcatgaaccaaacccacttcgttcaagacaggtgtttaagcgtgaaatgtccatatgagaaagtaaacttgagctggtacaatggaacggtcaacccct

SEQ ID NO: 666080 - DNA, 76 bp, Homo sapiens
gtttatttgtacaaatagcacaggaggaaattatggaagtggaaattacaatgattttggaaattataaccagcaa

SEQ ID NO: 666081 - DNA, 74 bp, Homo sapiens
gtccaagaagaatccaattgccaagaatcttggagaggcagaatatgtagtagcactttttatgtacatgtgtt

SEQ ID NO: 666082 - DNA, 100 bp, Homo sapiens
aggtcaccacgcaccgactatgtcgcctgccaccgagccgggcccacctccccaccaaggaaggtgttcatgaagtctgtgaagctggagtgggtgcaag

SEQ ID NO: 666083 - DNA, 90 bp, Homo sapiens
gtggtttatcattgtaatcagcttcttaccaaatacagaaggttttacaactgcctacagcatgctttggaaagggaaacgatgactaac

SEQ ID NO: 666084 - DNA, 100 bp, Homo sapiens
aacccatcctgccgtccttctccactttcgccagcccgtgccgcgagcgcggcctgcaggaggctacggggcgtggagtgctggacctgccaacacccag

SEQ ID NO: 666085 - DNA, 100 bp, Homo sapiens
ttctcaagcaaatgatcaagaagttggatgccagctgtgcagcggccaaagatgaagaggaagcctttctggattggagtgatgatgatgatgatgatga

SEQ ID NO: 666086 - DNA, 110 bp, Homo sapiens
tgattctgtgaccttgagcttcatagaggaaatgaaagactcctctatggaaaggtagctacagcaagctgggtagcaggcagatccaaaggatatcatgaagtttccag

SEQ ID NO: 666087 - DNA, 112 bp, Homo sapiens
gccgagcagccccggctctgggctacggactatgggcgaatagctctgaccacccggcgaaggtttttcgttggaatatacgttgcacatttatggcgattctgagtgtgag

SEQ ID NO: 666088 - DNA, 51 bp, Homo sapiens
cagagtgcccagaggccaagcggctaaagaaattccttgagctcataggca

SEQ ID NO: 666089 - DNA, 50 bp, Homo sapiens
aaagaacctctggtgttgaaaggtactccaaagattcaggtttactcacg

SEQ ID NO: 666090 - DNA, 100 bp, Homo sapiens
accttatcccagggcagcccctcctatggctccccagaggacacagccaaaatgaagtttaatccctttgtgacttccgaccgaagcaagaatcgcaaaa

SEQ ID NO: 666091 - DNA, 75 bp, Homo sapiens
ggcatgtggcaaaacacacagctgaggattgttaaaatgagtcttcggaagcaaacccctagtgacttcttaaag

SEQ ID NO: 666092 - DNA, 50 bp, Homo sapiens
ttgatgagattttttcagcaacaagggatgcccgggtagttaaagacatg

SEQ ID NO: 666093 - DNA, 98 bp, Homo sapiens
tgaaaggaatgggtctgggaccttaacagggagccatggccactgcagaacaaattagacttgcacagatgatttcggaccataatgatgctgacttt

SEQ ID NO: 666094 - DNA, 83 bp, Homo sapiens
gaagaagattaacctggagttaaggaacagatccccggaggaggagacagaagaaattctggcagatgtgctcaaggtggaag

SEQ ID NO: 666095 - DNA, 80 bp, Homo sapiens
agtggtcgcttcttctccttggacctgagggcactcgctttgctcctgtcagtacacactcccaaacagttaaacccagc

SEQ ID NO: 666096 - DNA, 74 bp, Homo sapiens
gtgaagctggagttcccttcccttccacagtgcaaggaagacgccgagactgaagcgttcccggctgaaggtga

SEQ ID NO: 666097 - DNA, 76 bp, Homo sapiens
caggccagaccctctgggagcttctcagccattttccacagatcagatcatgatgctgccgccaccgccgccacca

SEQ ID NO: 666098 - DNA, 75 bp, Homo sapiens
tttttgacagcttccgccgggactgcctggccgacgtggacaccaaggtgattgtgaagacaagaacggaatatc

SEQ ID NO: 666099 - DNA, 100 bp, Homo sapiens
gggtaacctagcaacgcagggaccgcggcggtaactgtggctagggaaacctggagcggtcagagcaggttagaaaatggatttctgactggaatctcac

SEQ ID NO: 666100 - DNA, 82 bp, Homo sapiens
tggacagatcaccccacctcttggctggagaatggggtactaagagaaaagcacgaagctgtggatcatagttcccagcatg

SEQ ID NO: 666101 - DNA, 90 bp, Homo sapiens
agaagaccaaggaagctgttttgctccttaagaaacttaaagcctggaatgatatcaaaaagaacatcagaacagacattgtcatggatg

SEQ ID NO: 666102 - DNA, 100 bp, Homo sapiens
ctggctctgctcccccagactctgttggatcagaaggtcaaggatcagggagcttccaaggcatttgatacctttttgatgggaagaagggctctgagga

SEQ ID NO: 666103 - DNA, 75 bp, Homo sapiens
aggacatcgacatccaggcgaactcggcctatcgctaccctccgaagtccgagtcttgctgcgacacccaggctg

SEQ ID NO: 666104 - DNA, 50 bp, Homo sapiens
aaaagaagcccaaagttttaaaggctgacaaacgggctcatcataatgca

SEQ ID NO: 666105 - DNA, 50 bp, Homo sapiens
cgaagggactgtgtattttaaatgcaggaggcaagtgaggcctatctggt

SEQ ID NO: 666106 - DNA, 75 bp, Homo sapiens
gcggggaccgctgtgctctcgggaagcatgctagagtgaaagaaagagagcacgaacgtcggaaacgacatcgag

SEQ ID NO: 666107 - DNA, 100 bp, Homo sapiens
caggcgcggccatggcgcagctgggaaagctgctcaaggagcagaagtacgaccggcagctgagccgtggtccttcagcatatctctgtgctgcagacaa

SEQ ID NO: 666108 - DNA, 51 bp, Homo sapiens
ctccaacggggccttctacaaggttcaggaagatttgactgaagagaaaaa

SEQ ID NO: 666109 - DNA, 74 bp, Homo sapiens
actgaggacttaaatgaagccactgattagcaatttaaagatcctctccaagggccagatgcagatggctggag

SEQ ID NO: 666110 - DNA, 98 bp, Homo sapiens
gcgcatggggctgctgagaccgctccggacgtgcgaagcgttcgcggtgcgatcggtttgggcttggccagccaggaagaatacctggttctgtgaat

SEQ ID NO: 666111 - DNA, 74 bp, Homo sapiens
taggcataaggaagaatgtctcatgttcgagtctggggctgtcgctgtgctctatggagtcttgctctgtctcc

SEQ ID NO: 666112 - DNA, 96 bp, Homo sapiens
cctcagcctccagagtagctgggattacagatgtggaaacatgagggcttttttgcactctataaaggattttggccaaactggcttcggcttgga

SEQ ID NO: 666113 - DNA, 74 bp, Homo sapiens
ccgaggtgcctttctccaaaagggaaacaaaggacccatcgcaaatgttttccatgctgatctccaaagtggtg

SEQ ID NO: 666114 - DNA, 75 bp, Homo sapiens
tccgcggctccggtcacgtcaccgtttcataattggacccttgaagacactcttcagtggttgatagagtttgtt

SEQ ID NO: 666115 - DNA, 75 bp, Homo sapiens
tttcaagatgatccttaccttatgccagcatcatctttggaatctgttcttcagatagatcctgaagttacagat

SEQ ID NO: 666116 - DNA, 100 bp, Homo sapiens
ggggacgacgcgtgcttcgtggcccggcaccgttccgcggacgtgctcgtctcatcggatcagatcgagcagctccatcggagatttaagcagctgagtg

SEQ ID NO: 666117 - DNA, 101 bp, Homo sapiens
gattgttggtgaaacaggatgtgggaagagcacacagattcctcagcgtcttcctccacttgatgaaggtggacccagactccacctggttcctcctgaac

SEQ ID NO: 666118 - DNA, 75 bp, Homo sapiens
caagcttttgtccccaaaccagagggagaaactgcctacatccgggttaaagttgatgggcccagaagtccaagt

SEQ ID NO: 666119 - DNA, 90 bp, Homo sapiens
cgagcagcggcgggggcccgaggggtacttgaagaagcagaagctcaacatttatatcagtccatcttgcctgatatggtgaaaattgca

SEQ ID NO: 666120 - DNA, 50 bp, Homo sapiens
aatggaccaaaatgaacacagtcactgggtgtgaagcagtattctggaaa

SEQ ID NO: 666121 - DNA, 128 bp, Homo sapiens
cgctgtccgcgccggctcccaccccggcccgaccccgacccggcccggtcaggccccatactcagtgccaggtcaccagatggaaagcgaaaaagaaagaacggccaatgttccctgaaaaccagcat

SEQ ID NO: 666122 - DNA, 74 bp, Homo sapiens
tcggaggtgggtccggggagcccgactcggaccgcggaggtattctctgaaaccaaatgaccaaatcttggctg

SEQ ID NO: 666123 - DNA, 100 bp, Homo sapiens
ttagtgaggctcagagatgcctgtaccgtgatgtgacgctggagaacctggcacttatgtcctccctggaaaagtccaacctgatcgtggtccagagagg

SEQ ID NO: 666124 - DNA, 143 bp, Homo sapiens
aggcacagagatctgtaattacagctactccagcaacatcttgtccataaggctgaaccggcaagtattctctactgccgctgatggtcaaacgcaagtggaaattaaagtgtgtcagggtgaaagagagatggctggagaca

SEQ ID NO: 666125 - DNA, 100 bp, Homo sapiens
ggcctctcaatattgcctggacgattgcttagaggagtatttcctgaactgtgtgggtaggtcctggcattgatgtgcctgctccagacatgagcacagg

SEQ ID NO: 666126 - DNA, 75 bp, Homo sapiens
ccccgcggccgcaccttcccgccttctcaggtgaccaagaatatggcccaggtgaccaaagccctggacaaggcc

SEQ ID NO: 666127 - DNA, 98 bp, Homo sapiens
gccgcctacacagcagttctgcaccactctcagaatccggatttctcagatgaggtttgtaaacccaacttcatttgtgtatggatcaaatgatgaaa

SEQ ID NO: 666128 - DNA, 101 bp, Homo sapiens
tctcggcccccggagcggggaccacggagacagaccccggcccggcgaccgagctgggcccgtgagccactcggcctcagtgcctccggagccagcgtggt

SEQ ID NO: 666129 - DNA, 100 bp, Homo sapiens
ctgaacgggatttatacacacatcactaaaaattatccctactacaggactgcggacaagggctggcaggtgaatgagtggcaggatgactggccgacct

SEQ ID NO: 666130 - DNA, 84 bp, Homo sapiens
cggcagtccacccaccgccgccgcctcccaggtcttattagtaggtaagaaacagctgctcctccacctccaccccagccccat

SEQ ID NO: 666131 - DNA, 88 bp, Homo sapiens
cggatttttggcctcatactctgttatagataaacaaggattacctcaacctctcttggaactcaatgactctcctgtcttcaaaacc

SEQ ID NO: 666132 - DNA, 75 bp, Homo sapiens
gcttttcaccgcggccatcctgcaggcacagttgccgattacagaatttggtgttcacttggcagaactgactgt

SEQ ID NO: 666133 - DNA, 82 bp, Homo sapiens
ccccagatccatttacactttacagctgcctgctgtttcccggggagatcatgaaacgaggtcgccttcccagcagcagtga

SEQ ID NO: 666134 - DNA, 98 bp, Homo sapiens
aagaattggtatttcaaatgaccaccatgttgcaaaagagttactggaggtgaactgtttgaagacatagtggcaagagaatactacagtgaagctga

SEQ ID NO: 666135 - DNA, 98 bp, Homo sapiens
taaccctcaataagaaatgcacgcatttgattgttccagagccaaagggggcccattggaactacttcagtttgatcacgggcagtcaaatccaactt

SEQ ID NO: 666136 - DNA, 82 bp, Homo sapiens
cgctcccgggaaccgttcccgggccgttgatcttcggccccacacgaacatccagtcatggataaaaatgagctggttcaga

SEQ ID NO: 666137 - DNA, 143 bp, Homo sapiens
gaatcatcatgttggttggctggttactgggaaaagatatcctggaaatgtttactattagtgtaaggcaaaagagatttcactagcagacctccaggagaattatattgaggcattaaataaattagtgtctgaaaatcaac

SEQ ID NO: 666138 - DNA, 100 bp, Homo sapiens
ctggagcatgaccacagacccattcagggaggctggcggactcttcatcctggacagtcccttactgtatgtcaagttaaaggaaaaggtgcttctggaa

SEQ ID NO: 666139 - DNA, 98 bp, Homo sapiens
gggaggggacggccgccggagccgcgaggccaaatcgatgctatagaagacaaacaagggaaggttttttttccttttgcatcatggctcaatttgga

SEQ ID NO: 666140 - DNA, 100 bp, Homo sapiens
aaaacaggatcagtaaagaaggaaaaagcagtaaagccagaggaagtttttgtccagaagtgcttatagaaaagatggctaatattaacctaaaagaaat

SEQ ID NO: 666141 - DNA, 102 bp, Homo sapiens
ttgtcgaccatcatatcttatccaagaatggaagttggatacactttgtgacttgtacgagacactgaccattacacaggctgttatttttctcaatacgag

SEQ ID NO: 666142 - DNA, 50 bp, Homo sapiens
tcattgtttgtcaccacaaaaaggacaggactttgcctcccgggccaaac

SEQ ID NO: 666143 - DNA, 100 bp, Homo sapiens
acatgagacagcagccaaacccccagtgtttgaagaacctgaagatcccagtaacaggtcatttttttccgaaatcatctcctctatttcggatgtaaaa

SEQ ID NO: 666144 - DNA, 113 bp, Homo sapiens
ctccgtggccttagctgtgctcgcgctactctctctttctggcctggaggctatccagcctcaaactggaggattataaggatcgcctgaaaagtggagagcatcttaatcca

SEQ ID NO: 666145 - DNA, 82 bp, Homo sapiens
ctattcacctcctgcctcaccacccccatcaagatcgccctgcgctggctctgacgcccgctctgcggcttcggtgtttgaa

SEQ ID NO: 666146 - DNA, 100 bp, Homo sapiens
tgccgacgtcgctgaacttctggtggttgaaaaggacactcgatttattcctggattacagtgcatgcaagatatgggaaatactaaagcaagactactc

SEQ ID NO: 666147 - DNA, 100 bp, Homo sapiens
cgaccggctgtggtgttccagtccccactgaccagtaggagcagcagggcgtcggcttgtgaggttaatagtcctaggatggatctgactcttgctgaac

SEQ ID NO: 666148 - DNA, 51 bp, Homo sapiens
cgcagggagaaggaagaggtgtttgaaaagatacttggcatatcgaaattt

SEQ ID NO: 666149 - DNA, 75 bp, Homo sapiens
ggtccctgaagagggaagacacgcggaaacagtggagcggaggcggagggacaagatcaacaactggatcgtcca

SEQ ID NO: 666150 - DNA, 50 bp, Homo sapiens
cctggtcgagccggaggaagccaccaggtttctaccatgaatgaaatgaa

SEQ ID NO: 666151 - DNA, 89 bp, Homo sapiens
gggagttgggggcaaggagaagatcctgggttttggccaaattgggcgagggcacaaaataaccacttaccccttctcaccgaggaaga

SEQ ID NO: 666152 - DNA, 87 bp, Homo sapiens
caaatgaatttgttagtgctgtgtgctggagggcactaccagatgggtttttccactactcccaagggcaagtgtaccttgggaatt

SEQ ID NO: 666153 - DNA, 96 bp, Homo sapiens
gggacccggcgaagacgcgaccgcggcgcgagtcaccatgtcctgacacagctctccctgaggagcagccacattccagctcccagtgcgcccctc

SEQ ID NO: 666154 - DNA, 75 bp, Homo sapiens
tttcacttattcatctgtccagcatgactcatccccgggagtgttgacgccgacaccatgtggatccaggttcgg

SEQ ID NO: 666155 - DNA, 101 bp, Homo sapiens
tgggaggcgaggacggtctctgccagtataaatgcagtgacgattcaaccctatgaaaagataaaggccaggggcttgcctgataatatatcttccgtgtt

SEQ ID NO: 666156 - DNA, 51 bp, Homo sapiens
aagctgggctcccaggtcagctcatgtcagtgaaaaaaccagtgaatcgcc

SEQ ID NO: 666157 - DNA, 98 bp, Homo sapiens
aatgcaataattctccattgagaagagagaagaacattctcgaatacctagaatggggtgctgtacttctttgcagtatacaaggactagcagttaat

SEQ ID NO: 666158 - DNA, 99 bp, Homo sapiens
ctgggcggccggccgacccttcctgtcgctgacggcgactgcgggaggccaggccctagactggagctggttacagacggaagaagaagagcacagctg

SEQ ID NO: 666159 - DNA, 100 bp, Homo sapiens
ctcaaccagatgaggaagtacaactttgagcactgctgatggttcttcagaactcaggaatcgtgttgcatgcattgtttctacccacctgagatggttg

SEQ ID NO: 666160 - DNA, 100 bp, Homo sapiens
ggaagattttgatgcaaatatcgaagaacagaaagaagaaaagaaagatgcagaggaagaggaaagcgaactggcccctccagccagcgtcaggtgcaga

SEQ ID NO: 666161 - DNA, 49 bp, Homo sapiens
gttgagaagtttattcagaaagttatgcttcctcctggagcccagcatt

SEQ ID NO: 666162 - DNA, 74 bp, Homo sapiens
gtggattcagcgcgatgcccaaatccaagcgcgacaagaaagggcaatttgcatatttctccaaagaaccatcc

SEQ ID NO: 666163 - DNA, 98 bp, Homo sapiens
ccagtgggtgctcacagctgcccattgcctaaagaagaggagatgttaaagtaacccatcttgcaggacgacattgaagattggtcttctgttgatct

SEQ ID NO: 666164 - DNA, 100 bp, Homo sapiens
gggctgctccccaggacctgagcaggaacctggagttttcaggtgactgctggctgctggcagccattgcctccctcaccttgaatgaagaaatcctggc

SEQ ID NO: 666165 - DNA, 97 bp, Homo sapiens
tctgcagccacatactatccgtttgttcaggaaccaccagtgacagagccataaagaatgctgatgggagaaccattttcctaattttcaaattgtt

SEQ ID NO: 666166 - DNA, 71 bp, Homo sapiens
aaggcgcgagtgaggaaaggaggtactgtaggtacctttgacaggagcgtgaccctgctggaggtgtgcgg

SEQ ID NO: 666167 - DNA, 100 bp, Homo sapiens
agcagcggcgggaggagcctccgggacagtaccacaggcacctggagtaccggcatcggtcgctgtggcccccgagtgtccgtcagagcctaggggagcc

SEQ ID NO: 666168 - DNA, 90 bp, Homo sapiens
tggcacttcattggccacctacagaaacaaaatgtcaacaaattgatggagtctcactgtgttgcccaggctgaagcagcctcaaactcc

SEQ ID NO: 666169 - DNA, 74 bp, Homo sapiens
ctaagaaatgggactttacagctttgatcgatttctgggataaggttcacaaaaaggattctggcttttggcga

SEQ ID NO: 666170 - DNA, 98 bp, Homo sapiens
acgccgagctggtgctgctcaccttgggccaggcctggcagggctgctgtggaaaatctctgttctcacaaagtctccccaatgctctacaagcaact

SEQ ID NO: 666171 - DNA, 73 bp, Homo sapiens
catatctcagagccttgcacccaggacacattcagctaacgtattttagcaggtggagtgaggttgaagattc

SEQ ID NO: 666172 - DNA, 78 bp, Homo sapiens
tgcggcatgatctccatcaccgaatggcagagtctgggagggacgttggagggtcatcccatatgatgtgctccctga

SEQ ID NO: 666173 - DNA, 75 bp, Homo sapiens
aaaccagtggccacagcatctttgtctagccccagtgcagttccggtgtctcgcccggtcctcaccctcagggct

SEQ ID NO: 666174 - DNA, 89 bp, Homo sapiens
ctcgtgtggttttggctcatggctctcaccttgctcacgccaaaactggacaagccaaggcatctgtagccaaagtaaacaaatctaca

SEQ ID NO: 666175 - DNA, 87 bp, Homo sapiens
tgggactctgcaatagatacatggagcccatcagaatggcagatggcttatgaaccacagattttccgcagatttccagtggcccca

SEQ ID NO: 666176 - DNA, 100 bp, Homo sapiens
caccctgactcggagacggacgaggatgaggaggagggggacgagcagcagcggctcctcaacacccctcgaaggtggtggaggtggatacagcagtcgg

SEQ ID NO: 666177 - DNA, 75 bp, Homo sapiens
gaaatcttggagaagggtctaaaggcctccaggcccaaggtcagcatcccactgtcagccatcattgaggtccgc

SEQ ID NO: 666178 - DNA, 149 bp, Homo sapiens
atttgttggggagaagaggattggaggtgtcagtgttaaaggaacctctacaacgaaggtgaagccacggaagataagattgtaaaccatggctgtgtggatacaagctcagcagctccaaggagaagcccttcatcagatgcaagcgt

SEQ ID NO: 666179 - DNA, 101 bp, Homo sapiens
gccgtaagaactaaaatggtctactgcaaaattgatcagacccagagaaaagtagttgtcagtctcatataagaactacagctcatcaggaggagatcgca

SEQ ID NO: 666180 - DNA, 100 bp, Homo sapiens
cggagaccagacctactgcagccacgcgggcgagcggctgtgtggatgtcggcgaagccgcgggcgagacaggccgacggtcgcaaggtcctacggtcaa

SEQ ID NO: 666181 - DNA, 90 bp, Homo sapiens
ttttaattatgacctttgtgactctatggtggagagattcaaccagttagcgtgaaagttggagataaagttcttctcccagaatatgga

SEQ ID NO: 666182 - DNA, 74 bp, Homo sapiens
cctggggatacaaggcccccaaggtccacctggaaaagagggtcagagggtgtgtttccattgtagaaaacctg

SEQ ID NO: 666183 - DNA, 100 bp, Homo sapiens
aaactaaaggagagttattccagtttaggaggaagatgcaagcggtttgggaccttgaacaaggcaaatatggttttggaccaagaatcgccttcagccc

SEQ ID NO: 666184 - DNA, 75 bp, Homo sapiens
gggagccccgggagccgcacgagaccatcatgcagacatcagagactgggtcggacacaggctcgacagtgacct

SEQ ID NO: 666185 - DNA, 93 bp, Homo sapiens
tgcagatagcaaggatgaagaagtcaaggttgcccccaggcggtccttcctggaggccacaagaggaagctgaatgaagaggacgccgccagc

SEQ ID NO: 666186 - DNA, 83 bp, Homo sapiens
caactttactgagaattttccacctcctgacacaacaccactcatactgccaaatctgtcgaaagggagataatgaagaactg

SEQ ID NO: 666187 - DNA, 85 bp, Homo sapiens
ctgttgaaaaaatttccagtgagaggcggggtttcaccatgttgcccagactggtcttgaactcctgagcttaagcaatccacct

SEQ ID NO: 666188 - DNA, 100 bp, Homo sapiens
ttggtgggagccgtgctctacctctatccgtacctggagtagaacagaaaaattattatgtctgtgttcccttgggactcattggaaattgtacagtgac

SEQ ID NO: 666189 - DNA, 75 bp, Homo sapiens
gatggtgatccgtgtatatattgcatcttcctctggctctacagcgaacattgatgatggcacctcagatcgccc

SEQ ID NO: 666190 - DNA, 75 bp, Homo sapiens
gtccccaagccagaagaaatcaacctgctcaccggggagtctgatacacagggggatatgagactttctactcgg

SEQ ID NO: 666191 - DNA, 101 bp, Homo sapiens
tccgaggacggggaggaggaggaggcggcgcccgcggacgcaggggcgttcaatggccccttcacagatgtagtcactacaaatcttaaattgcgaaatcc

SEQ ID NO: 666192 - DNA, 100 bp, Homo sapiens
ttttggttacacagagcactcagtccgcacctgttttccacagcagaatgatttggaacaagttctacgtcaaattggcgataaggaccaaaagatccag

SEQ ID NO: 666193 - DNA, 100 bp, Homo sapiens
aaacctttaatattgtattctcctaaatgagacgtctcgcatttgagcagctttaccgatttgttacaactcaagcaagggccagcagaaattctctttt

SEQ ID NO: 666194 - DNA, 50 bp, Homo sapiens
gggcctcatcagcttcgaggaggagcggacctcctgccccccgaggtctg

SEQ ID NO: 666195 - DNA, 75 bp, Homo sapiens
cagggctttgccatccccggctccagcttcctgacagtgatgtgtgttctgaaattgtgaaccatgagtctagta

SEQ ID NO: 666196 - DNA, 75 bp, Homo sapiens
gccgccaacgcgcaggtgctagcggccccttcgccctgcaggtaaaaatgtctccatcgtatcatcagtccaaag

SEQ ID NO: 666197 - DNA, 83 bp, Homo sapiens
ccgcaccatgccgctcctaagcctgcacagccgcggcggcagcagcagtgagaggtcagtgacttcctgtcgggccgttcgcc

SEQ ID NO: 666198 - DNA, 74 bp, Homo sapiens
gatagccctggtcctttctccagtggacccccaaaagtacaagggcatatttaacggattctcagttacactta

SEQ ID NO: 666199 - DNA, 50 bp, Homo sapiens
gttccccacggctgcgctcatgccagggagagataatgcatgtgagaaaa

SEQ ID NO: 666200 - DNA, 100 bp, Homo sapiens
cgcgaagctggccaaagcctgcccagacggctcacctgtgcgggatggaacaaaaggtcccaactaattatgcaggcggaggcagaagccgcgtctgtgc

SEQ ID NO: 666201 - DNA, 100 bp, Homo sapiens
tcgccatgccggcccggcggctgctgctgctgctgacgctgctgctgcccggcctcggggtaaatccatttcggatggccactcgtggcatgttcccgac

SEQ ID NO: 666202 - DNA, 83 bp, Homo sapiens
tggccttagctgtgctcgcgctactctctctttctggcctggaggctatccagccccgtgtccaggagccccgccaggtgccc

SEQ ID NO: 666203 - DNA, 96 bp, Homo sapiens
tgtgagaggcacacctctgtgcagaccacatcgagcgctctcttatttagtgcaacttttcggaagaagattgaaaagttggccagagacatcctg

SEQ ID NO: 666204 - DNA, 75 bp, Homo sapiens
tcagcggaagaccaaagaggatgagaaggacgacaagcccatccgagaccctaaaaagtctgccagtcgccctgg

SEQ ID NO: 666205 - DNA, 100 bp, Homo sapiens
ccctgggctggcgtcgtgccctagccaaggagaagcacaatcctggaggaagagaaggctcagcaagaagagcgcatgaggatggagtccagaagacagg

SEQ ID NO: 666206 - DNA, 100 bp, Homo sapiens
gcctaggcattttacctcctctccgcacggcgcagtacaactccaaatggctcaatgttctggacttcagtgaccccttcagcactgaagtgaagccgag

SEQ ID NO: 666207 - DNA, 75 bp, Homo sapiens
actttcggccctgggaccaaagtggatatcaaacggaaatcctcattgacgattcaatttgttgaaggccaattt

SEQ ID NO: 666208 - DNA, 49 bp, Homo sapiens
ggaagcatgtcgtctttatcgctcaggggctatctgatgggttagagtg

SEQ ID NO: 666209 - DNA, 88 bp, Homo sapiens
gcagctaccaggcaggagatcttccaggcaactttcatcctttgaaacgtgtgctgaaaaagaagaatcagcaaatactactgaaagt

SEQ ID NO: 666210 - DNA, 101 bp, Homo sapiens
gtgggcccagtcctcggtgcggcgcggccaggttcgagaacttgtcttggacaattgcaaatcaaatgatggaaaaattgagggcttaacagctgaatttg

SEQ ID NO: 666211 - DNA, 100 bp, Homo sapiens
cttttttgaatgggaggcattgatcattgtctttggtgcaacactaacaaggcttgtctggactacccagttacaagcgtcttgccaccggcttcccttt

SEQ ID NO: 666212 - DNA, 50 bp, Homo sapiens
ttcaggaggagcagcctatacaaagagagagctcagaaatatgctcagca

SEQ ID NO: 666213 - DNA, 83 bp, Homo sapiens
cagacttggctagtgcaagccttgtttattttcctcaccactgaatctacagatatcaatgatgtcaaacggctgaaacctgg

SEQ ID NO: 666214 - DNA, 100 bp, Homo sapiens
ggcagccttcttgctggcgctgcaaaatggctgtgcgggagccttgctgaagctcccttttctcaaagctgcccacgtggccagagcaggccggtttggc

SEQ ID NO: 666215 - DNA, 100 bp, Homo sapiens
gtgaccttgctgtgtctaatatttctccaccatcaccggactccaaatcatgaactgtggctgcagcagctggtcttcaccctggacagtgcattatcaa

SEQ ID NO: 666216 - DNA, 74 bp, Homo sapiens
cttttttatctcatattagtgcctgtgatggcatctttcatctaacacgtgtcagctgtgatgcatgtttaaaa

SEQ ID NO: 666217 - DNA, 90 bp, Homo sapiens
cggccttcatcgacatcagtgaagaagatcagctgaactagatgcagagcacgcccagaaggtcctggaaatggagcacacccagcaaat

SEQ ID NO: 666218 - DNA, 50 bp, Homo sapiens
ccaaactgaaaaagctggatgcgttgtagaatgaatgaagacactggcac

SEQ ID NO: 666219 - DNA, 100 bp, Homo sapiens
agaaattgaaattcttcttcgttatggacagcatccaaacattatcactctaaaggatatctaaattgaactcaacattttacattccatcttttctgaa

SEQ ID NO: 666220 - DNA, 90 bp, Homo sapiens
ccaagccttcccagttatcataaccttgaatggcgactagatgtacaggtatttgacaacaccccagcagccttggacggcacagtggca

SEQ ID NO: 666221 - DNA, 75 bp, Homo sapiens
cgggcacacccggctccccggacgcctcgaagctggcagggcggagatgctggaccacgccgtcctgcttcaggt

SEQ ID NO: 666222 - DNA, 90 bp, Homo sapiens
atgtgctgccccgggaattactgcaaaaatgcggccctccaggcactgaagcgtaagaagaggtatgagaagcagctggcgcagatcgac

SEQ ID NO: 666223 - DNA, 103 bp, Homo sapiens
aggcgatgtacaaccagggattcatccgaaagcagtgtgctggagaatctggtaaaagcaccattgtgaagcagatgaggatcctgcatgttaatgggtttaa

SEQ ID NO: 666224 - DNA, 98 bp, Homo sapiens
gtccagctcgcccagctcgcccagcgtccgccgcgcctcggccaagcattcgggttgtggtcacggtggaacaaacagaggaagaactggagagagct

SEQ ID NO: 666225 - DNA, 98 bp, Homo sapiens
ccgccatgggctactcagtttacagccactgcagtatcacagccagattgttcagagattttcaatgatgggtataagctcagtggattttacaaaat

SEQ ID NO: 666226 - DNA, 100 bp, Homo sapiens
ttgttcaagtgtccactgtggaaggttttttgcatgtctgacacccatgactccacctggaccttatggctccacccagaagcaattcagcccaacagga

SEQ ID NO: 666227 - DNA, 100 bp, Homo sapiens
gcccggggaaactgggaacaacctcaaaaccaaaaccagacacagcacaagcagcggccacagggtaggagtcaatgaagacatcttagtcttaacaagt

SEQ ID NO: 666228 - DNA, 100 bp, Homo sapiens
gcgcgtactcggccgcctgagcggaacgagttgaagcagttaatatggctgaaggaatcattcacgacacagaaaccaagatggaagaattcaaggacca

SEQ ID NO: 666229 - DNA, 78 bp, Homo sapiens
acagctcctcaagtgcaacaagtcccacttccgaaaccacaagtttgccgatccacctggtttccatcgggcctatag

SEQ ID NO: 666230 - DNA, 75 bp, Homo sapiens
accccactgtggtgtacctgaccaagtccagccccagcatggcacgccaaatcttaaaggcagaccacgcaaaaa

SEQ ID NO: 666231 - DNA, 100 bp, Homo sapiens
taaggtcttcagcggggcgctccaggaggcactcacagagactaatagacaagtcacgagttacctgtgtcaaatgggttcccggttcggaaagcctttt

SEQ ID NO: 666232 - DNA, 82 bp, Homo sapiens
tccagcctgcggagcctgtggggcaggaaagccatcaccaagtcgggcctccagcacctggccccccctccgcccacccctg

SEQ ID NO: 666233 - DNA, 100 bp, Homo sapiens
gaagaagttgcgaaggatccccaacggggaggccaacgtgaagaaggtggtgaaggaggagatctttgatgacaatgccaagcttccctgcttcaacggc

SEQ ID NO: 666234 - DNA, 100 bp, Homo sapiens
gacccagactcctcttgccacgcatcagtctgaaggccttggatggtatactgtaaattcagcatatggagataccattatcataccttgccgacttgac

SEQ ID NO: 666235 - DNA, 90 bp, Homo sapiens
ggaggaaaacaacttcgagggcagactttcagaaaaccaacgccaagatccctcccagcgtccacatcgtcctctggcaggagctcctgc

SEQ ID NO: 666236 - DNA, 88 bp, Homo sapiens
gcgacgctgctcaaaacctcgctccggaaaggggacacctgcctcaaggaataggttctcctagtgtctatcatgcagttatcgtcat

SEQ ID NO: 666237 - DNA, 73 bp, Homo sapiens
cgggccaggccgcggccggggcaggagcgcaggtatccgttacagcactgatgtgagtgtagatgaagtaaaa

SEQ ID NO: 666238 - DNA, 90 bp, Homo sapiens
agctgtgctcgcgctactctctctttctggcctggaggctatccagcgattctgatgagatggaggatgggcctggggttcaggattagg

SEQ ID NO: 666239 - DNA, 75 bp, Homo sapiens
agccggagctgcgagcgaggcagtgaaagggtggcagatgacggctgcccgaagccccccgagattgcacatggc

SEQ ID NO: 666240 - DNA, 83 bp, Homo sapiens
tccccgtccagaagcctgtaggaaagcggaagcggcctggcaggggaaggatcgagggcgaagctgtgctcaggcccgggctg

SEQ ID NO: 666241 - DNA, 89 bp, Homo sapiens
gaaaacctggctggcctcaagtacagggtcatcaagggcactccagagaaagatggaggagcgccggctgcggctccaggaggccgcca

SEQ ID NO: 666242 - DNA, 101 bp, Homo sapiens
ccaggcccttggagctggggagatcccggcaccttctgagacaccctgggcagaggagcagaataagttggtgcatggcggaccctgcgacaagacatctc

SEQ ID NO: 666243 - DNA, 75 bp, Homo sapiens
tcaagagctcgcctctgattgagaagcttcaggctgtgggagtgcactgtgctctgggctttggccgcactggca

SEQ ID NO: 666244 - DNA, 74 bp, Homo sapiens
acttaccattgaccgtgtgtccacagaggttacccttgcaggaaatctgaaatagagtactatgctatgttggc

SEQ ID NO: 666245 - DNA, 100 bp, Homo sapiens
gagaaagaaggttaagctggctgtcctgaaatattataaggtggactataaggcagatgagtggctgatgaagaatatggaccccctgaatgacaacgtg

SEQ ID NO: 666246 - DNA, 82 bp, Homo sapiens
gtcaaacatccatatcataagtggaattttggagatattcaaagactcaatgatgaggcacggcggctcattgctgatttgg

SEQ ID NO: 666247 - DNA, 80 bp, Homo sapiens
gtccaggagctggcatgacgtgcaggtctctagcgctgggtaattccagaattgattggccataccattgtcactgtatt

SEQ ID NO: 666248 - DNA, 101 bp, Homo sapiens
caagccggaaagagcgaaagaaagaagtggtggagggatccctttgctattcaccgtcagcatatgagccgtatgttgtcaggtggctttggatatagccc

SEQ ID NO: 666249 - DNA, 74 bp, Homo sapiens
ttcaagactcggatatgcaaaaaagtctgtggccactacactcagattgacttgatgcaaaacatcacaaaggc

SEQ ID NO: 666250 - DNA, 82 bp, Homo sapiens
cccctttctacaaggagggcaagtttgcttccaaggggctgctccttcctctccaagactcgggtggtccaggagcacggcg

SEQ ID NO: 666251 - DNA, 83 bp, Homo sapiens
gccattttgagcaatggggaacgctcacggactgtgtgcaattctgtggtgttcttggtcacacatttatggagtttctgaag

SEQ ID NO: 666252 - DNA, 74 bp, Homo sapiens
gctggagagttgaatgccagccaccagccatgggccggatcacctcaacagtcacgtcagacaagtgcactcaa

SEQ ID NO: 666253 - DNA, 100 bp, Homo sapiens
ggaagataaaatgactaagaggaagaagctgcggacctcagggactgttgacatttagggatgtggccatagaattctctctggaggagtggcaacacct

SEQ ID NO: 666254 - DNA, 97 bp, Homo sapiens
tccgctctcttcggctgccccaatccccggcagctctctcagaagaagcttcacagtcctgccctaatgagaagtgttatttaatcctggattgcag

SEQ ID NO: 666255 - DNA, 100 bp, Homo sapiens
ctgagctcaagtgatccacccaccgtggcctcccaaagtgctgagattaaaggagtgacactctttgtggccctttatgactatgaagcacggacagaag

SEQ ID NO: 666256 - DNA, 100 bp, Homo sapiens
agaagaaccggaagaaactgtccgagaagcccaaaagagcagagctgacatctgataaagacatgtaccttgacaacagctccattgaagaagcttcagg

SEQ ID NO: 666257 - DNA, 98 bp, Homo sapiens
cagagtgctgaagacggggtagccacgagctgtcgcctggttgggcccggaaatgggacgtcgcgctttctcagggagcgtagaagcagccagggcct

SEQ ID NO: 666258 - DNA, 75 bp, Homo sapiens
cgttctgcgacttataaaggaccagacaaatcaaattagtggttttggccaccaggaaaccctccccgaagaatg

SEQ ID NO: 666259 - DNA, 99 bp, Homo sapiens
tgtggaaaacagtaggaaagcaatgaaagaagctggtaagggaggcgtcgctgattccagagagctaaagccgatgacgctgaccggaaaggagattga

SEQ ID NO: 666260 - DNA, 100 bp, Homo sapiens
agataactctgggagaagcagaaaaccctgtgccagggacaggaaagataggagcacagttggtggatctgaaatctgaactgacagaaacccaagcaga

SEQ ID NO: 666261 - DNA, 75 bp, Homo sapiens
gcaatggataagtttggattcaggcactgaagtggcagcagcatcagggattgcttcctcctggtatgaccatag

SEQ ID NO: 666262 - DNA, 87 bp, Homo sapiens
gcgggctggagacatggaccgcggcgagcaaggtactgactttaacatagatagcttacctctgcctcggaaagcccatcatgactg

SEQ ID NO: 666263 - DNA, 100 bp, Homo sapiens
cttcgacgtcctgcctactttcttctatcacgcaaacaaagtcgtgtgcatggcgtccttggaggatatttctacccagctctcagacattttggacaat

SEQ ID NO: 666264 - DNA, 75 bp, Homo sapiens
cacaacatcaccagcttagacatctctgacaatggatcttttgccagaaatgagggcatactggcctgacgtaat

SEQ ID NO: 666265 - DNA, 75 bp, Homo sapiens
tctgcaactgtgtctgatggcggtgctggagaatctggtaaaagcaccattgtgaagcagatgaggatcctgcat

SEQ ID NO: 666266 - DNA, 82 bp, Homo sapiens
cagagattcatctttcatgcagtgacatgttgataaaaaatgatgggtctttttggagttcctgagctgagtgccccagaag

SEQ ID NO: 666267 - DNA, 98 bp, Homo sapiens
agcagcaaggcagaaccaccccagtgcacctccctggcctggtctgctgatggccagggactctgtaagctcggttcggctggagggactgacttcag

SEQ ID NO: 666268 - DNA, 83 bp, Homo sapiens
cccacctgcccggtgcccgaggaggcagccaagctcgtggcctgcctctgcgtgcgtgcagaccatgaattacgtggggcagt

SEQ ID NO: 666269 - DNA, 50 bp, Homo sapiens
cagagattcatatgagagttatggctctgtgacctcctatgtgctgactc

SEQ ID NO: 666270 - DNA, 75 bp, Homo sapiens
ccatgatgcctggtgccccattacaacccgtgcatcagaggctccttgaaatgctagatacagagaaggaactgt

SEQ ID NO: 666271 - DNA, 100 bp, Homo sapiens
ccatggacggcagggctccctctggatgtggaattctccgtccctttccagggagggaacaaagcccacagcaccggaaattaagtgttaaatccattac

SEQ ID NO: 666272 - DNA, 100 bp, Homo sapiens
tccctcgtgaccacccctacatccagtacaatggagtctcccaggcgggaatgcaatggtgcgatctcgacttcactgcaatcttcacctcccgggttcg

SEQ ID NO: 666273 - DNA, 90 bp, Homo sapiens
ggcctctccagccatgtggaactgcgtcgaccagaagattatgatattcataacagcagaaagaaaccaaggattgactatccccctgag

SEQ ID NO: 666274 - DNA, 80 bp, Homo sapiens
gctcgcgctactctctctttctggcctggaggctatccagcggccaccagatgcctccacccagaaaggtcagatgtggg

SEQ ID NO: 666275 - DNA, 98 bp, Homo sapiens
acagacgtgaaatggcatctgtcatctttagcgccaccttatgtcaagctgtcggaaaaggtaacagaagatggaactcgaaatcccaatgaaaaacc

SEQ ID NO: 666276 - DNA, 50 bp, Homo sapiens
tatactactaactttgaaatggaataagatgccgtgcgcgaaattcggaa

SEQ ID NO: 666277 - DNA, 90 bp, Homo sapiens
ttcaacggaaactagctcatctgtagagactgatttgcaacccttccgggaagccatagctctgcatgaaaaactgttcttgaaaaccac

SEQ ID NO: 666278 - DNA, 75 bp, Homo sapiens
atggaattacactgtgatacgactgactcctttctgagaaaagtctacagcattctttctctgcaggttctctta

SEQ ID NO: 666279 - DNA, 100 bp, Homo sapiens
ctcgctgggctgctcttcctgaggttttcctaagccatcccctggcggaaccgcccccagacttggattctcacttgcatttatcttcagctgctcctat

SEQ ID NO: 666280 - DNA, 98 bp, Homo sapiens
ccaagtcctgcagcacccctgggttcaggggaggagaaggcagagcccccccaggctatgaatgccctgatgcggttgaaccagctgaagccagggct

SEQ ID NO: 666281 - DNA, 75 bp, Homo sapiens
tcctgctcagaaatatatgcaaataagaagacagatcctgaaagagcaagctaattgccaagaagatgcttttag

SEQ ID NO: 666282 - DNA, 75 bp, Homo sapiens
cggacaagctgcacatccagatgaatgatgtcatcaccgtcatcgagggaaggacctgaaggagaagaaggagaa

SEQ ID NO: 666283 - DNA, 88 bp, Homo sapiens
tgggcttcaccatctttctgacagcgctgtcccggccaggaaccactgccccagagcacatcagctatgtgccccagctctcaaacga

SEQ ID NO: 666284 - DNA, 75 bp, Homo sapiens
tctggctctagcagagttttgattaccactgacctgctgcaagagaaattgggtgatatctgcttctcccttcgc

SEQ ID NO: 666285 - DNA, 96 bp, Homo sapiens
gggaatggccgcggtgtggcagcaagtcttagcagtggacgcgaggatgccaagaaggacgatgctgttcggaaggcctataagtatctagctgct

SEQ ID NO: 666286 - DNA, 75 bp, Homo sapiens
tagccctggagtgacctactcgcccgtcagtggttataataagtctctagtgatccctgaaaagttccagcatat

SEQ ID NO: 666287 - DNA, 75 bp, Homo sapiens
gtgacagtccatatgtaaccaaatattatggatcctatctgaagaagacttgcactatctgccagatgctgcttc

SEQ ID NO: 666288 - DNA, 99 bp, Homo sapiens
ccctgctggagcaagaggcagagctgtgggcggtggagtctagacttccccaaggcgtgtacccaggcactggtgaggtggattgatgatgaatcttct

SEQ ID NO: 666289 - DNA, 100 bp, Homo sapiens
tcagtgagctgaacatttcagaaatacagaagttgaagcagcagcttatgcaggaccgtataatagacgctggccccaaaggaaactactctcgatttat

SEQ ID NO: 666290 - DNA, 50 bp, Homo sapiens
agaaggactagacccagatcttcttgagatatatgattggatgcctgaac

SEQ ID NO: 666291 - DNA, 99 bp, Homo sapiens
ctcggctcatgttctgggacttaggagggcaggaagagctgcagtctttgtgggacaagtttggtgccctggttgtcagatgttggaaagcagtaggac

SEQ ID NO: 666292 - DNA, 98 bp, Homo sapiens
gaaggggcgtctgcggctctccgccgtccccagccctgcctctccctgggctctgctcatgatggagcagtccaagaagtcctccctcatggtggccc

SEQ ID NO: 666293 - DNA, 97 bp, Homo sapiens
cctgtatgtgatgatgaccgtcaccaactggttcaacattatagccttcagaaaggccaacaaagtgggtattttcatcaaagttacaccacagcgt

SEQ ID NO: 666294 - DNA, 143 bp, Homo sapiens
gaccgggaagatgaacaacggcggcaaagccgagaaggagaacaccccgagcgaggccaaccttcaggaggaggagacagaatgttgctgcgggatgtaaaagctcttaccctccactatgaccgctataccacctcccgcag

SEQ ID NO: 666295 - DNA, 90 bp, Homo sapiens
acaggatcctcttggagcagaagaagcaggaccgcggggagctgaagctgctgcttttgggatacagttgatatattagttggatggcat

SEQ ID NO: 666296 - DNA, 51 bp, Homo sapiens
gggagagtctgccggcggagaatataagccccaggccatttactgcaagga

SEQ ID NO: 666297 - DNA, 74 bp, Homo sapiens
tggaccgcatccctcgtgaccacccctacatccagtacagaagaggagatcccagaactggagattgacgtgga

SEQ ID NO: 666298 - DNA, 75 bp, Homo sapiens
ctctcccctccactttctcccggatccaattctggtacagcagttgcgccggacatacaaatatttcaaagatta

SEQ ID NO: 666299 - DNA, 90 bp, Homo sapiens
ggacaacccggtggtgctgtgtggctggaaaggaaactttgaaaagcaccccaaagaactgatcagggggcccatatggcttcgaggttg

SEQ ID NO: 666300 - DNA, 101 bp, Homo sapiens
agatgagggattgctactgcacggtgaacctggaccaggaggaggttttcaggaccaaaattgtggaaaagtcactctggctgttttggagtcagcggaag

SEQ ID NO: 666301 - DNA, 75 bp, Homo sapiens
ggcctggttgagctcgcactgacaatcgcagaacccttaggagaaatcttgagagtggacagcaattgtgaagat

SEQ ID NO: 666302 - DNA, 71 bp, Homo sapiens
ggggtgatcgctctcaactaactacaattgtattggcagctagagagtgagatgaacccggtacctcagat

SEQ ID NO: 666303 - DNA, 100 bp, Homo sapiens
aaatatttcaattatactgtgaaggaaactatggtccaggaggcagtggaggaagtgggggttatggtgggaggagccgatactgagcttcttcctattt

SEQ ID NO: 666304 - DNA, 100 bp, Homo sapiens
accccagttaagctgcgctccgggaggcaagaggcgcagatgttccagagattcctggagatcttactcttaagacgtgtggcagtacagccagtatgaa

SEQ ID NO: 666305 - DNA, 100 bp, Homo sapiens
gtattcgttgacagagctttgatagtcgtaccatatgcagaaggaagaagaagcactcctctctgaaatggatgtcacaggccaggcctttgaagacatg

SEQ ID NO: 666306 - DNA, 82 bp, Homo sapiens
ggcgcggcagcggagggacggcagtctcgcgcggatttttagactctgaggagcagttggagctaatccacattatggaaat

SEQ ID NO: 666307 - DNA, 82 bp, Homo sapiens
ctcgctctgggagcctagaatgcatcagtgcccttgtggcgaatggggctcacgtcgaattcccaaatgctggaaaatcctc

SEQ ID NO: 666308 - DNA, 50 bp, Homo sapiens
gtctgaactaggatgtcccgacatgaagcatttaaatcaaacggtattga

SEQ ID NO: 666309 - DNA, 75 bp, Homo sapiens
gattggacagcaggtcgacaattgagaggatccagaatccagatctctggaatagctaccaggcaaagaaaaaaa

SEQ ID NO: 666310 - DNA, 100 bp, Homo sapiens
aaagcctcttctgaaggaaaagacagtgtagtcctgcaaaacattttgaggaggaatttttatgatgataagaaatatacgtacacatgtttacattggc

SEQ ID NO: 666311 - DNA, 50 bp, Homo sapiens
gcgggccctggctggggatgtgcgagatgaagaagtcgagatgacgcgga

SEQ ID NO: 666312 - DNA, 75 bp, Homo sapiens
ctgcctgcctgcctggcatctctctctcccgaacccctcaatggaatgaattgcagccaccgtttaatgcaaacc

SEQ ID NO: 666313 - DNA, 50 bp, Homo sapiens
gtttttccgtaagcatactcagctggctgtcaaatacaaaataccccttc

SEQ ID NO: 666314 - DNA, 82 bp, Homo sapiens
tccactagagtcatctctacaatggcccactgcgtgaccttggttcagctgtccatttcctgtgaccatctcattgacaagg

SEQ ID NO: 666315 - DNA, 97 bp, Homo sapiens
tccaccgtagcccttgccaaagaggtcctgctgtactagccaccaaagcagctgctggtactaagaaatatgatcttagtaaatggaaatatgcaga

SEQ ID NO: 666316 - DNA, 90 bp, Homo sapiens
tccaggcggcacgatgccgaggaaacagtgaccctgagcgaagccaagccgggcggcagcttcttacagtacatttctagtgaagtaaac

SEQ ID NO: 666317 - DNA, 90 bp, Homo sapiens
aattgatactcagcagctggaccggcaaattaaagcaattatgaaagaagtcattccttttttgaagtggacagaggactgcagaaaatc

SEQ ID NO: 666318 - DNA, 50 bp, Homo sapiens
ggaaaaggagcttagctgctggccataggaaaaggatacagagtagagtt

SEQ ID NO: 666319 - DNA, 96 bp, Homo sapiens
tcagaagagtgagagagagctattagagattgtgaagaagaatttcgatctccgccctggggtcattgtcagatttggagtcaaaatatggacctg

SEQ ID NO: 666320 - DNA, 75 bp, Homo sapiens
gctactgccgcttcagttctcccggtgtggccacgagtcggcagagtctccttggaggtgacatggatatgggca

SEQ ID NO: 666321 - DNA, 75 bp, Homo sapiens
tgaaaagatgatagctttagttgctcttttggttgaacagtctcgatcagaaagtgttccttgcctgtatctccc

SEQ ID NO: 666322 - DNA, 90 bp, Homo sapiens
ctcacagcctgaaaatgaaaaggaagcttcaggtggagacagcccgaaggctgttgccaaaatggttcaacagtgctgtacttatgttga

SEQ ID NO: 666323 - DNA, 100 bp, Homo sapiens
gagctgaagcagggctacacatttttcatcccttccggagagctcaaaggatggctactgacatgcagaggaagagaagcagcgaatgccttgatggcac

SEQ ID NO: 666324 - DNA, 75 bp, Homo sapiens
tggctgagagtaggctccgggccccggacctagttttcggctttgtgagaaaccttaccatcaaacacgatggcc

SEQ ID NO: 666325 - DNA, 110 bp, Homo sapiens
acagctgtggaaagaagttgcaaaacactggccctaccattgaccatgccctgctggacatgcccttcctttgactccctggggagatgccctctgacttctgagagcag

SEQ ID NO: 666326 - DNA, 75 bp, Homo sapiens
cggcagccgaggccgcgaactgcatcatggagatgagatcgtggggctcaccagcgtcccccatggcttctgagt

SEQ ID NO: 666327 - DNA, 76 bp, Homo sapiens
cttcaaaaaaccttttctgggttgagcctagatgcagtcatggatcaggtaatgcagtttgttgagccaagtcggc

SEQ ID NO: 666328 - DNA, 100 bp, Homo sapiens
ggttctggcgctggggcaccgaccccgcaacgactgcccgggctgcgggaggggaggagagcagagaacgtccccaggcctgcactgcccaaagtcttgg

SEQ ID NO: 666329 - DNA, 100 bp, Homo sapiens
ccctaggatgcactgagatggtacatcaggataactgctcgtatcaggcaatttgtgtatggtgattggtggagccaacctcggtcgtgttggtgtgatc

SEQ ID NO: 666330 - DNA, 75 bp, Homo sapiens
aaatcagaggcatactttataggccctgggaggagcggggacactgaggacctctctccaaattggcctctcaac

SEQ ID NO: 666331 - DNA, 75 bp, Homo sapiens
cactgactcatgggccctggcggtggacgagcaggaagctgcggctgagtcggctggatgacaccaaaatcctcc

SEQ ID NO: 666332 - DNA, 83 bp, Homo sapiens
agccccggctctgggctacggactatgggcgaatagctctgaccacccggcgaagactggcattgctcgggtaccacttgctg

SEQ ID NO: 666333 - DNA, 98 bp, Homo sapiens
tttttcctgttgattctgccattgacactatatctccattgaatcagaagggaacagatgctgcttgtgttgctcagagtcacggaatctgtactgaa

SEQ ID NO: 666334 - DNA, 100 bp, Homo sapiens
cagcaaatggatttctcatggaagtttgtgttgattcagtggaatcagctgtgaatgcagaaagaggaggccaagatagccaggttaaccaaacgctttg

SEQ ID NO: 666335 - DNA, 100 bp, Homo sapiens
cccgggctgcggcgtgtgcgcgcccgccagctgctccggagatacgattgacttgatgcacaacatcacaaaggcgatttttgaggtatgagctttagaa

SEQ ID NO: 666336 - DNA, 96 bp, Homo sapiens
gggggccgagcccatgagtagggaggagaaacagaagcttggaggggtctggttgctgcttacagtggtgacagtgacaatgaggaggagctggtg

SEQ ID NO: 666337 - DNA, 75 bp, Homo sapiens
tggggatccgtcgcacacagcatctccaacaggagtcaactgagagttcaaatacaacaattgaggatgaagatg

SEQ ID NO: 666338 - DNA, 102 bp, Homo sapiens
tccggccaggacgctgggagctgcctgcgggaaggtgcggggagcggagccatggcctccggagttgtaagacgttcatcgccgtgttatccttgagtaaag

SEQ ID NO: 666339 - DNA, 100 bp, Homo sapiens
cctgaaggtggagctgtcccagctgcgcgtcgccaaagtgacaggcggtgcggcctccaagctctctaagatgccaaaatcctgagcatgatggaagaca

SEQ ID NO: 666340 - DNA, 74 bp, Homo sapiens
cgacgagaagtcaagaactatgtagaagatgacagattattgaggttgtcccaaaagaagttctgtgctggtgg

SEQ ID NO: 666341 - DNA, 89 bp, Homo sapiens
ttactttgccacttcttcacggaccagtttcagttcgccgatgggaaacccggagaccaaatccttgaatgtttactcagtgcctggct

SEQ ID NO: 666342 - DNA, 80 bp, Homo sapiens
agggcacggcgtggaggaggaaccagaccgcggccagagcgttcagagtcgagtgtgcccatttcttatagatccttctt

SEQ ID NO: 666343 - DNA, 50 bp, Homo sapiens
aggtgctgccctccagctcacagatccaaaagaactcaggcagagaccat

SEQ ID NO: 666344 - DNA, 75 bp, Homo sapiens
ctcaggagagagcagccagagtggactttgccattgatattattaaaagcactcatgaccattggaaagcattag

SEQ ID NO: 666345 - DNA, 100 bp, Homo sapiens
caagaaacacaggatgccctggatgctattgagggcacctacattgacaagaaatgccccttcactggtaatgtgtccattcgagggcggatcctctctg

SEQ ID NO: 666346 - DNA, 100 bp, Homo sapiens
ctggatggccattgagtccctgaactacagtgtctataccaccaagagtgatgtggtgaggacgcttgagcggaagttagaagcaaaaatgatcaaggag

SEQ ID NO: 666347 - DNA, 87 bp, Homo sapiens
gggaatgatattcagtggtgtttttctcaggtgaaaggagcagtagatgatgatgtagcagaaggattctgaaaccttccttgtatc

SEQ ID NO: 666348 - DNA, 73 bp, Homo sapiens
gccgctctccagcccgcttgaacgagtgtgtggcaggccccaacatcgccgccatcgtcgggggcaccgtggc

SEQ ID NO: 666349 - DNA, 101 bp, Homo sapiens
gctttccttttccatcaacaggggcaaatcgaagtagagagcgaaaccatcttcaagttagcagcgtttattttacaggaatgaatctgaagtctgctgca

SEQ ID NO: 666350 - DNA, 101 bp, Homo sapiens
gtggaatatgccaaggaaaaactggagagcttcatcaaaaatagtgatagctttgataaatgaccttgaatgatgccatgaggaacaaggcaaggctgtca

SEQ ID NO: 666351 - DNA, 90 bp, Homo sapiens
aagaaactgaggttcagagaggttaagagactccactgaggtcacacagccgaaggacagaataacgggctcccagattcacaagcccca

SEQ ID NO: 666352 - DNA, 100 bp, Homo sapiens
agaatatagatggttttgaaaagttcatgctgtcccttcattgaattttaggagcggcctattgccaattcatggacatgctcttccctggctgcattag

SEQ ID NO: 666353 - DNA, 96 bp, Homo sapiens
cactatggagctctcacatgtggaagctgcaaggtcttcttcaaaagagccgctgaaggaatcccgttctgcttccagaagtggaagtgctcacgg

SEQ ID NO: 666354 - DNA, 75 bp, Homo sapiens
tgaaggtccaggaccttaggaaagctgcctgcagagaggtggagaggtactccaaagattcaggtttactcacgt

SEQ ID NO: 666355 - DNA, 75 bp, Homo sapiens
cttcttgaaaggcaacattaagaaggagctgtttaagatgataccacgagtcaacccaaaagttgctggggagaa

SEQ ID NO: 666356 - DNA, 96 bp, Homo sapiens
tgagggaagactggtctaggtgctgctcctgaacttggtctctgagccatggcttcccatagacactcagatatgatgcttcctggtgtgtttagt

SEQ ID NO: 666357 - DNA, 96 bp, Homo sapiens
ctgaagattctgccgctgattgctatcacttctgcagaatccagtggagtcggtatttcttcaatagatatatctcaaagcagaagctggctaaca

SEQ ID NO: 666358 - DNA, 100 bp, Homo sapiens
agcaaagccgtgccctgggtgattctgtccgacggcgacggcaccgtggagaaagttgaggagctcaagcttgggaaaatggtgtgcattccttgtatcg

SEQ ID NO: 666359 - DNA, 100 bp, Homo sapiens
cggtgggcctctgagatatgccgtttacggctgagtcagtgctgattctctcaaatagagcttgaaggataaatcttcatttttgtttcaacaaaacttc

SEQ ID NO: 666360 - DNA, 101 bp, Homo sapiens
agaatatgtatgaactgcataaaaaagtttctccaaatgagctcatcctgggctgtgatgcagtttggcaaagggaagtcgtgttgctaccggtttctgac

SEQ ID NO: 666361 - DNA, 90 bp, Homo sapiens
ctcctgatgatgaagactgaaggtgtagactcagcctcactctgtacaagtctgggacatcgtgggcactgagctgaagttgaagaagga

SEQ ID NO: 666362 - DNA, 100 bp, Homo sapiens
gagctggttggccctgtgatccctcaagactggtccacggagtgtatgaccacaaacagccatcaaggatttttggcaggtatatcaatgatgttttata

SEQ ID NO: 666363 - DNA, 51 bp, Homo sapiens
tctctctttctggcctggaggctatccagcaaactggcgatggaatatgag

SEQ ID NO: 666364 - DNA, 83 bp, Homo sapiens
ctaaacttggcaccaagtatgggaagatggagagttggaagaaggtgaattggaagatgatggggcagaggagacccaggata

SEQ ID NO: 666365 - DNA, 95 bp, Homo sapiens
ggacggacaagaccctggtgaaggaggtcgtacaggttactcactataaacaatatccacccaacacaagcaaagtttattcctactttgaatgc

SEQ ID NO: 666366 - DNA, 80 bp, Homo sapiens
tggagatatggcgcaactgcggcgcatggggacccagagcctgctcttgggaacagccagagtaagattggaacccagac

SEQ ID NO: 666367 - DNA, 74 bp, Homo sapiens
ccagcatggggagcctgagaaaactcgaccctcccagaaaccttcgtccatctgctgtaacgcagtctggtggc

SEQ ID NO: 666368 - DNA, 50 bp, Homo sapiens
attcgcagtggtcgcttcttctccttggctacggaaaaacctgcgagccc

SEQ ID NO: 666369 - DNA, 98 bp, Homo sapiens
tcatccacaaccatgcggacatcggcttctgcctggtgctctgcgtcctcatcgggcttatgttcgaggttggggcaaacacaatggataatcctttg

SEQ ID NO: 666370 - DNA, 100 bp, Homo sapiens
gcggggatcctgctggactgcacgaaaaaagagaaaagggcactgcaggagtggagagagcgagcccagaggatgaggaagaggaaggaagagctcagca

SEQ ID NO: 666371 - DNA, 75 bp, Homo sapiens
gagccggttgcgccacccgaggacaagagacatccatgatgcaagagccaaattaccagcaagagttaagtaaac

SEQ ID NO: 666372 - DNA, 75 bp, Homo sapiens
cgacaagaccatgctggcaagtctgaaggtcaacttcgagagctgtgcccaggagtgaacaaccagccctacctc

SEQ ID NO: 666373 - DNA, 110 bp, Homo sapiens
tgtacagagatgtgatgttggagaactatagcaatctggttttcttggggtcaatattctctcgagttgaagaagactatctctggaggataaaacaactaggatcacac

SEQ ID NO: 666374 - DNA, 127 bp, Homo sapiens
ctggagcctcagttggaagcagccgatccagcctgcggagcctgtggggcagtccacctggaaggccgctgtggtggaaggatgtttgactgcagagatgtggcattcactgtgggcgaaggagaag

SEQ ID NO: 666375 - DNA, 75 bp, Homo sapiens
aggatgagaatagctactgaaggtgcagctatcttctccaagacagctcttctcagcactggagagtgactcaga

SEQ ID NO: 666376 - DNA, 88 bp, Homo sapiens
atacagccaagatcttggcaaagcttctccctcagtatttagaccagagttctagtaactcatgttctgtacttgaagctgccaagca

SEQ ID NO: 666377 - DNA, 75 bp, Homo sapiens
ccaccagcatggacgctcgccgcgtgccggttttgggatttgagattgacgcggtgaactctgtccagttttcaa

SEQ ID NO: 666378 - DNA, 75 bp, Homo sapiens
cagaagaagttaaaaaactgcttttacttttattgggttgtgcagttcaggatacattaattgtttggtcagaag

SEQ ID NO: 666379 - DNA, 87 bp, Homo sapiens
tctgtgcggcggccggcgggaccataagggcttaactcatatatttaacccccctccaaaaagaagcaagatttccagatgtagcaa

SEQ ID NO: 666380 - DNA, 80 bp, Homo sapiens
ggagaattatttgctgttggatcgtttcatactttacgcttgtgtgataaaactgggtttcaccagtgatcattaaagaa

SEQ ID NO: 666381 - DNA, 99 bp, Homo sapiens
cgtgtggctgctcagctcgggccacggagaggagcagcccccggagacagcggcacagaggtgcttctgccagggagattctacagtggttggaacgag

SEQ ID NO: 666382 - DNA, 70 bp, Homo sapiens
tccctgggggctatttcagctcagtctgaaatggttgtgacaaataatctcttggatctgccgcccccct

SEQ ID NO: 666383 - DNA, 83 bp, Homo sapiens
gtccgtcagtccctaggtatccgcactgctcagggggtggcacctgtggaaatgaaacggagaaataagatccagccttgttt

SEQ ID NO: 666384 - DNA, 50 bp, Homo sapiens
gtggccctgatccagacctgggcagaaatgcactcggtgatggaaagaga

SEQ ID NO: 666385 - DNA, 100 bp, Homo sapiens
gctccggcttctgctgttgctcttctccgccgcggcactgatccccacagattatggcatcgtcaaagcattgtggtgtcttttttactgctgcttgctg

SEQ ID NO: 666386 - DNA, 100 bp, Homo sapiens
caaatgtggctctctgaagaacatccgccacaggccaggttgcaatgaggtgtcgctgcagcagcatgcacttcttggtagcagaatggaatgaaccatc

SEQ ID NO: 666387 - DNA, 98 bp, Homo sapiens
caaacataggatgttttggcgagagatgtattcagtggaggaagctgttcagaatttaggccacccgtattggcttaccttggctccaatgtatattt

SEQ ID NO: 666388 - DNA, 100 bp, Homo sapiens
tcacaaggaatgcaagggccacctgttcctcagttccaaccacagggtgagcccatcactttctgtgaggagagttttgtaaagcaccgctcaagcgtga

SEQ ID NO: 666389 - DNA, 73 bp, Homo sapiens
caaagcctgcgcgagaggagccgggacacgcctagcgcgggctccagtaatagttatgcacgagtgcgagctg

SEQ ID NO: 666390 - DNA, 90 bp, Homo sapiens
ctggctttgcttctggaatcttccatcttcatgagctgccagagtttaacctcatccactccctgagctcttgggacccaaccaccatgc

SEQ ID NO: 666391 - DNA, 83 bp, Homo sapiens
gcttctgcagtgcgtaggagcggccggggcgggaggctccgcggagccgaggcgtggagttccagggtctccctccactgctg

SEQ ID NO: 666392 - DNA, 99 bp, Homo sapiens
cttgacacttatatcctccctggatgctgacctgacctttgaccagacggcgtggggggacagtggtgtgtattactgctccgtggtctcagcccagga

SEQ ID NO: 666393 - DNA, 75 bp, Homo sapiens
gcagaaggaactagaagaattgttgggacatcaggtcgtcctaaagtacagaacctgctaaggccatcaaaccta

SEQ ID NO: 666394 - DNA, 100 bp, Homo sapiens
agaggaggccgtccagcagatggcggatgccctgcagtacctgcagaaggtctctggagacatcttcagcagaccctgctctctattccagaggtggtga

SEQ ID NO: 666395 - DNA, 100 bp, Homo sapiens
ctctgcaaggtggtgttccagtggcaaacagctgtataaactcttgtaaacagatttctcactatgtgcaatagacactttggcagtgttgtggcacaaa

SEQ ID NO: 666396 - DNA, 76 bp, Homo sapiens
gactaaatgtgttgaacagggaagaattgtaaatcctcacttattgaaagatcttaccgagcggggcctatggcat

SEQ ID NO: 666397 - DNA, 98 bp, Homo sapiens
gaacatcactcagaagtttgatgtaatgaaacctggattggcatctatacagtcaaggattgctatcctgtccaggaaacctttaccataaactacag

SEQ ID NO: 666398 - DNA, 73 bp, Homo sapiens
gaagtcattcaacgggaattgaatagagactaaggtgtcagtatgttcttcaagctgctctgctcctgggccc

SEQ ID NO: 666399 - DNA, 75 bp, Homo sapiens
aatggaacaggtcatgatcaatgggctttggaccatgtggaggtcgtcctggccaaggagcgagctctcccttct

SEQ ID NO: 666400 - DNA, 147 bp, Homo sapiens
tctgaacagctggtagatgggctggcttactgaaggacatgattcagactgtcccggacccagcagctcatatcaaggagcattccggaagagtttttcgactacagtttgatgaattccagattgtcagtagttcacatgatgaca

SEQ ID NO: 666401 - DNA, 75 bp, Homo sapiens
ccaccagagcagccgcagagcatggttacctgtcctgctgccgattcctggatgacaatcagatcgtcaccagct

SEQ ID NO: 666402 - DNA, 71 bp, Homo sapiens
gctctccaagactagtctcttccaaggaagatcttgcagattgaggaacttcagcaggctttaatagtaaa

SEQ ID NO: 666403 - DNA, 90 bp, Homo sapiens
gctaccctattcctccgaaccagcatccccaccatcaacatggagaacaagaccacgtgggtgctggaaacgtgcgtagcaacagtaggc

SEQ ID NO: 666404 - DNA, 82 bp, Homo sapiens
gcgcccaagtggcggggactactggtgcctgcgctgaaaaagggcgaactttctgaccaagtatacaactacccagagggcc

SEQ ID NO: 666405 - DNA, 75 bp, Homo sapiens
aagacacaaacattgaagatcagcacagaaatcccaggaggagcctaaggcagcaattccatttccgtgagggcg

SEQ ID NO: 666406 - DNA, 100 bp, Homo sapiens
cgcagcgacaacatggaggccgtgaagaccttcaatagcgagtggaatgcagtagccctctgggcctgggatattgtggttgataactgtgccatctgca

SEQ ID NO: 666407 - DNA, 100 bp, Homo sapiens
gacggctacgccgaagcactcgttccgggggtgaagcctcctgcgccggccttgcctcgggacactggggttgggaaatcaagcatcgtgtgtcgatttg

SEQ ID NO: 666408 - DNA, 83 bp, Homo sapiens
gcctcaagaaaccagtaacagattgtgttatttcagattttcctaagcccagtgaagagaagattaagttaattctcaatcaa

SEQ ID NO: 666409 - DNA, 100 bp, Homo sapiens
cagacgatctcggagacgagtggtgggagaaccagccgactggagcaggcagcagcccagaatgctgagatgtataaactgtcttcagagcaattccatg

SEQ ID NO: 666410 - DNA, 75 bp, Homo sapiens
tatgaagaaattgagggttcttgccatggtctctaattaacagaagatggcaaagcccagccacagcagctatgt

SEQ ID NO: 666411 - DNA, 88 bp, Homo sapiens
gggtctcgcggcgcctggcagcagagaccaccagaaggccatgaccatgcagttcatcagccaccgattcccagaagatcatgatccc

SEQ ID NO: 666412 - DNA, 75 bp, Homo sapiens
tctggttcagctcatacaacagcttcttaggtgataacgtggtgctggaccagacctacctgtggcagggtgttc

SEQ ID NO: 666413 - DNA, 74 bp, Homo sapiens
gaagaggagtggagtaggggggacgcggcggcggcgttgacaatggaactcgaatcatttatgacagaaagttt

SEQ ID NO: 666414 - DNA, 83 bp, Homo sapiens
cctggggactacgacgtccctcaaaccttgcttctaggagataaaaagccctccagaatacccatcatatagcccctgaggtg

SEQ ID NO: 666415 - DNA, 75 bp, Homo sapiens
acaatggcgcaagatcgtcttcagctgttcatagcattccagagtcattaaaaagtatcacatggcagagattgg

SEQ ID NO: 666416 - DNA, 96 bp, Homo sapiens
gcgagctgagcgcctccagcgagaagttgagggagaaaggcgggcccgggaacagtaccaaatatgccccaacagcggcaagaccagcatcatcag

SEQ ID NO: 666417 - DNA, 100 bp, Homo sapiens
caagaaaagcctctgggagcagaagggaggctccaagacctcatcaacaattaaggcagtggttgcaggaatccagcaggctcacgcggaacagttggcc

SEQ ID NO: 666418 - DNA, 73 bp, Homo sapiens
tcagaacagagccaatggcttggaatgagcctgctgaactgtaaattctaccatctccactttgcagatgagg

SEQ ID NO: 666419 - DNA, 75 bp, Homo sapiens
gtcccgaagccccctgcaggaactctacaacccaatccagacccaacatgagtgaagtttcctgcaagaaacggg

SEQ ID NO: 666420 - DNA, 73 bp, Homo sapiens
tttgaagtggtgtctacacttataaaagttctcaacccattttacattttccagctgttcagtgttatactgt

SEQ ID NO: 666421 - DNA, 82 bp, Homo sapiens
cggaacatggctgcgtccggtctggattatattccatcacaacaagatattctgcttgccagaagacccaccaaaggcatcc

SEQ ID NO: 666422 - DNA, 90 bp, Homo sapiens
cgctgcgcggcgcggcggccgggccctcgagacggggacggcatttgagctggcaacgggagattatttgtttgaaccacattctgggga

SEQ ID NO: 666423 - DNA, 75 bp, Homo sapiens
gatgagtctgggccccactcccaccgcctctactacctggggtcaacatatttcactggcacctattcacaagct

SEQ ID NO: 666424 - DNA, 75 bp, Homo sapiens
gagcagacacattggcggcaagctaatgagaagctagataaggcaagtgtccagagaatggctgggatgaaagta

SEQ ID NO: 666425 - DNA, 82 bp, Homo sapiens
ccggagccgcggggcgcgggcggcggacagattgaccttcagagcgagacctcctgccccccgaggtctgcagtctcctgaa

SEQ ID NO: 666426 - DNA, 100 bp, Homo sapiens
atctacaaattttgctactgtcagatggattgactatggaaaagttgccaaattggcatctatcatttcccgtaaaaaagaagccaaagctgaggaactt

SEQ ID NO: 666427 - DNA, 50 bp, Homo sapiens
aggggaaggcgcctgaagaggacgaagctggagcagttcaagaaggacaa

SEQ ID NO: 666428 - DNA, 90 bp, Homo sapiens
ggaatgatcatcaaacagctatggtgatgattagagacatactaatgtacatgggggacctcgggggccggaagaccctccagcagagat

SEQ ID NO: 666429 - DNA, 100 bp, Homo sapiens
ggagaagagcgaccctcacagagacacagcggttcgagaagtttttgaagagactggtataaaatcagaattcaggtccgtcctgagtattcggcaacag

SEQ ID NO: 666430 - DNA, 51 bp, Homo sapiens
agcacgtggacgctgactcggaagtgcaggcgccttggtgctgaattgggg

SEQ ID NO: 666431 - DNA, 75 bp, Homo sapiens
cgactgcccagagtccgcggccggggcgcgggaggtccggcctctttggcctacccccgttggctccgctgcccc

SEQ ID NO: 666432 - DNA, 100 bp, Homo sapiens
agacgaggaatcagctttgaagtgggagcccagttggaagcccgggaccgtttaaaaaactggaagagtctaacctgtctctgcaagctcttgagtcccg

SEQ ID NO: 666433 - DNA, 100 bp, Homo sapiens
gttttgaaataagagacctgttgcctgctgcacagtattgctgtagactacaggaaatggaggcacgacttgcagcgttgcagggcagagttctaccttc

SEQ ID NO: 666434 - DNA, 75 bp, Homo sapiens
tgaccgaggcccccctgaaccccaaggccaacagagagaagatgactcagcccatgcagaatgccaccaagtatg

SEQ ID NO: 666435 - DNA, 50 bp, Homo sapiens
catagagaacatagcttccatttcagacttgtgtatgcggatacctgctt

SEQ ID NO: 666436 - DNA, 51 bp, Homo sapiens
tgcgcaaacttgacactcaccctgaccggatcttcaagatgaagttcaaag

SEQ ID NO: 666437 - DNA, 100 bp, Homo sapiens
aacaccatgccgtccgccttctctgtcagctctttccccgtcagcatcccagccgtgctcacggtttggctcagaagaaggcggccccaacagaggtgag

SEQ ID NO: 666438 - DNA, 73 bp, Homo sapiens
cgaagtgctgcattggaagaagtggctgcaaggtgtgactgttgtaaatctcaaggaactcttaaagagcgag

SEQ ID NO: 666439 - DNA, 75 bp, Homo sapiens
cgatggagcagcgaaaacgtggttgtagagttccgtgactcccagtgagctgaagagacgcctgaaagctgagaa

SEQ ID NO: 666440 - DNA, 98 bp, Homo sapiens
ccggagagaagaggattggtcctgcttttaagcctagctgaaattcttttcaagtttcaggtttagctgtgcctcccagtgactataatgacaaggaa

SEQ ID NO: 666441 - DNA, 89 bp, Homo sapiens
gacagattcgcagtggtcgcttcttctccttggatcctgatggtgaacatgccaggagagcaatgcaaaaggtgatggctacgactggt

SEQ ID NO: 666442 - DNA, 82 bp, Homo sapiens
ggctcgcgggcggcgggcccgggcacctgaatggacagaagaggacctcagccaactgacaagaagtatggttaagttccca

SEQ ID NO: 666443 - DNA, 74 bp, Homo sapiens
tgctgagaaactgcggaaagaattgcatgaaggcaagaaatgggaaattgccaagcccctgaaacacaagcaag

SEQ ID NO: 666444 - DNA, 97 bp, Homo sapiens
ggaagccagagccgcctgccatgccccagccagtccccacagcataacagggtccttcctgttccagggggagccagagggcggtgagggggaccag

SEQ ID NO: 666445 - DNA, 100 bp, Homo sapiens
attggccaaagaagttgagaaaatgggagcagttttcatggatgcccctgtttctggtgccgatacggaagatgtgtgcattgtagagagattgttctcc

SEQ ID NO: 666446 - DNA, 50 bp, Homo sapiens
gccgccgcgaggccgggaaggtgaagacaaccttttagtcctcacggtgg

SEQ ID NO: 666447 - DNA, 101 bp, Homo sapiens
cgtgtaagaagtgccttttgcctcccaccgtgattctgaggcctccccaaccatgtgcaattgaccaagaatcgccttcagccctgtctggtgcatccttg

SEQ ID NO: 666448 - DNA, 74 bp, Homo sapiens
tctcttcaccctgccgtcatgtctaagtcagagtctaagaaggccaccagctgtttcccacgccccatgactcc

SEQ ID NO: 666449 - DNA, 98 bp, Homo sapiens
gacaacctgctgcgggatcccaaatcggaagtgaattcggattgtttgctggttgtccttctattcaggccactcttcgttttccatgtactgcatgc

SEQ ID NO: 666450 - DNA, 75 bp, Homo sapiens
accaacggcaccaactattcgcggagctggaatgactggcaacccagatgtgcactcccagcaacacccctgcca

SEQ ID NO: 666451 - DNA, 49 bp, Homo sapiens
gcccgacgatgtccgcaggcggtatcactcctccttgcttcaatctctt

SEQ ID NO: 666452 - DNA, 128 bp, Homo sapiens
ctccaagaaaaaaaccacaaatgtttttctgttttgcctgaatacatgatttaaacaagagatttccacagaagccggcccaggcctttgtggtgaagcggggcgtccacgtgtcaggagcgtctccc

SEQ ID NO: 666453 - DNA, 78 bp, Homo sapiens
gcagcgctgcagtgaattttccccccaaactgcaataagccgccttccaagatgcagcagcttttttatgagaattac

SEQ ID NO: 666454 - DNA, 82 bp, Homo sapiens
tgcctctgccgcaaagatgcccccttccgctggaaagcgttcaaatctgaacatcaatgatgtactagggaactactcattg

SEQ ID NO: 666455 - DNA, 75 bp, Homo sapiens
aaaatgccctcaaacgcgccaacgggttgtgagtcccggcccagcccctccacccccctgcccccccgatgcgac

SEQ ID NO: 666456 - DNA, 73 bp, Homo sapiens
ttgccttacttttgtaactcctactctactggtatgggcactaggaaaagacttcttccatcaagcttaattg

SEQ ID NO: 666457 - DNA, 123 bp, Homo sapiens
ggcgaccgagggaatgatccttactaaccacgaccatcaaatccgtgtcggagtccttacagcatgtagagcgcatgaagtacaggacaataaagcttcctacacatatcaccaggaggatct

SEQ ID NO: 666458 - DNA, 50 bp, Homo sapiens
actacaaccagagcgaggccgcttgtattggttggtgatggtggtactgg

SEQ ID NO: 666459 - DNA, 90 bp, Homo sapiens
ggaagctaaagctaccaaagacgtagaaagaaatcttagcagcattcgcaacgacaggcgcctcctctgccaaccggtttgtcagcatcg

SEQ ID NO: 666460 - DNA, 97 bp, Homo sapiens
gagcagggaccgcctgctgcactttgggttcaaggcgacagtctcagccacctttgcggctagtcttgtcagcagcccggccattggagcatatctt

SEQ ID NO: 666461 - DNA, 82 bp, Homo sapiens
ggctgccgcttcgaggggcagttcagcatcaacaaggaggatacgaagcgttttcggcttcctgcccggagctgtgcagcaa

SEQ ID NO: 666462 - DNA, 101 bp, Homo sapiens
cgtggagatcaagcgcagcgatggggatggagaagtttatgtttgggatgtgaactcaaggaagtgccttaacagatttgttgatgaaggcagtttatatg

SEQ ID NO: 666463 - DNA, 89 bp, Homo sapiens
gttcctactgacatgaatgaccagaatctagaagagccatccagatatgtgtagaatgagccaaggagactcaaacccagcagctattc

SEQ ID NO: 666464 - DNA, 97 bp, Homo sapiens
ctggaagatgtggcagccggccacggagcgcctgcagatgatgctgtgtatctggacaatgagaaagaaagagaagagtatgtcctgaatgacatcg

SEQ ID NO: 666465 - DNA, 89 bp, Homo sapiens
attaggcagactcttcaaaacgcactcattcagtttgctactagatgccatggacaatattaccaggcagaaccaattctacgataccc

SEQ ID NO: 666466 - DNA, 75 bp, Homo sapiens
catcagcctgtgcaacagcacatagccaacataagttatagctgaggtggtaccagtttaagaagtgagaacttc

SEQ ID NO: 666467 - DNA, 75 bp, Homo sapiens
atcgcctcgcgccggctgctctttccgggctctgacgcccgctctgcggcttcggtgtttgaacaggccacagtc

SEQ ID NO: 666468 - DNA, 50 bp, Homo sapiens
ccaaggcggagcaggccaaagtgaagaagagctcccagctcctccagcag

SEQ ID NO: 666469 - DNA, 50 bp, Homo sapiens
gcctacccgggatacggaggagggatctcccttgagtttagaaatctggc

SEQ ID NO: 666470 - DNA, 97 bp, Homo sapiens
atggggaacctcacttcgtggtggtccactgcacaggctacatcaaggcctggcccccagcagttttaaccatgctgaccaacgaaactggctttga

SEQ ID NO: 666471 - DNA, 100 bp, Homo sapiens
ttttggatgaagaagtttttgaggtcagacacattctatgtgaaaaacatggcaaaatcatggaagccatggaaaagttaaagtctgggatgagattcaa

SEQ ID NO: 666472 - DNA, 90 bp, Homo sapiens
cactagttatgttcaaaaaaatattgagctcctggcagcttgcagagaagaatttcataggagactaaaagtgtatcatgcttggaaatc

SEQ ID NO: 666473 - DNA, 100 bp, Homo sapiens
tgggatgcaggtcataaaaccaatgtccagcagtgttactgctattgtggaggccctggagacctgaagcaggacattctaaatgaaaagactgaattgg

SEQ ID NO: 666474 - DNA, 100 bp, Homo sapiens
gtggctcgaattcccagagttcgaggtggtgggactcaccgctctggccagggtgcttttggaaacatgaaatccacgatgggatgaacctggagcttta

SEQ ID NO: 666475 - DNA, 98 bp, Homo sapiens
ggcggcgtgtcaggtggttgcggagctgtttcagctcaggctccaaactctgccatcacagctcagactggtgttggggtagcgtctaccgtccacct

SEQ ID NO: 666476 - DNA, 76 bp, Homo sapiens
gtgggagagatgaagaacctgagtcaggacgtaaatggaaccctggattaagttgtcatcattctgggaagaaaaa

SEQ ID NO: 666477 - DNA, 96 bp, Homo sapiens
gctactgcgacgccaaatacgtctgggcagccacggccgggggcgtctttcagagcattacgggctgaagaagatgcagagcagcctgaagctggt

SEQ ID NO: 666478 - DNA, 95 bp, Homo sapiens
atgttactcatagagtccgactataccacatacagggtcgagtctatgctgtcttgtcaaagagagaaggtcgggtacttcaagaagaaatgaaa

SEQ ID NO: 666479 - DNA, 100 bp, Homo sapiens
agcaatggcggaaggagaagatgtgccgccgctgccaacgtcgagcggcgacggctggtgatggatgtggacacactgtactaggccctgagagtggaac

SEQ ID NO: 666480 - DNA, 83 bp, Homo sapiens
atttgaccatcttggtgagaaacattaagacctactaccagttcgtgtttagtaggagcacagtagctgtttggggaacgacc

SEQ ID NO: 666481 - DNA, 87 bp, Homo sapiens
ctgaggaaacaccttcaggagaagcaggggagttgctgagtcagcccagaccggaaggagtggcagagatcatttgccccaagaacg

SEQ ID NO: 666482 - DNA, 90 bp, Homo sapiens
ggacaagctcgtggaggaccacctggcagtgcagtcgctcatcagggcatatcaggaggtgataacctttatgatggtattgaggacatg

SEQ ID NO: 666483 - DNA, 50 bp, Homo sapiens
ttcttcgagtatttgtagaaggcagcctgagggaactggcatgatagatg

SEQ ID NO: 666484 - DNA, 50 bp, Homo sapiens
ggatcactgtcctctctcggcagcagttacagaatgtctgaaggggacag

SEQ ID NO: 666485 - DNA, 50 bp, Homo sapiens
gacgctgggcgcgtcgaggactggttttttgctccactcaagcctgttag

SEQ ID NO: 666486 - DNA, 75 bp, Homo sapiens
ctgcaacacctgcggcctcactgggacccccaggaggtgaccctgcaggtttttctatatgagtggagaagacag

SEQ ID NO: 666487 - DNA, 80 bp, Homo sapiens
aaacaatggcatttacagaaagagtcaacagcagtggcaacaggggactcagaagaagatccttgacattgccaacatgc

SEQ ID NO: 666488 - DNA, 75 bp, Homo sapiens
gagaactatagcaacttggtatcactaggggttggtgaccttcagagatgtggcgctagacttttcccaagaaga

SEQ ID NO: 666489 - DNA, 75 bp, Homo sapiens
ccaaccggccagaggacgagtgtggtgcgtgctctggaggaggccaacgccgacctggaagtgaagatccgtgac

SEQ ID NO: 666490 - DNA, 101 bp, Homo sapiens
ggtggtggagtggcaacttcaggatgacaaaaaccaaagtctcttctgctgggaaatcccagtacagatccatgctacaagtgaaaactgatgagaaactg

SEQ ID NO: 666491 - DNA, 90 bp, Homo sapiens
ctcgggttctgacaagatggccgggctgccccgcaggatcatcaagtcattgaaattatgagactatcattcaaatggaagcattatagt

SEQ ID NO: 666492 - DNA, 111 bp, Homo sapiens
cagagcagatccctgccgtacaagctgatctccctgctaaatgaaaaagggcaagatactgggtttcaaaggacatttgagtctctcaaaaatgttgccaacaaatctgac

SEQ ID NO: 666493 - DNA, 74 bp, Homo sapiens
ggaaaatgcgctcgggctggaccagcagcagggtttccaggcctgaggtgcccgccctggccccaggagaatga

SEQ ID NO: 666494 - DNA, 90 bp, Homo sapiens
ctctggaacttctgcccagctctccttgggttttgacccaccacatcagagtgacacaagaaccatctacgtagccaacaggtttcctca

SEQ ID NO: 666495 - DNA, 98 bp, Homo sapiens
atgatgatgagacttatatgatgcaagatgtggcagaagaacaagaagttgagaccgagaatgtggaaacagattacctaggaacagtacgatttggg

SEQ ID NO: 666496 - DNA, 89 bp, Homo sapiens
aatgtgatgcagaggctgcaaggctcacatgattcattcagctactgggtggatgaaaagtccccagtggggcctgaccaaacccaagc

SEQ ID NO: 666497 - DNA, 50 bp, Homo sapiens
atctggctggaacacacatcagtcacaaacaggaccttgccctgtcactc

SEQ ID NO: 666498 - DNA, 100 bp, Homo sapiens
ccgggatggaggacgttaactctaacgtgaacgcggaccaggaggcatgaacgctgctgtccgggctgtgacgcgcatgggcatttatgtgggtgccaaa

SEQ ID NO: 666499 - DNA, 100 bp, Homo sapiens
caaaggggtgcctgtgattagtgtaaaaacgtccgggtccaaagagagagagtgaccaacctcgcataaccaaagatgtgatttgttttcatgctgagga

SEQ ID NO: 666500 - DNA, 75 bp, Homo sapiens
gagtcagtgcgccgctctccagcccgcttgaacggcctataagggctctgatatagatgtctttacctttgggac

SEQ ID NO: 666501 - DNA, 83 bp, Homo sapiens
cagcaggagggcatggagatggagcccggactcctgggggatgcaggttaacacagaaatctgcctcctgggccatgccgctt

SEQ ID NO: 666502 - DNA, 83 bp, Homo sapiens
gggatacaaggctggcatgactcacatcgtgcgggaagtcgacaggccgggatccagcatgccagatttcctggagaagctgc

SEQ ID NO: 666503 - DNA, 100 bp, Homo sapiens
cacccgcatcatcgccatcctgctgcaggtggctgtgccctttcagtggcagtggctgtaccagctgattgggcagaaagtggcccatgctctggcagag

SEQ ID NO: 666504 - DNA, 101 bp, Homo sapiens
ggctgctgtaaggccgaggttgcggcggaagcggagaccatgttccgagcggcggctccggggcagctccggcgggcgacattgctacaagtggttggtgt

SEQ ID NO: 666505 - DNA, 89 bp, Homo sapiens
gagcctgtgcatctgtacaaagatgtcaagttccatgccattgcagtgtcaactaggcctcagttacttttcagtttgcccaaattgag

SEQ ID NO: 666506 - DNA, 75 bp, Homo sapiens
ctggtgacatcatcattgacggaggaaattctgaatatagggacaccacaggtgtccgcaatgttgccagtgtct

SEQ ID NO: 666507 - DNA, 75 bp, Homo sapiens
aaaactgggtaaatgcagttcactggcaacctgtgttttacaaaggcattgaagttgatatcgatgtggagcacg

SEQ ID NO: 666508 - DNA, 90 bp, Homo sapiens
cgacttcgtggtgctgaaacgtgaagatgtgtttaaagcagtacaagtccagcggagaaactcgatgcattctatttctcatcatttggc

SEQ ID NO: 666509 - DNA, 88 bp, Homo sapiens
ccgccgctgagccgtcgcggagccgcgcagccctcggagcacgtaatctatgccagcaattatgacaatgttagcagaccatgcagct

SEQ ID NO: 666510 - DNA, 49 bp, Homo sapiens
ttgggactgggctcgatttgagtacgtagagaaatcgacactcttaatg

SEQ ID NO: 666511 - DNA, 80 bp, Homo sapiens
gctggatttttttcgggtagtggaaaaccagttacagaatgtctgaaggggacagtgtgggagaatccgtccatgggaaa

SEQ ID NO: 666512 - DNA, 83 bp, Homo sapiens
tgagtgttcctgtggtctctgcacctcctttctgttaagctgaatgaacgaataatagccacttcacagggactcctgatccg

SEQ ID NO: 666513 - DNA, 98 bp, Homo sapiens
ccttgcagtacaacatctacaatgttggctcaaggaagaacctctctatccagggcctccgctggtggctacagtggctgggcatcaacttcaccctc

SEQ ID NO: 666514 - DNA, 87 bp, Homo sapiens
tcactgatgatacggcatgataagagagaaatagcccggaaacttgcaaatcctaagcaaccaacaaatccttttctagagatggtc

SEQ ID NO: 666515 - DNA, 75 bp, Homo sapiens
tatactcgcagacaacccaaccggtatacaatggttggcatcactctcttcactgtgtctcataggaaatctctt

SEQ ID NO: 666516 - DNA, 127 bp, Homo sapiens
gaggggccactgctgggccctgaggctgcaccaagtggcgaaggagccggctccaagatatcagttttagagaatgtggcgtggagaaattctcaaggaaagagtaaaatgctggtgatgtgctgag

SEQ ID NO: 666517 - DNA, 119 bp, Homo sapiens
cttagatcttgtggccaagagttcagaccgtggcgaagtggagagtgacatgcagttggatggcggtgactgcgtggctttgaaatttctgaaaaccagaagaggcaggctgcaatgac

SEQ ID NO: 666518 - DNA, 80 bp, Homo sapiens
ttggctacgtggtgcaagagtcaggccagaacttcagcaccctggctgagaaggtgaggtcccagcttgaagagaaagaa

SEQ ID NO: 666519 - DNA, 73 bp, Homo sapiens
attagcttcgcagtctggaaagctttaggagttcacagttttttcccaggtcatgagtctcgggctacagaag

SEQ ID NO: 666520 - DNA, 90 bp, Homo sapiens
ccaacatggcggagagagaggtggagtccggcccccgaaagagggtcttgtggatgagcagcagaaagttcggaccatcagtgctttggc

SEQ ID NO: 666521 - DNA, 100 bp, Homo sapiens
accatctctaccatcatccgggtactggaagatgctcacagagatgccaacctgcaccatgtagcttgtaatatagtgaaaaaacctggcaacatttact

SEQ ID NO: 666522 - DNA, 74 bp, Homo sapiens
aatgagcaactgcccatgctgggccggcgccctggggccccggagagtgatgatgatgatgattttgatgatga

SEQ ID NO: 666523 - DNA, 100 bp, Homo sapiens
tgcctcaggccagtcgcctccaggccaagagggatccttcacccgtgtctggatggaggatgaagctgtcctggacagaggggcttccttcctcaagcat

SEQ ID NO: 666524 - DNA, 73 bp, Homo sapiens
caaggtctcctcggatcgcctggagaggcactcggacctgctgagtcagtgctgattctctcaaatagagctt

SEQ ID NO: 666525 - DNA, 98 bp, Homo sapiens
gaccctcctggatattcctgcaaacccaacaggaattcctcctgatcagcagagactgatctttgctggcaagcagctggaagatggacgtactttgt

SEQ ID NO: 666526 - DNA, 82 bp, Homo sapiens
acagctgctacagaccacaaacaccccatcagccaagagagacccttgacaaatttacatgtattggagaccagaccagaag

SEQ ID NO: 666527 - DNA, 100 bp, Homo sapiens
aatcctactcagaagaacttgtacagagatgtgatgttggagaactatagcaatctggttttcttgggaaatcacattctgcctgatgaagatctggctt

SEQ ID NO: 666528 - DNA, 75 bp, Homo sapiens
ggtgcctgggagctgtcttgtatgagatgctgtatggcctgactcagattgatggacaacttttcttaattaagc

SEQ ID NO: 666529 - DNA, 75 bp, Homo sapiens
ggcgactgtcattcacaaccccctgaaagcgttctccttactatgacaatgtccgccccctctcttaccctgatt

SEQ ID NO: 666530 - DNA, 95 bp, Homo sapiens
cacagttcctaccttatgagctcggttttcttatgcttataagagtggaacaggagccttcacgtaaatgggtccagtcatgcctcccagtaaga

SEQ ID NO: 666531 - DNA, 100 bp, Homo sapiens
aacaattcttcgacatactctccagcttcaaccagtagacaagatttgactctggaggtgacgtctgagccaataggtatttggagtctggagaaaaagc

SEQ ID NO: 666532 - DNA, 98 bp, Homo sapiens
aaaattctggataatggtgaatgggaagttggaaatctgtatgacatgttccacactcgcaactctttacaccgtagagcttatcaacacaaagttgg

SEQ ID NO: 666533 - DNA, 50 bp, Homo sapiens
gctctgaaatcgacgagctgatcaaggagtcctcccctgcccaagggaac

SEQ ID NO: 666534 - DNA, 75 bp, Homo sapiens
tgccacttttcagccatggccacaaggttgtctgcattcaaaagagcattctattaaagctaccttaatttggcg

SEQ ID NO: 666535 - DNA, 100 bp, Homo sapiens
ggagctggattacacacagcaagttcctgcttctgggacagctctactgacggccagaagcggactcctagaagaggggagcagcaaggatggaatgaca

SEQ ID NO: 666536 - DNA, 100 bp, Homo sapiens
ctaagatcggaagatgagtgagcttgaccagttacggcaggaggccgagcaacttaagaaccagattcgagaaaaatagaatcctgtgcatctcgatgta

SEQ ID NO: 666537 - DNA, 100 bp, Homo sapiens
cccgaatgcaggaagaccgtgatgggagctgcagcacagtcgggggtgtaggttatgggggcattgaatgccccagaggagcccgaaacctcccaggctt

SEQ ID NO: 666538 - DNA, 100 bp, Homo sapiens
aaagcggctctccagcaagaaggtggcaaggcttatggtgaaggctctggtgctgattgtagacgccatgtccaaaagttaaatctactacagggacaag

SEQ ID NO: 666539 - DNA, 96 bp, Homo sapiens
agtcccttaatttacaagttaactgcaaacataggtgacttaagagattaaaattaatttggttgctgttggttctgaacaaataatgagttcttt

SEQ ID NO: 666540 - DNA, 111 bp, Homo sapiens
aggatcggttaaaaactggcagctcacggaggaggattttgggaacacatcaggccgtctctgtttgaacaaccgaaggagtaaaggtgctgcaatgatgttagctgtggc

SEQ ID NO: 666541 - DNA, 71 bp, Homo sapiens
cagtgcccttcccggagcgtgccctcgccgctgggccaattcctgtccccccagcagcatggcatcgtgtg

SEQ ID NO: 666542 - DNA, 100 bp, Homo sapiens
gcctgcagcgctcccacccccggcggcggcacgatgccctttgacttcaggaggtaagaatgattgatgttggctgatattggagtgctcattcacatga

SEQ ID NO: 666543 - DNA, 100 bp, Homo sapiens
cggaagccctgagggcagctgttcccactggctctgctgaccttgtgccttggttggatttggtctagggagtcccagaaagaagtagaaaaagagagag

SEQ ID NO: 666544 - DNA, 100 bp, Homo sapiens
aaccccagctggaactccggccacagccagcatgcagcaaattgtggctactaatttgccccctgaagatcaagatggctctggggatgactctgacaac

SEQ ID NO: 666545 - DNA, 84 bp, Homo sapiens
atgaccgtggagttcgaggagtgcgtcaaggactccccgcgcttcagtgtcaacagcatctccaccctggagcctgtgagccgg

SEQ ID NO: 666546 - DNA, 96 bp, Homo sapiens
tggatgattaagattggaaggggacttgattattttaagaaaccacagcctcctccagagttgtgacctggaagttgcaaacaaagtcaaagctgc

SEQ ID NO: 666547 - DNA, 51 bp, Homo sapiens
gaggaccggagcggaaaaccttctgaagagacgttgacatttagggatgtg

SEQ ID NO: 666548 - DNA, 83 bp, Homo sapiens
cacttctcagagctgcccctggacgaccaggtcatcctgctgcgggcagcagggagagcaacaagccccggccctcagagctc

SEQ ID NO: 666549 - DNA, 80 bp, Homo sapiens
gcactgccaccaaagatcggaactccaacaagaccctgccctctaccacctgtgttgggatctggtgcaacaaacacaaa

SEQ ID NO: 666550 - DNA, 75 bp, Homo sapiens
gtggaaagaagttgcaaaacactgggtccacgctgcttttatgagctgtaacactcaccgcgaagatctgcagct

SEQ ID NO: 666551 - DNA, 100 bp, Homo sapiens
ccattcccaaattatagagctaattacaactttcggggcatgtacaatcagagtgccggtggtggtgtgcacattgagccccggtatagacagttccccc

SEQ ID NO: 666552 - DNA, 74 bp, Homo sapiens
gccatcgttgctgccttcttcgtcaaggggcatggtctagtggcccagtcaggacgcggaaacactccctggag

SEQ ID NO: 666553 - DNA, 82 bp, Homo sapiens
cagcttcgtggaggagtacaacaacaagatgccttcaattaagttgcagagttctgatggagagatatttgaagttgatgtg

SEQ ID NO: 666554 - DNA, 100 bp, Homo sapiens
gctgttttcttggggtgcagggagtgatggtcagctaggactcatgactactgaggattctgtggcagtgcccaggtttcctggggccattactctgggg

SEQ ID NO: 666555 - DNA, 75 bp, Homo sapiens
ggcggcggtggcggcgaaggccgaggcgagcagcccgacggccatggaggctgaagagacgatggaatgccttca

SEQ ID NO: 666556 - DNA, 100 bp, Homo sapiens
tcggaccctggcctcttgggatgcaaagggctgacagatgaagagattgatatggccttccagcagtcgggcactgctgccgatgagccttcgtccttgg

SEQ ID NO: 666557 - DNA, 74 bp, Homo sapiens
ggaaacttgcagcaaagccattcgggttggagtaattggatctaccatacccattgactaactatggaagatta

SEQ ID NO: 666558 - DNA, 100 bp, Homo sapiens
ccggactgctaaagatgcagctatttacagtggacagaaactgaaggggtgaaagaaaacccaagtgttctaatcttaggcgcttcaggcggagttggta

SEQ ID NO: 666559 - DNA, 50 bp, Homo sapiens
gtgcttgtcgaaatcaggtagcaaaaggtgctctgggacctggagttccc

SEQ ID NO: 666560 - DNA, 51 bp, Homo sapiens
caacgtggatcgttgttttgaaaccatgttggcagataaattgaacatgac

SEQ ID NO: 666561 - DNA, 50 bp, Homo sapiens
caggactgcgccgcgtcttcctcaagctgctgatgcaaggaatcccctgg

SEQ ID NO: 666562 - DNA, 50 bp, Homo sapiens
ctccgggccggtggtggccatggcaaagccctgcccacccggaagccgcc

SEQ ID NO: 666563 - DNA, 85 bp, Homo sapiens
gccaagatgccgcagtccaagtcccggaagatcgcgatcctgggctaccggtctgtgggttttgagcaaaattttggactgtgaa

SEQ ID NO: 666564 - DNA, 83 bp, Homo sapiens
gtggacagtcctgatgacacagccctcagcgagagtgccaaccaggccttcctgatgaaggatttgggggcagagcacttggc

SEQ ID NO: 666565 - DNA, 100 bp, Homo sapiens
ggagtcccagggcaccccggaagaggagtctccagccaagtttctgctgatgtactccacggttctgtgcagctattacaattcagccctgacgacagca

SEQ ID NO: 666566 - DNA, 96 bp, Homo sapiens
agaactttgaaggaagaaaggaaattgtgctaagaagcacgaggtcccagcaaagtctgatgtttactgtgaggtgtgtgaattcctggtgaagga

SEQ ID NO: 666567 - DNA, 87 bp, Homo sapiens
cattaaaagtaattcccaaccagcaaagccgtcttcctgcactacagtggaaggagaacatgaatctctcagaggcccaagtacagg

SEQ ID NO: 666568 - DNA, 75 bp, Homo sapiens
aaaacaagactggggctgctcccatcattgatgtggtgcgatcggctattggttttcagttccgctattgctaag

SEQ ID NO: 666569 - DNA, 88 bp, Homo sapiens
tttttgaagcctttgcaaaagaacgacaatcgagtggttagaaccaaagatatctttatcaaaccactataaaaatggagctgaccag

SEQ ID NO: 666570 - DNA, 100 bp, Homo sapiens
tgccctggggcagctgaactgagcgtatgtgccacgccgcccaggagacccctctgctgcaccacttcatgacatgcggcgggatgtgcaggagatcttc

SEQ ID NO: 666571 - DNA, 95 bp, Homo sapiens
ggccgccctctctcggagttggcaggaagccaggttgcagggtgtccgcttcctcagcttcccctaaagtacgactgagcttggcaaacgaagct

SEQ ID NO: 666572 - DNA, 83 bp, Homo sapiens
acagaaaggatcatcccagagcccagatcagggagcagagaaacatgaaggcacaggtcagtcctctgggatcactgatcaag

SEQ ID NO: 666573 - DNA, 80 bp, Homo sapiens
agccaggcatgtctcccgaggagtgcaggcgcttcaccacagacggtccagagggggcaaacctctttatttaccacctt

SEQ ID NO: 666574 - DNA, 83 bp, Homo sapiens
ggcctgggcgctccggtggcggcggaggttctgcggggagtgtctccagccctgcctgcaggtgccatccccgctgtgcccac

SEQ ID NO: 666575 - DNA, 100 bp, Homo sapiens
cagctgctgaggaggagccgaagcccaaaaagctgaaggtggaggcgccgcaagcgctgagggtctcctatggacagaagtgcgggcaaggagctttgtt

SEQ ID NO: 666576 - DNA, 80 bp, Homo sapiens
cgccgcgcacggacttcggcagagccgcggcgagtcctttgcacatgttggcaacacacgcatccgcatcggcctccctg

SEQ ID NO: 666577 - DNA, 98 bp, Homo sapiens
aaggatcgatattttgtcgaagaaactgtggaagtcattaggaacaatggtgcaaggtggatggaagcatgcctaggggaagatctgcctcccaccac

SEQ ID NO: 666578 - DNA, 76 bp, Homo sapiens
agcttctcagaagacagagggttttcttttgaggccgaatacatcaagcaatggtaacatctttaaatgaagataa

SEQ ID NO: 666579 - DNA, 50 bp, Homo sapiens
gccaggtgtccatccccgtgctgagctatgctgggactcatgtatgtcta

SEQ ID NO: 666580 - DNA, 75 bp, Homo sapiens
gggacctgaagaagatgaacaagcgccagcggaggaaatatttgagagtgtaggagatcgagagctaagacaagt

SEQ ID NO: 666581 - DNA, 100 bp, Homo sapiens
gctgcagcgagcgctggacggagaggaaagcgtagagatcagagagttgtgacatctgaggaccaagttcaagaagggactaaagtgctgaaacttaaaa

SEQ ID NO: 666582 - DNA, 75 bp, Homo sapiens
tggcgccgggggccggggagcgccaggctcttgtcaggatggtgaagctgttcatcggaaacctgccccgggagg

SEQ ID NO: 666583 - DNA, 117 bp, Homo sapiens
tcagtgccgagcccttagcgtggactgggctggccccggaagcccccacgggctctacctgaccctgcagtggaatgcagtagccctctgggcctgggatattgtggttgataactg

SEQ ID NO: 666584 - DNA, 74 bp, Homo sapiens
atgaatatgcagctcctgctgagttctaaattagttccattctggagctggctacaaatgggtaaagacctact

SEQ ID NO: 666585 - DNA, 82 bp, Homo sapiens
tcccatcattgatgtggtgcgatcgcttgcattgaaaggctctagttacagtggacttcttgaacgacatcatattcacacc

SEQ ID NO: 666586 - DNA, 100 bp, Homo sapiens
cctctgtttcatggacattatcatattcttctcaagagtacccagcaagaggtttgcaaagaggagttattcagtgagacactgcccatctctaagataa

SEQ ID NO: 666587 - DNA, 83 bp, Homo sapiens
gggctcgcggcgtctccggggaaagccgtggccccgagggcggatccgaggagaagatggggagccccgaggatgacctgatt

SEQ ID NO: 666588 - DNA, 90 bp, Homo sapiens
accctgactatgttggccagacttgcatccgcgggcttggtggagccagtgaacgtggtggacaatggagatggcacacacacagtaacc

SEQ ID NO: 666589 - DNA, 98 bp, Homo sapiens
gggctcttttctctccactgccaatgtttctgctttgggacaaccatacatctaattccttaaagtagttttatatgtaaaacttgcaaagaatcaga

SEQ ID NO: 666590 - DNA, 51 bp, Homo sapiens
tccctggaggagccatctattcacaacctgcctagagctggaacgttacct

SEQ ID NO: 666591 - DNA, 75 bp, Homo sapiens
cagaaccactgcctacaaaccaccctctcctgaccctgaagaactgtggacacaactcagatgggaagttcatcg

SEQ ID NO: 666592 - DNA, 75 bp, Homo sapiens
ttctacaaattctttcaggagtttacccaagaaccattggtggagatagaagggcttcgtgggacacatatgcaa

SEQ ID NO: 666593 - DNA, 80 bp, Homo sapiens
aagagttgtcccagctcggcccgcgggggagccccgggagccgcacggtgccggggacacgggcggcaagccgtccacgc

SEQ ID NO: 666594 - DNA, 98 bp, Homo sapiens
cagaacccagctgaaggactgatgctgagatgaatcgtcacctgtgtgtttggctttttagacatccatctcttaatggttacctccagtgtcacatc

SEQ ID NO: 666595 - DNA, 50 bp, Homo sapiens
cttgccggccccaacacggaccttgaaacctctgcgccatgagagccaag

SEQ ID NO: 666596 - DNA, 100 bp, Homo sapiens
cagtgagcccatcccgttctctgatttgcagcagtgtgctggaattgatgttcgtctgtgtgatgttggtgaggccatccaagaagttatggagtcctat

SEQ ID NO: 666597 - DNA, 116 bp, Homo sapiens
cgtgccccaccatgtcagacgcagccgtagacaccagctccgaaatcaccaccaaggtgagaagccctaccactgcaactgggacggctgcggctggaagtttgcgcgctcagacg

SEQ ID NO: 666598 - DNA, 100 bp, Homo sapiens
gaaaaagtatcgtcgagaagcctatcatcggcagcctgcttctgcaaagtggtacgatcgaagggactatgtcttcattgaattttgtgttgaagacagt

SEQ ID NO: 666599 - DNA, 100 bp, Homo sapiens
ggatgtatttggccatggtcttactgggagccactcacggattaatatttctccctgtcttactcagttacataggttacctctggaacctccaagtgaa

SEQ ID NO: 666600 - DNA, 101 bp, Homo sapiens
ttccgcttctcagaggacgccttcaacaccaccttcatctccaccatcgattgatgcactgagtaaaagaagcaaggaagctgaagcagctttcttgaatg

SEQ ID NO: 666601 - DNA, 100 bp, Homo sapiens
actcaccgcctgctggaggaagacacccctcgatacatgagagccagcgaccctgccagcccccacatcggtacaggtttgcagattccgccagcagcac

SEQ ID NO: 666602 - DNA, 74 bp, Homo sapiens
aaaaatgaagctctctttgacagtggtctccacccagctgttaaagttgactatagtcaatggggccaatggag

SEQ ID NO: 666603 - DNA, 51 bp, Homo sapiens
agtcagttgaacaagacaacttatttgataagaaaaagtcagcactttttg

SEQ ID NO: 666604 - DNA, 97 bp, Homo sapiens
gggaaaatcatggaagttgattactcagtctctaaaaagctaaggtgtgcaactgaggaacatggctcaagaaactaatcacagccaagtgcctatg

SEQ ID NO: 666605 - DNA, 75 bp, Homo sapiens
ctggggcagaagcgcgtggtcaaggttctgtacagagtaatgagatgtgtgacggctgcaaaccaggtgtttttt

SEQ ID NO: 666606 - DNA, 75 bp, Homo sapiens
cagaatgaaggagaaccagaaacatatctattatatcacaggatgaggaagatggagagaatgcccacccatata

SEQ ID NO: 666607 - DNA, 82 bp, Homo sapiens
aacgaagcctgcaagctgttcgatgccacgctgacccaggccattgagaaactagtcgctcttctcaacacgctggacaggt

SEQ ID NO: 666608 - DNA, 100 bp, Homo sapiens
caacccgttcttgcctcaggccagtcgcctccaggccaagagggatccttcacccgtgtctggtgctatgacaagcgtctgtggcctcgaatggacctga

SEQ ID NO: 666609 - DNA, 90 bp, Homo sapiens
gctgagcaacgggctcctgagctactacaggtttcaggaggggaagatgaaatccaacaattacaaaaagcattgcttgattacttggat

SEQ ID NO: 666610 - DNA, 75 bp, Homo sapiens
tgatcgaggccacagcccaggtcacagtgaaagcgcacataaaatccaaatcccacttgaaccaactgaagaaaa

SEQ ID NO: 666611 - DNA, 75 bp, Homo sapiens
ccacatgtgggtactgcattcctaccggtgtgacaggttcatgatcaagagggcccaaggacggaagcgctttgg

SEQ ID NO: 666612 - DNA, 100 bp, Homo sapiens
actgtaaaaagaaacacaagcgagaggaggaggaggatgatgatcataccctaatgatcccagcaagataatgtcctgtcttctaagatgtgcatcaagc

SEQ ID NO: 666613 - DNA, 87 bp, Homo sapiens
aaaagagtagcctgggctgtctggaaatctgagtccaagtggtaagaagttcagaagcaagcctcagttggcaaggtacctgggaaa

SEQ ID NO: 666614 - DNA, 83 bp, Homo sapiens
gtggcatggcggacgaggggaagtcgtacagcggagctcgaggccatgagcagatataccagcccagtgaacccagctgtctt

SEQ ID NO: 666615 - DNA, 100 bp, Homo sapiens
ctgataaggattatcgtagcaaggtgctcttctgggacaacgcgtacgagttcaacctcagcgctctgaagaacagatggagtcggataactgttcagga

SEQ ID NO: 666616 - DNA, 100 bp, Homo sapiens
gattagctaataaccaactgcaattcctacctccagtttcctgttttccagcacccaacataacttgtaaggattccagtggcaatgaaacacattttac

SEQ ID NO: 666617 - DNA, 75 bp, Homo sapiens
ggtgaacaccacggtggaggacgtgaagcaatattttgagcagtttgggaagacgattgcctacagcattttatg

SEQ ID NO: 666618 - DNA, 83 bp, Homo sapiens
ctacgcgcggggcgggtgctgcttgctgcaggctctggggagtcgccatggtgctggagaatctggtaaaagcaccattgtga

SEQ ID NO: 666619 - DNA, 100 bp, Homo sapiens
ccctctgtggaccccagatgcttgtcttcctgagagtgattggaggtctccttgccttggctggttatgatgtgattgctcaagcccaatctgggactgg

SEQ ID NO: 666620 - DNA, 90 bp, Homo sapiens
tccactttcgccagcccgtgccgcgagcgcggcctgcaggagcctaagttcgaggcccaggcgcctccatcagcgccgcctgcgccccgg

SEQ ID NO: 666621 - DNA, 98 bp, Homo sapiens
cgcccgccgcagaggaaagcgggctggcaggcgagggagcccgcgtcggctgagagcccacaggcccccacaggtgcatctgcagacgcagcaggagg

SEQ ID NO: 666622 - DNA, 75 bp, Homo sapiens
gtctaccagagcatggtgctcttcttcttcgagaattacaccggggtccaggagtcagaaataccatcagaggag

SEQ ID NO: 666623 - DNA, 100 bp, Homo sapiens
ggaagatgcctttgggaagcatgtcaccaacccggccttcaccaaactccctgtacctgcacatgttgttctttgtcagtgctgtcaagtgtgtgccagg

SEQ ID NO: 666624 - DNA, 100 bp, Homo sapiens
taggggggacgcggcggcggcgttgacaatgcatttggccatccagtgtcattggtctcagaggccagcagttattggagatgtccttcaagtctacagt

SEQ ID NO: 666625 - DNA, 100 bp, Homo sapiens
accatggtggtggcgctgctcatcgtttgcgacgttccctcagcctctgcccaaagaaagaaggaggtttggcaaacatcgaaaagatgacaagattgag

SEQ ID NO: 666626 - DNA, 95 bp, Homo sapiens
gtggttccatcagtcaggtcattgagcagttacctcagccaaacaggacaagcaggtttgaattttgggaagattttgaagaagaccatgggaag

SEQ ID NO: 666627 - DNA, 76 bp, Homo sapiens
ggagactgccgagcagccttgagccggcggtgggagcaaggaaaaggaggcaaaacccccacaggaagacctgaaa

SEQ ID NO: 666628 - DNA, 75 bp, Homo sapiens
ggacattattgcgcgtggaacggctgcttttggaagacatgggagtcccaccgtattgtccaggctggtctcgaa

SEQ ID NO: 666629 - DNA, 75 bp, Homo sapiens
accaggcgctgctgaccatggacacgtacctgggccagttccccgacatcaaggctacggggcgtggagtgctgg

SEQ ID NO: 666630 - DNA, 50 bp, Homo sapiens
cgccatggcctgcatcctgaaggattggtagcttatgtcgatcttgatga

SEQ ID NO: 666631 - DNA, 105 bp, Homo sapiens
accatttggacaaattatggaaataagagttttcccagaaaagggctattcatttgtcagtgccggtggtggtgtgcacattgagccccggtatagacagttccc

SEQ ID NO: 666632 - DNA, 74 bp, Homo sapiens
gtaattggatttctgaattttgaaattgtggaaacctactttccttggaaggagaacatgaatctctcagaggc

SEQ ID NO: 666633 - DNA, 101 bp, Homo sapiens
agagttatgagttgattgaaaagggcaattcatgatgttaaagccacagatctgggattaggtaaagtaagatttaaggcagaagtagattttgatgggcg

SEQ ID NO: 666634 - DNA, 82 bp, Homo sapiens
gccgctctgcgggactctgaggaaaagctcgcaccagccctcccaggcccaatacttcaaagcatcctacctctgctcaata

SEQ ID NO: 666635 - DNA, 100 bp, Homo sapiens
aactgcaatatggtcctcgtgacaaacatctatggagaagctgcccagttagaagaaacgagttatgcccagccaagtcttcagtatatccaggggcaac

SEQ ID NO: 666636 - DNA, 100 bp, Homo sapiens
gccccggctgcctcctccctgagaaccacaggagaagttgtgtcaggtgttgtaagtaaggtgttcaatcaacctaaagctaaagccaaggagctgggca

SEQ ID NO: 666637 - DNA, 95 bp, Homo sapiens
tggatttggctacacacttatagatcttctgcactgtttacaggcacagggttaatgcctcttggaagtcaggagtcttcagacagtctagctgc

SEQ ID NO: 666638 - DNA, 90 bp, Homo sapiens
gatgaccaagagaatgtgtcagccgatgcaccgagtccagcccaggaaaatggagagattgtgaataagtggaatacagctctcattggc

SEQ ID NO: 666639 - DNA, 82 bp, Homo sapiens
cggaagaccaaagaggatgagaaggacgacaagcccatccgaggcatacactagcgtggctaaggcccctctgcacctgcat

SEQ ID NO: 666640 - DNA, 100 bp, Homo sapiens
ggggtctccatccagatcagctgaatcagagtttgcattgttaacaagagagaagaagaaggaggttcctgctgtgccagaaacccttaagaaaaagcga

SEQ ID NO: 666641 - DNA, 83 bp, Homo sapiens
ggcatggaacccgagaccacagccaccactattctagcatccgtgaaggagcaggattggattcagcatcaaaatacatctac

SEQ ID NO: 666642 - DNA, 73 bp, Homo sapiens
tggtaatgtgtccattcgagggcggatcctctctgattgaccctcttgctggaatgacatctcttagtatagg

SEQ ID NO: 666643 - DNA, 100 bp, Homo sapiens
ttcagatgcaaggcaactcgaccatttgggagcctctggtggagcaagtaattgggattcctacagtgaccatttcaccattgaaacctgcaaagagaca

SEQ ID NO: 666644 - DNA, 74 bp, Homo sapiens
cactcccaggatcgggtcatcggcacaaaaggagacattgcccacgtgtcagttgtacccgaggcgttctcagc

SEQ ID NO: 666645 - DNA, 96 bp, Homo sapiens
cgcccagaaatacctgcagactcgggccgtggccgcctacaggtactattctgccctaaaaactatggaacaattagagaatgtgtactttccctg

SEQ ID NO: 666646 - DNA, 75 bp, Homo sapiens
taaagatccttatggaaagccagtggatatgtgggcatgtgggttaccatccattgacccatcaggcagctcccc

SEQ ID NO: 666647 - DNA, 95 bp, Homo sapiens
gccggccgggcatgagttagtcgcagacatggacaccaaacatttcctgccgctcgtgtcacaccatgtctgaccggaaggcagtgatcaagaac

SEQ ID NO: 666648 - DNA, 76 bp, Homo sapiens
attaaagaaaatacgagtaaaatatggtttacaggctgtggaaaatctctgttctcacaaagtctccccaatgctc

SEQ ID NO: 666649 - DNA, 123 bp, Homo sapiens
cacgtggacctcgtgaagctgctgctgtccaagggctctgacatcaacatccgagacaactttggaaattttagcattcaggtgccaggaatgcagatgggacagccagtgccagaaacaggc

SEQ ID NO: 666650 - DNA, 83 bp, Homo sapiens
atcgctgttaatgctacatatccagagctgcaatttactcctcaacacatggaagatcaatcgcgtaaagattttgaagagga

SEQ ID NO: 666651 - DNA, 75 bp, Homo sapiens
cgggacgcgcgtacgccctgctgcttctcctgggtaaaccagacttgaatacaacattgccaattagacaaacag

SEQ ID NO: 666652 - DNA, 100 bp, Homo sapiens
gtgaaagtcctctttttctttgtaccacttactgagcttcagttgtggagggccaaaagggtatcattcttcgagctattcaagaaatatttcaaagcat

SEQ ID NO: 666653 - DNA, 100 bp, Homo sapiens
agagctggggtctatcctgacaaatctgtacatccacctccagatcgacaggcagtacctggaagaccaggcccctttccctccaagcagcaagtagctg

SEQ ID NO: 666654 - DNA, 101 bp, Homo sapiens
gaagagcgagccagcgcccggagcaagcggagctcccccaagagccggaaagctttgggacatccggaagaaagcagccatccagacatttcagaacacgt

SEQ ID NO: 666655 - DNA, 50 bp, Homo sapiens
atcggacgctgcacaagatcaaggtcagagatgtcatcatcgctgcaagc

SEQ ID NO: 666656 - DNA, 100 bp, Homo sapiens
tggcccagcagatggagaatagaccctctgtccaggcagcattaaaacttaagcagggtgatgaccagttaaatgtatttggagaggacactatgggagg

SEQ ID NO: 666657 - DNA, 100 bp, Homo sapiens
aaagttcgagacttgcatttgaaatggacagaaggcattgtcaatgaattttatgagcaggaattcctgcccctagaggagtgttactttatggtcctcc

SEQ ID NO: 666658 - DNA, 97 bp, Homo sapiens
aagccctgcaggatacatgccatattcccatccttcaagttacacaacacatccacagatgcaacaaggttcaccaggctggtttaacctgcgatta

SEQ ID NO: 666659 - DNA, 95 bp, Homo sapiens
tagagaccgccgggtctcggcccgcaccaggagcggaacaaaaacaggtgagaatgaccactttaactcaccgggcccgtcgcactgaaataagc

SEQ ID NO: 666660 - DNA, 100 bp, Homo sapiens
gtcgacctcctataaccacccggtcctgggaatgtacgacgccaaagatgacttccctcttaggaaaacagtatgtccgtggttcagaccctgtattaaa

SEQ ID NO: 666661 - DNA, 100 bp, Homo sapiens
ctcaacatctctcagagacgaaaggatcatgctcctctgtggagcaagtgcctccatgaaatgccatattttgtgaagaaagtgcatgcaggaatattca

SEQ ID NO: 666662 - DNA, 90 bp, Homo sapiens
aggattggcactcacagcggcagcgatcaagcaggcagcgggctttgccagcaaaaccgaaacagtgagaaagatcagtctaaagaaaag

SEQ ID NO: 666663 - DNA, 100 bp, Homo sapiens
gacgcgctcaaccagatcgcgcgggagtattctaccttgtaaatactgttatttgtatatactgtaaatgatgacatcggtgggcactaaccgagcccgg

SEQ ID NO: 666664 - DNA, 50 bp, Homo sapiens
ccacatcaatgcactgccaatggaggaattgttgataaagaccttcgtca

SEQ ID NO: 666665 - DNA, 51 bp, Homo sapiens
aaaagtaaaccacgatcgttatgctgaattccaactccacagagtgaccag

SEQ ID NO: 666666 - DNA, 83 bp, Homo sapiens
ctccgccaccgtcttcaggccagctaagaatgaaaccttggcattacctgccgaatctaaaacaccagaggttgaaaaaatct

SEQ ID NO: 666667 - DNA, 83 bp, Homo sapiens
cgcctcccgagtcactgcagccaacccttcagcaagacaatgcagatcttcgtgaagactctgactggtaagaccatcaccct

SEQ ID NO: 666668 - DNA, 109 bp, Homo sapiens
tggaggcccctctgtcttttctgtgacgggagcaatgctgacctcggtttcctggacccattccgactcagatgacttgcagggtgcacagtcagaaattgaggcaaag

SEQ ID NO: 666669 - DNA, 75 bp, Homo sapiens
gccaactccaatgggcctttccagcccgtggtccttctccatattcgagcccgccggggtcagcttggtcagcgt

SEQ ID NO: 666670 - DNA, 75 bp, Homo sapiens
cttgggagaaagtttcatctgtggatggagtattgaatgacatctctgaaaaggagcaacgatggggagccaaga

SEQ ID NO: 666671 - DNA, 75 bp, Homo sapiens
gaaaaggcctgaagtggcactgaaatgaggcatagatgaggatttggtgctatggagaaatttttggtagaatat

SEQ ID NO: 666672 - DNA, 99 bp, Homo sapiens
ggcgtcgctgccaccatgacgggaaggaatttcttcacatggctcctggagaagtgaccatcacagttcgcctcatccgttcctttgaacatcgcaatt

SEQ ID NO: 666673 - DNA, 98 bp, Homo sapiens
gagagctctgcatcaatgcgccggccatagggcgtctctggccgagcctctttttgtggaaaacgacagcagcagcagtggcctggaagacgccaccg

SEQ ID NO: 666674 - DNA, 83 bp, Homo sapiens
aggagactccggcgctcgccatggccgacgaaaagcccaaggtggacgcggatctgtcaacatgggtaaaggagaccccaaca

SEQ ID NO: 666675 - DNA, 102 bp, Homo sapiens
gacccacctatacctgagtattgggttgctgtcagacgcaaacatgcagatctttgtgaagaccctcactggcaaaaccatcacccttgaggtcgagcccag

SEQ ID NO: 666676 - DNA, 96 bp, Homo sapiens
cgacgaccgacagggtggtgaaagctcttgcaagcttaggatatgaaaagagctgtgtgttgttcaattgtgcagccttagctagccaaattgcag

SEQ ID NO: 666677 - DNA, 80 bp, Homo sapiens
taaaacgggtcagttggcagccatcaaagttatggatgtcactgaggaagcaagatttccagatgtagcaaatgggttta

SEQ ID NO: 666678 - DNA, 50 bp, Homo sapiens
agctcgcagcgcatccccgcgcacaggtgctgggcgtcctcttctttgcc

SEQ ID NO: 666679 - DNA, 94 bp, Homo sapiens
gcgagctgagtggttgtgtggtcgcgtctcggaaaccggtagcgcttgcagcatgactaatagggatgccaaaggaaaaatatgatcctccaga

SEQ ID NO: 666680 - DNA, 50 bp, Homo sapiens
aagatggaagagtttgtgtacaaggcagtgtcatcattaggctgtctttg

SEQ ID NO: 666681 - DNA, 75 bp, Homo sapiens
gagcgtcggggaggcaagatgatccaccagcggttccatcctacacttggtcgagcaaaagatgtgataatacca

SEQ ID NO: 666682 - DNA, 98 bp, Homo sapiens
gtttattctggcctataattacaaaatggaacagatttcaaaaggacgtaatactccactgtgcgacagcacaatgttagaggtgttgtatctatggc

SEQ ID NO: 666683 - DNA, 74 bp, Homo sapiens
cctgcccacagacggtggtgcctcaaaacacctacccagtttcctgttttccagcacccaacataacttgtaag

SEQ ID NO: 666684 - DNA, 74 bp, Homo sapiens
aaggggggatatgtgatcaaagcatcagaagtggatccaaacttctacagcaaaaacttacttcttttaggaaa

SEQ ID NO: 666685 - DNA, 100 bp, Homo sapiens
gcatttaaaacagtatataaaggactggacactgaaacatgggttgaggttgcttggtgtgagctgcaggaaattgagagtcagattgacagaatctgtg

SEQ ID NO: 666686 - DNA, 83 bp, Homo sapiens
cacttctaggggctgcatcaccatcatagctcagcgacccttccctctatgatgaagtgcattgaagagaacaatggtgtgga

SEQ ID NO: 666687 - DNA, 100 bp, Homo sapiens
gccaaacctgcgcccgtggaggggcgcgcagagggcaccgggcgccgggagcaggcggcgcagcaccaggttcagcagctggacatggagaaccaacgct

SEQ ID NO: 666688 - DNA, 100 bp, Homo sapiens
tcttcctgccaattcaacaatcaaaaagaaagctgctgttatcatcatggctgtagagctgcagaaccttggcctgaaaatgctacattatatcagcaat

SEQ ID NO: 666689 - DNA, 75 bp, Homo sapiens
cttaacttgtggaagctgtaaagttttcttcaaaagagcagtggaaggtagaatcgacaaggagaacgttgaact

SEQ ID NO: 666690 - DNA, 82 bp, Homo sapiens
ctcgctactcgcttgcctacccgccggcccgcgggtctacttcctcaaaggtgcgcgcggagccatggttatcatgtcggag

SEQ ID NO: 666691 - DNA, 97 bp, Homo sapiens
cttcaccacccgcacggcgcagtgccggaacactgtggcggccatcgaggaggcaaaacccatttatggcggttggctgctcctggctccagatggg

SEQ ID NO: 666692 - DNA, 100 bp, Homo sapiens
tcccagcactcccatcaagctggaggaagaataccctctaccatctgctttggtcagggtgccgctcgaggatttaaaagcaacaagaagaaaaccaaac

SEQ ID NO: 666693 - DNA, 74 bp, Homo sapiens
ctgggcagcctgagtcccagtgatatttggagcaagaggtggtggtggccttcccccgaagaaatttggtaatc

SEQ ID NO: 666694 - DNA, 82 bp, Homo sapiens
catgatcgacttcctcacccgcgcctgcgacctcggagcaggccgggctctcgccatgggtcactgtcgcctctgccacggg

SEQ ID NO: 666695 - DNA, 75 bp, Homo sapiens
cgtcacgctgcactacaaggtcaaccacgaagactggcacagcctccaggttggcgggctcatctgcgctggggt

SEQ ID NO: 666696 - DNA, 60 bp, Homo sapiens
cggccgctagcgtcagcgccagccagcgagtaaccagctcataaatcacatcgaacagtt

SEQ ID NO: 666697 - DNA, 75 bp, Homo sapiens
tagtaacgtcatggaggatgaacgacagataagctgtcattggaaggaatagtggtacaaagagctgaatgccga

SEQ ID NO: 666698 - DNA, 90 bp, Homo sapiens
tacgtcttggatagactgttggtgcatgctacaaaaagaggtgctgctgttttttcaaacgaaggaaaaggaaaaccatacagcgccaca

SEQ ID NO: 666699 - DNA, 100 bp, Homo sapiens
cgactacaaggagatcgaggtggaagagcatactggagcatagtgaaagagtctattttgaagcttcaaacttagtgctgctgcagaccaggaacaagag

SEQ ID NO: 666700 - DNA, 101 bp, Homo sapiens
ccacctgaatacagacatctcctggatgataatggacaggccaaaccagatccgctggaaccgcgggaatgagtctttgccggagagggcggaggccgtgg

SEQ ID NO: 666701 - DNA, 98 bp, Homo sapiens
aggagctgaccaggaagacctactctctcatgggaggttgaatggagcagctgaacttggctgacagtggcctggtggggaaggaagccagaagatgc

SEQ ID NO: 666702 - DNA, 90 bp, Homo sapiens
cgaagctggccaaagcctgcccagacggctcacctgtgcgggatggaacaaaagaatgattacggacctgaagccaaagaacaagatgcg

SEQ ID NO: 666703 - DNA, 99 bp, Homo sapiens
ctggcgtgcactccgcacctcggggacattattgcgcgtggaacggctgcttttggaagggggatatgagactttctactcggaatatcctgagtgttg

SEQ ID NO: 666704 - DNA, 73 bp, Homo sapiens
ccgaagttggaagtgtctcttagcagcgcgcggagaagaacggggagccaggagggccctcctggacccggga

SEQ ID NO: 666705 - DNA, 100 bp, Homo sapiens
aaaaacgacagctaaccacagggcaggccatgggcaagatatctcagtgttctccgctctcataggtcaggctgcaaggtgtgactgttgtaaatctcaa

SEQ ID NO: 666706 - DNA, 83 bp, Homo sapiens
gcttcagagagaggaagccgaaaacaccctgcaatctttcagacagctggattgtagtcacatattccacttacagtgctgtc

SEQ ID NO: 666707 - DNA, 50 bp, Homo sapiens
ggtcaccgagaagtccccgaccgactgcctggtccgacccccagtggcac

SEQ ID NO: 666708 - DNA, 83 bp, Homo sapiens
caagggaccaaggtggaaatcaaacgttgcctgttcactctgatcgtagtattggaagttctggccaaggcaatcagacaaga

SEQ ID NO: 666709 - DNA, 102 bp, Homo sapiens
tatcagactcatttccgtttaagagaagctcaaggccgaagccgagcagaggatctaaatacaagagtggcctattggcgcattctacattctaaaggggag

SEQ ID NO: 666710 - DNA, 87 bp, Homo sapiens
ggatgcacacaggccggcgcccctcgggcctctgcggagcagaggtggtagcccagtggtgcacacagggggacttgctggcagtcg

SEQ ID NO: 666711 - DNA, 113 bp, Homo sapiens
ggttttaaatcaagatttaacattccaacacataaaaattatttatccaacagctcctcccaggtgcacacatcttgaccaactcagcagcaaggtggattttctttgtgttt

SEQ ID NO: 666712 - DNA, 100 bp, Homo sapiens
cccagtcccacttcaaacattcgtctcggaaaccccgcctcttacagtcacgaggtgccgggcagcctacaacattgtgacacggctttcaagcttccgg

SEQ ID NO: 666713 - DNA, 90 bp, Homo sapiens
gtcaatgtgcaaatgctgatcagttttacctctttcaatgatgaatcagtggtgtaaatttgatgacgacgtggtgtcaaggtgtactaa

SEQ ID NO: 666714 - DNA, 75 bp, Homo sapiens
tgtcattgcacacgttacagcctgcaggaagtacaggcggccaacgaagaccactaaggcttttcttcctacgat

SEQ ID NO: 666715 - DNA, 75 bp, Homo sapiens
ggggtttgggaaacaaggcttccagtgccaagggatctcctaccagagactggtgagggctgagcagggcctgcc

SEQ ID NO: 666716 - DNA, 82 bp, Homo sapiens
ccgcgaagccccggcgcaccgcaaacttcaccgagcctcttgaagccattcttacagatgatgaaccagaccacggcccgtt

SEQ ID NO: 666717 - DNA, 96 bp, Homo sapiens
tttaaacaagagatttccacagaaggcattttttactgtctacagaaacttattgtaattcatttttcctcactccagtagtaagaattataccaa

SEQ ID NO: 666718 - DNA, 75 bp, Homo sapiens
gcctgccgggaagcgagccgcgacccgagctgagattccatcgtgcctggctcacataagcgcttcctggaagtg

SEQ ID NO: 666719 - DNA, 83 bp, Homo sapiens
cgagcagcactgtcagcagatgtcgaataaatatggtttgaagtggtgaacatggatttttctcggcttcacatgtacagtcc

SEQ ID NO: 666720 - DNA, 75 bp, Homo sapiens
gtcctggccccctaactcaaacttaattcagtgcacaaatgagatgaatgtgaacatcccacagttggcagacag

SEQ ID NO: 666721 - DNA, 97 bp, Homo sapiens
gcttagggtgaaacaaatacctttgaggtttaaatcaggaggaatgccagctcctgagcaggcctcattggtggaggaggggcaaccacagacccgc

SEQ ID NO: 666722 - DNA, 75 bp, Homo sapiens
tggagcaaaagaagagggtgtccatgattctgcaaagccctgaggaggaggaagagcagccgcaggcagcacagc

SEQ ID NO: 666723 - DNA, 75 bp, Homo sapiens
cgagcaaacagaggcgctcatccacagagccacatctgttagacaacagcagttctgtagagagtttaaatatga

SEQ ID NO: 666724 - DNA, 100 bp, Homo sapiens
ctcgaagagattgtagagaagctaaaaggagaacttgaaagttcggaccaggaattacatgaatgacagtcttcgaaccaatgtgtttgttcgatttcaa

SEQ ID NO: 666725 - DNA, 73 bp, Homo sapiens
gaaggactccaaggcggagcaggccaaagtgaagaaggatgaagagactcggcacagccttgagtgcatccag

SEQ ID NO: 666726 - DNA, 96 bp, Homo sapiens
cctgaggaaggaccagcgggacgcctgcatcaaggaggccattctcttgagacaggatctcactgtgttgtgcaggctggtctcaaactcctggcc

SEQ ID NO: 666727 - DNA, 98 bp, Homo sapiens
acctgctgcgggatcccaaatcggaagtgaattcggattgtttgctgcaggaggatgcattagcacaacaggcctttgaagaggctcggagaaggaca

SEQ ID NO: 666728 - DNA, 96 bp, Homo sapiens
gacacggtctacaccgacttcgacgggccaattcctgtccccccagcagcatggcatcgtgtgctgaaccctctgagccctctgccccactgcccg

SEQ ID NO: 666729 - DNA, 100 bp, Homo sapiens
ctgtgcagggcagagcaggaggccccccgagccgtgctatcaagactaatcaggaccttctcccagaaactccatggacgcacattttctacaatgattt

SEQ ID NO: 666730 - DNA, 75 bp, Homo sapiens
gtgctttttctaacgcgaccccgacttcagccgacttaaccttgtttgggaaaagttcttaagttctgaaacgcc

SEQ ID NO: 666731 - DNA, 98 bp, Homo sapiens
ctccttgatcaccaggataatattctctcattgattaatgtcaatggttgtggaaaatgcccttaaagtgaacccaatactaggtccacaaatgtttc

SEQ ID NO: 666732 - DNA, 50 bp, Homo sapiens
tcaaagaccacgcctttgttacctcgagtatgctcaggcttcagaagagg

SEQ ID NO: 666733 - DNA, 83 bp, Homo sapiens
aggaggcggcagaacattgcttatgaatatctgtgccacttagaggaagccaaaagccatcactggtgcaagctatatttaac

SEQ ID NO: 666734 - DNA, 100 bp, Homo sapiens
aaactgaaggggtgaaagaaaacccaagggtcatgatcagagttcgactcttgcccaacactctgttgaactgactttacccaatcatcatccatttcat

SEQ ID NO: 666735 - DNA, 60 bp, Homo sapiens
aggtcttcacccaggccctggagtgcatgcgcagtgaaactggaacgccaagctgaagaa

SEQ ID NO: 666736 - DNA, 100 bp, Homo sapiens
cttcacaggaattgccatttaactgataaatttcaaacggaagagagtggcagcatttagaaagaatctaattgaaatgtctgaactggaaataaaacat

SEQ ID NO: 666737 - DNA, 74 bp, Homo sapiens
gaggggcgaagaggacgagggggccaaggcttcctccggggtgtccctggccagtgtccttccacctgtccaca

SEQ ID NO: 666738 - DNA, 82 bp, Homo sapiens
cgcgcccgggaggaaggaacgaggcaaggagctaaagcagcgtgcgttcagccctgggaaaatcgagagccttggttacaac

SEQ ID NO: 666739 - DNA, 82 bp, Homo sapiens
ccagatggtgttacctggagcttaaaaagctgcacgcaagtgttaaacttctggcctggtctccaagtcctctcctaagaag

SEQ ID NO: 666740 - DNA, 89 bp, Homo sapiens
ggagacgacagaccgtttgtgtgcaatgccccgggctgtggacagatttgataatgggctgcattaaaagtaaagaaaacaaaagtcca

SEQ ID NO: 666741 - DNA, 75 bp, Homo sapiens
cacaagaacgcactttcctcccaggtgagaagccctaccactgcaactgggacggctgcggctggaagtttgcgc

SEQ ID NO: 666742 - DNA, 100 bp, Homo sapiens
ggagatgaagaagaagattaacctggagttaaggaacagatccccggaggaggtgctggagaatctggtaaaagcaccattgtgaagcagatgaggatcc

SEQ ID NO: 666743 - DNA, 78 bp, Homo sapiens
ggtcgagcacataacggggttcgggtgtctcgtgtgtgaacatcacaggttcctaagtggtagcagagatggaacagc

SEQ ID NO: 666744 - DNA, 75 bp, Homo sapiens
caacaatggaggccagtggctggtctcagatgtcctaaacgatgctatatttgatgaagatcatgatgagatggt

SEQ ID NO: 666745 - DNA, 96 bp, Homo sapiens
ggtggattttgatgaaggctctgatgtatttcagatgagacaaggtctcaccatgttgcccagaatggacccgaactcctgagctcaagagatcct

SEQ ID NO: 666746 - DNA, 100 bp, Homo sapiens
ctggtgccgcgcagctttccccggtatgatctcgtgaaaccttgagagaaactgaatgacgaatgaaactattgttcctgtttcacacagaagaaaactg

SEQ ID NO: 666747 - DNA, 75 bp, Homo sapiens
ctccgcagccccgggcacggcggaggcagcggagccctgggccatcgctgatcttgcatctttaatggataaaac

SEQ ID NO: 666748 - DNA, 95 bp, Homo sapiens
ggaagcgtgcgtccctggcgcttccttcttctcttccggcggagagcccatggcgaattgtggatgattgcggtggagccttcactatgggtgtc

SEQ ID NO: 666749 - DNA, 75 bp, Homo sapiens
acctcagcgacctgatcgacctgggaccattgcaatttagagatgtggccatagaattctctctggaggagtggc

SEQ ID NO: 666750 - DNA, 90 bp, Homo sapiens
agtgtccttcgaggccagcgtggccctgctggaggcctcgctgaggaacgacgccgaggaaggagcgtgaggatcatccccggagaggac

SEQ ID NO: 666751 - DNA, 75 bp, Homo sapiens
gttgaagtgggtcattggagacaaagagagacaaagagttcctgaagtccacgtttctcctggtttaccatgact

SEQ ID NO: 666752 - DNA, 95 bp, Homo sapiens
cccgtcctttcgctatgaagagagcgacctggagcggggatacacgctgtatgcaggagctattcttgaagtttgtggatgaaaattgggaaggt

SEQ ID NO: 666753 - DNA, 98 bp, Homo sapiens
taaggaactactagataaccagtggttaacagtggaagaaaaggccaaatttgatgggatttttgaaagcctcttgcccatcaatggtttgctctctg

SEQ ID NO: 666754 - DNA, 100 bp, Homo sapiens
agggaaggcagcatggcacgctgcatggagccaaaatcgggtctgagaacatgttcttcaagtatacatggaataactttttgcatacacaagtggaaat

SEQ ID NO: 666755 - DNA, 88 bp, Homo sapiens
tgtaacccgaataagctgtcagactttgataggaaaatatgttgtgttcttcttttaccctcttgacttcacctttgtgtgccccacg

SEQ ID NO: 666756 - DNA, 51 bp, Homo sapiens
aaagtcatttcccaggctggcggagattactccacaggatccgctgaacat

SEQ ID NO: 666757 - DNA, 83 bp, Homo sapiens
cgcacgggatccagagcgccgcgcacttcgtcatgttcttcgcgccctgggctctctttacctatgaaggcaacagcaatgac

SEQ ID NO: 666758 - DNA, 83 bp, Homo sapiens
cggggtgtaataatgttaactgaggtagcagcagcagcagcagcagcagcagcagcagcagcagcagcagcagcagcagcagc

SEQ ID NO: 666759 - DNA, 75 bp, Homo sapiens
gtcggtgggtgaacattttgctccaaaagggatccttggccctgcgcagtttccaagccagcgccctactgggaa

SEQ ID NO: 666760 - DNA, 76 bp, Homo sapiens
ctcctatgtccgcttcaaggtgccccagcagaaagttcaggagccctggaaaggagaaggaataagacggcaggag

SEQ ID NO: 666761 - DNA, 97 bp, Homo sapiens
ccgagctccagccgaaggagaaggggggcctataatgaggaaatttctgtctgaccaatatcaggggcacatcagctgctgtactaagtttcttcaa

SEQ ID NO: 666762 - DNA, 96 bp, Homo sapiens
ccaggctttagattatggggcaccccctcatggaggaattgccttagcagggttgaatgcaccctcaggcacgaccatggagaaaggtgggaacat

SEQ ID NO: 666763 - DNA, 75 bp, Homo sapiens
aaaagcccaggcataaaatcatctccatattctcaggcacagagaaaggaaccaccaaactgttttccacagagg

SEQ ID NO: 666764 - DNA, 51 bp, Homo sapiens
cagcaagaacgggaacaaaactctggaacatcatttacagcgagcaatttc

SEQ ID NO: 666765 - DNA, 124 bp, Homo sapiens
agtcgggaccatcgtcgtgaggatcgtgtgcattacaggagtcctccacttgccactggcctcagggatttagagatactgttgttacttctgcatgttcattgcaaacagaaggttccttgag

SEQ ID NO: 666766 - DNA, 96 bp, Homo sapiens
tcttctaaggatcgctgtcctgacagaagagttgaggctgtgaagctgggcagggtttcagctgagctgaggttggaagtccctgaccttcagctg

SEQ ID NO: 666767 - DNA, 75 bp, Homo sapiens
catgccgtggtcaccgtccgagacgccaaacacaccaactttgtggagccgagtcgtccggaaatccattgcccg

SEQ ID NO: 666768 - DNA, 49 bp, Homo sapiens
gctcgagccgaaggacatatgtttggaaattttagcattcaggtgccag

SEQ ID NO: 666769 - DNA, 76 bp, Homo sapiens
ccccaggtgtaagcgcagaaagcaggcgaacccgcggcgcaataacgaattcagcttagagaactatcaacacagg

SEQ ID NO: 666770 - DNA, 100 bp, Homo sapiens
agcgcagtctcaggccgcgggacaaggtaccttgtgggtcaacgactcgtgaactacgaacggaaatctggcaaacaaggctcatctccaccacctccac

SEQ ID NO: 666771 - DNA, 100 bp, Homo sapiens
ttggccagggaactcaaacagcagatgcagtgtttgtcaggttcaactccagccatggtttcccagtggaggtcgattctgacaccagcatcttccagct

SEQ ID NO: 666772 - DNA, 100 bp, Homo sapiens
ctcggacagcgcccagggccggagcccgagcccttggaggacatccaggcagaaattgatgcccacaatgacatatttaaaagcattgacggaaacaggc

SEQ ID NO: 666773 - DNA, 82 bp, Homo sapiens
ctcgcctcggtacgccgcgcggcgcggacggcgcgtgagaagccctaccactgcaactgggacggctgcggctggaagtttg

SEQ ID NO: 666774 - DNA, 82 bp, Homo sapiens
ggctgaaggaggaggacaaagagcccctcatcgagctcttcgtcaagacccaacatgagtgaagtttcctgcaagaaacggg

SEQ ID NO: 666775 - DNA, 100 bp, Homo sapiens
gaatgaaagtcacatcacattgcattctgtctgcccgtgtgaattcaaccccgttaggagccgggtgtgggctgagccctgcctgattgatgctgccaag

SEQ ID NO: 666776 - DNA, 74 bp, Homo sapiens
gagctgtgtgaccgtctgagtagacatcagatccttacctgtcaggcgtcatcagagcgatggcaatgaaatag

SEQ ID NO: 666777 - DNA, 96 bp, Homo sapiens
caaccaaacccaccatcttctggtttcattggaaataatgaagatgtttcattttcaagaccagcagatcttgaccttattcagtcaactcccttt

SEQ ID NO: 666778 - DNA, 100 bp, Homo sapiens
aatacttcatacattacagtggttggaataaaaactttaatgaagcaccagttgagattcccagtccttctgaaaccccagctaaaccttctgaacctga

SEQ ID NO: 666779 - DNA, 75 bp, Homo sapiens
accaaacccgcactcaagtcagaggagaaggttatcaatactctggctgaccatcatcatcgtgggactgacttt

SEQ ID NO: 666780 - DNA, 100 bp, Homo sapiens
aaggaggctgctgagcctgcaactcgactgttctgtttgaggagctctgtgctttatcatagaaatggatctgtttggtggtaatccatttgcttccttg

SEQ ID NO: 666781 - DNA, 51 bp, Homo sapiens
gagtctgcatgaccttcaggaaagatggccgccaagaacgagtcatgtttg

SEQ ID NO: 666782 - DNA, 75 bp, Homo sapiens
tgaatactactgttaaggaacagatgttccaacagtatccgaggatgacatatcctcctctacatggtcccatga

SEQ ID NO: 666783 - DNA, 75 bp, Homo sapiens
gcgggaaatcgggctgaagcgactgagtccgcgatggagctccatgtccatccgctggccgggccgccccctcgg

SEQ ID NO: 666784 - DNA, 100 bp, Homo sapiens
tgggccgccgaatctccggccgaagagcggcggcggcagcggcggtttaagaattgtttaagctgcatcaatggagcacatacagggagcttggaagacg

SEQ ID NO: 666785 - DNA, 90 bp, Homo sapiens
gtacgcttcgaggacttcacggagctctggagaaacatgaagttcgggactatcttctggtttgtggtaaatatgccagctctagaacac

SEQ ID NO: 666786 - DNA, 96 bp, Homo sapiens
attataaagagctctgatgggctatttgggtgatacccagtgcagtgaactgcagaaagcataacccctactgtagaactaaatgcactgtgcatg

SEQ ID NO: 666787 - DNA, 101 bp, Homo sapiens
tgaatttccatgtcaacatagtccagatcctgggaagactctgcctgaagcccttgattattgcactgtttggctacagacagtgcctggagaaatagaca

SEQ ID NO: 666788 - DNA, 96 bp, Homo sapiens
caaagttgaaaatgatgcaagaagttagtgaaaattttgagctttctctcctttgaaaacactaagaataatgtcactgcatcagtttttactaga

SEQ ID NO: 666789 - DNA, 75 bp, Homo sapiens
gagcaggtgaacactgaccccaatggggattgcatcaggcagtcaatggcctgggatggtattaccacaaattca

SEQ ID NO: 666790 - DNA, 95 bp, Homo sapiens
gcggggagatgtctttgtccccatggagagcaggccggatgtggtgctgcagggcccagatattacactgtcaaaactttacaagttaattgaag

SEQ ID NO: 666791 - DNA, 82 bp, Homo sapiens
cagaagtccagagctgaggactgcctgtttgcagggagcatcgagtacagctgtccggcctccaacgagtgtgagatcacca

SEQ ID NO: 666792 - DNA, 74 bp, Homo sapiens
gctgctcaaagctgctgccgccccttgggctaaaagatcaatgtccgagttaccaccatggatgcagagctgga

SEQ ID NO: 666793 - DNA, 100 bp, Homo sapiens
tgtaaagtcaccaacgagatcttccgccactacgatgtgtgccatatttaattgctatgggcacagacccagaacctgctatgcggaacaaggctgatca

SEQ ID NO: 666794 - DNA, 83 bp, Homo sapiens
aaacagccagaccgagagcagcctgccggggcggagcacagcgactcggactccgaccccgagtactccacgctgccgccatc

SEQ ID NO: 666795 - DNA, 100 bp, Homo sapiens
gcgggactcttggcctgtccctcacatccgatgcaccctttttgtcagattatcaggatgagggttcatcttccttcctgtacagtattttcaaacttcc

SEQ ID NO: 666796 - DNA, 96 bp, Homo sapiens
ggaacagcgccgaggccttcaagtgcatgatgtgcgatgtgcggaagggcacctccacccgcaggatcctaaggcctttgtagtccttcagccact

SEQ ID NO: 666797 - DNA, 101 bp, Homo sapiens
agagttctcaatttggaaactttggcaatatacctgctccaatgacagtaggaaatattcaggcatctcaacaggccttacgagcaaaatatggaattaga

SEQ ID NO: 666798 - DNA, 74 bp, Homo sapiens
caagcctgagatctccagggagcagggcccttgatgagcctccctatttgacagtgggcactgatgtgagtgct

SEQ ID NO: 666799 - DNA, 100 bp, Homo sapiens
gcggggaccattcccaccaggtccgggtgaaagcctactaccgcggctacacagaggatcagagcaggggtgggcctgctgggctgcagctgggattctg

SEQ ID NO: 666800 - DNA, 83 bp, Homo sapiens
ggccaccgggggccgggatcggtgtccccatgaactcccttgtccccagttgaccaacctggcctgtagcttctcacaggcgt

SEQ ID NO: 666801 - DNA, 74 bp, Homo sapiens
ccggatccgatcccgctctgcacattccaaagaacccagcgggtgccgcttctccacccgaggcttccacctcc

SEQ ID NO: 666802 - DNA, 101 bp, Homo sapiens
cgggagagcggcggcagcgagaggcgagccagcggcgacgcctgcatttgaccacatttagcctgcagtacacacctcctgtggtggcctgtgtctgcatt

SEQ ID NO: 666803 - DNA, 98 bp, Homo sapiens
cacagcccggagtggagcgaggagcgcttccgcgtggacaggaagaaacttgaggccatgttacaagcagcaaaccctctgctttgctccaccgcccg

SEQ ID NO: 666804 - DNA, 85 bp, Homo sapiens
atgaaaactacaaatcccaggagcacttcacgacctgcctagagctggaacgttacctccagagcgagccctgctatgtttcagc

SEQ ID NO: 666805 - DNA, 101 bp, Homo sapiens
actttttgagccttacggagccgtctaccagatcaacgtcctccgggaccggagtcagaaccctccgcagagtaaaggtgaatcagctcccggccgacttt

SEQ ID NO: 666806 - DNA, 82 bp, Homo sapiens
tgagactcctgctcagtgtagcattaagtatgccgagattttgctgtcctggaggaccacaccctggctcacagcctgcagg

SEQ ID NO: 666807 - DNA, 100 bp, Homo sapiens
ccgtgatccaggtgctgagccgggtgctgcggctctgcgcggtccccgccagcgccccatcctgagccggtgccagaaccctgtggagcatcatgaactg

SEQ ID NO: 666808 - DNA, 83 bp, Homo sapiens
caagtacctttatgaaccagtgtatcccaatagacccaaatgatttgtacattgtagaacccctcaagttttctccagaaaag

SEQ ID NO: 666809 - DNA, 75 bp, Homo sapiens
ggaaatcctaatgacagtctccaaattcgcctccatctgtaccatgacctgcctagagctggaacgttacctcca

SEQ ID NO: 666810 - DNA, 100 bp, Homo sapiens
ccgggttccccggcctccctggcagagagggcattgctgggccccagggtgctcgaggattgcccggaacagctggcctccctggaatgaagggacacag

SEQ ID NO: 666811 - DNA, 100 bp, Homo sapiens
ctggagcggacgttggacaagatcatgatcctgttcaggtttatccacgtgtcaccggctctgccgtatccaagacagtatgcaaggccacgacccacga

SEQ ID NO: 666812 - DNA, 98 bp, Homo sapiens
aaacatggcttatgaacaccactacaagggtagcagtcgtggacgttctaagagaccaggccactctggatgacatggagaagtctgtgaatgatgat

SEQ ID NO: 666813 - DNA, 82 bp, Homo sapiens
gagctggtgatcggctggtgcatattcggcctcttactactggatgccatagaagtttgcaagaagtttatggagcgcgacc

SEQ ID NO: 666814 - DNA, 88 bp, Homo sapiens
gttggagagctcatctggaattttgccgatttcatgactaaccagtcccagctgcagctccagcaggtggcgctgcagcagcagcagc

SEQ ID NO: 666815 - DNA, 100 bp, Homo sapiens
agacagacacattcaaattgcactgctaccagacactgacaggccctgggctgcatcttgtacctgctgtgcttccggcagcacccttttgaggatggag

SEQ ID NO: 666816 - DNA, 96 bp, Homo sapiens
agtcccgccgtgcagcgcttcctggtctcccgggtcaccagaaaatggcctacacgatccacgagatcccggtcttcatcgccatgggcgtggtgg

SEQ ID NO: 666817 - DNA, 96 bp, Homo sapiens
aaaaaagagctttcaagacaaatggcaaacctgaagaaaaaaaccatgaagctggaacatcaggctttaatccagtgtgaccagttgaggaaggag

SEQ ID NO: 666818 - DNA, 90 bp, Homo sapiens
gagctgctctgcggggccgtggcgctcggctgcgcgctgctcctcgccctcaagttcacctgcagatgtacgattatagtttggatatgt

SEQ ID NO: 666819 - DNA, 75 bp, Homo sapiens
ggggcaacccagacgtgcaacaaagtgcgatgcctcccctggtgaagacacaaactgtcaccatctcagataatg

SEQ ID NO: 666820 - DNA, 75 bp, Homo sapiens
ccagcctcatgcccctgcagaagagcatcacgccctggaagtggacaacctggaccccaacttccagagcgacca

SEQ ID NO: 666821 - DNA, 50 bp, Homo sapiens
tggattccagcagtatcctcaagagaatggtgttgaacgcgtgtgtcctg

SEQ ID NO: 666822 - DNA, 100 bp, Homo sapiens
tccaggatgctgtccccctggccacggctccaggtcacggcccccagcgcagcctgcatgttccagtctccttaaccaaaactgccaagaaaggcttgga

SEQ ID NO: 666823 - DNA, 75 bp, Homo sapiens
cagctggatgtttgcgacatcccagagagcttccagagtgccagtcacgaattgcccgaacattacctgctgatc

SEQ ID NO: 666824 - DNA, 82 bp, Homo sapiens
gggagcagaaggactcggacacaggtgaccctggcaaagatgagagtgcacatttcgtcctgcctgaaggtccaggagcaga

SEQ ID NO: 666825 - DNA, 90 bp, Homo sapiens
agagaaggcactcaagtttatgctggccagctcagcgtccctggaagggaagggacaactgaagttcacctcaggacggtggagcccaca

SEQ ID NO: 666826 - DNA, 83 bp, Homo sapiens
gctcatggcatcaagtggcatccatcataagttggctgattgcaattctggcccaactcaaccctctctttggaccgcaattg

SEQ ID NO: 666827 - DNA, 98 bp, Homo sapiens
tccccactggctttggctggggacacccgacgcttgatagttctgaaatggatcacagtgaaaatgaagattacacaatgtcttcacctttgccgggg

SEQ ID NO: 666828 - DNA, 74 bp, Homo sapiens
caagggaccaaggtggaaatcaaacgatacaatgtctctttgctatatgaccttgaaaatcttccggcatccaa

SEQ ID NO: 666829 - DNA, 98 bp, Homo sapiens
ccgtacctaaaaatacatctcagacggcagctattactacaaagggaaatgtttcaacgtgcgcaagcgttgcggcggcgggcagaggactactacag

SEQ ID NO: 666830 - DNA, 74 bp, Homo sapiens
aagaagaccacacactgggaaacatcattaaatcgataggatttttgggccttggtctcatgggaagtggaatc

SEQ ID NO: 666831 - DNA, 100 bp, Homo sapiens
ggcttctgagacggcggcagcagcggcattcaggtgattgaaatctctgaatatcgaacccagctctatgaatatctacaaaatcgaatgatggccattg

SEQ ID NO: 666832 - DNA, 90 bp, Homo sapiens
gcagctgcagccgcagccgcctccgaagatgggggatttctacgacccggagcacccgacccctgatttgaaggatgacctctaggaaga

SEQ ID NO: 666833 - DNA, 90 bp, Homo sapiens
gaagttctggttgctggatttggtcgcaaaggtcatgctgttggtgatattcctggagtccgctttaagccaaaagaatctctgagtatg

SEQ ID NO: 666834 - DNA, 74 bp, Homo sapiens
gaccctgaaggtccaggagtacccgaccctcaagactcagcccacctgcacccaggtgaaataaacagctttat

SEQ ID NO: 666835 - DNA, 74 bp, Homo sapiens
cttgtcctggctcttgccctcatcctggttctggaatcctcagttcaagatgcctgaggaaacccagacccaag

SEQ ID NO: 666836 - DNA, 121 bp, Homo sapiens
ggtggcatgagggtcggaccccagtaccaggcggtggtgcccgacttcgaccccgcgatgccctcctagctagccgtcacgggatggagggcttcatggactcagggacacagacggacgc

SEQ ID NO: 666837 - DNA, 126 bp, Homo sapiens
tttgctgagctggttggccctgtgatccctcaagactggtccacggagtgtatgaccacaaacagccatcaagagatcccactggcattgttggtggtaggcctgggcgggggcagcctccccctc

SEQ ID NO: 666838 - DNA, 100 bp, Homo sapiens
gaaaagacatctaatttcattgctcggcagatgacaagagcacctcaaaggcagcagcctcaaggagcagccatggccccagacttgtcgcacggatgca

SEQ ID NO: 666839 - DNA, 90 bp, Homo sapiens
gagaaaaggattccagtcttagcgatcagcatcagcaaaggctccgaggtgccagaggcatagagtttgagaaactctctgatttcttca

SEQ ID NO: 666840 - DNA, 98 bp, Homo sapiens
caggaagctgggaaaccacaaaggaatgccacctaatgatccccatggtatccagagagaagacctcatcctgagtcttcgcgctgtgctggcttcta

SEQ ID NO: 666841 - DNA, 101 bp, Homo sapiens
cgcgctcactgttcaagggaaacttttgggtgctggagaatctggtaaaagcaccattgtgaagcagatgaggatcctgcatgttaatgggtttaatggag

SEQ ID NO: 666842 - DNA, 112 bp, Homo sapiens
tgaacctgacagacgaccagatcgccgctggcctctatggtcaatggcatgcagctttatggaaaatctcgccgagaagcagtctcctttcttaaagaagtgccaccccctt

SEQ ID NO: 666843 - DNA, 75 bp, Homo sapiens
ttgaactcaagtcttcacctcagcctcacctggttccttttcttaagaagtcaaattttctactactctactggg

SEQ ID NO: 666844 - DNA, 83 bp, Homo sapiens
gaaaatgtgtccagagattacaagtggtcaagcagaggatgcagatgtacaactcaccataccaccgggtgacagactgtgta

SEQ ID NO: 666845 - DNA, 100 bp, Homo sapiens
ctgcgctaaggaatgaaacccttccagctcgatctgctcttcgtctgcttcttcctcttcagtcaagaagtcacctgcaccggtgcccgtgacgtacgag

SEQ ID NO: 666846 - DNA, 75 bp, Homo sapiens
cacgaccaagatggcggcggtgtctggcttggtgcggagaccccttcgggaggatgaatttacaggaattgaacc

SEQ ID NO: 666847 - DNA, 100 bp, Homo sapiens
ctcgcacatttgacttggaagcaatgtttgaacaaactcgaagaacagctgtggaaagaagttgcaaaacactggtctgaacaagtgtcggaggccgagt

SEQ ID NO: 666848 - DNA, 75 bp, Homo sapiens
ttggaaatggatgagatcaaccatgattttccaggctggcttagcaggagctccagcccgtgctgtatcagctgt

SEQ ID NO: 666849 - DNA, 75 bp, Homo sapiens
gtgcctctgagaacttacgcagatcagccgacatttgacattgtgcagcaaagaaatggttatggagaagcccag

SEQ ID NO: 666850 - DNA, 75 bp, Homo sapiens
cactttgggttcaaggcgacagtctggtgtggcagatgtggatagctggaccctcctgggtgcctctgcgttatg

SEQ ID NO: 666851 - DNA, 83 bp, Homo sapiens
ctgagcttggcgcacgggccgaccagagctccacgcaggagatcggtgaggagctgatcaacggagtcatctactccatctcc

SEQ ID NO: 666852 - DNA, 82 bp, Homo sapiens
tctgagggagggtccgagccagccgctgttttgccggaggagcccctcaggccattggaggtggacacaaaggaagaggcag

SEQ ID NO: 666853 - DNA, 100 bp, Homo sapiens
aaacgtacctgtggtccctggatccagtgctactgctacaaataaggtgtgtggaggtcattgcaaaggaaggacaaaacctgaaagagctatatttggt

SEQ ID NO: 666854 - DNA, 50 bp, Homo sapiens
gtggtgtttgggtgtggaaggggttgaaatcacaaagattagacaccttt

SEQ ID NO: 666855 - DNA, 100 bp, Homo sapiens
gttcgtcaagcaaaagatgaacgtacttttcatatcttttaccagttgttatctggagcaggagaacacctaaagtgggataaaaacattcagatggcag

SEQ ID NO: 666856 - DNA, 126 bp, Homo sapiens
actgtttactacaaatgcttgctctactagtggaaattctaatctttcacagacacaggttggtgttcgaggaagagacattgttgttcttggtgtggagaagaagtcagtggccaaactgcagga

SEQ ID NO: 666857 - DNA, 75 bp, Homo sapiens
gttatctgcagagggagtcatgctttcaaggacctcatgagatctattgggaaactgattataaccactcgggca

SEQ ID NO: 666858 - DNA, 75 bp, Homo sapiens
tggcagtaattggaggaagaatgatagcacagaaaatctctgtcagaactggtgttggaaatcaatagctcttct

SEQ ID NO: 666859 - DNA, 134 bp, Homo sapiens
tgggacggcgtcctgctgggggagcagctgatcaccatgtcctgcacggacaagatcgccagagctacagagacttctgaagtggagagtctgcgacctcctcggttcttcaatgaagatggagttatcagacc

SEQ ID NO: 666860 - DNA, 99 bp, Homo sapiens
aaacaccgttgtcagcacttggaatacaagatggttgccgggtcatgttaattgggaaaaaggtcacccctcctaatttctcagtgtcacaagtgccca

SEQ ID NO: 666861 - DNA, 101 bp, Homo sapiens
gctgagagacggcggcggccgaaagcggagagatgctgggcgtggcggccgggatgacccacaggacctgctgaagctcacacccgtggaccacccagact

SEQ ID NO: 666862 - DNA, 100 bp, Homo sapiens
gctacatctcgcctctctacagcttcctgcccaacaccaaaaatatgtgtcacaaagatgtctacacggaactgccagggaatggactcagtgatcaaac

SEQ ID NO: 666863 - DNA, 95 bp, Homo sapiens
ctggactggtttaaaacggtcactgaaggagacttaattcagtgcacaaatgagatgaatgtgaacatcccacagttggcagacagtttatttga

SEQ ID NO: 666864 - DNA, 76 bp, Homo sapiens
caccaggcagcagggggaaaagcttgaattcggagtgatttaccactgcacagaggagcggctgtacacgggccgg

SEQ ID NO: 666865 - DNA, 75 bp, Homo sapiens
ttttgccgatttcatgactaaccagtgtgcccagtcccctggaaggcagtgaaggggacggagacactgactgag

SEQ ID NO: 666866 - DNA, 100 bp, Homo sapiens
cgacgcggacctgcggactagcgaacccggaggacctacaagaacagtgaggagcttcggtctcgtattgtgtctggaatcatcacacctatccatgagc

SEQ ID NO: 666867 - DNA, 82 bp, Homo sapiens
caggcggcccactggcagttcgagcagcccctgtcaaagggaacaggaagcagtccacggagggtgacgccctagacccacc

SEQ ID NO: 666868 - DNA, 100 bp, Homo sapiens
ctgcctgggggctgaggatgacaaaaaagccttcataggagtggccagacctgcaactgctccaccggctctctgagtgacattcagccctgcctgcggg

SEQ ID NO: 666869 - DNA, 75 bp, Homo sapiens
ctgctgagcttggcctcggcgtcctcgggatgtatggcttatttcaaacatcattttactttggatatatggcgg

SEQ ID NO: 666870 - DNA, 98 bp, Homo sapiens
gtgacaagccagcaccagtccagaagcctccatccagtatggttccagaccttgatccacctgttaaaaggcaacattggcacaggactcctgggact

SEQ ID NO: 666871 - DNA, 90 bp, Homo sapiens
gtcctctctgagtcaaatccagtggtctcctctgagcctccggcctccataagacccaaaacagatgacacctcttcccagtcccccgcg

SEQ ID NO: 666872 - DNA, 90 bp, Homo sapiens
cagatatcttgaaaagctgccagaaagagtaaagacaagattgcatcctacagcaaaactccaaaaattgaacgaagtgatgtgagcaag

SEQ ID NO: 666873 - DNA, 49 bp, Homo sapiens
cacaactccagtgctaactcaacaggatattaccttccaaatgatgatg

SEQ ID NO: 666874 - DNA, 50 bp, Homo sapiens
ccgggacaccctggaagccaggaaatgaccttcacggcatggtgcaactc

SEQ ID NO: 666875 - DNA, 50 bp, Homo sapiens
cggcaactcagaaacatcaggtccaaggttcaatctgacacggcccaaaa

SEQ ID NO: 666876 - DNA, 51 bp, Homo sapiens
cccatttaaaatcgaccgcacagaggcccgggcctccatgcaggctgagat

SEQ ID NO: 666877 - DNA, 90 bp, Homo sapiens
catatttttggacctgaaacagaaattctggaacacctatatgaatgtgaaagatgttgcagaagtgttccagaagtggctgaagataga

SEQ ID NO: 666878 - DNA, 75 bp, Homo sapiens
ctcaaggagaaggcagacctggtgtttgggaaatgggaagtaatgacagctggcacctgaactaagtacttttat

SEQ ID NO: 666879 - DNA, 82 bp, Homo sapiens
ctggcctggaggctatccagcgtcttgccatctctaagctggacctggtgacctttttggagggaaagaaagagccctggac

SEQ ID NO: 666880 - DNA, 102 bp, Homo sapiens
cagaaggatgtaaaggatggaaaatacagccagcctgagacagctgtcttgtgagggactgagatgcaggatttcttcacgcctcccctttgtgacttcaag

SEQ ID NO: 666881 - DNA, 81 bp, Homo sapiens
cgtctgccaaggagctggtgctgcggttgagaagctgatgtctcctcgacttccaactggaaccttgaacccccacatttc

SEQ ID NO: 666882 - DNA, 142 bp, Homo sapiens
aggacaacatcaccgtactgcatgtgaagctcaccgagacggcgatccgggcgctcgagacttaccagagccacaaggtcaaaatgcagatcttcgtgaaaacccttaccggcaagaccatcacccttgaggtggagcccag

SEQ ID NO: 666883 - DNA, 101 bp, Homo sapiens
ggaatctatgatgctgatggtgatggagattttgatgtggatgatgccaaagttttattaggtctctcaggcagctgcagagcttcaacagtactgtatgc

SEQ ID NO: 666884 - DNA, 83 bp, Homo sapiens
ccaaagctcccatccaagacatctggtaccacgaggatcggattagagcgtcagcccaaggccaaccccactgtcactctgtt

SEQ ID NO: 666885 - DNA, 100 bp, Homo sapiens
gagaacagaaggatctctccttaacgcctttcaccattaagaggaaagcgatggaggagctgagcgctgatgagcagcagctgtcgattcggcagaccga

SEQ ID NO: 666886 - DNA, 76 bp, Homo sapiens
ggtcatctgggcgtgcgggtcccgggttttgatcgcgcgtttgtgtagaaactggcgatggaatatgagaggagcc

SEQ ID NO: 666887 - DNA, 100 bp, Homo sapiens
tggtagtgatgaaaaaggttgcaatggtaccatacgattgtgtgaccacaaaaccaagttttcctgttggagtacaggtcagttcaccgggacctggagg

SEQ ID NO: 666888 - DNA, 100 bp, Homo sapiens
cattgagattgccacctacaggaagctgctggaaggcgaggagagcagggaccgtttggagggagccattcacctacaggagcaggacatggagaactca

SEQ ID NO: 666889 - DNA, 100 bp, Homo sapiens
acagccgcgaacagcacggcgtggccgcctcctgcctcgaagacctgaggagcaaggtgtattcctaggaaagataaaggatgcatttgatcgaaacccg

SEQ ID NO: 666890 - DNA, 87 bp, Homo sapiens
cggctgcgcggcgctcgcgcggagctccccggccggcggtgcgtccccacggtcaccatgaaagatgaattccctctgctgacaacc

SEQ ID NO: 666891 - DNA, 82 bp, Homo sapiens
gtgctgctgagcttggcctcggcgtcctcgggtgtgatgaatgcagactctgctaccattttggctgtttggatcctccttt

SEQ ID NO: 666892 - DNA, 107 bp, Homo sapiens
tccagaaattttagaaggaagaactgaaaaatatgtggatactccatttggcaagatccccagctcaagggtatagtgaccaggttatattgcaggcaaggctacta

SEQ ID NO: 666893 - DNA, 108 bp, Homo sapiens
ctgaacacctcgaccttctctgcacagcaggtccagcagctccagatctcggttgaccaacatggtgacaacctgaagaacaccaagagtgaaattgcagagctcaac

SEQ ID NO: 666894 - DNA, 82 bp, Homo sapiens
cacgacgggccgagcctgccactaactgtaagagtaaatgggtccagtaattggaatgactccagataagagagctgaaacc

SEQ ID NO: 666895 - DNA, 97 bp, Homo sapiens
gcaggggtcgagcaggtgccatcaggcacatgaacggtggagtcttcaaaggcaaagcctttggttgtgttggagggtacatcgccagcacgagttc

SEQ ID NO: 666896 - DNA, 75 bp, Homo sapiens
ggcagatgtttgtcgactggaatggataacaacgaacttgatgcaagtgataggtttgccaaggtcagacctctc

SEQ ID NO: 666897 - DNA, 98 bp, Homo sapiens
gaatcgcaaggctcttccctgaccattttctactgtccctgcgcgagtacggcaagaagaagctgaaatacctgccctacaatcaccagcacgaatac

SEQ ID NO: 666898 - DNA, 75 bp, Homo sapiens
caacttcagttcctggaagctaaagagctcttcaggtgctgtttcaggtactgggaatatggcaaaagaacaaag

SEQ ID NO: 666899 - DNA, 98 bp, Homo sapiens
actatttgtaaatcgtcccgataagaagaaaatacttttcttcaatgataagagctgtcagttttctgtggatgaagctccattcaacccaaataaag

SEQ ID NO: 666900 - DNA, 100 bp, Homo sapiens
cagcattgccaaaaaatatatagatcagaaatttgtattacagttactgtgactgtgggaggcaagcaacacttgctcggactgtatgacaccgcgggac

SEQ ID NO: 666901 - DNA, 100 bp, Homo sapiens
acgaggacagcacgtggaggctccgcgctggggcactgctgctcagcccccaacacctgagctcccagggccaattcctgtccccccagcagcatggcat

SEQ ID NO: 666902 - DNA, 50 bp, Homo sapiens
gccggtgcaactattcgcagtccgagcgaaaactttagaaactgttcctt

SEQ ID NO: 666903 - DNA, 90 bp, Homo sapiens
gtcctgtgatccatcactcggattggcaggacctggggccaaaagccaaggtcatcctgtacagttctacagcatgaataggcctgcctc

SEQ ID NO: 666904 - DNA, 100 bp, Homo sapiens
gcaggaacgttaagacggtgacggagaacagcaaagcctggaagcaagccgccgtggagaaggaagaactgtgctgagacacgaccgacttccaggagag

SEQ ID NO: 666905 - DNA, 100 bp, Homo sapiens
gtcgcatccgtttcacctgggccctggccctgctgcagacagccctgcacctccgggctcggcggaacttccgggacttcaggggagtgtcccgccgcac

SEQ ID NO: 666906 - DNA, 76 bp, Homo sapiens
cgctgtggtacttctcgcagtccccgcgcgtggtcatccaggaatggccttgatgaagatgacaggcatggccggg

SEQ ID NO: 666907 - DNA, 75 bp, Homo sapiens
aagccttgggtttctttcttaaaggactgatttttagaactccacatttgagaccattactgggacttccacccc

SEQ ID NO: 666908 - DNA, 83 bp, Homo sapiens
acggagatcctgatgaagttcgagcactaatatttaagaaagaagatgttaactttcagccacaagtatatggttatgatgac

SEQ ID NO: 666909 - DNA, 75 bp, Homo sapiens
cggaactggagccgaggcgcaggtggcgctggaaatcttcccaaggctgcagacaccgacggatttgctttggga

SEQ ID NO: 666910 - DNA, 50 bp, Homo sapiens
cctgccgttgcctgtcatgggagggcaggaagtgcttcgggagatccagg

SEQ ID NO: 666911 - DNA, 76 bp, Homo sapiens
ctcctgtgttccagttaataaagcatctacaaatgaggcagcctggggcaggttcaagtgctggattgtgtcatgt

SEQ ID NO: 666912 - DNA, 97 bp, Homo sapiens
ctataagagagtagaaagccctggtctggagcccccaactcccttgacagtgtacgctggagcaggttccagggtggggctgccctgccgcctgcct

SEQ ID NO: 666913 - DNA, 82 bp, Homo sapiens
ggttatatttggaaccttcgggcaaacaggattccacagtgtcctctggaaaatggtggtgcaggaggcaaaggtgtctggg

SEQ ID NO: 666914 - DNA, 75 bp, Homo sapiens
aattcttcagattggaaaataccacaggatggagactacgagtttggcagatgattctggaccagatgaagcctg

SEQ ID NO: 666915 - DNA, 100 bp, Homo sapiens
tcggggccgcttgtgggatggcctacaccggcaaatacttcgacaaggccaggtattcctctgctgtgagcagggctggccagccagactggcacacatt

SEQ ID NO: 666916 - DNA, 95 bp, Homo sapiens
gtggaggatatgatggttacaatgaaggaggaaattttggcggtgagttaatgttctcctcagaggtggaagaatatcctgataaagagaaagaa

SEQ ID NO: 666917 - DNA, 100 bp, Homo sapiens
ctggaggctgagtacgacagcctcaaacaggagctggagcagctcaaagagaccggaacatgaacattttgcagtactgcccctcttccgacatgtggac

SEQ ID NO: 666918 - DNA, 82 bp, Homo sapiens
ttgtcttttccgcccgcttcgatcgcctcgcgccggctgctctttccggcgccatcatgaccgggtcctataacaacttctt

SEQ ID NO: 666919 - DNA, 100 bp, Homo sapiens
gcagaacattgcttatgaatatctgtgccacttagaggaagccaaaaggtgtccgcaaatatggtaaagattttcaagctattgcagatgtaattggcaa

SEQ ID NO: 666920 - DNA, 100 bp, Homo sapiens
cggcctgtgacctgtgaacagggctgtgggccgtcagtgcccagataccagagtccggaaggccgcagtacctggggctgcgccccgccgcggccggagc

SEQ ID NO: 666921 - DNA, 74 bp, Homo sapiens
cctgtccggagacagcctaagggactcgagagcctattttcatctgcttaatcagattgcccctaaaggtgggg

SEQ ID NO: 666922 - DNA, 75 bp, Homo sapiens
cgcggacctagacctggaatcgcccaagtccctctactcgcgagcccacagaacttaattgcccaatctcagtct

SEQ ID NO: 666923 - DNA, 98 bp, Homo sapiens
tctacattttgttgcttagaaaagcctaggcatttctgtaacatttgaattggagcgttattcagtatattaatgtcttattgataatggcagaacat

SEQ ID NO: 666924 - DNA, 75 bp, Homo sapiens
gaacacccacacacagatgtggtgaaatgtacccagttagtaagagacaatacacattccaactatggagaatgg

SEQ ID NO: 666925 - DNA, 135 bp, Homo sapiens
tcgtcctcacctcgctactcgcttgcctacccgccggcccgcgggtctacttcctcaaagacaatgcagatcttcgtgaagactctgactggtaagaccatcaccctcgaggttgagcccagtgacaccatcgag

SEQ ID NO: 666926 - DNA, 112 bp, Homo sapiens
gacgagggcctggagtgtgtgcccactgaggagtccaacatcaccatgcagatttccacaagacggcaccctatgtcgtcactggcagcgtagatcaaacagtaaaagtgtg

SEQ ID NO: 666927 - DNA, 100 bp, Homo sapiens
gaagcgcagggagaaggaagaggtgtttgaaaaggttctaggtcccaattctactgcaaatagtatcatggcatcttatcagcaacagaagacttcggtt

SEQ ID NO: 666928 - DNA, 75 bp, Homo sapiens
ctgtccctgaatggctttggtggcatctgcctaacgttcacttcactcacgacctgcctagagctggaacgttac

SEQ ID NO: 666929 - DNA, 51 bp, Homo sapiens
ccaagctggggctagaggagttcctgcagatgcaaccttaaaatcagtgac

SEQ ID NO: 666930 - DNA, 87 bp, Homo sapiens
tcccagtttggcagatgtgagcaaactatgtataggaattccaaagatctgactgcagccatgagcagcaatgagtgcttcaagtgt

SEQ ID NO: 666931 - DNA, 50 bp, Homo sapiens
cgtctcgtccacgacctccctaggctgaccaactgactgaagagcagatt

SEQ ID NO: 666932 - DNA, 100 bp, Homo sapiens
cttccaaaagcgcagaccacagttacatgtatggagaatggctggtctcctactcccagatgcatccgtgtcagtcctaaactgactctggggactaaag

SEQ ID NO: 666933 - DNA, 83 bp, Homo sapiens
ctaacacctgtgagctaatctttgaagactgcaagattcctgggaaggagtgcgacctcaacaggcagtgtggggtaataaat

SEQ ID NO: 666934 - DNA, 100 bp, Homo sapiens
tggttctggaatcctcagttcaagacggtctggaaaatcccgaagcagaagcccgtattcatctaggcattcaagatctcgtagcaggcacagattgtct

SEQ ID NO: 666935 - DNA, 88 bp, Homo sapiens
gcgagcagtctcaggcctttagtgatgatgctgggatctagcaattgggaggcagcagacttgggtaatgaagagagaaaacaaaagt

SEQ ID NO: 666936 - DNA, 102 bp, Homo sapiens
gaacccgggaggcggaggttgcgggtctcacgtattgcagggaaggtttggttgtgagatcgagaataacagaagcagcggagcattctggaaatattacta

SEQ ID NO: 666937 - DNA, 83 bp, Homo sapiens
ccatgctgggccggcgccctggggccccggagagccccgtgctgatcccattccaatatgtagcttctgtttggggactaaag

SEQ ID NO: 666938 - DNA, 96 bp, Homo sapiens
gtggtggtgtcttcctgtctcaacgatacctattttctagtgctgagatcctgagacaatggtgccttatgtggatttggaacaccaaggaaccta

SEQ ID NO: 666939 - DNA, 100 bp, Homo sapiens
ccgaggctccgcaccagccgcgcttctgtccgcctgcaggtatgctccagaatcactgacagagagcaagttttctgtggcctcagatgtttggagcttt

SEQ ID NO: 666940 - DNA, 96 bp, Homo sapiens
tcgactacaagaagagggcggagcggagacgggagtattatgaaaagatcaatggagatttacagacagtcatctgggtggaggacacccttttgg

SEQ ID NO: 666941 - DNA, 74 bp, Homo sapiens
tctggataaggaccagtacctgcccaggaaactgaataactgaagtgaagtgatggactccgatttggagagta

SEQ ID NO: 666942 - DNA, 100 bp, Homo sapiens
cgcgggacaagaaaattcatgcggtggctgcctctttgatgagccgtatagcacatgtggatatagtcaatctgaaggtgatgacttcaattgggagcaa

SEQ ID NO: 666943 - DNA, 75 bp, Homo sapiens
tgggttttttgtggcttccttcgttattggagccaggcctacaccccaggaacgtcaaggtcgtgggaaataaaa

SEQ ID NO: 666944 - DNA, 48 bp, Homo sapiens
ccagagctgaggactgcctgtttgcagtaaagatgacggcgccttgag

SEQ ID NO: 666945 - DNA, 100 bp, Homo sapiens
acacagtggggacaacagcagtgagcaaggttggtacaggtcttgggcctacactggagttttatgcgcttgtatctcaggaactacagagagctgactt

SEQ ID NO: 666946 - DNA, 50 bp, Homo sapiens
ggcggagcagacctactcgtgcccatctacagcaagcagtcggtgttctt

SEQ ID NO: 666947 - DNA, 90 bp, Homo sapiens
aaggaatagaacggtcaaggagattatgtctacgtttacagccaggccatctgtgagctgcaagaagaggtgtcccggcttcgtctgcgg

SEQ ID NO: 666948 - DNA, 85 bp, Homo sapiens
ctctggagtttaggcaacggattatcttacgcccccacagaggcaaagatcggagtgatatggtacaagccaaggcatgctggca

SEQ ID NO: 666949 - DNA, 100 bp, Homo sapiens
tgaagtttatgccatcaacagacagaggctgcagaatctggagtttgctctgaatctcctcagacagcaagtctggaaaagtttgaaattccagtaaaaa

SEQ ID NO: 666950 - DNA, 83 bp, Homo sapiens
tttttacttctgtgatggcagtacacagcttttaatctagacaacgagcaaccagattatgatatggattcagaagatgagac

SEQ ID NO: 666951 - DNA, 75 bp, Homo sapiens
gcagagtgctgatgtgaaaaataccacgacaaaaccaccctagacatgtattcctctgagaaaccttggacagca

SEQ ID NO: 666952 - DNA, 75 bp, Homo sapiens
gcggcgacgacagaacccgagagcgttcattccgggggcacaccctctcagcgagccacctgagctgaagattcc

SEQ ID NO: 666953 - DNA, 75 bp, Homo sapiens
tgccttgccttggtgtctgcaaggctctgtaagatcgagatggtgatcatggagcgtagcaagctctcagagctg

SEQ ID NO: 666954 - DNA, 98 bp, Homo sapiens
cgagctgtttgacccctttgacctcttcgatgtgcgagactttggaaaggtttctgctgatgtactccacggttctgtgcagctattacaattcagcc

SEQ ID NO: 666955 - DNA, 75 bp, Homo sapiens
tgtttgtggatcgctgtgatcgtcacttgccaagctagcctttatgggaagcgcagaagtcagaaagaggaagat

SEQ ID NO: 666956 - DNA, 74 bp, Homo sapiens
tcaacttaaaagatgccacctctaaggatcaggtcatccagctgatgaacgcgatcttcagcaagaagaacttt

SEQ ID NO: 666957 - DNA, 78 bp, Homo sapiens
gcctccgtcgccgccgtcagagccgccctatcagagatccgtgctcagctcacagagcagatgaaatgcctggaccag

SEQ ID NO: 666958 - DNA, 98 bp, Homo sapiens
ggaggtgtggggtgtgagaacttgatcagtttgtgtcagccaccttgttctctaaagataaaaatgaatgccatttcccatccagtactgaagtgtta

SEQ ID NO: 666959 - DNA, 80 bp, Homo sapiens
ccggagaaaaagttgaagcgttatctacttttccaggtatgtgggagagaacaataacaataggaagtgctggaaagact

SEQ ID NO: 666960 - DNA, 100 bp, Homo sapiens
ggtttccagtgcagcgcggagtgggcgatgccagcgtgccaggctcttgtcaggatggtgaagctgttcatcggaaacctgccccgggaggctacagagc

SEQ ID NO: 666961 - DNA, 99 bp, Homo sapiens
atgctgctcaaaatcagcctacatgccatctttggtgaatcccagaccttgctggcagcagcagttgagagagaacgtgcagctacagaagaactcctt

SEQ ID NO: 666962 - DNA, 90 bp, Homo sapiens
cgcgcttgtgtaccatgaggacatgacggccacccggctgctctgggacgagcatgaagtcatcaatatcaacctgaaaaataagcctga

SEQ ID NO: 666963 - DNA, 90 bp, Homo sapiens
tggagctgggtcagtccgccgctcaccccgcggccgcaccttcccgccttctcagccactgaggcggctcccagctgcgttggcgacatg

SEQ ID NO: 666964 - DNA, 74 bp, Homo sapiens
tattcgggtgggagtgacccgattttccaggacatagttgacggcaaggaaaaagaaggacaagaacttggaac

SEQ ID NO: 666965 - DNA, 88 bp, Homo sapiens
gagaaaattgagacggagctaagagatatctgcaatgatgtactgaacaaaatccagtctcatagcagaggagaatataatgtttaca

SEQ ID NO: 666966 - DNA, 50 bp, Homo sapiens
atcatattatagatggagtaaagcaatggctgccatccggaagaaactgg

SEQ ID NO: 666967 - DNA, 83 bp, Homo sapiens
accagttcctttgtcaagagcatactttggaccctgttttcagaaagcaggttctgatggtcctttggctaccagcaaaccag

SEQ ID NO: 666968 - DNA, 99 bp, Homo sapiens
aaacaaggctggcagcttcatcactggaattgatgtcacctccaagttactaaaagatgtaactgaactgcagatccttggtgaaatatctttcaacaa

SEQ ID NO: 666969 - DNA, 100 bp, Homo sapiens
ctcgactcggtcctgtttcgacagcgaacatgtcgcggcctgtcaggtgttcctgggccttggggagctgcttctgtcctgcaactgggcagtggttgcc

SEQ ID NO: 666970 - DNA, 75 bp, Homo sapiens
ggaatccaggcaagtactggtaggagaaaactggttgtcctggatgtttgaaaagttggtcgttgtcatggtgtg

SEQ ID NO: 666971 - DNA, 76 bp, Homo sapiens
tcaagctgataggctgcgctaccggaatgtcatccagcgagtgattagtggctgacaagattttgaaaaagaaaga

SEQ ID NO: 666972 - DNA, 50 bp, Homo sapiens
cagctcccccgcctcggggagggcaccagcgtgcctgccagtgtagagcc

SEQ ID NO: 666973 - DNA, 100 bp, Homo sapiens
ggggaggtgccagcccgcgaatccggccggagtacaagccagctgccatgttgtgagcacataccacatagctccatggagatgcccatgtgactgtgat

SEQ ID NO: 666974 - DNA, 51 bp, Homo sapiens
agagtggatccgacctttggcttcaggtcctaggcctacttacaagcctcc

SEQ ID NO: 666975 - DNA, 83 bp, Homo sapiens
cgcttgcctacccgccggcccgcgggtctacttcctcaaagaacatgaaaggctcccggagcagcgctgactcctccaggaaa

SEQ ID NO: 666976 - DNA, 100 bp, Homo sapiens
tggggaatgtttctaatgatgaaaatgatctcaatgccacccaccaacactgtgttttggccggttcacaacctcggtttagttccacccaccgagtggc

SEQ ID NO: 666977 - DNA, 100 bp, Homo sapiens
tgcattcttctccaaaacgtggattgaggtctcaggttcctctgccaaagatggtaaaaaacttgttgctgcaagtcaagctgccttaggcttataacat

SEQ ID NO: 666978 - DNA, 75 bp, Homo sapiens
cggaagcccccacgggctctacctgaccctgcagtccaatggatgggaccccaatgaaatgttcaagttcaatga

SEQ ID NO: 666979 - DNA, 98 bp, Homo sapiens
tgaccatccggattgcagataaagaggtgaccattaagcaatccctctgtgagagcgagcgggcacgagtccgggctgcacggaagcacatcctggtg

SEQ ID NO: 666980 - DNA, 120 bp, Homo sapiens
tttatacaaggattttgtctcggtttgtggaaatactgcagagacttcacatgtatgagttttcaggtgagaatgcagaacgtttaaagaagacatatggcaagttttgtgggcaacata

SEQ ID NO: 666981 - DNA, 100 bp, Homo sapiens
ccgggagccgacagcttcgcgccggcccctggcgaagcggtgctgcctccagcccagagatgccgccaagatgcccgagagcgcttggaagtttctcttc

SEQ ID NO: 666982 - DNA, 74 bp, Homo sapiens
gagccaggcggggacaggacggcggggcgagccaggttactcactataaacaatatccacccaacacaagcaaa

SEQ ID NO: 666983 - DNA, 100 bp, Homo sapiens
gagattttgatgtggatgatgccaaagttttattagagtgcctggaagagctgggatgtctggttgagtcctatggcatgaatgtttgccaaccaacccc

SEQ ID NO: 666984 - DNA, 50 bp, Homo sapiens
aaagattgagctgcactgtattccttttctgtagaaaatgtttcctgact

SEQ ID NO: 666985 - DNA, 73 bp, Homo sapiens
gcgtgctttccacgacggtgacacgcttccctggattggtgatgtcttggcattgcccattttcaagcaggaa

SEQ ID NO: 666986 - DNA, 86 bp, Homo sapiens
cctcccccgcgtccctgcgaccgccgcggcgaagatgacaatgcagatcttcgtgaagactctgactggtaagaccatcaccctcg

SEQ ID NO: 666987 - DNA, 50 bp, Homo sapiens
cagcatatgaaagtggattatggggtgcagaagctggatacctaccagga

SEQ ID NO: 666988 - DNA, 88 bp, Homo sapiens
ggcagaaacagaggactaattttggcagttctaaatttgaatttgagggagaagatgaatcagttatcctcaaatcctgcacacggcg

SEQ ID NO: 666989 - DNA, 100 bp, Homo sapiens
cacaagtcctgtgccaggacagactgtcctccacatttagctgtgggagactggtcgaagctctcaaaggtctatggccctgtgttcactctgtattttg

SEQ ID NO: 666990 - DNA, 75 bp, Homo sapiens
aggtacctctccttttccctctccctttccctaaggtactggttttggattaggaattgttttctcacttacctt

SEQ ID NO: 666991 - DNA, 99 bp, Homo sapiens
cacccacagaaggagagggggatgaagaaatctgccaggagggtgcctcccgccagtatctgatgaaggtaagagtgcacttggaggctcctcagctct

SEQ ID NO: 666992 - DNA, 75 bp, Homo sapiens
ccgccttttctctctctcctctggcaggatgaggcgtgcaggcctggtgttctaagaacggaagcatctgggctg

SEQ ID NO: 666993 - DNA, 100 bp, Homo sapiens
cggcggagcaacgttcgcgtcatcacggacgagaactggagagaactgctggaaggagactggatgatagaattgttgactatagtcaatggggccaatg

SEQ ID NO: 666994 - DNA, 100 bp, Homo sapiens
tcagctacgaggaggcgctgaggagagataacgaaggaggcccaacttcattcaataaggagcctgacggatttatcccagacggtagaacaaaaggaag

SEQ ID NO: 666995 - DNA, 90 bp, Homo sapiens
caaggcgattccgcagtccccccgttccctggaggtcctgtggaatggctggaatgcaatagcgtggtcttggctcactgcaacctccgc

SEQ ID NO: 666996 - DNA, 97 bp, Homo sapiens
ggaacggcacatgacccaggcctatgccaatcagcatttcacattcctcatggttggttcaaaggtgtgatgaatgcagactctgctaccattttgg

SEQ ID NO: 666997 - DNA, 80 bp, Homo sapiens
aaccaatcagcagccgcgttagaataccctctaccatctgctttggtcagggtgccgctcgaggatttaaaagcaacaag

SEQ ID NO: 666998 - DNA, 100 bp, Homo sapiens
gaagataaagcatggagttggctaatggatgctggtacaggtttgcagattccgccagcagcacagcaagctctacagatgagtggctctttggcatttg

SEQ ID NO: 666999 - DNA, 100 bp, Homo sapiens
gtaactgcacaagtgaaatcactgacacaaaaagttcaagctggtgcctatcctacagaaaagattgcaacacctgctcggtataccgtgactttgggag

SEQ ID NO: 667000 - DNA, 97 bp, Homo sapiens
ttgagccttgtgggcatttgatgtgcacctcttgccttacggcatggcagcttaacagagcgttccaaaaagaggactctccagctactttttattg

SEQ ID NO: 667001 - DNA, 100 bp, Homo sapiens
ccctctctggccactatggaattctaatttgaaccatgtttggattgaagccgcctctgtattacttaccagcctacagacctggtacctggatttttgc

SEQ ID NO: 667002 - DNA, 107 bp, Homo sapiens
acacagtattgaaatgcatttgccttatacagctaaagccatggaaagtcgtgagatggagaataaagaaactctcaaagggttgcacaagatggatgatcgtccag

SEQ ID NO: 667003 - DNA, 51 bp, Homo sapiens
gattggctgtgtgcaatactcctcacgaggattgaaagaaggtggcaagag

SEQ ID NO: 667004 - DNA, 100 bp, Homo sapiens
gtcaaagagaagggaaccgtatacttcaagcaagaagatccatcgcagagtcctaaagaagaacccactgaaaaacttgagaatcatgttgaagctaaac

SEQ ID NO: 667005 - DNA, 100 bp, Homo sapiens
cctggccaacggctcctggacagatatggacacacccagccgctgtggtcttgatcttagcagtcaaatcaagggctgtctcgtgactgcttcagctgac

SEQ ID NO: 667006 - DNA, 75 bp, Homo sapiens
caccgtgcccgtggttctgctgaacaaaggcaaatcagacacaagtttggcagaaggaagtgtcagctgcttaga

SEQ ID NO: 667007 - DNA, 83 bp, Homo sapiens
cttctacaaggcccgcatggagggcgtctctggccgagcctctttttgtggaaaacgacagcagcagcagtggcctggaagac

SEQ ID NO: 667008 - DNA, 100 bp, Homo sapiens
cgccagcccgtcaagaactcaggccacagtggcttggccaatggcacagcagcagctggtgctttgaatgtaaatgtgaagaaggaaatatctagtccag

SEQ ID NO: 667009 - DNA, 50 bp, Homo sapiens
agatgattctcttccttcaaatccaatagcttactgcagagtgggtctgg

SEQ ID NO: 667010 - DNA, 88 bp, Homo sapiens
caggacagcacctagtcgtggccggaggagtctcagagctgtcagaaagacatgtcatgctgcccaaggacatagccaagctggtccc

SEQ ID NO: 667011 - DNA, 98 bp, Homo sapiens
tcatggggaaaatctccccggtgactttcagatgtgggttctgtggaaggacttgcctatcacagagcctgggatacactgtactggacaagctctac

SEQ ID NO: 667012 - DNA, 101 bp, Homo sapiens
gtcgccatcttggatccgcgggacaagaaaattcatgcgggctacaccaagtccattgatatttggtctgtaggctgcattctggcagaaatgctttctaa

SEQ ID NO: 667013 - DNA, 83 bp, Homo sapiens
cgctgagcttggcgcacgggccgaccagtaagactttgaccccgacgcaggcttcagtgattgccgcggatcagaagcctgag

SEQ ID NO: 667014 - DNA, 98 bp, Homo sapiens
tttgttcaggaaccaccagtgacagatactatactggcaattgctggagaagattttgcaattgttgcttctgatactcgattgagtgaagggttttc

SEQ ID NO: 667015 - DNA, 100 bp, Homo sapiens
cttggacaagatgaacaacaatatcggcattctgtgctacgaagttcctctgtgacgagggtgcaggtatctctggggactacatcgatcgcgtggacga

SEQ ID NO: 667016 - DNA, 75 bp, Homo sapiens
tgctctgaagcgcacgacctccgactactttctccttcaagggatgtgtttggccaaatgggagagtggttacaa

SEQ ID NO: 667017 - DNA, 99 bp, Homo sapiens
cgcctcagatgagatgaactgcaattccctcccaggctgtccctcgccgccttgctacagcccccaagactgaaaaacctcccgcacggaagaaaagtg

SEQ ID NO: 667018 - DNA, 83 bp, Homo sapiens
acaacctgcaccaggttcacggacgagtatcagcttttcgaggagcttggaaagttacgggcaggacttgagtggcttcggac

SEQ ID NO: 667019 - DNA, 75 bp, Homo sapiens
agcaccatccagatctcctcagtgatacacacctacatctgggcaagggatcgcttacacctgagacgaactaca

SEQ ID NO: 667020 - DNA, 75 bp, Homo sapiens
agcctgtcatgagacctccaaacccctttggccctgtatcaggagcacaggcctgcagagatttcctcatgttag

SEQ ID NO: 667021 - DNA, 98 bp, Homo sapiens
gcttttaggagtacccgccaacaagcgggaccgagcaggaatccgtatctgggaacagactattgcagatatcatccgaacatgtttgggacccaagt

SEQ ID NO: 667022 - DNA, 76 bp, Homo sapiens
ggttgctgcccagaaaggatacaccagcctcaagtactacagccttccagcagccttcccagacccacagatcaca

SEQ ID NO: 667023 - DNA, 131 bp, Homo sapiens
cactgcaacctctgccttccgggttcgagtaattctcctgcctcagcctcccaagcagctgggtctacaggtgtcccaccgaggaggccctgatcttgagcccggagccctgagccctgagacgatgcttg

SEQ ID NO: 667024 - DNA, 74 bp, Homo sapiens
gcattggagcctattgatataactgattctcttcctggacattctgttgccctctgtttagctgttgcctttaa

SEQ ID NO: 667025 - DNA, 100 bp, Homo sapiens
tcagagaagctgagcagctctgtcagcatgaacaccttctccgacagcagcacacccaccctggaagctgtcctgaatttcaaatactctggaggcccgg

SEQ ID NO: 667026 - DNA, 87 bp, Homo sapiens
aaaaaaagcagagaggagcggggagcaatgcaggttatgaagacagtatggagtttccagaccatagtagacatttgctacagtgtc

SEQ ID NO: 667027 - DNA, 100 bp, Homo sapiens
gccagggacagaggccagcgcgctgcaacacaagatcaagaactccatctgggaaagaccatgtttgtagatttattggctgtgggaggaatgatcgatt

SEQ ID NO: 667028 - DNA, 75 bp, Homo sapiens
gcaaggagatgatgaaggagacgttcaagtacttcctccgggaattggcagagggggtcgatttgggaggaaagg

SEQ ID NO: 667029 - DNA, 97 bp, Homo sapiens
gggccaaacctctaatggagttgattgagagggctgcatatctggttggtgtctctgaccccaatagccaagctggacagcaagggctagtggagcc

SEQ ID NO: 667030 - DNA, 97 bp, Homo sapiens
tgcacgacgcactggcccaggacctgcacaaggtggtcttcgagggatagcacgaggtggtctgacaggactaacacttaccagcctctatgcacta

SEQ ID NO: 667031 - DNA, 82 bp, Homo sapiens
gtctgggaccttaacagggagccatggacagagcgggatgccaccagcttgtccaaagggaagttccaggagctcctggtgg

SEQ ID NO: 667032 - DNA, 90 bp, Homo sapiens
ctccgctccccgccccgccgcggccatggaggacgagcggaaaaacggagcctacgccaccctgaagggtcccttcccaagcccttaggg

SEQ ID NO: 667033 - DNA, 82 bp, Homo sapiens
caggggccccgaagaactcccacaatgccacaggaggaggcagcagaaattgagggtgctgcaaaggaagcttgaggaacac

SEQ ID NO: 667034 - DNA, 96 bp, Homo sapiens
agaagaatgcccggcagaaggaaaaatcccattttggaactttccaggactctcacagaaggaggaagaggaggacacttttattgaagaacaaca

SEQ ID NO: 667035 - DNA, 50 bp, Homo sapiens
gtcccggggtgcgagcagcgcacttccggacttaaccaccaccatgtcga

SEQ ID NO: 667036 - DNA, 74 bp, Homo sapiens
gatgtcttccagactcggtgctgtacccgccaaaatggacccaagtggggtcaaagtgctggaaacagcagagg

SEQ ID NO: 667037 - DNA, 100 bp, Homo sapiens
aaactgtgcatgaagtggccctgaaggacaaggagcctgacactcaggatgcagatgaagtgaagttccagcgctgcagccatttcttccagatgaagaa

SEQ ID NO: 667038 - DNA, 101 bp, Homo sapiens
cggcggccgagggcgtcgcggactctccccgcgatgatgccggctttgatcactcagactcgagccaaacaggcagctaccatgagtgaagtggagtggag

SEQ ID NO: 667039 - DNA, 82 bp, Homo sapiens
taatgaaggcattgctatttttgcacttcagttcacatactatttatggcagtacttctggaatagaaattctaaacattag

SEQ ID NO: 667040 - DNA, 107 bp, Homo sapiens
tcttctgggtctctctgcctgaggccctggagggagagaagactttgagaatcactacaagaaaaactccttgtggtgaaggttctaagacgtgggatcgtttccag

SEQ ID NO: 667041 - DNA, 82 bp, Homo sapiens
atgtaaagtaccaggacagtgcatggcacatcttggacgaaccttgacaggatgggtgcagcgaactttccagagcacccag

SEQ ID NO: 667042 - DNA, 90 bp, Homo sapiens
ggaacatcagttctacgagaccctccctgctgagatgcgcaaattcactccccagtacaaaggttctggctccttggcagcaatggctgt

SEQ ID NO: 667043 - DNA, 100 bp, Homo sapiens
cgcagtatcatgctggccaagaagatcatcattaaggacggaggcacggagaccagttttgattttaaatgttctcaatccagactaaagacaaccaagt

SEQ ID NO: 667044 - DNA, 75 bp, Homo sapiens
ctgaaggcacttagtgcccacaaccgcaccaagaagcacgacctgctgaggcatcttgacagcagtagcaatgag

SEQ ID NO: 667045 - DNA, 75 bp, Homo sapiens
gttttctttactctggggtcccggctgccctgtggcctcgctcctcggaggatatggaatgtgcagatgtcccac

SEQ ID NO: 667046 - DNA, 50 bp, Homo sapiens
caaattggtaccaggcctccaagaaggcagacatgccacagacgctgagt

SEQ ID NO: 667047 - DNA, 83 bp, Homo sapiens
gacagaatgtttgagacaatggcgattgagattgaacaacttttggcaagggtggacaaaaatcttcgattcatgatcttgat

SEQ ID NO: 667048 - DNA, 100 bp, Homo sapiens
agcgtcgtggactatttccctagcgaggacttctaccgctgcggctactgcaagaacgagtcgggcagccgctccaatgaagaacatgagctgcctgtgg

SEQ ID NO: 667049 - DNA, 101 bp, Homo sapiens
aaaacctattacgaactcaaaagtcaaccgctgaagagcaggtatctctgcattagccagattggacatatgtaaagggacatcagtatatctggatcatc

SEQ ID NO: 667050 - DNA, 100 bp, Homo sapiens
tggaacggagccctctgccggctgctcctgctgaccctcgcgaatgaagtggagctgggggagctgcttctgtcactgaattatctcccaagtgctggca

SEQ ID NO: 667051 - DNA, 75 bp, Homo sapiens
gatgatcctgaagtacagaaagacatgtggcttcgtcctgttcatcgccaactaggggaagcgaatgaggagttt

SEQ ID NO: 667052 - DNA, 100 bp, Homo sapiens
gcagggctgaggacccaaagtcatttcccaggctggcggagaatcggggtactgtgcaaaaagtggttgttcttcctactaacaactctgtcagtggcga

SEQ ID NO: 667053 - DNA, 74 bp, Homo sapiens
ctcagacaagttccatcccacctttgagtcagaaggagatttaaccatagtagaaagaatggagaactattaac

SEQ ID NO: 667054 - DNA, 83 bp, Homo sapiens
gatttcaccacaagaagggctgccagatacagatcacttggattcagtcgagtttgctttgctccgtgggaactgcaccagag

SEQ ID NO: 667055 - DNA, 75 bp, Homo sapiens
cttgcttgctgactcctctcaaagatggtttgatgtcctccagaaagtgtctacccagttgaagacaaacctcac

SEQ ID NO: 667056 - DNA, 75 bp, Homo sapiens
agaaagtgatcataggagaaaaccatttcaggagctgaatgccaaagcagcttctctttttgaaacaaatgatga

SEQ ID NO: 667057 - DNA, 80 bp, Homo sapiens
tcaccctcatctatatcctttggcagctcacaggtgaggctccaggttgggctctatgctgtgtaccttctggactggct

SEQ ID NO: 667058 - DNA, 50 bp, Homo sapiens
aatggagccgctgctgcctacggtaagaagagttcctgggtcaagtggtc

SEQ ID NO: 667059 - DNA, 100 bp, Homo sapiens
ccagtctccgcaagagaaggaagctctttatgccttaacggtgaacctatgggtcgtggaacaaaagttatcctacacctgaaagaagaccaaactgagt

SEQ ID NO: 667060 - DNA, 100 bp, Homo sapiens
gttcgacaatggcagcatctacaaccctgaagtgcttgatatcacagaggaaactctgcattctcgcttcctggagcctagatattatcctactgaagat

SEQ ID NO: 667061 - DNA, 75 bp, Homo sapiens
aagaggcagctgttcatagaaatgcattgttcagattccattctgtggggaaattgactgtgaggactggatcaa

SEQ ID NO: 667062 - DNA, 59 bp, Homo sapiens
atcacacgcataatggatgaaaggaaccgacagactgccaaggaaatctgatgtggaaa

SEQ ID NO: 667063 - DNA, 50 bp, Homo sapiens
cgaccagaccggcccccccgagggatggaagaagcgagcctgtgccttgg

SEQ ID NO: 667064 - DNA, 50 bp, Homo sapiens
gaaaagatggattcagttatttaagctattgacctgaaaagtggttctgg

SEQ ID NO: 667065 - DNA, 87 bp, Homo sapiens
ctgctgctgcctctgctgaatgtggagcctgctggggccacactgatccgctcctgccacgccctggctctggcctggactttctcc

SEQ ID NO: 667066 - DNA, 75 bp, Homo sapiens
cgacatactacctctggccccgagatcagaatgccgattctggaacttttcaaagcctgactctcttcttgaaac

SEQ ID NO: 667067 - DNA, 82 bp, Homo sapiens
tcatctcttgtgtggggagtttcatcctagcggattctgaaaaagagttccacgtcctcccttatcgagtctttgttcccct

SEQ ID NO: 667068 - DNA, 75 bp, Homo sapiens
tgacggagacgcagatgtggacttgaaagaagctgcagcggaggaaggcgaggttcactaagaatctttccccag

SEQ ID NO: 667069 - DNA, 100 bp, Homo sapiens
ctgaaagattgggcaagagaagaattcagaagaaacaaaagtgccaccgaagagagcttctcgaaacaagtctgagaagaagcgtcgggaccagttcaat

SEQ ID NO: 667070 - DNA, 98 bp, Homo sapiens
tttctcacgtactctttttacattgcaatgatagaagatctttctgatgaagtcttctccctaaggcacaaaaaatatgaagagagagagcaagccag

SEQ ID NO: 667071 - DNA, 74 bp, Homo sapiens
ccaagcaggacacggtgcgcgtggccttctgctccggagtgtggccatctggggccgtgtggtatttgccactc

SEQ ID NO: 667072 - DNA, 95 bp, Homo sapiens
acaccaggtccgcgccaggcgtctcggggattctgcttctcagaagatgcactattatagatactctaacgccaaggtcagctgctggtacaagt

SEQ ID NO: 667073 - DNA, 100 bp, Homo sapiens
ctactactccatctaagccaacatgtggtatttgaaatatctcaccaaaaaatatttgaagaagaataatctacgtgactggttgcgcgtagttgctaac

SEQ ID NO: 667074 - DNA, 100 bp, Homo sapiens
cgaatcgttaaacatcttaggtcaggtggaaattaaaggtggagcacatgattattacaatgttcttcccaataagagcctatggaaagcctatatggaa

SEQ ID NO: 667075 - DNA, 73 bp, Homo sapiens
aaaaagtatcgtcgagaagcctatcatcgaggagaaggcagagcccccccaggctatgaatgccctgatgcgg

SEQ ID NO: 667076 - DNA, 89 bp, Homo sapiens
aaaagaaacaagtaaaactggatgagcagctcatggagatccatcatgttacacaaaatggaggactatataaaagaccgtttaatgaa

SEQ ID NO: 667077 - DNA, 97 bp, Homo sapiens
acaggatgtttcctgaaatgtccatccacttatccagacccaatggaacatcagcaatgcttctgtggcgagctttcctgcccggcctgaagttcga

SEQ ID NO: 667078 - DNA, 88 bp, Homo sapiens
ggcggcctctctggcagcagacatcagccacgcatctgaccttgttggtaactaggatttctacctcaaccgcgagacctatgcaagg

SEQ ID NO: 667079 - DNA, 51 bp, Homo sapiens
gcccgagaatagctccgtccagcagattgaagatggatacgtgacaatccc

SEQ ID NO: 667080 - DNA, 101 bp, Homo sapiens
catttccatttctaccttgtatgcctcaatttgctggatttaagcactgctgcactttatgagagtgatcagcagctggactgtgccttggacctaatgag

SEQ ID NO: 667081 - DNA, 75 bp, Homo sapiens
gccatcctcttctgcctcctcatagagcaagctctggaacgtcaaggtcgtgggaaataaaaggcagttctacac

SEQ ID NO: 667082 - DNA, 75 bp, Homo sapiens
tacatgtatcgaagaattcatgaagcaattatccagagggatgatatcgctgatttagtagaagctaaaaagttg

SEQ ID NO: 667083 - DNA, 100 bp, Homo sapiens
tggcactctacttaaaaccactaagtggaggtaaaggtctctcaggcagctgcagagcttcaacagtactgtatgcagaatgcctgcaaggatgccctgc

SEQ ID NO: 667084 - DNA, 87 bp, Homo sapiens
agatcactgtcctcagtcagtgcgacagcccctacatcacccgctactttggctcctacctaaagggaggcatgcatctccccatgt

SEQ ID NO: 667085 - DNA, 75 bp, Homo sapiens
gctggtggaagccgaagtgtcagaattggagacccgtctggaaaagctggaaaaggattttggtctgagatgctg

SEQ ID NO: 667086 - DNA, 83 bp, Homo sapiens
cggcagcaagaacagagagagaggtggacagatctgagagatactgagatccgcctaatgggaatggagccggcaatttcctg

SEQ ID NO: 667087 - DNA, 100 bp, Homo sapiens
tgagcctgttaaagaagaaaaactttcgcctgagcctattttggtgtcagttgtacccgaggcgttctcagcagcagcaagtacctgtggtggatttcca

SEQ ID NO: 667088 - DNA, 75 bp, Homo sapiens
caggactacatggatgccatggctgagaagttgcatttgctggtctggcctttgcgtccttctacctggcaggga

SEQ ID NO: 667089 - DNA, 75 bp, Homo sapiens
tccgctcggtgcccactaacaagggccgttgctccagggagaactgcaaatatcttcatccacccccacatttaa

SEQ ID NO: 667090 - DNA, 50 bp, Homo sapiens
gccatccccgagcagcggtggaagctggctgaccccgcactacatctacc

SEQ ID NO: 667091 - DNA, 115 bp, Homo sapiens
ccggggggagcgcggggcgacgctggctgcagggacccggtgacagcgtgagaggttcgcagagtgttcgggagattggggagatggtgggcttgaattcagaagaagtagagag

SEQ ID NO: 667092 - DNA, 100 bp, Homo sapiens
ttaattggtaggttggagttgagtctcacgttgaaacagaatgaagtgcttcctggagctaaggtctgggacctgcgccagaacaagctaacctacacca

SEQ ID NO: 667093 - DNA, 100 bp, Homo sapiens
agattatccaggagctattcagttgtgccttgaatgtcaaaaagctgccagcacttttaaacattacagttgtataagggatgcccgggtagttaaagac

SEQ ID NO: 667094 - DNA, 113 bp, Homo sapiens
ggtcagcacatgtgcctatatcacccagaaggtggagtttgctggcatcagattttggtgaccaatttggatttccatgatgagcagaagcgccggaacctcaatggaacact

SEQ ID NO: 667095 - DNA, 75 bp, Homo sapiens
gaagcaggggatattccaacagaatgggaaggtttccacttgagcggcacagtgacagaacctgcaatacaatcg

SEQ ID NO: 667096 - DNA, 48 bp, Homo sapiens
gaaaatagtatgggaattcctattatgagctccactggttcaacagcc

SEQ ID NO: 667097 - DNA, 121 bp, Homo sapiens
cagccccggtcacagagtgcaccgtatcctgtcacttctggatgtgaggattggagaatccatgttgaccaaatgcaccagcacagaagtggaattgaatctgctctaaaggagaccaagg

SEQ ID NO: 667098 - DNA, 75 bp, Homo sapiens
acagcatcccacattaagtcaacggacatctgtgttaaggcttatctagcccttcgtcatcacacaaacctactg

SEQ ID NO: 667099 - DNA, 51 bp, Homo sapiens
gagaacggaaaactcccaacttcctggcacagaccccacaggctcctcgga

SEQ ID NO: 667100 - DNA, 110 bp, Homo sapiens
tagccccttacaggcttaaacttagagtcaagttcttcgtggagcctcatctcatcttacaggagcagactaggttgaaaggattgttgacaaaaggaaaaataaaaaag

SEQ ID NO: 667101 - DNA, 100 bp, Homo sapiens
ctgcacttcgcattttggcattgacatttaattttagggtcctttatatagaagggagagtagggtcttactgaagtaacacaaagcttaaaaatggaaa

SEQ ID NO: 667102 - DNA, 87 bp, Homo sapiens
cggccacccacggactctgtcacttgctgggattcacacacggcacggaggcagagtggcagcagggaagctgatggcattctgaaa

SEQ ID NO: 667103 - DNA, 85 bp, Homo sapiens
attctcgacctgctaacagaactggaccttttcggggcgacagccagttttgtagtcaaaaagcagtcatctattcattgaattt

SEQ ID NO: 667104 - DNA, 100 bp, Homo sapiens
cagctcaggagagaaatgaaacgctttttccagctctcatttactccttcactattccaggtcctcaggatatagccgtgacctaaacacagaaatctac

SEQ ID NO: 667105 - DNA, 89 bp, Homo sapiens
aaagagccatacgaccttcggatgccatggacaatattaccaggcagaaccaattctacgatacccaagtcatcaaacaagaaaacgag

SEQ ID NO: 667106 - DNA, 100 bp, Homo sapiens
cactccattctgcctgggtgacaatgccttggtttcaacactatcggaatggtgctggagaatctggtaaaagcaccattgtgaagcagatgaggatcct

SEQ ID NO: 667107 - DNA, 74 bp, Homo sapiens
gtggcttttgtgaagcacagcacggtactggagaacacggatggtcagccatgtcatctgagcctcccccacca

SEQ ID NO: 667108 - DNA, 75 bp, Homo sapiens
acggctttggaaacgacgtcatgtgttaggattgttaaaatgagtcttcggaagcaaacccctagtgacttctta

SEQ ID NO: 667109 - DNA, 98 bp, Homo sapiens
ttatcaccacacgactgggtatatttcctctctggctaattcacctaaataagattgatcctcatgctccaaatgaaatgctctatgggcgaataggc

SEQ ID NO: 667110 - DNA, 101 bp, Homo sapiens
gttccatctaggcctacgagggccccgcccagtgtcccaagttaatgaaggagttcccccttctgagtatgttcaatatccatgaaaaccttttagaagcc

SEQ ID NO: 667111 - DNA, 79 bp, Homo sapiens
aagtcctgcctcaccaaggctggctcctcaagaaagaagaccgtggtagggaccgacattgcggagcttctgttacgag

SEQ ID NO: 667112 - DNA, 75 bp, Homo sapiens
gatgtaccgcatgtgatcactctgggactcgtggggctgcagcaccggtcaccgacgatgagggcgcacctgctg

SEQ ID NO: 667113 - DNA, 75 bp, Homo sapiens
cgcagaggacgccggaacaccctggaagccgagaaatgttgcagttgccaatacctatgcctgtaaggggctaga

SEQ ID NO: 667114 - DNA, 50 bp, Homo sapiens
gggagaggtgttttggaccaacaaggtaagtcagtaatgttgtatgcagc

SEQ ID NO: 667115 - DNA, 100 bp, Homo sapiens
cttctaacttcgtgatccacgctgctgggattacaggtgtgagccaccgcgtgtggcctctgggcaccttttgaagggtgacgagaacaagtcagtgcgc

SEQ ID NO: 667116 - DNA, 100 bp, Homo sapiens
tcactggaccgcgccggctgcgctgcagtgatgtcttggcattgcccattttcaagcaggaagattccagccttccattggatggtgaaacagagcaccc

SEQ ID NO: 667117 - DNA, 72 bp, Homo sapiens
agaggaacatttggctaaaatatttgaaataaacggtgactggcaaagagctgatgcagtctggaataaaat

SEQ ID NO: 667118 - DNA, 50 bp, Homo sapiens
acttgaggcgaatggccgaatctctccggctgacaaaccaagaggatttg

SEQ ID NO: 667119 - DNA, 82 bp, Homo sapiens
cacccgatgaggccgtgagggccccactggactgggcgctgccgctttctgagtgtgtaaaggttgccataaaggacaaaca

SEQ ID NO: 667120 - DNA, 82 bp, Homo sapiens
ttccagtgcattccagtatcacttctgatgactccctggagcacactgacagttcaggtctgggcccctgctgctgacatcc

SEQ ID NO: 667121 - DNA, 143 bp, Homo sapiens
tgccgctatggatgatcgagaggatctggtgtaccaggcgaagctggccgagcaggctgagcgatacgacgcccccaaatacatcaagatgtttgtactggatgaagctgacgaaatgttaagccgtggattcaaggaccaga

SEQ ID NO: 667122 - DNA, 100 bp, Homo sapiens
gcccgagacatggccaaagactacatggagaggatggcagcgcagcctagttgcggggccttttccgaagtggttttagctgaagagaaggcaactggca

SEQ ID NO: 667123 - DNA, 80 bp, Homo sapiens
catgtcatcttatctacgaaatgattcagtttgggacccactctggaacctgaggaagtggtaaacaggctgatgcatgg

SEQ ID NO: 667124 - DNA, 82 bp, Homo sapiens
aaaccagtcatatggcatggacaatcacagtggtggtggtgggggtagcagattgtacaagaatctccattccttacaatgg

SEQ ID NO: 667125 - DNA, 75 bp, Homo sapiens
tgccgcagttcatcttcctccctgtgtactttccatttgccttcctggctccagaaacatgacaaggaggacttt

SEQ ID NO: 667126 - DNA, 76 bp, Homo sapiens
gggaccgcgcccgcctcatttgcgccttgcagcactgctggaccaggttactgaagctaaaggagatgtttaactc

SEQ ID NO: 667127 - DNA, 90 bp, Homo sapiens
cacaggatctgccccagagaaagtcctcgctcgtcaccagcaagcttgcggggtcgtccttggtggaaggaaccatgaactggcatctcc

SEQ ID NO: 667128 - DNA, 100 bp, Homo sapiens
tggacaacgtgacggtccggcagggggagagcgccaccctcaggggctaagtgatggatcttgtactccgtgttgcagattactatttttttacaccata

SEQ ID NO: 667129 - DNA, 88 bp, Homo sapiens
gccggaaggggtcccgaagccccctgcaggaactctacaacccaatccagggcgatgccagtccctccactccagaggagaacgaaac

SEQ ID NO: 667130 - DNA, 75 bp, Homo sapiens
catcacagttattgacaccgaaaccgttggagagggccaggttagcatggcctcattgaaagaactagatcaaag

SEQ ID NO: 667131 - DNA, 75 bp, Homo sapiens
cccggccaagaggcaaaggggaggttacgcagcaaaccatccagaagatgccggtggccgtgggtccctacggac

SEQ ID NO: 667132 - DNA, 83 bp, Homo sapiens
ccgacatgttcacgcacgggatccagagcgccgcgcacttcgtcatgttcttcgcgccctgatctgggcggaccccggcaaat

SEQ ID NO: 667133 - DNA, 83 bp, Homo sapiens
aggctctgctcagcgcagcttggcaggcattgtgtggctgctcaattaatgtaccaacactggatggaagaaacatacctatg

SEQ ID NO: 667134 - DNA, 100 bp, Homo sapiens
caggaacgagagcggagcggagcacagtccgccgagcacaagctccagcatcccgtcaggggttgcaggatgaaaactttcggaagagaaagttgcctgt

SEQ ID NO: 667135 - DNA, 75 bp, Homo sapiens
cgaggtcttcgggaattccagcgaggatatgttgatgatgtgatcagccgcattgacaggatgtttcctgaaatg

SEQ ID NO: 667136 - DNA, 80 bp, Homo sapiens
ggaagaagaagaagaagaaaaagtttctcaaccagagggggtgcactatagccatctggagctgagccctggggagccag

SEQ ID NO: 667137 - DNA, 75 bp, Homo sapiens
tcccagccaggacggagataacaccatcttcaagaaccgaggagcagatggctcagcagcccccaaaagggcagg

SEQ ID NO: 667138 - DNA, 49 bp, Homo sapiens
caaatatttcaataagtacccaaaagtttccgttactatggcaatgacg

SEQ ID NO: 667139 - DNA, 100 bp, Homo sapiens
gccactaccctgtcttcgagaatcccaaacaaggaaagctccgcaccaaggtggagaacgatggaggcccattgaggcttctctgtcctccacggggaac

SEQ ID NO: 667140 - DNA, 100 bp, Homo sapiens
aggacaaattgggaagagtatatgcagtaatatgtgacctaaagcctccgagagcttccacagcggtggcagcggcagcccgatggccgcgacagccacg

SEQ ID NO: 667141 - DNA, 75 bp, Homo sapiens
agactgtctccagaattacttgggaagtaaaaatctgcgaggcttgtaatagttatgcacgagtgcgagctgtgg

SEQ ID NO: 667142 - DNA, 87 bp, Homo sapiens
acgtcggtcagaaaatgaagagtttgttgaagtgggaagattggggccttctgattattttggtctcttgtggctcagagcataatt

SEQ ID NO: 667143 - DNA, 98 bp, Homo sapiens
ggccatggcagcggcgcccctgaaagtgtgcatcgtgggctcggggaactgtgtgttatccaggattttcaagcttcggtacttcaagtgtcagattc

SEQ ID NO: 667144 - DNA, 100 bp, Homo sapiens
atgatatttgccaaatttgatgaagtgcaaagttcaggcggtatgattttgagtgtctgcaaagcatatagcactttctacattgtgggtttaatattat

SEQ ID NO: 667145 - DNA, 83 bp, Homo sapiens
ccatgtcagacgcagccgtagacaccagctccgaaatcaccaccaaggggagtacatcaagacctggcggccacgctacttcc

SEQ ID NO: 667146 - DNA, 75 bp, Homo sapiens
ccttccttgctttcagaatttcacccaggttctgacaggtgaccaagaatatggcccaggtgaccaaagccctgg

SEQ ID NO: 667147 - DNA, 100 bp, Homo sapiens
ctcggggcctccgcagcgacaacatggaggccgtgaagaccttcaatagcgagatagcagactccttgaaagcagggtccttgtttagtgcatctttgcc

SEQ ID NO: 667148 - DNA, 98 bp, Homo sapiens
gccgctgcgggcccgctccgacgcggaagctcttcacccagatcttcggggtcggtgtgaagactgctgaccggtggtaccgggaaggactgcgaacc

SEQ ID NO: 667149 - DNA, 74 bp, Homo sapiens
gagcccagaagatcaagactagtgtgagcaacaaagccaatgagtgccaggagcgccctgttgagtgtaagttc

SEQ ID NO: 667150 - DNA, 100 bp, Homo sapiens
aagagcccacggacaccacctcaacggtgaaaaggtgtttgtatctctctatggagctgccatagacatgaatataaggctggataagaattccttgacc

SEQ ID NO: 667151 - DNA, 90 bp, Homo sapiens
tatgagctcggttttcttatgcttataagagtggaacaggccacggcgtatgcctccgaggacggggtcctgaccgaggccatgatggac

SEQ ID NO: 667152 - DNA, 75 bp, Homo sapiens
cccctccggatccacagcacggccgcctggacacatccctccaccaaggatgggaaagggctccttcaagtatgc

SEQ ID NO: 667153 - DNA, 97 bp, Homo sapiens
ctaatctgctcagcatcactggattatgttataatgtggaacctggatgaatgtagagagaaagtacttcaagggacatggatgaagctggaaacca

SEQ ID NO: 667154 - DNA, 75 bp, Homo sapiens
gcggggaccgctgtgctctcggcttcaccatcatcatcgagccctttgacgacagaaccccgaccattgccaacc

SEQ ID NO: 667155 - DNA, 100 bp, Homo sapiens
cggcggcgaggaggggaatttccttgtgcctccattcccgggaggggggagcggcgttggaggccaccgtttccagagatggggtctcactctgtcatcc

SEQ ID NO: 667156 - DNA, 102 bp, Homo sapiens
cgaagacccagatcatccaggacttccttcggaaaggctcagcaggagattgccacctaccgcagcctgctcgagggacaggaagatcactacaacaatttg

SEQ ID NO: 667157 - DNA, 83 bp, Homo sapiens
gagcatcgctcttcggcaacccgaagccacaggatggaggagggggatcccagcaaagggacaagaatccttcaagaaacagg

SEQ ID NO: 667158 - DNA, 75 bp, Homo sapiens
gggatcttgatgcttgctttattagtgtttatactatggaaggacatggatttgattgacatactttggaggcaa

SEQ ID NO: 667159 - DNA, 75 bp, Homo sapiens
cagaaatcacattggaccctcctcccaactgtaggtctcagcatcagaggagcccaggaggaggaccctcccgat

SEQ ID NO: 667160 - DNA, 83 bp, Homo sapiens
gccaacgtgggctcgctcttcgacgacgtatttctgggaaaagccagcttctgtttgcactggtcttcacaactcgttacctg

SEQ ID NO: 667161 - DNA, 75 bp, Homo sapiens
ctgaaacagtgccgacttgcaaacggttacccatgcagttgttactgtaccagcctattttaatgatgcccaacg

SEQ ID NO: 667162 - DNA, 90 bp, Homo sapiens
ctttggactgctccagatttcttgtggaggccccccatgactgggatttagaggaggagctgtcccagttgcagacccaggtcggtgaca

SEQ ID NO: 667163 - DNA, 150 bp, Homo sapiens
taaggcaaaggagtggaagtttgagagaagtttaagagaagaaatggacatgattgcctaaatcagccaaacacagggtgctggagaatctggtaaaagcaccattgtgaagcagatgaggatcctgcatgttaatgggtttaatggaga

SEQ ID NO: 667164 - DNA, 100 bp, Homo sapiens
catcaccaccggatcaacttcgacaaataggatctgctaagctagaaaaagccgagatcctgcagatgaccgtggatcacctgaaaatgctgcatacggc

SEQ ID NO: 667165 - DNA, 100 bp, Homo sapiens
ctggattaatcgaattacagctgctagccaggaacatggactgaagtatccagcgctcattgggaatttagttaaggctctgttccatgggaaattcata

SEQ ID NO: 667166 - DNA, 90 bp, Homo sapiens
ggtccggacactggcggccatggaactcaccgcttttcctccgcaaccatgtctgacaaacccgatatggctgagatcgagaaattcgat

SEQ ID NO: 667167 - DNA, 83 bp, Homo sapiens
tactctctctttctggcctggaggctatccagcgctgctgagaactagccctagacctctgcgtgagggttcttctgccgaag

SEQ ID NO: 667168 - DNA, 83 bp, Homo sapiens
caggagtgtctgtccatctcagcgtgcaccagtctctaacaaccttgaatgctactgcttggagagaggagagtaacaaatac

SEQ ID NO: 667169 - DNA, 50 bp, Homo sapiens
gccagcatgccccagtccaaagcctacagacctggtacctggatttttgc

SEQ ID NO: 667170 - DNA, 75 bp, Homo sapiens
gaaactgaggcttagagaagtttggcaaattggctaagttcctacagctactatccccttttccagggcacagtg

SEQ ID NO: 667171 - DNA, 96 bp, Homo sapiens
aattatgcagttgctcgatgtgcctcctggtgaagacaaggggggatatgtgatcaaagcatcagaagtgaaacaaagagtcctcttcgtggaaaa

SEQ ID NO: 667172 - DNA, 100 bp, Homo sapiens
aaagtgggaaacattgaaatcaagcttaacagagcgttccaaaaagaggactctccagctactttttattgcatcagtatgcagtggtttagagaatggg

SEQ ID NO: 667173 - DNA, 83 bp, Homo sapiens
agtttacacaggcaaactgtcagaaaagagtagcctgggctgtctggaaatctgagaaggccaatgatgaggccaatcagagt

SEQ ID NO: 667174 - DNA, 50 bp, Homo sapiens
ttggagagtcagatgccattttgagaatgtaactggtcactacatttccc

SEQ ID NO: 667175 - DNA, 74 bp, Homo sapiens
aaagaaagctcttctgtccggttactttatgcaggagagaaggttcaaggtcaatgatgggagaacgagaagga

SEQ ID NO: 667176 - DNA, 74 bp, Homo sapiens
gctcgcgctactctctctttctggcctggaggctatccagcataaccttctgttcggtgatgaaattatcacta

SEQ ID NO: 667177 - DNA, 80 bp, Homo sapiens
catcctgaacgtctctccctgtcctagctctgtaactgtttacaggcaagtgtccagagaatggctgggatgaaagtaca

SEQ ID NO: 667178 - DNA, 49 bp, Homo sapiens
cctcaagcacctgcgcatcgtcatcgggaacagaaagaacagcttcaaa

SEQ ID NO: 667179 - DNA, 74 bp, Homo sapiens
gatcgaggacacgctatgtccttttggcttcgaggtttaccccttccagcagcagccgctcttctaaaacattc

SEQ ID NO: 667180 - DNA, 98 bp, Homo sapiens
tcgcgtaccccttcaacgccaagcagcccaccgacatggcccggaggcagcagaagatgacctgtgtagaaaaagcaggaacagatgagaaaatgctt

SEQ ID NO: 667181 - DNA, 83 bp, Homo sapiens
cagggaccaggctgagactcggggcgccagtccgggcaggggcagcgggagccggccggaaatatgaacagggattcatcaca

SEQ ID NO: 667182 - DNA, 98 bp, Homo sapiens
cgggcccaaacatgaaccactctcgccagttctgcagtctcgcccaagaacttcaaggtgaaaatgatcatgaagacatcagttctgctcagctggga

SEQ ID NO: 667183 - DNA, 75 bp, Homo sapiens
cgtgtggttgctaaggatgggctgaagctggggtctggaccttatcaagggaatgaaggaccgcctggagttctg

SEQ ID NO: 667184 - DNA, 75 bp, Homo sapiens
gctctgtctgtcgtgcgggacctggggttttttgggatctacaagattctgaaggaagatttccattaggtaatt

SEQ ID NO: 667185 - DNA, 100 bp, Homo sapiens
cgggacaacatgctgcggggcacagccgaatttgccacatacctgaatttctgccgttccttgcgttttgacgacaagcctgactactcgtacctgcggc

SEQ ID NO: 667186 - DNA, 100 bp, Homo sapiens
ccactgctggctgcttccagtgttcgccgagaggtcgcaatggaagaagagatcgccgcgctggtcattgacaatggctccggcatgtgcaaagctggtt

SEQ ID NO: 667187 - DNA, 103 bp, Homo sapiens
ccggcatcgtctttccgtcctctgaggcgacggccgcggctgcacaggtacttcgtactggatttcgaggctggcatcctgcagtattttgtgaatgagcaaa

SEQ ID NO: 667188 - DNA, 74 bp, Homo sapiens
cctgcaggagtggacggcaatgcatggaaagctcacctgatgggcccagccggctgcacgatgaacctgcgcaa

SEQ ID NO: 667189 - DNA, 82 bp, Homo sapiens
ggagctgagcaaagtgcgtgaggagtttaaggagctgaaagcgcgtgcctccggagccagcgtggtggccatagacaacaag

SEQ ID NO: 667190 - DNA, 99 bp, Homo sapiens
cgatgccctttgacttcaggagatgaggacactgaggcacaggaagtcaagaaacctgcacaaagccatgcaacaaccagccagtatctgagtcatgac

SEQ ID NO: 667191 - DNA, 82 bp, Homo sapiens
gcccagtggtcacctcacactcctccaaggggacaggccttcagtatttggcatcacctttacatggagcacaaagatgatg

SEQ ID NO: 667192 - DNA, 75 bp, Homo sapiens
gctgcagctgcgatctctgtggtaggcccagcaagcttgaaggtgagcacctcgaagggcttctttttatgttga

SEQ ID NO: 667193 - DNA, 75 bp, Homo sapiens
gccaagcggattgagccaggacacaacaccgcggagccctgcaggcgccgccaccggcacggccaggccagcatg

SEQ ID NO: 667194 - DNA, 96 bp, Homo sapiens
ggcggaacaggctaccaagtccgtgctgtttgtgtgtctggcctaaacccaccaagggacgaatgcgcatccactgcttagagaatgtggacaagg

SEQ ID NO: 667195 - DNA, 100 bp, Homo sapiens
tcagctcttcatgaattacacagcgtactatcccagtgccggtggtggtgtgcacattgagccccggtatagacagttcccccagctgaccagatcccag

SEQ ID NO: 667196 - DNA, 74 bp, Homo sapiens
gtctgcatggctctgtcactcacgattgctagtgcaactactgctccatcgatcccttcacatttgtctcctgg

SEQ ID NO: 667197 - DNA, 75 bp, Homo sapiens
aaacatgcaatgaacccaaaaggatggaaaatccctcctggataagggagatagccctgctcaagaattggtgaa

SEQ ID NO: 667198 - DNA, 75 bp, Homo sapiens
agaggattaaataatacattcaattctaaaataagacatggcccatttgctgagagatggatgttaaaaatcaac

SEQ ID NO: 667199 - DNA, 96 bp, Homo sapiens
cgtggtaacgtggctgcaaccttagcgacatcaggaagaacagggtcgaggatcgagggccagatattcgaagcttacaacatggcagctttgtgg

SEQ ID NO: 667200 - DNA, 100 bp, Homo sapiens
atgccaacagtgtaccagcagggcgttggctatgtgcccatcacaggagccttcacgtaaatgggtccagtcatgcctcccagtaagaagccagaaagct

SEQ ID NO: 667201 - DNA, 50 bp, Homo sapiens
aggattccaagtaactcttatttggtgctcaggaacagcccatggaagaa

SEQ ID NO: 667202 - DNA, 100 bp, Homo sapiens
cttaagctacttcaaacagttcttgttcttttaacaaccaatacagtagttcatgatgaggcactttctaaggaaaagcacagtgcagagcgcttgtaca

SEQ ID NO: 667203 - DNA, 75 bp, Homo sapiens
agtgagaccaaaaacccaccaattctggacacattgggattaaagccctggtacctgacagtgtaaagaaggagc

SEQ ID NO: 667204 - DNA, 73 bp, Homo sapiens
agcttcgcagtctggaaagctttaggagttcacagtgagcatggggaagtgattgactgtgtgcaggagctga

SEQ ID NO: 667205 - DNA, 100 bp, Homo sapiens
cacatcgacagggacgtcctcattgtcctcgtgcctgaaacagtacatgcagctggcaatccgagaaggatgtgggtctcccatcacttgccctgacatg

SEQ ID NO: 667206 - DNA, 75 bp, Homo sapiens
ctgaagactgattacaagaatcctatagaccagtgtaataccctgaatcccacggtatccaactgttgaaaaacg

SEQ ID NO: 667207 - DNA, 112 bp, Homo sapiens
ggcgggcggcagcatgtcggtggcggggctgaagaagcagttctacaaggcgagccaggccactcccagaagagacgggggtggaactgcttggcagcccggtggaagacac

SEQ ID NO: 667208 - DNA, 100 bp, Homo sapiens
gacatgatcctctccgcctctcgagctcagccttagggataacgacctgatctcgctgcctaaggaaatcggggagcttacccagcttaaagagctccac

SEQ ID NO: 667209 - DNA, 98 bp, Homo sapiens
cggacttagagctggacacacccaatgcaggcggggaccttataactaagacggctcttgacttttggcgggccggaagaaagagggaagacattcag

SEQ ID NO: 667210 - DNA, 82 bp, Homo sapiens
tgcaagagcaacacgtttccacagtattctaccttgtaaatactgttatttgtatatactgtaaatgatgacatcggtgggc

SEQ ID NO: 667211 - DNA, 100 bp, Homo sapiens
aaagctgcctttctgcaatactgcaggctatggagttactagtagagaaagcaatcagcagtgcttctagccctcagagccctggggatgcactgagaag

SEQ ID NO: 667212 - DNA, 49 bp, Homo sapiens
catcctcccaagtaactgggattacaggagcagctgataacctcagtcc

SEQ ID NO: 667213 - DNA, 90 bp, Homo sapiens
ggccactttcatagcaagtgtgatcggcacccgagggcttgcggctgaaggaaccatcactgttgctggaggcacctgacaaatcctagc

SEQ ID NO: 667214 - DNA, 100 bp, Homo sapiens
tgattagcttcgcagtctggaaagctttaggagttcacagtgtagatgatgagctggagatcaaggcctactatgcaggccacgtgctgggggcagccat

SEQ ID NO: 667215 - DNA, 120 bp, Homo sapiens
ctcccacaatgtgactactttgactactggggccagggaaccctggtcaccgtctcctcagattccagctaagaaagagtcttgtccaaacactggaagagacaaagaccacctgttgaa

SEQ ID NO: 667216 - DNA, 133 bp, Homo sapiens
gcaacatttcccacaggacacgaagtttgtcggcccttgccttggcagagctgaggtccggacactgtttgtcagcggcctccctgtggacattaaacccagagaactctacttgctcttccggccgttcaag

SEQ ID NO: 667217 - DNA, 50 bp, Homo sapiens
catccagctgatgcccttcttcgtggtgttcctgaaaagccccatagtga

SEQ ID NO: 667218 - DNA, 75 bp, Homo sapiens
ttgtccactgagctgatctcctctctggagcaccggggccaccaggagggaggcccggaggctgtttgatgtcct

SEQ ID NO: 667219 - DNA, 100 bp, Homo sapiens
cggggctggtgggcatagtggctgccctgctggggaggttcccctgaaggatgctaaggaatacgctgaatccataggtgccatcgtggttgagacaagt

SEQ ID NO: 667220 - DNA, 88 bp, Homo sapiens
ctattcaatatgaacctgttctgtgtagtaggaccacttgccgtgcagttttgaatcctttatggctgggcggggagcgtcggaccag

SEQ ID NO: 667221 - DNA, 113 bp, Homo sapiens
ggaaggatcaacagtcaattgtgtactagcattccaaggatctgggattggcacaagactctgctaccagcacaaagagcccaatccttcttggcagtctggcccatcagatc

SEQ ID NO: 667222 - DNA, 76 bp, Homo sapiens
tgtgggaactctttccagcttgtgtctggtccccaggatcggctgagagccctggtggtgatccccatcatcttcg

SEQ ID NO: 667223 - DNA, 78 bp, Homo sapiens
tccgccccacgccggctcggcctcgaaacagcttgaagaaagccacagactgcctgcgctgctgacttaaggccccaa

SEQ ID NO: 667224 - DNA, 51 bp, Homo sapiens
tgggtcctccgagagcagcagcggtagctacagcaagctgggtagcaggca

SEQ ID NO: 667225 - DNA, 117 bp, Homo sapiens
attagtctggctgagatgcttgaagaccttcatatttcccaagatgccactggtgaagaaggcacaacccgatctcccagagaaggagaagtgcctggcgtggactataactttctg

SEQ ID NO: 667226 - DNA, 100 bp, Homo sapiens
ccagctctcctgcgccgccgcctcccgccgcgccccgccatgccgctctactccgatttgataatgggctgcattaaaagtaaagaaaacaaaagtccag

SEQ ID NO: 667227 - DNA, 82 bp, Homo sapiens
aggatggagcagaggacattctagagaaaggctacagttcttagcaggagagagagcgaggagttgtcaggaaagctgcagg

SEQ ID NO: 667228 - DNA, 90 bp, Homo sapiens
tatttggaattttcgtatacgtggattccagaggggtgacagcaaaacttggttgaatctggcgatgtggaacccatggatatggagggc

SEQ ID NO: 667229 - DNA, 83 bp, Homo sapiens
gggcgtccgagtcaacaaccgcttcgagctgctgcggttggatttctcacgatgtccagtgttatctccatgtctgccccttt

SEQ ID NO: 667230 - DNA, 74 bp, Homo sapiens
cacgaggcgctggcccggaggctccagaaacgggtcctgctgctcaccaaggggtggccgtgactggggagagc

SEQ ID NO: 667231 - DNA, 95 bp, Homo sapiens
tttaatgaccacaacaagcaagcatgcagcttactgcttgaaaggtgtgtctttatgcggctggccaccatatgtgtcctggtgttcacgctggg

SEQ ID NO: 667232 - DNA, 100 bp, Homo sapiens
cggccagcgtgaccgttggcagcaaggaggtgaccctgaacctctacgacacggccggtgctggagaatctggtaaaagcaccattgtgaagcagatgag

SEQ ID NO: 667233 - DNA, 98 bp, Homo sapiens
gacttcatgcttagatacatgtataacaagaaactatggaggagtatatgttggcctaccatctgaagctgtcaatatggtgtccagtcaaacaaaga

SEQ ID NO: 667234 - DNA, 96 bp, Homo sapiens
tatggcaacagtgccagagtggtctacagtattctgcaaggacagccgtacttctcagtggagccaaagacaggccctcgggaccaaggatcacgt

SEQ ID NO: 667235 - DNA, 88 bp, Homo sapiens
ttttatcaaaaactatgtacttggaggatcgaacagatactgctattgttcatccagttcccattcgtatgactccaagcaaaatcca

SEQ ID NO: 667236 - DNA, 88 bp, Homo sapiens
tggtgctgctgaacccattgccagccgggcctccaggctgaatctgttcttccaggtaaaagatacctgctttcttcagcctatgtag

SEQ ID NO: 667237 - DNA, 98 bp, Homo sapiens
ggaagatggcggccggcgaaaggagctggtgcctgtgcaagttgttgaggggcaccaccacgaggcgatttgtgggccataccaaggatgtgctgagt

SEQ ID NO: 667238 - DNA, 100 bp, Homo sapiens
tcccgcttctaagcgtgtctgatcctttcattcctcttcaagtacctgatgcaccaggttctgtcatatgttgaagaatccatacaccattaagaaacag

SEQ ID NO: 667239 - DNA, 98 bp, Homo sapiens
gcagctggcggacccgtggcagaagatggctgtggagagcccgtccgacagcgctgaggccatggttgcttgttatccgggcaatggaacgggttatg

SEQ ID NO: 667240 - DNA, 100 bp, Homo sapiens
caaccagctcagcctgcattgccaatccaaccagaaggtacaagggtcgtgtgtgggcactgtggaaacacattcctgctaaatgtggtcaacagtgtca

SEQ ID NO: 667241 - DNA, 112 bp, Homo sapiens
ccggttcttcctacaagaccctcaaagccaggagctcgatgtgcaagtggtgaaattgcctctacctttgatcacccagaactggtgaagcttggaagttgcaaacttatcg

SEQ ID NO: 667242 - DNA, 100 bp, Homo sapiens
ggagagacgcacagctaagatgtcaggacatcctggaagctgggaaaggatacaaactggactctcaggacaaaacgacaccagccaaaccagcagcccc

SEQ ID NO: 667243 - DNA, 82 bp, Homo sapiens
gcactgaagccaggtctttctgcctatgctgatgatgttgaaaaggtggttattaacttggtgatgcttttggctgaaatga

SEQ ID NO: 667244 - DNA, 98 bp, Homo sapiens
gccgctcctaagcctgcacagccgcggcggcagcagcagtgagagagtgtgaacatggctacgcctcttcattcccgtccatgccgagcccccgactg

SEQ ID NO: 667245 - DNA, 75 bp, Homo sapiens
aatggaaaaaacattgaagacgtcattgcccaggatgtatcggcaagcagtgtaaacggaggacttggggaaaaa

SEQ ID NO: 667246 - DNA, 83 bp, Homo sapiens
gcgcgagtgaggaaaggaggtactgtagacaatgcagatcttcgtgaagactctgactggtaagaccatcaccctcgaggttg

SEQ ID NO: 667247 - DNA, 75 bp, Homo sapiens
caggagatacaagcactttaaagtcacaacaacgtctattgaaagcccattcaaagtgatttcttctgacttgag

SEQ ID NO: 667248 - DNA, 74 bp, Homo sapiens
aatgggatttcccctcatttatgtggaagctgaacagttatcaggaactgttgccgttattacatcagatggga

SEQ ID NO: 667249 - DNA, 82 bp, Homo sapiens
gtaaattgatcaggatttttggcctaccctccaaagaaaaggtttctctggaaacccccctggtaagtgtggaggaggcggg

SEQ ID NO: 667250 - DNA, 100 bp, Homo sapiens
ctgactcctacctccaaagtttatactatcagaccttattttcctaaggatgaggaaggtgaaattgttgaagtggatgaagaaacagcagctatcttga

SEQ ID NO: 667251 - DNA, 90 bp, Homo sapiens
gtccgcctcctacctccttctgcttcggtatgacttctctttggaaaagaaaaccattgagtgggctgaagagattaagaaaatcgaaga

SEQ ID NO: 667252 - DNA, 145 bp, Homo sapiens
ccagaaagtgtggatttgtgtggagcacacattgaatgggccaaggaaaaatcgagcagaaagaatgtctttcaggagagtagatctggagaaaccaacagctgtgttgaagaaataatccgggtaagattattctttaaacagt

SEQ ID NO: 667253 - DNA, 75 bp, Homo sapiens
taaagatggcaactgaacaaggaagaatgaagtttacccggcccttattcaagtgctagaagcccatggattgaa

SEQ ID NO: 667254 - DNA, 100 bp, Homo sapiens
catcactcacccagatggccggtcccaccggggtatcttcagccgcctccttgacagtcttcggcaggaagttcctgggcttcccgatggactcgagttt

SEQ ID NO: 667255 - DNA, 85 bp, Homo sapiens
aaatgctgtggcatctgttgtcgcaggtatattgtggatccaaacttctacagcaaaaacttacttcttttaggaaagacatact

SEQ ID NO: 667256 - DNA, 83 bp, Homo sapiens
accctggccgccccgagcggagcctggagagaatggatcttggagaatgtctgaaagtccatgacctggctttaagagcggat

SEQ ID NO: 667257 - DNA, 98 bp, Homo sapiens
ggaccctgacgtcagagagttcttggaaaaagaagagataattcatcaccttcgactgagcattcacaaggccttgagaagcaaggagtgcacgcagc

SEQ ID NO: 667258 - DNA, 100 bp, Homo sapiens
actacattgacctgaaagaccgaccattcttccctgggctggtgaagtacatgaactcagggccggttgtggccatgattctggatgaaattgaagaaca

SEQ ID NO: 667259 - DNA, 99 bp, Homo sapiens
gacgcgcgcagcccgcccgcccggcgaccagcaaggcgccatgtcagaaccggctggggatgtccgtcagaacccatgcggcagcaaggcctgccgccg

SEQ ID NO: 667260 - DNA, 103 bp, Homo sapiens
gtgtccctttccttcctggcgctttcctgggttgcttctggcggccatggtgttgctgctgtactccttctccggaaaccacccctactcctaatcccccgac

SEQ ID NO: 667261 - DNA, 100 bp, Homo sapiens
ttcgcccgcctttcccgcggctgatttgccttaaactccctaaaatctccgcagctctggttcctgttgcggccgaaccacaatggacactgccagccat

SEQ ID NO: 667262 - DNA, 100 bp, Homo sapiens
aattatgtagaggaagaaaacattcctgctctgaaagctcttcttgaaaaatgcaaagatgtagatgagagaaatgagctggatcagctcctttgtggca

SEQ ID NO: 667263 - DNA, 101 bp, Homo sapiens
gaggcactgccggactctcattctgcacaggacttctatgagaattatgagcccaaagagatcctgggcagagttttcaggagttgaaaatgacaatgaaa

SEQ ID NO: 667264 - DNA, 90 bp, Homo sapiens
actggggaaaatcagcaagagctttctggaagaaaggaaatgttaggatcactttattctgactatagggtatgaccccatcatttcccc

SEQ ID NO: 667265 - DNA, 75 bp, Homo sapiens
tcggcctcctgctcggtggcaccagggtcctcgctggctacccaatttggtgggccgcaagcttcttatcattgg

SEQ ID NO: 667266 - DNA, 100 bp, Homo sapiens
tacccttgtgtcttcagtttgaggtacctcccataattttaagggagggaagtgtaacatctcccatttttctgacatatttgctgctagagagtttaaa

SEQ ID NO: 667267 - DNA, 100 bp, Homo sapiens
ttacagataccacctctcttaatcaggatgcattcagtctactagcatattcagatccctggaacagcccagttggaaatcagcttgacccgattcagag

SEQ ID NO: 667268 - DNA, 75 bp, Homo sapiens
gagaaccgtcagtttgagccagatgttttcggctttgtgagaaaccttaccatcaaacacgatggccagcaacgt

SEQ ID NO: 667269 - DNA, 82 bp, Homo sapiens
gaggaggcggatcccccggcgtcagatcaatgcaatgtcccggaatggcttccatttgccaggcctaccaacctaactgatg

SEQ ID NO: 667270 - DNA, 75 bp, Homo sapiens
tgcgtgctcagccccagagcaggtccaagtgtgcctgccatcaactaactatccaggctacagcctgtaccccag

SEQ ID NO: 667271 - DNA, 100 bp, Homo sapiens
acctgcaggtattgggagatccacagctaagacgccaggacccactggaagcctagaaatggatctaagcattgaagaacagtcagagtgtgctcaggat

SEQ ID NO: 667272 - DNA, 100 bp, Homo sapiens
ctgcctcgacatcctagaagattacctcatccagagaaggaatacaaacagaagcttgcacgagtaacccaggtccgcaaggaactgaaatcccatattc

SEQ ID NO: 667273 - DNA, 74 bp, Homo sapiens
agaaagaagtcattattgcaaaggagaagctaaaacttacttatgaggaaaagtgtgaaattgaggaatcccaa

SEQ ID NO: 667274 - DNA, 98 bp, Homo sapiens
aatgaaagaaatctaactttcagttcttcctgttcaaaacagacatatctgaagagatggattaagaatgctttggattaaggattgtggagcacatt

SEQ ID NO: 667275 - DNA, 101 bp, Homo sapiens
ggatgattatgaatgacaggcttactgaatatcctcttataattaatgcaataaaacgcttccatctttatccagagttcctctgtgacgagggtgcaggt

SEQ ID NO: 667276 - DNA, 98 bp, Homo sapiens
ttgtctttctcagcaccttggcgaagccttgggtttctttcttaaaggactgatttttagaactccacatttgagtagggacggggtttcaccatgtt

SEQ ID NO: 667277 - DNA, 75 bp, Homo sapiens
tgctgcttctgctggtgctgctgttgtagctgctcgtgattgcagagggaatggcatacatcgagcggaagaact

SEQ ID NO: 667278 - DNA, 100 bp, Homo sapiens
agaccatcatgcacctcatgatcaacaatgctcggacatcatcatgcagctggacgacgtggttagcagtactgtgactgggccacgtgtggaggaggcc

SEQ ID NO: 667279 - DNA, 90 bp, Homo sapiens
cgcgactccggctctgcgctcggctgcctgacttcttcctgctgctgcttttcaggggaatctacttgaaaatggatcggtttatgttgg

SEQ ID NO: 667280 - DNA, 100 bp, Homo sapiens
tgcccatctgggtcaacaagcttgacatggagatttggaggccaatcactgccaccttttatttccctgtgggtccaggaactggatttctttatttggt

SEQ ID NO: 667281 - DNA, 74 bp, Homo sapiens
gcatgtgcatcacccaattcatgaagaagcgcaggcacgacggccaggccccaaagcccaagaggaaggtggag

SEQ ID NO: 667282 - DNA, 100 bp, Homo sapiens
gggaaagtggatcccacctacggtctggagagcagctgcattgcaggcacagggcccgatgagccagagaagcttgtgtccccagttgtcctcatccagg

SEQ ID NO: 667283 - DNA, 88 bp, Homo sapiens
tttctactgtaaagtcaccaacgagatcttccgccactacgaggtttccaggcctgaggtgcccgccctggccccaggagaatgaacc

SEQ ID NO: 667284 - DNA, 100 bp, Homo sapiens
gctcgaggcagtgatggtcaaccaggccctgctggtccttctggccctgctggaaaagatggtcgcactggacatcctggtacagttggacctgctggca

SEQ ID NO: 667285 - DNA, 83 bp, Homo sapiens
ggagagtgacggagtcggcgagcccccgcggcgacaggcgccatgtcagaaccggctggggatgtccgtcagaacccatgcgg

SEQ ID NO: 667286 - DNA, 75 bp, Homo sapiens
gcgcgagctgtctcggtcccacgtgtgcgaatctacctgttactcgtattttggacaatcttatggagatgaagt

SEQ ID NO: 667287 - DNA, 100 bp, Homo sapiens
gcaaaggtgaggaagttggcgaaggaacggctctcctttgtttgcagggcgtgatggtgggcatgggtcagaaggattcctatgtgggcgacgaggccca

SEQ ID NO: 667288 - DNA, 90 bp, Homo sapiens
gttcgaggccaatgatgggagaccaccgggatgggcaggttttggccacttgaccaggcagctgatgaccctggcagggggccgggtggt

SEQ ID NO: 667289 - DNA, 74 bp, Homo sapiens
ccgggtataataatgaagttaaaagagcagcactccaagtcacagcccgttggagattgtgattttaatgttcg

SEQ ID NO: 667290 - DNA, 95 bp, Homo sapiens
taatggtccggacttccgtgtcaggttacgggcaggacttgagtggcttcggacagggcttctcagaccccagccagcagcctccttcctacggg

SEQ ID NO: 667291 - DNA, 82 bp, Homo sapiens
tgaagggcatgtccctgcttgtcagggctgagagcgacggattttaattttgggaaaactaaataacctggtaaaagagtgg

SEQ ID NO: 667292 - DNA, 90 bp, Homo sapiens
ctaggatgatcgaggttgtttgcaacgaccgtctggggaagaaggtccgcgttaaatttgtcatttacgtgctgaagcatattgacttga

SEQ ID NO: 667293 - DNA, 100 bp, Homo sapiens
ggaaatcatgtcaagcgaagccttgaaaaagctgccctgagacggtgtcccgccgaaagcgagtaaccagctcataaatcacatcgaacagtttttggat

SEQ ID NO: 667294 - DNA, 100 bp, Homo sapiens
gctttgaatgtaaatgtgaagaaggaaatatctagtccagcaagaccttgctcttttgaagaggccatgaaaggtgaggaaaatagcagctgaatactat

SEQ ID NO: 667295 - DNA, 100 bp, Homo sapiens
tagcgttggcggaatttgcagtattgcctcatcattccgaaggaacttacaatgtctcagaaaaatggtgggaatgttcttcagatgatgtatgagaaac

SEQ ID NO: 667296 - DNA, 75 bp, Homo sapiens
ggaatgaagcgatgtagccttttaagacacattcagctaacgtattttagcaggtggagtgaggttgaagattcc

SEQ ID NO: 667297 - DNA, 74 bp, Homo sapiens
tctacattataccaataacgaggaacaagcaaagcagttgcgaaagagaaattgggaagccttaaaaaacatac

SEQ ID NO: 667298 - DNA, 51 bp, Homo sapiens
cttcgacatcgagatcaaccgggagccgggagtcagtgaccttcgaggatg

SEQ ID NO: 667299 - DNA, 113 bp, Homo sapiens
aaaacatgggagacatggacccccacatctttgctgtggcagaagaagcctacaagcagatggccagctccatcaagtatgatggtgaaggatgaatatgtgcatgactttga

SEQ ID NO: 667300 - DNA, 51 bp, Homo sapiens
gttgattactcagtctctaaaaagctaagattcacggcccttccacagtac

SEQ ID NO: 667301 - DNA, 107 bp, Homo sapiens
agcgcagccgggagacagatgcgaggcggcggtcagagactggtgaactagagaatgctgagtctggaggagacggaggcaggagaggagggaagcaggataacgtt

SEQ ID NO: 667302 - DNA, 96 bp, Homo sapiens
agggccagcgctgcgtggtcattctgcccgactcagtgcggaactacatgccagcggaagcctgccacctcctatgtgcggaccaccatcaacaag

SEQ ID NO: 667303 - DNA, 112 bp, Homo sapiens
gccgacttcattgaccaggctttggctcaaaagaatggtactctgtggatatccccttggacaaaactgtcgtcaataaggatgtcttcagagatcctgctcttaaacgcaa

SEQ ID NO: 667304 - DNA, 94 bp, Homo sapiens
aaacgaggggctggaacacctcgccaaagcagagaaataacctgcctagagctggaacgttacctccagagcgagccctgctatgtttcagcct

SEQ ID NO: 667305 - DNA, 102 bp, Homo sapiens
ggcacctgcgcgaagctggccaaagcctgcccagacggctcacctgtgcgggatggaacaaaagcctctgacctctgcaggtcagttcccaggacagtggag

SEQ ID NO: 667306 - DNA, 100 bp, Homo sapiens
cattcagctcctctgtgtttgccgcctggaatcaccattattttgggtgatccatatggctatcaattaaagtgctacctgagtgctgttcaacttcttg

SEQ ID NO: 667307 - DNA, 71 bp, Homo sapiens
tggaagcctcctatgattgacaatcccagttaccagggagaactaatgccgacgtgatgaccgccctgtcc

SEQ ID NO: 667308 - DNA, 74 bp, Homo sapiens
agtactcttattgattcacttaagaaaactcagcctgagaatgtgacctgaccaacggtgcagatgggatgctg

SEQ ID NO: 667309 - DNA, 100 bp, Homo sapiens
tatgaaagacctgggcttagacagtttggaccaagtggagattatcatggccatggaagacgaatttgtcaatgagagtgaagctgcagccggcatccag

SEQ ID NO: 667310 - DNA, 75 bp, Homo sapiens
atggaggagagacttatgcctggaggaacttggaaatcaaactcattcgcaacaaagatatgagttggcctgagg

SEQ ID NO: 667311 - DNA, 75 bp, Homo sapiens
cattccagcactggactcatggaggctgagcatttattcagttttcggctttgtgagaaaccttaccatcaaaca

SEQ ID NO: 667312 - DNA, 83 bp, Homo sapiens
atggaaagcaagcttcttggtacattcacaaatacgtacaggaactaattctgaagcatcaaatgcttctgaaacagaatctg

SEQ ID NO: 667313 - DNA, 145 bp, Homo sapiens
gagaatgatctgtacatagattttggtggaaagtttcattgtgtatgtagaagaccagaagtggatggagaagctaatgtcaaaccccgaaattccacaccacctagtttggcaagaaatcctgccccaggtgtgcttacaaaca

SEQ ID NO: 667314 - DNA, 100 bp, Homo sapiens
cttttctcctcctttgttaactgcctcacacacctcacttgttcttttgggcgaagtgctgcattggaagaagtggtgtacctgaaggaaatcttaaaag

SEQ ID NO: 667315 - DNA, 83 bp, Homo sapiens
tgactttgtgcttttggaccaagtgaccatggaggacttcatgaggaacctgcagctcaggtgcaatgattctggactgagac

SEQ ID NO: 667316 - DNA, 51 bp, Homo sapiens
gcactcatccagaaggccctgaggaaggtgctggagaatctggtaaaagca

SEQ ID NO: 667317 - DNA, 100 bp, Homo sapiens
cgagcgcggccctgcaggcgatgtcgccgaaaccgggctgcaggcgggaccaagaatcgccttcagccctgtctggtgcatccttggcagaaagtgagga

SEQ ID NO: 667318 - DNA, 106 bp, Homo sapiens
acaaacccaaagacttggtagtactcgtatcacgaagaaaacccctcaaagatggccacataatattacctttggctgatgatctattctgtaggaagtctgctgg

SEQ ID NO: 667319 - DNA, 74 bp, Homo sapiens
gcttcctctcctaggcgacgagacccagtggctaggactccctggcactggggaaaacagaggaggaggcactg

SEQ ID NO: 667320 - DNA, 90 bp, Homo sapiens
gtctacacacttctgatgacacctttattttaaaagctgatgttccaagaaaaggcgacggcggattgacagaagtatgattggagagcc

SEQ ID NO: 667321 - DNA, 100 bp, Homo sapiens
tgaacgcggccctctgtaatggcggagcgtggcggggacgggggcgagagtgaacgattcaacccgggggagctcagggaattagaatcatggagatgct

SEQ ID NO: 667322 - DNA, 99 bp, Homo sapiens
ctaggccggtgggtgagtgcaccgcgttctcgcacgcgtcatggtcatcatcagatttgaaatatttaaagtggatacaaaactatttcagcaatgcag

SEQ ID NO: 667323 - DNA, 82 bp, Homo sapiens
tagaaactcacatgagacaaatgcgctcagcttcaattgcttgcctacatgtagcctgtgttgtacagcagaaagatgccag

SEQ ID NO: 667324 - DNA, 97 bp, Homo sapiens
aaagagtaacggaaatccttgggtttgaagatgatgttgtgattgagtttatattcaaccagctggaagtgaagcttgatgtgtttgatgctgctga

SEQ ID NO: 667325 - DNA, 87 bp, Homo sapiens
agatggtccttaaaaccgaagaggaggacggtgttgacagctcttctaccacaagcagtgcttctccaatgcccaacagttatgatg

SEQ ID NO: 667326 - DNA, 154 bp, Homo sapiens
gattgaccatgctgagatggagctgcgccgaggccagatcctctggttccggggcctgaaccgtatccagactcaggagcctgcttccagccatgtgaagatgcctgctgcagcctcgccttctgccttgaataaaagctccctcaggcctccc

SEQ ID NO: 667327 - DNA, 108 bp, Homo sapiens
aactcggggcgcgcatcccgcaagtcggaacccggcggatcggatcccgcagatcggagacggggcctggaggtcagccatgtcatctgagcctcccccaccaccaca

SEQ ID NO: 667328 - DNA, 76 bp, Homo sapiens
tcccttgcttagtattgttagcagaatgaatcagtttcttgcagaacataaattattaggaaacattaaaaatgtg

SEQ ID NO: 667329 - DNA, 83 bp, Homo sapiens
gctggcggacatcactttagaccctccacctaattgcaggtcaaaatgcagatcttcgtgaaaacccttaccggcaagaccat

SEQ ID NO: 667330 - DNA, 99 bp, Homo sapiens
cccgcgaccgcgccccggcccgacatggcgccggagctgaccccggaggaggagcagaagtgtatgctgacttgtaaagtgaagaagccagtggtgctg

SEQ ID NO: 667331 - DNA, 100 bp, Homo sapiens
aagcttgcagaggtctttgagcaggaaattgaccctgtcatgcagtcccttggatattgctgtggacgcaaggacagtcattttgtttactcattcagcc

SEQ ID NO: 667332 - DNA, 82 bp, Homo sapiens
gaagagctgccgtcgctgcagagaccccgctatggctgaacaagatcactcaaggtgaaggataatctactaataccagcac

SEQ ID NO: 667333 - DNA, 100 bp, Homo sapiens
gcagaagagaagaagaagcaggatgaactgaaacggattgccagagaattggcagaaggtgtggcggctgatgctgagtctagggctacagccgagccgg

SEQ ID NO: 667334 - DNA, 101 bp, Homo sapiens
tctaaagcccttcacagcaagacccaggaagccgcgggcaaactcagactcgaaggcaagatgatgatgaatgaagtcctggcagcttcctgtgtcccagg

SEQ ID NO: 667335 - DNA, 101 bp, Homo sapiens
tcggggaagatggcgccctcggggctgaaggcggtggtgggggaaattccagggtctccctccactgctgtagtaacccgggtccggggcctcggtggtgc

SEQ ID NO: 667336 - DNA, 88 bp, Homo sapiens
gccgtaccgagctaccaggctggtttccacttgagcggcacagtgacagaacctgcaatacaatcggagccagaaactgtttgcaacg

SEQ ID NO: 667337 - DNA, 97 bp, Homo sapiens
gcaaagttaccggacagcaattaaacacagaaggaaatacccagactgttactacaacctcgggcgtctggacatggatttgattgacatactttgg

SEQ ID NO: 667338 - DNA, 75 bp, Homo sapiens
aagcagcaagtcaaggtcgccttcttgctctgagaacattattatcacagggtggcaattttaagcccagccaga

SEQ ID NO: 667339 - DNA, 88 bp, Homo sapiens
ggaaacgatccgctcccaaaacgaactgataaatttcaaacggaagagagtggcagcatttagaaagaatctaattgaaatgtctgaa

SEQ ID NO: 667340 - DNA, 96 bp, Homo sapiens
gcagtggtggccctggagcagtatgccagcaagtcttccaccaagagcctgcggaccactatcggcgaggccttcgagcggctgcaccggctgctg

SEQ ID NO: 667341 - DNA, 74 bp, Homo sapiens
ttgtggatcgctgtgatcgtcacttggagtgactgctattcggcctgaagacctggaattccccaacaccatga

SEQ ID NO: 667342 - DNA, 82 bp, Homo sapiens
gaccgatgtggaaactgctgcccgccgcgggcccggcaggagcactgctcagcacgcaggcatgtgaggaagctgggcttaa

SEQ ID NO: 667343 - DNA, 96 bp, Homo sapiens
aggtgttgcagaacctcggccccaaggacaaggtcgttgaggacttccacatggagattggcacaggaccagactcaagacacacaactcataaca

SEQ ID NO: 667344 - DNA, 125 bp, Homo sapiens
ttgtgtcctgagatcaaatggcacttcattggccacctacagaaacaaaatgtcaacaaattgatggggttttcagagaaagatgctgatgaggtgaaaggaatttttgtagataccaacttata

SEQ ID NO: 667345 - DNA, 150 bp, Homo sapiens
atgaaaagtggaaggaagcaattttacaagaaaagccatacttgttttctctggggtatgattctaatatgggaagtcgagacaacatgagtgtgattttgatctgttttccaaatgcacccaaagtatcgccagaagcagtgaagaagg

SEQ ID NO: 667346 - DNA, 75 bp, Homo sapiens
tagcattcgcctactccgtgaagttttaagaagaggagaggtcactcaattgggggagcccctgagcagcgatac

SEQ ID NO: 667347 - DNA, 83 bp, Homo sapiens
gtgtcatttctaagtactttctcctactccataaagacttcaaagattgcgggcggctgagacgccgcctgcctggcacctag

SEQ ID NO: 667348 - DNA, 100 bp, Homo sapiens
ccacaggccaggatgggtggaagtgaaggaggctccaaacgaatcctgcggtcccatgagattgtgctgccccccagtggacaagtggagacagacctgg

SEQ ID NO: 667349 - DNA, 51 bp, Homo sapiens
ccggagtcagaaccctccgcagagtaaagagccagtcttggtgctctgtgt

SEQ ID NO: 667350 - DNA, 101 bp, Homo sapiens
gctgctgctgctgctcctcactttcttcctccgcacggatgctgagagtctgccatcatggatgttctcgcagaagcaaatggcacctttgccttaaacct

SEQ ID NO: 667351 - DNA, 82 bp, Homo sapiens
cacaagctcattcactgtgtagtactatactggcaattgctggagaagattttgcaattgttgcttctgatactcgattgag

SEQ ID NO: 667352 - DNA, 88 bp, Homo sapiens
gaagaagaagaaaggaagtccgtatggatcagcagaggctcagaaaacagctcgtcgttattccctctgtggtgcatccctcctgagc

SEQ ID NO: 667353 - DNA, 78 bp, Homo sapiens
aggtgaatttccatgtcaacatagtccaggcctcatgcattgtgcgtcagcagcaatgtttatggtgaaaaatggcaa

SEQ ID NO: 667354 - DNA, 100 bp, Homo sapiens
gctgcagaccctgagcctgggcggcaaccaactgcagagcatcccggctgagatcgagaacttgcagaggtgacagggaaagacgtgtcctgcacttcga

SEQ ID NO: 667355 - DNA, 115 bp, Homo sapiens
aagctagaagaaaaggtgtacttgcaagaaacctcaggacttgagtaacagcaacatgatacgtcggtaacctttccagagatgtgacagaagctctaattctgcaactctttag

SEQ ID NO: 667356 - DNA, 100 bp, Homo sapiens
ctgcactacagaaaaagactcaaggctatttagaaacactttgtgctactctgtggggctttggaaaagcatgttaaatgtgatattagggaagatgcaa

SEQ ID NO: 667357 - DNA, 100 bp, Homo sapiens
aaaaactgcaaaatgattatggatgaatttatcaagtaattctgctaagaaggaattgggatcagcactactgtctcttttgggggacttaaaagttaga

SEQ ID NO: 667358 - DNA, 83 bp, Homo sapiens
acgacagcctcaaacaggagctggagcagctcaaagaggaagaggaggctgcaaaatgggcccgggaagaagaagaagcccag

SEQ ID NO: 667359 - DNA, 82 bp, Homo sapiens
cctgctgtcgctcctggtcggcgcgtggctcaagctagctggaagatctggaagttactgtagctgatcacattcaaaaggt

SEQ ID NO: 667360 - DNA, 103 bp, Homo sapiens
gtggaactgatgtttaaaatcattggaccatttagtaagaagaattccagtcttataaagtagcctttccagtaaatatatgactcagggaaaagcctcagcg

SEQ ID NO: 667361 - DNA, 76 bp, Homo sapiens
cagttagaaggccagaaggacatgataacgtggatacttcaggcagtggaccaatccagctatggcagtttcttct

SEQ ID NO: 667362 - DNA, 80 bp, Homo sapiens
gctcacctgcgctgtgatgcctgcagagctgtggcttaccagattttggggaatgtctcagaattccaaagagtggttga

SEQ ID NO: 667363 - DNA, 95 bp, Homo sapiens
tccggtttgctctacccgggaacagccagcttggcctgcggcccggccagcacctcatcctacggctgacacattaaaagagagatatcaaaaaa

SEQ ID NO: 667364 - DNA, 83 bp, Homo sapiens
ctactctgcctcggggacgaaagcaggaggagagacttcagcatgcaaaccttcatctgttcggcttgcaccgtcattttcat

SEQ ID NO: 667365 - DNA, 98 bp, Homo sapiens
ttgctcctcggcttgcatttgtttctgctgaccgcgggccctgccctgggctggaacgaccctgggcttttttccagacttcaagctcccattccaac

SEQ ID NO: 667366 - DNA, 80 bp, Homo sapiens
cttggcaagatttgatgctcttgtgctcagtgacatcattcagaccccaccaacaactgaacgctttggtcaggctgcta

SEQ ID NO: 667367 - DNA, 133 bp, Homo sapiens
aaatagttccgtgagaaagatggccgggaactcgatcctgctggctgctgtctctattctctcggcctgtcagcaaactacaagagactgtgaaaaggaagttggaaggagctcgatcaccacttaatggaga

SEQ ID NO: 667368 - DNA, 96 bp, Homo sapiens
accagctgaagagcgacaagccgctggcagccgcggatctcaccgccgctcagggaacaagatcactcaaggtgaaggataatctactaataccag

SEQ ID NO: 667369 - DNA, 100 bp, Homo sapiens
ggaaatgaagcgtgctaaagtgtctcaagcactgtttgcaaaggttgcagcaaccaaaagccagattttaccaaatgttgcaagaactctggagttctta

SEQ ID NO: 667370 - DNA, 90 bp, Homo sapiens
gaaaaacctgaggctgatgacccaaaggtatatgagtagaccagtgatgagtggcccaggactctatgaccctacaaccatcatgaatgc

SEQ ID NO: 667371 - DNA, 100 bp, Homo sapiens
cgttcatcgaggagggcacattccttttcacctcagagtcggtcggggaaggccacccagcttcctgcctgacacagctcacttcaagaagtgcacaatg

SEQ ID NO: 667372 - DNA, 99 bp, Homo sapiens
cgtcagccggaccccacctggacggctggggccacttgtggtcgccgggagctttctgaaaaggatatgagcatgctcgaggagaggattaagcggtca

SEQ ID NO: 667373 - DNA, 100 bp, Homo sapiens
caaaggtcgcgataatattattgacctcttcctttatcagccacagtcagtttgctgagaacgaaaccaatgaggtcaattttagagagataccttcaca

SEQ ID NO: 667374 - DNA, 73 bp, Homo sapiens
ttattgacttctcaccttgtgaaaggctggatctccagaactgttctctggaggaccctggtccaaactttca

SEQ ID NO: 667375 - DNA, 98 bp, Homo sapiens
ccgtggagagatcataatttggggttcaagattccaggtgtgaaaaggacattgatgagtgtgcctctgatccgtgtgtcaatggaggtctgtgccag

SEQ ID NO: 667376 - DNA, 101 bp, Homo sapiens
cctggccgcgattttctgcaggccccacgagtgggaggtgctgagccgctcaggtttttcgttggaatatacgttgcacatttatggcgattctgagtgtg

SEQ ID NO: 667377 - DNA, 82 bp, Homo sapiens
aacggggctgctggtgggccgcgtcgaagacatggaccagggctacggaggatgtggggcaatcaagttggggatgaaggag

SEQ ID NO: 667378 - DNA, 83 bp, Homo sapiens
gtcgccttctgcctggtcgggatcccgccccgcccggagccccggcccccacaggtgaaatgacaatggatgctctgttggct

SEQ ID NO: 667379 - DNA, 100 bp, Homo sapiens
gcgaggcagagcgggagcgcgcagccagtttgtgaagtgtggatatgcaggctctaactttccagaacacatcttcccagctttggttggaagacctatt

SEQ ID NO: 667380 - DNA, 83 bp, Homo sapiens
gatgacttgtcatgcaatcaaaatgaagttgaagcatcaggtatctttcagatgaaggcattgaagcttgcacaagctctcca

SEQ ID NO: 667381 - DNA, 82 bp, Homo sapiens
ctgtaagctgtgatctcagtatacaaaggatttgtactgtgttcgcagtgacctggggaacctgctcaaagccctgggtcgc

SEQ ID NO: 667382 - DNA, 51 bp, Homo sapiens
gacattgccatcccatgcaacaacaaggtttcagaagcaggcaacaggaac

SEQ ID NO: 667383 - DNA, 87 bp, Homo sapiens
gacgtacagcgggccgggaaaagtggcactgaggctctggaacttctgcccagctctccttggtcaaaatgcagatcttcgtgaaaa

SEQ ID NO: 667384 - DNA, 50 bp, Homo sapiens
ctccttcaagcccagcgagcatgcagcagtgttgtactgctacttctata

SEQ ID NO: 667385 - DNA, 75 bp, Homo sapiens
gatgggactgtctatgatgtcatgtttgtcagcacagaggctgggaggcggcagaatgcagccagaggagggcac

SEQ ID NO: 667386 - DNA, 151 bp, Homo sapiens
ccacgggcgtcgtgaagctcggtgaccttggtctgggccgcttcttcagctctgagaccaccgcagcccactccctaggctggaatgagctgctcatcgcctccttctcccaccgctccatcgccgtgaaggacgggatcctcctggccac

SEQ ID NO: 667387 - DNA, 75 bp, Homo sapiens
ttcccgggaggggggagcggcgttggaggccaccgtttccagtaagactttgaccccgacgcaggcttcagtgat

SEQ ID NO: 667388 - DNA, 100 bp, Homo sapiens
acggcattcggtatgaatatgggattttcaatcagaagatccgagatggatggcagattctggggagcaggtcctggtggatgtggagaccaagagcaat

SEQ ID NO: 667389 - DNA, 51 bp, Homo sapiens
gaggatgatcaagcggagttcgatgcggttatatatgccgcaattttacag

SEQ ID NO: 667390 - DNA, 100 bp, Homo sapiens
atacaagcaggatgtgtacttgcttcctaagaaaatgggtgaatctgattaacgagcccctggtgatatttgtttgtgcaactacaggccaaggagaccc

SEQ ID NO: 667391 - DNA, 50 bp, Homo sapiens
cagagagctattattccctgtattaaagggctttttggtggtgctggagt

SEQ ID NO: 667392 - DNA, 74 bp, Homo sapiens
gctgtttggaaagacccaggagaagccgcccaaagaactgttgttgacctcctgtactggagagacattaagaa

SEQ ID NO: 667393 - DNA, 80 bp, Homo sapiens
cccacagctactccaacccaaacaacaaccaagccagtttaatggtccttatgtcgtcagaagatcgagaagctcaggag

SEQ ID NO: 667394 - DNA, 82 bp, Homo sapiens
gaaggaggccgagccgggatctcaggtcctcgggggcggcggccacgccaaggacgggcgtccgacctccgatcatgaacgg

SEQ ID NO: 667395 - DNA, 90 bp, Homo sapiens
aacaacccgtacgtgcggaaggccctcaacatcccggagcagctgccacaatgggacatgtgcaagttacaattcaacaaacatggtgtg

SEQ ID NO: 667396 - DNA, 75 bp, Homo sapiens
tcaagcccaagaagaaagtcttcgagaagttgcaggtgacaatctccaatagacttgtgtcttcaccttgctgca

SEQ ID NO: 667397 - DNA, 74 bp, Homo sapiens
cgcgactggctgctgcggcgcgagacagagcgccaagtgtctcgctggtttgttcagtgccttcgggaacagtc

SEQ ID NO: 667398 - DNA, 75 bp, Homo sapiens
ctgggacttttcaagaggggatcccttccgtttaaacatctccctctttcagctgcctactgaatcactcttcta

SEQ ID NO: 667399 - DNA, 90 bp, Homo sapiens
cggagatgcctggaatacagtaagcctctgaagagccaatccattcaggatgggaaaccacgcaggcaaacgagaattaaatgccgagaa

SEQ ID NO: 667400 - DNA, 75 bp, Homo sapiens
aatgacatccgagcgaaagagaaagagcttcttggacacttaatgattgttggcaagaaatgtgctgctgatctg

SEQ ID NO: 667401 - DNA, 80 bp, Homo sapiens
taccaactgctttcctttccctcagcacacagaggatgatgctgactttgatgaaggcaaaagatgtgattgaagagcat

SEQ ID NO: 667402 - DNA, 74 bp, Homo sapiens
ggacatcctggaagctgggaaatgagatggctccgaagtcaaaaaagaaggggcaccccgggagggagcagaag

SEQ ID NO: 667403 - DNA, 75 bp, Homo sapiens
ctgttcgccgaggagatggagaatgaggacgagatgtcaggaagctcttcgtgggcggtcttgactggagcacga

SEQ ID NO: 667404 - DNA, 95 bp, Homo sapiens
cgtttgggaacgcaactttgaggagacagtgcggtgggctcatcagattcaagagatgtttccccaggttccataccatctggtactgcaggacc

SEQ ID NO: 667405 - DNA, 100 bp, Homo sapiens
gagacaccatgcccagcccctgaggaaattatcagttcattgcctagcatagtaaatgacaaatatggaaggaaggtcctattgtacttactaagcccca

SEQ ID NO: 667406 - DNA, 100 bp, Homo sapiens
gaagaaaccagccgaacttcagggtttccaccgttcgttcaaggaaagaccacagcaagattctttcattcgtctcctcctagcctgggggaccaggctc

SEQ ID NO: 667407 - DNA, 74 bp, Homo sapiens
ctgatgtggtgttgctgcagaagctgcagctggcggctgacggcactgtcatgaacaccttcgctcacaagtgc

SEQ ID NO: 667408 - DNA, 82 bp, Homo sapiens
agcggcgagtttccgatttaaagctgagctgcgaggaaaatggcggcgggaggcccctccagccagcgtcaggtgcagaatg

SEQ ID NO: 667409 - DNA, 50 bp, Homo sapiens
tgttttggaactgtcaggtacctcaaagcctattatcttcctaaaaagtt

SEQ ID NO: 667410 - DNA, 82 bp, Homo sapiens
acaagcaagagctaactagggttcaaatctgaacatcaatgatgtactagggaactactcattgactcttgttgatgcattg

SEQ ID NO: 667411 - DNA, 83 bp, Homo sapiens
ctgggggattcgcagggaggatgtcgggacaccccggaagctgggaaatggtcctaggcctacttacaagcctccagtctcaa

SEQ ID NO: 667412 - DNA, 100 bp, Homo sapiens
agcaaatactactgaaagtgcaatatttgagtatcactgcgaggtggcagagaaacaaacatcggtattgcttaaaccacttgctatttccagttccggc

SEQ ID NO: 667413 - DNA, 100 bp, Homo sapiens
gcttcctgttccttcaggaagtgaaatggatggagcagaatctggaaagctcttcacagaggtcctccaggatcaaggggaccactgattccaccactgc

SEQ ID NO: 667414 - DNA, 90 bp, Homo sapiens
aagccccagccccctgtggctgaggctacaccccggagccaggagggtacgaagatgccctggtgctcctgctcacagaggtgttgaatc

SEQ ID NO: 667415 - DNA, 90 bp, Homo sapiens
tggtggggtggcggagggggagactgtgccgtggagggcctcgccatgtcctgctgcccggaagaactcttggatataaaagaactcccc

SEQ ID NO: 667416 - DNA, 75 bp, Homo sapiens
gaaaatcggtgaagagaggttttgaattcacgcttatggtagtggggggaacaaggaccacaaggcttcccaggc

SEQ ID NO: 667417 - DNA, 90 bp, Homo sapiens
gtttcaacccagctggcccgtgctttcactatggactgtattactttggaagctggtttattgcagcctcctgttcgtatagtttcacag

SEQ ID NO: 667418 - DNA, 110 bp, Homo sapiens
cgtggccttagctgtgctcgcgctactctctctttctggcctggaggctatccagcgttcctgcacttggccatcatccatgaagaaaaggcactgaccatggaagtgat

SEQ ID NO: 667419 - DNA, 88 bp, Homo sapiens
gctgttttggagttagagaagagaattgaagaatcttctgaaacttgtgagaagaagtctgatcgggaacatgccctgtgtgccgccg

SEQ ID NO: 667420 - DNA, 100 bp, Homo sapiens
cagcttcacccgtacaggtagccccgccgccgcgcacctgccttcgctcccgcaccgatgatgctgtgtatctggacaatgagaaagaaagagaagagta

SEQ ID NO: 667421 - DNA, 80 bp, Homo sapiens
acacagtgcacccccattgaatttgacagcaaaggcaaaagctgtgcctcacttctgcgggttgaaccctttgtatgtgc

SEQ ID NO: 667422 - DNA, 100 bp, Homo sapiens
atgcaggatattttgattggaaggactgcctgcctccaacagttgatattcactgatggactccaaagaatcattaactcctggtagagaagaaaacccc

SEQ ID NO: 667423 - DNA, 98 bp, Homo sapiens
gcatcgaattcgcactgatgaaaatgggctttgtcctgcatgtagaaaggtggaacaatccaaagttttaatcaaagaaggtggtattcagttgctgc

SEQ ID NO: 667424 - DNA, 83 bp, Homo sapiens
ggctccgcggcggggctgctacccaccagcatcctccaaagcactgaacgcccggcccagcaaaatgatgcttcaacacccag

SEQ ID NO: 667425 - DNA, 100 bp, Homo sapiens
gtcgagatcgccgccgacgccgctgctgtggccgctgctgctgctgctgctcctggaaaccgatctggaccccctggagctcagcgaggggaaggtgctt

SEQ ID NO: 667426 - DNA, 87 bp, Homo sapiens
agaatctcaaacaagacaacttgagctgaaagcgaaaaactatgctgaccagaatgcagagccgaaatatctgatagttgtgcgacc

SEQ ID NO: 667427 - DNA, 75 bp, Homo sapiens
tgcagaccctgtggtccacgcgggagcggaagcagcagtaccatcccactgatatcacgggcccgctcaacctct

SEQ ID NO: 667428 - DNA, 76 bp, Homo sapiens
tcagaccttcattgctctgtgtgccaccggaatatatgcagaacatgtcctgcggcccaagaatcttggacttgca

SEQ ID NO: 667429 - DNA, 100 bp, Homo sapiens
aattcctactgcatcgtgggcatagcgtacaatgccaaaataggagatcacctctgcagcctgcacagccgggcctttggactcctggatgctagagtga

SEQ ID NO: 667430 - DNA, 74 bp, Homo sapiens
tgaggaagagctgataacaccttaaacctcctctggattcaagttaaagagcatctgctgcacccaagcctgag

SEQ ID NO: 667431 - DNA, 82 bp, Homo sapiens
tcctgagtagctgggattgcagctggaccagctattccttctgttgtggcgtatccgaaaaggagtcagaccagcactgcag

SEQ ID NO: 667432 - DNA, 75 bp, Homo sapiens
ccaggttcttcgaaaactgaagcagatgttgaacaacaagatgatgaggccgttgtggaagttaacattcctgga

SEQ ID NO: 667433 - DNA, 73 bp, Homo sapiens
agaaaacggcaataactgtggaggtgtctgtttcatgtggaatacctgacttcaggtcaagggatggtattta

SEQ ID NO: 667434 - DNA, 76 bp, Homo sapiens
tcagcctgccctaggacttcatgtctatatatttccccattcactgctggttctagtgagccctacatcagagcag

SEQ ID NO: 667435 - DNA, 100 bp, Homo sapiens
gcatcactcccagctgcgcaaagcttgcgaggtggcgttagaggctgcctaccacaaggactttagcttactttttaaagattgaagaaaaaaaagaaga

SEQ ID NO: 667436 - DNA, 100 bp, Homo sapiens
gccaatcccccctcacccaggcccctgtcaagaaggtgccggtggtgcgagtcttcggagcgaccccggcagggagactcatgcatctgtatgccgtgtg

SEQ ID NO: 667437 - DNA, 75 bp, Homo sapiens
caattcagtgaagatatgatacccacagtgggcttcaacatgaggaaggactcatctgatgatgtgagaagagtt

SEQ ID NO: 667438 - DNA, 72 bp, Homo sapiens
tctgcacctcaggagggaattcagcctcagtgatgtccatgagttaaaatggccagtggatctgcctttgcc

SEQ ID NO: 667439 - DNA, 100 bp, Homo sapiens
ggatcatgtctgcgagccaggattcccgacgttggtgatcaaagtgtccggtgtgatcctgtccgtggtcgggggcctggccgtgggaaaggtaacaaag

SEQ ID NO: 667440 - DNA, 83 bp, Homo sapiens
gggcggcgctgtgtccgtcgccatgacagcagaaaaatatggctcaggagactaaccagaccccggggcccatgctgtgtagc

SEQ ID NO: 667441 - DNA, 100 bp, Homo sapiens
ccgcctcctgcctcgaagacctgaggagcaaggatgcttcctgaaacttggagagtggcagctgaatctacagggcatcaatgagagcacaatccccaaa

SEQ ID NO: 667442 - DNA, 75 bp, Homo sapiens
ccctcatacgacttcagctcctcacttggactcctcttgagctttttaaagatgacatcaggtatctgttgacaa

SEQ ID NO: 667443 - DNA, 74 bp, Homo sapiens
atcgtgggactcagcagccttggtgctcaggtgccagatgcaaagaaggaccctctattgtcccaggcctgtgt

SEQ ID NO: 667444 - DNA, 100 bp, Homo sapiens
gttggcgacgtccctgggcgcgtcagaacaggcgctgcggctgatcatctccatcttcctggaatatggctcaagcctggaagatgacgtggtgggggac

SEQ ID NO: 667445 - DNA, 76 bp, Homo sapiens
aaactgaagtttcttctgggtccatcaccaaagagcagatgccaaatctgatgtccatgaaggaggtgggtgatgg

SEQ ID NO: 667446 - DNA, 101 bp, Homo sapiens
gaaaaagtcaaaacgggcaataagactctttaaagaaggcaaggagagaatgtatgaagaacagtcacaggacagtgcacagccagagaacaacacatcac

SEQ ID NO: 667447 - DNA, 78 bp, Homo sapiens
tgctgcgcctcaacgcgccgttgtgtcggtcctgaccgccagcctgtcgtacatggtggggatgatcgccagcttcta

SEQ ID NO: 667448 - DNA, 101 bp, Homo sapiens
tgtatacaactgtagatgcaaatgggtatctgaaaaatggatcaggatatgttcaaggaatgagtgatttactttcccctcttttatatgtgatggaaaat

SEQ ID NO: 667449 - DNA, 98 bp, Homo sapiens
caggctcatcctgtccatcgtgtgcctgatgatcacgcagctggctggcttcagtggaccactctctattggaggcatcatcattctgaaggatacca

SEQ ID NO: 667450 - DNA, 75 bp, Homo sapiens
gaagatttggaacctcactgaaaattggtattgttggattgccaaatgttggatcagaccccaacaccaacaaga

SEQ ID NO: 667451 - DNA, 97 bp, Homo sapiens
gggagctggacggcgagcgcgagcggcgcgagaaacctcccgcgacgatgcccctcaacgttagcttcaccaacaggaactatgacctcgactacga

SEQ ID NO: 667452 - DNA, 100 bp, Homo sapiens
ttagctcagcaattcttaccttttccgccatggagtcatagttgcagctgactccagggctacagcgggtgcttacattgcctcccagacggtgaagaag

SEQ ID NO: 667453 - DNA, 50 bp, Homo sapiens
ctccaccgcttccacaccaacagccgattacacctcaacaagaaggcaac

SEQ ID NO: 667454 - DNA, 82 bp, Homo sapiens
ttttgagaagagcagcaagagctttacctatctataccacatcagcttcaaaaagtcatgcttcaccccttcctccatctgc

SEQ ID NO: 667455 - DNA, 75 bp, Homo sapiens
ctcaagcaggagcttttcgccttcaacaagcctcttagcaatgcataccacgagttagcacaagtgtattcaacc

SEQ ID NO: 667456 - DNA, 100 bp, Homo sapiens
catgccgtggtcaccgtccgagacgccaaacacaccaactttgtggagagaacgtcaggatgcagatgggcaaatgaaagagctccaggatcagctcgaa

SEQ ID NO: 667457 - DNA, 75 bp, Homo sapiens
ggaggaatcctgatactgagcggtcccacaccggctcctgaccctgactctgctgccgagcctggagctgtgtct

SEQ ID NO: 667458 - DNA, 100 bp, Homo sapiens
caacagaccctgaggacaattgggaagaataacaccttccaccatgaccacctcagcaagttcccacttaaataaaggcatcaagcaggtgtacatgtcc

SEQ ID NO: 667459 - DNA, 100 bp, Homo sapiens
agctgaactaaggagaaagtcctacaacagtttggcgtgcaacatggggcttgagaaagggcactggagatattattgctgtcatgataacagaattgag

SEQ ID NO: 667460 - DNA, 75 bp, Homo sapiens
ggaccacggtcaccgtctcctcaggctactgcagcactggggtgtcagttgttggtccgacccagaacgcttcag

SEQ ID NO: 667461 - DNA, 75 bp, Homo sapiens
cttcacactgcagaactgggttctggactttgggcgtcccattgccatggtgatctggtgccagctggtggaaca

SEQ ID NO: 667462 - DNA, 95 bp, Homo sapiens
gagcgcgtgtcccgggccctggccgagctgggctacgagcggaccccgtcccagtgccgggagcgcatcaagctccagaacctgggtatcaaccc

SEQ ID NO: 667463 - DNA, 75 bp, Homo sapiens
gtcaaggtggcctaccaggaggccaggggtgtcgccatgctattgtacagggggatacgctggaagacatttaca

SEQ ID NO: 667464 - DNA, 80 bp, Homo sapiens
cagttcatgccagcggctggaataagggaatgaaggatggcagcatgccgtgcattaaaagctgttttggtagatctcag

SEQ ID NO: 667465 - DNA, 90 bp, Homo sapiens
tcatgagtgttcctgtggtctctgcacctcctttctggtttggatccagctcgagtcaacgtccctgtcattggtggccatgctgggaag

SEQ ID NO: 667466 - DNA, 75 bp, Homo sapiens
tcagacgcttcctatccctacaaagccatgactggaaatagcaaaggctatgcatttgtggagtttgagtctgag

SEQ ID NO: 667467 - DNA, 100 bp, Homo sapiens
gttggggtcaacctcactctggatggggtcaagtcctggctgaagccacggctgggacaggaagccacaatcctgaaggacacagccctgcagaaagtga

SEQ ID NO: 667468 - DNA, 98 bp, Homo sapiens
ttatgtgagaaaatctacaatttcttcgagacactcatataaagtaccatccttccagatacaagtaggaaaagtcgccagaagacaagagctgtagg

SEQ ID NO: 667469 - DNA, 90 bp, Homo sapiens
ggccagcaggatgccgcttctgctccagggcatgcaccatgcagttttggtctgtcatcccggctaaagtacagtggtgtcatctccgct

SEQ ID NO: 667470 - DNA, 100 bp, Homo sapiens
aaaggtcaccaatttccacagacacatcattggatgtgttggaagatgctactctcagacataaggaaggtttggcacctggatcctgtcattgcaaaac

SEQ ID NO: 667471 - DNA, 100 bp, Homo sapiens
ggtggaagaaacatcatgtcaacagaacatgatacaggagcttatagaaactaatcaacagcttagatgacagtcatgtccctttccagggacctcaagg

SEQ ID NO: 667472 - DNA, 82 bp, Homo sapiens
gccgtgctctacctctatccgaccctacagcttggggcctgggctcctctgaccatcctcattgagaaaggaaagtgagtcc

SEQ ID NO: 667473 - DNA, 75 bp, Homo sapiens
tactgtaaagtcaccaacgagatcttccgccactacgaaactgccattggatgtccagaatcccctgtagttgat

SEQ ID NO: 667474 - DNA, 100 bp, Homo sapiens
ccgaggccgcctccgagcgccagtattctaccttgtaaatactgttatttgtatatactgtaaatgatgacatcggtgggcactaaccgagcccggggaa

SEQ ID NO: 667475 - DNA, 85 bp, Homo sapiens
ggcaagtcctccctcatcaactccctccggaggcagcacctcaggaaagctcggcttattccaggggtgtgtttcgtcgagatgc

SEQ ID NO: 667476 - DNA, 75 bp, Homo sapiens
agtgattgagagtggaccacactgcgccaacacagaaattatggccgtgggcaagacctgccttctcatcagcta

SEQ ID NO: 667477 - DNA, 75 bp, Homo sapiens
atggtatggatttccaaagctagtgccatacagcggaaaggcagtgtttcctgaggttataggcgggtgtttgag

SEQ ID NO: 667478 - DNA, 74 bp, Homo sapiens
gtttggatgaaatgtccaatcttgaaaaacagtttaccgatctcaaagatcaacggtatccaactgttgaaaaa

SEQ ID NO: 667479 - DNA, 75 bp, Homo sapiens
cacctcatcccctggatgggggaccacaagatcctcatcgacaggtgccgaggtaaacagagcatccacggaagg

SEQ ID NO: 667480 - DNA, 100 bp, Homo sapiens
cagatatgatatcccagttggagagggaagaaaagctttggatgaaggagcttcaaacccaaagaggtaagcattcagggagatacttcaggggattacc

SEQ ID NO: 667481 - DNA, 100 bp, Homo sapiens
tcaggagacggagccacggagcaggcagcctgcttctgcaaagtggtacgatcgaagggactatgtcttcattgaattttgtgttgaagacagtaaggat

SEQ ID NO: 667482 - DNA, 90 bp, Homo sapiens
aaagaacagaatacaaagttaccctacagattccagcctccagcctggatgccaacaggaagatgtccctaagtgccagctctcccctaa

SEQ ID NO: 667483 - DNA, 50 bp, Homo sapiens
gtggctgcaaagtgaaaagcttgaacgataaagatggaaagccactcctg

SEQ ID NO: 667484 - DNA, 75 bp, Homo sapiens
cctgaggaagcgcgggcggacgacagaggatgccgaaccactccagtagttctcactggaattggtgcagatgag

SEQ ID NO: 667485 - DNA, 74 bp, Homo sapiens
acagcttcagcatcgagctgctgttatcccaccaatgctcctggctaaatacaaaagcttgcaatgggacaaag

SEQ ID NO: 667486 - DNA, 100 bp, Homo sapiens
cggaccgggcctccggaggcaggttcggctggaaggaaccgctctcgcttcgtcctacacttgcgcaaatgtctccggtgattttcttccacccccacct

SEQ ID NO: 667487 - DNA, 100 bp, Homo sapiens
tccccagagcctcagtttgtgcaggacaccgacatggaacagggactcactgggggagctggttttccatccatcccagtcggcaagagccccatggtgg

SEQ ID NO: 667488 - DNA, 100 bp, Homo sapiens
atgatgtgatgctggagaccttgacacttatatcctccctgggactttgtgtcattgtatcaagattttgaaaacttttatacaaggaatctgtacatga

SEQ ID NO: 667489 - DNA, 96 bp, Homo sapiens
tggaagcctctcggagtgctgcctccagccaagctatcatggtgaacttacttcagattgtgcgggaccactgggttcatgttcttgtccctatgg

SEQ ID NO: 667490 - DNA, 78 bp, Homo sapiens
gagaggcacccgagacccacggagaccgcgagagaagatgactgaggaggaggtggagaccgttctggcaggacacga

SEQ ID NO: 667491 - DNA, 51 bp, Homo sapiens
agccggggggcactgcccgcccgggctctgaacattgacatcaccaatttc

SEQ ID NO: 667492 - DNA, 82 bp, Homo sapiens
tgcgcgaagctggccaaagcctgcccagacggctcacctgtgcgggatggaacaaaagcatgatgccttcttctgtagagtg

SEQ ID NO: 667493 - DNA, 88 bp, Homo sapiens
ggatctgcatgccgctcaccgtagacgaggggaacgcccttttgcttgtgactggcagggctgcgacaagaagttcgcccgctccgac

SEQ ID NO: 667494 - DNA, 75 bp, Homo sapiens
tctgctcttcagtacaatcctgtaggcgaaaaccaagagtacatcggcctcgttctcctatattggaagaaaaag

SEQ ID NO: 667495 - DNA, 99 bp, Homo sapiens
aagatggcggcggtgtctggcttggtgcggagaccccttcgggaggcaagaggcgcagatgttccagagattcctggagatcttactcttaagacgtgt

SEQ ID NO: 667496 - DNA, 100 bp, Homo sapiens
cccagcatcctgtcaaaaccggcctatcggatgccttcatgattctcaatccatccccggatgtgccaggtcttgcagaaacagtccattgtgaccttca

SEQ ID NO: 667497 - DNA, 87 bp, Homo sapiens
tcactgagatcctgatctggggagatcaaaatgacagctctgtatttgagttgcactgctgtgatccatcctcatctcctaaagatg

SEQ ID NO: 667498 - DNA, 82 bp, Homo sapiens
ggtcggactcccgcggcgggaggagcctgttcccctgaggagtgtggccatctggggccgtgtggtatttgccactcaggag

SEQ ID NO: 667499 - DNA, 90 bp, Homo sapiens
cacccgagagccgcgagcgcccggccgaacccgcgatggaataatgcccagcggcccgccaggtcccgagtgtgaacatggctacgcctc

SEQ ID NO: 667500 - DNA, 80 bp, Homo sapiens
ctgatgatgagaatgctgtgtgcgcagcacagaactgccaaaggccctgcaaggacaagctgcttcctgtctgtgacacc

SEQ ID NO: 667501 - DNA, 75 bp, Homo sapiens
aaggatttctggaaggctgtgattcaagtgaggcaaaagttaagcatgattgggacagaatgatagaagctgtac

SEQ ID NO: 667502 - DNA, 101 bp, Homo sapiens
acgccggccatgtgtgccacctgtgccatccaaactgcacctacggagatccaagcctcctaaaggccaaggagctgagcaccatctagaaagaatccgac

SEQ ID NO: 667503 - DNA, 75 bp, Homo sapiens
gagcccggccccggggaactagggagcgtctccggctgcacagcgctcagacggtctggaaaatcccgaagcaga

SEQ ID NO: 667504 - DNA, 50 bp, Homo sapiens
acctcgcttacctgcatgctggtatgatctcgtgaaatcttgagagaaac

SEQ ID NO: 667505 - DNA, 98 bp, Homo sapiens
gaagatcgtggcccctacggtgtcccaaatcaatgcggagttcgtgacccaggtgtcagcggtgcccactgtgctggccatgaagaatggggacgtgg

SEQ ID NO: 667506 - DNA, 100 bp, Homo sapiens
cttaccccttctcaccgaggaagagcgggagaaagggcaatccacctcgaagatccaagtctgcacctcctcgtgatttaggcaatttggataagggaca

SEQ ID NO: 667507 - DNA, 87 bp, Homo sapiens
gaagcatccaaatattgtccagtatagagaatcatttgaaggtccttctcccagatttagaattttatgttaatcttggagattggc

SEQ ID NO: 667508 - DNA, 100 bp, Homo sapiens
tcgtcctgtggacgcgtatcgccagcacgatcccaccgcacgttcagaagtcggacgaagttatacggaagcgtctcctcattgatggagatggtgctgg

SEQ ID NO: 667509 - DNA, 75 bp, Homo sapiens
aaaacttgatgggaaaatcccggtgtccagagatggttcagaattttcaagatgagagttgttttttattctcca

SEQ ID NO: 667510 - DNA, 51 bp, Homo sapiens
cagcggtctgcgcctggcagcagatcaacctcaaaacgtgcaataccacct

SEQ ID NO: 667511 - DNA, 101 bp, Homo sapiens
cagagctgtccagcagccacggcccggggttttcaaggcttaatcgaagagatggttctgccattactgcaatagccacatctgtgtgtcacggcccaccc

SEQ ID NO: 667512 - DNA, 98 bp, Homo sapiens
aagaacacacagcagttctcacaaaggtctgaaggggcgtctcgattacctgagctctctgaaggtgaagggccttgtgctgggtccaattcacaaga

SEQ ID NO: 667513 - DNA, 95 bp, Homo sapiens
ccgccggcggccaagcagccaaccatgctcaacttcggtgcctctctccagcagactgcgatgctgtgtgctgtggacccacctggggttcatgg

SEQ ID NO: 667514 - DNA, 90 bp, Homo sapiens
cccgactccaagcgcgaaaaccccggatggtgaggagcagattcttcgctgctgctgccttaccgccgagaaccaccacccgccaggcgt

SEQ ID NO: 667515 - DNA, 90 bp, Homo sapiens
cgcggggcggcggcgaaaggacggtcctggctataagtcaccatggcacagcaagctgccgataagtatctctatgtggataaaaacttc

SEQ ID NO: 667516 - DNA, 100 bp, Homo sapiens
attgggacaacattcagacccatttccagtcatgagttttggcttggtttgaagaaggtgaagaaacaattacagcctttgtagaaccttttgtaatttt

SEQ ID NO: 667517 - DNA, 101 bp, Homo sapiens
gtcatagagttctttcataaagctctcatgaggaccaaataagaagcctgcgggaggggtcatttttgaggctgaagtttctctttggctcatcagccacc

SEQ ID NO: 667518 - DNA, 88 bp, Homo sapiens
ggagcttcgccaaggctggcgcagtcgctctgcttatgataatgtcaacaaagttcgagtagctatcaagaaaatcagcccctttgag

SEQ ID NO: 667519 - DNA, 75 bp, Homo sapiens
aaaccccacaagcactgcatacgagcccataggcagcatgtcatccatggaagtgaacgtggacatgctggagca

SEQ ID NO: 667520 - DNA, 100 bp, Homo sapiens
ttaccagggaggagcagtgaaagagaagggaatgctaagaactgctgggaggatgacagtattgacctgatggacatggcttcggacatcctgcagccca

SEQ ID NO: 667521 - DNA, 50 bp, Homo sapiens
gagtcttcggagcgaccccggcaggcaagatgatgatgaatgaagtcctg

SEQ ID NO: 667522 - DNA, 90 bp, Homo sapiens
cttcttaatcccatatctggacatctggaacatccatgatggcaccgaaagcgaaggaagctcctgctcctcctaaagccgaagccaaag

SEQ ID NO: 667523 - DNA, 100 bp, Homo sapiens
cgaggaggcagccaagctcgtagcctgccactccgtgctaagagatgctaaaaaccttgtacctatggaccccaatggcctgtcagatccctacgtaaaa

SEQ ID NO: 667524 - DNA, 50 bp, Homo sapiens
agaatgaatgctgttctgaatttgctgtccccaatctcttcatgctggaa

SEQ ID NO: 667525 - DNA, 75 bp, Homo sapiens
tcggtgctgcagacggcgagacctcctgcacagaaagttcaggagccctggaaaggagaaggaataagacggcag

SEQ ID NO: 667526 - DNA, 100 bp, Homo sapiens
gtaaatcgtcccgataagaagaaaatacttttcttcaatgataagagctgtcagttttctgtggatgaaggaaactctgatgaggaagaaagtgcttcag

SEQ ID NO: 667527 - DNA, 82 bp, Homo sapiens
cggcgctggagagggggcgctgagctgttgggtgccctctggtggtcagaagatgctgtgctgtctcgttaggatgaatgga

SEQ ID NO: 667528 - DNA, 123 bp, Homo sapiens
aacgtcacacgacggccccgcccccttggccagccaactggacagcggagcacgatgattgatagctctggatggacaaggaaaaagaggaaagcatgaaagaaaccctgcggataagaaggt

SEQ ID NO: 667529 - DNA, 96 bp, Homo sapiens
gcccgagctgccgccgcagccacagccgagggcactatgcctgcagactgcagagccttaatagacaaactcaaagtttgtaatgatgagcaactt

SEQ ID NO: 667530 - DNA, 90 bp, Homo sapiens
acgggagccaacatggcagcggggttcgggcgatgctgcagggtatcgagaaccttccctgcgaacttcagaggaacttccagctgatgc

SEQ ID NO: 667531 - DNA, 75 bp, Homo sapiens
agaaactgacgaattctctaatgttagaagaggaagagatatcccttggccagaaggtgaagaaaagttatctga

SEQ ID NO: 667532 - DNA, 75 bp, Homo sapiens
tctcgacctgctaacagaactggaccttttcggagggaaaacccctgatcctaaaatgaatgctaggacttacat

SEQ ID NO: 667533 - DNA, 50 bp, Homo sapiens
cgactactgtcagcagctgtgccagcttcgagagctgtgcccaggagtga

SEQ ID NO: 667534 - DNA, 51 bp, Homo sapiens
ggagtccggacatctgaaacttggggtgagcccctccagactccgaatagg

SEQ ID NO: 667535 - DNA, 100 bp, Homo sapiens
tgggacttcagatacgctttaacttgaaatcaaggaatgtagaaatcagggaagatgagaatgtgcctactgctcctgatcctccaagtcaacatttacg

SEQ ID NO: 667536 - DNA, 49 bp, Homo sapiens
tggagtcgttggaagatctaggctacaccctctcggttttctctgctct

SEQ ID NO: 667537 - DNA, 75 bp, Homo sapiens
gtcgcggagccggagggcgggaggaacatgacatcgcggagaatgtggaggctgtggacccacgaggtcgaacat

SEQ ID NO: 667538 - DNA, 88 bp, Homo sapiens
ttctgttccgcacaggcctgctgaactgggtgctttatataggctatcagttgagggatttgcagttgataaaatggctggagaggtt

SEQ ID NO: 667539 - DNA, 82 bp, Homo sapiens
gcttttataaattatgaaaaaagttgagaaggtaaccatcatgagatccaaaatacggagctggcatatacttcaccaagaa

SEQ ID NO: 667540 - DNA, 90 bp, Homo sapiens
gtccagcagcagaaggccatccagccccaggctgcacagggcccggcagccgtccagcagaaggtgggtgaagagggacagttaccttcc

SEQ ID NO: 667541 - DNA, 100 bp, Homo sapiens
gagatctgcctggctgaatgtgacatctacagaaaaatggctacaaacttcctagcacatgagaagatctggttcgacaagttcaaatatgacgacgcag

SEQ ID NO: 667542 - DNA, 100 bp, Homo sapiens
ttttatccatggatgacttgcttgggccctcatctacccactgacagtggcttctaagtctaccacgacagcccggcacaatgcagccaacaagattctg

SEQ ID NO: 667543 - DNA, 51 bp, Homo sapiens
actctatcaaagccatcctgaaaaatcagcaacatgaagcgagcagcctcc

SEQ ID NO: 667544 - DNA, 100 bp, Homo sapiens
gttcttgtcgcctccgaccgggtggccgccagcaatattgtccagatgaaggacggagccatgtggctagaaatcctcctcacttcagtgctgggctttg

SEQ ID NO: 667545 - DNA, 100 bp, Homo sapiens
gcccatcagcgcggcgctggccgagagccgcggctccgtgtttctggaaagtgacagcaggtggcagggtaaagacttggaagagacgctggttcattct

SEQ ID NO: 667546 - DNA, 100 bp, Homo sapiens
gccgggctcctcgtgtgcgccttctggatcccggactcgcgcgggatgccccacgtcatccggatcggccatgctgctgtagaccctaacagcgtctctt

SEQ ID NO: 667547 - DNA, 83 bp, Homo sapiens
gaacgagacttttctcagatgttggatatttgcttggaaaaacgtgtgggtacgaccttggaggaagataccaactagagata

SEQ ID NO: 667548 - DNA, 97 bp, Homo sapiens
agcctcgaaattctgggccgaaatgatccgcctgcctcagcctccaaagtagctgagactacagggttcatagtggcgtcatgcacgcagactcctg

SEQ ID NO: 667549 - DNA, 75 bp, Homo sapiens
cagcatattacctatcaggagaggagggaattgacataggggatagcttaactattccagatgaattcacggaag

SEQ ID NO: 667550 - DNA, 90 bp, Homo sapiens
tcactcacccttccgaactcttaacatcaatgggcaaatccccacaggagaaggagttctccgtggaggagccagccaacgtcctttgac

SEQ ID NO: 667551 - DNA, 100 bp, Homo sapiens
gcgcgtggggaagcgggcgtgacctcttctgaaaaggcgagacgagttgtactgctgtcacaggaaatggacgctggattacaagcatggcagctcaggc

SEQ ID NO: 667552 - DNA, 51 bp, Homo sapiens
acagcagcagcagcgcatctccttcaggcacaattccaccttcctttgtgc

SEQ ID NO: 667553 - DNA, 98 bp, Homo sapiens
atcaaggctgcctataatcaagtaaaaacaatagctcaaggaaacctttccaacacagatgtccaagctgccaaaggctggctatgtggctaccccca

SEQ ID NO: 667554 - DNA, 96 bp, Homo sapiens
ccagcacagcaaacccgccgggatcaaagtgtaccagtcggcagcatggagagctgcttttgcacattttcctgaactctatgattttgccctctc

SEQ ID NO: 667555 - DNA, 51 bp, Homo sapiens
ctgcgtcatcaaagacaccaaactgctgacatgtagactgccaaagtgtat

SEQ ID NO: 667556 - DNA, 95 bp, Homo sapiens
gccaaacccaacatctgtgatgggaactttaacactctagctattcttcgtcgtgagatgtttgttttcaaggcacttaagtattcatcgaagag

SEQ ID NO: 667557 - DNA, 100 bp, Homo sapiens
gccccagcccaggaacgaatctctcaggctgcatcaggatgaatgatgacccaagtatggaagctttttaaacggtccaaggtgtagagccatacttcag

SEQ ID NO: 667558 - DNA, 87 bp, Homo sapiens
tgaagctgtagggccttgtggagcacctggtgaatggccggatggactttgccttcccgggcagcaccaactccctgcacaggatga

SEQ ID NO: 667559 - DNA, 75 bp, Homo sapiens
attgtacagtgacatcttctgggatttagtctgtttttcagaagaagtgaagtcaagatgaagaaccatttgctt

SEQ ID NO: 667560 - DNA, 95 bp, Homo sapiens
cagcaccttcagtaacacacctggaacaggaacccagcaacaattcttctgccaggacctcatagttgaccagacgatagagaaagtttctttct

SEQ ID NO: 667561 - DNA, 100 bp, Homo sapiens
cacgagctgtgtggtccatgatgagccgtgctatcaagactaatcaggaccttctcccagaaactccatggacgcacattttctacaatgatttttgggg

SEQ ID NO: 667562 - DNA, 100 bp, Homo sapiens
ctatggcaatggaggtgccatgcgggtggctggcatctccctggcctatagcagtgtccaggatgtgcagaagtgtgcccagctggctggaaacctggca

SEQ ID NO: 667563 - DNA, 88 bp, Homo sapiens
taatgcgactcaaagctgcacggcagtctgtttatgaggaaattcgaaatgagtcccatgactatcctcatagagtggccaagtttcc

SEQ ID NO: 667564 - DNA, 100 bp, Homo sapiens
tcctgttgtctcgtcgtcatcgtcatcttcctgtcagtctgcagctactcagcttatgtgtacagttgatgacctgaaggaaatggggataccccttgga

SEQ ID NO: 667565 - DNA, 100 bp, Homo sapiens
cggcattacctgtacccattcaccggcggctaccggcggcggcgcgcagcgtgtcaggcggagagacccgccgccaggtatggcgtgagtcccgagaaca

SEQ ID NO: 667566 - DNA, 82 bp, Homo sapiens
tgtggtgcgggacgcaccctggaccgccagcagcagtgagaagacaatgcagatcttcgtgaagactctgactggtaagacc

SEQ ID NO: 667567 - DNA, 50 bp, Homo sapiens
ctttggctggggacacccgaccaatggctgccatccggaagaaactggtg

SEQ ID NO: 667568 - DNA, 50 bp, Homo sapiens
cctgaggtccttcacagcctgcaggaattgaatgatctggcacgggaccc

SEQ ID NO: 667569 - DNA, 100 bp, Homo sapiens
ccattttctcaaacgagagtcagcctttaacggtcaatgtgcgaaatggaatgagcttgcatgactgccttatgaaagcactcaaggtgaggggcctgca

SEQ ID NO: 667570 - DNA, 87 bp, Homo sapiens
cagctcctgccccagcaggccgggatggcctccatccttgccaccgcagtgatcaacagagctctgtgtgtcgtctgagcagtcgcg

SEQ ID NO: 667571 - DNA, 75 bp, Homo sapiens
atgctgtggttggatatttagaggacattatcatgggttttggctacgggcctccacctccaccgccagatcagt

SEQ ID NO: 667572 - DNA, 80 bp, Homo sapiens
ctccaatgtgtcatctgctttcgaaaaatgtcacccttggacaagaaaactctctgcagaggaattagagcgaaaacggc

SEQ ID NO: 667573 - DNA, 98 bp, Homo sapiens
aggaggaacttcgaaccatggaccaggccctcaagtccctgatggcctcagaggaggagacacccaaggacaatgctgctactctacaaccatctgat

SEQ ID NO: 667574 - DNA, 82 bp, Homo sapiens
taggggagcgaaggctgaggtggcagcggcaggagagtccggccgcgacaggacgccgcggcgagtcctttgcacatgttgg

SEQ ID NO: 667575 - DNA, 100 bp, Homo sapiens
gtggctgcaaccttagcgacatcaggaagaacagggtcgaggatcgaggtggagttggcatgaacttaacagcagcagatactgtgatttttgttgacag

SEQ ID NO: 667576 - DNA, 75 bp, Homo sapiens
tgagaccaacctgacgggtaccttctacatgtgcaaagcagaaaactctctgcagaggaattagagcgaaaacgg

SEQ ID NO: 667577 - DNA, 131 bp, Homo sapiens
ctctgacaccagcacagcaaacccgccgggatcaaagtgtaccagtcggcagcatggtggatatcaaagtattgcagagtgccttagcagccatccgacatgcccgctggttcgaggaaaatgcttctcag

SEQ ID NO: 667578 - DNA, 49 bp, Homo sapiens
caaattcatcccagaaatctaagaggtccctccttgtggtccatttctg

SEQ ID NO: 667579 - DNA, 75 bp, Homo sapiens
cagaaatgttacacacggagtatcaaactctgctgccaagatcggtcgcttggttatcggacagaatggaatcct

SEQ ID NO: 667580 - DNA, 83 bp, Homo sapiens
cgctgctcaaggacacggtctacaccgacttcgacgccgccaccggcacggccaggccagcatggtggaccacttacttccag

SEQ ID NO: 667581 - DNA, 96 bp, Homo sapiens
gccaacattaacctgttctgtgtggtcagcaaattctggactcgaaaccgaccaggtgataaaatgcgagatcgatataatctaaaccttttacct

SEQ ID NO: 667582 - DNA, 100 bp, Homo sapiens
tacacctgttttgaccaacggaaaagagcaaatgcagcatttttgataggtgcctatgcaaattgtgagaagctggagaataattttgatgacatcaagc

SEQ ID NO: 667583 - DNA, 82 bp, Homo sapiens
gagcggcgggggaggcggcagcggagaggatttttagactctgaggagcagttggagctaatccacattatggaaatggaaa

SEQ ID NO: 667584 - DNA, 50 bp, Homo sapiens
gtcttggctcagacgctcatgacagggtcagatgtgttactgggctggag

SEQ ID NO: 667585 - DNA, 74 bp, Homo sapiens
tctgaacaaggccaacacctatgcagaaactgttttggctgggcctacttcacctataccttctctgggaaatg

SEQ ID NO: 667586 - DNA, 75 bp, Homo sapiens
ggcaggtcgcgggacatactgtggcgcgtgaaaattagttctgctgtgcttaaagctgcggcccatcactatgga

SEQ ID NO: 667587 - DNA, 51 bp, Homo sapiens
catcctgtttatgtccgacgtgcagctatctcagccagcttttatgcaaag

SEQ ID NO: 667588 - DNA, 90 bp, Homo sapiens
cagcgttaccatgcatcctgccgtcttcctatccttacccgacctcagatgctcccttctgctcctgtgcatctgggggaggtgttgtag

SEQ ID NO: 667589 - DNA, 98 bp, Homo sapiens
ggaaaaactgtatcacgttttcgtgtagctatagatttcactgcctcaaacggggaccccaggaacagctgttccttgcactacatccacccttacca

SEQ ID NO: 667590 - DNA, 75 bp, Homo sapiens
gttttgaaatcgacacacaaagaatagagttgagcctgtgggacacttcgggttgttcctcaaagtcattcaagc

SEQ ID NO: 667591 - DNA, 97 bp, Homo sapiens
ctttatgatgaatgcaataattctccattgagaagagagaagaacattctcgaatacctagaatggggtgcaacagctgcagcccggaaagaggtga

SEQ ID NO: 667592 - DNA, 100 bp, Homo sapiens
gaatctcgtgctcaccggtttctcccacatcgacctgcttgatccaaggattattcgaccatttatagcagaatgccgtcaaactattgccaaacttgat

SEQ ID NO: 667593 - DNA, 100 bp, Homo sapiens
cttgaagatagccatcagccgctacgtgactcttttctccagaatttgccatctgccttagtaagtcatgtactaaatcctcaacctggagagaagattc

SEQ ID NO: 667594 - DNA, 82 bp, Homo sapiens
gtgcagggctccgggcaccaggagcatatcaaacacctagctcccctgtttgacaaccctaagttggataaggagctgcggg

SEQ ID NO: 667595 - DNA, 88 bp, Homo sapiens
gcgaagacggtaacccgtgtgactttgactggaactggttagtactgcagaaaaaccacgacttaaagaaggccttatacatgaacaa

SEQ ID NO: 667596 - DNA, 51 bp, Homo sapiens
gctgatctgagtcttactgcttttacagatggagtctcgctctgttaccca

SEQ ID NO: 667597 - DNA, 50 bp, Homo sapiens
gtctgcgagccaggattcccgtgcctccggagccagcgtggtggccatag

SEQ ID NO: 667598 - DNA, 52 bp, Homo sapiens
aataagttcgccaaagcgacaggagcttagagacggggtttcaccacgttgg

SEQ ID NO: 667599 - DNA, 92 bp, Homo sapiens
ttagctgtgctcgcgctactctctctttctggcctggaggctatccagcatccgaattcgagatccaaaccaaggaggaaaggatatcacag

SEQ ID NO: 667600 - DNA, 100 bp, Homo sapiens
tttggatatcctgaaagatcaatggccaagaagcttgagagaagaaaaatttcagaaaaattgtctcaatttgactagaatatcaatgaaccaggaaaac

SEQ ID NO: 667601 - DNA, 96 bp, Homo sapiens
tggatacataacctgaggagccgggggaagctggccttgggaccatggcaaaagttataaccaccgtactgaagttccctgatgatcagactcaga

SEQ ID NO: 667602 - DNA, 100 bp, Homo sapiens
atgagggtgaggagaagtatgaggtggtgaaactcaagatccccatggacaacaaggagtaagcccagaggtctccaccccacgggaggaaggctgaggc

SEQ ID NO: 667603 - DNA, 87 bp, Homo sapiens
cgccgagctggacccggaccggttttgggacttctgcacggacctggccgtctccagtgccaacttcattcccacggtcactgccat

SEQ ID NO: 667604 - DNA, 90 bp, Homo sapiens
tggcaacttcaggatgacaaaaaccaaagtctcttctgctgggaaatcccagtacagatcgacactttcttcatgagcaacaaaccccaa

SEQ ID NO: 667605 - DNA, 100 bp, Homo sapiens
ccagtgttcaccatcctggccccggaaggaggcatacacggaatacctgaggagcatccactatatctcccaggtgttactagaagaagtggaaaccact

SEQ ID NO: 667606 - DNA, 82 bp, Homo sapiens
ccgctctctgaagaacctccgagtacgagacctgcctagagctggaacgttacctccagagcgagccctgctatgtttcagc

SEQ ID NO: 667607 - DNA, 98 bp, Homo sapiens
agcggacctccacctacaacggggacatcagggagaccaggacagaccaagagaataaggaccctagccagcgggttgtgctgcagctgaagggccac

SEQ ID NO: 667608 - DNA, 100 bp, Homo sapiens
caccattttctgccgctggacgcaaggttaaacccatccagagtaatggctgcggccttacccaggaccctgggggagttgcagctgtatagaatattac

SEQ ID NO: 667609 - DNA, 100 bp, Homo sapiens
tcctttccctttgagaccgtgaagagaaagatgcaggtgagcgaagcaggtgttcacagaccccatgttggtggaattcatggtcgaagtaatgatgggg

SEQ ID NO: 667610 - DNA, 82 bp, Homo sapiens
tttgtggaagatggcgcctgttgtgacagggtctgtctcgttggaaaatccagaacatacccttcctccagagaagcttccg

SEQ ID NO: 667611 - DNA, 98 bp, Homo sapiens
gagggtagacctgtgggcacggacgcacgccactttttctctgctgatccagaccaagccaccctggtagaacaagtaaaaagagtaaaagaaattga

SEQ ID NO: 667612 - DNA, 75 bp, Homo sapiens
acaaaggtctggacactgaaaccaccgtggaagtcgcctggtgtgaactgcaggcatttgggcagtccttctcca

SEQ ID NO: 667613 - DNA, 100 bp, Homo sapiens
cctctatctcgcttttcccctggccttctgtatcttcatggtgcggctcatcttcgagaggctggcgcccatgcggctctacacgctctccaagcgccac

SEQ ID NO: 667614 - DNA, 100 bp, Homo sapiens
ctgccccttctgggcaggcttctcgttgactcatgttgaccaagcaagcttccaggttgatgcctttggaacgtcattcattctcgatgtcgtgctaaat

SEQ ID NO: 667615 - DNA, 74 bp, Homo sapiens
cagtgtaataccctgaatcccttgaaggcacagttaaatgaaacactcacaaaacttagaactgaacaaaatga

SEQ ID NO: 667616 - DNA, 75 bp, Homo sapiens
cctgggatccagcccttctggtgtcacctcccagggtgactcaactccaggtcaaaatgcagatcttcgtgaaaa

SEQ ID NO: 667617 - DNA, 98 bp, Homo sapiens
gaacacacaagtgacagaagcctggaacaaagttgcccactcatttaactgcacgccaatagaagagattctagactttggctacccacagaattccg

SEQ ID NO: 667618 - DNA, 108 bp, Homo sapiens
ctccgagccccggccgcctgtccgtcgatgcaccgaaaagctagagaccgttggatggcagcttaaccttcagatggctcactctgctcaagcaaaactaaaatctcc

SEQ ID NO: 667619 - DNA, 112 bp, Homo sapiens
gtgcaatatacgctggttccagtttctgggtggcaagaacttgaaactgcatttcttgagcataaagaacagcttgtccagatgccctgtttaatgaactggtaaaatcccg

SEQ ID NO: 667620 - DNA, 82 bp, Homo sapiens
cttcggcagtccacccaccgccgccgcctcccaggcatgtcgggccccaggcctgtggtgctgagcgggccttcgggagctg

SEQ ID NO: 667621 - DNA, 85 bp, Homo sapiens
tgtggctgcaaagtgaaaagcttgaacagtgacaaagacctcgatgatgccttggataaactctctgacagtctaggacaaaggc

SEQ ID NO: 667622 - DNA, 100 bp, Homo sapiens
tccaggacgtcttcaacacggtgggcgccgacatcatccagctgcctcaaatcgtcgtagtgggaacgcagttttaacttctagtcatggcgaatgatcg

SEQ ID NO: 667623 - DNA, 82 bp, Homo sapiens
ataaaataccagtggaggccgacttcttgtatgcatactccacagcacctgatcctgataacttaagtgactctctcttttc

SEQ ID NO: 667624 - DNA, 101 bp, Homo sapiens
tctaattgaagccaacggagaactcaaggtcttcatagaccagaaccttagtcccgggaaagggcaaagtgcacctggagctgcggctgagcgaggtcatc

SEQ ID NO: 667625 - DNA, 100 bp, Homo sapiens
cgaagacgcggtgggccgcccctccgaaggtagaagatagcaccatgccgattcgtcgaactgtgaattctacccgggaaactcctcccaaaagcaagct

SEQ ID NO: 667626 - DNA, 50 bp, Homo sapiens
gcgacattgacaatgatggctttgaaggattctggactctacttataata

SEQ ID NO: 667627 - DNA, 82 bp, Homo sapiens
tcaggagccgccgccgccatatcaggaatgggccttgacgaaggagaagtcggtgaagcacatggatttgtgccttactgtg

SEQ ID NO: 667628 - DNA, 90 bp, Homo sapiens
tgggaatgattgttataaatgaaggctctcttgatatgctccaagtcatagaaatgggaaaagcaaatggtcattcctgttcagtttgac

SEQ ID NO: 667629 - DNA, 100 bp, Homo sapiens
gtgacatgtctgtgagctgcggaggctgcggcccccagcccgagaggaagtttggcgtggtggtggttggtgttggccgagccggctccgtgcggatgag

SEQ ID NO: 667630 - DNA, 73 bp, Homo sapiens
cgccatccgggagaagctggcctgggccaaggctgctctttggcgtaaattgcaatcgattagggatcgtttc

SEQ ID NO: 667631 - DNA, 98 bp, Homo sapiens
gctgaaggatgtgcgggaggtgaaggaggagaatacgctgaatgagaagcttttcttgctggcgtgcgacaagggctgcagtgcagtggcgtgatctc

SEQ ID NO: 667632 - DNA, 97 bp, Homo sapiens
aagtctataagctttgcaacagaattacagagtatgatgggacacttaacaaatccactagttcaagaagcttaaaatcccttgaccctgaaaacag

SEQ ID NO: 667633 - DNA, 98 bp, Homo sapiens
gacaatataaaagaacatattacatgacgaagatgggggttgacgtagtatctgaactcagattgatggacaacttttcttaattaagcaccttttga

SEQ ID NO: 667634 - DNA, 95 bp, Homo sapiens
gggggaggagattggtgcagagatggcattacgaacctttggccacttggatcagttccatgacaagaccccttatacgattatgtttggtccag

SEQ ID NO: 667635 - DNA, 100 bp, Homo sapiens
gggaactcctgctgcccactcaggggaaggtgtggctcattgactttaatccatttggtgaagtcacagattcactgctgttcacctgggaagaactgat

SEQ ID NO: 667636 - DNA, 100 bp, Homo sapiens
attaccagtcagaggcggaaggactcctggaatgccacaaatgcaaatacttgtgcactgggagagggtggatgcgtagactcgaccaaccaaagcctgg

SEQ ID NO: 667637 - DNA, 83 bp, Homo sapiens
tctctcatctcgctcggctgcgggaaatcgggctgaagcgactgagtccgcgatggaggttggtttcatcgactacattgtcc

SEQ ID NO: 667638 - DNA, 75 bp, Homo sapiens
cctgtgtcatgctgcttctggagacaggcatgaaggaggaggtgactggttcttcaggaactgtgaaggtggtgg

SEQ ID NO: 667639 - DNA, 100 bp, Homo sapiens
ccggaccggagactttggggcctaactagacaatggcgatgaccactcagaaggaggcctggtggagaaccacgtggacagcaccatgaacatgttgggc

SEQ ID NO: 667640 - DNA, 90 bp, Homo sapiens
tgcgagtgggacgcgcactggtcggtgccggctcaggagccgggcctggagcattggtaagcgtcacactgccaaagtgagagctgctgg

SEQ ID NO: 667641 - DNA, 51 bp, Homo sapiens
tttgttcctggggctgagtgccctcgtgtcttgggacaaggtgcgcattcc

SEQ ID NO: 667642 - DNA, 82 bp, Homo sapiens
cagtcatcatccattaccacaaaattaggttttgggatttgagattgacgcggtgaactctgtccagttttcaaaccacaca

SEQ ID NO: 667643 - DNA, 75 bp, Homo sapiens
aattttagggtcctttatatagaagggagagaaacctgtaggaagtgtcagggactctggaaagaacataatggc

SEQ ID NO: 667644 - DNA, 74 bp, Homo sapiens
ggagttcacgactctgagtgctggtcaaaatgcagatcttcgtgaaaacccttaccggcaagaccatcaccctt

SEQ ID NO: 667645 - DNA, 50 bp, Homo sapiens
gtgaacgacgcccaggaatacagacggacccactccggatacttctccag

SEQ ID NO: 667646 - DNA, 100 bp, Homo sapiens
tctctccagatggatccctctgtgcttctggaggcaaggcatcatgacggtgatgtcagctctgtcggtggccccctccaaggcccgcgagtactccaag

SEQ ID NO: 667647 - DNA, 75 bp, Homo sapiens
tcacacgccgccatccgggaggcccagggaaggcctaagatctggcaaacttggtgaacagtgtgaagcagttgt

SEQ ID NO: 667648 - DNA, 82 bp, Homo sapiens
aaaaaaaaaagtatcaggttccgtttgccgccgagaggaaagcaatctcccgggcaggcctccagcatctggctcctgcaca

SEQ ID NO: 667649 - DNA, 100 bp, Homo sapiens
ctgaaatctcttttaggggattctgcaccaacactgcacttaaataagggcacacctagtcagtttttggctttcacccccaaccagtgaccaaagactt

SEQ ID NO: 667650 - DNA, 100 bp, Homo sapiens
gaaggaggccttccccgggcggagagcccctctccaggaaagctaaaaccatgggggcaatctaaagaaaataattatctaaatcaacatgtcaacagaa

SEQ ID NO: 667651 - DNA, 75 bp, Homo sapiens
gcagaaaaagaggctcttcctcctcctcccgcgacgaagaaagccagcttccctctacaagtgctctgggaaaag

SEQ ID NO: 667652 - DNA, 98 bp, Homo sapiens
caagaataattccttccatatcaacatgagcaaaaagaagctctgtgccctctatgggaagtggactgaatgtttatacagtgttgaccctgccacgt

SEQ ID NO: 667653 - DNA, 134 bp, Homo sapiens
ggggcctcgggcgccccgcagccccccaacatcctgctcctgctcatggacgacgtgatgtgtccaatctagatcccaacttctcatttgaaggcaccaaactggatgtggggaacattgtgctggcattatac

SEQ ID NO: 667654 - DNA, 112 bp, Homo sapiens
ggctccctcctcccagggccaggcgccgctcagaacgctcagtgtggaggctgctggccctgccatctgtaagaagatgtcatacggatccatcgcccgtggaggtggcctg

SEQ ID NO: 667655 - DNA, 75 bp, Homo sapiens
aggtgcaagatactatataaatatcccttttactattcagcgactatgtgaattgttaacagatccaaggagaaa

SEQ ID NO: 667656 - DNA, 82 bp, Homo sapiens
aaaaaatgaccttcggtatattgaaatgcaggcaaatcctgatcctaactgttgtcttggagtatttgggctgagcttgtac

SEQ ID NO: 667657 - DNA, 75 bp, Homo sapiens
cgcaaccccagatccatttacactttacacagcagccgctcttctaaaacattcaaaccaaagaagaatatccct

SEQ ID NO: 667658 - DNA, 97 bp, Homo sapiens
ccagggcccggagacagcaacatcttctggggcctgcagaatcctcactatggatgggctcattgaggacattaagcatcggcggtattatgagaag

SEQ ID NO: 667659 - DNA, 100 bp, Homo sapiens
tcctggagatctacaggatttatcaaatcgagtcactgtcaagttgaaggtttagaacagatgtggaaaaatgtttacttcagagaaaggggttgtggag

SEQ ID NO: 667660 - DNA, 75 bp, Homo sapiens
ttccttcatctaccatggctcagccgggaactctgaacctcaataacgagggaatagtgcctaccgatcagctgc

SEQ ID NO: 667661 - DNA, 71 bp, Homo sapiens
ctttaaagaatacacttcaagtgtgatgaatgcagactctgctaccattttggctgtttggatcctccttt

SEQ ID NO: 667662 - DNA, 100 bp, Homo sapiens
ccagaggtggaggggaggattttgaggacacttgtggagagctcgaattccagaatgatgaaattgtgctgttcacggaagaccaggatgtagatgaggg

SEQ ID NO: 667663 - DNA, 118 bp, Homo sapiens
aagaagaggtgtagagtttgcatatatcaactgtggccttaatgagcatgttgacagcatcgatgctagacagacatggtggtatctccatcaaggcttctgcaaatatggacctcat

SEQ ID NO: 667664 - DNA, 74 bp, Homo sapiens
gttcaaggaggccttccagctgtttgaccgaacagagcttgttgacatttgaagaagtggccatgtatttttcc

SEQ ID NO: 667665 - DNA, 51 bp, Homo sapiens
agattgctgaaaagatcaatgctggtttattcagtcaccatgaagctgctg

SEQ ID NO: 667666 - DNA, 123 bp, Homo sapiens
gcggatggccccaggtgtaagcgcagaaagcaggcgaacccgcggcgcaataacgtaagactttgaccccgacgcaggcttcagtgattgccgcggatcagaagcctgagcactttggctcga

SEQ ID NO: 667667 - DNA, 83 bp, Homo sapiens
gccatgccggcccggcggctgctgctgctgctgacgctgctgctgcccggcctcggggtaattttaaccaatcagatgacaac

SEQ ID NO: 667668 - DNA, 100 bp, Homo sapiens
ccaaatgtctgtgtagaaatggggttgcccagtgcttcacagctcagtgtcagcctctattttgtaaccagatcatatctgaagatattagtgagctaca

SEQ ID NO: 667669 - DNA, 100 bp, Homo sapiens
cctgaaggaggccggtgactttcacttccagccagctgtgaagaagggtatttgaagtataccatacaactgttttgaaaatccagcgtggacaatggct

SEQ ID NO: 667670 - DNA, 51 bp, Homo sapiens
ctggattgtagccataagtggacttgcaacctcgagtctgtctgtagagat

SEQ ID NO: 667671 - DNA, 75 bp, Homo sapiens
gaagagttgctgaaacgtgctggtgagaggacacgaagatcgattgagaagttattagaatgggaaaacaatagg

SEQ ID NO: 667672 - DNA, 76 bp, Homo sapiens
gaggacttctggcctttggcacgtcctgctccgtggtgctctatgaccccctgctacttttccaggtatgtgggag

SEQ ID NO: 667673 - DNA, 100 bp, Homo sapiens
ctggatggtctttagattgatacaccaatcctctgaaattgcatgcaaaaattgaggagaaggaggaagtgaccatggacacaagtgaaaacagacctga

SEQ ID NO: 667674 - DNA, 98 bp, Homo sapiens
gatcacatcagggactccacggccagagccctggatgtcatttggaaaaacactagagacagacggctggcaggtttggaataaattgcctcatccaa

SEQ ID NO: 667675 - DNA, 101 bp, Homo sapiens
tcccctgtgtttctccattctgttggttttatgcatctttatccaatcaagtgcccttggacaaagcctgaaaccagttaccttatcccatatcacacaac

SEQ ID NO: 667676 - DNA, 100 bp, Homo sapiens
gcactggtgggagtatgttgacgccactgtgaccttggaacttttagatgattcccttcagggaaccagggtggagctggccccagtcagggcagtggag

SEQ ID NO: 667677 - DNA, 82 bp, Homo sapiens
cagcaacaacacggccctggtcgtcgtcgccgctgcggaccaagaatcgccttcagccctgtctggtgcatccttggcagaa

SEQ ID NO: 667678 - DNA, 75 bp, Homo sapiens
cctcgggtctcgggggccgctctgggatcccggccaccagcaattgtccggaagaggatcacctagcccgggtag

SEQ ID NO: 667679 - DNA, 97 bp, Homo sapiens
cacttgtgtgcggaactcctcggaaccatggaaaatgttctgctgctgccctggatgttcttgcaaatgtgtatcgtgatgaactgctgccacatat

SEQ ID NO: 667680 - DNA, 100 bp, Homo sapiens
gaaaacgaagatgacgtgtatggaaactcatcaggacggaagcacaggggccactcagagtcgcccgagaaagacactatggacagcgtgaagcagagcg

SEQ ID NO: 667681 - DNA, 97 bp, Homo sapiens
gagaagggcgactactacgaggcgcaccagatgtaccggaccctgttcttcaggtgaccctggcaaagatgagagtgcacatttcgtcctgcctgaa

SEQ ID NO: 667682 - DNA, 100 bp, Homo sapiens
tttgccctcagcatctcccttcatgtctgggtcatggttttgcagacattgggtacagaaacttaccggcctagttctgcctcacagtgtgtggctggta

SEQ ID NO: 667683 - DNA, 100 bp, Homo sapiens
ccatgagaagtataatgatttatataagttccagcaggtgtctgtcatgtgtgcaatgagtgaagaatatgctgtagccataaaaccctgcaaataaacg

SEQ ID NO: 667684 - DNA, 100 bp, Homo sapiens
ttctactctgccagggaagaaattgtgataggaactgaggggaggacgaggaagaaacgaacgtgatagttctcagctacccccagtactgccggtaccg

SEQ ID NO: 667685 - DNA, 73 bp, Homo sapiens
ccccatatatgattttctttaaggatggtttagaaatggaaaaatgtaagttggacggactagcgaagatccg

SEQ ID NO: 667686 - DNA, 110 bp, Homo sapiens
ccagcggtactaccaccgaggccacgtggacccggccaacgacacatttgacattgatccgatggtggttactggtacttgatgaagaagcagaagtttttatagtcaaa

SEQ ID NO: 667687 - DNA, 98 bp, Homo sapiens
accatcaaaatggaatgtaaccctagccaggtgaatggctcaagtgaacacctacctcttcatgatgcaagcccaaggcattctgatccgggacaacg

SEQ ID NO: 667688 - DNA, 75 bp, Homo sapiens
gtaaatgggttaccagaggaagagctaagaacacagatatgtagaactcttcttgaattctacagcaggagcaag

SEQ ID NO: 667689 - DNA, 101 bp, Homo sapiens
gaagcaagacccagcggctctccaaggtttacagccccggcctgccgcctgccccggcccagccctcaagcatcccaccctgcgcactggtcagccagccc

SEQ ID NO: 667690 - DNA, 90 bp, Homo sapiens
cgaagttggaagtgtctcttagcagcgcgcggagaagaacggggagccagccactgaggcggctcccagctgcgttggcgacatggccga

SEQ ID NO: 667691 - DNA, 100 bp, Homo sapiens
ccggcccggagcccccagcgcagcggccgcgaccccatatcatgtgaacctcctcctggctggctatgatgagcatgaagggccagcgctgtattacatg

SEQ ID NO: 667692 - DNA, 51 bp, Homo sapiens
gcggctctccagcaagaaggtggcaaggccacctgatctgggaggaccacc

SEQ ID NO: 667693 - DNA, 82 bp, Homo sapiens
cttggactgagtcctgcaggacacagtcatggctccgatcttcatcttgaagaagagtgacattgggtgactgctgcttgga

SEQ ID NO: 667694 - DNA, 100 bp, Homo sapiens
gtaactggtggagaccaaattttgaacctcctcagattattgctcccccagagcggaagtactcagtctggatcgggggctctatcctggcctctctctc

SEQ ID NO: 667695 - DNA, 75 bp, Homo sapiens
agaaggaggtcgacgaggacacgacagtcacaatcccctcggccgtgtcaagtctggcaccatctttgacaactt

SEQ ID NO: 667696 - DNA, 142 bp, Homo sapiens
cctactttgcttgaggtgctactgaattttctgaagactgagcagaaccagggtacacgcagagagctggttgtcttcttgcctgccctgtgtcgtaaaatgggggtcccttactgcattatcaagggaaaggcaagactgg

SEQ ID NO: 667697 - DNA, 137 bp, Homo sapiens
ggccccgtgtcctgcaggtattgggagatccacagctaagacaccgggacctcctggaagccaaaaatgcttggttctacagccattgggatccagacatcagagggtgtgtgcctagctgtggagaagagaattac

SEQ ID NO: 667698 - DNA, 96 bp, Homo sapiens
tggggagggcccgactgctccagcggaagtgggaaaactcttgcctttgccatcccaatgattcatgcggtgttgcagtggcagaagaggaatgct

SEQ ID NO: 667699 - DNA, 90 bp, Homo sapiens
taccaagatggagagcatcgctgcagctactcagtgggtgaaggagcatgtgggggacagagaattctgcttggtcagaatcgtgatggc

SEQ ID NO: 667700 - DNA, 75 bp, Homo sapiens
caagattataatcaggaagtggatgcctccatttttaaggtcatgcgcatcgtggataatgttcgtcctgatcga

SEQ ID NO: 667701 - DNA, 100 bp, Homo sapiens
ggaaggggtcccgaagccccctgcaggaactctacaacccaatccaggcttctggctgtgatgggtcggagattcctgatgaagtgaagctgattgggtt

SEQ ID NO: 667702 - DNA, 100 bp, Homo sapiens
tttatcacagaggaataacgagggagaggagaaaggtgtcatagagacgtcagatcgactggaccgtgaatcgacctcccattattggctaacagtcttt

SEQ ID NO: 667703 - DNA, 83 bp, Homo sapiens
ggcaggcccgacccgcctccccggcgccgccgtggctcgacggagaccagctaggtgctctggcgctgcttcagcaccgtggt

SEQ ID NO: 667704 - DNA, 75 bp, Homo sapiens
tggtcttcaatgccagaatggtgtttgaaaagattcatagtgaccacttagtagctagtgagaaacagcatatgc

SEQ ID NO: 667705 - DNA, 75 bp, Homo sapiens
aacagatctttaccagatgttaggttagaaggagtcaagaattgaaggttggctttcagtaccaaatagaggaaa

SEQ ID NO: 667706 - DNA, 87 bp, Homo sapiens
gctgtggaagggctccttcaagcccagcgagcatgtcaccaggagactaaagtccatcaaaaacatccagaaaattaccaagtctat

SEQ ID NO: 667707 - DNA, 100 bp, Homo sapiens
accatcctgggtgctggccctgtgctggagctaaacaaccctgagatggtggagggccttgtccttatcaacgtgaacccttgtgcggaaggctggatgg

SEQ ID NO: 667708 - DNA, 105 bp, Homo sapiens
cgcaagggcggcggggagcacacggagcactgcaggcgccgggttttaaaatcaaagatgggaaaatcggagaaaattgcccttccccatggccagcttgttcat

SEQ ID NO: 667709 - DNA, 98 bp, Homo sapiens
cgaagacgccgaggaggcagagcaccgcggcgccgagcgcagacccgagagctactacccactctacccgccccaagaagacatggccattgactatg

SEQ ID NO: 667710 - DNA, 90 bp, Homo sapiens
gtgggaccgaggtggacatggatccgcagggttgaagctttgagagaagcagcaactgctgttgagcaagagaaagaaatccttctggaa

SEQ ID NO: 667711 - DNA, 75 bp, Homo sapiens
ctcacggcacctcccaccatgaagcccatgaaacccctgaaggccaccgccaccacctcccagcccgtgctcacc

SEQ ID NO: 667712 - DNA, 74 bp, Homo sapiens
ccgtcagagctgaggtacttcgtgaaggagcgctgtgtggccgccctggctcgtgtcgagcgcaccgacttcct

SEQ ID NO: 667713 - DNA, 75 bp, Homo sapiens
gagatgactttgagatcttgaaggtgatcggccgaggagcctttggggagggtatgcagaagttggctagtcaat

SEQ ID NO: 667714 - DNA, 100 bp, Homo sapiens
tgctgttgcggctaggggaaccgtcgtggggaaggatggtgtgcgaaaaatgaccgcctctttttcgtcatggaatatgtaaatggtggagacctcatgt

SEQ ID NO: 667715 - DNA, 82 bp, Homo sapiens
tggccgcgcctggcctggccgggaccatggagcaggccgggctctcgccatgggtcactgtcgcctctgccacgggaagttt

SEQ ID NO: 667716 - DNA, 74 bp, Homo sapiens
gcggtgtgggcgcgtcaggccgcgacgagggcgctgaggcatgcggctaccaagggcatccttgtggctatggt

SEQ ID NO: 667717 - DNA, 75 bp, Homo sapiens
cagccgcgctgccgagaagctttacctcgctgaccctatgaaggggcaagctctgtgtgattgattggaagacat

SEQ ID NO: 667718 - DNA, 90 bp, Homo sapiens
ctggggaagactggatttcagcttaggagaaggatggaagatgctaattctgaaaagagtataaatgaagaaaatggagaagtatcagaa

SEQ ID NO: 667719 - DNA, 74 bp, Homo sapiens
gctacctctttctgggtgactatgtggacagaggctatttcagtatagagagcctggcccaactagagaatctg

SEQ ID NO: 667720 - DNA, 90 bp, Homo sapiens
caaaacgggcaataagactctttaaagaaggcaaggagagaatgtatgaagaacagtcacaggacagttatagaaagttgatatctctga

SEQ ID NO: 667721 - DNA, 100 bp, Homo sapiens
tattagcacttactgggattggtcagatagcgagtttgaatggcagacacttagcctgtgatgaggagagagtggaagaagcaaaactgctggtgtccca

SEQ ID NO: 667722 - DNA, 96 bp, Homo sapiens
ctacaatgaatgggatattcaggttcatgttgcaaatcacatgattgagttggccaccctgttcaagggcttaggagaaagtcaacacacttcgca

SEQ ID NO: 667723 - DNA, 100 bp, Homo sapiens
ttgaggactctgtagttgaagattataattcagtggataaaactaccacaggttaaacccatccagagtaatggctgcggccttacccaggaccctgggg

SEQ ID NO: 667724 - DNA, 108 bp, Homo sapiens
cgggatcgtgaccgagaccgtgaccgagagcgtgaccgagagcgcgaatatcgtcatcgttagaaggtacttaagagattatggcatcagaaacccacaatgttaaaa

SEQ ID NO: 667725 - DNA, 75 bp, Homo sapiens
gcgttctgtcatctcagcaaagaatggaagagaatggagactacacatatgtggaaagagtgaagatacccttgg

SEQ ID NO: 667726 - DNA, 100 bp, Homo sapiens
gaggaaatgagagaaatgcttacacacagaaatgaatggggaatgcatcagcaacccccacacccccctccagatcagccatggatgccaccaacaccag

SEQ ID NO: 667727 - DNA, 82 bp, Homo sapiens
aagccgctcagcaagctccacatccccgtgctgcatcttcctcccgtgaggctggccgagctccacgctgatctgaagatac

SEQ ID NO: 667728 - DNA, 90 bp, Homo sapiens
gcagcgaggacggcgaggcgctcaacggcgagccagagctggacctcaccagcaagattcctcgaggtctgaacaagaaccactgacgca

SEQ ID NO: 667729 - DNA, 100 bp, Homo sapiens
gaggaggagaggcccgcgcgcccactggagccgagcggtgaggaataaccggaccgacccccgacggtgcgtgggcattcagtacctgactgcattggag

SEQ ID NO: 667730 - DNA, 74 bp, Homo sapiens
tacagaatgggccaagctccactgttcagatgcaaaggtcctgtccctgctatcagtggggcactgaagaaagc

SEQ ID NO: 667731 - DNA, 100 bp, Homo sapiens
gccatcatgagggaaatcgtgcacttgcaggccgggcagtgcggcaaccaaatcggcgccaagatgcagatgttggacaaatttcccatggaaggaggac

SEQ ID NO: 667732 - DNA, 48 bp, Homo sapiens
tctggaggctgcatctgaaaagattgaggagagcaccacagtggtcac

SEQ ID NO: 667733 - DNA, 100 bp, Homo sapiens
cctacgccggggcggcggtggacgagctgggcaaagtgctgacgcccacccaggtgttcaagcagccctggccagggatcatgcgcacagtctatgggaa

SEQ ID NO: 667734 - DNA, 99 bp, Homo sapiens
tggacggtcagaaagttgaagttccacagccactgagttggttccagcaacagatagaaatgctttaagttcactctggggaaagctggcctctgaaat

SEQ ID NO: 667735 - DNA, 50 bp, Homo sapiens
gtctagcccagtggaccttctgaagccacagttgaggctattgaggctga

SEQ ID NO: 667736 - DNA, 82 bp, Homo sapiens
gccctggtcttgctcggccgatgaagtgcagaggtttttttctgcaaccatgtccaagggacctgcagttggtattgatctt

SEQ ID NO: 667737 - DNA, 98 bp, Homo sapiens
cgtgcgcggggtgatcaccatgaacgaggagtacgagacgaggttcctgtgcaactcttcacaggtgccctggctccatgcagtttatgcagcactgg

SEQ ID NO: 667738 - DNA, 82 bp, Homo sapiens
cgaaacagctcatcactgatatttctggctcaggaaataattgtgtgcaacttgctttggtgtttgctgttttattgccaca

SEQ ID NO: 667739 - DNA, 90 bp, Homo sapiens
ccccaatgctgaccaaggaggagcctgttccagaactgctggaagctgagagatcctacagtaaggaattgtttgaagaagttatttcaa

SEQ ID NO: 667740 - DNA, 100 bp, Homo sapiens
ccaagccgactgatgactggagaggatggctactatttcaccaatctgggcgccctgcgtccggcagaggaggcgagcatcccgctcaggtgatgaggaa

SEQ ID NO: 667741 - DNA, 96 bp, Homo sapiens
cccgggagcgcgatgtggagcgcttctttaagggctacgggaagatcctggaggtggatctgaagaacggatcaatgagctgagcaatgttcctgt

SEQ ID NO: 667742 - DNA, 74 bp, Homo sapiens
ttcccaccaggtccgggtgaaagcctactaccgcggatcaggcctttgtgacactaaccacaaacgatgcctac

SEQ ID NO: 667743 - DNA, 101 bp, Homo sapiens
tcccctgaagaggcagtgaaatggggtgaatcatttgacaaactgctttcccatagaggacatggatttgattgacatactttggaggcaagatatagatc

SEQ ID NO: 667744 - DNA, 51 bp, Homo sapiens
tgatgttagaagccatccagggagcccgacgactgggtttggattcagaag

SEQ ID NO: 667745 - DNA, 149 bp, Homo sapiens
tgggaaaggacaaaaaaattcctggaaaaagaagtccaagaagcaaaaaagggactgctaagaagataccaccagacacgatgaggcgagtggtacgacagagcaagtttcggcatgtatttgggcaagcggtgaaaaatgaccagtgc

SEQ ID NO: 667746 - DNA, 76 bp, Homo sapiens
gcttgctgcaggctctggggagtcgccatgggaaatgatcttcattggttagcatgtgccttatatgtggcttgca

SEQ ID NO: 667747 - DNA, 90 bp, Homo sapiens
gtttcggttgcacgtcacagctctggattaccttgcaccttatgccaagtaatgttgcaggtcagtggaatccagtttttatgcagcctc

SEQ ID NO: 667748 - DNA, 100 bp, Homo sapiens
ctgcattccatctctatgagccaccattacttcgggatgacttcagacaaaacccttcggatgtcatggttgcagtaggagagcctgcagtaatggaatg

SEQ ID NO: 667749 - DNA, 88 bp, Homo sapiens
accgccaagtcggccacctggacggaacactacatattgcagcaaagttgcatttcccttggaagttgttcaaaaagacagctgtttc

SEQ ID NO: 667750 - DNA, 98 bp, Homo sapiens
ggaagcgccgcgatgttcgccccccggctgctggatttccagaagacgaaatacgcgagctcaatgaacagaacctcatccaggaagtccccaacatc

SEQ ID NO: 667751 - DNA, 90 bp, Homo sapiens
gtccgcggcgcgcccggcccggatggcccactgcgtgaccttggttcagctgtccatttcctgtgaccatctcattgacaaggacatcgg

SEQ ID NO: 667752 - DNA, 100 bp, Homo sapiens
ccgttactgccctgtggggcaaggtgaacgtggatgaagttggtggtgggccccctccccttggaggcccttcagtatgagctctgcgggctcctcccag

SEQ ID NO: 667753 - DNA, 100 bp, Homo sapiens
tttaattttagggtcctttatatagaagggagagtagacccgaccgcatgtctgtcatggacctcgccaatacttgctccagctttcagtcggacctgga

SEQ ID NO: 667754 - DNA, 97 bp, Homo sapiens
ctataatattttttgatgaaatagatggattagctccagttcgctctagcagacaagatcagatccacaggcagacctgttatcctaaactaggtga

SEQ ID NO: 667755 - DNA, 75 bp, Homo sapiens
tcatctaaattacatctgcaaaaagaccctttttccaactttcaccaacaatcaccagtggtttacacaacattg

SEQ ID NO: 667756 - DNA, 51 bp, Homo sapiens
accctaccgaattacaagatcaggatgggccttgacggcatgaaaatgcag

SEQ ID NO: 667757 - DNA, 50 bp, Homo sapiens
ctaggagagcatgagtttgtagaaggacaaaagcatgtcttcccttcctg

SEQ ID NO: 667758 - DNA, 75 bp, Homo sapiens
ccggcgcgaagaggctggactcggattcgttgcctgagtaagagatgctaaaaaccttgtacctatggaccccaa

SEQ ID NO: 667759 - DNA, 90 bp, Homo sapiens
ctggatgttggtagaaaaagcaagagtttgttatatagcacaattcacagaagctgtgagtccttcagtgctacccccttcagctttgcc

SEQ ID NO: 667760 - DNA, 100 bp, Homo sapiens
gaaggtgctcattcttcaaagaaataaactcagtgacactcccaagggtagtttctctccctggctcatcttgcatgcttgctctgatggaaaaggtcac

SEQ ID NO: 667761 - DNA, 75 bp, Homo sapiens
ctccttttccctctccctttccctaagtttgacttgctggaaatggaccggctggagaggccactggttgacctg

SEQ ID NO: 667762 - DNA, 104 bp, Homo sapiens
cttgtcctggctcttgccctcatcctggttctggaatcctcagttcaaggggcaacaccctccactaaagagtcaagccagccggacgcattctcatctggtgg

SEQ ID NO: 667763 - DNA, 50 bp, Homo sapiens
caacgtgcgcgccgctcagaagagagttatgatgacttgtaccattggtc

SEQ ID NO: 667764 - DNA, 101 bp, Homo sapiens
ctacagattttggagaaaactcccaacaggctcaaacgcatttggaattggagggatggatagaatgacagaagatgctcttcgcttgaatctgttgaagc

SEQ ID NO: 667765 - DNA, 90 bp, Homo sapiens
gggacctccaaagactaaactgacaagccttcaaggagcccagggagttagcacgacatcagtatgagctggtcaccttccctgacaacg

SEQ ID NO: 667766 - DNA, 94 bp, Homo sapiens
atctgcagtacaggatatgaagaaattgagggttcttgccatgagtgttgcggagataggaacatgggagagaaacaatctgggtaacatgaaa

SEQ ID NO: 667767 - DNA, 75 bp, Homo sapiens
atcggcagtttgttcacgaccctcaacttggctactccctgccttgtgtgggaggaattaattccaatgagtgtg

SEQ ID NO: 667768 - DNA, 95 bp, Homo sapiens
agtgtgaaaaactggaaatcccaaagcctcgaatggctgccactcagaaacttgttaaagacattattgtgtcttctgagaaaccatcaggcttg

SEQ ID NO: 667769 - DNA, 100 bp, Homo sapiens
cgcagatctccgggccacctgccttgaaggccaggagtggtggctcacacctgtaatcccagctctgggaggccaaggccagtggattgcttgagcccag

SEQ ID NO: 667770 - DNA, 80 bp, Homo sapiens
ctttcgcttggcgctgggcagcttcgtggaggagtacaacaacaaggtgtccctggccagtgtccttccacctgtccaca

SEQ ID NO: 667771 - DNA, 100 bp, Homo sapiens
gattatttgcaacagctcacgggagcaagaacgattcgccatgaagtcagcgtaaataatgtaacacataaactgtgcagtaaccattgctttaataagt

SEQ ID NO: 667772 - DNA, 100 bp, Homo sapiens
ggcgcccagcaatcacagaagccgacaaggcgttcaagcgaaaacatgaccgctgagcccatgagggggccgaaggccagagaccaggatttggctacgg

SEQ ID NO: 667773 - DNA, 100 bp, Homo sapiens
aagattacaccaagatctgtgctgaccacaggaattggatctactagtgcaggtcctggcattgatgtgcctgctccagacatgagcacaggtgagcggg

SEQ ID NO: 667774 - DNA, 50 bp, Homo sapiens
ggccggtgcaactattcgcagtccgagcgcatttaaatcaaacggtattg

SEQ ID NO: 667775 - DNA, 51 bp, Homo sapiens
ggcaaatactcctgtaaatttgagtgtgacccctgaatggttggacagtga

SEQ ID NO: 667776 - DNA, 98 bp, Homo sapiens
gcaacctctgtctcccaggttcagatcttcttcagcagtatcgttctgctgtgtgcaaactagacagtgtgaataaggatcttaacagtcaattagag

SEQ ID NO: 667777 - DNA, 75 bp, Homo sapiens
gaaaaatctccagctcctcaaaagatgtccctggtagatttgggaaagaagcttttagaagcggcacgagcaggt

SEQ ID NO: 667778 - DNA, 100 bp, Homo sapiens
agaggtcgtggaggtggccgtggaggcagaggtggcatggggatcacagaagaactgcagcttcctggggagcagtttcacctccacaggcatcgcttca

SEQ ID NO: 667779 - DNA, 135 bp, Homo sapiens
agccgacaaggaggtgaagcggccccagcactcccagctgcgcagggcctgccaggtggcgctcggatagtggccaaagcctccaagaacctcatgtccacgcaaagcttggggattgtatttggacctaccctt

SEQ ID NO: 667780 - DNA, 100 bp, Homo sapiens
tgaatatccagtttgagccatcggatctaagatccaaaagccacagacccctttgcttctgtttttgggaatgaatcatttggaggtggatttgctgact

SEQ ID NO: 667781 - DNA, 100 bp, Homo sapiens
gttaagaatgtgactttggagccagcctgctaggggctgaattctgactcagccatttactaactgtgtgaccttagggcgttttttctatcagaggctg

SEQ ID NO: 667782 - DNA, 50 bp, Homo sapiens
ctgtttttgccaccacactccagcctggctgatgcttttttcaaagccgc

SEQ ID NO: 667783 - DNA, 75 bp, Homo sapiens
tttgaactttggatgctttattgtacaaagagagaagaggtactcccttatagggactcgtaaagacatagagca

SEQ ID NO: 667784 - DNA, 82 bp, Homo sapiens
gtcctggctcttgccctcatcctggttctggaatcctcagttcaagaccaaagagaaccctgtacagtaagaaatatggtgt

SEQ ID NO: 667785 - DNA, 100 bp, Homo sapiens
caaggcaattgatcccaagttgtcgacgaccgacagggtggtgaaaggctggagcagccctacttcagcgccaacgcccagttcttccaggcgctgagcc

SEQ ID NO: 667786 - DNA, 73 bp, Homo sapiens
cagagccgctgcagccatggccccaatcaaggtacggctcctcactggcattggaaggtacaacgagatgaca

SEQ ID NO: 667787 - DNA, 100 bp, Homo sapiens
ttggtgtcgtttttccttgagctgaacgtcttgcaacagtggccgcacgcataggtggcccgaggcaccacaacccggaggagcaggttgaaaagatccg

SEQ ID NO: 667788 - DNA, 75 bp, Homo sapiens
acagttgttgcagcaagcgattcaggattttttatcaagcagaaatgcatcgaacaacgagaatcaagatcactg

SEQ ID NO: 667789 - DNA, 75 bp, Homo sapiens
cagattcgcagtggtcgcttcttctccttgggaaacactactatgaagtatcctgtcatgaccaagggttatgca

SEQ ID NO: 667790 - DNA, 90 bp, Homo sapiens
gattcgcgctgctgggcacccacggagcctccggggctgatccagacatttaatgtggatgcaccatgccagaccgtggaagatttaacg

SEQ ID NO: 667791 - DNA, 96 bp, Homo sapiens
taaagagccatctgtggtgccaattgaagaggtgccccgcaatgacacatgtccggagctgcctgagatccccaatggctggaagagcccatcgca

SEQ ID NO: 667792 - DNA, 100 bp, Homo sapiens
gaacccggagctgggaatcgggagccgggcgcggggagctgcgcgaagccggggcggagcacgcgagctatggttattgacccagtggctccacgatatg

SEQ ID NO: 667793 - DNA, 51 bp, Homo sapiens
tgacactgaacttacagtgcaaacgtgttcctgatccaagcagaaccctgt

SEQ ID NO: 667794 - DNA, 75 bp, Homo sapiens
cccggctcgcccgtgtgcagaggagtatgctgctgctgttccgctttgcgtcctcgctacaaacgcctggtggac

SEQ ID NO: 667795 - DNA, 100 bp, Homo sapiens
aggatacaaggcagccatagttcacaatgttgattctgatgacctcattagcatgggatccaacgacagtaagtacagtgtttcctgaggttataggcgg

SEQ ID NO: 667796 - DNA, 98 bp, Homo sapiens
cccagctttaaaggagatgcaggagaaaatacggcattgctagtgttccttgcctgtatctccccttggttcaatagctaccagatttttggaagagg

SEQ ID NO: 667797 - DNA, 90 bp, Homo sapiens
gcggggcgccctccgccacgcagccggccaccgccgagacccagcacatcgccgaccaggtattggcatactccacacatctgtaccatt

SEQ ID NO: 667798 - DNA, 50 bp, Homo sapiens
ctactgcgaagacagctggcaggtccagcctgatgagtgaagaggctaag

SEQ ID NO: 667799 - DNA, 88 bp, Homo sapiens
cttcattcccatcggcattggcatttttgtcacctccaacaacatccgcgagatcgaggctctctatgagaacatgctggtggagctg

SEQ ID NO: 667800 - DNA, 100 bp, Homo sapiens
tcttcagctgctcggacagatgaagctccccaaggagctgcagatggccgcccatgccccatcattctttgggatgcatctttatcttcagcaagtaatg

SEQ ID NO: 667801 - DNA, 75 bp, Homo sapiens
cccagggggccggagggccagggtctcccggagacttcccaagtaagaagcggaagaggagccgctggaaccaag

SEQ ID NO: 667802 - DNA, 97 bp, Homo sapiens
ccagttactatggcagttgcaaaatattcaggagaccgtcgttgccttgtatttccagagaacagatagaaaatgctgctgaagaacctagagtctt

SEQ ID NO: 667803 - DNA, 102 bp, Homo sapiens
tttgattatgcaagacaaatgcaaaagttacctgttgctattccagcacacaaactccctgacagaatactgccaagtcgttccccatcaggaagtcctcgc

SEQ ID NO: 667804 - DNA, 100 bp, Homo sapiens
ctgaagccctgcttcatatggaatctcctacctgcttgagggattcaagaagtcctggtcaaaacctgctccgaggtggacgagccgtagctccccgaat

SEQ ID NO: 667805 - DNA, 80 bp, Homo sapiens
gttgtatttagtgtgacgactgttgacctgaaaaggtagcctttccagtaaatatatgactcagggaaaagcctcagcga

SEQ ID NO: 667806 - DNA, 100 bp, Homo sapiens
tcgaccacatcaagaagctcagcactgatgtggacttgattgtggaagtgctaagatactgaagttgctgaagatcctcaacaagtttcaactgtccatc

SEQ ID NO: 667807 - DNA, 75 bp, Homo sapiens
tagagtatgaggcactaaaaacacaattgcaagaaaatgagacacattctcagatggagtctcactctgtcaccc

SEQ ID NO: 667808 - DNA, 100 bp, Homo sapiens
cgcggcccagtcggcaccggcgaggccgtgctggaacccgggcctcagccgcagccgcagcggggccgacacctcgccgctcctgctatttgccaaccgc

SEQ ID NO: 667809 - DNA, 100 bp, Homo sapiens
ctctctggccgctatcatcccagcagtggagttcagcccactactctgaaccagggaaagcaggcaggatgggagagtcgccgatagaaccacctcttcc

SEQ ID NO: 667810 - DNA, 82 bp, Homo sapiens
tggaaacttcttggaggttttcaggaaacttgcagcaaagccattcgggttggagtaattgcctatgtgcttcccaagctgt

SEQ ID NO: 667811 - DNA, 82 bp, Homo sapiens
tgggcaccaggaagcgaaggctgcttcctgcctgacacagctcacttcaagaagtgcacaatgtcagaacgtggaattaagt

SEQ ID NO: 667812 - DNA, 97 bp, Homo sapiens
atcaaacagctatggtgatgattagagacatactaatgtacatgtctctagtgatccctgaaaagttccagcatattttgcgagtactcaacaccaa

SEQ ID NO: 667813 - DNA, 101 bp, Homo sapiens
cttcaaccacctcgagcggctgctggacgaagatttcctccttcttcacccctgaaaccatatccaaagaagcccccaaaccaaaaggatgttattaaatt

SEQ ID NO: 667814 - DNA, 75 bp, Homo sapiens
gagatttcatctcgaaacctggcgctttgtgtccctggtgatgttggaacattaatgatggaacatggccaaact

SEQ ID NO: 667815 - DNA, 75 bp, Homo sapiens
accatctgaagcatctgcttacaagcgatttcatcaaaggtctttccattttgctccgggggacagtacaagaaa

SEQ ID NO: 667816 - DNA, 100 bp, Homo sapiens
ctgcaaccttagcgacatcaggaagaacagggtcgaggatcgagattttcagctgaactctcatctctcaacactggcaaatattcataagatctaccac

SEQ ID NO: 667817 - DNA, 88 bp, Homo sapiens
aaggatgcacaagttccaaggttacgtttcatgaatggtagtgtctagaaagggtatgtcccttcaagagagaggtgccaatgtccaa

SEQ ID NO: 667818 - DNA, 89 bp, Homo sapiens
ggggaaacgatccgctcccaaaacgtctccaaaaaaagttggtgatgacattgccaaggcaacgggtgactggaagggcctgaggatta

SEQ ID NO: 667819 - DNA, 80 bp, Homo sapiens
tgagcgccgggctccgtggggaggaagcgggggccaccaaggttattcagcttctcaaggctggaaaagcgaaggaagtt

SEQ ID NO: 667820 - DNA, 74 bp, Homo sapiens
acacctactcgtgctcgggcaagctgctggagagggagatcaaggcggtgtctttcctgaagactatcttcccg

SEQ ID NO: 667821 - DNA, 98 bp, Homo sapiens
ggccacagagagattggtgtttttgtgaggcagtgagacctaagaaatctcctgcaaagaagctgagccatgcaattagtaaatctttggggtgtgta

SEQ ID NO: 667822 - DNA, 111 bp, Homo sapiens
ctcctgtctacagagaaaaagaagatatgtatgacgagattattgagttaaagaaggagcgggacggtatgcgggccatcctggggtcctacgacagcgagctgaccccgg

SEQ ID NO: 667823 - DNA, 74 bp, Homo sapiens
atgttattactctatacaaagatctcaaacctgttttggattcatatggtcatacagcagatggaacaaaaaaa

SEQ ID NO: 667824 - DNA, 82 bp, Homo sapiens
cagggcccgcggcctacaacgtggatcagccattgagacccagagcagcagttctgaagagatagtgcccagccctccctcg

SEQ ID NO: 667825 - DNA, 98 bp, Homo sapiens
gctgcaccgcttcgagtctattgccattgcccaagagctggagataagatgggtagactgctacttcccttttacacatccttcctttgagatggaga

SEQ ID NO: 667826 - DNA, 95 bp, Homo sapiens
acaggtacagcatggaggagctgattcagctgggccaaggaatactcccccagttgcaagaggcgcaggaccgtggaagacttcaacaaattctg

SEQ ID NO: 667827 - DNA, 100 bp, Homo sapiens
gcatggtgcccgaacaccgcgccttcggaagcccgttcggcctggaggagccgcagtgggtcccggacaaggagaatcactgcagcccccctcgccctga

SEQ ID NO: 667828 - DNA, 98 bp, Homo sapiens
tatgggccgctgtcagggctcgaggatgccagtttttagggccagtctgtgatcaaaacagggcgactgctaatcagtcacgaggctcccttgacagg

SEQ ID NO: 667829 - DNA, 100 bp, Homo sapiens
taatattggacaccgcttactccagaaacatgggtggaagctgggccagggattgggaaaatctcttcagggccctgcttgatactcagaatcttttgcg

SEQ ID NO: 667830 - DNA, 83 bp, Homo sapiens
ggaggacgagctccgggatgctgtactccttgtctttgcaaacaaacaggttaatttggagtggcccctggagtcagtttcct

SEQ ID NO: 667831 - DNA, 100 bp, Homo sapiens
agccgatccagcctgcggagcctgtggggcagggacttcaaaatgagcgtccctgactacatgcagtgtgctgaggaccaccagacgctgctcgtggtgg

SEQ ID NO: 667832 - DNA, 100 bp, Homo sapiens
ctgttccaccttcagagcgtcacggcgtacgccctcatggggaaaatctccccggtgactttcaggtgtggatgtggaagcagccaagcgggcagaagag

SEQ ID NO: 667833 - DNA, 75 bp, Homo sapiens
gccgccgggaacgggctgcaccaatggccaggtgtgtgccctcttcctgattctggagaaaaatgccggtccgga

SEQ ID NO: 667834 - DNA, 50 bp, Homo sapiens
acgaaacctggcacggctcttgcttccgatgctggctccacctggaccag

SEQ ID NO: 667835 - DNA, 90 bp, Homo sapiens
ttgctgctctacttgaggaacatgacatttttgttccagaggatgatgatgatgatgactaacaggtgattttcataacttcatgctcca

SEQ ID NO: 667836 - DNA, 82 bp, Homo sapiens
aagaccgcgcgcagggcctgcagcgggagctggacggcgagcgcgagcggcgcgagaaaacatcaacgagtgtgtgacggac

SEQ ID NO: 667837 - DNA, 100 bp, Homo sapiens
gccccttctgcaaccacgagaaatcctgtgatgtgaaaatgtccctcgccggctccctcggggcctccactgcagcgcagctgcccatagctctgaacag

SEQ ID NO: 667838 - DNA, 100 bp, Homo sapiens
gcacgcggcgatatggaagaggagggcaagaagggcaagaaggtagaacaagtcagccagttggctgtgttcatagaggcagcattagactatcacagac

SEQ ID NO: 667839 - DNA, 80 bp, Homo sapiens
acaagcaccccgagtactgggacactgccatcctcttcaccaggcagtctattatcctcccagtccacaacgctgaaccg

SEQ ID NO: 667840 - DNA, 74 bp, Homo sapiens
cgggcctgtcagttatcgggtgtgaccgccgccgcccagggaggaaataatgctggccatacagttgttgtgga

SEQ ID NO: 667841 - DNA, 82 bp, Homo sapiens
ctgcaccatgagcgtcccggccttcatcgacatcagtgaagaagatcagcaaattgtggctactaatttgccccctgaagat

SEQ ID NO: 667842 - DNA, 98 bp, Homo sapiens
gagggaaagtagccagcaatgtcgaacgcgtcatttgattgcccgcctcagaacgatggatctgcatctcttcgactactcagagccagggaacttct

SEQ ID NO: 667843 - DNA, 110 bp, Homo sapiens
atctccctgcagtctgagcctgtggtgaccgatgcgttcctggccgtggctggccacatcttctctgcagatcacccggaagttcaggctgaattctgaaggcaaacttg

SEQ ID NO: 667844 - DNA, 100 bp, Homo sapiens
tggtgaaaagcactacaacatggcaaaaagttacccaaatgaagaaaaggatgcttgggatgtgaagatgttgctagagctttggacatcagacagtgca

SEQ ID NO: 667845 - DNA, 102 bp, Homo sapiens
gtctgctgctattctccgagcttcgcaatggatgatcggctgaatgtaacagaggaactaacgtccaacgacaagacgaggattctcaacgtccagtccagg

SEQ ID NO: 667846 - DNA, 100 bp, Homo sapiens
acaggaggcgcagaaaatcttcaaagccaaccaccccatggacgcagaagttactaaggccaaggttcccgggaacctgagtgcagctcaggtggccgcg

SEQ ID NO: 667847 - DNA, 100 bp, Homo sapiens
agagagtctacagataaatctacagagacaattcctcaagtggacttggccatgattggtttcttaggaaaagtcctcagtgctgtgggcagtgcccagc

SEQ ID NO: 667848 - DNA, 100 bp, Homo sapiens
ccgcgtccctgcgaccgccgcggcgaagatggattggagaatccatgttgaccaaatgcaccagcacagaagtggaattgaatctgctctaaaggagacc

SEQ ID NO: 667849 - DNA, 100 bp, Homo sapiens
tctgatttacccatatgttatggtccttttccatgtgatatatgtggtcgccagtttaacgacactggaaatttgaaacgtcatatagaatgtactcatg

SEQ ID NO: 667850 - DNA, 94 bp, Homo sapiens
cagttcttgtttgtggatcgctgtgatcgtcacttggtcagcccaaggccaaccccactgtcactctgttcccgccctcctctgaggagctcca

SEQ ID NO: 667851 - DNA, 50 bp, Homo sapiens
ttcaacatggggctgctgatggactgtgccctgtccacggtgcctcctgc

SEQ ID NO: 667852 - DNA, 82 bp, Homo sapiens
cgagtcctgagcggccaggacgacgaggagcagggcctgactgcgcagcctctcgagctcctgtgtgagaaatccattggca

SEQ ID NO: 667853 - DNA, 100 bp, Homo sapiens
cctttactacagcagccaaaacgagaagaagaagaagtgttagaccagggtcccttcaccgatgttgtcaccaccaacctaaagcttggcaacccgacag

SEQ ID NO: 667854 - DNA, 82 bp, Homo sapiens
gggttctggagagcggggtgtgggagacaagaggagcagcagcggcaccgcccctcaccctggagggtcctgtacaatctca

SEQ ID NO: 667855 - DNA, 97 bp, Homo sapiens
acatgaagggacttgggatatttaattggataatagaagattgaaggctgaagagtctgctgcttctggagcaaagggagatctggctgctagtgac

SEQ ID NO: 667856 - DNA, 98 bp, Homo sapiens
agagaccatattctacggggctttcagcaaatcaaagccaggtctccaattgagaaacatggcactgtttttcctgcactctacccacctattgctgg

SEQ ID NO: 667857 - DNA, 100 bp, Homo sapiens
ttcggaaagacacctggccagcggtccagagctgatgcagaaattctgctgaccccacgtagaagacaacgactcagtaatgaatctactacccctggag

SEQ ID NO: 667858 - DNA, 100 bp, Homo sapiens
cgaatatcgtcatcgttagaaggttttgactacaagacttgtaacgtgctggtagccttggagcaacagtcaccagatattgctcaaggtgttcatcttg

SEQ ID NO: 667859 - DNA, 100 bp, Homo sapiens
ggcccagcaaatgcaactagccaatgccatgatgcctggtgccccattacaacccgtgatggcattcctgcgtcctttacaagcgccaagtctgtattca

SEQ ID NO: 667860 - DNA, 100 bp, Homo sapiens
ggccgactacggccgcctcagcagccggctgcaggccagagagggcctcgggaagagatgcgaggatgacaagactgaaactgttgaggagcccatggag

SEQ ID NO: 667861 - DNA, 96 bp, Homo sapiens
ggactacttcttgcggcgcctcggctcctcccaggtggcctcccgcgtgctggccatgaaggacaagatccagaagctttatgaacgaaagataaa

SEQ ID NO: 667862 - DNA, 100 bp, Homo sapiens
gggggccggccccggcctggtcctggccccggagctgttgctggacccctggcagggcacgttcccaggctcgcagccccaggcacctgctagccccgtt

SEQ ID NO: 667863 - DNA, 100 bp, Homo sapiens
cgaaggtctcagagctttacgatgtcacttgggaaggtctcttgcagctgaatggggtaaatatggaatgcgattcaatgtgattcaaccagggcctata

SEQ ID NO: 667864 - DNA, 100 bp, Homo sapiens
cagatagtggaaagaaaccatgtgctgaaatgtttgacgacactgatggtttggtcctggctataagtcaccatggcacagcaagctgccgataagtatc

SEQ ID NO: 667865 - DNA, 100 bp, Homo sapiens
aaaagacctgctttgccctgggaaatagtaaccctgccaaatacatcagcttgtaggagacagaggacatcggcagaaactagatgatcagaccaagccc

SEQ ID NO: 667866 - DNA, 100 bp, Homo sapiens
gaacaatctttttattacagaagaagattatcaggtggggtggaagacaacccgtgagtattacaccttcatgtgggttactttgcccattgacctaaac

SEQ ID NO: 667867 - DNA, 75 bp, Homo sapiens
tagccaccaaagacatgaggaaatcacaggcctgcagaattttcttcctgccccttgaactctgatgaagaagtg

SEQ ID NO: 667868 - DNA, 110 bp, Homo sapiens
acctgctaacagaactggaccttttcggccatttcataattctgaatcatgtctgataacggagaactggaagataagcctccagcacctcctgtgcgaatgagcagcac

SEQ ID NO: 667869 - DNA, 82 bp, Homo sapiens
cccaggtgcccccggcctgcgctcccatccacacgctcgtgcctgatttgagatggggtcccaggtctcggtggaatcggga

SEQ ID NO: 667870 - DNA, 100 bp, Homo sapiens
ttcaagagccattccttttggaacaatgatcatccagcccctcttagaacttgaccaaaatagaagtaaattaaagttgtacattggacacctgacaacc

SEQ ID NO: 667871 - DNA, 109 bp, Homo sapiens
cttcgatgttcttctaatactcctcctctaacatgtcagcgttattgtaatgcaagaacatgaatctgaaggtggaagaacacctttgatgaaagctgcaagagctggt

SEQ ID NO: 667872 - DNA, 100 bp, Homo sapiens
cgcccctccctgctgtcacccagacccgcggtgcgacagactctgctaacaccagatagtggaaagaaaccatgtgctgaaatgtttgacgacactgatg

SEQ ID NO: 667873 - DNA, 82 bp, Homo sapiens
aagcagaaaggcgggtgtcactggggacgttctgaggtaagactttgaccccgacgcaggcttcagtgattgccgcggatca

SEQ ID NO: 667874 - DNA, 88 bp, Homo sapiens
caggaccaggctgcgagaacaggattgcctacagcgctcctttaaggcacaggttttctcctgccctgcttgccggcatgatcttggc

SEQ ID NO: 667875 - DNA, 90 bp, Homo sapiens
tatttacagtcggaggagtactcggtgaaatcctgtcctgaagactgtaagatccccagctcaagggtatagtgaccaggttatattgca

SEQ ID NO: 667876 - DNA, 100 bp, Homo sapiens
agatcagctgaggaagtagaagaaataaaggcagaaaaagaggctaaaactcaggctatacttttggagatgaggaattcttcagttggataaagtggac

SEQ ID NO: 667877 - DNA, 75 bp, Homo sapiens
ctccaggcagcttcgggtcagccatggttgtgtcagcaaaattcttggcagggactgacgaagacacaatcatcg

SEQ ID NO: 667878 - DNA, 96 bp, Homo sapiens
ctttaaaagatcaaccttgagtagcagaggccctcacaccttcctcagaatggacccccaggtttgcaatggtctggagcagccaaggaagcagca

SEQ ID NO: 667879 - DNA, 75 bp, Homo sapiens
gttttgagaaatggtgcttgggaaattgtccactgggaaaagatatacacagaagttcctgctcttcgctacaat

SEQ ID NO: 667880 - DNA, 101 bp, Homo sapiens
atcgggatttacgtggagatcaagcgcagcgatgactgtggatattcataaggagaaagtggcacgaagagagattggtattttgacaacaaataagaata

SEQ ID NO: 667881 - DNA, 100 bp, Homo sapiens
ggcggcgccgctcatccccctctcccagcagaacggggaagataaccgaagggtggtttgagaaacccaccaggccaactgggaattagaattgattcaa

SEQ ID NO: 667882 - DNA, 50 bp, Homo sapiens
attgaactgcttcagaaagcacaggaacgtatcaatgagtgtgatgagat

SEQ ID NO: 667883 - DNA, 90 bp, Homo sapiens
tggaaacatcctccctcaagtgctttgctgaaacgcctaataagaacaaatacttccctggacaagaaagccagatgaaactgatctacc

SEQ ID NO: 667884 - DNA, 51 bp, Homo sapiens
gctatactgacatcagtaataggaacattttagtggacaaaccaaatgacc

SEQ ID NO: 667885 - DNA, 110 bp, Homo sapiens
tggaatatataaatgtgttgtttgtggaactccattgtttaaattgttgatggagtcgtgcagagtatcaagctcatcaccgagggggcgagcaagcgcattgctgagtt

SEQ ID NO: 667886 - DNA, 75 bp, Homo sapiens
atgaccctaaaaatggcgattctgcaaccaagcacctgaaacagcagtggactaaagaggatggacatagaactt

SEQ ID NO: 667887 - DNA, 100 bp, Homo sapiens
cactcacaaccactgcgccaggaaagtgcaagaaaattggatgtatattttgaatatgaagaaaaaataatgagcaaaactactctggataaatctcttc

SEQ ID NO: 667888 - DNA, 82 bp, Homo sapiens
tcaagtttgtcgtcgtcggggtcctgctgcaggattctttctactaatccagatacttgttgaagtgctgactagtttcttg

SEQ ID NO: 667889 - DNA, 100 bp, Homo sapiens
gttcagtgtggctcaccatggagtgtcagagtgagggagatgactgctgagctccgagaggtgaacagagcccctggttgtctgcattcaaaagagcatt

SEQ ID NO: 667890 - DNA, 75 bp, Homo sapiens
actgtgagctgcttcaagatcagggaagtttttcggtacaattttgtgatgctggccctgtcctcctcattcctg

SEQ ID NO: 667891 - DNA, 100 bp, Homo sapiens
tttgtgaaaggccaatttcatgaatttcaagagagtaccattggggctgctgaaatgggttgcggattgaacaagttagagaaacgtgatgaaaaacggc

SEQ ID NO: 667892 - DNA, 100 bp, Homo sapiens
aggatatcctgacggccatcgccgccgacctgtgcaaggcagccatccgcagggccagcgccatcctgcgcagccagaagcctgtgatggtgaagaggaa

SEQ ID NO: 667893 - DNA, 83 bp, Homo sapiens
ctcagtgggaagcatagcatgaggacacggcggagtcggggctcgaatcctaatgtacctggctagctggtggtgagtagggg

SEQ ID NO: 667894 - DNA, 75 bp, Homo sapiens
tggattcacccacagcggggcggcggcggcggcggctgcggcccaatatagatgagctgcttcagaaagagcaaa

SEQ ID NO: 667895 - DNA, 75 bp, Homo sapiens
ctggtcttggtagcggaggcacccgaatgctgcccgggtgagactctgagatttgcccacctgatgaccttgcca

SEQ ID NO: 667896 - DNA, 75 bp, Homo sapiens
atggaaatcatgtgaaatgtgtaaagatgctcttagatttctaccactccaaacgccggctgatcttctccaaga

SEQ ID NO: 667897 - DNA, 100 bp, Homo sapiens
gccagcccgagcaagtaaagattgtgccaaatctttggagtgttgatggagaagttacagtagctgaacagaagccgggagaaattgctgaagaactcgc

SEQ ID NO: 667898 - DNA, 75 bp, Homo sapiens
agagccacgcgtttgatggcttcgaggtgaactggaccgagcagcagcagatggcagcctggcatcctcgctaca

SEQ ID NO: 667899 - DNA, 82 bp, Homo sapiens
cccaaacccgggtctcttccgactccgggcccaacagtttgtgccgctgccatggcccagacactgcagatggagatcccga

SEQ ID NO: 667900 - DNA, 99 bp, Homo sapiens
ccaccatctacagcaacgtgatcaaagattgtctaaagccccaggaaaaatggtggaaaattcaccgtcgccattgccagaaagagcgatttatggctt

SEQ ID NO: 667901 - DNA, 90 bp, Homo sapiens
gacgaaccatagacccctcacatcctgagaactcaggggagctggagctggaggcacaagagagaaggcaccaaggctcagagtcagcag

SEQ ID NO: 667902 - DNA, 75 bp, Homo sapiens
ggacccctgtctcccggaggagcgcgcaccaggtcctgctgtactagccaccaaagcagctgctggtactaagaa

SEQ ID NO: 667903 - DNA, 98 bp, Homo sapiens
aagggaagacaccaccagtttttgcttctgctggcccgagataacttcttccgctgtggtgtgctgtatgaggactccctgtcctcccaggtccggac

SEQ ID NO: 667904 - DNA, 76 bp, Homo sapiens
ggtcctacctggggatattatcaaatctactactgttcatggcagagctggagtggaccagagaaattgcttgctt

SEQ ID NO: 667905 - DNA, 100 bp, Homo sapiens
tgagccccaaggacctgtttggcacagaaaactgaatctgtagataacgagggagaatgaattgtcatgaaaaattggggttgattttatgtatctcttg

SEQ ID NO: 667906 - DNA, 76 bp, Homo sapiens
ctaaagtgagagtgaccaggcttgttctggatccctatttattaaaggtgagccaatggtggcagcagaagtaggc

SEQ ID NO: 667907 - DNA, 90 bp, Homo sapiens
ccaacttttctatcagacgatgaattgaaacacctcattctcagggtgcagtcgctttcaatctgaaatcaaacgcttgaaaatctcatc

SEQ ID NO: 667908 - DNA, 97 bp, Homo sapiens
aattatgaaagaagtcattccttttttgaaggggaagatggtgaaaggaatgggaggtgctatggatttagtgtccagtgcgaaaaccaaagtggtg

SEQ ID NO: 667909 - DNA, 101 bp, Homo sapiens
atccataaaaattcatcagagagcattttactactgagctgcaaaggtgccggggacacgggcggcaagccgtccacgcggggcggtgaccctgcagcgcg

SEQ ID NO: 667910 - DNA, 74 bp, Homo sapiens
gaaggagaccttccgggagaatttggcaatgaggagcagcagctggcgtgggccaagcgggagagcgagaaggc

SEQ ID NO: 667911 - DNA, 83 bp, Homo sapiens
ctggactggagcagaaccccaggactgcgcccccgggagcgggcgcccagaggtcatcatcagatttgaaatatttaaagtgg

SEQ ID NO: 667912 - DNA, 96 bp, Homo sapiens
gttttgtgaaaggccaatttcatgaatttcaagagagtaccattgggggtactccaaagattcaggtttactcacgtcatccagcagagaatggaa

SEQ ID NO: 667913 - DNA, 96 bp, Homo sapiens
cggaaatgttgtccaaagttcttccagtcctcctaggcatcttattgatcctccagtcgaggtcccgcaggctcccgatggcgagattacggcgcc

SEQ ID NO: 667914 - DNA, 82 bp, Homo sapiens
ggctttcggcaagaactggattcgtggcgccacaagctcattcactgtgtaggattttttatcaagcagaaatgcatcgaac

SEQ ID NO: 667915 - DNA, 98 bp, Homo sapiens
ccgcaactacaagaaaaccctcctcctgaggcaccacgtctctaccgagcacaaactccacgaagccaacgcccagttgattcgatgtcatcagtccc

SEQ ID NO: 667916 - DNA, 74 bp, Homo sapiens
aagccaaaaagcattgctggtatttcgaaggactctatccaacctattatattcttccatacaccagcaaactt

SEQ ID NO: 667917 - DNA, 100 bp, Homo sapiens
cctcatgccaaagaccatcatgcacctcatgatcaacaatgaatatgagagcctggagcaagaaaacaccatgctgcggagagagatcgggaagctgaca

SEQ ID NO: 667918 - DNA, 100 bp, Homo sapiens
ggctctcggcctggccaggtccgaaaacttaatctacacctacgataaggaaggaaaatcacctcggcagtgtttgaaggaaggatactgcaactctttg

SEQ ID NO: 667919 - DNA, 100 bp, Homo sapiens
ctcatgccaaagaccatcatgcacctcatgatcaacaatggtctaaaattcccaggactccacagctttgcaccagataagcctggaggaatactaatga

SEQ ID NO: 667920 - DNA, 100 bp, Homo sapiens
cattgcaagcactattggcagctgcagagccagatgatccacaggatgctgtagtagcaaatcaggtaaaaatgcatttgcaaagggagaaaatgaaggc

SEQ ID NO: 667921 - DNA, 75 bp, Homo sapiens
ggccccgggcccgagcccaccttaggtcccctcacccggctggagggcatcaagcgtgcctgccagtgtagagcc

SEQ ID NO: 667922 - DNA, 100 bp, Homo sapiens
ctctccagcttctgcagtgcattgttgatgagaactattccatggcagtatatcttgtaaaacagttgtcctcaacagttcttcttcagaggttacgagc

SEQ ID NO: 667923 - DNA, 80 bp, Homo sapiens
cgaagagagctctgttgttgcatttggtgccctggttgtcagatgttggaaagcagtaggacggaacatactcttcgtgg

SEQ ID NO: 667924 - DNA, 90 bp, Homo sapiens
aagaagctgcagccgcacctggccaaggcttcttggacacttaatgattgttggcaagaaatgtgctgctgatctgggcctgaataaggg

SEQ ID NO: 667925 - DNA, 75 bp, Homo sapiens
aagtgcgcaaacttgacactcaccctgaccggacagttctgcacagaggatgtggatgaatgcctgctgcagccc

SEQ ID NO: 667926 - DNA, 83 bp, Homo sapiens
gctgcgtgagcgagcagaggcttaaggtcttcagcggggcgctccaggaggcactcacagaggcagaagaggcctggaccttg

SEQ ID NO: 667927 - DNA, 75 bp, Homo sapiens
ccatgggaggccgcgtctttctcggggtctaatgtgatggaagagcaggacctgcgggacatcggcatcagcgac

SEQ ID NO: 667928 - DNA, 97 bp, Homo sapiens
ctctgatctacgaaagtcatgttacccaacaccgggcatgttatgttacccagagaactttccaaacaagtacctaaaactcatctgatgtctgaag

SEQ ID NO: 667929 - DNA, 96 bp, Homo sapiens
gaaggagaggccctagaaccgaaaattgcctaagaattatgacccaaaagttaccccagatccagaaagatggctgccaatgcgagaacgttctta

SEQ ID NO: 667930 - DNA, 74 bp, Homo sapiens
agctggagtatctggacctgtacctgatgcactggccttatgcctttgatctctggcatctctatcccctatga

SEQ ID NO: 667931 - DNA, 74 bp, Homo sapiens
cccctccttgggcctgcggctctctacgtccctgcggagcagccggtttctgagtcccttcaacatgatcctgg

SEQ ID NO: 667932 - DNA, 97 bp, Homo sapiens
catttaattttagggtcctttatatagaagggagagtagactctgtttgctggctacacggacaacctggtgcgagtgtggcaggtgaccattggca

SEQ ID NO: 667933 - DNA, 82 bp, Homo sapiens
agagctgggtgccaggctgaaggatcactgaggaaggggaagtgggcaaagcaggatcatgaattttctaaaactgaggaac

SEQ ID NO: 667934 - DNA, 75 bp, Homo sapiens
gccaagttcagcaaatttggagatgagatggagtctccctgtttcccaggctggtcattgactgctggatcatgt

SEQ ID NO: 667935 - DNA, 96 bp, Homo sapiens
acagaatcgggtgaagagcatgctcctgtgcctggcatggtttcaccgagaacatcgtgcccgaggcccggacggatctcgaatcccttacatcga

SEQ ID NO: 667936 - DNA, 95 bp, Homo sapiens
tctctcatctcgctcggctgcgggaaatcgggctgaagcgactgagtccgcgatggagtgaccgcttagattcatctgctgtccttgacaccggc

SEQ ID NO: 667937 - DNA, 75 bp, Homo sapiens
gcctcctgaggagctgggattacagtcaccaaaggcttcgtgtacagctctttcctaaagccctacaatcctcgc

SEQ ID NO: 667938 - DNA, 100 bp, Homo sapiens
gtccacccaaccacagccgaaattgacctcaaagaagatatagatatggaagaaagtagcagtgttgccatgttggtgccagatattggggaacaggaag

SEQ ID NO: 667939 - DNA, 82 bp, Homo sapiens
gggccgctctgggatcccggccaccagcaattgtccgctgcatcttcctcccgtgaggctggccgagctccacgctgatctg

SEQ ID NO: 667940 - DNA, 97 bp, Homo sapiens
aaaactattgcgcctgccctggttagcaagcttgatgaagaaatctctggaattgtggaagtggttggaagagtaaccgccaaggccaccatcttgt

SEQ ID NO: 667941 - DNA, 75 bp, Homo sapiens
aggcctgctatatctttcaccaccgttgccgccttctcgagggtgtgaccatgaagctcatggatgaggtcgccg

SEQ ID NO: 667942 - DNA, 82 bp, Homo sapiens
tctcgggctcttgggcgctgctctgaggcgagaaccactgtctctgatcaacgtgcggaagaggaacgtggaatctggggaa

SEQ ID NO: 667943 - DNA, 100 bp, Homo sapiens
tgaataagcggggccgtgtgctggtcaatgatgcccaggaaatagcagacacacctagtggagacaaaacttccttggagacacgtttcatgacgatcct

SEQ ID NO: 667944 - DNA, 100 bp, Homo sapiens
caactatggaacaacaacttgcagctcatctctattgatggatgattatgtacttgaagtgaggcactttcagtgtcctaaatggccaaatccagatagc

SEQ ID NO: 667945 - DNA, 90 bp, Homo sapiens
gcagcccgcgtctgccgcccacgtacatgcacgccatgtgatgcgacctaaagtcatgtggcacctccttcgaaggtacatggcatcccg

SEQ ID NO: 667946 - DNA, 100 bp, Homo sapiens
gcggcgccgctcatccccctctcccagcaggcgttggagaccagggccagccctggccacaccccaggctgtgtcaccttcgtcctgaatgaccacagca

SEQ ID NO: 667947 - DNA, 75 bp, Homo sapiens
tttacagtctgttccacatgatcattgtaataagggtttgtaccagttgctggagccccgaatgattgttcgttg

SEQ ID NO: 667948 - DNA, 101 bp, Homo sapiens
gatgggatgccggcagtcagagtcaaaacagagcttttggaatctgaacaagggctccagtgatccacaagctcagaaatacatcgcggaaagtaaatgtt

SEQ ID NO: 667949 - DNA, 100 bp, Homo sapiens
ccctcccccatcaaaggaaaggggaaaatgtctcagtcgaaagctgctcactcccaaagcctgacaagttgatgccactgctgtctgagggctcctctgg

SEQ ID NO: 667950 - DNA, 100 bp, Homo sapiens
gagttgtggctgctctactacgcgcagtgctccaggcgcgggtgcggcagctgcaggctgagagcgtgtcggaggtggtggtgaacagggtggatgtggc

SEQ ID NO: 667951 - DNA, 100 bp, Homo sapiens
gcgggctgaagggttagcggagcacgggcaaggcggagagtgacggagtcggcgagcccccgcggcgacagattttcagctgaactctcatctctcaaca

SEQ ID NO: 667952 - DNA, 135 bp, Homo sapiens
attgtccaaagcagtcgtaagaagaggtcccaatcccccactctttccgccctaatggaggtctccagtttcggtattgacctgatggacatggcttcggacatcctgcagcccaaaggagatgatgtggcccgg

SEQ ID NO: 667953 - DNA, 101 bp, Homo sapiens
tgtgaccccacggccagaagaggacccatggaagaactggagcaaggcctgttgatgcagccatgggcgtggctacagcttgcagagaactccctcttggc

SEQ ID NO: 667954 - DNA, 75 bp, Homo sapiens
tggagattttcagtattgtgagcaagcaaaatcagtaattgtgctcggcttattccaggggtgtgtttcgtcgag

SEQ ID NO: 667955 - DNA, 99 bp, Homo sapiens
gcttagacggtggcttgttgcagatcctgattgtaggtggtgtccagctccagactgtggcaactgcatgtccagccagacgaagaacgtggtcagcgg

SEQ ID NO: 667956 - DNA, 49 bp, Homo sapiens
gaccgtcaccaactggttcaagcaatctgaaggcaaatcctgtttagac

SEQ ID NO: 667957 - DNA, 50 bp, Homo sapiens
taggaagtccactagcagcttctaaggaccttgccaccatggaagaaaga

SEQ ID NO: 667958 - DNA, 80 bp, Homo sapiens
ggcggctgctgctgctgctgacgctgctgctgcccggcctcgggaaagaagcttccggttctgaggtcctggaggtgcca

SEQ ID NO: 667959 - DNA, 100 bp, Homo sapiens
agaattacacaaaatcgtgtttgacccacgctatctcctgctcaactctgaggaacgaaagcaggctcctgcttaccatcttattttggaagggattctg

SEQ ID NO: 667960 - DNA, 74 bp, Homo sapiens
ccgcgcccatggcagagccagaccagatggccacagaagcccagcccgggaccccaggacgacccctgcctgca

SEQ ID NO: 667961 - DNA, 100 bp, Homo sapiens
cagctcaccagggtggacaaatcgccagagatgtgttctcaaaagtctatggtcctgtgttcaccgtgtattttggcatgaatcccatagtggtgtttca

SEQ ID NO: 667962 - DNA, 78 bp, Homo sapiens
ccccacagaccagcccagcattcagatcaccgaagtggccttggagtacaacaactgtcatggggaccaggtggtgga

SEQ ID NO: 667963 - DNA, 75 bp, Homo sapiens
gaggaggacatcgtcaggctggcccaggaccaggaggagatgaagaatcccctactttgaaactagtgctgccaa

SEQ ID NO: 667964 - DNA, 88 bp, Homo sapiens
atgatcgagttgtcttccgcacctgtgaaagagagcagaacagggtggtcttccagatggcaggggaaatggaaggtgatgcagtcga

SEQ ID NO: 667965 - DNA, 83 bp, Homo sapiens
ggcccgcccgggagggccggggccgcgctcaggtgccgtgagcgatgtggagatgcaggaacactatgatgagttttttgagg

SEQ ID NO: 667966 - DNA, 50 bp, Homo sapiens
ctccttcaagcccagcgagcatgcctcgatgacttacgagccctcaaggg

SEQ ID NO: 667967 - DNA, 100 bp, Homo sapiens
attgaagacatcaagggaaaatggggtgaggaagattttgaagacaatcgtcacttatacagaatgttggctcaattaagaaacatcagggagataaatt

SEQ ID NO: 667968 - DNA, 100 bp, Homo sapiens
tgattcagcaaatgggatcaatatttcacctgatgataagcagtaacgtgatgagatctattcatggcgtgggagagctgatgacccaggtggtgctccg

SEQ ID NO: 667969 - DNA, 100 bp, Homo sapiens
ggtcgtggtcattgttgcttccttcttcatattgaagaacttcaaccccacagtctatgaagagcgagctctgtatctcgaagcaataattcagaaccac

SEQ ID NO: 667970 - DNA, 80 bp, Homo sapiens
gtgacggccggtgagattggaagtggcggcggcggcaggcggcagaggggagctttatgaaaactttatcagtgaatttg

SEQ ID NO: 667971 - DNA, 98 bp, Homo sapiens
ctgctcagcttcgagaagattggctacacaggtggtgaatgcagtcaactgcagtctgttctcagctgtgcgggaggacttcaaggatctgaaaccac

SEQ ID NO: 667972 - DNA, 90 bp, Homo sapiens
atgtggagctctgaatttaattcgaggctttcatgctatagaaagtctcctgcaggttcttggtgagattcaggaaattgtgaaaacagg

SEQ ID NO: 667973 - DNA, 75 bp, Homo sapiens
cgccgcgctccaaccgcctcctcctcctcagtaacgcgggtgcaacattagaggaaatcaatcagcactgggact

SEQ ID NO: 667974 - DNA, 92 bp, Homo sapiens
tttcgtgtggtagccacaggctctggctgtgccctggtccagctgcagccactgacaggacagtcattttgtttactcattcagccctgttg

SEQ ID NO: 667975 - DNA, 50 bp, Homo sapiens
agggagctccaggactcaccctcaggacagtcattttgtttactcattca

SEQ ID NO: 667976 - DNA, 82 bp, Homo sapiens
ggaaagggataggagaaggatgtggactgcagtgctgcagtgccaggtctgagcgggaaagttccgaagaataggagtggct

SEQ ID NO: 667977 - DNA, 95 bp, Homo sapiens
ctgggctgctgcagccggccctggcccacgggctggctttggggctcgtgattgccacgctggggaatatcagacggggtttcaccatgttggcc

SEQ ID NO: 667978 - DNA, 75 bp, Homo sapiens
ggcttacatcttcctgaatcgagcagagaaactcctgagaaaaatgacagtgagccaggcagccagaggataaaa

SEQ ID NO: 667979 - DNA, 51 bp, Homo sapiens
ctagtgtctagaaggcactaagggccaagtcctgtatctgccatgtctgtg

SEQ ID NO: 667980 - DNA, 76 bp, Homo sapiens
acttggactgagtcctgcaggacacaggttgactatagtcaatggggccaatggagccaagtgtatggaaacccac

SEQ ID NO: 667981 - DNA, 90 bp, Homo sapiens
gttcatgtctgaggtgatccaggcctatgaaactctgcatggcactgcaacatggtgctggagaacgtgaaggagatgtggactgaggta

SEQ ID NO: 667982 - DNA, 83 bp, Homo sapiens
ccggctttcgcatttgggaccctgcaggaattaaacaaccaccatgtcgagcaaaaaggcaaagaccaagaccaccaagaagc

SEQ ID NO: 667983 - DNA, 90 bp, Homo sapiens
tcagtgtgatgaagattggcacccagctgccactggtgacatgccaacttaccagatccgagctcctactgctgctttgccacagggagt

SEQ ID NO: 667984 - DNA, 82 bp, Homo sapiens
gagaggatccggcgccgaatcactgactggcacaggtgttgggccccgtgctgatcccattccaatatgtagcttctgtttg

SEQ ID NO: 667985 - DNA, 75 bp, Homo sapiens
ctggggccaagggacaatggtcaccgtctcttcagggtccaattctcagactgtggtgactcaggagccctcact

SEQ ID NO: 667986 - DNA, 100 bp, Homo sapiens
cttgtccagaactctgtcaaatgaagaacactttcaagaaccagacccaacatgagtgaagtttcctgcaagaaacgggacgactatttggaatggccag

SEQ ID NO: 667987 - DNA, 75 bp, Homo sapiens
tccagtagtaaattatgaagaagatgcacgatcagttacatctatgattaaagagtctattgttggggaaatcag

SEQ ID NO: 667988 - DNA, 90 bp, Homo sapiens
ctgctgctgaggagaggagcgtcaacagcagcaccatggatacactgcctctaggactgggacagatagccactgagtacctgcttcaaa

SEQ ID NO: 667989 - DNA, 100 bp, Homo sapiens
tagttcctacctcaaatgtgctcacgatgttgaatgatgctttaacacattctgcagttttaattcagatgttgatgttagtgaagattcacctcctccc

SEQ ID NO: 667990 - DNA, 90 bp, Homo sapiens
ctactgaagaaatgaaacaagaagaaaatttgagtgtaccgttttttggagaggcttatgcggtacctgattcatccagcaaattaagac

SEQ ID NO: 667991 - DNA, 74 bp, Homo sapiens
aaaaattgtggtggatgaactttctaaccttaagaagaataggaccaggtggatgcaacccttattcctattac

SEQ ID NO: 667992 - DNA, 100 bp, Homo sapiens
ttttcatagagctggactattggaagagagggtctcaaaaccaaagatctcctggacttgtatcaacacaaccctgacctgtgaggtaatgaatggaact

SEQ ID NO: 667993 - DNA, 100 bp, Homo sapiens
tctcataccgctcccctcactgctagaatctgtcttcctgacctaagtattatttccatgttgaagcaaaggagagagcccttgattctgcaaagtcaag

SEQ ID NO: 667994 - DNA, 82 bp, Homo sapiens
gagacacaccaggccggcaggctgagaaaagcgagaccgcgtgcgaggaccggttgtgaccgagattcccgacgagagagac

SEQ ID NO: 667995 - DNA, 87 bp, Homo sapiens
cagacagaatccctgctaccagatttgtactgtgttcgcagtgacctggggaacctgctcaaagccctgggtcgcttggaagaagcc

SEQ ID NO: 667996 - DNA, 108 bp, Homo sapiens
tggctctgccgggggccggggcttcttccgtgggggccgaggacggggccgtgggttctctagaggtctttggccatcaccctcccagagcccaacggcagcgcaacg

SEQ ID NO: 667997 - DNA, 80 bp, Homo sapiens
agccgatccagcctgcggagcctgtggggcaggtcgtggttcaattccagaattctttcatattatgaaaagaaagttta

SEQ ID NO: 667998 - DNA, 104 bp, Homo sapiens
ggctcacagatctgggacaccgcattcgccatccaggctctgcttgagaccctgaaggaagattgggaatctgaaaaagatttatgtttagaaaatctacgcaa

SEQ ID NO: 667999 - DNA, 82 bp, Homo sapiens
ctgcttatggcggcgctggagagggggcgctgagctgttgggtggctgcttcaacccccaactccactgctggtgcagccat

SEQ ID NO: 668000 - DNA, 50 bp, Homo sapiens
tgctggggcggaatttcaagatggatcggagccgcgccctggtcggccag

SEQ ID NO: 668001 - DNA, 75 bp, Homo sapiens
gcggccaggtccctgctgaatcacacgccgccatccgggaggcccagggaaggtgtcagctgtgatgcatgttta

SEQ ID NO: 668002 - DNA, 74 bp, Homo sapiens
cagttgtgggcaccttgtatgcgtattgcctaagtgtaatcttgaacatgggcggtgctgtgagtgctggtgaa

SEQ ID NO: 668003 - DNA, 75 bp, Homo sapiens
ctggagtttgacacgaatatggatgcagtacagatggatgtggatctggaccgccagtctttaagcagcatagat

SEQ ID NO: 668004 - DNA, 96 bp, Homo sapiens
ggcgacggcgggctgtcgtcacgacgacgtgcggacgcagcggcgggggcgaaatcatcgagttccccatcctaaagctaaatggccggaccatgg

SEQ ID NO: 668005 - DNA, 75 bp, Homo sapiens
cgggatcaaagtgtaccagtcggcagcatgggtgcccacagtttgtgtgctgcggagatcgcctgatggggcccc

SEQ ID NO: 668006 - DNA, 98 bp, Homo sapiens
aatgacggttataagaccatttatttctttggagacaaaactatgccacttaagagttggacagtggaggaccttcagaagaggctcttggccctgga

SEQ ID NO: 668007 - DNA, 110 bp, Homo sapiens
acaggtgctacggctcacgcagctccaacccctacctgctgtctcaccccagtgagcccctggagctcgtggtctcagtagagatggggtttcgccgtgttagccaggat

SEQ ID NO: 668008 - DNA, 75 bp, Homo sapiens
gctggatgtttgcgacatcccagagagcttccagagtcatttggatccaggattcctagcaagtgacaaaacatc

SEQ ID NO: 668009 - DNA, 75 bp, Homo sapiens
ggctgaggagttttcaatcccaaatcggctacagtctcaaagggcaatgcttctgcagggcactgaaagcctgaa

SEQ ID NO: 668010 - DNA, 82 bp, Homo sapiens
ggaaggagcagaacgtgagggtgtaacttacaaaaaggtgacttaagagattaaaattaatttggttgctgttggttctgaa

SEQ ID NO: 668011 - DNA, 151 bp, Homo sapiens
tttacttgttggggccctcttgataaaaagagatgtggggggattctcgacctgctaacagaactggaccttttcgattgaaatcagcaagggatgtggttaccagaacaggacactcattggccttggggtccctacataggtatttagg

SEQ ID NO: 668012 - DNA, 75 bp, Homo sapiens
gggtggccgattactgcgagaacaactacatacagatgatggatttggacatgcttctatgaagaaatgccacat

SEQ ID NO: 668013 - DNA, 102 bp, Homo sapiens
tacagagtgctcaacaacttcatttccaaccaaaaaatggactttaaggaagatctttcagctatatgttctcctttcagccaagacctttcaccagtgcag

SEQ ID NO: 668014 - DNA, 75 bp, Homo sapiens
cggatcccgaagacgagggcctggaggaaacagcctttcagcaatggattggtgactgtgatggttccccagctg

SEQ ID NO: 668015 - DNA, 96 bp, Homo sapiens
tgagctcagaggtggtggattcgaatccctacagggaaaagaagatctcccggagcagtgccctgaaagtgctggaccatgccatgattggccccg

SEQ ID NO: 668016 - DNA, 90 bp, Homo sapiens
ggccccgcaagccagacctgcaggtgtacctgccgcgacaccgaggcggctgagccagaggccaactgcagaggaactggaacagaggaa

SEQ ID NO: 668017 - DNA, 100 bp, Homo sapiens
tcagctacttgaagatagccatcagccgctacgtgactcttttctccaggtgcgggccagtgctattgcccaggacgcggaccagaactacgactacgcc

SEQ ID NO: 668018 - DNA, 82 bp, Homo sapiens
gccgatccgccgcccgtccacacccgccgccagattcccaacctgctgagcatccgcacacccactcaggagttggggccca

SEQ ID NO: 668019 - DNA, 50 bp, Homo sapiens
ggatctggtaacatggcaaaagatgctgaggctgaggtggcctccttgaa

SEQ ID NO: 668020 - DNA, 97 bp, Homo sapiens
gacggattcatttagagctgcggaacaggacgccctctgatgaaatgatccgactagatgaagtccccaatctgagttccttagtatccaatttcga

SEQ ID NO: 668021 - DNA, 95 bp, Homo sapiens
gggagtccaccatcgctctgcaagccgcagattgctgctctctgaacactatagtcgtcgaatctcacaagcgtacggtctgatgaatgaactgt

SEQ ID NO: 668022 - DNA, 74 bp, Homo sapiens
cccggacctcgtcaggccgctgcagatgaccattccagacctgcctagagctggaacgttacctccagagcgag

SEQ ID NO: 668023 - DNA, 87 bp, Homo sapiens
ccacttcaaacattcgtctcggaaaccccgcctcttacagtcacgagagctccaagagtcaggatcgcaagtcagaaagcaaagaaa

SEQ ID NO: 668024 - DNA, 50 bp, Homo sapiens
ggacacagaagtatttgtgacagacaagttggatggcttgaggactggta

SEQ ID NO: 668025 - DNA, 100 bp, Homo sapiens
gcctctttctctcaggctttcctacaactcatgcccagcagcagcaagcagacttaattcagtgcacaaatgagatgaatgtgaacatcccacagttggc

SEQ ID NO: 668026 - DNA, 100 bp, Homo sapiens
gctagatgtttcatatgaaccaatgatagtgaaggaagctcgatatattgccataacaatgatgaaggctgaccggttccctgatgtgttacctgcttct

SEQ ID NO: 668027 - DNA, 76 bp, Homo sapiens
ctcggtgctgtgctgcaccgtgtgcctggacctgcccaaggcctccgtgtaccagcggaagatggagaaccgtgat

SEQ ID NO: 668028 - DNA, 90 bp, Homo sapiens
agaacgacctagtatttgaatttgctagtaacgtcatggaggatgaacgacagtgttgctaacaaccacaagcagaatttgatgacggtg

SEQ ID NO: 668029 - DNA, 75 bp, Homo sapiens
cagctgactgcacttcttttttgagaaaggaaggaatatatcctgactgattgcttcaggtgagaccacaggagt

SEQ ID NO: 668030 - DNA, 75 bp, Homo sapiens
gatacatggatctggcctcaagactggtgtataccaacagatgttttaaagattgtgtattctgtgggtgctcag

SEQ ID NO: 668031 - DNA, 78 bp, Homo sapiens
agcctgacaaccttggaacagaacaagaggacaggaggtgtcgttccagggcaacaggtttgtctatgctggctctaa

SEQ ID NO: 668032 - DNA, 100 bp, Homo sapiens
tgggaccttctccctgcctggacccctactattgcaacaagtgctatgaagggaaatcctccaaagatatcctgaaaagagtagctgcaaatgcattgat

SEQ ID NO: 668033 - DNA, 75 bp, Homo sapiens
tgtagacaggagctgttcctattcgggcatcttggctcctccttgagaatgtatcctgtcaggtataatgtcagt

SEQ ID NO: 668034 - DNA, 129 bp, Homo sapiens
agcagaatgggacatggttaatacagtttcatttaaaaggaaaccacataccaatggaggtcaatgggaaggatctttcaaaggccactcatgaagaggcagtggaagcttttcgcaatgccaaggagc

SEQ ID NO: 668035 - DNA, 51 bp, Homo sapiens
tttggagctcttggaaccaattgaacagaaaaccttctgaggaaaggaggc

SEQ ID NO: 668036 - DNA, 75 bp, Homo sapiens
ggtactggaaacccacaggcacacccaaagtcgggaagacatcactcatgaaccagtatgtgaataagaaattca

SEQ ID NO: 668037 - DNA, 75 bp, Homo sapiens
agatcgcccgccatggctttacttactgcggccgcccggctcttgggaaccaagagacgagttgtactgctgtca

SEQ ID NO: 668038 - DNA, 100 bp, Homo sapiens
atcaaccttagaaagtttcaatgcatccgtgtcattctggaccttactcccaactaccggggtgagaactcgtggttctccactcaggttgacactgtgg

SEQ ID NO: 668039 - DNA, 97 bp, Homo sapiens
aatagtttgatagagcttcctgatgactatagctgcctcctgaatcaagcttctcatttcaggaatacatggtttacaggaagcatacctacatgag

SEQ ID NO: 668040 - DNA, 99 bp, Homo sapiens
gatcgagcaggcggcgcagtacaccaacgcggtgcgcgaccgggagctggacctccgggacattcacggcatggtgtaactcccacctccggaaggcgg

SEQ ID NO: 668041 - DNA, 100 bp, Homo sapiens
gtttatatctaagactccaagtaaggaagaaattgagaaagaatgtgaagataccagtttgcgtcaggagacacagggtgttttgaatgctgtatcaaat

SEQ ID NO: 668042 - DNA, 75 bp, Homo sapiens
ctcacttggagctgtccagatcagcatgggcccatcccttgatggctcctcaggctgggcttggagcccacagga

SEQ ID NO: 668043 - DNA, 74 bp, Homo sapiens
agaggtgtcggaggtctcatctttgaactactgccggagcttctgccagattccacctgctcctacgaagcccg

SEQ ID NO: 668044 - DNA, 75 bp, Homo sapiens
cacaaagagttacatctcatcacagacaaatgctgacattgatgagatgaagatatcctatgtcttgaatgaggg

SEQ ID NO: 668045 - DNA, 100 bp, Homo sapiens
gcaagttgacggctctcgactaccacaaccccgccggcttcaactgcaaaggtgtgatgaatgcagactctgctaccattttggctgtttggatcctcct

SEQ ID NO: 668046 - DNA, 80 bp, Homo sapiens
acatggccaacgaaagaccctgaactagagtcccaggtcaaccttgccggtggtggtgtgcacattgagccccggtatag

SEQ ID NO: 668047 - DNA, 100 bp, Homo sapiens
cgtcccgctgccgtcgccgccgccaccatgcccaagagaaaggaaccctaaggactctgcaatatgaataattccctagagaacaccatctcctttgaag

SEQ ID NO: 668048 - DNA, 100 bp, Homo sapiens
tccagcggtcacctacccccagcaccacctccagcccctgcgcctcggcgatcgccagctcgagtgcagattccttgctgtgaccgaggttcagagtgag

SEQ ID NO: 668049 - DNA, 83 bp, Homo sapiens
ggcgcgcggcgctctggctctggctgtgcgcgctggcgctgagcctgcagccggccctgccgccactgaggcggctcccagct

SEQ ID NO: 668050 - DNA, 100 bp, Homo sapiens
gcatgaaccgcagccaccggcacggggcgggcagcggctgcctgggcactatggaggtgaagagcaagtggtggtgaccgcggtggcttcaaaaattttg

SEQ ID NO: 668051 - DNA, 75 bp, Homo sapiens
tgtggggggattctcgacctgctaacagaactggaccttttcgcacctggctgcagtggaagaaagaaagatcaa

SEQ ID NO: 668052 - DNA, 86 bp, Homo sapiens
ctggccctggtggggattgacagccacgggaagcgagcagctgatgcagctgtacagtgcgcgccagcggcggcggctgaaccggg

SEQ ID NO: 668053 - DNA, 83 bp, Homo sapiens
gtccttggggacggagcagcgcgtcgtggggcgagcggcaggaatcttgtcgattggcctggctgctgcctactacagcggag

SEQ ID NO: 668054 - DNA, 100 bp, Homo sapiens
aaagttttgcagatcttcaacaagaggacccaggagaaattcgccctcaaaggcggcgactggcggcgcgatggacctgaccgggctcctgctggacgaa

SEQ ID NO: 668055 - DNA, 100 bp, Homo sapiens
caaggagggcggcgggactgcactcgagtgtccagacctgctcgatggatgtgatcttcgtggtggaaagctaaattttaaaaccaccccaatggatgca

SEQ ID NO: 668056 - DNA, 100 bp, Homo sapiens
cgacggacaggctgccgcaccccaggcccccagaggccagtctgtttgcctcccaacgccatctgacccagggggcagctggcattttatgctatgtggg

SEQ ID NO: 668057 - DNA, 100 bp, Homo sapiens
gatcattttgctgtgatcaaggctatgttgcctctgtgttaggccaatgatttctctgcctcttccaaacttttcctccctgaacctgaggggtaagcat

SEQ ID NO: 668058 - DNA, 154 bp, Homo sapiens
gcagaggcgggcgcctaccagccggcagctccggagctgcccgcgccatgtccgcgcacaatcggggcaccgagctcgacaatgcagatcttcgtgaagactctgactggtaagaccatcaccctcgaggttgagcccagtgacaccatcgaga

SEQ ID NO: 668059 - DNA, 83 bp, Homo sapiens
taaaatgagaaatacctttggaagccatacatatgaaaatcagcttctcaaaagtgaaataagaagattggaaaggaatcaag

SEQ ID NO: 668060 - DNA, 100 bp, Homo sapiens
ggaaagaatcccggccagacgtgcgaacagctccagctgggaagctctatgcagaactgtgccaaggcatcgtggacatagccatttccagtgtcttccc

SEQ ID NO: 668061 - DNA, 78 bp, Homo sapiens
ttatagtcaacatggttgacgttgcaaaggcgcttaatcggcctccaacgtctaaaccatttacacagctggtgaaag

SEQ ID NO: 668062 - DNA, 74 bp, Homo sapiens
tgtacagcagtttcctcatccctgcagctgtgtttgaacagccaagaaggatcaagaaggtggagaagaaaaga

SEQ ID NO: 668063 - DNA, 100 bp, Homo sapiens
ttctcttggtgttcaactggaatagagcagcaggaacgaatgcaggaatttgggaactgagctgtgcaagtgctgaagaaggagatttgtttggaggaaa

SEQ ID NO: 668064 - DNA, 134 bp, Homo sapiens
tgttggggagaagaggattggaggtgtcagtgttaaaggaacctctacaacgaaggtgaagccacggaagataagacgcaaacatgcagatctttgtgaagaccctcactggcaaaaccatcacccttgaggtc

SEQ ID NO: 668065 - DNA, 76 bp, Homo sapiens
gcggcaggacgcacttgtcttagcagttctcgctgaccgcgctagctgtttcatgatcaacatgggagactcccac

SEQ ID NO: 668066 - DNA, 73 bp, Homo sapiens
gagccgcagctatggagccgcaggaggagagagaaacgcaggttgacaactacaggcacaagccattgaagct

SEQ ID NO: 668067 - DNA, 100 bp, Homo sapiens
tttcgcccgcggctcctgagggatcggtctcagccgcgcgggtggcaaatacagtgttcagttcaagttgcccgacgtgtatggtgtattccagtttaaa

SEQ ID NO: 668068 - DNA, 99 bp, Homo sapiens
cgagactgagctggctaagcaggtgctgcagacggagctggagcgaccgagagagctctctggcctgacaaccaatgttgtggacattattttggctca

SEQ ID NO: 668069 - DNA, 51 bp, Homo sapiens
ccgatggccctgtgggagaacagctcgtgcaagatttactgaaaactttgc

SEQ ID NO: 668070 - DNA, 50 bp, Homo sapiens
tgacaatggaggcctccctccggaaattggatacactcacatgaaaatag

SEQ ID NO: 668071 - DNA, 51 bp, Homo sapiens
gaggcctttcaccaagtccatggatgcctttgtggaactgtacggccccag

SEQ ID NO: 668072 - DNA, 83 bp, Homo sapiens
ccgcaaccattgacgccatgtcgggttattcgagtgaccgagaccgcggccgggaccgaggagaaccatggagtctggcagta

SEQ ID NO: 668073 - DNA, 98 bp, Homo sapiens
aaaattcaggaaggactattctcattaagtcctcctcgccatcctcatcacagcctcattctagccactgcagaacgaaggcctcatcattgtgtcac

SEQ ID NO: 668074 - DNA, 100 bp, Homo sapiens
ctggtgcccttgccaaaacagcggtagctcccctggaccgaaccaaaatcatcttccaagtgtcactactccatccagaagggagctgcgtttctgggac

SEQ ID NO: 668075 - DNA, 100 bp, Homo sapiens
ggacctcccagtactacccctcctactccggcagctcccggcggagagcggcagacggcagcctagctatcatggtgaacttacttcagattgtgcggga

SEQ ID NO: 668076 - DNA, 80 bp, Homo sapiens
ggtacatcgcctcagggcattcatttcaggctccttctaaatggccaaggaaccccagcatgttaattgaacttgatcac

SEQ ID NO: 668077 - DNA, 100 bp, Homo sapiens
accaggggcttgagagctgggttctattttccctcctcaaactgactttgcagccacggagagcacaagtgcatacaccttgatagcaccaaatataaac

SEQ ID NO: 668078 - DNA, 96 bp, Homo sapiens
ggattctcgacctgctaacagaactggaccttttcggtagttcttccaacgtttattcttgaaagaagatctcttttagaaatgtatgcagacttt

SEQ ID NO: 668079 - DNA, 100 bp, Homo sapiens
ctggagcggctggaagcgcggggcggccgggagggggcagtcctcgccggcgagttcagcgactggactcgggccatatccgtggtgccgtcaacatgcc

SEQ ID NO: 668080 - DNA, 83 bp, Homo sapiens
aagaatttcctctgaagcaccgcttccccgggcgctgcctggacaggcctgcctgcgtgctgggacatgtctggcctccaagg

SEQ ID NO: 668081 - DNA, 83 bp, Homo sapiens
cagagcccggggacggcgaggccctcatgtaccacacggtaactaggatttctacctcaaccgcgagacctatgcaaggacgg

SEQ ID NO: 668082 - DNA, 100 bp, Homo sapiens
cttgatcagtgtcaggctggttgtcaattttgatatgccttcaagtatggatgagtatgtccatcaggacagatcacttgtatgccttcttcattcagtg

SEQ ID NO: 668083 - DNA, 71 bp, Homo sapiens
atcttcgattgattgtagcttcagccactctggatgcagaccgaatagcacccagtcctgcctggcagaag

SEQ ID NO: 668084 - DNA, 74 bp, Homo sapiens
tttggtttgaggaggctgaggaggccatgatttctggagagcttgacattctcaaagactggtgctatgaagct

SEQ ID NO: 668085 - DNA, 100 bp, Homo sapiens
atcccagtgaagaagatgcagccattgtagacaaagtgctttctatgcggattgtgaagaaggagtacataccgagcatcaaatattaaggcacccggag

SEQ ID NO: 668086 - DNA, 114 bp, Homo sapiens
tcacagaccgttctggcaagtggagttgatgagaaacaggcaagaactcccctggagcaggaaattttcaacctcctccataagaacaagcagccagtgacagaccctttactg

SEQ ID NO: 668087 - DNA, 75 bp, Homo sapiens
ttgcaacatttcaggaaaacagagaaagaagtgataggagggctctgtaggttatgaagacagtatggagtttcc

SEQ ID NO: 668088 - DNA, 83 bp, Homo sapiens
caccatgttcggaatgctgctgttcgctggtgggaagatgtgaagttcatttccaatccgccctccatggtggcagcggggag

SEQ ID NO: 668089 - DNA, 98 bp, Homo sapiens
gacgtgctgttgcaactcgaggggatctccctaggtcctggggcctctctcaagatgagaaagatcagtctaaagaaaaggagaagaaagtgaaaaaa

SEQ ID NO: 668090 - DNA, 82 bp, Homo sapiens
ctgcagctggcgcctctgcagtgggacgaacaggaggcattgaactcaatcatgaacgatctggtggccctccagatgaacc

SEQ ID NO: 668091 - DNA, 59 bp, Homo sapiens
ttccgtttgttggtggaggaggtggcaggcctcggcgaccattcctcaagaattttgta

SEQ ID NO: 668092 - DNA, 51 bp, Homo sapiens
cggagcgtcccagctgcgaggaggaggagattgtatttcgttactaccaca

SEQ ID NO: 668093 - DNA, 83 bp, Homo sapiens
caattatcagtttacaacctgcacccactaaagggctttcagcaatcgtgagaccgtctagtataagacagagcacgaaaggc

SEQ ID NO: 668094 - DNA, 82 bp, Homo sapiens
aaaaacgatgttgatgtccaaattgaccaggagtcctacctgcctgaagacataaccactcacgaattcttgtttggtgccc

SEQ ID NO: 668095 - DNA, 75 bp, Homo sapiens
gcagcctgttatagtgcccatgtatgcagcaggattgggtatgatgtgattgctcaagctcagtcaggtactggc

SEQ ID NO: 668096 - DNA, 75 bp, Homo sapiens
cgaatgtgcaggatcaccgaggggaaagtgagcttgacagaccatgctcgacagctgaccaaggccatgatgcga

SEQ ID NO: 668097 - DNA, 87 bp, Homo sapiens
tcccctttcatttgcagatggaaagtttttaaaatggagatgtatgcatttcgattcttcatccgcctgtagatgacccacagagtg

SEQ ID NO: 668098 - DNA, 96 bp, Homo sapiens
ggccacttcgctgggaggccctgggctccccagtgccacccgaagggcctgaggaggccatctgcaggctgtccagaagggaagaaaatggagttt

SEQ ID NO: 668099 - DNA, 101 bp, Homo sapiens
gtccaggcggctacattcggcccggccatggcagcggcgcccctgaaagtgtgcatcgtgggctcggggaactgatatgtgattctgttggactggcaaaa

SEQ ID NO: 668100 - DNA, 100 bp, Homo sapiens
ggacaggttaagggactcccaggaatatcagccgagaccgacccgcccgcccgcggccccgcagcagctccaagaaggaaccaagagaccgaggccttcc

SEQ ID NO: 668101 - DNA, 100 bp, Homo sapiens
ggggatcagaggtccctggagtttctgcttcctccagagccaggtaactgccagtttctgtggctgaatttaagcacttacagcatcttcctagctgggt

SEQ ID NO: 668102 - DNA, 90 bp, Homo sapiens
gtctaagtccaaagatttttacccagatcaaaggtccatcatcaaaacaccaaagactcaagacacagaagatgatgagggagctcagtg

SEQ ID NO: 668103 - DNA, 75 bp, Homo sapiens
gtttcttttccggccctgggatgtcacgcacctgccaggagaacaggcagtggcagtgtgaccaagaaccatgcc

SEQ ID NO: 668104 - DNA, 90 bp, Homo sapiens
cgcagtcgctccgagcggccgcgagcagagccgcccagccctgccagctgcgccgggacggctgatcagctgaccgaagaacagattgct

SEQ ID NO: 668105 - DNA, 101 bp, Homo sapiens
agaaataccagtccccagtgagggtgtacaaatacccctttgaattaattatggctggtatgttagagcccaccaaggaaccactgaaaccactttctgct

SEQ ID NO: 668106 - DNA, 100 bp, Homo sapiens
acagagctgtaccagtacacggcccacgttgccaggccagaggcattgatgtgcagcaggtttctttagtcatcaactatgaccttcccaccaacaggga

SEQ ID NO: 668107 - DNA, 50 bp, Homo sapiens
gcggcgttggaggccaccgtttccagccgtgagcagaagtgtgtgaagtg

SEQ ID NO: 668108 - DNA, 100 bp, Homo sapiens
tggaagtagattggtttcagctgcattggttatcctttccgaacttcctgcagtgtgctctcctgaagccctggtttcctgaggtttgtgagggttttat

SEQ ID NO: 668109 - DNA, 100 bp, Homo sapiens
cttgaccattcagatggttcgatttttttataaagagaaggaatctgtgaatgccaaagttcttaaggactactgttcgaagatttttggaagaatactg

SEQ ID NO: 668110 - DNA, 83 bp, Homo sapiens
atgaagcccagcctagcaccattgccaccagcatgcgggattccctcattgacagatatgtaactggttcatcaatgcccggc

SEQ ID NO: 668111 - DNA, 75 bp, Homo sapiens
aggacggaaacgccgaggaacccggctgaggcggcagtatgaaaagacacagactgtactctcagaactgaagtt

SEQ ID NO: 668112 - DNA, 100 bp, Homo sapiens
tcacgctgatgaacttgtacttcacgcagcttcctgggtctgcaggtccagccggctggcaccctccatgtacccaggggagattccagccagacacccg

SEQ ID NO: 668113 - DNA, 97 bp, Homo sapiens
gcaaaaaagaaaagttgtttcctccaacattgatgttcctccagcaaggttggtcaaagaaaaagtgatgtatgaaaaagaggcaaaacaacaagaa

SEQ ID NO: 668114 - DNA, 100 bp, Homo sapiens
cttgcattacgtgcacagacgtcagtgtttctgaaagatctatccagcactccgatggccagcaacaacaccgccagcatagcacaagccaggaagctgg

SEQ ID NO: 668115 - DNA, 100 bp, Homo sapiens
ctggtatagacgcagaatctgtttcacacaacaactgctatttgaaggtgttggagcgggccggagagaagtagagtgggctgcgaggagaaggaaacag

SEQ ID NO: 668116 - DNA, 144 bp, Homo sapiens
gccatggcccccagcatgggctcctctgtcaatgacgctttaaagagagataaagatgccatttatggatgcacaccggctgcaccatgtcagcagcctggcctggctggacgagcacacgctggtcacgacctcccatgatgc

SEQ ID NO: 668117 - DNA, 74 bp, Homo sapiens
caacgacgttccatctgtggaaggacctaccaaccagcaacacagtcactcctggcggcaaaccaaacaaaacc

SEQ ID NO: 668118 - DNA, 88 bp, Homo sapiens
cggtggtgctggtggcggcggcgctttcggcgcgggcccgggccccgagcgcccgaacagctgtgagccgtgagctttgaggcggtgg

SEQ ID NO: 668119 - DNA, 100 bp, Homo sapiens
cagcctcagccgcgcgccggacggcgccgccctggccaccgcgcgcgcctcgccccggcagggaaaaccagtagattcccagacatcgcgaagtgaatct

SEQ ID NO: 668120 - DNA, 75 bp, Homo sapiens
ccactgcttctccgtgggcagcattggcgaccagcgcttcacggattgggccgagcctatgccctggcttttgca

SEQ ID NO: 668121 - DNA, 75 bp, Homo sapiens
gaagcagcagctcaccgaggacggggactctttggtgccctggttgtcagatgttggaaagcagtaggacggaac

SEQ ID NO: 668122 - DNA, 90 bp, Homo sapiens
aaaacgaccagagaggaccacatgaaactcaaggtccagggagtggagggaaccgctactccgatgattagctgcccagctggactctgc

SEQ ID NO: 668123 - DNA, 82 bp, Homo sapiens
gttcgagaacgaccccgagacggggccccttactggacacggcccgagcggatggacaagaagctgctggccgtgccggccg

SEQ ID NO: 668124 - DNA, 99 bp, Homo sapiens
ccgagggggagccccgcgcgcggcgtcgccaacaggaaggccgggtgtgcagtcacatctctgctagcttcggagctgaccaaggatgatgccatggct

SEQ ID NO: 668125 - DNA, 88 bp, Homo sapiens
gaaaactttcagctttggctttgctctctcttctgccatctgataataggtttccacttgagcggcacagtgacagaacctgcaatac

SEQ ID NO: 668126 - DNA, 90 bp, Homo sapiens
tgctagtcgctgcaacactcctctacagtttgagatgaaattgacagttcttcaatgtcagatgatgatagaaaagaggttgtaaacatt

SEQ ID NO: 668127 - DNA, 50 bp, Homo sapiens
atcggaatctattaagaatgatgagctgctggagccagttctgcttctcg

SEQ ID NO: 668128 - DNA, 100 bp, Homo sapiens
atgtccatgtccgcctttgctccgagctggggtctcatgtctgtggtgctggaatccagagccctgacgctctggctttcaggctagaggaagagcagaa

SEQ ID NO: 668129 - DNA, 98 bp, Homo sapiens
tcaaatggtagtcatctggggactaagcaacaggtgtttcaaggaactaattctctggctcaaagcttggattctgccgtgccactcacgaatggcga

SEQ ID NO: 668130 - DNA, 75 bp, Homo sapiens
ggagtgatgtcttccagactcggtgctgtacccgcccttcgagagctgtgcccaggagtgaacaaccagccctac

SEQ ID NO: 668131 - DNA, 100 bp, Homo sapiens
caaaagaagagcagtcacagatcaccagccagggggcaagcgcgatgaagagctggttctgcccatcaactcctccctgagcgtcactctgcaccaggac

SEQ ID NO: 668132 - DNA, 51 bp, Homo sapiens
ctgcagacttcgaggagctagaaaagcaggaaaatgtttataggaggcctt

SEQ ID NO: 668133 - DNA, 90 bp, Homo sapiens
cagaaatcatagacttgtattccaacttcccgatcggcgagaagcaggatatctgggtgtggacatgatcagtaaaatgctgaagatgca

SEQ ID NO: 668134 - DNA, 110 bp, Homo sapiens
atcccggtccctgcagagcgatccccgggcccagatatggacgcagcagagccgggggaaggagaagttcctgggcatcctgaacaaatacatggagatccatggcaccg

SEQ ID NO: 668135 - DNA, 102 bp, Homo sapiens
taaagcgcaggcgggcggggaggcgggagcaggagcccgcggccggccagccgaagatggtggcggctactcctcctggaccatggccaacctggagcgcac

SEQ ID NO: 668136 - DNA, 75 bp, Homo sapiens
gtcattttactgtcaagacatttcttcggcattctgcaacagggctgatggagttatgagaacaatgaacacaga

SEQ ID NO: 668137 - DNA, 112 bp, Homo sapiens
gcagacggtggaactgggcgagctgcggctgcgggtgcggcgggtcctggccgaagacaatgcagatcttcgtgaagactctgactggtaagaccatcaccctcgaggttga

SEQ ID NO: 668138 - DNA, 82 bp, Homo sapiens
aagaaagaaaaaggcagtgagacagattcagcccaggatcagcctgtgaagactggatacacgtctgtttaactacgcaaaa

SEQ ID NO: 668139 - DNA, 82 bp, Homo sapiens
cgggcagtttgaggagctgctgcgcctcaaagccaagtttggtgcacctcgatttggaggaagtagggcagggcccttatct

SEQ ID NO: 668140 - DNA, 83 bp, Homo sapiens
gcagccgcggatctcaccgccgctcagggggccaaaccagtgctcctgccacctctctggctgccccctagagcctgcccatc

SEQ ID NO: 668141 - DNA, 101 bp, Homo sapiens
tataaatgaagatctggacagtggcacacagataccgtttattaaaagagctgtggctagtgctgcagcagctcccagtccagtgctaggaaacattcccc

SEQ ID NO: 668142 - DNA, 75 bp, Homo sapiens
aacgtgccctactctgccccgggggagaggttatggaaacaaaggacatgctttacatcgtcactgaatttgcta

SEQ ID NO: 668143 - DNA, 100 bp, Homo sapiens
gacatgattgcctaaatcagccaaacacagggttcgagaacttgtcttggacaattgcaaatcaaatgatggaaaaattgagggcttaacagctgaattt

SEQ ID NO: 668144 - DNA, 99 bp, Homo sapiens
ggtggcctgggcagcctgctggaccctgccaagaagtcgcccatcgcagcagctcgggacccagtgtcctggtttcgggatggggagccaaagctgctc

SEQ ID NO: 668145 - DNA, 75 bp, Homo sapiens
atgtatcagggacagtggcggatgtgcactgctacaggactctactatggagctttgaaaagtccagccgcattt

SEQ ID NO: 668146 - DNA, 89 bp, Homo sapiens
ccccctcccccctccggcgcggaccccgcgtgcgccttgctcgcccgcagccccgagaccgcagacatgcaagaaagcacttcagccaa

SEQ ID NO: 668147 - DNA, 100 bp, Homo sapiens
ccgagatctatggggtcacccacacccgcggcatctaccagaaggccattgaggccctcctgctgctggtgcccgccttcctcctcatcggctggggacg

SEQ ID NO: 668148 - DNA, 75 bp, Homo sapiens
tcttcctcctcctcttcctcctcctctggggggcccttccagcctgcagactttggcttcatgtttgaaagctcg

SEQ ID NO: 668149 - DNA, 100 bp, Homo sapiens
caagcctggaggacctcttcaacttctgctccaggaaattcagcctcaaaaccgtcctgctgcttgctgaccaaatggccaagactaaggggctgcagag

SEQ ID NO: 668150 - DNA, 82 bp, Homo sapiens
ttgtgagaggaaaggcctctcggagctgcgatcgggaactgtggctgcaccatctgtcttcatcttcccgccatctgatgag

SEQ ID NO: 668151 - DNA, 88 bp, Homo sapiens
gtcggtttccggatgaaacgaggagccagctccatcaagtatgatggtgaaggatgaatatgtgcatgactttgagggacagccatcg

SEQ ID NO: 668152 - DNA, 75 bp, Homo sapiens
ggaacgtgaccgtcactgacgtggacatcgtcttcagcaagatcaaggatctgaaacttgcccacccttcgggat

SEQ ID NO: 668153 - DNA, 83 bp, Homo sapiens
tcaagcacctgcgcatcgtcatcggtgtgagttcttgatacgaatgaaaggccaagagtttgttgatgagattcaaggtagat

SEQ ID NO: 668154 - DNA, 75 bp, Homo sapiens
gaggaggagataacgcggccttgggctctgaaccaaaaacttttgctagaaaatcagcttttacgagagaaaact

SEQ ID NO: 668155 - DNA, 50 bp, Homo sapiens
ctgtgatgtgtgccgagggaggaattgctttctaaaaccaatttttccaa

SEQ ID NO: 668156 - DNA, 76 bp, Homo sapiens
gtccgagtccacggtggtgcgcgacgtgttctatgatggctgccagcgggaccaggatggctattactggatcact

SEQ ID NO: 668157 - DNA, 90 bp, Homo sapiens
cttgacgtaacagaaatgtgccaatagtgttctggacttggtgcctctttctgttatatgctttcctatttagttgggagaccagttgta

SEQ ID NO: 668158 - DNA, 83 bp, Homo sapiens
cgctggtgcagccaccctcgctccctctgctcttcctcccttcgctcgcaccatggccaaatagttgcatcacatgtatctaa

SEQ ID NO: 668159 - DNA, 100 bp, Homo sapiens
accaggactcagaggccgccatcaaccgccagatcaacctggagctctacgcctcctacgtttacctgtccatggttcagcagactgtacaggatctttt

SEQ ID NO: 668160 - DNA, 75 bp, Homo sapiens
agaggaccttctgattagtccacagtcttcctctataggcagtgtagccaatcaagtattccacccagtgatgtt

SEQ ID NO: 668161 - DNA, 74 bp, Homo sapiens
ggacggcgctgcggtacatccaggtgaaagaaaatggcccgaaccaagcagactgctcgtaagtccaccggtgg

SEQ ID NO: 668162 - DNA, 90 bp, Homo sapiens
caagatggttcatcttttgccctagagcaattgaagaataacaagcctttgtattcatttgaagataatgcagactatgtttatgatgtt

SEQ ID NO: 668163 - DNA, 71 bp, Homo sapiens
cttgatgagaaggacccacggcgtctgttcgaagtaacaacatgctgtaccccaaggaagacaaggagaac

SEQ ID NO: 668164 - DNA, 74 bp, Homo sapiens
cgttttgctggcagcaggatcatgtgacttcaaatgcaggtactgcttctccgagatggccccagtgtgtgcgg

SEQ ID NO: 668165 - DNA, 75 bp, Homo sapiens
ctggatcaccgacagcacagacagaatccctgctaccaacaatgcagatcttcgtgaagactctgactggtaaga

SEQ ID NO: 668166 - DNA, 100 bp, Homo sapiens
gggagatcatcatctgcacctaccgccagacatatctgaagagatggattaagaatgctttggattaaggattgtggagcacatttcaatcattttagga

SEQ ID NO: 668167 - DNA, 75 bp, Homo sapiens
taaatacgaatctttccaaaggagatgcccgtacaagccagctgccatgttgtgagcacataccacatagctcca

SEQ ID NO: 668168 - DNA, 82 bp, Homo sapiens
cgcagtggtcgcttcttctccttgttgatcatggccttgccaggttggtgacagtatattgtgagcatggtcataaagctgc

SEQ ID NO: 668169 - DNA, 80 bp, Homo sapiens
ctcgtggcctgcctctgcgtgcaaatctcccaagcctaagaagaagaagcacaggaaggagaaggaggagcggaccaaag

SEQ ID NO: 668170 - DNA, 73 bp, Homo sapiens
gacaccatcagcaaaggagactttataactatagggtcaaaatgcagatcttcgtgaaaacccttaccggcaa

SEQ ID NO: 668171 - DNA, 75 bp, Homo sapiens
cgcctgtgggcacagacaaggagctcagtgacctcctggacttcagcatgggactttgaacatgtcggggatcgc

SEQ ID NO: 668172 - DNA, 83 bp, Homo sapiens
cttcagatgcgcggggcgtgcgcgtcctcctccccaggcccgccgcctccctgccaagcacttgcacctcctgcgccgccgcc

SEQ ID NO: 668173 - DNA, 75 bp, Homo sapiens
caggctctggagaaagaggagaagaggaacccgcagtgtacgcacacaagcaggaacccccccagtattcccaca

SEQ ID NO: 668174 - DNA, 100 bp, Homo sapiens
actgggaggctgtggaggttggggcctccagccatgacagtgatgagaaagcgttgacagaaggctacgttggggccctgcacgagaatagacacggcag

SEQ ID NO: 668175 - DNA, 100 bp, Homo sapiens
gcatgaaagctacacttcaaccagagtgcttagatgagtacgaagatgatgaagcagggcagaaagagcggaaacgagaagatgcaattacacaacagaa

SEQ ID NO: 668176 - DNA, 75 bp, Homo sapiens
aagaaaaggagacaaggatggctcttcctcaggagaggcaagagaaagctctgggcatcctgacatacctgggcc

SEQ ID NO: 668177 - DNA, 90 bp, Homo sapiens
ctggagggtatggatatggatatggacgttccagagactataatggcagatacagaaggtggtcatggcactaggagactacatgggcgc

SEQ ID NO: 668178 - DNA, 83 bp, Homo sapiens
gagggctgcaggtggtggaaaagcagaaccttagcaaagaggagctgatagcggagctgcagatcctgaggaggatgaagggg

SEQ ID NO: 668179 - DNA, 100 bp, Homo sapiens
cttcgatctctcaagagcctagtttagcagacataaaagcccggattcaggattcagatgaaccaggcaggaagacagggttctgatggtgtgagtctcc

SEQ ID NO: 668180 - DNA, 90 bp, Homo sapiens
ctgtcttcatctttacagaggaatagtctacaaaggaagacttgtaacctggagaagagggctgaaagacacacagaagtcttcatggat

SEQ ID NO: 668181 - DNA, 75 bp, Homo sapiens
ctacaatggctccttgatggacggcaccctcttcgattccaggctctacaaggaacagggtgaggggcagggtga

SEQ ID NO: 668182 - DNA, 75 bp, Homo sapiens
agatgcttcagagagaggaagccgaaaacaccctgcaatctttcagacaggctccaaacaggcatgcgaggtgcc

SEQ ID NO: 668183 - DNA, 100 bp, Homo sapiens
cccgcgtccagcacctacgtcccgctgccgtcgccgccgccaccatgcccaagagaaagggagaggctagtggtaacaggccgagctggatggatgggta

SEQ ID NO: 668184 - DNA, 90 bp, Homo sapiens
cgatcattctgcaagcaggcaacctgaatacagagtgcctggtgaagaatgtgatgggatcactagcatgtctgcggagagcggccctgg

SEQ ID NO: 668185 - DNA, 102 bp, Homo sapiens
tcctggctgtacaattcgtaacacaccttcagaacctatacattgcatcgtttgggcaaagtacttgttcaaagaacggagaccaacctgggctgaagaaag

SEQ ID NO: 668186 - DNA, 51 bp, Homo sapiens
attccaagtaactcttatttgtgtatcggatctgtcgttctggaaagaaga

SEQ ID NO: 668187 - DNA, 51 bp, Homo sapiens
gtatacgaacggctctgcggcgaggaggttgtacgtggacactataaaggt

SEQ ID NO: 668188 - DNA, 98 bp, Homo sapiens
agtttaaacaaccctgccatgttgcaagttcttctacagccccagttatgtggacgagctgttaaaccagattcaagtcaatctgaaagtcccagcca

SEQ ID NO: 668189 - DNA, 75 bp, Homo sapiens
ccccaagacccttgtgctcgttgtcgccgcggtcctgctgttgggactaaagacatgtggaaagcctactctgac

SEQ ID NO: 668190 - DNA, 162 bp, Homo sapiens
taccatgacacagtacaggattcctgatatagatgccagtcataatagatttcgagacaacagtggccttctgatgaatactttaaatacgaaaaccggtgaggtccaaacattgtggtgtgtgcaaccgctgtatagcaaaatttgatcatcattgcccat

SEQ ID NO: 668191 - DNA, 100 bp, Homo sapiens
gctattgctggacggccagtgggagagcgaggcctgagcctctgcgtctaggtgactctcctattccatctgtttcttcgggatcatcttcacctctttc

SEQ ID NO: 668192 - DNA, 55 bp, Homo sapiens
tggtttcctttctcaccactgccattgccttgcctccccgattgaaagagatgaa

SEQ ID NO: 668193 - DNA, 100 bp, Homo sapiens
cgccccgcccgcaggtgctatgctgtgggccccgctcagacccaacatgagtgaagtttcctgcaagaaacgggacgactatttggaatggccagagtat

SEQ ID NO: 668194 - DNA, 115 bp, Homo sapiens
gtcttcccgcgtccgccgattcctcctccttggtcgccgcgtccttggctggcgtgcgacgttgtggacgtttaccagcgggagttcctggcgctgcgcgatcggttgcacgcag

SEQ ID NO: 668195 - DNA, 74 bp, Homo sapiens
tgcagcttcaagcttaggaccacccaccatgcctatccaggtgaaagaacttgtcctggacaacagtcggtcga

SEQ ID NO: 668196 - DNA, 98 bp, Homo sapiens
cggctcccagagaaaaatcggcagatgttacagctgctcatgaaccacttggcaaaggtgataaaagaaaatgtggctgaagttacccgaagttcagc

SEQ ID NO: 668197 - DNA, 82 bp, Homo sapiens
tcattgcaggaagtggatgagttccacctcattttagagtatcaagcagtacatgctttttaatgggacctgtgaagcaact

SEQ ID NO: 668198 - DNA, 98 bp, Homo sapiens
gcaaagggcacgtatagcattggtaaagaacgatcgtccagtggagcttagcagtgtctgcaaaaacgaatcttttcctacaacctgttaactgactg

SEQ ID NO: 668199 - DNA, 50 bp, Homo sapiens
tcctgagtagctgggattgcaggtacactaagatgaagacggccaccaac

SEQ ID NO: 668200 - DNA, 100 bp, Homo sapiens
tgaagatgtaagaaaggcagcggatcgtctggaggaagagatagaggaacatgcttttgacgacaataaatcagcaatggaacccactatgaagtttagc

SEQ ID NO: 668201 - DNA, 75 bp, Homo sapiens
ctgggcagtttggggaagtctggatgggtgtgctgggcatcaaggtgaagatcatgctgccctgggacccaactg

SEQ ID NO: 668202 - DNA, 100 bp, Homo sapiens
tcagccctggacctggcagatccttcagcaaaagctgtccttacaggtgacctggtactgcttgatgtatgtccccttacacttggtattgaaactgtgg

SEQ ID NO: 668203 - DNA, 98 bp, Homo sapiens
accgagagcgtgaccgagagcgcgaatatcgtcatcgttagaaggttcagagaagattcttcatgggaaatcaagttctaaaggtctttgcagcaaga

SEQ ID NO: 668204 - DNA, 83 bp, Homo sapiens
gtggaacggctgcttttggaagatggcatgatcaacattgacatgactggagagaagaggtcgttggatctcccatatcccag

SEQ ID NO: 668205 - DNA, 75 bp, Homo sapiens
tgacagccctgtgtgacaccaagataagtaacatgtcgccctctggtcgcctgtgtcttctcaccatcgttggcc

SEQ ID NO: 668206 - DNA, 75 bp, Homo sapiens
cggcagccttgactccccagggaagcaggatggtgagcagcgtccctctcatgtgacacccacagttatgccgga

SEQ ID NO: 668207 - DNA, 100 bp, Homo sapiens
aatccgcttcctgcacagccagggacttgtccatcgtgatatcaaactgaaaaatgtgctgacaacgactgaaagacctttcattcagaagctgtttcgt

SEQ ID NO: 668208 - DNA, 83 bp, Homo sapiens
ctcgcgacccccggcaacccggagaaggtctacagagcggcctgcgccagcgaggacaagaatccttcaagaaacaggaaaaa

SEQ ID NO: 668209 - DNA, 83 bp, Homo sapiens
ttccttgacagcccgggccgagaagtttgctggcctagacctgaactcttcagataatcagagtggaggaagtacagccagca

SEQ ID NO: 668210 - DNA, 75 bp, Homo sapiens
agaacccttccggtgggctaggtactgagcgcgcgaggtgagtgatgaaatggtagtggagctcattgagaagaa

SEQ ID NO: 668211 - DNA, 82 bp, Homo sapiens
ttcccgcaagcccagacaatgccggtggaggaatttgtggctggctggatctctgctcctgacccctgaggattaccagcga

SEQ ID NO: 668212 - DNA, 97 bp, Homo sapiens
ccgggctaggacgccgagcggtgactccccgccgctcccgggggccgtgacggaaatgcttccagactgcacacttttacttagaggacagtacatc

SEQ ID NO: 668213 - DNA, 50 bp, Homo sapiens
atggactcctgacgaccaacagcttcctgcctgacacagctcacttcaag

SEQ ID NO: 668214 - DNA, 51 bp, Homo sapiens
ctggagcagcattccagggcctgaggttgcagaacttgaagctaatttacc

SEQ ID NO: 668215 - DNA, 97 bp, Homo sapiens
ctctgcacctcgcgccccagcagtgcctgaaacagtacatgcagctggcaatccgagaaggatgtgggtctcccatcacttgccctgacatggtgtg

SEQ ID NO: 668216 - DNA, 89 bp, Homo sapiens
gaacgaggcaaggagctaaagcagcgtgcgttcagccctggggttgaaatcacaaagattagacacctttttagataggtgttcttcag

SEQ ID NO: 668217 - DNA, 100 bp, Homo sapiens
cagcgactcatgagagcgcggccggaggacagaacccagtgacttgattgtaaaaatttacagagcggaatcatatgctggtctccaagagtttaaagca

SEQ ID NO: 668218 - DNA, 100 bp, Homo sapiens
cccagggcccacgggccagccccgccgccctcgcaacctggcagccgccgccgtggaaggaacttgctactaccagcaccatgccctaccaatatccagc

SEQ ID NO: 668219 - DNA, 100 bp, Homo sapiens
gttgaaatcctggaaaggaggacgtcagtgccgtcgaggagctcttcagcgctggcagcgtctatcccagactaccggggccctaatggagtgtggacac

SEQ ID NO: 668220 - DNA, 75 bp, Homo sapiens
aaagctgttttggaactgtcaggtacctcaaagcgaatcatcatgttggttggctggttactgggaaaagatatc

SEQ ID NO: 668221 - DNA, 100 bp, Homo sapiens
acaaacttttagttgaagatataaataaggataaaaacctggttcctgaagatgaggcaaatataggggcatcagttgttgaaatggatgaaaacaacgg

SEQ ID NO: 668222 - DNA, 74 bp, Homo sapiens
catgggtggtggtcgcgctgtgctccagtgtggacactgccagcggctgcagccgacttggaatgacctgggag

SEQ ID NO: 668223 - DNA, 49 bp, Homo sapiens
cggcctgcgcagccacctcaagaatgtcgttcatgagctaagaataacc

SEQ ID NO: 668224 - DNA, 103 bp, Homo sapiens
ttttgttcaagataaagtgattttttgcctttgttgattaactggacaaattcagatcatatactcctatgaaaggaggaatctccaatgtatggtttgacag

SEQ ID NO: 668225 - DNA, 74 bp, Homo sapiens
agccatcagccgctacgtgactcttttctccaggtggataattactgtaccttcctcatggaaaaagttttatt

SEQ ID NO: 668226 - DNA, 75 bp, Homo sapiens
cccagatgatggttagcagtttttggcaatcacgtattttcaaagttcactattatgaagatggcaatgttcagt

SEQ ID NO: 668227 - DNA, 101 bp, Homo sapiens
tttttgcctttgttgattaactggacaaattcagattgaacgagaggcaattattttagataatcttcaggaagaactccctgaaatttccaaaacaaaag

SEQ ID NO: 668228 - DNA, 90 bp, Homo sapiens
actgcagcgattgcgagaatgaggaggacaacagctacaaccgggggtagtaaacctattgatggcaattttgctgactgtggaagtgac

SEQ ID NO: 668229 - DNA, 78 bp, Homo sapiens
tttgacatggacggacttcttctgggtagtgatcaaagagttcaaaatttcaatttgccccgtctgtgtatacagaag

SEQ ID NO: 668230 - DNA, 97 bp, Homo sapiens
agatgattaaaacggaatttacactgacagaagcagtggtcgaatccagtagaaaactggtcaaggaagctgtccttctggcactcctctggtggac

SEQ ID NO: 668231 - DNA, 90 bp, Homo sapiens
caagaccaagggctacgcagggaccccagccctgcagccgcttcccagttgcgccctcctctgccctggcttcgtctgaggacctgcagc

SEQ ID NO: 668232 - DNA, 75 bp, Homo sapiens
aaaggtgccacagcagagacgcgaaggagaggccctagaaccgaagcagagctcattcatcagagggaaatagaa

SEQ ID NO: 668233 - DNA, 100 bp, Homo sapiens
gtgcatttccatatggcaatgaacagaaactgttcatacttggtgcgctgtggactcttgtgataattaaccaagagtagctctatttgtccaacctcac

SEQ ID NO: 668234 - DNA, 78 bp, Homo sapiens
acggttttggatcacaggcctgcattgatctggtagccttgctccagaagcctgttcctcacagtcaagcctcagaag

SEQ ID NO: 668235 - DNA, 73 bp, Homo sapiens
ctgaaacagaaattctggaacacctatatggaacagcgccttttgatagtcctaagtaattgctgctatctag

SEQ ID NO: 668236 - DNA, 87 bp, Homo sapiens
gcagatctgctgctcatccttgggacctccctggagggtggagccagccatcctgagacgtccgtacagcccgtactggtggagtgt

SEQ ID NO: 668237 - DNA, 88 bp, Homo sapiens
gcctcatctgttccagggaggtgggattgacttcgtgctctgtctgatgatggagtatctgatcttgaagacccaaccttgactcccc

SEQ ID NO: 668238 - DNA, 98 bp, Homo sapiens
gttgttgccttgggaatcctgtcttggactgtgatctgttgttgtaagaggcagattccccaggcgacggcttcgatgaaggacggcaaatgggagcg

SEQ ID NO: 668239 - DNA, 100 bp, Homo sapiens
gttccatcgagccattactacagtgccgcagcatctcttgccaccattccatgcgcccctaccgattgacatgcgacaccaggaaggaaggtaccattac

SEQ ID NO: 668240 - DNA, 50 bp, Homo sapiens
gagcctgaagatggcacagctctgggagttgctgagtcagcccagaccgg

SEQ ID NO: 668241 - DNA, 100 bp, Homo sapiens
gtcgtgtacccttaacaggtatctgctcctcatggcgcaggagcatctggagttccgcctgccgcatcaggcactggccaagatgatgctgatggccact

SEQ ID NO: 668242 - DNA, 97 bp, Homo sapiens
catgggcgcgtcacacaggcctccgtgaagaacttccagatcatccatggcaatgaccattcctcaagccagaaacagaacaacaaaactgagatgt

SEQ ID NO: 668243 - DNA, 100 bp, Homo sapiens
aaggccgaagccgagcagaggatctaaatacaagagtggcctattgctagagaccgttggatggcagcttaaccttcagatggctcactctgctcaagca

SEQ ID NO: 668244 - DNA, 75 bp, Homo sapiens
cgttgacagggaagcagccggatgactggtgatgtacatcgagagagacagcagaaagaccactccaggcaagga

SEQ ID NO: 668245 - DNA, 100 bp, Homo sapiens
tattaccctttgtgtcatcctccacagctccagggaaggcactcaaaagtggggggcaggaaagggatcacatgcagtggtctaaggaagaagaagcagc

SEQ ID NO: 668246 - DNA, 98 bp, Homo sapiens
gtggccccgtgtcctgcaggtattgggagatccacagctaagacaccgggacctcctggaagccaaaaatgctatccagtcagttcgctgctattccc

SEQ ID NO: 668247 - DNA, 86 bp, Homo sapiens
gtacgagaatctgtacgcagggaggaagtgcctgctgattgtcatggaatgtatatgactctcaacccttctactaagaggaagaa

SEQ ID NO: 668248 - DNA, 95 bp, Homo sapiens
ccatccacaagattgaggagggccatctggctgtgtactacagttgctgatagtccaactccaccgccaccacctccaccagatgacattcccat

SEQ ID NO: 668249 - DNA, 90 bp, Homo sapiens
ctgatagaaatcatttccatcaataccgggctaatgtaatgcttgaatatgatattgatgaagctcaggcattgttggaaaagaatttat

SEQ ID NO: 668250 - DNA, 75 bp, Homo sapiens
atatctctcttttggctgccagacccaaatactattttgcatggacgctaggagaaaatgcagaagtctccatgg

SEQ ID NO: 668251 - DNA, 100 bp, Homo sapiens
tttacagcatcaagtataataaccaattagcaactcggactgcacaagctatttttgatgacagctatttggatggagagccacttagcttgcagactgc

SEQ ID NO: 668252 - DNA, 89 bp, Homo sapiens
cgggagcggagacctcgctgcgctcatggcgtcgcccggcggccctccaggcactgaagcgtaagaagaggtatgagaagcagctggcg

SEQ ID NO: 668253 - DNA, 83 bp, Homo sapiens
agttttctactgtaaagtcaccaacgagatcttccgccactacgaagtgaagacatttccacctggacacctgaccatgtgcc

SEQ ID NO: 668254 - DNA, 112 bp, Homo sapiens
tggatttatttctcgattcgctgtcggaggagaatgagaccctggtggagtttgctattggtgccaagtctagtggtggcagggaagacttggagtcatctggactgcagag

SEQ ID NO: 668255 - DNA, 100 bp, Homo sapiens
gatctctgtcagtcggacctgcagcaggttctgttcttgcttgagtcttgcacaggttggatggcaagcatgtggtgtttggcaaagtgaaagaaggcat

SEQ ID NO: 668256 - DNA, 88 bp, Homo sapiens
accactccacagcagaccaatgagaaagatcagtctaaagaaaaggagaagaaagtgaaaaaaacaattccttcctgggctacccttt

SEQ ID NO: 668257 - DNA, 88 bp, Homo sapiens
tctgagaagcgcacacggttagaagagatgatgcagaacttactcttggaagaaggcggcctggtccaggtggagagcgtcaaccttc

SEQ ID NO: 668258 - DNA, 86 bp, Homo sapiens
gccccaggtacgctaggccgcggccttcgttcctcccagaaagttctgccttcccaggaccctgcccttccccagaaggagcagga

SEQ ID NO: 668259 - DNA, 100 bp, Homo sapiens
acgcagcggagatgcctctttttgccaccaatcccttcgatcaggatgttgggtgagatctcagaccccttccgcttcaccaccttctacatccactttg

SEQ ID NO: 668260 - DNA, 100 bp, Homo sapiens
gtggaggctgctaggagccggtcagaggggggtcctgatgacaacttaattgaaggtggaggaacaaaatttgtctgcaaacctggagccagaaacatta

SEQ ID NO: 668261 - DNA, 97 bp, Homo sapiens
gcggggagccccgcctgaggtgccctaaacacactatgaccgcatcaacaacagcaacttgtgattggcggtgaccggatattcagttgcacatccc

SEQ ID NO: 668262 - DNA, 82 bp, Homo sapiens
gccaaggaaaaactggagagcttcatcaaaaatagtgatagctttgataagaggagatgttaaagtaacccatcttgcagga

SEQ ID NO: 668263 - DNA, 136 bp, Homo sapiens
actaccgaaccaggtggagtggtatccggaagcagcacatggtgaatgccacacccttcaagattgctcgaggccaggggtgaatgtgatgctgaggaagattgctgtggctgcagcgtccaagccagcagtggag

SEQ ID NO: 668264 - DNA, 75 bp, Homo sapiens
gtctgcgccctaggatgcactgagatggtacatcaggataactgctcgtatcagtgcctggatcaaagtggaaca

SEQ ID NO: 668265 - DNA, 100 bp, Homo sapiens
ctcaagcgcagcgccctcagcagctccctgcgggacctctcggaagccgggagagtcccgtattctcagagtaaaagttgtttctggaattgatctcgcc

SEQ ID NO: 668266 - DNA, 112 bp, Homo sapiens
gctgtgcagccgcgaggaggcgcgggaggtgttcgagaacgaccccgagacgaagctggcagggcggagatgctggaccacgccgtcctgcttcaggtgatcaaagaacagc

SEQ ID NO: 668267 - DNA, 90 bp, Homo sapiens
ccgcaccatcggcaagggcaacttcgcggtggtcaagcgggccacgcacctcgtcaccaaggccaagggcaccactgagttcagtacttc

SEQ ID NO: 668268 - DNA, 82 bp, Homo sapiens
attggcaggcctgaggtccttgttggctgcttgctggagagattcctcggacaagaaggaaaagaaatcttttagccttgag

SEQ ID NO: 668269 - DNA, 100 bp, Homo sapiens
ccatctgctgccacaccagcaccagcaagcggcattggctgcgtctcaggcctcaaggccggaacagtccgtgatgcaagctctcgagagtctcacggag

SEQ ID NO: 668270 - DNA, 90 bp, Homo sapiens
cttatttagccggagtgagaagcaagaaggccctggacacagcaatatctctgggctttcacagatgtcagtattgaatatggtggtgag

SEQ ID NO: 668271 - DNA, 90 bp, Homo sapiens
ccctgcgcttcgtgcaccggggcggtccgttgccaaagccaggtgcagcagttcctgcggcaagcccagcgggggacagaggaaaaggag

SEQ ID NO: 668272 - DNA, 96 bp, Homo sapiens
ccgtgaccgagagcgtgaccgagagcgcgaatatcgtcatcgttagaaggtgcccttgctcgtgtgaatgaacagaggccagagaattgcagaaac

SEQ ID NO: 668273 - DNA, 83 bp, Homo sapiens
aaatgcagcatctgcgatgtgaggaaaggcacctccaccagtgatgtcttggcattgcccattttcaagcaggaagattccag

SEQ ID NO: 668274 - DNA, 100 bp, Homo sapiens
gaggaaactaacctcaacctctgccatcacaaggagtgagaagctgctgctctatgacacgctgcagggggagctgcaggagcggatccagaggctggag

SEQ ID NO: 668275 - DNA, 85 bp, Homo sapiens
acaggttaatctgttggattctaatgcagttcatcacatcattcatgattttcaggttatctaccttgcctgctcctatgccaca

SEQ ID NO: 668276 - DNA, 88 bp, Homo sapiens
gtgggcgagaacgtccactgcgggccggcgaaagctggtaacgtgaagcacctggttctcttcctccatgaggctgtcctggtgcagt

SEQ ID NO: 668277 - DNA, 100 bp, Homo sapiens
gcttaacttggaggagtactactttgaacagcatagagccaatcacattttgcacaagggcagtcaccatgaaaggtatgtacaagctgtgaggacaacg

SEQ ID NO: 668278 - DNA, 82 bp, Homo sapiens
cgctcgagacttaccagagccacaagccattgagacccagagcagcagttctgaagagatagtgcccagccctccctcgcca

SEQ ID NO: 668279 - DNA, 88 bp, Homo sapiens
cgcctcccggctctcgtcagcctcccgccggccgtctccttaacaccgaacacccggagattctggagctggctggcaatgcagcgag

SEQ ID NO: 668280 - DNA, 75 bp, Homo sapiens
aaagcgagcgatcgagcgagcgcgcgcgcgaaaactccgggcaggctcagctgtcgcaggccctggaggagctgg

SEQ ID NO: 668281 - DNA, 101 bp, Homo sapiens
agatgtgacagaagtccttatacttcagttgttcagtcagattggaccctgtaaaagctgtaaaatgataacagagacaaagtctcccgttgagagtacta

SEQ ID NO: 668282 - DNA, 75 bp, Homo sapiens
aggaatccaccttcttacgctatggcaggtgatctgtgaaaatggttcgctattcacttgacccggagaacccca

SEQ ID NO: 668283 - DNA, 100 bp, Homo sapiens
gttgtccgcggttcctcctcctgtcgctgcccgtgtgattactgagactcaggttttataggatcacattgacaaaagtaccatggagttttatgagtca

SEQ ID NO: 668284 - DNA, 100 bp, Homo sapiens
aggccacaactctgcagtggaccacagcattcctgaaatacatccaggaaagacatggagattctcttaaaaagcgttatcgaactccttccagatccag

SEQ ID NO: 668285 - DNA, 100 bp, Homo sapiens
gtgcagaacaccaactctgcccttaggtatcccatccagaccccacgagaggcctgttacggagacatggatggcttccccggggtccggaactatggtg

SEQ ID NO: 668286 - DNA, 98 bp, Homo sapiens
tgctcgccgcgatcctggacctggcgcgcggttatgaagacagtatggagtttccagaccatagtagacatttgctacagtgtctgagcgagcagaga

SEQ ID NO: 668287 - DNA, 98 bp, Homo sapiens
cagatccgcaggcgcaaggcttcaggcgacccgtactgggcctactctgatatttggagtctgggagtgatccttttcatgttggtgtgtgggcagcc

SEQ ID NO: 668288 - DNA, 82 bp, Homo sapiens
gccaacgcagacaccatgaaggtgctgggagtgcagcggcctctcctacaggctgatcagctgaccgaagaacagattgctg

SEQ ID NO: 668289 - DNA, 75 bp, Homo sapiens
tgcattaacctgccgccgcccctcaccagacagatcgctgtcaaaaccctagcgaatgacaacagagctgctcaa

SEQ ID NO: 668290 - DNA, 83 bp, Homo sapiens
tccgcgcagcccagcgcagccatgcccagctgagagccagcctggaggttacccagcagcaggccacccaggccgaaggccag

SEQ ID NO: 668291 - DNA, 75 bp, Homo sapiens
ctgggcccgcgtggatctctaaggcctcattgctacgatttcagagtaccctggtaatagctgagcatgcaaatg

SEQ ID NO: 668292 - DNA, 83 bp, Homo sapiens
gtgcacttctacggacgcgtggagcacacccccgacggcgtgaagtggctggacacacaggtcaaaatgcagatcttcgtgaa

SEQ ID NO: 668293 - DNA, 100 bp, Homo sapiens
gcgctgcggaacatggccttggacgtcagaaataaggagctcatcggccgcatctacaagtgcttgtttactggctccgtgagctcactactgacgctgc

SEQ ID NO: 668294 - DNA, 75 bp, Homo sapiens
gaagtagtaaaaccagctgcagtgttatcaaaggaactgtggctgcaccatctgtcttcatcttcccgccatctg

SEQ ID NO: 668295 - DNA, 75 bp, Homo sapiens
gtacaaaagaagcagctcaggaggctgttaaactggacggcatcagaattaatgtaactacactgaaagatgatg

SEQ ID NO: 668296 - DNA, 50 bp, Homo sapiens
atctacaaccttcgatctcctgacgagaagaatgtggccattagccttcg

SEQ ID NO: 668297 - DNA, 132 bp, Homo sapiens
gcctggccccggctctctggaccttgtctcgctcgggagcggaaacagcggcagccagagctcaaagttatgaagtttcaggatgaattggaatctgggaaaagacctaaaaaaccaggccagagttttcag

SEQ ID NO: 668298 - DNA, 100 bp, Homo sapiens
gtgcggggcgacctcggtggcccgcagtgtgacatttgtatgtgcagtatctctgtatttgaagaccctgtggatatgccctgtggacatgacttttgta

SEQ ID NO: 668299 - DNA, 100 bp, Homo sapiens
aaaagatctcatcaaatctgaagaaatgaacacaaaattgcaacgagatgtccgtgaagaagagagaagggcacagttacctaagtatcaacgtaatctt

SEQ ID NO: 668300 - DNA, 75 bp, Homo sapiens
gatgaattaagttcagctattggggctgcttccccaagcccacagtctgtaagaagggtctcatcctcccgatct

SEQ ID NO: 668301 - DNA, 80 bp, Homo sapiens
agagtgaggagtggagcagcagccagcctgggctctcacctttgtgtatccttttggtgccacattgagtgtcatgaaac

SEQ ID NO: 668302 - DNA, 100 bp, Homo sapiens
gttcactcgtctgccaccatcccattggatgaccccactttgctctttgccaatgcaggcatgaaccaggtccaagggcagccattaatggtgcaggtca

SEQ ID NO: 668303 - DNA, 137 bp, Homo sapiens
ttggcctgcaggaacatggcaagggcgagtgaagcagtgtcacgcattttagaagaatggaaacagtttgctagatgatgctaaggcccgcttaagaaagtatgatattggaggcaaatattctcacttgccatata

SEQ ID NO: 668304 - DNA, 100 bp, Homo sapiens
cttcaacttcctcctcaccgtggccttcgccttcctggtcaccctgcctcggaggctgctggtggtctacccttggacccagaggttctttgagtccttt

SEQ ID NO: 668305 - DNA, 100 bp, Homo sapiens
aagaagagaagacaatgagaagtaatctagagctcctctccaccaaactgccatattgccgtgagaatgtgtgtctggcttatggtagtgaatggtcagt

SEQ ID NO: 668306 - DNA, 100 bp, Homo sapiens
ccggggcaggtggctgcatagtcttggcggaggtactactgagcgagtgtgcttgatccagggaacggttgaagcactgaatgcagttcatggattcatt

SEQ ID NO: 668307 - DNA, 100 bp, Homo sapiens
gcccagggctctgatgagtctctcatcacttgtaaagcctgagacagctgccttgtgtgcgactgagatgcacagctgccttgtgtgcgactgagatgca

SEQ ID NO: 668308 - DNA, 50 bp, Homo sapiens
gccaaacaaagtgccctactatatcaagaacatgtttgacaagctgaacc

SEQ ID NO: 668309 - DNA, 100 bp, Homo sapiens
gtgcgaggctatcggcgcttcctcaagtgccccatcatctctacccccagggactcggagatcatgcagcagaagcagaaaaaggcaaacgagaagaagg

SEQ ID NO: 668310 - DNA, 98 bp, Homo sapiens
ttgctacaggcccatggaggtaccctgcctggatctataacaccattaaaaatctcaagtgacgactttgggaaactctggttatccttcgcaaatga

SEQ ID NO: 668311 - DNA, 98 bp, Homo sapiens
aaaattagagtgaatgtagttgcaccaggtacatcagcctgctgcccgtcatcccagtcacgctccgcctgaacccgagggaggctctggagggccgg

SEQ ID NO: 668312 - DNA, 90 bp, Homo sapiens
gtctcagaatggaaagataaatatgaagaaagcaggcgggaagtgatggaaatgagatccctcatgtccatgatccggaaacgatcccac

SEQ ID NO: 668313 - DNA, 83 bp, Homo sapiens
agcaccgagtccgaggtctacgacgacggcaccaacaccttcttctgcattttgaaagcgaagcagaagccgtagaatcagcg

SEQ ID NO: 668314 - DNA, 75 bp, Homo sapiens
gtgaccgagaccgcggccgggaccgagggttatgatgtgattgctcaagcccaatctgggactgggaaaacggcc

SEQ ID NO: 668315 - DNA, 82 bp, Homo sapiens
ataagagcagaggatggaacacttcagtgcattcaagatggaaatcatattatgtagaatacttgggtgacatctgcctgag

SEQ ID NO: 668316 - DNA, 90 bp, Homo sapiens
ttgatcgtcttcctcttcagccatccagacctcctgccccccgaggtctgcagtctcctgaacccagcagccatctacgccaacaacgag

SEQ ID NO: 668317 - DNA, 100 bp, Homo sapiens
ccttccttccagcctgatgctaccaaaggtggaaagtcctgaagaaatccagtgggtcaatgctggcccactagcatatgcgcgagctttcttagatgat

SEQ ID NO: 668318 - DNA, 80 bp, Homo sapiens
gcgtgtcctcggagcgcggtccctgtattggtctcctgctcctagaggtttacccaaggtccagcctagcccctaggcac

SEQ ID NO: 668319 - DNA, 50 bp, Homo sapiens
aggttctcaacaggctgactgtgctcagatggaagtagattatacagagc

SEQ ID NO: 668320 - DNA, 73 bp, Homo sapiens
ggaaaatagcctttgccatcactgccattaagggttatgtggtccgaatcagtggtgggaacgacaaacaagg

SEQ ID NO: 668321 - DNA, 51 bp, Homo sapiens
aggaacatctcaccaattttaaatcagatctccagcaccctgccggtggca

SEQ ID NO: 668322 - DNA, 96 bp, Homo sapiens
cagacagtgacgattatagcacaatatcaacctgaaggttttagctaaagaagatactgaggcagctattcaatcaatattatacaaagaaaattc

SEQ ID NO: 668323 - DNA, 82 bp, Homo sapiens
aaaattgagacggagctaagagatatctgcaatgatgtactgtttaatggatcgagaagtggcgttgcttgctgaaatggac

SEQ ID NO: 668324 - DNA, 82 bp, Homo sapiens
cttcctcacgcagttcactttctaaatgaatcaggagaatacttatctctggcgcacatcactatatttggctgcctctgcc

SEQ ID NO: 668325 - DNA, 99 bp, Homo sapiens
tcccacctagctctcctctctttgcagagccatacaaagttgatcagttccatgacaagaccccttatacgattatgtttggtccagataaatgtggag

SEQ ID NO: 668326 - DNA, 74 bp, Homo sapiens
cccggtcactgtggagtacatcacccgctacatcgccagtctgaagcaggctattgaagaggaaggaggcgatc

SEQ ID NO: 668327 - DNA, 80 bp, Homo sapiens
gttcttgtttgtggatcgctgtgatcgtcacttggaactgtggctgcaccatctgtcttcatcttcccgccatctgatga

SEQ ID NO: 668328 - DNA, 82 bp, Homo sapiens
cgcggccggaccgagcgcctcgacctcggtctgagttgcagatctgatctcttctgaacacctcatcgtgtctccatccctg

SEQ ID NO: 668329 - DNA, 98 bp, Homo sapiens
ctgccgcgaacatctccatcgccgcgaatcatgttcgttcaggaggaggccctggccagcagcctctcgtccactgacagtctgactcccgagcacca

SEQ ID NO: 668330 - DNA, 74 bp, Homo sapiens
acaacgcttgttatgttttcatcacttctctccagaaggctctcgaacagtgtggcctgatgaaactatgggac

SEQ ID NO: 668331 - DNA, 101 bp, Homo sapiens
aggtgtcgcaggagcacatcgagaccgcttaccgcatctggctggagccctgcattcgcggcgtgtgcagtgcatttgcccagtataacatggatcagttc

SEQ ID NO: 668332 - DNA, 100 bp, Homo sapiens
taagaaaaagtgctcggagagctcggacagcggctccgggttctggaaggccctgaccttcatggccgtcggaggaggtacttatatgaacgtattgatg

SEQ ID NO: 668333 - DNA, 75 bp, Homo sapiens
ctgaggagctgcagtctctgtcaaggggaagatggtgaaaggaatgggaggtgctatggatttagtgtccagtgc

SEQ ID NO: 668334 - DNA, 101 bp, Homo sapiens
aagtgaaattgaggtcacaccttcagtccttcgagcaacggagctcccacctccatatacagccattgccagtccagacgccagtggtattccagtaataa

SEQ ID NO: 668335 - DNA, 86 bp, Homo sapiens
ctggccctggccctgatcatcctgctgggcttcgtccagatcgggaaggggcgtctctggccgagcctctttttgtggaaaacgac

SEQ ID NO: 668336 - DNA, 100 bp, Homo sapiens
atttgtgcaatgtttagccaacccaaattaccttaatttatgaaaagacacagactgtactctcagaactgaagttgaagtttgaaatgactgagcagga

SEQ ID NO: 668337 - DNA, 133 bp, Homo sapiens
ctgggtgctctaaaacaatgatagcaaaggctttggccaatgagagtggactgaattttctagctataaaggtgtgttctactccctcttctgggaatgaagcctccccagcaaagcctatacctgcttgttg

SEQ ID NO: 668338 - DNA, 88 bp, Homo sapiens
aggatcaaaagatacaacagttatcatatggcaagttgatccgacaggggcaagtgtccgagtggtgaatcagctacttacagagatg

SEQ ID NO: 668339 - DNA, 90 bp, Homo sapiens
tggtgtggcacacagtaaatccagcaaggatatggagagccatgttttcctgaaggccaagacccggtattctaccttgtaaatactgtt

SEQ ID NO: 668340 - DNA, 50 bp, Homo sapiens
gccacatccccccgggctacatctcacagatagcctgggctggaagctct

SEQ ID NO: 668341 - DNA, 100 bp, Homo sapiens
cgtcttttgcctctttctctcaggctttcctacaactcatgcccagcagcagcaagcagatcatcaaattgttggatggaaaacgatctcaaactgtggg

SEQ ID NO: 668342 - DNA, 83 bp, Homo sapiens
cggctgaaagctgagctaggaattcccttggaagagaacaccttccaccatgaccacctcagcaagttcccacttaaataaag

SEQ ID NO: 668343 - DNA, 75 bp, Homo sapiens
ctgctatcaatgcacagttagacctctgtgaggatgaagatgtatctgtggccgctgttcctccaactccccagc

SEQ ID NO: 668344 - DNA, 91 bp, Homo sapiens
gcgaacccctctgggatccccgccgctctgtctacaacccgagacctcctgccccccgaggtctgcagtctcctgaacccagcagccatct

SEQ ID NO: 668345 - DNA, 89 bp, Homo sapiens
agccgctctgccttgctgcccccaggtgggccgccaccccctgacctgcctgggtccaaagggctatatatccagcctgctcaccctgg

SEQ ID NO: 668346 - DNA, 82 bp, Homo sapiens
taggtgagtcgcggtgggtcctcgcttgcagttcagcgaccacgggagtgaagatggaatgagaagaacagagaaacaatga

SEQ ID NO: 668347 - DNA, 129 bp, Homo sapiens
cggagagcaggtttaatgatgctgcctattattactggatgctgtccatgcagtgcctcgatatagctcaagcttgccctgcagggacattcaaggccagccaggaagctgaaggctgctcccactgcc

SEQ ID NO: 668348 - DNA, 74 bp, Homo sapiens
ccgcgccccccgggacccccacgccgccgccaggttggttcctgtataccttgggccagagagcaaacataggt

SEQ ID NO: 668349 - DNA, 103 bp, Homo sapiens
ggagaagcggcgccgagcgcgtattaacgagagcctcgctcagctcaaaaccctcatcctggacgccctcagaaaagaggcgcctggcggagctgacggtgga

SEQ ID NO: 668350 - DNA, 100 bp, Homo sapiens
cgttccgctacctgcacgacatcatcacggaggaacccttaacattcagggatgtggccatagaattctctccagaagagtggaaatgcctggaccctgc

SEQ ID NO: 668351 - DNA, 101 bp, Homo sapiens
ttcctgcaagaaaacaagcagcttctgcacgacgcactggcccaggacctgcacaaggatgggcaacactccagattcagcctcagacaacctcggtttcc

SEQ ID NO: 668352 - DNA, 83 bp, Homo sapiens
ctcggccggggcgctcacggccacggcgctggtcaccggggtctgcctgggagtacgagagggcctccaaagtggaccagttt

SEQ ID NO: 668353 - DNA, 75 bp, Homo sapiens
ggctcatggctggggtcaccatcacggccaccgtcatccttagcttccttctcctacatctgcttgctgctggga

SEQ ID NO: 668354 - DNA, 75 bp, Homo sapiens
tttgcatatgagtgctgctgcagcttcccgagacatcaccttggttaaggctacctttccagataatccaacagc

SEQ ID NO: 668355 - DNA, 76 bp, Homo sapiens
gggagcgacttccaggatatagccctggagatcatgtttgagaccttcaacaccccagccatgtacgttgctatcc

SEQ ID NO: 668356 - DNA, 75 bp, Homo sapiens
cactgactttcagctatggaatcgagccgatgatgagcaccccacctcctgccagcgagctcccgcagccacagc

SEQ ID NO: 668357 - DNA, 75 bp, Homo sapiens
ctcgccagcagccgtccggagccagccaacgagcgggtatttgaagtataccatacaactgttttgaaaatccag

SEQ ID NO: 668358 - DNA, 100 bp, Homo sapiens
gaagtttgctcagatcgacgagaagactgagaaggccaacgtgcagcggctgaaggagtaccgctccaaactcatcctcttccccaggaagccctcggcc

SEQ ID NO: 668359 - DNA, 80 bp, Homo sapiens
ggatgccgcgtggaagccgaagccgcacctcccgcatggcccctccggccaggagcccagcagccggggccgccctatta

SEQ ID NO: 668360 - DNA, 100 bp, Homo sapiens
tcaggaagcggagaccccgaggaacccagcagggtcaccatttgcagcgcaacatggcaggagcagcaggaggaggtgaggaagcgctgtgagagtgcag

SEQ ID NO: 668361 - DNA, 90 bp, Homo sapiens
atgattcagattttgaagctaaagttaagcagtggctgccttttctctatcctctttcctttattcattatcagcgccaatgaagcaaag

SEQ ID NO: 668362 - DNA, 75 bp, Homo sapiens
ccgttctcctcttgtctacgtgctggacccggtgtccctggccagtgtccttccacctgtccacaagcatgggga

SEQ ID NO: 668363 - DNA, 50 bp, Homo sapiens
ctccagcgtgtctccagccgtgagtccggcagcgtcttctcttgagggag

SEQ ID NO: 668364 - DNA, 134 bp, Homo sapiens
ctctctgcaacacctttggaggaggggtgtttctggccacgtgcttcaacgctctgctgcccgctgtgagggaaaaggccccttcacagatgtagtcactacaaatcttaaattgcgaaatccatcggatagaa

SEQ ID NO: 668365 - DNA, 100 bp, Homo sapiens
cggccgccctgcccagctgcctgcccccggaggtgcccacgcagctgcctggacaatgtcttgggacaaggtgcgcattcctggtgtgctgcagcgattg

SEQ ID NO: 668366 - DNA, 74 bp, Homo sapiens
aaggtggcctaccaggaggccaggggtgtcgccatgcccccaggtttccctagatgacaaataaacattccttt

SEQ ID NO: 668367 - DNA, 82 bp, Homo sapiens
agggggtgtccccttcagctgtgtcattgttgatgaggctagtgatacagagcgagatggactagccccagaaaagacatca

SEQ ID NO: 668368 - DNA, 83 bp, Homo sapiens
gccagtggcatctgtgacaacttgcttgttggaagtactccatgacacacactcggagaaagtcccttcccatgctgagttcg

SEQ ID NO: 668369 - DNA, 74 bp, Homo sapiens
tgaagaagatgaacaagcgccagcagtccagagcgtgagtccattcacatcctgagtgttgatgagaagaacaa

SEQ ID NO: 668370 - DNA, 90 bp, Homo sapiens
ccgcgtgtttgagaggcagcactactcagacatcttcaccaccacagagcccatcaagcccgagcagactctgctaacaccagatagtgg

SEQ ID NO: 668371 - DNA, 82 bp, Homo sapiens
atgtcgtctcagcagtgctcgggcgcagtggtgctcatcggggactcaggcgtgggcaagagcaacctgctgtcgcgcttca

SEQ ID NO: 668372 - DNA, 75 bp, Homo sapiens
ggcttcctggcctgggcgctccggtggcggcggaggtctgggaagatccgaggtatctcctggagaagccatcta

SEQ ID NO: 668373 - DNA, 82 bp, Homo sapiens
ctgctgtccatgtatttcttcgtgctgggaatcctggccctgtcccacaccatcagggaagatggagagttggaagaaggtg

SEQ ID NO: 668374 - DNA, 95 bp, Homo sapiens
gatatctgcggctgatcctgccagaactgggcacctccgggctgtgaaaagttagggaagtgtctgacacctccagaatccattcccaagaagtg

SEQ ID NO: 668375 - DNA, 74 bp, Homo sapiens
ggggttcgggtgtctcgtgtgtgaacatcacagggtgttcctgaaaagccccatagtgattgagtcttcaaaac

SEQ ID NO: 668376 - DNA, 51 bp, Homo sapiens
ccttagaggagccatttttccagggtggcattgtgtgtcccagagtgccgg

SEQ ID NO: 668377 - DNA, 75 bp, Homo sapiens
agcctttgactgtgaagagacatgagatggtgaatgaacccccaggtgcccttcgctttatgaggcggataattg

SEQ ID NO: 668378 - DNA, 114 bp, Homo sapiens
cgcaggcttcagcagtgcacagagccggaggatcgcgtactaggttttgacaagcttgcatcatgcgtgagtataagctagtcgttcttggctcaggaggcgttggaaagtctg

SEQ ID NO: 668379 - DNA, 100 bp, Homo sapiens
ctcattatctaccacccgagatgccccaaggtatctgaaaactgaagagtggagaatatgttcagcagggaacaagaggattcttttagaaataagaggt

SEQ ID NO: 668380 - DNA, 100 bp, Homo sapiens
aggggcagggcgggaaggaagatccggcgcggggcacaggatccggagctggagcccccagttgcaggaccagctctgccccctaattataaaagcagta

SEQ ID NO: 668381 - DNA, 75 bp, Homo sapiens
gagccccagcaccgcccctcctggaagaaggaagaggtgagagaacgccgagccgtcgccgcagcctccgccgcc

SEQ ID NO: 668382 - DNA, 100 bp, Homo sapiens
cgacgaaatccccctgaaggtaccgcggacctcgccccgggacagcgaggagctgagggaccctaggaattacggaggttgagctggtccggaatcccta

SEQ ID NO: 668383 - DNA, 87 bp, Homo sapiens
tctcaagagattcagcagcgaacggaagctcctggaggtcagaggccctttcatcatcaggctgggccctgtctcaggcccccaggc

SEQ ID NO: 668384 - DNA, 83 bp, Homo sapiens
ggccagttcctgccgtctgctcttctgcctcttgatctccgccaccgtcttcaggccaggtttggtgcacctcgatttggagg

SEQ ID NO: 668385 - DNA, 75 bp, Homo sapiens
tctgcttcgggcctctggaatttagcgctcgcccagctagccgcagaagtcaacgaaaggttccgttgtccttga

SEQ ID NO: 668386 - DNA, 100 bp, Homo sapiens
ctgcgtctacacttaacaattggcaccaggagtttactagatttgttcctaaatttaagcaccacctcaggacaccagcccgggccccatctacttcttg

SEQ ID NO: 668387 - DNA, 100 bp, Homo sapiens
ggcggcgtgcccagcaagagattaaagatgcagtacgccacggggccgctgctcaagttccagatttgccgtgctggtatagaggactctaagaagtggg

SEQ ID NO: 668388 - DNA, 98 bp, Homo sapiens
tgggctgtgctggtcacagccacactctgcaccgctaggccgtccccgaccttgcctgaacaaggaggagacatcacagctttcccagatcgggagga

SEQ ID NO: 668389 - DNA, 98 bp, Homo sapiens
cggagcgtagcctccaccccccactcgcagtccccaagacttaattcagtgcacaaatgagatgaatgtgaacatcccacagttggcagacagtttat

SEQ ID NO: 668390 - DNA, 100 bp, Homo sapiens
cctgcacctcctagtctggaaaaacgactaccggcagctcgagaaggagctgcagggccaggagccttcacgtaaatgggtccagtcatgcctcccagta

SEQ ID NO: 668391 - DNA, 83 bp, Homo sapiens
gaaactttttggtacccctttttatccactcattggcagagaagctgtatgtcctggatgatgaatacacaagctcagtaggc

SEQ ID NO: 668392 - DNA, 100 bp, Homo sapiens
cgggcggtgcgcactgcgggcgcatccctgccccggcgccgtccgtgcccgcgggacctgacagccgggtcagagggtcgcggagcctcgccggccgcca

SEQ ID NO: 668393 - DNA, 90 bp, Homo sapiens
gtggactacagcgccacggtggatcagcgcctacccgagtgtgcgaagctagccaaggtggcacatttagaacgaacagggcattactta

SEQ ID NO: 668394 - DNA, 51 bp, Homo sapiens
atggttctcagactggaacagcgaagtgcctccagaaagagtcgagaagat

SEQ ID NO: 668395 - DNA, 108 bp, Homo sapiens
gttttcaggaccaaaattgtggaaaagtcactctggtgacagagctgaatgaacctctctccaatgaagatcgaaatctcctctctgtggcctacaagaatgtggttg

SEQ ID NO: 668396 - DNA, 100 bp, Homo sapiens
ggaatcgctgaaccgtgcagtgctcgctgccatggatgccaccaagctgcgagtgatagacagccaagcagagaaactgaaggagcttgacaaggagatc

SEQ ID NO: 668397 - DNA, 101 bp, Homo sapiens
agttatttcactaataaacactaggatgctcttctgggcatgctctacaaacaaacctgagggatacagggaagctccaccatgaggcgaggtggatggag

SEQ ID NO: 668398 - DNA, 100 bp, Homo sapiens
ccgcttcctggaatggcaagcgcagcaacaacagagagcacgtggaaccacgtgaatgttgagggggcgacacacaagcaggtggtggacctgattcgag

SEQ ID NO: 668399 - DNA, 74 bp, Homo sapiens
tgcctgtgtccctgaccatggctccctgcagtaccctttaacggggatcatggaagctgataaagatgacacac

SEQ ID NO: 668400 - DNA, 115 bp, Homo sapiens
caggaactggaattagaagatcatcaaagcagactggagcagaaactgagagagaaaatgctcaaggaggtgtccgagctgcaggaggagggaatgaacgccatcaacctgcccc

SEQ ID NO: 668401 - DNA, 100 bp, Homo sapiens
ggcagtcagttgattgtcaccgcctcgaagcatgcctacgtgccaaactctgccccatggaagccaatccggttacctgacagcgtggaagatgaactgg

SEQ ID NO: 668402 - DNA, 74 bp, Homo sapiens
aagcccctttgaccccgctcacaagcatacggctgtcttggtggttctcctgtgcctcctgttggctctctttg

SEQ ID NO: 668403 - DNA, 117 bp, Homo sapiens
gccagacaaacagcccgcccgaccccgtcccgaccctggccgccccgagcggagcctggagggactttgaacatgtcggggatcgccctcagcagactcgcccaggagaggaaagca

SEQ ID NO: 668404 - DNA, 75 bp, Homo sapiens
aacgtggttgtacgagacgtggcctgtggcgctaaccacacgagccttcacgaagtcagtaaaagtgatctcggc

SEQ ID NO: 668405 - DNA, 100 bp, Homo sapiens
atccagcgactacgcggccgcggagacctacctgcggcgtcggcagctgctgctccgagggactggtgattgcagctggaagtgcccatgaccgagctgg

SEQ ID NO: 668406 - DNA, 98 bp, Homo sapiens
aacaggctaccaagtccgtgctgtttgtgtgtctgggtcaactttgtagtgtgccaactctttgccttgctagcagccatttggtttcgaacttatct

SEQ ID NO: 668407 - DNA, 74 bp, Homo sapiens
tgcaggaacaccgtcacgctgctggaggaggtgttgctctcttgccattcgtggatgagcgaaggctacgagct

SEQ ID NO: 668408 - DNA, 106 bp, Homo sapiens
gagccactgacgccgggaccgggaccgccgccgccgccgccaccatggctgacagataaggcagtgaaggactattccgcttaccgttcttcccttctcttttggg

SEQ ID NO: 668409 - DNA, 100 bp, Homo sapiens
atccggacaaacctggaatttctccaagagcagtttaatagcattgctgcgcatgtgctgcattgcacagaggcatttcatccttcatgaagccattcag

SEQ ID NO: 668410 - DNA, 100 bp, Homo sapiens
agactggaggaagaattcccaagccagagctttccaggcctactgaacttgacgcactggtatttggccatctatacaccattcttaccacacaattgac

SEQ ID NO: 668411 - DNA, 100 bp, Homo sapiens
ctttgtacagaaattgaaaggcttcaaagctagcaggtgccgacgccaccgccgagcccatgatcctggaacagtacgtggtggtgtccaactataagaa

SEQ ID NO: 668412 - DNA, 90 bp, Homo sapiens
gtcatcagacagcagtgatggagaggtgcccacagctgtggccccggctcagggcttctttcgccgaagcatccagaagaacatggtgta

SEQ ID NO: 668413 - DNA, 76 bp, Homo sapiens
gctggactgctcagggtgccagacctcatcgataccttaggaaagccagctgctaaggatgtccatcttgtggatc

SEQ ID NO: 668414 - DNA, 108 bp, Homo sapiens
ccgggaggaaggaacgaggcaaggagctaaagcagcgtgcgttcagccctgggcctcccgcgacgatgcccctcaacgttagcttcaccaacaggaactatgacctcg

SEQ ID NO: 668415 - DNA, 96 bp, Homo sapiens
gatcaactaattgaaggacatcagtggctggaaaataatataggctttgaattgtattccatggtgccatctatttgtcctctagaaactcttcat

SEQ ID NO: 668416 - DNA, 75 bp, Homo sapiens
tggggacctggccgactacctgcacggaaagaccacagcaagattctttcattcgtctcctcctagcctggggga

SEQ ID NO: 668417 - DNA, 73 bp, Homo sapiens
aacacgggagactcccggtaacccccaacttgccgggacaaactctgcctgggcgagtccttttcctgcgtta

SEQ ID NO: 668418 - DNA, 100 bp, Homo sapiens
agaccatgctggacttcttgtcggatcagggcctgtttaaagaagaaaacccgtatgctagatttgaaaacaactaaagcgctccagcacatcagtcccg

SEQ ID NO: 668419 - DNA, 75 bp, Homo sapiens
tttttgaaacttgtcgatgacattctgaaaaagacacatagcatctttcctgtcagtcttcaaactagtattaat

SEQ ID NO: 668420 - DNA, 100 bp, Homo sapiens
acgtcccagctctctctgggcatctggaaagagccaacattactcagagccgcagttcccactccttgaacaaacagctcatcattaacatggaacccct

SEQ ID NO: 668421 - DNA, 116 bp, Homo sapiens
ccccggatctgacggggcgggacctggcgccaccttgcaggaatcccttggcaccatgtcctgtgtgcattataaattttcctctaaactcaactatgataccgtcacctttgatg

SEQ ID NO: 668422 - DNA, 100 bp, Homo sapiens
gaaaggccatggaaggcaccatcgatggatcactgataaatcctacagtgccaagtatcttcaagaccttctcatggagagtgtgaatttttcccccgcc

SEQ ID NO: 668423 - DNA, 100 bp, Homo sapiens
ggtgccgaccgcggccatcgcagttggaggctattttttggggggggaagttctccctggacgacctgctgaccaacgtcatgctctactggacaacagg

SEQ ID NO: 668424 - DNA, 101 bp, Homo sapiens
ggtattgggagatccacagctaagacaccgggacctcctggaagccaaaaatggcattgtgtggctgctcaattaatgtaccaacactggatggaagaaac

SEQ ID NO: 668425 - DNA, 100 bp, Homo sapiens
cctggggcggccggccaggaaccacccgttaaggtatgatctcgtgaaatcttgagagaaactgaatgacgaatgaaactattgttcctgtttcacacag

SEQ ID NO: 668426 - DNA, 83 bp, Homo sapiens
ctcatacagagattgaaatgttccttagaaaggagcagcaggaccttaaaggctttgatccaggagagaaatactttcataac

SEQ ID NO: 668427 - DNA, 100 bp, Homo sapiens
ccagtcttcacttggaaacagaatcacgccttgtgaagagatcatccctaagcaggagagaagctactaaaggtgctggagaatctggtaaaagcaccat

SEQ ID NO: 668428 - DNA, 83 bp, Homo sapiens
gggattgctggctacagcttcagaagaccgaagcgttcgtatctggaaggcccctggccccaacatggcccgtcgctctcaga

SEQ ID NO: 668429 - DNA, 98 bp, Homo sapiens
cgagatcgccgccgacgccgctgctgtggccgctgctgctgctgctgctcctggaaaccgtattcatgtgattgaacggcgtgctcttcctgagttct

SEQ ID NO: 668430 - DNA, 100 bp, Homo sapiens
agcctatcgtctccaagaggagtttgaagctacccttggggcatctgatcctaattcccttgctgatgatattgttacagctcttttgaggaagcttaag

SEQ ID NO: 668431 - DNA, 96 bp, Homo sapiens
tgtctcggtagaaggccagagtcacacacggtcctaagagctgggcaccaggaagcgaaggctgttacggcagtcccagtcctactgcacagacac

SEQ ID NO: 668432 - DNA, 74 bp, Homo sapiens
gtgaatatccttgctcaggctctttatgaattattttctgccacagatggttgctgaagcacatgtgcctaatt

SEQ ID NO: 668433 - DNA, 100 bp, Homo sapiens
cctgagccactgcgtgaggctagcactcatccgcttccgggtcaagaacaaaatccagtctcatagcagaggagaatataatgtttacagcaccttccag

SEQ ID NO: 668434 - DNA, 83 bp, Homo sapiens
ctcacgcgggcgcggatcgaccggagcagagagctggcgagcaagagtgaagacatttccacctggacacctgaccatgtgcc

SEQ ID NO: 668435 - DNA, 100 bp, Homo sapiens
tcgacttagccctgctccaggaatgggacctcgagtcactgtgagcctgatccggggatggcctctgcctccaccacaatgcatactaccaccattgcag

SEQ ID NO: 668436 - DNA, 100 bp, Homo sapiens
cttcgccacttacagtatgcaacacattttcctatacctctgaccagcatctcagacatgtcgaaaaagatgttttgatccctaaaataatgagagaaaa

SEQ ID NO: 668437 - DNA, 83 bp, Homo sapiens
ctggagcctcagttggaagcagccgatccagcctgcggagcctgtggggcagaactccatccggcacaacctgtcactgcata

SEQ ID NO: 668438 - DNA, 75 bp, Homo sapiens
gggtgctctttctctagaggagaaacttctttccagagtgttgaatcttccaccagaaaacttgatcacatcaat

SEQ ID NO: 668439 - DNA, 75 bp, Homo sapiens
agctgcgattttcgccctacgttttcaacggaggcggggatctgacgagcttttctctacttgtgtcactaacgg

SEQ ID NO: 668440 - DNA, 100 bp, Homo sapiens
tgcaaccctcttgtcctctttgaagcagaaattgaaaagtactgcccagagaattttgtagacatcaagggcatccgtttccgaggctttagtatccctg

SEQ ID NO: 668441 - DNA, 100 bp, Homo sapiens
gcggcggcaaggccaagtgctcgcagttctgcaccactggcatggatggcggcatgagtatctgggatgtgaagcatgtttgtgtcattagtgaaactgg

SEQ ID NO: 668442 - DNA, 74 bp, Homo sapiens
aagggcaaggtccctgtcacctacttggaactgctcagctaggcaggtgcgcgtggaattcatggacgacacga

SEQ ID NO: 668443 - DNA, 98 bp, Homo sapiens
cggcgaatgcggattcgatcattcacatcgtggctgcctccgggtgatgatggctgtgtgaacgactgccatggcccaccggaagcttgagagcgtgg

SEQ ID NO: 668444 - DNA, 133 bp, Homo sapiens
gaaaaacaacattgctacacatgctaaaagatgacagacttggacaacatgtcccaacattacatcccaaaatgactgctgtccatgcaggcaacataaacttcaagtgggatcctaaaagtctagagatcag

SEQ ID NO: 668445 - DNA, 100 bp, Homo sapiens
gcttgcattcagctcctctgtgtttgccgcctggttttttgtagcatcagatccaacagttaaaacagatcgactgtggcacgacaagtatactttgagg

SEQ ID NO: 668446 - DNA, 50 bp, Homo sapiens
cactgatgaggatcagcccatggatgctgcagctgattcagagtaggcta

SEQ ID NO: 668447 - DNA, 90 bp, Homo sapiens
cctttaggtgcttttatattcatctcaaaaacaaaattctgaactcaggacttggcaatctcagaccagtatccttcaggggttctctta

SEQ ID NO: 668448 - DNA, 80 bp, Homo sapiens
cggagcgccagctcaatgaacttatgttcctgaggaagaattgaaggcagcagaaatagatgaagagcacgtggaggatg

SEQ ID NO: 668449 - DNA, 75 bp, Homo sapiens
gaagccttccgctattcagcagagagctattattccctgtattaaagactggcattgctcgggtaccacttgctg

SEQ ID NO: 668450 - DNA, 83 bp, Homo sapiens
caagaaggccctggacacagcaatatctctgggctttcacaggcatgccaccaggactacaggggcagagtgtctcctctggc

SEQ ID NO: 668451 - DNA, 76 bp, Homo sapiens
agtctcagcttcaggtgaagaaggcagctctcactcaggcaaagtgtcagagatggctttggattccccgttctgt

SEQ ID NO: 668452 - DNA, 80 bp, Homo sapiens
gaaaaaaaccttcaggcggcccatggttatgcaatgccaaccaaaaccatagaagtgttgcagttgcaggaccaaggcag

SEQ ID NO: 668453 - DNA, 50 bp, Homo sapiens
ctttgattctccatatcacctacaggacaagaagaggtatttacgcctcc

SEQ ID NO: 668454 - DNA, 74 bp, Homo sapiens
cgcagtggtcgcttcttctccttgtctgtgcagataataatcatgtccggacgtggacagtaacacgattcaga

SEQ ID NO: 668455 - DNA, 96 bp, Homo sapiens
cttgccattctcacaggactaatagctggcaaatttctgttccatcagcgtttgtttgacagcaccagttgcccttgaagcagaaaacagaggtga

SEQ ID NO: 668456 - DNA, 51 bp, Homo sapiens
attttggctgctgcaggagccattttagcctgggttactaggtgtctttca

SEQ ID NO: 668457 - DNA, 100 bp, Homo sapiens
gacatctccaactgtgggaactctttccagcttgtgtctgtttgggaatacctgctactgcaattcagttcttcaagcactttatttttgtcgtccattt

SEQ ID NO: 668458 - DNA, 100 bp, Homo sapiens
gggcggctgagccgcgcagtgcggaccctcgcggggaactgcgccgccgccaccatgtctcaggaaggtgtggagagccccggcgctgtgcttcctgtcg

SEQ ID NO: 668459 - DNA, 100 bp, Homo sapiens
tgcaacagtttggcaatgacatctcccctgagattggggagaaggtgcggactcttgttcttgcactggtgagatcattgatggcacttcagaaatgaat

SEQ ID NO: 668460 - DNA, 75 bp, Homo sapiens
tgcaccctgttgtggctctataagcaggttgcccccaagtttcctggcagtgtgtgatactgaggaggtgagctt

SEQ ID NO: 668461 - DNA, 75 bp, Homo sapiens
ccgccagctgctccggagatacgatctcccttgagtttagaaatctggctgagaaataccaaacagtgattgccg

SEQ ID NO: 668462 - DNA, 75 bp, Homo sapiens
cgggtggtccccgggcaattcgacgacgcggactcctctgacaggctttcttcgagagtcacccagctccttcag

SEQ ID NO: 668463 - DNA, 74 bp, Homo sapiens
gccccgctgagcgatcccaccgaagcagcgtgtcctccgtgggagcccgagatcatggaagggaagtggttgct

SEQ ID NO: 668464 - DNA, 100 bp, Homo sapiens
tgcaataatagtgacatctttcagaaagagatgttgagaatgggaattcatattcctgaaaattgtcacaacttggacaaaagtaacacagaagaacctt

SEQ ID NO: 668465 - DNA, 80 bp, Homo sapiens
cagtgaatgtggaaaggagattgacagtcacaattttgtaataagtggtattggaaggaactggccctgggcctctggag

SEQ ID NO: 668466 - DNA, 73 bp, Homo sapiens
cgcgatggagcagcgaaaacgtggttgtagagttccgtgactcccagacaggggcaagtgtccgagtggtgaa

SEQ ID NO: 668467 - DNA, 83 bp, Homo sapiens
gcctgcagcgggagctggacggcgagcgcgagcggcgcgagaaagtgccccacctcaaccagaatgcctggaacaacctggag

SEQ ID NO: 668468 - DNA, 101 bp, Homo sapiens
atatttctaagaggaaatgtcacaggggctatgatgcaagaaagcctcagaaatgactgcatacagccaacaagtcccaaatttggaaaagctgactcata

SEQ ID NO: 668469 - DNA, 80 bp, Homo sapiens
agcatggcatttcagtcactggtttgcagagtccaggcactctgatggttctaaaacatccctacccaagaaaagtggaa

SEQ ID NO: 668470 - DNA, 75 bp, Homo sapiens
tggagagggggcgctgagctgttgggagtgcctggtgaagaatgtgatgggatcactagcatgtctgcggagagc

SEQ ID NO: 668471 - DNA, 75 bp, Homo sapiens
aagcactacaaacaagcagctgatttcagaatggcttcggttattgcctttccttggtgtactcgcacttcttgg

SEQ ID NO: 668472 - DNA, 75 bp, Homo sapiens
aacctggatccttggatacaggaaaccaacagtcacacatgtacattacagatccatcacaaagcgaagtcatgg

SEQ ID NO: 668473 - DNA, 80 bp, Homo sapiens
caccaggccgggaagcccatcggaaaagcacatctcccaggatcctgagagagcttgaaccagaccactgtggacacggt

SEQ ID NO: 668474 - DNA, 82 bp, Homo sapiens
atatctggccgcctctgccgcagctggagtttcagtcattcagtcagtaccgctgtaagactgccaagaagtcagaggagga

SEQ ID NO: 668475 - DNA, 76 bp, Homo sapiens
ggatgccccagccggggcccagcgaacgccaggagcatggggaagtgattgactgtgtgcaggagctgagccactc

SEQ ID NO: 668476 - DNA, 75 bp, Homo sapiens
gctcgccgccttggaaagaggctttccggcaggctctgtgtggctgcacagtgaacgtccccactctggacggca

SEQ ID NO: 668477 - DNA, 100 bp, Homo sapiens
agaagccttttccgttgccggtgccggcctagcgtcctggaattacttcaatcaagattacaagggccagaagctagctgaacagatgtttcagggaatt

SEQ ID NO: 668478 - DNA, 123 bp, Homo sapiens
gtcttctcgtcggattgcccatgcacttgttgcagaaacagccaaggttctaaatgagaagaaacttcaagaggttgatagtttatggaaagaatttgaaactccagagaaagcaaacaaaat

SEQ ID NO: 668479 - DNA, 100 bp, Homo sapiens
gactcgagggtgacgctcgctccgctcgtcccgctcgtcatggcctacccgggatacggaggaggggttgctaggaagaggctcaatgtttgtgttttca

SEQ ID NO: 668480 - DNA, 99 bp, Homo sapiens
cacggatccaagaaggagtggagtctttggctggctatgcagacatctttctggagcagtttttgcaagaaaggatcaaagtgaacggaaaagctggga

SEQ ID NO: 668481 - DNA, 75 bp, Homo sapiens
cggcgcagctgatagcaggaacagcagagaagcctgtgttcttcccagccttcgcagccgaggcccagaagctgc

SEQ ID NO: 668482 - DNA, 100 bp, Homo sapiens
caggagtcagtgggtccactggtagcccccacccctctccgtccatggccccagatgacacttcagatcacttcagcatcggtgaggttggtctctcaag

SEQ ID NO: 668483 - DNA, 101 bp, Homo sapiens
cagaagtttatcaaggctgtcacacatcaagttaaatttggtcaacaaaatccacgtcagcgaatggtttccaggtggataattatggaacccagctcaat

SEQ ID NO: 668484 - DNA, 100 bp, Homo sapiens
cgcgccggcgctcccttgtcacgcctcgggaagcgcgcacctgccaagcagtgttctaagaacggaagcatctgggctggatggaatttagcatcaagca

SEQ ID NO: 668485 - DNA, 100 bp, Homo sapiens
gctacgcgcccacttggcgggccctggctggggatgtgcgaggtgtcatggagaaactccagctgggcccagagattctgcagcgggaaaatccaaggct

SEQ ID NO: 668486 - DNA, 101 bp, Homo sapiens
ttgattcctgcatttctgaagatctcaagatctggactactgttgaaaaaatttccagtgagacaatgcagatcttcgtgaagactctgactggtaagacc

SEQ ID NO: 668487 - DNA, 75 bp, Homo sapiens
ggctgcggcgcgggagccggcgtgggcggcggcaacggggcactgacctgggtgagcagcccgacggccatggag

SEQ ID NO: 668488 - DNA, 100 bp, Homo sapiens
ccgcagtatcatgctggccaagaagatcatcattaaggacggaggcacgggctcaccaggagaacgtgggtcagcaggtacagctggcccaattggttta

SEQ ID NO: 668489 - DNA, 100 bp, Homo sapiens
gggacagcgagagcgtgccaggcgtgtactgcctatgtgtgctaggggggatgatccagacggcagagcagtaccagttcctgcaccacactttggccct

SEQ ID NO: 668490 - DNA, 83 bp, Homo sapiens
tcatcagccactacgccgggcaggatgccacggttgtgaccgagattcccgacgagagagactgaggggaagagaggaaggag

SEQ ID NO: 668491 - DNA, 90 bp, Homo sapiens
gacctgtggagggggtgtcagcttccgggagcgcccctgctactcccagaggtgtggatgaggtcaccattgtcaacattttgaccaacc

SEQ ID NO: 668492 - DNA, 97 bp, Homo sapiens
gcggcgtcggagcccgaggcgggagccatgccggagaagcgcgcgggcgcgcaggccgcggggagcacctgggctaatgcagagtcaagtaaaacct

SEQ ID NO: 668493 - DNA, 98 bp, Homo sapiens
aagcagtgcctgctgcggctgggggtgctgcgccagctctaaagccaccatcctcacgagactctggggccccccaggctcccagacctttgagcaac

SEQ ID NO: 668494 - DNA, 132 bp, Homo sapiens
gtctcgctccgtggccttagctgtgctcgcgctactctctctttctggcctggaggctatccagcgtgagcacctgcggatctgtccccagggctacacctgctgcaccagcgagatggaggagaacctggc

SEQ ID NO: 668495 - DNA, 100 bp, Homo sapiens
gttgggacagaaataacccagagccctggaacaaactgggtcccaatgatcaatacaagaagttgaatataccggcaattttgcgagcacccaaggagag

SEQ ID NO: 668496 - DNA, 100 bp, Homo sapiens
ggagtggagcagccttgagggcccggaaggaaattgctgctgagcttgcccacccagtacagcatggaccacttctcagggatgcacaattggtacgcct

SEQ ID NO: 668497 - DNA, 95 bp, Homo sapiens
taaagtcacccggcggccaaaggccagtgactaccaacgtttggaccagaaggctgtatcgcatccattgaatactgtgaccgaggacatgtaca

SEQ ID NO: 668498 - DNA, 85 bp, Homo sapiens
cagacagagacacacggtcactgcagctgaagccgctgcccctgctacaggcatgttatgttacccagagaactttccaaacaag

SEQ ID NO: 668499 - DNA, 101 bp, Homo sapiens
ggcggctcggagtccgctggccacccagctgagaggagaggcgcccccggggacggttgcacactgggccacagaggatccagcaaggatgaagaaatgga

SEQ ID NO: 668500 - DNA, 80 bp, Homo sapiens
ctccaggacagcacctagtcgtggccggaggagtctcagagctgtcagaaagaatgtgaaagatgttgcagaagtgttcc

SEQ ID NO: 668501 - DNA, 75 bp, Homo sapiens
tctctatcagcctctatttgataagattcatcccaccggaaaaatgtttattctttcagatggagaaggaaaaaa

SEQ ID NO: 668502 - DNA, 82 bp, Homo sapiens
ccggacggtacttctgccactgctgctccgtggagatcgtcccgcgcctgccgcgagcagctgatgcagctgtacagtgcgc

SEQ ID NO: 668503 - DNA, 75 bp, Homo sapiens
tcgacttcctcacccgcgcctgcgacctcgggtttccaggcctgaggtgcccgccctggccccaggagaatgaac

SEQ ID NO: 668504 - DNA, 98 bp, Homo sapiens
tctctgtcctcattgcgcccagacgggccggcccagagctcccgggtcgtctttcgtgtggccgcgagactttatattcagagcaccaatcaaattaa

SEQ ID NO: 668505 - DNA, 95 bp, Homo sapiens
catgaccaggccctggctgttctcagtgccaagcagcaggaaattgaccttctgcagaagagagaaatctcatcatctgtgcagccttcttaaag

SEQ ID NO: 668506 - DNA, 100 bp, Homo sapiens
caactatcgacttggagtactcgtgtgtatgtacagagaaccatcgctacatgaaattggagaaaaacaagggcgttcaaggaaaagttctggaacacca

SEQ ID NO: 668507 - DNA, 96 bp, Homo sapiens
tggatttataccggttcagcaagtatgttctcagaagctatacactcattatctgatacttgtaatcagccaaagactccttcttcctcccaacca

SEQ ID NO: 668508 - DNA, 76 bp, Homo sapiens
caagaaggccctggacacagcaatatctctgggctttcacaggacagtcattttgtttactcattcagccctgttg

SEQ ID NO: 668509 - DNA, 100 bp, Homo sapiens
agaagcgtactttcatggttttcacaaacaaatatcccaggagaagtgatcatggagaccaaggagaacagggtctttttggagttcctgagctgagtgc

SEQ ID NO: 668510 - DNA, 100 bp, Homo sapiens
ccaggtcagcatgaacgatggcctctcttttatctccagttctgtcatcatcaccaccacacactgtatcttacagactctttcagcacctacgaaaaat

SEQ ID NO: 668511 - DNA, 100 bp, Homo sapiens
agagtggaacaggtaatgagaatcttcgccttgcgaattggctgtgaaaggactgaggcagccatctgggggtagcgggcactcttatcagagcggctgg

SEQ ID NO: 668512 - DNA, 112 bp, Homo sapiens
aaatgctgttgtatgcagtgaaagagttgctgaactacaaagaaaggtccatctccactggtggctgtggtggctttggattgttggaagaccatcaccttcagcaggtctg

SEQ ID NO: 668513 - DNA, 100 bp, Homo sapiens
gaccatcgaaaggagcaagagcaagatcaccgtgacatccgagctaaactagttccagtgggatacggaattaagaaacttcaaatacagtgtgtagttg

SEQ ID NO: 668514 - DNA, 82 bp, Homo sapiens
cccggcgtctgcctcgagactgaagaccggagaggccattcccctggtactggccctgtttgcctttgttggcttcatgctg

SEQ ID NO: 668515 - DNA, 98 bp, Homo sapiens
aggaatgttctccaagcagcaatccaaaagagtctcaaggatccttcaaataacttcaggcttggtgatccagctatttttcctgccgtaattgtgga

SEQ ID NO: 668516 - DNA, 100 bp, Homo sapiens
aagagagcgacctggagcggggatacacgaaatttggagagcttgtaatgaccaaagaatcaaaggccttgatgggactctaccatggtcaggtcctgtg

SEQ ID NO: 668517 - DNA, 100 bp, Homo sapiens
acgaaataaagctcctgggcaaggggacgtctgcagctgagtatggctgatggcaagcattgtacttttccacatctgcctggcaaaacctttgtctata

SEQ ID NO: 668518 - DNA, 101 bp, Homo sapiens
cccaatttttggactgtgctctcaaactttactttgcctcatttgaggagtgggaacaggcttcggcgaacacaaaggagagattatttcattcaatattt

SEQ ID NO: 668519 - DNA, 101 bp, Homo sapiens
ggtgccctcagccccgtcctcttgtcctcctcagcctcgtcaggatggctaaaggtgaccccaagaaaccaaagggcaagatgtccgcttatgccttcttt

SEQ ID NO: 668520 - DNA, 101 bp, Homo sapiens
ccaacagtgtggataaattacgcttgcataccaccaatcacaggcacgaggcggccctgaagctctacaagacatgggatgtagagctggaaagatctgca

SEQ ID NO: 668521 - DNA, 96 bp, Homo sapiens
tctcgagcccgggaagtgcgttttggtgaaatgctaccacaagaaataccgctcggccacccgtgacgtcattttccgcctgcagtttcacactgg

SEQ ID NO: 668522 - DNA, 74 bp, Homo sapiens
tgggacgtgccacagatcccatcagaggcaccccagacacagctgaaggggatgctaagggagataaagcaaag

SEQ ID NO: 668523 - DNA, 100 bp, Homo sapiens
ctgaccttaaagatgctgaagctgttcagaagttcttccttgaagaaatacagcttggtgaagagttactagctcaaggcccgcgatgctcccagcccgg

SEQ ID NO: 668524 - DNA, 96 bp, Homo sapiens
gttgcagggttttgtttatataactcaagttgtttggctaaattcttcaggactaccgaccagactcccggaaatcatgttggtaggatcccagtc

SEQ ID NO: 668525 - DNA, 90 bp, Homo sapiens
cacgaacccattgtcaacaagttccgtgaatacaagatcaccggcgtaatcaacccagcgttggacaaatactttccgtcagactctgga

SEQ ID NO: 668526 - DNA, 101 bp, Homo sapiens
tccacagctaagacgccaggacccactggaagcctagaaatggtagcagcaattgcagagacagatgaatctgcagaatcagaaggtgtaattgattctca

SEQ ID NO: 668527 - DNA, 75 bp, Homo sapiens
gccgtgtgccatgactacgacatccacttctaccccaccttccgggtcatgtccaaagtaatggagatgttccag

SEQ ID NO: 668528 - DNA, 75 bp, Homo sapiens
ctcacatatggatactttcacagttcaggcttaccactcttctctcatggatcctgataccaaactcatcggaaa

SEQ ID NO: 668529 - DNA, 100 bp, Homo sapiens
gattgtttcaatctaatgatgctgctgatactttggctgtgaggcaaaaaaggagaatttatgatatcaccaatgtcttagagggaattgacttgattga

SEQ ID NO: 668530 - DNA, 71 bp, Homo sapiens
cgcttcttctggaagaccagccaacaggaagagagagaaaatccttcaaaacggagtagaattgaacgtga

SEQ ID NO: 668531 - DNA, 83 bp, Homo sapiens
ctggtcatgagcttcgttaacatggttggaatcgaagcctcttaaaatggcagatgacttggacttcgagacaggagatgcag

SEQ ID NO: 668532 - DNA, 98 bp, Homo sapiens
cagccttggtggtgacatcaatgtatggaagctccaaaaggaaagataccagattgatcttgatcacctctgcctccccagcacctagtcttccttgg

SEQ ID NO: 668533 - DNA, 97 bp, Homo sapiens
cttcagatcgtggcaagcgagcccggggtagagtacaaacaggccgtccatgagcttgtgcgttgcgtagcactgacaagaatttgctatggagact

SEQ ID NO: 668534 - DNA, 100 bp, Homo sapiens
aatgctaccctgcacagtgaagttcagtttccctgctcagcttctagcaacaattttgcaaggcagatccagcgccgatacattccaccgttgatctggg

SEQ ID NO: 668535 - DNA, 82 bp, Homo sapiens
agcaccctcatcgccctggccgacaagcacgcaaacagccctcagcgcctttttccaggagaccaacatcccctacagccac

SEQ ID NO: 668536 - DNA, 97 bp, Homo sapiens
gtccctcgtccagccacccccaggatgccaggccaaggtggagcaagcggtggagacagagccggagcccgagctgcgccagcagaccgagtggcag

SEQ ID NO: 668537 - DNA, 90 bp, Homo sapiens
caaacagagagaccttgaaggggcagtcagtaggagttcaaagaaggacgcagagccagccacacagccccacaggtcctctttagccac

SEQ ID NO: 668538 - DNA, 90 bp, Homo sapiens
gcggcggcgggagcggcgccgagaggccgtgcgggacgcgggcgccaggaccggccgaacgcagagggtttccaggcctgaggtgcccgc

SEQ ID NO: 668539 - DNA, 80 bp, Homo sapiens
gtgagcaagcccaggcacagccgacgccgcggggaggaggcgtctccctattccttacttgatatctgcttgaatttctt

SEQ ID NO: 668540 - DNA, 100 bp, Homo sapiens
ccctgttcacactaccctgtcaaagtcagatgccaaaaaagccgcctcaaagacgctgctggagaagggagctcgaggagcagcacggcatccactgcaa

SEQ ID NO: 668541 - DNA, 87 bp, Homo sapiens
aaggtgatgcccaagatggaccagtaatctatgccagcaattatgacaatgttagcagaccatgcagctcgtcagctgcttgatttc

SEQ ID NO: 668542 - DNA, 98 bp, Homo sapiens
cggcgcctcccgggctccggctccggcttctgctgttgctcttctccgccgcggcactgatccccacaggatgtgatcttcgtggtggaaagctaaat

SEQ ID NO: 668543 - DNA, 101 bp, Homo sapiens
gctaaagttggtctacctattggcttctccttgcctgattgtttgcaggttgtcagagaagtacagggcaccattcccaaactcacagctaaatccaactg

SEQ ID NO: 668544 - DNA, 75 bp, Homo sapiens
ctcccgggctggactcaggcttctcaggaggccccgtgtgggccgcggcccggccctcaccatggagtccatgtt

SEQ ID NO: 668545 - DNA, 51 bp, Homo sapiens
gcccgtggtccttctccatattcgagctataactgtccagctctgtgcatc

SEQ ID NO: 668546 - DNA, 97 bp, Homo sapiens
tggtggatgctcttcagttcgtgtgtggagacaggggcttttatttcagtagacgttacatccaagaggaaataatccaggcaaggaagcacaagct

SEQ ID NO: 668547 - DNA, 74 bp, Homo sapiens
cattctgtgaagaaggcagtacattttgggttaccgcaactattggatgattatccgaaatgtttcattgtggg

SEQ ID NO: 668548 - DNA, 88 bp, Homo sapiens
accggaaaatagctgaactggaaaagaacattgttggtgaaaagaccaaggtgtgctgggcatcaaggtgaagatcatgctgccctgg

SEQ ID NO: 668549 - DNA, 115 bp, Homo sapiens
ggccatgtctggctgtgatgctcgggagggagactgttgttcccggagatgcggcgcgcagacctggaatggccaaatatcaaggtgaagttcaaagtttgaaactggatgatga

SEQ ID NO: 668550 - DNA, 74 bp, Homo sapiens
tgcaccgacctcgacgtcttgcctgtgtcccacttgttcgcggcctatagggtcgggctgggagtgatggagcc

SEQ ID NO: 668551 - DNA, 90 bp, Homo sapiens
aagaaggtggtccttgtaccctacacctcggagcatgtgcccagggattgtcaatgaggcagatcagattccgatttgacgggcaaccaa

SEQ ID NO: 668552 - DNA, 100 bp, Homo sapiens
aaaaacggccaagaggcagacctaggaaatgggttgttacactctggtaccgagctcccgaagttcttctgcagtccacatatgcaacacctgtggacat

SEQ ID NO: 668553 - DNA, 98 bp, Homo sapiens
gtactaccaaggacagcttttttcctgcaaggttctagtaaataccgcttgctgtgttttgatgttggtggctaagctcatccagtgtattgtgtttg

SEQ ID NO: 668554 - DNA, 100 bp, Homo sapiens
gaagaatgagaactataagagcctggtgagacggagctatcggcgccgcggcaagagccagcataagcttaaatcgtctcagaaggacaaggtccgccag

SEQ ID NO: 668555 - DNA, 75 bp, Homo sapiens
agctgtcggtgcagcaggagacggaggaccagaactacggcatgttcaagggcagcaggaaagacgagatcctgg

SEQ ID NO: 668556 - DNA, 97 bp, Homo sapiens
ggggcgctggcggcctgcgcagccacctcaaggaagaaaggcgaaggttgaaaaatgcaataattatccagtcatttattcgaggctatagagacag

SEQ ID NO: 668557 - DNA, 100 bp, Homo sapiens
gggacggagggggtctctcagtaatgctggggaccctgagatcgtcaagtctcccagcgaccccaagcaataccggctacagatgcacatgttgaatgga

SEQ ID NO: 668558 - DNA, 50 bp, Homo sapiens
gcatgacgtgcaggtctctagcgcgagggtttgcatttgtgtatgaagct

SEQ ID NO: 668559 - DNA, 98 bp, Homo sapiens
gggttctctggaaggacattcaaacaggctagacagcaacaagcagaattggcccaacaggaatggcttcaaatgcagcaagctgcccaacaagccca

SEQ ID NO: 668560 - DNA, 82 bp, Homo sapiens
ccatcactgcttccctcagccataacaggttattccagtcggtcgcacagtgctgcatgggacagaagcaggcccagcaagt

SEQ ID NO: 668561 - DNA, 74 bp, Homo sapiens
ggcgaaggtctcagagctttacgatgtcacttgggaaggtaagaatgattgatgttggctgatattggagtgct

SEQ ID NO: 668562 - DNA, 96 bp, Homo sapiens
aaggaacgtgcccgattgaagacagtgaagtttaatgccaaacctggagtgattgattcgaaaggggtcctggatgcctcatcccttagtttcaac

SEQ ID NO: 668563 - DNA, 98 bp, Homo sapiens
caggacaccgacatggaacagggactcactggggataagtatgctgtgcgcttcatccctcgggagaatggcgtttacctgattgacgtcaagttcaa

SEQ ID NO: 668564 - DNA, 100 bp, Homo sapiens
ccttgctgctaacatagatgaaattgtatttacatcaacaggagacatctccatttactatgatgagaaagttgaggagctcaagcttgggaaaatggtg

SEQ ID NO: 668565 - DNA, 75 bp, Homo sapiens
tgaagccccaccaggagctaaaaaagattatttgcatgggtgcaaaagaaaatggtttgccgctggagtatcaag

SEQ ID NO: 668566 - DNA, 100 bp, Homo sapiens
cgatgactggtgcaggtgtgacctcagcgcctttgatgccaatgggctccccaactgcagcccccttctgcagccggtccgccgagacctgaactttgag

SEQ ID NO: 668567 - DNA, 100 bp, Homo sapiens
acgcgtcatcgagtgtgacgtggtgaaagcttccccgggcgctgcctggacaggcctgcctgcgtgctgggacatgtctggcctccaaggaccgtcggtg

SEQ ID NO: 668568 - DNA, 82 bp, Homo sapiens
ttggtccgcggcatccgtaaccacaaggaggacgaggcttcttccccgggagctcgcagggctgcgacgccttcctgcggca

SEQ ID NO: 668569 - DNA, 75 bp, Homo sapiens
gtggttgcgctcgaaagtgacaaaacttttattccacatttggagggaagtgggaatgtccttggcatcattgtg

SEQ ID NO: 668570 - DNA, 90 bp, Homo sapiens
tcagtgactgaattaaaaggtgtcaagaagctcagaatgatttggagcaagaggtggtggtggccttcccccgaagaaatttggtaatcc

SEQ ID NO: 668571 - DNA, 100 bp, Homo sapiens
acaaggaaccaaagaatatgaaattcatcatgatatgaagagaaggctactaaagacttggaacgatacaatagtcaaatgaagagagccattgaacagg

SEQ ID NO: 668572 - DNA, 100 bp, Homo sapiens
tgtactggcagcacgtgtacatccccgtgctgccgccgcatctgctggactactgctgattgctgtcgtggctgtgatgtgcaaaccccacagatgtcca

SEQ ID NO: 668573 - DNA, 74 bp, Homo sapiens
aaaatcgctcggcgacgggtcctgtccccgctcgttctgccttgggccagctgagatctgtatctgtggacctg

SEQ ID NO: 668574 - DNA, 82 bp, Homo sapiens
cgcagccccggcctctcggcctctgccggagaaacaggctcttgtcaggatggtgaagctgttcatcggaaacctgccccgg

SEQ ID NO: 668575 - DNA, 100 bp, Homo sapiens
tctgtgacttcatcttctgatataaaagaccagtgtcttaagtaccaggatgattgtcttttgaaagtgtggtatcctatgactggttggaagtcttcaa

SEQ ID NO: 668576 - DNA, 89 bp, Homo sapiens
agcagagcagccggtaacgttgctggaccgggacgcacgctcagctgaggaggacccccaaagggaatgaactccattgcctttgtgtg

SEQ ID NO: 668577 - DNA, 74 bp, Homo sapiens
ttttcctgaagcagctggctagtggcttattacttgtgactggacttcctgaccaagcatgccagccacaccgg

SEQ ID NO: 668578 - DNA, 75 bp, Homo sapiens
ccgtggagcggcggcggagcgggcgccgcggggggtgtggcgcggagatgccatggacaatattaccaggcagaa

SEQ ID NO: 668579 - DNA, 96 bp, Homo sapiens
gagaaagcctggaatgcttacccctactgcagaaccggccgagacgcatccagagctttcgtgaccggggactgttctgaagcaggcctcgtggat

SEQ ID NO: 668580 - DNA, 75 bp, Homo sapiens
ttttacaaagaatccaagcaacaggctctgtccaatatggtatgcagggagttccagcgaggaaactgtgcccgg

SEQ ID NO: 668581 - DNA, 83 bp, Homo sapiens
caaagattgcctgcagtttattgatcatgatgctgcgattaatagatatagccgtttatcaaaaaaaagagaaaatgacaagg

SEQ ID NO: 668582 - DNA, 82 bp, Homo sapiens
gaaactgctcctgcagcgagagctcacggaattcctctcggttttacaactgcctacagcatgctttggaaagggaaacgat

SEQ ID NO: 668583 - DNA, 49 bp, Homo sapiens
acctaaagcctgactggggcaaggtgcccctgggcgctgggattgctct

SEQ ID NO: 668584 - DNA, 90 bp, Homo sapiens
cggggagcagcagcttgatgcaggtgtttgacctggtgatgcttttcatcatctatagcaccaatactcagacaaagaagtacattgaca

SEQ ID NO: 668585 - DNA, 75 bp, Homo sapiens
cagaagtttgataacttgtactgctgccgagaatccattttggatgggttgcacacatgacgaaaagtgaaatgc

SEQ ID NO: 668586 - DNA, 83 bp, Homo sapiens
ggcctacctcttcctctggcccgaagccttcctttatcgctttcagcctagatattatcctactgaagatgtgcctcgaaagc

SEQ ID NO: 668587 - DNA, 100 bp, Homo sapiens
agattctcaagcatccttctctggccaggaggatctgtgtccaaaactccacgttttctgctacctggaaccgagcttatgtccctgatgccaaaaatgc

SEQ ID NO: 668588 - DNA, 100 bp, Homo sapiens
aagtaatccaattcgaagaccaatttcagcagacagcgccatcatgaatccagctagcaaagtaattgcactgaaaggtcctcagaatggttggaatgac

SEQ ID NO: 668589 - DNA, 80 bp, Homo sapiens
ccagtggatccatacaactgctccgcctggtggaatctgaggtgaagcatatatgcgtttaagcaaactccccgaagcag

SEQ ID NO: 668590 - DNA, 100 bp, Homo sapiens
ctcccgccgggcgagcatggggcgcctggcctcgaggccgctgctgctggcgctcctgtcgttggagttgtctgctggttctcagcttgaagaagattct

SEQ ID NO: 668591 - DNA, 50 bp, Homo sapiens
gcatgctagtggagaagttgaagaaccgatctttcagcagagatgacaga

SEQ ID NO: 668592 - DNA, 95 bp, Homo sapiens
ctctcagtcaagatccaaacagtctttcaaacctagatcagatgcctgaggaaacccagacccaagaccaaccgatggaggaggaggaggttgag

SEQ ID NO: 668593 - DNA, 100 bp, Homo sapiens
cagcgattggagagtctgagtgcagccaccacctttgagcctcttgagcctgtgaaggacactgacattcaggttctagtaaataccgcttgctgtgttt

SEQ ID NO: 668594 - DNA, 100 bp, Homo sapiens
gccgttttctcactatgctgggacattgctgctacttctggcaggtgtggcctgcctccgagttgtggacatcggatacccaaggagacgaagctgaagc

SEQ ID NO: 668595 - DNA, 50 bp, Homo sapiens
ctcatgcccagcagcagcaagcaggcaaatgaagaggattcttccagttc

SEQ ID NO: 668596 - DNA, 75 bp, Homo sapiens
agaggcgatggaaagaaaatagttagttaccaggttctggaatgaatttgttgcagatacaggataaagtctggt

SEQ ID NO: 668597 - DNA, 90 bp, Homo sapiens
ctcaagacaccattttttgactgaagccaagagccttgcttgtcaaggtggctttggagaaaagtctggcaactgtggagacccagaacc

SEQ ID NO: 668598 - DNA, 75 bp, Homo sapiens
tagttcccgacttgtttctcaggtcaaaatgcagatcttcgtgaaaacccttaccggcaagaccatcacccttga

SEQ ID NO: 668599 - DNA, 74 bp, Homo sapiens
gctgagaggagtcttctggtgcagtcttattttgaaaagacactgtgtaagagtgcaaatccgcagtggcagga

SEQ ID NO: 668600 - DNA, 100 bp, Homo sapiens
gagatgtccggctgcagcagcaagtcccatcggaggacctccctgccctgtataccgagggaacaggagaagaatttggattggtttcctcggatgcgag

SEQ ID NO: 668601 - DNA, 80 bp, Homo sapiens
aaaaatattatggtctttgtgcacatttacatcaaggccaggagacaagcttctcaagtctttacagccgagaagattcc

SEQ ID NO: 668602 - DNA, 76 bp, Homo sapiens
tcctgcagaagaagcgacaattgggattgtggatggcattttcacaagggacaagaatccttcaagaaacaggaaa

SEQ ID NO: 668603 - DNA, 98 bp, Homo sapiens
caagtatgctgcaagtgagaacatatttaacaggtgtcttcagtgccctgggtttgcctgtgacccaatgcccactgggactgaatgccaaaggactc

SEQ ID NO: 668604 - DNA, 100 bp, Homo sapiens
gtccggcttcggagcgggagtgttcgttgtgccagcgactaaaaagagaacatccagtcatggataaaaatgagctggttcagaaggccaaactggccga

SEQ ID NO: 668605 - DNA, 93 bp, Homo sapiens
cgccccttcgcgtcccctgcaccatgagctggggcaccgagctctggggtggcccagttgaaatccttcccttcctctaccttggaagtgcct

SEQ ID NO: 668606 - DNA, 83 bp, Homo sapiens
aagatgcagcaggtcggaggaaacagccagaccgagagcagcctgccggggcggagccaaaacagagtggagtacgagaaaag

SEQ ID NO: 668607 - DNA, 100 bp, Homo sapiens
ctccgaccgcggccgggaggctcctgggggccggggctccgagccctggttgttgctatgaaacagctatgacaagacatttttatcatggccgtacaga

SEQ ID NO: 668608 - DNA, 75 bp, Homo sapiens
ctcgtggcctgcctctgcgtgcgttcatctgcagaagccagcggacgcctctgttcaacttgtgggttacctggc

SEQ ID NO: 668609 - DNA, 101 bp, Homo sapiens
agatatgctcatgtggtgttgaggaaagcagacattgacctcaccaagagggcgggagaactcactgaggatgaggatggagatgaagatgaggaagctga

SEQ ID NO: 668610 - DNA, 100 bp, Homo sapiens
agaagcagaaatgagcagaaaggagttggggcttgatgaaggcgtggatagcctgaaggcagccattcaggctcatatgacattaacagacaagacactt

SEQ ID NO: 668611 - DNA, 75 bp, Homo sapiens
aaatatagaacactaaagtgttacatgacagatgtatgaggctggaggctcccaggtgattttcacaaatccttt

SEQ ID NO: 668612 - DNA, 97 bp, Homo sapiens
aagaaatctgttgcttcttgcatgggtgtgatgaatgcagactctgctaccattttggctgtttggatcctcctttgaaaaagtctcctaaacagac

SEQ ID NO: 668613 - DNA, 77 bp, Homo sapiens
cctcctgtaacccagcctgtttcacttcttgtttcaccagtgatcattaaagaatgggcagcttacaaaggaaagtc

SEQ ID NO: 668614 - DNA, 75 bp, Homo sapiens
tcactttcggccctgggaccaaagtggatatcaaacgacacattcagctaacgtattttagcaggtggagtgagg

SEQ ID NO: 668615 - DNA, 100 bp, Homo sapiens
aaggcggaagaggaagcacagagcttgtttgttacagaggttgtcacagctcatgcagttcgggtccctgtcaccagcaacctgagtgccaacattactg

SEQ ID NO: 668616 - DNA, 85 bp, Homo sapiens
aacagttaatcctcaatttaagcctgatctaacccctagaaacagatgcggaaaacgccatgcggtacataaatgggacgcgtct

SEQ ID NO: 668617 - DNA, 100 bp, Homo sapiens
tgagagccaactgtctctcaacttctacactgccctacatcattcgaggaatggcgcccccgacgacgccctgcagcaccgacgtgtgtgacagcgacta

SEQ ID NO: 668618 - DNA, 101 bp, Homo sapiens
atagacatgggggcctcaaacgtggagatcaactcctctctgttaatggagtggcatttattaatacagcaaaagaaatttatgaaaaaattcaagaagga

SEQ ID NO: 668619 - DNA, 90 bp, Homo sapiens
taaggggattgcggtcatggacaaggaaggcaatgtcctgggtcattccagaattgctgggacaaaggttgcccgacatgtgagtgccat

SEQ ID NO: 668620 - DNA, 99 bp, Homo sapiens
agtatgccggaagctggttttcaggccacaaatgctttcacagcacccctgcagtggaccatgagtcggtaatgcccactgaggacctctgggagccat

SEQ ID NO: 668621 - DNA, 75 bp, Homo sapiens
ctgatcgggtcttccttcatgcattgcactgatgatgtggaatacgttcttagttaaaagattttctgctgctac

SEQ ID NO: 668622 - DNA, 100 bp, Homo sapiens
gggccgctctcgccgcccgggccccgcggctgccgcagcattcccgggaagagtgtatccagaagctactgtcaggaggacactgtaagagaaccttggc

SEQ ID NO: 668623 - DNA, 90 bp, Homo sapiens
gccaaacatcaagcagaatgtgatttgcttgaagatatgaggtctataagggagaattccaactacctgactttcttaaagaaaaaccac

SEQ ID NO: 668624 - DNA, 75 bp, Homo sapiens
acctttgctgtattcacacaccttcctatcccagatgcagtgactggttactacctgaaccgtgctggctttgag

SEQ ID NO: 668625 - DNA, 74 bp, Homo sapiens
cgccggaacaccattcttcgccaggccaggaattttgtgatggacgcctctgaccccacccagctctctgcatc

SEQ ID NO: 668626 - DNA, 75 bp, Homo sapiens
aacttataatgagcctggctctcaagtattcaaggagtctactcttcatcttgtgttgagacttcgtggtggtgc

SEQ ID NO: 668627 - DNA, 80 bp, Homo sapiens
tgtgctacaagcttacttctgtttggtccaacactaagtaaggaggaaaaagagttggaaagaagaaaagaattaaagaa

SEQ ID NO: 668628 - DNA, 74 bp, Homo sapiens
gggagattgcccagttcctctgtgacatcaaggtaacagctgtggactggcactttgaggaggctgtggatggt

SEQ ID NO: 668629 - DNA, 75 bp, Homo sapiens
accgagagtgcctcatctacagcagaccctatcagatttggatatgtccttcatatttgattggatttacagtgg

SEQ ID NO: 668630 - DNA, 96 bp, Homo sapiens
gggaattgtcctctgtggaagggactttcttttggccctaggccccttcctgcccctgtcgtcagcaggattccgttggtgaacctgtaaaaacaa

SEQ ID NO: 668631 - DNA, 75 bp, Homo sapiens
gtggatcgctgtgatcgtcacttgagtacccaagtggccttggaccatctggagtctgtgcctgagaaactgagc

SEQ ID NO: 668632 - DNA, 51 bp, Homo sapiens
gaagtgtagaacgtcattcagaggcaacagctgaagctaataatcttgctg

SEQ ID NO: 668633 - DNA, 83 bp, Homo sapiens
gaagatcgtcgccacctggatgctggagctgtcgcctggttgggcccggaaatgggacgtcgcgctttctcagggagcgtaga

SEQ ID NO: 668634 - DNA, 75 bp, Homo sapiens
ctggggcagatgatcgtcaagtgaagatctggcgcatgaatgagatcatgatgcagccgtccttttggatttctt

SEQ ID NO: 668635 - DNA, 75 bp, Homo sapiens
cggggaactgcagggcgctcgaggccagtggaatgcagtagccctctgggcctgggatattgtggttgataactg

SEQ ID NO: 668636 - DNA, 101 bp, Homo sapiens
ttcaagccttcctttgatgtgaagatatgagcacttttcttcatgtcttcaccaagtattaggtcttcttaatggaaaggatcctgattcctcttcaaagg

SEQ ID NO: 668637 - DNA, 75 bp, Homo sapiens
cgaagccactttttgtatgcttatggcaatcagatgagctccgacaagaaatgctggatgatgtacaaaagaaat

SEQ ID NO: 668638 - DNA, 90 bp, Homo sapiens
gcaagatcctgtgcactgactgcggactttccttatcccagttgattgtgcagaatacactgcctgtcgcttgtcttctattcaccatgg

SEQ ID NO: 668639 - DNA, 50 bp, Homo sapiens
ctcctttacacagtatcagaacgcgctaatgtgcatgctacaacagcaac

SEQ ID NO: 668640 - DNA, 98 bp, Homo sapiens
gtgaactactttgcaatccgggaccctgatgctcccataagacagaaaatgccccttgatgatctggatagagaagatgaagttagattactcaaata

SEQ ID NO: 668641 - DNA, 90 bp, Homo sapiens
gctgctgccgccggacgcctccattgtttgaccacaacaagggccggattctcacccagtatacgctcaacggcaagaaagtggaagttg

SEQ ID NO: 668642 - DNA, 73 bp, Homo sapiens
caaggaagccacgtgcagacatctacaaccttcgatctcctgacgatcacagcaaactgtacaatggcagttg

SEQ ID NO: 668643 - DNA, 51 bp, Homo sapiens
atcctcttcaagcttaaacctggaactggcatcaaatactcacaacatagc

SEQ ID NO: 668644 - DNA, 100 bp, Homo sapiens
ggttcgtttgagaggacttccttatagttgcaatgagaaagacattgtagacttctttgcagggaaatccctaagtcagccaacccctcctcccatgcca

SEQ ID NO: 668645 - DNA, 75 bp, Homo sapiens
gaccggccgcagtgccacttcgacatcgagatcaaccgggagccgggctccttctcctgaaaaagccgaggagga

SEQ ID NO: 668646 - DNA, 100 bp, Homo sapiens
cgcgccgacgcggccccgcaagccagacctgcaggtgtacctgccgcgacaccgagatgttttactgtgcctggctaactatagtcgagggggtgatggt

SEQ ID NO: 668647 - DNA, 88 bp, Homo sapiens
ccactggccgtcttcccagagttgtgacagccaatcggatgctgaagcagatgcttttcaggaaaatgtttataggaggccttagctg

SEQ ID NO: 668648 - DNA, 83 bp, Homo sapiens
tacgcattggatcctcaaagaactgactgcaaaattcaaaatggggctcaaggtattcgtttcatctacaccagagaaggcag

SEQ ID NO: 668649 - DNA, 100 bp, Homo sapiens
aaacatgatccggaagtcactggagatgttggagctcggcctgagtgaggcacaggacagaatgacttggaagataacggagcttcgaagcttctagcag

SEQ ID NO: 668650 - DNA, 90 bp, Homo sapiens
ctcaccgttacccggggcaacagctgagccgtctgggaagggatgcatctacgagctcatctgcgcctttgtttagaacgcttaaaagtt

SEQ ID NO: 668651 - DNA, 100 bp, Homo sapiens
ggcctcacactagtatcgcatgtccactatccagaacctccaatctttcgggaaagatgccaccctcctgatacatgaagccaccctggaagatggtttg

SEQ ID NO: 668652 - DNA, 82 bp, Homo sapiens
aggctcgcctcgactccaaatggttgaaaacagatatacaggatgaaattgattctgcagtaaagatgttggtgtcattaaa

SEQ ID NO: 668653 - DNA, 75 bp, Homo sapiens
aggccatggaggctcgtctgctgctgcaggaggagtttgtttacgaggacatggaggccctctgcagtgtcctgc

SEQ ID NO: 668654 - DNA, 100 bp, Homo sapiens
ttgaccgctcctccaactaaccatggccacagatgtctttaattccaaaaacctggccgttcaggcacaaaagaagatcttgggtaaaatggtgtccaaa

SEQ ID NO: 668655 - DNA, 75 bp, Homo sapiens
ggaaacccaaggttgtggtatgctggaaatctgaaatagagtactatgctatgttggctaaaactggtgtccatc

SEQ ID NO: 668656 - DNA, 82 bp, Homo sapiens
atgcgcgtcgccttccccgacaccaagaagacctactgcttcgacgccttccctaacatcgagaaggtgtcctagatcacgt

SEQ ID NO: 668657 - DNA, 97 bp, Homo sapiens
acacctttggaggaggggtgtttctggccacgtgcttcaacgctctgctgcccgctgtgagggaaaaggtttactcctggcttgggggcattaggaa

SEQ ID NO: 668658 - DNA, 88 bp, Homo sapiens
gtggaagtgagaccgaaatagactctgaagtaatatctggactttgaaattcctaaatgcgatggccaggtattactgacacaagtgt

SEQ ID NO: 668659 - DNA, 75 bp, Homo sapiens
aggaggaggtacagctgaagtcagctcggttaccaaagtgacccaggtagatggaaacagccccgtcaggttttc

SEQ ID NO: 668660 - DNA, 100 bp, Homo sapiens
attgtattgagaacaatatagatttgcaggatccagccgcagaagccaggatgaaggtagcctgcatcacagagcaggtcttgaccctggtcaacaagag

SEQ ID NO: 668661 - DNA, 97 bp, Homo sapiens
ctgtagctttccggctctgttggacagtgatgtgaagaggttcagctgtcctaatcctcactgccgaaaggtgcaccgggtataatttcttcaccat

SEQ ID NO: 668662 - DNA, 90 bp, Homo sapiens
ggtggtcccagtgctattatgcctacttgactgcagcaccatctgtcacttccgttgtcacccctgcaatcttgatacttccccaagaag

SEQ ID NO: 668663 - DNA, 74 bp, Homo sapiens
actcgcgtttccacttcagagatctggatcagattttattaagacctctactggaaaagaaacagtaaatgcca

SEQ ID NO: 668664 - DNA, 51 bp, Homo sapiens
gtaccctacacctcggagcatgtgcccagacacatcatctcagagttggag

SEQ ID NO: 668665 - DNA, 75 bp, Homo sapiens
cgaggaggtgcgcgagaagtacaaaggtcatcatcagatttgaaatatttaaagtggatacaaaactatttcagc

SEQ ID NO: 668666 - DNA, 85 bp, Homo sapiens
aggcgccgcgccaggccgggcgggcggtacaccaggggttggaaaaaccacactaggcaaagaacttgcgtcaaaatcaggactg

SEQ ID NO: 668667 - DNA, 50 bp, Homo sapiens
cagcctggtcatcagccagggggctgacgagacccagggccctgtggagc

SEQ ID NO: 668668 - DNA, 55 bp, Homo sapiens
gaatgcgccaagaggagctcatgaggcagctccagggttccttgaaaagaaaaca

SEQ ID NO: 668669 - DNA, 88 bp, Homo sapiens
gagccccagctgagccgagggctcgcactcttctggtctcccaggcccaacccacctgaagctagtgtcagcagtgggatacctgcgc

SEQ ID NO: 668670 - DNA, 100 bp, Homo sapiens
cggccagggaggtgcggagcagcctcggcggcggcggccgaaccaaccgagtcggatcctgaccctaaaacctagaactccattctccaactttaaaaat

SEQ ID NO: 668671 - DNA, 75 bp, Homo sapiens
ccacgagtagcagccgcaactggacggaggacatggaaggagccccatggctgggggttatggagtgatgggtga

SEQ ID NO: 668672 - DNA, 100 bp, Homo sapiens
ccagctcatctatctgctggagcagatgctccagaaaacctagatgagcagattaagaaagtgtcccagcagatccttgagaagcgagcctatatctgtg

SEQ ID NO: 668673 - DNA, 51 bp, Homo sapiens
atggcagattcaatctttttaaggatgtggatgctgcctacatgagcaagg

SEQ ID NO: 668674 - DNA, 100 bp, Homo sapiens
agacatgtggggcctgggaaatgaaagagcgccttgggacagggggatttggaaatgtcatccgatggcacaatcagaaaagttgccagacggccagcat

SEQ ID NO: 668675 - DNA, 49 bp, Homo sapiens
ctggtctctcccaccacacagaggtctgcagggaactggccaggcaagg

SEQ ID NO: 668676 - DNA, 51 bp, Homo sapiens
cagctgatgcttggagtcgggctgatcggatatggaatattatcttgtaaa

SEQ ID NO: 668677 - DNA, 75 bp, Homo sapiens
gaacctggaagttgtgctttttaagacaatgcagatcttcgtgaagactctgactggtaagaccatcaccctcga

SEQ ID NO: 668678 - DNA, 75 bp, Homo sapiens
catcaggaaatactacgagactgtctcagcccatccctacaatgaagctgtggtctaccaatctagacaactcag

SEQ ID NO: 668679 - DNA, 98 bp, Homo sapiens
ctccggccgcctggctccccatactagtcgccgggcaccagtgtcttgtcacctggactccacataggactaattattatactggcaataatgatcta

SEQ ID NO: 668680 - DNA, 90 bp, Homo sapiens
aagcaagcctctaaactcacaccaagtatgctgcgattagctattgaaggcctgcaggctgaaaaagcttctgatcctgcaagttctctt

SEQ ID NO: 668681 - DNA, 74 bp, Homo sapiens
gtcagtggagacttcatgcttaaccagtacaccaagacatttgtcaagatgcaaaaaggtgagcgccagatggc

SEQ ID NO: 668682 - DNA, 98 bp, Homo sapiens
agcagagacgcgaaggagaggccctagaaccccgtgctggtatagaggactctaagaagtggggcatgctgtttctggtgaaccagctgtttaaaatc

SEQ ID NO: 668683 - DNA, 100 bp, Homo sapiens
gaaaaatttccaagccagagtcatctgggttatggaattccactgaaagacggagatgagaaaacagatgaagaagcagaggggccatattcagataatg

SEQ ID NO: 668684 - DNA, 96 bp, Homo sapiens
tgaaaatgggctttgtcctgcatgtagaaagggagtactgatggtcggcccacctggcacggggaagacgctccttgctaaagcagtagctacaga

SEQ ID NO: 668685 - DNA, 51 bp, Homo sapiens
gaaaccttgctaaggctattgctacgacggagttttgctcttgttgcccag

SEQ ID NO: 668686 - DNA, 75 bp, Homo sapiens
cgattataagaagagaaactcagcgctggggaagaagggaccagttactctccacaagaaaattcacacaaccac

SEQ ID NO: 668687 - DNA, 100 bp, Homo sapiens
ctccgggaagaggtgcacgaactgcaggcgcggtggttccccagcagaaccactctcagcatcggctttcaaaaagcaatggtcaagactatgtctgcag

SEQ ID NO: 668688 - DNA, 76 bp, Homo sapiens
caagatcaaggtcaacaatcaccttttccacagttccgatgaagttaaattccgtcaagatttaatgaatattgcg

SEQ ID NO: 668689 - DNA, 75 bp, Homo sapiens
aaggacacaaatagatgtaggcagaatacctttacagaggttaaaattggtgcacatgaacttgaacagatgcag

SEQ ID NO: 668690 - DNA, 98 bp, Homo sapiens
tcaaccacattgtggagaaacgggtcttggcgaaaatcctgccttgcttcgttgggcctatgcaagaacaataaatgtctatcctaatttcagaccca

SEQ ID NO: 668691 - DNA, 100 bp, Homo sapiens
gtcactttccacaaactgaaactcaccaacaacatttcagacaaacatggatttactggacccttgtcgaaactcctcctggggaggaacaagccaagca

SEQ ID NO: 668692 - DNA, 50 bp, Homo sapiens
ctcggcccctggctcctgctcctgggcttatgtgcacaagagtgtaatgg

SEQ ID NO: 668693 - DNA, 90 bp, Homo sapiens
gtatgcttcgtttttcgccgtcatgggcgcctcggccgccatggtcttcagcgatgccatggacaatattaccaggcagaaccaattcta

SEQ ID NO: 668694 - DNA, 95 bp, Homo sapiens
gcagatgggcaaagagtaccgtgagaagatagaggcagaactgcaggacatctgcaatgatgttctggggatgttcgtctaaccccagaagactt

SEQ ID NO: 668695 - DNA, 75 bp, Homo sapiens
atcccttattgatgctgccaaatttcctcttccaatggaagtgtttaaggaatgtatcctgtcaggtataatgtc

SEQ ID NO: 668696 - DNA, 73 bp, Homo sapiens
cttggcctcggggtctccctacaccaacgtcttgtgaaaatgccattgtgtgctggaaacctggcaagatgga

SEQ ID NO: 668697 - DNA, 98 bp, Homo sapiens
acgttgaggcccttcttgtgtatctggagaaaatagagcgcttctctgaagtagctttggaaagtagagaagaaaatccagtttgcttcttggagaac

SEQ ID NO: 668698 - DNA, 100 bp, Homo sapiens
ggcacggaatctatctctgagaatgacccgttctggaatcagcttctctcattttctttccctgcaccaactagcaggtgcaacctgccccccatctcag

SEQ ID NO: 668699 - DNA, 100 bp, Homo sapiens
cagttggacatgagaaccgtgcaaatttctgatctagagcctccacctcagatatatgacaagcagttggatgaaagagaacacacaattgaagaatgga

SEQ ID NO: 668700 - DNA, 88 bp, Homo sapiens
gagcggcctcctggcatctgccggctgctccgcaccccggggtcccaggaagggcggcccaggtatggatcctggcgggagccagtca

SEQ ID NO: 668701 - DNA, 101 bp, Homo sapiens
tgaatttccatgtcaacatagtcctggtcagcttttgccaactgttttcaaatcacatgcatgggggatcttacacacactccttgagatgtttagctacc

SEQ ID NO: 668702 - DNA, 98 bp, Homo sapiens
ctacgaaaaagccctggtggagctgaaggttgcaggagagatgaatggagagtatagaggcagaggatttggacgaggaagatttcaaagctggaaaa

SEQ ID NO: 668703 - DNA, 100 bp, Homo sapiens
tcgcgaagatgataggggggaaacctcaagatataatcttcacttccgggggcactgagcaatggctgccatccggaagaaactggtgattgttggtgat

SEQ ID NO: 668704 - DNA, 93 bp, Homo sapiens
agcaaaaccaacgcctggctcggagcagcagcctctgaggtgagaagccctaccactgcaactgggacggctgcggctggaagtttgcgcgct

SEQ ID NO: 668705 - DNA, 83 bp, Homo sapiens
gagctgaaacagaacctgtccaggagctggcatgacgtgcaggtctctagcgctgcagagcagagcgggcggaggaccccggg

SEQ ID NO: 668706 - DNA, 100 bp, Homo sapiens
accgctggtttaacatttcgtttgatatttttggtcgcaccaccactccacagcagaccaaagacccctggcacaagatccctgccctggacccagagaa

SEQ ID NO: 668707 - DNA, 101 bp, Homo sapiens
atgatgacctcggctcctatcaaggttgaggatctgaagagtagctccctggacaggagcagccagaggcccctcggctctggagccccggagcccacccc

SEQ ID NO: 668708 - DNA, 99 bp, Homo sapiens
ggcatggacctgcagagacccgattcctaccagggaggagctggccctgacttcaacgaccacgtcctgcataaggatatgaattgtctcccacggcag

SEQ ID NO: 668709 - DNA, 50 bp, Homo sapiens
aagacatcccctcccaggctccgactcatgcacttgcaggaaagacatgg

SEQ ID NO: 668710 - DNA, 75 bp, Homo sapiens
tggcggacgaggggaagtcgtacagcgtagacccaaatgatttgtacattgtagaacccctcaagttttctccag

SEQ ID NO: 668711 - DNA, 98 bp, Homo sapiens
agaggacagcggcagcgacgagaacctggatcagatacctggaggcatcattgaagactcctgtgtcttgcgtggagtcatgattaacaaggatgtga

SEQ ID NO: 668712 - DNA, 51 bp, Homo sapiens
cttggatcctataaacctgtcaattctgtacaggtgaacaaaggcagagta

SEQ ID NO: 668713 - DNA, 83 bp, Homo sapiens
gctgtctctgatccgcaagcatgctcagaccttcattgctctgtgtgccaccgtaatctcaggggcgatataatcaatgaggt

SEQ ID NO: 668714 - DNA, 90 bp, Homo sapiens
ttctgtcttccttcctgggtcagtgattcccggaccctggaagagaagagggtggctaatgattaaggttgaaatcacaaagattagaca

SEQ ID NO: 668715 - DNA, 75 bp, Homo sapiens
gctggtaatagatgtctgacaaactaaagaaagacttgtgttaccatgctacaagtgaaaactgatgagaaactg

SEQ ID NO: 668716 - DNA, 97 bp, Homo sapiens
ggaaaatgacggttataagaccatttatttctttggagacaaaactatgccaagctcccagctcctccagcagccgacaggaggcccgtcaagatgc

SEQ ID NO: 668717 - DNA, 100 bp, Homo sapiens
gagttgcgtttctacccgtgcttcagggtctagcccagccgaatccgcgtcgggctgtaactcgagtgccagatcatgcaacagatgagtgaccaccgct

SEQ ID NO: 668718 - DNA, 90 bp, Homo sapiens
cagaaaacctcagacaccatagccccctggttccatgatgatcatagcagggttaagctagcacagcttgctgaaaaggatggcaaactg

SEQ ID NO: 668719 - DNA, 96 bp, Homo sapiens
cccagaataaagccaagctcatctctgagacccggaggaggttcgaagctgagtatgtgacagggtggacaagcttcatttacacgatatctggag

SEQ ID NO: 668720 - DNA, 100 bp, Homo sapiens
tagccacggtgtggcagctgctctgaaccaggacctggacccggacccaaagtgccatgtctttaatgttccagcaacagatagaaatgctttaagttca

SEQ ID NO: 668721 - DNA, 82 bp, Homo sapiens
ccccgggatccggagcgcagcccgggaaagggaaatcctcattgacgattcaatttgttgaaggccaatttgtggactccta

SEQ ID NO: 668722 - DNA, 97 bp, Homo sapiens
gacctgagctgggaggccactagcagccagttccggcccgaggacaccgactaccagcagatgaggacggggacttggttgccttttccagtgacga

SEQ ID NO: 668723 - DNA, 101 bp, Homo sapiens
gctgacggtcccgcacgtctgccgctgccaccggcgcgcccgacgaacacttgccaagtatttcaatccttgctatgccactgctaggttaaaaccaacat

SEQ ID NO: 668724 - DNA, 75 bp, Homo sapiens
cggcgagcagtctcaggcctttagtgatgatgggatagctgggagtatggccaccctgctccacgatgcggtaat

SEQ ID NO: 668725 - DNA, 50 bp, Homo sapiens
gcgcccgcgccaccatcttcggctgaagatgaaggatttgggggcagagc

SEQ ID NO: 668726 - DNA, 95 bp, Homo sapiens
agatagtgatcctgccaacattgttcatgactttaacaaggttgaaaatctttctaaacgatacgaagaaatttatcttaaaaataaagatctag

SEQ ID NO: 668727 - DNA, 97 bp, Homo sapiens
atggcactcaacatgaacaactacaaaggctatgaaaagaagccctattgtaatgcgcgcattctacattctaaaggggagctcagtgaagatagac

SEQ ID NO: 668728 - DNA, 96 bp, Homo sapiens
agcagctctaccgccgcctcaactgccgcctcgcctactcactctggagcccccctgtccctgccttacccagcaagcttcccacgtttggagccc

SEQ ID NO: 668729 - DNA, 126 bp, Homo sapiens
caatagggaaagtgaggcagctgcaaggagggcggcgggactgcactcgagtgtccagacctgctcgatggatctagtgaaaagccatttgatgtatgcggtcagagaagaagtggaggtcctcaa

SEQ ID NO: 668730 - DNA, 80 bp, Homo sapiens
agtagcaggccgcatgcttggaggtaaagtccttcctggggtggatgctctcagcaatatttagtactttcctgcctttt

SEQ ID NO: 668731 - DNA, 101 bp, Homo sapiens
ccctctatcacatatgacatcagtcagttgtttgatttcatcgatgatctggcagacctcagctgcctggtgctggatctccagaactgttctctggagga

SEQ ID NO: 668732 - DNA, 85 bp, Homo sapiens
gattcgcagtggtcgcttcttctccttggttgtccttctattcaggccactcttcgttttccatgtactgcatgctgtttgtggc

SEQ ID NO: 668733 - DNA, 90 bp, Homo sapiens
ctcctgctattccttgggctgcctttcctgcaggaatagcgggttttgcagcaattgttgcatatggattatataaactgaagagcaggg

SEQ ID NO: 668734 - DNA, 88 bp, Homo sapiens
tagcccctttccttactggatcctcaaaccagaagaaaacctgaatctctgagtgtgcaggatcaagacaaaaaacttcaagacttgt

SEQ ID NO: 668735 - DNA, 100 bp, Homo sapiens
ggagtgtaggtcatatcgccgcggttgtggacctggcctattagcagatgccaagatgcgggtatttgaacgttcagtgtattttggtgattcctgccaa

SEQ ID NO: 668736 - DNA, 73 bp, Homo sapiens
gagtacttacggagtgacaaagggaaaagtctgctttgaggcaaaggtgtttggcaatcaactcattcctccc

SEQ ID NO: 668737 - DNA, 80 bp, Homo sapiens
gtacatcggggatttctggctctttcctcttcgccttaaattcggttctggaggacacgtgccggcggcaggacttcaac

SEQ ID NO: 668738 - DNA, 75 bp, Homo sapiens
ctgagaaagtgagccagaaacatgctgagcctttgacagtgatgagctactcctgggtcatgagaaggcccctgc

SEQ ID NO: 668739 - DNA, 73 bp, Homo sapiens
tttccctaatacgtacctcattgtgggaggtttgcaggttgctatgttaatgttgtttgtctttggagtctta

SEQ ID NO: 668740 - DNA, 100 bp, Homo sapiens
acgggggccgccgcagcaccatggcgaccaccgtcagcactcagcgcgggccggtgcaatggatgagcttcatagtctggatccaagaaggcaagagtta

SEQ ID NO: 668741 - DNA, 96 bp, Homo sapiens
aaaagttgaagaatctcttatgatgcctgcagtttttcatactgttgcttcaaggacacagcttgcattgtacaattatcagaatccttggaatta

SEQ ID NO: 668742 - DNA, 100 bp, Homo sapiens
aacaagacagagctggcctggagtccgcggctggccgcgtgagtagacaggggcaagtgtccgagtggtgaatcagctacttacagagatggatggtctg

SEQ ID NO: 668743 - DNA, 100 bp, Homo sapiens
gtagatgataaagatgatgatatccttctcaaccttgtgggatgtgaaaactctgttactgaagatctcatcctggccttgggtgtcctggcccaaagcc

SEQ ID NO: 668744 - DNA, 102 bp, Homo sapiens
acatcaaggagtgcaagtggaaggtgatggcttcagccatgcaattcgcttattaaagtacgaatgtgaagaatcttttacgaccctaaacgtagacattag

SEQ ID NO: 668745 - DNA, 75 bp, Homo sapiens
cgcagggggacggggaccagcagctgtcgccgccgctctcagattgtaaaccatggctgtgtggatacaagctca

SEQ ID NO: 668746 - DNA, 100 bp, Homo sapiens
gttggtcaacatcttctggttcttccgagaggccttccttgtcccagcctacacagaacagagccaaatcaaaggcttgttctacgcagaaatagaagag

SEQ ID NO: 668747 - DNA, 100 bp, Homo sapiens
cgggcatctcccggcccggccgcagcagccgccgccgccgcgcaattgctgctaaaattgattcaattcctcacttgaataattccacacctctagtgga

SEQ ID NO: 668748 - DNA, 100 bp, Homo sapiens
tagcatcccagaaggtgaagaagatctggcaaaagcaattcagatggcccaagaacaggctacagatactgaaattttgaactgataaatttcaaacgga

SEQ ID NO: 668749 - DNA, 100 bp, Homo sapiens
gaagcagtgaaggagtgcagaggcatcacctgaaagggcagcaggatgggtgtggaagcagtgatggcacttttggaggggaccccagataccccagcct

SEQ ID NO: 668750 - DNA, 87 bp, Homo sapiens
ccaatgtgggatcgatgtttcaatattggaagcgctttgatttacagcagctgcagctcccggagccctgcctgttccctgtccatc

SEQ ID NO: 668751 - DNA, 132 bp, Homo sapiens
caggaacaaaggaattccgcccttgtccttacgtcctgctaacccgcttggcattgagattgaaaagtctgccatcatggatgttctcgcagaagcaaatggcacctttgccttaaaccttttgaaaacgct

SEQ ID NO: 668752 - DNA, 75 bp, Homo sapiens
accacatgttgtctcttagaagtgggagctgaacggcacggaatgttaacactggtgaattagcagcaattaaag

SEQ ID NO: 668753 - DNA, 88 bp, Homo sapiens
cgacaggctttccatgtaacatggtgaaagacccctgacaaaagacaatcatcttctgggtacatttgatctgactggaattcctcct

SEQ ID NO: 668754 - DNA, 100 bp, Homo sapiens
tgcccctattgtaagtgcagatggaacacaacaggtgttgccacatctgcaaacttcctgggagagtaatggggattcgagtgcttcgattatctttggt

SEQ ID NO: 668755 - DNA, 96 bp, Homo sapiens
cgaactctgcaaagcctccagaggacataccacctccaggatcaggatgcagaggtacccactgatggtaatgctggcctgctggctgaaccccag

SEQ ID NO: 668756 - DNA, 100 bp, Homo sapiens
gtgaagggtggcccaggtggggccaggctgactgaactcctctctgctatatgaaatatgggagacgacagaccgtttgtgtgcaatgccccgggctgtg

SEQ ID NO: 668757 - DNA, 83 bp, Homo sapiens
agaagtggtgatgcaagaagtttctaggaaaggccggacaccaggtatctgcccaaactggaacttatgctgtagacatttct

SEQ ID NO: 668758 - DNA, 74 bp, Homo sapiens
agaattcatgattgaagaaatgcaggatgacgtcatgatgccccagcgggtgaggctgcaacacgaggctgccg

SEQ ID NO: 668759 - DNA, 48 bp, Homo sapiens
ctcaggttccacttcatgtcggaattggcagcaatgaaacagattctc

SEQ ID NO: 668760 - DNA, 90 bp, Homo sapiens
gaaattcaagcttctcgccagcattgtgaggaagtatatattcaagcccaggactgtatagtaaaacaatgacccccacttatgatgctc

SEQ ID NO: 668761 - DNA, 100 bp, Homo sapiens
ctcaatctctgcagatggccgtacgtgtgaaggaccgcagctgaatgcacagctagaaggttggctttcacaagtacagtctacaaaaagacctgctaga

SEQ ID NO: 668762 - DNA, 101 bp, Homo sapiens
cgacctgaaacggtgcacgtactacgagacgtgtgctacatacgggctgaatgtggagagggtcttccaggacggtgttgacttcaaaatcaaaactgtag

SEQ ID NO: 668763 - DNA, 75 bp, Homo sapiens
gcacctgctcacttttcttttgttcctgcccgtagggagattcttcaagcaatcactatgtcaacagacacaggt

SEQ ID NO: 668764 - DNA, 82 bp, Homo sapiens
cctgaaggtaccgcggacctcgccccgggacagcgaggagctgagggaccctgtgaaatgacaatggatgctctgttggctc

SEQ ID NO: 668765 - DNA, 82 bp, Homo sapiens
ctccggcataagctcaatcttcgggaaaacgagttgtactaatgaaaaaatttcctctggatggagagaagatgggcagaga

SEQ ID NO: 668766 - DNA, 80 bp, Homo sapiens
ccagaacggagagctccctcctagaaaagctaatcttccagtaccaacaattgcagcaatagatggactcgctttaggtg

SEQ ID NO: 668767 - DNA, 101 bp, Homo sapiens
actacaatggatgctgagctggaatttgccattcagcccaatacaactggcaaacaactttttgaccagatgaggaaaatgaagctcgggctggttaactg

SEQ ID NO: 668768 - DNA, 100 bp, Homo sapiens
gccacacaacgactggaacatgcattcaacatcgccagatatcaattaggcatagagaaactactcgatcctgaagtggctggaatggctggtactgcac

SEQ ID NO: 668769 - DNA, 83 bp, Homo sapiens
gctaatgctatcaaagagatgattgagaactgaattcaattcgtcataatctgtccctacacagcaagttcattcgtgtgcag

SEQ ID NO: 668770 - DNA, 50 bp, Homo sapiens
cacatattgcttcaatgcttcaggtattgtcttctaagaactctgaagca

SEQ ID NO: 668771 - DNA, 83 bp, Homo sapiens
atttggaaatgtcatccgatggcacaatcagactcagcccacctgcacccaggtgaaataaacagctttattgctcacacgaa

SEQ ID NO: 668772 - DNA, 83 bp, Homo sapiens
ctgtgtggcttcaagagactgatcaaattgtgagaggaaaacagcctacccggtgcgtataacccgtatatagagataattga

SEQ ID NO: 668773 - DNA, 100 bp, Homo sapiens
tcttgactgccatccttgcctcgctcactgcacgccagaacctgaggagagaatggcatgccagcaattgcttgttcagagctcttggtgatcaattgga

SEQ ID NO: 668774 - DNA, 100 bp, Homo sapiens
gagcgagtctcggagaagatgtggtggcttccgtttgttggtggaggaggtggcaggcctcggcgataaatttgcgcctcattttggtaagcggaaaaac

SEQ ID NO: 668775 - DNA, 100 bp, Homo sapiens
caggaggaaggcatggactcggagattggctgcctcatccgcttctatgcaggtgaagccatataatgtctacatcacagttgcttacccaccagacaca

SEQ ID NO: 668776 - DNA, 100 bp, Homo sapiens
tgcggtgttacccacgactgcctgggacctggccaagggctccacacaccaagaccaaggccgccccatgaacattcagcttgtcacgtcacagattgac

SEQ ID NO: 668777 - DNA, 75 bp, Homo sapiens
gcatggccccaggtggcgagttcagggaggccttcaaggaggctattgagggcacctacattgacaagaaatgcc

SEQ ID NO: 668778 - DNA, 100 bp, Homo sapiens
aatcattatccaggagtccgccctggactaccgcctggatcctcagctccagctgcactgctcagacgagctactacccacagatggcatgatccgaaaa

SEQ ID NO: 668779 - DNA, 75 bp, Homo sapiens
ccggacggtacttctgccactgctgctccgtggagatcgtcccgcgcctgccggagctggtgactgccctcatgt

SEQ ID NO: 668780 - DNA, 75 bp, Homo sapiens
ctacctgcagggttgtcgagctgctctgcaggtcggaagtctatgcgtcagtctacagctgagcatacacgacaa

SEQ ID NO: 668781 - DNA, 75 bp, Homo sapiens
tcctacggattctggacttgccagccccacaatcatgagcaatttacagcaatgagggatttatacatgaaaaat

SEQ ID NO: 668782 - DNA, 100 bp, Homo sapiens
cgcccgcttcaaccccaggggaccagaggaactcagccctgattgcgaacttcccattaaaatcttactcatgttactattcaccatatatagtatttcg

SEQ ID NO: 668783 - DNA, 74 bp, Homo sapiens
actattctttcatggacaggcttggccactccaacagtgttacagcacatgaaggccgtgcaggcagatcagga

SEQ ID NO: 668784 - DNA, 83 bp, Homo sapiens
gcggcgggcgagtgactgcggccacgcctgaaaggcgactctcctgtttgatatcgacagctgcacttactacttcagctggg

SEQ ID NO: 668785 - DNA, 83 bp, Homo sapiens
gtcttaaaatcctgctctggccggattccagactcgtgggggaaaggctgtactgccaaatctgtcgaaagggagataatgaa

SEQ ID NO: 668786 - DNA, 82 bp, Homo sapiens
gggatcgacgcggacagcgggctggagcctgacgagctggcgggatttaagtgccctgtatgctcaaaatttgtatcctcag

SEQ ID NO: 668787 - DNA, 90 bp, Homo sapiens
taagcgcctccttgatcaccaggataatattctctcattgattaatgtcaatgtattggaccaggtacagacatttctcccacagatggc

SEQ ID NO: 668788 - DNA, 96 bp, Homo sapiens
tggaaatgaacttcacaagttcctcatctgggacactgctggtcaggaacgggctctggctccgctactgcatcgtgtgcttctgtccaagaggca

SEQ ID NO: 668789 - DNA, 88 bp, Homo sapiens
taagacgtttaaggaaatgctgcaggacaggcaccaagtatagatgagaaagtagatcttcattttattgcattagttcatgtagatg

SEQ ID NO: 668790 - DNA, 98 bp, Homo sapiens
ctgggcacagcatgagatccaaaggcagggcaaggaaactggccacaagagatgagtatgatgtatgtgccatttgtttggatgagtatgaagatgga

SEQ ID NO: 668791 - DNA, 100 bp, Homo sapiens
gaattctccgtccctttccagggagggaacaaagcccacagcaccggacatagctcgccttttgcaagaaaaggagttacaggaagagaaaaagagaaag

SEQ ID NO: 668792 - DNA, 51 bp, Homo sapiens
gtggtggtcgcgttgactagaaaggtcttagaaaaataccccaatacaccc

SEQ ID NO: 668793 - DNA, 100 bp, Homo sapiens
ctcaagagtgctgctgctaacgcggtccccggcacgcaccatctgttgccatcccggccggccgaggccattgcagaccgattattgaccgacctattcg

SEQ ID NO: 668794 - DNA, 100 bp, Homo sapiens
ggacgccgcggggtctccgggacaggctgaaggtgatgtggccgccctcaaccgacgcatccagctcgttgaggaggagttggacagggctcaggaacga

SEQ ID NO: 668795 - DNA, 51 bp, Homo sapiens
acgccatcgttgctgccttcttcgtcaaggctttcatgagaaggacaagaa

SEQ ID NO: 668796 - DNA, 75 bp, Homo sapiens
ccgggaactgctgacgcttgatgagaaggacccacggcgtctgttcgaaggggggtacatggtatggagtagaca

SEQ ID NO: 668797 - DNA, 110 bp, Homo sapiens
tgggtttatctcaaggcctgagtagccggtaacaaacgagggttcccgggattggaccgacgcagccatggttggatggcaagcatgtggtgtttggcaaagtgaaagaa

SEQ ID NO: 668798 - DNA, 75 bp, Homo sapiens
tttcaaggatatgctgtattcagctcaggaccaggcaccttctgtggaagaaatttacagcaacaatgtcaacac

SEQ ID NO: 668799 - DNA, 99 bp, Homo sapiens
tccctgatggcctcagaggaggagacctgtgcacaccgatatgaggcaaggcagcgagtggaccagatcctggagacgcgggatatgattggtcgctgc

SEQ ID NO: 668800 - DNA, 90 bp, Homo sapiens
gacacgccgcttcatcgagctgcctttacaggacgaaagtaatccttcccctctaccaccggatatggctcctgggcagagttatcaacc

SEQ ID NO: 668801 - DNA, 100 bp, Homo sapiens
atcgacgtcgtgatccagaagtccagagctgaggactgcctgtttgcaggttaaacccatccagagtaatggctgcggccttacccaggaccctggggga

SEQ ID NO: 668802 - DNA, 75 bp, Homo sapiens
ggtcaacgagcggggcaaccactgcgagtactgcttcaccagattattcagctgattgaaggcaaagcctctgct

SEQ ID NO: 668803 - DNA, 83 bp, Homo sapiens
ggaaggaataagcctggaagaaaaagatacaacgaactagcacaacgaggcaaacggggattcagcgtccgatcctttggaac

SEQ ID NO: 668804 - DNA, 100 bp, Homo sapiens
cgccgctcccggcaacccggagcgcgcaccgcaggccggcggccgagctcgcggccatcgaggagggcacgctggaggagatcgaagaggaggtccggca

SEQ ID NO: 668805 - DNA, 83 bp, Homo sapiens
ctggggagcagtgggcctccagggagcagctcctcctccagctctattaccaggttttaaacttcgccatgatcgtgtcttct

SEQ ID NO: 668806 - DNA, 83 bp, Homo sapiens
ctcgcctcgctgggcagcctcaacatcccctacaagatcgaggccgtgcagagtgacaagtcagcagcaggagatggctgtct

SEQ ID NO: 668807 - DNA, 49 bp, Homo sapiens
ccgactggagcaggcagcagcccagaactttacagactagcatggcaaa

SEQ ID NO: 668808 - DNA, 50 bp, Homo sapiens
agatgatcagccaggcacagaagggtgactatgaccagagcaggaccaaa

SEQ ID NO: 668809 - DNA, 82 bp, Homo sapiens
aagctgctgccgccccttgggctaaaagatggtatagctgcatgctgggaaagaaatgcagcctggcgcctctgaaggagga

SEQ ID NO: 668810 - DNA, 88 bp, Homo sapiens
cagcaggcacccaagcgggcggcagatatgagatcctgactccaaactccattcccaagggtttcatggacgggaagcaggcgtgcgt

SEQ ID NO: 668811 - DNA, 100 bp, Homo sapiens
gagaggccgtgcgggacgcgggcgccaggaccggccgaacgcagaggtacaccaggggttggaaaaaccacactaggcaaagaacttgcgtcaaaatcag

SEQ ID NO: 668812 - DNA, 83 bp, Homo sapiens
ccacaatcttcaatgagtaaacatattcctaaggggaaactgaggcccaaggaaattgagtatctctgcaaagtcaccagctg

SEQ ID NO: 668813 - DNA, 126 bp, Homo sapiens
agcccagctccggcccctgctcggggatagacagtatatcagaaaattctacacagggccacgactgcttcccggtgctgttcacctatgacgccgccgcggggatgctgagcttcggcgggcggc

SEQ ID NO: 668814 - DNA, 90 bp, Homo sapiens
acaggccaagggcgctccccaggaagtggcagtcagtcaagtggatggcatgaagtggagccagaaccatccgggtatggctgaaaagag

SEQ ID NO: 668815 - DNA, 51 bp, Homo sapiens
ggaattcatggggtgaaccatggtcttaggaaaagtcctcagtgctgtggg

SEQ ID NO: 668816 - DNA, 83 bp, Homo sapiens
cgccggcccgcgggtctacttcctcaaagtatggtttgaagtggtgaacatggatttttctcggcttcacatgtacagtcctc

SEQ ID NO: 668817 - DNA, 99 bp, Homo sapiens
ggagaccagcagtgcagtcatgtgcctggaccttgcagcttcctggatgaagtgccccttggacaggctcggcttcttcaaaagaaaatatgaaaagat

SEQ ID NO: 668818 - DNA, 74 bp, Homo sapiens
acagagcaacccccggcagatcaagcgtgatgtgtccaatctagatcccaacttctcatttgaaggcaccaaac

SEQ ID NO: 668819 - DNA, 75 bp, Homo sapiens
cctgccctcagccgcccgctggccgggagcggagcccctgtgggtcgctcctgtggttggtccagcccagaatgc

SEQ ID NO: 668820 - DNA, 117 bp, Homo sapiens
gccggccgcccagacgctgcccgcgggcccggccacggcggagccaagggggaacttgaggttaagaacatggacatgaagccggggtcaaccctgaagatcacaggcagcatcgcc

SEQ ID NO: 668821 - DNA, 110 bp, Homo sapiens
caacgagattgtactgctagaggcgggccatgagcccatggagctgctgatcaacgacaagaaacccctgcagcagctgtggaacgccatcctgctggtggccatgctcc

SEQ ID NO: 668822 - DNA, 75 bp, Homo sapiens
gaggaaatgaagggtattgccgctgttactgatatacctttaggtttgggcaaaactacccctgatccttcagct

SEQ ID NO: 668823 - DNA, 100 bp, Homo sapiens
ctgatattggagtgctcattcacatgaaggtgggttaggagtacagaagatgctgtggactattcagacatcaatgaggtggcagaagatgaaagccgaa

SEQ ID NO: 668824 - DNA, 100 bp, Homo sapiens
gggttccacttccagcaacagctcctgcagcagtaccgagtgccccggggaagccattccccaccccccaggaggaaggattgaagttaacattccagaa

SEQ ID NO: 668825 - DNA, 100 bp, Homo sapiens
ctggacgacacggtgccgctgacagcagccatcgaggcgagccagagcctgcagtcccacacgtgagcggtttctggtaagactgaacaagaatggtggg

SEQ ID NO: 668826 - DNA, 73 bp, Homo sapiens
aggatgacatatttttggacctgaaacagaaattctggaacacctatatggcgtcgattagcaaggtaaaagt

SEQ ID NO: 668827 - DNA, 90 bp, Homo sapiens
ccgagggcaggacgaacttcaccaggggcactaagacctggaaatggccctgaaattttattgggtcagggacctcctcagcagccgcca

SEQ ID NO: 668828 - DNA, 90 bp, Homo sapiens
atggcaacggccaacttcggcaagatccagatcgggatttacgtggagatcaagcgcagcgatgacatcctgcagtactacctggcctgc

SEQ ID NO: 668829 - DNA, 82 bp, Homo sapiens
catgatctggctggacctgaaggaggccggtgactttcacttccagccagctgtgaagaagccgagaaagccaagagccatc

SEQ ID NO: 668830 - DNA, 90 bp, Homo sapiens
agtgatcctttgcaccctgcttggagacggacttgcttccggtgctactttgaatgataaggatgatgactctcttcctgcagaaactgg

SEQ ID NO: 668831 - DNA, 82 bp, Homo sapiens
ggcacagacaaggagctcagtgacctcctggacttcagcatggctccccacaggtgcaggaagccgccgcccagccatggac

SEQ ID NO: 668832 - DNA, 97 bp, Homo sapiens
ggacgagctgacggtcaagaccaaggatggcgtggtggagatcaccgatcctggagagctcccagactttgctcagcgttctcaagagggaagctgg

SEQ ID NO: 668833 - DNA, 100 bp, Homo sapiens
tgaagtttgggacaagatatttatctaacttctgggctctggtatcagttcctcttcagtattgcatggcatggtttttaagaaggaaaccgaaggtgat

SEQ ID NO: 668834 - DNA, 100 bp, Homo sapiens
ttggaattctgcccactctgcggagttagcagtcacgacctccagcacagagccatgggaccacaccaccaccaccacaaccaataggccaggaaccacc

SEQ ID NO: 668835 - DNA, 82 bp, Homo sapiens
atcatgtctgcgagccaggattcccgaaggaagaggcccagcagaagggactcgctgagccaccccccgccccactccatgt

SEQ ID NO: 668836 - DNA, 74 bp, Homo sapiens
aggaacttggagttaatggtctaatttatgataggtctgtttctgtcgactgtggaccacttatgtgcgatccg

SEQ ID NO: 668837 - DNA, 99 bp, Homo sapiens
agctctgcagttaatgcacgtattttaaactcccgggcctgcggacgctatgcacaggtctggagcccggcactgtggtcataacagagcaggcagtgg

SEQ ID NO: 668838 - DNA, 100 bp, Homo sapiens
cctcggcgtgctactgtgcgctcgatccagcaccatggggaagcgggacaatcgggtggacagttttagaagacgacagaaagaaaaaagaaagagaatg

SEQ ID NO: 668839 - DNA, 100 bp, Homo sapiens
cggcgctcggcatggctctcctggtgctcgggcttatttcaaaacctttgtccctcagttccaggaggcagcatttgccaatggaaagctctaggaaaca

SEQ ID NO: 668840 - DNA, 75 bp, Homo sapiens
atggatatctctactcgctccaaagatgagattgtggggaacctgggtgaaggcacctttggcaaggtggtggag

SEQ ID NO: 668841 - DNA, 75 bp, Homo sapiens
cggctctcgtcagcctcccgccggccgtctccttaacaccgaacaccatacacctatgagcgaattgatgggcga

SEQ ID NO: 668842 - DNA, 90 bp, Homo sapiens
accagtgcctgcaggaactctccagagagcagacaggagacctgggcacggagcagccagtgccaggtgtatggaatgattcggttctca

SEQ ID NO: 668843 - DNA, 75 bp, Homo sapiens
ttcggtgcctctctccagcagactgcggttcgtgctggccgtgggcagcgccgtctttgatgccatgttcaacgg

SEQ ID NO: 668844 - DNA, 100 bp, Homo sapiens
gcgatcgagcctcggtcaaggagatcctgactgctgtcatggcgtgccctctggagaaggccctggatgtgatggtgtccaccttccacaagtactcggg

SEQ ID NO: 668845 - DNA, 100 bp, Homo sapiens
gccgtgaggaggttgggggccctcgcggaggccgagaggcttaaggaggttatggccacaccgtgcccttgtcagatggaggtaaggccttctgcatcat

SEQ ID NO: 668846 - DNA, 83 bp, Homo sapiens
actctccttatgctgggtgaaaacaaaggttatggaaacaaaggacatgctttacatcgtcactgaatttgctaaaaatggag

SEQ ID NO: 668847 - DNA, 98 bp, Homo sapiens
gtaccatggccgggatcatcaagaaacaaatcttgaagcacctctccagccgctgtacaaccagccctccgacacccggcagtatcatgagaacatca

SEQ ID NO: 668848 - DNA, 90 bp, Homo sapiens
cggcgggatgtggcgactacgtcgggccgctgtggcctgaatttcagaggcaggaaagtgtccggtcccagcataaaggtatccagttat

SEQ ID NO: 668849 - DNA, 87 bp, Homo sapiens
atttgccagtttggtgcagaatgtgacgaagatgccgaggatgtctggtattggcaagcttgccagtgtacctgctggtggggctgt

SEQ ID NO: 668850 - DNA, 101 bp, Homo sapiens
cggatggccactcatcagaaggactgctcgctgccatatgctacggaatccaaagaatgcagggtgcttcaaggatgaccgcatcgtcttctggacttgga

SEQ ID NO: 668851 - DNA, 74 bp, Homo sapiens
gaactccggacgtgtgcggcggcctcggagctgctcctgccggcggctgcctctcttcgccaggaccttctgct

SEQ ID NO: 668852 - DNA, 96 bp, Homo sapiens
cgggtctggcctcctcacctggtacctgatcagcatcgcggagctgatccccagccacaggatgaagaagaagggccccagcctgcccaggggcct

SEQ ID NO: 668853 - DNA, 101 bp, Homo sapiens
gaggaggccgtccagcagatggcggatgccctgcagtacctgcagaaggtctctggagacatcttcagcagacatccacgacagcgatggcagttccagca

SEQ ID NO: 668854 - DNA, 95 bp, Homo sapiens
gagcacatgccattctggcagttttttgtaagactctgtggtattgttggaggaatcttttcaacaacaggagcagcatggacctgtcagcaact

SEQ ID NO: 668855 - DNA, 138 bp, Homo sapiens
ggggattacaaagcctgaagaccccggagcccctttagccatgtggatacctacggagcacgagaaatacggcgtggccggatcgagctgggagatgtgacaccacacaatattaaacagttgaaaagattgaatcag

SEQ ID NO: 668856 - DNA, 90 bp, Homo sapiens
gttggcgtgtccctgcagcgaaggatcctgggggatatgagactttctactcggaatatcctgagtgttgcgtggatgtaaaacccattt

SEQ ID NO: 668857 - DNA, 100 bp, Homo sapiens
tctttgagcgttcttccagcaaacggtacaccatgtcccgcagccttgatggagccgacatcggcctggctgcctggggacgcaaggccctggacattgc

SEQ ID NO: 668858 - DNA, 82 bp, Homo sapiens
gagtgaaggtgcagtgctggcggttatcaatactctggctgaccatcatcatcgtgggactgactttggtggaagtccttgg

SEQ ID NO: 668859 - DNA, 74 bp, Homo sapiens
ttcaagacaggtgtttaagcagttctgccttctccgagggaagcaaggtggcttcgagaacaagaagagaattg

SEQ ID NO: 668860 - DNA, 90 bp, Homo sapiens
gcgctccaagagctccagcctgagccggctcgagttttcaatggttccagcaggtcaacacgggagaaggaacctgttcaaaaacacaaa

SEQ ID NO: 668861 - DNA, 100 bp, Homo sapiens
caaccccaaagccgcgcgagcagtgggaggagcaatgagaggcaatcctacagcccacctgaggatattgaccataaggactcatatctcattacaagaa

SEQ ID NO: 668862 - DNA, 75 bp, Homo sapiens
gtcaccaagagaggctgagagaccagattgagaggatccagaatccagatctctggaatagctaccaggcaaaga

SEQ ID NO: 668863 - DNA, 96 bp, Homo sapiens
ttcagaagagccaaggaataaacatgcaatgaacccaaaaggaggaggaggtggaggaggaggaggatggagagctgcccaagacagggatcagat

SEQ ID NO: 668864 - DNA, 76 bp, Homo sapiens
ttccctgaccattttctactgtccctgcgcgagtgcacccccaaggtggactttccccaggaccagctgacagcac

SEQ ID NO: 668865 - DNA, 100 bp, Homo sapiens
gcagcctgcgcgagctgcgggcgcgcgagttcagccgcctggcagaaaaggatgcgcctccacttagcaaggctgggcaggatgtggttctgcatctgcc

SEQ ID NO: 668866 - DNA, 100 bp, Homo sapiens
tgataaaacatttagaacgatgtgaacatcgaatcatggaatcccttgcatggctctcacatgatgccttcttctgtagagtgggcgctttgcagaatac

SEQ ID NO: 668867 - DNA, 100 bp, Homo sapiens
gagtgaagtcccagggatattctgtgctgatccctgcatgtcactgagtccaccatgctttacagaagaagacagatttagtctggaagctcttcaaaca

SEQ ID NO: 668868 - DNA, 143 bp, Homo sapiens
ctcggggctgaccctgcccaccaggaccgccatggggacacggcactgcatgctgctgcccgccagggcccagatgacatgcgtcgggatgtccaggaaatttttcgcatgaccccccacgagaagcaggtcatgatgttcag

SEQ ID NO: 668869 - DNA, 100 bp, Homo sapiens
cttcattggccacctacagaaacaaaatgtcaacaaattgatggctgcaggactcatgcacacgttcaatgcccacgccgccactgacatcacgggcttc

SEQ ID NO: 668870 - DNA, 85 bp, Homo sapiens
agagggcagagccgtgcatggggctgctccccaggacctgagcaggaacctggagttttcaggcacttgcactgttgcctagact

SEQ ID NO: 668871 - DNA, 96 bp, Homo sapiens
cagagctgtgcctcccagcaccacagtccttctgcagtccctcgtccagccacccccaggtcagaatggcggcagcggagcatcgtcattcttcag

SEQ ID NO: 668872 - DNA, 88 bp, Homo sapiens
cggcggcggcagcgggtcttgggtcctccgagagcagcagcggagggcatcctggctgtttcacccgtggacttgaacttgccattgg

SEQ ID NO: 668873 - DNA, 83 bp, Homo sapiens
gcattcagaaaggagcagactgtggagcaaaggtggaggaggaactgcaggagcaagacttcttggaccgctgcttccaagag

SEQ ID NO: 668874 - DNA, 100 bp, Homo sapiens
tccatcaggtacaacctcgaggagctctaccaggacatgaccgataatagcaacaatcaactggtagtaagagcaaagtttaacttccagcagaccaatg

SEQ ID NO: 668875 - DNA, 83 bp, Homo sapiens
aatacttgatttagtatgtaaaagatgttttgaatgtgaaaacctttgcatcttctgatagtctagccaaggtccaagaagta

SEQ ID NO: 668876 - DNA, 100 bp, Homo sapiens
gagccaggaagagggactggaaccatctcagaagccatgcccctcaggctggaacttgccctgtctcctcgcagatgagattacataccggttacggcac

SEQ ID NO: 668877 - DNA, 100 bp, Homo sapiens
catcacaagctcagcctggacagcaacagttaagggaagaaagtcggaggctggctttggctgcgaaaagagaaaaaagaaaagagaagagaaggaagaa

SEQ ID NO: 668878 - DNA, 133 bp, Homo sapiens
acagcgacctctctgaggatgaggacctgcagctggccatggcctacagcctgtcagagatggaggcagctgggaagaaacccgcaggaagctggagaagcttcgagagaaggagcgtaagaaggaagccaag

SEQ ID NO: 668879 - DNA, 98 bp, Homo sapiens
ccaggagaaaagacagcaatggaccgagtctcaaaccatgaattatgtgggacagctggctgggcaggtgattgtcactgtgaaggaactctacaagg

SEQ ID NO: 668880 - DNA, 101 bp, Homo sapiens
gaggctctggaacttctgcccagctctccttggtgcagcggaactgctgcctgacgctctgcaacttcagcatccccgaggagctggaattccagtaccgc

SEQ ID NO: 668881 - DNA, 98 bp, Homo sapiens
gtcctgaccacaatggggaggacaacttcgcccgggacttcatgatcatccccccgaaggagtggaagccgcggcagacgtatgatgacatcgacgac

SEQ ID NO: 668882 - DNA, 98 bp, Homo sapiens
cgagcggaggagcaggcgccggagattctgacaatggagatattaattatgattatgttcatgaattgtcattggaaatgaagcgtcagaagatacag

SEQ ID NO: 668883 - DNA, 100 bp, Homo sapiens
ggcatctctgggtgggcaacttacccgagaacgtgcgggaagagaagatcatcgagcatttcaaacggggcagcgtccctgtgacctggccgatgaggaa

SEQ ID NO: 668884 - DNA, 101 bp, Homo sapiens
cagaccatgcagggggtcatcaccatggatgggacgctgcaggccctggccagaagaatgtttgaaggtgagatggcaagtttaactgccatcctgaaaac

SEQ ID NO: 668885 - DNA, 75 bp, Homo sapiens
atcgcaaacccaaagatccccgttcctggagattctgattgaggttgggggccgtcccgctcctaaggcaggaag

SEQ ID NO: 668886 - DNA, 119 bp, Homo sapiens
gcagaaaagaggtcacatcagcgttctgcgtcatgggggagtgctgatcaactaaaagaggtgcctccatatgcgtcggagaaccagacctgcagggaccaggaaaaggaatactatga

SEQ ID NO: 668887 - DNA, 75 bp, Homo sapiens
gatcaccattggctgggaaggaaaaacagaatcagctgttccctgcgaaaggtactatgcgcctgcaggacctac

SEQ ID NO: 668888 - DNA, 100 bp, Homo sapiens
cacccggtgtcgctgggctgcaccccgggcggggacgtccgccgggcacgggagggggccaagatgccgctgatcttgcatctttaatggataaaacatt

SEQ ID NO: 668889 - DNA, 100 bp, Homo sapiens
tggaagtttgagagaagtttaagagaagaaatggacatgattgcctaaatcagccaaacacaggggcaatgacatcattgcagcagccaagcgcatggct

SEQ ID NO: 668890 - DNA, 101 bp, Homo sapiens
cacatagacatttacgcggatgtcggcgaagagttcaaccagaggctgggaggcggcagaatgcagccagaggagggcacaggctggctgctggagctgct

SEQ ID NO: 668891 - DNA, 83 bp, Homo sapiens
acgaatcgttaaacatcttaggtcaggaaataatgcaaaaggtgtcccaaggctcctgaccagtgaacaaagatttgagaaag

SEQ ID NO: 668892 - DNA, 82 bp, Homo sapiens
ggaacagcacccccttctttaaggttgactatagtcaatggggccaatggagccaagtgtatggaaacccacaacagtatgg

SEQ ID NO: 668893 - DNA, 100 bp, Homo sapiens
cagcgaagatgaaggtggtggaggagcccaacgcgtttggacctcgcgacctgtgtcagcagagccgccctgcaccaccatgtgcatcatcttctttaag

SEQ ID NO: 668894 - DNA, 100 bp, Homo sapiens
ctgtatgacaacaagatccagagcctcgccaagggcactttcacctccctgcgggccatccagactctccgtgctggtatagaggactctaagaagtggg

SEQ ID NO: 668895 - DNA, 77 bp, Homo sapiens
ccccgcgtccctgcgaccgccgcggcgaagatggaatgtatcctgtcaggtataatgtcagtgaatggcaagaaagt

SEQ ID NO: 668896 - DNA, 100 bp, Homo sapiens
gcggtgcccgaggagtagtcgctggagtccgcgcctccctggggatattccaatgcctttagttagctcaggagtagagcatggtaacctgagagagctg

SEQ ID NO: 668897 - DNA, 75 bp, Homo sapiens
cagagccgggggagcccagcccagccagcctccaggtgtgcttcccgcacagctgcagccatggggtctgaggac

SEQ ID NO: 668898 - DNA, 90 bp, Homo sapiens
ataccatcggacaggatttctccgcctcagcccaacggggaggtactggctgtgatcgaacttctcaaccctcagagacttagatcttcc

SEQ ID NO: 668899 - DNA, 100 bp, Homo sapiens
gcaaacccgtcacacagaccaaggccacttcttgcaaaccacatacacagcacaaagaatgtcagacagtcttattgttacaggtatcgctgtgctgctc

SEQ ID NO: 668900 - DNA, 98 bp, Homo sapiens
tctggagatgcttccgaactgtgggcaaaaatggcgagtgtcctgccatacttcgtagctacaaaactggctaaaatccggaagccaactttggataa

SEQ ID NO: 668901 - DNA, 74 bp, Homo sapiens
aagaaacctgtcaggaatacgagcttctggccttcaaacagtggccgagctgcagaactccttgccaaagaaca

SEQ ID NO: 668902 - DNA, 100 bp, Homo sapiens
cccaagtcaagtttgaagacctcataaaagatttgagaaaactgaagaggcaactagaagttttgtgcaccgagggcggcctgagcctctggatcttcac

SEQ ID NO: 668903 - DNA, 51 bp, Homo sapiens
cgtcaggaagcaccgaagccacctcagacttcagctacgggacggacgagt

SEQ ID NO: 668904 - DNA, 89 bp, Homo sapiens
cttctgtagtatattttcagtgctgccgtatcgcgacagtacccaagtcgggttcgtgggagtaagggagaagttttgtacattttgga

SEQ ID NO: 668905 - DNA, 147 bp, Homo sapiens
gccagtacatcacgtgaactcgtagagtgagaactcattcactaccatgaagacaacaccaagccattcctgagatgcacacttgactgaaggaggacagggaatctgaagactccggatgacatcagagctacttttcaacagcct

SEQ ID NO: 668906 - DNA, 98 bp, Homo sapiens
ctcccttgcatgatggaaacaccatggctgcggcggcccagctctctctgacacagatcatgagcgtcttgttgttcatcgagcactcagtagaggtg

SEQ ID NO: 668907 - DNA, 90 bp, Homo sapiens
cctctcatcgggagaatgctcttcaggatagtatcttggccagggaactcaaacagcagatgcaggtccggtttatcactaaaatatggc

SEQ ID NO: 668908 - DNA, 76 bp, Homo sapiens
tctttcacctgccaggttcaaatagaagagtgatggatgtcatttctcgttcacagctttacttggatgatctttt

SEQ ID NO: 668909 - DNA, 75 bp, Homo sapiens
atctgatgatgatgaaagttacacagttggctggggaacagaccagggaattggtggatttggagaagagccggg

SEQ ID NO: 668910 - DNA, 89 bp, Homo sapiens
gcgcgccgccgccaacgccgcgcccgacgcagcgatgggcaacacggtgcaccggaccctgccaggtggccagacaagcacaaacctct

SEQ ID NO: 668911 - DNA, 83 bp, Homo sapiens
cgacaagccgctggcagccgcggatctcaccgccgctcagggaaccttcagaagtttagtctttttggagacataagtgttct

SEQ ID NO: 668912 - DNA, 87 bp, Homo sapiens
ggtactgttgaaagcgacaagtggaggcgccgctctagcggccgggactctgaactatggcgattttcttccagtaaaatgtgatgc

SEQ ID NO: 668913 - DNA, 75 bp, Homo sapiens
attgacagctgcattcaatcttttggaagagatgatctagagagcttccagcttgagataagtggctttttaaaa

SEQ ID NO: 668914 - DNA, 95 bp, Homo sapiens
agaaatccaggtttcccgcatccgatgtggactcagccactttgctgcactgaccagtcaaaatgcagatcttcgtgaaaacccttaccggcaag

SEQ ID NO: 668915 - DNA, 100 bp, Homo sapiens
tggggccggaggagtcagctgtgtgtccagaacgtgccatggagacgcttaacgaaactggcgatggaatatgagaggagccctctggaaagaaaaggac

SEQ ID NO: 668916 - DNA, 101 bp, Homo sapiens
acagccacagtcaagatgttgccaacattcgtaaggtccattcctgatggctctggtaaacactacacgtgaagagtggtgaaagggaacattgattactg

SEQ ID NO: 668917 - DNA, 78 bp, Homo sapiens
agacagcgaccccagatgaaggtgagaaacggactggtgcttccaaggtgtcgtgaaaactacccctaaaagccaaaa

SEQ ID NO: 668918 - DNA, 82 bp, Homo sapiens
ttccccgttagaactcgcgtttccacttcagagatctgggaggaataagtttttttcatctgtaatttggaagccaagtcag

SEQ ID NO: 668919 - DNA, 97 bp, Homo sapiens
aggacagcttcaatcgcggtgtgaagaagaaagcagcaaaacgaccactgaaaacaacgccggctttggaagtgataaagcagttaaaagagaaaat

SEQ ID NO: 668920 - DNA, 82 bp, Homo sapiens
tgcaaatccttaaaagagtcttaacgctaaaagatggcggcaaggcagcccaggcaaatgtaagaataggcgatgtggttct

SEQ ID NO: 668921 - DNA, 75 bp, Homo sapiens
gacccgggtgccgaggagcgggaagagttgctggggttgacatcatggacatatgtgagtccatcctggagagga

SEQ ID NO: 668922 - DNA, 96 bp, Homo sapiens
acagacagtgacgattatagcacaatatcaacctgaaggcaaactcttccacatagactttggatatattttgggtcgggatccaaagcctcttcc

SEQ ID NO: 668923 - DNA, 83 bp, Homo sapiens
ccattgcagcccaggtggataaggaacatctcttcccagcggctcaggcctttccccctggtgctcttcatcctttaccaaag

SEQ ID NO: 668924 - DNA, 73 bp, Homo sapiens
ggaagtgcagctgcctcagttcttagcgcaggtgaagtggatcctaaagagaggatagcacgccaacgaaaat

SEQ ID NO: 668925 - DNA, 100 bp, Homo sapiens
cattttcaggaggaagcgatggcttcagacagcatatttgagtcatttccttcgtacccacagtgcttcatgagagttgatattcactgatggactccaa

SEQ ID NO: 668926 - DNA, 101 bp, Homo sapiens
actctgactgcaagcacccctttcttgaaccgaacagagtcaagtggaatcaaagatgatgctgtgtatctggacaatgagaaagaaagagaagagtatgt

SEQ ID NO: 668927 - DNA, 82 bp, Homo sapiens
cctgcgaggcctcccgggctccgggaaaactacactggccaggtgatgtgtccaatctagatcccaacttctcatttgaagg

SEQ ID NO: 668928 - DNA, 101 bp, Homo sapiens
tgtttagccaacccaaattaccttaattagctctgaggaacatgaatacagtgatgaagctcctcaggaagatgagggctttatgggcatgtcccctctct

SEQ ID NO: 668929 - DNA, 100 bp, Homo sapiens
tcccaggctcaagcagtcctaccatgtcagccttcccagtagctgggaccacaggagcttctggaagaggtgaagaaggaattgcagaaagtgaaagagg

SEQ ID NO: 668930 - DNA, 104 bp, Homo sapiens
ggacctggatcatggctgccgcgccgccgctacgggaccgcctgagctttctacaccggggcgccctgcgtccggcagaggaggcgagcatcccgctcaggtga

SEQ ID NO: 668931 - DNA, 100 bp, Homo sapiens
ctggcagccaaatgcatcctggcaggtacctggagtacaagagggtccctaacagcagaccacctgaatatgagttcttctggggcttgcgctcctacca

SEQ ID NO: 668932 - DNA, 97 bp, Homo sapiens
aggatgagccccgcgaccactggcacattcttgctgacaggatattcttggtgatcttggaagtgtccgtatcatggaatcaatctctatgatggga

SEQ ID NO: 668933 - DNA, 100 bp, Homo sapiens
agggtcacgtgatgcaactcttttgctgtggtattggaatggaaaatgcagtgggattggagataacccaggcaccaggcccagacatgtccgtccttgt

SEQ ID NO: 668934 - DNA, 90 bp, Homo sapiens
ttctgggacctccacctccctcatttcatcttgggggaccagcagttggaccaagaggaaatctgggtgaggcttcgagctctgaggaag

SEQ ID NO: 668935 - DNA, 97 bp, Homo sapiens
ttccaattacagacgacaaagtagcactgaaaaatccagttacactcttaaaggaattgtcagtgataaagtctcgatatcaaactttgtatgcccg

SEQ ID NO: 668936 - DNA, 50 bp, Homo sapiens
cggcaagtgctgcctgcaggtccatgccattttctttttaaaagcggaag

SEQ ID NO: 668937 - DNA, 97 bp, Homo sapiens
tgtcttccaagaacagaagaaaatgatccaggcccaggtggttggttctagctattgccatggtacgtttttatatggaaaaaggaacacacagagg

SEQ ID NO: 668938 - DNA, 90 bp, Homo sapiens
ggacatcctggaagctgggaaatgaaaaaggtagcagcactgcctaaacaagaggttatacaagaagaggaagagataatccatgaagat

SEQ ID NO: 668939 - DNA, 83 bp, Homo sapiens
aggatgaacctgcccaaggggccggacacgctctgcttcgacaaggacgagttcatgaaggtttacaggtacatacattacac

SEQ ID NO: 668940 - DNA, 75 bp, Homo sapiens
gcaggcgatgccctccacaggtatggcagcttcctttgctccaataagctttgcaatcaaggccaaagaaaatga

SEQ ID NO: 668941 - DNA, 100 bp, Homo sapiens
aagtgagcagtccagaaagcggcttatcgaacagagccgggagttcaagaagaacactccagagctacgagagtacaaggtagtgggtcgctgcctgccc

SEQ ID NO: 668942 - DNA, 75 bp, Homo sapiens
gaagaccagcacagcctagatttggaaaccaatagagccatggcgactccctctgctgccttcgaggcccttatg

SEQ ID NO: 668943 - DNA, 75 bp, Homo sapiens
ccgatactgagcttcttcctatttgccatggggtttttaatgaccacaacaagcaagcatgcagcttactgcttg

SEQ ID NO: 668944 - DNA, 82 bp, Homo sapiens
cactcgagagatgaggacactgaaattcagagaggggaagtgatttgcctcagcttgtactccaaaacctattgatgtacaa

SEQ ID NO: 668945 - DNA, 101 bp, Homo sapiens
gtcattttactgtcaagacatttcttcggcattctgcaacagatacactgaagagatggtgccttggcacccttgcctggaactcgttagcaactgcgagc

SEQ ID NO: 668946 - DNA, 98 bp, Homo sapiens
ggggaccccggtacggacctgtgcaggtgaggacaggccagatctaaagcgggaagccagtatctgtcatatgctgaaacatccacacattgtagagt

SEQ ID NO: 668947 - DNA, 100 bp, Homo sapiens
gtccaatgaggagaaattgaacctgtgccggaagtactacctgggcgcagacggggaagcggagccaacatgccagtggcccggagctgggtttgtcgca

SEQ ID NO: 668948 - DNA, 98 bp, Homo sapiens
tccgacttgccggcagaacttacgctgcgggaccccgggcactgttgctgctgcgggagattcttggtgccaccattgagaactccaggattgtcctg

SEQ ID NO: 668949 - DNA, 82 bp, Homo sapiens
ctgcgagaagcaagcggaacttcctgagggaaatcctcattgacgattcaatttgttgaaggccaatttgtggactcctacg

SEQ ID NO: 668950 - DNA, 90 bp, Homo sapiens
ctcaataatttggtagtggaagcctatcagatcgcttcttgacctgcacaactttctgatttgatgagttcaacagaaaccaactcaagg

SEQ ID NO: 668951 - DNA, 100 bp, Homo sapiens
cagcgagtaaagtcttggacagacttaaaccagttataggggtaaacactgatccagaacgccgaaggagtaaaggtgctgcaatgatgttagctgtggc

SEQ ID NO: 668952 - DNA, 100 bp, Homo sapiens
gatgaacctcatgcgggatgtggagcgggagggcctggactgggacctcatattacaaggcttcctcggagatggcactttaccagaaaaaacatggtat

SEQ ID NO: 668953 - DNA, 83 bp, Homo sapiens
cgcaacaagatcccctatgagagtcccatcttcagcagagacaatgcagatcttcgtgaagactctgactggtaagaccatca

SEQ ID NO: 668954 - DNA, 100 bp, Homo sapiens
gttggaccttccggagcttctcagaagacagagggttttcttttgagctcaaagcattcagcaaaccagggttccaaggtgaatgtatagattttacaga

SEQ ID NO: 668955 - DNA, 50 bp, Homo sapiens
gactcctgctcagtgtagcattaaggttttgagcaaaattttggactgtg

SEQ ID NO: 668956 - DNA, 50 bp, Homo sapiens
ctacatttagcgcatcatgtgatccgggaggagagacttcagcatgcaaa

SEQ ID NO: 668957 - DNA, 74 bp, Homo sapiens
gtgattacttccggtaccttgctgaagttgcgtgtggtgatgatcgaaaacactcaagaatgaacaatccgtca

SEQ ID NO: 668958 - DNA, 98 bp, Homo sapiens
gacccgctgcccgcggctgcagtcggggcggcagctgaggcggaggctgacgaggaggcggatcccccggcgtcagggctcaagggttcttgttgatg

SEQ ID NO: 668959 - DNA, 88 bp, Homo sapiens
cagaatccaccgtcaggcataaattgattattcctcgcccacatctgtgccaggtatctcattcagttgctaaacttatattagttaa

SEQ ID NO: 668960 - DNA, 88 bp, Homo sapiens
ctggcgcggctgctggagagcaggaagtacatcctggtggtgcccctcatcgctgccctgggcacgctggacttcagcctgctgtatg

SEQ ID NO: 668961 - DNA, 100 bp, Homo sapiens
gtttcggtcatctaaaggaggttttaaacagtataacagggaccagttactctccacaagaaaattcacacaaccacagtgctcttcatagttcaaattc

SEQ ID NO: 668962 - DNA, 90 bp, Homo sapiens
ggacggcggaacatctggaggctgggaaatggctactgcagcactggggtgtcagttgttggtccgacccagaacgcttcagttctgctc

SEQ ID NO: 668963 - DNA, 75 bp, Homo sapiens
gacgcgcacgctgtaggaaaactttgcagtaccatgcaggactagcatctggccttttaaatcagcagtcattga

SEQ ID NO: 668964 - DNA, 130 bp, Homo sapiens
ctttggtgtggacatctgctgccggaaggggtcccgaagccccctgcaggaactctacaacccaatccaggagatcatgaatcagacagataaaaatcaacaagaaatcccatcataccttaatgatgaa

SEQ ID NO: 668965 - DNA, 75 bp, Homo sapiens
tgcccgtggttctgctgaacaaaggcagcagtggagctactgctgtggttcaggcagccctatgcaaacccaggc

SEQ ID NO: 668966 - DNA, 83 bp, Homo sapiens
gagagagaccagacctgcaagctctttgacacacagcagttcttgtcagtttctctgcaggtggatattgttcccagccaggg

SEQ ID NO: 668967 - DNA, 50 bp, Homo sapiens
gcactctcacttattaaagatcttgaagagaagctgaatttggacgacag

SEQ ID NO: 668968 - DNA, 100 bp, Homo sapiens
cccagccgctgtctgattttaagctggcaaagtgggaaaaataaagtgttgagtaaacagaccaagttggatcttccatggtggcttattctaattcggc

SEQ ID NO: 668969 - DNA, 100 bp, Homo sapiens
ggtggaagggatcggctacgacttcatccccacggtgctggacaggacgaaacctgctcctccaaagccagagcccaagcctaaaaaggcccctgcaaag

SEQ ID NO: 668970 - DNA, 100 bp, Homo sapiens
tcacagacttctgtacagaagagagttgtccagtgatgtcagctggcccaaatgaaaaggatttggtgaaacaggcaaagaccttaaatagtgcagcaaa

SEQ ID NO: 668971 - DNA, 130 bp, Homo sapiens
ctcggggacccttcgtgtccggtggttgctgttgcttggcctggtgggcccagtcctcggtgcggcgcggccagaaatgggcaagttcatgaaacctgggaaggtggtgcttgtcctggctggacgctac

SEQ ID NO: 668972 - DNA, 99 bp, Homo sapiens
acgaaatttgcatttcagaaaggccacctgatactgtatggaggatggcctagagggctgaactgatgcttgaaggtgcagtacagaaggtttctaaaa

SEQ ID NO: 668973 - DNA, 74 bp, Homo sapiens
agagccgcgccgtccgcgccgcccgttctgatacctactggagcaggatttcccaggcatgaggattggtccgg

SEQ ID NO: 668974 - DNA, 75 bp, Homo sapiens
gttcttcattgccaaggcacagaagtatatggaggatcgcagaaaacagaagtggcaaagatgtaaaaaaaataa

SEQ ID NO: 668975 - DNA, 82 bp, Homo sapiens
cggagacctgcggagaggcggcggccgcggcctccgcaagccggagcttactccacgggaacagcctctagataatctgagt

SEQ ID NO: 668976 - DNA, 83 bp, Homo sapiens
cgcggccgcaccttcccgccttctcagctctacaaaaacctctggggcgctgtcctgcaggaaagcaaggtgttggagcgggc

SEQ ID NO: 668977 - DNA, 82 bp, Homo sapiens
caagttcaaggccaagttcctgacagcctggaacaacgtcaagtacggaggccactgtctgcagctcccgtgaagatgtcca

SEQ ID NO: 668978 - DNA, 127 bp, Homo sapiens
cgcctcctggacgtgctcgcgcccctggtcctgctgctcggggtccgcgcggcctccgcggagccagcagggagagcaacaagccccggccctcagagctcagccggatgagcgcagcccagagaca

SEQ ID NO: 668979 - DNA, 75 bp, Homo sapiens
attgcagctgcatgaatcccaaaaaggtaagcggaagggtacagccaatgcccgaatgccagagaaggtcacatg

SEQ ID NO: 668980 - DNA, 101 bp, Homo sapiens
ctgacccccagttacgcctggaatatgaaggcttccccgtcccgggtgaaaatcctatttataagagtgccgtaacaactgtggtcaatccgaagtatgag

SEQ ID NO: 668981 - DNA, 95 bp, Homo sapiens
ggaccagcgacccaagcgccgcggttaaccacgtctcgtccacgacctccctaggtggtctttgggaagaagcttcctgcctttgccaccatccc

SEQ ID NO: 668982 - DNA, 80 bp, Homo sapiens
agtcagagacatcaaaacctggaccttctggattacaggccaaattagcaagtaactataactacccaatattgcagcca

SEQ ID NO: 668983 - DNA, 73 bp, Homo sapiens
aaacacatgtttcttcaatgcagttatgcagcacttttcaggattagaagaggctgtgtatagaaacatacaa

SEQ ID NO: 668984 - DNA, 74 bp, Homo sapiens
cgtgcttcctgttaagcctgtgaaactttccagtctcatcagattttccatgtcctggtggtggcagcagcctt

SEQ ID NO: 668985 - DNA, 100 bp, Homo sapiens
cggttgctgcggggctcgggttcttggggctgttcgcggctgaggttttggcccgaaccgcgacttcaacaaaaaataagagaagaaaggaatattttct

SEQ ID NO: 668986 - DNA, 50 bp, Homo sapiens
ctgggctgtctggaaatctgagattatctttctcaaggaatagatctttc

SEQ ID NO: 668987 - DNA, 101 bp, Homo sapiens
ttcattgtcttttccgcccgcttcgatcgcctcgcgccggctgctctttccggccttatgccagcctggaccatcttggaggcagtgtaggatcatggaag

SEQ ID NO: 668988 - DNA, 51 bp, Homo sapiens
gccaaggtccagggggcaaggtcgtgcaatacaagttcttgcgttttagga

SEQ ID NO: 668989 - DNA, 75 bp, Homo sapiens
ctctctcatccgcacgcacaatatcgggcagaaagataatcacggcattgtgtggctgctcaattaatgtaccaa

SEQ ID NO: 668990 - DNA, 74 bp, Homo sapiens
gaccaccttggtcctctcaggggaatattctattggacaagtactcactgtatttacatgaggaatttccagag

SEQ ID NO: 668991 - DNA, 101 bp, Homo sapiens
gccagagcctgcagtcccacacgggttacgactcactgattaaaaagagggactttttcaaatactttgcacttttgattgtgtattatggataccaagga

SEQ ID NO: 668992 - DNA, 83 bp, Homo sapiens
ctaatcttgtacttcaagaggaggaatcacgctcggaaacaatgggccgacggtcgcaaggtcctacggtcaagcatccggga

SEQ ID NO: 668993 - DNA, 98 bp, Homo sapiens
tccgtatctgcctaggcattttgctgtctcctcctaatacgtgcagtgtgccctgaaccgccctgccttctttgctgagaggctctactatgctatga

SEQ ID NO: 668994 - DNA, 83 bp, Homo sapiens
tagagccggagtggggcgagccgcggaacccggccgggagccgcgcgaggcggaacaagatcactcaaggtgaaggataatct

SEQ ID NO: 668995 - DNA, 101 bp, Homo sapiens
ttagggtcctttatatagaagggagagtaggaatgctccaaaatgggaagaagtttgattcatccagagacagaaacaaacctttcaagttcagaattggc

SEQ ID NO: 668996 - DNA, 90 bp, Homo sapiens
gtttcctgcttacttctgttgggacaggccttgcatcctgtgctgccaactccatcaatcagtgaaggtggtgtttttaaggctcatctt

SEQ ID NO: 668997 - DNA, 100 bp, Homo sapiens
ggagagagacaagatgtccgccagagctgcggccgccaagctgagctttcagcacaagatcgggatcctttattgcaaagcaggccagagcacagaggaa

SEQ ID NO: 668998 - DNA, 98 bp, Homo sapiens
aggaacttggttccccctccctcagcttccgccccaaaagtgggcctttggagtgacgctgtgggaactcatgactctgggccagactccctacgtgg

SEQ ID NO: 668999 - DNA, 90 bp, Homo sapiens
ccgacccttttcccctccccgggccacccagcccgcccaactcccagcggagagcaaggattcaaaggcaaatccaagcccaaccttctg

SEQ ID NO: 669000 - DNA, 73 bp, Homo sapiens
gcgaatatcgtcatcgttagaagggaaaagcttcactctgaccatcactgtcttcacaaacccaccgcaagtc

SEQ ID NO: 669001 - DNA, 97 bp, Homo sapiens
cggagactgcccaggtgtggtcaccatgttcctctccgcggtcttctcgcacagtgcagaaaaacgccaagtacatctgcctggctaacaaggactg

SEQ ID NO: 669002 - DNA, 100 bp, Homo sapiens
gccgggtcccatggagctggaggggcagtggtggcgaggacagctggccgccgatattcaccaagcgcttcgctacaagtcacccacaaaagctgtatat

SEQ ID NO: 669003 - DNA, 75 bp, Homo sapiens
ctcagatgctgccagggtccctgaagagggaagacacgcggaaacagggagaagagaagtttacctttattgaga

SEQ ID NO: 669004 - DNA, 143 bp, Homo sapiens
ggcgggcccaaggcgtgaggcgccgcccgggtgtccccgcggcgcaggaggcggtggagcgcagagcgggcgagcgcggaagctctatgcagaactgtgccaaggcatcgtggacatagccatttccagtgtcttcccacccc

SEQ ID NO: 669005 - DNA, 76 bp, Homo sapiens
aaaggcctgtataccctcagaccagaaaacgcccactcctggatcttcacattgaactcaatggctacatgtatga

SEQ ID NO: 669006 - DNA, 100 bp, Homo sapiens
caagtgcgcgccctggcgggtccggaccaagctggaacagtgaaccatggagctgtatttcggtgaatatcaacatgtgcagcaggaatatggggtccat

SEQ ID NO: 669007 - DNA, 90 bp, Homo sapiens
ctggtgtcgccatgggccgccgccccgcccgttgattctttccaccatggccagacgcccccggaacagcagggcctggcacttcgtcct

SEQ ID NO: 669008 - DNA, 73 bp, Homo sapiens
catgacgccgtcacccttcctgcgattctacttaggtctgctgagaacagacccagtccctgaggaaggagaa

SEQ ID NO: 669009 - DNA, 101 bp, Homo sapiens
cttcagcagcgcaggcggtggtccctgaggcccgtggaaggagtcaaacttgcgggaattttgcagatattgttaatcctgccagtctttctcttcaagcc

SEQ ID NO: 669010 - DNA, 100 bp, Homo sapiens
gtgccccgacggggcgcgcgcgaagcgagcgagaaggcacggagtcgccgcggagcgcagaatccgtctcttgctcaagtgaaaattgaagaagcaaagc

SEQ ID NO: 669011 - DNA, 75 bp, Homo sapiens
cgatattctaagatcacagtggtcgcctgctttaacaatttctaaaggactctcatcagatgctacagttttgac

SEQ ID NO: 669012 - DNA, 89 bp, Homo sapiens
aggacagttactttcctgagaacatgtgctcacgtgtgcaatacagtgaatcagttgaccaatataggaaacaaatcttcattctgcta

SEQ ID NO: 669013 - DNA, 98 bp, Homo sapiens
tgaagttcaacgcacttataacaacatatgagatcctcttgaaagataagtcacccacaaaagctgtatataatgccagacattggaatcatccagat

SEQ ID NO: 669014 - DNA, 100 bp, Homo sapiens
agagcatacaattccactggaaaaactccaaccagataaagattctgggaaatcagggctccttcttaactaaaggtacaccaggggttggaaaaaccac

SEQ ID NO: 669015 - DNA, 90 bp, Homo sapiens
actatgttacaatcatgttgtggaaagagaaagtggctcatgccaaagaagaaaaccttagtatgcatcagatgctggatcagactttac

SEQ ID NO: 669016 - DNA, 98 bp, Homo sapiens
gccgagaggccgtgcgggacgcgggcgccaggaccggccgaacgcagaggagcgggacggtatgcgggccatcctggggtcctacgacagcgagctga

SEQ ID NO: 669017 - DNA, 100 bp, Homo sapiens
tactgcacatcgtggtggtcggatttcaccacaagaagggctgccaggcccaggctgcaagcacaaaggaagtttgctcagtctcagccgaatagtccca

SEQ ID NO: 669018 - DNA, 50 bp, Homo sapiens
cgagtacgaagcgggcgtttgcgaaggttctgcagcagtgcatgagaaag

SEQ ID NO: 669019 - DNA, 100 bp, Homo sapiens
aagatgaggaggtcgctgagagctgggaagaggcggcagacagcgggatattgggcagttgcattacctgtctacctccttattgctatagtaattggct

SEQ ID NO: 669020 - DNA, 98 bp, Homo sapiens
acagtgggggtgtgcaaacccgagagaactggatgatgaggtaccccacgggcaagagtcagacctcttctctgaaactagcagtgtcgtgagtggca

SEQ ID NO: 669021 - DNA, 75 bp, Homo sapiens
gaaacagtctccatctacctaggcctctcacaagtatatctcagagatgttgcaggtcttgttccagaccaccac

SEQ ID NO: 669022 - DNA, 75 bp, Homo sapiens
gaactaggatgtcccgacatgaaggtattggcatcggtccctaaacccacggaagctgattgaagtgaagttctc

SEQ ID NO: 669023 - DNA, 100 bp, Homo sapiens
ctttgttactgggaaaccgaacgcggcgctgtggctttcagcttgggtgaagcggtgagtgctggagatgcattatgtgaaattgagactgacaaagctg

SEQ ID NO: 669024 - DNA, 100 bp, Homo sapiens
cagcagcatctcagcccaagagaagattgtaaaccatggctgtgtggatacaagctcagcagctccaaggagaagcccttcatcagatgcaagcgttata

SEQ ID NO: 669025 - DNA, 100 bp, Homo sapiens
agtctaaagaaaagaagaaaaagaaatctgcactggatgaaatcatggaggccttctctgcttttggggacctgaccatcaagtctctggcggacattga

SEQ ID NO: 669026 - DNA, 87 bp, Homo sapiens
cctcaacagctacaagccacaggcaagataatctgcaaaatggcttcaatgctgagtaagagtaccgttgaacgcctgctactcccc

SEQ ID NO: 669027 - DNA, 82 bp, Homo sapiens
tgagacgcagagtgtaccaggggatgctggactgcatggcaatgtcccctgatggggaggccatcgtcactggtgctggaga

SEQ ID NO: 669028 - DNA, 83 bp, Homo sapiens
gccgcggcggcagcagcagtgagagcttcaaaagcagtggactgtcttttggattcaaagtgggcaaaggccaagaaaggaga

SEQ ID NO: 669029 - DNA, 82 bp, Homo sapiens
ctgtgctcgcgctactctctctttctggcctggaggctatccagcggtgagcccatcactttctgtgaggagagttttgtaa

SEQ ID NO: 669030 - DNA, 75 bp, Homo sapiens
gcctgcccacctggccgcaaagacagcaagggctccggctggaaggtgtataccggaaagggggcgctcgtgccc

SEQ ID NO: 669031 - DNA, 101 bp, Homo sapiens
cttcaatatcttcacccagcatgagtgatcagcagctggactgtgccttggacctaatgaggcgcctgcctccccagcaaatcgagaaaaacctcagcgac

SEQ ID NO: 669032 - DNA, 75 bp, Homo sapiens
ctggaaggagcccggggccctcattccttctcctccactgggaactgatgcgccgcgtggctcctcgtttctcca

SEQ ID NO: 669033 - DNA, 50 bp, Homo sapiens
tgctgaccaagctgctcacctcggattcaagccaaaactcgagaatttag

SEQ ID NO: 669034 - DNA, 90 bp, Homo sapiens
ctgtcctttcagcttctttctcacacgcagatgaacactggacttcagaaataaggaggccccaaccctgagcacaacagcaacctggcc

SEQ ID NO: 669035 - DNA, 98 bp, Homo sapiens
ttgtctatcccgtctacctggccatcctctttctcttctggatgtcccggagcaagggaaagagaagaaggcgccgcccttgctggagggggccccct

SEQ ID NO: 669036 - DNA, 88 bp, Homo sapiens
tgacaggaactacgtcccggggaaggaagaggagttgtacgcatgtcagagaggttgcaggctgttttcaatttgtcagtttgtggat

SEQ ID NO: 669037 - DNA, 125 bp, Homo sapiens
tggctaagatgctgccgactctgggcggcgaggaaggcgtctcccgggatgctggtggactgtgtgcccctggtggaggtggacgacatgatgatcatgggcaagaagcctgaccccaagtgtgt

SEQ ID NO: 669038 - DNA, 74 bp, Homo sapiens
gaaaaatttatgtcattggaggatacactaccagagcaaaaaatcgtggaattgccattccagtggatttggac

SEQ ID NO: 669039 - DNA, 90 bp, Homo sapiens
cattgaagaccttaagaagtttctaaaacgggatgccaacagacagatcagcgacctcaaatttaaacttgcaaaatctgagcaagagat

SEQ ID NO: 669040 - DNA, 88 bp, Homo sapiens
tggaggggattttgtcagcttgtcgtcaaggttggctcaaaaacagaagttgctgagtgcaaggagaaattcgccgcctccaaggacc

SEQ ID NO: 669041 - DNA, 90 bp, Homo sapiens
gcagatcagaggtagtcggacctttcccgctggcgcgcagcctcagctagatcctggccatgagagctccgcacctccacctctccgccg

SEQ ID NO: 669042 - DNA, 96 bp, Homo sapiens
tttggagaacttctggagctggccaacgtgcaggaggacaaccttaaacttccaccacaagaggaatataaagaggtccctcctgcaccaagaaag

SEQ ID NO: 669043 - DNA, 83 bp, Homo sapiens
cttagctgtgctcgcgctactctctctttctggcctggaggctatccagcgactggagactgatgcatgagggggctacggag

SEQ ID NO: 669044 - DNA, 50 bp, Homo sapiens
agtgaatcccaactgttatgccaaagggaaatcctcattgacgattcaat

SEQ ID NO: 669045 - DNA, 100 bp, Homo sapiens
agcctccggagtagctgggactacagtggacatttgggagcaataaaaataagaagaaaggaaaagccagaaaaatagagaagaaaggaaccatgaagaa

SEQ ID NO: 669046 - DNA, 100 bp, Homo sapiens
ctgctccgcatcgagcagaaggacttcaaggcactatgggagggattaaagcctgtggtttccacagaagcaccacctatcatatttgccacaccaacta

SEQ ID NO: 669047 - DNA, 100 bp, Homo sapiens
atgaagacttgaacttaatacagcaagaaagaccatcaagtttaccagtaggataattgcggactgaaccctcgggctgcggtcatatatgagaacttgc

SEQ ID NO: 669048 - DNA, 96 bp, Homo sapiens
gggaacccagaagaggtgacgcctcccagtgcaacgtcagcttaaagaagcagaggagccgcagcatccttagctccttcttctgctgcttccgtg

SEQ ID NO: 669049 - DNA, 90 bp, Homo sapiens
ggcggaggcagaggtggaggcgctttgaaaggagactggagaagctggctggtggaggggcgaacttaatggtaaagaaggagtatttcc

SEQ ID NO: 669050 - DNA, 96 bp, Homo sapiens
atacagggtcaaaggagagcacaaccatcgcagttggaagcccatggggcagacaatgcagatcttcgtgaagactctgactggtaagaccatcac

SEQ ID NO: 669051 - DNA, 75 bp, Homo sapiens
gggctgggaacccgcggtggagcgggacacgaacgtgcacaggagaaaacgacgctccacacctttaacttcttc

SEQ ID NO: 669052 - DNA, 50 bp, Homo sapiens
aaagtgggaaacattgaaatcaaggttggagtgcagtggtgctgtgtctg

SEQ ID NO: 669053 - DNA, 74 bp, Homo sapiens
gatgttttacttcaagcaggggctgatttagaggactcagagagagtaatgataattaccggaccaaacatggg

SEQ ID NO: 669054 - DNA, 98 bp, Homo sapiens
gcaggactctttctgttcaggccagaccctctgggagcttctcagccattttccacagatcagatttccacaagacggcaccctatgtcgtcactggc

SEQ ID NO: 669055 - DNA, 95 bp, Homo sapiens
cagatcttcacagcacagttcctgggaaggtggagccaccagcctctccttgtccaatatcagatggaaatgatgcggagccttcgccatgtaaa

SEQ ID NO: 669056 - DNA, 100 bp, Homo sapiens
tcagcctcccaggtagctgggattacaggtttctgagtcccttcaacatgatcctgggaggaatcgtggtggtgctggtgttcacagggtttgtgtgggc

SEQ ID NO: 669057 - DNA, 50 bp, Homo sapiens
aaaaatcccaaggtctgcaaaggcgtcacaatgtagcagggaccccaggc

SEQ ID NO: 669058 - DNA, 48 bp, Homo sapiens
cgagaggaggcgagaggcgcaaagatatgaggccccaggattcctggc

SEQ ID NO: 669059 - DNA, 51 bp, Homo sapiens
gcccagtcctcggtgcggcgcggccaggttcccaaaggtgggggcctaccc

SEQ ID NO: 669060 - DNA, 150 bp, Homo sapiens
ctttcgccggggcccaggcccagggaccaggcggaggcgtcgcgggagcctttggggcaccacagagatgcgggtggtgctgggggccagcagggcttcctgggctgcatccgctccttgaggatgaatggggtgacacttgacctggag

SEQ ID NO: 669061 - DNA, 82 bp, Homo sapiens
ctgcaggaagcccttccgcggaccgaaaggaatgtatcctgtcaggtataatgtcagtgaatggcaagaaagttcttcatat

SEQ ID NO: 669062 - DNA, 75 bp, Homo sapiens
tgaacattcaagtgaagcaaaagcctttcatgattatgggcatggtctagtggcccagtcaggacgcggaaacac

SEQ ID NO: 669063 - DNA, 75 bp, Homo sapiens
tgacaagattttaaaaaaatcccatgaggagaaggcattctaatttagggaggagtctgctactagtcttatcag

SEQ ID NO: 669064 - DNA, 100 bp, Homo sapiens
gaggaagtgagagctctggaagcggaaagggaagctattatatctgagaagcggcaaaagttaaaaaaagtccttcatgaaaaagaaagatcttaagcag

SEQ ID NO: 669065 - DNA, 83 bp, Homo sapiens
tacaacattaatcagatactgcatttaaggttctctacttaaaagacaatgactactgatgaaggtgccaagaacaatgaaga

SEQ ID NO: 669066 - DNA, 100 bp, Homo sapiens
aagtgctgggattacaggcgtgagccaccacgcctggcctcactcaaacagtaaacgagaccccagttattaaagcttttggcatcttgaagcgagcggc

SEQ ID NO: 669067 - DNA, 74 bp, Homo sapiens
gagtatcaaatatgagaaagctaggccatctgaataactttactaagaaaaggcgacggcggattgacagaagt

SEQ ID NO: 669068 - DNA, 74 bp, Homo sapiens
gaggagagacagaagaagctggaggccggcaaagccaagccccattgacaaaccttcagattctctcagtatag

SEQ ID NO: 669069 - DNA, 75 bp, Homo sapiens
cgccatctcacgcctgctggagccacaatggtgcgcatgaatgtcctggcagatgctctcaagagtatcaacaat

SEQ ID NO: 669070 - DNA, 97 bp, Homo sapiens
tctgcgccgccggcaccatgaggtactaaatcaaacttctcgacttgagatacagctgctggagaattcattatccacctacaagctagagaagcaa

SEQ ID NO: 669071 - DNA, 83 bp, Homo sapiens
agaaaaggcaacatcctgtcacaggccatgctctggcaaaaacgtgtggtggacacaggcctattcatcaacatggctgagag

SEQ ID NO: 669072 - DNA, 80 bp, Homo sapiens
tgcgcctgcctctccaggatgtctacaaaattggtggtgacttaagagattaaaattaatttggttgctgttggttctga

SEQ ID NO: 669073 - DNA, 100 bp, Homo sapiens
tttaaccgctctctgcctcccagggcgaacgctgttggagaagctgttcagccagcaggagaacgggcctccagaagaagcagagaagttttgctcccgg

SEQ ID NO: 669074 - DNA, 98 bp, Homo sapiens
tgaacgggcaggcaagcagtgtcaatattgcagctactgcttctgaggactgttgggaaagatcctgatggctatccgagatgcaggttttgaaatct

SEQ ID NO: 669075 - DNA, 99 bp, Homo sapiens
gacactgcattgagtttttaccatatggctggagcatctcttgataaagccctgattgagtccctcaaccagaaaccacagactgccggtgaccaaccc

SEQ ID NO: 669076 - DNA, 83 bp, Homo sapiens
agccagcaatgccaagatctgttgtgtctagtcccaattaccatgaagaaaaatacagatgtgaatatcttcataacaagctg

SEQ ID NO: 669077 - DNA, 50 bp, Homo sapiens
gtgatatccaagaacaagcactgcagtaatgccatcggtcccctggtagc

SEQ ID NO: 669078 - DNA, 90 bp, Homo sapiens
aaagccgttgctgttgatccaactgaagagtactttgttacaggatctgccgaaggcaatataaaggacttaaccaccaccatgtcgagc
